United States Patent Application Publication US 2022/0040281 A1 - sequence listing, part 2

SEQ ID NO: 1783 - RNA, 1240 nt, Artificial Sequence
  mRNA Design i-3 (A64-N5-C30-hSL-N5) comprising derived and/or modified sequence from Pb(ANKA)__XP_022712148.1__Pb-CSP (opt11)
gggagaaagcuuaccaugaaaaaaugcaccauccucgucguagccucccuccuccuagucaacucccuccuccccggauacgggcaaaacaaaucaauucaagcccaacgcaaccucaacgaacucugcuacaacgaaggcaacgacaacaaacuauaccacguacucaacuccaaaaacgguaaaaucuacaaccgcaacacugucaaccgccuacucgccgacgcccccgaaggcaaaaaaaacgaaaaaaaaaacgaaaaaaucgaacgcaacaacaaacucaaacaacccccacccccaccaaaccccaacgacccccccccccccaaucccaaugaccccccaccccccaaccccaacgaccccccccccccaaaccccaacgacccccccccccccaacgccaacgauccaccuccucccaacgcaaacgacccagcaccuccaaacgccaacgaccccgcccccccaaacgcaaacgacccagcccccccaaacgcaaacgaccccgccccccccaacgccaacgacccacccccccccaaccccaacgacccagccccccccaaugccaacgacccccccccucccaaccccaacgaccccgcccccccacaaggaaacaacaacccacaaccccaaccacgaccccaaccccaaccccaaccccaaccacaaccacaaccccaaccccaaccacaaccccgaccacaaccccaaccccaacccggcggcaacaacaacaacaaaaacaacaacaacgacgacuccuacaucccauccgccgaaaaaauccucgaauucgucaaacaaauacgcgacuccauaaccgaagaauggucccaaugcaacgugaccugcggcucaggcauccgaguccgcaaacgcaaaggaucuaacaaaaaagccgaagaccucacccuagaagacaucgacaccgaaaucugcaaaauggacaaaugcuccuccauauucaacaucgucucaaacucacucggcuuugucauccuccucguacucgucuucuucaacuaaggacuaguuauaagacugacuagcccgaugggccucccaacgggcccuccuccccuccuugcaccgagauuaauaaaaaaaaaaaaaaaaaaaaaaaaaaaaaaaaaaaaaaaaaaaaaaaaaaaaaaaaaaaaaaaaugcaucccccccccccccccccccccccccccccccaaaggcucuuuucagagccaccagaauu

SEQ ID NO: 1784 - RNA, 1405 nt, Artificial Sequence
  mRNA Design i-3 (A64-N5-C30-hSL-N5) comprising derived and/or modified sequence from Pb(ANKA)__XP_022712148.1__Pb-CSP_L(G4SG4)_TM domain HA (opt11)
gggagaaagcuuaccaugaaaaaaugcacaauccuugucguagccucccuacuacucguaaacucacuccuacccggauacggccaaaacaaaucuauccaagcccaacguaaccuuaaugaacuaugcuacaacgaaggcaacgacaacaaacuuuaccacguccugaacuccaaaaacggcaaaaucuacaaccggaacaccguaaaucgccugcucgcugacgcaccagaaggaaaaaaaaacgaaaaaaaaaacgaaaaaauagagcguaacaacaagcucaaacaaccgcccccccccccaaaccccaacgaccccccccccccuaaccccaacgacccaccgccacccaacccaaacgacccccccccaccaaaccccaacgacccaccaccaccgaacgccaacgacccaccuccccccaacgccaacgacccugcaccccccaacgccaacgaucccgccccccccaacgccaacgacccagcacccccaaacgccaacgauccagcuccccccaacgccaacgaccccccaccccccaaccccaacgacccagcccccccaaacgcuaacgacccccccccccccaacccaaacgacccagcccccccccaaggcaacaacaacccucaaccccaaccccgcccgcaaccccaaccccaaccacaaccacaaccucaaccacaaccacaaccccaaccccgcccacaaccacaaccccaaccaggcggcaacaacaacaacaaaaacaacaacaacgacgacuccuacauccccucagcagaaaaaauccucgaguucgucaaacaaauccgcgacucuaucacagaagaauggucccaaugcaacguaaccugcggcucaggcauccgcguccgaaaacgaaaaggcucaaacaaaaaagccgaagaccucacacucgaagacaucgacaccgaaauaugcaaaauggacaaaugcuccuccauauucaacaucgucucaaacucucucgguuucgucaucuuacucguccucguauucuucaacggcggcggaggcuccggcggaggaggcaaacuagaauccaccagaaucuaccaaauccucgccauauacucuaccgucgccagcucccuuguccucguggucucccucggagcaaucuccuucuggaugugcucuaacggcucacuccaaugccguaucugcauuuaaggacuaguuauaagacugacuagcccgaugggccucccaacgggcccuccuccccuccuugcaccgagauuaauaaaaaaaaaaaaaaaaaaaaaaaaaaaaaaaaaaaaaaaaaaaaaaaaaaaaaaaaaaaaaaaaugcaucccccccccccccccccccccccccccccccaaaggcucuuuucagagccaccagaauu

SEQ ID NO: 1785 - RNA, 1225 nt, Artificial Sequence
  mRNA Design i-3 (A64-N5-C30-hSL-N5) comprising derived and/or modified sequence from Pb(ANKA)__XP_022712148.1__HsALB_Pb-CSP(24-340) (opt11)
gggagaaagcuuaccaugaaaugggucaccuucaucucccuacuauuccucuuuucauccgcuuacucacaaaacaaauccauccaagcccaacgcaaccucaaugaacuaugcuacaacgaaggcaacgacaacaaacucuaccacguccucaacucaaaaaacggaaaaauauacaaccgcaacaccguaaaccgccuacuagccgacgcccccgaaggcaaaaaaaacgaaaaaaaaaacgaaaaaaucgaacgcaacaacaaacuaaaacaacccccccccccccccaaccccaacgacccccccccccccaaccccaacgaccccccacccccaaacccaaacgaccccccuccccccaacccaaacgaccccccaccccccaacgcaaacgacccccccccacccaacgccaacgaccccgccccccccaacgccaacgaucccgccccccccaacgccaacgaccccgccccccccaacgccaacgacccagccccccccaacgcaaacgacccccccccccccaaccccaacgaccccgcaccccccaacgccaacgacccacccccacccaaccccaacgaccccgcacccccacaaggaaacaacaacccccaaccccaaccccgaccccaaccccaaccccaaccccaaccccaaccgcaaccccagccacaaccacaaccccgcccucaaccucaaccccaacccggaggaaacaacaacaacaaaaauaacaacaacgaugacuccuacauccccuccgcagaaaaaauacucgaauucguaaaacaaauccgcgacucaaucaccgaagaauggucccaaugcaacguaaccugcggcuccggcauccgcguccgcaaacgcaaaggcuccaacaagaaagccgaagaccucacacuggaagacauagacaccgaaauaugcaaaauggauaaaugcuccuccaucuucaacaucgucuccaacucucucggcuucguaauacuucucguucucguauucuucaacuaaggacuaguuauaagacugacuagcccgaugggccucccaacgggcccuccuccccuccuugcaccgagauuaauaaaaaaaaaaaaaaaaaaaaaaaaaaaaaaaaaaaaaaaaaaaaaaaaaaaaaaaaaaaaaaaaugcaucccccccccccccccccccccccccccccccaaaggcucuuuucagagccaccagaauu

SEQ ID NO: 1786 - RNA, 1243 nt, Artificial Sequence
  mRNA Design i-3 (A64-N5-C30-hSL-N5) comprising derived and/or modified sequence from Pb(ANKA)__XP_022712148.1__HsIns-iso1_Pb-CSP(24-340) (opt11)
gggagaaagcuuaccauggcccucuggaugcgacuacucccccuccucgcacuccuagcccucuggggccccgaccccgccgccgcacaaaacaaauccauccaagcccaacgcaaccucaaugaacucugcuacaacgaaggcaacgacaacaaacucuaccacguccucaacucaaaaaacggaaaaaucuacaaccgaaacaccgucaaccgccuccuugccgacgccccagaaggcaaaaaaaacgagaaaaaaaaugaaaaaaucgaacgcaacaacaaacucaaacaaccccccccccccccgaacccuaacgacccccccccccccaaccccaaugaccccccacccccaaacccgaacgaccccccaccccccaaccccaacgaccccccucccccuaacgcaaacgacccuccaccccccaacgccaacgaccccgccccaccaaacgccaaugaccccgccccaccaaacgcaaacgauccagcccccccaaacgcaaacgaccccgcaccacccaacgcaaacgacccccccccccccaaccccaacgaccccgcccccccaaacgccaacgaccccccaccacccaaccccaacgaccccgcacccccacaaggcaacaacaacccacaaccacaaccccgcccccaaccccaaccacaaccccaaccccaaccccaaccacaaccacaaccacaaccccgcccccaaccccaaccccaacccggcggcaacaacaacaacaaaaacaacaauaacgacgacucuuacauccccucagccgaaaaaauacucgaauucgucaaacaaauccgcgacuccaucaccgaagaauggucacaaugcaacgucaccugcggaucaggcauccgaguacgcaaacgcaaaggcuccaacaaaaaagccgaagaccucacccucgaagacaucgacaccgaaauuugcaaaauggacaagugcuccuccauauucaacaucguuucaaacucauuaggauucgucauccuccucguccucgucuucuucaacuaaggacuaguuauaagacugacuagcccgaugggccucccaacgggcccuccuccccuccuugcaccgagauuaauaaaaaaaaaaaaaaaaaaaaaaaaaaaaaaaaaaaaaaaaaaaaaaaaaaaaaaaaaaaaaaaaugcaucccccccccccccccccccccccccccccccaaaggcucuuuucagagccaccagaauu

SEQ ID NO: 1787 - RNA, 1222 nt, Artificial Sequence
  mRNA Design i-3 (A64-N5-C30-hSL-N5) comprising derived and/or modified sequence from Pb(ANKA)__XP_022712148.1__HsSPARC_Pb-CSP(24-340) (opt11)
gggagaaagcuuaccaugcgcgccuggaucuucuuccuccucugccuugccggccgcgcacuagcccaaaacaaaucuauccaagcccaacgcaaccucaacgaacucugcuacaacgaaggaaacgacaacaaacucuaccauguacucaacuccaaaaacggaaaaaucuacaaccgcaacaccguaaaccgccuacucgcugacgccccugaaggcaaaaaaaacgaaaaaaaaaacgaaaaaaucgaacgcaacaacaaacucaaacaaccuccccccccccccaacccaaacgacccccccccucccaacccaaacgaccccccacccccaaaccccaacgacccccccccccccaacccaaacgacccccccccccccaacgccaacgacccccccccccccaacgccaacgaccccgccccaccaaacgcaaacgauccagcaccccccaacgccaacgaccccgcaccccccaacgcaaacgaccccgccccccccaacgccaacgaccccccgccaccuaacccaaacgacccagcaccccccaacgccaacgaucccccaccccccaaccccaacgacccagcccccccccaaggaaacaacaacccacaaccccaaccccgcccucaaccacaaccacaaccccaaccucaaccccaaccucaaccccaaccccaaccacgaccacaaccccaaccacaaccuggcggcaacaacaacaacaaaaacaacaacaacgacgacucauacaucccauccgcagaaaaaauacucgaauucguaaaacaaaucagagacuccauaacagaagaauggucccaaugcaacgucacuugcggcucaggcauacgcguccgcaaacgcaagggcuccaacaaaaaagccgaagaccuaacacucgaagacaucgacacagaaaucugcaaaauggacaaaugcucaucaaucuucaacaucguauccaacucacucggcuucguaauccuccucguccucgucuucuucaacuaaggacuaguuauaagacugacuagcccgaugggccucccaacgggcccuccuccccuccuugcaccgagauuaauaaaaaaaaaaaaaaaaaaaaaaaaaaaaaaaaaaaaaaaaaaaaaaaaaaaaaaaaaaaaaaaaugcaucccccccccccccccccccccccccccccccaaaggcucuuuucagagccaccagaauu

SEQ ID NO: 1788 - RNA, 1225 nt, Artificial Sequence
  mRNA Design i-3 (A64-N5-C30-hSL-N5) comprising derived and/or modified sequence from Pb(ANKA)__XP_022712148.1__IgE_Pb-CSP(24-340) (opt11)
gggagaaagcuuaccauggacuggaccuggauccuuuuccuaguagccgccgcaacccgcguccacucacaaaacaaauccauccaagcacagcguaaccucaacgaacucuguuacaacgagggcaacgacaacaaacuauaccacguccugaacuccaaaaacggcaaaaucuacaaccgcaacaccguaaaccgucuccucgccgacgccccagaaggcaaaaaaaaugaaaaaaaaaacgaaaaaaucgaacgaaacaacaaacuaaaacaacccccccccccccccaaccccaacgacccccccccccccaaccccaacgauccccccccccccaaccccaacgacccccccccccccaaucccaacgacccccccccccccaacgcaaacgaccccccccccccuaaugccaacgacccagcaccccccaacgccaacgaccccgccccccccaacgcaaacgaccccgccccccccaacgccaacgaccccgccccaccuaacgcaaacgacccacccccccccaaccccaacgaccccgccccccccaacgcuaacgacccccccccccccaacccaaacgacccagcacccccacaaggcaacaacaacccacaaccccaaccccgcccccaaccucaaccacaaccccaaccacaaccccaaccccaaccccaaccccaaccccgcccacaaccccaaccucaacccggcggcaacaacaacaacaaaaacaacaacaacgacgacuccuacauaccauccgccgaaaaaauccucgaauucgucaaacaaauccgcgacucaaucaccgaagaauggucacaaugcaacgucaccugcggcuccgguauccgcguaagaaaacgcaaaggaucaaacaaaaaagccgaagaccucacccucgaagacauagacaccgaaaucugcaaaauggacaaauguucauccaucuuuaacaucgucuccaacucacucggauucguaauacuacuaguccuaguauucuucaacuaaggacuaguuauaagacugacuagcccgaugggccucccaacgggcccuccuccccuccuugcaccgagauuaauaaaaaaaaaaaaaaaaaaaaaaaaaaaaaaaaaaaaaaaaaaaaaaaaaaaaaaaaaaaaaaaaugcaucccccccccccccccccccccccccccccccaaaggcucuuuucagagccaccagaauu

SEQ ID NO: 1789 - RNA, 1411 nt, Artificial Sequence
  mRNA Design i-3 (A64-N5-C30-hSL-N5) comprising derived and/or modified sequence from Pf(3D7)__XP_001351122.1__Pf-CSP (wt)
aggagaaagcuuaccaugaugagaaaauuagcuauuuuaucuguuucuuccuuuuuauuuguugaggccuuauuccaggaauaccagugcuauggaaguucgucaaacacaaggguucuaaaugaauuaaauuaugauaaugcaggcacuaauuuauauaaugaauuagaaaugaauuauuaugggaaacaggaaaauugguauagucuuaaaaaaaauaguagaucacuuggagaaaaugaugauggaaauaacgaagacaacgagaaauuaaggaaaccaaaacauaaaaaauuaaagcaaccagcggaugguaauccugauccaaaugcaaacccaaauguagaucccaaugccaacccaaauguagauccaaaugcaaacccaaauguagauccaaaugcaaacccaaaugcaaacccaaaugcaaacccaaaugcaaacccaaaugcaaacccaaaugcaaacccaaaugcaaacccaaaugcaaacccaaaugcaaacccaaaugcaaacccaaaugcaaacccaaaugcaaacccaaaugcaaacccaaaugcaaaccccaaugcaaauccuaaugcaaacccaaaugcaaacccaaacguagauccuaaugcaaauccaaaugcaaacccaaacgcaaaccccaaugcaaauccuaaugcaaaccccaaugcaaauccuaaugcaaauccuaaugccaauccaaaugcaaauccaaaugcaaacccaaacgcaaaccccaaugcaaauccuaaugccaauccaaaugcaaauccaaaugcaaacccaaaugcaaacccaaaugcaaaccccaaugcaaauccuaauaaaaacaaucaagguaauggacaaggucacaauaugccaaaugacccaaaccgaaauguagaugaaaaugcuaaugccaacagugcuguaaaaaauaauaauaacgaagaaccaagugauaagcacauaaaagaauauuuaaacaaaauacaaaauucucuuucaacugaaugguccccauguaguguaacuuguggaaaugguauucaaguuagaauaaagccuggcucugcuaauaaaccuaaagacgaauuagauuaugcaaaugauauugaaaaaaaaauuuguaaaauggaaaaauguuccaguguguuuaaugucguaaauaguucaauaggauuaauaaugguauuauccuucuuguuccuuaauuagggacuaguuauaagacugacuagcccgaugggccucccaacgggcccuccuccccuccuugcaccgagauuaauaaaaaaaaaaaaaaaaaaaaaaaaaaaaaaaaaaaaaaaaaaaaaaaaaaaaaaaaaaaaaaaaugcaucccccccccccccccccccccccccccccccaaaggcucuuuucagagccaccagaauu

SEQ ID NO: 1790 - RNA, 1342 nt, Artificial Sequence
  mRNA Design i-3 (A64-N5-C30-hSL-N5) comprising derived and/or modified sequence from Pf(3D7)__XP_001351122.1__Pf-CSP(1-374) (wt)
aggagaaagcuuaccaugaugagaaaauuagcuauuuuaucuguuucuuccuuuuuauuuguugaggccuuauuccaggaauaccagugcuauggaaguucgucaaacacaaggguucuaaaugaauuaaauuaugauaaugcaggcacuaauuuauauaaugaauuagaaaugaauuauuaugggaaacaggaaaauugguauagucuuaaaaaaaauaguagaucacuuggagaaaaugaugauggaaauaacgaagacaacgagaaauuaaggaaaccaaaacauaaaaaauuaaagcaaccagcggaugguaauccugauccaaaugcaaacccaaauguagaucccaaugccaacccaaauguagauccaaaugcaaacccaaauguagauccaaaugcaaacccaaaugcaaacccaaaugcaaacccaaaugcaaacccaaaugcaaacccaaaugcaaacccaaaugcaaacccaaaugcaaacccaaaugcaaacccaaaugcaaacccaaaugcaaacccaaaugcaaacccaaaugcaaacccaaaugcaaaccccaaugcaaauccuaaugcaaacccaaaugcaaacccaaacguagauccuaaugcaaauccaaaugcaaacccaaacgcaaaccccaaugcaaauccuaaugcaaaccccaaugcaaauccuaaugcaaauccuaaugccaauccaaaugcaaauccaaaugcaaacccaaacgcaaaccccaaugcaaauccuaaugccaauccaaaugcaaauccaaaugcaaacccaaaugcaaacccaaaugcaaaccccaaugcaaauccuaauaaaaacaaucaagguaauggacaaggucacaauaugccaaaugacccaaaccgaaauguagaugaaaaugcuaaugccaacagugcuguaaaaaauaauaauaacgaagaaccaagugauaagcacauaaaagaauauuuaaacaaaauacaaaauucucuuucaacugaaugguccccauguaguguaacuuguggaaaugguauucaaguuagaauaaagccuggcucugcuaauaaaccuaaagacgaauuagauuaugcaaaugauauugaaaaaaaaauuuguaaaauggaaaaauguugaggacuaguuauaagacugacuagcccgaugggccucccaacgggcccuccuccccuccuugcaccgagauuaauaaaaaaaaaaaaaaaaaaaaaaaaaaaaaaaaaaaaaaaaaaaaaaaaaaaaaaaaaaaaaaaaugcaucccccccccccccccccccccccccccccccaaaggcucuuuucagagccaccagaauu

SEQ ID NO: 1791 - RNA, 1195 nt, Artificial Sequence
  mRNA Design i-3 (A64-N5-C30-hSL-N5) comprising derived and/or modified sequence from Pf(3D7)__XP_001351122.1__Pf-CSP(1-325) (wt)
aggagaaagcuuaccaugaugagaaaauuagcuauuuuaucuguuucuuccuuuuuauuuguugaggccuuauuccaggaauaccagugcuauggaaguucgucaaacacaaggguucuaaaugaauuaaauuaugauaaugcaggcacuaauuuauauaaugaauuagaaaugaauuauuaugggaaacaggaaaauugguauagucuuaaaaaaaauaguagaucacuuggagaaaaugaugauggaaauaacgaagacaacgagaaauuaaggaaaccaaaacauaaaaaauuaaagcaaccagcggaugguaauccugauccaaaugcaaacccaaauguagaucccaaugccaacccaaauguagauccaaaugcaaacccaaauguagauccaaaugcaaacccaaaugcaaacccaaaugcaaacccaaaugcaaacccaaaugcaaacccaaaugcaaacccaaaugcaaacccaaaugcaaacccaaaugcaaacccaaaugcaaacccaaaugcaaacccaaaugcaaacccaaaugcaaacccaaaugcaaaccccaaugcaaauccuaaugcaaacccaaaugcaaacccaaacguagauccuaaugcaaauccaaaugcaaacccaaacgcaaaccccaaugcaaauccuaaugcaaaccccaaugcaaauccuaaugcaaauccuaaugccaauccaaaugcaaauccaaaugcaaacccaaacgcaaaccccaaugcaaauccuaaugccaauccaaaugcaaauccaaaugcaaacccaaaugcaaacccaaaugcaaaccccaaugcaaauccuaauaaaaacaaucaagguaauggacaaggucacaauaugccaaaugacccaaaccgaaauguagaugaaaaugcuaaugccaacagugcuguaaaaaauaauaauaacgaagaaccaagugauaagcacauaaaagaauauuuaaacaaaauacaaaauugaggacuaguuauaagacugacuagcccgaugggccucccaacgggcccuccuccccuccuugcaccgagauuaauaaaaaaaaaaaaaaaaaaaaaaaaaaaaaaaaaaaaaaaaaaaaaaaaaaaaaaaaaaaaaaaaugcaucccccccccccccccccccccccccccccccaaaggcucuuuucagagccaccagaauu

SEQ ID NO: 1792 - RNA, 1240 nt, Artificial Sequence
  mRNA Design i-3 (A64-N5-C30-hSL-N5) comprising derived and/or modified sequence from Pb(ANKA)__XP_022712148.1__Pb-CSP (wt)
aggagaaagcuuaccaugaagaaguguaccauuuuaguuguagcgucacuuuuauuaguuaauucucuacuuccaggauauggacaaaauaaaagcauccaagcccaaaggaacuuaaacgagcuauguuacaaugaaggaaaugauaauaaauuguaucacgugcuuaacucuaagaauggaaaaauauacaaucgaaauacagucaacagauuacuugccgaugcucccgaaggaaaaaaaaaugagaaaaaaaacgaaaaaauagagcguaauaauaaauugaaacaaccaccaccaccaccaaacccaaaugacccaccaccaccaaacccaaaugacccaccaccaccaaacccaaaugacccaccaccaccaaacccaaaugacccaccaccaccaaacgcaaaugacccaccaccaccaaacgcaaaugacccagcaccaccaaacgcaaaugacccagcaccaccaaacgcaaaugacccagcaccaccaaacgcaaaugacccagcaccaccaaacgcaaaugacccaccaccaccaaacccaaaugacccagcaccaccaaacgcaaaugacccaccaccaccaaacccaaaugacccagcaccaccacaaggaaauaacaauccacaaccacagccacggccgcagccacaaccacagccacagccacaaccacagccacagccacaaccacagccacgaccacagccacaaccacagccaggugguaauaacaauaacaaaaauaauaauaaugacgauucuuauaucccaagcgcggaaaaaauacuagaauuuguuaaacagaucagggauaguaucacagaggaauggucucaauguaacguaacaugugguucugguauaagaguuagaaaacgaaaagguucaaauaagaaagcagaagauuugaccuuagaagauauugauacugaaauuuguaaaauggauaaauguucaaguauauuuaauauuguaagcaauucauuaggauuuguaauauuauuaguauuaguauucuuuaauuaaggacuaguuauaagacugacuagcccgaugggccucccaacgggcccuccuccccuccuugcaccgagauuaauaaaaaaaaaaaaaaaaaaaaaaaaaaaaaaaaaaaaaaaaaaaaaaaaaaaaaaaaaaaaaaaaugcaucccccccccccccccccccccccccccccccaaaggcucuuuucagagccaccagaauu

SEQ ID NO: 1793 - RNA, 1411 nt, Artificial Sequence
  mRNA Design i-3 (A64-N5-C30-hSL-N5) comprising derived and/or modified sequence from Pf(3D7)__XP_001351122.1__Pf-CSP (opt1)
aggagaaagcuuaccaugaugcgcaagcuggccauccucagcguguccagcuuccuguucgucgaggcccuguuccaggaguaccagugcuacggcuccagcuccaacacccgggugcucaacgagcugaacuacgacaacgcggggaccaaccuguacaacgagcucgagaugaacuacuacggcaagcaggagaacugguacagccugaagaagaacucccgcagccugggggagaacgacgacggcaacaacgaggacaacgagaagcuccggaagcccaagcacaagaagcugaagcagccggccgacgggaaccccgaccccaacgccaaccccaacguggacccgaacgccaaccccaacgucgaccccaacgccaaccccaacguggacccgaacgcgaaccccaacgccaaccccaacgccaaccccaacgccaacccgaacgcgaaccccaacgccaaccccaacgccaaccccaacgccaacccgaacgccaaccccaacgcgaaccccaacgccaaccccaacgccaacccgaacgccaaccccaacgccaaccccaacgcgaaccccaacgccaacccgaacgccaaccccaacguggaccccaacgccaaccccaacgccaacccgaacgcgaaccccaacgccaaccccaacgccaacccgaacgccaaccccaacgccaaccccaacgcgaaccccaacgccaacccgaacgccaaccccaacgccaaccccaacgcgaaccccaacgccaacccgaacgccaaccccaacgccaaccccaacgccaaccccaacgcgaacccgaacgccaaccccaacaagaacaaccagggcaacggccaggggcacaacaugcccaacgaccccaaccgcaacgucgacgagaacgccaacgccaacuccgccgugaagaacaacaacaacgaggagccgagcgacaagcacaucaaggaguaccugaacaagauccagaacucccucagcacggaguggucccccugcagcgugaccugcggcaacgggauccagguccggaucaagcccggcuccgcgaacaagcccaaggacgagcuggacuacgccaacgacaucgagaagaagaucugcaagauggagaagugcagcuccguguucaacguggucaacagcuccaucgggcugaucauggugcucagcuuccuguuccugaacugaggacuaguuauaagacugacuagcccgaugggccucccaacgggcccuccuccccuccuugcaccgagauuaauaaaaaaaaaaaaaaaaaaaaaaaaaaaaaaaaaaaaaaaaaaaaaaaaaaaaaaaaaaaaaaaaugcaucccccccccccccccccccccccccccccccaaaggcucuuuucagagccaccagaauu

SEQ ID NO: 1794 - RNA, 1342 nt, Artificial Sequence
  mRNA Design i-3 (A64-N5-C30-hSL-N5) comprising derived and/or modified sequence from Pf(3D7)__XP_001351122.1__Pf-CSP(1-374) (opt1)
aggagaaagcuuaccaugaugcgcaagcuggccauccucagcguguccagcuuccuguucgucgaggcccuguuccaggaguaccagugcuacggcuccagcuccaacacccgggugcucaacgagcugaacuacgacaacgcggggaccaaccuguacaacgagcucgagaugaacuacuacggcaagcaggagaacugguacagccugaagaagaacucccgcagccugggggagaacgacgacggcaacaacgaggacaacgagaagcuccggaagcccaagcacaagaagcugaagcagccggccgacgggaaccccgaccccaacgccaaccccaacguggacccgaacgccaaccccaacgucgaccccaacgccaaccccaacguggacccgaacgcgaaccccaacgccaaccccaacgccaaccccaacgccaacccgaacgcgaaccccaacgccaaccccaacgccaaccccaacgccaacccgaacgccaaccccaacgcgaaccccaacgccaaccccaacgccaacccgaacgccaaccccaacgccaaccccaacgcgaaccccaacgccaacccgaacgccaaccccaacguggaccccaacgccaaccccaacgccaacccgaacgcgaaccccaacgccaaccccaacgccaacccgaacgccaaccccaacgccaaccccaacgcgaaccccaacgccaacccgaacgccaaccccaacgccaaccccaacgcgaaccccaacgccaacccgaacgccaaccccaacgccaaccccaacgccaaccccaacgcgaacccgaacgccaaccccaacaagaacaaccagggcaacggccaggggcacaacaugcccaacgaccccaaccgcaacgucgacgagaacgccaacgccaacuccgccgugaagaacaacaacaacgaggagccgagcgacaagcacaucaaggaguaccugaacaagauccagaacucccucagcacggaguggucccccugcagcgugaccugcggcaacgggauccagguccggaucaagcccggcuccgcgaacaagcccaaggacgagcuggacuacgccaacgacaucgagaagaagaucugcaagauggagaagugcugaggacuaguuauaagacugacuagcccgaugggccucccaacgggcccuccuccccuccuugcaccgagauuaauaaaaaaaaaaaaaaaaaaaaaaaaaaaaaaaaaaaaaaaaaaaaaaaaaaaaaaaaaaaaaaaaugcaucccccccccccccccccccccccccccccccaaaggcucuuuucagagccaccagaauu

SEQ ID NO: 1795 - RNA, 1195 nt, Artificial Sequence
  mRNA Design i-3 (A64-N5-C30-hSL-N5) comprising derived and/or modified sequence from Pf(3D7)__XP_001351122.1__Pf-CSP(1-325) (opt1)
aggagaaagcuuaccaugaugcgcaagcuggccauccucagcguguccagcuuccuguucgucgaggcccuguuccaggaguaccagugcuacggcuccagcuccaacacccgggugcucaacgagcugaacuacgacaacgcggggaccaaccuguacaacgagcucgagaugaacuacuacggcaagcaggagaacugguacagccugaagaagaacucccgcagccugggggagaacgacgacggcaacaacgaggacaacgagaagcuccggaagcccaagcacaagaagcugaagcagccggccgacgggaaccccgaccccaacgccaaccccaacguggacccgaacgccaaccccaacgucgaccccaacgccaaccccaacguggacccgaacgcgaaccccaacgccaaccccaacgccaaccccaacgccaacccgaacgcgaaccccaacgccaaccccaacgccaaccccaacgccaacccgaacgccaaccccaacgcgaaccccaacgccaaccccaacgccaacccgaacgccaaccccaacgccaaccccaacgcgaaccccaacgccaacccgaacgccaaccccaacguggaccccaacgccaaccccaacgccaacccgaacgcgaaccccaacgccaaccccaacgccaacccgaacgccaaccccaacgccaaccccaacgcgaaccccaacgccaacccgaacgccaaccccaacgccaaccccaacgcgaaccccaacgccaacccgaacgccaaccccaacgccaaccccaacgccaaccccaacgcgaacccgaacgccaaccccaacaagaacaaccagggcaacggccaggggcacaacaugcccaacgaccccaaccgcaacgucgacgagaacgccaacgccaacuccgccgugaagaacaacaacaacgaggagccgagcgacaagcacaucaaggaguaccugaacaagauccagaacugaggacuaguuauaagacugacuagcccgaugggccucccaacgggcccuccuccccuccuugcaccgagauuaauaaaaaaaaaaaaaaaaaaaaaaaaaaaaaaaaaaaaaaaaaaaaaaaaaaaaaaaaaaaaaaaaugcaucccccccccccccccccccccccccccccccaaaggcucuuuucagagccaccagaauu

SEQ ID NO: 1796 - RNA, 1411 nt, Artificial Sequence
  mRNA Design i-3 (A64-N5-C30-hSL-N5) comprising derived and/or modified sequence from Pf(3D7)__XP_001351122.1__HsALB_Pf-CSP(19-397) (opt1) R8527/R8530
aggagaaagcuuaccaugaagugggugaccuucaucagccugcucuuccuguucuccagcgccuacucccuguuccaggaguaccagugcuacggcuccagcuccaacacccgggugcucaacgagcugaacuacgacaacgcggggaccaaccuguacaacgagcucgagaugaacuacuacggcaagcaggagaacugguacagccugaagaagaacucccgcagccugggggagaacgacgacggcaacaacgaggacaacgagaagcuccggaagcccaagcacaagaagcugaagcagccggccgacgggaaccccgaccccaacgccaaccccaacguggacccgaacgccaaccccaacgucgaccccaacgccaaccccaacguggacccgaacgcgaaccccaacgccaaccccaacgccaaccccaacgccaacccgaacgcgaaccccaacgccaaccccaacgccaaccccaacgccaacccgaacgccaaccccaacgcgaaccccaacgccaaccccaacgccaacccgaacgccaaccccaacgccaaccccaacgcgaaccccaacgccaacccgaacgccaaccccaacguggaccccaacgccaaccccaacgccaacccgaacgcgaaccccaacgccaaccccaacgccaacccgaacgccaaccccaacgccaaccccaacgcgaaccccaacgccaacccgaacgccaaccccaacgccaaccccaacgcgaaccccaacgccaacccgaacgccaaccccaacgccaaccccaacgccaaccccaacgcgaacccgaacgccaaccccaacaagaacaaccagggcaacggccaggggcacaacaugcccaacgaccccaaccgcaacgucgacgagaacgccaacgccaacuccgccgugaagaacaacaacaacgaggagccgagcgacaagcacaucaaggaguaccugaacaagauccagaacucccucagcacggaguggucccccugcagcgugaccugcggcaacgggauccagguccggaucaagcccggcuccgcgaacaagcccaaggacgagcuggacuacgccaacgacaucgagaagaagaucugcaagauggagaagugcagcuccguguucaacguggucaacagcuccaucgggcugaucauggugcucagcuuccuguuccugaacugaggacuaguuauaagacugacuagcccgaugggccucccaacgggcccuccuccccuccuugcaccgagauuaauaaaaaaaaaaaaaaaaaaaaaaaaaaaaaaaaaaaaaaaaaaaaaaaaaaaaaaaaaaaaaaaaugcaucccccccccccccccccccccccccccccccaaaggcucuuuucagagccaccagaauu

SEQ ID NO: 1797 - RNA, 1429 nt, Artificial Sequence
  mRNA Design i-3 (A64-N5-C30-hSL-N5) comprising derived and/or modified sequence from Pf(3D7)__XP_001351122.1__HsIns-iso1_Pf-CSP(19-397) (opt1)
aggagaaagcuuaccauggcccuguggaugcgccuccugccccugcucgcccugcuggcgcucuggggcccggaccccgccgccgcccuguuccaggaguaccagugcuacggcuccagcuccaacacccgggugcucaacgagcugaacuacgacaacgcggggaccaaccuguacaacgagcucgagaugaacuacuacggcaagcaggagaacugguacagccugaagaagaacucccgcagccugggggagaacgacgacggcaacaacgaggacaacgagaagcuccggaagcccaagcacaagaagcugaagcagccggccgacgggaaccccgaccccaacgccaaccccaacguggacccgaacgccaaccccaacgucgaccccaacgccaaccccaacguggacccgaacgcgaaccccaacgccaaccccaacgccaaccccaacgccaacccgaacgcgaaccccaacgccaaccccaacgccaaccccaacgccaacccgaacgccaaccccaacgcgaaccccaacgccaaccccaacgccaacccgaacgccaaccccaacgccaaccccaacgcgaaccccaacgccaacccgaacgccaaccccaacguggaccccaacgccaaccccaacgccaacccgaacgcgaaccccaacgccaaccccaacgccaacccgaacgccaaccccaacgccaaccccaacgcgaaccccaacgccaacccgaacgccaaccccaacgccaaccccaacgcgaaccccaacgccaacccgaacgccaaccccaacgccaaccccaacgccaaccccaacgcgaacccgaacgccaaccccaacaagaacaaccagggcaacggccaggggcacaacaugcccaacgaccccaaccgcaacgucgacgagaacgccaacgccaacuccgccgugaagaacaacaacaacgaggagccgagcgacaagcacaucaaggaguaccugaacaagauccagaacucccucagcacggaguggucccccugcagcgugaccugcggcaacgggauccagguccggaucaagcccggcuccgcgaacaagcccaaggacgagcuggacuacgccaacgacaucgagaagaagaucugcaagauggagaagugcagcuccguguucaacguggucaacagcuccaucgggcugaucauggugcucagcuuccuguuccugaacugaggacuaguuauaagacugacuagcccgaugggccucccaacgggcccuccuccccuccuugcaccgagauuaauaaaaaaaaaaaaaaaaaaaaaaaaaaaaaaaaaaaaaaaaaaaaaaaaaaaaaaaaaaaaaaaaugcaucccccccccccccccccccccccccccccccaaaggcucuuuucagagccaccagaauu

SEQ ID NO: 1798 - RNA, 1408 nt, Artificial Sequence
  mRNA Design i-3 (A64-N5-C30-hSL-N5) comprising derived and/or modified sequence from Pf(3D7)__XP_001351122.1__HsSPARC_Pf-CSP(19-397) (opt1)
aggagaaagcuuaccaugcgcgccuggaucuucuuccugcucugccuggccggccgggcccuggcccuguuccaggaguaccagugcuacggcuccagcuccaacacccgggugcucaacgagcugaacuacgacaacgcggggaccaaccuguacaacgagcucgagaugaacuacuacggcaagcaggagaacugguacagccugaagaagaacucccgcagccugggggagaacgacgacggcaacaacgaggacaacgagaagcuccggaagcccaagcacaagaagcugaagcagccggccgacgggaaccccgaccccaacgccaaccccaacguggacccgaacgccaaccccaacgucgaccccaacgccaaccccaacguggacccgaacgcgaaccccaacgccaaccccaacgccaaccccaacgccaacccgaacgcgaaccccaacgccaaccccaacgccaaccccaacgccaacccgaacgccaaccccaacgcgaaccccaacgccaaccccaacgccaacccgaacgccaaccccaacgccaaccccaacgcgaaccccaacgccaacccgaacgccaaccccaacguggaccccaacgccaaccccaacgccaacccgaacgcgaaccccaacgccaaccccaacgccaacccgaacgccaaccccaacgccaaccccaacgcgaaccccaacgccaacccgaacgccaaccccaacgccaaccccaacgcgaaccccaacgccaacccgaacgccaaccccaacgccaaccccaacgccaaccccaacgcgaacccgaacgccaaccccaacaagaacaaccagggcaacggccaggggcacaacaugcccaacgaccccaaccgcaacgucgacgagaacgccaacgccaacuccgccgugaagaacaacaacaacgaggagccgagcgacaagcacaucaaggaguaccugaacaagauccagaacucccucagcacggaguggucccccugcagcgugaccugcggcaacgggauccagguccggaucaagcccggcuccgcgaacaagcccaaggacgagcuggacuacgccaacgacaucgagaagaagaucugcaagauggagaagugcagcuccguguucaacguggucaacagcuccaucgggcugaucauggugcucagcuuccuguuccugaacugaggacuaguuauaagacugacuagcccgaugggccucccaacgggcccuccuccccuccuugcaccgagauuaauaaaaaaaaaaaaaaaaaaaaaaaaaaaaaaaaaaaaaaaaaaaaaaaaaaaaaaaaaaaaaaaaugcaucccccccccccccccccccccccccccccccaaaggcucuuuucagagccaccagaauu

SEQ ID NO: 1799 - RNA, 1411 nt, Artificial Sequence
  mRNA Design i-3 (A64-N5-C30-hSL-N5) comprising derived and/or modified sequence from Pf(3D7)__XP_001351122.1__IgE_Pf-CSP(19-397) (opt1)
aggagaaagcuuaccauggacuggaccuggauccuguuccucguggccgccgcgacccgcguccacagccuguuccaggaguaccagugcuacggcuccagcuccaacacccgggugcucaacgagcugaacuacgacaacgcggggaccaaccuguacaacgagcucgagaugaacuacuacggcaagcaggagaacugguacagccugaagaagaacucccgcagccugggggagaacgacgacggcaacaacgaggacaacgagaagcuccggaagcccaagcacaagaagcugaagcagccggccgacgggaaccccgaccccaacgccaaccccaacguggacccgaacgccaaccccaacgucgaccccaacgccaaccccaacguggacccgaacgcgaaccccaacgccaaccccaacgccaaccccaacgccaacccgaacgcgaaccccaacgccaaccccaacgccaaccccaacgccaacccgaacgccaaccccaacgcgaaccccaacgccaaccccaacgccaacccgaacgccaaccccaacgccaaccccaacgcgaaccccaacgccaacccgaacgccaaccccaacguggaccccaacgccaaccccaacgccaacccgaacgcgaaccccaacgccaaccccaacgccaacccgaacgccaaccccaacgccaaccccaacgcgaaccccaacgccaacccgaacgccaaccccaacgccaaccccaacgcgaaccccaacgccaacccgaacgccaaccccaacgccaaccccaacgccaaccccaacgcgaacccgaacgccaaccccaacaagaacaaccagggcaacggccaggggcacaacaugcccaacgaccccaaccgcaacgucgacgagaacgccaacgccaacuccgccgugaagaacaacaacaacgaggagccgagcgacaagcacaucaaggaguaccugaacaagauccagaacucccucagcacggaguggucccccugcagcgugaccugcggcaacgggauccagguccggaucaagcccggcuccgcgaacaagcccaaggacgagcuggacuacgccaacgacaucgagaagaagaucugcaagauggagaagugcagcuccguguucaacguggucaacagcuccaucgggcugaucauggugcucagcuuccuguuccugaacugaggacuaguuauaagacugacuagcccgaugggccucccaacgggcccuccuccccuccuugcaccgagauuaauaaaaaaaaaaaaaaaaaaaaaaaaaaaaaaaaaaaaaaaaaaaaaaaaaaaaaaaaaaaaaaaaugcaucccccccccccccccccccccccccccccccaaaggcucuuuucagagccaccagaauu

SEQ ID NO: 1800 - RNA, 1576 nt, Artificial Sequence
  mRNA Design i-3 (A64-N5-C30-hSL-N5) comprising derived and/or modified sequence from Pf(3D7)__XP_001351122.1__Pf-CSP_L(G4SG4)_TM domain HA (opt1)
aggagaaagcuuaccaugaugcgcaagcuggccauccucagcguguccagcuuccuguucgucgaggcccuguuccaggaguaccagugcuacggcuccagcuccaacacccgggugcucaacgagcugaacuacgacaacgcggggaccaaccuguacaacgagcucgagaugaacuacuacggcaagcaggagaacugguacagccugaagaagaacucccgcagccugggggagaacgacgacggcaacaacgaggacaacgagaagcuccggaagcccaagcacaagaagcugaagcagccggccgacgggaaccccgaccccaacgccaaccccaacguggacccgaacgccaaccccaacgucgaccccaacgccaaccccaacguggacccgaacgcgaaccccaacgccaaccccaacgccaaccccaacgccaacccgaacgcgaaccccaacgccaaccccaacgccaaccccaacgccaacccgaacgccaaccccaacgcgaaccccaacgccaaccccaacgccaacccgaacgccaaccccaacgccaaccccaacgcgaaccccaacgccaacccgaacgccaaccccaacguggaccccaacgccaaccccaacgccaacccgaacgcgaaccccaacgccaaccccaacgccaacccgaacgccaaccccaacgccaaccccaacgcgaaccccaacgccaacccgaacgccaaccccaacgccaaccccaacgcgaaccccaacgccaacccgaacgccaaccccaacgccaaccccaacgccaaccccaacgcgaacccgaacgccaaccccaacaagaacaaccagggcaacggccaggggcacaacaugcccaacgaccccaaccgcaacgucgacgagaacgccaacgccaacuccgccgugaagaacaacaacaacgaggagccgagcgacaagcacaucaaggaguaccugaacaagauccagaacucccucagcacggaguggucccccugcagcgugaccugcggcaacgggauccagguccggaucaagcccggcuccgcgaacaagcccaaggacgagcuggacuacgccaacgacaucgagaagaagaucugcaagauggagaagugcagcuccguguucaacguggucaacagcuccaucgggcugaucauggugcucagcuuccuguuccugaacggcgggggcgggagcggcgggggcggcaagcucgaguccacgcggaucuaccagauccuggcgaucuacagcaccgucgccagcucccuggugcucguggucagccugggggccaucuccuucuggaugugcagcaacggcucccugcagugccgcaucugcaucugaggacuaguuauaagacugacuagcccgaugggccucccaacgggcccuccuccccuccuugcaccgagauuaauaaaaaaaaaaaaaaaaaaaaaaaaaaaaaaaaaaaaaaaaaaaaaaaaaaaaaaaaaaaaaaaaugcaucccccccccccccccccccccccccccccccaaaggcucuuuucagagccaccagaauu

SEQ ID NO: 1801 - RNA, 1450 nt, Artificial Sequence
  mRNA Design i-3 (A64-N5-C30-hSL-N5) comprising derived and/or modified sequence from Pf(3D7)__XP_001351122.1__Pf-CSP(199-377)_L(PVTN)_HBsAg (opt1)
aggagaaagcuuaccauggaccccaacgccaaccccaacgccaacccgaacgcgaaccccaacgccaaccccaacgccaacccgaacgccaaccccaacgccaaccccaacgcgaaccccaacgccaacccgaacgccaaccccaacgccaaccccaacgcgaaccccaacgccaacccgaacgccaaccccaacgccaaccccaacgccaaccccaacgcgaacccgaacgccaaccccaacaagaacaaccagggcaacggccaggggcacaacaugcccaacgaccccaaccgcaacgucgacgagaacgccaacgccaacuccgccgugaagaacaacaacaacgaggagccgagcgacaagcacaucaaggaguaccugaacaagauccagaacucccucagcacggaguggucccccugcagcgugaccugcggcaacgggauccagguccggaucaagcccggcuccgcgaacaagcccaaggacgagcuggacuacgccaacgacaucgagaagaagaucugcaagauggagaagugcagcuccgugccggugacgaacauggagaacaucaccagcggcuuccuggggccccuccuggugcugcaggccggcuucuuccuccugacccgcauccugaccaucccgcagucccucgacagcugguggaccucccugaacuuccucgggggcagccccgucugccuggggcagaacucccagagccccaccuccaaccacagccccaccuccugcccgcccaucugccccggcuaccgguggaugugccugcgccgguucaucaucuuccuguucauccuccugcugugccucaucuuccugcuggugcuccuggacuaccagggcaugcugcccgugugcccgcucauccccgggagcacgaccaccaacaccggccccugcaagacgugcaccacccccgcccaggggaacuccauguucccgagcugcugcugcaccaagcccacggacggcaacugcacgugcauccccauccccuccagcugggcguucgccaaguaccugugggagugggccuccguccgcuucagcuggcugucccuccuggugccguucgugcagugguucgucgggcugagccccaccguguggcucuccgccaucuggaugaugugguacuggggccccagccuguacagcaucgugucccccuucaucccgcugcuccccaucuucuucugccugugggucuacaucugaggacuaguuauaagacugacuagcccgaugggccucccaacgggcccuccuccccuccuugcaccgagauuaauaaaaaaaaaaaaaaaaaaaaaaaaaaaaaaaaaaaaaaaaaaaaaaaaaaaaaaaaaaaaaaaaugcaucccccccccccccccccccccccccccccccaaaggcucuuuucagagccaccagaauu

SEQ ID NO: 1802 - RNA, 1492 nt, Artificial Sequence
  mRNA Design i-3 (A64-N5-C30-hSL-N5) comprising derived and/or modified sequence from Pf(3D7)__XP_001351122.1__Pf-CSP(199-387)_L(PVTN)_HBsAg (opt1)
aggagaaagcuuaccaugauggccccggaccccaacgccaaccccaacgccaacccgaacgcgaaccccaacgccaaccccaacgccaacccgaacgccaaccccaacgccaaccccaacgcgaaccccaacgccaacccgaacgccaaccccaacgccaaccccaacgcgaaccccaacgccaacccgaacgccaaccccaacgccaaccccaacgccaaccccaacgcgaacccgaacgccaaccccaacaagaacaaccagggcaacggccaggggcacaacaugcccaacgaccccaaccgcaacgucgacgagaacgccaacgccaacuccgccgugaagaacaacaacaacgaggagccgagcgacaagcacaucaaggaguaccugaacaagauccagaacucccucagcacggaguggucccccugcagcgugaccugcggcaacgggauccagguccggaucaagcccggcuccgcgaacaagcccaaggacgagcuggacuacgccaacgacaucgagaagaagaucugcaagauggagaagugcagcuccguguucaacguggucaacagcuccaucgggcuggggccggugacgaacauggagaacaucaccagcggcuuccuggggccccuccuggugcugcaggccggcuucuuccuccugacccgcauccugaccaucccgcagucccucgacagcugguggaccucccugaacuuccucgggggcagccccgucugccuggggcagaacucccagagccccaccuccaaccacagccccaccuccugcccgcccaucugccccggcuaccgguggaugugccugcgccgguucaucaucuuccuguucauccuccugcugugccucaucuuccugcuggugcuccuggacuaccagggcaugcugcccgugugcccgcucauccccgggagcacgaccaccaacaccggccccugcaagacgugcaccacccccgcccaggggaacuccauguucccgagcugcugcugcaccaagcccacggacggcaacugcacgugcauccccauccccuccagcugggcguucgccaaguaccugugggagugggccuccguccgcuucagcuggcugucccuccuggugccguucgugcagugguucgucgggcugagccccaccguguggcucuccgccaucuggaugaugugguacuggggccccagccuguacagcaucgugucccccuucaucccgcugcuccccaucuucuucugccugugggucuacaucugaggacuaguuauaagacugacuagcccgaugggccucccaacgggcccuccuccccuccuugcaccgagauuaauaaaaaaaaaaaaaaaaaaaaaaaaaaaaaaaaaaaaaaaaaaaaaaaaaaaaaaaaaaaaaaaaugcaucccccccccccccccccccccccccccccccaaaggcucuuuucagagccaccagaauu

SEQ ID NO: 1803 - RNA, 676 nt, Artificial Sequence
  mRNA Design i-3 (A64-N5-C30-hSL-N5) comprising derived and/or modified sequence from Pf(3D7)__XP_001351122.1__HsALB_Pf-CSP(19-152) (opt1)
aggagaaagcuuaccaugaagugggugaccuucaucagccugcucuuccuguucuccagcgccuacucccuguuccaggaguaccagugcuacggcuccagcuccaacacccgggugcucaacgagcugaacuacgacaacgcggggaccaaccuguacaacgagcucgagaugaacuacuacggcaagcaggagaacugguacagccugaagaagaacucccgcagccugggggagaacgacgacggcaacaacgaggacaacgagaagcuccggaagcccaagcacaagaagcugaagcagccggccgacgggaaccccgaccccaacgccaaccccaacguggacccgaacgccaaccccaacgucgaccccaacgccaaccccaacguggacccgaacgcgaaccccaacgccaaccccaacgccaaccccaacgccaacccgaacgcgaaccccaacgccaaccccugaggacuaguuauaagacugacuagcccgaugggccucccaacgggcccuccuccccuccuugcaccgagauuaauaaaaaaaaaaaaaaaaaaaaaaaaaaaaaaaaaaaaaaaaaaaaaaaaaaaaaaaaaaaaaaaaugcaucccccccccccccccccccccccccccccccaaaggcucuuuucagagccaccagaauu

SEQ ID NO: 1804 - RNA, 796 nt, Artificial Sequence
  mRNA Design i-3 (A64-N5-C30-hSL-N5) comprising derived and/or modified sequence from Pf(3D7)__XP_001351122.1__HsALB_Pf-CSP(19-192) (opt1)
aggagaaagcuuaccaugaagugggugaccuucaucagccugcucuuccuguucuccagcgccuacucccuguuccaggaguaccagugcuacggcuccagcuccaacacccgggugcucaacgagcugaacuacgacaacgcggggaccaaccuguacaacgagcucgagaugaacuacuacggcaagcaggagaacugguacagccugaagaagaacucccgcagccugggggagaacgacgacggcaacaacgaggacaacgagaagcuccggaagcccaagcacaagaagcugaagcagccggccgacgggaaccccgaccccaacgccaaccccaacguggacccgaacgccaaccccaacgucgaccccaacgccaaccccaacguggacccgaacgcgaaccccaacgccaaccccaacgccaaccccaacgccaacccgaacgcgaaccccaacgccaaccccaacgccaaccccaacgccaacccgaacgccaaccccaacgcgaaccccaacgccaaccccaacgccaacccgaacgccaaccccaacgccaaccccaacgcgaaccccaacgccaacccgugaggacuaguuauaagacugacuagcccgaugggccucccaacgggcccuccuccccuccuugcaccgagauuaauaaaaaaaaaaaaaaaaaaaaaaaaaaaaaaaaaaaaaaaaaaaaaaaaaaaaaaaaaaaaaaaaugcaucccccccccccccccccccccccccccccccaaaggcucuuuucagagccaccagaauu

SEQ ID NO: 1805 - RNA, 1036 nt, Artificial Sequence
  mRNA Design i-3 (A64-N5-C30-hSL-N5) comprising derived and/or modified sequence from Pf(3D7)__XP_001351122.1__HsALB_Pf-CSP(19-272) (opt1)
aggagaaagcuuaccaugaagugggugaccuucaucagccugcucuuccuguucuccagcgccuacucccuguuccaggaguaccagugcuacggcuccagcuccaacacccgggugcucaacgagcugaacuacgacaacgcggggaccaaccuguacaacgagcucgagaugaacuacuacggcaagcaggagaacugguacagccugaagaagaacucccgcagccugggggagaacgacgacggcaacaacgaggacaacgagaagcuccggaagcccaagcacaagaagcugaagcagccggccgacgggaaccccgaccccaacgccaaccccaacguggacccgaacgccaaccccaacgucgaccccaacgccaaccccaacguggacccgaacgcgaaccccaacgccaaccccaacgccaaccccaacgccaacccgaacgcgaaccccaacgccaaccccaacgccaaccccaacgccaacccgaacgccaaccccaacgcgaaccccaacgccaaccccaacgccaacccgaacgccaaccccaacgccaaccccaacgcgaaccccaacgccaacccgaacgccaaccccaacguggaccccaacgccaaccccaacgccaacccgaacgcgaaccccaacgccaaccccaacgccaacccgaacgccaaccccaacgccaaccccaacgcgaaccccaacgccaacccgaacgccaaccccaacgccaaccccaacgcgaaccccaacgccaacccgaacgccaaccccaacgccaaccccaacgccaaccccaacgcgaacccgaacgccaaccccugaggacuaguuauaagacugacuagcccgaugggccucccaacgggcccuccuccccuccuugcaccgagauuaauaaaaaaaaaaaaaaaaaaaaaaaaaaaaaaaaaaaaaaaaaaaaaaaaaaaaaaaaaaaaaaaaugcaucccccccccccccccccccccccccccccccaaaggcucuuuucagagccaccagaauu

SEQ ID NO: 1806 - RNA, 1198 nt, Artificial Sequence
  mRNA Design i-3 (A64-N5-C30-hSL-N5) comprising derived and/or modified sequence from Pf(3D7)__XP_001351122.1__HsALB_Pf-CSP(19-272)_L(AAY)_Pf-CSP(310-3 27)_L(AAY)_Pf-CSP(346-375) (opt1)
aggagaaagcuuaccaugaagugggugaccuucaucagccugcucuuccuguucuccagcgccuacucccuguuccaggaguaccagugcuacggcuccagcuccaacacccgggugcucaacgagcugaacuacgacaacgcggggaccaaccuguacaacgagcucgagaugaacuacuacggcaagcaggagaacugguacagccugaagaagaacucccgcagccugggggagaacgacgacggcaacaacgaggacaacgagaagcuccggaagcccaagcacaagaagcugaagcagccggccgacgggaaccccgaccccaacgccaaccccaacguggacccgaacgccaaccccaacgucgaccccaacgccaaccccaacguggacccgaacgcgaaccccaacgccaaccccaacgccaaccccaacgccaacccgaacgcgaaccccaacgccaaccccaacgccaaccccaacgccaacccgaacgccaaccccaacgcgaaccccaacgccaaccccaacgccaacccgaacgccaaccccaacgccaaccccaacgcgaaccccaacgccaacccgaacgccaaccccaacguggaccccaacgccaaccccaacgccaacccgaacgcgaaccccaacgccaaccccaacgccaacccgaacgccaaccccaacgccaaccccaacgcgaaccccaacgccaacccgaacgccaaccccaacgccaaccccaacgcgaaccccaacgccaacccgaacgccaaccccaacgccaaccccaacgccaaccccaacgcgaacccgaacgccaaccccgccgcguaugagccgagcgacaagcacaucaaggaguaccugaacaagauccagaacucccucgcggccuacaucaagcccggcuccgcgaacaagcccaaggacgagcuggacuacgccaacgacaucgagaagaagaucugcaagauggagaagugcagcugaggacuaguuauaagacugacuagcccgaugggccucccaacgggcccuccuccccuccuugcaccgagauuaauaaaaaaaaaaaaaaaaaaaaaaaaaaaaaaaaaaaaaaaaaaaaaaaaaaaaaaaaaaaaaaaaugcaucccccccccccccccccccccccccccccccaaaggcucuuuucagagccaccagaauu

SEQ ID NO: 1807 - RNA, 1159 nt, Artificial Sequence
  mRNA Design i-3 (A64-N5-C30-hSL-N5) comprising derived and/or modified sequence from Pf(3D7)__XP_001351122.1__HsALB_Pf-CSP(19-272)_L(AAY)_Pf-CSP(346-3 65)_L(AAY)_P2 (opt1)
aggagaaagcuuaccaugaagugggugaccuucaucagccugcucuuccuguucuccagcgccuacucccuguuccaggaguaccagugcuacggcuccagcuccaacacccgggugcucaacgagcugaacuacgacaacgcggggaccaaccuguacaacgagcucgagaugaacuacuacggcaagcaggagaacugguacagccugaagaagaacucccgcagccugggggagaacgacgacggcaacaacgaggacaacgagaagcuccggaagcccaagcacaagaagcugaagcagccggccgacgggaaccccgaccccaacgccaaccccaacguggacccgaacgccaaccccaacgucgaccccaacgccaaccccaacguggacccgaacgcgaaccccaacgccaaccccaacgccaaccccaacgccaacccgaacgcgaaccccaacgccaaccccaacgccaaccccaacgccaacccgaacgccaaccccaacgcgaaccccaacgccaaccccaacgccaacccgaacgccaaccccaacgccaaccccaacgcgaaccccaacgccaacccgaacgccaaccccaacguggaccccaacgccaaccccaacgccaacccgaacgcgaaccccaacgccaaccccaacgccaacccgaacgccaaccccaacgccaaccccaacgcgaaccccaacgccaacccgaacgccaaccccaacgccaaccccaacgcgaaccccaacgccaacccgaacgccaaccccaacgccaaccccaacgccaaccccaacgcgaacccgaacgccaaccccgccgcguauaucaagcccggcuccgcgaacaagcccaaggacgagcuggacuacgccaacgacaucgaggcggccuaccaguacaucaaggccaacagcaaguucaucggcaucaccgagcugugaggacuaguuauaagacugacuagcccgaugggccucccaacgggcccuccuccccuccuugcaccgagauuaauaaaaaaaaaaaaaaaaaaaaaaaaaaaaaaaaaaaaaaaaaaaaaaaaaaaaaaaaaaaaaaaaugcaucccccccccccccccccccccccccccccccaaaggcucuuuucagagccaccagaauu

SEQ ID NO: 1808 - RNA, 1153 nt, Artificial Sequence
  mRNA Design i-3 (A64-N5-C30-hSL-N5) comprising derived and/or modified sequence from Pf(3D7)__XP_001351122.1__HsALB_Pf-CSP(19-272)_L(AAY)_Pf-CSP(346-3 65)_L(AAY)_PADRE (opt1)
aggagaaagcuuaccaugaagugggugaccuucaucagccugcucuuccuguucuccagcgccuacucccuguuccaggaguaccagugcuacggcuccagcuccaacacccgggugcucaacgagcugaacuacgacaacgcggggaccaaccuguacaacgagcucgagaugaacuacuacggcaagcaggagaacugguacagccugaagaagaacucccgcagccugggggagaacgacgacggcaacaacgaggacaacgagaagcuccggaagcccaagcacaagaagcugaagcagccggccgacgggaaccccgaccccaacgccaaccccaacguggacccgaacgccaaccccaacgucgaccccaacgccaaccccaacguggacccgaacgcgaaccccaacgccaaccccaacgccaaccccaacgccaacccgaacgcgaaccccaacgccaaccccaacgccaaccccaacgccaacccgaacgccaaccccaacgcgaaccccaacgccaaccccaacgccaacccgaacgccaaccccaacgccaaccccaacgcgaaccccaacgccaacccgaacgccaaccccaacguggaccccaacgccaaccccaacgccaacccgaacgcgaaccccaacgccaaccccaacgccaacccgaacgccaaccccaacgccaaccccaacgcgaaccccaacgccaacccgaacgccaaccccaacgccaaccccaacgcgaaccccaacgccaacccgaacgccaaccccaacgccaaccccaacgccaaccccaacgcgaacccgaacgccaaccccgccgcguauaucaagcccggcuccgcgaacaagcccaaggacgagcuggacuacgccaacgacaucgaggcggccuacgccaaguucguggccgccuggacccugaaggcggccgccugaggacuaguuauaagacugacuagcccgaugggccucccaacgggcccuccuccccuccuugcaccgagauuaauaaaaaaaaaaaaaaaaaaaaaaaaaaaaaaaaaaaaaaaaaaaaaaaaaaaaaaaaaaaaaaaaugcaucccccccccccccccccccccccccccccccaaaggcucuuuucagagccaccagaauu

SEQ ID NO: 1809 - RNA, 1210 nt, Artificial Sequence
  mRNA Design i-3 (A64-N5-C30-hSL-N5) comprising derived and/or modified sequence from Pf(3D7)__XP_001351122.1__HsALB_Pf-CSP(19-272)_L(G4S)_Pf-CSP(310-3 27)_L(G4S)_Pf-CSP(346-375) (opt1)
aggagaaagcuuaccaugaagugggugaccuucaucagccugcucuuccuguucuccagcgccuacucccuguuccaggaguaccagugcuacggcuccagcuccaacacccgggugcucaacgagcugaacuacgacaacgcggggaccaaccuguacaacgagcucgagaugaacuacuacggcaagcaggagaacugguacagccugaagaagaacucccgcagccugggggagaacgacgacggcaacaacgaggacaacgagaagcuccggaagcccaagcacaagaagcugaagcagccggccgacgggaaccccgaccccaacgccaaccccaacguggacccgaacgccaaccccaacgucgaccccaacgccaaccccaacguggacccgaacgcgaaccccaacgccaaccccaacgccaaccccaacgccaacccgaacgcgaaccccaacgccaaccccaacgccaaccccaacgccaacccgaacgccaaccccaacgcgaaccccaacgccaaccccaacgccaacccgaacgccaaccccaacgccaaccccaacgcgaaccccaacgccaacccgaacgccaaccccaacguggaccccaacgccaaccccaacgccaacccgaacgcgaaccccaacgccaaccccaacgccaacccgaacgccaaccccaacgccaaccccaacgcgaaccccaacgccaacccgaacgccaaccccaacgccaaccccaacgcgaaccccaacgccaacccgaacgccaaccccaacgccaaccccaacgccaaccccaacgcgaacccgaacgccaaccccggaggcggaggaucugagccgagcgacaagcacaucaaggaguaccugaacaagauccagaacucccucggcggagguggaaguaucaagcccggcuccgcgaacaagcccaaggacgagcuggacuacgccaacgacaucgagaagaagaucugcaagauggagaagugcagcugaggacuaguuauaagacugacuagcccgaugggccucccaacgggcccuccuccccuccuugcaccgagauuaauaaaaaaaaaaaaaaaaaaaaaaaaaaaaaaaaaaaaaaaaaaaaaaaaaaaaaaaaaaaaaaaaugcaucccccccccccccccccccccccccccccccaaaggcucuuuucagagccaccagaauu

SEQ ID NO: 1810 - RNA, 1195 nt, Artificial Sequence
  mRNA Design i-3 (A64-N5-C30-hSL-N5) comprising derived and/or modified sequence from Pf(3D7)__XP_001351122.1__HsALB_Pf-CSP(19-272)_L(G4S)_Pf-CSP(310-3 27)_Pf-CSP(346-375) (opt1)
aggagaaagcuuaccaugaagugggugaccuucaucagccugcucuuccuguucuccagcgccuacucccuguuccaggaguaccagugcuacggcuccagcuccaacacccgggugcucaacgagcugaacuacgacaacgcggggaccaaccuguacaacgagcucgagaugaacuacuacggcaagcaggagaacugguacagccugaagaagaacucccgcagccugggggagaacgacgacggcaacaacgaggacaacgagaagcuccggaagcccaagcacaagaagcugaagcagccggccgacgggaaccccgaccccaacgccaaccccaacguggacccgaacgccaaccccaacgucgaccccaacgccaaccccaacguggacccgaacgcgaaccccaacgccaaccccaacgccaaccccaacgccaacccgaacgcgaaccccaacgccaaccccaacgccaaccccaacgccaacccgaacgccaaccccaacgcgaaccccaacgccaaccccaacgccaacccgaacgccaaccccaacgccaaccccaacgcgaaccccaacgccaacccgaacgccaaccccaacguggaccccaacgccaaccccaacgccaacccgaacgcgaaccccaacgccaaccccaacgccaacccgaacgccaaccccaacgccaaccccaacgcgaaccccaacgccaacccgaacgccaaccccaacgccaaccccaacgcgaaccccaacgccaacccgaacgccaaccccaacgccaaccccaacgccaaccccaacgcgaacccgaacgccaaccccggaggcggaggaucugagccgagcgacaagcacaucaaggaguaccugaacaagauccagaacucccucaucaagcccggcuccgcgaacaagcccaaggacgagcuggacuacgccaacgacaucgagaagaagaucugcaagauggagaagugcagcugaggacuaguuauaagacugacuagcccgaugggccucccaacgggcccuccuccccuccuugcaccgagauuaauaaaaaaaaaaaaaaaaaaaaaaaaaaaaaaaaaaaaaaaaaaaaaaaaaaaaaaaaaaaaaaaaugcaucccccccccccccccccccccccccccccccaaaggcucuuuucagagccaccagaauu

SEQ ID NO: 1811 - RNA, 1195 nt, Artificial Sequence
  mRNA Design i-3 (A64-N5-C30-hSL-N5) comprising derived and/or modified sequence from Pf(3D7)__XP_001351122.1__HsALB_Pf-CSP(19-325) (opt1)
aggagaaagcuuaccaugaagugggugaccuucaucagccugcucuuccuguucuccagcgccuacucccuguuccaggaguaccagugcuacggcuccagcuccaacacccgggugcucaacgagcugaacuacgacaacgcggggaccaaccuguacaacgagcucgagaugaacuacuacggcaagcaggagaacugguacagccugaagaagaacucccgcagccugggggagaacgacgacggcaacaacgaggacaacgagaagcuccggaagcccaagcacaagaagcugaagcagccggccgacgggaaccccgaccccaacgccaaccccaacguggacccgaacgccaaccccaacgucgaccccaacgccaaccccaacguggacccgaacgcgaaccccaacgccaaccccaacgccaaccccaacgccaacccgaacgcgaaccccaacgccaaccccaacgccaaccccaacgccaacccgaacgccaaccccaacgcgaaccccaacgccaaccccaacgccaacccgaacgccaaccccaacgccaaccccaacgcgaaccccaacgccaacccgaacgccaaccccaacguggaccccaacgccaaccccaacgccaacccgaacgcgaaccccaacgccaaccccaacgccaacccgaacgccaaccccaacgccaaccccaacgcgaaccccaacgccaacccgaacgccaaccccaacgccaaccccaacgcgaaccccaacgccaacccgaacgccaaccccaacgccaaccccaacgccaaccccaacgcgaacccgaacgccaaccccaacaagaacaaccagggcaacggccaggggcacaacaugcccaacgaccccaaccgcaacgucgacgagaacgccaacgccaacuccgccgugaagaacaacaacaacgaggagccgagcgacaagcacaucaaggaguaccugaacaagauccagaacugaggacuaguuauaagacugacuagcccgaugggccucccaacgggcccuccuccccuccuugcaccgagauuaauaaaaaaaaaaaaaaaaaaaaaaaaaaaaaaaaaaaaaaaaaaaaaaaaaaaaaaaaaaaaaaaaugcaucccccccccccccccccccccccccccccccaaaggcucuuuucagagccaccagaauu

SEQ ID NO: 1812 - RNA, 1372 nt, Artificial Sequence
  mRNA Design i-3 (A64-N5-C30-hSL-N5) comprising derived and/or modified sequence from Pf(3D7)__XP_001351122.1__HsALB_Pf-CSP(19-384) (opt1)
aggagaaagcuuaccaugaagugggugaccuucaucagccugcucuuccuguucuccagcgccuacucccuguuccaggaguaccagugcuacggcuccagcuccaacacccgggugcucaacgagcugaacuacgacaacgcggggaccaaccuguacaacgagcucgagaugaacuacuacggcaagcaggagaacugguacagccugaagaagaacucccgcagccugggggagaacgacgacggcaacaacgaggacaacgagaagcuccggaagcccaagcacaagaagcugaagcagccggccgacgggaaccccgaccccaacgccaaccccaacguggacccgaacgccaaccccaacgucgaccccaacgccaaccccaacguggacccgaacgcgaaccccaacgccaaccccaacgccaaccccaacgccaacccgaacgcgaaccccaacgccaaccccaacgccaaccccaacgccaacccgaacgccaaccccaacgcgaaccccaacgccaaccccaacgccaacccgaacgccaaccccaacgccaaccccaacgcgaaccccaacgccaacccgaacgccaaccccaacguggaccccaacgccaaccccaacgccaacccgaacgcgaaccccaacgccaaccccaacgccaacccgaacgccaaccccaacgccaaccccaacgcgaaccccaacgccaacccgaacgccaaccccaacgccaaccccaacgcgaaccccaacgccaacccgaacgccaaccccaacgccaaccccaacgccaaccccaacgcgaacccgaacgccaaccccaacaagaacaaccagggcaacggccaggggcacaacaugcccaacgaccccaaccgcaacgucgacgagaacgccaacgccaacuccgccgugaagaacaacaacaacgaggagccgagcgacaagcacaucaaggaguaccugaacaagauccagaacucccucagcacggaguggucccccugcagcgugaccugcggcaacgggauccagguccggaucaagcccggcuccgcgaacaagcccaaggacgagcuggacuacgccaacgacaucgagaagaagaucugcaagauggagaagugcagcuccguguucaacguggucaacagcuccugaggacuaguuauaagacugacuagcccgaugggccucccaacgggcccuccuccccuccuugcaccgagauuaauaaaaaaaaaaaaaaaaaaaaaaaaaaaaaaaaaaaaaaaaaaaaaaaaaaaaaaaaaaaaaaaaugcaucccccccccccccccccccccccccccccccaaaggcucuuuucagagccaccagaauu

SEQ ID NO: 1813 - RNA, 1510 nt, Artificial Sequence
  mRNA Design i-3 (A64-N5-C30-hSL-N5) comprising derived and/or modified sequence from Pf(3D7)__XP_001351122.1__HsALB_Pf-CSP(19-384)_TM domain HA (opt1)
aggagaaagcuuaccaugaagugggugaccuucaucagccugcucuuccuguucuccagcgccuacucccuguuccaggaguaccagugcuacggcuccagcuccaacacccgggugcucaacgagcugaacuacgacaacgcggggaccaaccuguacaacgagcucgagaugaacuacuacggcaagcaggagaacugguacagccugaagaagaacucccgcagccugggggagaacgacgacggcaacaacgaggacaacgagaagcuccggaagcccaagcacaagaagcugaagcagccggccgacgggaaccccgaccccaacgccaaccccaacguggacccgaacgccaaccccaacgucgaccccaacgccaaccccaacguggacccgaacgcgaaccccaacgccaaccccaacgccaaccccaacgccaacccgaacgcgaaccccaacgccaaccccaacgccaaccccaacgccaacccgaacgccaaccccaacgcgaaccccaacgccaaccccaacgccaacccgaacgccaaccccaacgccaaccccaacgcgaaccccaacgccaacccgaacgccaaccccaacguggaccccaacgccaaccccaacgccaacccgaacgcgaaccccaacgccaaccccaacgccaacccgaacgccaaccccaacgccaaccccaacgcgaaccccaacgccaacccgaacgccaaccccaacgccaaccccaacgcgaaccccaacgccaacccgaacgccaaccccaacgccaaccccaacgccaaccccaacgcgaacccgaacgccaaccccaacaagaacaaccagggcaacggccaggggcacaacaugcccaacgaccccaaccgcaacgucgacgagaacgccaacgccaacuccgccgugaagaacaacaacaacgaggagccgagcgacaagcacaucaaggaguaccugaacaagauccagaacucccucagcacggaguggucccccugcagcgugaccugcggcaacgggauccagguccggaucaagcccggcuccgcgaacaagcccaaggacgagcuggacuacgccaacgacaucgagaagaagaucugcaagauggagaagugcagcuccguguucaacguggucaacagcuccaagcucgaguccacgcggaucuaccagauccuggcgaucuacagcaccgucgccagcucccuggugcucguggucagccugggggccaucuccuucuggaugugcagcaacggcucccugcagugccgcaucugcaucugaggacuaguuauaagacugacuagcccgaugggccucccaacgggcccuccuccccuccuugcaccgagauuaauaaaaaaaaaaaaaaaaaaaaaaaaaaaaaaaaaaaaaaaaaaaaaaaaaaaaaaaaaaaaaaaaugcaucccccccccccccccccccccccccccccccaaaggcucuuuucagagccaccagaauu

SEQ ID NO: 1814 - RNA, 1222 nt, Artificial Sequence
  mRNA Design i-3 (A64-N5-C30-hSL-N5) comprising derived and/or modified sequence from Pf(3D7)__XP_001351122.1__HsALB_Pf-CSP(82-397) (opt1)
aggagaaagcuuaccaugaagugggugaccuucaucagccugcucuuccuguucuccagcgccuacuccgacaacgagaagcuccggaagcccaagcacaagaagcugaagcagccggccgacgggaaccccgaccccaacgccaaccccaacguggacccgaacgccaaccccaacgucgaccccaacgccaaccccaacguggacccgaacgcgaaccccaacgccaaccccaacgccaaccccaacgccaacccgaacgcgaaccccaacgccaaccccaacgccaaccccaacgccaacccgaacgccaaccccaacgcgaaccccaacgccaaccccaacgccaacccgaacgccaaccccaacgccaaccccaacgcgaaccccaacgccaacccgaacgccaaccccaacguggaccccaacgccaaccccaacgccaacccgaacgcgaaccccaacgccaaccccaacgccaacccgaacgccaaccccaacgccaaccccaacgcgaaccccaacgccaacccgaacgccaaccccaacgccaaccccaacgcgaaccccaacgccaacccgaacgccaaccccaacgccaaccccaacgccaaccccaacgcgaacccgaacgccaaccccaacaagaacaaccagggcaacggccaggggcacaacaugcccaacgaccccaaccgcaacgucgacgagaacgccaacgccaacuccgccgugaagaacaacaacaacgaggagccgagcgacaagcacaucaaggaguaccugaacaagauccagaacucccucagcacggaguggucccccugcagcgugaccugcggcaacgggauccagguccggaucaagcccggcuccgcgaacaagcccaaggacgagcuggacuacgccaacgacaucgagaagaagaucugcaagauggagaagugcagcuccguguucaacguggucaacagcuccaucgggcugaucauggugcucagcuuccuguuccugaacugaggacuaguuauaagacugacuagcccgaugggccucccaacgggcccuccuccccuccuugcaccgagauuaauaaaaaaaaaaaaaaaaaaaaaaaaaaaaaaaaaaaaaaaaaaaaaaaaaaaaaaaaaaaaaaaaugcaucccccccccccccccccccccccccccccccaaaggcucuuuucagagccaccagaauu

SEQ ID NO: 1815 - RNA, 574 nt, Artificial Sequence
  mRNA Design i-3 (A64-N5-C30-hSL-N5) comprising derived and/or modified sequence from Pf(3D7)__XP_001351122.1__HsALB_Pf-CSP(93-192) (opt1)
aggagaaagcuuaccaugaagugggugaccuucaucagccugcucuuccuguucuccagcgccuacuccaagcugaagcagccggccgacgggaaccccgaccccaacgccaaccccaacguggacccgaacgccaaccccaacgucgaccccaacgccaaccccaacguggacccgaacgcgaaccccaacgccaaccccaacgccaaccccaacgccaacccgaacgcgaaccccaacgccaaccccaacgccaaccccaacgccaacccgaacgccaaccccaacgcgaaccccaacgccaaccccaacgccaacccgaacgccaaccccaacgccaaccccaacgcgaaccccaacgccaacccgugaggacuaguuauaagacugacuagcccgaugggccucccaacgggcccuccuccccuccuugcaccgagauuaauaaaaaaaaaaaaaaaaaaaaaaaaaaaaaaaaaaaaaaaaaaaaaaaaaaaaaaaaaaaaaaaaugcaucccccccccccccccccccccccccccccccaaaggcucuuuucagagccaccagaauu

SEQ ID NO: 1816 - RNA, 814 nt, Artificial Sequence
  mRNA Design i-3 (A64-N5-C30-hSL-N5) comprising derived and/or modified sequence from Pf(3D7)__XP_001351122.1__HsALB_Pf-CSP(93-272) (opt1)
aggagaaagcuuaccaugaagugggugaccuucaucagccugcucuuccuguucuccagcgccuacuccaagcugaagcagccggccgacgggaaccccgaccccaacgccaaccccaacguggacccgaacgccaaccccaacgucgaccccaacgccaaccccaacguggacccgaacgcgaaccccaacgccaaccccaacgccaaccccaacgccaacccgaacgcgaaccccaacgccaaccccaacgccaaccccaacgccaacccgaacgccaaccccaacgcgaaccccaacgccaaccccaacgccaacccgaacgccaaccccaacgccaaccccaacgcgaaccccaacgccaacccgaacgccaaccccaacguggaccccaacgccaaccccaacgccaacccgaacgcgaaccccaacgccaaccccaacgccaacccgaacgccaaccccaacgccaaccccaacgcgaaccccaacgccaacccgaacgccaaccccaacgccaaccccaacgcgaaccccaacgccaacccgaacgccaaccccaacgccaaccccaacgccaaccccaacgcgaacccgaacgccaaccccugaggacuaguuauaagacugacuagcccgaugggccucccaacgggcccuccuccccuccuugcaccgagauuaauaaaaaaaaaaaaaaaaaaaaaaaaaaaaaaaaaaaaaaaaaaaaaaaaaaaaaaaaaaaaaaaaugcaucccccccccccccccccccccccccccccccaaaggcucuuuucagagccaccagaauu

SEQ ID NO: 1817 - RNA, 1189 nt, Artificial Sequence
  mRNA Design i-3 (A64-N5-C30-hSL-N5) comprising derived and/or modified sequence from Pf(3D7)__XP_001351122.1__HsALB_Pf-CSP(93-397) (opt1)
aggagaaagcuuaccaugaagugggugaccuucaucagccugcucuuccuguucuccagcgccuacuccaagcugaagcagccggccgacgggaaccccgaccccaacgccaaccccaacguggacccgaacgccaaccccaacgucgaccccaacgccaaccccaacguggacccgaacgcgaaccccaacgccaaccccaacgccaaccccaacgccaacccgaacgcgaaccccaacgccaaccccaacgccaaccccaacgccaacccgaacgccaaccccaacgcgaaccccaacgccaaccccaacgccaacccgaacgccaaccccaacgccaaccccaacgcgaaccccaacgccaacccgaacgccaaccccaacguggaccccaacgccaaccccaacgccaacccgaacgcgaaccccaacgccaaccccaacgccaacccgaacgccaaccccaacgccaaccccaacgcgaaccccaacgccaacccgaacgccaaccccaacgccaaccccaacgcgaaccccaacgccaacccgaacgccaaccccaacgccaaccccaacgccaaccccaacgcgaacccgaacgccaaccccaacaagaacaaccagggcaacggccaggggcacaacaugcccaacgaccccaaccgcaacgucgacgagaacgccaacgccaacuccgccgugaagaacaacaacaacgaggagccgagcgacaagcacaucaaggaguaccugaacaagauccagaacucccucagcacggaguggucccccugcagcgugaccugcggcaacgggauccagguccggaucaagcccggcuccgcgaacaagcccaaggacgagcuggacuacgccaacgacaucgagaagaagaucugcaagauggagaagugcagcuccguguucaacguggucaacagcuccaucgggcugaucauggugcucagcuuccuguuccugaacugaggacuaguuauaagacugacuagcccgaugggccucccaacgggcccuccuccccuccuugcaccgagauuaauaaaaaaaaaaaaaaaaaaaaaaaaaaaaaaaaaaaaaaaaaaaaaaaaaaaaaaaaaaaaaaaaugcaucccccccccccccccccccccccccccccccaaaggcucuuuucagagccaccagaauu

SEQ ID NO: 1818 - RNA, 559 nt, Artificial Sequence
  mRNA Design i-3 (A64-N5-C30-hSL-N5) comprising derived and/or modified sequence from Pf(3D7)__XP_001351122.1__HsALB_Pf-CSP(98-192) (opt1)
aggagaaagcuuaccaugaagugggugaccuucaucagccugcucuuccuguucuccagcgccuacuccgccgacgggaaccccgaccccaacgccaaccccaacguggacccgaacgccaaccccaacgucgaccccaacgccaaccccaacguggacccgaacgcgaaccccaacgccaaccccaacgccaaccccaacgccaacccgaacgcgaaccccaacgccaaccccaacgccaaccccaacgccaacccgaacgccaaccccaacgcgaaccccaacgccaaccccaacgccaacccgaacgccaaccccaacgccaaccccaacgcgaaccccaacgccaacccgugaggacuaguuauaagacugacuagcccgaugggccucccaacgggcccuccuccccuccuugcaccgagauuaauaaaaaaaaaaaaaaaaaaaaaaaaaaaaaaaaaaaaaaaaaaaaaaaaaaaaaaaaaaaaaaaaugcaucccccccccccccccccccccccccccccccaaaggcucuuuucagagccaccagaauu

SEQ ID NO: 1819 - RNA, 799 nt, Artificial Sequence
  mRNA Design i-3 (A64-N5-C30-hSL-N5) comprising derived and/or modified sequence from Pf(3D7)__XP_001351122.1__HsALB_Pf-CSP(98-272) (opt1)
aggagaaagcuuaccaugaagugggugaccuucaucagccugcucuuccuguucuccagcgccuacuccgccgacgggaaccccgaccccaacgccaaccccaacguggacccgaacgccaaccccaacgucgaccccaacgccaaccccaacguggacccgaacgcgaaccccaacgccaaccccaacgccaaccccaacgccaacccgaacgcgaaccccaacgccaaccccaacgccaaccccaacgccaacccgaacgccaaccccaacgcgaaccccaacgccaaccccaacgccaacccgaacgccaaccccaacgccaaccccaacgcgaaccccaacgccaacccgaacgccaaccccaacguggaccccaacgccaaccccaacgccaacccgaacgcgaaccccaacgccaaccccaacgccaacccgaacgccaaccccaacgccaaccccaacgcgaaccccaacgccaacccgaacgccaaccccaacgccaaccccaacgcgaaccccaacgccaacccgaacgccaaccccaacgccaaccccaacgccaaccccaacgcgaacccgaacgccaaccccugaggacuaguuauaagacugacuagcccgaugggccucccaacgggcccuccuccccuccuugcaccgagauuaauaaaaaaaaaaaaaaaaaaaaaaaaaaaaaaaaaaaaaaaaaaaaaaaaaaaaaaaaaaaaaaaaugcaucccccccccccccccccccccccccccccccaaaggcucuuuucagagccaccagaauu

SEQ ID NO: 1820 - RNA, 1105 nt, Artificial Sequence
  mRNA Design i-3 (A64-N5-C30-hSL-N5) comprising derived and/or modified sequence from Pf(3D7)__XP_001351122.1__HsALB_Pf-CSP(98-374) (opt1)
aggagaaagcuuaccaugaagugggugaccuucaucagccugcucuuccuguucuccagcgccuacuccgccgacgggaaccccgaccccaacgccaaccccaacguggacccgaacgccaaccccaacgucgaccccaacgccaaccccaacguggacccgaacgcgaaccccaacgccaaccccaacgccaaccccaacgccaacccgaacgcgaaccccaacgccaaccccaacgccaaccccaacgccaacccgaacgccaaccccaacgcgaaccccaacgccaaccccaacgccaacccgaacgccaaccccaacgccaaccccaacgcgaaccccaacgccaacccgaacgccaaccccaacguggaccccaacgccaaccccaacgccaacccgaacgcgaaccccaacgccaaccccaacgccaacccgaacgccaaccccaacgccaaccccaacgcgaaccccaacgccaacccgaacgccaaccccaacgccaaccccaacgcgaaccccaacgccaacccgaacgccaaccccaacgccaaccccaacgccaaccccaacgcgaacccgaacgccaaccccaacaagaacaaccagggcaacggccaggggcacaacaugcccaacgaccccaaccgcaacgucgacgagaacgccaacgccaacuccgccgugaagaacaacaacaacgaggagccgagcgacaagcacaucaaggaguaccugaacaagauccagaacucccucagcacggaguggucccccugcagcgugaccugcggcaacgggauccagguccggaucaagcccggcuccgcgaacaagcccaaggacgagcuggacuacgccaacgacaucgagaagaagaucugcaagauggagaagugcugaggacuaguuauaagacugacuagcccgaugggccucccaacgggcccuccuccccuccuugcaccgagauuaauaaaaaaaaaaaaaaaaaaaaaaaaaaaaaaaaaaaaaaaaaaaaaaaaaaaaaaaaaaaaaaaaugcaucccccccccccccccccccccccccccccccaaaggcucuuuucagagccaccagaauu

SEQ ID NO: 1821 - RNA, 1174 nt, Artificial Sequence
  mRNA Design i-3 (A64-N5-C30-hSL-N5) comprising derived and/or modified sequence from Pf(3D7)__XP_001351122.1__HsALB_Pf-CSP(98-397) (opt1)
aggagaaagcuuaccaugaagugggugaccuucaucagccugcucuuccuguucuccagcgccuacuccgccgacgggaaccccgaccccaacgccaaccccaacguggacccgaacgccaaccccaacgucgaccccaacgccaaccccaacguggacccgaacgcgaaccccaacgccaaccccaacgccaaccccaacgccaacccgaacgcgaaccccaacgccaaccccaacgccaaccccaacgccaacccgaacgccaaccccaacgcgaaccccaacgccaaccccaacgccaacccgaacgccaaccccaacgccaaccccaacgcgaaccccaacgccaacccgaacgccaaccccaacguggaccccaacgccaaccccaacgccaacccgaacgcgaaccccaacgccaaccccaacgccaacccgaacgccaaccccaacgccaaccccaacgcgaaccccaacgccaacccgaacgccaaccccaacgccaaccccaacgcgaaccccaacgccaacccgaacgccaaccccaacgccaaccccaacgccaaccccaacgcgaacccgaacgccaaccccaacaagaacaaccagggcaacggccaggggcacaacaugcccaacgaccccaaccgcaacgucgacgagaacgccaacgccaacuccgccgugaagaacaacaacaacgaggagccgagcgacaagcacaucaaggaguaccugaacaagauccagaacucccucagcacggaguggucccccugcagcgugaccugcggcaacgggauccagguccggaucaagcccggcuccgcgaacaagcccaaggacgagcuggacuacgccaacgacaucgagaagaagaucugcaagauggagaagugcagcuccguguucaacguggucaacagcuccaucgggcugaucauggugcucagcuuccuguuccugaacugaggacuaguuauaagacugacuagcccgaugggccucccaacgggcccuccuccccuccuugcaccgagauuaauaaaaaaaaaaaaaaaaaaaaaaaaaaaaaaaaaaaaaaaaaaaaaaaaaaaaaaaaaaaaaaaaugcaucccccccccccccccccccccccccccccccaaaggcucuuuucagagccaccagaauu

SEQ ID NO: 1822 - RNA, 1501 nt, Artificial Sequence
  mRNA Design i-3 (A64-N5-C30-hSL-N5) comprising derived and/or modified sequence from Pf(3D7)__XP_001351122.1__HsALB_Pf-CSP(199-377)_L(PVTN)_HBsAg (opt1)
aggagaaagcuuaccaugaaguggguaaccuuuauuucccuucuuuuucucuuuagcucggcuuauuccgaccccaacgccaaccccaacgccaacccgaacgcgaaccccaacgccaaccccaacgccaacccgaacgccaaccccaacgccaaccccaacgcgaaccccaacgccaacccgaacgccaaccccaacgccaaccccaacgcgaaccccaacgccaacccgaacgccaaccccaacgccaaccccaacgccaaccccaacgcgaacccgaacgccaaccccaacaagaacaaccagggcaacggccaggggcacaacaugcccaacgaccccaaccgcaacgucgacgagaacgccaacgccaacuccgccgugaagaacaacaacaacgaggagccgagcgacaagcacaucaaggaguaccugaacaagauccagaacucccucagcacggaguggucccccugcagcgugaccugcggcaacgggauccagguccggaucaagcccggcuccgcgaacaagcccaaggacgagcuggacuacgccaacgacaucgagaagaagaucugcaagauggagaagugcagcuccgugccggugacgaacauggagaacaucaccagcggcuuccuggggccccuccuggugcugcaggccggcuucuuccuccugacccgcauccugaccaucccgcagucccucgacagcugguggaccucccugaacuuccucgggggcagccccgucugccuggggcagaacucccagagccccaccuccaaccacagccccaccuccugcccgcccaucugccccggcuaccgguggaugugccugcgccgguucaucaucuuccuguucauccuccugcugugccucaucuuccugcuggugcuccuggacuaccagggcaugcugcccgugugcccgcucauccccgggagcacgaccaccaacaccggccccugcaagacgugcaccacccccgcccaggggaacuccauguucccgagcugcugcugcaccaagcccacggacggcaacugcacgugcauccccauccccuccagcugggcguucgccaaguaccugugggagugggccuccguccgcuucagcuggcugucccuccuggugccguucgugcagugguucgucgggcugagccccaccguguggcucuccgccaucuggaugaugugguacuggggccccagccuguacagcaucgugucccccuucaucccgcugcuccccaucuucuucugccugugggucuacaucugaggacuaguuauaagacugacuagcccgaugggccucccaacgggcccuccuccccuccuugcaccgagauuaauaaaaaaaaaaaaaaaaaaaaaaaaaaaaaaaaaaaaaaaaaaaaaaaaaaaaaaaaaaaaaaaaugcaucccccccccccccccccccccccccccccccaaaggcucuuuucagagccaccagaauu

SEQ ID NO: 1823 - RNA, 1240 nt, Artificial Sequence
  mRNA Design i-3 (A64-N5-C30-hSL-N5) comprising derived and/or modified sequence from Pb(ANKA)__XP_022712148.1__Pb-CSP (opt1)
aggagaaagcuuaccaugaagaagugcaccauccugguggucgccagccuccugcuggugaacucccuccugcccggcuacgggcagaacaagagcauccaggcccagcgcaaccugaacgagcucugcuacaacgagggcaacgacaacaagcuguaccacgugcugaacuccaagaacgggaagaucuacaaccggaacaccgucaaccgccuccuggcggacgccccggagggcaagaagaacgagaagaagaacgagaagaucgagcggaacaacaagcugaagcagccgcccccgccgcccaaccccaacgacccgccgccgcccaaccccaacgacccgcccccgcccaacccgaacgacccgcccccgccgaaccccaacgacccgcccccgcccaacgccaacgacccgcccccgcccaacgccaacgaccccgccccgcccaacgcgaacgaccccgccccgccgaacgccaacgaccccgccccgcccaacgcgaacgacccggccccgcccaacgccaacgacccgccgccgcccaaccccaacgacccggccccgcccaacgccaacgacccgccgcccccgaaccccaacgacccggcgccgccccaggggaacaacaacccgcagccccagccccgcccccagccgcagccccagccccagccccagccgcagccccagccccagccccagccgcggccccagccccagccccagccgggcggcaacaacaacaacaagaacaacaacaacgacgacagcuacauccccuccgccgagaagauccucgaguucgugaagcagauccgcgacagcaucacggaggaguggucccagugcaacgugaccugcgggagcggcauccggguccgcaagcggaagggguccaacaagaaggccgaggaccugacccuggaggacaucgacaccgagaucugcaagauggacaagugcagcuccaucuucaacaucgugagcaacucccucggcuucgugauccugcugguccucguguucuucaacugaggacuaguuauaagacugacuagcccgaugggccucccaacgggcccuccuccccuccuugcaccgagauuaauaaaaaaaaaaaaaaaaaaaaaaaaaaaaaaaaaaaaaaaaaaaaaaaaaaaaaaaaaaaaaaaaugcaucccccccccccccccccccccccccccccccaaaggcucuuuucagagccaccagaauu

SEQ ID NO: 1824 - RNA, 1405 nt, Artificial Sequence
  mRNA Design i-3 (A64-N5-C30-hSL-N5) comprising derived and/or modified sequence from Pb(ANKA)__XP_022712148.1__Pb-CSP_L(G4SG4)_TM domain HA (opt1)
aggagaaagcuuaccaugaagaagugcaccauccugguggucgccagccuccugcuggugaacucccuccugcccggcuacgggcagaacaagagcauccaggcccagcgcaaccugaacgagcucugcuacaacgagggcaacgacaacaagcuguaccacgugcugaacuccaagaacgggaagaucuacaaccggaacaccgucaaccgccuccuggcggacgccccggagggcaagaagaacgagaagaagaacgagaagaucgagcggaacaacaagcugaagcagccgcccccgccgcccaaccccaacgacccgccgccgcccaaccccaacgacccgcccccgcccaacccgaacgacccgcccccgccgaaccccaacgacccgcccccgcccaacgccaacgacccgcccccgcccaacgccaacgaccccgccccgcccaacgcgaacgaccccgccccgccgaacgccaacgaccccgccccgcccaacgcgaacgacccggccccgcccaacgccaacgacccgccgccgcccaaccccaacgacccggccccgcccaacgccaacgacccgccgcccccgaaccccaacgacccggcgccgccccaggggaacaacaacccgcagccccagccccgcccccagccgcagccccagccccagccccagccgcagccccagccccagccccagccgcggccccagccccagccccagccgggcggcaacaacaacaacaagaacaacaacaacgacgacagcuacauccccuccgccgagaagauccucgaguucgugaagcagauccgcgacagcaucacggaggaguggucccagugcaacgugaccugcgggagcggcauccggguccgcaagcggaagggguccaacaagaaggccgaggaccugacccuggaggacaucgacaccgagaucugcaagauggacaagugcagcuccaucuucaacaucgugagcaacucccucggcuucgugauccugcugguccucguguucuucaacggcgggggcgggagcggcgggggcggcaagcucgaguccacgcggaucuaccagauccuggcgaucuacagcaccgucgccagcucccuggugcucguggucagccugggggccaucuccuucuggaugugcagcaacggcucccugcagugccgcaucugcaucugaggacuaguuauaagacugacuagcccgaugggccucccaacgggcccuccuccccuccuugcaccgagauuaauaaaaaaaaaaaaaaaaaaaaaaaaaaaaaaaaaaaaaaaaaaaaaaaaaaaaaaaaaaaaaaaaugcaucccccccccccccccccccccccccccccccaaaggcucuuuucagagccaccagaauu

SEQ ID NO: 1825 - RNA, 1225 nt, Artificial Sequence
  mRNA Design i-3 (A64-N5-C30-hSL-N5) comprising derived and/or modified sequence from Pb(ANKA)__XP_022712148.1__HsALB_Pb-CSP(24-340) (opt1)
aggagaaagcuuaccaugaagugggugaccuucaucagccugcucuuccuguucuccagcgccuacucccagaacaagagcauccaggcccagcgcaaccugaacgagcucugcuacaacgagggcaacgacaacaagcuguaccacgugcugaacuccaagaacgggaagaucuacaaccggaacaccgucaaccgccuccuggcggacgccccggagggcaagaagaacgagaagaagaacgagaagaucgagcggaacaacaagcugaagcagccgcccccgccgcccaaccccaacgacccgccgccgcccaaccccaacgacccgcccccgcccaacccgaacgacccgcccccgccgaaccccaacgacccgcccccgcccaacgccaacgacccgcccccgcccaacgccaacgaccccgccccgcccaacgcgaacgaccccgccccgccgaacgccaacgaccccgccccgcccaacgcgaacgacccggccccgcccaacgccaacgacccgccgccgcccaaccccaacgacccggccccgcccaacgccaacgacccgccgcccccgaaccccaacgacccggcgccgccccaggggaacaacaacccgcagccccagccccgcccccagccgcagccccagccccagccccagccgcagccccagccccagccccagccgcggccccagccccagccccagccgggcggcaacaacaacaacaagaacaacaacaacgacgacagcuacauccccuccgccgagaagauccucgaguucgugaagcagauccgcgacagcaucacggaggaguggucccagugcaacgugaccugcgggagcggcauccggguccgcaagcggaagggguccaacaagaaggccgaggaccugacccuggaggacaucgacaccgagaucugcaagauggacaagugcagcuccaucuucaacaucgugagcaacucccucggcuucgugauccugcugguccucguguucuucaacugaggacuaguuauaagacugacuagcccgaugggccucccaacgggcccuccuccccuccuugcaccgagauuaauaaaaaaaaaaaaaaaaaaaaaaaaaaaaaaaaaaaaaaaaaaaaaaaaaaaaaaaaaaaaaaaaugcaucccccccccccccccccccccccccccccccaaaggcucuuuucagagccaccagaauu

SEQ ID NO: 1826 - RNA, 1243 nt, Artificial Sequence
  mRNA Design i-3 (A64-N5-C30-hSL-N5) comprising derived and/or modified sequence from Pb(ANKA)__XP_022712148.1__HsIns-iso1_Pb-CSP(24-340) (opt1)
aggagaaagcuuaccauggcccuguggaugcgccuccugccccugcucgcccugcuggcgcucuggggcccggaccccgccgccgcccagaacaagagcauccaggcccagcgcaaccugaacgagcucugcuacaacgagggcaacgacaacaagcuguaccacgugcugaacuccaagaacgggaagaucuacaaccggaacaccgucaaccgccuccuggcggacgccccggagggcaagaagaacgagaagaagaacgagaagaucgagcggaacaacaagcugaagcagccgcccccgccgcccaaccccaacgacccgccgccgcccaaccccaacgacccgcccccgcccaacccgaacgacccgcccccgccgaaccccaacgacccgcccccgcccaacgccaacgacccgcccccgcccaacgccaacgaccccgccccgcccaacgcgaacgaccccgccccgccgaacgccaacgaccccgccccgcccaacgcgaacgacccggccccgcccaacgccaacgacccgccgccgcccaaccccaacgacccggccccgcccaacgccaacgacccgccgcccccgaaccccaacgacccggcgccgccccaggggaacaacaacccgcagccccagccccgcccccagccgcagccccagccccagccccagccgcagccccagccccagccccagccgcggccccagccccagccccagccgggcggcaacaacaacaacaagaacaacaacaacgacgacagcuacauccccuccgccgagaagauccucgaguucgugaagcagauccgcgacagcaucacggaggaguggucccagugcaacgugaccugcgggagcggcauccggguccgcaagcggaagggguccaacaagaaggccgaggaccugacccuggaggacaucgacaccgagaucugcaagauggacaagugcagcuccaucuucaacaucgugagcaacucccucggcuucgugauccugcugguccucguguucuucaacugaggacuaguuauaagacugacuagcccgaugggccucccaacgggcccuccuccccuccuugcaccgagauuaauaaaaaaaaaaaaaaaaaaaaaaaaaaaaaaaaaaaaaaaaaaaaaaaaaaaaaaaaaaaaaaaaugcaucccccccccccccccccccccccccccccccaaaggcucuuuucagagccaccagaauu

SEQ ID NO: 1827 - RNA, 1222 nt, Artificial Sequence
  mRNA Design i-3 (A64-N5-C30-hSL-N5) comprising derived and/or modified sequence from Pb(ANKA)__XP_022712148.1__HsSPARC_Pb-CSP(24-340) (opt1)
aggagaaagcuuaccaugcgcgccuggaucuucuuccugcucugccuggccggccgggcccuggcccagaacaagagcauccaggcccagcgcaaccugaacgagcucugcuacaacgagggcaacgacaacaagcuguaccacgugcugaacuccaagaacgggaagaucuacaaccggaacaccgucaaccgccuccuggcggacgccccggagggcaagaagaacgagaagaagaacgagaagaucgagcggaacaacaagcugaagcagccgcccccgccgcccaaccccaacgacccgccgccgcccaaccccaacgacccgcccccgcccaacccgaacgacccgcccccgccgaaccccaacgacccgcccccgcccaacgccaacgacccgcccccgcccaacgccaacgaccccgccccgcccaacgcgaacgaccccgccccgccgaacgccaacgaccccgccccgcccaacgcgaacgacccggccccgcccaacgccaacgacccgccgccgcccaaccccaacgacccggccccgcccaacgccaacgacccgccgcccccgaaccccaacgacccggcgccgccccaggggaacaacaacccgcagccccagccccgcccccagccgcagccccagccccagccccagccgcagccccagccccagccccagccgcggccccagccccagccccagccgggcggcaacaacaacaacaagaacaacaacaacgacgacagcuacauccccuccgccgagaagauccucgaguucgugaagcagauccgcgacagcaucacggaggaguggucccagugcaacgugaccugcgggagcggcauccggguccgcaagcggaagggguccaacaagaaggccgaggaccugacccuggaggacaucgacaccgagaucugcaagauggacaagugcagcuccaucuucaacaucgugagcaacucccucggcuucgugauccugcugguccucguguucuucaacugaggacuaguuauaagacugacuagcccgaugggccucccaacgggcccuccuccccuccuugcaccgagauuaauaaaaaaaaaaaaaaaaaaaaaaaaaaaaaaaaaaaaaaaaaaaaaaaaaaaaaaaaaaaaaaaaugcaucccccccccccccccccccccccccccccccaaaggcucuuuucagagccaccagaauu

SEQ ID NO: 1828 - RNA, 1225 nt, Artificial Sequence
  mRNA Design i-3 (A64-N5-C30-hSL-N5) comprising derived and/or modified sequence from Pb(ANKA)__XP_022712148.1__IgE_Pb-CSP(24-340) (opt1)
aggagaaagcuuaccauggacuggaccuggauccuguuccucguggccgccgcgacccgcguccacagccagaacaagagcauccaggcccagcgcaaccugaacgagcucugcuacaacgagggcaacgacaacaagcuguaccacgugcugaacuccaagaacgggaagaucuacaaccggaacaccgucaaccgccuccuggcggacgccccggagggcaagaagaacgagaagaagaacgagaagaucgagcggaacaacaagcugaagcagccgcccccgccgcccaaccccaacgacccgccgccgcccaaccccaacgacccgcccccgcccaacccgaacgacccgcccccgccgaaccccaacgacccgcccccgcccaacgccaacgacccgcccccgcccaacgccaacgaccccgccccgcccaacgcgaacgaccccgccccgccgaacgccaacgaccccgccccgcccaacgcgaacgacccggccccgcccaacgccaacgacccgccgccgcccaaccccaacgacccggccccgcccaacgccaacgacccgccgcccccgaaccccaacgacccggcgccgccccaggggaacaacaacccgcagccccagccccgcccccagccgcagccccagccccagccccagccgcagccccagccccagccccagccgcggccccagccccagccccagccgggcggcaacaacaacaacaagaacaacaacaacgacgacagcuacauccccuccgccgagaagauccucgaguucgugaagcagauccgcgacagcaucacggaggaguggucccagugcaacgugaccugcgggagcggcauccggguccgcaagcggaagggguccaacaagaaggccgaggaccugacccuggaggacaucgacaccgagaucugcaagauggacaagugcagcuccaucuucaacaucgugagcaacucccucggcuucgugauccugcugguccucguguucuucaacugaggacuaguuauaagacugacuagcccgaugggccucccaacgggcccuccuccccuccuugcaccgagauuaauaaaaaaaaaaaaaaaaaaaaaaaaaaaaaaaaaaaaaaaaaaaaaaaaaaaaaaaaaaaaaaaaugcaucccccccccccccccccccccccccccccccaaaggcucuuuucagagccaccagaauu

SEQ ID NO: 1829 - RNA, 1411 nt, Artificial Sequence; identical to SEQ ID NO: 1793
  mRNA Design i-3 (A64-N5-C30-hSL-N5) comprising derived and/or modified sequence from Pf(3D7)__XP_001351122.1__Pf-CSP (opt1)

SEQ ID NO: 1830 - RNA, 1342 nt, Artificial Sequence; identical to SEQ ID NO: 1794
  mRNA Design i-3 (A64-N5-C30-hSL-N5) comprising derived and/or modified sequence from Pf(3D7)__XP_001351122.1__Pf-CSP(1-374) (opt1)

SEQ ID NO: 1831 - RNA, 1195 nt, Artificial Sequence; identical to SEQ ID NO: 1795
  mRNA Design i-3 (A64-N5-C30-hSL-N5) comprising derived and/or modified sequence from Pf(3D7)__XP_001351122.1__Pf-CSP(1-325) (opt1)

SEQ ID NO: 1832 - RNA, 1411 nt, Artificial Sequence
  mRNA Design i-3 (A64-N5-C30-hSL-N5) comprising derived and/or modified sequence from Pf(3D7)__XP_001351122.1__HsALB_Pf-CSP(19-397) (opt1)
aggagaaagcuuaccaugaagugggugaccuucaucagccuccuguuccuguucuccagcgccuacucccuguuccaggaguaccagugcuacggcagcuccagcaacacccgcguccucaacgagcugaacuacgacaacgccgggacgaaccuguacaacgagcucgagaugaacuacuacggcaagcaggagaacugguacucccugaagaagaacagccggucccugggggagaacgacgacggcaacaacgaggacaacgagaagcuccgcaagcccaagcacaagaagcugaagcagccggcggacgggaaccccgaccccaacgccaaccccaacguggacccgaacgccaaccccaacguggaccccaacgccaaccccaacgucgacccgaacgccaaccccaacgcgaaccccaacgccaaccccaacgccaacccgaacgccaaccccaacgcgaaccccaacgccaaccccaacgccaacccgaacgccaaccccaacgccaaccccaacgcgaaccccaacgccaacccgaacgccaaccccaacgccaaccccaacgccaaccccaacgcgaacccgaacgccaaccccaacguggaccccaacgccaaccccaacgccaacccgaacgccaaccccaacgcgaaccccaacgccaacccgaacgccaaccccaacgccaaccccaacgccaaccccaacgcgaacccgaacgccaaccccaacgccaaccccaacgccaaccccaacgcgaacccgaacgccaaccccaacgccaaccccaacgccaaccccaacgccaacccgaacgcgaaccccaacaagaacaaccagggcaacggccaggggcacaacaugcccaacgaccccaaccggaacguggacgagaacgccaacgccaacagcgccgucaagaacaacaacaacgaggagccguccgacaagcacaucaaggaguaccugaacaagauccagaacagccucuccaccgaguggagccccugcuccgugaccugcggcaacgggauccaggugcgcaucaagcccggcagcgccaacaagcccaaggacgagcuggacuacgcgaacgacaucgagaagaagaucugcaagauggagaagugcuccagcgucuucaacguggugaacuccagcaucgggcugaucaugguccucagcuuccuguuccugaacugaggacuaguuauaagacugacuagcccgaugggccucccaacgggcccuccuccccuccuugcaccgagauuaauaaaaaaaaaaaaaaaaaaaaaaaaaaaaaaaaaaaaaaaaaaaaaaaaaaaaaaaaaaaaaaaaugcaucccccccccccccccccccccccccccccccaaaggcucuuuucagagccaccagaauu

SEQ ID NO: 1833 - RNA, 1429 nt, Artificial Sequence
  mRNA Design i-3 (A64-N5-C30-hSL-N5) comprising derived and/or modified sequence from Pf(3D7)__XP_001351122.1__HsIns-iso1_Pf-CSP(19-397) (opt1)
aggagaaagcuuaccauggcccuguggaugcgccuccugccccugcucgcccugcuggcgcucuggggcccggaccccgccgccgcccuguuccaggaguaccagugcuacgggagcuccagcaacacccgggugcugaacgagcucaacuacgacaacgccggcaccaaccuguacaacgagcuggagaugaacuacuacgggaagcaggagaacugguacucccucaagaagaacagccgcucccugggcgagaacgacgacgggaacaacgaggacaacgagaagcugcggaagcccaagcacaagaagcucaagcagcccgcggacggcaacccggaccccaacgccaaccccaacgucgaccccaacgccaacccgaacguggaccccaacgccaaccccaacguggaccccaacgcgaacccgaacgccaaccccaacgccaaccccaacgccaaccccaacgccaacccgaacgcgaaccccaacgccaaccccaacgccaaccccaacgccaacccgaacgccaaccccaacgcgaaccccaacgccaaccccaacgccaacccgaacgccaaccccaacgccaaccccaacgcgaaccccaacgccaacccgaacgucgaccccaacgccaaccccaacgccaacccgaacgccaaccccaacgcgaaccccaacgccaaccccaacgccaacccgaacgccaaccccaacgcgaaccccaacgccaaccccaacgccaacccgaacgccaaccccaacgccaaccccaacgcgaaccccaacgccaacccgaacgccaaccccaacgccaaccccaacgccaaccccaacgcgaacccgaacaagaacaaccagggcaacgggcagggccacaacaugcccaacgaccccaaccgcaacguggacgagaacgccaacgccaacagcgccgugaagaacaacaacaacgaggagcccuccgacaagcacaucaaggaguaccugaacaagauccagaacagccuguccacggaguggagcccgugcuccgugaccugcgggaacggcauccagguccggaucaagcccgggagcgccaacaagcccaaggacgagcucgacuacgcgaacgacaucgagaagaagaucugcaagauggagaagugcuccagcguguucaacgucgugaacuccagcaucggccugaucauggugcuguccuuccucuuccugaacugaggacuaguuauaagacugacuagcccgaugggccucccaacgggcccuccuccccuccuugcaccgagauuaauaaaaaaaaaaaaaaaaaaaaaaaaaaaaaaaaaaaaaaaaaaaaaaaaaaaaaaaaaaaaaaaaugcaucccccccccccccccccccccccccccccccaaaggcucuuuucagagccaccagaauu

SEQ ID NO: 1834 - RNA, 1408 nt, Artificial Sequence
  mRNA Design i-3 (A64-N5-C30-hSL-N5) comprising derived and/or modified sequence from Pf(3D7)__XP_001351122.1__HsSPARC_Pf-CSP(19-397) (opt1)
aggagaaagcuuaccaugcgcgccuggaucuucuuccugcucugccuggccggccgggcgcuggcccucuuccaggaguaccagugcuacgggagcuccagcaacacccgcgugcugaacgagcugaacuacgacaacgccggcaccaaccucuacaacgagcuggagaugaacuacuacgggaagcaggagaacugguacucccugaagaagaacagccggucccucggcgagaacgacgacgggaacaacgaggacaacgagaagcugcgcaagcccaagcacaagaagcugaagcagccggccgacggcaaccccgaccccaacgccaaccccaacgucgacccgaacgcgaaccccaacguggaccccaacgccaaccccaacguggacccgaacgccaaccccaacgccaaccccaacgcgaaccccaacgccaacccgaacgccaaccccaacgccaaccccaacgccaaccccaacgcgaacccgaacgccaaccccaacgccaaccccaacgccaaccccaacgccaacccgaacgcgaaccccaacgccaaccccaacgccaaccccaacgccaacccgaacgccaaccccaacgucgaccccaacgcgaaccccaacgccaacccgaacgccaaccccaacgccaaccccaacgccaacccgaacgcgaaccccaacgccaaccccaacgccaaccccaacgccaacccgaacgcgaaccccaacgccaaccccaacgccaaccccaacgccaacccgaacgccaaccccaacgcgaaccccaacgccaaccccaacgccaacccgaacgccaaccccaacaagaacaaccagggcaacgggcagggccacaacaugcccaacgaccccaaccggaacguggacgagaacgccaacgcgaacagcgccgugaagaacaacaacaacgaggagccguccgacaagcacaucaaggaguaccucaacaagauccagaacagccuguccacggaguggagccccugcuccgugaccugcgggaacggcauccagguccgcaucaagcccgggagcgccaacaagcccaaggacgagcuggacuacgccaacgacaucgagaagaagaucugcaagauggagaagugcuccagcguguucaacgucgugaacuccagcaucggccucaucauggugcuguccuuccuguuccucaacugaggacuaguuauaagacugacuagcccgaugggccucccaacgggcccuccuccccuccuugcaccgagauuaauaaaaaaaaaaaaaaaaaaaaaaaaaaaaaaaaaaaaaaaaaaaaaaaaaaaaaaaaaaaaaaaaugcaucccccccccccccccccccccccccccccccaaaggcucuuuucagagccaccagaauu

SEQ ID NO: 1835 - RNA, 1411 nt, Artificial Sequence
  mRNA Design i-3 (A64-N5-C30-hSL-N5) comprising derived and/or modified sequence from Pf(3D7)__XP_001351122.1__IgE_Pf-CSP(19-397) (opt1)
aggagaaagcuuaccauggacuggaccuggauccuguuccucguggccgccgcgacccgcguccacagccuguuccaggaguaccagugcuacggcuccagcuccaacacgcgggugcugaacgagcucaacuacgacaacgccgggaccaaccuguacaacgagcuggagaugaacuacuacggcaagcaggagaacugguacagccucaagaagaacucccgcagccugggggagaacgacgacggcaacaacgaggacaacgagaagcugcggaagcccaagcacaagaagcucaagcagccggccgacgggaaccccgaccccaacgccaaccccaacguggacccgaacgccaaccccaacgucgaccccaacgcgaaccccaacguggacccgaacgccaaccccaacgccaaccccaacgccaaccccaacgcgaacccgaacgccaaccccaacgccaaccccaacgccaaccccaacgccaacccgaacgcgaaccccaacgccaaccccaacgccaaccccaacgccaacccgaacgccaaccccaacgcgaaccccaacgccaaccccaacgccaacccgaacgccaaccccaacguggaccccaacgccaaccccaacgcgaacccgaacgccaaccccaacgccaaccccaacgccaacccgaacgccaaccccaacgcgaaccccaacgccaaccccaacgccaacccgaacgccaaccccaacgcgaaccccaacgccaaccccaacgccaacccgaacgccaaccccaacgccaaccccaacgcgaaccccaacgccaacccgaacgccaaccccaacaagaacaaccagggcaacggccaggggcacaacaugcccaacgaccccaaccgcaacgucgacgagaacgccaacgccaacuccgcggugaagaacaacaacaacgaggagccgagcgacaagcacaucaaggaguaccugaacaagauccagaacucccugagcaccgaguggucccccugcagcgugaccugcggcaacgggauccagguccggaucaagcccggcuccgccaacaagcccaaggacgagcucgacuacgccaacgacaucgagaagaagaucugcaagauggagaagugcagcuccguguucaacguggucaacagcuccaucgggcugaucauggugcugagcuuccucuuccugaacugaggacuaguuauaagacugacuagcccgaugggccucccaacgggcccuccuccccuccuugcaccgagauuaauaaaaaaaaaaaaaaaaaaaaaaaaaaaaaaaaaaaaaaaaaaaaaaaaaaaaaaaaaaaaaaaaugcaucccccccccccccccccccccccccccccccaaaggcucuuuucagagccaccagaauu

SEQ ID NO: 1836 - RNA, 1576 nt, Artificial Sequence
  mRNA Design i-3 (A64-N5-C30-hSL-N5) comprising derived and/or modified sequence from Pf(3D7)__XP_001351122.1__Pf-CSP_L(G4SG4)_TM domain HA (opt1)
aggagaaagcuuaccaugaugcgcaagcuggccauccucagcguguccagcuuccuguucgucgaggcccuguuccaggaguaccagugcuacggcuccagcuccaacacccgggugcucaacgagcugaacuacgacaacgcggggaccaaccuguacaacgagcucgagaugaacuacuacggcaagcaggagaacugguacagccugaagaagaacucccgcagccugggggagaacgacgacggcaacaacgaggacaacgagaagcuccggaagcccaagcacaagaagcugaagcagccggccgacgggaaccccgaccccaacgccaaccccaacguggacccgaacgccaaccccaacgucgaccccaacgccaaccccaacguggacccgaacgcgaaccccaacgccaaccccaacgccaaccccaacgccaacccgaacgcgaaccccaacgccaaccccaacgccaaccccaacgccaacccgaacgccaaccccaacgcgaaccccaacgccaaccccaacgccaacccgaacgccaaccccaacgccaaccccaacgcgaaccccaacgccaacccgaacgccaaccccaacguggaccccaacgccaaccccaacgccaacccgaacgcgaaccccaacgccaaccccaacgccaacccgaacgccaaccccaacgccaaccccaacgcgaaccccaacgccaacccgaacgccaaccccaacgccaaccccaacgcgaaccccaacgccaacccgaacgccaaccccaacgccaaccccaacgccaaccccaacgcgaacccgaacgccaaccccaacaagaacaaccagggcaacggccaggggcacaacaugcccaacgaccccaaccgcaacgucgacgagaacgccaacgccaacuccgccgugaagaacaacaacaacgaggagccgagcgacaagcacaucaaggaguaccugaacaagauccagaacucccucagcacggaguggucccccugcagcgugaccugcggcaacgggauccagguccggaucaagcccggcuccgcgaacaagcccaaggacgagcuggacuacgccaacgacaucgagaagaagaucugcaagauggagaagugcagcuccguguucaacguggucaacagcuccaucgggcugaucauggugcucagcuuccuguuccugaacggcggcgggggcagcgggggcggcgggaagcucgaguccacccgcaucuaccagauccuggccaucuacagcaccguggccuccagccugguccucguggugucccugggcgccaucagcuucuggaugugcuccaacgggagccugcagugccggaucugcaucugaggacuaguuauaagacugacuagcccgaugggccucccaacgggcccuccuccccuccuugcaccgagauuaauaaaaaaaaaaaaaaaaaaaaaaaaaaaaaaaaaaaaaaaaaaaaaaaaaaaaaaaaaaaaaaaaugcaucccccccccccccccccccccccccccccccaaaggcucuuuucagagccaccagaauu

SEQ ID NO: 1837 - RNA, 1450 nt, Artificial Sequence
  mRNA Design i-3 (A64-N5-C30-hSL-N5) comprising derived and/or modified sequence from Pf(3D7)__XP_001351122.1__Pf-CSP(199-377)_L(PVTN)_HBsAg (opt1)
aggagaaagcuuaccauggaccccaacgccaacccgaacgccaaccccaacgcgaaccccaacgccaaccccaacgccaacccgaacgccaaccccaacgccaaccccaacgcgaaccccaacgccaacccgaacgccaaccccaacgccaaccccaacgcgaaccccaacgccaacccgaacgccaaccccaacgccaaccccaacgccaaccccaacgcgaacccgaacgccaaccccaacaagaacaaccagggcaacgggcagggccacaacaugcccaacgaccccaaccgcaacguggacgagaacgccaacgccaacagcgccgucaagaacaacaacaacgaggagccguccgacaagcacaucaaggaguaccugaacaagauccagaacagccucuccaccgaguggagccccugcuccgugaccugcgggaacggcauccaggugcggaucaagcccgggagcgcgaacaagcccaaggacgagcuggacuacgccaacgacaucgagaagaagaucugcaagauggagaagugcuccagcgucccggugacgaacauggagaacaucaccuccggcuuccugggcccccuccuggugcugcaggccggguucuuccuccugacccgcauccugaccaucccccagagccucgacuccugguggacgagccugaacuuccugggcgggucccccgucugccucggccagaacagccaguccccgaccagcaaccacucccccaccagcugcccgcccaucugccccggguaccgguggaugugccugcgccgguucaucaucuuccuguucauccuccugcugugccucaucuuccugcuggugcuccuggacuaccagggcaugcugcccgugugcccccucaucccgggcuccaccacgaccaacaccgggcccugcaagaccugcacgacccccgcccagggcaacagcauguuccccagcugcugcugcaccaagccgaccgacgggaacugcacgugcauccccauccccuccagcugggccuucgcgaaguaccugugggagugggccuccguccgcuucagcuggcugucccuccuggugcccuucgugcagugguucgucggccugagcccgaccguguggcucuccgccaucuggaugaugugguacuggggccccagccuguacuccaucgugagccccuucaucccccugcucccgaucuucuucugccugugggucuacaucugaggacuaguuauaagacugacuagcccgaugggccucccaacgggcccuccuccccuccuugcaccgagauuaauaaaaaaaaaaaaaaaaaaaaaaaaaaaaaaaaaaaaaaaaaaaaaaaaaaaaaaaaaaaaaaaaugcaucccccccccccccccccccccccccccccccaaaggcucuuuucagagccaccagaauu

SEQ ID NO: 1838 - RNA, 1492 nt, Artificial Sequence
  mRNA Design i-3 (A64-N5-C30-hSL-N5) comprising derived and/or modified sequence from Pf(3D7)__XP_001351122.1__Pf-CSP(199-387)_L(PVTN)_HBsAg (opt1)
aggagaaagcuuaccaugauggcccccgacccgaacgccaaccccaacgcgaaccccaacgccaaccccaacgccaacccgaacgccaaccccaacgccaaccccaacgcgaaccccaacgccaacccgaacgccaaccccaacgccaaccccaacgcgaaccccaacgccaacccgaacgccaaccccaacgccaaccccaacgccaaccccaacgcgaacccgaacgccaaccccaacgccaaccccaacaagaacaaccagggcaacgggcagggccacaacaugcccaacgacccgaaccgcaacguggacgagaacgccaacgccaacagcgcggucaagaacaacaacaacgaggagcccuccgacaagcacaucaaggaguaccugaacaagauccagaacagccucuccaccgaguggagccccugcuccgugaccugcgggaacggcauccaggugcggaucaagcccgggagcgccaacaagccgaaggacgagcuggacuacgccaacgacaucgagaagaagaucugcaagauggagaagugcuccagcgucuucaacguggugaacuccagcaucggccugggccccgucacgaacauggagaacaucaccuccggguuccucggcccccugcuggugcuccaggccggguucuuccugcugacccgcauccucaccaucccccagagccuggacuccugguggacgagccugaacuuccucggcggguccccggugugccugggccagaacagccagucccccaccagcaaccacucccccaccagcugcccgcccaucugccccggcuaccgguggaugugccugcgccgguucaucaucuuccucuucauccugcugcucugccugaucuuccugcucguccugcuggacuaccaggggaugcuccccgugugcccgcugauccccggcagcaccacgaccaacaccgggcccugcaagaccugcacgacccccgcccagggcaacuccauguucccgagcugcugcugcaccaagcccaccgacggcaacugcacgugcauccccauccccuccagcugggcguucgccaaguaccugugggagugggccuccgugcgcuucagcuggcucucccugcuggucccguucgugcagugguucguggggcucagccccaccgucuggcuguccgccaucuggaugaugugguacuggggccccagccuguacuccaucgugagccccuucaucccgcuccugcccaucuucuucugccuguggguguacaucugaggacuaguuauaagacugacuagcccgaugggccucccaacgggcccuccuccccuccuugcaccgagauuaauaaaaaaaaaaaaaaaaaaaaaaaaaaaaaaaaaaaaaaaaaaaaaaaaaaaaaaaaaaaaaaaaugcaucccccccccccccccccccccccccccccccaaaggcucuuuucagagccaccagaauu

SEQ ID NO: 1839 - RNA, 676 nt, Artificial Sequence
  mRNA Design i-3 (A64-N5-C30-hSL-N5) comprising derived and/or modified sequence from Pf(3D7)__XP_001351122.1__HsALB_Pf-CSP(19-152) (opt1)
aggagaaagcuuaccaugaagugggugaccuucaucagccuccuguuccuguucuccagcgccuacucccuguuccaggaguaccagugcuacggcagcuccagcaacacccgcguccucaacgagcugaacuacgacaacgccgggacgaaccuguacaacgagcucgagaugaacuacuacggcaagcaggagaacugguacucccugaagaagaacagccggucccugggggagaacgacgacggcaacaacgaggacaacgagaagcuccgcaagcccaagcacaagaagcugaagcagccggcggacgggaaccccgaccccaacgccaaccccaacguggacccgaacgccaaccccaacguggaccccaacgccaaccccaacgucgacccgaacgccaaccccaacgcgaaccccaacgccaaccccaacgccaacccgaacgccaaccccaacgcgaaccccugaggacuaguuauaagacugacuagcccgaugggccucccaacgggcccuccuccccuccuugcaccgagauuaauaaaaaaaaaaaaaaaaaaaaaaaaaaaaaaaaaaaaaaaaaaaaaaaaaaaaaaaaaaaaaaaaugcaucccccccccccccccccccccccccccccccaaaggcucuuuucagagccaccagaauu

SEQ ID NO: 1840 - RNA, 796 nt, Artificial Sequence
  mRNA Design i-3 (A64-N5-C30-hSL-N5) comprising derived and/or modified sequence from Pf(3D7)__XP_001351122.1__HsALB_Pf-CSP(19-192) (opt1)
aggagaaagcuuaccaugaagugggugaccuucaucagccuccuguuccuguucuccagcgccuacucccuguuccaggaguaccagugcuacggcagcuccagcaacacccgcguccucaacgagcugaacuacgacaacgccgggacgaaccuguacaacgagcucgagaugaacuacuacggcaagcaggagaacugguacucccugaagaagaacagccggucccugggggagaacgacgacggcaacaacgaggacaacgagaagcuccgcaagcccaagcacaagaagcugaagcagccggcggacgggaaccccgaccccaacgccaaccccaacguggacccgaacgccaaccccaacguggaccccaacgccaaccccaacgucgacccgaacgccaaccccaacgcgaaccccaacgccaaccccaacgccaacccgaacgccaaccccaacgcgaaccccaacgccaaccccaacgccaacccgaacgccaaccccaacgccaaccccaacgcgaaccccaacgccaacccgaacgccaaccccaacgccaaccccaacgccaaccccaacgcgaacccgugaggacuaguuauaagacugacuagcccgaugggccucccaacgggcccuccuccccuccuugcaccgagauuaauaaaaaaaaaaaaaaaaaaaaaaaaaaaaaaaaaaaaaaaaaaaaaaaaaaaaaaaaaaaaaaaaugcaucccccccccccccccccccccccccccccccaaaggcucuuuucagagccaccagaauu

SEQ ID NO: 1841 - RNA, 1036 nt, Artificial Sequence
  mRNA Design i-3 (A64-N5-C30-hSL-N5) comprising derived and/or modified sequence from Pf(3D7)__XP_001351122.1__HsALB_Pf-CSP(19-272) (opt1)
aggagaaagcuuaccaugaagugggugaccuucaucagccuccuguuccuguucuccagcgccuacucccuguuccaggaguaccagugcuacggcagcuccagcaacacccgcguccucaacgagcugaacuacgacaacgccgggacgaaccuguacaacgagcucgagaugaacuacuacggcaagcaggagaacugguacucccugaagaagaacagccggucccugggggagaacgacgacggcaacaacgaggacaacgagaagcuccgcaagcccaagcacaagaagcugaagcagccggcggacgggaaccccgaccccaacgccaaccccaacguggacccgaacgccaaccccaacguggaccccaacgccaaccccaacgucgacccgaacgccaaccccaacgcgaaccccaacgccaaccccaacgccaacccgaacgccaaccccaacgcgaaccccaacgccaaccccaacgccaacccgaacgccaaccccaacgccaaccccaacgcgaaccccaacgccaacccgaacgccaaccccaacgccaaccccaacgccaaccccaacgcgaacccgaacgccaaccccaacguggaccccaacgccaaccccaacgccaacccgaacgccaaccccaacgcgaaccccaacgccaacccgaacgccaaccccaacgccaaccccaacgccaaccccaacgcgaacccgaacgccaaccccaacgccaaccccaacgccaaccccaacgcgaacccgaacgccaaccccaacgccaaccccaacgccaaccccaacgccaacccgaacgcgaaccccugaggacuaguuauaagacugacuagcccgaugggccucccaacgggcccuccuccccuccuugcaccgagauuaauaaaaaaaaaaaaaaaaaaaaaaaaaaaaaaaaaaaaaaaaaaaaaaaaaaaaaaaaaaaaaaaaugcaucccccccccccccccccccccccccccccccaaaggcucuuuucagagccaccagaauu

SEQ ID NO: 1842 - RNA, 1198 nt, Artificial Sequence
  mRNA Design i-3 (A64-N5-C30-hSL-N5) comprising derived and/or modified sequence from Pf(3D7)__XP_001351122.1__HsALB_Pf-CSP(19-272)_L(AAY)_Pf-CSP(310-3 27)_L(AAY)_Pf-CSP(346-375) (opt1)
aggagaaagcuuaccaugaagugggugaccuucaucagccuccuguuccuguucuccagcgccuacucccuguuccaggaguaccagugcuacggcagcuccagcaacacccgcguccucaacgagcugaacuacgacaacgccgggacgaaccuguacaacgagcucgagaugaacuacuacggcaagcaggagaacugguacucccugaagaagaacagccggucccugggggagaacgacgacggcaacaacgaggacaacgagaagcuccgcaagcccaagcacaagaagcugaagcagccggcggacgggaaccccgaccccaacgccaaccccaacguggacccgaacgccaaccccaacguggaccccaacgccaaccccaacgucgacccgaacgccaaccccaacgcgaaccccaacgccaaccccaacgccaacccgaacgccaaccccaacgcgaaccccaacgccaaccccaacgccaacccgaacgccaaccccaacgccaaccccaacgcgaaccccaacgccaacccgaacgccaaccccaacgccaaccccaacgccaaccccaacgcgaacccgaacgccaaccccaacguggaccccaacgccaaccccaacgccaacccgaacgccaaccccaacgcgaaccccaacgccaacccgaacgccaaccccaacgccaaccccaacgccaaccccaacgcgaacccgaacgccaaccccaacgccaaccccaacgccaaccccaacgcgaacccgaacgccaaccccaacgccaaccccaacgccaaccccaacgccaacccgaacgcgaaccccgccgccuacgagcccagcgacaagcacaucaaggaguaccugaacaagauccagaacucccucgccgccuacaucaagcccggcagcgcgaacaagccgaaggacgagcuggacuacgccaacgacaucgagaagaagaucugcaagauggagaagugcuccugaggacuaguuauaagacugacuagcccgaugggccucccaacgggcccuccuccccuccuugcaccgagauuaauaaaaaaaaaaaaaaaaaaaaaaaaaaaaaaaaaaaaaaaaaaaaaaaaaaaaaaaaaaaaaaaaugcaucccccccccccccccccccccccccccccccaaaggcucuuuucagagccaccagaauu

SEQ ID NO: 1843 - RNA, 1159 nt, Artificial Sequence
  mRNA Design i-3 (A64-N5-C30-hSL-N5) comprising derived and/or modified sequence from Pf(3D7)__XP_001351122.1__HsALB_Pf-CSP(19-272)_L(AAY)_Pf-CSP(346-3 65)_L(AAY)_P2 (opt1)
aggagaaagcuuaccaugaagugggugaccuucaucagccuccuguuccuguucuccagcgccuacucccuguuccaggaguaccagugcuacggcagcuccagcaacacccgcguccucaacgagcugaacuacgacaacgccgggacgaaccuguacaacgagcucgagaugaacuacuacggcaagcaggagaacugguacucccugaagaagaacagccggucccugggggagaacgacgacggcaacaacgaggacaacgagaagcuccgcaagcccaagcacaagaagcugaagcagccggcggacgggaaccccgaccccaacgccaaccccaacguggacccgaacgccaaccccaacguggaccccaacgccaaccccaacgucgacccgaacgccaaccccaacgcgaaccccaacgccaaccccaacgccaacccgaacgccaaccccaacgcgaaccccaacgccaaccccaacgccaacccgaacgccaaccccaacgccaaccccaacgcgaaccccaacgccaacccgaacgccaaccccaacgccaaccccaacgccaaccccaacgcgaacccgaacgccaaccccaacguggaccccaacgccaaccccaacgccaacccgaacgccaaccccaacgcgaaccccaacgccaacccgaacgccaaccccaacgccaaccccaacgccaaccccaacgcgaacccgaacgccaaccccaacgccaaccccaacgccaaccccaacgcgaacccgaacgccaaccccaacgccaaccccaacgccaaccccaacgccaacccgaacgcgaaccccgccgccuacaucaagcccggcagcgccaacaagcccaaggacgagcuggacuacgccaacgacaucgaggcggccuaccaguacaucaaggccaacuccaaguucaucggcaucaccgagcucugaggacuaguuauaagacugacuagcccgaugggccucccaacgggcccuccuccccuccuugcaccgagauuaauaaaaaaaaaaaaaaaaaaaaaaaaaaaaaaaaaaaaaaaaaaaaaaaaaaaaaaaaaaaaaaaaugcaucccccccccccccccccccccccccccccccaaaggcucuuuucagagccaccagaauu

SEQ ID NO: 1844 - RNA, 1153 nt, Artificial Sequence
  mRNA Design i-3 (A64-N5-C30-hSL-N5) comprising derived and/or modified sequence from Pf(3D7)__XP_001351122.1__HsALB_Pf-CSP(19-272)_L(AAY)_Pf-CSP(346-3 65)_L(AAY)_PADRE (opt1)
aggagaaagcuuaccaugaagugggugaccuucaucagccuccuguuccuguucuccagcgccuacucccuguuccaggaguaccagugcuacggcagcuccagcaacacccgcguccucaacgagcugaacuacgacaacgccgggacgaaccuguacaacgagcucgagaugaacuacuacggcaagcaggagaacugguacucccugaagaagaacagccggucccugggggagaacgacgacggcaacaacgaggacaacgagaagcuccgcaagcccaagcacaagaagcugaagcagccggcggacgggaaccccgaccccaacgccaaccccaacguggacccgaacgccaaccccaacguggaccccaacgccaaccccaacgucgacccgaacgccaaccccaacgcgaaccccaacgccaaccccaacgccaacccgaacgccaaccccaacgcgaaccccaacgccaaccccaacgccaacccgaacgccaaccccaacgccaaccccaacgcgaaccccaacgccaacccgaacgccaaccccaacgccaaccccaacgccaaccccaacgcgaacccgaacgccaaccccaacguggaccccaacgccaaccccaacgccaacccgaacgccaaccccaacgcgaaccccaacgccaacccgaacgccaaccccaacgccaaccccaacgccaaccccaacgcgaacccgaacgccaaccccaacgccaaccccaacgccaaccccaacgcgaacccgaacgccaaccccaacgccaaccccaacgccaaccccaacgccaacccgaacgcgaaccccgccgccuacaucaagcccggcagcgccaacaagcccaaggacgagcuggacuacgccaacgacaucgaggcggccuacgccaaguucguggccgccuggacccucaaggcggccgccugaggacuaguuauaagacugacuagcccgaugggccucccaacgggcccuccuccccuccuugcaccgagauuaauaaaaaaaaaaaaaaaaaaaaaaaaaaaaaaaaaaaaaaaaaaaaaaaaaaaaaaaaaaaaaaaaugcaucccccccccccccccccccccccccccccccaaaggcucuuuucagagccaccagaauu

SEQ ID NO: 1845 - RNA, 1210 nt, Artificial Sequence
  mRNA Design i-3 (A64-N5-C30-hSL-N5) comprising derived and/or modified sequence from Pf(3D7)__XP_001351122.1__HsALB_Pf-CSP(19-272)_L(G4S)_Pf-CSP(310-3 27)_L(G4S)_Pf-CSP(346-375) (opt1)
aggagaaagcuuaccaugaagugggugaccuucaucagccuccuguuccuguucuccagcgccuacucccuguuccaggaguaccagugcuacggcagcuccagcaacacccgcguccucaacgagcugaacuacgacaacgccgggacgaaccuguacaacgagcucgagaugaacuacuacggcaagcaggagaacugguacucccugaagaagaacagccggucccugggggagaacgacgacggcaacaacgaggacaacgagaagcuccgcaagcccaagcacaagaagcugaagcagccggcggacgggaaccccgaccccaacgccaaccccaacguggacccgaacgccaaccccaacguggaccccaacgccaaccccaacgucgacccgaacgccaaccccaacgcgaaccccaacgccaaccccaacgccaacccgaacgccaaccccaacgcgaaccccaacgccaaccccaacgccaacccgaacgccaaccccaacgccaaccccaacgcgaaccccaacgccaacccgaacgccaaccccaacgccaaccccaacgccaaccccaacgcgaacccgaacgccaaccccaacguggaccccaacgccaaccccaacgccaacccgaacgccaaccccaacgcgaaccccaacgccaacccgaacgccaaccccaacgccaaccccaacgccaaccccaacgcgaacccgaacgccaaccccaacgccaaccccaacgccaaccccaacgcgaacccgaacgccaaccccaacgccaaccccaacgccaaccccaacgccaacccgaacgcgaaccccggcggcgggggcagcgagcccuccgacaagcacaucaaggaguaccugaacaagauccagaacagccucgggggcgggggcuccaucaagcccggcagcgccaacaagccgaaggacgagcuggacuacgccaacgacaucgagaagaagaucugcaagauggagaagugcuccugaggacuaguuauaagacugacuagcccgaugggccucccaacgggcccuccuccccuccuugcaccgagauuaauaaaaaaaaaaaaaaaaaaaaaaaaaaaaaaaaaaaaaaaaaaaaaaaaaaaaaaaaaaaaaaaaugcaucccccccccccccccccccccccccccccccaaaggcucuuuucagagccaccagaauu

SEQ ID NO: 1846 - RNA, 1195 nt, Artificial Sequence
  mRNA Design i-3 (A64-N5-C30-hSL-N5) comprising derived and/or modified sequence from Pf(3D7)__XP_001351122.1__HsALB_Pf-CSP(19-272)_L(G4S)_Pf-CSP(310-3 27)_Pf-CSP(346-375) (opt1)
aggagaaagcuuaccaugaagugggugaccuucaucagccuccuguuccuguucuccagcgccuacucccuguuccaggaguaccagugcuacggcagcuccagcaacacccgcguccucaacgagcugaacuacgacaacgccgggacgaaccuguacaacgagcucgagaugaacuacuacggcaagcaggagaacugguacucccugaagaagaacagccggucccugggggagaacgacgacggcaacaacgaggacaacgagaagcuccgcaagcccaagcacaagaagcugaagcagccggcggacgggaaccccgaccccaacgccaaccccaacguggacccgaacgccaaccccaacguggaccccaacgccaaccccaacgucgacccgaacgccaaccccaacgcgaaccccaacgccaaccccaacgccaacccgaacgccaaccccaacgcgaaccccaacgccaaccccaacgccaacccgaacgccaaccccaacgccaaccccaacgcgaaccccaacgccaacccgaacgccaaccccaacgccaaccccaacgccaaccccaacgcgaacccgaacgccaaccccaacguggaccccaacgccaaccccaacgccaacccgaacgccaaccccaacgcgaaccccaacgccaacccgaacgccaaccccaacgccaaccccaacgccaaccccaacgcgaacccgaacgccaaccccaacgccaaccccaacgccaaccccaacgcgaacccgaacgccaaccccaacgccaaccccaacgccaaccccaacgccaacccgaacgcgaaccccggcggcgggggcagcgagcccuccgacaagcacaucaaggaguaccugaacaagauccagaacagccucaucaagcccggguccgccaacaagccgaaggacgagcuggacuacgccaacgacaucgagaagaagaucugcaagauggagaagugcagcugaggacuaguuauaagacugacuagcccgaugggccucccaacgggcccuccuccccuccuugcaccgagauuaauaaaaaaaaaaaaaaaaaaaaaaaaaaaaaaaaaaaaaaaaaaaaaaaaaaaaaaaaaaaaaaaaugcaucccccccccccccccccccccccccccccccaaaggcucuuuucagagccaccagaauu

SEQ ID NO: 1847 - RNA, 1195 nt, Artificial Sequence
  mRNA Design i-3 (A64-N5-C30-hSL-N5) comprising derived and/or modified sequence from Pf(3D7)__XP_001351122.1__HsALB_Pf-CSP(19-325) (opt1)
aggagaaagcuuaccaugaagugggugaccuucaucagccuccuguuccuguucuccagcgccuacucccuguuccaggaguaccagugcuacggcagcuccagcaacacccgcguccucaacgagcugaacuacgacaacgccgggacgaaccuguacaacgagcucgagaugaacuacuacggcaagcaggagaacugguacucccugaagaagaacagccggucccugggggagaacgacgacggcaacaacgaggacaacgagaagcuccgcaagcccaagcacaagaagcugaagcagccggcggacgggaaccccgaccccaacgccaaccccaacguggacccgaacgccaaccccaacguggaccccaacgccaaccccaacgucgacccgaacgccaaccccaacgcgaaccccaacgccaaccccaacgccaacccgaacgccaaccccaacgcgaaccccaacgccaaccccaacgccaacccgaacgccaaccccaacgccaaccccaacgcgaaccccaacgccaacccgaacgccaaccccaacgccaaccccaacgccaaccccaacgcgaacccgaacgccaaccccaacguggaccccaacgccaaccccaacgccaacccgaacgccaaccccaacgcgaaccccaacgccaacccgaacgccaaccccaacgccaaccccaacgccaaccccaacgcgaacccgaacgccaaccccaacgccaaccccaacgccaaccccaacgcgaacccgaacgccaaccccaacgccaaccccaacgccaaccccaacgccaacccgaacgcgaaccccaacaagaacaaccagggcaacggccaggggcacaacaugcccaacgaccccaaccggaacguggacgagaacgccaacgccaacagcgccgucaagaacaacaacaacgaggagccguccgacaagcacaucaaggaguaccugaacaagauccagaacugaggacuaguuauaagacugacuagcccgaugggccucccaacgggcccuccuccccuccuugcaccgagauuaauaaaaaaaaaaaaaaaaaaaaaaaaaaaaaaaaaaaaaaaaaaaaaaaaaaaaaaaaaaaaaaaaugcaucccccccccccccccccccccccccccccccaaaggcucuuuucagagccaccagaauu

SEQ ID NO: 1848 - RNA, 1372 nt, Artificial Sequence
  mRNA Design i-3 (A64-N5-C30-hSL-N5) comprising derived and/or modified sequence from Pf(3D7)__XP_001351122.1__HsALB_Pf-CSP(19-384) (opt1)
aggagaaagcuuaccaugaagugggugaccuucaucagccuccuguuccuguucuccagcgccuacucccuguuccaggaguaccagugcuacggcagcuccagcaacacccgcguccucaacgagcugaacuacgacaacgccgggacgaaccuguacaacgagcucgagaugaacuacuacggcaagcaggagaacugguacucccugaagaagaacagccggucccugggggagaacgacgacggcaacaacgaggacaacgagaagcuccgcaagcccaagcacaagaagcugaagcagccggcggacgggaaccccgaccccaacgccaaccccaacguggacccgaacgccaaccccaacguggaccccaacgccaaccccaacgucgacccgaacgccaaccccaacgcgaaccccaacgccaaccccaacgccaacccgaacgccaaccccaacgcgaaccccaacgccaaccccaacgccaacccgaacgccaaccccaacgccaaccccaacgcgaaccccaacgccaacccgaacgccaaccccaacgccaaccccaacgccaaccccaacgcgaacccgaacgccaaccccaacguggaccccaacgccaaccccaacgccaacccgaacgccaaccccaacgcgaaccccaacgccaacccgaacgccaaccccaacgccaaccccaacgccaaccccaacgcgaacccgaacgccaaccccaacgccaaccccaacgccaaccccaacgcgaacccgaacgccaaccccaacgccaaccccaacgccaaccccaacgccaacccgaacgcgaaccccaacaagaacaaccagggcaacggccaggggcacaacaugcccaacgaccccaaccggaacguggacgagaacgccaacgccaacagcgccgucaagaacaacaacaacgaggagccguccgacaagcacaucaaggaguaccugaacaagauccagaacagccucuccaccgaguggagccccugcuccgugaccugcggcaacgggauccaggugcgcaucaagcccggcagcgccaacaagcccaaggacgagcuggacuacgcgaacgacaucgagaagaagaucugcaagauggagaagugcuccagcgucuucaacguggugaacuccagcugaggacuaguuauaagacugacuagcccgaugggccucccaacgggcccuccuccccuccuugcaccgagauuaauaaaaaaaaaaaaaaaaaaaaaaaaaaaaaaaaaaaaaaaaaaaaaaaaaaaaaaaaaaaaaaaaugcaucccccccccccccccccccccccccccccccaaaggcucuuuucagagccaccagaauu

SEQ ID NO: 1849 - RNA, 1510 nt, Artificial Sequence
  mRNA Design i-3 (A64-N5-C30-hSL-N5) comprising derived and/or modified sequence from Pf(3D7)__XP_001351122.1__HsALB_Pf-CSP(19-384)_TM domain HA (opt1)
aggagaaagcuuaccaugaagugggugaccuucaucagccuccuguuccuguucuccagcgccuacucccuguuccaggaguaccagugcuacggcagcuccagcaacacccgcguccucaacgagcugaacuacgacaacgccgggacgaaccuguacaacgagcucgagaugaacuacuacggcaagcaggagaacugguacucccugaagaagaacagccggucccugggggagaacgacgacggcaacaacgaggacaacgagaagcuccgcaagcccaagcacaagaagcugaagcagccggcggacgggaaccccgaccccaacgccaaccccaacguggacccgaacgccaaccccaacguggaccccaacgccaaccccaacgucgacccgaacgccaaccccaacgcgaaccccaacgccaaccccaacgccaacccgaacgccaaccccaacgcgaaccccaacgccaaccccaacgccaacccgaacgccaaccccaacgccaaccccaacgcgaaccccaacgccaacccgaacgccaaccccaacgccaaccccaacgccaaccccaacgcgaacccgaacgccaaccccaacguggaccccaacgccaaccccaacgccaacccgaacgccaaccccaacgcgaaccccaacgccaacccgaacgccaaccccaacgccaaccccaacgccaaccccaacgcgaacccgaacgccaaccccaacgccaaccccaacgccaaccccaacgcgaacccgaacgccaaccccaacgccaaccccaacgccaaccccaacgccaacccgaacgcgaaccccaacaagaacaaccagggcaacggccaggggcacaacaugcccaacgaccccaaccggaacguggacgagaacgccaacgccaacagcgccgucaagaacaacaacaacgaggagccguccgacaagcacaucaaggaguaccugaacaagauccagaacagccucuccaccgaguggagccccugcuccgugaccugcggcaacgggauccaggugcgcaucaagcccggcagcgccaacaagcccaaggacgagcuggacuacgcgaacgacaucgagaagaagaucugcaagauggagaagugcuccagcgucuucaacguggugaacuccagcaagcuggagagcacccggaucuaccagauccucgccaucuacuccacggucgccagcucccuggugcugguggucagccucggggccaucuccuucuggaugugcagcaacggcucccugcagugccgcaucugcaucugaggacuaguuauaagacugacuagcccgaugggccucccaacgggcccuccuccccuccuugcaccgagauuaauaaaaaaaaaaaaaaaaaaaaaaaaaaaaaaaaaaaaaaaaaaaaaaaaaaaaaaaaaaaaaaaaugcaucccccccccccccccccccccccccccccccaaaggcucuuuucagagccaccagaauu

SEQ ID NO: 1850 - RNA, 1222 nt, Artificial Sequence
  mRNA Design i-3 (A64-N5-C30-hSL-N5) comprising derived and/or modified sequence from Pf(3D7)__XP_001351122.1__HsALB_Pf-CSP(82-397) (opt1)
aggagaaagcuuaccaugaagugggugaccuucaucagccuccuguuccuguucuccagcgccuacuccgacaacgagaagcugcgcaagcccaagcacaagaagcucaagcagccggccgacggcaaccccgaccccaacgcgaaccccaacgucgacccgaacgccaaccccaacguggaccccaacgccaaccccaacguggacccgaacgccaaccccaacgccaaccccaacgcgaaccccaacgccaacccgaacgccaaccccaacgccaaccccaacgcgaaccccaacgccaacccgaacgccaaccccaacgccaaccccaacgccaaccccaacgcgaacccgaacgccaaccccaacgccaaccccaacgccaaccccaacgccaacccgaacgcgaaccccaacgucgaccccaacgccaaccccaacgccaacccgaacgccaaccccaacgccaaccccaacgcgaacccgaacgccaaccccaacgccaaccccaacgccaaccccaacgccaacccgaacgcgaaccccaacgccaaccccaacgccaaccccaacgccaacccgaacgcgaaccccaacgccaaccccaacgccaaccccaacgccaacccgaacgccaaccccaacaagaacaaccaggggaacggccaggggcacaacaugcccaacgaccccaaccggaacguggacgagaacgcgaacgccaacagcgccgugaagaacaacaacaacgaggagccguccgacaagcacaucaaggaguaccugaacaagauccagaacagccuguccaccgaguggagccccugcuccgucacgugcggcaacgggauccaggugcgcaucaagcccggcagcgccaacaagcccaaggacgagcucgacuacgccaacgacaucgagaagaagaucugcaagauggagaagugcuccagcguguucaacgucgugaacuccagcaucggccugaucauggugcuguccuuccucuuccugaacugaggacuaguuauaagacugacuagcccgaugggccucccaacgggcccuccuccccuccuugcaccgagauuaauaaaaaaaaaaaaaaaaaaaaaaaaaaaaaaaaaaaaaaaaaaaaaaaaaaaaaaaaaaaaaaaaugcaucccccccccccccccccccccccccccccccaaaggcucuuuucagagccaccagaauu

SEQ ID NO: 1851 - RNA, 574 nt, Artificial Sequence
  mRNA Design i-3 (A64-N5-C30-hSL-N5) comprising derived and/or modified sequence from Pf(3D7)__XP_001351122.1__HsALB_Pf-CSP(93-192) (opt1)
aggagaaagcuuaccaugaagugggugaccuucaucagccuccuguuccuguucuccagcgccuacuccaagcugaagcagcccgccgacggcaacccggaccccaacgcgaaccccaacgucgaccccaacgccaacccgaacguggaccccaacgccaaccccaacguggaccccaacgccaacccgaacgccaaccccaacgcgaaccccaacgccaaccccaacgccaacccgaacgccaaccccaacgcgaaccccaacgccaaccccaacgccaacccgaacgccaaccccaacgccaaccccaacgcgaaccccaacgccaacccgaacgccaaccccaacgccaaccccaacgccaaccccugaggacuaguuauaagacugacuagcccgaugggccucccaacgggcccuccuccccuccuugcaccgagauuaauaaaaaaaaaaaaaaaaaaaaaaaaaaaaaaaaaaaaaaaaaaaaaaaaaaaaaaaaaaaaaaaaugcaucccccccccccccccccccccccccccccccaaaggcucuuuucagagccaccagaauu

SEQ ID NO: 1852 - RNA, 814 nt, Artificial Sequence
  mRNA Design i-3 (A64-N5-C30-hSL-N5) comprising derived and/or modified sequence from Pf(3D7)__XP_001351122.1__HsALB_Pf-CSP(93-272) (opt1)
aggagaaagcuuaccaugaagugggugaccuucaucagccuccuguuccuguucuccagcgccuacuccaagcugaagcagcccgccgacggcaacccggaccccaacgcgaaccccaacgucgaccccaacgccaacccgaacguggaccccaacgccaaccccaacguggaccccaacgccaacccgaacgccaaccccaacgcgaaccccaacgccaaccccaacgccaacccgaacgccaaccccaacgcgaaccccaacgccaaccccaacgccaacccgaacgccaaccccaacgccaaccccaacgcgaaccccaacgccaacccgaacgccaaccccaacgccaaccccaacgccaaccccaacgcgaacccgaacgucgaccccaacgccaaccccaacgccaaccccaacgccaacccgaacgccaaccccaacgcgaaccccaacgccaacccgaacgccaaccccaacgccaaccccaacgccaaccccaacgcgaacccgaacgccaaccccaacgccaaccccaacgccaaccccaacgcgaacccgaacgccaaccccaacgccaaccccaacgccaaccccaacgccaacccgugaggacuaguuauaagacugacuagcccgaugggccucccaacgggcccuccuccccuccuugcaccgagauuaauaaaaaaaaaaaaaaaaaaaaaaaaaaaaaaaaaaaaaaaaaaaaaaaaaaaaaaaaaaaaaaaaugcaucccccccccccccccccccccccccccccccaaaggcucuuuucagagccaccagaauu

SEQ ID NO: 1853 - RNA, 1189 nt, Artificial Sequence
  mRNA Design i-3 (A64-N5-C30-hSL-N5) comprising derived and/or modified sequence from Pf(3D7)__XP_001351122.1__HsALB_Pf-CSP(93-397) (opt1)
aggagaaagcuuaccaugaagugggugaccuucaucagccuccuguuccuguucuccagcgccuacuccaagcugaagcagcccgccgacggcaacccggaccccaacgcgaaccccaacgucgaccccaacgccaacccgaacguggaccccaacgccaaccccaacguggaccccaacgccaacccgaacgccaaccccaacgcgaaccccaacgccaaccccaacgccaacccgaacgccaaccccaacgcgaaccccaacgccaaccccaacgccaacccgaacgccaaccccaacgccaaccccaacgcgaaccccaacgccaacccgaacgccaaccccaacgccaaccccaacgccaaccccaacgcgaacccgaacgucgaccccaacgccaaccccaacgccaaccccaacgccaacccgaacgccaaccccaacgcgaaccccaacgccaacccgaacgccaaccccaacgccaaccccaacgccaaccccaacgcgaacccgaacgccaaccccaacgccaaccccaacgccaaccccaacgcgaacccgaacgccaaccccaacgccaaccccaacgccaaccccaacgccaacccgaacaagaacaaccaggggaacggccaggggcacaacaugcccaacgaccccaaccgcaacguggacgagaacgcgaacgccaacagcgccgugaagaacaacaacaacgaggagcccuccgacaagcacaucaaggaguaccucaacaagauccagaacagccuguccaccgaguggagcccgugcuccgucacgugcggcaacgggauccaggugcggaucaagcccggcagcgccaacaagcccaaggacgagcuggacuacgccaacgacaucgagaagaagaucugcaagauggagaagugcuccagcguguucaacgucgugaacuccagcaucggccucaucauggugcuguccuuccuguuccucaacugaggacuaguuauaagacugacuagcccgaugggccucccaacgggcccuccuccccuccuugcaccgagauuaauaaaaaaaaaaaaaaaaaaaaaaaaaaaaaaaaaaaaaaaaaaaaaaaaaaaaaaaaaaaaaaaaugcaucccccccccccccccccccccccccccccccaaaggcucuuuucagagccaccagaauu

SEQ ID NO: 1854 - RNA, 559 nt, Artificial Sequence
  mRNA Design i-3 (A64-N5-C30-hSL-N5) comprising derived and/or modified sequence from Pf(3D7)__XP_001351122.1__HsALB_Pf-CSP(98-192) (opt1)
aggagaaagcuuaccaugaagugggugaccuucaucagccuccuguuccuguucuccagcgccuacuccgccgacggcaaccccgacccgaacgcgaaccccaacgucgaccccaacgccaaccccaacguggacccgaacgccaaccccaacguggaccccaacgccaaccccaacgccaacccgaacgcgaaccccaacgccaaccccaacgccaaccccaacgccaacccgaacgcgaaccccaacgccaaccccaacgccaaccccaacgccaacccgaacgccaaccccaacgcgaaccccaacgccaaccccaacgccaacccgaacgccaaccccaacgccaaccccugaggacuaguuauaagacugacuagcccgaugggccucccaacgggcccuccuccccuccuugcaccgagauuaauaaaaaaaaaaaaaaaaaaaaaaaaaaaaaaaaaaaaaaaaaaaaaaaaaaaaaaaaaaaaaaaaugcaucccccccccccccccccccccccccccccccaaaggcucuuuucagagccaccagaauu

SEQ ID NO: 1855 - RNA, 799 nt, Artificial Sequence
  mRNA Design i-3 (A64-N5-C30-hSL-N5) comprising derived and/or modified sequence from Pf(3D7)__XP_001351122.1__HsALB_Pf-CSP(98-272) (opt1)
aggagaaagcuuaccaugaagugggugaccuucaucagccuccuguuccuguucuccagcgccuacuccgccgacggcaaccccgacccgaacgcgaaccccaacgucgaccccaacgccaaccccaacguggacccgaacgccaaccccaacguggaccccaacgccaaccccaacgccaacccgaacgcgaaccccaacgccaaccccaacgccaaccccaacgccaacccgaacgcgaaccccaacgccaaccccaacgccaaccccaacgccaacccgaacgccaaccccaacgcgaaccccaacgccaaccccaacgccaacccgaacgccaaccccaacgccaaccccaacgcgaaccccaacgucgacccgaacgccaaccccaacgccaaccccaacgccaaccccaacgccaacccgaacgcgaaccccaacgccaaccccaacgccaacccgaacgccaaccccaacgccaaccccaacgcgaaccccaacgccaacccgaacgccaaccccaacgccaaccccaacgcgaaccccaacgccaacccgaacgccaaccccaacgccaaccccaacgccaaccccugaggacuaguuauaagacugacuagcccgaugggccucccaacgggcccuccuccccuccuugcaccgagauuaauaaaaaaaaaaaaaaaaaaaaaaaaaaaaaaaaaaaaaaaaaaaaaaaaaaaaaaaaaaaaaaaaugcaucccccccccccccccccccccccccccccccaaaggcucuuuucagagccaccagaauu

SEQ ID NO: 1856 - RNA, 1105 nt, Artificial Sequence
  mRNA Design i-3 (A64-N5-C30-hSL-N5) comprising derived and/or modified sequence from Pf(3D7)__XP_001351122.1__HsALB_Pf-CSP(98-374) (opt1)
aggagaaagcuuaccaugaagugggugaccuucaucagccuccuguuccuguucuccagcgccuacuccgccgacggcaaccccgacccgaacgcgaaccccaacgucgaccccaacgccaaccccaacguggacccgaacgccaaccccaacguggaccccaacgccaaccccaacgccaacccgaacgcgaaccccaacgccaaccccaacgccaaccccaacgccaacccgaacgcgaaccccaacgccaaccccaacgccaaccccaacgccaacccgaacgccaaccccaacgcgaaccccaacgccaaccccaacgccaacccgaacgccaaccccaacgccaaccccaacgcgaaccccaacgucgacccgaacgccaaccccaacgccaaccccaacgccaaccccaacgccaacccgaacgcgaaccccaacgccaaccccaacgccaacccgaacgccaaccccaacgccaaccccaacgcgaaccccaacgccaacccgaacgccaaccccaacgccaaccccaacgcgaaccccaacgccaacccgaacgccaaccccaacgccaaccccaacgccaaccccaacaagaacaaccaggggaacggccaggggcacaacaugccgaacgaccccaaccgcaacguggacgagaacgcgaacgccaacagcgccgugaagaacaacaacaacgaggagcccuccgacaagcacaucaaggaguaccugaacaagauccagaacagccucuccaccgaguggagccccugcuccgucacgugcggcaacgggauccaggugcggaucaagccgggcagcgccaacaagcccaaggacgagcuggacuacgccaacgacaucgagaagaagaucugcaagauggagaagugcugaggacuaguuauaagacugacuagcccgaugggccucccaacgggcccuccuccccuccuugcaccgagauuaauaaaaaaaaaaaaaaaaaaaaaaaaaaaaaaaaaaaaaaaaaaaaaaaaaaaaaaaaaaaaaaaaugcaucccccccccccccccccccccccccccccccaaaggcucuuuucagagccaccagaauu

SEQ ID NO: 1857 - RNA, 1174 nt, Artificial Sequence
  mRNA Design i-3 (A64-N5-C30-hSL-N5) comprising derived and/or modified sequence from Pf(3D7)__XP_001351122.1__HsALB_Pf-CSP(98-397) (opt1)
aggagaaagcuuaccaugaagugggugaccuucaucagccuccuguuccuguucuccagcgccuacuccgccgacggcaaccccgacccgaacgcgaaccccaacgucgaccccaacgccaaccccaacguggacccgaacgccaaccccaacguggaccccaacgccaaccccaacgccaacccgaacgcgaaccccaacgccaaccccaacgccaaccccaacgccaacccgaacgcgaaccccaacgccaaccccaacgccaaccccaacgccaacccgaacgccaaccccaacgcgaaccccaacgccaaccccaacgccaacccgaacgccaaccccaacgccaaccccaacgcgaaccccaacgucgacccgaacgccaaccccaacgccaaccccaacgccaaccccaacgccaacccgaacgcgaaccccaacgccaaccccaacgccaacccgaacgccaaccccaacgccaaccccaacgcgaaccccaacgccaacccgaacgccaaccccaacgccaaccccaacgcgaaccccaacgccaacccgaacgccaaccccaacgccaaccccaacgccaaccccaacaagaacaaccaggggaacggccaggggcacaacaugccgaacgaccccaaccgcaacguggacgagaacgcgaacgccaacagcgccgugaagaacaacaacaacgaggagcccuccgacaagcacaucaaggaguaccugaacaagauccagaacagccucuccaccgaguggagccccugcuccgucacgugcggcaacgggauccaggugcggaucaagccgggcagcgccaacaagcccaaggacgagcuggacuacgccaacgacaucgagaagaagaucugcaagauggagaagugcuccagcguguucaacgucgugaacuccagcaucggccugaucauggugcucuccuuccuguuccugaacugaggacuaguuauaagacugacuagcccgaugggccucccaacgggcccuccuccccuccuugcaccgagauuaauaaaaaaaaaaaaaaaaaaaaaaaaaaaaaaaaaaaaaaaaaaaaaaaaaaaaaaaaaaaaaaaaugcaucccccccccccccccccccccccccccccccaaaggcucuuuucagagccaccagaauu

SEQ ID NO: 1858 - RNA, 1501 nt, Artificial Sequence
  mRNA Design i-3 (A64-N5-C30-hSL-N5) comprising derived and/or modified sequence from Pf(3D7)__XP_001351122.1__HsALB_Pf-CSP(199-377)_L(PVTN)_HBsAg (opt1)
aggagaaagcuuaccaugaagugggugaccuucaucagccuccuguuccuguucuccagcgccuacuccgaccccaacgccaacccgaacgcgaaccccaacgccaaccccaacgccaaccccaacgccaacccgaacgccaaccccaacgcgaaccccaacgccaaccccaacgccaacccgaacgccaaccccaacgcgaaccccaacgccaaccccaacgccaacccgaacgccaaccccaacgccaaccccaacgcgaaccccaacgccaacccgaacgccaaccccaacaagaacaaccagggcaacgggcagggccacaacaugcccaacgaccccaaccgcaacgucgacgagaacgccaacgccaacagcgcggugaagaacaacaacaacgaggagccguccgacaagcacaucaaggaguaccugaacaagauccagaacagccucuccaccgaguggagccccugcuccgugaccugcgggaacggcauccagguccggaucaagcccgggagcgccaacaagcccaaggacgagcuggacuacgccaacgacaucgagaagaagaucugcaagauggagaagugcuccagcgugccggugaccaacauggagaacaucaccuccggcuuccugggcccccuccugguccugcaggccggguucuuccuccugacccgcauccugacgaucccccagagccucgacuccugguggaccagccugaacuuccugggcgggucccccgugugccucggccagaacagccaguccccgaccagcaaccacagccccaccuccugcccgcccaucugccccggguaccgguggaugugccugcgccgguucaucaucuuccuguucauccuccugcugugccucaucuuccugcuggugcuccuggacuaccagggcaugcugcccgucugcccccucaucccgggcagcacgaccaccaacaccgggcccugcaagacgugcaccacccccgcccagggcaacuccauguuccccagcugcugcugcaccaagccgacggacgggaacugcacgugcauccccauccccuccagcugggcguucgccaaguaccugugggagugggccuccgugcgcuucagcuggcugucccuccuggugcccuucguccagugguucgugggccugagcccgaccguguggcucuccgccaucuggaugaugugguacuggggccccagccuguacuccaucgucagccccuucaucccccugcucccgaucuucuucugccuguggguguacaucugaggacuaguuauaagacugacuagcccgaugggccucccaacgggcccuccuccccuccuugcaccgagauuaauaaaaaaaaaaaaaaaaaaaaaaaaaaaaaaaaaaaaaaaaaaaaaaaaaaaaaaaaaaaaaaaaugcaucccccccccccccccccccccccccccccccaaaggcucuuuucagagccaccagaauu

SEQ ID NO: 1859 - RNA, 1240 nt, Artificial Sequence
  mRNA Design i-3 (A64-N5-C30-hSL-N5) comprising derived and/or modified sequence from Pb(ANKA)__XP_022712148.1__Pb-CSP (opt1)
aggagaaagcuuaccaugaagaagugcaccauccugguggucgccagccuccugcuggugaacucccuccugcccggcuacgggcagaacaagagcauccaggcccagcgcaaccugaacgagcucugcuacaacgagggcaacgacaacaagcuguaccacgugcugaacuccaagaacgggaagaucuacaaccggaacaccgucaaccgccuccuggcggacgccccggagggcaagaagaacgagaagaagaacgagaagaucgagcggaacaacaagcugaagcagcccccccccccgcccaaccccaacgaccccccgccccccaaccccaacgacccgcccccccccaacccgaacgaccccccccccccgaaccccaacgacccccccccgcccaacgccaacgacccccccccgcccaacgccaacgaccccgccccgcccaacgcgaacgaccccgcccccccgaacgccaacgaccccgccccccccaacgcgaacgacccggccccccccaacgccaacgaccccccgccccccaaccccaacgacccggccccccccaacgccaacgaccccccgccccccaaccccaacgacccggcgcccccccaggggaacaacaacccgcagccccagccccgcccccagccgcagccccagccccagccccagccgcagccccagccccagccccagccgcggccccagccccagccccagccgggcggcaacaacaacaacaagaacaacaacaacgacgacagcuacauccccuccgccgagaagauccucgaguucgugaagcagauccgcgacagcaucacggaggaguggucccagugcaacgugaccugcgggagcggcauccggguccgcaagcggaagggguccaacaagaaggccgaggaccugacccuggaggacaucgacaccgagaucugcaagauggacaagugcagcuccaucuucaacaucgugagcaacucccucggcuucgugauccugcugguccucguguucuucaacugaggacuaguuauaagacugacuagcccgaugggccucccaacgggcccuccuccccuccuugcaccgagauuaauaaaaaaaaaaaaaaaaaaaaaaaaaaaaaaaaaaaaaaaaaaaaaaaaaaaaaaaaaaaaaaaaugcaucccccccccccccccccccccccccccccccaaaggcucuuuucagagccaccagaauu

SEQ ID NO: 1860 - RNA, 1405 nt, Artificial Sequence
  mRNA Design i-3 (A64-N5-C30-hSL-N5) comprising derived and/or modified sequence from Pb(ANKA)__XP_022712148.1__Pb-CSP_L(G4SG4)_TM domain HA (opt1)
aggagaaagcuuaccaugaagaagugcaccauccugguggucgccagccuccugcuggugaacucccuccugcccggcuacgggcagaacaagagcauccaggcccagcgcaaccugaacgagcucugcuacaacgagggcaacgacaacaagcuguaccacgugcugaacuccaagaacgggaagaucuacaaccggaacaccgucaaccgccuccuggcggacgccccggagggcaagaagaacgagaagaagaacgagaagaucgagcggaacaacaagcugaagcagcccccccccccgcccaaccccaacgaccccccgccccccaaccccaacgacccgcccccccccaacccgaacgaccccccccccccgaaccccaacgacccccccccgcccaacgccaacgacccccccccgcccaacgccaacgaccccgccccgcccaacgcgaacgaccccgcccccccgaacgccaacgaccccgccccccccaacgcgaacgacccggccccccccaacgccaacgaccccccgccccccaaccccaacgacccggccccccccaacgccaacgaccccccgccccccaaccccaacgacccggcgcccccccaggggaacaacaacccgcagccccagccccgcccccagccgcagccccagccccagccccagccgcagccccagccccagccccagccgcggccccagccccagccccagccgggcggcaacaacaacaacaagaacaacaacaacgacgacagcuacauccccuccgccgagaagauccucgaguucgugaagcagauccgcgacagcaucacggaggaguggucccagugcaacgugaccugcgggagcggcauccggguccgcaagcggaagggguccaacaagaaggccgaggaccugacccuggaggacaucgacaccgagaucugcaagauggacaagugcagcuccaucuucaacaucgugagcaacucccucggcuucgugauccugcugguccucguguucuucaacgggggcggcgggagcggcgggggcggcaagcuggaguccacgcgcaucuaccagauccuggccaucuacagcaccguggccuccagccucguccugguggugucccugggggcgaucagcuucuggaugugcagcaacggcucccuccagugccggaucugcaucugaggacuaguuauaagacugacuagcccgaugggccucccaacgggcccuccuccccuccuugcaccgagauuaauaaaaaaaaaaaaaaaaaaaaaaaaaaaaaaaaaaaaaaaaaaaaaaaaaaaaaaaaaaaaaaaaugcaucccccccccccccccccccccccccccccccaaaggcucuuuucagagccaccagaauu

SEQ ID NO: 1861 - RNA, 1225 nt, Artificial Sequence
  mRNA Design i-3 (A64-N5-C30-hSL-N5) comprising derived and/or modified sequence from Pb(ANKA)__XP_022712148.1__HsALB_Pb-CSP(24-340) (opt1)
aggagaaagcuuaccaugaagugggugaccuucaucagccugcucuuccuguucuccagcgccuacucccagaacaagagcauccaggcccagcgcaaccugaacgagcucugcuacaacgagggcaacgacaacaagcuguaccacguccugaacuccaagaacgggaagaucuacaaccggaacaccgugaaccgccuccuggcggacgcccccgagggcaagaagaacgagaagaagaacgagaagaucgagcggaacaacaagcugaagcagccgcccccccccccgaaccccaacgacccccccccgcccaaccccaacgaccccccgccccccaaccccaacgacccgcccccccccaacccgaacgaccccccccccccgaacgccaacgaccccccccccccgaacgccaacgaccccgcccccccgaacgcgaacgaccccgccccccccaacgccaacgacccggccccccccaacgcgaacgaccccgccccgcccaacgccaacgacccccccccgcccaaccccaacgaccccgccccgcccaacgccaacgacccccccccgcccaaccccaacgaccccgcgccgccccaggggaacaacaacccccagccgcagccccgcccccagccccagccgcagccccagccccagccccagccgcagccccagccccagccccggccgcagccccagccccagcccggcgggaacaacaacaacaagaacaacaacaacgacgacagcuacaucccguccgccgagaagauccucgaguucgugaagcagauccgcgacagcaucacggaggaguggucccagugcaacgucaccugcggcagcggcauccgggugcgcaagcggaagggguccaacaagaaggccgaggaccugacccuggaggacaucgacaccgagaucugcaagauggacaagugcagcuccaucuucaacaucgugagcaacucccucggcuucgucauccugcuggugcucguguucuucaacugaggacuaguuauaagacugacuagcccgaugggccucccaacgggcccuccuccccuccuugcaccgagauuaauaaaaaaaaaaaaaaaaaaaaaaaaaaaaaaaaaaaaaaaaaaaaaaaaaaaaaaaaaaaaaaaaugcaucccccccccccccccccccccccccccccccaaaggcucuuuucagagccaccagaauu

SEQ ID NO: 1862 - RNA, 1243 nt, Artificial Sequence
  mRNA Design i-3 (A64-N5-C30-hSL-N5) comprising derived and/or modified sequence from Pb(ANKA)__XP_022712148.1__HsIns-iso1_Pb-CSP(24-340) (opt1)
aggagaaagcuuaccauggcccuguggaugcgccuccugccccugcucgcccugcuggcgcucuggggcccggaccccgccgccgcccagaacaagagcauccaggcccagcggaaccugaacgagcugugcuacaacgaggggaacgacaacaagcucuaccacgugcugaacuccaagaacggcaagaucuacaaccgcaacaccgucaaccggcugcucgcggacgcccccgaggggaagaagaacgagaagaagaacgagaagaucgagcgcaacaacaagcugaagcagcccccgcccccccccaacccgaacgaccccccccccccgaaccccaacgacccccccccgcccaaccccaacgaccccccgccccccaaccccaacgacccgcccccccccaacgccaacgacccgccccccccgaacgccaacgaccccgcgccccccaacgccaacgacccggccccccccaacgccaacgaccccgccccgcccaacgcgaacgaccccgcccccccgaacgccaacgaccccccccccccgaaccccaacgaccccgcccccccgaacgccaacgaccccccccccccgaaccccaacgaccccgcgccgccccagggcaacaacaacccccagccccagccgcggccccagccccagccccagccgcagccccagccccagccccagccgcagccccagccccgcccccagccgcagccccagcccgggggcaacaacaacaacaagaacaacaacaacgacgacagcuacauccccuccgccgagaagauccuggaguucgugaagcagauccgggacagcaucaccgaggaguggucccagugcaacgugacgugcggcagcgggauccgcguccggaagcgcaagggcuccaacaagaaggccgaggaccucacccuggaggacaucgacaccgagaucugcaagauggacaagugcagcuccaucuucaacaucgugagcaacucccugggguucgugauccuccugguccugguguucuucaacugaggacuaguuauaagacugacuagcccgaugggccucccaacgggcccuccuccccuccuugcaccgagauuaauaaaaaaaaaaaaaaaaaaaaaaaaaaaaaaaaaaaaaaaaaaaaaaaaaaaaaaaaaaaaaaaaugcaucccccccccccccccccccccccccccccccaaaggcucuuuucagagccaccagaauu

SEQ ID NO: 1863 - RNA, 1222 nt, Artificial Sequence
  mRNA Design i-3 (A64-N5-C30-hSL-N5) comprising derived and/or modified sequence from Pb(ANKA)__XP_022712148.1__HsSPARC_Pb-CSP(24-340) (opt1)
aggagaaagcuuaccaugcgcgccuggaucuucuuccugcucugccuggccggccgggcgcuggcccagaacaagagcauccaggcccagcgcaaccucaacgagcugugcuacaacgaggggaacgacaacaagcuguaccacgugcucaacuccaagaacggcaagaucuacaaccggaacaccgucaaccgccugcuggccgacgcccccgaggggaagaagaacgagaagaagaacgagaagaucgagcggaacaacaagcucaagcagccgcccccccccccgaaccccaacgacccccccccgcccaaccccaacgaccccccgccccccaaccccaacgacccgcccccccccaacccgaacgaccccccccccccgaacgcgaacgaccccccccccccgaacgccaacgaccccgcccccccgaacgccaacgaccccgcgccccccaacgccaacgacccggccccccccaacgccaacgaccccgccccgcccaacgcgaacgacccccccccgcccaaccccaacgaccccgccccgcccaacgccaacgacccccccccgcccaaccccaacgaccccgccccgccccagggcaacaacaacccccagccgcagccccgcccccagccccagccgcagccccagccccagccccagccgcagccccagccccagccccggccgcagccccagccccagcccgggggcaacaacaacaacaagaacaacaacaacgacgacagcuacaucccguccgccgagaagauccuggaguucgugaagcagauccgcgacagcaucaccgaggaguggucccagugcaacgugacgugcggcagcgggauccggguccgcaagcggaagggcuccaacaagaaggcggaggaccugacccucgaggacaucgacaccgagaucugcaagauggacaagugcagcuccaucuucaacaucgugagcaacucccugggguucgugauccugcucguccugguguucuucaacugaggacuaguuauaagacugacuagcccgaugggccucccaacgggcccuccuccccuccuugcaccgagauuaauaaaaaaaaaaaaaaaaaaaaaaaaaaaaaaaaaaaaaaaaaaaaaaaaaaaaaaaaaaaaaaaaugcaucccccccccccccccccccccccccccccccaaaggcucuuuucagagccaccagaauu

SEQ ID NO: 1864 - RNA, 1225 nt, Artificial Sequence
  mRNA Design i-3 (A64-N5-C30-hSL-N5) comprising derived and/or modified sequence from Pb(ANKA)__XP_022712148.1__IgE_Pb-CSP(24-340) (opt1)
aggagaaagcuuaccauggacuggaccuggauccuguuccucguggccgccgcgacccgcguccacagccagaacaaguccauccaggcccagcggaaccugaacgagcugugcuacaacgagggcaacgacaacaagcucuaccacgugcugaacagcaagaacgggaagaucuacaaccgcaacacggugaaccggcugcucgccgacgcccccgagggcaagaagaacgagaagaagaacgagaagaucgagcgcaacaacaagcugaagcagccgcccccccccccgaaccccaacgacccccccccgcccaaccccaacgaccccccgccccccaaccccaacgacccgcccccccccaacccgaacgaccccccccccccgaacgccaacgaccccccccccccgaacgcgaacgaccccgcccccccgaacgccaacgaccccgccccccccaacgcgaacgacccggccccccccaacgccaacgaccccgccccgcccaacgccaacgacccccccccgcccaaccccaacgaccccgcgccgcccaacgccaacgacccccccccgcccaaccccaacgaccccgccccgccccaggggaacaacaacccccagccgcagccccggccccagccccagccgcagccccagccccagccccagccgcagccccagccccagccccgcccgcagccccagccccagcccggcgggaacaacaacaacaagaacaacaacaacgacgacuccuacaucccgagcgccgagaagauccuggaguucgucaagcagauccgggacuccaucaccgaggaguggagccagugcaacgugaccugcggcuccggcauccgcgugcggaagcgcaaggggagcaacaagaaggccgaggaccucacccuggaggacaucgacacggagaucugcaagauggacaagugcuccagcaucuucaacaucgucuccaacagccugggcuucgugauccuccuggugcuggucuucuucaacugaggacuaguuauaagacugacuagcccgaugggccucccaacgggcccuccuccccuccuugcaccgagauuaauaaaaaaaaaaaaaaaaaaaaaaaaaaaaaaaaaaaaaaaaaaaaaaaaaaaaaaaaaaaaaaaaugcaucccccccccccccccccccccccccccccccaaaggcucuuuucagagccaccagaauu

SEQ ID NO: 1865 - RNA, 1411 nt, Artificial Sequence
  mRNA Design i-3 (A64-N5-C30-hSL-N5) comprising derived and/or modified sequence from Pf(3D7)__XP_001351122.1__Pf-CSP (opt2)
aggagaaagcuuaccaugaugcgcaagcucgccauccucuccgucuccuccuuccucuucgucgaggcccucuuccaggaguaccagugcuacggcuccuccuccaacacccgcguccucaacgagcucaacuacgacaacgccggcaccaaccucuacaacgagcucgagaugaacuacuacggcaagcaggagaacugguacucccucaagaagaacucccgcucccucggcgagaacgacgacggcaacaacgaggacaacgagaagcuccgcaagcccaagcacaagaagcucaagcagcccgccgacggcaaccccgaccccaacgccaaccccaacgucgaccccaacgccaaccccaacgucgaccccaacgccaaccccaacgucgaccccaacgccaaccccaacgccaaccccaacgccaaccccaacgccaaccccaacgccaaccccaacgccaaccccaacgccaaccccaacgccaaccccaacgccaaccccaacgccaaccccaacgccaaccccaacgccaaccccaacgccaaccccaacgccaaccccaacgccaaccccaacgccaaccccaacgccaaccccaacgucgaccccaacgccaaccccaacgccaaccccaacgccaaccccaacgccaaccccaacgccaaccccaacgccaaccccaacgccaaccccaacgccaaccccaacgccaaccccaacgccaaccccaacgccaaccccaacgccaaccccaacgccaaccccaacgccaaccccaacgccaaccccaacgccaaccccaacgccaaccccaacgccaaccccaacaagaacaaccagggcaacggccagggccacaacaugcccaacgaccccaaccgcaacgucgacgagaacgccaacgccaacuccgccgucaagaacaacaacaacgaggagcccuccgacaagcacaucaaggaguaccucaacaagauccagaacucccucuccaccgaguggucccccugcuccgucaccugcggcaacggcauccagguccgcaucaagcccggcuccgccaacaagcccaaggacgagcucgacuacgccaacgacaucgagaagaagaucugcaagauggagaagugcuccuccgucuucaacgucgucaacuccuccaucggccucaucaugguccucuccuuccucuuccucaacugaggacuaguuauaagacugacuagcccgaugggccucccaacgggcccuccuccccuccuugcaccgagauuaauaaaaaaaaaaaaaaaaaaaaaaaaaaaaaaaaaaaaaaaaaaaaaaaaaaaaaaaaaaaaaaaaugcaucccccccccccccccccccccccccccccccaaaggcucuuuucagagccaccagaauu

SEQ ID NO: 1866 - RNA, 1342 nt, Artificial Sequence
  mRNA Design i-3 (A64-N5-C30-hSL-N5) comprising derived and/or modified sequence from Pf(3D7)__XP_001351122.1__Pf-CSP(1-374) (opt2)
aggagaaagcuuaccaugaugcgcaagcucgccauccucuccgucuccuccuuccucuucgucgaggcccucuuccaggaguaccagugcuacggcuccuccuccaacacccgcguccucaacgagcucaacuacgacaacgccggcaccaaccucuacaacgagcucgagaugaacuacuacggcaagcaggagaacugguacucccucaagaagaacucccgcucccucggcgagaacgacgacggcaacaacgaggacaacgagaagcuccgcaagcccaagcacaagaagcucaagcagcccgccgacggcaaccccgaccccaacgccaaccccaacgucgaccccaacgccaaccccaacgucgaccccaacgccaaccccaacgucgaccccaacgccaaccccaacgccaaccccaacgccaaccccaacgccaaccccaacgccaaccccaacgccaaccccaacgccaaccccaacgccaaccccaacgccaaccccaacgccaaccccaacgccaaccccaacgccaaccccaacgccaaccccaacgccaaccccaacgccaaccccaacgccaaccccaacgccaaccccaacgucgaccccaacgccaaccccaacgccaaccccaacgccaaccccaacgccaaccccaacgccaaccccaacgccaaccccaacgccaaccccaacgccaaccccaacgccaaccccaacgccaaccccaacgccaaccccaacgccaaccccaacgccaaccccaacgccaaccccaacgccaaccccaacgccaaccccaacgccaaccccaacgccaaccccaacaagaacaaccagggcaacggccagggccacaacaugcccaacgaccccaaccgcaacgucgacgagaacgccaacgccaacuccgccgucaagaacaacaacaacgaggagcccuccgacaagcacaucaaggaguaccucaacaagauccagaacucccucuccaccgaguggucccccugcuccgucaccugcggcaacggcauccagguccgcaucaagcccggcuccgccaacaagcccaaggacgagcucgacuacgccaacgacaucgagaagaagaucugcaagauggagaagugcugaggacuaguuauaagacugacuagcccgaugggccucccaacgggcccuccuccccuccuugcaccgagauuaauaaaaaaaaaaaaaaaaaaaaaaaaaaaaaaaaaaaaaaaaaaaaaaaaaaaaaaaaaaaaaaaaugcaucccccccccccccccccccccccccccccccaaaggcucuuuucagagccaccagaauu

SEQ ID NO: 1867 - RNA, 1195 nt, Artificial Sequence
  mRNA Design i-3 (A64-N5-C30-hSL-N5) comprising derived and/or modified sequence from Pf(3D7)__XP_001351122.1__Pf-CSP(1-325) (opt2)
aggagaaagcuuaccaugaugcgcaagcucgccauccucuccgucuccuccuuccucuucgucgaggcccucuuccaggaguaccagugcuacggcuccuccuccaacacccgcguccucaacgagcucaacuacgacaacgccggcaccaaccucuacaacgagcucgagaugaacuacuacggcaagcaggagaacugguacucccucaagaagaacucccgcucccucggcgagaacgacgacggcaacaacgaggacaacgagaagcuccgcaagcccaagcacaagaagcucaagcagcccgccgacggcaaccccgaccccaacgccaaccccaacgucgaccccaacgccaaccccaacgucgaccccaacgccaaccccaacgucgaccccaacgccaaccccaacgccaaccccaacgccaaccccaacgccaaccccaacgccaaccccaacgccaaccccaacgccaaccccaacgccaaccccaacgccaaccccaacgccaaccccaacgccaaccccaacgccaaccccaacgccaaccccaacgccaaccccaacgccaaccccaacgccaaccccaacgccaaccccaacgucgaccccaacgccaaccccaacgccaaccccaacgccaaccccaacgccaaccccaacgccaaccccaacgccaaccccaacgccaaccccaacgccaaccccaacgccaaccccaacgccaaccccaacgccaaccccaacgccaaccccaacgccaaccccaacgccaaccccaacgccaaccccaacgccaaccccaacgccaaccccaacgccaaccccaacaagaacaaccagggcaacggccagggccacaacaugcccaacgaccccaaccgcaacgucgacgagaacgccaacgccaacuccgccgucaagaacaacaacaacgaggagcccuccgacaagcacaucaaggaguaccucaacaagauccagaacugaggacuaguuauaagacugacuagcccgaugggccucccaacgggcccuccuccccuccuugcaccgagauuaauaaaaaaaaaaaaaaaaaaaaaaaaaaaaaaaaaaaaaaaaaaaaaaaaaaaaaaaaaaaaaaaaugcaucccccccccccccccccccccccccccccccaaaggcucuuuucagagccaccagaauu

SEQ ID NO: 1868 - RNA, 1411 nt, Artificial Sequence
  mRNA Design i-3 (A64-N5-C30-hSL-N5) comprising derived and/or modified sequence from Pf(3D7)__XP_001351122.1__HsALB_Pf-CSP(19-397) (opt2)
aggagaaagcuuaccaugaagugggucaccuucaucucccuccucuuccucuucuccuccgccuacucccucuuccaggaguaccagugcuacggcuccuccuccaacacccgcguccucaacgagcucaacuacgacaacgccggcaccaaccucuacaacgagcucgagaugaacuacuacggcaagcaggagaacugguacucccucaagaagaacucccgcucccucggcgagaacgacgacggcaacaacgaggacaacgagaagcuccgcaagcccaagcacaagaagcucaagcagcccgccgacggcaaccccgaccccaacgccaaccccaacgucgaccccaacgccaaccccaacgucgaccccaacgccaaccccaacgucgaccccaacgccaaccccaacgccaaccccaacgccaaccccaacgccaaccccaacgccaaccccaacgccaaccccaacgccaaccccaacgccaaccccaacgccaaccccaacgccaaccccaacgccaaccccaacgccaaccccaacgccaaccccaacgccaaccccaacgccaaccccaacgccaaccccaacgccaaccccaacgucgaccccaacgccaaccccaacgccaaccccaacgccaaccccaacgccaaccccaacgccaaccccaacgccaaccccaacgccaaccccaacgccaaccccaacgccaaccccaacgccaaccccaacgccaaccccaacgccaaccccaacgccaaccccaacgccaaccccaacgccaaccccaacgccaaccccaacgccaaccccaacgccaaccccaacaagaacaaccagggcaacggccagggccacaacaugcccaacgaccccaaccgcaacgucgacgagaacgccaacgccaacuccgccgucaagaacaacaacaacgaggagcccuccgacaagcacaucaaggaguaccucaacaagauccagaacucccucuccaccgaguggucccccugcuccgucaccugcggcaacggcauccagguccgcaucaagcccggcuccgccaacaagcccaaggacgagcucgacuacgccaacgacaucgagaagaagaucugcaagauggagaagugcuccuccgucuucaacgucgucaacuccuccaucggccucaucaugguccucuccuuccucuuccucaacugaggacuaguuauaagacugacuagcccgaugggccucccaacgggcccuccuccccuccuugcaccgagauuaauaaaaaaaaaaaaaaaaaaaaaaaaaaaaaaaaaaaaaaaaaaaaaaaaaaaaaaaaaaaaaaaaugcaucccccccccccccccccccccccccccccccaaaggcucuuuucagagccaccagaauu

SEQ ID NO: 1869 - RNA, 1429 nt, Artificial Sequence
  mRNA Design i-3 (A64-N5-C30-hSL-N5) comprising derived and/or modified sequence from Pf(3D7)__XP_001351122.1__HsIns-iso1_Pf-CSP(19-397) (opt2)
aggagaaagcuuaccauggcccucuggaugcgccuccucccccuccucgcccuccucgcccucuggggccccgaccccgccgccgcccucuuccaggaguaccagugcuacggcuccuccuccaacacccgcguccucaacgagcucaacuacgacaacgccggcaccaaccucuacaacgagcucgagaugaacuacuacggcaagcaggagaacugguacucccucaagaagaacucccgcucccucggcgagaacgacgacggcaacaacgaggacaacgagaagcuccgcaagcccaagcacaagaagcucaagcagcccgccgacggcaaccccgaccccaacgccaaccccaacgucgaccccaacgccaaccccaacgucgaccccaacgccaaccccaacgucgaccccaacgccaaccccaacgccaaccccaacgccaaccccaacgccaaccccaacgccaaccccaacgccaaccccaacgccaaccccaacgccaaccccaacgccaaccccaacgccaaccccaacgccaaccccaacgccaaccccaacgccaaccccaacgccaaccccaacgccaaccccaacgccaaccccaacgccaaccccaacgucgaccccaacgccaaccccaacgccaaccccaacgccaaccccaacgccaaccccaacgccaaccccaacgccaaccccaacgccaaccccaacgccaaccccaacgccaaccccaacgccaaccccaacgccaaccccaacgccaaccccaacgccaaccccaacgccaaccccaacgccaaccccaacgccaaccccaacgccaaccccaacgccaaccccaacaagaacaaccagggcaacggccagggccacaacaugcccaacgaccccaaccgcaacgucgacgagaacgccaacgccaacuccgccgucaagaacaacaacaacgaggagcccuccgacaagcacaucaaggaguaccucaacaagauccagaacucccucuccaccgaguggucccccugcuccgucaccugcggcaacggcauccagguccgcaucaagcccggcuccgccaacaagcccaaggacgagcucgacuacgccaacgacaucgagaagaagaucugcaagauggagaagugcuccuccgucuucaacgucgucaacuccuccaucggccucaucaugguccucuccuuccucuuccucaacugaggacuaguuauaagacugacuagcccgaugggccucccaacgggcccuccuccccuccuugcaccgagauuaauaaaaaaaaaaaaaaaaaaaaaaaaaaaaaaaaaaaaaaaaaaaaaaaaaaaaaaaaaaaaaaaaugcaucccccccccccccccccccccccccccccccaaaggcucuuuucagagccaccagaauu

SEQ ID NO: 1870 - RNA, 1408 nt, Artificial Sequence
  mRNA Design i-3 (A64-N5-C30-hSL-N5) comprising derived and/or modified sequence from Pf(3D7)__XP_001351122.1__HsSPARC_Pf-CSP(19-397) (opt2)
aggagaaagcuuaccaugcgcgccuggaucuucuuccuccucugccucgccggccgcgcccucgcccucuuccaggaguaccagugcuacggcuccuccuccaacacccgcguccucaacgagcucaacuacgacaacgccggcaccaaccucuacaacgagcucgagaugaacuacuacggcaagcaggagaacugguacucccucaagaagaacucccgcucccucggcgagaacgacgacggcaacaacgaggacaacgagaagcuccgcaagcccaagcacaagaagcucaagcagcccgccgacggcaaccccgaccccaacgccaaccccaacgucgaccccaacgccaaccccaacgucgaccccaacgccaaccccaacgucgaccccaacgccaaccccaacgccaaccccaacgccaaccccaacgccaaccccaacgccaaccccaacgccaaccccaacgccaaccccaacgccaaccccaacgccaaccccaacgccaaccccaacgccaaccccaacgccaaccccaacgccaaccccaacgccaaccccaacgccaaccccaacgccaaccccaacgccaaccccaacgucgaccccaacgccaaccccaacgccaaccccaacgccaaccccaacgccaaccccaacgccaaccccaacgccaaccccaacgccaaccccaacgccaaccccaacgccaaccccaacgccaaccccaacgccaaccccaacgccaaccccaacgccaaccccaacgccaaccccaacgccaaccccaacgccaaccccaacgccaaccccaacgccaaccccaacaagaacaaccagggcaacggccagggccacaacaugcccaacgaccccaaccgcaacgucgacgagaacgccaacgccaacuccgccgucaagaacaacaacaacgaggagcccuccgacaagcacaucaaggaguaccucaacaagauccagaacucccucuccaccgaguggucccccugcuccgucaccugcggcaacggcauccagguccgcaucaagcccggcuccgccaacaagcccaaggacgagcucgacuacgccaacgacaucgagaagaagaucugcaagauggagaagugcuccuccgucuucaacgucgucaacuccuccaucggccucaucaugguccucuccuuccucuuccucaacugaggacuaguuauaagacugacuagcccgaugggccucccaacgggcccuccuccccuccuugcaccgagauuaauaaaaaaaaaaaaaaaaaaaaaaaaaaaaaaaaaaaaaaaaaaaaaaaaaaaaaaaaaaaaaaaaugcaucccccccccccccccccccccccccccccccaaaggcucuuuucagagccaccagaauu

SEQ ID NO: 1871 - RNA, 1411 nt, Artificial Sequence
  mRNA Design i-3 (A64-N5-C30-hSL-N5) comprising derived and/or modified sequence from Pf(3D7)__XP_001351122.1__IgE_Pf-CSP(19-397) (opt2)
aggagaaagcuuaccauggacuggaccuggauccucuuccucgucgccgccgccacccgcguccacucccucuuccaggaguaccagugcuacggcuccuccuccaacacccgcguccucaacgagcucaacuacgacaacgccggcaccaaccucuacaacgagcucgagaugaacuacuacggcaagcaggagaacugguacucccucaagaagaacucccgcucccucggcgagaacgacgacggcaacaacgaggacaacgagaagcuccgcaagcccaagcacaagaagcucaagcagcccgccgacggcaaccccgaccccaacgccaaccccaacgucgaccccaacgccaaccccaacgucgaccccaacgccaaccccaacgucgaccccaacgccaaccccaacgccaaccccaacgccaaccccaacgccaaccccaacgccaaccccaacgccaaccccaacgccaaccccaacgccaaccccaacgccaaccccaacgccaaccccaacgccaaccccaacgccaaccccaacgccaaccccaacgccaaccccaacgccaaccccaacgccaaccccaacgccaaccccaacgucgaccccaacgccaaccccaacgccaaccccaacgccaaccccaacgccaaccccaacgccaaccccaacgccaaccccaacgccaaccccaacgccaaccccaacgccaaccccaacgccaaccccaacgccaaccccaacgccaaccccaacgccaaccccaacgccaaccccaacgccaaccccaacgccaaccccaacgccaaccccaacgccaaccccaacaagaacaaccagggcaacggccagggccacaacaugcccaacgaccccaaccgcaacgucgacgagaacgccaacgccaacuccgccgucaagaacaacaacaacgaggagcccuccgacaagcacaucaaggaguaccucaacaagauccagaacucccucuccaccgaguggucccccugcuccgucaccugcggcaacggcauccagguccgcaucaagcccggcuccgccaacaagcccaaggacgagcucgacuacgccaacgacaucgagaagaagaucugcaagauggagaagugcuccuccgucuucaacgucgucaacuccuccaucggccucaucaugguccucuccuuccucuuccucaacugaggacuaguuauaagacugacuagcccgaugggccucccaacgggcccuccuccccuccuugcaccgagauuaauaaaaaaaaaaaaaaaaaaaaaaaaaaaaaaaaaaaaaaaaaaaaaaaaaaaaaaaaaaaaaaaaugcaucccccccccccccccccccccccccccccccaaaggcucuuuucagagccaccagaauu

SEQ ID NO: 1872 - RNA, 1576 nt, Artificial Sequence
  mRNA Design i-3 (A64-N5-C30-hSL-N5) comprising derived and/or modified sequence from Pf(3D7)__XP_001351122.1__Pf-CSP_L(G4SG4)_TM domain HA (opt2)
aggagaaagcuuaccaugaugcgcaagcucgccauccucuccgucuccuccuuccucuucgucgaggcccucuuccaggaguaccagugcuacggcuccuccuccaacacccgcguccucaacgagcucaacuacgacaacgccggcaccaaccucuacaacgagcucgagaugaacuacuacggcaagcaggagaacugguacucccucaagaagaacucccgcucccucggcgagaacgacgacggcaacaacgaggacaacgagaagcuccgcaagcccaagcacaagaagcucaagcagcccgccgacggcaaccccgaccccaacgccaaccccaacgucgaccccaacgccaaccccaacgucgaccccaacgccaaccccaacgucgaccccaacgccaaccccaacgccaaccccaacgccaaccccaacgccaaccccaacgccaaccccaacgccaaccccaacgccaaccccaacgccaaccccaacgccaaccccaacgccaaccccaacgccaaccccaacgccaaccccaacgccaaccccaacgccaaccccaacgccaaccccaacgccaaccccaacgccaaccccaacgucgaccccaacgccaaccccaacgccaaccccaacgccaaccccaacgccaaccccaacgccaaccccaacgccaaccccaacgccaaccccaacgccaaccccaacgccaaccccaacgccaaccccaacgccaaccccaacgccaaccccaacgccaaccccaacgccaaccccaacgccaaccccaacgccaaccccaacgccaaccccaacgccaaccccaacaagaacaaccagggcaacggccagggccacaacaugcccaacgaccccaaccgcaacgucgacgagaacgccaacgccaacuccgccgucaagaacaacaacaacgaggagcccuccgacaagcacaucaaggaguaccucaacaagauccagaacucccucuccaccgaguggucccccugcuccgucaccugcggcaacggcauccagguccgcaucaagcccggcuccgccaacaagcccaaggacgagcucgacuacgccaacgacaucgagaagaagaucugcaagauggagaagugcuccuccgucuucaacgucgucaacuccuccaucggccucaucaugguccucuccuuccucuuccucaacggcggcggcggcuccggcggcggcggcaagcucgaguccacccgcaucuaccagauccucgccaucuacuccaccgucgccuccucccucguccucgucgucucccucggcgccaucuccuucuggaugugcuccaacggcucccuccagugccgcaucugcaucugaggacuaguuauaagacugacuagcccgaugggccucccaacgggcccuccuccccuccuugcaccgagauuaauaaaaaaaaaaaaaaaaaaaaaaaaaaaaaaaaaaaaaaaaaaaaaaaaaaaaaaaaaaaaaaaaugcaucccccccccccccccccccccccccccccccaaaggcucuuuucagagccaccagaauu

SEQ ID NO: 1873 - RNA, 1450 nt, Artificial Sequence
  mRNA Design i-3 (A64-N5-C30-hSL-N5) comprising derived and/or modified sequence from Pf(3D7)__XP_001351122.1__Pf-CSP(199-377)_L(PVTN)_HBsAg (opt2)
aggagaaagcuuaccauggaccccaacgccaaccccaacgccaaccccaacgccaaccccaacgccaaccccaacgccaaccccaacgccaaccccaacgccaaccccaacgccaaccccaacgccaaccccaacgccaaccccaacgccaaccccaacgccaaccccaacgccaaccccaacgccaaccccaacgccaaccccaacgccaaccccaacgccaaccccaacgccaaccccaacaagaacaaccagggcaacggccagggccacaacaugcccaacgaccccaaccgcaacgucgacgagaacgccaacgccaacuccgccgucaagaacaacaacaacgaggagcccuccgacaagcacaucaaggaguaccucaacaagauccagaacucccucuccaccgaguggucccccugcuccgucaccugcggcaacggcauccagguccgcaucaagcccggcuccgccaacaagcccaaggacgagcucgacuacgccaacgacaucgagaagaagaucugcaagauggagaagugcuccuccguccccgucaccaacauggagaacaucaccuccggcuuccucggcccccuccucguccuccaggccggcuucuuccuccucacccgcauccucaccaucccccagucccucgacuccugguggaccucccucaacuuccucggcggcucccccgucugccucggccagaacucccagucccccaccuccaaccacucccccaccuccugcccccccaucugccccggcuaccgcuggaugugccuccgccgcuucaucaucuuccucuucauccuccuccucugccucaucuuccuccucguccuccucgacuaccagggcaugcuccccgucugcccccucauccccggcuccaccaccaccaacaccggccccugcaagaccugcaccacccccgcccagggcaacuccauguuccccuccugcugcugcaccaagcccaccgacggcaacugcaccugcauccccauccccuccuccugggccuucgccaaguaccucugggagugggccuccguccgcuucuccuggcucucccuccucguccccuucguccagugguucgucggccucucccccaccgucuggcucuccgccaucuggaugaugugguacuggggccccucccucuacuccaucgucucccccuucaucccccuccuccccaucuucuucugccucugggucuacaucugaggacuaguuauaagacugacuagcccgaugggccucccaacgggcccuccuccccuccuugcaccgagauuaauaaaaaaaaaaaaaaaaaaaaaaaaaaaaaaaaaaaaaaaaaaaaaaaaaaaaaaaaaaaaaaaaugcaucccccccccccccccccccccccccccccccaaaggcucuuuucagagccaccagaauu

SEQ ID NO: 1874 - RNA, 1492 nt, Artificial Sequence
  mRNA Design i-3 (A64-N5-C30-hSL-N5) comprising derived and/or modified sequence from Pf(3D7)__XP_001351122.1__Pf-CSP(199-387)_L(PVTN)_HBsAg (opt2)
aggagaaagcuuaccaugauggcccccgaccccaacgccaaccccaacgccaaccccaacgccaaccccaacgccaaccccaacgccaaccccaacgccaaccccaacgccaaccccaacgccaaccccaacgccaaccccaacgccaaccccaacgccaaccccaacgccaaccccaacgccaaccccaacgccaaccccaacgccaaccccaacgccaaccccaacgccaaccccaacgccaaccccaacaagaacaaccagggcaacggccagggccacaacaugcccaacgaccccaaccgcaacgucgacgagaacgccaacgccaacuccgccgucaagaacaacaacaacgaggagcccuccgacaagcacaucaaggaguaccucaacaagauccagaacucccucuccaccgaguggucccccugcuccgucaccugcggcaacggcauccagguccgcaucaagcccggcuccgccaacaagcccaaggacgagcucgacuacgccaacgacaucgagaagaagaucugcaagauggagaagugcuccuccgucuucaacgucgucaacuccuccaucggccucggccccgucaccaacauggagaacaucaccuccggcuuccucggcccccuccucguccuccaggccggcuucuuccuccucacccgcauccucaccaucccccagucccucgacuccugguggaccucccucaacuuccucggcggcucccccgucugccucggccagaacucccagucccccaccuccaaccacucccccaccuccugcccccccaucugccccggcuaccgcuggaugugccuccgccgcuucaucaucuuccucuucauccuccuccucugccucaucuuccuccucguccuccucgacuaccagggcaugcuccccgucugcccccucauccccggcuccaccaccaccaacaccggccccugcaagaccugcaccacccccgcccagggcaacuccauguuccccuccugcugcugcaccaagcccaccgacggcaacugcaccugcauccccauccccuccuccugggccuucgccaaguaccucugggagugggccuccguccgcuucuccuggcucucccuccucguccccuucguccagugguucgucggccucucccccaccgucuggcucuccgccaucuggaugaugugguacuggggccccucccucuacuccaucgucucccccuucaucccccuccuccccaucuucuucugccucugggucuacaucugaggacuaguuauaagacugacuagcccgaugggccucccaacgggcccuccuccccuccuugcaccgagauuaauaaaaaaaaaaaaaaaaaaaaaaaaaaaaaaaaaaaaaaaaaaaaaaaaaaaaaaaaaaaaaaaaugcaucccccccccccccccccccccccccccccccaaaggcucuuuucagagccaccagaauu

SEQ ID NO: 1875 - RNA, 676 nt, Artificial Sequence
  mRNA Design i-3 (A64-N5-C30-hSL-N5) comprising derived and/or modified sequence from Pf(3D7)__XP_001351122.1__HsALB_Pf-CSP(19-152) (opt2)
aggagaaagcuuaccaugaagugggucaccuucaucucccuccucuuccucuucuccuccgccuacucccucuuccaggaguaccagugcuacggcuccuccuccaacacccgcguccucaacgagcucaacuacgacaacgccggcaccaaccucuacaacgagcucgagaugaacuacuacggcaagcaggagaacugguacucccucaagaagaacucccgcucccucggcgagaacgacgacggcaacaacgaggacaacgagaagcuccgcaagcccaagcacaagaagcucaagcagcccgccgacggcaaccccgaccccaacgccaaccccaacgucgaccccaacgccaaccccaacgucgaccccaacgccaaccccaacgucgaccccaacgccaaccccaacgccaaccccaacgccaaccccaacgccaaccccaacgccaaccccaacgccaaccccugaggacuaguuauaagacugacuagcccgaugggccucccaacgggcccuccuccccuccuugcaccgagauuaauaaaaaaaaaaaaaaaaaaaaaaaaaaaaaaaaaaaaaaaaaaaaaaaaaaaaaaaaaaaaaaaaugcaucccccccccccccccccccccccccccccccaaaggcucuuuucagagccaccagaauu

SEQ ID NO: 1876 - RNA, 796 nt, Artificial Sequence
  mRNA Design i-3 (A64-N5-C30-hSL-N5) comprising derived and/or modified sequence from Pf(3D7)__XP_001351122.1__HsALB_Pf-CSP(19-192) (opt2)
aggagaaagcuuaccaugaagugggucaccuucaucucccuccucuuccucuucuccuccgccuacucccucuuccaggaguaccagugcuacggcuccuccuccaacacccgcguccucaacgagcucaacuacgacaacgccggcaccaaccucuacaacgagcucgagaugaacuacuacggcaagcaggagaacugguacucccucaagaagaacucccgcucccucggcgagaacgacgacggcaacaacgaggacaacgagaagcuccgcaagcccaagcacaagaagcucaagcagcccgccgacggcaaccccgaccccaacgccaaccccaacgucgaccccaacgccaaccccaacgucgaccccaacgccaaccccaacgucgaccccaacgccaaccccaacgccaaccccaacgccaaccccaacgccaaccccaacgccaaccccaacgccaaccccaacgccaaccccaacgccaaccccaacgccaaccccaacgccaaccccaacgccaaccccaacgccaaccccaacgccaaccccaacgccaaccccaacgccaaccccaacgccaaccccugaggacuaguuauaagacugacuagcccgaugggccucccaacgggcccuccuccccuccuugcaccgagauuaauaaaaaaaaaaaaaaaaaaaaaaaaaaaaaaaaaaaaaaaaaaaaaaaaaaaaaaaaaaaaaaaaugcaucccccccccccccccccccccccccccccccaaaggcucuuuucagagccaccagaauu

SEQ ID NO: 1877 - RNA, 1036 nt, Artificial Sequence
  mRNA Design i-3 (A64-N5-C30-hSL-N5) comprising derived and/or modified sequence from Pf(3D7)__XP_001351122.1__HsALB_Pf-CSP(19-272) (opt2)
aggagaaagcuuaccaugaagugggucaccuucaucucccuccucuuccucuucuccuccgccuacucccucuuccaggaguaccagugcuacggcuccuccuccaacacccgcguccucaacgagcucaacuacgacaacgccggcaccaaccucuacaacgagcucgagaugaacuacuacggcaagcaggagaacugguacucccucaagaagaacucccgcucccucggcgagaacgacgacggcaacaacgaggacaacgagaagcuccgcaagcccaagcacaagaagcucaagcagcccgccgacggcaaccccgaccccaacgccaaccccaacgucgaccccaacgccaaccccaacgucgaccccaacgccaaccccaacgucgaccccaacgccaaccccaacgccaaccccaacgccaaccccaacgccaaccccaacgccaaccccaacgccaaccccaacgccaaccccaacgccaaccccaacgccaaccccaacgccaaccccaacgccaaccccaacgccaaccccaacgccaaccccaacgccaaccccaacgccaaccccaacgccaaccccaacgccaaccccaacgucgaccccaacgccaaccccaacgccaaccccaacgccaaccccaacgccaaccccaacgccaaccccaacgccaaccccaacgccaaccccaacgccaaccccaacgccaaccccaacgccaaccccaacgccaaccccaacgccaaccccaacgccaaccccaacgccaaccccaacgccaaccccaacgccaaccccaacgccaaccccaacgccaaccccugaggacuaguuauaagacugacuagcccgaugggccucccaacgggcccuccuccccuccuugcaccgagauuaauaaaaaaaaaaaaaaaaaaaaaaaaaaaaaaaaaaaaaaaaaaaaaaaaaaaaaaaaaaaaaaaaugcaucccccccccccccccccccccccccccccccaaaggcucuuuucagagccaccagaauu

SEQ ID NO: 1878 - RNA, 1198 nt, Artificial Sequence
  mRNA Design i-3 (A64-N5-C30-hSL-N5) comprising derived and/or modified sequence from Pf(3D7)__XP_001351122.1__HsALB_Pf-CSP(19-272)_L(AAY)_Pf-CSP(310-3 27)_L(AAY)_Pf-CSP(346-375) (opt2)
aggagaaagcuuaccaugaagugggucaccuucaucucccuccucuuccucuucuccuccgccuacucccucuuccaggaguaccagugcuacggcuccuccuccaacacccgcguccucaacgagcucaacuacgacaacgccggcaccaaccucuacaacgagcucgagaugaacuacuacggcaagcaggagaacugguacucccucaagaagaacucccgcucccucggcgagaacgacgacggcaacaacgaggacaacgagaagcuccgcaagcccaagcacaagaagcucaagcagcccgccgacggcaaccccgaccccaacgccaaccccaacgucgaccccaacgccaaccccaacgucgaccccaacgccaaccccaacgucgaccccaacgccaaccccaacgccaaccccaacgccaaccccaacgccaaccccaacgccaaccccaacgccaaccccaacgccaaccccaacgccaaccccaacgccaaccccaacgccaaccccaacgccaaccccaacgccaaccccaacgccaaccccaacgccaaccccaacgccaaccccaacgccaaccccaacgccaaccccaacgucgaccccaacgccaaccccaacgccaaccccaacgccaaccccaacgccaaccccaacgccaaccccaacgccaaccccaacgccaaccccaacgccaaccccaacgccaaccccaacgccaaccccaacgccaaccccaacgccaaccccaacgccaaccccaacgccaaccccaacgccaaccccaacgccaaccccaacgccaaccccaacgccaaccccgccgccuacgagcccuccgacaagcacaucaaggaguaccucaacaagauccagaacucccucgccgccuacaucaagcccggcuccgccaacaagcccaaggacgagcucgacuacgccaacgacaucgagaagaagaucugcaagauggagaagugcuccugaggacuaguuauaagacugacuagcccgaugggccucccaacgggcccuccuccccuccuugcaccgagauuaauaaaaaaaaaaaaaaaaaaaaaaaaaaaaaaaaaaaaaaaaaaaaaaaaaaaaaaaaaaaaaaaaugcaucccccccccccccccccccccccccccccccaaaggcucuuuucagagccaccagaauu

SEQ ID NO: 1879 - RNA, 1159 nt, Artificial Sequence
  mRNA Design i-3 (A64-N5-C30-hSL-N5) comprising derived and/or modified sequence from Pf(3D7)__XP_001351122.1__HsALB_Pf-CSP(19-272)_L(AAY)_Pf-CSP(346-3 65)_L(AAY)_P2 (opt2)
aggagaaagcuuaccaugaagugggucaccuucaucucccuccucuuccucuucuccuccgccuacucccucuuccaggaguaccagugcuacggcuccuccuccaacacccgcguccucaacgagcucaacuacgacaacgccggcaccaaccucuacaacgagcucgagaugaacuacuacggcaagcaggagaacugguacucccucaagaagaacucccgcucccucggcgagaacgacgacggcaacaacgaggacaacgagaagcuccgcaagcccaagcacaagaagcucaagcagcccgccgacggcaaccccgaccccaacgccaaccccaacgucgaccccaacgccaaccccaacgucgaccccaacgccaaccccaacgucgaccccaacgccaaccccaacgccaaccccaacgccaaccccaacgccaaccccaacgccaaccccaacgccaaccccaacgccaaccccaacgccaaccccaacgccaaccccaacgccaaccccaacgccaaccccaacgccaaccccaacgccaaccccaacgccaaccccaacgccaaccccaacgccaaccccaacgccaaccccaacgucgaccccaacgccaaccccaacgccaaccccaacgccaaccccaacgccaaccccaacgccaaccccaacgccaaccccaacgccaaccccaacgccaaccccaacgccaaccccaacgccaaccccaacgccaaccccaacgccaaccccaacgccaaccccaacgccaaccccaacgccaaccccaacgccaaccccaacgccaaccccaacgccaaccccgccgccuacaucaagcccggcuccgccaacaagcccaaggacgagcucgacuacgccaacgacaucgaggccgccuaccaguacaucaaggccaacuccaaguucaucggcaucaccgagcucugaggacuaguuauaagacugacuagcccgaugggccucccaacgggcccuccuccccuccuugcaccgagauuaauaaaaaaaaaaaaaaaaaaaaaaaaaaaaaaaaaaaaaaaaaaaaaaaaaaaaaaaaaaaaaaaaugcaucccccccccccccccccccccccccccccccaaaggcucuuuucagagccaccagaauu

SEQ ID NO: 1880 - RNA, 1153 nt, Artificial Sequence
  mRNA Design i-3 (A64-N5-C30-hSL-N5) comprising derived and/or modified sequence from Pf(3D7)__XP_001351122.1__HsALB_Pf-CSP(19-272)_L(AAY)_Pf-CSP(346-3 65)_L(AAY)_PADRE (opt2)
aggagaaagcuuaccaugaagugggucaccuucaucucccuccucuuccucuucuccuccgccuacucccucuuccaggaguaccagugcuacggcuccuccuccaacacccgcguccucaacgagcucaacuacgacaacgccggcaccaaccucuacaacgagcucgagaugaacuacuacggcaagcaggagaacugguacucccucaagaagaacucccgcucccucggcgagaacgacgacggcaacaacgaggacaacgagaagcuccgcaagcccaagcacaagaagcucaagcagcccgccgacggcaaccccgaccccaacgccaaccccaacgucgaccccaacgccaaccccaacgucgaccccaacgccaaccccaacgucgaccccaacgccaaccccaacgccaaccccaacgccaaccccaacgccaaccccaacgccaaccccaacgccaaccccaacgccaaccccaacgccaaccccaacgccaaccccaacgccaaccccaacgccaaccccaacgccaaccccaacgccaaccccaacgccaaccccaacgccaaccccaacgccaaccccaacgccaaccccaacgucgaccccaacgccaaccccaacgccaaccccaacgccaaccccaacgccaaccccaacgccaaccccaacgccaaccccaacgccaaccccaacgccaaccccaacgccaaccccaacgccaaccccaacgccaaccccaacgccaaccccaacgccaaccccaacgccaaccccaacgccaaccccaacgccaaccccaacgccaaccccaacgccaaccccgccgccuacaucaagcccggcuccgccaacaagcccaaggacgagcucgacuacgccaacgacaucgaggccgccuacgccaaguucgucgccgccuggacccucaaggccgccgccugaggacuaguuauaagacugacuagcccgaugggccucccaacgggcccuccuccccuccuugcaccgagauuaauaaaaaaaaaaaaaaaaaaaaaaaaaaaaaaaaaaaaaaaaaaaaaaaaaaaaaaaaaaaaaaaaugcaucccccccccccccccccccccccccccccccaaaggcucuuuucagagccaccagaauu

SEQ ID NO: 1881 - RNA, 1210 nt, Artificial Sequence
  mRNA Design i-3 (A64-N5-C30-hSL-N5) comprising derived and/or modified sequence from Pf(3D7)__XP_001351122.1__HsALB_Pf-CSP(19-272)_L(G4S)_Pf-CSP(310-3 27)_L(G4S)_Pf-CSP(346-375) (opt2)
aggagaaagcuuaccaugaagugggucaccuucaucucccuccucuuccucuucuccuccgccuacucccucuuccaggaguaccagugcuacggcuccuccuccaacacccgcguccucaacgagcucaacuacgacaacgccggcaccaaccucuacaacgagcucgagaugaacuacuacggcaagcaggagaacugguacucccucaagaagaacucccgcucccucggcgagaacgacgacggcaacaacgaggacaacgagaagcuccgcaagcccaagcacaagaagcucaagcagcccgccgacggcaaccccgaccccaacgccaaccccaacgucgaccccaacgccaaccccaacgucgaccccaacgccaaccccaacgucgaccccaacgccaaccccaacgccaaccccaacgccaaccccaacgccaaccccaacgccaaccccaacgccaaccccaacgccaaccccaacgccaaccccaacgccaaccccaacgccaaccccaacgccaaccccaacgccaaccccaacgccaaccccaacgccaaccccaacgccaaccccaacgccaaccccaacgccaaccccaacgucgaccccaacgccaaccccaacgccaaccccaacgccaaccccaacgccaaccccaacgccaaccccaacgccaaccccaacgccaaccccaacgccaaccccaacgccaaccccaacgccaaccccaacgccaaccccaacgccaaccccaacgccaaccccaacgccaaccccaacgccaaccccaacgccaaccccaacgccaaccccaacgccaaccccggcggcggcggcuccgagcccuccgacaagcacaucaaggaguaccucaacaagauccagaacucccucggcggcggcggcuccaucaagcccggcuccgccaacaagcccaaggacgagcucgacuacgccaacgacaucgagaagaagaucugcaagauggagaagugcuccugaggacuaguuauaagacugacuagcccgaugggccucccaacgggcccuccuccccuccuugcaccgagauuaauaaaaaaaaaaaaaaaaaaaaaaaaaaaaaaaaaaaaaaaaaaaaaaaaaaaaaaaaaaaaaaaaugcaucccccccccccccccccccccccccccccccaaaggcucuuuucagagccaccagaauu

SEQ ID NO: 1882 - RNA, 1195 nt, Artificial Sequence
  mRNA Design i-3 (A64-N5-C30-hSL-N5) comprising derived and/or modified sequence from Pf(3D7)__XP_001351122.1__HsALB_Pf-CSP(19-272)_L(G4S)_Pf-CSP(310-3 27)_Pf-CSP(346-375) (opt2)
aggagaaagcuuaccaugaagugggucaccuucaucucccuccucuuccucuucuccuccgccuacucccucuuccaggaguaccagugcuacggcuccuccuccaacacccgcguccucaacgagcucaacuacgacaacgccggcaccaaccucuacaacgagcucgagaugaacuacuacggcaagcaggagaacugguacucccucaagaagaacucccgcucccucggcgagaacgacgacggcaacaacgaggacaacgagaagcuccgcaagcccaagcacaagaagcucaagcagcccgccgacggcaaccccgaccccaacgccaaccccaacgucgaccccaacgccaaccccaacgucgaccccaacgccaaccccaacgucgaccccaacgccaaccccaacgccaaccccaacgccaaccccaacgccaaccccaacgccaaccccaacgccaaccccaacgccaaccccaacgccaaccccaacgccaaccccaacgccaaccccaacgccaaccccaacgccaaccccaacgccaaccccaacgccaaccccaacgccaaccccaacgccaaccccaacgccaaccccaacgucgaccccaacgccaaccccaacgccaaccccaacgccaaccccaacgccaaccccaacgccaaccccaacgccaaccccaacgccaaccccaacgccaaccccaacgccaaccccaacgccaaccccaacgccaaccccaacgccaaccccaacgccaaccccaacgccaaccccaacgccaaccccaacgccaaccccaacgccaaccccaacgccaaccccggcggcggcggcuccgagcccuccgacaagcacaucaaggaguaccucaacaagauccagaacucccucaucaagcccggcuccgccaacaagcccaaggacgagcucgacuacgccaacgacaucgagaagaagaucugcaagauggagaagugcuccugaggacuaguuauaagacugacuagcccgaugggccucccaacgggcccuccuccccuccuugcaccgagauuaauaaaaaaaaaaaaaaaaaaaaaaaaaaaaaaaaaaaaaaaaaaaaaaaaaaaaaaaaaaaaaaaaugcaucccccccccccccccccccccccccccccccaaaggcucuuuucagagccaccagaauu

SEQ ID NO: 1883 - RNA, 1195 nt, Artificial Sequence
  mRNA Design i-3 (A64-N5-C30-hSL-N5) comprising derived and/or modified sequence from Pf(3D7)__XP_001351122.1__HsALB_Pf-CSP(19-325) (opt2)
aggagaaagcuuaccaugaagugggucaccuucaucucccuccucuuccucuucuccuccgccuacucccucuuccaggaguaccagugcuacggcuccuccuccaacacccgcguccucaacgagcucaacuacgacaacgccggcaccaaccucuacaacgagcucgagaugaacuacuacggcaagcaggagaacugguacucccucaagaagaacucccgcucccucggcgagaacgacgacggcaacaacgaggacaacgagaagcuccgcaagcccaagcacaagaagcucaagcagcccgccgacggcaaccccgaccccaacgccaaccccaacgucgaccccaacgccaaccccaacgucgaccccaacgccaaccccaacgucgaccccaacgccaaccccaacgccaaccccaacgccaaccccaacgccaaccccaacgccaaccccaacgccaaccccaacgccaaccccaacgccaaccccaacgccaaccccaacgccaaccccaacgccaaccccaacgccaaccccaacgccaaccccaacgccaaccccaacgccaaccccaacgccaaccccaacgccaaccccaacgucgaccccaacgccaaccccaacgccaaccccaacgccaaccccaacgccaaccccaacgccaaccccaacgccaaccccaacgccaaccccaacgccaaccccaacgccaaccccaacgccaaccccaacgccaaccccaacgccaaccccaacgccaaccccaacgccaaccccaacgccaaccccaacgccaaccccaacgccaaccccaacgccaaccccaacaagaacaaccagggcaacggccagggccacaacaugcccaacgaccccaaccgcaacgucgacgagaacgccaacgccaacuccgccgucaagaacaacaacaacgaggagcccuccgacaagcacaucaaggaguaccucaacaagauccagaacugaggacuaguuauaagacugacuagcccgaugggccucccaacgggcccuccuccccuccuugcaccgagauuaauaaaaaaaaaaaaaaaaaaaaaaaaaaaaaaaaaaaaaaaaaaaaaaaaaaaaaaaaaaaaaaaaugcaucccccccccccccccccccccccccccccccaaaggcucuuuucagagccaccagaauu

SEQ ID NO: 1884 - RNA, 1372 nt, Artificial Sequence
  mRNA Design i-3 (A64-N5-C30-hSL-N5) comprising derived and/or modified sequence from Pf(3D7)__XP_001351122.1__HsALB_Pf-CSP(19-384) (opt2)
aggagaaagcuuaccaugaagugggucaccuucaucucccuccucuuccucuucuccuccgccuacucccucuuccaggaguaccagugcuacggcuccuccuccaacacccgcguccucaacgagcucaacuacgacaacgccggcaccaaccucuacaacgagcucgagaugaacuacuacggcaagcaggagaacugguacucccucaagaagaacucccgcucccucggcgagaacgacgacggcaacaacgaggacaacgagaagcuccgcaagcccaagcacaagaagcucaagcagcccgccgacggcaaccccgaccccaacgccaaccccaacgucgaccccaacgccaaccccaacgucgaccccaacgccaaccccaacgucgaccccaacgccaaccccaacgccaaccccaacgccaaccccaacgccaaccccaacgccaaccccaacgccaaccccaacgccaaccccaacgccaaccccaacgccaaccccaacgccaaccccaacgccaaccccaacgccaaccccaacgccaaccccaacgccaaccccaacgccaaccccaacgccaaccccaacgccaaccccaacgucgaccccaacgccaaccccaacgccaaccccaacgccaaccccaacgccaaccccaacgccaaccccaacgccaaccccaacgccaaccccaacgccaaccccaacgccaaccccaacgccaaccccaacgccaaccccaacgccaaccccaacgccaaccccaacgccaaccccaacgccaaccccaacgccaaccccaacgccaaccccaacgccaaccccaacaagaacaaccagggcaacggccagggccacaacaugcccaacgaccccaaccgcaacgucgacgagaacgccaacgccaacuccgccgucaagaacaacaacaacgaggagcccuccgacaagcacaucaaggaguaccucaacaagauccagaacucccucuccaccgaguggucccccugcuccgucaccugcggcaacggcauccagguccgcaucaagcccggcuccgccaacaagcccaaggacgagcucgacuacgccaacgacaucgagaagaagaucugcaagauggagaagugcuccuccgucuucaacgucgucaacuccuccugaggacuaguuauaagacugacuagcccgaugggccucccaacgggcccuccuccccuccuugcaccgagauuaauaaaaaaaaaaaaaaaaaaaaaaaaaaaaaaaaaaaaaaaaaaaaaaaaaaaaaaaaaaaaaaaaugcaucccccccccccccccccccccccccccccccaaaggcucuuuucagagccaccagaauu

SEQ ID NO: 1885 - RNA, 1510 nt, Artificial Sequence
  mRNA Design i-3 (A64-N5-C30-hSL-N5) comprising derived and/or modified sequence from Pf(3D7)__XP_001351122.1__HsALB_Pf-CSP(19-384)_TM domain HA (opt2)
aggagaaagcuuaccaugaagugggucaccuucaucucccuccucuuccucuucuccuccgccuacucccucuuccaggaguaccagugcuacggcuccuccuccaacacccgcguccucaacgagcucaacuacgacaacgccggcaccaaccucuacaacgagcucgagaugaacuacuacggcaagcaggagaacugguacucccucaagaagaacucccgcucccucggcgagaacgacgacggcaacaacgaggacaacgagaagcuccgcaagcccaagcacaagaagcucaagcagcccgccgacggcaaccccgaccccaacgccaaccccaacgucgaccccaacgccaaccccaacgucgaccccaacgccaaccccaacgucgaccccaacgccaaccccaacgccaaccccaacgccaaccccaacgccaaccccaacgccaaccccaacgccaaccccaacgccaaccccaacgccaaccccaacgccaaccccaacgccaaccccaacgccaaccccaacgccaaccccaacgccaaccccaacgccaaccccaacgccaaccccaacgccaaccccaacgccaaccccaacgucgaccccaacgccaaccccaacgccaaccccaacgccaaccccaacgccaaccccaacgccaaccccaacgccaaccccaacgccaaccccaacgccaaccccaacgccaaccccaacgccaaccccaacgccaaccccaacgccaaccccaacgccaaccccaacgccaaccccaacgccaaccccaacgccaaccccaacgccaaccccaacgccaaccccaacaagaacaaccagggcaacggccagggccacaacaugcccaacgaccccaaccgcaacgucgacgagaacgccaacgccaacuccgccgucaagaacaacaacaacgaggagcccuccgacaagcacaucaaggaguaccucaacaagauccagaacucccucuccaccgaguggucccccugcuccgucaccugcggcaacggcauccagguccgcaucaagcccggcuccgccaacaagcccaaggacgagcucgacuacgccaacgacaucgagaagaagaucugcaagauggagaagugcuccuccgucuucaacgucgucaacuccuccaagcucgaguccacccgcaucuaccagauccucgccaucuacuccaccgucgccuccucccucguccucgucgucucccucggcgccaucuccuucuggaugugcuccaacggcucccuccagugccgcaucugcaucugaggacuaguuauaagacugacuagcccgaugggccucccaacgggcccuccuccccuccuugcaccgagauuaauaaaaaaaaaaaaaaaaaaaaaaaaaaaaaaaaaaaaaaaaaaaaaaaaaaaaaaaaaaaaaaaaugcaucccccccccccccccccccccccccccccccaaaggcucuuuucagagccaccagaauu

SEQ ID NO: 1886 - RNA, 1222 nt, Artificial Sequence
  mRNA Design i-3 (A64-N5-C30-hSL-N5) comprising derived and/or modified sequence from Pf(3D7)__XP_001351122.1__HsALB_Pf-CSP(82-397) (opt2)
aggagaaagcuuaccaugaagugggucaccuucaucucccuccucuuccucuucuccuccgccuacuccgacaacgagaagcuccgcaagcccaagcacaagaagcucaagcagcccgccgacggcaaccccgaccccaacgccaaccccaacgucgaccccaacgccaaccccaacgucgaccccaacgccaaccccaacgucgaccccaacgccaaccccaacgccaaccccaacgccaaccccaacgccaaccccaacgccaaccccaacgccaaccccaacgccaaccccaacgccaaccccaacgccaaccccaacgccaaccccaacgccaaccccaacgccaaccccaacgccaaccccaacgccaaccccaacgccaaccccaacgccaaccccaacgccaaccccaacgucgaccccaacgccaaccccaacgccaaccccaacgccaaccccaacgccaaccccaacgccaaccccaacgccaaccccaacgccaaccccaacgccaaccccaacgccaaccccaacgccaaccccaacgccaaccccaacgccaaccccaacgccaaccccaacgccaaccccaacgccaaccccaacgccaaccccaacgccaaccccaacgccaaccccaacaagaacaaccagggcaacggccagggccacaacaugcccaacgaccccaaccgcaacgucgacgagaacgccaacgccaacuccgccgucaagaacaacaacaacgaggagcccuccgacaagcacaucaaggaguaccucaacaagauccagaacucccucuccaccgaguggucccccugcuccgucaccugcggcaacggcauccagguccgcaucaagcccggcuccgccaacaagcccaaggacgagcucgacuacgccaacgacaucgagaagaagaucugcaagauggagaagugcuccuccgucuucaacgucgucaacuccuccaucggccucaucaugguccucuccuuccucuuccucaacugaggacuaguuauaagacugacuagcccgaugggccucccaacgggcccuccuccccuccuugcaccgagauuaauaaaaaaaaaaaaaaaaaaaaaaaaaaaaaaaaaaaaaaaaaaaaaaaaaaaaaaaaaaaaaaaaugcaucccccccccccccccccccccccccccccccaaaggcucuuuucagagccaccagaauu

SEQ ID NO: 1887 - RNA, 574 nt, Artificial Sequence
  mRNA Design i-3 (A64-N5-C30-hSL-N5) comprising derived and/or modified sequence from Pf(3D7)__XP_001351122.1__HsALB_Pf-CSP(93-192) (opt2)
aggagaaagcuuaccaugaagugggucaccuucaucucccuccucuuccucuucuccuccgccuacuccaagcucaagcagcccgccgacggcaaccccgaccccaacgccaaccccaacgucgaccccaacgccaaccccaacgucgaccccaacgccaaccccaacgucgaccccaacgccaaccccaacgccaaccccaacgccaaccccaacgccaaccccaacgccaaccccaacgccaaccccaacgccaaccccaacgccaaccccaacgccaaccccaacgccaaccccaacgccaaccccaacgccaaccccaacgccaaccccaacgccaaccccaacgccaaccccaacgccaaccccugaggacuaguuauaagacugacuagcccgaugggccucccaacgggcccuccuccccuccuugcaccgagauuaauaaaaaaaaaaaaaaaaaaaaaaaaaaaaaaaaaaaaaaaaaaaaaaaaaaaaaaaaaaaaaaaaugcaucccccccccccccccccccccccccccccccaaaggcucuuuucagagccaccagaauu

SEQ ID NO: 1888 - RNA, 814 nt, Artificial Sequence
  mRNA Design i-3 (A64-N5-C30-hSL-N5) comprising derived and/or modified sequence from Pf(3D7)__XP_001351122.1__HsALB_Pf-CSP(93-272) (opt2)
aggagaaagcuuaccaugaagugggucaccuucaucucccuccucuuccucuucuccuccgccuacuccaagcucaagcagcccgccgacggcaaccccgaccccaacgccaaccccaacgucgaccccaacgccaaccccaacgucgaccccaacgccaaccccaacgucgaccccaacgccaaccccaacgccaaccccaacgccaaccccaacgccaaccccaacgccaaccccaacgccaaccccaacgccaaccccaacgccaaccccaacgccaaccccaacgccaaccccaacgccaaccccaacgccaaccccaacgccaaccccaacgccaaccccaacgccaaccccaacgccaaccccaacgccaaccccaacgucgaccccaacgccaaccccaacgccaaccccaacgccaaccccaacgccaaccccaacgccaaccccaacgccaaccccaacgccaaccccaacgccaaccccaacgccaaccccaacgccaaccccaacgccaaccccaacgccaaccccaacgccaaccccaacgccaaccccaacgccaaccccaacgccaaccccaacgccaaccccaacgccaaccccugaggacuaguuauaagacugacuagcccgaugggccucccaacgggcccuccuccccuccuugcaccgagauuaauaaaaaaaaaaaaaaaaaaaaaaaaaaaaaaaaaaaaaaaaaaaaaaaaaaaaaaaaaaaaaaaaugcaucccccccccccccccccccccccccccccccaaaggcucuuuucagagccaccagaauu

SEQ ID NO: 1889 - RNA, 1189 nt, Artificial Sequence
  mRNA Design i-3 (A64-N5-C30-hSL-N5) comprising derived and/or modified sequence from Pf(3D7)__XP_001351122.1__HsALB_Pf-CSP(93-397) (opt2)
aggagaaagcuuaccaugaagugggucaccuucaucucccuccucuuccucuucuccuccgccuacuccaagcucaagcagcccgccgacggcaaccccgaccccaacgccaaccccaacgucgaccccaacgccaaccccaacgucgaccccaacgccaaccccaacgucgaccccaacgccaaccccaacgccaaccccaacgccaaccccaacgccaaccccaacgccaaccccaacgccaaccccaacgccaaccccaacgccaaccccaacgccaaccccaacgccaaccccaacgccaaccccaacgccaaccccaacgccaaccccaacgccaaccccaacgccaaccccaacgccaaccccaacgccaaccccaacgucgaccccaacgccaaccccaacgccaaccccaacgccaaccccaacgccaaccccaacgccaaccccaacgccaaccccaacgccaaccccaacgccaaccccaacgccaaccccaacgccaaccccaacgccaaccccaacgccaaccccaacgccaaccccaacgccaaccccaacgccaaccccaacgccaaccccaacgccaaccccaacgccaaccccaacaagaacaaccagggcaacggccagggccacaacaugcccaacgaccccaaccgcaacgucgacgagaacgccaacgccaacuccgccgucaagaacaacaacaacgaggagcccuccgacaagcacaucaaggaguaccucaacaagauccagaacucccucuccaccgaguggucccccugcuccgucaccugcggcaacggcauccagguccgcaucaagcccggcuccgccaacaagcccaaggacgagcucgacuacgccaacgacaucgagaagaagaucugcaagauggagaagugcuccuccgucuucaacgucgucaacuccuccaucggccucaucaugguccucuccuuccucuuccucaacugaggacuaguuauaagacugacuagcccgaugggccucccaacgggcccuccuccccuccuugcaccgagauuaauaaaaaaaaaaaaaaaaaaaaaaaaaaaaaaaaaaaaaaaaaaaaaaaaaaaaaaaaaaaaaaaaugcaucccccccccccccccccccccccccccccccaaaggcucuuuucagagccaccagaauu

SEQ ID NO: 1890 - RNA, 559 nt, Artificial Sequence
  mRNA Design i-3 (A64-N5-C30-hSL-N5) comprising derived and/or modified sequence from Pf(3D7)__XP_001351122.1__HsALB_Pf-CSP(98-192) (opt2)
aggagaaagcuuaccaugaagugggucaccuucaucucccuccucuuccucuucuccuccgccuacuccgccgacggcaaccccgaccccaacgccaaccccaacgucgaccccaacgccaaccccaacgucgaccccaacgccaaccccaacgucgaccccaacgccaaccccaacgccaaccccaacgccaaccccaacgccaaccccaacgccaaccccaacgccaaccccaacgccaaccccaacgccaaccccaacgccaaccccaacgccaaccccaacgccaaccccaacgccaaccccaacgccaaccccaacgccaaccccaacgccaaccccaacgccaaccccugaggacuaguuauaagacugacuagcccgaugggccucccaacgggcccuccuccccuccuugcaccgagauuaauaaaaaaaaaaaaaaaaaaaaaaaaaaaaaaaaaaaaaaaaaaaaaaaaaaaaaaaaaaaaaaaaugcaucccccccccccccccccccccccccccccccaaaggcucuuuucagagccaccagaauu

SEQ ID NO: 1891 - RNA, 799 nt, Artificial Sequence
  mRNA Design i-3 (A64-N5-C30-hSL-N5) comprising derived and/or modified sequence from Pf(3D7)__XP_001351122.1__HsALB_Pf-CSP(98-272) (opt2)
aggagaaagcuuaccaugaagugggucaccuucaucucccuccucuuccucuucuccuccgccuacuccgccgacggcaaccccgaccccaacgccaaccccaacgucgaccccaacgccaaccccaacgucgaccccaacgccaaccccaacgucgaccccaacgccaaccccaacgccaaccccaacgccaaccccaacgccaaccccaacgccaaccccaacgccaaccccaacgccaaccccaacgccaaccccaacgccaaccccaacgccaaccccaacgccaaccccaacgccaaccccaacgccaaccccaacgccaaccccaacgccaaccccaacgccaaccccaacgccaaccccaacgucgaccccaacgccaaccccaacgccaaccccaacgccaaccccaacgccaaccccaacgccaaccccaacgccaaccccaacgccaaccccaacgccaaccccaacgccaaccccaacgccaaccccaacgccaaccccaacgccaaccccaacgccaaccccaacgccaaccccaacgccaaccccaacgccaaccccaacgccaaccccaacgccaaccccugaggacuaguuauaagacugacuagcccgaugggccucccaacgggcccuccuccccuccuugcaccgagauuaauaaaaaaaaaaaaaaaaaaaaaaaaaaaaaaaaaaaaaaaaaaaaaaaaaaaaaaaaaaaaaaaaugcaucccccccccccccccccccccccccccccccaaaggcucuuuucagagccaccagaauu

SEQ ID NO: 1892 - RNA, 1105 nt, Artificial Sequence
  mRNA Design i-3 (A64-N5-C30-hSL-N5) comprising derived and/or modified sequence from Pf(3D7)__XP_001351122.1__HsALB_Pf-CSP(98-374) (opt2)
aggagaaagcuuaccaugaagugggucaccuucaucucccuccucuuccucuucuccuccgccuacuccgccgacggcaaccccgaccccaacgccaaccccaacgucgaccccaacgccaaccccaacgucgaccccaacgccaaccccaacgucgaccccaacgccaaccccaacgccaaccccaacgccaaccccaacgccaaccccaacgccaaccccaacgccaaccccaacgccaaccccaacgccaaccccaacgccaaccccaacgccaaccccaacgccaaccccaacgccaaccccaacgccaaccccaacgccaaccccaacgccaaccccaacgccaaccccaacgccaaccccaacgucgaccccaacgccaaccccaacgccaaccccaacgccaaccccaacgccaaccccaacgccaaccccaacgccaaccccaacgccaaccccaacgccaaccccaacgccaaccccaacgccaaccccaacgccaaccccaacgccaaccccaacgccaaccccaacgccaaccccaacgccaaccccaacgccaaccccaacgccaaccccaacgccaaccccaacaagaacaaccagggcaacggccagggccacaacaugcccaacgaccccaaccgcaacgucgacgagaacgccaacgccaacuccgccgucaagaacaacaacaacgaggagcccuccgacaagcacaucaaggaguaccucaacaagauccagaacucccucuccaccgaguggucccccugcuccgucaccugcggcaacggcauccagguccgcaucaagcccggcuccgccaacaagcccaaggacgagcucgacuacgccaacgacaucgagaagaagaucugcaagauggagaagugcugaggacuaguuauaagacugacuagcccgaugggccucccaacgggcccuccuccccuccuugcaccgagauuaauaaaaaaaaaaaaaaaaaaaaaaaaaaaaaaaaaaaaaaaaaaaaaaaaaaaaaaaaaaaaaaaaugcaucccccccccccccccccccccccccccccccaaaggcucuuuucagagccaccagaauu

SEQ ID NO: 1893 - RNA, 1174 nt, Artificial Sequence
  mRNA Design i-3 (A64-N5-C30-hSL-N5) comprising derived and/or modified sequence from Pf(3D7)__XP_001351122.1__HsALB_Pf-CSP(98-397) (opt2)
aggagaaagcuuaccaugaagugggucaccuucaucucccuccucuuccucuucuccuccgccuacuccgccgacggcaaccccgaccccaacgccaaccccaacgucgaccccaacgccaaccccaacgucgaccccaacgccaaccccaacgucgaccccaacgccaaccccaacgccaaccccaacgccaaccccaacgccaaccccaacgccaaccccaacgccaaccccaacgccaaccccaacgccaaccccaacgccaaccccaacgccaaccccaacgccaaccccaacgccaaccccaacgccaaccccaacgccaaccccaacgccaaccccaacgccaaccccaacgccaaccccaacgucgaccccaacgccaaccccaacgccaaccccaacgccaaccccaacgccaaccccaacgccaaccccaacgccaaccccaacgccaaccccaacgccaaccccaacgccaaccccaacgccaaccccaacgccaaccccaacgccaaccccaacgccaaccccaacgccaaccccaacgccaaccccaacgccaaccccaacgccaaccccaacgccaaccccaacaagaacaaccagggcaacggccagggccacaacaugcccaacgaccccaaccgcaacgucgacgagaacgccaacgccaacuccgccgucaagaacaacaacaacgaggagcccuccgacaagcacaucaaggaguaccucaacaagauccagaacucccucuccaccgaguggucccccugcuccgucaccugcggcaacggcauccagguccgcaucaagcccggcuccgccaacaagcccaaggacgagcucgacuacgccaacgacaucgagaagaagaucugcaagauggagaagugcuccuccgucuucaacgucgucaacuccuccaucggccucaucaugguccucuccuuccucuuccucaacugaggacuaguuauaagacugacuagcccgaugggccucccaacgggcccuccuccccuccuugcaccgagauuaauaaaaaaaaaaaaaaaaaaaaaaaaaaaaaaaaaaaaaaaaaaaaaaaaaaaaaaaaaaaaaaaaugcaucccccccccccccccccccccccccccccccaaaggcucuuuucagagccaccagaauu

SEQ ID NO: 1894 - RNA, 1501 nt, Artificial Sequence
  mRNA Design i-3 (A64-N5-C30-hSL-N5) comprising derived and/or modified sequence from Pf(3D7)__XP_001351122.1__HsALB_Pf-CSP(199-377)_L(PVTN)_HBsAg (opt2)
aggagaaagcuuaccaugaagugggucaccuucaucucccuccucuuccucuucuccuccgccuacuccgaccccaacgccaaccccaacgccaaccccaacgccaaccccaacgccaaccccaacgccaaccccaacgccaaccccaacgccaaccccaacgccaaccccaacgccaaccccaacgccaaccccaacgccaaccccaacgccaaccccaacgccaaccccaacgccaaccccaacgccaaccccaacgccaaccccaacgccaaccccaacgccaaccccaacaagaacaaccagggcaacggccagggccacaacaugcccaacgaccccaaccgcaacgucgacgagaacgccaacgccaacuccgccgucaagaacaacaacaacgaggagcccuccgacaagcacaucaaggaguaccucaacaagauccagaacucccucuccaccgaguggucccccugcuccgucaccugcggcaacggcauccagguccgcaucaagcccggcuccgccaacaagcccaaggacgagcucgacuacgccaacgacaucgagaagaagaucugcaagauggagaagugcuccuccguccccgucaccaacauggagaacaucaccuccggcuuccucggcccccuccucguccuccaggccggcuucuuccuccucacccgcauccucaccaucccccagucccucgacuccugguggaccucccucaacuuccucggcggcucccccgucugccucggccagaacucccagucccccaccuccaaccacucccccaccuccugcccccccaucugccccggcuaccgcuggaugugccuccgccgcuucaucaucuuccucuucauccuccuccucugccucaucuuccuccucguccuccucgacuaccagggcaugcuccccgucugcccccucauccccggcuccaccaccaccaacaccggccccugcaagaccugcaccacccccgcccagggcaacuccauguuccccuccugcugcugcaccaagcccaccgacggcaacugcaccugcauccccauccccuccuccugggccuucgccaaguaccucugggagugggccuccguccgcuucuccuggcucucccuccucguccccuucguccagugguucgucggccucucccccaccgucuggcucuccgccaucuggaugaugugguacuggggccccucccucuacuccaucgucucccccuucaucccccuccuccccaucuucuucugccucugggucuacaucugaggacuaguuauaagacugacuagcccgaugggccucccaacgggcccuccuccccuccuugcaccgagauuaauaaaaaaaaaaaaaaaaaaaaaaaaaaaaaaaaaaaaaaaaaaaaaaaaaaaaaaaaaaaaaaaaugcaucccccccccccccccccccccccccccccccaaaggcucuuuucagagccaccagaauu

SEQ ID NO: 1895 - RNA, 1240 nt, Artificial Sequence
  mRNA Design i-3 (A64-N5-C30-hSL-N5) comprising derived and/or modified sequence from Pb(ANKA)__XP_022712148.1__Pb-CSP (opt2)
aggagaaagcuuaccaugaagaagugcaccauccucgucgucgccucccuccuccucgucaacucccuccuccccggcuacggccagaacaaguccauccaggcccagcgcaaccucaacgagcucugcuacaacgagggcaacgacaacaagcucuaccacguccucaacuccaagaacggcaagaucuacaaccgcaacaccgucaaccgccuccucgccgacgcccccgagggcaagaagaacgagaagaagaacgagaagaucgagcgcaacaacaagcucaagcagcccccccccccccccaaccccaacgacccccccccccccaaccccaacgacccccccccccccaaccccaacgacccccccccccccaaccccaacgacccccccccccccaacgccaacgacccccccccccccaacgccaacgaccccgccccccccaacgccaacgaccccgccccccccaacgccaacgaccccgccccccccaacgccaacgaccccgccccccccaacgccaacgacccccccccccccaaccccaacgaccccgccccccccaacgccaacgacccccccccccccaaccccaacgaccccgcccccccccagggcaacaacaacccccagccccagccccgcccccagccccagccccagccccagccccagccccagccccagccccagccccagccccgcccccagccccagccccagcccggcggcaacaacaacaacaagaacaacaacaacgacgacuccuacauccccuccgccgagaagauccucgaguucgucaagcagauccgcgacuccaucaccgaggaguggucccagugcaacgucaccugcggcuccggcauccgcguccgcaagcgcaagggcuccaacaagaaggccgaggaccucacccucgaggacaucgacaccgagaucugcaagauggacaagugcuccuccaucuucaacaucgucuccaacucccucggcuucgucauccuccucguccucgucuucuucaacugaggacuaguuauaagacugacuagcccgaugggccucccaacgggcccuccuccccuccuugcaccgagauuaauaaaaaaaaaaaaaaaaaaaaaaaaaaaaaaaaaaaaaaaaaaaaaaaaaaaaaaaaaaaaaaaaugcaucccccccccccccccccccccccccccccccaaaggcucuuuucagagccaccagaauu

SEQ ID NO: 1896 - RNA, 1405 nt, Artificial Sequence
  mRNA Design i-3 (A64-N5-C30-hSL-N5) comprising derived and/or modified sequence from Pb(ANKA)__XP_022712148.1__Pb-CSP_L(G4SG4)_TM domain HA (opt2)
aggagaaagcuuaccaugaagaagugcaccauccucgucgucgccucccuccuccucgucaacucccuccuccccggcuacggccagaacaaguccauccaggcccagcgcaaccucaacgagcucugcuacaacgagggcaacgacaacaagcucuaccacguccucaacuccaagaacggcaagaucuacaaccgcaacaccgucaaccgccuccucgccgacgcccccgagggcaagaagaacgagaagaagaacgagaagaucgagcgcaacaacaagcucaagcagcccccccccccccccaaccccaacgacccccccccccccaaccccaacgacccccccccccccaaccccaacgacccccccccccccaaccccaacgacccccccccccccaacgccaacgacccccccccccccaacgccaacgaccccgccccccccaacgccaacgaccccgccccccccaacgccaacgaccccgccccccccaacgccaacgaccccgccccccccaacgccaacgacccccccccccccaaccccaacgaccccgccccccccaacgccaacgacccccccccccccaaccccaacgaccccgcccccccccagggcaacaacaacccccagccccagccccgcccccagccccagccccagccccagccccagccccagccccagccccagccccagccccgcccccagccccagccccagcccggcggcaacaacaacaacaagaacaacaacaacgacgacuccuacauccccuccgccgagaagauccucgaguucgucaagcagauccgcgacuccaucaccgaggaguggucccagugcaacgucaccugcggcuccggcauccgcguccgcaagcgcaagggcuccaacaagaaggccgaggaccucacccucgaggacaucgacaccgagaucugcaagauggacaagugcuccuccaucuucaacaucgucuccaacucccucggcuucgucauccuccucguccucgucuucuucaacggcggcggcggcuccggcggcggcggcaagcucgaguccacccgcaucuaccagauccucgccaucuacuccaccgucgccuccucccucguccucgucgucucccucggcgccaucuccuucuggaugugcuccaacggcucccuccagugccgcaucugcaucugaggacuaguuauaagacugacuagcccgaugggccucccaacgggcccuccuccccuccuugcaccgagauuaauaaaaaaaaaaaaaaaaaaaaaaaaaaaaaaaaaaaaaaaaaaaaaaaaaaaaaaaaaaaaaaaaugcaucccccccccccccccccccccccccccccccaaaggcucuuuucagagccaccagaauu

SEQ ID NO: 1897 - RNA, 1225 nt, Artificial Sequence
  mRNA Design i-3 (A64-N5-C30-hSL-N5) comprising derived and/or modified sequence from Pb(ANKA)__XP_022712148.1__HsALB_Pb-CSP(24-340) (opt2)
aggagaaagcuuaccaugaagugggucaccuucaucucccuccucuuccucuucuccuccgccuacucccagaacaaguccauccaggcccagcgcaaccucaacgagcucugcuacaacgagggcaacgacaacaagcucuaccacguccucaacuccaagaacggcaagaucuacaaccgcaacaccgucaaccgccuccucgccgacgcccccgagggcaagaagaacgagaagaagaacgagaagaucgagcgcaacaacaagcucaagcagcccccccccccccccaaccccaacgacccccccccccccaaccccaacgacccccccccccccaaccccaacgacccccccccccccaaccccaacgacccccccccccccaacgccaacgacccccccccccccaacgccaacgaccccgccccccccaacgccaacgaccccgccccccccaacgccaacgaccccgccccccccaacgccaacgaccccgccccccccaacgccaacgacccccccccccccaaccccaacgaccccgccccccccaacgccaacgacccccccccccccaaccccaacgaccccgcccccccccagggcaacaacaacccccagccccagccccgcccccagccccagccccagccccagccccagccccagccccagccccagccccagccccgcccccagccccagccccagcccggcggcaacaacaacaacaagaacaacaacaacgacgacuccuacauccccuccgccgagaagauccucgaguucgucaagcagauccgcgacuccaucaccgaggaguggucccagugcaacgucaccugcggcuccggcauccgcguccgcaagcgcaagggcuccaacaagaaggccgaggaccucacccucgaggacaucgacaccgagaucugcaagauggacaagugcuccuccaucuucaacaucgucuccaacucccucggcuucgucauccuccucguccucgucuucuucaacugaggacuaguuauaagacugacuagcccgaugggccucccaacgggcccuccuccccuccuugcaccgagauuaauaaaaaaaaaaaaaaaaaaaaaaaaaaaaaaaaaaaaaaaaaaaaaaaaaaaaaaaaaaaaaaaaugcaucccccccccccccccccccccccccccccccaaaggcucuuuucagagccaccagaauu

SEQ ID NO: 1898 - RNA, 1243 nt, Artificial Sequence
  mRNA Design i-3 (A64-N5-C30-hSL-N5) comprising derived and/or modified sequence from Pb(ANKA)__XP_022712148.1__HsIns-iso1_Pb-CSP(24-340) (opt2)
aggagaaagcuuaccauggcccucuggaugcgccuccucccccuccucgcccuccucgcccucuggggccccgaccccgccgccgcccagaacaaguccauccaggcccagcgcaaccucaacgagcucugcuacaacgagggcaacgacaacaagcucuaccacguccucaacuccaagaacggcaagaucuacaaccgcaacaccgucaaccgccuccucgccgacgcccccgagggcaagaagaacgagaagaagaacgagaagaucgagcgcaacaacaagcucaagcagcccccccccccccccaaccccaacgacccccccccccccaaccccaacgacccccccccccccaaccccaacgacccccccccccccaaccccaacgacccccccccccccaacgccaacgacccccccccccccaacgccaacgaccccgccccccccaacgccaacgaccccgccccccccaacgccaacgaccccgccccccccaacgccaacgaccccgccccccccaacgccaacgacccccccccccccaaccccaacgaccccgccccccccaacgccaacgacccccccccccccaaccccaacgaccccgcccccccccagggcaacaacaacccccagccccagccccgcccccagccccagccccagccccagccccagccccagccccagccccagccccagccccgcccccagccccagccccagcccggcggcaacaacaacaacaagaacaacaacaacgacgacuccuacauccccuccgccgagaagauccucgaguucgucaagcagauccgcgacuccaucaccgaggaguggucccagugcaacgucaccugcggcuccggcauccgcguccgcaagcgcaagggcuccaacaagaaggccgaggaccucacccucgaggacaucgacaccgagaucugcaagauggacaagugcuccuccaucuucaacaucgucuccaacucccucggcuucgucauccuccucguccucgucuucuucaacugaggacuaguuauaagacugacuagcccgaugggccucccaacgggcccuccuccccuccuugcaccgagauuaauaaaaaaaaaaaaaaaaaaaaaaaaaaaaaaaaaaaaaaaaaaaaaaaaaaaaaaaaaaaaaaaaugcaucccccccccccccccccccccccccccccccaaaggcucuuuucagagccaccagaauu

SEQ ID NO: 1899 - RNA, 1222 nt, Artificial Sequence
  mRNA Design i-3 (A64-N5-C30-hSL-N5) comprising derived and/or modified sequence from Pb(ANKA)__XP_022712148.1__HsSPARC_Pb-CSP(24-340) (opt2)
aggagaaagcuuaccaugcgcgccuggaucuucuuccuccucugccucgccggccgcgcccucgcccagaacaaguccauccaggcccagcgcaaccucaacgagcucugcuacaacgagggcaacgacaacaagcucuaccacguccucaacuccaagaacggcaagaucuacaaccgcaacaccgucaaccgccuccucgccgacgcccccgagggcaagaagaacgagaagaagaacgagaagaucgagcgcaacaacaagcucaagcagcccccccccccccccaaccccaacgacccccccccccccaaccccaacgacccccccccccccaaccccaacgacccccccccccccaaccccaacgacccccccccccccaacgccaacgacccccccccccccaacgccaacgaccccgccccccccaacgccaacgaccccgccccccccaacgccaacgaccccgccccccccaacgccaacgaccccgccccccccaacgccaacgacccccccccccccaaccccaacgaccccgccccccccaacgccaacgacccccccccccccaaccccaacgaccccgcccccccccagggcaacaacaacccccagccccagccccgcccccagccccagccccagccccagccccagccccagccccagccccagccccagccccgcccccagccccagccccagcccggcggcaacaacaacaacaagaacaacaacaacgacgacuccuacauccccuccgccgagaagauccucgaguucgucaagcagauccgcgacuccaucaccgaggaguggucccagugcaacgucaccugcggcuccggcauccgcguccgcaagcgcaagggcuccaacaagaaggccgaggaccucacccucgaggacaucgacaccgagaucugcaagauggacaagugcuccuccaucuucaacaucgucuccaacucccucggcuucgucauccuccucguccucgucuucuucaacugaggacuaguuauaagacugacuagcccgaugggccucccaacgggcccuccuccccuccuugcaccgagauuaauaaaaaaaaaaaaaaaaaaaaaaaaaaaaaaaaaaaaaaaaaaaaaaaaaaaaaaaaaaaaaaaaugcaucccccccccccccccccccccccccccccccaaaggcucuuuucagagccaccagaauu

SEQ ID NO: 1900 - RNA, 1225 nt, Artificial Sequence
  mRNA Design i-3 (A64-N5-C30-hSL-N5) comprising derived and/or modified sequence from Pb(ANKA)__XP_022712148.1__IgE_Pb-CSP(24-340) (opt2)
aggagaaagcuuaccauggacuggaccuggauccucuuccucgucgccgccgccacccgcguccacucccagaacaaguccauccaggcccagcgcaaccucaacgagcucugcuacaacgagggcaacgacaacaagcucuaccacguccucaacuccaagaacggcaagaucuacaaccgcaacaccgucaaccgccuccucgccgacgcccccgagggcaagaagaacgagaagaagaacgagaagaucgagcgcaacaacaagcucaagcagcccccccccccccccaaccccaacgacccccccccccccaaccccaacgacccccccccccccaaccccaacgacccccccccccccaaccccaacgacccccccccccccaacgccaacgacccccccccccccaacgccaacgaccccgccccccccaacgccaacgaccccgccccccccaacgccaacgaccccgccccccccaacgccaacgaccccgccccccccaacgccaacgacccccccccccccaaccccaacgaccccgccccccccaacgccaacgacccccccccccccaaccccaacgaccccgcccccccccagggcaacaacaacccccagccccagccccgcccccagccccagccccagccccagccccagccccagccccagccccagccccagccccgcccccagccccagccccagcccggcggcaacaacaacaacaagaacaacaacaacgacgacuccuacauccccuccgccgagaagauccucgaguucgucaagcagauccgcgacuccaucaccgaggaguggucccagugcaacgucaccugcggcuccggcauccgcguccgcaagcgcaagggcuccaacaagaaggccgaggaccucacccucgaggacaucgacaccgagaucugcaagauggacaagugcuccuccaucuucaacaucgucuccaacucccucggcuucgucauccuccucguccucgucuucuucaacugaggacuaguuauaagacugacuagcccgaugggccucccaacgggcccuccuccccuccuugcaccgagauuaauaaaaaaaaaaaaaaaaaaaaaaaaaaaaaaaaaaaaaaaaaaaaaaaaaaaaaaaaaaaaaaaaugcaucccccccccccccccccccccccccccccccaaaggcucuuuucagagccaccagaauu

SEQ ID NO: 1901 - RNA, 1411 nt, Artificial Sequence
  mRNA Design i-3 (A64-N5-C30-hSL-N5) comprising derived and/or modified sequence from Pf(3D7)__XP_001351122.1__Pf-CSP (opt3)
aggagaaagcuuaccaugaugagaaagcuggccauccucagcguguccucuuuccuuuuugucgaggcucuguuccaggaauaccaaugcuauggcucaaguagcaacaccaggguuuugaaugaguuaaacuacgacaaugcagggacaaaccuguauaaugaacuagagaugaacuacuauggaaaacaggaaaauugguacucccucaagaaaaacucucggucgcugggugagaaugaugacggcaacaaugaggauaacgaaaaacuucgcaagcccaagcacaagaaacugaagcagccugccgacgggaauccagauccgaacgcgaaucccaacguggacccuaacgcuaauccaaacguagaucccaaugccaacccuaauguggacccaaacgcaaaucccaacgccaauccuaacgcuaauccaaacgcaaauccgaacgccaaucccaacgcuaacccuaaugccaacccaaaugcgaaccccaaugcaaacccuaaugccaacccaaaugcuaaccccaaugccaacccgaaugcaaacccuaaugcuaaccccaacgccaauccaaacgcgaauccuaacgccaaucccaacgucgauccaaaugcaaaccccaaugcuaacccuaaugccaacccaaaugcuaacccgaaugccaaccccaacgcaaauccuaacgccaauccaaacgcuaaucccaacgcgaauccuaacgcaaauccaaacgccaaucccaacgcuaauccgaacgccaauccuaacgcaaauccaaacgccaaccccaaugcuaacccuaaugccaaccccaaugcaaacccaaauaaaaacaaucagggaaacggccaaggucauaauaugccuaacgaccccaaucgaaacguggaugagaaugcgaacgcuaacucagccguuaagaauaacaauaacgaggaaccaagcgacaaacacauuaaggaguauuugaauaagauacagaacagucucuccacugaauggucuccguguagcgugacgugcgggaauggaauccagguccguauuaaaccuggcuccgcaaacaagcccaaagaugagcuggacuacgccaaugacaucgaaaagaaaauuuguaagauggagaaaugcucaaguguguuuaacguaguuaauagcucuaucggccugauaauggugcucuccuucuuauuucugaacugaggacuaguuauaagacugacuagcccgaugggccucccaacgggcccuccuccccuccuugcaccgagauuaauaaaaaaaaaaaaaaaaaaaaaaaaaaaaaaaaaaaaaaaaaaaaaaaaaaaaaaaaaaaaaaaaugcaucccccccccccccccccccccccccccccccaaaggcucuuuucagagccaccagaauu

SEQ ID NO: 1902 - RNA, 1342 nt, Artificial Sequence
  mRNA Design i-3 (A64-N5-C30-hSL-N5) comprising derived and/or modified sequence from Pf(3D7)__XP_001351122.1__Pf-CSP(1-374) (opt3)
aggagaaagcuuaccaugaugagaaagcuggccauccucagcguguccucuuuccuuuuugucgaggcucuguuccaggaauaccaaugcuauggcucaaguagcaacaccaggguuuugaaugaguuaaacuacgacaaugcagggacaaaccuguauaaugaacuagagaugaacuacuauggaaaacaggaaaauugguacucccucaagaaaaacucucggucgcugggugagaaugaugacggcaacaaugaggauaacgaaaaacuucgcaagcccaagcacaagaaacugaagcagccugccgacgggaauccagauccgaacgcgaaucccaacguggacccuaacgcuaauccaaacguagaucccaaugccaacccuaauguggacccaaacgcaaaucccaacgccaauccuaacgcuaauccaaacgcaaauccgaacgccaaucccaacgcuaacccuaaugccaacccaaaugcgaaccccaaugcaaacccuaaugccaacccaaaugcuaaccccaaugccaacccgaaugcaaacccuaaugcuaaccccaacgccaauccaaacgcgaauccuaacgccaaucccaacgucgauccaaaugcaaaccccaaugcuaacccuaaugccaacccaaaugcuaacccgaaugccaaccccaacgcaaauccuaacgccaauccaaacgcuaaucccaacgcgaauccuaacgcaaauccaaacgccaaucccaacgcuaauccgaacgccaauccuaacgcaaauccaaacgccaaccccaaugcuaacccuaaugccaaccccaaugcaaacccaaauaaaaacaaucagggaaacggccaaggucauaauaugccuaacgaccccaaucgaaacguggaugagaaugcgaacgcuaacucagccguuaagaauaacaauaacgaggaaccaagcgacaaacacauuaaggaguauuugaauaagauacagaacagucucuccacugaauggucuccguguagcgugacgugcgggaauggaauccagguccguauuaaaccuggcuccgcaaacaagcccaaagaugagcuggacuacgccaaugacaucgaaaagaaaauuuguaagauggagaaaugcugaggacuaguuauaagacugacuagcccgaugggccucccaacgggcccuccuccccuccuugcaccgagauuaauaaaaaaaaaaaaaaaaaaaaaaaaaaaaaaaaaaaaaaaaaaaaaaaaaaaaaaaaaaaaaaaaugcaucccccccccccccccccccccccccccccccaaaggcucuuuucagagccaccagaauu

SEQ ID NO: 1903 - RNA, 1195 nt, Artificial Sequence
  mRNA Design i-3 (A64-N5-C30-hSL-N5) comprising derived and/or modified sequence from Pf(3D7)__XP_001351122.1__Pf-CSP(1-325) (opt3)
aggagaaagcuuaccaugaugagaaagcuggccauccucagcguguccucuuuccuuuuugucgaggcucuguuccaggaauaccaaugcuauggcucaaguagcaacaccaggguuuugaaugaguuaaacuacgacaaugcagggacaaaccuguauaaugaacuagagaugaacuacuauggaaaacaggaaaauugguacucccucaagaaaaacucucggucgcugggugagaaugaugacggcaacaaugaggauaacgaaaaacuucgcaagcccaagcacaagaaacugaagcagccugccgacgggaauccagauccgaacgcgaaucccaacguggacccuaacgcuaauccaaacguagaucccaaugccaacccuaauguggacccaaacgcaaaucccaacgccaauccuaacgcuaauccaaacgcaaauccgaacgccaaucccaacgcuaacccuaaugccaacccaaaugcgaaccccaaugcaaacccuaaugccaacccaaaugcuaaccccaaugccaacccgaaugcaaacccuaaugcuaaccccaacgccaauccaaacgcgaauccuaacgccaaucccaacgucgauccaaaugcaaaccccaaugcuaacccuaaugccaacccaaaugcuaacccgaaugccaaccccaacgcaaauccuaacgccaauccaaacgcuaaucccaacgcgaauccuaacgcaaauccaaacgccaaucccaacgcuaauccgaacgccaauccuaacgcaaauccaaacgccaaccccaaugcuaacccuaaugccaaccccaaugcaaacccaaauaaaaacaaucagggaaacggccaaggucauaauaugccuaacgaccccaaucgaaacguggaugagaaugcgaacgcuaacucagccguuaagaauaacaauaacgaggaaccaagcgacaaacacauuaaggaguauuugaauaagauacagaacugaggacuaguuauaagacugacuagcccgaugggccucccaacgggcccuccuccccuccuugcaccgagauuaauaaaaaaaaaaaaaaaaaaaaaaaaaaaaaaaaaaaaaaaaaaaaaaaaaaaaaaaaaaaaaaaaugcaucccccccccccccccccccccccccccccccaaaggcucuuuucagagccaccagaauu

SEQ ID NO: 1904 - RNA, 1411 nt, Artificial Sequence
  mRNA Design i-3 (A64-N5-C30-hSL-N5) comprising derived and/or modified sequence from Pf(3D7)__XP_001351122.1__HsALB_Pf-CSP(19-397) (opt3)
aggagaaagcuuaccaugaagugggugaccuucaucagccugcucuuucuuuucuccucugccuacucacuguuucaggaguaucaaugcuacggcaguagcuccaacacaagagucuugaaugaauuaaacuaugacaaugcugggacuaaccuguacaaugagcuagaaaugaacuauuacggaaaacaggagaauugguauucucucaagaaaaacucgaggucacugggugaaaaugaugacggcaacaaugaggauaacgagaaacuucggaagcccaagcacaagaaacugaagcagccugcagacgggaauccagauccgaacgccaaucccaacguugacccuaacgcgaauccaaacguggaucccaaugcuaacccuaauguagacccaaacgccaaucccaacgcaaauccuaacgccaauccaaacgcuaauccgaacgcaaaucccaacgccaacccuaaugcuaacccaaaugccaaccccaaugcgaacccuaaugcaaacccaaaugccaaccccaaugcuaacccgaaugccaacccuaaugcaaaccccaacgcuaauccaaacgccaauccuaacgcgaaucccaacguggauccaaaugccaaccccaaugcaaacccuaaugcuaacccaaaugccaacccgaaugcuaaccccaacgccaauccuaacgcaaauccaaacgccaaucccaacgcuaauccuaacgcgaauccaaacgcaaaucccaacgccaauccgaacgcuaauccuaacgccaauccaaacgcaaaccccaaugccaacccuaaugcuaaccccaaugccaacccaaauaaaaacaaucagggaaacggccaaggucauaauaugccuaacgaccccaaucgcaacgucgaugaaaaugcaaacgcgaacagcgcugugaagaauaacaauaacgaggaaccaagugacaaacacauuaaggaguacuugaauaagauacagaacucccucucuacggaguggagcccguguuccguuaccugcgggaauggaauccaggugcgaauuaaaccuggcucagccaacaagcccaaagaugaacuggacuacgcaaaugacaucgagaagaaaauuuguaagauggaaaaaugcaguagcgucuucaacgugguaaauucuuccaucggccugauaaugguucucucauuuuuauuccugaacugaggacuaguuauaagacugacuagcccgaugggccucccaacgggcccuccuccccuccuugcaccgagauuaauaaaaaaaaaaaaaaaaaaaaaaaaaaaaaaaaaaaaaaaaaaaaaaaaaaaaaaaaaaaaaaaaugcaucccccccccccccccccccccccccccccccaaaggcucuuuucagagccaccagaauu

SEQ ID NO: 1905 - RNA, 1429 nt, Artificial Sequence
  mRNA Design i-3 (A64-N5-C30-hSL-N5) comprising derived and/or modified sequence from Pf(3D7)__XP_001351122.1__HsIns-iso1_Pf-CSP(19-397) (opt3)
aggagaaagcuuaccauggcccuguggaugagacuccuuccccuguuggcuuuacuggcacuauggggcccugacccagccgcggcucucuuccaggaguaccaaugcuaugggagcuccucuaacaccagggugcugaaugaacuuaacuacgauaaugccggaacaaaccuguauaaugaguuggaaaugaacuacuaugguaagcaggagaauugguacucacucaaaaagaacagucggagccugggcgaaaaugacgaugggaacaaugaggacaacgagaaacugcgcaagccgaaacacaagaagcucaaacagcccgcagauggaaauccugacccaaacgccaaucccaacgucgauccuaacgcuaauccaaacguugaccccaaugcaaacccuaauguggauccaaacgccaauccgaacgcuaaucccaacgccaauccuaacgcgaauccaaacgcaaaucccaacgccaacccuaaugcuaacccaaaugccaaccccaaugcaaacccgaaugcuaacccuaaugccaaccccaaugcgaacccaaaugccaacccuaaugcaaaccccaacgcuaauccaaacgccaaucccaacgcuaauccuaacguagacccaaaugccaacccgaaugcaaaccccaaugccaacccuaaugcuaacccaaaugcgaaccccaacgcaaauccuaacgccaauccaaacgcuaaucccaacgccaauccgaacgcaaauccuaacgccaauccaaacgcuaaucccaacgccaauccuaacgcaaaucccaacgcgaacccaaaugcuaacccuaaugccaaccccaaugcaaacccaaauaagaacaaucagggcaacggucaagggcauaauaugccgaacgauccuaaucgaaacguggacgaaaaugccaacgcuaacuccgccgucaaaaauaacaauaacgaggaacccucugauaagcacaucaaagaguauuuaaauaagauucagaacucgcugucaacugaguggagcccauguagugugacgugcggaaauggcauacagguucguaucaagcccggcuccgcaaacaaaccuaaggacgaacuugacuacgcuaaugauauugagaaaaagaucuguaaaauggaaaagugcucuagcguguuuaacgucguaaauuccucaauuggguugaucauggugcugaguuuccuauuucucaacugaggacuaguuauaagacugacuagcccgaugggccucccaacgggcccuccuccccuccuugcaccgagauuaauaaaaaaaaaaaaaaaaaaaaaaaaaaaaaaaaaaaaaaaaaaaaaaaaaaaaaaaaaaaaaaaaugcaucccccccccccccccccccccccccccccccaaaggcucuuuucagagccaccagaauu

SEQ ID NO: 1906 - RNA, 1408 nt, Artificial Sequence
  mRNA Design i-3 (A64-N5-C30-hSL-N5) comprising derived and/or modified sequence from Pf(3D7)__XP_001351122.1__HsSPARC_Pf-CSP(19-397) (opt3)
aggagaaagcuuaccaugagagccuggaucuucuuucugcucugccuugcuggcagggcacuggccuuguuccaggaguaccaauguuaugggagcuccucuaacacccggguguuaaaugaacugaacuacgacaaugcgggaacaaaccuauauaaugagcucgaaaugaacuacuaugguaagcaggagaauugguacucacugaaaaagaacagucgcagccuuggcgaaaaugaugacgggaacaaugaggauaacgagaaacugcgaaagcccaaacacaagaaguugaaacagccugcugacggaaauccagauccgaacgccaaucccaacgucgacccuaacgcaaauccaaacguugaucccaaugccaacccuaauguggacccaaacgcuaaucccaacgcaaauccuaacgccaauccaaacgcuaauccgaacgccaaucccaacgcgaacccuaaugcaaacccaaaugccaaccccaaugcuaacccuaaugccaacccaaaugcaaaccccaaugcuaacccgaaugccaacccuaaugcgaaccccaacgccaauccaaacgcaaauccuaacgcuaaucccaacguagauccaaaugccaaccccaaugcuaacccuaaugccaacccaaaugcaaacccgaaugccaaccccaacgcuaauccuaacgcgaauccaaacgcaaaucccaacgccaauccuaacgcuaauccaaacgccaaucccaacgcaaauccgaacgccaauccuaacgcuaauccaaacgccaaccccaaugcaaacccuaaugcgaaccccaaugcuaacccaaauaagaacaaucagggcaacggucaagggcauaauaugccuaacgaccccaaucguaacguggaugaaaaugccaacgcaaacuccgccgucaaaaauaacaauaacgaggaaccaucugacaagcacauuaaagaguaucucaauaagauacagaacucgcugucaacugaguggagcccgugcagugugacguguggaaauggcauccagguuagaauuaagccuggcuccgcuaacaaacccaaggaugaacuggacuacgccaaugacaucgagaaaaagauuugcaaaauggaaaaguguucuagcguguuuaacgucguaaauuccucaaucgggcucauaaugguguuaaguuuccuguuucuuaacugaggacuaguuauaagacugacuagcccgaugggccucccaacgggcccuccuccccuccuugcaccgagauuaauaaaaaaaaaaaaaaaaaaaaaaaaaaaaaaaaaaaaaaaaaaaaaaaaaaaaaaaaaaaaaaaaugcaucccccccccccccccccccccccccccccccaaaggcucuuuucagagccaccagaauu

SEQ ID NO: 1907 - RNA, 1411 nt, Artificial Sequence
  mRNA Design i-3 (A64-N5-C30-hSL-N5) comprising derived and/or modified sequence from Pf(3D7)__XP_001351122.1__IgE_Pf-CSP(19-397) (opt3)
aggagaaagcuuaccauggacuggaccuggauccuguuccucguggccgcugcaacaagaguccacagccuuuuucaggaguaccaaugcuauggcuccucuucaaacacuaggguucugaaugaauugaacuacgauaaugccgggacgaacuuauauaaugagcuggaaaugaacuacuauggaaagcaggagaauugguacagucuaaagaagaacagccggucccucggugaaaaugacgauggcaacaaugaggacaacgagaaacugcgcaagcccaaacauaagaaacuuaaacagccugcggaugggaauccagacccgaacgcuaaucccaacguggauccuaacgccaauccaaacguagaccccaaugcaaacccuaauguggauccaaacgccaaucccaacgcuaauccuaacgcaaauccaaacgccaauccgaacgcuaaucccaacgccaacccuaaugcgaacccaaaugcaaaccccaaugccaacccuaaugcuaacccaaaugccaaccccaaugcaaacccgaaugcuaacccuaaugccaaccccaacgcgaauccaaacgccaauccuaacgcaaaucccaacgucgacccaaaugcuaaccccaaugccaacccuaaugcuaacccaaaugccaacccgaaugcaaaccccaacgccaauccuaacgcuaauccaaacgcgaaucccaacgcaaauccuaacgccaauccaaacgcuaaucccaacgccaauccgaacgcaaauccuaacgccaauccaaacgcuaaccccaaugccaacccuaaugcaaaccccaaugcgaacccaaauaagaacaaucagggaaacggccaaggucacaauaugccuaacgaucccaaucgaaacguggacgaaaaugcuaacgccaacucugcaguuaaaaauaacaauaacgaggaaccaucggauaagcauauuaaagaguaucugaauaagauacagaacucauugagcaccgaguggaguccguguuccgugacaugcgggaauggaauccagguccguauuaagccuggcucugccaacaaacccaaggacgaacucgacuacgcuaaugauaucgagaaaaagauuuguaaaauggaaaagugcagcuccguguucaacguaguuaauucaaguaucggccugauaauggugcugagcuuucucuucuuaaacugaggacuaguuauaagacugacuagcccgaugggccucccaacgggcccuccuccccuccuugcaccgagauuaauaaaaaaaaaaaaaaaaaaaaaaaaaaaaaaaaaaaaaaaaaaaaaaaaaaaaaaaaaaaaaaaaugcaucccccccccccccccccccccccccccccccaaaggcucuuuucagagccaccagaauu

SEQ ID NO: 1908 - RNA, 1576 nt, Artificial Sequence
  mRNA Design i-3 (A64-N5-C30-hSL-N5) comprising derived and/or modified sequence from Pf(3D7)__XP_001351122.1__Pf-CSP_L(G4SG4)_TM domain HA (opt3)
aggagaaagcuuaccaugaugagaaagcuggccauccucagcguguccucuuuccuuuuugucgaggcucuguuccaggaauaccaaugcuauggcucaaguagcaacaccaggguuuugaaugaguuaaacuacgacaaugcagggacaaaccuguauaaugaacuagagaugaacuacuauggaaagcaggaaaauugguacucccucaagaaaaacucucggucgcugggugagaaugaugacggcaacaaugaggauaacgaaaaacuucgcaagcccaagcacaagaaacugaagcagccugccgacgggaauccagauccgaacgcgaaucccaacguggacccuaacgcuaauccaaacguagaucccaaugccaacccuaauguggacccaaacgcaaaucccaacgccaauccuaacgcuaauccaaacgcaaauccgaacgccaaucccaacgcuaacccuaaugccaacccaaaugcgaaccccaaugcaaacccuaaugccaacccaaaugcuaaccccaaugccaacccgaaugcaaacccuaaugcuaaccccaacgccaauccaaacgcgaauccuaacgccaaucccaacgucgauccaaaugcaaaccccaaugcuaacccuaaugccaacccaaaugcuaacccgaaugccaaccccaacgcaaauccuaacgccaauccaaacgcuaaucccaacgcgaauccuaacgcaaauccaaacgccaaucccaacgcuaauccgaacgccaauccuaacgcaaauccaaacgccaaccccaaugcuaacccuaaugccaaccccaaugcaaacccaaauaaaaacaaucagggaaacggccaaggucauaauaugccuaacgaccccaaucgaaacguggaugagaaugcgaacgcuaacucagccguuaagaauaacaauaacgaggaaccaagcgacaaacacauuaaggaguauuugaauaagauacagaacagucucuccacugaauggucuccguguagcgugacgugcgggaauggaauccagguccguauuaaaccuggcuccgcaaacaagcccaaagaugagcuggacuacgccaaugacaucgaaaagaaaauuuguaagauggagaaaugcucaaguguguuuaacguaguuaauagcucuaucggccugauaauggugcucuccuucuuauuucugaacgggggagguggcucagggggaggcgguaaacuugaaagcaccagaaucuaccagauuuuggcuaucuauaguacagucgccucuucccuggugcuaguggucagccucggggcaauuucguucuggauguguucuaauggaucccugcaaugcaggaucuguauaugaggacuaguuauaagacugacuagcccgaugggccucccaacgggcccuccuccccuccuugcaccgagauuaauaaaaaaaaaaaaaaaaaaaaaaaaaaaaaaaaaaaaaaaaaaaaaaaaaaaaaaaaaaaaaaaaugcaucccccccccccccccccccccccccccccccaaaggcucuuuucagagccaccagaauu

SEQ ID NO: 1909 - RNA, 1450 nt, Artificial Sequence
  mRNA Design i-3 (A64-N5-C30-hSL-N5) comprising derived and/or modified sequence from Pf(3D7)__XP_001351122.1__Pf-CSP(199-377)_L(PVTN)_HBsAg (opt3)
aggagaaagcuuaccauggaccccaacgccaauccuaacgcuaauccaaacgcaaauccgaacgccaaucccaacgcgaauccuaacgcuaauccaaacgccaaucccaacgcaaauccuaacgccaacccaaaugcuaaccccaaugcaaacccuaaugccaacccaaaugcuaacccgaaugccaaccccaaugcgaacccuaaugcaaacccaaaugccaaccccaacgcuaauccuaacaagaauaaccagggcaaugggcaaggacacaacaugccaaaugaucccaacagaaauguggacgagaacgccaaugcaaacagcgcugucaaaaauaacaauaacgaggaaccguccgauaagcauaucaaagaauaccugaacaagauucaaaauucucucucaaccgaguggaguccuugcagcguuacaugugguaacggcauacaggugaggaucaaacccggguccgccaauaagccaaaggacgaacuugauuaugcgaacgacauugagaaaaagaucugcaaaauggagaaguguucuucgguaccugugacuaauauggaaaacauuacgucaggauuccugggccccuuguuaguccugcaggccggguuuuuccuacucacccggauccugacaauaccacagagccuugauaguugguggacuucccugaauuuucucgguggaucucccgugugcuugggccagaacagccaguccccuaccucaaaucacaguccaacaagcuguccgcccaucugcccuggcuaccgcuggaugugucugcgacguuucauuaucuuucuguucauucucuuacugugccuuaucuuuuugcugguucuacucgacuaucaggggaugcugccaguguguccccuuauaccuggaucuaccacuacaaacaccgguccaugcaaaacguguacuacccccgcacaaggcaauuccauguucccgucaugcugcuguacaaagccuacugaugggaacugcaccuguauuccaauccccagcaguugggcuuuugccaaguaccugugggagugggcuucugucagauucuccugguugagccuccuggugccuuuuguacagugguucguuggauuaucgcccacaguguggcugucugccauuuggaugaugugguauuggggcccaucccucuacucaaucgucaguccuuuuaucccccuucugccaauuuucuucugcuuguggguguauauaugaggacuaguuauaagacugacuagcccgaugggccucccaacgggcccuccuccccuccuugcaccgagauuaauaaaaaaaaaaaaaaaaaaaaaaaaaaaaaaaaaaaaaaaaaaaaaaaaaaaaaaaaaaaaaaaaugcaucccccccccccccccccccccccccccccccaaaggcucuuuucagagccaccagaauu

SEQ ID NO: 1910 - RNA, 1492 nt, Artificial Sequence
  mRNA Design i-3 (A64-N5-C30-hSL-N5) comprising derived and/or modified sequence from Pf(3D7)__XP_001351122.1__Pf-CSP(199-387)_L(PVTN)_HBsAg (opt3)
aggagaaagcuuaccaugauggcccccgacccuaacgcuaauccaaacgcaaauccgaacgccaaucccaacgcgaauccuaacgcuaauccaaacgccaaucccaacgcaaauccuaacgccaauccaaacgcuaaccccaaugcaaacccuaaugccaacccaaaugcuaacccgaaugccaaccccaaugcgaacccuaaugcaaacccaaaugccaaccccaaugcuaacccuaacgccaauccaaacaagaauaaccagggcaaugggcaaggacacaacaugcccaaugauccgaacagaaauguggacgagaacgcaaaugcuaacagcgccgucaaaaauaacaauaacgaggaaccuuccgauaagcauaucaaagaauaccugaacaagauucaaaauucucucucaaccgaguggagucccugcagcguuacaugugguaacggcauacaggugaggaucaaaccaggguccgcgaauaagccuaaggacgaacuugauuaugccaacgacauugagaaaaagaucugcaaaauggagaaguguucuucgguauucaauguggucaacucaagcauuggacugggccccgugacuaauauggaaaacaucacgaguggguuuuuggguccauuacugguucuacaggcaggauucuuucuccugacccggauacuuacaaucccccagucccuggauucuugguggacuagcuugaauuuccucggcggcuccccugugugccuggggcagaacucacagaguccaaccagcaaucacucuccgacauccugucccccuauuugcccaggauaccgcuggaugugucugcgacguuuuaucauuuuccucuuuaucuuacugcuuugcuugauauuccugcuaguccuccuggacuaucaggguaugcuucccguguguccucugauuccaggcucaaccacuacaaacaccgggcccugcaaaacguguacuaccccggcucaaggaaauagcauguuuccuaguugcugcuguacaaagccaacugauggcaacugcaccuguauccccauuccuucuuccugggccuucgcuaaguacuugugggagugggccagcguaagauuuucguggcucucucuguuaguucccuucgugcagugguuugucggucuguccccaacaguguggcucucagcaaucuggaugaugugguauugggggccuagucuuuacagcaucgugucccccuucauuccacuguugccgauauucuuuugccuaugggucuauaucugaggacuaguuauaagacugacuagcccgaugggccucccaacgggcccuccuccccuccuugcaccgagauuaauaaaaaaaaaaaaaaaaaaaaaaaaaaaaaaaaaaaaaaaaaaaaaaaaaaaaaaaaaaaaaaaaugcaucccccccccccccccccccccccccccccccaaaggcucuuuucagagccaccagaauu

SEQ ID NO: 1911 - RNA, 676 nt, Artificial Sequence
  mRNA Design i-3 (A64-N5-C30-hSL-N5) comprising derived and/or modified sequence from Pf(3D7)__XP_001351122.1__HsALB_Pf-CSP(19-152) (opt3)
aggagaaagcuuaccaugaagugggugaccuucaucagccugcucuuucuuuucuccucugccuacucacuguuucaggaguaucaaugcuacggcaguagcuccaacacaagagucuugaaugaauuaaacuaugacaaugcugggacuaaccuguacaaugagcuagaaaugaacuauuacggaaaacaggagaauugguauucucucaagaaaaacucgaggucacugggugaaaaugaugacggcaacaaugaggauaacgagaaacuucggaagcccaagcacaagaaacugaagcagccugcagacgggaauccagauccgaacgccaaucccaacguugacccuaacgcgaauccaaacguggaucccaaugcuaacccuaauguagacccaaacgccaaucccaacgcaaauccuaacgccaauccaaacgcuaauccgaacgcaaaucccaacgccaacccuugaggacuaguuauaagacugacuagcccgaugggccucccaacgggcccuccuccccuccuugcaccgagauuaauaaaaaaaaaaaaaaaaaaaaaaaaaaaaaaaaaaaaaaaaaaaaaaaaaaaaaaaaaaaaaaaaugcaucccccccccccccccccccccccccccccccaaaggcucuuuucagagccaccagaauu

SEQ ID NO: 1912 - RNA, 796 nt, Artificial Sequence
  mRNA Design i-3 (A64-N5-C30-hSL-N5) comprising derived and/or modified sequence from Pf(3D7)__XP_001351122.1__HsALB_Pf-CSP(19-192) (opt3)
aggagaaagcuuaccaugaagugggugaccuucaucagccugcucuuucuuuucuccucugccuacucacuguuucaggaguaucaaugcuacggcaguagcuccaacacaagagucuugaaugaauuaaacuaugacaaugcugggacuaaccuguacaaugagcuagaaaugaacuauuacggaaaacaggagaauugguauucucucaagaaaaacucgaggucacugggugaaaaugaugacggcaacaaugaggauaacgagaaacuucggaagcccaagcacaagaaacugaagcagccugcagacgggaauccagauccgaacgccaaucccaacguugacccuaacgcgaauccaaacguggaucccaaugcuaacccuaauguagacccaaacgccaaucccaacgcaaauccuaacgccaauccaaacgcuaauccgaacgcaaaucccaacgccaacccuaaugcuaacccaaaugccaaccccaaugcgaacccuaaugcaaacccaaaugccaaccccaaugcuaacccgaaugccaacccuaaugcaaaccccaacgcuaauccaaacgccaauccuugaggacuaguuauaagacugacuagcccgaugggccucccaacgggcccuccuccccuccuugcaccgagauuaauaaaaaaaaaaaaaaaaaaaaaaaaaaaaaaaaaaaaaaaaaaaaaaaaaaaaaaaaaaaaaaaaugcaucccccccccccccccccccccccccccccccaaaggcucuuuucagagccaccagaauu

SEQ ID NO: 1913 - RNA, 1036 nt, Artificial Sequence
  mRNA Design i-3 (A64-N5-C30-hSL-N5) comprising derived and/or modified sequence from Pf(3D7)__XP_001351122.1__HsALB_Pf-CSP(19-272) (opt3)
aggagaaagcuuaccaugaagugggugaccuucaucagccugcucuuucuuuucuccucugccuacucacuguuucaggaguaucaaugcuacggcaguagcuccaacacaagagucuugaaugaauuaaacuaugacaaugcugggacuaaccuguacaaugagcuagaaaugaacuauuacggaaaacaggagaauugguauucucucaagaaaaacucgaggucacugggugaaaaugaugacggcaacaaugaggauaacgagaaacuucggaagcccaagcacaagaaacugaagcagccugcagacgggaauccagauccgaacgccaaucccaacguugacccuaacgcgaauccaaacguggaucccaaugcuaacccuaauguagacccaaacgccaaucccaacgcaaauccuaacgccaauccaaacgcuaauccgaacgcaaaucccaacgccaacccuaaugcuaacccaaaugccaaccccaaugcgaacccuaaugcaaacccaaaugccaaccccaaugcuaacccgaaugccaacccuaaugcaaaccccaacgcuaauccaaacgccaauccuaacgcgaaucccaacguggauccaaaugccaaccccaaugcaaacccuaaugcuaacccaaaugccaacccgaaugcuaaccccaacgccaauccuaacgcaaauccaaacgccaaucccaacgcuaauccuaacgcgaauccaaacgcaaaucccaacgccaauccgaacgcuaauccuaacgccaauccaaacgcaaaccccaaugccaacccuaaugcuaaccccaaugccaacccaugaggacuaguuauaagacugacuagcccgaugggccucccaacgggcccuccuccccuccuugcaccgagauuaauaaaaaaaaaaaaaaaaaaaaaaaaaaaaaaaaaaaaaaaaaaaaaaaaaaaaaaaaaaaaaaaaugcaucccccccccccccccccccccccccccccccaaaggcucuuuucagagccaccagaauu

SEQ ID NO: 1914 - RNA, 1198 nt, Artificial Sequence
  mRNA Design i-3 (A64-N5-C30-hSL-N5) comprising derived and/or modified sequence from Pf(3D7)__XP_001351122.1__HsALB_Pf-CSP(19-272)_L(AAY)_Pf-CSP(310-3 27)_L(AAY)_Pf-CSP(346-375) (opt3)
aggagaaagcuuaccaugaagugggugaccuucaucagccugcucuuucuuuucuccucugccuacucacuguuucaggaguaucaaugcuacggcaguagcuccaacacaagagucuugaaugaauuaaacuaugacaaugcugggacuaaccuguacaaugagcuagaaaugaacuauuacggaaaacaggagaauugguauucucucaagaaaaacucgaggucacugggugaaaaugaugacggcaacaaugaggauaacgagaaacuucggaagcccaagcacaagaaacugaagcagccugcagacgggaauccagauccgaacgccaaucccaacguugacccuaacgcgaauccaaacguggaucccaaugcuaacccuaauguagacccaaacgccaaucccaacgcaaauccuaacgccaauccaaacgcuaauccgaacgcaaaucccaacgccaacccuaaugcuaacccaaaugccaaccccaaugcgaacccuaaugcaaacccaaaugccaaccccaaugcuaacccgaaugccaacccuaaugcaaaccccaacgcuaauccaaacgccaauccuaacgcgaaucccaacguggauccaaaugccaaccccaaugcaaacccuaaugcuaacccaaaugccaacccgaaugcuaaccccaacgccaauccuaacgcaaauccaaacgccaaucccaacgcuaauccuaacgcgaauccaaacgcaaaucccaacgccaauccgaacgcuaauccuaacgccaauccaaacgcaaaccccaaugccaacccuaaugcuaaccccaaugccaacccagcagcguacgaaccuagcgacaaacauauuaaggaguacuugaauaaaauacagaacagucucgcugccuauaucaagcccggauccgcaaauaagccaaaagaugaacuggacuacgccaacgauauugagaagaaaaucuguaagauggagaaaugcucuugaggacuaguuauaagacugacuagcccgaugggccucccaacgggcccuccuccccuccuugcaccgagauuaauaaaaaaaaaaaaaaaaaaaaaaaaaaaaaaaaaaaaaaaaaaaaaaaaaaaaaaaaaaaaaaaaugcaucccccccccccccccccccccccccccccccaaaggcucuuuucagagccaccagaauu

SEQ ID NO: 1915 - RNA, 1159 nt, Artificial Sequence
  mRNA Design i-3 (A64-N5-C30-hSL-N5) comprising derived and/or modified sequence from Pf(3D7)__XP_001351122.1__HsALB_Pf-CSP(19-272)_L(AAY)_Pf-CSP(346-3 65)_L(AAY)_P2 (opt3)
aggagaaagcuuaccaugaagugggugaccuucaucagccugcucuuucuuuucuccucugccuacucacuguuucaggaguaucaaugcuacggcaguagcuccaacacaagagucuugaaugaauuaaacuaugacaaugcugggacuaaccuguacaaugagcuagaaaugaacuauuacggaaaacaggagaauugguauucucucaagaaaaacucgaggucacugggugaaaaugaugacggcaacaaugaggauaacgagaaacuucggaagcccaagcacaagaaacugaagcagccugcagacgggaauccagauccgaacgccaaucccaacguugacccuaacgcgaauccaaacguggaucccaaugcuaacccuaauguagacccaaacgccaaucccaacgcaaauccuaacgccaauccaaacgcuaauccgaacgcaaaucccaacgccaacccuaaugcuaacccaaaugccaaccccaaugcgaacccuaaugcaaacccaaaugccaaccccaaugcuaacccgaaugccaacccuaaugcaaaccccaacgcuaauccaaacgccaauccuaacgcgaaucccaacguggauccaaaugccaaccccaaugcaaacccuaaugcuaacccaaaugccaacccgaaugcuaaccccaacgccaauccuaacgcaaauccaaacgccaaucccaacgcuaauccuaacgcgaauccaaacgcaaaucccaacgccaauccgaacgcuaauccuaacgccaauccaaacgcaaaccccaaugccaacccuaaugcuaaccccaaugccaacccagcagcguacauuaaaccuggaagcgcuaauaagcccaaagacgaauuggauuacgccaacgacauagaggcagccuaucaguacaucaaggcuaauaguaaguucauuggcaucacggaacucugaggacuaguuauaagacugacuagcccgaugggccucccaacgggcccuccuccccuccuugcaccgagauuaauaaaaaaaaaaaaaaaaaaaaaaaaaaaaaaaaaaaaaaaaaaaaaaaaaaaaaaaaaaaaaaaaugcaucccccccccccccccccccccccccccccccaaaggcucuuuucagagccaccagaauu

SEQ ID NO: 1916 - RNA, 1153 nt, Artificial Sequence
  mRNA Design i-3 (A64-N5-C30-hSL-N5) comprising derived and/or modified sequence from Pf(3D7)__XP_001351122.1__HsALB_Pf-CSP(19-272)_L(AAY)_Pf-CSP(346-3 65)_L(AAY)_PADRE (opt3)
aggagaaagcuuaccaugaagugggugaccuucaucagccugcucuuucuuuucuccucugccuacucacuguuucaggaguaucaaugcuacggcaguagcuccaacacaagagucuugaaugaauuaaacuaugacaaugcugggacuaaccuguacaaugagcuagaaaugaacuauuacggaaaacaggagaauugguauucucucaagaaaaacucgaggucacugggugaaaaugaugacggcaacaaugaggauaacgagaaacuucggaagcccaagcacaagaaacugaagcagccugcagacgggaauccagauccgaacgccaaucccaacguugacccuaacgcgaauccaaacguggaucccaaugcuaacccuaauguagacccaaacgccaaucccaacgcaaauccuaacgccaauccaaacgcuaauccgaacgcaaaucccaacgccaacccuaaugcuaacccaaaugccaaccccaaugcgaacccuaaugcaaacccaaaugccaaccccaaugcuaacccgaaugccaacccuaaugcaaaccccaacgcuaauccaaacgccaauccuaacgcgaaucccaacguggauccaaaugccaaccccaaugcaaacccuaaugcuaacccaaaugccaacccgaaugcuaaccccaacgccaauccuaacgcaaauccaaacgccaaucccaacgcuaauccuaacgcgaauccaaacgcaaaucccaacgccaauccgaacgcuaauccuaacgccaauccaaacgcaaaccccaaugccaacccuaaugcuaaccccaaugccaacccagcagcguacauuaaaccuggaagcgcuaauaagcccaaagacgaauuggauuacgccaacgacauagaggcagccuaugcuaaguucgucgccgcauggacgcucaaggcugccgcgugaggacuaguuauaagacugacuagcccgaugggccucccaacgggcccuccuccccuccuugcaccgagauuaauaaaaaaaaaaaaaaaaaaaaaaaaaaaaaaaaaaaaaaaaaaaaaaaaaaaaaaaaaaaaaaaaugcaucccccccccccccccccccccccccccccccaaaggcucuuuucagagccaccagaauu

SEQ ID NO: 1917 - RNA, 1210 nt, Artificial Sequence
  mRNA Design i-3 (A64-N5-C30-hSL-N5) comprising derived and/or modified sequence from Pf(3D7)__XP_001351122.1__HsALB_Pf-CSP(19-272)_L(G4S)_Pf-CSP(310-3 27)_L(G4S)_Pf-CSP(346-375) (opt3)
aggagaaagcuuaccaugaagugggugaccuucaucagccugcucuuucuuuucuccucugccuacucacuguuucaggaguaucaaugcuacggcaguagcuccaacacaagagucuugaaugaauuaaacuaugacaaugcugggacuaaccuguacaaugagcuagaaaugaacuauuacggaaaacaggagaauugguauucucucaagaaaaacucgaggucacugggugaaaaugaugacggcaacaaugaggauaacgagaaacuucggaagcccaagcacaagaaacugaagcagccugcagacgggaauccagauccgaacgccaaucccaacguugacccuaacgcgaauccaaacguggaucccaaugcuaacccuaauguagacccaaacgccaaucccaacgcaaauccuaacgccaauccaaacgcuaauccgaacgcaaaucccaacgccaacccuaaugcuaacccaaaugccaaccccaaugcgaacccuaaugcaaacccaaaugccaaccccaaugcuaacccgaaugccaacccuaaugcaaaccccaacgcuaauccaaacgccaauccuaacgcgaaucccaacguggauccaaaugccaaccccaaugcaaacccuaaugcuaacccaaaugccaacccgaaugcuaaccccaacgccaauccuaacgcaaauccaaacgccaaucccaacgcuaauccuaacgcgaauccaaacgcaaaucccaacgccaauccgaacgcuaauccuaacgccaauccaaacgcaaaccccaaugccaacccuaaugcuaaccccaaugccaacccaggaggcggugggagcgaaccuagugacaaacauauuaaggaguacuugaauaaaauacagaacucccucggaggcggcgggucuaucaagcccggaagcgcaaauaagccaaaagaugaacuggacuacgcgaacgauauugagaagaaaaucuguaagauggagaaaugcuccugaggacuaguuauaagacugacuagcccgaugggccucccaacgggcccuccuccccuccuugcaccgagauuaauaaaaaaaaaaaaaaaaaaaaaaaaaaaaaaaaaaaaaaaaaaaaaaaaaaaaaaaaaaaaaaaaugcaucccccccccccccccccccccccccccccccaaaggcucuuuucagagccaccagaauu

SEQ ID NO: 1918 - RNA, 1195 nt, Artificial Sequence
  mRNA Design i-3 (A64-N5-C30-hSL-N5) comprising derived and/or modified sequence from Pf(3D7)__XP_001351122.1__HsALB_Pf-CSP(19-272)_L(G4S)_Pf-CSP(310-3 27)_Pf-CSP(346-375) (opt3)
aggagaaagcuuaccaugaagugggugaccuucaucagccugcucuuucuuuucuccucugccuacucacuguuucaggaguaucaaugcuacggcaguagcuccaacacaagagucuugaaugaauuaaacuaugacaaugcugggacuaaccuguacaaugagcuagaaaugaacuauuacggaaaacaggagaauugguauucucucaagaaaaacucgaggucacugggugaaaaugaugacggcaacaaugaggauaacgagaaacuucggaagcccaagcacaagaaacugaagcagccugcagacgggaauccagauccgaacgccaaucccaacguugacccuaacgcgaauccaaacguggaucccaaugcuaacccuaauguagacccaaacgccaaucccaacgcaaauccuaacgccaauccaaacgcuaauccgaacgcaaaucccaacgccaacccuaaugcuaacccaaaugccaaccccaaugcgaacccuaaugcaaacccaaaugccaaccccaaugcuaacccgaaugccaacccuaaugcaaaccccaacgcuaauccaaacgccaauccuaacgcgaaucccaacguggauccaaaugccaaccccaaugcaaacccuaaugcuaacccaaaugccaacccgaaugcuaaccccaacgccaauccuaacgcaaauccaaacgccaaucccaacgcuaauccuaacgcgaauccaaacgcaaaucccaacgccaauccgaacgcuaauccuaacgccaauccaaacgcaaaccccaaugccaacccuaaugcuaaccccaaugccaacccaggaggcggugggagcgaaccuagugacaaacauauuaaggaguacuugaauaaaauacagaacucccucaucaagcccggaucugcaaauaagccaaaagaugaacuggacuacgcgaacgauauugagaagaaaaucuguaagauggagaaaugcagcugaggacuaguuauaagacugacuagcccgaugggccucccaacgggcccuccuccccuccuugcaccgagauuaauaaaaaaaaaaaaaaaaaaaaaaaaaaaaaaaaaaaaaaaaaaaaaaaaaaaaaaaaaaaaaaaaugcaucccccccccccccccccccccccccccccccaaaggcucuuuucagagccaccagaauu

SEQ ID NO: 1919 - RNA, 1195 nt, Artificial Sequence
  mRNA Design i-3 (A64-N5-C30-hSL-N5) comprising derived and/or modified sequence from Pf(3D7)__XP_001351122.1__HsALB_Pf-CSP(19-325) (opt3)
aggagaaagcuuaccaugaagugggugaccuucaucagccugcucuuucuuuucuccucugccuacucacuguuucaggaguaucaaugcuacggcaguagcuccaacacaagagucuugaaugaauuaaacuaugacaaugcugggacuaaccuguacaaugagcuagaaaugaacuauuacggaaaacaggagaauugguauucucucaagaaaaacucgaggucacugggugaaaaugaugacggcaacaaugaggauaacgagaaacuucggaagcccaagcacaagaaacugaagcagccugcagacgggaauccagauccgaacgccaaucccaacguugacccuaacgcgaauccaaacguggaucccaaugcuaacccuaauguagacccaaacgccaaucccaacgcaaauccuaacgccaauccaaacgcuaauccgaacgcaaaucccaacgccaacccuaaugcuaacccaaaugccaaccccaaugcgaacccuaaugcaaacccaaaugccaaccccaaugcuaacccgaaugccaacccuaaugcaaaccccaacgcuaauccaaacgccaauccuaacgcgaaucccaacguggauccaaaugccaaccccaaugcaaacccuaaugcuaacccaaaugccaacccgaaugcuaaccccaacgccaauccuaacgcaaauccaaacgccaaucccaacgcuaauccuaacgcgaauccaaacgcaaaucccaacgccaauccgaacgcuaauccuaacgccaauccaaacgcaaaccccaaugccaacccuaaugcuaaccccaaugccaacccaaauaaaaacaaucagggaaacggccaaggucauaauaugccuaacgaccccaaucgcaacgucgaugaaaaugcaaacgcgaacagcgcugugaagaauaacaauaacgaggaaccaagugacaaacacauuaaggaguacuugaauaagauacagaacugaggacuaguuauaagacugacuagcccgaugggccucccaacgggcccuccuccccuccuugcaccgagauuaauaaaaaaaaaaaaaaaaaaaaaaaaaaaaaaaaaaaaaaaaaaaaaaaaaaaaaaaaaaaaaaaaugcaucccccccccccccccccccccccccccccccaaaggcucuuuucagagccaccagaauu

SEQ ID NO: 1920 - RNA, 1372 nt, Artificial Sequence
  mRNA Design i-3 (A64-N5-C30-hSL-N5) comprising derived and/or modified sequence from Pf(3D7)__XP_001351122.1__HsALB_Pf-CSP(19-384) (opt3)
aggagaaagcuuaccaugaagugggugaccuucaucagccugcucuuucuuuucuccucugccuacucacuguuucaggaguaucaaugcuacggcaguagcuccaacacaagagucuugaaugaauuaaacuaugacaaugcugggacuaaccuguacaaugagcuagaaaugaacuauuacggaaaacaggagaauugguauucucucaagaaaaacucgaggucacugggugaaaaugaugacggcaacaaugaggauaacgagaaacuucggaagcccaagcacaagaaacugaagcagccugcagacgggaauccagauccgaacgccaaucccaacguugacccuaacgcgaauccaaacguggaucccaaugcuaacccuaauguagacccaaacgccaaucccaacgcaaauccuaacgccaauccaaacgcuaauccgaacgcaaaucccaacgccaacccuaaugcuaacccaaaugccaaccccaaugcgaacccuaaugcaaacccaaaugccaaccccaaugcuaacccgaaugccaacccuaaugcaaaccccaacgcuaauccaaacgccaauccuaacgcgaaucccaacguggauccaaaugccaaccccaaugcaaacccuaaugcuaacccaaaugccaacccgaaugcuaaccccaacgccaauccuaacgcaaauccaaacgccaaucccaacgcuaauccuaacgcgaauccaaacgcaaaucccaacgccaauccgaacgcuaauccuaacgccaauccaaacgcaaaccccaaugccaacccuaaugcuaaccccaaugccaacccaaauaaaaacaaucagggaaacggccaaggucauaauaugccuaacgaccccaaucgcaacgucgaugaaaaugcaaacgcgaacagcgcugugaagaauaacaauaacgaggaaccaagugacaaacacauuaaggaguacuugaauaagauacagaacucccucucuacggaguggagcccguguuccguuaccugcgggaauggaauccaggugcgaauuaaaccuggcucagccaacaagcccaaagaugaacuggacuacgcaaaugacaucgagaagaaaauuuguaagauggaaaaaugcaguagcgucuucaacgugguaaauucuuccugaggacuaguuauaagacugacuagcccgaugggccucccaacgggcccuccuccccuccuugcaccgagauuaauaaaaaaaaaaaaaaaaaaaaaaaaaaaaaaaaaaaaaaaaaaaaaaaaaaaaaaaaaaaaaaaaugcaucccccccccccccccccccccccccccccccaaaggcucuuuucagagccaccagaauu

SEQ ID NO: 1921 - RNA, 1510 nt, Artificial Sequence
  mRNA Design i-3 (A64-N5-C30-hSL-N5) comprising derived and/or modified sequence from Pf(3D7)__XP_001351122.1__HsALB_Pf-CSP(19-384)_TM domain HA (opt3)
aggagaaagcuuaccaugaagugggugaccuucaucagccugcucuuucuuuucuccucugccuacucacuguuucaggaguaucaaugcuacggcaguagcuccaacacaagagucuugaaugaauuaaacuaugacaaugcugggacuaaccuguacaaugagcuagaaaugaacuauuacggaaaacaggagaauugguauucucucaagaaaaacucgaggucacugggugaaaaugaugacggcaacaaugaggauaacgagaaacuucggaagcccaagcacaagaaacugaagcagccugcagacgggaauccagauccgaacgccaaucccaacguugacccuaacgcgaauccaaacguggaucccaaugcuaacccuaauguagacccaaacgccaaucccaacgcaaauccuaacgccaauccaaacgcuaauccgaacgcaaaucccaacgccaacccuaaugcuaacccaaaugccaaccccaaugcgaacccuaaugcaaacccaaaugccaaccccaaugcuaacccgaaugccaacccuaaugcaaaccccaacgcuaauccaaacgccaauccuaacgcgaaucccaacguggauccaaaugccaaccccaaugcaaacccuaaugcuaacccaaaugccaacccgaaugcuaaccccaacgccaauccuaacgcaaauccaaacgccaaucccaacgcuaauccuaacgcgaauccaaacgcaaaucccaacgccaauccgaacgcuaauccuaacgccaauccaaacgcaaaccccaaugccaacccuaaugcuaaccccaaugccaacccaaauaaaaacaaucagggaaacggccaaggucauaauaugccuaacgaccccaaucgcaacgucgaugaaaaugcaaacgcgaacagcgcugugaagaauaacaauaacgaggaaccaagugacaaacacauuaaggaguacuugaauaagauacagaacucccucucuacggaguggagcccguguuccguuaccugcgggaauggaauccaggugcgaauuaaaccuggcucagccaacaagcccaaagaugaacuggacuacgcaaaugacaucgagaagaaaauuuguaagauggaaaaaugcaguagcgucuucaacgugguaaauucuuccaagcuggagucaacacguaucuaucagauacucgccaucuacagcacuguugcuaguucuuuagugcuggucgugucccuuggcgccauuagcuuuuggauguguucgaacgggucuuugcaaugcagaaucuguauuugaggacuaguuauaagacugacuagcccgaugggccucccaacgggcccuccuccccuccuugcaccgagauuaauaaaaaaaaaaaaaaaaaaaaaaaaaaaaaaaaaaaaaaaaaaaaaaaaaaaaaaaaaaaaaaaaugcaucccccccccccccccccccccccccccccccaaaggcucuuuucagagccaccagaauu

SEQ ID NO: 1922 - RNA, 1222 nt, Artificial Sequence
  mRNA Design i-3 (A64-N5-C30-hSL-N5) comprising derived and/or modified sequence from Pf(3D7)__XP_001351122.1__HsALB_Pf-CSP(82-397) (opt3)
aggagaaagcuuaccaugaagugggugaccuucaucagccugcucuuucuuuucuccucugccuacucagacaacgagaaacugagaaagcccaaacacaagaaauugaagcagccugcugauggcaauccagacccgaacgcaaaucccaacgucgauccuaaugccaacccaaauguugaccccaacgcgaauccuaacguggauccaaaugcuaaccccaaugccaacccuaaugcaaacccaaacgccaauccgaacgcuaaucccaacgcaaauccuaacgccaauccaaacgcuaaucccaacgccaauccuaacgcgaauccaaacgcaaaucccaacgccaacccgaaugcuaacccuaaugccaaccccaaugcaaacccaaaugcuaacccuaaugccaaccccaauguagacccaaacgcgaaucccaacgccaauccuaacgcaaacccaaaugcuaacccgaaugccaaccccaaugcuaacccuaaugccaacccaaaugcaaaccccaaugccaacccuaaugcuaacccaaaugcgaaccccaacgcaaauccgaacgccaauccuaacgcuaauccaaacgccaaucccaacgcaaauccuaacgccaaucccaacgcuaauccaaacaagaauaaccaggggaauggacagggucauaacaugccuaacgaucccaauaggaacguggacgaaaaugccaacgcaaauagugcggucaaaaacaauaacaaugaggaaccaagcgauaagcacauuaaagaguauuuaaacaagauacaaaauucccugucuacagaauggucgccgugcucagugacuuguggcaacgggauccagguucggauuaaaccuggaagcgcuaauaagcccaaggacgagcuagauuacgccaacgacaucgagaaaaagauuugcaaaauggaaaaguguaguuccguguuuaaugucgugaacucuagcaucggccucauaaugguacuguccuuccuuuuucugaacugaggacuaguuauaagacugacuagcccgaugggccucccaacgggcccuccuccccuccuugcaccgagauuaauaaaaaaaaaaaaaaaaaaaaaaaaaaaaaaaaaaaaaaaaaaaaaaaaaaaaaaaaaaaaaaaaugcaucccccccccccccccccccccccccccccccaaaggcucuuuucagagccaccagaauu

SEQ ID NO: 1923 - RNA, 574 nt, Artificial Sequence
  mRNA Design i-3 (A64-N5-C30-hSL-N5) comprising derived and/or modified sequence from Pf(3D7)__XP_001351122.1__HsALB_Pf-CSP(93-192) (opt3)
aggagaaagcuuaccaugaagugggugaccuucaucagccugcucuuucuuuucuccucugccuacucaaaacugaagcagcccgcugacggcaacccugauccaaaugcaaacccgaaugucgaccccaacgccaauccuaacguugauccaaaugcgaaccccaauguggacccuaacgcuaauccaaacgccaaucccaacgcaaauccuaacgccaacccaaaugcuaacccgaaugcaaaccccaaugccaacccuaaugcuaacccaaaugccaaccccaaugcgaacccuaaugcaaacccaaaugccaaccccaacgcuaauccgaacgccaauccuaacgcaaaucccaacgcuaauccaugaggacuaguuauaagacugacuagcccgaugggccucccaacgggcccuccuccccuccuugcaccgagauuaauaaaaaaaaaaaaaaaaaaaaaaaaaaaaaaaaaaaaaaaaaaaaaaaaaaaaaaaaaaaaaaaaugcaucccccccccccccccccccccccccccccccaaaggcucuuuucagagccaccagaauu

SEQ ID NO: 1924 - RNA, 814 nt, Artificial Sequence
  mRNA Design i-3 (A64-N5-C30-hSL-N5) comprising derived and/or modified sequence from Pf(3D7)__XP_001351122.1__HsALB_Pf-CSP(93-272) (opt3)
aggagaaagcuuaccaugaagugggugaccuucaucagccugcucuuucuuuucuccucugccuacucaaaacugaagcagcccgcugacggcaacccugauccaaaugcaaacccgaaugucgaccccaacgccaauccuaacguugauccaaaugcgaaccccaauguggacccuaacgcuaauccaaacgccaaucccaacgcaaauccuaacgccaacccaaaugcuaacccgaaugcaaaccccaaugccaacccuaaugcuaacccaaaugccaaccccaaugcgaacccuaaugcaaacccaaaugccaaccccaacgcuaauccgaacgccaauccuaacgcaaaucccaacgcuaauccaaacgccaauccuaacguagaucccaaugcgaacccaaaugccaaccccaaugcaaacccuaacgcuaauccaaacgccaauccgaacgcuaaucccaacgccaauccuaacgcaaauccaaacgccaaucccaacgcuaauccuaacgcgaauccaaacgcaaaccccaaugccaacccgaaugcuaacccuaaugccaacccaaaugcaaaccccaaugccaacccuaaugcuaaccccugaggacuaguuauaagacugacuagcccgaugggccucccaacgggcccuccuccccuccuugcaccgagauuaauaaaaaaaaaaaaaaaaaaaaaaaaaaaaaaaaaaaaaaaaaaaaaaaaaaaaaaaaaaaaaaaaugcaucccccccccccccccccccccccccccccccaaaggcucuuuucagagccaccagaauu

SEQ ID NO: 1925 - RNA, 1189 nt, Artificial Sequence
  mRNA Design i-3 (A64-N5-C30-hSL-N5) comprising derived and/or modified sequence from Pf(3D7)__XP_001351122.1__HsALB_Pf-CSP(93-397) (opt3)
aggagaaagcuuaccaugaagugggugaccuucaucagccugcucuuucuuuucuccucugccuacucaaaacugaagcagcccgcugacggcaacccugauccaaaugcaaacccgaaugucgaccccaacgccaauccuaacguugauccaaaugcgaaccccaauguggacccuaacgcuaauccaaacgccaaucccaacgcaaauccuaacgccaacccaaaugcuaacccgaaugcaaaccccaaugccaacccuaaugcuaacccaaaugccaaccccaaugcgaacccuaaugcaaacccaaaugccaaccccaacgcuaauccgaacgccaauccuaacgcaaaucccaacgcuaauccaaacgccaauccuaacguagaucccaaugcgaacccaaaugccaaccccaaugcaaacccuaacgcuaauccaaacgccaauccgaacgcuaaucccaacgccaauccuaacgcaaauccaaacgccaaucccaacgcuaauccuaacgcgaauccaaacgcaaaccccaaugccaacccgaaugcuaacccuaaugccaacccaaaugcaaaccccaaugccaacccuaaugcuaaccccaauaaaaacaaucaagggaacggacagggucacaauaugccaaacgacccuaacagaaauguggaugagaacgccaaugcaaacagugcggucaagaauaacaauaacgaggaacccagcgacaaacauauuaaggaauauuugaauaagauacagaacuccuuaucuacagaguggucgccaugcucagugacuuguggcaaugggauccagguuaggauuaaaccgggaagcgcuaacaagccuaaagaugaacuggacuacgccaaugauaucgagaagaaaauuugcaagauggagaaguguaguuccguguuuaacgucguaaauucuagcaucggccuaauaauggugcucuccuuccuguuucuuaacugaggacuaguuauaagacugacuagcccgaugggccucccaacgggcccuccuccccuccuugcaccgagauuaauaaaaaaaaaaaaaaaaaaaaaaaaaaaaaaaaaaaaaaaaaaaaaaaaaaaaaaaaaaaaaaaaugcaucccccccccccccccccccccccccccccccaaaggcucuuuucagagccaccagaauu

SEQ ID NO: 1926 - RNA, 559 nt, Artificial Sequence
  mRNA Design i-3 (A64-N5-C30-hSL-N5) comprising derived and/or modified sequence from Pf(3D7)__XP_001351122.1__HsALB_Pf-CSP(98-192) (opt3)
aggagaaagcuuaccaugaagugggugaccuucaucagccugcucuuucuuuucuccucugccuacucagcugacggcaaccccgauccuaaugcaaacccaaaugucgacccgaacgccaaucccaacguugauccuaaugcgaacccaaauguggaccccaacgcuaauccuaacgccaauccaaacgcaaaucccaacgccaacccuaaugcuaacccaaaugcaaacccgaaugccaaccccaaugcuaacccuaaugccaacccaaaugcgaaccccaaugcaaacccuaaugccaacccaaacgcuaaucccaacgccaauccgaacgcaaauccuaacgcuaaucccugaggacuaguuauaagacugacuagcccgaugggccucccaacgggcccuccuccccuccuugcaccgagauuaauaaaaaaaaaaaaaaaaaaaaaaaaaaaaaaaaaaaaaaaaaaaaaaaaaaaaaaaaaaaaaaaaugcaucccccccccccccccccccccccccccccccaaaggcucuuuucagagccaccagaauu

SEQ ID NO: 1927 - RNA, 799 nt, Artificial Sequence
  mRNA Design i-3 (A64-N5-C30-hSL-N5) comprising derived and/or modified sequence from Pf(3D7)__XP_001351122.1__HsALB_Pf-CSP(98-272) (opt3)
aggagaaagcuuaccaugaagugggugaccuucaucagccugcucuuucuuuucuccucugccuacucagcugacggcaaccccgauccuaaugcaaacccaaaugucgacccgaacgccaaucccaacguugauccuaaugcgaacccaaauguggaccccaacgcuaauccuaacgccaauccaaacgcaaaucccaacgccaacccuaaugcuaacccaaaugcaaacccgaaugccaaccccaaugcuaacccuaaugccaacccaaaugcgaaccccaaugcaaacccuaaugccaacccaaacgcuaaucccaacgccaauccgaacgcaaauccuaacgcuaaucccaacgccaauccaaacguagauccuaaugcgaaccccaaugccaacccaaaugcaaaccccaacgcuaauccuaacgccaauccaaacgcuaauccgaacgccaaucccaacgcaaauccuaacgccaauccaaacgcuaaucccaacgcgaauccuaacgcaaacccaaaugccaaccccaaugcuaacccgaaugccaacccuaaugcaaacccaaaugccaaccccaaugcuaacccuugaggacuaguuauaagacugacuagcccgaugggccucccaacgggcccuccuccccuccuugcaccgagauuaauaaaaaaaaaaaaaaaaaaaaaaaaaaaaaaaaaaaaaaaaaaaaaaaaaaaaaaaaaaaaaaaaugcaucccccccccccccccccccccccccccccccaaaggcucuuuucagagccaccagaauu

SEQ ID NO: 1928 - RNA, 1105 nt, Artificial Sequence
  mRNA Design i-3 (A64-N5-C30-hSL-N5) comprising derived and/or modified sequence from Pf(3D7)__XP_001351122.1__HsALB_Pf-CSP(98-374) (opt3)
aggagaaagcuuaccaugaagugggugaccuucaucagccugcucuuucuuuucuccucugccuacucagcugacggcaaccccgauccuaaugcaaacccaaaugucgacccgaacgccaaucccaacguugauccuaaugcgaacccaaauguggaccccaacgcuaauccuaacgccaauccaaacgcaaaucccaacgccaacccuaaugcuaacccaaaugcaaacccgaaugccaaccccaaugcuaacccuaaugccaacccaaaugcgaaccccaaugcaaacccuaaugccaacccaaacgcuaaucccaacgccaauccgaacgcaaauccuaacgcuaaucccaacgccaauccaaacguagauccuaaugcgaaccccaaugccaacccaaaugcaaaccccaacgcuaauccuaacgccaauccaaacgcuaauccgaacgccaaucccaacgcaaauccuaacgccaauccaaacgcuaaucccaacgcgaauccuaacgcaaacccaaaugccaaccccaaugcuaacccgaaugccaacccuaaugcaaacccaaaugccaaccccaaugcuaacccuaauaaaaacaaucaggggaacggacaaggucacaauaugcccaacgacccaaacagaaauguggaugagaacgccaaugcaaacagugcggucaagaauaacaauaacgaggaaccuagcgacaaacauauuaaggaauaucugaauaaaauacagaacuccuugucuacagaguggucgcccugcucagugacuuguggcaaugggauccagguuaggauuaagccaggaagcgcuaacaagccgaaagaugaauuagacuacgccaaugauaucgagaagaaaauuugcaagauggagaaauguugaggacuaguuauaagacugacuagcccgaugggccucccaacgggcccuccuccccuccuugcaccgagauuaauaaaaaaaaaaaaaaaaaaaaaaaaaaaaaaaaaaaaaaaaaaaaaaaaaaaaaaaaaaaaaaaaugcaucccccccccccccccccccccccccccccccaaaggcucuuuucagagccaccagaauu

SEQ ID NO: 1929 - RNA, 1174 nt, Artificial Sequence
  mRNA Design i-3 (A64-N5-C30-hSL-N5) comprising derived and/or modified sequence from Pf(3D7)__XP_001351122.1__HsALB_Pf-CSP(98-397) (opt3)
aggagaaagcuuaccaugaagugggugaccuucaucagccugcucuuucuuuucuccucugccuacucagcugacggcaaccccgauccuaaugcaaacccaaaugucgacccgaacgccaaucccaacguugauccuaaugcgaacccaaauguggaccccaacgcuaauccuaacgccaauccaaacgcaaaucccaacgccaacccuaaugcuaacccaaaugcaaacccgaaugccaaccccaaugcuaacccuaaugccaacccaaaugcgaaccccaaugcaaacccuaaugccaacccaaacgcuaaucccaacgccaauccgaacgcaaauccuaacgcuaaucccaacgccaauccaaacguagauccuaaugcgaaccccaaugccaacccaaaugcaaaccccaacgcuaauccuaacgccaauccaaacgcuaauccgaacgccaaucccaacgcaaauccuaacgccaauccaaacgcuaaucccaacgcgaauccuaacgcaaacccaaaugccaaccccaaugcuaacccgaaugccaacccuaaugcaaacccaaaugccaaccccaaugcuaacccuaauaaaaacaaucaggggaacggacaaggucacaauaugcccaacgacccaaacagaaauguggaugagaacgccaaugcaaacagugcggucaagaauaacaauaacgaggaaccuagcgacaaacauauuaaggaauaucugaauaaaauacagaacuccuugucuacagaguggucgcccugcucagugacuuguggcaaugggauccagguuaggauuaagccaggaagcgcuaacaagccgaaagaugaauuagacuacgccaaugauaucgagaagaaaauuugcaagauggagaaauguaguuccguguuuaacgucguaaauucuagcaucggccugauaauggugcuauccuuccucuuucugaacugaggacuaguuauaagacugacuagcccgaugggccucccaacgggcccuccuccccuccuugcaccgagauuaauaaaaaaaaaaaaaaaaaaaaaaaaaaaaaaaaaaaaaaaaaaaaaaaaaaaaaaaaaaaaaaaaugcaucccccccccccccccccccccccccccccccaaaggcucuuuucagagccaccagaauu

SEQ ID NO: 1930 - RNA, 1501 nt, Artificial Sequence
  mRNA Design i-3 (A64-N5-C30-hSL-N5) comprising derived and/or modified sequence from Pf(3D7)__XP_001351122.1__HsALB_Pf-CSP(199-377)_L(PVTN)_HBsAg (opt3)
aggagaaagcuuaccaugaagugggugaccuucaucagccugcucuuucuuuucuccucugccuacucagaccccaacgcuaauccuaacgcaaauccaaacgccaauccgaacgcgaaucccaacgcuaauccuaacgccaauccaaacgcaaaucccaacgccaauccuaacgcuaacccaaaugcaaaccccaaugccaacccuaaugcuaacccaaaugccaacccgaaugcgaaccccaaugcaaacccuaaugccaacccaaaugcuaaccccaacgccaauccuaacaaaaauaaccagggcaaugggcaaggacacaacaugccaaaugaucccaacagaaaugucgacgagaacgcaaaugcuaacagugccguuaagaauaacaauaacgaggaaccgagcgauaaacauauuaaggaauaucugaacaaaauacaaaauuccuugucuacagaguggucgccuugcucagugacuugugguaacggcauccagguaaggauuaagcccgggagcgcgaauaagccaaaagacgaauuagauuacgccaacgacaucgagaagaaaauuugcaagauggagaaauguaguuccgugccugucacgaauauggaaaacaucaccucuggauuucugggcccccuacucgugcugcaggcagguuucuuucuucugacacggauauugacuaucccacagagccucgauuccugguggaccucacugaauuuccucgggggaagucccguuugccugggccagaacagccagucuccuacauccaaucacucaccaaccagcuguccgcccauuugcccuggcuaucgcuggauguguuuacgacguuuuaucauuuuccuguuuauccuuuugcugugccuaauauuccuccuggugcuucuggacuaccaggggauguugccagucuguccccucauuccuggaaguacuacaaccaacacggguccaugcaagacuuguaccacacccgcucaaggcaauucuauguuuccguccugcugcuguacuaagccuaccgaugggaacugcacauguaucccaauucccagcucgugggccuucgcuaaauaucugugggagugggccucugugagauuuuccugguuaucacugcucguaccuuucguucagugguucgugggacuuagucccaccgucuggcugagcgcaaucuggaugaugugguacuggggcccauccuuguauucuaucgugagcccuuuuauuccccuacugccaauauucuuuugccucuggguguacaucugaggacuaguuauaagacugacuagcccgaugggccucccaacgggcccuccuccccuccuugcaccgagauuaauaaaaaaaaaaaaaaaaaaaaaaaaaaaaaaaaaaaaaaaaaaaaaaaaaaaaaaaaaaaaaaaaugcaucccccccccccccccccccccccccccccccaaaggcucuuuucagagccaccagaauu

SEQ ID NO: 1931 - RNA, 1240 nt, Artificial Sequence
  mRNA Design i-3 (A64-N5-C30-hSL-N5) comprising derived and/or modified sequence from Pb(ANKA)__XP_022712148.1__Pb-CSP (opt3)
aggagaaagcuuaccaugaagaaaugcaccauccugguggucgccagccuccuucugguuaacuccuuguuacccggcuacgggcagaauaagucuauucaagcucagagaaaccugaaugagcuauguuauaacgaaggaaaugacaacaaacucuaccacgugcuuaauucaaagaacgguaaaauauauaauaggaacacaguaaaucggcugcuggcagaugccccugagggcaagaagaacgaaaagaaaaaugagaaaaucgaacgcaacaauaaguugaaacagccaccgcccccuccaaaccccaacgacccuccacccccuaauccaaacgauccgcccccuccaaaucccaacgacccuccacccccgaauccuaacgaucccccaccucccaaugcgaacgacccacccccuccaaaugcuaacgauccggcacccccuaaugccaacgacccagcucccccuaaugccaacgauccagcacccccgaaugccaacgacccugcuccacccaacgccaaugauccucccccaccuaaccccaaugacccagcgccgccuaacgcaaaugaucccccacccccuaacccaaaugaccccgccccuccgcaggggaacaauaacccacaaccccagccucgaccacagccccagccucaaccgcagccccagccacagccucaaccccagccacagccucguccccaaccacagccgcagccuggaggcaauaacaauaacaagaauaacaacaaugacgauaguuacauucccagcgcugagaagauccucgaguucgugaaacagauuagagacuccaucacugaagaguggucucaaugcaacgucacgugugguucggggauaagggugcggaagcgcaaaggaucaaauaagaaagccgaagaucugacccuggaggacaucgauacagagauuugcaagauggacaaauguagcaguaucuuuaacauuguuuccaauucucucggcuucgugaucuuacugguccuuguguuuuucaacugaggacuaguuauaagacugacuagcccgaugggccucccaacgggcccuccuccccuccuugcaccgagauuaauaaaaaaaaaaaaaaaaaaaaaaaaaaaaaaaaaaaaaaaaaaaaaaaaaaaaaaaaaaaaaaaaugcaucccccccccccccccccccccccccccccccaaaggcucuuuucagagccaccagaauu

SEQ ID NO: 1932 - RNA, 1405 nt, Artificial Sequence
  mRNA Design i-3 (A64-N5-C30-hSL-N5) comprising derived and/or modified sequence from Pb(ANKA)__XP_022712148.1__Pb-CSP_L(G4SG4)_TM domain HA (opt3)
aggagaaagcuuaccaugaagaaaugcaccauccugguggucgccagccuccuucugguuaacuccuuguuacccggcuacgggcagaauaagucuauucaagcucagagaaaccugaaugagcuauguuauaacgaaggaaaugacaacaaacucuaccacgugcuuaauucaaagaacgguaaaauauauaauaggaacacaguaaaucggcugcuggcagaugccccugagggcaagaagaacgaaaagaaaaaugagaaaaucgaacgcaacaauaaguugaaacagccaccgcccccuccaaaccccaacgacccuccacccccuaauccaaacgauccgcccccuccaaaucccaacgacccuccacccccgaauccuaacgaucccccaccucccaaugcgaacgacccacccccuccaaaugcuaacgauccggcacccccuaaugccaacgacccagcucccccuaaugccaacgauccagcacccccgaaugccaacgacccugcuccacccaacgccaaugauccucccccaccuaaccccaaugacccagcgccgccuaacgcaaaugaucccccacccccuaacccaaaugaccccgccccuccgcaggggaacaauaacccacaaccccagccucgaccacagccccagccucaaccgcagccccagccacagccucaaccccagccacagccucguccccaaccacagccgcagccuggaggcaauaacaauaacaagaauaacaacaaugacgauaguuacauucccagcgcugagaagauccucgaguucgugaaacagauuagagacuccaucacugaagaguggucucaaugcaacgucacgugugguucggggauaagggugcggaagcgcaaaggaucaaauaagaaagccgaagaucugacccuggaggacaucgauacagagauuugcaagauggacaaauguagcaguaucuuuaacauuguuuccaauucucucggcuucgugaucuuacugguccuuguguuuuucaacggcgggggagguagcggcgggggaggcaaguuggaauccacuagaauauaucagauucuggcaaucuacucaaccguagcuaguagccuaguucucguggucucucugggugccauuuccuuuuggaugugcucaaaugggagccuucaguguaggaucugcaucugaggacuaguuauaagacugacuagcccgaugggccucccaacgggcccuccuccccuccuugcaccgagauuaauaaaaaaaaaaaaaaaaaaaaaaaaaaaaaaaaaaaaaaaaaaaaaaaaaaaaaaaaaaaaaaaaugcaucccccccccccccccccccccccccccccccaaaggcucuuuucagagccaccagaauu

SEQ ID NO: 1933 - RNA, 1225 nt, Artificial Sequence
  mRNA Design i-3 (A64-N5-C30-hSL-N5) comprising derived and/or modified sequence from Pb(ANKA)__XP_022712148.1__HsALB_Pb-CSP(24-340) (opt3)
aggagaaagcuuaccaugaagugggugaccuucaucagccugcucuuucuuuucuccucugccuacucacagaacaaaaguauucaagcucagagaaaucugaacgaguugugcuauaaugaaggcaacgacaauaaguuauaccacguccugaacagcaaaaaugggaagauauauaacaggaauacaguuaaccggcuacucgcagaugcccccgaggguaaaaagaaugaaaagaaaaacgagaagaucgaacgcaauaacaaacugaagcagccuccaccgcccccuaauccaaacgaucccccuccacccaacccuaaugacccaccgcccccuaacccaaaugaucccccuccacccaacccgaaugacccucccccaccuaacgcgaaugaucccccacccccuaacgcuaaugacccagccccgcccaacgcaaaugacccugccccacccaacgcuaaugauccugcaccacccaacgccaaugacccggcuccuccaaacgccaacgaucccccucccccaaauccuaacgaccccgcgccaccgaaugcaaacgauccucccccacccaauccuaacgacccagcucccccucagggaaauaacaauccgcaaccacagccccgaccucagccacagccccaaccucagccgcagccccagccacaaccucagccccagccacguccucaaccccagccacagccgggcgggaacaauaacaauaaaaacaauaacaacgacgauuccuacauuccuucugccgagaagauccuugaguuugugaagcagauuagagacucgaucacugaagaguggucacaauguaauguaacgugcggaagcggcauaagggugcggaaacgcaaggguaguaacaaaaaggccgaagaucugaccuuggaggacaucgauacagagauuuguaaaauggacaagugcuccucuaucuucaauauugucagcaacucccucggguuugugauccugcugguucucguguucuuuaauugaggacuaguuauaagacugacuagcccgaugggccucccaacgggcccuccuccccuccuugcaccgagauuaauaaaaaaaaaaaaaaaaaaaaaaaaaaaaaaaaaaaaaaaaaaaaaaaaaaaaaaaaaaaaaaaaugcaucccccccccccccccccccccccccccccccaaaggcucuuuucagagccaccagaauu

SEQ ID NO: 1934 - RNA, 1243 nt, Artificial Sequence
  mRNA Design i-3 (A64-N5-C30-hSL-N5) comprising derived and/or modified sequence from Pb(ANKA)__XP_022712148.1__HsIns-iso1_Pb-CSP(24-340) (opt3)
aggagaaagcuuaccauggcccuguggaugagacuccuuccccuguuggcuuuacuggcacuauggggcccugacccagccgcggcucagaacaagagcauccaagcccagaggaaucucaacgagcugugcuacaaugaagggaacgauaauaaacuuuaucacguucugaacuccaagaauggaaaaauuuacaaccggaauaccgucaaccgcuugcucgcagacgccccggaggguaagaaaaaugaaaagaagaacgagaaaauagaacgaaauaacaagcugaaacagcccccuccacccccuaauccaaacgaucccccuccaccgaaccccaaugacccuccacccccuaacccaaaugaucccccgccucccaacccaaaugacccucccccacccaacgcuaaugauccuccaccgcccaacgcaaaugacccugccccacccaacgcuaaugauccugccccacccaacgcgaaugacccggcaccuccaaacgccaaugaucccgcuccucccaacgccaacgacccaccucccccaaauccgaacgauccugcacccccaaaugcuaacgaucccccuccacccaauccuaacgacccggccccaccccagggcaauaacaauccucaaccacagccccguccucagccgcagccccaaccacagccucagccccagccacaaccucagccccagccaagaccgcaaccucagccccagccagggggaaacaauaacaauaagaacaauaacaacgacgacucuuauauccccucagcggagaaaauucuggaguucguuaagcagaucagggauaguauuacagaagaguggagccaauguaaugugacuugcggcuccgguauccggguacgcaagagaaaagggucuaacaagaaagccgaagaccucacguuagaggauauagacaccgagaucuguaagauggauaaaugcucgucaauuuuuaauaucgugagcaacagucugggauucgucauucuuuuggugcugguguuuuucaauugaggacuaguuauaagacugacuagcccgaugggccucccaacgggcccuccuccccuccuugcaccgagauuaauaaaaaaaaaaaaaaaaaaaaaaaaaaaaaaaaaaaaaaaaaaaaaaaaaaaaaaaaaaaaaaaaugcaucccccccccccccccccccccccccccccccaaaggcucuuuucagagccaccagaauu

SEQ ID NO: 1935 - RNA, 1222 nt, Artificial Sequence
  mRNA Design i-3 (A64-N5-C30-hSL-N5) comprising derived and/or modified sequence from Pb(ANKA)__XP_022712148.1__HsSPARC_Pb-CSP(24-340) (opt3)
aggagaaagcuuaccaugagagccuggaucuucuuucugcucugccuugcuggcagggcacuggcccagaacaagagcauucaagcgcagcggaauuugaacgaguuauguuacaaugaagggaacgacaauaaacuguaucacguucuaaacuccaagaauggaaaaauauacaaccgcaauaccgucaaccgacuccuggcugaugcccccgaggguaagaaaaaugaaaagaagaacgagaaaaucgaacguaauaacaaacuuaagcagccuccaccgcccccuaauccaaacgacccgccuccacccaacccuaaugauccaccgcccccuaacccaaaugaucccccuccacccaacccgaaugacccucccccaccuaacgcaaaugaucccccacccccuaacgccaaugacccagcuccgcccaacgcaaaugacccugccccacccaacgcuaaugauccugccccacccaacgcgaaugacccggcaccuccaaacgccaacgaucccccucccccaaauccuaacgaccccgcuccaccgaaugccaacgauccucccccacccaauccuaacgacccagcacccccucagggcaauaacaauccgcaaccacagcccagaccucagccacagccccaaccucagccgcagccccagccacaaccucagccccagccaaggccucaaccccagccacagcccgggggaaacaauaacaauaagaacaauaacaacgacgauucuuauauuccuucagcugagaaaauccuggaguucguuaagcagauucgggacaguaucacagaagaguggagccaaugcaaugugacuuguggcuccgguauacgcguaagaaagaggaaagggucuaacaagaaagccgaagauuugacgcucgaggacaucgauaccgagauuugcaagauggacaaauguucgucaaucuuuaauauugugagcaacagucugggauucgucauccugcucguguuaguguuuuucaauugaggacuaguuauaagacugacuagcccgaugggccucccaacgggcccuccuccccuccuugcaccgagauuaauaaaaaaaaaaaaaaaaaaaaaaaaaaaaaaaaaaaaaaaaaaaaaaaaaaaaaaaaaaaaaaaaugcaucccccccccccccccccccccccccccccccaaaggcucuuuucagagccaccagaauu

SEQ ID NO: 1936 - RNA, 1225 nt, Artificial Sequence
  mRNA Design i-3 (A64-N5-C30-hSL-N5) comprising derived and/or modified sequence from Pb(ANKA)__XP_022712148.1__IgE_Pb-CSP(24-340) (opt3)
aggagaaagcuuaccauggacuggaccuggauccuguuccucguggccgcugcaacaagaguccacagccagaacaaguccauucaagcccagaggaaucuuaacgagcugugcuacaaugaaggcaacgauaauaaauuguaucauguuuuaaacucuaagaaugggaaaauauacaaccggaauacugugaaccgccugcuagcggacgcucccgagggaaagaaaaaugaaaagaagaacgagaaaaucgaacgaaauaacaagcucaaacagccuccaccgcccccuaauccaaacgaucccccuccacccaacccuaaugacccaccgcccccuaacccaaaugaucccccuccacccaacccgaaugacccucccccaccuaacgccaaugaucccccacccccuaacgcaaaugacccagccccgcccaacgcuaaugauccugcaccacccaacgccaaugacccugcuccacccaacgccaaugauccggcgccuccaaacgcaaacgaucccccucccccaaauccuaacgaccccgccccaccgaaugcuaacgacccucccccacccaauccuaacgacccagcacccccucaggguaauaacaauccgcaaccacagccccguccucagccacagccccaaccucagccgcagccccagccacaaccucagccccagccaagaccucaaccccagccacagccgggcgggaacaauaacaauaagaacaauaacaacgaugacucauauauuccuagugccgagaaaauccuggaguuuguaaagcagauuagggauagcaucacggaagaguggucccaauguaaugugaccugcggaucuggcauacggguccgcaagagaaaagguucgaacaagaaagcugaagaccuuacacuggaggauaucgacacugagauuuguaagauggauaaaugcucaagcaucuucaauauugugaguaacuccuugggguuuguuauccuccuggugcuggucuucuuuaauugaggacuaguuauaagacugacuagcccgaugggccucccaacgggcccuccuccccuccuugcaccgagauuaauaaaaaaaaaaaaaaaaaaaaaaaaaaaaaaaaaaaaaaaaaaaaaaaaaaaaaaaaaaaaaaaaugcaucccccccccccccccccccccccccccccccaaaggcucuuuucagagccaccagaauu

SEQ ID NO: 1937 - RNA, 1411 nt, Artificial Sequence
  mRNA Design i-3 (A64-N5-C30-hSL-N5) comprising derived and/or modified sequence from Pf(3D7)__XP_001351122.1__Pf-CSP (opt4)
aggagaaagcuuaccaugaugagaaagcuggccauccugagcgugagcagcuuccuguucguggaggcccuguuccaggaguaccagugcuacggcagcagcagcaacaccagagugcugaacgagcugaacuacgacaacgccggcaccaaccuguacaacgagcuggagaugaacuacuacggcaagcaggagaacugguacagccugaagaagaacagcagaagccugggcgagaacgacgacggcaacaacgaggacaacgagaagcugagaaagcccaagcacaagaagcugaagcagcccgccgacggcaaccccgaccccaacgccaaccccaacguggaccccaacgccaaccccaacguggaccccaacgccaaccccaacguggaccccaacgccaaccccaacgccaaccccaacgccaaccccaacgccaaccccaacgccaaccccaacgccaaccccaacgccaaccccaacgccaaccccaacgccaaccccaacgccaaccccaacgccaaccccaacgccaaccccaacgccaaccccaacgccaaccccaacgccaaccccaacgccaaccccaacgccaaccccaacguggaccccaacgccaaccccaacgccaaccccaacgccaaccccaacgccaaccccaacgccaaccccaacgccaaccccaacgccaaccccaacgccaaccccaacgccaaccccaacgccaaccccaacgccaaccccaacgccaaccccaacgccaaccccaacgccaaccccaacgccaaccccaacgccaaccccaacgccaaccccaacgccaaccccaacaagaacaaccagggcaacggccagggccacaacaugcccaacgaccccaacagaaacguggacgagaacgccaacgccaacagcgccgugaagaacaacaacaacgaggagcccagcgacaagcacaucaaggaguaccugaacaagauccagaacagccugagcaccgaguggagccccugcagcgugaccugcggcaacggcauccaggugagaaucaagcccggcagcgccaacaagcccaaggacgagcuggacuacgccaacgacaucgagaagaagaucugcaagauggagaagugcagcagcguguucaacguggugaacagcagcaucggccugaucauggugcugagcuuccuguuccugaacugaggacuaguuauaagacugacuagcccgaugggccucccaacgggcccuccuccccuccuugcaccgagauuaauaaaaaaaaaaaaaaaaaaaaaaaaaaaaaaaaaaaaaaaaaaaaaaaaaaaaaaaaaaaaaaaaugcaucccccccccccccccccccccccccccccccaaaggcucuuuucagagccaccagaauu

SEQ ID NO: 1938 - RNA, 1342 nt, Artificial Sequence
  mRNA Design i-3 (A64-N5-C30-hSL-N5) comprising derived and/or modified sequence from Pf(3D7)__XP_001351122.1__Pf-CSP(1-374) (opt4)
aggagaaagcuuaccaugaugagaaagcuggccauccugagcgugagcagcuuccuguucguggaggcccuguuccaggaguaccagugcuacggcagcagcagcaacaccagagugcugaacgagcugaacuacgacaacgccggcaccaaccuguacaacgagcuggagaugaacuacuacggcaagcaggagaacugguacagccugaagaagaacagcagaagccugggcgagaacgacgacggcaacaacgaggacaacgagaagcugagaaagcccaagcacaagaagcugaagcagcccgccgacggcaaccccgaccccaacgccaaccccaacguggaccccaacgccaaccccaacguggaccccaacgccaaccccaacguggaccccaacgccaaccccaacgccaaccccaacgccaaccccaacgccaaccccaacgccaaccccaacgccaaccccaacgccaaccccaacgccaaccccaacgccaaccccaacgccaaccccaacgccaaccccaacgccaaccccaacgccaaccccaacgccaaccccaacgccaaccccaacgccaaccccaacgccaaccccaacguggaccccaacgccaaccccaacgccaaccccaacgccaaccccaacgccaaccccaacgccaaccccaacgccaaccccaacgccaaccccaacgccaaccccaacgccaaccccaacgccaaccccaacgccaaccccaacgccaaccccaacgccaaccccaacgccaaccccaacgccaaccccaacgccaaccccaacgccaaccccaacgccaaccccaacaagaacaaccagggcaacggccagggccacaacaugcccaacgaccccaacagaaacguggacgagaacgccaacgccaacagcgccgugaagaacaacaacaacgaggagcccagcgacaagcacaucaaggaguaccugaacaagauccagaacagccugagcaccgaguggagccccugcagcgugaccugcggcaacggcauccaggugagaaucaagcccggcagcgccaacaagcccaaggacgagcuggacuacgccaacgacaucgagaagaagaucugcaagauggagaagugcugaggacuaguuauaagacugacuagcccgaugggccucccaacgggcccuccuccccuccuugcaccgagauuaauaaaaaaaaaaaaaaaaaaaaaaaaaaaaaaaaaaaaaaaaaaaaaaaaaaaaaaaaaaaaaaaaugcaucccccccccccccccccccccccccccccccaaaggcucuuuucagagccaccagaauu

SEQ ID NO: 1939 - RNA, 1195 nt, Artificial Sequence
  mRNA Design i-3 (A64-N5-C30-hSL-N5) comprising derived and/or modified sequence from Pf(3D7)__XP_001351122.1__Pf-CSP(1-325) (opt4)
aggagaaagcuuaccaugaugagaaagcuggccauccugagcgugagcagcuuccuguucguggaggcccuguuccaggaguaccagugcuacggcagcagcagcaacaccagagugcugaacgagcugaacuacgacaacgccggcaccaaccuguacaacgagcuggagaugaacuacuacggcaagcaggagaacugguacagccugaagaagaacagcagaagccugggcgagaacgacgacggcaacaacgaggacaacgagaagcugagaaagcccaagcacaagaagcugaagcagcccgccgacggcaaccccgaccccaacgccaaccccaacguggaccccaacgccaaccccaacguggaccccaacgccaaccccaacguggaccccaacgccaaccccaacgccaaccccaacgccaaccccaacgccaaccccaacgccaaccccaacgccaaccccaacgccaaccccaacgccaaccccaacgccaaccccaacgccaaccccaacgccaaccccaacgccaaccccaacgccaaccccaacgccaaccccaacgccaaccccaacgccaaccccaacgccaaccccaacguggaccccaacgccaaccccaacgccaaccccaacgccaaccccaacgccaaccccaacgccaaccccaacgccaaccccaacgccaaccccaacgccaaccccaacgccaaccccaacgccaaccccaacgccaaccccaacgccaaccccaacgccaaccccaacgccaaccccaacgccaaccccaacgccaaccccaacgccaaccccaacgccaaccccaacaagaacaaccagggcaacggccagggccacaacaugcccaacgaccccaacagaaacguggacgagaacgccaacgccaacagcgccgugaagaacaacaacaacgaggagcccagcgacaagcacaucaaggaguaccugaacaagauccagaacugaggacuaguuauaagacugacuagcccgaugggccucccaacgggcccuccuccccuccuugcaccgagauuaauaaaaaaaaaaaaaaaaaaaaaaaaaaaaaaaaaaaaaaaaaaaaaaaaaaaaaaaaaaaaaaaaugcaucccccccccccccccccccccccccccccccaaaggcucuuuucagagccaccagaauu

SEQ ID NO: 1940 - RNA, 1411 nt, Artificial Sequence
  mRNA Design i-3 (A64-N5-C30-hSL-N5) comprising derived and/or modified sequence from Pf(3D7)__XP_001351122.1__HsALB_Pf-CSP(19-397) (opt4)
aggagaaagcuuaccaugaagugggugaccuucaucagccugcuguuccuguucagcagcgccuacagccuguuccaggaguaccagugcuacggcagcagcagcaacaccagagugcugaacgagcugaacuacgacaacgccggcaccaaccuguacaacgagcuggagaugaacuacuacggcaagcaggagaacugguacagccugaagaagaacagcagaagccugggcgagaacgacgacggcaacaacgaggacaacgagaagcugagaaagcccaagcacaagaagcugaagcagcccgccgacggcaaccccgaccccaacgccaaccccaacguggaccccaacgccaaccccaacguggaccccaacgccaaccccaacguggaccccaacgccaaccccaacgccaaccccaacgccaaccccaacgccaaccccaacgccaaccccaacgccaaccccaacgccaaccccaacgccaaccccaacgccaaccccaacgccaaccccaacgccaaccccaacgccaaccccaacgccaaccccaacgccaaccccaacgccaaccccaacgccaaccccaacgccaaccccaacguggaccccaacgccaaccccaacgccaaccccaacgccaaccccaacgccaaccccaacgccaaccccaacgccaaccccaacgccaaccccaacgccaaccccaacgccaaccccaacgccaaccccaacgccaaccccaacgccaaccccaacgccaaccccaacgccaaccccaacgccaaccccaacgccaaccccaacgccaaccccaacgccaaccccaacaagaacaaccagggcaacggccagggccacaacaugcccaacgaccccaacagaaacguggacgagaacgccaacgccaacagcgccgugaagaacaacaacaacgaggagcccagcgacaagcacaucaaggaguaccugaacaagauccagaacagccugagcaccgaguggagccccugcagcgugaccugcggcaacggcauccaggugagaaucaagcccggcagcgccaacaagcccaaggacgagcuggacuacgccaacgacaucgagaagaagaucugcaagauggagaagugcagcagcguguucaacguggugaacagcagcaucggccugaucauggugcugagcuuccuguuccugaacugaggacuaguuauaagacugacuagcccgaugggccucccaacgggcccuccuccccuccuugcaccgagauuaauaaaaaaaaaaaaaaaaaaaaaaaaaaaaaaaaaaaaaaaaaaaaaaaaaaaaaaaaaaaaaaaaugcaucccccccccccccccccccccccccccccccaaaggcucuuuucagagccaccagaauu

SEQ ID NO: 1941 - RNA, 1429 nt, Artificial Sequence
  mRNA Design i-3 (A64-N5-C30-hSL-N5) comprising derived and/or modified sequence from Pf(3D7)__XP_001351122.1__HsIns-iso1_Pf-CSP(19-397) (opt4)
aggagaaagcuuaccauggcccuguggaugagacugcugccccugcuggcccugcuggcccuguggggccccgaccccgccgccgcccuguuccaggaguaccagugcuacggcagcagcagcaacaccagagugcugaacgagcugaacuacgacaacgccggcaccaaccuguacaacgagcuggagaugaacuacuacggcaagcaggagaacugguacagccugaagaagaacagcagaagccugggcgagaacgacgacggcaacaacgaggacaacgagaagcugagaaagcccaagcacaagaagcugaagcagcccgccgacggcaaccccgaccccaacgccaaccccaacguggaccccaacgccaaccccaacguggaccccaacgccaaccccaacguggaccccaacgccaaccccaacgccaaccccaacgccaaccccaacgccaaccccaacgccaaccccaacgccaaccccaacgccaaccccaacgccaaccccaacgccaaccccaacgccaaccccaacgccaaccccaacgccaaccccaacgccaaccccaacgccaaccccaacgccaaccccaacgccaaccccaacgccaaccccaacguggaccccaacgccaaccccaacgccaaccccaacgccaaccccaacgccaaccccaacgccaaccccaacgccaaccccaacgccaaccccaacgccaaccccaacgccaaccccaacgccaaccccaacgccaaccccaacgccaaccccaacgccaaccccaacgccaaccccaacgccaaccccaacgccaaccccaacgccaaccccaacgccaaccccaacaagaacaaccagggcaacggccagggccacaacaugcccaacgaccccaacagaaacguggacgagaacgccaacgccaacagcgccgugaagaacaacaacaacgaggagcccagcgacaagcacaucaaggaguaccugaacaagauccagaacagccugagcaccgaguggagccccugcagcgugaccugcggcaacggcauccaggugagaaucaagcccggcagcgccaacaagcccaaggacgagcuggacuacgccaacgacaucgagaagaagaucugcaagauggagaagugcagcagcguguucaacguggugaacagcagcaucggccugaucauggugcugagcuuccuguuccugaacugaggacuaguuauaagacugacuagcccgaugggccucccaacgggcccuccuccccuccuugcaccgagauuaauaaaaaaaaaaaaaaaaaaaaaaaaaaaaaaaaaaaaaaaaaaaaaaaaaaaaaaaaaaaaaaaaugcaucccccccccccccccccccccccccccccccaaaggcucuuuucagagccaccagaauu

SEQ ID NO: 1942 - RNA, 1408 nt, Artificial Sequence
  mRNA Design i-3 (A64-N5-C30-hSL-N5) comprising derived and/or modified sequence from Pf(3D7)__XP_001351122.1__HsSPARC_Pf-CSP(19-397) (opt4)
aggagaaagcuuaccaugagagccuggaucuucuuccugcugugccuggccggcagagcccuggcccuguuccaggaguaccagugcuacggcagcagcagcaacaccagagugcugaacgagcugaacuacgacaacgccggcaccaaccuguacaacgagcuggagaugaacuacuacggcaagcaggagaacugguacagccugaagaagaacagcagaagccugggcgagaacgacgacggcaacaacgaggacaacgagaagcugagaaagcccaagcacaagaagcugaagcagcccgccgacggcaaccccgaccccaacgccaaccccaacguggaccccaacgccaaccccaacguggaccccaacgccaaccccaacguggaccccaacgccaaccccaacgccaaccccaacgccaaccccaacgccaaccccaacgccaaccccaacgccaaccccaacgccaaccccaacgccaaccccaacgccaaccccaacgccaaccccaacgccaaccccaacgccaaccccaacgccaaccccaacgccaaccccaacgccaaccccaacgccaaccccaacgccaaccccaacguggaccccaacgccaaccccaacgccaaccccaacgccaaccccaacgccaaccccaacgccaaccccaacgccaaccccaacgccaaccccaacgccaaccccaacgccaaccccaacgccaaccccaacgccaaccccaacgccaaccccaacgccaaccccaacgccaaccccaacgccaaccccaacgccaaccccaacgccaaccccaacgccaaccccaacaagaacaaccagggcaacggccagggccacaacaugcccaacgaccccaacagaaacguggacgagaacgccaacgccaacagcgccgugaagaacaacaacaacgaggagcccagcgacaagcacaucaaggaguaccugaacaagauccagaacagccugagcaccgaguggagccccugcagcgugaccugcggcaacggcauccaggugagaaucaagcccggcagcgccaacaagcccaaggacgagcuggacuacgccaacgacaucgagaagaagaucugcaagauggagaagugcagcagcguguucaacguggugaacagcagcaucggccugaucauggugcugagcuuccuguuccugaacugaggacuaguuauaagacugacuagcccgaugggccucccaacgggcccuccuccccuccuugcaccgagauuaauaaaaaaaaaaaaaaaaaaaaaaaaaaaaaaaaaaaaaaaaaaaaaaaaaaaaaaaaaaaaaaaaugcaucccccccccccccccccccccccccccccccaaaggcucuuuucagagccaccagaauu

SEQ ID NO: 1943 - RNA, 1411 nt, Artificial Sequence
  mRNA Design i-3 (A64-N5-C30-hSL-N5) comprising derived and/or modified sequence from Pf(3D7)__XP_001351122.1__IgE_Pf-CSP(19-397) (opt4)
aggagaaagcuuaccauggacuggaccuggauccuguuccugguggccgccgccaccagagugcacagccuguuccaggaguaccagugcuacggcagcagcagcaacaccagagugcugaacgagcugaacuacgacaacgccggcaccaaccuguacaacgagcuggagaugaacuacuacggcaagcaggagaacugguacagccugaagaagaacagcagaagccugggcgagaacgacgacggcaacaacgaggacaacgagaagcugagaaagcccaagcacaagaagcugaagcagcccgccgacggcaaccccgaccccaacgccaaccccaacguggaccccaacgccaaccccaacguggaccccaacgccaaccccaacguggaccccaacgccaaccccaacgccaaccccaacgccaaccccaacgccaaccccaacgccaaccccaacgccaaccccaacgccaaccccaacgccaaccccaacgccaaccccaacgccaaccccaacgccaaccccaacgccaaccccaacgccaaccccaacgccaaccccaacgccaaccccaacgccaaccccaacgccaaccccaacguggaccccaacgccaaccccaacgccaaccccaacgccaaccccaacgccaaccccaacgccaaccccaacgccaaccccaacgccaaccccaacgccaaccccaacgccaaccccaacgccaaccccaacgccaaccccaacgccaaccccaacgccaaccccaacgccaaccccaacgccaaccccaacgccaaccccaacgccaaccccaacgccaaccccaacaagaacaaccagggcaacggccagggccacaacaugcccaacgaccccaacagaaacguggacgagaacgccaacgccaacagcgccgugaagaacaacaacaacgaggagcccagcgacaagcacaucaaggaguaccugaacaagauccagaacagccugagcaccgaguggagccccugcagcgugaccugcggcaacggcauccaggugagaaucaagcccggcagcgccaacaagcccaaggacgagcuggacuacgccaacgacaucgagaagaagaucugcaagauggagaagugcagcagcguguucaacguggugaacagcagcaucggccugaucauggugcugagcuuccuguuccugaacugaggacuaguuauaagacugacuagcccgaugggccucccaacgggcccuccuccccuccuugcaccgagauuaauaaaaaaaaaaaaaaaaaaaaaaaaaaaaaaaaaaaaaaaaaaaaaaaaaaaaaaaaaaaaaaaaugcaucccccccccccccccccccccccccccccccaaaggcucuuuucagagccaccagaauu

SEQ ID NO: 1944 - RNA, 1576 nt, Artificial Sequence
  mRNA Design i-3 (A64-N5-C30-hSL-N5) comprising derived and/or modified sequence from Pf(3D7)__XP_001351122.1__Pf-CSP_L(G4SG4)_TM domain HA (opt4)
aggagaaagcuuaccaugaugagaaagcuggccauccugagcgugagcagcuuccuguucguggaggcccuguuccaggaguaccagugcuacggcagcagcagcaacaccagagugcugaacgagcugaacuacgacaacgccggcaccaaccuguacaacgagcuggagaugaacuacuacggcaagcaggagaacugguacagccugaagaagaacagcagaagccugggcgagaacgacgacggcaacaacgaggacaacgagaagcugagaaagcccaagcacaagaagcugaagcagcccgccgacggcaaccccgaccccaacgccaaccccaacguggaccccaacgccaaccccaacguggaccccaacgccaaccccaacguggaccccaacgccaaccccaacgccaaccccaacgccaaccccaacgccaaccccaacgccaaccccaacgccaaccccaacgccaaccccaacgccaaccccaacgccaaccccaacgccaaccccaacgccaaccccaacgccaaccccaacgccaaccccaacgccaaccccaacgccaaccccaacgccaaccccaacgccaaccccaacguggaccccaacgccaaccccaacgccaaccccaacgccaaccccaacgccaaccccaacgccaaccccaacgccaaccccaacgccaaccccaacgccaaccccaacgccaaccccaacgccaaccccaacgccaaccccaacgccaaccccaacgccaaccccaacgccaaccccaacgccaaccccaacgccaaccccaacgccaaccccaacgccaaccccaacaagaacaaccagggcaacggccagggccacaacaugcccaacgaccccaacagaaacguggacgagaacgccaacgccaacagcgccgugaagaacaacaacaacgaggagcccagcgacaagcacaucaaggaguaccugaacaagauccagaacagccugagcaccgaguggagccccugcagcgugaccugcggcaacggcauccaggugagaaucaagcccggcagcgccaacaagcccaaggacgagcuggacuacgccaacgacaucgagaagaagaucugcaagauggagaagugcagcagcguguucaacguggugaacagcagcaucggccugaucauggugcugagcuuccuguuccugaacggcggcggcggcagcggcggcggcggcaagcuggagagcaccagaaucuaccagauccuggccaucuacagcaccguggccagcagccuggugcugguggugagccugggcgccaucagcuucuggaugugcagcaacggcagccugcagugcagaaucugcaucugaggacuaguuauaagacugacuagcccgaugggccucccaacgggcccuccuccccuccuugcaccgagauuaauaaaaaaaaaaaaaaaaaaaaaaaaaaaaaaaaaaaaaaaaaaaaaaaaaaaaaaaaaaaaaaaaugcaucccccccccccccccccccccccccccccccaaaggcucuuuucagagccaccagaauu

SEQ ID NO: 1945 - RNA, 1450 nt, Artificial Sequence
  mRNA Design i-3 (A64-N5-C30-hSL-N5) comprising derived and/or modified sequence from Pf(3D7)__XP_001351122.1__Pf-CSP(199-377)_L(PVTN)_HBsAg (opt4)
aggagaaagcuuaccauggaccccaacgccaaccccaacgccaaccccaacgccaaccccaacgccaaccccaacgccaaccccaacgccaaccccaacgccaaccccaacgccaaccccaacgccaaccccaacgccaaccccaacgccaaccccaacgccaaccccaacgccaaccccaacgccaaccccaacgccaaccccaacgccaaccccaacgccaaccccaacgccaaccccaacaagaacaaccagggcaacggccagggccacaacaugcccaacgaccccaacagaaacguggacgagaacgccaacgccaacagcgccgugaagaacaacaacaacgaggagcccagcgacaagcacaucaaggaguaccugaacaagauccagaacagccugagcaccgaguggagccccugcagcgugaccugcggcaacggcauccaggugagaaucaagcccggcagcgccaacaagcccaaggacgagcuggacuacgccaacgacaucgagaagaagaucugcaagauggagaagugcagcagcgugcccgugaccaacauggagaacaucaccagcggcuuccugggcccccugcuggugcugcaggccggcuucuuccugcugaccagaauccugaccaucccccagagccuggacagcugguggaccagccugaacuuccugggcggcagccccgugugccugggccagaacagccagagccccaccagcaaccacagccccaccagcugcccccccaucugccccggcuacagauggaugugccugagaagauucaucaucuuccuguucauccugcugcugugccugaucuuccugcuggugcugcuggacuaccagggcaugcugcccgugugcccccugauccccggcagcaccaccaccaacaccggccccugcaagaccugcaccacccccgcccagggcaacagcauguuccccagcugcugcugcaccaagcccaccgacggcaacugcaccugcauccccauccccagcagcugggccuucgccaaguaccugugggagugggccagcgugagauucagcuggcugagccugcuggugcccuucgugcagugguucgugggccugagccccaccguguggcugagcgccaucuggaugaugugguacuggggccccagccuguacagcaucgugagccccuucaucccccugcugcccaucuucuucugccuguggguguacaucugaggacuaguuauaagacugacuagcccgaugggccucccaacgggcccuccuccccuccuugcaccgagauuaauaaaaaaaaaaaaaaaaaaaaaaaaaaaaaaaaaaaaaaaaaaaaaaaaaaaaaaaaaaaaaaaaugcaucccccccccccccccccccccccccccccccaaaggcucuuuucagagccaccagaauu

SEQ ID NO: 1946 - RNA, 1492 nt, Artificial Sequence
  mRNA Design i-3 (A64-N5-C30-hSL-N5) comprising derived and/or modified sequence from Pf(3D7)__XP_001351122.1__Pf-CSP(199-387)_L(PVTN)_HBsAg (opt4)
aggagaaagcuuaccaugauggcccccgaccccaacgccaaccccaacgccaaccccaacgccaaccccaacgccaaccccaacgccaaccccaacgccaaccccaacgccaaccccaacgccaaccccaacgccaaccccaacgccaaccccaacgccaaccccaacgccaaccccaacgccaaccccaacgccaaccccaacgccaaccccaacgccaaccccaacgccaaccccaacgccaaccccaacaagaacaaccagggcaacggccagggccacaacaugcccaacgaccccaacagaaacguggacgagaacgccaacgccaacagcgccgugaagaacaacaacaacgaggagcccagcgacaagcacaucaaggaguaccugaacaagauccagaacagccugagcaccgaguggagccccugcagcgugaccugcggcaacggcauccaggugagaaucaagcccggcagcgccaacaagcccaaggacgagcuggacuacgccaacgacaucgagaagaagaucugcaagauggagaagugcagcagcguguucaacguggugaacagcagcaucggccugggccccgugaccaacauggagaacaucaccagcggcuuccugggcccccugcuggugcugcaggccggcuucuuccugcugaccagaauccugaccaucccccagagccuggacagcugguggaccagccugaacuuccugggcggcagccccgugugccugggccagaacagccagagccccaccagcaaccacagccccaccagcugcccccccaucugccccggcuacagauggaugugccugagaagauucaucaucuuccuguucauccugcugcugugccugaucuuccugcuggugcugcuggacuaccagggcaugcugcccgugugcccccugauccccggcagcaccaccaccaacaccggccccugcaagaccugcaccacccccgcccagggcaacagcauguuccccagcugcugcugcaccaagcccaccgacggcaacugcaccugcauccccauccccagcagcugggccuucgccaaguaccugugggagugggccagcgugagauucagcuggcugagccugcuggugcccuucgugcagugguucgugggccugagccccaccguguggcugagcgccaucuggaugaugugguacuggggccccagccuguacagcaucgugagccccuucaucccccugcugcccaucuucuucugccuguggguguacaucugaggacuaguuauaagacugacuagcccgaugggccucccaacgggcccuccuccccuccuugcaccgagauuaauaaaaaaaaaaaaaaaaaaaaaaaaaaaaaaaaaaaaaaaaaaaaaaaaaaaaaaaaaaaaaaaaugcaucccccccccccccccccccccccccccccccaaaggcucuuuucagagccaccagaauu

SEQ ID NO: 1947 - RNA, 676 nt, Artificial Sequence
  mRNA Design i-3 (A64-N5-C30-hSL-N5) comprising derived and/or modified sequence from Pf(3D7)__XP_001351122.1__HsALB_Pf-CSP(19-152) (opt4)
aggagaaagcuuaccaugaagugggugaccuucaucagccugcuguuccuguucagcagcgccuacagccuguuccaggaguaccagugcuacggcagcagcagcaacaccagagugcugaacgagcugaacuacgacaacgccggcaccaaccuguacaacgagcuggagaugaacuacuacggcaagcaggagaacugguacagccugaagaagaacagcagaagccugggcgagaacgacgacggcaacaacgaggacaacgagaagcugagaaagcccaagcacaagaagcugaagcagcccgccgacggcaaccccgaccccaacgccaaccccaacguggaccccaacgccaaccccaacguggaccccaacgccaaccccaacguggaccccaacgccaaccccaacgccaaccccaacgccaaccccaacgccaaccccaacgccaaccccaacgccaaccccugaggacuaguuauaagacugacuagcccgaugggccucccaacgggcccuccuccccuccuugcaccgagauuaauaaaaaaaaaaaaaaaaaaaaaaaaaaaaaaaaaaaaaaaaaaaaaaaaaaaaaaaaaaaaaaaaugcaucccccccccccccccccccccccccccccccaaaggcucuuuucagagccaccagaauu

SEQ ID NO: 1948 - RNA, 796 nt, Artificial Sequence
  mRNA Design i-3 (A64-N5-C30-hSL-N5) comprising derived and/or modified sequence from Pf(3D7)__XP_001351122.1__HsALB_Pf-CSP(19-192) (opt4)
aggagaaagcuuaccaugaagugggugaccuucaucagccugcuguuccuguucagcagcgccuacagccuguuccaggaguaccagugcuacggcagcagcagcaacaccagagugcugaacgagcugaacuacgacaacgccggcaccaaccuguacaacgagcuggagaugaacuacuacggcaagcaggagaacugguacagccugaagaagaacagcagaagccugggcgagaacgacgacggcaacaacgaggacaacgagaagcugagaaagcccaagcacaagaagcugaagcagcccgccgacggcaaccccgaccccaacgccaaccccaacguggaccccaacgccaaccccaacguggaccccaacgccaaccccaacguggaccccaacgccaaccccaacgccaaccccaacgccaaccccaacgccaaccccaacgccaaccccaacgccaaccccaacgccaaccccaacgccaaccccaacgccaaccccaacgccaaccccaacgccaaccccaacgccaaccccaacgccaaccccaacgccaaccccaacgccaaccccaacgccaaccccugaggacuaguuauaagacugacuagcccgaugggccucccaacgggcccuccuccccuccuugcaccgagauuaauaaaaaaaaaaaaaaaaaaaaaaaaaaaaaaaaaaaaaaaaaaaaaaaaaaaaaaaaaaaaaaaaugcaucccccccccccccccccccccccccccccccaaaggcucuuuucagagccaccagaauu

SEQ ID NO: 1949 - RNA, 1036 nt, Artificial Sequence
  mRNA Design i-3 (A64-N5-C30-hSL-N5) comprising derived and/or modified sequence from Pf(3D7)__XP_001351122.1__HsALB_Pf-CSP(19-272) (opt4)
aggagaaagcuuaccaugaagugggugaccuucaucagccugcuguuccuguucagcagcgccuacagccuguuccaggaguaccagugcuacggcagcagcagcaacaccagagugcugaacgagcugaacuacgacaacgccggcaccaaccuguacaacgagcuggagaugaacuacuacggcaagcaggagaacugguacagccugaagaagaacagcagaagccugggcgagaacgacgacggcaacaacgaggacaacgagaagcugagaaagcccaagcacaagaagcugaagcagcccgccgacggcaaccccgaccccaacgccaaccccaacguggaccccaacgccaaccccaacguggaccccaacgccaaccccaacguggaccccaacgccaaccccaacgccaaccccaacgccaaccccaacgccaaccccaacgccaaccccaacgccaaccccaacgccaaccccaacgccaaccccaacgccaaccccaacgccaaccccaacgccaaccccaacgccaaccccaacgccaaccccaacgccaaccccaacgccaaccccaacgccaaccccaacgccaaccccaacguggaccccaacgccaaccccaacgccaaccccaacgccaaccccaacgccaaccccaacgccaaccccaacgccaaccccaacgccaaccccaacgccaaccccaacgccaaccccaacgccaaccccaacgccaaccccaacgccaaccccaacgccaaccccaacgccaaccccaacgccaaccccaacgccaaccccaacgccaaccccaacgccaaccccugaggacuaguuauaagacugacuagcccgaugggccucccaacgggcccuccuccccuccuugcaccgagauuaauaaaaaaaaaaaaaaaaaaaaaaaaaaaaaaaaaaaaaaaaaaaaaaaaaaaaaaaaaaaaaaaaugcaucccccccccccccccccccccccccccccccaaaggcucuuuucagagccaccagaauu

SEQ ID NO: 1950 - RNA, 1198 nt, Artificial Sequence
  mRNA Design i-3 (A64-N5-C30-hSL-N5) comprising derived and/or modified sequence from Pf(3D7)__XP_001351122.1__HsALB_Pf-CSP(19-272)_L(AAY)_Pf-CSP(310-3 27)_L(AAY)_Pf-CSP(346-375) (opt4)
aggagaaagcuuaccaugaagugggugaccuucaucagccugcuguuccuguucagcagcgccuacagccuguuccaggaguaccagugcuacggcagcagcagcaacaccagagugcugaacgagcugaacuacgacaacgccggcaccaaccuguacaacgagcuggagaugaacuacuacggcaagcaggagaacugguacagccugaagaagaacagcagaagccugggcgagaacgacgacggcaacaacgaggacaacgagaagcugagaaagcccaagcacaagaagcugaagcagcccgccgacggcaaccccgaccccaacgccaaccccaacguggaccccaacgccaaccccaacguggaccccaacgccaaccccaacguggaccccaacgccaaccccaacgccaaccccaacgccaaccccaacgccaaccccaacgccaaccccaacgccaaccccaacgccaaccccaacgccaaccccaacgccaaccccaacgccaaccccaacgccaaccccaacgccaaccccaacgccaaccccaacgccaaccccaacgccaaccccaacgccaaccccaacgccaaccccaacguggaccccaacgccaaccccaacgccaaccccaacgccaaccccaacgccaaccccaacgccaaccccaacgccaaccccaacgccaaccccaacgccaaccccaacgccaaccccaacgccaaccccaacgccaaccccaacgccaaccccaacgccaaccccaacgccaaccccaacgccaaccccaacgccaaccccaacgccaaccccaacgccaaccccgccgccuacgagcccagcgacaagcacaucaaggaguaccugaacaagauccagaacagccuggccgccuacaucaagcccggcagcgccaacaagcccaaggacgagcuggacuacgccaacgacaucgagaagaagaucugcaagauggagaagugcagcugaggacuaguuauaagacugacuagcccgaugggccucccaacgggcccuccuccccuccuugcaccgagauuaauaaaaaaaaaaaaaaaaaaaaaaaaaaaaaaaaaaaaaaaaaaaaaaaaaaaaaaaaaaaaaaaaugcaucccccccccccccccccccccccccccccccaaaggcucuuuucagagccaccagaauu

SEQ ID NO: 1951 - RNA, 1159 nt, Artificial Sequence
  mRNA Design i-3 (A64-N5-C30-hSL-N5) comprising derived and/or modified sequence from Pf(3D7)__XP_001351122.1__HsALB_Pf-CSP(19-272)_L(AAY)_Pf-CSP(346-3 65)_L(AAY)_P2 (opt4)
aggagaaagcuuaccaugaagugggugaccuucaucagccugcuguuccuguucagcagcgccuacagccuguuccaggaguaccagugcuacggcagcagcagcaacaccagagugcugaacgagcugaacuacgacaacgccggcaccaaccuguacaacgagcuggagaugaacuacuacggcaagcaggagaacugguacagccugaagaagaacagcagaagccugggcgagaacgacgacggcaacaacgaggacaacgagaagcugagaaagcccaagcacaagaagcugaagcagcccgccgacggcaaccccgaccccaacgccaaccccaacguggaccccaacgccaaccccaacguggaccccaacgccaaccccaacguggaccccaacgccaaccccaacgccaaccccaacgccaaccccaacgccaaccccaacgccaaccccaacgccaaccccaacgccaaccccaacgccaaccccaacgccaaccccaacgccaaccccaacgccaaccccaacgccaaccccaacgccaaccccaacgccaaccccaacgccaaccccaacgccaaccccaacgccaaccccaacguggaccccaacgccaaccccaacgccaaccccaacgccaaccccaacgccaaccccaacgccaaccccaacgccaaccccaacgccaaccccaacgccaaccccaacgccaaccccaacgccaaccccaacgccaaccccaacgccaaccccaacgccaaccccaacgccaaccccaacgccaaccccaacgccaaccccaacgccaaccccaacgccaaccccgccgccuacaucaagcccggcagcgccaacaagcccaaggacgagcuggacuacgccaacgacaucgaggccgccuaccaguacaucaaggccaacagcaaguucaucggcaucaccgagcugugaggacuaguuauaagacugacuagcccgaugggccucccaacgggcccuccuccccuccuugcaccgagauuaauaaaaaaaaaaaaaaaaaaaaaaaaaaaaaaaaaaaaaaaaaaaaaaaaaaaaaaaaaaaaaaaaugcaucccccccccccccccccccccccccccccccaaaggcucuuuucagagccaccagaauu

SEQ ID NO: 1952 - RNA, 1153 nt, Artificial Sequence
  mRNA Design i-3 (A64-N5-C30-hSL-N5) comprising derived and/or modified sequence from Pf(3D7)__XP_001351122.1__HsALB_Pf-CSP(19-272)_L(AAY)_Pf-CSP(346-3 65)_L(AAY)_PADRE (opt4)
aggagaaagcuuaccaugaagugggugaccuucaucagccugcuguuccuguucagcagcgccuacagccuguuccaggaguaccagugcuacggcagcagcagcaacaccagagugcugaacgagcugaacuacgacaacgccggcaccaaccuguacaacgagcuggagaugaacuacuacggcaagcaggagaacugguacagccugaagaagaacagcagaagccugggcgagaacgacgacggcaacaacgaggacaacgagaagcugagaaagcccaagcacaagaagcugaagcagcccgccgacggcaaccccgaccccaacgccaaccccaacguggaccccaacgccaaccccaacguggaccccaacgccaaccccaacguggaccccaacgccaaccccaacgccaaccccaacgccaaccccaacgccaaccccaacgccaaccccaacgccaaccccaacgccaaccccaacgccaaccccaacgccaaccccaacgccaaccccaacgccaaccccaacgccaaccccaacgccaaccccaacgccaaccccaacgccaaccccaacgccaaccccaacgccaaccccaacguggaccccaacgccaaccccaacgccaaccccaacgccaaccccaacgccaaccccaacgccaaccccaacgccaaccccaacgccaaccccaacgccaaccccaacgccaaccccaacgccaaccccaacgccaaccccaacgccaaccccaacgccaaccccaacgccaaccccaacgccaaccccaacgccaaccccaacgccaaccccaacgccaaccccgccgccuacaucaagcccggcagcgccaacaagcccaaggacgagcuggacuacgccaacgacaucgaggccgccuacgccaaguucguggccgccuggacccugaaggccgccgccugaggacuaguuauaagacugacuagcccgaugggccucccaacgggcccuccuccccuccuugcaccgagauuaauaaaaaaaaaaaaaaaaaaaaaaaaaaaaaaaaaaaaaaaaaaaaaaaaaaaaaaaaaaaaaaaaugcaucccccccccccccccccccccccccccccccaaaggcucuuuucagagccaccagaauu

SEQ ID NO: 1953 - RNA, 1210 nt, Artificial Sequence
  mRNA Design i-3 (A64-N5-C30-hSL-N5) comprising derived and/or modified sequence from Pf(3D7)__XP_001351122.1__HsALB_Pf-CSP(19-272)_L(G4S)_Pf-CSP(310-3 27)_L(G4S)_Pf-CSP(346-375) (opt4)
aggagaaagcuuaccaugaagugggugaccuucaucagccugcuguuccuguucagcagcgccuacagccuguuccaggaguaccagugcuacggcagcagcagcaacaccagagugcugaacgagcugaacuacgacaacgccggcaccaaccuguacaacgagcuggagaugaacuacuacggcaagcaggagaacugguacagccugaagaagaacagcagaagccugggcgagaacgacgacggcaacaacgaggacaacgagaagcugagaaagcccaagcacaagaagcugaagcagcccgccgacggcaaccccgaccccaacgccaaccccaacguggaccccaacgccaaccccaacguggaccccaacgccaaccccaacguggaccccaacgccaaccccaacgccaaccccaacgccaaccccaacgccaaccccaacgccaaccccaacgccaaccccaacgccaaccccaacgccaaccccaacgccaaccccaacgccaaccccaacgccaaccccaacgccaaccccaacgccaaccccaacgccaaccccaacgccaaccccaacgccaaccccaacgccaaccccaacguggaccccaacgccaaccccaacgccaaccccaacgccaaccccaacgccaaccccaacgccaaccccaacgccaaccccaacgccaaccccaacgccaaccccaacgccaaccccaacgccaaccccaacgccaaccccaacgccaaccccaacgccaaccccaacgccaaccccaacgccaaccccaacgccaaccccaacgccaaccccaacgccaaccccggcggcggcggcagcgagcccagcgacaagcacaucaaggaguaccugaacaagauccagaacagccugggcggcggcggcagcaucaagcccggcagcgccaacaagcccaaggacgagcuggacuacgccaacgacaucgagaagaagaucugcaagauggagaagugcagcugaggacuaguuauaagacugacuagcccgaugggccucccaacgggcccuccuccccuccuugcaccgagauuaauaaaaaaaaaaaaaaaaaaaaaaaaaaaaaaaaaaaaaaaaaaaaaaaaaaaaaaaaaaaaaaaaugcaucccccccccccccccccccccccccccccccaaaggcucuuuucagagccaccagaauu

SEQ ID NO: 1954 - RNA, 1195 nt, Artificial Sequence
  mRNA Design i-3 (A64-N5-C30-hSL-N5) comprising derived and/or modified sequence from Pf(3D7)__XP_001351122.1__HsALB_Pf-CSP(19-272)_L(G4S)_Pf-CSP(310-3 27)_Pf-CSP(346-375) (opt4)
aggagaaagcuuaccaugaagugggugaccuucaucagccugcuguuccuguucagcagcgccuacagccuguuccaggaguaccagugcuacggcagcagcagcaacaccagagugcugaacgagcugaacuacgacaacgccggcaccaaccuguacaacgagcuggagaugaacuacuacggcaagcaggagaacugguacagccugaagaagaacagcagaagccugggcgagaacgacgacggcaacaacgaggacaacgagaagcugagaaagcccaagcacaagaagcugaagcagcccgccgacggcaaccccgaccccaacgccaaccccaacguggaccccaacgccaaccccaacguggaccccaacgccaaccccaacguggaccccaacgccaaccccaacgccaaccccaacgccaaccccaacgccaaccccaacgccaaccccaacgccaaccccaacgccaaccccaacgccaaccccaacgccaaccccaacgccaaccccaacgccaaccccaacgccaaccccaacgccaaccccaacgccaaccccaacgccaaccccaacgccaaccccaacgccaaccccaacguggaccccaacgccaaccccaacgccaaccccaacgccaaccccaacgccaaccccaacgccaaccccaacgccaaccccaacgccaaccccaacgccaaccccaacgccaaccccaacgccaaccccaacgccaaccccaacgccaaccccaacgccaaccccaacgccaaccccaacgccaaccccaacgccaaccccaacgccaaccccaacgccaaccccggcggcggcggcagcgagcccagcgacaagcacaucaaggaguaccugaacaagauccagaacagccugaucaagcccggcagcgccaacaagcccaaggacgagcuggacuacgccaacgacaucgagaagaagaucugcaagauggagaagugcagcugaggacuaguuauaagacugacuagcccgaugggccucccaacgggcccuccuccccuccuugcaccgagauuaauaaaaaaaaaaaaaaaaaaaaaaaaaaaaaaaaaaaaaaaaaaaaaaaaaaaaaaaaaaaaaaaaugcaucccccccccccccccccccccccccccccccaaaggcucuuuucagagccaccagaauu

SEQ ID NO: 1955 - RNA, 1195 nt, Artificial Sequence
  mRNA Design i-3 (A64-N5-C30-hSL-N5) comprising derived and/or modified sequence from Pf(3D7)__XP_001351122.1__HsALB_Pf-CSP(19-325) (opt4)
aggagaaagcuuaccaugaagugggugaccuucaucagccugcuguuccuguucagcagcgccuacagccuguuccaggaguaccagugcuacggcagcagcagcaacaccagagugcugaacgagcugaacuacgacaacgccggcaccaaccuguacaacgagcuggagaugaacuacuacggcaagcaggagaacugguacagccugaagaagaacagcagaagccugggcgagaacgacgacggcaacaacgaggacaacgagaagcugagaaagcccaagcacaagaagcugaagcagcccgccgacggcaaccccgaccccaacgccaaccccaacguggaccccaacgccaaccccaacguggaccccaacgccaaccccaacguggaccccaacgccaaccccaacgccaaccccaacgccaaccccaacgccaaccccaacgccaaccccaacgccaaccccaacgccaaccccaacgccaaccccaacgccaaccccaacgccaaccccaacgccaaccccaacgccaaccccaacgccaaccccaacgccaaccccaacgccaaccccaacgccaaccccaacgccaaccccaacguggaccccaacgccaaccccaacgccaaccccaacgccaaccccaacgccaaccccaacgccaaccccaacgccaaccccaacgccaaccccaacgccaaccccaacgccaaccccaacgccaaccccaacgccaaccccaacgccaaccccaacgccaaccccaacgccaaccccaacgccaaccccaacgccaaccccaacgccaaccccaacgccaaccccaacaagaacaaccagggcaacggccagggccacaacaugcccaacgaccccaacagaaacguggacgagaacgccaacgccaacagcgccgugaagaacaacaacaacgaggagcccagcgacaagcacaucaaggaguaccugaacaagauccagaacugaggacuaguuauaagacugacuagcccgaugggccucccaacgggcccuccuccccuccuugcaccgagauuaauaaaaaaaaaaaaaaaaaaaaaaaaaaaaaaaaaaaaaaaaaaaaaaaaaaaaaaaaaaaaaaaaugcaucccccccccccccccccccccccccccccccaaaggcucuuuucagagccaccagaauu

SEQ ID NO: 1956 - RNA, 1372 nt, Artificial Sequence
  mRNA Design i-3 (A64-N5-C30-hSL-N5) comprising derived and/or modified sequence from Pf(3D7)__XP_001351122.1__HsALB_Pf-CSP(19-384) (opt4)
aggagaaagcuuaccaugaagugggugaccuucaucagccugcuguuccuguucagcagcgccuacagccuguuccaggaguaccagugcuacggcagcagcagcaacaccagagugcugaacgagcugaacuacgacaacgccggcaccaaccuguacaacgagcuggagaugaacuacuacggcaagcaggagaacugguacagccugaagaagaacagcagaagccugggcgagaacgacgacggcaacaacgaggacaacgagaagcugagaaagcccaagcacaagaagcugaagcagcccgccgacggcaaccccgaccccaacgccaaccccaacguggaccccaacgccaaccccaacguggaccccaacgccaaccccaacguggaccccaacgccaaccccaacgccaaccccaacgccaaccccaacgccaaccccaacgccaaccccaacgccaaccccaacgccaaccccaacgccaaccccaacgccaaccccaacgccaaccccaacgccaaccccaacgccaaccccaacgccaaccccaacgccaaccccaacgccaaccccaacgccaaccccaacgccaaccccaacguggaccccaacgccaaccccaacgccaaccccaacgccaaccccaacgccaaccccaacgccaaccccaacgccaaccccaacgccaaccccaacgccaaccccaacgccaaccccaacgccaaccccaacgccaaccccaacgccaaccccaacgccaaccccaacgccaaccccaacgccaaccccaacgccaaccccaacgccaaccccaacgccaaccccaacaagaacaaccagggcaacggccagggccacaacaugcccaacgaccccaacagaaacguggacgagaacgccaacgccaacagcgccgugaagaacaacaacaacgaggagcccagcgacaagcacaucaaggaguaccugaacaagauccagaacagccugagcaccgaguggagccccugcagcgugaccugcggcaacggcauccaggugagaaucaagcccggcagcgccaacaagcccaaggacgagcuggacuacgccaacgacaucgagaagaagaucugcaagauggagaagugcagcagcguguucaacguggugaacagcagcugaggacuaguuauaagacugacuagcccgaugggccucccaacgggcccuccuccccuccuugcaccgagauuaauaaaaaaaaaaaaaaaaaaaaaaaaaaaaaaaaaaaaaaaaaaaaaaaaaaaaaaaaaaaaaaaaugcaucccccccccccccccccccccccccccccccaaaggcucuuuucagagccaccagaauu

SEQ ID NO: 1957 - RNA, 1510 nt, Artificial Sequence
  mRNA Design i-3 (A64-N5-C30-hSL-N5) comprising derived and/or modified sequence from Pf(3D7)__XP_001351122.1__HsALB_Pf-CSP(19-384)_TM domain HA (opt4)
aggagaaagcuuaccaugaagugggugaccuucaucagccugcuguuccuguucagcagcgccuacagccuguuccaggaguaccagugcuacggcagcagcagcaacaccagagugcugaacgagcugaacuacgacaacgccggcaccaaccuguacaacgagcuggagaugaacuacuacggcaagcaggagaacugguacagccugaagaagaacagcagaagccugggcgagaacgacgacggcaacaacgaggacaacgagaagcugagaaagcccaagcacaagaagcugaagcagcccgccgacggcaaccccgaccccaacgccaaccccaacguggaccccaacgccaaccccaacguggaccccaacgccaaccccaacguggaccccaacgccaaccccaacgccaaccccaacgccaaccccaacgccaaccccaacgccaaccccaacgccaaccccaacgccaaccccaacgccaaccccaacgccaaccccaacgccaaccccaacgccaaccccaacgccaaccccaacgccaaccccaacgccaaccccaacgccaaccccaacgccaaccccaacgccaaccccaacguggaccccaacgccaaccccaacgccaaccccaacgccaaccccaacgccaaccccaacgccaaccccaacgccaaccccaacgccaaccccaacgccaaccccaacgccaaccccaacgccaaccccaacgccaaccccaacgccaaccccaacgccaaccccaacgccaaccccaacgccaaccccaacgccaaccccaacgccaaccccaacgccaaccccaacaagaacaaccagggcaacggccagggccacaacaugcccaacgaccccaacagaaacguggacgagaacgccaacgccaacagcgccgugaagaacaacaacaacgaggagcccagcgacaagcacaucaaggaguaccugaacaagauccagaacagccugagcaccgaguggagccccugcagcgugaccugcggcaacggcauccaggugagaaucaagcccggcagcgccaacaagcccaaggacgagcuggacuacgccaacgacaucgagaagaagaucugcaagauggagaagugcagcagcguguucaacguggugaacagcagcaagcuggagagcaccagaaucuaccagauccuggccaucuacagcaccguggccagcagccuggugcugguggugagccugggcgccaucagcuucuggaugugcagcaacggcagccugcagugcagaaucugcaucugaggacuaguuauaagacugacuagcccgaugggccucccaacgggcccuccuccccuccuugcaccgagauuaauaaaaaaaaaaaaaaaaaaaaaaaaaaaaaaaaaaaaaaaaaaaaaaaaaaaaaaaaaaaaaaaaugcaucccccccccccccccccccccccccccccccaaaggcucuuuucagagccaccagaauu

SEQ ID NO: 1958 - RNA, 1222 nt, Artificial Sequence
  mRNA Design i-3 (A64-N5-C30-hSL-N5) comprising derived and/or modified sequence from Pf(3D7)__XP_001351122.1__HsALB_Pf-CSP(82-397) (opt4)
aggagaaagcuuaccaugaagugggugaccuucaucagccugcuguuccuguucagcagcgccuacagcgacaacgagaagcugagaaagcccaagcacaagaagcugaagcagcccgccgacggcaaccccgaccccaacgccaaccccaacguggaccccaacgccaaccccaacguggaccccaacgccaaccccaacguggaccccaacgccaaccccaacgccaaccccaacgccaaccccaacgccaaccccaacgccaaccccaacgccaaccccaacgccaaccccaacgccaaccccaacgccaaccccaacgccaaccccaacgccaaccccaacgccaaccccaacgccaaccccaacgccaaccccaacgccaaccccaacgccaaccccaacgccaaccccaacguggaccccaacgccaaccccaacgccaaccccaacgccaaccccaacgccaaccccaacgccaaccccaacgccaaccccaacgccaaccccaacgccaaccccaacgccaaccccaacgccaaccccaacgccaaccccaacgccaaccccaacgccaaccccaacgccaaccccaacgccaaccccaacgccaaccccaacgccaaccccaacgccaaccccaacaagaacaaccagggcaacggccagggccacaacaugcccaacgaccccaacagaaacguggacgagaacgccaacgccaacagcgccgugaagaacaacaacaacgaggagcccagcgacaagcacaucaaggaguaccugaacaagauccagaacagccugagcaccgaguggagccccugcagcgugaccugcggcaacggcauccaggugagaaucaagcccggcagcgccaacaagcccaaggacgagcuggacuacgccaacgacaucgagaagaagaucugcaagauggagaagugcagcagcguguucaacguggugaacagcagcaucggccugaucauggugcugagcuuccuguuccugaacugaggacuaguuauaagacugacuagcccgaugggccucccaacgggcccuccuccccuccuugcaccgagauuaauaaaaaaaaaaaaaaaaaaaaaaaaaaaaaaaaaaaaaaaaaaaaaaaaaaaaaaaaaaaaaaaaugcaucccccccccccccccccccccccccccccccaaaggcucuuuucagagccaccagaauu

SEQ ID NO: 1959 - RNA, 574 nt, Artificial Sequence
  mRNA Design i-3 (A64-N5-C30-hSL-N5) comprising derived and/or modified sequence from Pf(3D7)__XP_001351122.1__HsALB_Pf-CSP(93-192) (opt4)
aggagaaagcuuaccaugaagugggugaccuucaucagccugcuguuccuguucagcagcgccuacagcaagcugaagcagcccgccgacggcaaccccgaccccaacgccaaccccaacguggaccccaacgccaaccccaacguggaccccaacgccaaccccaacguggaccccaacgccaaccccaacgccaaccccaacgccaaccccaacgccaaccccaacgccaaccccaacgccaaccccaacgccaaccccaacgccaaccccaacgccaaccccaacgccaaccccaacgccaaccccaacgccaaccccaacgccaaccccaacgccaaccccaacgccaaccccaacgccaaccccugaggacuaguuauaagacugacuagcccgaugggccucccaacgggcccuccuccccuccuugcaccgagauuaauaaaaaaaaaaaaaaaaaaaaaaaaaaaaaaaaaaaaaaaaaaaaaaaaaaaaaaaaaaaaaaaaugcaucccccccccccccccccccccccccccccccaaaggcucuuuucagagccaccagaauu

SEQ ID NO: 1960 - RNA, 814 nt, Artificial Sequence
  mRNA Design i-3 (A64-N5-C30-hSL-N5) comprising derived and/or modified sequence from Pf(3D7)__XP_001351122.1__HsALB_Pf-CSP(93-272) (opt4)
aggagaaagcuuaccaugaagugggugaccuucaucagccugcuguuccuguucagcagcgccuacagcaagcugaagcagcccgccgacggcaaccccgaccccaacgccaaccccaacguggaccccaacgccaaccccaacguggaccccaacgccaaccccaacguggaccccaacgccaaccccaacgccaaccccaacgccaaccccaacgccaaccccaacgccaaccccaacgccaaccccaacgccaaccccaacgccaaccccaacgccaaccccaacgccaaccccaacgccaaccccaacgccaaccccaacgccaaccccaacgccaaccccaacgccaaccccaacgccaaccccaacgccaaccccaacguggaccccaacgccaaccccaacgccaaccccaacgccaaccccaacgccaaccccaacgccaaccccaacgccaaccccaacgccaaccccaacgccaaccccaacgccaaccccaacgccaaccccaacgccaaccccaacgccaaccccaacgccaaccccaacgccaaccccaacgccaaccccaacgccaaccccaacgccaaccccaacgccaaccccugaggacuaguuauaagacugacuagcccgaugggccucccaacgggcccuccuccccuccuugcaccgagauuaauaaaaaaaaaaaaaaaaaaaaaaaaaaaaaaaaaaaaaaaaaaaaaaaaaaaaaaaaaaaaaaaaugcaucccccccccccccccccccccccccccccccaaaggcucuuuucagagccaccagaauu

SEQ ID NO: 1961 - RNA, 1189 nt, Artificial Sequence
  mRNA Design i-3 (A64-N5-C30-hSL-N5) comprising derived and/or modified sequence from Pf(3D7)__XP_001351122.1__HsALB_Pf-CSP(93-397) (opt4)
aggagaaagcuuaccaugaagugggugaccuucaucagccugcuguuccuguucagcagcgccuacagcaagcugaagcagcccgccgacggcaaccccgaccccaacgccaaccccaacguggaccccaacgccaaccccaacguggaccccaacgccaaccccaacguggaccccaacgccaaccccaacgccaaccccaacgccaaccccaacgccaaccccaacgccaaccccaacgccaaccccaacgccaaccccaacgccaaccccaacgccaaccccaacgccaaccccaacgccaaccccaacgccaaccccaacgccaaccccaacgccaaccccaacgccaaccccaacgccaaccccaacgccaaccccaacguggaccccaacgccaaccccaacgccaaccccaacgccaaccccaacgccaaccccaacgccaaccccaacgccaaccccaacgccaaccccaacgccaaccccaacgccaaccccaacgccaaccccaacgccaaccccaacgccaaccccaacgccaaccccaacgccaaccccaacgccaaccccaacgccaaccccaacgccaaccccaacgccaaccccaacaagaacaaccagggcaacggccagggccacaacaugcccaacgaccccaacagaaacguggacgagaacgccaacgccaacagcgccgugaagaacaacaacaacgaggagcccagcgacaagcacaucaaggaguaccugaacaagauccagaacagccugagcaccgaguggagccccugcagcgugaccugcggcaacggcauccaggugagaaucaagcccggcagcgccaacaagcccaaggacgagcuggacuacgccaacgacaucgagaagaagaucugcaagauggagaagugcagcagcguguucaacguggugaacagcagcaucggccugaucauggugcugagcuuccuguuccugaacugaggacuaguuauaagacugacuagcccgaugggccucccaacgggcccuccuccccuccuugcaccgagauuaauaaaaaaaaaaaaaaaaaaaaaaaaaaaaaaaaaaaaaaaaaaaaaaaaaaaaaaaaaaaaaaaaugcaucccccccccccccccccccccccccccccccaaaggcucuuuucagagccaccagaauu

SEQ ID NO: 1962 - RNA, 559 nt, Artificial Sequence
  mRNA Design i-3 (A64-N5-C30-hSL-N5) comprising derived and/or modified sequence from Pf(3D7)__XP_001351122.1__HsALB_Pf-CSP(98-192) (opt4)
aggagaaagcuuaccaugaagugggugaccuucaucagccugcuguuccuguucagcagcgccuacagcgccgacggcaaccccgaccccaacgccaaccccaacguggaccccaacgccaaccccaacguggaccccaacgccaaccccaacguggaccccaacgccaaccccaacgccaaccccaacgccaaccccaacgccaaccccaacgccaaccccaacgccaaccccaacgccaaccccaacgccaaccccaacgccaaccccaacgccaaccccaacgccaaccccaacgccaaccccaacgccaaccccaacgccaaccccaacgccaaccccaacgccaaccccugaggacuaguuauaagacugacuagcccgaugggccucccaacgggcccuccuccccuccuugcaccgagauuaauaaaaaaaaaaaaaaaaaaaaaaaaaaaaaaaaaaaaaaaaaaaaaaaaaaaaaaaaaaaaaaaaugcaucccccccccccccccccccccccccccccccaaaggcucuuuucagagccaccagaauu

SEQ ID NO: 1963 - RNA, 799 nt, Artificial Sequence
  mRNA Design i-3 (A64-N5-C30-hSL-N5) comprising derived and/or modified sequence from Pf(3D7)__XP_001351122.1__HsALB_Pf-CSP(98-272) (opt4)
aggagaaagcuuaccaugaagugggugaccuucaucagccugcuguuccuguucagcagcgccuacagcgccgacggcaaccccgaccccaacgccaaccccaacguggaccccaacgccaaccccaacguggaccccaacgccaaccccaacguggaccccaacgccaaccccaacgccaaccccaacgccaaccccaacgccaaccccaacgccaaccccaacgccaaccccaacgccaaccccaacgccaaccccaacgccaaccccaacgccaaccccaacgccaaccccaacgccaaccccaacgccaaccccaacgccaaccccaacgccaaccccaacgccaaccccaacgccaaccccaacguggaccccaacgccaaccccaacgccaaccccaacgccaaccccaacgccaaccccaacgccaaccccaacgccaaccccaacgccaaccccaacgccaaccccaacgccaaccccaacgccaaccccaacgccaaccccaacgccaaccccaacgccaaccccaacgccaaccccaacgccaaccccaacgccaaccccaacgccaaccccaacgccaaccccugaggacuaguuauaagacugacuagcccgaugggccucccaacgggcccuccuccccuccuugcaccgagauuaauaaaaaaaaaaaaaaaaaaaaaaaaaaaaaaaaaaaaaaaaaaaaaaaaaaaaaaaaaaaaaaaaugcaucccccccccccccccccccccccccccccccaaaggcucuuuucagagccaccagaauu

SEQ ID NO: 1964 - RNA, 1105 nt, Artificial Sequence
  mRNA Design i-3 (A64-N5-C30-hSL-N5) comprising derived and/or modified sequence from Pf(3D7)__XP_001351122.1__HsALB_Pf-CSP(98-374) (opt4)
aggagaaagcuuaccaugaagugggugaccuucaucagccugcuguuccuguucagcagcgccuacagcgccgacggcaaccccgaccccaacgccaaccccaacguggaccccaacgccaaccccaacguggaccccaacgccaaccccaacguggaccccaacgccaaccccaacgccaaccccaacgccaaccccaacgccaaccccaacgccaaccccaacgccaaccccaacgccaaccccaacgccaaccccaacgccaaccccaacgccaaccccaacgccaaccccaacgccaaccccaacgccaaccccaacgccaaccccaacgccaaccccaacgccaaccccaacgccaaccccaacguggaccccaacgccaaccccaacgccaaccccaacgccaaccccaacgccaaccccaacgccaaccccaacgccaaccccaacgccaaccccaacgccaaccccaacgccaaccccaacgccaaccccaacgccaaccccaacgccaaccccaacgccaaccccaacgccaaccccaacgccaaccccaacgccaaccccaacgccaaccccaacgccaaccccaacaagaacaaccagggcaacggccagggccacaacaugcccaacgaccccaacagaaacguggacgagaacgccaacgccaacagcgccgugaagaacaacaacaacgaggagcccagcgacaagcacaucaaggaguaccugaacaagauccagaacagccugagcaccgaguggagccccugcagcgugaccugcggcaacggcauccaggugagaaucaagcccggcagcgccaacaagcccaaggacgagcuggacuacgccaacgacaucgagaagaagaucugcaagauggagaagugcugaggacuaguuauaagacugacuagcccgaugggccucccaacgggcccuccuccccuccuugcaccgagauuaauaaaaaaaaaaaaaaaaaaaaaaaaaaaaaaaaaaaaaaaaaaaaaaaaaaaaaaaaaaaaaaaaugcaucccccccccccccccccccccccccccccccaaaggcucuuuucagagccaccagaauu

SEQ ID NO: 1965 - RNA, 1174 nt, Artificial Sequence
  mRNA Design i-3 (A64-N5-C30-hSL-N5) comprising derived and/or modified sequence from Pf(3D7)__XP_001351122.1__HsALB_Pf-CSP(98-397) (opt4)
aggagaaagcuuaccaugaagugggugaccuucaucagccugcuguuccuguucagcagcgccuacagcgccgacggcaaccccgaccccaacgccaaccccaacguggaccccaacgccaaccccaacguggaccccaacgccaaccccaacguggaccccaacgccaaccccaacgccaaccccaacgccaaccccaacgccaaccccaacgccaaccccaacgccaaccccaacgccaaccccaacgccaaccccaacgccaaccccaacgccaaccccaacgccaaccccaacgccaaccccaacgccaaccccaacgccaaccccaacgccaaccccaacgccaaccccaacgccaaccccaacguggaccccaacgccaaccccaacgccaaccccaacgccaaccccaacgccaaccccaacgccaaccccaacgccaaccccaacgccaaccccaacgccaaccccaacgccaaccccaacgccaaccccaacgccaaccccaacgccaaccccaacgccaaccccaacgccaaccccaacgccaaccccaacgccaaccccaacgccaaccccaacgccaaccccaacaagaacaaccagggcaacggccagggccacaacaugcccaacgaccccaacagaaacguggacgagaacgccaacgccaacagcgccgugaagaacaacaacaacgaggagcccagcgacaagcacaucaaggaguaccugaacaagauccagaacagccugagcaccgaguggagccccugcagcgugaccugcggcaacggcauccaggugagaaucaagcccggcagcgccaacaagcccaaggacgagcuggacuacgccaacgacaucgagaagaagaucugcaagauggagaagugcagcagcguguucaacguggugaacagcagcaucggccugaucauggugcugagcuuccuguuccugaacugaggacuaguuauaagacugacuagcccgaugggccucccaacgggcccuccuccccuccuugcaccgagauuaauaaaaaaaaaaaaaaaaaaaaaaaaaaaaaaaaaaaaaaaaaaaaaaaaaaaaaaaaaaaaaaaaugcaucccccccccccccccccccccccccccccccaaaggcucuuuucagagccaccagaauu

SEQ ID NO: 1966 - RNA, 1501 nt, Artificial Sequence
  mRNA Design i-3 (A64-N5-C30-hSL-N5) comprising derived and/or modified sequence from Pf(3D7)__XP_001351122.1__HsALB_Pf-CSP(199-377)_L(PVTN)_HBsAg (opt4)
aggagaaagcuuaccaugaagugggugaccuucaucagccugcuguuccuguucagcagcgccuacagcgaccccaacgccaaccccaacgccaaccccaacgccaaccccaacgccaaccccaacgccaaccccaacgccaaccccaacgccaaccccaacgccaaccccaacgccaaccccaacgccaaccccaacgccaaccccaacgccaaccccaacgccaaccccaacgccaaccccaacgccaaccccaacgccaaccccaacgccaaccccaacgccaaccccaacaagaacaaccagggcaacggccagggccacaacaugcccaacgaccccaacagaaacguggacgagaacgccaacgccaacagcgccgugaagaacaacaacaacgaggagcccagcgacaagcacaucaaggaguaccugaacaagauccagaacagccugagcaccgaguggagccccugcagcgugaccugcggcaacggcauccaggugagaaucaagcccggcagcgccaacaagcccaaggacgagcuggacuacgccaacgacaucgagaagaagaucugcaagauggagaagugcagcagcgugcccgugaccaacauggagaacaucaccagcggcuuccugggcccccugcuggugcugcaggccggcuucuuccugcugaccagaauccugaccaucccccagagccuggacagcugguggaccagccugaacuuccugggcggcagccccgugugccugggccagaacagccagagccccaccagcaaccacagccccaccagcugcccccccaucugccccggcuacagauggaugugccugagaagauucaucaucuuccuguucauccugcugcugugccugaucuuccugcuggugcugcuggacuaccagggcaugcugcccgugugcccccugauccccggcagcaccaccaccaacaccggccccugcaagaccugcaccacccccgcccagggcaacagcauguuccccagcugcugcugcaccaagcccaccgacggcaacugcaccugcauccccauccccagcagcugggccuucgccaaguaccugugggagugggccagcgugagauucagcuggcugagccugcuggugcccuucgugcagugguucgugggccugagccccaccguguggcugagcgccaucuggaugaugugguacuggggccccagccuguacagcaucgugagccccuucaucccccugcugcccaucuucuucugccuguggguguacaucugaggacuaguuauaagacugacuagcccgaugggccucccaacgggcccuccuccccuccuugcaccgagauuaauaaaaaaaaaaaaaaaaaaaaaaaaaaaaaaaaaaaaaaaaaaaaaaaaaaaaaaaaaaaaaaaaugcaucccccccccccccccccccccccccccccccaaaggcucuuuucagagccaccagaauu

SEQ ID NO: 1967 - RNA, 1240 nt, Artificial Sequence
  mRNA Design i-3 (A64-N5-C30-hSL-N5) comprising derived and/or modified sequence from Pb(ANKA)__XP_022712148.1__Pb-CSP (opt4)
aggagaaagcuuaccaugaagaagugcaccauccuggugguggccagccugcugcuggugaacagccugcugcccggcuacggccagaacaagagcauccaggcccagagaaaccugaacgagcugugcuacaacgagggcaacgacaacaagcuguaccacgugcugaacagcaagaacggcaagaucuacaacagaaacaccgugaacagacugcuggccgacgcccccgagggcaagaagaacgagaagaagaacgagaagaucgagagaaacaacaagcugaagcagcccccccccccccccaaccccaacgacccccccccccccaaccccaacgacccccccccccccaaccccaacgacccccccccccccaaccccaacgacccccccccccccaacgccaacgacccccccccccccaacgccaacgaccccgccccccccaacgccaacgaccccgccccccccaacgccaacgaccccgccccccccaacgccaacgaccccgccccccccaacgccaacgacccccccccccccaaccccaacgaccccgccccccccaacgccaacgacccccccccccccaaccccaacgaccccgcccccccccagggcaacaacaacccccagccccagcccagaccccagccccagccccagccccagccccagccccagccccagccccagccccagcccagaccccagccccagccccagcccggcggcaacaacaacaacaagaacaacaacaacgacgacagcuacauccccagcgccgagaagauccuggaguucgugaagcagaucagagacagcaucaccgaggaguggagccagugcaacgugaccugcggcagcggcaucagagugagaaagagaaagggcagcaacaagaaggccgaggaccugacccuggaggacaucgacaccgagaucugcaagauggacaagugcagcagcaucuucaacaucgugagcaacagccugggcuucgugauccugcuggugcugguguucuucaacugaggacuaguuauaagacugacuagcccgaugggccucccaacgggcccuccuccccuccuugcaccgagauuaauaaaaaaaaaaaaaaaaaaaaaaaaaaaaaaaaaaaaaaaaaaaaaaaaaaaaaaaaaaaaaaaaugcaucccccccccccccccccccccccccccccccaaaggcucuuuucagagccaccagaauu

SEQ ID NO: 1968 - RNA, 1405 nt, Artificial Sequence
  mRNA Design i-3 (A64-N5-C30-hSL-N5) comprising derived and/or modified sequence from Pb(ANKA)__XP_022712148.1__Pb-CSP_L(G4SG4)_TM domain HA (opt4)
aggagaaagcuuaccaugaagaagugcaccauccuggugguggccagccugcugcuggugaacagccugcugcccggcuacggccagaacaagagcauccaggcccagagaaaccugaacgagcugugcuacaacgagggcaacgacaacaagcuguaccacgugcugaacagcaagaacggcaagaucuacaacagaaacaccgugaacagacugcuggccgacgcccccgagggcaagaagaacgagaagaagaacgagaagaucgagagaaacaacaagcugaagcagcccccccccccccccaaccccaacgacccccccccccccaaccccaacgacccccccccccccaaccccaacgacccccccccccccaaccccaacgacccccccccccccaacgccaacgacccccccccccccaacgccaacgaccccgccccccccaacgccaacgaccccgccccccccaacgccaacgaccccgccccccccaacgccaacgaccccgccccccccaacgccaacgacccccccccccccaaccccaacgaccccgccccccccaacgccaacgacccccccccccccaaccccaacgaccccgcccccccccagggcaacaacaacccccagccccagcccagaccccagccccagccccagccccagccccagccccagccccagccccagccccagcccagaccccagccccagccccagcccggcggcaacaacaacaacaagaacaacaacaacgacgacagcuacauccccagcgccgagaagauccuggaguucgugaagcagaucagagacagcaucaccgaggaguggagccagugcaacgugaccugcggcagcggcaucagagugagaaagagaaagggcagcaacaagaaggccgaggaccugacccuggaggacaucgacaccgagaucugcaagauggacaagugcagcagcaucuucaacaucgugagcaacagccugggcuucgugauccugcuggugcugguguucuucaacggcggcggcggcagcggcggcggcggcaagcuggagagcaccagaaucuaccagauccuggccaucuacagcaccguggccagcagccuggugcugguggugagccugggcgccaucagcuucuggaugugcagcaacggcagccugcagugcagaaucugcaucugaggacuaguuauaagacugacuagcccgaugggccucccaacgggcccuccuccccuccuugcaccgagauuaauaaaaaaaaaaaaaaaaaaaaaaaaaaaaaaaaaaaaaaaaaaaaaaaaaaaaaaaaaaaaaaaaugcaucccccccccccccccccccccccccccccccaaaggcucuuuucagagccaccagaauu

SEQ ID NO: 1969 - RNA, 1225 nt, Artificial Sequence
  mRNA Design i-3 (A64-N5-C30-hSL-N5) comprising derived and/or modified sequence from Pb(ANKA)__XP_022712148.1__HsALB_Pb-CSP(24-340) (opt4)
aggagaaagcuuaccaugaagugggugaccuucaucagccugcuguuccuguucagcagcgccuacagccagaacaagagcauccaggcccagagaaaccugaacgagcugugcuacaacgagggcaacgacaacaagcuguaccacgugcugaacagcaagaacggcaagaucuacaacagaaacaccgugaacagacugcuggccgacgcccccgagggcaagaagaacgagaagaagaacgagaagaucgagagaaacaacaagcugaagcagcccccccccccccccaaccccaacgacccccccccccccaaccccaacgacccccccccccccaaccccaacgacccccccccccccaaccccaacgacccccccccccccaacgccaacgacccccccccccccaacgccaacgaccccgccccccccaacgccaacgaccccgccccccccaacgccaacgaccccgccccccccaacgccaacgaccccgccccccccaacgccaacgacccccccccccccaaccccaacgaccccgccccccccaacgccaacgacccccccccccccaaccccaacgaccccgcccccccccagggcaacaacaacccccagccccagcccagaccccagccccagccccagccccagccccagccccagccccagccccagccccagcccagaccccagccccagccccagcccggcggcaacaacaacaacaagaacaacaacaacgacgacagcuacauccccagcgccgagaagauccuggaguucgugaagcagaucagagacagcaucaccgaggaguggagccagugcaacgugaccugcggcagcggcaucagagugagaaagagaaagggcagcaacaagaaggccgaggaccugacccuggaggacaucgacaccgagaucugcaagauggacaagugcagcagcaucuucaacaucgugagcaacagccugggcuucgugauccugcuggugcugguguucuucaacugaggacuaguuauaagacugacuagcccgaugggccucccaacgggcccuccuccccuccuugcaccgagauuaauaaaaaaaaaaaaaaaaaaaaaaaaaaaaaaaaaaaaaaaaaaaaaaaaaaaaaaaaaaaaaaaaugcaucccccccccccccccccccccccccccccccaaaggcucuuuucagagccaccagaauu

SEQ ID NO: 1970 - RNA, 1243 nt, Artificial Sequence
  mRNA Design i-3 (A64-N5-C30-hSL-N5) comprising derived and/or modified sequence from Pb(ANKA)__XP_022712148.1__HsIns-iso1_Pb-CSP(24-340) (opt4)
aggagaaagcuuaccauggcccuguggaugagacugcugccccugcuggcccugcuggcccuguggggccccgaccccgccgccgcccagaacaagagcauccaggcccagagaaaccugaacgagcugugcuacaacgagggcaacgacaacaagcuguaccacgugcugaacagcaagaacggcaagaucuacaacagaaacaccgugaacagacugcuggccgacgcccccgagggcaagaagaacgagaagaagaacgagaagaucgagagaaacaacaagcugaagcagcccccccccccccccaaccccaacgacccccccccccccaaccccaacgacccccccccccccaaccccaacgacccccccccccccaaccccaacgacccccccccccccaacgccaacgacccccccccccccaacgccaacgaccccgccccccccaacgccaacgaccccgccccccccaacgccaacgaccccgccccccccaacgccaacgaccccgccccccccaacgccaacgacccccccccccccaaccccaacgaccccgccccccccaacgccaacgacccccccccccccaaccccaacgaccccgcccccccccagggcaacaacaacccccagccccagcccagaccccagccccagccccagccccagccccagccccagccccagccccagccccagcccagaccccagccccagccccagcccggcggcaacaacaacaacaagaacaacaacaacgacgacagcuacauccccagcgccgagaagauccuggaguucgugaagcagaucagagacagcaucaccgaggaguggagccagugcaacgugaccugcggcagcggcaucagagugagaaagagaaagggcagcaacaagaaggccgaggaccugacccuggaggacaucgacaccgagaucugcaagauggacaagugcagcagcaucuucaacaucgugagcaacagccugggcuucgugauccugcuggugcugguguucuucaacugaggacuaguuauaagacugacuagcccgaugggccucccaacgggcccuccuccccuccuugcaccgagauuaauaaaaaaaaaaaaaaaaaaaaaaaaaaaaaaaaaaaaaaaaaaaaaaaaaaaaaaaaaaaaaaaaugcaucccccccccccccccccccccccccccccccaaaggcucuuuucagagccaccagaauu

SEQ ID NO: 1971 - RNA, 1222 nt, Artificial Sequence
  mRNA Design i-3 (A64-N5-C30-hSL-N5) comprising derived and/or modified sequence from Pb(ANKA)__XP_022712148.1__HsSPARC_Pb-CSP(24-340) (opt4)
aggagaaagcuuaccaugagagccuggaucuucuuccugcugugccuggccggcagagcccuggcccagaacaagagcauccaggcccagagaaaccugaacgagcugugcuacaacgagggcaacgacaacaagcuguaccacgugcugaacagcaagaacggcaagaucuacaacagaaacaccgugaacagacugcuggccgacgcccccgagggcaagaagaacgagaagaagaacgagaagaucgagagaaacaacaagcugaagcagcccccccccccccccaaccccaacgacccccccccccccaaccccaacgacccccccccccccaaccccaacgacccccccccccccaaccccaacgacccccccccccccaacgccaacgacccccccccccccaacgccaacgaccccgccccccccaacgccaacgaccccgccccccccaacgccaacgaccccgccccccccaacgccaacgaccccgccccccccaacgccaacgacccccccccccccaaccccaacgaccccgccccccccaacgccaacgacccccccccccccaaccccaacgaccccgcccccccccagggcaacaacaacccccagccccagcccagaccccagccccagccccagccccagccccagccccagccccagccccagccccagcccagaccccagccccagccccagcccggcggcaacaacaacaacaagaacaacaacaacgacgacagcuacauccccagcgccgagaagauccuggaguucgugaagcagaucagagacagcaucaccgaggaguggagccagugcaacgugaccugcggcagcggcaucagagugagaaagagaaagggcagcaacaagaaggccgaggaccugacccuggaggacaucgacaccgagaucugcaagauggacaagugcagcagcaucuucaacaucgugagcaacagccugggcuucgugauccugcuggugcugguguucuucaacugaggacuaguuauaagacugacuagcccgaugggccucccaacgggcccuccuccccuccuugcaccgagauuaauaaaaaaaaaaaaaaaaaaaaaaaaaaaaaaaaaaaaaaaaaaaaaaaaaaaaaaaaaaaaaaaaugcaucccccccccccccccccccccccccccccccaaaggcucuuuucagagccaccagaauu

SEQ ID NO: 1972 - RNA, 1225 nt, Artificial Sequence
  mRNA Design i-3 (A64-N5-C30-hSL-N5) comprising derived and/or modified sequence from Pb(ANKA)__XP_022712148.1__IgE_Pb-CSP(24-340) (opt4)
aggagaaagcuuaccauggacuggaccuggauccuguuccugguggccgccgccaccagagugcacagccagaacaagagcauccaggcccagagaaaccugaacgagcugugcuacaacgagggcaacgacaacaagcuguaccacgugcugaacagcaagaacggcaagaucuacaacagaaacaccgugaacagacugcuggccgacgcccccgagggcaagaagaacgagaagaagaacgagaagaucgagagaaacaacaagcugaagcagcccccccccccccccaaccccaacgacccccccccccccaaccccaacgacccccccccccccaaccccaacgacccccccccccccaaccccaacgacccccccccccccaacgccaacgacccccccccccccaacgccaacgaccccgccccccccaacgccaacgaccccgccccccccaacgccaacgaccccgccccccccaacgccaacgaccccgccccccccaacgccaacgacccccccccccccaaccccaacgaccccgccccccccaacgccaacgacccccccccccccaaccccaacgaccccgcccccccccagggcaacaacaacccccagccccagcccagaccccagccccagccccagccccagccccagccccagccccagccccagccccagcccagaccccagccccagccccagcccggcggcaacaacaacaacaagaacaacaacaacgacgacagcuacauccccagcgccgagaagauccuggaguucgugaagcagaucagagacagcaucaccgaggaguggagccagugcaacgugaccugcggcagcggcaucagagugagaaagagaaagggcagcaacaagaaggccgaggaccugacccuggaggacaucgacaccgagaucugcaagauggacaagugcagcagcaucuucaacaucgugagcaacagccugggcuucgugauccugcuggugcugguguucuucaacugaggacuaguuauaagacugacuagcccgaugggccucccaacgggcccuccuccccuccuugcaccgagauuaauaaaaaaaaaaaaaaaaaaaaaaaaaaaaaaaaaaaaaaaaaaaaaaaaaaaaaaaaaaaaaaaaugcaucccccccccccccccccccccccccccccccaaaggcucuuuucagagccaccagaauu

SEQ ID NO: 1973 - RNA, 1411 nt, Artificial Sequence
  mRNA Design i-3 (A64-N5-C30-hSL-N5) comprising derived and/or modified sequence from Pf(3D7)__XP_001351122.1__Pf-CSP (opt5)
aggagaaagcuuaccaugaugagaaagcuggccauccucagcguguccucuuuccuguuugucgaggcucuuuuccaggaauaccaaugcuauggcagcuccucuaacacccggguucugaaugagcucaacuacgacaaugccgggacaaaccuguauaaugaacuugagaugaacuacuauggaaaacaggaaaauugguacagccugaagaaaaacucccgcucucucggcgagaaugaugacgggaacaaugaggauaacgaaaagcugagaaaacccaagcacaagaaacugaagcagccugcggacggaaauccggaucccaacgcuaauccuaacguggaccccaacgccaauccuaacguggaucccaaugccaacccuaaugucgacccgaacgcuaaucccaacgccaauccuaacgcuaaucccaacgccaauccuaacgcgaaucccaacgccaacccgaaugcuaacccuaaugccaaccccaaugcuaacccuaaugccaaccccaaugcgaaccccaaugccaacccuaaugcuaacccgaaugccaaccccaacgcuaauccuaacgccaaucccaacgccaauccuaacguggaucccaaugcuaacccgaaugcgaacccuaaugccaaccccaaugcuaacccuaaugccaaccccaacgccaauccuaacgcuaaucccaacgccaauccgaacgcgaauccuaacgcuaaucccaacgccaaucccaacgccaauccuaacgcuaauccgaacgccaaucccaacgcuaacccuaaugccaaccccaaugcgaacccuaaugccaaccccaauaaaaacaaucagggcaacgggcaaggacauaauaugccuaacgaccccaaucggaacguugaugagaaugcuaacgccaacagcgcugugaagaauaacaauaacgaggaaccguccgacaaacacauuaaggaguaucucaauaagauccagaacagccugucuacggaaugguccccuuguagcgugaccugcggcaauggcauucagguccgcaucaaacccgggucugccaacaagccuaaagaugagcuugacuacgcgaaugacauugaaaagaaaaucuguaagauggagaaaugcuccagcguuuuuaacguggucaauucuuccaucggacugauuauggugcucagcuuccuguuucuuaacugaggacuaguuauaagacugacuagcccgaugggccucccaacgggcccuccuccccuccuugcaccgagauuaauaaaaaaaaaaaaaaaaaaaaaaaaaaaaaaaaaaaaaaaaaaaaaaaaaaaaaaaaaaaaaaaaugcaucccccccccccccccccccccccccccccccaaaggcucuuuucagagccaccagaauu

SEQ ID NO: 1974 - RNA, 1342 nt, Artificial Sequence
  mRNA Design i-3 (A64-N5-C30-hSL-N5) comprising derived and/or modified sequence from Pf(3D7)__XP_001351122.1__Pf-CSP(1-374) (opt5)
aggagaaagcuuaccaugaugagaaagcuggccauccucagcguguccucuuuccuguuugucgaggcucuuuuccaggaauaccaaugcuauggcagcuccucuaacacccggguucugaaugagcucaacuacgacaaugccgggacaaaccuguauaaugaacuugagaugaacuacuauggaaaacaggaaaauugguacagccugaagaaaaacucccgcucucucggcgagaaugaugacgggaacaaugaggauaacgaaaagcugagaaaacccaagcacaagaaacugaagcagccugcggacggaaauccggaucccaacgcuaauccuaacguggaccccaacgccaauccuaacguggaucccaaugccaacccuaaugucgacccgaacgcuaaucccaacgccaauccuaacgcuaaucccaacgccaauccuaacgcgaaucccaacgccaacccgaaugcuaacccuaaugccaaccccaaugcuaacccuaaugccaaccccaaugcgaaccccaaugccaacccuaaugcuaacccgaaugccaaccccaacgcuaauccuaacgccaaucccaacgccaauccuaacguggaucccaaugcuaacccgaaugcgaacccuaaugccaaccccaaugcuaacccuaaugccaaccccaacgccaauccuaacgcuaaucccaacgccaauccgaacgcgaauccuaacgcuaaucccaacgccaaucccaacgccaauccuaacgcuaauccgaacgccaaucccaacgcuaacccuaaugccaaccccaaugcgaacccuaaugccaaccccaauaaaaacaaucagggcaacgggcaaggacauaauaugccuaacgaccccaaucggaacguugaugagaaugcuaacgccaacagcgcugugaagaauaacaauaacgaggaaccguccgacaaacacauuaaggaguaucucaauaagauccagaacagccugucuacggaaugguccccuuguagcgugaccugcggcaauggcauucagguccgcaucaaacccgggucugccaacaagccuaaagaugagcuugacuacgcgaaugacauugaaaagaaaaucuguaagauggagaaaugcugaggacuaguuauaagacugacuagcccgaugggccucccaacgggcccuccuccccuccuugcaccgagauuaauaaaaaaaaaaaaaaaaaaaaaaaaaaaaaaaaaaaaaaaaaaaaaaaaaaaaaaaaaaaaaaaaugcaucccccccccccccccccccccccccccccccaaaggcucuuuucagagccaccagaauu

SEQ ID NO: 1975 - RNA, 1195 nt, Artificial Sequence
  mRNA Design i-3 (A64-N5-C30-hSL-N5) comprising derived and/or modified sequence from Pf(3D7)__XP_001351122.1__Pf-CSP(1-325) (opt5)
aggagaaagcuuaccaugaugagaaagcuggccauccucagcguguccucuuuccuguuugucgaggcucuuuuccaggaauaccaaugcuauggcagcuccucuaacacccggguucugaaugagcucaacuacgacaaugccgggacaaaccuguauaaugaacuugagaugaacuacuauggaaaacaggaaaauugguacagccugaagaaaaacucccgcucucucggcgagaaugaugacgggaacaaugaggauaacgaaaagcugagaaaacccaagcacaagaaacugaagcagccugcggacggaaauccggaucccaacgcuaauccuaacguggaccccaacgccaauccuaacguggaucccaaugccaacccuaaugucgacccgaacgcuaaucccaacgccaauccuaacgcuaaucccaacgccaauccuaacgcgaaucccaacgccaacccgaaugcuaacccuaaugccaaccccaaugcuaacccuaaugccaaccccaaugcgaaccccaaugccaacccuaaugcuaacccgaaugccaaccccaacgcuaauccuaacgccaaucccaacgccaauccuaacguggaucccaaugcuaacccgaaugcgaacccuaaugccaaccccaaugcuaacccuaaugccaaccccaacgccaauccuaacgcuaaucccaacgccaauccgaacgcgaauccuaacgcuaaucccaacgccaaucccaacgccaauccuaacgcuaauccgaacgccaaucccaacgcuaacccuaaugccaaccccaaugcgaacccuaaugccaaccccaauaaaaacaaucagggcaacgggcaaggacauaauaugccuaacgaccccaaucggaacguugaugagaaugcuaacgccaacagcgcugugaagaauaacaauaacgaggaaccguccgacaaacacauuaaggaguaucucaauaagauccagaacugaggacuaguuauaagacugacuagcccgaugggccucccaacgggcccuccuccccuccuugcaccgagauuaauaaaaaaaaaaaaaaaaaaaaaaaaaaaaaaaaaaaaaaaaaaaaaaaaaaaaaaaaaaaaaaaaugcaucccccccccccccccccccccccccccccccaaaggcucuuuucagagccaccagaauu

SEQ ID NO: 1976 - RNA, 1411 nt, Artificial Sequence
  mRNA Design i-3 (A64-N5-C30-hSL-N5) comprising derived and/or modified sequence from Pf(3D7)__XP_001351122.1__HsALB_Pf-CSP(19-397) (opt5)
aggagaaagcuuaccaugaagugggugaccuucaucagccugcucuuucuguucuccucugccuacagccuuuuucaggaguaucaaugcuacggcuccucuagcaacacaagaguccugaaugaacucaacuaugacaaugcugggacgaaccuguacaaugagcuugaaaugaacuauuacggaaaacaggagaauugguauucccugaagaaaaacucucggagccucggcgaaaaugaugacgggaacaaugaggauaacgagaagcugcgcaaacccaagcacaagaaacugaagcagccugccgacggaaauccggaucccaacgcgaauccuaacguugaccccaacgcuaauccuaacguggaucccaaugccaacccuaauguggacccgaacgccaaucccaacgcuaauccuaacgccaaucccaacgcuaauccuaacgccaaucccaacgcgaacccgaaugccaacccuaaugcuaaccccaaugccaacccuaaugcuaaccccaaugccaaccccaaugcgaacccuaaugccaacccgaaugcuaaccccaacgccaauccuaacgcuaaucccaacgccaauccuaacgucgaucccaaugccaacccgaaugcuaacccuaaugcgaaccccaaugccaacccuaaugcuaaccccaacgccaauccuaacgccaaucccaacgcuaauccgaacgccaauccuaacgcgaaucccaacgcuaaucccaacgccaauccuaacgccaauccgaacgcuaaucccaacgccaacccuaaugcuaaccccaaugccaacccuaaugcgaaccccaauaaaaacaaucagggcaacgggcaaggacauaauaugccuaacgaccccaauagaaacguggaugaaaaugccaacgcuaacuccgccguuaagaauaacaauaacgaggaaccgagcgacaaacacauuaaggaguaccucaauaagauccagaacucucuguccaccgaguggagcccuuguucugugacaugcggcaauggcauucagguccggaucaaacccggguccgcuaacaagccuaaagaugaacuugacuacgccaaugacauugagaagaaaaucuguaagauggaaaaaugcagcucuguguucaacguugucaauuccagcaucggacugauuauggugcucuccuuucuguuccuuaacugaggacuaguuauaagacugacuagcccgaugggccucccaacgggcccuccuccccuccuugcaccgagauuaauaaaaaaaaaaaaaaaaaaaaaaaaaaaaaaaaaaaaaaaaaaaaaaaaaaaaaaaaaaaaaaaaugcaucccccccccccccccccccccccccccccccaaaggcucuuuucagagccaccagaauu

SEQ ID NO: 1977 - RNA, 1429 nt, Artificial Sequence
  mRNA Design i-3 (A64-N5-C30-hSL-N5) comprising derived and/or modified sequence from Pf(3D7)__XP_001351122.1__HsIns-iso1_Pf-CSP(19-397) (opt5)
aggagaaagcuuaccauggcccuguggaugagacuccugccccuucuggcucuccuggcccuuuggggcccugacccggcggcugcccuguuccaggaguaccaaugcuaugggagcuccucuaacacccgggugcucaaugaacugaacuacgauaaugccggaacaaaccuguauaaugagcucgaaaugaacuacuauggcaagcaggagaauugguacagccugaaaaagaacucccgcucucuuggggaaaaugacgauggaaacaaugaggacaacgagaaacugagaaagcccaaacacaagaagcucaaacagccugcugauggcaaucccgacccuaacgccaaucccaacgucgauccuaacgcuaauccgaacguugaccccaaugccaacccuaauguggaucccaacgcgaauccuaacgccaaucccaacgcuaauccgaacgccaauccuaacgcuaaucccaacgccaacccuaaugcgaaccccaaugccaaccccaaugcuaacccuaaugccaacccgaaugcuaaccccaaugccaacccuaaugccaaccccaaugcuaacccuaacgcgaaucccaacgccaauccgaacgcuaauccuaacguggaccccaaugccaacccuaaugccaaccccaaugcuaacccuaaugccaaccccaaugcgaacccgaacgcuaauccuaacgccaaucccaacgccaaucccaacgcuaauccuaacgccaauccgaacgcuaaucccaacgccaauccuaacgcgaaucccaacgccaauccuaacgcuaaccccaaugccaacccuaaugcuaaccccaaugccaacccgaauaagaacaaucaggggaacggacaaggccauaauaugccuaacgaucccaaucggaacgucgacgaaaaugcgaacgccaacagcgcugugaaaaauaacaauaacgaggaaccuuccgauaagcacaucaaagaguaucugaauaagauucagaacucucuuagcacggaguggucccccuguagcguuaccugcggcaaugggauccaggugcgcauuaagccgggaucugccaacaaaccuaaggacgaacuggacuacgcuaaugauaucgagaaaaagauuuguaaaauggaaaagugcuccagcgucuuuaacgugguuaauucuuccaucggccucaucauggugcugagcuuccuguuucucaacugaggacuaguuauaagacugacuagcccgaugggccucccaacgggcccuccuccccuccuugcaccgagauuaauaaaaaaaaaaaaaaaaaaaaaaaaaaaaaaaaaaaaaaaaaaaaaaaaaaaaaaaaaaaaaaaaugcaucccccccccccccccccccccccccccccccaaaggcucuuuucagagccaccagaauu

SEQ ID NO: 1978 - RNA, 1408 nt, Artificial Sequence
  mRNA Design i-3 (A64-N5-C30-hSL-N5) comprising derived and/or modified sequence from Pf(3D7)__XP_001351122.1__HsSPARC_Pf-CSP(19-397) (opt5)
aggagaaagcuuaccaugagagccuggaucuucuuucugcucugccuggcuggccgggcccuugcgcuguuccaggaguaccaauguuaugggagcuccucuaacacccgcgugcucaaugaacugaacuacgacaaugcuggaacaaaccuuuauaaugagcuggaaaugaacuacuauggcaagcaggagaauugguacagccucaaaaagaacuccagaucucugggggaaaaugaugacggaaacaaugaggauaacgagaaacugcggaagcccaaacacaagaagcucaaacagccugccgacggcaauccggaucccaacgccaauccuaacgucgaccccaacgcuaauccuaacguugaucccaaugccaacccuaauguggacccgaacgcuaaucccaacgccaauccuaacgcgaaucccaacgccaauccuaacgcuaaucccaacgccaacccgaaugcuaacccuaaugccaaccccaaugcgaacccuaaugccaaccccaaugcuaaccccaaugccaacccuaaugcuaacccgaaugccaaccccaacgccaauccuaacgcuaaucccaacgcgaauccuaacguggaucccaaugccaacccgaaugcuaacccuaaugccaaccccaaugccaacccuaaugcuaaccccaacgccaauccuaacgcgaaucccaacgcuaauccgaacgccaauccuaacgccaaucccaacgcuaaucccaacgccaauccuaacgcuaauccgaacgccaaucccaacgcgaacccuaaugccaaccccaaugcuaacccuaaugccaaccccaauaagaacaaucaggggaacggacaaggccauaauaugccuaacgaccccaaucgcaacgucgaugaaaaugcuaacgccaacagcgcggugaaaaauaacaauaacgaggaaccguccgacaagcacauuaaagaguaucugaauaagauccagaacucucuuagcacggagugguccccuugcagcguuaccuguggcaaugggauucaggugagaaucaagcccggaucugccaacaaaccuaaggaugaacuggacuacgcuaaugacauugagaaaaagaucugcaaaauggaaaaguguuccagcgucuuuaacgugguuaauucuuccaucggccucauuauggugcugagcuuccuuuuucugaacugaggacuaguuauaagacugacuagcccgaugggccucccaacgggcccuccuccccuccuugcaccgagauuaauaaaaaaaaaaaaaaaaaaaaaaaaaaaaaaaaaaaaaaaaaaaaaaaaaaaaaaaaaaaaaaaaugcaucccccccccccccccccccccccccccccccaaaggcucuuuucagagccaccagaauu

SEQ ID NO: 1979 - RNA, 1411 nt, Artificial Sequence
  mRNA Design i-3 (A64-N5-C30-hSL-N5) comprising derived and/or modified sequence from Pf(3D7)__XP_001351122.1__IgE_Pf-CSP(19-397) (opt5)
aggagaaagcuuaccauggacuggaccuggauccuguuccucguggccgcugccacaagaguccacagccuguuucaggaguaccaaugcuauggcuccucuagcaacacgcggguucuuaaugaacugaacuacgauaaugcggggaccaaccucuauaaugagcuggaaaugaacuacuauggaaagcaggagaauugguacucccuuaaaaagaacucucgcagccugggcgaaaaugacgaugggaacaaugaggacaacgagaaacucagaaagcccaaacauaagaagcugaaacagccugcugauggaaauccggaccccaacgccaauccuaacguggaucccaacgccaauccuaacguggaccccaaugcuaacccuaaugucgauccgaacgccaaucccaacgcuaauccuaacgccaaucccaacgcgaauccuaacgccaaucccaacgcuaacccgaaugccaacccuaaugcuaaccccaaugccaacccuaaugcgaaccccaaugccaaccccaaugcuaacccuaaugccaacccgaaugcuaaccccaacgccaauccuaacgccaaucccaacgcuaauccuaacguggaccccaaugcgaacccgaaugccaacccuaaugcuaaccccaaugccaacccuaaugccaaccccaacgcuaauccuaacgccaaucccaacgcgaauccgaacgcuaauccuaacgccaaucccaacgccaaucccaacgcuaauccuaacgccaauccgaacgcuaaucccaacgccaacccuaaugcgaaccccaaugccaacccuaaugcuaaccccaauaagaacaaucagggcaacgggcaaggacacaauaugccuaacgaucccaaucggaacguugacgaaaaugccaacgcuaacuccgccgugaaaaauaacaauaacgaggaaccgucugauaagcauauuaaagaguaucugaauaagauccagaacagccucuccacagaguggagcccuuguucugugaccugcggcaauggcauucagguccgcaucaagcccggguccgcgaacaaaccuaaggacgaacuggacuacgccaaugauauugagaaaaagaucuguaaaauggaaaagugcagcucuguuuucaacguggucaauuccagcaucggacuuauuauggugcugucuuuucucuuccugaacugaggacuaguuauaagacugacuagcccgaugggccucccaacgggcccuccuccccuccuugcaccgagauuaauaaaaaaaaaaaaaaaaaaaaaaaaaaaaaaaaaaaaaaaaaaaaaaaaaaaaaaaaaaaaaaaaugcaucccccccccccccccccccccccccccccccaaaggcucuuuucagagccaccagaauu

SEQ ID NO: 1980 - RNA, 1576 nt, Artificial Sequence
  mRNA Design i-3 (A64-N5-C30-hSL-N5) comprising derived and/or modified sequence from Pf(3D7)__XP_001351122.1__Pf-CSP_L(G4SG4)_TM domain HA (opt5)
aggagaaagcuuaccaugaugagaaagcuggccauccucagcguguccucuuuccuguuugucgaggcucuuuuccaggaauaccaaugcuauggcagcuccucuaacacccggguucugaaugagcucaacuacgacaaugccgggacaaaccuguauaaugaacuugagaugaacuacuauggaaaacaggaaaauugguacagccugaagaaaaacucccgcucucucggcgagaaugaugacgggaacaaugaggauaacgaaaagcugagaaaacccaagcacaagaaacugaagcagccugcggacggaaauccggaucccaacgcuaauccuaacguggaccccaacgccaauccuaacguggaucccaaugccaacccuaaugucgacccgaacgcuaaucccaacgccaauccuaacgcuaaucccaacgccaauccuaacgcgaaucccaacgccaacccgaaugcuaacccuaaugccaaccccaaugcuaacccuaaugccaaccccaaugcgaaccccaaugccaacccuaaugcuaacccgaaugccaaccccaacgcuaauccuaacgccaaucccaacgccaauccuaacguggaucccaaugcuaacccgaaugcgaacccuaaugccaaccccaaugcuaacccuaaugccaaccccaacgccaauccuaacgcuaaucccaacgccaauccgaacgcgaauccuaacgcuaaucccaacgccaaucccaacgccaauccuaacgcuaauccgaacgccaaucccaacgcuaacccuaaugccaaccccaaugcgaacccuaaugccaaccccaauaaaaacaaucagggcaacgggcaaggacauaauaugccuaacgaccccaaucggaacguugaugagaaugcuaacgccaacagcgcugugaagaauaacaauaacgaggaaccguccgacaaacacauuaaggaguaucucaauaagauccagaacagccugucuacggaaugguccccuuguagcgugaccugcggcaauggcauucagguccgcaucaaacccgggucugccaacaagccuaaagaugagcuugacuacgcgaaugacauugaaaagaaaaucuguaagauggagaaaugcuccagcguuuuuaacguggucaauucuuccaucggacugauuauggugcucagcuuccuguuucuuaacggcgggggaggcuccgggggaggcggcaagcuggaaucuacaagaaucuaccagauucucgccaucuauagcaccguggcuuccagccugguccugguugugucucucggggccauuuccuucuggauguguagcaauggaucucugcaaugccggaucuguauuugaggacuaguuauaagacugacuagcccgaugggccucccaacgggcccuccuccccuccuugcaccgagauuaauaaaaaaaaaaaaaaaaaaaaaaaaaaaaaaaaaaaaaaaaaaaaaaaaaaaaaaaaaaaaaaaaugcaucccccccccccccccccccccccccccccccaaaggcucuuuucagagccaccagaauu

SEQ ID NO: 1981 - RNA, 1450 nt, Artificial Sequence
  mRNA Design i-3 (A64-N5-C30-hSL-N5) comprising derived and/or modified sequence from Pf(3D7)__XP_001351122.1__Pf-CSP(199-377)_L(PVTN)_HBsAg (opt5)
aggagaaagcuuaccauggaccccaacgccaauccuaacgcuaauccgaacgccaaucccaacgcgaauccuaacgcuaaucccaacgccaauccuaacgccaaucccaacgcuaauccuaacgccaacccgaaugcuaaccccaaugccaacccuaaugcgaaccccaaugccaacccuaaugcuaaccccaaugccaacccgaaugcuaacccuaaugccaaccccaacgcgaauccuaacaagaauaaccagggcaaugggcaaggacacaacaugcccaaugaucccaacagaaauguggacgagaacgccaaugcuaacagcgccgucaaaaauaacaauaacgaggaaccuuccgauaagcauaucaaagaauaccugaacaagauucaaaauucucucagcaccgagugguccccgugcucuguuacauguggcaacgggauccaggugcggauuaaacccggaagcgcuaauaagccuaaggacgaacuggauuaugccaacgacaucgagaaaaagauuugcaaaauggagaaguguuccucugugcccgucacgaauauggaaaacaucaccagcggcuuccuugggccucugcucgugcugcaggccggauuuuuccuucugacacgcauccucaccauuccccagucccuggauagcugguggacaucucugaauuuucucggcggcuccccgguuugccuggggcagaacagccagucuccuaccuccaaucacagccccacaucuuguccucccaucugcccuggauacagauggaugugucuucggcgcuucauuaucuuucuguucauucuccugcuuugccugaucuuucuccuggugcugcucgacuaucagggcaugcugcccgucuguccgcuuauuccuggguccaccacgaccaacacaggacccugcaaaaccuguacaacccccgcucaaggcaauagcauguucccuuccugcugcuguacgaagccgacagaugggaacugcaccuguauccccaucccuucuagcugggcguuugccaaguaccugugggagugggcuuccgugagauucagcuggcucucucugcuuguucccuuugugcagugguucgucggacuguccccuacaguguggcucagcgccauuuggaugaugugguauuggggccccucucuguacagcaucguguccccuuuuauuccccugcucccgaucuucuucugccugugggucuauauuugaggacuaguuauaagacugacuagcccgaugggccucccaacgggcccuccuccccuccuugcaccgagauuaauaaaaaaaaaaaaaaaaaaaaaaaaaaaaaaaaaaaaaaaaaaaaaaaaaaaaaaaaaaaaaaaaugcaucccccccccccccccccccccccccccccccaaaggcucuuuucagagccaccagaauu

SEQ ID NO: 1982 - RNA, 1492 nt, Artificial Sequence
  mRNA Design i-3 (A64-N5-C30-hSL-N5) comprising derived and/or modified sequence from Pf(3D7)__XP_001351122.1__Pf-CSP(199-387)_L(PVTN)_HBsAg (opt5)
aggagaaagcuuaccaugauggcccccgacccuaacgcuaauccgaacgccaaucccaacgcgaauccuaacgcuaaucccaacgccaauccuaacgccaaucccaacgcuaauccuaacgccaauccgaacgcuaaccccaaugccaacccuaaugcgaaccccaaugccaacccuaaugcuaaccccaaugccaacccgaaugcuaacccuaaugccaaccccaaugcgaacccuaacgccaaucccaacaagaauaaccagggcaaugggcaaggacacaacaugcccaaugauccuaacagaaauguggacgagaacgcuaaugccaacagcgcugucaaaaauaacaauaacgaggaaccguccgauaagcauaucaaagaauaccugaacaagauucaaaauucucucagcaccgaguggucccccugcucuguuacauguggcaacgggauccaggugcggauuaaaccuggaagcgccaauaagcccaaggacgaacuggauuaugccaacgacaucgagaaaaagauuugcaaaauggagaaguguuccucuguguucaaugucgugaacagcuccaucggccuugggccuguuacgaauauggaaaacaucaccagcggauuucugggcccccuccuggugcuucaggcuggcuucuuucugcucacacgcauucugaccaucccgcagucucuggauuccugguggacaagccucaauuuccuugggggaucuccugucugccugggccagaacucccagagccccaccucuaaucacuccccuacaagcugucccccuauuugccccggguacagauggaugugucugcggcgcuuuaucauuuuccucuuuauccugcuucugugccucauuuuccugcuggugcuccuggacuaucagggaaugcuuccgguuuguccucugauccccggcuccaccacgaccaacacagggcccugcaaaaccuguacaaccccugcgcaaggaaauucuauguuuccgagcugcugcuguacgaagcccacagauggcaacugcaccuguaucccuauucccuccagcugggccuucgcuaaguaccucugggagugggccucugugagauuuuccuggcugagccuucuggucccuuucgugcagugguuugugggccucucucccacagucuggcugagcgccaucuggaugaugugguauugggggccuucccuguacucuauuguuagccccuucaucccgcuccugccuauuuucuuuugccuuuggguguauaucugaggacuaguuauaagacugacuagcccgaugggccucccaacgggcccuccuccccuccuugcaccgagauuaauaaaaaaaaaaaaaaaaaaaaaaaaaaaaaaaaaaaaaaaaaaaaaaaaaaaaaaaaaaaaaaaaugcaucccccccccccccccccccccccccccccccaaaggcucuuuucagagccaccagaauu

SEQ ID NO: 1983 - RNA, 676 nt, Artificial Sequence
  mRNA Design i-3 (A64-N5-C30-hSL-N5) comprising derived and/or modified sequence from Pf(3D7)__XP_001351122.1__HsALB_Pf-CSP(19-152) (opt5)
aggagaaagcuuaccaugaagugggugaccuucaucagccugcucuuucuguucuccucugccuacagccuuuuucaggaguaucaaugcuacggcuccucuagcaacacaagaguccugaaugaacucaacuaugacaaugcugggacgaaccuguacaaugagcuugaaaugaacuauuacggaaaacaggagaauugguauucccugaagaaaaacucucggagccucggcgaaaaugaugacgggaacaaugaggauaacgagaagcugcgcaaacccaagcacaagaaacugaagcagccugccgacggaaauccggaucccaacgcgaauccuaacguugaccccaacgcuaauccuaacguggaucccaaugccaacccuaauguggacccgaacgccaaucccaacgcuaauccuaacgccaaucccaacgcuaauccuaacgccaaucccaacgcgaacccgugaggacuaguuauaagacugacuagcccgaugggccucccaacgggcccuccuccccuccuugcaccgagauuaauaaaaaaaaaaaaaaaaaaaaaaaaaaaaaaaaaaaaaaaaaaaaaaaaaaaaaaaaaaaaaaaaugcaucccccccccccccccccccccccccccccccaaaggcucuuuucagagccaccagaauu

SEQ ID NO: 1984 - RNA, 796 nt, Artificial Sequence
  mRNA Design i-3 (A64-N5-C30-hSL-N5) comprising derived and/or modified sequence from Pf(3D7)__XP_001351122.1__HsALB_Pf-CSP(19-192) (opt5)
aggagaaagcuuaccaugaagugggugaccuucaucagccugcucuuucuguucuccucugccuacagccuuuuucaggaguaucaaugcuacggcuccucuagcaacacaagaguccugaaugaacucaacuaugacaaugcugggacgaaccuguacaaugagcuugaaaugaacuauuacggaaaacaggagaauugguauucccugaagaaaaacucucggagccucggcgaaaaugaugacgggaacaaugaggauaacgagaagcugcgcaaacccaagcacaagaaacugaagcagccugccgacggaaauccggaucccaacgcgaauccuaacguugaccccaacgcuaauccuaacguggaucccaaugccaacccuaauguggacccgaacgccaaucccaacgcuaauccuaacgccaaucccaacgcuaauccuaacgccaaucccaacgcgaacccgaaugccaacccuaaugcuaaccccaaugccaacccuaaugcuaaccccaaugccaaccccaaugcgaacccuaaugccaacccgaaugcuaaccccaacgccaauccuaacgcuaaucccugaggacuaguuauaagacugacuagcccgaugggccucccaacgggcccuccuccccuccuugcaccgagauuaauaaaaaaaaaaaaaaaaaaaaaaaaaaaaaaaaaaaaaaaaaaaaaaaaaaaaaaaaaaaaaaaaugcaucccccccccccccccccccccccccccccccaaaggcucuuuucagagccaccagaauu

SEQ ID NO: 1985 - RNA, 1036 nt, Artificial Sequence
  mRNA Design i-3 (A64-N5-C30-hSL-N5) comprising derived and/or modified sequence from Pf(3D7)__XP_001351122.1__HsALB_Pf-CSP(19-272) (opt5)
aggagaaagcuuaccaugaagugggugaccuucaucagccugcucuuucuguucuccucugccuacagccuuuuucaggaguaucaaugcuacggcuccucuagcaacacaagaguccugaaugaacucaacuaugacaaugcugggacgaaccuguacaaugagcuugaaaugaacuauuacggaaaacaggagaauugguauucccugaagaaaaacucucggagccucggcgaaaaugaugacgggaacaaugaggauaacgagaagcugcgcaaacccaagcacaagaaacugaagcagccugccgacggaaauccggaucccaacgcgaauccuaacguugaccccaacgcuaauccuaacguggaucccaaugccaacccuaauguggacccgaacgccaaucccaacgcuaauccuaacgccaaucccaacgcuaauccuaacgccaaucccaacgcgaacccgaaugccaacccuaaugcuaaccccaaugccaacccuaaugcuaaccccaaugccaaccccaaugcgaacccuaaugccaacccgaaugcuaaccccaacgccaauccuaacgcuaaucccaacgccaauccuaacgucgaucccaaugccaacccgaaugcuaacccuaaugcgaaccccaaugccaacccuaaugcuaaccccaacgccaauccuaacgccaaucccaacgcuaauccgaacgccaauccuaacgcgaaucccaacgcuaaucccaacgccaauccuaacgccaauccgaacgcuaaucccaacgccaacccuaaugcuaaccccaaugccaacccuaaugcgaaccccugaggacuaguuauaagacugacuagcccgaugggccucccaacgggcccuccuccccuccuugcaccgagauuaauaaaaaaaaaaaaaaaaaaaaaaaaaaaaaaaaaaaaaaaaaaaaaaaaaaaaaaaaaaaaaaaaugcaucccccccccccccccccccccccccccccccaaaggcucuuuucagagccaccagaauu

SEQ ID NO: 1986 - RNA, 1198 nt, Artificial Sequence
  mRNA Design i-3 (A64-N5-C30-hSL-N5) comprising derived and/or modified sequence from Pf(3D7)__XP_001351122.1__HsALB_Pf-CSP(19-272)_L(AAY)_Pf-CSP(310-3 27)_L(AAY)_Pf-CSP(346-375) (opt5)
aggagaaagcuuaccaugaagugggugaccuucaucagccugcucuuucuguucuccucugccuacagccuuuuucaggaguaucaaugcuacggcuccucuagcaacacaagaguccugaaugaacucaacuaugacaaugcugggacgaaccuguacaaugagcuugaaaugaacuauuacggaaaacaggagaauugguauucccugaagaaaaacucucggagccucggcgaaaaugaugacgggaacaaugaggauaacgagaagcugcgcaaacccaagcacaagaaacugaagcagccugccgacggaaauccggaucccaacgcgaauccuaacguugaccccaacgcuaauccuaacguggaucccaaugccaacccuaauguggacccgaacgccaaucccaacgcuaauccuaacgccaaucccaacgcuaauccuaacgccaaucccaacgcgaacccgaaugccaacccuaaugcuaaccccaaugccaacccuaaugcuaaccccaaugccaaccccaaugcgaacccuaaugccaacccgaaugcuaaccccaacgccaauccuaacgcuaaucccaacgccaauccuaacgucgaucccaaugccaacccgaaugcuaacccuaaugcgaaccccaaugccaacccuaaugcuaaccccaacgccaauccuaacgccaaucccaacgcuaauccgaacgccaauccuaacgcgaaucccaacgcuaaucccaacgccaauccuaacgccaauccgaacgcuaaucccaacgccaacccuaaugcuaaccccaaugccaacccuaaugcgaaccccgccgcuuacgaaccuuccgacaaacauauuaaggaguaccucaauaaaauccagaacagccuggccgcuuauauuaagcccggcucugccaauaagccgaaagaugaacuugacuacgcgaacgauaucgagaagaaaauuuguaagauggagaaaugcuccugaggacuaguuauaagacugacuagcccgaugggccucccaacgggcccuccuccccuccuugcaccgagauuaauaaaaaaaaaaaaaaaaaaaaaaaaaaaaaaaaaaaaaaaaaaaaaaaaaaaaaaaaaaaaaaaaugcaucccccccccccccccccccccccccccccccaaaggcucuuuucagagccaccagaauu

SEQ ID NO: 1987 - RNA, 1159 nt, Artificial Sequence
  mRNA Design i-3 (A64-N5-C30-hSL-N5) comprising derived and/or modified sequence from Pf(3D7)__XP_001351122.1__HsALB_Pf-CSP(19-272)_L(AAY)_Pf-CSP(346-3 65)_L(AAY)_P2 (opt5)
aggagaaagcuuaccaugaagugggugaccuucaucagccugcucuuucuguucuccucugccuacagccuuuuucaggaguaucaaugcuacggcuccucuagcaacacaagaguccugaaugaacucaacuaugacaaugcugggacgaaccuguacaaugagcuugaaaugaacuauuacggaaaacaggagaauugguauucccugaagaaaaacucucggagccucggcgaaaaugaugacgggaacaaugaggauaacgagaagcugcgcaaacccaagcacaagaaacugaagcagccugccgacggaaauccggaucccaacgcgaauccuaacguugaccccaacgcuaauccuaacguggaucccaaugccaacccuaauguggacccgaacgccaaucccaacgcuaauccuaacgccaaucccaacgcuaauccuaacgccaaucccaacgcgaacccgaaugccaacccuaaugcuaaccccaaugccaacccuaaugcuaaccccaaugccaaccccaaugcgaacccuaaugccaacccgaaugcuaaccccaacgccaauccuaacgcuaaucccaacgccaauccuaacgucgaucccaaugccaacccgaaugcuaacccuaaugcgaaccccaaugccaacccuaaugcuaaccccaacgccaauccuaacgccaaucccaacgcuaauccgaacgccaauccuaacgcgaaucccaacgcuaaucccaacgccaauccuaacgccaauccgaacgcuaaucccaacgccaacccuaaugcuaaccccaaugccaacccuaaugcgaaccccgccgcuuacauuaaaccuggcuccgccaauaagcccaaagacgaacucgauuacgcuaacgacaucgaggccgcguaucaguacauuaaggccaauagcaaguucaucgggauuaccgaacugugaggacuaguuauaagacugacuagcccgaugggccucccaacgggcccuccuccccuccuugcaccgagauuaauaaaaaaaaaaaaaaaaaaaaaaaaaaaaaaaaaaaaaaaaaaaaaaaaaaaaaaaaaaaaaaaaugcaucccccccccccccccccccccccccccccccaaaggcucuuuucagagccaccagaauu

SEQ ID NO: 1988 - RNA, 1153 nt, Artificial Sequence
  mRNA Design i-3 (A64-N5-C30-hSL-N5) comprising derived and/or modified sequence from Pf(3D7)__XP_001351122.1__HsALB_Pf-CSP(19-272)_L(AAY)_Pf-CSP(346-3 65)_L(AAY)_PADRE (opt5)
aggagaaagcuuaccaugaagugggugaccuucaucagccugcucuuucuguucuccucugccuacagccuuuuucaggaguaucaaugcuacggcuccucuagcaacacaagaguccugaaugaacucaacuaugacaaugcugggacgaaccuguacaaugagcuugaaaugaacuauuacggaaaacaggagaauugguauucccugaagaaaaacucucggagccucggcgaaaaugaugacgggaacaaugaggauaacgagaagcugcgcaaacccaagcacaagaaacugaagcagccugccgacggaaauccggaucccaacgcgaauccuaacguugaccccaacgcuaauccuaacguggaucccaaugccaacccuaauguggacccgaacgccaaucccaacgcuaauccuaacgccaaucccaacgcuaauccuaacgccaaucccaacgcgaacccgaaugccaacccuaaugcuaaccccaaugccaacccuaaugcuaaccccaaugccaaccccaaugcgaacccuaaugccaacccgaaugcuaaccccaacgccaauccuaacgcuaaucccaacgccaauccuaacgucgaucccaaugccaacccgaaugcuaacccuaaugcgaaccccaaugccaacccuaaugcuaaccccaacgccaauccuaacgccaaucccaacgcuaauccgaacgccaauccuaacgcgaaucccaacgcuaaucccaacgccaauccuaacgccaauccgaacgcuaaucccaacgccaacccuaaugcuaaccccaaugccaacccuaaugcgaaccccgccgcuuacauuaaaccuggcuccgccaauaagcccaaagacgaacucgauuacgcuaacgacaucgaggccgcguaugccaaguucguggcugccuggacccugaaggcugccgccugaggacuaguuauaagacugacuagcccgaugggccucccaacgggcccuccuccccuccuugcaccgagauuaauaaaaaaaaaaaaaaaaaaaaaaaaaaaaaaaaaaaaaaaaaaaaaaaaaaaaaaaaaaaaaaaaugcaucccccccccccccccccccccccccccccccaaaggcucuuuucagagccaccagaauu

SEQ ID NO: 1989 - RNA, 1210 nt, Artificial Sequence
  mRNA Design i-3 (A64-N5-C30-hSL-N5) comprising derived and/or modified sequence from Pf(3D7)__XP_001351122.1__HsALB_Pf-CSP(19-272)_L(G4S)_Pf-CSP(310-3 27)_L(G4S)_Pf-CSP(346-375) (opt5)
aggagaaagcuuaccaugaagugggugaccuucaucagccugcucuuucuguucuccucugccuacagccuuuuucaggaguaucaaugcuacggcuccucuagcaacacaagaguccugaaugaacucaacuaugacaaugcugggacgaaccuguacaaugagcuugaaaugaacuauuacggaaaacaggagaauugguauucccugaagaaaaacucucggagccucggcgaaaaugaugacgggaacaaugaggauaacgagaagcugcgcaaacccaagcacaagaaacugaagcagccugccgacggaaauccggaucccaacgcgaauccuaacguugaccccaacgcuaauccuaacguggaucccaaugccaacccuaauguggacccgaacgccaaucccaacgcuaauccuaacgccaaucccaacgcuaauccuaacgccaaucccaacgcgaacccgaaugccaacccuaaugcuaaccccaaugccaacccuaaugcuaaccccaaugccaaccccaaugcgaacccuaaugccaacccgaaugcuaaccccaacgccaauccuaacgcuaaucccaacgccaauccuaacgucgaucccaaugccaacccgaaugcuaacccuaaugcgaaccccaaugccaacccuaaugcuaaccccaacgccaauccuaacgccaaucccaacgcuaauccgaacgccaauccuaacgcgaaucccaacgcuaaucccaacgccaauccuaacgccaauccgaacgcuaaucccaacgccaacccuaaugcuaaccccaaugccaacccuaaugcgaaccccggcgggggaggcuccgaaccuagcgacaaacauauuaaggaguaccucaauaaaauccagaacucucugggcgggggaggcuccauuaagcccgggagcgccaauaagccgaaagaugaacuugacuacgcuaacgauaucgagaagaaaauuuguaagauggagaaaugcucuugaggacuaguuauaagacugacuagcccgaugggccucccaacgggcccuccuccccuccuugcaccgagauuaauaaaaaaaaaaaaaaaaaaaaaaaaaaaaaaaaaaaaaaaaaaaaaaaaaaaaaaaaaaaaaaaaugcaucccccccccccccccccccccccccccccccaaaggcucuuuucagagccaccagaauu

SEQ ID NO: 1990 - RNA, 1195 nt, Artificial Sequence
  mRNA Design i-3 (A64-N5-C30-hSL-N5) comprising derived and/or modified sequence from Pf(3D7)__XP_001351122.1__HsALB_Pf-CSP(19-272)_L(G4S)_Pf-CSP(310-3 27)_Pf-CSP(346-375) (opt5)
aggagaaagcuuaccaugaagugggugaccuucaucagccugcucuuucuguucuccucugccuacagccuuuuucaggaguaucaaugcuacggcuccucuagcaacacaagaguccugaaugaacucaacuaugacaaugcugggacgaaccuguacaaugagcuugaaaugaacuauuacggaaaacaggagaauugguauucccugaagaaaaacucucggagccucggcgaaaaugaugacgggaacaaugaggauaacgagaagcugcgcaaacccaagcacaagaaacugaagcagccugccgacggaaauccggaucccaacgcgaauccuaacguugaccccaacgcuaauccuaacguggaucccaaugccaacccuaauguggacccgaacgccaaucccaacgcuaauccuaacgccaaucccaacgcuaauccuaacgccaaucccaacgcgaacccgaaugccaacccuaaugcuaaccccaaugccaacccuaaugcuaaccccaaugccaaccccaaugcgaacccuaaugccaacccgaaugcuaaccccaacgccaauccuaacgcuaaucccaacgccaauccuaacgucgaucccaaugccaacccgaaugcuaacccuaaugcgaaccccaaugccaacccuaaugcuaaccccaacgccaauccuaacgccaaucccaacgcuaauccgaacgccaauccuaacgcgaaucccaacgcuaaucccaacgccaauccuaacgccaauccgaacgcuaaucccaacgccaacccuaaugcuaaccccaaugccaacccuaaugcgaaccccggcgggggaggcuccgaaccuagcgacaaacauauuaaggaguaccucaauaaaauccagaacucucugauuaagcccggcuccgccaauaagccgaaagaugaacuugacuacgcuaacgauaucgagaagaaaauuuguaagauggagaaaugcagcugaggacuaguuauaagacugacuagcccgaugggccucccaacgggcccuccuccccuccuugcaccgagauuaauaaaaaaaaaaaaaaaaaaaaaaaaaaaaaaaaaaaaaaaaaaaaaaaaaaaaaaaaaaaaaaaaugcaucccccccccccccccccccccccccccccccaaaggcucuuuucagagccaccagaauu

SEQ ID NO: 1991 - RNA, 1195 nt, Artificial Sequence
  mRNA Design i-3 (A64-N5-C30-hSL-N5) comprising derived and/or modified sequence from Pf(3D7)__XP_001351122.1__HsALB_Pf-CSP(19-325) (opt5)
aggagaaagcuuaccaugaagugggugaccuucaucagccugcucuuucuguucuccucugccuacagccuuuuucaggaguaucaaugcuacggcuccucuagcaacacaagaguccugaaugaacucaacuaugacaaugcugggacgaaccuguacaaugagcuugaaaugaacuauuacggaaaacaggagaauugguauucccugaagaaaaacucucggagccucggcgaaaaugaugacgggaacaaugaggauaacgagaagcugcgcaaacccaagcacaagaaacugaagcagccugccgacggaaauccggaucccaacgcgaauccuaacguugaccccaacgcuaauccuaacguggaucccaaugccaacccuaauguggacccgaacgccaaucccaacgcuaauccuaacgccaaucccaacgcuaauccuaacgccaaucccaacgcgaacccgaaugccaacccuaaugcuaaccccaaugccaacccuaaugcuaaccccaaugccaaccccaaugcgaacccuaaugccaacccgaaugcuaaccccaacgccaauccuaacgcuaaucccaacgccaauccuaacgucgaucccaaugccaacccgaaugcuaacccuaaugcgaaccccaaugccaacccuaaugcuaaccccaacgccaauccuaacgccaaucccaacgcuaauccgaacgccaauccuaacgcgaaucccaacgcuaaucccaacgccaauccuaacgccaauccgaacgcuaaucccaacgccaacccuaaugcuaaccccaaugccaacccuaaugcgaaccccaauaaaaacaaucagggcaacgggcaaggacauaauaugccuaacgaccccaauagaaacguggaugaaaaugccaacgcuaacuccgccguuaagaauaacaauaacgaggaaccgagcgacaaacacauuaaggaguaccucaauaagauccagaacugaggacuaguuauaagacugacuagcccgaugggccucccaacgggcccuccuccccuccuugcaccgagauuaauaaaaaaaaaaaaaaaaaaaaaaaaaaaaaaaaaaaaaaaaaaaaaaaaaaaaaaaaaaaaaaaaugcaucccccccccccccccccccccccccccccccaaaggcucuuuucagagccaccagaauu

SEQ ID NO: 1992 - RNA, 1372 nt, Artificial Sequence
  mRNA Design i-3 (A64-N5-C30-hSL-N5) comprising derived and/or modified sequence from Pf(3D7)__XP_001351122.1__HsALB_Pf-CSP(19-384) (opt5)
aggagaaagcuuaccaugaagugggugaccuucaucagccugcucuuucuguucuccucugccuacagccuuuuucaggaguaucaaugcuacggcuccucuagcaacacaagagugcugaaugaacucaacuaugacaaugcugggacgaaccuguacaaugagcuugaaaugaacuauuacggaaaacaggagaauugguauucccugaagaaaaacucucggagccucggcgaaaaugaugacgggaacaaugaggauaacgagaagcugcgcaaacccaagcacaagaaacugaagcagccugccgacggaaauccggaucccaacgcgaauccuaacguugaccccaacgcuaauccuaacguggaucccaaugccaacccuaauguggacccgaacgccaaucccaacgcuaauccuaacgccaaucccaacgcuaauccuaacgccaaucccaacgcgaacccgaaugccaacccuaaugcuaaccccaaugccaacccuaaugcuaaccccaaugccaaccccaaugcgaacccuaaugccaacccgaaugcuaaccccaacgccaauccuaacgcuaaucccaacgccaauccuaacgucgaucccaaugccaacccgaaugcuaacccuaaugcgaaccccaaugccaacccuaaugcuaaccccaacgccaauccuaacgccaaucccaacgcuaauccgaacgccaauccuaacgcgaaucccaacgcuaaucccaacgccaauccuaacgccaauccgaacgcuaaucccaacgccaacccuaaugcuaaccccaaugccaacccuaaugcgaaccccaauaaaaacaaucagggcaacgggcaaggacauaauaugccuaacgaccccaauagaaacguggaugaaaaugccaacgcuaacuccgccguuaagaauaacaauaacgaggaaccgagcgacaaacacauuaaggaguaccucaauaagauccagaacucucuguccaccgaguggagcccuuguucugugacaugcggcaauggcauucagguccggaucaaacccggguccgcuaacaagccuaaagaugaacuugacuacgccaaugacauugagaagaaaaucuguaagauggaaaaaugcagcucuguguucaacguugucaauuccagcugaggacuaguuauaagacugacuagcccgaugggccucccaacgggcccuccuccccuccuugcaccgagauuaauaaaaaaaaaaaaaaaaaaaaaaaaaaaaaaaaaaaaaaaaaaaaaaaaaaaaaaaaaaaaaaaaugcaucccccccccccccccccccccccccccccccaaaggcucuuuucagagccaccagaauu

SEQ ID NO: 1993 - RNA, 1510 nt, Artificial Sequence
  mRNA Design i-3 (A64-N5-C30-hSL-N5) comprising derived and/or modified sequence from Pf(3D7)__XP_001351122.1__HsALB_Pf-CSP(19-384)_TM domain HA (opt5)
aggagaaagcuuaccaugaagugggugaccuucaucagccugcucuuucuguucuccucugccuacagccuuuuucaggaguaucaaugcuacggcuccucuagcaacacaagaguccugaaugaacucaacuaugacaaugcugggacgaaccuguacaaugagcuugaaaugaacuauuacggaaaacaggagaauugguauucccugaagaaaaacucucggagccucggcgaaaaugaugacgggaacaaugaggauaacgagaagcugcgcaaacccaagcacaagaaacugaagcagccugccgacggaaauccggaucccaacgcgaauccuaacguugaccccaacgcuaauccuaacguggaucccaaugccaacccuaauguggacccgaacgccaaucccaacgcuaauccuaacgccaaucccaacgcuaauccuaacgccaaucccaacgcgaacccgaaugccaacccuaaugcuaaccccaaugccaacccuaaugcuaaccccaaugccaaccccaaugcgaacccuaaugccaacccgaaugcuaaccccaacgccaauccuaacgcuaaucccaacgccaauccuaacgucgaucccaaugccaacccgaaugcuaacccuaaugcgaaccccaaugccaacccuaaugcuaaccccaacgccaauccuaacgccaaucccaacgcuaauccgaacgccaauccuaacgcgaaucccaacgcuaaucccaacgccaauccuaacgccaauccgaacgcuaaucccaacgccaacccuaaugcuaaccccaaugccaacccuaaugcgaaccccaauaaaaacaaucagggcaacgggcaaggacauaauaugccuaacgaccccaauagaaacguggaugaaaaugccaacgcuaacuccgccguuaagaauaacaauaacgaggaaccgagcgacaaacacauuaaggaguaccucaauaagauccagaacucucuguccaccgaguggagcccuuguucugugacaugcggcaauggcauucagguccggaucaaacccggguccgcuaacaagccuaaagaugaacuugacuacgccaaugacauugagaagaaaaucuguaagauggaaaaaugcagcucuguguucaacguugucaauuccagcaagcuggaguccacccgcaucuaucagauucucgcgaucuacucuacaguggccagcucccuggugcuuguggucagccugggagcuauuucuuuuuggauguguuccaacggcagccuccaaugcagaaucuguauuugaggacuaguuauaagacugacuagcccgaugggccucccaacgggcccuccuccccuccuugcaccgagauuaauaaaaaaaaaaaaaaaaaaaaaaaaaaaaaaaaaaaaaaaaaaaaaaaaaaaaaaaaaaaaaaaaugcaucccccccccccccccccccccccccccccccaaaggcucuuuucagagccaccagaauu

SEQ ID NO: 1994 - RNA, 1222 nt, Artificial Sequence
  mRNA Design i-3 (A64-N5-C30-hSL-N5) comprising derived and/or modified sequence from Pf(3D7)__XP_001351122.1__HsALB_Pf-CSP(82-397) (opt5)
aggagaaagcuuaccaugaagugggugaccuucaucagccugcucuuucuguucuccucugccuacagcgacaacgagaaacuuagaaagcccaaacacaagaaacugaagcagccugcugauggcaauccggaccccaacgccaauccuaacgucgaucccaaugcgaacccuaauguugaccccaacgcuaauccuaacguggauccgaaugccaaccccaaugccaacccuaaugcuaaccccaacgccaauccuaacgcuaaucccaacgccaauccgaacgcgaauccuaacgccaaucccaacgcuaauccuaacgccaaucccaacgcuaaucccaacgccaacccuaaugcgaacccgaaugccaaccccaaugcuaacccuaaugccaaccccaaugcuaacccuaauguggaccccaacgccaauccgaacgccaauccuaacgcuaaccccaaugcgaacccuaaugccaaccccaaugcuaacccuaaugccaaccccaaugccaacccgaaugcuaacccuaaugccaaccccaaugcgaaccccaacgcuaauccuaacgccaauccgaacgccaaucccaacgcuaauccuaacgccaaucccaacgcuaauccuaacgccaaucccaacaagaauaaccaagggaauggacagggccauaacaugccuaacgaucccaaucggaacgucgacgaaaaugcgaacgccaauuccgcugugaaaaacaauaacaaugaggaaccgucugauaagcacauuaaagaguaucucaacaagauccagaauagccuguccacagaauggucuccuugcagcguuacgugugggaacggcauucaggugcgcaucaaacccggauccgccaauaagccuaaggacgagcuugauuacgcuaacgacauugagaaaaagaucugcaaaauggaaaaguguagcucugucuuuaaugugguuaacuccagcaucgggcugauuauggugcucucuuuccuguuucugaacugaggacuaguuauaagacugacuagcccgaugggccucccaacgggcccuccuccccuccuugcaccgagauuaauaaaaaaaaaaaaaaaaaaaaaaaaaaaaaaaaaaaaaaaaaaaaaaaaaaaaaaaaaaaaaaaaugcaucccccccccccccccccccccccccccccccaaaggcucuuuucagagccaccagaauu

SEQ ID NO: 1995 - RNA, 574 nt, Artificial Sequence
  mRNA Design i-3 (A64-N5-C30-hSL-N5) comprising derived and/or modified sequence from Pf(3D7)__XP_001351122.1__HsALB_Pf-CSP(93-192) (opt5)
aggagaaagcuuaccaugaagugggugaccuucaucagccugcucuuucuguucuccucugccuacagcaaacuuaagcagcccgcugacggcaacccugauccgaaugccaaccccaaugucgacccuaacgcgaaucccaacguugauccuaaugcuaaccccaauguggacccuaacgccaauccgaacgccaaucccaacgcuaauccuaacgccaaccccaaugcuaacccuaaugccaaccccaaugcgaacccgaaugccaacccuaaugcuaaccccaaugccaacccuaaugcuaaccccaaugccaaccccaacgcgaauccuaacgccaauccgaacgcuaaucccaacgccaauccuugaggacuaguuauaagacugacuagcccgaugggccucccaacgggcccuccuccccuccuugcaccgagauuaauaaaaaaaaaaaaaaaaaaaaaaaaaaaaaaaaaaaaaaaaaaaaaaaaaaaaaaaaaaaaaaaaugcaucccccccccccccccccccccccccccccccaaaggcucuuuucagagccaccagaauu

SEQ ID NO: 1996 - RNA, 814 nt, Artificial Sequence
  mRNA Design i-3 (A64-N5-C30-hSL-N5) comprising derived and/or modified sequence from Pf(3D7)__XP_001351122.1__HsALB_Pf-CSP(93-272) (opt5)
aggagaaagcuuaccaugaagugggugaccuucaucagccugcucuuucuguucuccucugccuacagcaaacuuaagcagcccgcugacggcaacccugauccgaaugccaaccccaaugucgacccuaacgcgaaucccaacguugauccuaaugcuaaccccaauguggacccuaacgccaauccgaacgccaaucccaacgcuaauccuaacgccaaccccaaugcuaacccuaaugccaaccccaaugcgaacccgaaugccaacccuaaugcuaaccccaaugccaacccuaaugcuaaccccaaugccaaccccaacgcgaauccuaacgccaauccgaacgcuaaucccaacgccaauccuaacgcuaaucccaacguggauccuaaugccaaccccaaugccaacccgaaugcuaacccuaacgcgaaucccaacgccaauccuaacgcuaaucccaacgccaauccuaacgccaaucccaacgcuaauccgaacgccaauccuaacgcgaaucccaacgcuaaccccaaugccaacccuaaugccaacccgaaugcuaaccccaaugccaacccuaaugcuaaccccaaugccaacccuugaggacuaguuauaagacugacuagcccgaugggccucccaacgggcccuccuccccuccuugcaccgagauuaauaaaaaaaaaaaaaaaaaaaaaaaaaaaaaaaaaaaaaaaaaaaaaaaaaaaaaaaaaaaaaaaaugcaucccccccccccccccccccccccccccccccaaaggcucuuuucagagccaccagaauu

SEQ ID NO: 1997 - RNA, 1189 nt, Artificial Sequence
  mRNA Design i-3 (A64-N5-C30-hSL-N5) comprising derived and/or modified sequence from Pf(3D7)__XP_001351122.1__HsALB_Pf-CSP(93-397) (opt5)
aggagaaagcuuaccaugaagugggugaccuucaucagccugcucuuucuguucuccucugccuacagcaaacuuaagcagcccgcugacggcaacccugauccgaaugccaaccccaaugucgacccuaacgcgaaucccaacguugauccuaaugcuaaccccaauguggacccuaacgccaauccgaacgccaaucccaacgcuaauccuaacgccaaccccaaugcuaacccuaaugccaaccccaaugcgaacccgaaugccaacccuaaugcuaaccccaaugccaacccuaaugcuaaccccaaugccaaccccaacgcgaauccuaacgccaauccgaacgcuaaucccaacgccaauccuaacgcuaaucccaacguggauccuaaugccaaccccaaugccaacccgaaugcuaacccuaacgcgaaucccaacgccaauccuaacgcuaaucccaacgccaauccuaacgccaaucccaacgcuaauccgaacgccaauccuaacgcgaaucccaacgcuaaccccaaugccaacccuaaugccaacccgaaugcuaaccccaaugccaacccuaaugcuaaccccaaugccaacccuaauaaaaacaaucaagggaacggacagggccacaauaugcccaacgacccuaacagaaaugucgaugagaacgcgaaugccaacuccgcugugaagaauaacaauaacgaggaacccucugacaaacauauuaaggaauaucugaauaagauccagaacagccucuccacagaguggucuccgugcagcguuacgugugggaauggcauucaggugcggaucaaaccuggauccgccaacaagcccaaagaugaacuggacuacgcuaaugauauugagaagaaaaucugcaagauggagaaguguagcucugucuuuaacgugguuaauuccagcaucgggcuuauuauggugcugucuuuccucuuucugaacugaggacuaguuauaagacugacuagcccgaugggccucccaacgggcccuccuccccuccuugcaccgagauuaauaaaaaaaaaaaaaaaaaaaaaaaaaaaaaaaaaaaaaaaaaaaaaaaaaaaaaaaaaaaaaaaaugcaucccccccccccccccccccccccccccccccaaaggcucuuuucagagccaccagaauu

SEQ ID NO: 1998 - RNA, 559 nt, Artificial Sequence
  mRNA Design i-3 (A64-N5-C30-hSL-N5) comprising derived and/or modified sequence from Pf(3D7)__XP_001351122.1__HsALB_Pf-CSP(98-192) (opt5)
aggagaaagcuuaccaugaagugggugaccuucaucagccugcucuuucuguucuccucugccuacagcgcugacggcaaccccgauccuaaugccaacccgaaugucgaccccaacgcgaauccuaacguugaucccaaugcuaacccuaauguggaccccaacgccaauccuaacgccaauccgaacgcuaaucccaacgccaacccuaaugcuaaccccaaugccaacccuaaugcgaaccccaaugccaacccgaaugcuaacccuaaugccaaccccaaugcuaacccuaaugccaaccccaacgcgaaucccaacgccaauccuaacgcuaauccgaacgccaaucccugaggacuaguuauaagacugacuagcccgaugggccucccaacgggcccuccuccccuccuugcaccgagauuaauaaaaaaaaaaaaaaaaaaaaaaaaaaaaaaaaaaaaaaaaaaaaaaaaaaaaaaaaaaaaaaaaugcaucccccccccccccccccccccccccccccccaaaggcucuuuucagagccaccagaauu

SEQ ID NO: 1999 - RNA, 799 nt, Artificial Sequence
  mRNA Design i-3 (A64-N5-C30-hSL-N5) comprising derived and/or modified sequence from Pf(3D7)__XP_001351122.1__HsALB_Pf-CSP(98-272) (opt5)
aggagaaagcuuaccaugaagugggugaccuucaucagccugcucuuucuguucuccucugccuacagcgcugacggcaaccccgauccuaaugccaacccgaaugucgaccccaacgcgaauccuaacguugaucccaaugcuaacccuaauguggaccccaacgccaauccuaacgccaauccgaacgcuaaucccaacgccaacccuaaugcuaaccccaaugccaacccuaaugcgaaccccaaugccaacccgaaugcuaacccuaaugccaaccccaaugcuaacccuaaugccaaccccaacgcgaaucccaacgccaauccuaacgcuaauccgaacgccaaucccaacgcuaauccuaacguggaucccaaugccaacccuaaugccaaccccaaugcuaacccgaacgcgaauccuaacgccaaucccaacgcuaauccuaacgccaaucccaacgccaauccuaacgcuaaucccaacgccaauccgaacgcgaauccuaacgcuaaccccaaugccaaccccaaugccaacccuaaugcuaacccgaaugccaaccccaaugcuaacccuaaugccaaccccugaggacuaguuauaagacugacuagcccgaugggccucccaacgggcccuccuccccuccuugcaccgagauuaauaaaaaaaaaaaaaaaaaaaaaaaaaaaaaaaaaaaaaaaaaaaaaaaaaaaaaaaaaaaaaaaaugcaucccccccccccccccccccccccccccccccaaaggcucuuuucagagccaccagaauu

SEQ ID NO: 2000 - RNA, 1105 nt, Artificial Sequence
  mRNA Design i-3 (A64-N5-C30-hSL-N5) comprising derived and/or modified sequence from Pf(3D7)__XP_001351122.1__HsALB_Pf-CSP(98-374) (opt5)
aggagaaagcuuaccaugaagugggugaccuucaucagccugcucuuucuguucuccucugccuacagcgcugacggcaaccccgauccuaaugccaacccgaaugucgaccccaacgcgaauccuaacguugaucccaaugcuaacccuaauguggaccccaacgccaauccuaacgccaauccgaacgcuaaucccaacgccaacccuaaugcuaaccccaaugccaacccuaaugcgaaccccaaugccaacccgaaugcuaacccuaaugccaaccccaaugcuaacccuaaugccaaccccaacgcgaaucccaacgccaauccuaacgcuaauccgaacgccaaucccaacgcuaauccuaacguggaucccaaugccaacccuaaugccaaccccaaugcuaacccgaacgcgaauccuaacgccaaucccaacgcuaauccuaacgccaaucccaacgccaauccuaacgcuaaucccaacgccaauccgaacgcgaauccuaacgcuaaccccaaugccaaccccaaugccaacccuaaugcuaacccgaaugccaaccccaaugcuaacccuaaugccaaccccaauaaaaacaaucaggggaacggacaaggccacaauaugccuaacgaccccaacagaaaugucgaugagaacgcgaaugccaacuccgcugugaagaauaacaauaacgaggaaccuucugacaaacauauuaaggaauaucuuaauaaaauccagaacagccuguccacagaguggucucccugcagcguuacgugugggaauggcauucaggugcggaucaagccgggauccgccaacaagccuaaagaugaacucgacuacgcuaaugauauugagaagaaaaucugcaagauggagaaauguugaggacuaguuauaagacugacuagcccgaugggccucccaacgggcccuccuccccuccuugcaccgagauuaauaaaaaaaaaaaaaaaaaaaaaaaaaaaaaaaaaaaaaaaaaaaaaaaaaaaaaaaaaaaaaaaaugcaucccccccccccccccccccccccccccccccaaaggcucuuuucagagccaccagaauu

SEQ ID NO: 2001 - RNA, 1174 nt, Artificial Sequence
  mRNA Design i-3 (A64-N5-C30-hSL-N5) comprising derived and/or modified sequence from Pf(3D7)__XP_001351122.1__HsALB_Pf-CSP(98-397) (opt5)
aggagaaagcuuaccaugaagugggugaccuucaucagccugcucuuucuguucuccucugccuacagcgcugacggcaaccccgauccuaaugccaacccgaaugucgaccccaacgcgaauccuaacguugaucccaaugcuaacccuaauguggaccccaacgccaauccuaacgccaauccgaacgcuaaucccaacgccaacccuaaugcuaaccccaaugccaacccuaaugcgaaccccaaugccaacccgaaugcuaacccuaaugccaaccccaaugcuaacccuaaugccaaccccaacgcgaaucccaacgccaauccuaacgcuaauccgaacgccaaucccaacgcuaauccuaacguggaucccaaugccaacccuaaugccaaccccaaugcuaacccgaacgcgaauccuaacgccaaucccaacgcuaauccuaacgccaaucccaacgccaauccuaacgcuaaucccaacgccaauccgaacgcgaauccuaacgcuaaccccaaugccaaccccaaugccaacccuaaugcuaacccgaaugccaaccccaaugcuaacccuaaugccaaccccaauaaaaacaaucaggggaacggacaaggccacaauaugccuaacgaccccaacagaaaugucgaugagaacgcgaaugccaacuccgcugugaagaauaacaauaacgaggaaccuucugacaaacauauuaaggaauaucuuaauaaaauccagaacagccuguccacagaguggucucccugcagcguuacgugugggaauggcauucaggugcggaucaagccgggauccgccaacaagccuaaagaugaacucgacuacgcuaaugauauugagaagaaaaucugcaagauggagaaauguagcucugucuuuaacgugguuaauuccagcaucgggcugauuauggugcuuucuuuccuguuucucaacugaggacuaguuauaagacugacuagcccgaugggccucccaacgggcccuccuccccuccuugcaccgagauuaauaaaaaaaaaaaaaaaaaaaaaaaaaaaaaaaaaaaaaaaaaaaaaaaaaaaaaaaaaaaaaaaaugcaucccccccccccccccccccccccccccccccaaaggcucuuuucagagccaccagaauu

SEQ ID NO: 2002 - RNA, 1501 nt, Artificial Sequence
  mRNA Design i-3 (A64-N5-C30-hSL-N5) comprising derived and/or modified sequence from Pf(3D7)__XP_001351122.1__HsALB_Pf-CSP(199-377)_L(PVTN)_HBsAg (opt5)
aggagaaagcuuaccaugaagugggugaccuucaucagccugcucuuucuguucuccucugccuacagcgaccccaacgcuaauccuaacgccaauccgaacgcgaaucccaacgcuaauccuaacgccaaucccaacgccaauccuaacgcuaaucccaacgccaauccuaacgcuaacccgaaugccaaccccaaugcgaacccuaaugccaaccccaaugcuaacccuaaugccaaccccaaugcuaacccgaaugccaacccuaaugcgaaccccaacgccaauccuaacaaaaauaaccagggcaaugggcaaggacacaacaugcccaaugaucccaacagaaaugucgacgagaacgcuaaugccaacuccgcuguuaagaauaacaauaacgaggaaccuucugauaaacauauuaaggaauaucuuaacaaaauccagaauagccuguccacagaguggucuccgugcagcgugacguguggcaacgggauucaggugcggaucaagcccggauccgccaauaagccuaaagacgaacucgauuacgccaacgacauugagaagaaaaucugcaagauggagaaauguagcucuguccccgugaccaauauggaaaacaucacauccggcuuucuggggccucuucugguucuccaggcuggauucuuucugcugacccgcauucucacaaucccccaaagccuggauucuugguggaccucccuuaauuuccugggcggcagcccggugugccucgggcagaacucucaguccccuacaagcaaucacucccccaccucuuguccucccauuugcccuggauauagauggaugugucugcggcgcuuuaucauuuuccuuuuuauccugcuccugugccugauuuuccuccugguccuucuggacuaccagggcaugcuccccguguguccgcugaucccugggagcacgaccacaaacaccggacccugcaagacauguaccacgcccgcgcaaggcaauuccauguuuccuagcugcugcuguacaaagccgaccgaugggaacugcacauguauccccauuccuucuuccugggccuucgcuaaauaucuuugggagugggccagcguuagauuuucuuggcugagccuccuggugcccuucguccagugguucgugggacuguccccuaccguguggcucucugccaucuggaugaugugguacuggggccccagccuguauuccauugucagcccuuuuaucccccuucugccgauuuucuuuugccucuggguuuacaucugaggacuaguuauaagacugacuagcccgaugggccucccaacgggcccuccuccccuccuugcaccgagauuaauaaaaaaaaaaaaaaaaaaaaaaaaaaaaaaaaaaaaaaaaaaaaaaaaaaaaaaaaaaaaaaaaugcaucccccccccccccccccccccccccccccccaaaggcucuuuucagagccaccagaauu

SEQ ID NO: 2003 - RNA, 1240 nt, Artificial Sequence
  mRNA Design i-3 (A64-N5-C30-hSL-N5) comprising derived and/or modified sequence from Pb(ANKA)__XP_022712148.1__Pb-CSP (opt5)
aggagaaagcuuaccaugaagaaaugcaccauccugguugucgccagccuccugcuuguuaacucccugcuccccggcuacgggcagaauaagucuauucaagcucagagaaaccugaaugagcuuuguuauaacgaaggaaaugacaacaaacuguaccacgugcucaauagcaagaacggcaaaaucuauaaucggaacacagugaaucgccugcuggccgaugcgccugaggggaagaagaacgaaaagaaaaaugagaaaauugaaagaaacaauaagcucaaacagccgcccccucccccuaaccccaacgacccuccgcccccuaaucccaacgauccucccccgccuaaucccaacgacccucccccucccaauccgaacgaucccccucccccuaaugcuaacgaucccccgccucccaaugccaacgacccugcucccccuaaugccaacgaccccgccccgccuaaugcuaacgaucccgcgcccccuaaugccaacgacccggcucccccuaacgccaaugaucccccucccccuaaccccaaugacccggccccucccaacgcuaaugauccucccccgccuaaccccaaugacccugccccuccccagggaaacaauaacccccaaccgcagccccggccucagccccagccucaaccccagccucagccgcagccccaaccucagccccagccucgcccccaaccgcagccucagcccggcgggaauaacaauaacaagaauaacaacaaugacgauuccuacauccccucugcggagaagauucuggaguucgucaaacagaucagagacagcaucacggaagaguggucccaaugcaacgugaccuguggaucuggcauucggguucgcaagagaaaaggcagcaauaagaaagccgaagaucuuacacuggaggacaucgauaccgagauuugcaagauggacaaauguuccagcaucuuuaacauugugucuaauucccucggguucgucauccugcuugugcugguguuuuucaacugaggacuaguuauaagacugacuagcccgaugggccucccaacgggcccuccuccccuccuugcaccgagauuaauaaaaaaaaaaaaaaaaaaaaaaaaaaaaaaaaaaaaaaaaaaaaaaaaaaaaaaaaaaaaaaaaugcaucccccccccccccccccccccccccccccccaaaggcucuuuucagagccaccagaauu

SEQ ID NO: 2004 - RNA, 1405 nt, Artificial Sequence
  mRNA Design i-3 (A64-N5-C30-hSL-N5) comprising derived and/or modified sequence from Pb(ANKA)__XP_022712148.1__Pb-CSP_L(G4SG4)_TM domain HA (opt5)
aggagaaagcuuaccaugaagaaaugcaccauccugguggucgccagccuccugcuuguuaacucccugcuccccggcuacgggcagaauaagucuauucaagcucagagaaaccugaaugagcuuuguuauaacgaaggaaaugacaacaaacuguaccacgugcucaauagcaagaacggcaaaaucuauaaucggaacacagugaaucgccugcuggccgaugcgccugaggggaagaagaacgaaaagaaaaaugagaaaauugaaagaaacaauaagcucaaacagccgcccccucccccuaaccccaacgacccuccgcccccuaaucccaacgauccucccccgccuaaucccaacgacccucccccucccaauccgaacgaucccccucccccuaaugcuaacgaucccccgccucccaaugccaacgacccugcucccccuaaugccaacgaccccgccccgccuaaugcuaacgaucccgcgcccccuaaugccaacgacccggcucccccuaacgccaaugaucccccucccccuaaccccaaugacccggccccucccaacgcuaaugauccucccccgccuaaccccaaugacccugccccuccccagggaaacaauaacccccaaccgcagccccggccucagccccagccucaaccccagccucagccgcagccccaaccucagccccagccucgcccccaaccgcagccucagcccggcgggaauaacaauaacaagaauaacaacaaugacgauuccuacauccccucugcggagaagauucuggaguucgucaaacagaucagagacagcaucacggaagaguggucccaaugcaacgugaccuguggaucuggcauucggguucgcaagagaaaaggcagcaauaagaaagccgaagaucuuacacuggaggacaucgauaccgagauuugcaagauggacaaauguuccagcaucuuuaacauugugucuaauucccucggguucgucauccugcuugugcugguguuuuucaacggaggcgggggaagcggcgggggaggcaagcucgaaucuacacggauuuaucagauccuggcuaucuacuccaccguugccagcucucugguccucguggugucccugggcgcuauuagcuuuuggaugugcuccaaugggucucuucagugucgcaucugcauuugaggacuaguuauaagacugacuagcccgaugggccucccaacgggcccuccuccccuccuugcaccgagauuaauaaaaaaaaaaaaaaaaaaaaaaaaaaaaaaaaaaaaaaaaaaaaaaaaaaaaaaaaaaaaaaaaugcaucccccccccccccccccccccccccccccccaaaggcucuuuucagagccaccagaauu

SEQ ID NO: 2005 - RNA, 1225 nt, Artificial Sequence
  mRNA Design i-3 (A64-N5-C30-hSL-N5) comprising derived and/or modified sequence from Pb(ANKA)__XP_022712148.1__HsALB_Pb-CSP(24-340) (opt5)
aggagaaagcuuaccaugaagugggugaccuucaucagccugcucuuucuguucuccucugccuacagccagaacaaauccauucaagcucagagaaaucuuaacgagcugugcuauaaugaaggcaacgacaauaagcucuaccacguccugaacucuaaaaaugggaagaucuauaaccggaauacaguuaaccgccuucuggccgaugcgcccgagggcaaaaagaaugaaaagaaaaacgagaagauugaaagaaauaacaaacucaagcagccuccgcccccucccaauccuaacgacccucccccgcccaacccuaaugaucccccucccccgaacccuaaugaucccccuccucccaaccccaaugacccgcccccucccaacgcuaaugacccucccccgccuaacgccaaugaucccgccccucccaacgcuaaugacccugcucccccgaacgccaaugauccugccccucccaacgcgaaugaccccgccccgcccaacgcuaacgauccucccccucccaauccuaacgaccccgccccgccuaaugcuaacgaucccccucccccgaauccuaacgaccccgccccuccccagggaaauaacaauccccaaccucagccgcggccccagccucagccccaaccucagccccagccucagccgcaaccccagccucagccccgcccucaaccccagccgcagccugggggaaacaauaacaauaaaaacaauaacaacgacgauagcuacauccccuccgcggagaagauucuggaguuugugaagcagaucagagacucuaucacggaagaguggagccaaugcaaugugaccugcggcuccgggauucggguccgcaaaagaaagggaagcaacaaaaaggccgaagaucugacacucgaggacaucgauaccgagauuuguaaaauggacaaguguucuuccaucuucaauauugugagcaacucucugggcuuuguuauccuucuggugcucgucuucuuuaauugaggacuaguuauaagacugacuagcccgaugggccucccaacgggcccuccuccccuccuugcaccgagauuaauaaaaaaaaaaaaaaaaaaaaaaaaaaaaaaaaaaaaaaaaaaaaaaaaaaaaaaaaaaaaaaaaugcaucccccccccccccccccccccccccccccccaaaggcucuuuucagagccaccagaauu

SEQ ID NO: 2006 - RNA, 1243 nt, Artificial Sequence
  mRNA Design i-3 (A64-N5-C30-hSL-N5) comprising derived and/or modified sequence from Pb(ANKA)__XP_022712148.1__HsIns-iso1_Pb-CSP(24-340) (opt5)
aggagaaagcuuaccauggcccuguggaugagacuccugccccuucuggcucuccuggcccuuuggggcccugacccggcggcugcccagaacaagagcauccaagcccagcggaaucugaacgagcucugcuacaaugaagggaacgauaauaaacuguaucacgugcugaacuccaagaauggaaaaauuuacaaccgcaauaccgucaacagacuccuggcugacgcccccgagggcaagaaaaaugaaaagaagaacgagaaaaucgaacggaauaacaaacuuaagcagccucccccucccccuaauccgaacgaucccccucccccuaaccccaaugacccgccucccccuaaccccaaugaucccccuccgcccaacccuaaugaucccccucccccgaacgcuaaugacccucccccucccaacgccaaugacccugcgcccccgaacgccaaugauccugcuccucccaacgccaaugaccccgcuccgcccaacgccaaugauccugcgcccccuaacgccaacgaucccccucccccgaauccuaacgaccccgcuccucccaaugccaacgacccgccucccccuaaucccaacgaccccgcuccuccgcaggggaauaacaauccccaaccucagccccgcccucagccccagccucaaccgcagccccagccucagccccaaccucagccccagccgagaccucaaccccagccccagccuggaggcaacaauaacaauaagaacaauaacaacgaugacucuuauauucccagcgccgagaaaauccuggaguucguuaagcagauucgggauuccaucacagaagaguggucucaauguaaugugacgugcgggagcggaauccgcgugagaaagcggaaaggcuccaacaagaaagccgaagaccucacccuggaggauauugacacagagaucuguaagauggauaaaugcucuagcauuuuuaauaucgucuccaacagccuuggcuucgugauucugcucguucugguguuuuucaauugaggacuaguuauaagacugacuagcccgaugggccucccaacgggcccuccuccccuccuugcaccgagauuaauaaaaaaaaaaaaaaaaaaaaaaaaaaaaaaaaaaaaaaaaaaaaaaaaaaaaaaaaaaaaaaaaugcaucccccccccccccccccccccccccccccccaaaggcucuuuucagagccaccagaauu

SEQ ID NO: 2007 - RNA, 1222 nt, Artificial Sequence
  mRNA Design i-3 (A64-N5-C30-hSL-N5) comprising derived and/or modified sequence from Pb(ANKA)__XP_022712148.1__HsSPARC_Pb-CSP(24-340) (opt5)
aggagaaagcuuaccaugagagccuggaucuucuuucugcucugccuggcuggccgggcccuugcgcagaacaagagcauucaagcucagcgcaaucugaacgagcucuguuacaaugaagggaacgacaauaaacuguaucacgugcuuaacuccaagaauggaaaaaucuacaacagaaauaccgucaaccggcugcucgccgaugcccccgagggcaagaaaaaugaaaagaagaacgagaaaauugaacgcaauaacaagcugaaacagccuccgcccccucccaauccuaacgacccucccccgcccaacccuaaugaucccccucccccgaacccuaaugaucccccuccucccaaccccaaugacccgcccccucccaacgcuaaugacccucccccgccuaacgccaaugaucccgcuccucccaacgccaaugacccugcgcccccgaacgccaaugauccugcuccucccaacgccaaugaccccgcuccgcccaacgccaacgauccucccccucccaauccuaacgaccccgcgccgccuaaugccaacgaucccccucccccgaauccuaacgaccccgcuccuccccaggggaauaacaauccccaaccucagccgagaccccagccucagccccaaccucagccccagccucagccgcaaccccagccucagccccggccucaaccccagccgcagccuggaggcaacaauaacaauaagaacaauaacaacgacgauucuuauauccccagcgccgagaaaauucuggaguucguuaagcagauccgcgacuccaucacagaagaguggucucaaugcaaugugacgugugggagcggaauuagagugcggaagcgcaaaggcuccaacaagaaagcugaagaucucacccuggaggacaucgauacagagauuugcaagauggacaaauguucuagcaucuuuaauauugucuccaacagccuuggcuucgugauccugcucguucugguguuuuucaauugaggacuaguuauaagacugacuagcccgaugggccucccaacgggcccuccuccccuccuugcaccgagauuaauaaaaaaaaaaaaaaaaaaaaaaaaaaaaaaaaaaaaaaaaaaaaaaaaaaaaaaaaaaaaaaaaugcaucccccccccccccccccccccccccccccccaaaggcucuuuucagagccaccagaauu

SEQ ID NO: 2008 - RNA, 1225 nt, Artificial Sequence
  mRNA Design i-3 (A64-N5-C30-hSL-N5) comprising derived and/or modified sequence from Pb(ANKA)__XP_022712148.1__IgE_Pb-CSP(24-340) (opt5)
aggagaaagcuuaccauggacuggaccuggauccuguuccucguggccgcugccacaagaguccacagccagaacaaguccauucaagcgcagcggaaucugaacgagcuuugcuacaaugaaggcaacgauaauaaacuguaucauguucucaacucuaagaaugggaaaaucuacaaccgcaauacggugaacagacugcuugcugacgcccccgagggaaagaaaaaugaaaagaagaacgagaaaauugaacggaauaacaagcugaaacagccuccgcccccucccaauccuaacgaucccccuccgcccaacccuaaugacccgccucccccgaacccuaaugaucccccuccucccaaccccaaugacccgcccccucccaacgccaaugauccucccccgccuaacgcuaaugaccccgccccucccaacgcuaaugauccugccccucccaacgcgaaugaccccgccccucccaacgcuaaugaucccgccccgcccaacgcuaacgacccucccccucccaauccuaacgaucccgccccgccuaaugcgaacgaucccccucccccgaauccuaacgaccccgccccuccccagggcaauaacaauccccaaccucagccgcgcccccagccucagccccaaccucagccccagccucagccgcaaccccagccucagcccagaccucaaccccagccgcagccugggggaaacaauaacaauaagaacaauaacaacgacgacagcuauauccccuccgcugagaaaauucucgaguuugugaagcagauccgggauucuaucaccgaagaguggagccaauguaaugucacaugcggcuccgggauucgcgugagaaagcggaaaggaucuaacaagaaagccgaagaccugacccuggaggauaucgacacagagauuuguaagauggauaaaugcagcuccaucuucaauauuguuagcaacucucucggcuuugugauccugcuuguccugguguucuuuaauugaggacuaguuauaagacugacuagcccgaugggccucccaacgggcccuccuccccuccuugcaccgagauuaauaaaaaaaaaaaaaaaaaaaaaaaaaaaaaaaaaaaaaaaaaaaaaaaaaaaaaaaaaaaaaaaaugcaucccccccccccccccccccccccccccccccaaaggcucuuuucagagccaccagaauu

SEQ ID NO: 2009 - RNA, 1411 nt, Artificial Sequence
  mRNA Design i-3 (A64-N5-C30-hSL-N5) comprising derived and/or modified sequence from Pf(3D7)__XP_001351122.1__Pf-CSP (opt6)
aggagaaagcuuaccaugaugagaaaacuugcaauacuaagcguaucuucauuccuauucguagaagcacuauuccaagaauaucaaugcuauggaucaagcuccaacacaagaguacuuaacgaacuaaauuacgacaaugcaggaacaaaccuauacaaugaacuugaaaugaauuacuacggcaaacaagaaaacugguacucccuaaaaaaaaacucaaggucauuaggagaaaacgacgacggaaacaacgaagacaacgaaaaacuacgaaaacccaaacacaaaaaauuaaaacaaccagcagacggaaaccccgacccaaacgcaaacccaaacgucgacccaaacgcaaacccgaacguagacccaaacgcgaacccaaacguagacccaaacgcaaacccaaacgcaaacccaaacgcaaacccaaacgcaaacccaaaugcaaacccaaacgcaaacccaaacgccaauccaaacgccaacccaaacgcaaacccaaacgcaaacccaaacgcaaacccaaacgcaaaccccaacgcaaacccaaacgcuaacccaaacgcaaacccuaaugcaaacccuaacgcaaacccaaacgucgacccgaacgcaaacccaaaugcaaacccaaacgcaaacccaaacgcaaaccccaacgccaacccaaaugcaaacccaaaugcaaauccaaacgcaaacccaaacgcaaacccuaacgcaaacccaaacgcaaaccccaacgcaaacccaaacgcaaacccaaacgccaacccaaacgcaaaccccaaugcaaacccaaacgcaaacccaaacgcaaacccaaacaaaaacaaucaaggcaacggacaaggacacaacaugcccaacgacccaaaccgaaacgucgacgaaaacgccaacgcaaacagcgcaguaaaaaacaacaacaacgaagaacccucagacaaacacauaaaagaauacuuaaacaaaauacaaaacucacuaucuacagaauggucacccuguagcguaaccugcggcaacggaauacaaguaagaauaaaaccaggcucagcaaacaaaccaaaagaugaacuagacuacgccaaugauauagaaaaaaaaauauguaaaauggaaaaauguagcucagucuucaacguagucaacucaucaauaggacuaauaaugguacucuccuuccucuuccuaaauuaaggacuaguuauaagacugacuagcccgaugggccucccaacgggcccuccuccccuccuugcaccgagauuaauaaaaaaaaaaaaaaaaaaaaaaaaaaaaaaaaaaaaaaaaaaaaaaaaaaaaaaaaaaaaaaaaugcaucccccccccccccccccccccccccccccccaaaggcucuuuucagagccaccagaauu

SEQ ID NO: 2010 - RNA, 1342 nt, Artificial Sequence
  mRNA Design i-3 (A64-N5-C30-hSL-N5) comprising derived and/or modified sequence from Pf(3D7)__XP_001351122.1__Pf-CSP(1-374) (opt6)
aggagaaagcuuaccaugaugagaaaacuagcaauauuaagcguaagcucauuccuauucguugaagcauuauuccaagaauaccaaugcuacggcucaagcucaaacacaagaguauuaaacgaauuaaacuacgacaaugcaggaaccaaccucuacaacgaacuagaaaugaauuauuacggcaaacaagaaaacugguacucacucaaaaaaaacucacgaucccuaggagaaaacgaugacggaaacaaugaagauaacgaaaaauuaagaaaaccaaaacacaaaaaauuaaaacaaccugcagacggaaacccagacccaaacgcaaauccaaauguagacccaaacgcaaaccccaacguagacccaaaugcaaacccaaacguagacccaaacgcaaacccaaaugcaaacccaaacgcaaacccaaacgcaaacccaaacgcaaaccccaacgcaaacccaaacgcaaacccaaacgccaaccccaacgcaaacccaaacgcaaacccgaaugcaaacccaaacgcaaacccaaacgcaaacccaaacgcaaacccaaacgcaaacccaaacgcaaacccaaaugcaaacccaaacguggauccaaacgcaaauccaaacgcaaacccaaacgcaaacccaaacgcaaaccccaacgcaaauccaaacgcaaaccccaaugcaaauccaaacgcaaacccaaacgccaacccaaacgcaaacccgaacgccaauccaaacgcaaacccaaacgcaaacccaaacgcaaacccaaacgccaacccaaacgcaaacccaaacgcaaacccaaacgcaaaccccaacaaaaacaaccaaggaaacggacaaggacacaacaugccaaacgauccaaacagaaacgucgacgaaaacgccaacgcuaacagcgcaguaaaaaacaauaacaacgaagaaccaucagacaaacauauaaaagaauacuuaaacaaaauccaaaacucacuaucaacagaauggucccccuguuccguaacaugcggaaacggaauacaaguacgaaucaaaccaggaucagccaacaaaccgaaagacgaacuagacuaugccaacgauauagaaaaaaaaauaugcaaaauggaaaaaugcugaggacuaguuauaagacugacuagcccgaugggccucccaacgggcccuccuccccuccuugcaccgagauuaauaaaaaaaaaaaaaaaaaaaaaaaaaaaaaaaaaaaaaaaaaaaaaaaaaaaaaaaaaaaaaaaaugcaucccccccccccccccccccccccccccccccaaaggcucuuuucagagccaccagaauu

SEQ ID NO: 2011 - RNA, 1195 nt, Artificial Sequence
  mRNA Design i-3 (A64-N5-C30-hSL-N5) comprising derived and/or modified sequence from Pf(3D7)__XP_001351122.1__Pf-CSP(1-325) (opt6)
aggagaaagcuuaccaugaugcgaaaauuagcaauacuaagcguaagcucauucuuauucguagaagcacucuuccaagaauaccaaugcuacggaucaagcucaaacacaagaguccuaaacgaauuaaacuaugacaacgcaggaacaaaccuauacaacgaacuagaaaugaacuacuacggaaaacaagaaaacugguacucacucaaaaaaaacagcagaagucuaggagaaaacgacgacggaaacaacgaagacaacgaaaaacuacgaaaaccaaaacacaaaaaacuaaaacaaccagcagacgggaacccagacccaaacgcaaacccaaacguagauccaaacgcaaacccaaauguagacccuaacgcaaacccaaauguagacccaaacgcaaacccuaacgcaaacccaaaugcaaacccaaacgcaaauccaaacgcaaacccaaacgcaaacccaaacgcgaacccaaacgcaaacccaaacgcaaacccaaaugcaaaccccaacgcaaauccaaaugcaaacccaaaugcaaauccaaacgcaaacccaaacgcaaacccaaaugcaaauccaaacgcaaauccaaacguggauccaaacgcaaacccaaacgcaaacccaaacgcaaacccaaacgcaaacccaaacgcaaacccaaacgcaaauccaaacgccaauccaaacgcaaauccaaaugcaaacccaaacgcaaacccaaacgcaaacccaaacgcaaacccaaacgcaaacccaaacgcaaacccaaacgcaaacccaaacgcaaacccaaacgcaaacccaaacgcaaacccaaacaaaaacaaccaaggaaacggacaaggacacaacaugccaaacgacccaaacagaaacguagacgaaaacgccaacgcaaauagcgcagucaaaaacaacaauaacgaagaaccaucggacaaacacauaaaagaauacuuaaacaaaauacaaaacugaggacuaguuauaagacugacuagcccgaugggccucccaacgggcccuccuccccuccuugcaccgagauuaauaaaaaaaaaaaaaaaaaaaaaaaaaaaaaaaaaaaaaaaaaaaaaaaaaaaaaaaaaaaaaaaaugcaucccccccccccccccccccccccccccccccaaaggcucuuuucagagccaccagaauu

SEQ ID NO: 2012 - RNA, 1411 nt, Artificial Sequence
  mRNA Design i-3 (A64-N5-C30-hSL-N5) comprising derived and/or modified sequence from Pf(3D7)__XP_001351122.1__HsALB_Pf-CSP(19-397) (opt6)
aggagaaagcuuaccaugaaaugggucacauuuauuucacuacuauucuuauucucaagcgcauacucacuauuucaagaauaccaaugcuacggcucauccucaaauacacgaguacuaaaugaacucaacuacgacaacgcaggaaccaaucucuacaacgaauuagaaaugaacuacuacggcaaacaagaaaacugguauucacuaaaaaaaaacaguagaucacuaggagaaaaugacgacggaaacaaugaagacaacgaaaaacuaagaaaaccaaaacacaaaaaauuaaaacaaccagcagacggaaacccagacccaaacgcaaacccuaacguagaucccaaugccaacccaaauguagacccaaacgcaaaccccaacgucgauccaaacgcaaacccaaacgcaaacccaaacgcaaacccaaacgcaaacccaaacgcaaacccaaaugcaaaccccaacgcaaacccaaacgcuaacccaaacgcaaacccaaacgcaaacccaaacgcaaacccaaacgcaaacccaaacgccaacccaaacgccaacccaaacgcaaauccaaacgcaaacccaaaugccaauccaaacguugacccaaacgcaaacccaaacgcaaaccccaacgcaaacccaaacgcaaauccaaacgcgaaccccaacgcaaacccaaacgcaaacccaaaugcaaacccaaacgcuaacccaaaugcaaacccaaacgccaacccaaacgccaacccaaacgcaaaccccaacgcaaacccaaacgcaaacccaaacgccaauccaaacgcaaacccaaaugcaaacccaaacaaaaacaaccaaggaaacggacaaggacacaacaugccaaacgaccccaacagaaacguagaugaaaaugcaaaugcuaacucagccguaaaaaacaauaacaacgaagaaccaucagacaaacacauaaaagaauaccuaaauaaaauacaaaauuccuuaucaacagaaugguccccaugcucaguaacuugcgguaacggcauacaaguaagaauaaaaccaggaucagcaaacaaaccaaaagacgaauuagacuaugcaaacgacauagaaaaaaaaauauguaaaauggaaaaaugcagcucaguauucaacguaguaaauuccucaaucggacucaucaugguauuaucauuccuauuuuuaaauuaaggacuaguuauaagacugacuagcccgaugggccucccaacgggcccuccuccccuccuugcaccgagauuaauaaaaaaaaaaaaaaaaaaaaaaaaaaaaaaaaaaaaaaaaaaaaaaaaaaaaaaaaaaaaaaaaugcaucccccccccccccccccccccccccccccccaaaggcucuuuucagagccaccagaauu

SEQ ID NO: 2013 - RNA, 1429 nt, Artificial Sequence
  mRNA Design i-3 (A64-N5-C30-hSL-N5) comprising derived and/or modified sequence from Pf(3D7)__XP_001351122.1__HsIns-iso1_Pf-CSP(19-397) (opt6)
aggagaaagcuuaccauggcacuauggaugagacuacuaccacuacuagcacuccuagccuuauggggacccgauccagccgcagcacucuuccaagaauaccaaugcuauggaucauccuccaacacaagaguccuaaacgaauuaaauuacgacaacgcuggaacaaaccuauacaaugaacuagaaaugaauuauuacggaaaacaagaaaauugguacucacuaaaaaaaaacucuagaagccuaggagaaaacgacgacggaaacaacgaagauaacgaaaaacuaagaaaaccaaaacacaaaaaauuaaaacaacccgcagacggcaacccagacccaaaugcaaauccaaacguagacccaaacgcaaauccaaacguagacccaaacgcaaacccaaauguagacccaaacgcaaauccaaacgcaaacccaaaugcaaacccaaaugcaaacccaaacgcaaauccaaacgcaaaucccaacgccaacccaaacgcaaacccaaacgcaaauccaaacgcaaacccaaacgcaaacccaaacgcaaacccaaacgcaaacccaaaugcaaacccaaaugccaauccaaacgccaacccaaacgcaaacccaaacguagacccaaacgcaaacccaaacgccaacccaaacgcaaaccccaaugcaaacccaaacgcaaacccaaacgcaaaccccaacgcaaauccaaacgcaaacccaaacgcaaauccaaacgcaaauccaaacgccaacccaaacgcaaacccaaacgcaaauccaaacgcaaaccccaacgcaaacccaaacgccaacccaaaugcaaacccaaacgcaaaucccaauaaaaacaaccaaggaaacggacaaggacacaacaugccaaacgauccaaacagaaacguagacgaaaacgcaaacgcaaacucagcagucaaaaacaauaacaacgaagaaccaucagacaaacacauaaaagaauaccuaaacaaaauacaaaacucacuauccacagaauggucaccaugcucaguaaccugcggaaacggaauacaaguaagaauaaaaccaggaucagccaacaaaccaaaagacgaacuagacuaugcuaaugacauagaaaaaaaaauaugcaaaauggaaaaaugcuccucaguauucaacgucguaaacucuucaauaggacuaauaaugguacuauccuucuuauuucuaaacuaaggacuaguuauaagacugacuagcccgaugggccucccaacgggcccuccuccccuccuugcaccgagauuaauaaaaaaaaaaaaaaaaaaaaaaaaaaaaaaaaaaaaaaaaaaaaaaaaaaaaaaaaaaaaaaaaugcaucccccccccccccccccccccccccccccccaaaggcucuuuucagagccaccagaauu

SEQ ID NO: 2014 - RNA, 1408 nt, Artificial Sequence
  mRNA Design i-3 (A64-N5-C30-hSL-N5) comprising derived and/or modified sequence from Pf(3D7)__XP_001351122.1__HsSPARC_Pf-CSP(19-397) (opt6)
aggagaaagcuuaccaugcgcgcauggauauucuuccuccuaugucuagcaggucgagcacuugcacucuuccaagaauaccaauguuacggauccucaagcaacacacgaguacuaaacgaacuaaacuacgauaacgcaggaaccaacuuauacaacgaacuagaaaugaacuacuacggcaaacaagaaaacugguacucacucaaaaaaaacagcagaagccuaggagaaaaugacgacggaaacaacgaagauaacgaaaaauuacgaaaacccaaacacaaaaaauuaaaacaacccgcagauggaaauccagacccgaacgcaaacccaaacguagacccaaacgcaaacccaaacguugacccaaacgcaaacccaaacguagacccaaacgcaaacccuaacgccaacccaaacgcaaacccaaacgcaaacccaaaugcgaacccaaaugcaaacccaaacgccaacccaaaugcaaaccccaacgcaaauccaaacgcaaacccaaaugcaaacccaaacgcaaacccaaacgcaaacccaaacgcaaacccaaacgccaaccccaaugcaaacccaaacgcaaacccaaacgucgacccaaacgcaaacccaaacgcaaacccaaacgcaaauccaaacgcaaauccaaacgcaaacccuaacgcaaacccaaacgcaaacccaaaugcaaauccaaacgcaaacccaaacgcaaacccaaacgcaaauccaaacgcaaacccaaacgcaaacccaaacgcaaacccuaaugcaaacccaaaugcaaauccaaacgcaaacccaaaugcaaaccccaacaaaaacaaccaaggaaacggacaaggacacaauaugccaaacgacccaaacagaaacguagacgaaaacgcaaacgccaacagcgcaguaaaaaacaacaacaacgaagaaccaucagacaaacacauaaaagaauaccuaaacaaaauacaaaacucacuaucaacagaauggucucccugcuccguaacaugcggaaacggcauacaaguacgaauaaaaccuggaucagccaacaaaccaaaagacgaacuagacuaugcaaaugacauagaaaaaaaaauaugcaaaauggaaaaaugcaguucagucuucaacguagucaacagcucaauaggccuaauaaugguacucucauuccuauucuuaaacuaaggacuaguuauaagacugacuagcccgaugggccucccaacgggcccuccuccccuccuugcaccgagauuaauaaaaaaaaaaaaaaaaaaaaaaaaaaaaaaaaaaaaaaaaaaaaaaaaaaaaaaaaaaaaaaaaugcaucccccccccccccccccccccccccccccccaaaggcucuuuucagagccaccagaauu

SEQ ID NO: 2015 - RNA, 1411 nt, Artificial Sequence
  mRNA Design i-3 (A64-N5-C30-hSL-N5) comprising derived and/or modified sequence from Pf(3D7)__XP_001351122.1__IgE_Pf-CSP(19-397) (opt6)
aggagaaagcuuaccauggauuggacauggauucucuuccucguagcagcagccacaagaguacacucuuuauuucaagaauaccaaugcuacggaucaagcucaaacacacgcguacuaaacgaacuaaacuacgacaacgcaggaacaaacuuauacaacgaacuagaaaugaacuauuauggcaaacaagaaaacugguacucacuaaaaaaaaacuccagaagcuuaggagaaaacgacgacggaaacaacgaagacaacgaaaaacuacgcaaaccuaaacacaaaaaacuaaaacaaccugcagacggaaacccagacccaaacgcgaacccaaacguagauccaaacgcaaacccaaacguagaucccaacgcaaacccgaacguagacccuaacgcaaauccaaacgcaaaccccaacgcaaacccgaacgcaaacccaaacgcaaacccaaacgcaaacccaaacgcaaacccaaacgcaaacccaaacgccaacccaaacgcaaauccaaacgcuaacccaaaugcaaacccuaacgcaaacccaaacgccaacccaaacgcaaacccaaacgcaaacccaaacgcaaaucccaauguagacccaaacgcaaacccaaacgcaaacccaaacgcuaacccaaaugcaaacccaaacgcaaacccaaacgcaaacccaaacgcuaaccccaacgcaaacccgaacgcaaacccaaaugcaaacccaaacgcaaacccaaaugcaaacccaaacgcaaacccaaacgcaaaccccaaugccaacccaaacgcaaauccaaaugccaauccaaacgcaaacccaaacaaaaacaaccaaggaaauggacaaggacauaacaugccaaacgaccccaaccgaaauguagacgaaaacgccaacgcaaauagugcagucaaaaacaauaacaaugaagaacccucagauaaacauauaaaagaauacuuaaacaaaauacaaaacucacuaucaaccgaguggucuccuugcucaguaacauguggaaacggaauacaaguacgaauaaaaccaggaucagcaaacaaaccgaaagacgaacuagacuacgccaacgacauagaaaagaaaauauguaaaauggagaaauguaguucaguauucaacgugguaaacagcucaauaggccuaauaaugguacucucuuuccuauuccuaaacuaaggacuaguuauaagacugacuagcccgaugggccucccaacgggcccuccuccccuccuugcaccgagauuaauaaaaaaaaaaaaaaaaaaaaaaaaaaaaaaaaaaaaaaaaaaaaaaaaaaaaaaaaaaaaaaaaugcaucccccccccccccccccccccccccccccccaaaggcucuuuucagagccaccagaauu

SEQ ID NO: 2016 - RNA, 1576 nt, Artificial Sequence
  mRNA Design i-3 (A64-N5-C30-hSL-N5) comprising derived and/or modified sequence from Pf(3D7)__XP_001351122.1__Pf-CSP_L(G4SG4)_TM domain HA (opt6)
aggagaaagcuuaccaugaugcguaaacuagcaauacuaucugucaguucauucuuauucguagaagcacuauuccaagaauaccaauguuacggaucuucaucaaacacaagaguacucaacgaauuaaacuacgauaacgcuggaaccaauuuauacaacgaacuagaaaugaacuacuauggaaaacaagaaaacugguauucacuaaaaaaaaacagcagaaguuuaggagaaaaugacgacggaaacaaugaagacaaugaaaaauuacgaaaaccaaaacacaaaaaauuaaaacaacccgccgacggaaauccagacccaaacgcaaacccaaauguagacccaaacgcaaacccaaauguagaucccaacgcaaacccaaacguagaucccaaugcaaacccaaacgcaaacccaaaugcaaaccccaacgcaaacccaaaugcaaacccuaacgcaaacccgaacgcaaacccaaacgcaaaucccaaugcaaaccccaacgcaaauccaaaugcaaacccuaacgcaaauccgaacgcaaauccaaacgcaaacccaaacgcaaacccaaacgcaaacccaaacgcaaacccaaacgucgacccaaacgccaauccaaacgcaaaccccaaugcaaacccaaaugcaaacccaaacgcaaacccaaaugccaacccaaacgcaaacccaaacgcaaacccaaacgcaaacccaaacgcaaacccaaaugcaaacccaaaugcaaacccaaacgccaacccaaacgcaaacccaaacgcaaacccaaacgccaacccaaacgcaaacccuaacgcaaauccaaacaaaaacaaccaagggaacggacaaggacacaacaugccaaacgacccaaacagaaacguagacgaaaacgccaacgcaaacucagcugucaaaaacaauaacaacgaagaacccuccgauaaacacauaaaagaauaccuaaacaaaauccaaaacucccuuucuacagaauggucacccugcucaguaacaugcggcaacggcauacaaguuagaaucaaaccaggaucagcaaauaaaccaaaagacgaauuagacuaugccaacgacauagaaaaaaaaauauguaaaauggaaaaaugcucaucaguuuucaacguaguaaacagcucaaucggauuaauaaugguacuaucauucuuauuuuuaaacggaggaggaggcuccggcggagguggaaaacuagaaucaacuagaauauaccaaauauuagcaauauacucaacaguagcaucaucacucguauuaguaguaucgcuaggagcaauaaguuucuggaugugcucuaacggaagccuacaaugccgaauaugcauauaaggacuaguuauaagacugacuagcccgaugggccucccaacgggcccuccuccccuccuugcaccgagauuaauaaaaaaaaaaaaaaaaaaaaaaaaaaaaaaaaaaaaaaaaaaaaaaaaaaaaaaaaaaaaaaaaugcaucccccccccccccccccccccccccccccccaaaggcucuuuucagagccaccagaauu

SEQ ID NO: 2017 - RNA, 1450 nt, Artificial Sequence
  mRNA Design i-3 (A64-N5-C30-hSL-N5) comprising derived and/or modified sequence from Pf(3D7)__XP_001351122.1__Pf-CSP(199-377)_L(PVTN)_HBsAg (opt6)
aggagaaagcuuaccauggacccaaacgccaaccccaacgcaaacccaaaugcaaacccaaacgcuaaccccaacgcaaacccaaacgcuaacccuaacgcaaauccaaacgcaaaucccaacgcaaauccaaacgcaaacccaaacgcaaacccaaaugccaacccaaacgcaaacccuaacgcaaaucccaacgcaaauccaaaugcaaaccccaaugcaaacccaaacgcaaauccaaacaaaaauaaucaaggaaauggacaaggacauaacaugccaaacgacccuaaccgaaacgucgacgaaaaugcaaacgcaaacuccgcaguaaaaaacaacaacaacgaagaaccuuccgacaaacacauaaaagaauaccuaaacaaaauacaaaacucucuauccacugaauggucaccaugcucaguaaccugcggaaauggcauacaaguaagaauaaaaccaggaucugcaaauaaaccuaaagacgaacuagauuacgcaaaugacauagaaaaaaaaauaugcaaaauggaaaaaugcucaucagucccaguaacaaacauggaaaacaucacaucaggauucuuaggaccacuacucguauuacaagcaggauucuuucuuuuaacaagaauauuaacaauaccacaaucccuagacucaugguggacaucauuaaacuuccuagguggaucaccagucugccucggacaaaacucacaaucaccaacaucaaaccacucaccaacauccugcccaccaauuuguccaggauacagauggaugugccuacgaagauucauaauauucuuauuuauauuacuacuaugucucauauuuuuacucguacuauuagacuaucagggcauguuacccguauguccacuaauaccaggcucaaccaccacaaacacagguccaugcaaaaccugcaccacaccagcacaaggaaacuccauguuucccucauguugcugcaccaaacccaccgauggaaacugcaccugcauaccaaucccaucuucaugggcauucgcaaaauaucuaugggaaugggcauccguaagauuuucauggcuaucacuauuaguaccauucguacaaugguucguaggauuaucaccaacaguaugguuaucagcaauauggaugaugugguacuggggaccaucacuauacucaauaguauccccuuucauaccauuacucccaauauuuuucugccuuuggguauacauauaaggacuaguuauaagacugacuagcccgaugggccucccaacgggcccuccuccccuccuugcaccgagauuaauaaaaaaaaaaaaaaaaaaaaaaaaaaaaaaaaaaaaaaaaaaaaaaaaaaaaaaaaaaaaaaaaugcaucccccccccccccccccccccccccccccccaaaggcucuuuucagagccaccagaauu

SEQ ID NO: 2018 - RNA, 1492 nt, Artificial Sequence
  mRNA Design i-3 (A64-N5-C30-hSL-N5) comprising derived and/or modified sequence from Pf(3D7)__XP_001351122.1__Pf-CSP(199-387)_L(PVTN)_HBsAg (opt6)
aggagaaagcuuaccaugauggcaccagauccaaacgcaaacccaaacgcaaacccaaacgcaaauccaaaugcaaacccaaacgcaaaucccaaugcaaacccuaacgcaaacccaaacgccaacccaaaugccaacccaaacgcaaacccaaacgcaaauccaaacgcaaacccaaacgcuaacccaaaugcaaaccccaacgcaaauccaaacgcaaacccaaacgcaaauccaaacgcuaacccaaacaaaaauaaccaaggaaacggacaaggacacaauaugccaaaugacccaaauagaaacguagacgaaaacgcaaacgcaaauucagcagucaaaaacaauaacaacgaagaaccauccgauaaacacauaaaagaauacuuaaacaaaauccaaaacucacuaucaacugaauggucaccuuguucaguaacauguggcaacggaauacaaguaagaauaaaaccagguucagccaacaaaccuaaagacgaacuagacuacgcaaacgacauagaaaaaaaaaucugcaaaauggaaaaaugcucaucaguauuuaauguaguaaacucaucaauaggacuaggcccuguaacaaacauggaaaacauaaccucaggauucuuaggcccacuacuaguacuccaagcaggauucuuucuucuaacaagaauauuaaccauuccucaaucauuagacucaugguggacaucccuuaacuuucuaggaggaagccccguaugcuuaggacaaaacagccaauccccaacauccaaccacuccccaacaucaugccccccaauaugcccaggauacagauggaugugccuaagaagauucaucauauuccuauuuauucucuuacucugcuuaauauucuuacucguauuacucgacuaccaaggaauguuaccaguaugcccacuaauaccaggauccacaacaacaaacacgggaccaugcaaaacaugcacaacaccugcccaaggaaauuccauguucccaucaugcugcugcacaaaaccaaccgacggcaacugcacaugcauaccaauaccaucaagcugggccuucgcaaaauaccuaugggaaugggcaucagugagauucucauggcucucauuacuagucccauucguacaaugguuuguaggauuaucaccaacaguuuggcucagcgcaauauggaugaugugguacuggggccccucuuuauauucaauaguauccccauuuauaccacuacucccaauauucuucuguuuauggguauacauauaaggacuaguuauaagacugacuagcccgaugggccucccaacgggcccuccuccccuccuugcaccgagauuaauaaaaaaaaaaaaaaaaaaaaaaaaaaaaaaaaaaaaaaaaaaaaaaaaaaaaaaaaaaaaaaaaugcaucccccccccccccccccccccccccccccccaaaggcucuuuucagagccaccagaauu

SEQ ID NO: 2019 - RNA, 676 nt, Artificial Sequence
  mRNA Design i-3 (A64-N5-C30-hSL-N5) comprising derived and/or modified sequence from Pf(3D7)__XP_001351122.1__HsALB_Pf-CSP(19-152) (opt6)
aggagaaagcuuaccaugaaauggguaacauucauaucacuacuauuccuauucuccagcgcauacucacuauuccaagaauaccaaugcuacggaucaagcucaaacacacgaguacuaaacgaacuaaacuacgacaacgcaggaaccaaccuauacaacgaacuagaaaugaacuacuacggaaaacaagaaaacugguacucacuaaaaaaaaacagcagaucacuaggagaaaacgacgacggaaacaacgaagacaacgaaaaacuaagaaaaccaaaacacaaaaaacuaaaacaacccgcagacggaaacccagacccaaacgcaaacccaaacguagacccaaaugcaaacccaaacguagacccaaacgcaaacccaaacguagacccaaacgcaaacccaaacgcaaacccaaacgcaaacccaaacgcaaacccaaacgcaaacccaaacgcaaacccauaaggacuaguuauaagacugacuagcccgaugggccucccaacgggcccuccuccccuccuugcaccgagauuaauaaaaaaaaaaaaaaaaaaaaaaaaaaaaaaaaaaaaaaaaaaaaaaaaaaaaaaaaaaaaaaaaugcaucccccccccccccccccccccccccccccccaaaggcucuuuucagagccaccagaauu

SEQ ID NO: 2020 - RNA, 796 nt, Artificial Sequence
  mRNA Design i-3 (A64-N5-C30-hSL-N5) comprising derived and/or modified sequence from Pf(3D7)__XP_001351122.1__HsALB_Pf-CSP(19-192) (opt6)
aggagaaagcuuaccaugaaauggguaacauucaucucacuacuauucuuauucucaucagcauacucacuauuccaagaauaccaaugcuacggaucaucaucaaacacacgaguacucaacgaacuaaacuacgacaacgcaggaacaaaccuauacaacgaacuagaaaugaacuacuacggaaaacaagaaaacugguauucacuaaaaaaaaacucaagaucacuaggagaaaacgacgacggaaacaacgaagacaacgaaaaacuaagaaaaccaaaacacaaaaaacuaaaacaaccagcagacggaaacccagacccaaacgcaaacccaaacguagacccaaacgccaacccaaacguagacccaaacgcaaacccaaacguagacccaaacgcaaacccaaacgcaaacccaaacgcaaacccaaacgcaaacccaaacgcaaacccaaacgcaaacccaaacgcaaacccaaacgcaaacccaaacgcaaacccaaacgcaaacccaaacgcaaacccaaacgcaaauccaaacgcaaacccaaacgcaaacccaaacgcaaacccaaacgcaaaccccuaaggacuaguuauaagacugacuagcccgaugggccucccaacgggcccuccuccccuccuugcaccgagauuaauaaaaaaaaaaaaaaaaaaaaaaaaaaaaaaaaaaaaaaaaaaaaaaaaaaaaaaaaaaaaaaaaugcaucccccccccccccccccccccccccccccccaaaggcucuuuucagagccaccagaauu

SEQ ID NO: 2021 - RNA, 1036 nt, Artificial Sequence
  mRNA Design i-3 (A64-N5-C30-hSL-N5) comprising derived and/or modified sequence from Pf(3D7)__XP_001351122.1__HsALB_Pf-CSP(19-272) (opt6)
aggagaaagcuuaccaugaaauggguaacauucauaucacuacuauuccuauucucaagcgcauauucacuauuccaagaauaccaaugcuacggaucaagcucaaacacaagaguacuuaacgaacuaaacuacgacaacgcaggaacaaaccuauacaacgaacuugaaaugaacuacuacggaaaacaagaaaacugguacucacuaaaaaaaaauagcagaagcuuaggagaaaacgacgacggaaacaacgaagacaacgaaaaauuaagaaaaccuaaacacaaaaaacuaaaacaacccgcagacggaaacccagacccuaacgccaacccaaauguagacccaaacgcaaacccaaacguagacccaaacgcaaaccccaacguagacccaaacgcaaacccaaacgcaaacccaaacgcaaacccaaacgcaaaccccaacgcaaacccaaacgcaaacccaaacgcaaacccaaacgcaaacccaaacgcaaacccaaacgcaaacccaaacgcaaacccaaacgcaaacccaaacgcgaacccaaacgcaaacccaaacgcaaacccaaacgcaaacccaaacgcaaacccaaacguagacccaaaugcaaaccccaacgcaaacccaaacgcaaacccaaaugcaaaccccaacgcaaacccaaacgcaaacccaaacgcaaacccaaacgcaaacccaaaugcaaacccaaacgcaaacccaaacgccaacccaaacgcaaacccaaacgcaaacccaaacgcaaacccaaacgcaaacccgaacgcaaacccaaacgcaaacccaaacgcaaacccauaaggacuaguuauaagacugacuagcccgaugggccucccaacgggcccuccuccccuccuugcaccgagauuaauaaaaaaaaaaaaaaaaaaaaaaaaaaaaaaaaaaaaaaaaaaaaaaaaaaaaaaaaaaaaaaaaugcaucccccccccccccccccccccccccccccccaaaggcucuuuucagagccaccagaauu

SEQ ID NO: 2022 - RNA, 1198 nt, Artificial Sequence
  mRNA Design i-3 (A64-N5-C30-hSL-N5) comprising derived and/or modified sequence from Pf(3D7)__XP_001351122.1__HsALB_Pf-CSP(19-272)_L(AAY)_Pf-CSP(310-3 27)_L(AAY)_Pf-CSP(346-375) (opt6)
aggagaaagcuuaccaugaaauggguaacauuuauaucacuccuauuccuuuuuucgucagcauacucacuauuccaagaauaucaaugcuacggaucaagcuccaacacaagaguacuaaacgaacuaaacuacgacaacgcaggaacaaaccuauacaacgaacuagaaaugaacuacuacggaaaacaagaaaacugguacucacuaaaaaaaaacagccgaagcuuaggagaaaaugacgacggaaacaacgaagacaacgaaaaauuacgcaaacccaaacacaaaaaacugaaacaaccagcagacggaaacccagacccaaacgcaaacccaaacguagacccaaacgcaaacccaaacguagacccaaacgcaaacccaaacguagacccaaacgcaaacccaaacgcgaacccaaacgccaacccaaacgcaaacccaaacgcaaacccaaacgcaaacccaaacgcaaacccaaacgcaaacccaaacgccaacccgaacgcaaacccaaacgcaaacccaaacgcaaauccaaacgcaaacccaaacgcaaacccaaacgccaacccaaacgcaaacccaaacgcaaacccaaauguggacccaaacgcaaacccaaacgcaaacccaaacgcaaacccaaaugcaaacccaaacgcaaacccaaacgcaaacccaaacgcaaacccaaacgcaaacccaaaugcaaacccaaacgcaaauccaaacgcaaacccaaacgcaaacccaaacgcaaacccaaacgcaaacccuaacgcaaacccaaacgcaaacccaaacgccaaccccaaugcaaacccagcagcauacgaaccaucagacaaacacauaaaagaauaccuaaacaaaauacaaaacucacucgcagcauauauaaagccaggaagcgccaacaaaccaaaagacgaacuagauuacgcaaacgacauagaaaaaaaaaucuguaaaauggaaaaaugcucauaaggacuaguuauaagacugacuagcccgaugggccucccaacgggcccuccuccccuccuugcaccgagauuaauaaaaaaaaaaaaaaaaaaaaaaaaaaaaaaaaaaaaaaaaaaaaaaaaaaaaaaaaaaaaaaaaugcaucccccccccccccccccccccccccccccccaaaggcucuuuucagagccaccagaauu

SEQ ID NO: 2023 - RNA, 1159 nt, Artificial Sequence
  mRNA Design i-3 (A64-N5-C30-hSL-N5) comprising derived and/or modified sequence from Pf(3D7)__XP_001351122.1__HsALB_Pf-CSP(19-272)_L(AAY)_Pf-CSP(346-3 65)_L(AAY)_P2 (opt6)
aggagaaagcuuaccaugaaauggguaacauucauaucacuauuauuccuuuucucaucagcuuacucacuauuccaagaauaccaaugcuacggaucauccucaaacacaagaguacuaaacgaacuaaacuacgacaacgccggaaccaaccuauacaacgaacucgaaaugaacuacuacggaaaacaagaaaacugguacucacuaaaaaaaaacagccgaucccuaggagaaaacgacgacggaaauaacgaagacaaugaaaaauuaagaaaaccaaaacacaaaaaacuaaaacaaccagcagacggaaacccagacccaaacgcaaacccaaacguagauccaaacgcaaacccaaacguagacccaaacgcaaacccaaacguagacccaaacgcuaacccaaacgcaaacccaaacgcaaacccaaacgcaaacccaaacgcaaacccaaacgcaaacccgaacgcaaaccccaacgcaaacccaaacgcaaacccaaacgcaaaccccaacgcaaacccaaacgcaaacccgaacgcaaacccaaacgcaaacccaaacgcaaacccaaacgcaaacccaaacgcaaacccaaacguagacccaaacgccaacccaaacgcaaacccaaacgcaaacccaaacgcaaacccaaacgcaaacccaaacgcaaacccaaacgcaaacccaaacgcaaacccaaacgcaaacccaaacgcaaaccccaacgcaaacccaaaugcaaacccaaacgcaaacccaaaugcaaaccccaacgcaaacccaaaugccaauccaaacgcaaacccaaacgcaaacccagccgcauacauaaaaccaggauccgcaaacaaaccaaaagacgaacuagacuacgcaaacgacauagaagcagcauaccaauauauaaaagccaacuccaaauucauagguauaacagaacucuaaggacuaguuauaagacugacuagcccgaugggccucccaacgggcccuccuccccuccuugcaccgagauuaauaaaaaaaaaaaaaaaaaaaaaaaaaaaaaaaaaaaaaaaaaaaaaaaaaaaaaaaaaaaaaaaaugcaucccccccccccccccccccccccccccccccaaaggcucuuuucagagccaccagaauu

SEQ ID NO: 2024 - RNA, 1153 nt, Artificial Sequence
  mRNA Design i-3 (A64-N5-C30-hSL-N5) comprising derived and/or modified sequence from Pf(3D7)__XP_001351122.1__HsALB_Pf-CSP(19-272)_L(AAY)_Pf-CSP(346-3 65)_L(AAY)_PADRE (opt6)
aggagaaagcuuaccaugaaauggguaaccuucauaucacuacuauucuuauucucaucagcauacucacucuuccaagaauaccaaugcuacggcucaagcucaaacacaagaguacuaaacgaauuaaacuaugacaacgccggaacaaaccuauacaaugaauuagaaaugaacuacuacggcaaacaagaaaacugguacucacucaaaaaaaacuccagaaguuuaggagaaaaugacgacggaaacaaugaagacaaugaaaaauuacgaaaaccaaaacacaaaaaacuaaaacaacccgccgacggaaaccccgacccgaacgcaaacccaaacguagacccaaacgcaaacccaaacguagacccaaaugcaaacccaaacguagacccaaacgcaaacccaaacgcaaacccaaacgcaaauccaaacgcaaacccaaaugcaaacccaaaugcaaauccaaacgcaaaccccaacgcaaacccaaacgcaaacccaaaugcaaauccaaacgccaacccaaaugcaaacccaaacgcaaauccaaacgcaaacccaaacgcaaauccaaacgcaaacccaaaugcaaacccaaacguagauccaaacgcaaacccaaacgccaacccaaacgcaaacccgaacgcaaacccaaacgcaaacccaaacgccaacccaaacgccaacccaaacgccaacccaaacgcaaacccaaacgcaaacccaaacgcaaacccaaacgcaaacccaaaugcaaacccuaacgcaaacccaaacgcaaacccaaacgcaaacccaaacgccaacccaaacgcaaauccagcagcauacauaaaaccaggaucagcaaacaaaccaaaagaugaacuagacuacgcaaaugacaucgaagcagccuacgcuaaauucguagcagccuggacacuaaaagcagcagccuaaggacuaguuauaagacugacuagcccgaugggccucccaacgggcccuccuccccuccuugcaccgagauuaauaaaaaaaaaaaaaaaaaaaaaaaaaaaaaaaaaaaaaaaaaaaaaaaaaaaaaaaaaaaaaaaaugcaucccccccccccccccccccccccccccccccaaaggcucuuuucagagccaccagaauu

SEQ ID NO: 2025 - RNA, 1210 nt, Artificial Sequence
  mRNA Design i-3 (A64-N5-C30-hSL-N5) comprising derived and/or modified sequence from Pf(3D7)__XP_001351122.1__HsALB_Pf-CSP(19-272)_L(G4S)_Pf-CSP(310-3 27)_L(G4S)_Pf-CSP(346-375) (opt6)
aggagaaagcuuaccaugaaauggguaaccuucaucucacuacuauuccuauucucaagcgcauacucacucuuucaagaauaccaaugcuacggcucaagcucaaacacacgaguacuaaacgaacuaaacuacgacaacgcaggaacaaaccuauauaacgaacucgaaaugaacuacuacggcaaacaagaaaauugguacucacuaaaaaaaaacagcagaagcuuaggagaaaacgacgacggaaacaacgaagauaacgaaaaacuaagaaaaccaaaacacaaaaaacuaaaacaacccgcagacggaaacccagacccaaacgcaaauccaaauguagacccgaacgcaaacccaaacguagacccaaaugcgaacccaaacgucgacccaaacgcaaacccaaaugcaaacccaaaugcgaacccaaacgcaaacccaaacgcaaauccaaacgcaaauccaaaugcaaacccaaacgcgaauccaaacgcaaacccaaacgcaaacccaaacgcaaacccaaacgcaaacccaaacgcaaacccaaacgcaaacccgaacgcuaacccaaacgcaaacccaaacgcaaacccaaacguagauccaaacgcgaacccaaacgcaaacccaaaugcaaacccaaacgcaaacccaaacgcaaacccaaacgcaaacccaaacgcaaacccaaacgcaaacccaaacgcgaacccaaacgcaaauccaaaugcaaacccaaacgcaaacccaaacgcaaacccaaacgcaaacccaaaugcaaacccaaacgcaaacccaaaugcaaacccaaacgcaaacccaggaggaggaggaucagaacccucagacaaacacauaaaagaauaccuaaacaaaauacaaaacucacuaggaggaggaggaucgaucaaaccaggaagcgcaaacaaaccaaaagacgaacucgacuacgcaaacgauauagaaaaaaaaauaugcaaaauggaaaaaugcucguaaggacuaguuauaagacugacuagcccgaugggccucccaacgggcccuccuccccuccuugcaccgagauuaauaaaaaaaaaaaaaaaaaaaaaaaaaaaaaaaaaaaaaaaaaaaaaaaaaaaaaaaaaaaaaaaaugcaucccccccccccccccccccccccccccccccaaaggcucuuuucagagccaccagaauu

SEQ ID NO: 2026 - RNA, 1195 nt, Artificial Sequence
  mRNA Design i-3 (A64-N5-C30-hSL-N5) comprising derived and/or modified sequence from Pf(3D7)__XP_001351122.1__HsALB_Pf-CSP(19-272)_L(G4S)_Pf-CSP(310-3 27)_Pf-CSP(346-375) (opt6)
aggagaaagcuuaccaugaaauggguaacauucauaucacuccuauuccuauucuccucagcauacucccucuuccaagaauaccaaugcuacggcucaagcucaaacacacgaguacuaaacgaacuaaauuacgacaacgccggaacaaaccuauauaaugaacuagaaaugaauuacuacggaaaacaagaaaacugguacucacuuaaaaaaaacucaagaucauuaggagaaaacgacgacggcaacaacgaagacaacgaaaaacuaagaaaaccaaaacacaaaaaacuaaaacaacccgcagacggaaauccagauccaaacgcaaacccaaacguagacccaaacgcaaacccaaacguagacccaaacgcaaacccaaacgucgacccaaacgccaacccaaacgcaaacccaaacgcaaacccaaacgcaaacccaaacgccaacccaaacgcaaacccaaacgcaaacccaaacgcaaacccaaacgcaaacccaaacgcaaacccaaacgcaaacccgaacgcaaacccaaacgcaaauccuaacgcaaacccaaacgcaaacccaaacgcaaauccgaacgcaaacccaaacguagacccaaacgcaaacccaaacgcaaacccaaacgcaaacccaaacgcaaacccaaacgcaaacccuaacgcaaacccaaaugcaaacccaaacgcgaacccaaaugcaaacccaaaugcaaacccaaacgcaaacccaaacgcaaacccaaacgcaaauccaaacgcaaauccaaacgcaaacccaaacgcaaacccaaacgcaaacccaaacgccaacccaggaggagguggaagcgaaccauccgacaaacacauaaaagaauaccuaaacaaaauacaaaacucacuaauaaaacccggcucagcaaacaaaccaaaagacgaacuagacuacgccaacgacauagaaaaaaaaauauguaaaauggaaaaaugcucauaaggacuaguuauaagacugacuagcccgaugggccucccaacgggcccuccuccccuccuugcaccgagauuaauaaaaaaaaaaaaaaaaaaaaaaaaaaaaaaaaaaaaaaaaaaaaaaaaaaaaaaaaaaaaaaaaugcaucccccccccccccccccccccccccccccccaaaggcucuuuucagagccaccagaauu

SEQ ID NO: 2027 - RNA, 1195 nt, Artificial Sequence
  mRNA Design i-3 (A64-N5-C30-hSL-N5) comprising derived and/or modified sequence from Pf(3D7)__XP_001351122.1__HsALB_Pf-CSP(19-325) (opt6)
aggagaaagcuuaccaugaaauggguaacauucauaucacuccuauuccuauucucaagcgcauacucauuauuccaagaauaccaaugcuacggaucaucaucuaacacaagaguacucaacgaacuaaacuacgacaacgcaggaacuaaucucuacaacgaacuagaaaugaacuacuacggaaaacaagaaaacugguauucacuaaaaaaaaacagccgaucauuaggagaaaacgacgacggcaacaacgaagacaacgaaaaacuacgaaaaccaaaacacaaaaaauuaaaacagccagccgacggaaacccagacccaaacgcaaacccaaacguagacccaaacgcaaacccaaacguagacccaaacgcaaacccaaacguagacccaaacgcaaacccaaacgcaaacccaaacgcaaauccaaacgcaaacccaaacgccaacccaaacgcaaacccaaacgcaaaccccaacgcaaacccaaacgcaaacccaaacgcaaacccaaaugccaacccaaacgcaaacccaaacgcaaacccaaacgcaaacccaaacgcaaacccaaaugcaaacccaaacgcaaacccaaacguagacccaaacgcaaacccaaaugcaaacccaaacgcaaaccccaacgcaaacccaaacgcaaacccaaacgcaaacccaaacgcaaacccaaacgccaacccaaacgcaaacccaaacgcaaacccaaacgcaaacccaaacgcaaacccaaacgcaaauccaaacgcaaacccaaacgcaaacccaaacgcaaacccaaacgcaaacccaaacgcaaacccaaauaaaaacaaucaaggaaacggacaaggacacaacaugccaaacgauccaaaucgcaacguagacgaaaacgcaaacgcaaacagcgcagucaaaaacaacaacaacgaagaaccaucagacaaacacauaaaagaauaccuaaauaaaauacaaaacuagggacuaguuauaagacugacuagcccgaugggccucccaacgggcccuccuccccuccuugcaccgagauuaauaaaaaaaaaaaaaaaaaaaaaaaaaaaaaaaaaaaaaaaaaaaaaaaaaaaaaaaaaaaaaaaaugcaucccccccccccccccccccccccccccccccaaaggcucuuuucagagccaccagaauu

SEQ ID NO: 2028 - RNA, 1372 nt, Artificial Sequence
  mRNA Design i-3 (A64-N5-C30-hSL-N5) comprising derived and/or modified sequence from Pf(3D7)__XP_001351122.1__HsALB_Pf-CSP(19-384) (opt6)
aggagaaagcuuaccaugaaauggguaaccuuuauaucacucuuauuccuauuuucaucagcauacucacucuuccaagaauaucaaugcuacggaucaucaucaaacacaagaguccucaaugaauuaaacuaugacaaugcaggaaccaaccuauacaacgaauuagaaaugaacuacuacggcaaacaagaaaacugguacucacucaaaaaaaacucaagauccuuaggagaaaaugaugacggaaacaacgaagacaacgaaaaacuccgaaaaccaaaacacaaaaaacuaaaacaacccgccgacggaaacccagaccccaacgcaaacccaaauguagaccccaacgcaaacccaaacguagacccaaacgcaaacccaaacguagacccaaacgcaaauccaaacgccaacccaaacgcaaacccaaacgccaacccaaacgcaaacccaaacgcaaacccaaacgcaaacccaaacgcaaacccaaaugcaaacccaaaugcaaacccaaacgcaaacccaaacgcaaacccaaacgcaaacccaaacgcaaacccaaaugcaaacccaaacgcaaacccaaacgcaaacccaaacguagacccaaaugcaaacccaaacgcaaacccaaacgcaaauccaaaugcaaauccaaacgcaaauccaaacgcaaacccaaacgcaaacccaaacgcaaacccaaacgcaaauccaaaugcaaacccaaacgcaaacccaaacgcaaacccaaacgcuaacccaaacgccaauccaaacgcaaacccaaacgcaaacccuaaugcaaacccaaacgccaacccaaauaaaaauaaccaaggaaacggacaaggacacaacaugccaaacgacccaaacagaaacgucgaugaaaacgcaaacgcaaauuccgcagucaaaaacaacaacaacgaagaaccaucagacaaacacauaaaagaauaccucaacaaaauacaaaacucccuaucaacagaauggucacccugcuccguuacaugcgguaacggcauacaaguaagaauaaaaccaggaucagcuaacaaacccaaagacgaacuagacuacgccaacgacauagaaaaaaaaauaugcaaaauggaaaaaugcuccucaguauucaacguaguaaacucaucauaaggacuaguuauaagacugacuagcccgaugggccucccaacgggcccuccuccccuccuugcaccgagauuaauaaaaaaaaaaaaaaaaaaaaaaaaaaaaaaaaaaaaaaaaaaaaaaaaaaaaaaaaaaaaaaaaugcaucccccccccccccccccccccccccccccccaaaggcucuuuucagagccaccagaauu

SEQ ID NO: 2029 - RNA, 1510 nt, Artificial Sequence
  mRNA Design i-3 (A64-N5-C30-hSL-N5) comprising derived and/or modified sequence from Pf(3D7)__XP_001351122.1__HsALB_Pf-CSP(19-384)_TM domain HA (opt6)
aggagaaagcuuaccaugaaauggguaacauuuauaucacuacuuuuccuauucucaucagcauacucacucuuccaagaauaucaaugcuauggauccucaucaaacacaagaguacucaacgaauuaaacuacgauaaugccggaacaaaccuauauaacgaacuagaaaugaacuacuacggaaaacaagaaaauugguacucauuaaaaaaaaacuccagaucccuuggagaaaacgacgauggaaacaacgaagauaacgaaaaauuaagaaaaccaaaacacaaaaaauugaaacaaccagcagacgguaacccagacccaaacgccaacccaaacguagacccaaacgcgaauccaaacgucgacccaaacgcaaaucccaacguagacccaaaugcaaauccaaaugccaauccaaacgcaaacccaaacgcaaacccaaaugcaaacccaaacgccaacccaaacgcaaauccaaacgcaaacccaaacgcaaacccaaacgccaacccaaacgccaaccccaaugcaaacccaaaugcaaacccaaacgcaaacccaaacgcaaauccaaacgcaaacccaaacgccaacccaaacguagacccaaacgcaaauccaaacgcaaacccaaacgccaauccaaacgcaaacccaaacgccaacccaaaugcaaaucccaacgcaaacccaaacgcaaauccaaaugcaaaccccaacgcaaauccaaacgcaaacccaaacgcaaauccaaacgcaaauccaaaugcaaacccaaacgcaaacccuaaugcaaacccaaacgcaaacccaaacgccaacccaaacaaaaacaaccaaggaaacggacaaggucacaauaugccaaaugacccaaaccgaaacguagacgaaaacgcaaaugccaauagcgcaguaaaaaacaauaacaacgaagaaccuucagauaaacacauaaaagaauaccuaaacaaaauacaaaacucccuaucaacagaauggucaccuuguucagucacauguggaaacggaauacaaguaagaauaaaaccaggaucagcaaacaaaccaaaagacgaacuagauuacgcaaacgauauagaaaaaaaaauauguaaaauggaaaaaugcuccucagucuucaacguagucaacaguuccaaacuagaaucaaccagaaucuaccaaauacuagcaauauauuccacaguagcaagcucacucguauuaguagucucccuaggagcaauaucauucuggaugugcucaaacggaagcuuacaaugccgaauauguauauaaggacuaguuauaagacugacuagcccgaugggccucccaacgggcccuccuccccuccuugcaccgagauuaauaaaaaaaaaaaaaaaaaaaaaaaaaaaaaaaaaaaaaaaaaaaaaaaaaaaaaaaaaaaaaaaaugcaucccccccccccccccccccccccccccccccaaaggcucuuuucagagccaccagaauu

SEQ ID NO: 2030 - RNA, 1222 nt, Artificial Sequence
  mRNA Design i-3 (A64-N5-C30-hSL-N5) comprising derived and/or modified sequence from Pf(3D7)__XP_001351122.1__HsALB_Pf-CSP(82-397) (opt6)
aggagaaagcuuaccaugaaauggguaacauucauaucacuacuauuccucuucaguucagccuauagcgauaacgaaaaacuaagaaaaccaaaacacaaaaaacucaaacaaccagcagacggaaacccagacccaaacgcaaacccaaacguagacccaaacgcaaacccaaacguagacccaaacgcaaauccaaacguagacccaaaugcaaaccccaacgcaaacccaaacgcaaacccaaacgcaaacccaaacgcaaacccaaaugcgaacccaaaugcaaauccaaacgcaaacccaaacgcaaacccaaacgcaaacccaaacgcuaacccaaacgcaaacccaaacgcaaacccaaaugcaaacccaaacgcaaacccaaacgcaaaccccaacgcaaacccaaacguagacccaaacgcaaacccaaacgcaaacccaaacgcaaacccaaacgccaacccaaaugccaacccaaacgcaaacccaaaugcaaaccccaacgcaaacccaaacgccaacccaaacgcaaacccaaacgcaaacccaaacgcaaaccccaaugcaaacccaaacgcaaacccaaaugcaaauccaaacgcaaacccaaacgcaaacccaaacgcaaacccaaacaaaaacaaccaaggaaacggacaaggacacaacaugccaaacgacccaaaucgaaacgucgaugaaaacgccaacgcaaacucagcaguaaaaaacaacaacaacgaagaaccaucugacaaacacauaaaagaauaccuaaacaaaauacaaaacucauuauccaccgaauggucaccauguucaguaacaugcggcaacggaauacaagucagaauaaaaccaggcucagcaaauaaaccaaaagacgaacuagacuacgcaaacgacauagaaaaaaaaauaugcaaaauggaaaaauguucaucagucuucaacguaguaaacucaucaauaggacucauaaugguacuaucauuccuauucuuaaacuaaggacuaguuauaagacugacuagcccgaugggccucccaacgggcccuccuccccuccuugcaccgagauuaauaaaaaaaaaaaaaaaaaaaaaaaaaaaaaaaaaaaaaaaaaaaaaaaaaaaaaaaaaaaaaaaaugcaucccccccccccccccccccccccccccccccaaaggcucuuuucagagccaccagaauu

SEQ ID NO: 2031 - RNA, 574 nt, Artificial Sequence
  mRNA Design i-3 (A64-N5-C30-hSL-N5) comprising derived and/or modified sequence from Pf(3D7)__XP_001351122.1__HsALB_Pf-CSP(93-192) (opt6)
aggagaaagcuuaccaugaaauggguaacauucaucucacuacuauuccuauucucaagcgcauacucaaaacuaaaacaaccagcagacggaaacccagacccaaacgcaaacccaaacguagacccaaacgcaaacccaaacguagacccaaacgcaaacccaaacguagacccaaacgcaaacccaaacgcaaacccaaacgcaaacccaaacgcaaacccaaacgcaaacccaaacgcaaacccaaacgcaaacccaaacgcaaacccaaacgcaaacccaaacgcaaacccaaacgcaaacccaaacgcaaacccaaacgcaaacccaaacgcaaacccaaacgcaaacccaaacgcaaacccauaaggacuaguuauaagacugacuagcccgaugggccucccaacgggcccuccuccccuccuugcaccgagauuaauaaaaaaaaaaaaaaaaaaaaaaaaaaaaaaaaaaaaaaaaaaaaaaaaaaaaaaaaaaaaaaaaugcaucccccccccccccccccccccccccccccccaaaggcucuuuucagagccaccagaauu

SEQ ID NO: 2032 - RNA, 814 nt, Artificial Sequence
  mRNA Design i-3 (A64-N5-C30-hSL-N5) comprising derived and/or modified sequence from Pf(3D7)__XP_001351122.1__HsALB_Pf-CSP(93-272) (opt6)
aggagaaagcuuaccaugaaaugggucacauucauaucacuccuauuccuauucucaagcgcauacucaaaacuaaaacaaccagcagacggaaacccagacccaaacgcaaacccaaacguagacccaaacgcaaacccaaacguagacccaaacgcaaacccaaacguagacccaaacgcaaacccaaacgcaaacccaaacgccaacccaaacgcaaacccaaacgcaaacccaaacgcaaacccaaacgcaaacccaaacgcaaacccaaacgcaaacccaaacgcaaacccaaacgcaaacccaaacgcaaacccaaacgcaaauccaaacgcaaacccaaacgccaacccaaacgcaaacccaaacgcaaacccaaacguagacccaaacgcaaacccaaacgcaaacccaaacgcaaacccaaacgcaaacccaaacgcaaacccaaacgcaaacccaaacgcaaacccaaacgcaaacccaaacgcaaauccaaacgcaaacccaaacgcaaacccaaacgcaaacccaaacgcaaacccaaacgcaaacccaaacgcaaacccaaacgcaaacccaaacgcaaacccaaacgcaaacccauaaggacuaguuauaagacugacuagcccgaugggccucccaacgggcccuccuccccuccuugcaccgagauuaauaaaaaaaaaaaaaaaaaaaaaaaaaaaaaaaaaaaaaaaaaaaaaaaaaaaaaaaaaaaaaaaaugcaucccccccccccccccccccccccccccccccaaaggcucuuuucagagccaccagaauu

SEQ ID NO: 2033 - RNA, 1189 nt, Artificial Sequence
  mRNA Design i-3 (A64-N5-C30-hSL-N5) comprising derived and/or modified sequence from Pf(3D7)__XP_001351122.1__HsALB_Pf-CSP(93-397) (opt6)
aggagaaagcuuaccaugaaauggguaacauucauaucacuccuauuccuauucucaucagcauacucaaaacuaaaacaacccgcagacggaaacccagacccaaacgccaacccaaacguagacccaaacgcaaacccgaacguagacccaaacgcaaaccccaacguagacccaaacgcaaacccaaaugcaaacccaaacgcaaacccaaacgcaaacccaaacgcaaacccaaacgcaaacccaaacgcaaacccaaacgcaaacccaaacgcaaacccaaacgcgaaucccaacgcaaauccaaacgcaaacccaaacgcaaauccaaacgcaaacccgaacgcaaacccaaacgcaaacccaaacgcaaacccaaacguagauccaaacgcaaauccaaacgcaaacccaaacgcaaauccaaacgcaaacccaaacgcaaacccaaacgcaaaccccaacgcaaacccaaacgcaaacccaaacgcaaacccaaacgcaaauccaaacgccaacccaaacgcaaacccaaacgcaaacccaaacgcgaacccaaacgcgaacccaaacgcaaacccaaacgcaaacccaaacgcaaacccaaacaaaaacaaccaagggaacggacaaggacacaacaugccaaacgauccaaacagaaacguagacgaaaacgcaaacgcaaacucagcaguaaaaaacaacaacaacgaagaaccaucagacaaacacauaaaagaauaccuaaacaaaauacaaaacucacucucaacagaauggucaccaugcaguguaacaugcggaaauggaauacaaguacguauaaaaccaggaucagcaaacaaaccaaaagacgaauuagacuacgccaacgauauagaaaaaaaaauaugcaaaauggaaaaaugcagcucagucuucaacguagucaacagcucaauaggacuaauaaugguccucucauucuuauuucuaaacugaggacuaguuauaagacugacuagcccgaugggccucccaacgggcccuccuccccuccuugcaccgagauuaauaaaaaaaaaaaaaaaaaaaaaaaaaaaaaaaaaaaaaaaaaaaaaaaaaaaaaaaaaaaaaaaaugcaucccccccccccccccccccccccccccccccaaaggcucuuuucagagccaccagaauu

SEQ ID NO: 2034 - RNA, 559 nt, Artificial Sequence
  mRNA Design i-3 (A64-N5-C30-hSL-N5) comprising derived and/or modified sequence from Pf(3D7)__XP_001351122.1__HsALB_Pf-CSP(98-192) (opt6)
aggagaaagcuuaccaugaaauggguaacauucauaagccuacuauuccuauucagcucagcauacagcgcagacggaaacccagacccaaacgcaaacccaaacguagacccaaacgcaaacccaaacguagacccaaacgcaaacccaaacguagacccaaacgcaaacccaaacgcaaacccaaacgcaaacccaaacgcaaacccaaacgcaaacccaaacgcaaacccaaacgcaaacccaaacgcaaacccaaacgcaaacccaaacgcaaacccaaacgcaaacccaaacgcaaacccaaacgcaaacccaaacgcaaacccaaacgcaaacccaaacgcaaacccauaaggacuaguuauaagacugacuagcccgaugggccucccaacgggcccuccuccccuccuugcaccgagauuaauaaaaaaaaaaaaaaaaaaaaaaaaaaaaaaaaaaaaaaaaaaaaaaaaaaaaaaaaaaaaaaaaugcaucccccccccccccccccccccccccccccccaaaggcucuuuucagagccaccagaauu

SEQ ID NO: 2035 - RNA, 799 nt, Artificial Sequence
  mRNA Design i-3 (A64-N5-C30-hSL-N5) comprising derived and/or modified sequence from Pf(3D7)__XP_001351122.1__HsALB_Pf-CSP(98-272) (opt6)
aggagaaagcuuaccaugaaauggguaacauucauaucacuacuauuccuauucagcucagccuacagcgcagacggaaacccagacccaaacgcaaacccaaacguagacccaaacgcaaacccaaacgucgacccaaacgcaaacccaaacguagacccaaacgcaaacccaaacgcaaacccaaacgcaaacccaaacgcaaacccaaacgcaaacccaaacgcaaacccaaacgcaaacccaaacgcaaacccaaacgcaaacccaaacgcaaacccaaacgcaaacccaaacgcaaacccaaacgcaaacccaaacgcaaacccaaacgcaaacccaaacgcaaacccaaacgcaaacccaaacguagacccaaaugcaaacccaaacgcaaacccaaacgcaaacccaaacgcaaacccaaacgcaaacccaaacgcaaacccaaacgcaaacccaaacgcaaacccaaacgcaaacccaaacgcaaacccaaacgcaaacccaaacgcgaacccaaacgcaaacccaaacgcaaacccaaacgcaaacccaaacgcaaacccaaaugcaaacccaaacgcaaacccauaaggacuaguuauaagacugacuagcccgaugggccucccaacgggcccuccuccccuccuugcaccgagauuaauaaaaaaaaaaaaaaaaaaaaaaaaaaaaaaaaaaaaaaaaaaaaaaaaaaaaaaaaaaaaaaaaugcaucccccccccccccccccccccccccccccccaaaggcucuuuucagagccaccagaauu

SEQ ID NO: 2036 - RNA, 1105 nt, Artificial Sequence
  mRNA Design i-3 (A64-N5-C30-hSL-N5) comprising derived and/or modified sequence from Pf(3D7)__XP_001351122.1__HsALB_Pf-CSP(98-374) (opt6)
aggagaaagcuuaccaugaaaugggucacauucauaucccuacuauuccuauucucaucagcauauucagcagauggaaacccagacccaaacgccaacccaaacguagacccaaacgcaaacccaaacguagacccaaacgcaaacccaaacguagacccaaacgcaaacccaaacgcaaacccaaacgcaaacccaaacgcaaacccaaacgcaaacccaaacgcaaacccaaacgcaaacccaaacgcaaacccaaacgcaaacccaaacgcaaacccaaacgcaaacccaaaugcaaauccaaacgcaaauccaaacgcaaacccaaacgccaacccaaacgcaaauccaaacgcaaacccaaacguagacccgaacgcaaacccgaacgcaaacccaaacgcaaacccaaaugcaaacccaaacgcaaacccaaacgccaacccaaacgcaaacccaaacgcaaacccaaaugcaaacccaaacgcaaacccaaacgccaacccaaacgcaaacccaaacgcaaacccaaacgcaaacccaaacgcaaacccaaaugcaaacccaaacgcaaacccaaacgcaaacccaaacaaaaacaaccaaggaaauggacaaggccacaacaugccaaacgacccaaacagaaacguagacgaaaacgcaaacgcaaacuccgcagucaaaaacaacaacaacgaagaaccauccgacaaacacauaaaagaauaccucaauaaaauacaaaacucacuaucaacagaaugguccccaugcucaguaacaugcggaaacggaauacaaguaagaauaaaaccaggauccgcaaacaaaccaaaagacgaacuagacuacgcaaacgauauagaaaaaaaaauaugcaaaauggaaaaaugcuaaggacuaguuauaagacugacuagcccgaugggccucccaacgggcccuccuccccuccuugcaccgagauuaauaaaaaaaaaaaaaaaaaaaaaaaaaaaaaaaaaaaaaaaaaaaaaaaaaaaaaaaaaaaaaaaaugcaucccccccccccccccccccccccccccccccaaaggcucuuuucagagccaccagaauu

SEQ ID NO: 2037 - RNA, 1174 nt, Artificial Sequence
  mRNA Design i-3 (A64-N5-C30-hSL-N5) comprising derived and/or modified sequence from Pf(3D7)__XP_001351122.1__HsALB_Pf-CSP(98-397) (opt6)
aggagaaagcuuaccaugaaauggguaaccuucauaucauuacuauuccuuuucagcucggcauacucagcagacggcaacccagacccaaacgcaaacccaaacgucgacccaaaugcgaacccaaacguagacccaaacgcaaacccaaacguagauccaaacgcaaacccaaacgcaaacccaaacgcaaacccaaacgcaaacccaaacgccaacccaaaugcaaacccaaacgcaaaccccaacgcaaacccaaacgcaaacccaaacgcaaacccaaacgcaaaucccaacgcaaauccaaacgcaaacccaaaugcaaacccaaacgccaacccaaacgcaaacccaaacgcaaaccccaaugucgacccaaacgcaaacccaaacgcaaacccaaacgcaaacccaaacgcaaauccaaacgcaaaccccaacgcaaacccaaacgcaaacccaaacgcaaacccaaacgcaaacccaaacgcaaacccaaacgcaaacccaaacgcaaacccaaacgcaaacccaaacgcaaacccaaacgcaaauccaaacgcaaacccaaacgcaaacccaaacgcaaacccaaacaaaaacaaccaaggaaauggacaaggacacaacaugccaaaugaccccaacagaaacgucgacgaaaacgccaacgcaaacagcgcaguaaaaaacaacaacaaugaagaaccaucagacaaacacauaaaagaauaccuaaacaaaauucaaaacucacuaucaaccgaaugguccccaugcucaguaacaugcggaaacgguauacaaguacgaauaaaaccaggaucagcaaacaaaccaaaagacgaacuagacuacgcaaacgacauagaaaaaaaaauaugcaaaauggaaaaaugcucaucaguuuuuaacguagucaauagcucaaucggacucauaaugguacuaucauuucucuuccuaaauuaaggacuaguuauaagacugacuagcccgaugggccucccaacgggcccuccuccccuccuugcaccgagauuaauaaaaaaaaaaaaaaaaaaaaaaaaaaaaaaaaaaaaaaaaaaaaaaaaaaaaaaaaaaaaaaaaugcaucccccccccccccccccccccccccccccccaaaggcucuuuucagagccaccagaauu

SEQ ID NO: 2038 - RNA, 1501 nt, Artificial Sequence
  mRNA Design i-3 (A64-N5-C30-hSL-N5) comprising derived and/or modified sequence from Pf(3D7)__XP_001351122.1__HsALB_Pf-CSP(199-377)_L(PVTN)_HBsAg (opt6)
aggagaaagcuuaccaugaaauggguaacauuuauauccuuacuauuucucuucuccucagcuuacucugacccaaacgcaaaucccaacgcaaacccaaaugcaaacccaaacgcaaauccaaacgcaaacccaaaugcuaaucccaacgcaaacccaaacgcaaaccccaaugccaacccaaacgcuaacccaaacgcaaacccaaacgccaacccaaaugcaaacccaaacgcaaacccaaacgcaaauccaaaugcaaacccaaacgcaaauccaaacgcaaacccaaacaaaaacaaccaaggaaacggacaaggccauaauaugccuaaugaccccaacagaaacguagacgaaaaugcuaacgccaacucagcaguaaaaaacaacaauaacgaagaaccaucagauaaacacauaaaagaauacuuaaacaaaauacaaaauucauuaucaacagaauggucaccaugcucagucaccugcggaaacgguauacaaguacgcauaaaaccaggcucagcaaauaaaccaaaagacgaacuagauuacgcuaacgacauagaaaaaaaaauaugcaaaauggaaaaaugcucaucaguaccaguaacaaauauggaaaacauaacaucaggauuccuaggcccacucuuaguacuacaagcaggauuuuuucuucuaacaagaaucuuaacuauaccccaaucacucgacucaugguggaccucacuaaauuuccucggaggaucuccaguaugccucggacaaaauucacaaucaccaacauccaaucacucacccaccuccugcccaccaaucugcccaggauacagauggaugugcuuacgaagauucauaauauuccuauucauacuacuucuaugcuuaauauuccuucucguccuacucgacuaucaaggaaugcucccuguaugcccacucauaccaggauccacaacaacuaacacaggacccuguaaaacaugcacaacacccgcccaaggaaauucaauguuccccucuugcugcugcacaaaaccaacagacggaaauugcacaugcauuccaauuccaucaucuugggcauuugcaaaauacuuaugggaaugggcaucaguccgauucucgugguuaucuuuacuaguaccauucguucaaugguuuguaggacuuucaccuacaguaugguuaucugcaauauggaugaugugguacuggggaccaucauuauacucaaucguaucaccauuuauaccacuacuacccauauuuuucugccuauggguauacauauaaggacuaguuauaagacugacuagcccgaugggccucccaacgggcccuccuccccuccuugcaccgagauuaauaaaaaaaaaaaaaaaaaaaaaaaaaaaaaaaaaaaaaaaaaaaaaaaaaaaaaaaaaaaaaaaaugcaucccccccccccccccccccccccccccccccaaaggcucuuuucagagccaccagaauu

SEQ ID NO: 2039 - RNA, 1240 nt, Artificial Sequence
  mRNA Design i-3 (A64-N5-C30-hSL-N5) comprising derived and/or modified sequence from Pb(ANKA)__XP_022712148.1__Pb-CSP (opt6)
aggagaaagcuuaccaugaaaaaaugcacaaucuuaguaguagcaucacuccuacuagucaacucucuccuaccaggauacggccaaaacaaauccauacaagcccaacgcaaccuaaacgaauuaugcuauaacgaaggcaacgacaacaaauuauaccauguauuaaacucaaaaaacggaaaaauauacaacagaaacacaguaaacagacuacucgcagacgcacccgaaggaaaaaaaaaugaaaaaaaaaacgaaaaaauagaacgcaacaacaaacuuaaacaaccaccaccacccccaaaccccaacgacccaccacccccaaaccccaacgauccaccccccccaaaccccaacgacccaccacccccaaacccaaacgaccccccaccaccaaaugcaaacgacccaccaccaccaaacgcaaacgacccagcaccacccaacgccaacgaccccgcaccaccaaacgcaaacgauccagcucccccaaacgcaaacgauccagcaccaccaaacgccaacgacccaccaccaccaaacccaaacgacccagcaccaccaaacgcaaaugacccaccaccccccaacccaaacgaccccgccccaccacaagguaacaacaacccacaaccacaaccacgcccacaaccacaaccacaaccacaaccacaaccccaaccacaaccacaaccacaaccacgcccacaaccccaaccucaaccaggaggcaauaacaacaacaaaaacaauaauaacgaugacuccuacauaccaucugccgaaaaaauccucgaauucguaaaacaaauaagagacucaauaacagaagaauggucacaauguaacguaacaugcggaucaggcauacgaguaagaaaacgcaaaggaucaaacaaaaaagcagaagaccuaacacucgaagacauugacacagaaaucugcaaaauggacaaaugcucaucaauauucaacauagucucaaacucauuaggauucguaauccuacuaguacucguauucuucaacuaaggacuaguuauaagacugacuagcccgaugggccucccaacgggcccuccuccccuccuugcaccgagauuaauaaaaaaaaaaaaaaaaaaaaaaaaaaaaaaaaaaaaaaaaaaaaaaaaaaaaaaaaaaaaaaaaugcaucccccccccccccccccccccccccccccccaaaggcucuuuucagagccaccagaauu

SEQ ID NO: 2040 - RNA, 1405 nt, Artificial Sequence
  mRNA Design i-3 (A64-N5-C30-hSL-N5) comprising derived and/or modified sequence from Pb(ANKA)__XP_022712148.1__Pb-CSP_L(G4SG4)_TM domain HA (opt6)
aggagaaagcuuaccaugaaaaaaugcaccauacuagucguagccucacuacuacuagucaauucauuauuaccaggauacggccaaaauaaauccauacaagcacaaagaaaucucaaugaauuaugcuacaacgaaggaaacgacaauaaacuauaccacguauuaaacucaaaaaauggaaaaauauacaaccgaaacaccguaaaccguuuauuagcagacgcaccagaaggaaaaaaaaacgaaaaaaaaaacgaaaaaauugaaagaaacaauaaacucaaacaaccaccucccccacccaacccaaacgacccacccccacccaacccaaacgacccaccacccccaaaccccaacgauccccccccacccaauccaaacgauccaccaccaccaaacgcaaacgacccaccaccaccaaacgcaaacgacccagcaccaccaaacgcaaacgaccccgcaccaccaaacgcaaacgauccagcaccacccaacgcaaacgacccagcacccccaaacgccaacgaccccccaccaccaaacccaaacgaccccgcaccuccaaacgcaaacgacccaccaccaccaaacccuaacgacccagcccccccacaaggaaacaacaauccucaaccacaaccacgcccucaaccacaaccccaaccucaaccacaaccacaaccacaaccccaaccacaaccacgaccacaaccucaaccucaaccaggaggcaacaacaacaacaaaaacaacaacaacgacgacucauacauaccaucagcagaaaaaauacuagaauucgucaaacaaauaagagacucuauaacugaagaauggucccaaugcaauguaacuugcggaucaggcaucagagucagaaaacgcaaaggauccaacaaaaaagccgaagaccuaacccucgaagauauagacacagaaaucugcaaaauggacaaaugcucaucaauuuucaauauagucucaaauucacuaggauucgucaucuuacuaguacuaguauucuuuaauggaggaggaggaucaggaggaggaggaaaacuagaaucaacccgaauauaccaaauacuagcaauauacucaaccguagcaucaucacucguacuagugguauccuuaggagcaauaagcuuuuggaugugcuccaacggcucucuacaaugucgaauaugcauaugaggacuaguuauaagacugacuagcccgaugggccucccaacgggcccuccuccccuccuugcaccgagauuaauaaaaaaaaaaaaaaaaaaaaaaaaaaaaaaaaaaaaaaaaaaaaaaaaaaaaaaaaaaaaaaaaugcaucccccccccccccccccccccccccccccccaaaggcucuuuucagagccaccagaauu

SEQ ID NO: 2041 - RNA, 1225 nt, Artificial Sequence
  mRNA Design i-3 (A64-N5-C30-hSL-N5) comprising derived and/or modified sequence from Pb(ANKA)__XP_022712148.1__HsALB_Pb-CSP(24-340) (opt6)
aggagaaagcuuaccaugaaaugggucacauucauaucacuccuauuccuauucucaucagcauacucacaaaacaaaucaauccaagcccaacgaaaccuaaacgaacuaugcuacaacgaaggaaacgauaacaaacuauaccacguacuaaacucaaaaaacggaaaaauauacaaucgaaacacaguaaacagacucuuagcagacgcaccagaaggaaaaaaaaacgaaaaaaaaaacgaaaaaaucgaaagaaacaacaaacucaaacaaccaccaccaccaccaaacccaaacgauccaccaccccccaacccaaacgacccacccccacccaacccaaacgaccccccaccaccaaacccaaacgaccccccaccaccaaacgcaaacgauccaccaccccccaacgcaaacgauccagcaccacccaacgccaacgacccagcaccacccaaugcaaacgacccagcacccccaaacgcaaacgacccagcacccccaaacgccaacgacccaccaccaccaaacccaaaugacccagcaccaccaaacgccaacgauccaccacccccaaacccaaacgacccugcaccuccccaaggaaacaacaacccacaaccacaaccaagaccacaaccucaaccacaaccacaaccacaaccacaaccacaaccacaaccccaaccaagaccacaaccacaaccccaaccaggaggcaacaacaauaacaaaaauaacaacaacgacgacucauacaucccauccgcagaaaaaauauuagaauuuguaaaacaaauaagagacucaauaacagaagaauggucccaaugcaacguaacaugcgguucaggaauccguguacgaaaacgcaaaggcucaaacaaaaaagcagaagaccucacacucgaagacauugacacagaaauaugcaaaauggacaaaugcuccucaaucuucaacauugucucaaacucauuaggauucguaaucuuacucguacucguauucuucaacuaaggacuaguuauaagacugacuagcccgaugggccucccaacgggcccuccuccccuccuugcaccgagauuaauaaaaaaaaaaaaaaaaaaaaaaaaaaaaaaaaaaaaaaaaaaaaaaaaaaaaaaaaaaaaaaaaugcaucccccccccccccccccccccccccccccccaaaggcucuuuucagagccaccagaauu

SEQ ID NO: 2042 - RNA, 1243 nt, Artificial Sequence
  mRNA Design i-3 (A64-N5-C30-hSL-N5) comprising derived and/or modified sequence from Pb(ANKA)__XP_022712148.1__HsIns-iso1_Pb-CSP(24-340) (opt6)
aggagaaagcuuaccauggcacuauggaugagacuacuaccacuauuagcacuacucgcacuauggggacccgacccagcagcagcacaaaacaaaucaauacaagcccaaagaaaccuaaaugaacuaugcuacaacgaaggaaacgacaacaaauuauaccacguacuaaacuccaaaaacggaaaaauuuacaacagaaacaccguaaaccgacuacuagcagacgcaccagaaggaaaaaaaaacgaaaaaaaaaacgaaaaaauagaaagaaacaauaaacuaaaacaaccaccacccccaccaaaccccaacgacccaccaccaccaaacccaaacgacccuccaccaccaaaccccaacgaccccccucccccaaacccaaacgaccccccaccaccaaacgcaaaugaccccccccccccaaaugcaaacgaccccgcaccaccaaacgcaaacgacccagccccaccaaacgccaacgauccugcaccaccaaaugcaaacgacccagcccccccaaacgcaaaugacccaccaccaccaaacccaaacgacccugcaccaccaaaugcuaacgaccccccaccaccaaauccaaacgaccccgcccccccacaaggaaacaauaacccacaaccccaacccagaccacaaccacaaccucaaccacaaccccaaccacaaccccaaccacaaccacaaccacgcccacaaccacaaccacaaccaggaggaaacaacaauaauaaaaacaacaauaacgacgacucauacauucccuccgcagaaaaaauacucgaauucguaaaacaaauaagagacucuauaacagaagaauggucccaaugcaacgucacaugcggauccggaauaagagucagaaaaagaaaaggaucaaacaaaaaagcagaagaccucacacuagaagacauagauacagaaauaugcaaaauggacaaauguucaucaauauuuaacauaguaucaaacucuuuaggauucgucauauuacucguacuaguauucuucaacuaaggacuaguuauaagacugacuagcccgaugggccucccaacgggcccuccuccccuccuugcaccgagauuaauaaaaaaaaaaaaaaaaaaaaaaaaaaaaaaaaaaaaaaaaaaaaaaaaaaaaaaaaaaaaaaaaugcaucccccccccccccccccccccccccccccccaaaggcucuuuucagagccaccagaauu

SEQ ID NO: 2043 - RNA, 1222 nt, Artificial Sequence
  mRNA Design i-3 (A64-N5-C30-hSL-N5) comprising derived and/or modified sequence from Pb(ANKA)__XP_022712148.1__HsSPARC_Pb-CSP(24-340) (opt6)
aggagaaagcuuaccaugcgagcauggauauucuucuuacuuugucucgcaggacgcgcccuagcacaaaacaaaucaauacaagcacaaagaaaccucaacgaacuaugcuacaacgaaggaaacgacaacaaacuauaccacgucuuaaacucaaaaaacggaaaaauauacaauagaaacacaguaaaccgacuauuagcagacgcacccgaaggaaaaaaaaacgaaaaaaaaaaugaaaaaaucgaaagaaacaacaaacucaaacaaccacccccacccccaaacccuaacgacccaccaccaccaaaccccaacgauccaccaccaccaaacccaaacgacccaccaccccccaacccaaacgacccacccccacccaacgccaacgauccaccacccccaaaugcaaacgacccagccccaccaaacgcaaacgauccagcuccaccaaacgcaaacgaccccgccccaccaaacgccaacgacccagcuccaccaaacgcaaaugauccaccaccacccaacccaaacgacccugcacccccaaacgcaaacgacccaccaccaccaaacccaaacgacccagcacccccacaaggcaacaauaacccacaaccacaacccagaccacaaccccaaccgcaaccccaaccacaaccacaaccacaaccacaaccacaaccaagaccacaaccacaaccucaaccuggcggaaacaauaacaauaaaaacaacaacaacgacgacucauauauaccaucagccgaaaaaauucuagaauucguaaaacaaaucagagacucaauaacagaagaauggucacaaugcaacguaacauguggauccggaauaagaguaagaaaaagaaaaggaucaaacaaaaaagcagaagaucuaacacuagaagauauagacacagaaauaugcaaaauggacaaaugcucaucaauauucaacauagucuccaacucacucggauucguaauccuacucguacucguauucuucaacuaaggacuaguuauaagacugacuagcccgaugggccucccaacgggcccuccuccccuccuugcaccgagauuaauaaaaaaaaaaaaaaaaaaaaaaaaaaaaaaaaaaaaaaaaaaaaaaaaaaaaaaaaaaaaaaaaugcaucccccccccccccccccccccccccccccccaaaggcucuuuucagagccaccagaauu

SEQ ID NO: 2044 - RNA, 1225 nt, Artificial Sequence
  mRNA Design i-3 (A64-N5-C30-hSL-N5) comprising derived and/or modified sequence from Pb(ANKA)__XP_022712148.1__IgE_Pb-CSP(24-340) (opt6)
aggagaaagcuuaccauggacuggacguggauauuauuuuuagucgccgcagccaccagaguacacucucaaaacaaaucaauacaagcccaaagaaaucuaaacgaauuaugcuacaacgaaggaaacgacaacaaacuauaccacguccucaacucuaaaaauggaaaaauauacaacagaaacaccguaaacagacuacuagcagacgcaccagaaggaaaaaaaaaugaaaaaaaaaacgaaaaaauagaaagaaauaacaaacucaaacaaccaccaccaccucccaacccaaacgacccaccacccccaaacccaaaugacccaccaccaccaaacccaaacgacccaccacccccaaacccaaaugacccaccaccaccaaacgcaaacgacccaccaccaccaaacgcaaacgacccagccccaccaaacgcaaacgacccagcaccaccaaacgcaaacgacccagcaccacccaaugccaaugacccagcaccaccaaacgcaaacgaccccccaccaccaaacccuaaugaccccgcaccaccaaacgcaaacgaccccccaccaccuaaccccaacgaccccgccccaccacaaggaaacaacaacccacaaccacaaccacguccacaaccacaaccacaaccccaaccacaaccccaaccacaaccacaaccacaaccccgaccacaaccacaaccacaacccggagguaacaacaacaauaaaaacaacaauaacgacgacuccuacauacccuccgcagaaaaaauacuagaauucguaaaacaaauaagagacucaauaacugaagaauggucacaauguaacguaacaugcgguucaggaauaagagucagaaaaagaaaaggaucaaacaaaaaagcagaagauuuaacacuagaagacauagacaccgaaauaugcaaaauggacaaaugcagcuccaucuucaacauaguaucaaacucacuaggauuuguaauacuacucguacuaguauucuucaauuaaggacuaguuauaagacugacuagcccgaugggccucccaacgggcccuccuccccuccuugcaccgagauuaauaaaaaaaaaaaaaaaaaaaaaaaaaaaaaaaaaaaaaaaaaaaaaaaaaaaaaaaaaaaaaaaaugcaucccccccccccccccccccccccccccccccaaaggcucuuuucagagccaccagaauu

SEQ ID NO: 2045 - RNA, 1411 nt, Artificial Sequence
  mRNA Design i-3 (A64-N5-C30-hSL-N5) comprising derived and/or modified sequence from Pf(3D7)__XP_001351122.1__Pf-CSP (opt11)
aggagaaagcuuaccaugaugcgaaagcuugcgauccucagcgucuccucauuccuauucguagaagcacuauuccaagaauaccaaugcuacggcucauccucaaacacacgcguacucaacgaacucaacuacgacaacgcaggaacaaaccucuacaacgaacuagagaugaacuacuacggcaaacaagaaaacugguacucucucaaaaaaaacucacgaagccucggcgagaacgacgacggaaacaacgaagacaacgaaaaacuccgcaaaccaaaacacaaaaaacucaaacaacccgccgacggaaacccagacccaaacgcaaacccaaacguagacccaaacgccaaccccaacguagaccccaacgccaacccuaacgucgaccccaaugcaaaccccaacgcgaacccaaacgcaaaccccaacgcaaaccccaacgcaaacccaaacgccaaccccaacgcaaacccaaacgcaaacccuaacgccaacccaaacgccaacccaaacgccaacccaaacgcaaacccgaacgccaaccccaacgccaacccaaacgcaaacccaaacgcaaaccccaacgccaaccccaacguagaccccaacgcaaaccccaacgcaaacccaaacgccaaccccaacgccaaccccaacgccaaccccaacgccaaccccaaugccaacccaaacgcgaaccccaacgcaaacccgaacgcaaacccaaacgcgaacccaaacgcgaacccaaacgccaaccccaacgccaaccccaacgcaaacccaaacgcgaacccaaacgcaaaccccaacgccaacccaaacaaaaacaaccaaggaaacggacaaggccacaacaugccaaacgaccccaaccgcaacguagacgaaaacgccaacgccaacuccgcugucaagaacaacaacaacgaagaaccauccgacaaacacauaaaagaauaccuaaacaaaauccaaaacucccucucaaccgaauggucccccugcuccgucacaugcggaaacggcauccaaguccgaaucaaaccaggcuccgccaacaaacccaaagacgaacuggacuacgccaacgacaucgaaaaaaaaaucugcaaaauggaaaaaugcucauccgucuucaacguggucaacuccuccaucggacuaauaaugguccucuccuuccuauuccuaaacuaaggacuaguuauaagacugacuagcccgaugggccucccaacgggcccuccuccccuccuugcaccgagauuaauaaaaaaaaaaaaaaaaaaaaaaaaaaaaaaaaaaaaaaaaaaaaaaaaaaaaaaaaaaaaaaaaugcaucccccccccccccccccccccccccccccccaaaggcucuuuucagagccaccagaauu

SEQ ID NO: 2046 - RNA, 1342 nt, Artificial Sequence
  mRNA Design i-3 (A64-N5-C30-hSL-N5) comprising derived and/or modified sequence from Pf(3D7)__XP_001351122.1__Pf-CSP(1-374) (opt11)
aggagaaagcuuaccaugaugcgcaaacucgcaauccucuccgucucaucguuccuauucguagaagcacucuuccaagaauaccaaugcuacggcucaagcuccaacacaagaguacucaacgaacucaacuacgacaaugccggaacaaaccuauacaacgagcuagaaaugaacuacuacggcaaacaagaaaacugguacucgcuaaaaaaaaacagcagaagccuaggugaaaacgacgacggaaacaacgaagacaacgaaaaacugcgcaaaccaaaacacaaaaaacuaaaacaacccgcagacggcaacccagacccaaacgcaaacccaaacguagaccccaacgccaacccaaacguagacccaaacgccaacccaaacguagacccaaacgcaaacccgaacgcaaacccaaacgcaaacccaaacgcaaacccaaacgcaaacccaaacgccaaccccaacgcaaauccaaacgcaaaccccaacgcaaaccccaacgccaacccaaacgcaaaccccaacgcgaacccaaacgccaaccccaacgccaacccaaacgcaaacccaaacgcaaacccaaacgccaaccccaacgucgacccaaacgccaacccaaacgcaaaccccaacgccaaccccaacgcaaacccaaacgccaacccgaacgcaaacccgaacgcaaacccaaacgcaaaccccaacgcaaaccccaacgcaaacccaaacgcaaaccccaacgccaaccccaacgccaaccccaacgcaaacccaaacgcaaacccgaacgcaaaccccaacgcaaaccccaacgccaaucccaacaaaaacaaccaaggcaacggacaaggacacaacaugccaaacgaccccaaccgcaacgucgacgaaaacgccaacgccaacuccgcggucaaaaacaacaacaacgaagagcccucagacaaacacauaaaagaauaccuaaacaaaauccaaaacucccucucgacagaauggucccccugcagcgucaccugcggaaacggcauacaaguacgaauaaaacccggcucagccaacaaaccaaaagacgaacuagacuacgccaacgacauagaaaaaaaaauaugcaaaauggaaaaaugcugaggacuaguuauaagacugacuagcccgaugggccucccaacgggcccuccuccccuccuugcaccgagauuaauaaaaaaaaaaaaaaaaaaaaaaaaaaaaaaaaaaaaaaaaaaaaaaaaaaaaaaaaaaaaaaaaugcaucccccccccccccccccccccccccccccccaaaggcucuuuucagagccaccagaauu

SEQ ID NO: 2047 - RNA, 1195 nt, Artificial Sequence
  mRNA Design i-3 (A64-N5-C30-hSL-N5) comprising derived and/or modified sequence from Pf(3D7)__XP_001351122.1__Pf-CSP(1-325) (opt11)
aggagaaagcuuaccaugaugcgcaaacucgcaauccuaucaguaagcucauuccuguucguagaagcacuauuccaagaauaccaaugcuacggcucauccucaaacacaagaguacuaaacgaacuaaacuacgacaacgccggaaccaaccuauacaacgaacucgaaaugaacuacuacggcaaacaagaaaacugguacucacuaaagaaaaacagcagaagccucggcgaaaacgacgacggcaacaacgaagacaacgagaaacugagaaaaccaaaacacaagaaacuaaaacaacccgcggacgggaacccagacccaaaugcaaacccaaacgucgacccaaacgcaaacccaaacguagacccaaacgcaaaccccaacguagaccccaacgcaaacccaaacgcaaacccaaacgcaaacccaaacgcaaacccaaacgcaaaccccaacgcaaacccaaacgcaaacccaaacgcaaaccccaacgccaacccaaacgccaaccccaacgcaaacccaaacgcaaacccaaacgcaaaccccaacgccaacccgaacgcaaacccaaacgcaaacccaaacgcaaaccccaacguagacccaaacgcaaacccaaacgccaaccccaacgcaaacccaaacgcaaacccgaacgcaaaccccaacgcaaaccccaacgcaaacccaaacgcaaaccccaacgcaaauccaaacgcaaacccaaacgcaaacccaaacgccaacccaaacgcaaaucccaacgcaaacccaaacgcaaaccccaacgcaaacccaaacgcaaacccaaacgcaaacccaaacaaaaacaaccaaggaaacggccaaggacacaacaugccaaacgacccaaaccgaaacguagacgaaaacgccaacgccaacagcgcagucaaaaacaacaauaaugaagaacccuccgacaaacacauaaaagaauaccuaaacaaaauccaaaacugaggacuaguuauaagacugacuagcccgaugggccucccaacgggcccuccuccccuccuugcaccgagauuaauaaaaaaaaaaaaaaaaaaaaaaaaaaaaaaaaaaaaaaaaaaaaaaaaaaaaaaaaaaaaaaaaugcaucccccccccccccccccccccccccccccccaaaggcucuuuucagagccaccagaauu

SEQ ID NO: 2048 - RNA, 1411 nt, Artificial Sequence
  mRNA Design i-3 (A64-N5-C30-hSL-N5) comprising derived and/or modified sequence from Pf(3D7)__XP_001351122.1__HsALB_Pf-CSP(19-397) (opt11)
aggagaaagcuuaccaugaaaugggucaccuucauaucccuccuauuccucuucucaucagccuacucccucuuccaggaauaccaaugcuacggaucguccucaaacacuagaguacucaaugaauuaaacuacgacaacgccggcaccaaccucuacaacgaacucgaaaugaacuacuacggaaaacaagaaaacugguacucacucaaaaaaaacucucgaucccucggcgaaaacgacgacggcaacaacgaagacaacgagaaacuacgcaaaccaaaacacaaaaaauuaaaacaacccgccgacggcaaccccgaccccaacgccaaccccaacguagaccccaacgcgaaccccaacgucgacccaaacgccaaccccaacguggaccccaacgccaacccaaacgccaaccccaacgccaacccaaacgcaaaccccaacgccaacccaaacgccaaccccaacgcaaacccaaacgcgaacccaaacgcaaacccaaacgccaacccaaacgcaaacccaaacgcgaacccaaacgccaacccaaacgccaaccccaacgcaaacccaaacgccaacccaaacgccaacccaaacguagacccaaacgcgaaccccaacgcuaacccaaacgcaaacccaaacgccaacccaaacgccaacccuaacgcaaacccaaacgccaaccccaacgccaaccccaacgccaaccccaacgcaaacccaaacgccaacccaaacgccaaccccaacgccaacccaaacgcaaacccaaacgcaaacccaaacgcaaaccccaacgccaacccaaacgccaacccaaacaaaaauaaccaaggcaaugggcaaggccacaacaugccaaacgaccccaaccgcaaugucgacgaaaacgccaacgccaacucugcaguaaaaaacaauaacaacgaagaacccucagacaaacacaucaaagaauaccucaacaagauccaaaauucccucuccacagaauggucccccugcagcguaaccugcggcaacggcauccaaguccgcaucaaacccggcuccgccaacaaaccgaaagacgaacuagacuacgccaacgacauagaaaaaaaaaucugcaaaauggaaaaaugcagcuccgucuucaacgucgucaacagcuccaucggccucaucaugguccucuccuuccuguuccucaacuaaggacuaguuauaagacugacuagcccgaugggccucccaacgggcccuccuccccuccuugcaccgagauuaauaaaaaaaaaaaaaaaaaaaaaaaaaaaaaaaaaaaaaaaaaaaaaaaaaaaaaaaaaaaaaaaaugcaucccccccccccccccccccccccccccccccaaaggcucuuuucagagccaccagaauu

SEQ ID NO: 2049 - RNA, 1429 nt, Artificial Sequence
  mRNA Design i-3 (A64-N5-C30-hSL-N5) comprising derived and/or modified sequence from Pf(3D7)__XP_001351122.1__HsIns-iso1_Pf-CSP(19-397) (opt11)
aggagaaagcuuaccauggcacucuggaugagacuccucccccuccucgcacuccucgcccuauggggcccagacccagcggcagcccucuuccaagaauaccaaugcuacggcucauccuccaacacccgaguccucaaugaacuaaacuacgacaacgccggcaccaaccuauacaacgaacuagaaaugaacuacuacggcaaacaagaaaacugguacucccucaaaaaaaauucacgcucccuaggugagaacgacgacggaaacaacgaagacaacgaaaaacuccgaaaacccaaacacaaaaaacuaaaacaaccagcagacggcaaccccgaccccaacgcaaaccccaacguagacccaaacgcgaaccccaacgucgauccaaacgccaacccaaacguugaccccaacgcgaaccccaacgcaaacccaaacgcaaacccuaacgcgaaccccaacgcaaaccccaacgccaaccccaacgccaaccccaacgccaacccaaacgcaaaccccaacgccaaccccaacgcaaacccaaacgcaaacccgaacgcaaaccccaacgccaacccaaacgcaaacccaaacgccaacccaaacgcaaaccccaacguagacccaaacgccaaucccaacgcgaaccccaacgcaaacccaaacgcgaacccaaacgccaacccaaacgcaaacccgaacgccaacccaaacgccaaccccaacgcaaaccccaacgcaaacccaaacgccaacccaaacgcaaacccaaacgcaaaccccaacgccaaccccaacgcaaacccaaaugccaaccccaacgccaaccccaacgcaaacccaaacaaaaacaaccaaggaaacggccaaggccacaacaugccgaacgaccccaaccgaaacgucgacgaaaacgcaaacgccaacucagcggucaaaaacaacaacaacgaagaacccucagacaaacacaucaaagaauaccuaaacaagauccagaacucucucucaacagaauggucccccugcuccguaacaugcggcaacggcauccaaguacgaaucaaaccgggaucagccaauaaacccaaagacgaacucgacuacgccaacgacaucgaaaaaaaaauaugcaaaauggaaaaaugcagcucagucuucaacguagucaacagcuccauaggccucaucaugguacucuccuuccuguuccuaaacuaaggacuaguuauaagacugacuagcccgaugggccucccaacgggcccuccuccccuccuugcaccgagauuaauaaaaaaaaaaaaaaaaaaaaaaaaaaaaaaaaaaaaaaaaaaaaaaaaaaaaaaaaaaaaaaaaugcaucccccccccccccccccccccccccccccccaaaggcucuuuucagagccaccagaauu

SEQ ID NO: 2050 - RNA, 1408 nt, Artificial Sequence
  mRNA Design i-3 (A64-N5-C30-hSL-N5) comprising derived and/or modified sequence from Pf(3D7)__XP_001351122.1__HsSPARC_Pf-CSP(19-397) (opt11)
aggagaaagcuuaccaugcgcgccuggauauucuuccuccuaugccuagcaggacgcgcccucgcacucuuccaagaauaccaaugcuacggcucauccucaaacacccgcguacuuaacgaacuaaacuacgacaacgccggaaccaaccuauacaacgaacucgaaaugaacuacuacgguaaacaagaaaacugguacucccucaaaaaaaacagccgaagccuaggagaaaacgacgacggaaacaacgaagacaacgaaaaacugcgcaaacccaaacacaaaaaacucaaacaacccgcagacgggaacccagacccaaacgcaaacccaaacguggacccaaacgccaacccuaacguagaccccaacgcaaaccccaacgucgacccuaaugcaaacccaaacgccaaccccaacgcgaacccaaacgcaaaccccaacgcuaacccgaacgccaaccccaacgccaacccgaacgcaaacccaaacgcaaacccaaacgcgaacccaaacgcaaacccaaacgccaaccccaacgcgaacccaaacgccaauccaaacgccaacccaaacgcaaacccaaacgccaaccccaacguagacccaaacgccaacccaaacgcgaacccaaacgcaaaccccaacgcaaacccaaacgcaaacccaaacgccaacccuaacgcaaacccaaacgccaaccccaacgccaacccaaacgcaaacccaaacgccaacccaaacgccaaccccaacgcaaacccgaacgcaaaccccaacgcaaacccaaacgcaaacccaaacgcgaacccgaacgccaacccaaauaagaacaaccaaggaaacggacaaggccacaacaugccaaacgaccccaaccgcaacgucgacgaaaacgcaaaugccaacuccgcagucaaaaacaacaauaacgaagaacccucggacaaacacaucaaagaauaccucaacaagauccaaaacucacucuccaccgaauggucacccugcagcguaacuugcggcaacggcauccaaguccgcauaaaaccaggcuccgcaaacaaacccaaagacgaacucgacuaugccaacgacaucgaaaaaaaaauaugcaaaauggaaaaaugcagcucagucuucaacguagucaacagcucuaucggacuaauaaugguacucuccuuccuauucuuaaacuaaggacuaguuauaagacugacuagcccgaugggccucccaacgggcccuccuccccuccuugcaccgagauuaauaaaaaaaaaaaaaaaaaaaaaaaaaaaaaaaaaaaaaaaaaaaaaaaaaaaaaaaaaaaaaaaaugcaucccccccccccccccccccccccccccccccaaaggcucuuuucagagccaccagaauu

SEQ ID NO: 2051 - RNA, 1411 nt, Artificial Sequence
  mRNA Design i-3 (A64-N5-C30-hSL-N5) comprising derived and/or modified sequence from Pf(3D7)__XP_001351122.1__IgE_Pf-CSP(19-397) (opt11)
aggagaaagcuuaccauggacuggacauggauccucuuccucgucgccgcggccacacgcguacacucacucuuccaagaauaucaaugcuacggcucaagcucgaacacgcgcguacucaacgaacuaaacuacgacaacgccggcaccaaccuauacaacgaacucgaaaugaacuacuacggcaaacaagaaaacugguacucacuuaagaaaaauucacgaucccucggagaaaacgacgaugggaacaacgaagacaacgaaaaacuacgcaaacccaaacacaagaaacuuaaacaacccgcagacggcaacccagacccaaacgcaaaccccaacguagaccccaacgcaaacccaaacguagacccaaacgccaacccaaacguagacccaaacgcgaacccaaacgccaacccaaacgccaaccccaacgcaaacccaaacgcaaauccaaacgcaaacccaaaugcaaacccgaacgccaauccaaacgcaaaccccaacgcaaacccaaacgcaaaccccaaugccaacccaaacgcaaaccccaacgcaaaccccaacgcaaaccccaacgcaaacccaaacgcgaacccaaacguagaccccaacgccaaccccaacgccaacccaaacgcaaacccaaacgccaacccaaacgccaaccccaacgcaaaccccaacgcaaacccgaacgcaaacccaaacgcaaacccaaacgcaaacccgaacgcaaacccuaacgcgaaccccaacgccaaccccaacgcaaacccaaacgcaaacccaaacgccaacccaaacgcaaacccaaacgcaaacccaaacaaaaacaaccaaggaaacgggcaaggacauaacaugccgaacgaccccaaccgcaacguagacgaaaacgccaacgccaacagcgcagucaaaaacaacaacaacgaagaacccuccgacaaacacaucaaagaauaccuaaacaaaauccagaacucacuauccaccgaauggucccccugcagcgugaccugcggcaacggcauacaaguccgcauaaaaccaggcuccgccaacaaacccaaagacgaacuagacuacgccaacgacauagaaaagaaaauaugcaaaauggaaaaaugcagcucagucuucaauguagucaacuccuccaucggacucauaaugguccuaucauuccucuuccuaaacuaaggacuaguuauaagacugacuagcccgaugggccucccaacgggcccuccuccccuccuugcaccgagauuaauaaaaaaaaaaaaaaaaaaaaaaaaaaaaaaaaaaaaaaaaaaaaaaaaaaaaaaaaaaaaaaaaugcaucccccccccccccccccccccccccccccccaaaggcucuuuucagagccaccagaauu

SEQ ID NO: 2052 - RNA, 1576 nt, Artificial Sequence
  mRNA Design i-3 (A64-N5-C30-hSL-N5) comprising derived and/or modified sequence from Pf(3D7)__XP_001351122.1__Pf-CSP_L(G4SG4)_TM domain HA (opt11)
aggagaaagcuuaccaugaugcgcaaacucgccauccucagcgucagcucguuccucuucgucgaagcacuauuccaagaauaccaguguuacggcucauccucaaacacacgcgugcucaacgaacuaaacuacgacaacgccggcaccaaccucuacaacgaacuagaaaugaacuauuacggcaagcaagaaaacugguacucacucaaaaaaaacagccgaagccuaggcgagaacgacgacgggaacaacgaagacaacgaaaaacuacgcaaacccaagcacaaaaaacugaaacaaccagccgacggaaauccagaccccaacgcaaacccgaacguagaccccaacgcgaaccccaacguggacccgaacgcaaacccgaacguagacccaaacgcaaacccaaacgcgaacccaaacgcaaacccaaacgcuaacccaaacgcaaaccccaacgccaaccccaacgcgaacccaaacgcaaacccaaacgcaaacccaaacgcaaacccgaacgcaaacccaaacgccaacccaaacgcgaacccaaacgccaacccaaacgcaaacccaaacgcaaacccaaacgcaaacccaaacguagacccgaacgccaacccgaaugcaaacccaaacgcaaacccgaacgcaaacccaaacgcgaacccgaacgccaacccaaacgcaaacccgaacgcaaaccccaacgccaacccaaacgcaaaccccaacgcaaaccccaacgcaaacccgaacgcaaacccaaacgcaaacccaaacgccaaccccaacgccaaccccaacgcaaacccgaacgccaacccaaacaaaaacaaccaaggcaacgggcaaggacacaacaugccaaacgaccccaaccgaaacgucgacgaaaacgccaacgccaacuccgcagucaaaaacaacaacaacgaagaacccucagacaaacacauaaaagaauaccucaacaaaauccaaaacucacucucaaccgaguggucacccugcagugugaccuguggcaacggaauacaaguacgcauaaaacccggaucagccaacaaaccgaaagacgaacuagacuacgccaacgacauagaaaaaaaaauaugcaaaauggagaaaugcagcucugucuucaacgucgucaacagcucaaucggacucauaaugguccucuccuuccuauuccucaacggcggagggggcucaggcggcggaggaaaauuagaauccaccagaaucuaucagauucucgccauauacagcacagucgcaagcucgcuuguccuugucguaucacuaggcgcaaucucauucuggaugugcuccaacggaagccugcaaugccgcauuugcauauaaggacuaguuauaagacugacuagcccgaugggccucccaacgggcccuccuccccuccuugcaccgagauuaauaaaaaaaaaaaaaaaaaaaaaaaaaaaaaaaaaaaaaaaaaaaaaaaaaaaaaaaaaaaaaaaaugcaucccccccccccccccccccccccccccccccaaaggcucuuuucagagccaccagaauu

SEQ ID NO: 2053 - RNA, 1450 nt, Artificial Sequence
  mRNA Design i-3 (A64-N5-C30-hSL-N5) comprising derived and/or modified sequence from Pf(3D7)__XP_001351122.1__Pf-CSP(199-377)_L(PVTN)_HBsAg (opt11)
aggagaaagcuuaccauggaccccaacgccaaccccaacgccaaccccaacgccaaucccaacgcuaaccccaacgccaaccccaacgcaaaccccaacgccaacccaaacgccaaccccaacgcaaaccccaacgccaaucccaaugccaaccccaacgccaaccccaacgcgaaccccaacgccaaccccaacgcaaacccaaacgccaaccccaacgccaaccccaacgccaaccccaacaaaaacaaccaaggcaacggccaaggccacaacaugcccaacgaccccaaccgcaacguagacgagaacgccaacgccaacagcgcugucaaaaacaacaacaacgaggaacccuccgacaaacacaucaaagaauaccuuaacaaaauccaaaacucucucuccaccgaguggucccccugcucagucacaugcggcaacggcauacaaguucguaucaaacccggcucagcaaacaaacccaaagacgaacucgacuacgcaaacgacauagaaaagaaaaucugcaaaauggaaaaauguucauccguccccgucaccaacauggaaaacaucacuuccggauuccucgguccccuacucguacuccaagccggcuucuuccuccucacccgcauccucaccaucccccaaucacuugacuccugguggaccucccucaacuuccucggcggcucccccgucugccuaggccaaaacagccaaucccccacuagcaaccacucccccacauccugcccacccaucugccccggauaucgauggaugugccuucgccgauucauaaucuuccucuucauccuccuacucugccucaucuuccuccucguccuucuagauuaccaaggcaugcuccccgucugcccccuuauccccggcuccaccaccacaaacaccggccccugcaaaaccugcacaacccccgcccaaggcaauagcauguuccccuccugcugcugcacuaaaccaacagacggcaacuguaccugcaucccaaucccaucaucaugggccuucgccaaauaccucugggaaugggcaucuguacgauucuccuggcucucccuucucguacccuucguccagugguucgucggccucucccccaccguauggcuauccgccaucuggaugaugugguacuggggccccucccuauacuccaucgucuccccauucauaccacuccuacccaucuucuucugccucugggucuacaucugaggacuaguuauaagacugacuagcccgaugggccucccaacgggcccuccuccccuccuugcaccgagauuaauaaaaaaaaaaaaaaaaaaaaaaaaaaaaaaaaaaaaaaaaaaaaaaaaaaaaaaaaaaaaaaaaugcaucccccccccccccccccccccccccccccccaaaggcucuuuucagagccaccagaauu

SEQ ID NO: 2054 - RNA, 1492 nt, Artificial Sequence
  mRNA Design i-3 (A64-N5-C30-hSL-N5) comprising derived and/or modified sequence from Pf(3D7)__XP_001351122.1__Pf-CSP(199-387)_L(PVTN)_HBsAg (opt11)
aggagaaagcuuaccaugauggcccccgaccccaacgcaaauccaaacgcaaaccccaacgccaacccuaacgcaaaccccaacgccaacccaaacgccaaucccaacgccaacccuaacgccaaccccaacgcaaaccccaacgccaaccccaacgccaacccuaacgcaaaccccaacgccaacccaaacgcaaaccccaacgccaaccccaacgccaaccccaacgcaaacccaaacgcaaaccccaacaaaaacaaccaaggaaacggacaaggccacaacaugccuaacgaccccaaucgcaacgucgacgaaaacgcaaacgccaacuccgccgucaaaaacaacaacaacgaagaacccucugacaaacacaucaaagaauaccucaacaagauccaaaacucccuauccaccgaauggucccccugcuccgucacuugcgguaauggcauccaaguccgcauaaaaccaggauccgcaaacaaacccaaagacgaacuagacuacgccaacgacauagaaaagaaaaucugcaaaauggaaaaaugcuccucagucuucaaugucguaaacuccuccauuggccuaggccccgucaccaacauggaaaacauuaccuccggauuccucgguccucuccucguccuccaagccggauucuuucuccucacacgaauccucacuaucccucaaucccuggacucaugguggaccucccucaacuuccugggcggcucccccgucugccucggccaaaacagccaauccccaaccuccaaucacucccccacaagcugcccucccauaugccccggcuaccgcuggaugugccuccgucgcuucaucauauuccucuucauacuucuccucugccucaucuuccuccuuguccugcuagacuaccaaggcaugcuccccgucugcccacucauccccgguuccaccacaacaaacaccggccccugcaaaacaugcaccacacccgcccaagguaacuccauguuccccuccugcugcugcaccaaaccaaccgacggcaacugcacuugcauucccauccccucauccugggccuucgccaaauaccucugggaaugggcauccguccguuucucauggcuaucucuccuaguaccauucguacaaugguucguuggccucucccccaccguauggcucuccgccauauggaugaugugguacuggggcccuucacuuuacuccaucgucucacccuucaucccacuccuacccaucuucuucugccuuuggguauacaucuaaggacuaguuauaagacugacuagcccgaugggccucccaacgggcccuccuccccuccuugcaccgagauuaauaaaaaaaaaaaaaaaaaaaaaaaaaaaaaaaaaaaaaaaaaaaaaaaaaaaaaaaaaaaaaaaaugcaucccccccccccccccccccccccccccccccaaaggcucuuuucagagccaccagaauu

SEQ ID NO: 2055 - RNA, 676 nt, Artificial Sequence
  mRNA Design i-3 (A64-N5-C30-hSL-N5) comprising derived and/or modified sequence from Pf(3D7)__XP_001351122.1__HsALB_Pf-CSP(19-152) (opt11)
aggagaaagcuuaccaugaaaugggucaccuucaucucccuccucuuccucuucuccagcgcauacucccucuuccaagaauaccaaugcuacggcuccuccuccaacacccgcguccucaacgaacucaacuacgacaacgccggcaccaaccucuacaacgaacucgaaaugaacuacuacggcaaacaagaaaacugguacucccucaaaaaaaacucccgcucccuaggcgaaaacgacgacggaaacaacgaagacaacgaaaaacuccgcaaacccaaacacaaaaaacucaaacaacccgccgacggaaaccccgaccccaacgccaacccaaacgucgaccccaacgccaaccccaacgucgaccccaacgccaaccccaacgucgaccccaacgccaaccccaacgcaaacccaaacgcaaacccaaacgccaaccccaacgccaaccccaacgccaaccccuaaggacuaguuauaagacugacuagcccgaugggccucccaacgggcccuccuccccuccuugcaccgagauuaauaaaaaaaaaaaaaaaaaaaaaaaaaaaaaaaaaaaaaaaaaaaaaaaaaaaaaaaaaaaaaaaaugcaucccccccccccccccccccccccccccccccaaaggcucuuuucagagccaccagaauu

SEQ ID NO: 2056 - RNA, 796 nt, Artificial Sequence
  mRNA Design i-3 (A64-N5-C30-hSL-N5) comprising derived and/or modified sequence from Pf(3D7)__XP_001351122.1__HsALB_Pf-CSP(19-192) (opt11)
aggagaaagcuuaccaugaaauggguaaccuucauaucccuccucuuccuauucucgagcgccuacucccucuuccaagaauaccaaugcuacggcucauccuccaacacccgcguccucaacgaacucaacuacgacaacgccggcaccaaccucuacaacgaacuagagaugaacuacuacggcaaacaagaaaacugguacucacucaaaaaaaacucccgaucccuaggagaaaacgacgacggcaacaacgaagacaacgaaaaacuacgaaaacccaaacacaaaaaacucaaacaacccgccgacggcaaccccgaccccaacgccaaccccaacgucgaccccaacgccaacccaaacguagaccccaacgccaaccccaacgucgacccaaacgccaaccccaacgccaaccccaacgccaacccaaacgcaaacccaaacgcaaacccaaacgccaacccaaacgccaaccccaacgccaaccccaacgcaaaccccaacgcaaaccccaacgccaacccaaacgcaaaccccaacgccaacccaaacgccaacccaaacgccaaccccaacgcaaaccccuaaggacuaguuauaagacugacuagcccgaugggccucccaacgggcccuccuccccuccuugcaccgagauuaauaaaaaaaaaaaaaaaaaaaaaaaaaaaaaaaaaaaaaaaaaaaaaaaaaaaaaaaaaaaaaaaaugcaucccccccccccccccccccccccccccccccaaaggcucuuuucagagccaccagaauu

SEQ ID NO: 2057 - RNA, 1036 nt, Artificial Sequence
  mRNA Design i-3 (A64-N5-C30-hSL-N5) comprising derived and/or modified sequence from Pf(3D7)__XP_001351122.1__HsALB_Pf-CSP(19-272) (opt11)
aggagaaagcuuaccaugaaauggguaaccuucaucucccuccucuuccuauucucaucagcauacucacucuuccaagaauaccaaugcuacggcucgagcucaaacacacgcguacucaacgaacugaacuacgacaacgccggaaccaaccucuacaaugaacucgaaaugaacuacuacggcaaacaagagaacugguacucacucaaaaaaaacagcagaagccucggagaaaacgacgacggaaacaacgaagacaacgaaaaacuccgcaaacccaagcacaaaaaacuaaaacaacccgcagacggaaaccccgaccccaacgcaaacccgaacgucgacccaaacgccaacccaaacguagaccccaacgcgaacccaaacguagacccaaacgccaacccaaacgcaaaccccaacgccaaccccaacgcaaacccaaacgccaacccaaacgcaaaccccaaugcaaaccccaacgcaaacccaaacgccaaccccaacgcaaacccaaacgcaaacccaaacgcaaacccaaacgcaaacccaaacgcgaacccaaacgcaaacccaaacgcaaacccgaacgcaaacccaaacguagacccaaacgcaaaccccaacgccaacccaaacgcaaacccaaacgcaaacccaaacgcaaacccaaacgcgaacccaaacgccaacccaaacgcaaacccaaacgcaaacccaaacgcaaacccaaacgcaaacccaaacgcaaacccaaacgcaaacccgaacgcgaacccaaacgcaaacccaaacgcgaacccgaacgcaaaccccaacgcaaacccauaaggacuaguuauaagacugacuagcccgaugggccucccaacgggcccuccuccccuccuugcaccgagauuaauaaaaaaaaaaaaaaaaaaaaaaaaaaaaaaaaaaaaaaaaaaaaaaaaaaaaaaaaaaaaaaaaugcaucccccccccccccccccccccccccccccccaaaggcucuuuucagagccaccagaauu

SEQ ID NO: 2058 - RNA, 1198 nt, Artificial Sequence
  mRNA Design i-3 (A64-N5-C30-hSL-N5) comprising derived and/or modified sequence from Pf(3D7)__XP_001351122.1__HsALB_Pf-CSP(19-272)_L(AAY)_Pf-CSP(310-3 27)_L(AAY)_Pf-CSP(346-375) (opt11)
aggagaaagcuuaccaugaaaugggucaccuucaucucacuccuauuccuauucuccuccgcauacucacucuuccaagaauaccagugcuacggaucaagcuccaacacacgcguacuaaacgaacugaacuacgacaacgccggaaccaaccucuacaacgaacucgaaaugaauuacuacggcaaacaagagaacugguacucacucaaaaaaaacagcagaucccuaggcgaaaacgacgacggaaacaacgaagacaacgaaaaacuacgcaaacccaaacacaaaaaacuaaaacaacccgcagacggaaacccagauccaaacgcaaacccaaacguagacccaaacgccaacccaaacguagacccaaacgcaaacccaaacguagaccccaacgcaaacccaaacgcaaacccgaacgccaacccaaacgcaaaccccaacgccaacccaaacgcaaacccaaacgcaaacccaaacgcaaacccaaacgccaaccccaacgcgaacccaaacgcaaacccuaacgccaacccaaacgcaaacccaaacgcaaacccgaacgcaaacccaaacgcaaacccaaacgcaaacccgaacguagacccaaacgcaaacccaaacgcaaacccaaacgcaaacccaaacgccaacccaaacgccaacccaaacgcaaaccccaacgcaaaccccaacgcgaacccaaacgccaaccccaacgcaaacccaaacgccaacccaaacgccaacccgaacgcaaacccaaacgccaacccaaacgccaacccgaacgcaaacccaaacgccaacccaaacgccaacccagccgcguacgaacccucagauaaacacauaaaagaauaccucaacaaaauccaaaacucacuagcagccuacaucaaaccaggauccgccaacaaacccaaggacgaacucgacuacgcaaacgacaucgaaaaaaaaaucugcaaaauggaaaaaugcucaugaggacuaguuauaagacugacuagcccgaugggccucccaacgggcccuccuccccuccuugcaccgagauuaauaaaaaaaaaaaaaaaaaaaaaaaaaaaaaaaaaaaaaaaaaaaaaaaaaaaaaaaaaaaaaaaaugcaucccccccccccccccccccccccccccccccaaaggcucuuuucagagccaccagaauu

SEQ ID NO: 2059 - RNA, 1159 nt, Artificial Sequence
  mRNA Design i-3 (A64-N5-C30-hSL-N5) comprising derived and/or modified sequence from Pf(3D7)__XP_001351122.1__HsALB_Pf-CSP(19-272)_L(AAY)_Pf-CSP(346-3 65)_L(AAY)_P2 (opt11)
aggagaaagcuuaccaugaaaugggucaccuucaucucacuccuauuccuauucucgagcgcauacucacucuuccaagaauaccaaugcuauggcuccagcucaaacacacgcguccuaaacgaacucaacuacgacaacgccggaacaaaccucuacaacgaacucgaaaugaacuacuacggcaaacaagaaaacugguacucgcucaaaaaaaacucccgaagucuaggcgaaaacgacgacggaaacaacgaagacaacgaaaaacuacgcaaacccaaacacaaaaaacuaaaacaacccgcagacggaaaccccgacccaaacgcaaaccccaacguagacccaaacgcaaaccccaacguagacccaaacgcaaacccgaacguagacccaaacgccaacccaaacgccaaccccaacgcaaacccaaacgccaaccccaacgcaaacccaaacgcaaacccaaacgcaaacccaaacgcaaacccaaacgccaaccccaacgccaacccaaacgccaaccccaacgcgaaccccaacgcgaacccaaacgccaacccaaacgcaaaccccaacgcaaacccaaacgcaaacccaaacgucgacccaaacgcaaacccaaacgcaaacccgaacgcaaacccaaacgcaaaccccaacgccaacccaaacgcgaacccaaacgccaacccaaacgccaacccaaacgcaaacccaaacgccaacccaaacgcaaacccaaacgcaaaccccaacgcaaaccccaacgcaaacccaaacgccaaccccaacgcaaaccccaacgcaaacccaaacgccaacccagccgcauacauaaaacccggcuccgccaacaaaccaaaagacgaacuagacuacgccaacgacauagaagcagccuaccaauacaucaaagccaacagcaaauucauaggaauaaccgagcuauaaggacuaguuauaagacugacuagcccgaugggccucccaacgggcccuccuccccuccuugcaccgagauuaauaaaaaaaaaaaaaaaaaaaaaaaaaaaaaaaaaaaaaaaaaaaaaaaaaaaaaaaaaaaaaaaaugcaucccccccccccccccccccccccccccccccaaaggcucuuuucagagccaccagaauu

SEQ ID NO: 2060 - RNA, 1153 nt, Artificial Sequence
  mRNA Design i-3 (A64-N5-C30-hSL-N5) comprising derived and/or modified sequence from Pf(3D7)__XP_001351122.1__HsALB_Pf-CSP(19-272)_L(AAY)_Pf-CSP(346-3 65)_L(AAY)_PADRE (opt11)
aggagaaagcuuaccaugaaauggguaaccuucaucucgcuacuguuccucuucucauccgcauacucccucuuccaagaauaccaaugcuacggcucauccucaaacacacgaguacuaaacgaacucaacuacgacaacgccggaaccaaccuauacaacgaacucgaaaugaacuacuacggcaaacaagaaaacugguacucacucaaaaaaaacucccgaucccucggcgaaaacgacgacggaaacaacgaagacaacgaaaaacugagaaaacccaaacacaaaaaacuaaaacaaccagccgacggcaacccagaccccaacgcaaaccccaacguagacccaaacgccaaccccaacguagacccaaacgcaaacccaaacguagaccccaacgccaacccaaacgccaacccaaacgccaaccccaacgcaaacccaaacgcaaacccaaacgcaaacccaaacgccaacccaaacgcaaacccaaacgccaacccgaacgcaaaccccaacgcaaacccaaacgcaaaccccaacgccaacccaaacgcaaacccaaacgcaaaccccaacgcaaacccaaaugcgaacccaaacguggacccgaacgcaaaccccaacgccaacccaaacgcaaaccccaacgccaaccccaacgccaaccccaacgcaaaccccaacgccaaccccaacgccaacccaaacgccaacccaaacgcgaacccaaacgcaaaccccaacgcaaacccaaacgcaaacccaaacgcaaacccaaacgcaaaccccaacgcaaacccaaacgcaaacccaaacgcaaaccccgcagccuacauuaaaccaggcuccgccaacaaacccaaagacgaacucgacuacgccaacgacauagaagcagccuacgccaaauucguagccgcauggacacucaaagccgcagccuaaggacuaguuauaagacugacuagcccgaugggccucccaacgggcccuccuccccuccuugcaccgagauuaauaaaaaaaaaaaaaaaaaaaaaaaaaaaaaaaaaaaaaaaaaaaaaaaaaaaaaaaaaaaaaaaaugcaucccccccccccccccccccccccccccccccaaaggcucuuuucagagccaccagaauu

SEQ ID NO: 2061 - RNA, 1210 nt, Artificial Sequence
  mRNA Design i-3 (A64-N5-C30-hSL-N5) comprising derived and/or modified sequence from Pf(3D7)__XP_001351122.1__HsALB_Pf-CSP(19-272)_L(G4S)_Pf-CSP(310-3 27)_L(G4S)_Pf-CSP(346-375) (opt11)
aggagaaagcuuaccaugaaaugggucaccuucaucucccuacuauuccucuucucaucagccuacucacucuuccaagaguaccaaugcuacggcucaagcucaaacacacgcguacucaacgaacuaaacuacgacaacgcaggcaccaaccucuacaacgaacucgagaugaacuacuacggcaaacaagaaaacugguacucacucaaaaaaaacucccgcagccucggcgaaaacgacgacggcaacaacgaagauaacgagaaacuacgcaaacccaaacacaaaaaacuaaaacaacccgccgacggaaacccagacccaaacgccaacccaaacguagacccaaacgcaaacccaaacguagacccaaacgccaaccccaacguagacccaaacgccaacccaaacgccaacccaaacgcaaacccaaacgcaaacccaaacgcgaacccaaacgcaaaccccaacgccaacccaaacgcaaacccaaacgccaaccccaacgcaaacccaaacgcaaaccccaacgcaaacccaaacgccaaccccaacgcaaaccccaacgcaaacccaaacgcaaacccaaacgcaaacccaaacgucgacccaaacgcaaaccccaacgcaaacccaaacgcaaacccaaacgccaacccaaacgcaaacccaaacgccaacccaaacgcaaaccccaacgcaaaccccaacgccaacccaaacgcaaaccccaacgcgaacccaaacgcaaacccaaacgcaaacccaaacgcaaaccccaacgcaaaccccaacgcaaacccaaacgcaaacccaaacgcaaacccaggcggcggcggaagcgaacccucggacaaacacauaaaagaauaccucaacaaaauccaaaacucccucggaggcggaggcuccaucaaacccggaagcgcaaacaaacccaaagacgaacucgacuacgcaaacgacaucgagaaaaaaauaugcaaaauggaaaaaugcucauaaggacuaguuauaagacugacuagcccgaugggccucccaacgggcccuccuccccuccuugcaccgagauuaauaaaaaaaaaaaaaaaaaaaaaaaaaaaaaaaaaaaaaaaaaaaaaaaaaaaaaaaaaaaaaaaaugcaucccccccccccccccccccccccccccccccaaaggcucuuuucagagccaccagaauu

SEQ ID NO: 2062 - RNA, 1195 nt, Artificial Sequence
  mRNA Design i-3 (A64-N5-C30-hSL-N5) comprising derived and/or modified sequence from Pf(3D7)__XP_001351122.1__HsALB_Pf-CSP(19-272)_L(G4S)_Pf-CSP(310-3 27)_Pf-CSP(346-375) (opt11)
aggagaaagcuuaccaugaaauggguaaccuucaucucacuccuauuccucuucuccuccgcauacucgcucuuccaagaauaccaaugcuacggcucaagcucaaacacccgcguccucaacgaacucaacuacgacaacgccgguaccaaccuauacaacgaacucgaaaugaacuacuacggcaaacaagaaaacugguacucacucaaaaaaaacuccaggucccuaggagaaaacgacgauggcaacaacgaagacaacgaaaaacuccgaaagccaaaacacaaaaaacuaaaacagcccgcagacggcaacccagacccaaacgcaaacccaaacguagacccaaacgcgaaccccaacguagacccaaacgcaaacccaaacguagacccaaacgcaaaccccaacgcaaacccaaacgcaaaccccaacgcaaaccccaacgcaaacccaaacgcaaacccaaacgcaaacccaaacgcaaacccaaacgcaaaccccaacgccaaccccaacgcaaacccaaacgcaaacccaaacgcaaacccaaacgcaaacccaaacgcaaaccccaacgccaacccaaacgcaaacccaaacguagacccaaacgcaaacccaaacgcaaacccaaacgcaaaccccaacgccaacccaaacgcaaacccaaacgcaaacccaaacgcaaacccaaacgcaaauccaaacgcuaacccaaacgcaaacccgaacgcaaaccccaaugcaaaccccaacgcaaacccaaacgccaacccaaacgcaaacccaaacgcgaacccaaacgcaaacccaaacgcaaacccaggcggaggcggauccgaacccuccgacaaacacauaaaagaauaccuaaacaaaauccaaaacucucucauaaaacccggaucagccaacaaaccaaaagacgaacuagacuacgccaaugacauagaaaaaaaaauaugcaagauggaaaaaugcagcuaaggacuaguuauaagacugacuagcccgaugggccucccaacgggcccuccuccccuccuugcaccgagauuaauaaaaaaaaaaaaaaaaaaaaaaaaaaaaaaaaaaaaaaaaaaaaaaaaaaaaaaaaaaaaaaaaugcaucccccccccccccccccccccccccccccccaaaggcucuuuucagagccaccagaauu

SEQ ID NO: 2063 - RNA, 1195 nt, Artificial Sequence
  mRNA Design i-3 (A64-N5-C30-hSL-N5) comprising derived and/or modified sequence from Pf(3D7)__XP_001351122.1__HsALB_Pf-CSP(19-325) (opt11)
aggagaaagcuuaccaugaaauggguaaccuucaucucacuccuguuccuauucucauccgcauacucacucuuccaagaauaccaaugcuacggcucgucuucaaacacccgcguacucaacgaacucaacuacgacaacgccggaaccaaccucuacaacgaacucgaaaugaacuacuacggcaaacaagaaaacugguacucacucaaaaaaaacagccgaagccuaggcgaaaacgacgacggaaacaaugaagacaacgaaaaacuccgcaaacccaaacacaaaaaacucaaacaaccagcagacggaaaccccgacccgaacgcaaacccaaacguagacccaaacgcaaacccaaacguagacccaaacgcgaacccaaacguagaccccaacgcaaacccaaacgcaaacccaaacgcaaacccaaacgccaaccccaacgccaacccaaacgccaacccaaacgcaaacccgaacgcgaacccaaacgcaaaccccaacgcaaacccaaacgcaaacccaaacgcgaacccaaacgccaacccaaacgccaacccaaacgcaaacccaaacgccaacccaaacgcaaaccccaacguggaccccaacgcaaacccaaacgcaaacccaaacgccaaccccaacgcaaacccaaacgcaaacccuaacgcaaacccaaacgcaaaccccaacgcgaacccaaacgcaaacccaaacgcaaacccaaacgcaaaccccaacgcaaacccaaacgccaacccaaacgccaacccaaacgcgaauccaaacgcaaaccccaacgcaaacccaaacgcaaacccgaacaaaaacaaccaagggaacggacaaggacacaacaugccaaacgaccccaaccgcaacgucgacgaaaacgccaacgccaacuccgcaguaaaaaacaacaacaacgaagaacccuccgacaaacacauaaaagaauaccucaacaagauacaaaacuagggacuaguuauaagacugacuagcccgaugggccucccaacgggcccuccuccccuccuugcaccgagauuaauaaaaaaaaaaaaaaaaaaaaaaaaaaaaaaaaaaaaaaaaaaaaaaaaaaaaaaaaaaaaaaaaugcaucccccccccccccccccccccccccccccccaaaggcucuuuucagagccaccagaauu

SEQ ID NO: 2064 - RNA, 1372 nt, Artificial Sequence
  mRNA Design i-3 (A64-N5-C30-hSL-N5) comprising derived and/or modified sequence from Pf(3D7)__XP_001351122.1__HsALB_Pf-CSP(19-384) (opt11)
aggagaaagcuuaccaugaaauggguaaccuucaucucacuacucuuccuauucucaagcgcguacucacucuuccaagaauaccaaugcuacggcucgagcucaaacacccgcguucucaacgaacuaaacuacgacaacgccggaaccaaccuauacaacgaacuugaaaugaacuacuacggcaaacaagaaaacugguacucgcucaaaaaaaacuccaggagccuaggcgaaaacgacgacggaaacaacgaagacaacgagaaacuaagaaaacccaaacacaaaaaacucaaacagcccgcggacggaaaccccgacccaaacgcaaaccccaacguagacccgaacgccaacccaaacguagacccaaacgcaaacccaaacguagaccccaacgcaaacccgaacgccaacccaaacgcaaacccaaaugcgaaccccaacgcgaacccaaacgcaaacccgaacgcaaaccccaacgccaacccaaacgcaaacccaaacgcaaaccccaacgcaaacccaaacgcgaacccaaacgcaaacccaaacgcgaacccgaacgcaaacccaaacgcaaacccgaacgcaaacccaaacguagacccaaacgccaacccaaacgcaaacccaaacgcaaaccccaacgcaaacccaaacgcaaacccgaacgcaaacccaaacgcaaacccaaacgcgaacccaaacgcaaaccccaacgcaaacccaaacgcaaacccuaacgcaaacccgaacgcaaacccaaacgccaacccaaacgcgaaccccaacgcaaacccaaacgccaacccaaacgccaacccgaacaaaaacaaccaaggaaacggacaaggacacaacaugccaaacgaccccaaccgaaacgucgacgaaaacgcaaacgccaacagugccgucaaaaacaacaacaaugaagaacccucagacaaacacauaaaagaauaccuaaacaaaauccagaacucgcucucaaccgaauggucacccugcagcgucaccugcggcaacggaauacaaguacgcaucaaaccaggcucggccaacaaaccaaaagacgaauuagacuacgcaaacgacaucgaaaaaaaaauaugcaaaauggaaaaaugcagcucagucuucaacguagucaauagcucauaaggacuaguuauaagacugacuagcccgaugggccucccaacgggcccuccuccccuccuugcaccgagauuaauaaaaaaaaaaaaaaaaaaaaaaaaaaaaaaaaaaaaaaaaaaaaaaaaaaaaaaaaaaaaaaaaugcaucccccccccccccccccccccccccccccccaaaggcucuuuucagagccaccagaauu

SEQ ID NO: 2065 - RNA, 1510 nt, Artificial Sequence
  mRNA Design i-3 (A64-N5-C30-hSL-N5) comprising derived and/or modified sequence from Pf(3D7)__XP_001351122.1__HsALB_Pf-CSP(19-384)_TM domain HA (opt11)
aggagaaagcuuaccaugaagugggucaccuucaucucccuccuauuccucuucucuagcgcguacucacucuuccaagaauaccaaugcuacggauccagcucaaacacacgcguccucaaugaacugaacuacgauaacgccggaaccaaccucuacaacgaacucgaaaugaacuacuacggcaaacaagaaaacugguacucacuaaagaaaaauagcaggucccucggcgaaaacgacgacgggaacaacgaagauaacgaaaaacuacgcaaacccaagcacaagaaacuaaaacagccagcagacggaaacccagaccccaacgccaacccaaacgucgaccccaacgcaaacccaaacguagauccgaacgcaaacccaaacgucgauccaaacgcaaacccaaacgcaaacccaaacgcuaaccccaacgccaacccaaacgcaaacccgaacgcaaaccccaacgcgaacccgaacgcaaacccaaacgcaaacccaaacgccaacccaaacgcaaacccaaacgcaaacccaaacgccaacccaaacgcaaaccccaacgcgaaccccaacgcaaaccccaacgcaaacccaaacgucgacccaaacgcaaaccccaacgcaaaccccaacgcaaaccccaaugcaaacccaaacgcgaaccccaacgcaaacccaaacgcgaacccaaaugcaaaccccaacgccaaccccaacgccaacccgaacgcaaacccaaacgccaacccaaacgccaacccaaacgcaaaucccaacgccaacccaaacgcgaacccgaacgcaaacccaaacgcaaacccgaacaaaaacaaccaaggaaacggucaaggacacaacaugccaaacgaccccaaccgcaacgucgacgaaaacgccaaugccaacagcgccgucaaaaacaacaacaacgaagaacccucagacaaacacaucaaagaguaccuaaacaagauccaaaacucccucuccaccgaauggucccccugcagcguaaccugcggaaacggcauccaaguccgcauaaaaccaggcucagccaacaaaccaaaagaugaacucgacuacgcaaacgacauagaaaagaaaaucugcaaaauggaaaaaugcagcuccguauucaacgugguuaacuccucaaaacuagaauccacccgcaucuaccaaauacucgcaauauacagcacaguagccagcucacucguccuagucgucucccucggagccaucagcuucuggaugugcuccaacggaaguuuacaaugucgcauaugcauauaaggacuaguuauaagacugacuagcccgaugggccucccaacgggcccuccuccccuccuugcaccgagauuaauaaaaaaaaaaaaaaaaaaaaaaaaaaaaaaaaaaaaaaaaaaaaaaaaaaaaaaaaaaaaaaaaugcaucccccccccccccccccccccccccccccccaaaggcucuuuucagagccaccagaauu

SEQ ID NO: 2066 - RNA, 1222 nt, Artificial Sequence
  mRNA Design i-3 (A64-N5-C30-hSL-N5) comprising derived and/or modified sequence from Pf(3D7)__XP_001351122.1__HsALB_Pf-CSP(82-397) (opt11)
aggagaaagcuuaccaugaaaugggucaccuucaucucacuccuguuccucuucucauccgccuacagcgacaacgaaaaacugcgcaaacccaaacacaagaaacucaaacaaccagccgacggcaaccccgaccccaacgccaacccaaacguagaccccaacgccaaccccaacguagacccaaacgccaacccaaacguggaccccaacgcaaacccaaacgccaacccaaacgccaauccaaacgccaacccaaacgcaaacccaaacgcaaaccccaacgccaacccuaacgccaaccccaacgcaaacccaaacgccaaccccaacgccaaccccaacgcaaaccccaacgcaaacccuaacgccaaccccaacgccaaccccaacgcaaacccaaacgccaaccccaacguagacccaaacgccaaccccaacgcaaaccccaacgccaacccaaacgcaaacccaaacgccaaccccaacgccaaccccaacgcaaacccaaacgcaaacccaaaugcaaaccccaacgccaaccccaacgccaaccccaacgcaaaccccaacgcaaaccccaacgcaaacccgaacgccaacccaaacgccaacccaaacgccaaccccaacgcaaaccccaacaaaaacaaccaaggcaacggacaaggacacaacaugcccaacgaccccaaccgcaacgucgacgaaaacgccaacgccaacuccgccgucaaaaacaacaacaacgaagaacccuccgacaaacacaucaaagaauaccucaacaaaauccaaaacucccucucaaccgaauggucacccugcuccguaaccugcggcaacggcauccaaguccgcaucaaacccggcucagccaacaaacccaaagacgaacucgacuacgccaaugacaucgaaaagaaaauaugcaaaauggaaaaaugcuccuccgucuucaacgucgucaacuccuccaucggccucaucaugguccucucguuccuauuccuaaacuaaggacuaguuauaagacugacuagcccgaugggccucccaacgggcccuccuccccuccuugcaccgagauuaauaaaaaaaaaaaaaaaaaaaaaaaaaaaaaaaaaaaaaaaaaaaaaaaaaaaaaaaaaaaaaaaaugcaucccccccccccccccccccccccccccccccaaaggcucuuuucagagccaccagaauu

SEQ ID NO: 2067 - RNA, 574 nt, Artificial Sequence
  mRNA Design i-3 (A64-N5-C30-hSL-N5) comprising derived and/or modified sequence from Pf(3D7)__XP_001351122.1__HsALB_Pf-CSP(93-192) (opt11)
aggagaaagcuuaccaugaaauggguaaccuucaucucacuccuauuccuauucucaagcgcauacucaaaacuaaaacaacccgcagacggaaacccagacccaaacgcaaacccaaacguagacccaaacgcaaacccaaacguagacccaaacgcaaacccaaacguagacccaaacgcaaacccaaacgcaaacccaaacgcaaacccaaacgcaaacccaaacgcaaaccccaacgcaaacccaaacgcaaacccaaacgcaaacccaaacgcaaacccaaacgcaaacccaaacgcaaacccaaacgcaaacccaaacgcaaacccaaacgcaaacccaaacgccaacccaaacgcaaacccauaaggacuaguuauaagacugacuagcccgaugggccucccaacgggcccuccuccccuccuugcaccgagauuaauaaaaaaaaaaaaaaaaaaaaaaaaaaaaaaaaaaaaaaaaaaaaaaaaaaaaaaaaaaaaaaaaugcaucccccccccccccccccccccccccccccccaaaggcucuuuucagagccaccagaauu

SEQ ID NO: 2068 - RNA, 814 nt, Artificial Sequence
  mRNA Design i-3 (A64-N5-C30-hSL-N5) comprising derived and/or modified sequence from Pf(3D7)__XP_001351122.1__HsALB_Pf-CSP(93-272) (opt11)
aggagaaagcuuaccaugaaaugggucaccuucaucucacuccuauuccuauucucauccgcauacucaaaacuaaaacaacccgccgacggaaacccagacccaaacgcaaacccaaacguagacccaaacgcaaacccaaacguagacccaaacgcaaacccaaacguagacccaaacgcaaacccaaacgccaacccaaacgcaaauccaaacgcaaacccaaacgcaaacccaaacgcaaacccaaacgcaaacccaaacgccaacccaaacgccaacccaaacgcaaacccaaacgcaaacccaaacgcaaacccaaacgcaaacccaaacgcaaacccaaacgccaaccccaacgcaaacccaaacgcaaaccccaacguagacccaaacgcaaacccaaacgccaaccccaacgcaaaccccaacgccaaccccaacgccaacccaaacgccaacccaaacgcaaacccaaacgcaaacccaaacgcaaacccaaacgcaaacccaaacgcaaacccaaacgcaaacccaaacgcaaacccaaacgcaaacccaaacgccaacccaaacgcaaacccaaacgcaaacccgaacgcaaacccauaaggacuaguuauaagacugacuagcccgaugggccucccaacgggcccuccuccccuccuugcaccgagauuaauaaaaaaaaaaaaaaaaaaaaaaaaaaaaaaaaaaaaaaaaaaaaaaaaaaaaaaaaaaaaaaaaugcaucccccccccccccccccccccccccccccccaaaggcucuuuucagagccaccagaauu

SEQ ID NO: 2069 - RNA, 1189 nt, Artificial Sequence
  mRNA Design i-3 (A64-N5-C30-hSL-N5) comprising derived and/or modified sequence from Pf(3D7)__XP_001351122.1__HsALB_Pf-CSP(93-397) (opt11)
aggagaaagcuuaccaugaaaugggucacauucaucucacuccuauuccuauucucaagcgccuacuccaaacucaaacaacccgccgacggcaacccagacccaaacgccaaccccaacgucgacccaaacgccaacccaaacgucgacccaaacgcaaacccaaacgucgaccccaacgccaaccccaacgccaaccccaacgccaacccaaacgccaaucccaacgccaaccccaacgccaacccaaacgcaaaccccaacgccaauccaaacgccaaccccaacgcaaaccccaacgccaaccccaacgcaaacccaaacgcaaacccaaacgcaaaccccaacgccaaccccaacgcaaaccccaacgccaaccccaacgucgaccccaacgccaacccaaacgccaacccaaacgccaaccccaacgccaaccccaacgcaaacccaaacgcgaaccccaacgcaaaccccaacgccaacccgaacgccaacccgaacgcaaacccaaacgccaaccccaacgcaaaccccaacgcaaacccaaacgcgaaccccaacgccaacccaaacgccaacccaaacgcgaacccaaacgccaaccccaacaaaaacaaccaagggaacggacaaggccacaacaugcccaacgaccccaaccgcaacgucgacgaaaacgccaacgccaacuccgccgucaaaaacaacaacaacgaagaacccuccgacaaacacauaaaagaauaccuaaacaaaauccaaaacucacucucuacugaauggucccccugcucagucaccugcggcaacggcauacaaguccgcauaaaacccggcucggccaacaaaccaaaagacgaacuagacuacgcaaacgacaucgaaaaaaaaauaugcaaaauggaaaaaugcuccucagucuucaacguaguaaacuccuccaucggccucauaaugguccucuccuuccuauuccucaacuaaggacuaguuauaagacugacuagcccgaugggccucccaacgggcccuccuccccuccuugcaccgagauuaauaaaaaaaaaaaaaaaaaaaaaaaaaaaaaaaaaaaaaaaaaaaaaaaaaaaaaaaaaaaaaaaaugcaucccccccccccccccccccccccccccccccaaaggcucuuuucagagccaccagaauu

SEQ ID NO: 2070 - RNA, 559 nt, Artificial Sequence
  mRNA Design i-3 (A64-N5-C30-hSL-N5) comprising derived and/or modified sequence from Pf(3D7)__XP_001351122.1__HsALB_Pf-CSP(98-192) (opt11)
aggagaaagcuuaccaugaaaugggucacauucauaagccuacucuuccucuucagcucagccuacuccgcagacggaaacccagacccaaacgcaaacccaaacguagacccaaacgcaaacccaaacguagacccaaacgcaaacccaaacguagacccaaacgcaaacccaaacgcaaacccaaacgcaaacccaaacgcaaacccaaacgcaaacccaaacgcaaacccaaacgcaaacccaaacgcaaacccaaacgcaaacccaaacgcaaaccccaacgcaaacccaaacgcaaacccaaacgcaaacccaaacgcaaacccaaacgcaaacccaaacgcaaacccauaaggacuaguuauaagacugacuagcccgaugggccucccaacgggcccuccuccccuccuugcaccgagauuaauaaaaaaaaaaaaaaaaaaaaaaaaaaaaaaaaaaaaaaaaaaaaaaaaaaaaaaaaaaaaaaaaugcaucccccccccccccccccccccccccccccccaaaggcucuuuucagagccaccagaauu

SEQ ID NO: 2071 - RNA, 799 nt, Artificial Sequence
  mRNA Design i-3 (A64-N5-C30-hSL-N5) comprising derived and/or modified sequence from Pf(3D7)__XP_001351122.1__HsALB_Pf-CSP(98-272) (opt11)
aggagaaagcuuaccaugaaauggguaaccuucauaagccuacucuuccuauucucaucagccuacagcgcagacggaaacccagaccccaacgcaaacccaaacguagacccaaacgcaaacccaaacguagaccccaacgcaaacccaaacguagacccaaacgccaacccaaacgcaaacccaaacgcaaacccaaacgccaacccaaacgcaaacccaaacgccaacccaaacgcaaacccaaacgcaaacccaaacgcaaacccaaacgcaaacccaaacgcaaacccaaacgcaaacccaaacgccaacccaaacgcaaacccaaacgcaaacccaaacgcaaacccaaacgccaaccccaacguagacccaaacgccaaccccaacgcaaacccaaacgcaaacccaaacgcaaacccaaacgcaaacccaaacgcaaacccaaacgcaaacccaaacgcaaacccaaacgcaaacccgaacgccaacccaaacgcaaacccaaacgcaaacccaaacgcaaacccaaacgcaaacccaaacgcaaaccccaacgcaaacccaaacgcaaacccaaacgcaaacccauaaggacuaguuauaagacugacuagcccgaugggccucccaacgggcccuccuccccuccuugcaccgagauuaauaaaaaaaaaaaaaaaaaaaaaaaaaaaaaaaaaaaaaaaaaaaaaaaaaaaaaaaaaaaaaaaaugcaucccccccccccccccccccccccccccccccaaaggcucuuuucagagccaccagaauu

SEQ ID NO: 2072 - RNA, 1105 nt, Artificial Sequence
  mRNA Design i-3 (A64-N5-C30-hSL-N5) comprising derived and/or modified sequence from Pf(3D7)__XP_001351122.1__HsALB_Pf-CSP(98-374) (opt11)
aggagaaagcuuaccaugaaauggguaaccuucauaucccuacucuuccuuuucuccucggccuacuccgcagacggaaacccagacccaaacgcaaaccccaacguagacccaaacgcaaacccaaauguagacccaaacgcaaacccaaacguggacccaaacgcgaaccccaacgcaaaccccaacgcaaacccaaacgccaacccaaacgcaaacccaaacgccaacccaaacgcaaaccccaacgccaaccccaacgccaacccaaacgcaaacccaaacgcaaaccccaacgcaaacccaaacgccaacccaaacgccaacccaaacgccaaccccaacgcaaacccaaacgccaacccaaacguagacccaaacgcaaacccaaacgcaaacccaaacgcaaaccccaacgcaaaccccaacgcaaacccaaacgcaaacccaaacgcaaacccaaacgcaaacccaaacgccaacccaaacgcgaaccccaacgccaacccaaacgcaaacccaaacgccaacccaaacgccaacccaaacgcaaaccccaacgcaaacccaaacgcaaacccaaacgccaacccgaacaaaaacaaccaaggcaacggccaaggacacaacaugccaaacgaccccaaccgcaacguagacgaaaacgccaacgcaaacuccgcagucaaaaacaacaacaacgaagaacccuccgacaaacacauaaaagaauaccuaaacaaaauccaaaacucgcucucaaccgaauggucccccugcuccgucaccugcggcaacggcauccaaguacgcaucaaaccaggcucagcaaacaaaccaaaagacgaacucgacuacgccaacgacauagaaaaaaaaauaugcaaaauggagaaaugcuaaggacuaguuauaagacugacuagcccgaugggccucccaacgggcccuccuccccuccuugcaccgagauuaauaaaaaaaaaaaaaaaaaaaaaaaaaaaaaaaaaaaaaaaaaaaaaaaaaaaaaaaaaaaaaaaaugcaucccccccccccccccccccccccccccccccaaaggcucuuuucagagccaccagaauu

SEQ ID NO: 2073 - RNA, 1174 nt, Artificial Sequence
  mRNA Design i-3 (A64-N5-C30-hSL-N5) comprising derived and/or modified sequence from Pf(3D7)__XP_001351122.1__HsALB_Pf-CSP(98-397) (opt11)
aggagaaagcuuaccaugaaauggguaaccuucaucagccuacuauuccuauucagcuccgccuacagcgccgacggaaacccagacccaaacgccaaccccaacgucgacccaaacgccaaccccaacguagacccaaacgccaaccccaacgucgaccccaacgccaaccccaacgccaacccaaacgccaacccuaacgccaacccaaacgccaacccgaacgccaaccccaacgcgaacccaaacgccaacccaaacgcaaaccccaacgccaaccccaacgccaaccccaacgcaaaccccaacgcaaacccaaacgccaacccaaacgccaaccccaacgccaaccccaaugcaaacccaaacgucgaccccaacgccaacccaaacgccaaccccaacgccaaccccaacgccaaccccaacgcaaaccccaacgccaaccccaacgcgaaccccaacgccaaccccaacgccaacccaaacgccaaccccaacgccaaccccaacgccaaccccaacgcuaaccccaacgcaaacccaaacgccaacccaaacgccaacccaaacgccaaccccaacgccaacccaaacaaaaacaaccaaggcaacggacaaggacacaacaugccaaacgaccccaaccgcaacgucgacgaaaaugccaacgccaacuccgccgucaaaaacaacaacaacgaagaacccuccgacaaacacaucaaagaauaccuaaacaaaauacaaaacucucucucaaccgaauggucccccugcuccgucacaugcggcaacggcauccaaguccgcaucaaaccaggaucagccaauaaacccaaagacgaacucgacuacgccaacgacauagaaaaaaaaaucugcaaaauggaaaaaugcagcucagucuucaacgucgucaacuccucaaucggacuuauaaugguccuauccuuccucuuccuuaacuaaggacuaguuauaagacugacuagcccgaugggccucccaacgggcccuccuccccuccuugcaccgagauuaauaaaaaaaaaaaaaaaaaaaaaaaaaaaaaaaaaaaaaaaaaaaaaaaaaaaaaaaaaaaaaaaaugcaucccccccccccccccccccccccccccccccaaaggcucuuuucagagccaccagaauu

SEQ ID NO: 2074 - RNA, 1501 nt, Artificial Sequence
  mRNA Design i-3 (A64-N5-C30-hSL-N5) comprising derived and/or modified sequence from Pf(3D7)__XP_001351122.1__HsALB_Pf-CSP(199-377)_L(PVTN)_HBsAg (opt11)
aggagaaagcuuaccaugaaaugggucacauucaucucgcuccucuuccuauucuccuccgccuacuccgacccuaacgccaaucccaacgccaaccccaacgccaaccccaacgccaaccccaacgccaaccccaaugcaaacccaaacgcaaaccccaacgccaaccccaacgcaaacccaaaugcaaaccccaacgcaaaccccaacgccaaccccaaugccaaccccaacgcuaaccccaacgccaauccaaacgccaaccccaacgcaaaccccaacgccaacccuaacaaaaauaaccaaggcaacggccaaggacacaacaugcccaacgaccccaaccgaaaugucgacgaaaacgcuaacgcuaacagcgccgucaaaaacaacaacaacgaagaacccuccgacaaacacauuaaagaauaccucaacaaaauccaaaacucccucuccaccgaauggucccccugcucuguaacuugcggcaacggcauccaaguccgcauaaaacccggaucagcaaacaaacccaaagacgaacucgacuacgcaaacgacauugagaagaaaaucugcaaaauggaaaaaugcucaucaguacccgucacuaacauggaaaacaucaccuccggcuuccucggcccccuccuaguccuacaagccgguuucuuccuucuuacacgcauccuaaccaucccacaaucccuagacuccugguggacaucuuuaaacuuccuuggaggauccccugucugccucggccaaaacucccaauccccaaccucuaaccacucucccacauccugcccucccauaugccccgguuaccgcuggaugugccuccgccgcuucaucaucuuccucuucauacuccucuuaugccucaucuuccuccucguacuacucgacuaccaagguaugcuacccguaugcccucucauccccggcuccaccacaaccaacaccggccccugcaaaacaugcaccacccccgcacagggcaauuccauguuccccuccugcuguugcaccaaacccacagacggcaacuguaccugcauccccauccccuccucuugggcauuugccaaauaccucugggaaugggccuccguccgauucucuuggcuuucacuccucguucccuucguacaaugguucgucggccuaucacccaccgucuggcucuccgccaucuggaugaugugguacuggggcccuucacuuuacuccauagucagccccuucauaccacuccuccccaucuucuucugccuauggguauacaucuaaggacuaguuauaagacugacuagcccgaugggccucccaacgggcccuccuccccuccuugcaccgagauuaauaaaaaaaaaaaaaaaaaaaaaaaaaaaaaaaaaaaaaaaaaaaaaaaaaaaaaaaaaaaaaaaaugcaucccccccccccccccccccccccccccccccaaaggcucuuuucagagccaccagaauu

SEQ ID NO: 2075 - RNA, 1240 nt, Artificial Sequence
  mRNA Design i-3 (A64-N5-C30-hSL-N5) comprising derived and/or modified sequence from Pb(ANKA)__XP_022712148.1__Pb-CSP (opt11)
aggagaaagcuuaccaugaaaaaaugcaccauccucgucguagccucccuccuccuagucaacucccuccuccccggauacgggcaaaacaaaucaauucaagcccaacgcaaccucaacgaacucugcuacaacgaaggcaacgacaacaaacuauaccacguacucaacuccaaaaacgguaaaaucuacaaccgcaacacugucaaccgccuacucgccgacgcccccgaaggcaaaaaaaacgaaaaaaaaaacgaaaaaaucgaacgcaacaacaaacucaaacaacccccacccccaccaaaccccaacgacccccccccccccaaucccaaugaccccccaccccccaaccccaacgaccccccccccccaaaccccaacgacccccccccccccaacgccaacgauccaccuccucccaacgcaaacgacccagcaccuccaaacgccaacgaccccgcccccccaaacgcaaacgacccagcccccccaaacgcaaacgaccccgccccccccaacgccaacgacccacccccccccaaccccaacgacccagccccccccaaugccaacgacccccccccucccaaccccaacgaccccgcccccccacaaggaaacaacaacccacaaccccaaccacgaccccaaccccaaccccaaccccaaccacaaccacaaccccaaccccaaccacaaccccgaccacaaccccaaccccaacccggcggcaacaacaacaacaaaaacaacaacaacgacgacuccuacaucccauccgccgaaaaaauccucgaauucgucaaacaaauacgcgacuccauaaccgaagaauggucccaaugcaacgugaccugcggcucaggcauccgaguccgcaaacgcaaaggaucuaacaaaaaagccgaagaccucacccuagaagacaucgacaccgaaaucugcaaaauggacaaaugcuccuccauauucaacaucgucucaaacucacucggcuuugucauccuccucguacucgucuucuucaacuaaggacuaguuauaagacugacuagcccgaugggccucccaacgggcccuccuccccuccuugcaccgagauuaauaaaaaaaaaaaaaaaaaaaaaaaaaaaaaaaaaaaaaaaaaaaaaaaaaaaaaaaaaaaaaaaaugcaucccccccccccccccccccccccccccccccaaaggcucuuuucagagccaccagaauu

SEQ ID NO: 2076 - RNA, 1405 nt, Artificial Sequence
  mRNA Design i-3 (A64-N5-C30-hSL-N5) comprising derived and/or modified sequence from Pb(ANKA)__XP_022712148.1__Pb-CSP_L(G4SG4)_TM domain HA (opt11)
aggagaaagcuuaccaugaaaaaaugcacaauccuugucguagccucccuacuacucguaaacucacuccuacccggauacggccaaaacaaaucuauccaagcccaacguaaccuuaaugaacuaugcuacaacgaaggcaacgacaacaaacuuuaccacguccugaacuccaaaaacggcaaaaucuacaaccggaacaccguaaaucgccugcucgcugacgcaccagaaggaaaaaaaaacgaaaaaaaaaacgaaaaaauagagcguaacaacaagcucaaacaaccgcccccccccccaaaccccaacgaccccccccccccuaaccccaacgacccaccgccacccaacccaaacgacccccccccaccaaaccccaacgacccaccaccaccgaacgccaacgacccaccuccccccaacgccaacgacccugcaccccccaacgccaacgaucccgccccccccaacgccaacgacccagcacccccaaacgccaacgauccagcuccccccaacgccaacgaccccccaccccccaaccccaacgacccagcccccccaaacgcuaacgacccccccccccccaacccaaacgacccagcccccccccaaggcaacaacaacccucaaccccaaccccgcccgcaaccccaaccccaaccacaaccacaaccucaaccacaaccacaaccccaaccccgcccacaaccacaaccccaaccaggcggcaacaacaacaacaaaaacaacaacaacgacgacuccuacauccccucagcagaaaaaauccucgaguucgucaaacaaauccgcgacucuaucacagaagaauggucccaaugcaacguaaccugcggcucaggcauccgcguccgaaaacgaaaaggcucaaacaaaaaagccgaagaccucacacucgaagacaucgacaccgaaauaugcaaaauggacaaaugcuccuccauauucaacaucgucucaaacucucucgguuucgucaucuuacucguccucguauucuucaacggcggcggaggcuccggcggaggaggcaaacuagaauccaccagaaucuaccaaauccucgccauauacucuaccgucgccagcucccuuguccucguggucucccucggagcaaucuccuucuggaugugcucuaacggcucacuccaaugccguaucugcauuuaaggacuaguuauaagacugacuagcccgaugggccucccaacgggcccuccuccccuccuugcaccgagauuaauaaaaaaaaaaaaaaaaaaaaaaaaaaaaaaaaaaaaaaaaaaaaaaaaaaaaaaaaaaaaaaaaugcaucccccccccccccccccccccccccccccccaaaggcucuuuucagagccaccagaauu

SEQ ID NO: 2077 - RNA, 1225 nt, Artificial Sequence
  mRNA Design i-3 (A64-N5-C30-hSL-N5) comprising derived and/or modified sequence from Pb(ANKA)__XP_022712148.1__HsALB_Pb-CSP(24-340) (opt11)
aggagaaagcuuaccaugaaaugggucaccuucaucucccuacuauuccucuuuucauccgcuuacucacaaaacaaauccauccaagcccaacgcaaccucaaugaacuaugcuacaacgaaggcaacgacaacaaacucuaccacguccucaacucaaaaaacggaaaaauauacaaccgcaacaccguaaaccgccuacuagccgacgcccccgaaggcaaaaaaaacgaaaaaaaaaacgaaaaaaucgaacgcaacaacaaacuaaaacaacccccccccccccccaaccccaacgacccccccccccccaaccccaacgaccccccacccccaaacccaaacgaccccccuccccccaacccaaacgaccccccaccccccaacgcaaacgacccccccccacccaacgccaacgaccccgccccccccaacgccaacgaucccgccccccccaacgccaacgaccccgccccccccaacgccaacgacccagccccccccaacgcaaacgacccccccccccccaaccccaacgaccccgcaccccccaacgccaacgacccacccccacccaaccccaacgaccccgcacccccacaaggaaacaacaacccccaaccccaaccccgaccccaaccccaaccccaaccccaaccccaaccgcaaccccagccacaaccacaaccccgcccucaaccucaaccccaacccggaggaaacaacaacaacaaaaauaacaacaacgaugacuccuacauccccuccgcagaaaaaauacucgaauucguaaaacaaauccgcgacucaaucaccgaagaauggucccaaugcaacguaaccugcggcuccggcauccgcguccgcaaacgcaaaggcuccaacaagaaagccgaagaccucacacuggaagacauagacaccgaaauaugcaaaauggauaaaugcuccuccaucuucaacaucgucuccaacucucucggcuucguaauacuucucguucucguauucuucaacuaaggacuaguuauaagacugacuagcccgaugggccucccaacgggcccuccuccccuccuugcaccgagauuaauaaaaaaaaaaaaaaaaaaaaaaaaaaaaaaaaaaaaaaaaaaaaaaaaaaaaaaaaaaaaaaaaugcaucccccccccccccccccccccccccccccccaaaggcucuuuucagagccaccagaauu

SEQ ID NO: 2078 - RNA, 1243 nt, Artificial Sequence
  mRNA Design i-3 (A64-N5-C30-hSL-N5) comprising derived and/or modified sequence from Pb(ANKA)__XP_022712148.1__HsIns-iso1_Pb-CSP(24-340) (opt11)
aggagaaagcuuaccauggcccucuggaugcgacuacucccccuccucgcacuccuagcccucuggggccccgaccccgccgccgcacaaaacaaauccauccaagcccaacgcaaccucaaugaacucugcuacaacgaaggcaacgacaacaaacucuaccacguccucaacucaaaaaacggaaaaaucuacaaccgaaacaccgucaaccgccuccuugccgacgccccagaaggcaaaaaaaacgagaaaaaaaaugaaaaaaucgaacgcaacaacaaacucaaacaaccccccccccccccgaacccuaacgacccccccccccccaaccccaaugaccccccacccccaaacccgaacgaccccccaccccccaaccccaacgaccccccucccccuaacgcaaacgacccuccaccccccaacgccaacgaccccgccccaccaaacgccaaugaccccgccccaccaaacgcaaacgauccagcccccccaaacgcaaacgaccccgcaccacccaacgcaaacgacccccccccccccaaccccaacgaccccgcccccccaaacgccaacgaccccccaccacccaaccccaacgaccccgcacccccacaaggcaacaacaacccacaaccacaaccccgcccccaaccccaaccacaaccccaaccccaaccccaaccacaaccacaaccacaaccccgcccccaaccccaaccccaacccggcggcaacaacaacaacaaaaacaacaauaacgacgacucuuacauccccucagccgaaaaaauacucgaauucgucaaacaaauccgcgacuccaucaccgaagaauggucacaaugcaacgucaccugcggaucaggcauccgaguacgcaaacgcaaaggcuccaacaaaaaagccgaagaccucacccucgaagacaucgacaccgaaauuugcaaaauggacaagugcuccuccauauucaacaucguuucaaacucauuaggauucgucauccuccucguccucgucuucuucaacuaaggacuaguuauaagacugacuagcccgaugggccucccaacgggcccuccuccccuccuugcaccgagauuaauaaaaaaaaaaaaaaaaaaaaaaaaaaaaaaaaaaaaaaaaaaaaaaaaaaaaaaaaaaaaaaaaugcaucccccccccccccccccccccccccccccccaaaggcucuuuucagagccaccagaauu

SEQ ID NO: 2079 - RNA, 1222 nt, Artificial Sequence
  mRNA Design i-3 (A64-N5-C30-hSL-N5) comprising derived and/or modified sequence from Pb(ANKA)__XP_022712148.1__HsSPARC_Pb-CSP(24-340) (opt11)
aggagaaagcuuaccaugcgcgccuggaucuucuuccuccucugccuugccggccgcgcacuagcccaaaacaaaucuauccaagcccaacgcaaccucaacgaacucugcuacaacgaaggaaacgacaacaaacucuaccauguacucaacuccaaaaacggaaaaaucuacaaccgcaacaccguaaaccgccuacucgcugacgccccugaaggcaaaaaaaacgaaaaaaaaaacgaaaaaaucgaacgcaacaacaaacucaaacaaccuccccccccccccaacccaaacgacccccccccucccaacccaaacgaccccccacccccaaaccccaacgacccccccccccccaacccaaacgacccccccccccccaacgccaacgacccccccccccccaacgccaacgaccccgccccaccaaacgcaaacgauccagcaccccccaacgccaacgaccccgcaccccccaacgcaaacgaccccgccccccccaacgccaacgaccccccgccaccuaacccaaacgacccagcaccccccaacgccaacgaucccccaccccccaaccccaacgacccagcccccccccaaggaaacaacaacccacaaccccaaccccgcccucaaccacaaccacaaccccaaccucaaccccaaccucaaccccaaccccaaccacgaccacaaccccaaccacaaccuggcggcaacaacaacaacaaaaacaacaacaacgacgacucauacaucccauccgcagaaaaaauacucgaauucguaaaacaaaucagagacuccauaacagaagaauggucccaaugcaacgucacuugcggcucaggcauacgcguccgcaaacgcaagggcuccaacaaaaaagccgaagaccuaacacucgaagacaucgacacagaaaucugcaaaauggacaaaugcucaucaaucuucaacaucguauccaacucacucggcuucguaauccuccucguccucgucuucuucaacuaaggacuaguuauaagacugacuagcccgaugggccucccaacgggcccuccuccccuccuugcaccgagauuaauaaaaaaaaaaaaaaaaaaaaaaaaaaaaaaaaaaaaaaaaaaaaaaaaaaaaaaaaaaaaaaaaugcaucccccccccccccccccccccccccccccccaaaggcucuuuucagagccaccagaauu

SEQ ID NO: 2080 - RNA, 1225 nt, Artificial Sequence
  mRNA Design i-3 (A64-N5-C30-hSL-N5) comprising derived and/or modified sequence from Pb(ANKA)__XP_022712148.1__IgE_Pb-CSP(24-340) (opt11)
aggagaaagcuuaccauggacuggaccuggauccuuuuccuaguagccgccgcaacccgcguccacucacaaaacaaauccauccaagcacagcguaaccucaacgaacucuguuacaacgagggcaacgacaacaaacuauaccacguccugaacuccaaaaacggcaaaaucuacaaccgcaacaccguaaaccgucuccucgccgacgccccagaaggcaaaaaaaaugaaaaaaaaaacgaaaaaaucgaacgaaacaacaaacuaaaacaacccccccccccccccaaccccaacgacccccccccccccaaccccaacgauccccccccccccaaccccaacgacccccccccccccaaucccaacgacccccccccccccaacgcaaacgaccccccccccccuaaugccaacgacccagcaccccccaacgccaacgaccccgccccccccaacgcaaacgaccccgccccccccaacgccaacgaccccgccccaccuaacgcaaacgacccacccccccccaaccccaacgaccccgccccccccaacgcuaacgacccccccccccccaacccaaacgacccagcacccccacaaggcaacaacaacccacaaccccaaccccgcccccaaccucaaccacaaccccaaccacaaccccaaccccaaccccaaccccaaccccgcccacaaccccaaccucaacccggcggcaacaacaacaacaaaaacaacaacaacgacgacuccuacauaccauccgccgaaaaaauccucgaauucgucaaacaaauccgcgacucaaucaccgaagaauggucacaaugcaacgucaccugcggcuccgguauccgcguaagaaaacgcaaaggaucaaacaaaaaagccgaagaccucacccucgaagacauagacaccgaaaucugcaaaauggacaaauguucauccaucuuuaacaucgucuccaacucacucggauucguaauacuacuaguccuaguauucuucaacuaaggacuaguuauaagacugacuagcccgaugggccucccaacgggcccuccuccccuccuugcaccgagauuaauaaaaaaaaaaaaaaaaaaaaaaaaaaaaaaaaaaaaaaaaaaaaaaaaaaaaaaaaaaaaaaaaugcaucccccccccccccccccccccccccccccccaaaggcucuuuucagagccaccagaauu

SEQ ID NO: 2081 - protein, 397 aa, Artificial Sequence; identical to SEQ ID NO: 1
  derived and/or modified protein sequence (wt) from Pf(3D7)__XP_001351122.1__CSP

SEQ ID NO: 2082 - protein, 374 aa, Artificial Sequence; identical to SEQ ID NO: 2
  derived and/or modified protein sequence (wt) from Pf(3D7)__XP_001351122.1__CSP(1-374)__CSP-delGPI

SEQ ID NO: 2083 - protein, 325 aa, Artificial Sequence; identical to SEQ ID NO: 3
  derived and/or modified protein sequence (wt) from Pf(3D7)__XP_001351122.1__CSP(1-325)__CSP-delTSR(v2)-delGPI

SEQ ID NO: 2084 - protein, 379 aa, Artificial Sequence
  derived and/or modified protein sequence (wt) from Pf(3D7)__XP_001351122.1__CSP(19-397)__CSP-delSP
LFQEYQCYGSSSNTRVLNELNYDNAGTNLYNELEMNYYGKQENWYSLKKNSRSLGENDDGNNEDNEKLRKPKHKKLKQPADGNPDPNANPNVDPNANPNVDPNANPNVDPNANPNANPNANPNANPNANPNANPNANPNANPNANPNANPNANPNANPNANPNANPNANPNANPNANPNVDPNANPNANPNANPNANPNANPNANPNANPNANPNANPNANPNANPNANPNANPNANPNANPNANPNANPNANPNKNNQGNGQGHNMPNDPNRNVDENANANSAVKNNNNEEPSDKHIKEYLNKIQNSLSTEWSPCSVTCGNGIQVRIKPGSANKPKDELDYANDIEKKICKMEKCSSVFNVVNSSIGLIMVLSFLFLN

SEQ ID NO: 2085 - protein, 356 aa, Artificial Sequence
  derived and/or modified protein sequence (wt) from Pf(3D7)__XP_001351122.1__CSP(19-374)__CSP-delSP-delGPI
LFQEYQCYGSSSNTRVLNELNYDNAGTNLYNELEMNYYGKQENWYSLKKNSRSLGENDDGNNEDNEKLRKPKHKKLKQPADGNPDPNANPNVDPNANPNVDPNANPNVDPNANPNANPNANPNANPNANPNANPNANPNANPNANPNANPNANPNANPNANPNANPNANPNANPNANPNVDPNANPNANPNANPNANPNANPNANPNANPNANPNANPNANPNANPNANPNANPNANPNANPNANPNANPNANPNKNNQGNGQGHNMPNDPNRNVDENANANSAVKNNNNEEPSDKHIKEYLNKIQNSLSTEWSPCSVTCGNGIQVRIKPGSANKPKDELDYANDIEKKICKMEKC

SEQ ID NO: 2086 - protein, 307 aa, Artificial Sequence
  derived and/or modified protein sequence (wt) from Pf(3D7)__XP_001351122.1__CSP(19-325)__CSP-delSP-delTSR(v2)-delGPI
LFQEYQCYGSSSNTRVLNELNYDNAGTNLYNELEMNYYGKQENWYSLKKNSRSLGENDDGNNEDNEKLRKPKHKKLKQPADGNPDPNANPNVDPNANPNVDPNANPNVDPNANPNANPNANPNANPNANPNANPNANPNANPNANPNANPNANPNANPNANPNANPNANPNANPNANPNVDPNANPNANPNANPNANPNANPNANPNANPNANPNANPNANPNANPNANPNANPNANPNANPNANPNANPNANPNKNNQGNGQGHNMPNDPNRNVDENANANSAVKNNNNEEPSDKHIKEYLNKIQN

SEQ ID NO: 2087 - protein, 117 aa, Artificial Sequence
  derived and/or modified protein sequence (wt) from Pf(3D7)__XP_001351122.1__CSP(19-135)
LFQEYQCYGSSSNTRVLNELNYDNAGTNLYNELEMNYYGKQENWYSLKKNSRSLGENDDGNNEDNEKLRKPKHKKLKQPADGNPDPNANPNVDPNANPNVDPNANPNVDPNANPNAN

SEQ ID NO: 2088 - protein, 175 aa, Artificial Sequence
  derived and/or modified protein sequence (wt) from Pf(3D7)__XP_001351122.1__CSP(19-193)
LFQEYQCYGSSSNTRVLNELNYDNAGTNLYNELEMNYYGKQENWYSLKKNSRSLGENDDGNNEDNEKLRKPKHKKLKQPADGNPDPNANPNVDPNANPNVDPNANPNVDPNANPNANPNANPNANPNANPNANPNANPNANPNANPNANPNANPNANPNANPNANPNANPNANPN

SEQ ID NO: 2089 - protein, 254 aa, Artificial Sequence
  derived and/or modified protein sequence (wt) from Pf(3D7)__XP_001351122.1__CSP(19-272)
LFQEYQCYGSSSNTRVLNELNYDNAGTNLYNELEMNYYGKQENWYSLKKNSRSLGENDDGNNEDNEKLRKPKHKKLKQPADGNPDPNANPNVDPNANPNVDPNANPNVDPNANPNANPNANPNANPNANPNANPNANPNANPNANPNANPNANPNANPNANPNANPNANPNANPNANPNVDPNANPNANPNANPNANPNANPNANPNANPNANPNANPNANPNANPNANPNANPNANPNANPNANPNANPNANP

SEQ ID NO: 2090 - protein, 366 aa, Artificial Sequence
  derived and/or modified protein sequence (wt) from Pf(3D7)__XP_001351122.1__CSP(19-384)
LFQEYQCYGSSSNTRVLNELNYDNAGTNLYNELEMNYYGKQENWYSLKKNSRSLGENDDGNNEDNEKLRKPKHKKLKQPADGNPDPNANPNVDPNANPNVDPNANPNVDPNANPNANPNANPNANPNANPNANPNANPNANPNANPNANPNANPNANPNANPNANPNANPNANPNANPNVDPNANPNANPNANPNANPNANPNANPNANPNANPNANPNANPNANPNANPNANPNANPNANPNANPNANPNANPNKNNQGNGQGHNMPNDPNRNVDENANANSAVKNNNNEEPSDKHIKEYLNKIQNSLSTEWSPCSVTCGNGIQVRIKPGSANKPKDELDYANDIEKKICKMEKCSSVFNVVNSS

SEQ ID NO: 2091 - protein, 316 aa, Artificial Sequence
  derived and/or modified protein sequence (wt) from Pf(3D7)__XP_001351122.1__CSP(82-397)
DNEKLRKPKHKKLKQPADGNPDPNANPNVDPNANPNVDPNANPNVDPNANPNANPNANPNANPNANPNANPNANPNANPNANPNANPNANPNANPNANPNANPNANPNANPNANPNVDPNANPNANPNANPNANPNANPNANPNANPNANPNANPNANPNANPNANPNANPNANPNANPNANPNANPNANPNKNNQGNGQGHNMPNDPNRNVDENANANSAVKNNNNEEPSDKHIKEYLNKIQNSLSTEWSPCSVTCGNGIQVRIKPGSANKPKDELDYANDIEKKICKMEKCSSVFNVVNSSIGLIMVLSFLFLN

SEQ ID NO: 2092 - protein, 100 aa, Artificial Sequence
  derived and/or modified protein sequence (wt) from Pf(3D7)__XP_001351122.1__CSP(93-192)
KLKQPADGNPDPNANPNVDPNANPNVDPNANPNVDPNANPNANPNANPNANPNANPNANPNANPNANPNANPNANPNANPNANPNANPNANPNANPNANP

SEQ ID NO: 2093 - protein, 180 aa, Artificial Sequence
  derived and/or modified protein sequence (wt) from Pf(3D7)__XP_001351122.1__CSP(93-272)__RI region_NANP repeat region
KLKQPADGNPDPNANPNVDPNANPNVDPNANPNVDPNANPNANPNANPNANPNANPNANPNANPNANPNANPNANPNANPNANPNANPNANPNANPNANPNANPNVDPNANPNANPNANPNANPNANPNANPNANPNANPNANPNANPNANPNANPNANPNANPNANPNANPNANPNANP

SEQ ID NO: 2094 - protein, 305 aa, Artificial Sequence
  derived and/or modified protein sequence (wt) from Pf(3D7)__XP_001351122.1__CSP(93-397)
KLKQPADGNPDPNANPNVDPNANPNVDPNANPNVDPNANPNANPNANPNANPNANPNANPNANPNANPNANPNANPNANPNANPNANPNANPNANPNANPNANPNVDPNANPNANPNANPNANPNANPNANPNANPNANPNANPNANPNANPNANPNANPNANPNANPNANPNANPNANPNKNNQGNGQGHNMPNDPNRNVDENANANSAVKNNNNEEPSDKHIKEYLNKIQNSLSTEWSPCSVTCGNGIQVRIKPGSANKPKDELDYANDIEKKICKMEKCSSVFNVVNSSIGLIMVLSFLFLN

SEQ ID NO: 2095 - protein, 95 aa, Artificial Sequence
  derived and/or modified protein sequence (wt) from Pf(3D7)__XP_001351122.1__CSP(98-192)
ADGNPDPNANPNVDPNANPNVDPNANPNVDPNANPNANPNANPNANPNANPNANPNANPNANPNANPNANPNANPNANPNANPNANPNANPNANP

SEQ ID NO: 2096 - protein, 277 aa, Artificial Sequence
  derived and/or modified protein sequence (wt) from Pf(3D7)__XP_001351122.1__CSP(98-374)
ADGNPDPNANPNVDPNANPNVDPNANPNVDPNANPNANPNANPNANPNANPNANPNANPNANPNANPNANPNANPNANPNANPNANPNANPNANPNANPNVDPNANPNANPNANPNANPNANPNANPNANPNANPNANPNANPNANPNANPNANPNANPNANPNANPNANPNANPNKNNQGNGQGHNMPNDPNRNVDENANANSAVKNNNNEEPSDKHIKEYLNKIQNSLSTEWSPCSVTCGNGIQVRIKPGSANKPKDELDYANDIEKKICKMEKC

SEQ ID NO: 2097 - protein, 300 aa, Artificial Sequence
  derived and/or modified protein sequence (wt) from Pf(3D7)__XP_001351122.1__CSP(98-397)
ADGNPDPNANPNVDPNANPNVDPNANPNVDPNANPNANPNANPNANPNANPNANPNANPNANPNANPNANPNANPNANPNANPNANPNANPNANPNANPNVDPNANPNANPNANPNANPNANPNANPNANPNANPNANPNANPNANPNANPNANPNANPNANPNANPNANPNANPNKNNQGNGQGHNMPNDPNRNVDENANANSAVKNNNNEEPSDKHIKEYLNKIQNSLSTEWSPCSVTCGNGIQVRIKPGSANKPKDELDYANDIEKKICKMEKCSSVFNVVNSSIGLIMVLSFLFLN

SEQ ID NO: 2098 - protein, 179 aa, Artificial Sequence
  derived and/or modified protein sequence (wt) from Pf(3D7)__XP_001351122.1__CSP(199-377)
DPNANPNANPNANPNANPNANPNANPNANPNANPNANPNANPNANPNANPNANPNANPNANPNANPNANPNANPNKNNQGNGQGHNMPNDPNRNVDENANANSAVKNNNNEEPSDKHIKEYLNKIQNSLSTEWSPCSVTCGNGIQVRIKPGSANKPKDELDYANDIEKKICKMEKCSSV

SEQ ID NO: 2099 - protein, 189 aa, Artificial Sequence
  derived and/or modified protein sequence (wt) from Pf(3D7)__XP_001351122.1__CSP(199-387)
DPNANPNANPNANPNANPNANPNANPNANPNANPNANPNANPNANPNANPNANPNANPNANPNANPNANPNANPNKNNQGNGQGHNMPNDPNRNVDENANANSAVKNNNNEEPSDKHIKEYLNKIQNSLSTEWSPCSVTCGNGIQVRIKPGSANKPKDELDYANDIEKKICKMEKCSSVFNVVNSSIGL

SEQ ID NO: 2100 - protein, 19 aa, Artificial Sequence
  derived and/or modified protein sequence (wt) from Pf(3D7)__XP_001351122.1__CSP(309-327)__RIII region, Th2R
EEPSDKHIKEYLNKIQNSL

SEQ ID NO: 2101 - protein, 21 aa, Artificial Sequence
  derived and/or modified protein sequence (wt) from Pf(3D7)__XP_001351122.1__CSP(346-366)__Th3R
IKPGSANKPKDELDYANDIEK

SEQ ID NO: 2102 - protein, 31 aa, Artificial Sequence
  derived and/or modified protein sequence (wt) from Pf(3D7)__XP_001351122.1__CSP(346-376)__Th3R_CS.T3
IKPGSANKPKDELDYANDIEKKICKMEKCSS

SEQ ID NO: 2103 - protein, 18 aa, Artificial Sequence
  derived and/or modified protein sequence (wt) from Pf(3D7)__XP_001351122.1__CSP(1-18)__signal peptide
MMRKLAILSVSSFLFVEA

SEQ ID NO: 2104 - protein, 358 aa, Artificial Sequence
  derived and/or modified protein sequence (wt) from Pf(3D7)__XP_001351122.1__CSP(27-384)__EcCSP fragment
GSSSNTRVLNELNYDNAGTNLYNELEMNYYGKQENWYSLKKNSRSLGENDDGNNEDNEKLRKPKHKKLKQPADGNPDPNANPNVDPNANPNVDPNANPNVDPNANPNANPNANPNANPNANPNANPNANPNANPNANPNANPNANPNANPNANPNANPNANPNANPNANPNVDPNANPNANPNANPNANPNANPNANPNANPNANPNANPNANPNANPNANPNANPNANPNANPNANPNANPNANPNKNNQGNGQGHNMPNDPNRNVDENANANSAVKNNNNEEPSDKHIKEYLNKIQNSLSTEWSPCSVTCGNGIQVRIKPGSANKPKDELDYANDIEKKICKMEKCSSVFNVVNSS

SEQ ID NO: 2105 - protein, 6 aa, Artificial Sequence
  derived and/or modified protein sequence (wt) from Pf(3D7)__XP_001351122.1__CSP(69-74)__3A1 antibody binding site
SRSLGE

SEQ ID NO: 2106 - protein, 310 aa, Artificial Sequence
  derived and/or modified protein sequence (wt) from Pf(3D7)__XP_001351122.1__CSP(74-383)__PpCSP fragment
ENDDGNNEDNEKLRKPKHKKLKQPADGNPDPNANPNVDPNANPNVDPNANPNVDPNANPNANPNANPNANPNANPNANPNANPNANPNANPNANPNANPNANPNANPNANPNANPNANPNANPNVDPNANPNANPNANPNANPNANPNANPNANPNANPNANPNANPNANPNANPNANPNANPNANPNANPNANPNANPNKNNQGNGQGHNMPNDPNRNVDENANANSAVKNNNNEEPSDKHIKEYLNKIQNSLSTEWSPCSVTCGNGIQVRIKPGSANKPKDELDYANDIEKKICKMEKCSSVFNVVNS

SEQ ID NO: 2107 - protein, 20 aa, Artificial Sequence
  derived and/or modified protein sequence (wt) from Pf(3D7)__XP_001351122.1__CSP(75-94)__2C3 antibody binding site
NDDGNNEDNEKLRKPKHKKL

SEQ ID NO: 2108 - protein, 5 aa, Artificial Sequence
  derived and/or modified protein sequence (wt) from Pf(3D7)__XP_001351122.1__CSP(93-97)__RI region
KLKQP

SEQ ID NO: 2109 - protein, 6 aa, Artificial Sequence
  derived and/or modified protein sequence (wt) from Pf(3D7)__XP_001351122.1__CSP(95-100)__3H10/3B4 antibody binding site
KQPADG

SEQ ID NO: 2110 - protein, 175 aa, Artificial Sequence
  derived and/or modified protein sequence (wt) from Pf(3D7)__XP_001351122.1__CSP(98-272)__NANP repeat region
ADGNPDPNANPNVDPNANPNVDPNANPNVDPNANPNANPNANPNANPNANPNANPNANPNANPNANPNANPNANPNANPNANPNANPNANPNANPNANPNVDPNANPNANPNANPNANPNANPNANPNANPNANPNANPNANPNANPNANPNANPNANPNANPNANPNANPNANP

SEQ ID NO: 2111 - protein, 168 aa, Artificial Sequence
  derived and/or modified protein sequence (wt) from Pf(3D7)__XP_001351122.1__CSP(105-272)__central repeat region
NANPNVDPNANPNVDPNANPNVDPNANPNANPNANPNANPNANPNANPNANPNANPNANPNANPNANPNANPNANPNANPNANPNANPNANPNVDPNANPNANPNANPNANPNANPNANPNANPNANPNANPNANPNANPNANPNANPNANPNANPNANPNANPNANP

SEQ ID NO: 2112 - protein, 189 aa, Artificial Sequence
  derived and/or modified protein sequence (wt) from Pf(3D7)__XP_001351122.1__CSP(207-395)__RTS,S fragment
NPNANPNANPNANPNANPNANPNANPNANPNANPNANPNANPNANPNANPNANPNANPNANPNANPNKNNQGNGQGHNMPNDPNRNVDENANANSAVKNNNNEEPSDKHIKEYLNKIQNSLSTEWSPCSVTCGNGIQVRIKPGSANKPKDELDYANDIEKKICKMEKCSSVFNVVNSSIGLIMVLSFLF

SEQ ID NO: 2113 - protein, 18 aa, Artificial Sequence
  derived and/or modified protein sequence (wt) from Pf(3D7)__XP_001351122.1__CSP(310-327)__RIII region, Th2R
EPSDKHIKEYLNKIQNSL

SEQ ID NO: 2114 - protein, 65 aa, Artificial Sequence
  derived and/or modified protein sequence (wt) from Pf(3D7)__XP_001351122.1__CSP(310-374)__RIII region_TSR (RII+)
EPSDKHIKEYLNKIQNSLSTEWSPCSVTCGNGIQVRIKPGSANKPKDELDYANDIEKKICKMEKC

SEQ ID NO: 2115 - protein, 57 aa, Artificial Sequence
  derived and/or modified protein sequence (wt) from Pf(3D7)__XP_001351122.1__CSP(319-375)__TSR region v3
YLNKIQNSLSTEWSPCSVTCGNGIQVRIKPGSANKPKDELDYANDIEKKICKMEKCS

SEQ ID NO: 2116 - protein, 49 aa, Artificial Sequence
  derived and/or modified protein sequence (wt) from Pf(3D7)__XP_001351122.1__CSP(326-374)__TSR region v1
SLSTEWSPCSVTCGNGIQVRIKPGSANKPKDELDYANDIEKKICKMEKC

SEQ ID NO: 2117 - protein, 47 aa, Artificial Sequence
  derived and/or modified protein sequence (wt) from Pf(3D7)__XP_001351122.1__CSP(328-374)__TSR region v2
STEWSPCSVTCGNGIQVRIKPGSANKPKDELDYANDIEKKICKMEKC

SEQ ID NO: 2118 - protein, 18 aa, Artificial Sequence
  derived and/or modified protein sequence (wt) from Pf(3D7)__XP_001351122.1__CSP(330-347)__RII+ region v1
EWSPCSVTCGNGIQVRIK

SEQ ID NO: 2119 - protein, 22 aa, Artificial Sequence
  derived and/or modified protein sequence (wt) from Pf(3D7)__XP_001351122.1__CSP(330-351)__RII+ region v2
EWSPCSVTCGNGIQVRIKPGSA

SEQ ID NO: 2120 - protein, 23 aa, Artificial Sequence
  derived and/or modified protein sequence (wt) from Pf(3D7)__XP_001351122.1__CSP(375-397)__GPI anchor signal
SSVFNVVNSSIGLIMVLSFLFLN

SEQ ID NO: 2121 - RNA, 1194 nt, Artificial Sequence; identical to SEQ ID NO: 37
  derived and/or modified CDS sequence (wt) from Pf(3D7)__XP_001351122.1__CSP

SEQ ID NO: 2122 - RNA, 1122 nt, Artificial Sequence; identical to SEQ ID NO: 38
  derived and/or modified CDS sequence (wt) from Pf(3D7)__XP_001351122.1__CSP(1-374)__CSP-delGPI

SEQ ID NO: 2123 - RNA, 975 nt, Artificial Sequence; identical to SEQ ID NO: 39
  derived and/or modified CDS sequence (wt) from Pf(3D7)__XP_001351122.1__CSP(1-325)__CSP-delTSR(v2)-delGPI

SEQ ID NO: 2124 - RNA, 1137 nt, Artificial Sequence
  derived and/or modified CDS sequence (wt) from Pf(3D7)__XP_001351122.1__CSP(19-397)__CSP-delSP
uuauuccaggaauaccagugcuauggaaguucgucaaacacaaggguucuaaaugaauuaaauuaugauaaugcaggcacuaauuuauauaaugaauuagaaaugaauuauuaugggaaacaggaaaauugguauagucuuaaaaaaaauaguagaucacuuggagaaaaugaugauggaaauaacgaagacaacgagaaauuaaggaaaccaaaacauaaaaaauuaaagcaaccagcggaugguaauccugauccaaaugcaaacccaaauguagaucccaaugccaacccaaauguagauccaaaugcaaacccaaauguagauccaaaugcaaacccaaaugcaaacccaaaugcaaacccaaaugcaaacccaaaugcaaacccaaaugcaaacccaaaugcaaacccaaaugcaaacccaaaugcaaacccaaaugcaaacccaaaugcaaacccaaaugcaaacccaaaugcaaacccaaaugcaaaccccaaugcaaauccuaaugcaaacccaaaugcaaacccaaacguagauccuaaugcaaauccaaaugcaaacccaaacgcaaaccccaaugcaaauccuaaugcaaaccccaaugcaaauccuaaugcaaauccuaaugccaauccaaaugcaaauccaaaugcaaacccaaacgcaaaccccaaugcaaauccuaaugccaauccaaaugcaaauccaaaugcaaacccaaaugcaaacccaaaugcaaaccccaaugcaaauccuaauaaaaacaaucaagguaauggacaaggucacaauaugccaaaugacccaaaccgaaauguagaugaaaaugcuaaugccaacagugcuguaaaaaauaauaauaacgaagaaccaagugauaagcacauaaaagaauauuuaaacaaaauacaaaauucucuuucaacugaaugguccccauguaguguaacuuguggaaaugguauucaaguuagaauaaagccuggcucugcuaauaaaccuaaagacgaauuagauuaugcaaaugauauugaaaaaaaaauuuguaaaauggaaaaauguuccaguguguuuaaugucguaaauaguucaauaggauuaauaaugguauuauccuucuuguuccuuaau

SEQ ID NO: 2125 - RNA, 1068 nt, Artificial Sequence
  derived and/or modified CDS sequence (wt) from Pf(3D7)__XP_001351122.1__CSP(19-374)__CSP-delSP-delGPI
uuauuccaggaauaccagugcuauggaaguucgucaaacacaaggguucuaaaugaauuaaauuaugauaaugcaggcacuaauuuauauaaugaauuagaaaugaauuauuaugggaaacaggaaaauugguauagucuuaaaaaaaauaguagaucacuuggagaaaaugaugauggaaauaacgaagacaacgagaaauuaaggaaaccaaaacauaaaaaauuaaagcaaccagcggaugguaauccugauccaaaugcaaacccaaauguagaucccaaugccaacccaaauguagauccaaaugcaaacccaaauguagauccaaaugcaaacccaaaugcaaacccaaaugcaaacccaaaugcaaacccaaaugcaaacccaaaugcaaacccaaaugcaaacccaaaugcaaacccaaaugcaaacccaaaugcaaacccaaaugcaaacccaaaugcaaacccaaaugcaaacccaaaugcaaaccccaaugcaaauccuaaugcaaacccaaaugcaaacccaaacguagauccuaaugcaaauccaaaugcaaacccaaacgcaaaccccaaugcaaauccuaaugcaaaccccaaugcaaauccuaaugcaaauccuaaugccaauccaaaugcaaauccaaaugcaaacccaaacgcaaaccccaaugcaaauccuaaugccaauccaaaugcaaauccaaaugcaaacccaaaugcaaacccaaaugcaaaccccaaugcaaauccuaauaaaaacaaucaagguaauggacaaggucacaauaugccaaaugacccaaaccgaaauguagaugaaaaugcuaaugccaacagugcuguaaaaaauaauaauaacgaagaaccaagugauaagcacauaaaagaauauuuaaacaaaauacaaaauucucuuucaacugaaugguccccauguaguguaacuuguggaaaugguauucaaguuagaauaaagccuggcucugcuaauaaaccuaaagacgaauuagauuaugcaaaugauauugaaaaaaaaauuuguaaaauggaaaaaugu

SEQ ID NO: 2126 - RNA, 921 nt, Artificial Sequence
  derived and/or modified CDS sequence (wt) from Pf(3D7)__XP_001351122.1__CSP(19-325)__CSP-delSP-delTSR(v2)-delGPI
uuauuccaggaauaccagugcuauggaaguucgucaaacacaaggguucuaaaugaauuaaauuaugauaaugcaggcacuaauuuauauaaugaauuagaaaugaauuauuaugggaaacaggaaaauugguauagucuuaaaaaaaauaguagaucacuuggagaaaaugaugauggaaauaacgaagacaacgagaaauuaaggaaaccaaaacauaaaaaauuaaagcaaccagcggaugguaauccugauccaaaugcaaacccaaauguagaucccaaugccaacccaaauguagauccaaaugcaaacccaaauguagauccaaaugcaaacccaaaugcaaacccaaaugcaaacccaaaugcaaacccaaaugcaaacccaaaugcaaacccaaaugcaaacccaaaugcaaacccaaaugcaaacccaaaugcaaacccaaaugcaaacccaaaugcaaacccaaaugcaaacccaaaugcaaaccccaaugcaaauccuaaugcaaacccaaaugcaaacccaaacguagauccuaaugcaaauccaaaugcaaacccaaacgcaaaccccaaugcaaauccuaaugcaaaccccaaugcaaauccuaaugcaaauccuaaugccaauccaaaugcaaauccaaaugcaaacccaaacgcaaaccccaaugcaaauccuaaugccaauccaaaugcaaauccaaaugcaaacccaaaugcaaacccaaaugcaaaccccaaugcaaauccuaauaaaaacaaucaagguaauggacaaggucacaauaugccaaaugacccaaaccgaaauguagaugaaaaugcuaaugccaacagugcuguaaaaaauaauaauaacgaagaaccaagugauaagcacauaaaagaauauuuaaacaaaauacaaaau

SEQ ID NO: 2127 - RNA, 351 nt, Artificial Sequence
  derived and/or modified CDS sequence (wt) from Pf(3D7)__XP_001351122.1__CSP(19-135)
uuauuccaggaauaccagugcuauggaaguucgucaaacacaaggguucuaaaugaauuaaauuaugauaaugcaggcacuaauuuauauaaugaauuagaaaugaauuauuaugggaaacaggaaaauugguauagucuuaaaaaaaauaguagaucacuuggagaaaaugaugauggaaauaacgaagacaacgagaaauuaaggaaaccaaaacauaaaaaauuaaagcaaccagcggaugguaauccugauccaaaugcaaacccaaauguagaucccaaugccaacccaaauguagauccaaaugcaaacccaaauguagauccaaaugcaaacccaaaugcaaac

SEQ ID NO: 2128 - RNA, 525 nt, Artificial Sequence
  derived and/or modified CDS sequence (wt) from Pf(3D7)__XP_001351122.1__CSP(19-193)
uuauuccaggaauaccagugcuauggaaguucgucaaacacaaggguucuaaaugaauuaaauuaugauaaugcaggcacuaauuuauauaaugaauuagaaaugaauuauuaugggaaacaggaaaauugguauagucuuaaaaaaaauaguagaucacuuggagaaaaugaugauggaaauaacgaagacaacgagaaauuaaggaaaccaaaacauaaaaaauuaaagcaaccagcggaugguaauccugauccaaaugcaaacccaaauguagaucccaaugccaacccaaauguagauccaaaugcaaacccaaauguagauccaaaugcaaacccaaaugcaaacccaaaugcaaacccaaaugcaaacccaaaugcaaacccaaaugcaaacccaaaugcaaacccaaaugcaaacccaaaugcaaacccaaaugcaaacccaaaugcaaacccaaaugcaaacccaaaugcaaacccaaaugcaaaccccaaugcaaauccuaaugcaaacccaaau

SEQ ID NO: 2129 - RNA, 762 nt, Artificial Sequence
  derived and/or modified CDS sequence (wt) from Pf(3D7)__XP_001351122.1__CSP(19-272)
uuauuccaggaauaccagugcuauggaaguucgucaaacacaaggguucuaaaugaauuaaauuaugauaaugcaggcacuaauuuauauaaugaauuagaaaugaauuauuaugggaaacaggaaaauugguauagucuuaaaaaaaauaguagaucacuuggagaaaaugaugauggaaauaacgaagacaacgagaaauuaaggaaaccaaaacauaaaaaauuaaagcaaccagcggaugguaauccugauccaaaugcaaacccaaauguagaucccaaugccaacccaaauguagauccaaaugcaaacccaaauguagauccaaaugcaaacccaaaugcaaacccaaaugcaaacccaaaugcaaacccaaaugcaaacccaaaugcaaacccaaaugcaaacccaaaugcaaacccaaaugcaaacccaaaugcaaacccaaaugcaaacccaaaugcaaacccaaaugcaaacccaaaugcaaaccccaaugcaaauccuaaugcaaacccaaaugcaaacccaaacguagauccuaaugcaaauccaaaugcaaacccaaacgcaaaccccaaugcaaauccuaaugcaaaccccaaugcaaauccuaaugcaaauccuaaugccaauccaaaugcaaauccaaaugcaaacccaaacgcaaaccccaaugcaaauccuaaugccaauccaaaugcaaauccaaaugcaaacccaaaugcaaacccaaaugcaaaccccaaugcaaauccu

SEQ ID NO: 2130 - RNA, 1098 nt, Artificial Sequence
  derived and/or modified CDS sequence (wt) from Pf(3D7)__XP_001351122.1__CSP(19-384)
uuauuccaggaauaccagugcuauggaaguucgucaaacacaaggguucuaaaugaauuaaauuaugauaaugcaggcacuaauuuauauaaugaauuagaaaugaauuauuaugggaaacaggaaaauugguauagucuuaaaaaaaauaguagaucacuuggagaaaaugaugauggaaauaacgaagacaacgagaaauuaaggaaaccaaaacauaaaaaauuaaagcaaccagcggaugguaauccugauccaaaugcaaacccaaauguagaucccaaugccaacccaaauguagauccaaaugcaaacccaaauguagauccaaaugcaaacccaaaugcaaacccaaaugcaaacccaaaugcaaacccaaaugcaaacccaaaugcaaacccaaaugcaaacccaaaugcaaacccaaaugcaaacccaaaugcaaacccaaaugcaaacccaaaugcaaacccaaaugcaaacccaaaugcaaaccccaaugcaaauccuaaugcaaacccaaaugcaaacccaaacguagauccuaaugcaaauccaaaugcaaacccaaacgcaaaccccaaugcaaauccuaaugcaaaccccaaugcaaauccuaaugcaaauccuaaugccaauccaaaugcaaauccaaaugcaaacccaaacgcaaaccccaaugcaaauccuaaugccaauccaaaugcaaauccaaaugcaaacccaaaugcaaacccaaaugcaaaccccaaugcaaauccuaauaaaaacaaucaagguaauggacaaggucacaauaugccaaaugacccaaaccgaaauguagaugaaaaugcuaaugccaacagugcuguaaaaaauaauaauaacgaagaaccaagugauaagcacauaaaagaauauuuaaacaaaauacaaaauucucuuucaacugaaugguccccauguaguguaacuuguggaaaugguauucaaguuagaauaaagccuggcucugcuaauaaaccuaaagacgaauuagauuaugcaaaugauauugaaaaaaaaauuuguaaaauggaaaaauguuccaguguguuuaaugucguaaauaguuca

SEQ ID NO: 2131 - RNA, 948 nt, Artificial Sequence
  derived and/or modified CDS sequence (wt) from Pf(3D7)__XP_001351122.1__CSP(82-397)
gacaacgagaaauuaaggaaaccaaaacauaaaaaauuaaagcaaccagcggaugguaauccugauccaaaugcaaacccaaauguagaucccaaugccaacccaaauguagauccaaaugcaaacccaaauguagauccaaaugcaaacccaaaugcaaacccaaaugcaaacccaaaugcaaacccaaaugcaaacccaaaugcaaacccaaaugcaaacccaaaugcaaacccaaaugcaaacccaaaugcaaacccaaaugcaaacccaaaugcaaacccaaaugcaaacccaaaugcaaaccccaaugcaaauccuaaugcaaacccaaaugcaaacccaaacguagauccuaaugcaaauccaaaugcaaacccaaacgcaaaccccaaugcaaauccuaaugcaaaccccaaugcaaauccuaaugcaaauccuaaugccaauccaaaugcaaauccaaaugcaaacccaaacgcaaaccccaaugcaaauccuaaugccaauccaaaugcaaauccaaaugcaaacccaaaugcaaacccaaaugcaaaccccaaugcaaauccuaauaaaaacaaucaagguaauggacaaggucacaauaugccaaaugacccaaaccgaaauguagaugaaaaugcuaaugccaacagugcuguaaaaaauaauaauaacgaagaaccaagugauaagcacauaaaagaauauuuaaacaaaauacaaaauucucuuucaacugaaugguccccauguaguguaacuuguggaaaugguauucaaguuagaauaaagccuggcucugcuaauaaaccuaaagacgaauuagauuaugcaaaugauauugaaaaaaaaauuuguaaaauggaaaaauguuccaguguguuuaaugucguaaauaguucaauaggauuaauaaugguauuauccuucuuguuccuuaau

SEQ ID NO: 2132 - RNA, 300 nt, Artificial Sequence
  derived and/or modified CDS sequence (wt) from Pf(3D7)__XP_001351122.1__CSP(93-192)
aaauuaaagcaaccagcggaugguaauccugauccaaaugcaaacccaaauguagaucccaaugccaacccaaauguagauccaaaugcaaacccaaauguagauccaaaugcaaacccaaaugcaaacccaaaugcaaacccaaaugcaaacccaaaugcaaacccaaaugcaaacccaaaugcaaacccaaaugcaaacccaaaugcaaacccaaaugcaaacccaaaugcaaacccaaaugcaaacccaaaugcaaacccaaaugcaaaccccaaugcaaauccuaaugcaaaccca

SEQ ID NO: 2133 - RNA, 540 nt, Artificial Sequence
  derived and/or modified CDS sequence (wt) from Pf(3D7)__XP_001351122.1__CSP(93-272)__RI region_NANP repeat region
aaauuaaagcaaccagcggaugguaauccugauccaaaugcaaacccaaauguagaucccaaugccaacccaaauguagauccaaaugcaaacccaaauguagauccaaaugcaaacccaaaugcaaacccaaaugcaaacccaaaugcaaacccaaaugcaaacccaaaugcaaacccaaaugcaaacccaaaugcaaacccaaaugcaaacccaaaugcaaacccaaaugcaaacccaaaugcaaacccaaaugcaaacccaaaugcaaaccccaaugcaaauccuaaugcaaacccaaaugcaaacccaaacguagauccuaaugcaaauccaaaugcaaacccaaacgcaaaccccaaugcaaauccuaaugcaaaccccaaugcaaauccuaaugcaaauccuaaugccaauccaaaugcaaauccaaaugcaaacccaaacgcaaaccccaaugcaaauccuaaugccaauccaaaugcaaauccaaaugcaaacccaaaugcaaacccaaaugcaaaccccaaugcaaauccu

SEQ ID NO: 2134 - RNA, 915 nt, Artificial Sequence
  derived and/or modified CDS sequence (wt) from Pf(3D7)__XP_001351122.1__CSP(93-397)
aaauuaaagcaaccagcggaugguaauccugauccaaaugcaaacccaaauguagaucccaaugccaacccaaauguagauccaaaugcaaacccaaauguagauccaaaugcaaacccaaaugcaaacccaaaugcaaacccaaaugcaaacccaaaugcaaacccaaaugcaaacccaaaugcaaacccaaaugcaaacccaaaugcaaacccaaaugcaaacccaaaugcaaacccaaaugcaaacccaaaugcaaacccaaaugcaaaccccaaugcaaauccuaaugcaaacccaaaugcaaacccaaacguagauccuaaugcaaauccaaaugcaaacccaaacgcaaaccccaaugcaaauccuaaugcaaaccccaaugcaaauccuaaugcaaauccuaaugccaauccaaaugcaaauccaaaugcaaacccaaacgcaaaccccaaugcaaauccuaaugccaauccaaaugcaaauccaaaugcaaacccaaaugcaaacccaaaugcaaaccccaaugcaaauccuaauaaaaacaaucaagguaauggacaaggucacaauaugccaaaugacccaaaccgaaauguagaugaaaaugcuaaugccaacagugcuguaaaaaauaauaauaacgaagaaccaagugauaagcacauaaaagaauauuuaaacaaaauacaaaauucucuuucaacugaaugguccccauguaguguaacuuguggaaaugguauucaaguuagaauaaagccuggcucugcuaauaaaccuaaagacgaauuagauuaugcaaaugauauugaaaaaaaaauuuguaaaauggaaaaauguuccaguguguuuaaugucguaaauaguucaauaggauuaauaaugguauuauccuucuuguuccuuaau

SEQ ID NO: 2135 - RNA, 285 nt, Artificial Sequence
  derived and/or modified CDS sequence (wt) from Pf(3D7)__XP_001351122.1__CSP(98-192)
gcggaugguaauccugauccaaaugcaaacccaaauguagaucccaaugccaacccaaauguagauccaaaugcaaacccaaauguagauccaaaugcaaacccaaaugcaaacccaaaugcaaacccaaaugcaaacccaaaugcaaacccaaaugcaaacccaaaugcaaacccaaaugcaaacccaaaugcaaacccaaaugcaaacccaaaugcaaacccaaaugcaaacccaaaugcaaacccaaaugcaaaccccaaugcaaauccuaaugcaaaccca

SEQ ID NO: 2136 - RNA, 831 nt, Artificial Sequence
  derived and/or modified CDS sequence (wt) from Pf(3D7)__XP_001351122.1__CSP(98-374)
gcggaugguaauccugauccaaaugcaaacccaaauguagaucccaaugccaacccaaauguagauccaaaugcaaacccaaauguagauccaaaugcaaacccaaaugcaaacccaaaugcaaacccaaaugcaaacccaaaugcaaacccaaaugcaaacccaaaugcaaacccaaaugcaaacccaaaugcaaacccaaaugcaaacccaaaugcaaacccaaaugcaaacccaaaugcaaacccaaaugcaaaccccaaugcaaauccuaaugcaaacccaaaugcaaacccaaacguagauccuaaugcaaauccaaaugcaaacccaaacgcaaaccccaaugcaaauccuaaugcaaaccccaaugcaaauccuaaugcaaauccuaaugccaauccaaaugcaaauccaaaugcaaacccaaacgcaaaccccaaugcaaauccuaaugccaauccaaaugcaaauccaaaugcaaacccaaaugcaaacccaaaugcaaaccccaaugcaaauccuaauaaaaacaaucaagguaauggacaaggucacaauaugccaaaugacccaaaccgaaauguagaugaaaaugcuaaugccaacagugcuguaaaaaauaauaauaacgaagaaccaagugauaagcacauaaaagaauauuuaaacaaaauacaaaauucucuuucaacugaaugguccccauguaguguaacuuguggaaaugguauucaaguuagaauaaagccuggcucugcuaauaaaccuaaagacgaauuagauuaugcaaaugauauugaaaaaaaaauuuguaaaauggaaaaaugu

SEQ ID NO: 2137 - RNA, 900 nt, Artificial Sequence
  derived and/or modified CDS sequence (wt) from Pf(3D7)__XP_001351122.1__CSP(98-397)
gcggaugguaauccugauccaaaugcaaacccaaauguagaucccaaugccaacccaaauguagauccaaaugcaaacccaaauguagauccaaaugcaaacccaaaugcaaacccaaaugcaaacccaaaugcaaacccaaaugcaaacccaaaugcaaacccaaaugcaaacccaaaugcaaacccaaaugcaaacccaaaugcaaacccaaaugcaaacccaaaugcaaacccaaaugcaaacccaaaugcaaaccccaaugcaaauccuaaugcaaacccaaaugcaaacccaaacguagauccuaaugcaaauccaaaugcaaacccaaacgcaaaccccaaugcaaauccuaaugcaaaccccaaugcaaauccuaaugcaaauccuaaugccaauccaaaugcaaauccaaaugcaaacccaaacgcaaaccccaaugcaaauccuaaugccaauccaaaugcaaauccaaaugcaaacccaaaugcaaacccaaaugcaaaccccaaugcaaauccuaauaaaaacaaucaagguaauggacaaggucacaauaugccaaaugacccaaaccgaaauguagaugaaaaugcuaaugccaacagugcuguaaaaaauaauaauaacgaagaaccaagugauaagcacauaaaagaauauuuaaacaaaauacaaaauucucuuucaacugaaugguccccauguaguguaacuuguggaaaugguauucaaguuagaauaaagccuggcucugcuaauaaaccuaaagacgaauuagauuaugcaaaugauauugaaaaaaaaauuuguaaaauggaaaaauguuccaguguguuuaaugucguaaauaguucaauaggauuaauaaugguauuauccuucuuguuccuuaau

SEQ ID NO: 2138 - RNA, 537 nt, Artificial Sequence
  derived and/or modified CDS sequence (wt) from Pf(3D7)__XP_001351122.1__CSP(199-377)
gauccuaaugcaaauccaaaugcaaacccaaacgcaaaccccaaugcaaauccuaaugcaaaccccaaugcaaauccuaaugcaaauccuaaugccaauccaaaugcaaauccaaaugcaaacccaaacgcaaaccccaaugcaaauccuaaugccaauccaaaugcaaauccaaaugcaaacccaaaugcaaacccaaaugcaaaccccaaugcaaauccuaauaaaaacaaucaagguaauggacaaggucacaauaugccaaaugacccaaaccgaaauguagaugaaaaugcuaaugccaacagugcuguaaaaaauaauaauaacgaagaaccaagugauaagcacauaaaagaauauuuaaacaaaauacaaaauucucuuucaacugaaugguccccauguaguguaacuuguggaaaugguauucaaguuagaauaaagccuggcucugcuaauaaaccuaaagacgaauuagauuaugcaaaugauauugaaaaaaaaauuuguaaaauggaaaaauguuccagugug

SEQ ID NO: 2139 - RNA, 567 nt, Artificial Sequence
  derived and/or modified CDS sequence (wt) from Pf(3D7)__XP_001351122.1__CSP(199-387)
gauccuaaugcaaauccaaaugcaaacccaaacgcaaaccccaaugcaaauccuaaugcaaaccccaaugcaaauccuaaugcaaauccuaaugccaauccaaaugcaaauccaaaugcaaacccaaacgcaaaccccaaugcaaauccuaaugccaauccaaaugcaaauccaaaugcaaacccaaaugcaaacccaaaugcaaaccccaaugcaaauccuaauaaaaacaaucaagguaauggacaaggucacaauaugccaaaugacccaaaccgaaauguagaugaaaaugcuaaugccaacagugcuguaaaaaauaauaauaacgaagaaccaagugauaagcacauaaaagaauauuuaaacaaaauacaaaauucucuuucaacugaaugguccccauguaguguaacuuguggaaaugguauucaaguuagaauaaagccuggcucugcuaauaaaccuaaagacgaauuagauuaugcaaaugauauugaaaaaaaaauuuguaaaauggaaaaauguuccaguguguuuaaugucguaaauaguucaauaggauua

SEQ ID NO: 2140 - RNA, 57 nt, Artificial Sequence
  derived and/or modified CDS sequence (wt) from Pf(3D7)__XP_001351122.1__CSP(309-327)__RIII region, Th2R
gaagaaccaagugauaagcacauaaaagaauauuuaaacaaaauacaaaauucucuu

SEQ ID NO: 2141 - RNA, 63 nt, Artificial Sequence
  derived and/or modified CDS sequence (wt) from Pf(3D7)__XP_001351122.1__CSP(346-366)__Th3R
auaaagccuggcucugcuaauaaaccuaaagacgaauuagauuaugcaaaugauauugaaaaa

SEQ ID NO: 2142 - RNA, 93 nt, Artificial Sequence
  derived and/or modified CDS sequence (wt) from Pf(3D7)__XP_001351122.1__CSP(346-376)__Th3R_CS.T3
auaaagccuggcucugcuaauaaaccuaaagacgaauuagauuaugcaaaugauauugaaaaaaaaauuuguaaaauggaaaaauguuccagu

SEQ ID NO: 2143 - RNA, 54 nt, Artificial Sequence
  derived and/or modified CDS sequence (wt) from Pf(3D7)__XP_001351122.1__CSP(1-18)__signal peptide
augaugagaaaauuagcuauuuuaucuguuucuuccuuuuuauuuguugaggcc

SEQ ID NO: 2144 - RNA, 1074 nt, Artificial Sequence
  derived and/or modified CDS sequence (wt) from Pf(3D7)__XP_001351122.1__CSP(27-384)__EcCSP fragment
ggaaguucgucaaacacaaggguucuaaaugaauuaaauuaugauaaugcaggcacuaauuuauauaaugaauuagaaaugaauuauuaugggaaacaggaaaauugguauagucuuaaaaaaaauaguagaucacuuggagaaaaugaugauggaaauaacgaagacaacgagaaauuaaggaaaccaaaacauaaaaaauuaaagcaaccagcggaugguaauccugauccaaaugcaaacccaaauguagaucccaaugccaacccaaauguagauccaaaugcaaacccaaauguagauccaaaugcaaacccaaaugcaaacccaaaugcaaacccaaaugcaaacccaaaugcaaacccaaaugcaaacccaaaugcaaacccaaaugcaaacccaaaugcaaacccaaaugcaaacccaaaugcaaacccaaaugcaaacccaaaugcaaacccaaaugcaaaccccaaugcaaauccuaaugcaaacccaaaugcaaacccaaacguagauccuaaugcaaauccaaaugcaaacccaaacgcaaaccccaaugcaaauccuaaugcaaaccccaaugcaaauccuaaugcaaauccuaaugccaauccaaaugcaaauccaaaugcaaacccaaacgcaaaccccaaugcaaauccuaaugccaauccaaaugcaaauccaaaugcaaacccaaaugcaaacccaaaugcaaaccccaaugcaaauccuaauaaaaacaaucaagguaauggacaaggucacaauaugccaaaugacccaaaccgaaauguagaugaaaaugcuaaugccaacagugcuguaaaaaauaauaauaacgaagaaccaagugauaagcacauaaaagaauauuuaaacaaaauacaaaauucucuuucaacugaaugguccccauguaguguaacuuguggaaaugguauucaaguuagaauaaagccuggcucugcuaauaaaccuaaagacgaauuagauuaugcaaaugauauugaaaaaaaaauuuguaaaauggaaaaauguuccaguguguuuaaugucguaaauaguuca

SEQ ID NO: 2145 - RNA, 18 nt, Artificial Sequence
  derived and/or modified CDS sequence (wt) from Pf(3D7)__XP_001351122.1__CSP(69-74)__3A1 antibody binding site
aguagaucacuuggagaa

SEQ ID NO: 2146 - RNA, 930 nt, Artificial Sequence
  derived and/or modified CDS sequence (wt) from Pf(3D7)__XP_001351122.1__CSP(74-383)__PpCSP fragment
gaaaaugaugauggaaauaacgaagacaacgagaaauuaaggaaaccaaaacauaaaaaauuaaagcaaccagcggaugguaauccugauccaaaugcaaacccaaauguagaucccaaugccaacccaaauguagauccaaaugcaaacccaaauguagauccaaaugcaaacccaaaugcaaacccaaaugcaaacccaaaugcaaacccaaaugcaaacccaaaugcaaacccaaaugcaaacccaaaugcaaacccaaaugcaaacccaaaugcaaacccaaaugcaaacccaaaugcaaacccaaaugcaaacccaaaugcaaaccccaaugcaaauccuaaugcaaacccaaaugcaaacccaaacguagauccuaaugcaaauccaaaugcaaacccaaacgcaaaccccaaugcaaauccuaaugcaaaccccaaugcaaauccuaaugcaaauccuaaugccaauccaaaugcaaauccaaaugcaaacccaaacgcaaaccccaaugcaaauccuaaugccaauccaaaugcaaauccaaaugcaaacccaaaugcaaacccaaaugcaaaccccaaugcaaauccuaauaaaaacaaucaagguaauggacaaggucacaauaugccaaaugacccaaaccgaaauguagaugaaaaugcuaaugccaacagugcuguaaaaaauaauaauaacgaagaaccaagugauaagcacauaaaagaauauuuaaacaaaauacaaaauucucuuucaacugaaugguccccauguaguguaacuuguggaaaugguauucaaguuagaauaaagccuggcucugcuaauaaaccuaaagacgaauuagauuaugcaaaugauauugaaaaaaaaauuuguaaaauggaaaaauguuccaguguguuuaaugucguaaauagu

SEQ ID NO: 2147 - RNA, 60 nt, Artificial Sequence
  derived and/or modified CDS sequence (wt) from Pf(3D7)__XP_001351122.1__CSP(75-94)__2C3 antibody binding site
aaugaugauggaaauaacgaagacaacgagaaauuaaggaaaccaaaacauaaaaaauua

SEQ ID NO: 2148 - RNA, 15 nt, Artificial Sequence
  derived and/or modified CDS sequence (wt) from Pf(3D7)__XP_001351122.1__CSP(93-97)__RI region
aaauuaaagcaacca

SEQ ID NO: 2149 - RNA, 18 nt, Artificial Sequence
  derived and/or modified CDS sequence (wt) from Pf(3D7)__XP_001351122.1__CSP(95-100)__3H10/3B4 antibody binding site
aagcaaccagcggauggu

SEQ ID NO: 2150 - RNA, 525 nt, Artificial Sequence
  derived and/or modified CDS sequence (wt) from Pf(3D7)__XP_001351122.1__CSP(98-272)__NANP repeat region
gcggaugguaauccugauccaaaugcaaacccaaauguagaucccaaugccaacccaaauguagauccaaaugcaaacccaaauguagauccaaaugcaaacccaaaugcaaacccaaaugcaaacccaaaugcaaacccaaaugcaaacccaaaugcaaacccaaaugcaaacccaaaugcaaacccaaaugcaaacccaaaugcaaacccaaaugcaaacccaaaugcaaacccaaaugcaaacccaaaugcaaaccccaaugcaaauccuaaugcaaacccaaaugcaaacccaaacguagauccuaaugcaaauccaaaugcaaacccaaacgcaaaccccaaugcaaauccuaaugcaaaccccaaugcaaauccuaaugcaaauccuaaugccaauccaaaugcaaauccaaaugcaaacccaaacgcaaaccccaaugcaaauccuaaugccaauccaaaugcaaauccaaaugcaaacccaaaugcaaacccaaaugcaaaccccaaugcaaauccu

SEQ ID NO: 2151 - RNA, 504 nt, Artificial Sequence
  derived and/or modified CDS sequence (wt) from Pf(3D7)__XP_001351122.1__CSP(105-272)__central repeat region
aaugcaaacccaaauguagaucccaaugccaacccaaauguagauccaaaugcaaacccaaauguagauccaaaugcaaacccaaaugcaaacccaaaugcaaacccaaaugcaaacccaaaugcaaacccaaaugcaaacccaaaugcaaacccaaaugcaaacccaaaugcaaacccaaaugcaaacccaaaugcaaacccaaaugcaaacccaaaugcaaacccaaaugcaaaccccaaugcaaauccuaaugcaaacccaaaugcaaacccaaacguagauccuaaugcaaauccaaaugcaaacccaaacgcaaaccccaaugcaaauccuaaugcaaaccccaaugcaaauccuaaugcaaauccuaaugccaauccaaaugcaaauccaaaugcaaacccaaacgcaaaccccaaugcaaauccuaaugccaauccaaaugcaaauccaaaugcaaacccaaaugcaaacccaaaugcaaaccccaaugcaaauccu

SEQ ID NO: 2152 - RNA, 567 nt, Artificial Sequence
  derived and/or modified CDS sequence (wt) from Pf(3D7)__XP_001351122.1__CSP(207-395)__RTS,S fragment
aacccaaacgcaaaccccaaugcaaauccuaaugcaaaccccaaugcaaauccuaaugcaaauccuaaugccaauccaaaugcaaauccaaaugcaaacccaaacgcaaaccccaaugcaaauccuaaugccaauccaaaugcaaauccaaaugcaaacccaaaugcaaacccaaaugcaaaccccaaugcaaauccuaauaaaaacaaucaagguaauggacaaggucacaauaugccaaaugacccaaaccgaaauguagaugaaaaugcuaaugccaacagugcuguaaaaaauaauaauaacgaagaaccaagugauaagcacauaaaagaauauuuaaacaaaauacaaaauucucuuucaacugaaugguccccauguaguguaacuuguggaaaugguauucaaguuagaauaaagccuggcucugcuaauaaaccuaaagacgaauuagauuaugcaaaugauauugaaaaaaaaauuuguaaaauggaaaaauguuccaguguguuuaaugucguaaauaguucaauaggauuaauaaugguauuauccuucuuguuc

SEQ ID NO: 2153 - RNA, 54 nt, Artificial Sequence
  derived and/or modified CDS sequence (wt) from Pf(3D7)__XP_001351122.1__CSP(310-327)__RIII region, Th2R
gaaccaagugauaagcacauaaaagaauauuuaaacaaaauacaaaauucucuu

SEQ ID NO: 2154 - RNA, 195 nt, Artificial Sequence
  derived and/or modified CDS sequence (wt) from Pf(3D7)__XP_001351122.1__CSP(310-374)__RIII region_TSR (RII+)
gaaccaagugauaagcacauaaaagaauauuuaaacaaaauacaaaauucucuuucaacugaaugguccccauguaguguaacuuguggaaaugguauucaaguuagaauaaagccuggcucugcuaauaaaccuaaagacgaauuagauuaugcaaaugauauugaaaaaaaaauuuguaaaauggaaaaaugu

SEQ ID NO: 2155 - RNA, 171 nt, Artificial Sequence
  derived and/or modified CDS sequence (wt) from Pf(3D7)__XP_001351122.1__CSP(319-375)__TSR region v3
uauuuaaacaaaauacaaaauucucuuucaacugaaugguccccauguaguguaacuuguggaaaugguauucaaguuagaauaaagccuggcucugcuaauaaaccuaaagacgaauuagauuaugcaaaugauauugaaaaaaaaauuuguaaaauggaaaaauguucc

SEQ ID NO: 2156 - RNA, 147 nt, Artificial Sequence
  derived and/or modified CDS sequence (wt) from Pf(3D7)__XP_001351122.1__CSP(326-374)__TSR region v1
ucucuuucaacugaaugguccccauguaguguaacuuguggaaaugguauucaaguuagaauaaagccuggcucugcuaauaaaccuaaagacgaauuagauuaugcaaaugauauugaaaaaaaaauuuguaaaauggaaaaaugu

SEQ ID NO: 2157 - RNA, 141 nt, Artificial Sequence
  derived and/or modified CDS sequence (wt) from Pf(3D7)__XP_001351122.1__CSP(328-374)__TSR region v2
ucaacugaaugguccccauguaguguaacuuguggaaaugguauucaaguuagaauaaagccuggcucugcuaauaaaccuaaagacgaauuagauuaugcaaaugauauugaaaaaaaaauuuguaaaauggaaaaaugu

SEQ ID NO: 2158 - RNA, 54 nt, Artificial Sequence
  derived and/or modified CDS sequence (wt) from Pf(3D7)__XP_001351122.1__CSP(330-347)__RII+ region v1
gaaugguccccauguaguguaacuuguggaaaugguauucaaguuagaauaaag

SEQ ID NO: 2159 - RNA, 66 nt, Artificial Sequence
  derived and/or modified CDS sequence (wt) from Pf(3D7)__XP_001351122.1__CSP(330-351)__RII+ region v2
gaaugguccccauguaguguaacuuguggaaaugguauucaaguuagaauaaagccuggcucugcu

SEQ ID NO: 2160 - RNA, 69 nt, Artificial Sequence
  derived and/or modified CDS sequence (wt) from Pf(3D7)__XP_001351122.1__CSP(375-397)__GPI anchor signal
uccaguguguuuaaugucguaaauaguucaauaggauuaauaaugguauuauccuucuuguuccuuaau

SEQ ID NO: 2161 - RNA, 1194 nt, Artificial Sequence; identical to SEQ ID NO: 41
  derived and/or modified CDS sequence (opt1) from Pf(3D7)__XP_001351122.1__CSP

SEQ ID NO: 2162 - RNA, 1122 nt, Artificial Sequence; identical to SEQ ID NO: 42
  derived and/or modified CDS sequence (opt1) from Pf(3D7)__XP_001351122.1__CSP(1-374)__CSP-delGPI

SEQ ID NO: 2163 - RNA, 975 nt, Artificial Sequence; identical to SEQ ID NO: 43
  derived and/or modified CDS sequence (opt1) from Pf(3D7)__XP_001351122.1__CSP(1-325)__CSP-delTSR(v2)-delGPI

SEQ ID NO: 2164 - RNA, 1137 nt, Artificial Sequence
  derived and/or modified CDS sequence (opt1) from Pf(3D7)__XP_001351122.1__CSP(19-397)__CSP-delSP
cuguuccaggaguaccagugcuacggcuccagcuccaacacccgggugcucaacgagcugaacuacgacaacgcggggaccaaccuguacaacgagcucgagaugaacuacuacggcaagcaggagaacugguacagccugaagaagaacucccgcagccugggggagaacgacgacggcaacaacgaggacaacgagaagcuccggaagcccaagcacaagaagcugaagcagccggccgacgggaaccccgaccccaacgccaaccccaacguggacccgaacgccaaccccaacgucgaccccaacgccaaccccaacguggacccgaacgcgaaccccaacgccaaccccaacgccaaccccaacgccaacccgaacgcgaaccccaacgccaaccccaacgccaaccccaacgccaacccgaacgccaaccccaacgcgaaccccaacgccaaccccaacgccaacccgaacgccaaccccaacgccaaccccaacgcgaaccccaacgccaacccgaacgccaaccccaacguggaccccaacgccaaccccaacgccaacccgaacgcgaaccccaacgccaaccccaacgccaacccgaacgccaaccccaacgccaaccccaacgcgaaccccaacgccaacccgaacgccaaccccaacgccaaccccaacgcgaaccccaacgccaacccgaacgccaaccccaacgccaaccccaacgccaaccccaacgcgaacccgaacgccaaccccaacaagaacaaccagggcaacggccaggggcacaacaugcccaacgaccccaaccgcaacgucgacgagaacgccaacgccaacuccgccgugaagaacaacaacaacgaggagccgagcgacaagcacaucaaggaguaccugaacaagauccagaacucccucagcacggaguggucccccugcagcgugaccugcggcaacgggauccagguccggaucaagcccggcuccgcgaacaagcccaaggacgagcuggacuacgccaacgacaucgagaagaagaucugcaagauggagaagugcagcuccguguucaacguggucaacagcuccaucgggcugaucauggugcucagcuuccuguuccugaac

SEQ ID NO: 2165 - RNA, 1068 nt, Artificial Sequence
  derived and/or modified CDS sequence (opt1) from Pf(3D7)__XP_001351122.1__CSP(19-374)__CSP-delSP-delGPI
cuguuccaggaguaccagugcuacggcuccagcuccaacacccgggugcucaacgagcugaacuacgacaacgcggggaccaaccuguacaacgagcucgagaugaacuacuacggcaagcaggagaacugguacagccugaagaagaacucccgcagccugggggagaacgacgacggcaacaacgaggacaacgagaagcuccggaagcccaagcacaagaagcugaagcagccggccgacgggaaccccgaccccaacgccaaccccaacguggacccgaacgccaaccccaacgucgaccccaacgccaaccccaacguggacccgaacgcgaaccccaacgccaaccccaacgccaaccccaacgccaacccgaacgcgaaccccaacgccaaccccaacgccaaccccaacgccaacccgaacgccaaccccaacgcgaaccccaacgccaaccccaacgccaacccgaacgccaaccccaacgccaaccccaacgcgaaccccaacgccaacccgaacgccaaccccaacguggaccccaacgccaaccccaacgccaacccgaacgcgaaccccaacgccaaccccaacgccaacccgaacgccaaccccaacgccaaccccaacgcgaaccccaacgccaacccgaacgccaaccccaacgccaaccccaacgcgaaccccaacgccaacccgaacgccaaccccaacgccaaccccaacgccaaccccaacgcgaacccgaacgccaaccccaacaagaacaaccagggcaacggccaggggcacaacaugcccaacgaccccaaccgcaacgucgacgagaacgccaacgccaacuccgccgugaagaacaacaacaacgaggagccgagcgacaagcacaucaaggaguaccugaacaagauccagaacucccucagcacggaguggucccccugcagcgugaccugcggcaacgggauccagguccggaucaagcccggcuccgcgaacaagcccaaggacgagcuggacuacgccaacgacaucgagaagaagaucugcaagauggagaagugc

SEQ ID NO: 2166 - RNA, 921 nt, Artificial Sequence
  derived and/or modified CDS sequence (opt1) from Pf(3D7)__XP_001351122.1__CSP(19-325)__CSP-delSP-delTSR(v2)-delGPI
cuguuccaggaguaccagugcuacggcuccagcuccaacacccgggugcucaacgagcugaacuacgacaacgcggggaccaaccuguacaacgagcucgagaugaacuacuacggcaagcaggagaacugguacagccugaagaagaacucccgcagccugggggagaacgacgacggcaacaacgaggacaacgagaagcuccggaagcccaagcacaagaagcugaagcagccggccgacgggaaccccgaccccaacgccaaccccaacguggacccgaacgccaaccccaacgucgaccccaacgccaaccccaacguggacccgaacgcgaaccccaacgccaaccccaacgccaaccccaacgccaacccgaacgcgaaccccaacgccaaccccaacgccaaccccaacgccaacccgaacgccaaccccaacgcgaaccccaacgccaaccccaacgccaacccgaacgccaaccccaacgccaaccccaacgcgaaccccaacgccaacccgaacgccaaccccaacguggaccccaacgccaaccccaacgccaacccgaacgcgaaccccaacgccaaccccaacgccaacccgaacgccaaccccaacgccaaccccaacgcgaaccccaacgccaacccgaacgccaaccccaacgccaaccccaacgcgaaccccaacgccaacccgaacgccaaccccaacgccaaccccaacgccaaccccaacgcgaacccgaacgccaaccccaacaagaacaaccagggcaacggccaggggcacaacaugcccaacgaccccaaccgcaacgucgacgagaacgccaacgccaacuccgccgugaagaacaacaacaacgaggagccgagcgacaagcacaucaaggaguaccugaacaagauccagaac

SEQ ID NO: 2167 - RNA, 351 nt, Artificial Sequence
  derived and/or modified CDS sequence (opt1) from Pf(3D7)__XP_001351122.1__CSP(19-135)
cuguuccaggaguaccagugcuacggcuccagcuccaacacccgggugcucaacgagcugaacuacgacaacgcggggaccaaccuguacaacgagcucgagaugaacuacuacggcaagcaggagaacugguacagccugaagaagaacucccgcagccugggggagaacgacgacggcaacaacgaggacaacgagaagcuccggaagcccaagcacaagaagcugaagcagccggccgacgggaaccccgaccccaacgccaaccccaacguggacccgaacgccaaccccaacgucgaccccaacgccaaccccaacguggacccgaacgcgaaccccaacgccaac

SEQ ID NO: 2168 - RNA, 525 nt, Artificial Sequence
  derived and/or modified CDS sequence (opt1) from Pf(3D7)__XP_001351122.1__CSP(19-193)
cuguuccaggaguaccagugcuacggcuccagcuccaacacccgggugcucaacgagcugaacuacgacaacgcggggaccaaccuguacaacgagcucgagaugaacuacuacggcaagcaggagaacugguacagccugaagaagaacucccgcagccugggggagaacgacgacggcaacaacgaggacaacgagaagcuccggaagcccaagcacaagaagcugaagcagccggccgacgggaaccccgaccccaacgccaaccccaacguggacccgaacgccaaccccaacgucgaccccaacgccaaccccaacguggacccgaacgcgaaccccaacgccaaccccaacgccaaccccaacgccaacccgaacgcgaaccccaacgccaaccccaacgccaaccccaacgccaacccgaacgccaaccccaacgcgaaccccaacgccaaccccaacgccaacccgaacgccaaccccaacgccaaccccaacgcgaaccccaacgccaacccgaac

SEQ ID NO: 2169 - RNA, 762 nt, Artificial Sequence
  derived and/or modified CDS sequence (opt1) from Pf(3D7)__XP_001351122.1__CSP(19-272)
cuguuccaggaguaccagugcuacggcuccagcuccaacacccgggugcucaacgagcugaacuacgacaacgcggggaccaaccuguacaacgagcucgagaugaacuacuacggcaagcaggagaacugguacagccugaagaagaacucccgcagccugggggagaacgacgacggcaacaacgaggacaacgagaagcuccggaagcccaagcacaagaagcugaagcagccggccgacgggaaccccgaccccaacgccaaccccaacguggacccgaacgccaaccccaacgucgaccccaacgccaaccccaacguggacccgaacgcgaaccccaacgccaaccccaacgccaaccccaacgccaacccgaacgcgaaccccaacgccaaccccaacgccaaccccaacgccaacccgaacgccaaccccaacgcgaaccccaacgccaaccccaacgccaacccgaacgccaaccccaacgccaaccccaacgcgaaccccaacgccaacccgaacgccaaccccaacguggaccccaacgccaaccccaacgccaacccgaacgcgaaccccaacgccaaccccaacgccaacccgaacgccaaccccaacgccaaccccaacgcgaaccccaacgccaacccgaacgccaaccccaacgccaaccccaacgcgaaccccaacgccaacccgaacgccaaccccaacgccaaccccaacgccaaccccaacgcgaacccgaacgccaacccc

SEQ ID NO: 2170 - RNA, 1098 nt, Artificial Sequence
  derived and/or modified CDS sequence (opt1) from Pf(3D7)__XP_001351122.1__CSP(19-384)
cuguuccaggaguaccagugcuacggcuccagcuccaacacccgggugcucaacgagcugaacuacgacaacgcggggaccaaccuguacaacgagcucgagaugaacuacuacggcaagcaggagaacugguacagccugaagaagaacucccgcagccugggggagaacgacgacggcaacaacgaggacaacgagaagcuccggaagcccaagcacaagaagcugaagcagccggccgacgggaaccccgaccccaacgccaaccccaacguggacccgaacgccaaccccaacgucgaccccaacgccaaccccaacguggacccgaacgcgaaccccaacgccaaccccaacgccaaccccaacgccaacccgaacgcgaaccccaacgccaaccccaacgccaaccccaacgccaacccgaacgccaaccccaacgcgaaccccaacgccaaccccaacgccaacccgaacgccaaccccaacgccaaccccaacgcgaaccccaacgccaacccgaacgccaaccccaacguggaccccaacgccaaccccaacgccaacccgaacgcgaaccccaacgccaaccccaacgccaacccgaacgccaaccccaacgccaaccccaacgcgaaccccaacgccaacccgaacgccaaccccaacgccaaccccaacgcgaaccccaacgccaacccgaacgccaaccccaacgccaaccccaacgccaaccccaacgcgaacccgaacgccaaccccaacaagaacaaccagggcaacggccaggggcacaacaugcccaacgaccccaaccgcaacgucgacgagaacgccaacgccaacuccgccgugaagaacaacaacaacgaggagccgagcgacaagcacaucaaggaguaccugaacaagauccagaacucccucagcacggaguggucccccugcagcgugaccugcggcaacgggauccagguccggaucaagcccggcuccgcgaacaagcccaaggacgagcuggacuacgccaacgacaucgagaagaagaucugcaagauggagaagugcagcuccguguucaacguggucaacagcucc

SEQ ID NO: 2171 - RNA, 948 nt, Artificial Sequence
  derived and/or modified CDS sequence (opt1) from Pf(3D7)__XP_001351122.1__CSP(82-397)
gacaacgagaagcuccggaagcccaagcacaagaagcugaagcagccggccgacgggaaccccgaccccaacgccaaccccaacguggacccgaacgccaaccccaacgucgaccccaacgccaaccccaacguggacccgaacgcgaaccccaacgccaaccccaacgccaaccccaacgccaacccgaacgcgaaccccaacgccaaccccaacgccaaccccaacgccaacccgaacgccaaccccaacgcgaaccccaacgccaaccccaacgccaacccgaacgccaaccccaacgccaaccccaacgcgaaccccaacgccaacccgaacgccaaccccaacguggaccccaacgccaaccccaacgccaacccgaacgcgaaccccaacgccaaccccaacgccaacccgaacgccaaccccaacgccaaccccaacgcgaaccccaacgccaacccgaacgccaaccccaacgccaaccccaacgcgaaccccaacgccaacccgaacgccaaccccaacgccaaccccaacgccaaccccaacgcgaacccgaacgccaaccccaacaagaacaaccagggcaacggccaggggcacaacaugcccaacgaccccaaccgcaacgucgacgagaacgccaacgccaacuccgccgugaagaacaacaacaacgaggagccgagcgacaagcacaucaaggaguaccugaacaagauccagaacucccucagcacggaguggucccccugcagcgugaccugcggcaacgggauccagguccggaucaagcccggcuccgcgaacaagcccaaggacgagcuggacuacgccaacgacaucgagaagaagaucugcaagauggagaagugcagcuccguguucaacguggucaacagcuccaucgggcugaucauggugcucagcuuccuguuccugaac

SEQ ID NO: 2172 - RNA, 300 nt, Artificial Sequence
  derived and/or modified CDS sequence (opt1) from Pf(3D7)__XP_001351122.1__CSP(93-192)
aagcugaagcagccggccgacgggaaccccgaccccaacgccaaccccaacguggacccgaacgccaaccccaacgucgaccccaacgccaaccccaacguggacccgaacgcgaaccccaacgccaaccccaacgccaaccccaacgccaacccgaacgcgaaccccaacgccaaccccaacgccaaccccaacgccaacccgaacgccaaccccaacgcgaaccccaacgccaaccccaacgccaacccgaacgccaaccccaacgccaaccccaacgcgaaccccaacgccaacccg

SEQ ID NO: 2173 - RNA, 540 nt, Artificial Sequence
  derived and/or modified CDS sequence (opt1) from Pf(3D7)__XP_001351122.1__CSP(93-272)__RI region_NANP repeat region
aagcugaagcagccggccgacgggaaccccgaccccaacgccaaccccaacguggacccgaacgccaaccccaacgucgaccccaacgccaaccccaacguggacccgaacgcgaaccccaacgccaaccccaacgccaaccccaacgccaacccgaacgcgaaccccaacgccaaccccaacgccaaccccaacgccaacccgaacgccaaccccaacgcgaaccccaacgccaaccccaacgccaacccgaacgccaaccccaacgccaaccccaacgcgaaccccaacgccaacccgaacgccaaccccaacguggaccccaacgccaaccccaacgccaacccgaacgcgaaccccaacgccaaccccaacgccaacccgaacgccaaccccaacgccaaccccaacgcgaaccccaacgccaacccgaacgccaaccccaacgccaaccccaacgcgaaccccaacgccaacccgaacgccaaccccaacgccaaccccaacgccaaccccaacgcgaacccgaacgccaacccc

SEQ ID NO: 2174 - RNA, 915 nt, Artificial Sequence
  derived and/or modified CDS sequence (opt1) from Pf(3D7)__XP_001351122.1__CSP(93-397)
aagcugaagcagccggccgacgggaaccccgaccccaacgccaaccccaacguggacccgaacgccaaccccaacgucgaccccaacgccaaccccaacguggacccgaacgcgaaccccaacgccaaccccaacgccaaccccaacgccaacccgaacgcgaaccccaacgccaaccccaacgccaaccccaacgccaacccgaacgccaaccccaacgcgaaccccaacgccaaccccaacgccaacccgaacgccaaccccaacgccaaccccaacgcgaaccccaacgccaacccgaacgccaaccccaacguggaccccaacgccaaccccaacgccaacccgaacgcgaaccccaacgccaaccccaacgccaacccgaacgccaaccccaacgccaaccccaacgcgaaccccaacgccaacccgaacgccaaccccaacgccaaccccaacgcgaaccccaacgccaacccgaacgccaaccccaacgccaaccccaacgccaaccccaacgcgaacccgaacgccaaccccaacaagaacaaccagggcaacggccaggggcacaacaugcccaacgaccccaaccgcaacgucgacgagaacgccaacgccaacuccgccgugaagaacaacaacaacgaggagccgagcgacaagcacaucaaggaguaccugaacaagauccagaacucccucagcacggaguggucccccugcagcgugaccugcggcaacgggauccagguccggaucaagcccggcuccgcgaacaagcccaaggacgagcuggacuacgccaacgacaucgagaagaagaucugcaagauggagaagugcagcuccguguucaacguggucaacagcuccaucgggcugaucauggugcucagcuuccuguuccugaac

SEQ ID NO: 2175 - RNA, 285 nt, Artificial Sequence
  derived and/or modified CDS sequence (opt1) from Pf(3D7)__XP_001351122.1__CSP(98-192)
gccgacgggaaccccgaccccaacgccaaccccaacguggacccgaacgccaaccccaacgucgaccccaacgccaaccccaacguggacccgaacgcgaaccccaacgccaaccccaacgccaaccccaacgccaacccgaacgcgaaccccaacgccaaccccaacgccaaccccaacgccaacccgaacgccaaccccaacgcgaaccccaacgccaaccccaacgccaacccgaacgccaaccccaacgccaaccccaacgcgaaccccaacgccaacccg

SEQ ID NO: 2176 - RNA, 831 nt, Artificial Sequence
  derived and/or modified CDS sequence (opt1) from Pf(3D7)__XP_001351122.1__CSP(98-374)
gccgacgggaaccccgaccccaacgccaaccccaacguggacccgaacgccaaccccaacgucgaccccaacgccaaccccaacguggacccgaacgcgaaccccaacgccaaccccaacgccaaccccaacgccaacccgaacgcgaaccccaacgccaaccccaacgccaaccccaacgccaacccgaacgccaaccccaacgcgaaccccaacgccaaccccaacgccaacccgaacgccaaccccaacgccaaccccaacgcgaaccccaacgccaacccgaacgccaaccccaacguggaccccaacgccaaccccaacgccaacccgaacgcgaaccccaacgccaaccccaacgccaacccgaacgccaaccccaacgccaaccccaacgcgaaccccaacgccaacccgaacgccaaccccaacgccaaccccaacgcgaaccccaacgccaacccgaacgccaaccccaacgccaaccccaacgccaaccccaacgcgaacccgaacgccaaccccaacaagaacaaccagggcaacggccaggggcacaacaugcccaacgaccccaaccgcaacgucgacgagaacgccaacgccaacuccgccgugaagaacaacaacaacgaggagccgagcgacaagcacaucaaggaguaccugaacaagauccagaacucccucagcacggaguggucccccugcagcgugaccugcggcaacgggauccagguccggaucaagcccggcuccgcgaacaagcccaaggacgagcuggacuacgccaacgacaucgagaagaagaucugcaagauggagaagugc

SEQ ID NO: 2177 - RNA, 900 nt, Artificial Sequence
  derived and/or modified CDS sequence (opt1) from Pf(3D7)__XP_001351122.1__CSP(98-397)
gccgacgggaaccccgaccccaacgccaaccccaacguggacccgaacgccaaccccaacgucgaccccaacgccaaccccaacguggacccgaacgcgaaccccaacgccaaccccaacgccaaccccaacgccaacccgaacgcgaaccccaacgccaaccccaacgccaaccccaacgccaacccgaacgccaaccccaacgcgaaccccaacgccaaccccaacgccaacccgaacgccaaccccaacgccaaccccaacgcgaaccccaacgccaacccgaacgccaaccccaacguggaccccaacgccaaccccaacgccaacccgaacgcgaaccccaacgccaaccccaacgccaacccgaacgccaaccccaacgccaaccccaacgcgaaccccaacgccaacccgaacgccaaccccaacgccaaccccaacgcgaaccccaacgccaacccgaacgccaaccccaacgccaaccccaacgccaaccccaacgcgaacccgaacgccaaccccaacaagaacaaccagggcaacggccaggggcacaacaugcccaacgaccccaaccgcaacgucgacgagaacgccaacgccaacuccgccgugaagaacaacaacaacgaggagccgagcgacaagcacaucaaggaguaccugaacaagauccagaacucccucagcacggaguggucccccugcagcgugaccugcggcaacgggauccagguccggaucaagcccggcuccgcgaacaagcccaaggacgagcuggacuacgccaacgacaucgagaagaagaucugcaagauggagaagugcagcuccguguucaacguggucaacagcuccaucgggcugaucauggugcucagcuuccuguuccugaac

SEQ ID NO: 2178 - RNA, 537 nt, Artificial Sequence
  derived and/or modified CDS sequence (opt1) from Pf(3D7)__XP_001351122.1__CSP(199-377)
gaccccaacgccaaccccaacgccaacccgaacgcgaaccccaacgccaaccccaacgccaacccgaacgccaaccccaacgccaaccccaacgcgaaccccaacgccaacccgaacgccaaccccaacgccaaccccaacgcgaaccccaacgccaacccgaacgccaaccccaacgccaaccccaacgccaaccccaacgcgaacccgaacgccaaccccaacaagaacaaccagggcaacggccaggggcacaacaugcccaacgaccccaaccgcaacgucgacgagaacgccaacgccaacuccgccgugaagaacaacaacaacgaggagccgagcgacaagcacaucaaggaguaccugaacaagauccagaacucccucagcacggaguggucccccugcagcgugaccugcggcaacgggauccagguccggaucaagcccggcuccgcgaacaagcccaaggacgagcuggacuacgccaacgacaucgagaagaagaucugcaagauggagaagugcagcuccgug

SEQ ID NO: 2179 - RNA, 567 nt, Artificial Sequence
  derived and/or modified CDS sequence (opt1) from Pf(3D7)__XP_001351122.1__CSP(199-387)
gaccccaacgccaaccccaacgccaacccgaacgcgaaccccaacgccaaccccaacgccaacccgaacgccaaccccaacgccaaccccaacgcgaaccccaacgccaacccgaacgccaaccccaacgccaaccccaacgcgaaccccaacgccaacccgaacgccaaccccaacgccaaccccaacgccaaccccaacgcgaacccgaacgccaaccccaacaagaacaaccagggcaacggccaggggcacaacaugcccaacgaccccaaccgcaacgucgacgagaacgccaacgccaacuccgccgugaagaacaacaacaacgaggagccgagcgacaagcacaucaaggaguaccugaacaagauccagaacucccucagcacggaguggucccccugcagcgugaccugcggcaacgggauccagguccggaucaagcccggcuccgcgaacaagcccaaggacgagcuggacuacgccaacgacaucgagaagaagaucugcaagauggagaagugcagcuccguguucaacguggucaacagcuccaucgggcug

SEQ ID NO: 2180 - RNA, 57 nt, Artificial Sequence
  derived and/or modified CDS sequence (opt1) from Pf(3D7)__XP_001351122.1__CSP(309-327)__RIII region, Th2R
gaggagccgagcgacaagcacaucaaggaguaccugaacaagauccagaacucccuc

SEQ ID NO: 2181 - RNA, 63 nt, Artificial Sequence
  derived and/or modified CDS sequence (opt1) from Pf(3D7)__XP_001351122.1__CSP(346-366)__Th3R
aucaagcccggcuccgcgaacaagcccaaggacgagcuggacuacgccaacgacaucgagaag

SEQ ID NO: 2182 - RNA, 93 nt, Artificial Sequence
  derived and/or modified CDS sequence (opt1) from Pf(3D7)__XP_001351122.1__CSP(346-376)__Th3R_CS.T3
aucaagcccggcuccgcgaacaagcccaaggacgagcuggacuacgccaacgacaucgagaagaagaucugcaagauggagaagugcagcucc

SEQ ID NO: 2183 - RNA, 54 nt, Artificial Sequence
  derived and/or modified CDS sequence (opt1) from Pf(3D7)__XP_001351122.1__CSP(1-18)__signal peptide
augaugcgcaagcuggccauccucagcguguccagcuuccuguucgucgaggcc

SEQ ID NO: 2184 - RNA, 1074 nt, Artificial Sequence
  derived and/or modified CDS sequence (opt1) from Pf(3D7)__XP_001351122.1__CSP(27-384)__EcCSP fragment
ggcuccagcuccaacacccgggugcucaacgagcugaacuacgacaacgcggggaccaaccuguacaacgagcucgagaugaacuacuacggcaagcaggagaacugguacagccugaagaagaacucccgcagccugggggagaacgacgacggcaacaacgaggacaacgagaagcuccggaagcccaagcacaagaagcugaagcagccggccgacgggaaccccgaccccaacgccaaccccaacguggacccgaacgccaaccccaacgucgaccccaacgccaaccccaacguggacccgaacgcgaaccccaacgccaaccccaacgccaaccccaacgccaacccgaacgcgaaccccaacgccaaccccaacgccaaccccaacgccaacccgaacgccaaccccaacgcgaaccccaacgccaaccccaacgccaacccgaacgccaaccccaacgccaaccccaacgcgaaccccaacgccaacccgaacgccaaccccaacguggaccccaacgccaaccccaacgccaacccgaacgcgaaccccaacgccaaccccaacgccaacccgaacgccaaccccaacgccaaccccaacgcgaaccccaacgccaacccgaacgccaaccccaacgccaaccccaacgcgaaccccaacgccaacccgaacgccaaccccaacgccaaccccaacgccaaccccaacgcgaacccgaacgccaaccccaacaagaacaaccagggcaacggccaggggcacaacaugcccaacgaccccaaccgcaacgucgacgagaacgccaacgccaacuccgccgugaagaacaacaacaacgaggagccgagcgacaagcacaucaaggaguaccugaacaagauccagaacucccucagcacggaguggucccccugcagcgugaccugcggcaacgggauccagguccggaucaagcccggcuccgcgaacaagcccaaggacgagcuggacuacgccaacgacaucgagaagaagaucugcaagauggagaagugcagcuccguguucaacguggucaacagcucc

SEQ ID NO: 2185 - RNA, 18 nt, Artificial Sequence
  derived and/or modified CDS sequence (opt1) from Pf(3D7)__XP_001351122.1__CSP(69-74)__3A1 antibody binding site
ucccgcagccugggggag

SEQ ID NO: 2186 - RNA, 930 nt, Artificial Sequence
  derived and/or modified CDS sequence (opt1) from Pf(3D7)__XP_001351122.1__CSP(74-383)__PpCSP fragment
gagaacgacgacggcaacaacgaggacaacgagaagcuccggaagcccaagcacaagaagcugaagcagccggccgacgggaaccccgaccccaacgccaaccccaacguggacccgaacgccaaccccaacgucgaccccaacgccaaccccaacguggacccgaacgcgaaccccaacgccaaccccaacgccaaccccaacgccaacccgaacgcgaaccccaacgccaaccccaacgccaaccccaacgccaacccgaacgccaaccccaacgcgaaccccaacgccaaccccaacgccaacccgaacgccaaccccaacgccaaccccaacgcgaaccccaacgccaacccgaacgccaaccccaacguggaccccaacgccaaccccaacgccaacccgaacgcgaaccccaacgccaaccccaacgccaacccgaacgccaaccccaacgccaaccccaacgcgaaccccaacgccaacccgaacgccaaccccaacgccaaccccaacgcgaaccccaacgccaacccgaacgccaaccccaacgccaaccccaacgccaaccccaacgcgaacccgaacgccaaccccaacaagaacaaccagggcaacggccaggggcacaacaugcccaacgaccccaaccgcaacgucgacgagaacgccaacgccaacuccgccgugaagaacaacaacaacgaggagccgagcgacaagcacaucaaggaguaccugaacaagauccagaacucccucagcacggaguggucccccugcagcgugaccugcggcaacgggauccagguccggaucaagcccggcuccgcgaacaagcccaaggacgagcuggacuacgccaacgacaucgagaagaagaucugcaagauggagaagugcagcuccguguucaacguggucaacagc

SEQ ID NO: 2187 - RNA, 60 nt, Artificial Sequence
  derived and/or modified CDS sequence (opt1) from Pf(3D7)__XP_001351122.1__CSP(75-94)__2C3 antibody binding site
aacgacgacggcaacaacgaggacaacgagaagcuccggaagcccaagcacaagaagcug

SEQ ID NO: 2188 - RNA, 15 nt, Artificial Sequence
  derived and/or modified CDS sequence (opt1) from Pf(3D7)__XP_001351122.1__CSP(93-97)__RI region
aagcugaagcagccg

SEQ ID NO: 2189 - RNA, 18 nt, Artificial Sequence
  derived and/or modified CDS sequence (opt1) from Pf(3D7)__XP_001351122.1__CSP(95-100)__3H10/3B4 antibody binding site
aagcagccggccgacggg

SEQ ID NO: 2190 - RNA, 525 nt, Artificial Sequence
  derived and/or modified CDS sequence (opt1) from Pf(3D7)__XP_001351122.1__CSP(98-272)__NANP repeat region
gccgacgggaaccccgaccccaacgccaaccccaacguggacccgaacgccaaccccaacgucgaccccaacgccaaccccaacguggacccgaacgcgaaccccaacgccaaccccaacgccaaccccaacgccaacccgaacgcgaaccccaacgccaaccccaacgccaaccccaacgccaacccgaacgccaaccccaacgcgaaccccaacgccaaccccaacgccaacccgaacgccaaccccaacgccaaccccaacgcgaaccccaacgccaacccgaacgccaaccccaacguggaccccaacgccaaccccaacgccaacccgaacgcgaaccccaacgccaaccccaacgccaacccgaacgccaaccccaacgccaaccccaacgcgaaccccaacgccaacccgaacgccaaccccaacgccaaccccaacgcgaaccccaacgccaacccgaacgccaaccccaacgccaaccccaacgccaaccccaacgcgaacccgaacgccaacccc

SEQ ID NO: 2191 - RNA, 504 nt, Artificial Sequence
  derived and/or modified CDS sequence (opt1) from Pf(3D7)__XP_001351122.1__CSP(105-272)__central repeat region
aacgccaaccccaacguggacccgaacgccaaccccaacgucgaccccaacgccaaccccaacguggacccgaacgcgaaccccaacgccaaccccaacgccaaccccaacgccaacccgaacgcgaaccccaacgccaaccccaacgccaaccccaacgccaacccgaacgccaaccccaacgcgaaccccaacgccaaccccaacgccaacccgaacgccaaccccaacgccaaccccaacgcgaaccccaacgccaacccgaacgccaaccccaacguggaccccaacgccaaccccaacgccaacccgaacgcgaaccccaacgccaaccccaacgccaacccgaacgccaaccccaacgccaaccccaacgcgaaccccaacgccaacccgaacgccaaccccaacgccaaccccaacgcgaaccccaacgccaacccgaacgccaaccccaacgccaaccccaacgccaaccccaacgcgaacccgaacgccaacccc

SEQ ID NO: 2192 - RNA, 567 nt, Artificial Sequence
  derived and/or modified CDS sequence (opt1) from Pf(3D7)__XP_001351122.1__CSP(207-395)__RTS,S fragment
aacccgaacgcgaaccccaacgccaaccccaacgccaacccgaacgccaaccccaacgccaaccccaacgcgaaccccaacgccaacccgaacgccaaccccaacgccaaccccaacgcgaaccccaacgccaacccgaacgccaaccccaacgccaaccccaacgccaaccccaacgcgaacccgaacgccaaccccaacaagaacaaccagggcaacggccaggggcacaacaugcccaacgaccccaaccgcaacgucgacgagaacgccaacgccaacuccgccgugaagaacaacaacaacgaggagccgagcgacaagcacaucaaggaguaccugaacaagauccagaacucccucagcacggaguggucccccugcagcgugaccugcggcaacgggauccagguccggaucaagcccggcuccgcgaacaagcccaaggacgagcuggacuacgccaacgacaucgagaagaagaucugcaagauggagaagugcagcuccguguucaacguggucaacagcuccaucgggcugaucauggugcucagcuuccuguuc

SEQ ID NO: 2193 - RNA, 54 nt, Artificial Sequence
  derived and/or modified CDS sequence (opt1) from Pf(3D7)__XP_001351122.1__CSP(310-327)__RIII region, Th2R
gagccgagcgacaagcacaucaaggaguaccugaacaagauccagaacucccuc

SEQ ID NO: 2194 - RNA, 195 nt, Artificial Sequence
  derived and/or modified CDS sequence (opt1) from Pf(3D7)__XP_001351122.1__CSP(310-374)__RIII region_TSR (RII+)
gagccgagcgacaagcacaucaaggaguaccugaacaagauccagaacucccucagcacggaguggucccccugcagcgugaccugcggcaacgggauccagguccggaucaagcccggcuccgcgaacaagcccaaggacgagcuggacuacgccaacgacaucgagaagaagaucugcaagauggagaagugc

SEQ ID NO: 2195 - RNA, 171 nt, Artificial Sequence
  derived and/or modified CDS sequence (opt1) from Pf(3D7)__XP_001351122.1__CSP(319-375)__TSR region v3
uaccugaacaagauccagaacucccucagcacggaguggucccccugcagcgugaccugcggcaacgggauccagguccggaucaagcccggcuccgcgaacaagcccaaggacgagcuggacuacgccaacgacaucgagaagaagaucugcaagauggagaagugcagc

SEQ ID NO: 2196 - RNA, 147 nt, Artificial Sequence
  derived and/or modified CDS sequence (opt1) from Pf(3D7)__XP_001351122.1__CSP(326-374)__TSR region v1
ucccucagcacggaguggucccccugcagcgugaccugcggcaacgggauccagguccggaucaagcccggcuccgcgaacaagcccaaggacgagcuggacuacgccaacgacaucgagaagaagaucugcaagauggagaagugc

SEQ ID NO: 2197 - RNA, 141 nt, Artificial Sequence
  derived and/or modified CDS sequence (opt1) from Pf(3D7)__XP_001351122.1__CSP(328-374)__TSR region v2
agcacggaguggucccccugcagcgugaccugcggcaacgggauccagguccggaucaagcccggcuccgcgaacaagcccaaggacgagcuggacuacgccaacgacaucgagaagaagaucugcaagauggagaagugc

SEQ ID NO: 2198 - RNA, 54 nt, Artificial Sequence
  derived and/or modified CDS sequence (opt1) from Pf(3D7)__XP_001351122.1__CSP(330-347)__RII+ region v1
gaguggucccccugcagcgugaccugcggcaacgggauccagguccggaucaag

SEQ ID NO: 2199 - RNA, 66 nt, Artificial Sequence
  derived and/or modified CDS sequence (opt1) from Pf(3D7)__XP_001351122.1__CSP(330-351)__RII+ region v2
gaguggucccccugcagcgugaccugcggcaacgggauccagguccggaucaagcccggcuccgcg

SEQ ID NO: 2200 - RNA, 69 nt, Artificial Sequence
  derived and/or modified CDS sequence (opt1) from Pf(3D7)__XP_001351122.1__CSP(375-397)__GPI anchor signal
agcuccguguucaacguggucaacagcuccaucgggcugaucauggugcucagcuuccuguuccugaac

SEQ ID NO: 2201 - RNA, 1194 nt, Artificial Sequence; identical to SEQ ID NO: 41
  derived and/or modified CDS sequence (opt1) from Pf(3D7)__XP_001351122.1__CSP

SEQ ID NO: 2202 - RNA, 1122 nt, Artificial Sequence; identical to SEQ ID NO: 42
  derived and/or modified CDS sequence (opt1) from Pf(3D7)__XP_001351122.1__CSP(1-374)__CSP-delGPI

SEQ ID NO: 2203 - RNA, 975 nt, Artificial Sequence; identical to SEQ ID NO: 43
  derived and/or modified CDS sequence (opt1) from Pf(3D7)__XP_001351122.1__CSP(1-325)__CSP-delTSR(v2)-delGPI

SEQ ID NO: 2204 - RNA, 1137 nt, Artificial Sequence
  derived and/or modified CDS sequence (opt1) from Pf(3D7)__XP_001351122.1__CSP(19-397)__CSP-delSP
cuguuccaggaguaccagugcuacggcagcuccagcaacacccgcgugcucaacgagcugaacuacgacaacgccgggaccaaccuguacaacgagcucgagaugaacuacuacggcaagcaggagaacugguacucccugaagaagaacagccggucccugggggagaacgacgacggcaacaacgaggacaacgagaagcuccgcaagcccaagcacaagaagcugaagcagccggccgacgggaaccccgaccccaacgcgaaccccaacgucgacccgaacgccaaccccaacguggaccccaacgccaaccccaacguggacccgaacgccaaccccaacgccaaccccaacgcgaaccccaacgccaacccgaacgccaaccccaacgccaaccccaacgcgaaccccaacgccaacccgaacgccaaccccaacgccaaccccaacgccaaccccaacgcgaacccgaacgccaaccccaacgccaaccccaacgccaaccccaacgccaacccgaacgcgaaccccaacgucgaccccaacgccaaccccaacgccaacccgaacgccaaccccaacgccaaccccaacgcgaacccgaacgccaaccccaacgccaaccccaacgccaaccccaacgccaacccgaacgcgaaccccaacgccaaccccaacgccaaccccaacgccaacccgaacgcgaaccccaacgccaaccccaacgccaaccccaacgccaacccgaacgccaaccccaacaagaacaaccagggcaacggccaggggcacaacaugcccaacgaccccaaccggaacguggacgagaacgcgaacgccaacagcgccgugaagaacaacaacaacgaggagccguccgacaagcacaucaaggaguaccugaacaagauccagaacagccucuccacggaguggagccccugcuccgugaccugcggcaacgggauccagguccgcaucaagcccggcagcgccaacaagcccaaggacgagcuggacuacgccaacgacaucgagaagaagaucugcaagauggagaagugcuccagcguguucaacgucgugaacuccagcaucgggcugaucauggugcucuccuuccuguuccugaac

SEQ ID NO: 2205 - RNA, 1068 nt, Artificial Sequence
  derived and/or modified CDS sequence (opt1) from Pf(3D7)__XP_001351122.1__CSP(19-374)__CSP-delSP-delGPI
cuguuccaggaguaccagugcuacggcagcuccagcaacacccgcgugcucaacgagcugaacuacgacaacgccgggaccaaccuguacaacgagcucgagaugaacuacuacggcaagcaggagaacugguacucccugaagaagaacagccggucccugggggagaacgacgacggcaacaacgaggacaacgagaagcuccgcaagcccaagcacaagaagcugaagcagccggccgacgggaaccccgaccccaacgcgaaccccaacgucgacccgaacgccaaccccaacguggaccccaacgccaaccccaacguggacccgaacgccaaccccaacgccaaccccaacgcgaaccccaacgccaacccgaacgccaaccccaacgccaaccccaacgcgaaccccaacgccaacccgaacgccaaccccaacgccaaccccaacgccaaccccaacgcgaacccgaacgccaaccccaacgccaaccccaacgccaaccccaacgccaacccgaacgcgaaccccaacgucgaccccaacgccaaccccaacgccaacccgaacgccaaccccaacgccaaccccaacgcgaacccgaacgccaaccccaacgccaaccccaacgccaaccccaacgccaacccgaacgcgaaccccaacgccaaccccaacgccaaccccaacgccaacccgaacgcgaaccccaacgccaaccccaacgccaaccccaacgccaacccgaacgccaaccccaacaagaacaaccagggcaacggccaggggcacaacaugcccaacgaccccaaccggaacguggacgagaacgcgaacgccaacagcgccgugaagaacaacaacaacgaggagccguccgacaagcacaucaaggaguaccugaacaagauccagaacagccucuccacggaguggagccccugcuccgugaccugcggcaacgggauccagguccgcaucaagcccggcagcgccaacaagcccaaggacgagcuggacuacgccaacgacaucgagaagaagaucugcaagauggagaagugc

SEQ ID NO: 2206 - RNA, 921 nt, Artificial Sequence
  derived and/or modified CDS sequence (opt1) from Pf(3D7)__XP_001351122.1__CSP(19-325)__CSP-delSP-delTSR(v2)-delGPI
cuguuccaggaguaccagugcuacggcagcuccagcaacacccgcgugcucaacgagcugaacuacgacaacgccgggaccaaccuguacaacgagcucgagaugaacuacuacggcaagcaggagaacugguacucccugaagaagaacagccggucccugggggagaacgacgacggcaacaacgaggacaacgagaagcuccgcaagcccaagcacaagaagcugaagcagccggccgacgggaaccccgaccccaacgcgaaccccaacgucgacccgaacgccaaccccaacguggaccccaacgccaaccccaacguggacccgaacgccaaccccaacgccaaccccaacgcgaaccccaacgccaacccgaacgccaaccccaacgccaaccccaacgcgaaccccaacgccaacccgaacgccaaccccaacgccaaccccaacgccaaccccaacgcgaacccgaacgccaaccccaacgccaaccccaacgccaaccccaacgccaacccgaacgcgaaccccaacgucgaccccaacgccaaccccaacgccaacccgaacgccaaccccaacgccaaccccaacgcgaacccgaacgccaaccccaacgccaaccccaacgccaaccccaacgccaacccgaacgcgaaccccaacgccaaccccaacgccaaccccaacgccaacccgaacgcgaaccccaacgccaaccccaacgccaaccccaacgccaacccgaacgccaaccccaacaagaacaaccagggcaacggccaggggcacaacaugcccaacgaccccaaccggaacguggacgagaacgcgaacgccaacagcgccgugaagaacaacaacaacgaggagccguccgacaagcacaucaaggaguaccugaacaagauccagaac

SEQ ID NO: 2207 - RNA, 351 nt, Artificial Sequence
  derived and/or modified CDS sequence (opt1) from Pf(3D7)__XP_001351122.1__CSP(19-135)
cuguuccaggaguaccagugcuacggcagcuccagcaacacccgcgugcucaacgagcugaacuacgacaacgccgggaccaaccuguacaacgagcucgagaugaacuacuacggcaagcaggagaacugguacucccugaagaagaacagccggucccugggggagaacgacgacggcaacaacgaggacaacgagaagcuccgcaagcccaagcacaagaagcugaagcagccggccgacgggaaccccgaccccaacgcgaaccccaacgucgacccgaacgccaaccccaacguggaccccaacgccaaccccaacguggacccgaacgccaaccccaacgccaac

SEQ ID NO: 2208 - RNA, 525 nt, Artificial Sequence
  derived and/or modified CDS sequence (opt1) from Pf(3D7)__XP_001351122.1__CSP(19-193)
cuguuccaggaguaccagugcuacggcagcuccagcaacacccgcgugcucaacgagcugaacuacgacaacgccgggaccaaccuguacaacgagcucgagaugaacuacuacggcaagcaggagaacugguacucccugaagaagaacagccggucccugggggagaacgacgacggcaacaacgaggacaacgagaagcuccgcaagcccaagcacaagaagcugaagcagccggccgacgggaaccccgaccccaacgcgaaccccaacgucgacccgaacgccaaccccaacguggaccccaacgccaaccccaacguggacccgaacgccaaccccaacgccaaccccaacgcgaaccccaacgccaacccgaacgccaaccccaacgccaaccccaacgcgaaccccaacgccaacccgaacgccaaccccaacgccaaccccaacgccaaccccaacgcgaacccgaacgccaaccccaacgccaaccccaacgccaaccccaacgccaacccgaac

SEQ ID NO: 2209 - RNA, 762 nt, Artificial Sequence
  derived and/or modified CDS sequence (opt1) from Pf(3D7)__XP_001351122.1__CSP(19-272)
cuguuccaggaguaccagugcuacggcagcuccagcaacacccgcgugcucaacgagcugaacuacgacaacgccgggaccaaccuguacaacgagcucgagaugaacuacuacggcaagcaggagaacugguacucccugaagaagaacagccggucccugggggagaacgacgacggcaacaacgaggacaacgagaagcuccgcaagcccaagcacaagaagcugaagcagccggccgacgggaaccccgaccccaacgcgaaccccaacgucgacccgaacgccaaccccaacguggaccccaacgccaaccccaacguggacccgaacgccaaccccaacgccaaccccaacgcgaaccccaacgccaacccgaacgccaaccccaacgccaaccccaacgcgaaccccaacgccaacccgaacgccaaccccaacgccaaccccaacgccaaccccaacgcgaacccgaacgccaaccccaacgccaaccccaacgccaaccccaacgccaacccgaacgcgaaccccaacgucgaccccaacgccaaccccaacgccaacccgaacgccaaccccaacgccaaccccaacgcgaacccgaacgccaaccccaacgccaaccccaacgccaaccccaacgccaacccgaacgcgaaccccaacgccaaccccaacgccaaccccaacgccaacccgaacgcgaaccccaacgccaaccccaacgccaaccccaacgccaacccgaacgccaacccc

SEQ ID NO: 2210 - RNA, 1098 nt, Artificial Sequence
  derived and/or modified CDS sequence (opt1) from Pf(3D7)__XP_001351122.1__CSP(19-384)
cuguuccaggaguaccagugcuacggcagcuccagcaacacccgcgugcucaacgagcugaacuacgacaacgccgggaccaaccuguacaacgagcucgagaugaacuacuacggcaagcaggagaacugguacucccugaagaagaacagccggucccugggggagaacgacgacggcaacaacgaggacaacgagaagcuccgcaagcccaagcacaagaagcugaagcagccggccgacgggaaccccgaccccaacgcgaaccccaacgucgacccgaacgccaaccccaacguggaccccaacgccaaccccaacguggacccgaacgccaaccccaacgccaaccccaacgcgaaccccaacgccaacccgaacgccaaccccaacgccaaccccaacgcgaaccccaacgccaacccgaacgccaaccccaacgccaaccccaacgccaaccccaacgcgaacccgaacgccaaccccaacgccaaccccaacgccaaccccaacgccaacccgaacgcgaaccccaacgucgaccccaacgccaaccccaacgccaacccgaacgccaaccccaacgccaaccccaacgcgaacccgaacgccaaccccaacgccaaccccaacgccaaccccaacgccaacccgaacgcgaaccccaacgccaaccccaacgccaaccccaacgccaacccgaacgcgaaccccaacgccaaccccaacgccaaccccaacgccaacccgaacgccaaccccaacaagaacaaccagggcaacggccaggggcacaacaugcccaacgaccccaaccggaacguggacgagaacgcgaacgccaacagcgccgugaagaacaacaacaacgaggagccguccgacaagcacaucaaggaguaccugaacaagauccagaacagccucuccacggaguggagccccugcuccgugaccugcggcaacgggauccagguccgcaucaagcccggcagcgccaacaagcccaaggacgagcuggacuacgccaacgacaucgagaagaagaucugcaagauggagaagugcuccagcguguucaacgucgugaacuccagc

SEQ ID NO: 2211 - RNA, 948 nt, Artificial Sequence
  derived and/or modified CDS sequence (opt1) from Pf(3D7)__XP_001351122.1__CSP(82-397)
gacaacgagaagcugcgcaagcccaagcacaagaagcucaagcagccggccgacggcaaccccgaccccaacgccaaccccaacguggacccgaacgcgaaccccaacgucgaccccaacgccaaccccaacguggacccgaacgccaaccccaacgccaaccccaacgccaaccccaacgcgaacccgaacgccaaccccaacgccaaccccaacgccaaccccaacgcgaacccgaacgccaaccccaacgccaaccccaacgccaaccccaacgccaacccgaacgcgaaccccaacgccaaccccaacgccaaccccaacgccaacccgaacgccaaccccaacguggaccccaacgcgaaccccaacgccaacccgaacgccaaccccaacgccaaccccaacgccaacccgaacgcgaaccccaacgccaaccccaacgccaaccccaacgccaacccgaacgccaaccccaacgcgaaccccaacgccaaccccaacgccaacccgaacgccaaccccaacgcgaaccccaacgccaaccccaacgccaacccgaacgccaaccccaacaagaacaaccaggggaacggccaggggcacaacaugcccaacgaccccaaccggaacgucgacgagaacgccaacgcgaacagcgccgugaagaacaacaacaacgaggagccguccgacaagcacaucaaggaguaccugaacaagauccagaacagccuguccaccgaguggagccccugcuccgugaccugcggcaacgggauccagguccgcaucaagcccggcagcgccaacaagcccaaggacgagcucgacuacgccaacgacaucgagaagaagaucugcaagauggagaagugcuccagcguguucaacguggucaacuccagcaucggccugaucauggugcuguccuuccucuuccugaac

SEQ ID NO: 2212 - RNA, 300 nt, Artificial Sequence
  derived and/or modified CDS sequence (opt1) from Pf(3D7)__XP_001351122.1__CSP(93-192)
aagcugaagcagcccgccgacggcaacccggaccccaacgccaaccccaacguggaccccaacgcgaacccgaacgucgaccccaacgccaaccccaacguggaccccaacgccaacccgaacgccaaccccaacgccaaccccaacgcgaaccccaacgccaacccgaacgccaaccccaacgccaaccccaacgcgaaccccaacgccaacccgaacgccaaccccaacgccaaccccaacgccaaccccaacgcgaacccgaacgccaaccccaacgccaaccccaacgccaacccc

SEQ ID NO: 2213 - RNA, 540 nt, Artificial Sequence
  derived and/or modified CDS sequence (opt1) from Pf(3D7)__XP_001351122.1__CSP(93-272)__RI region_NANP repeat region
aagcugaagcagcccgccgacggcaacccggaccccaacgccaaccccaacguggaccccaacgcgaacccgaacgucgaccccaacgccaaccccaacguggaccccaacgccaacccgaacgccaaccccaacgccaaccccaacgcgaaccccaacgccaacccgaacgccaaccccaacgccaaccccaacgcgaaccccaacgccaacccgaacgccaaccccaacgccaaccccaacgccaaccccaacgcgaacccgaacgccaaccccaacgccaaccccaacgccaaccccaacgccaacccgaacguggaccccaacgcgaaccccaacgccaaccccaacgccaacccgaacgccaaccccaacgccaaccccaacgcgaacccgaacgccaaccccaacgccaaccccaacgccaaccccaacgccaacccgaacgcgaaccccaacgccaaccccaacgccaaccccaacgccaacccgaacgcgaaccccaacgccaaccccaacgccaaccccaacgccaacccg

SEQ ID NO: 2214 - RNA, 915 nt, Artificial Sequence
  derived and/or modified CDS sequence (opt1) from Pf(3D7)__XP_001351122.1__CSP(93-397)
aagcugaagcagcccgccgacggcaacccggaccccaacgccaaccccaacguggaccccaacgcgaacccgaacgucgaccccaacgccaaccccaacguggaccccaacgccaacccgaacgccaaccccaacgccaaccccaacgcgaaccccaacgccaacccgaacgccaaccccaacgccaaccccaacgcgaaccccaacgccaacccgaacgccaaccccaacgccaaccccaacgccaaccccaacgcgaacccgaacgccaaccccaacgccaaccccaacgccaaccccaacgccaacccgaacguggaccccaacgcgaaccccaacgccaaccccaacgccaacccgaacgccaaccccaacgccaaccccaacgcgaacccgaacgccaaccccaacgccaaccccaacgccaaccccaacgccaacccgaacgcgaaccccaacgccaaccccaacgccaaccccaacgccaacccgaacgcgaaccccaacgccaaccccaacgccaaccccaacgccaacccgaacaagaacaaccaggggaacggccaggggcacaacaugcccaacgaccccaaccgcaacgucgacgagaacgccaacgcgaacagcgccgugaagaacaacaacaacgaggagcccuccgacaagcacaucaaggaguaccucaacaagauccagaacagccuguccaccgaguggagcccgugcuccgugaccugcggcaacgggauccagguccggaucaagcccggcagcgccaacaagcccaaggacgagcuggacuacgccaacgacaucgagaagaagaucugcaagauggagaagugcuccagcguguucaacguggucaacuccagcaucggccucaucauggugcuguccuuccuguuccucaac

SEQ ID NO: 2215 - RNA, 285 nt, Artificial Sequence
  derived and/or modified CDS sequence (opt1) from Pf(3D7)__XP_001351122.1__CSP(98-192)
gccgacggcaaccccgacccgaacgccaaccccaacguggaccccaacgcgaaccccaacgucgacccgaacgccaaccccaacguggaccccaacgccaaccccaacgccaacccgaacgccaaccccaacgcgaaccccaacgccaaccccaacgccaacccgaacgccaaccccaacgcgaaccccaacgccaaccccaacgccaacccgaacgccaaccccaacgccaaccccaacgcgaaccccaacgccaacccgaacgccaaccccaacgccaacccc

SEQ ID NO: 2216 - RNA, 831 nt, Artificial Sequence
  derived and/or modified CDS sequence (opt1) from Pf(3D7)__XP_001351122.1__CSP(98-374)
gccgacggcaaccccgacccgaacgccaaccccaacguggaccccaacgcgaaccccaacgucgacccgaacgccaaccccaacguggaccccaacgccaaccccaacgccaacccgaacgccaaccccaacgcgaaccccaacgccaaccccaacgccaacccgaacgccaaccccaacgcgaaccccaacgccaaccccaacgccaacccgaacgccaaccccaacgccaaccccaacgcgaaccccaacgccaacccgaacgccaaccccaacgccaaccccaacgccaaccccaacguggacccgaacgcgaaccccaacgccaaccccaacgccaaccccaacgccaacccgaacgccaaccccaacgcgaaccccaacgccaacccgaacgccaaccccaacgccaaccccaacgccaaccccaacgcgaacccgaacgccaaccccaacgccaaccccaacgccaaccccaacgcgaacccgaacgccaaccccaacgccaaccccaacgccaaccccaacaagaacaaccaggggaacggccaggggcacaacaugccgaacgaccccaaccgcaacgucgacgagaacgccaacgcgaacagcgccgugaagaacaacaacaacgaggagcccuccgacaagcacaucaaggaguaccugaacaagauccagaacagccucuccaccgaguggagccccugcuccgugaccugcggcaacgggauccagguccggaucaagccgggcagcgccaacaagcccaaggacgagcuggacuacgccaacgacaucgagaagaagaucugcaagauggagaagugc

SEQ ID NO: 2217 - RNA, 900 nt, Artificial Sequence
  derived and/or modified CDS sequence (opt1) from Pf(3D7)__XP_001351122.1__CSP(98-397)
gccgacggcaaccccgacccgaacgccaaccccaacguggaccccaacgcgaaccccaacgucgacccgaacgccaaccccaacguggaccccaacgccaaccccaacgccaacccgaacgccaaccccaacgcgaaccccaacgccaaccccaacgccaacccgaacgccaaccccaacgcgaaccccaacgccaaccccaacgccaacccgaacgccaaccccaacgccaaccccaacgcgaaccccaacgccaacccgaacgccaaccccaacgccaaccccaacgccaaccccaacguggacccgaacgcgaaccccaacgccaaccccaacgccaaccccaacgccaacccgaacgccaaccccaacgcgaaccccaacgccaacccgaacgccaaccccaacgccaaccccaacgccaaccccaacgcgaacccgaacgccaaccccaacgccaaccccaacgccaaccccaacgcgaacccgaacgccaaccccaacgccaaccccaacgccaaccccaacaagaacaaccaggggaacggccaggggcacaacaugccgaacgaccccaaccgcaacgucgacgagaacgccaacgcgaacagcgccgugaagaacaacaacaacgaggagcccuccgacaagcacaucaaggaguaccugaacaagauccagaacagccucuccaccgaguggagccccugcuccgugaccugcggcaacgggauccagguccggaucaagccgggcagcgccaacaagcccaaggacgagcuggacuacgccaacgacaucgagaagaagaucugcaagauggagaagugcuccagcguguucaacguggucaacuccagcaucggccugaucauggugcucuccuuccuguuccugaac

SEQ ID NO: 2218 - RNA, 537 nt, Artificial Sequence
  derived and/or modified CDS sequence (opt1) from Pf(3D7)__XP_001351122.1__CSP(199-377)
gaccccaacgccaacccgaacgccaaccccaacgcgaaccccaacgccaaccccaacgccaacccgaacgccaaccccaacgccaaccccaacgcgaaccccaacgccaacccgaacgccaaccccaacgccaaccccaacgcgaaccccaacgccaacccgaacgccaaccccaacgccaaccccaacgccaaccccaacgcgaacccgaacgccaaccccaacaagaacaaccagggcaacgggcagggccacaacaugcccaacgaccccaaccgcaacguggacgagaacgccaacgccaacagcgccgucaagaacaacaacaacgaggagccguccgacaagcacaucaaggaguaccugaacaagauccagaacagccucuccaccgaguggagccccugcuccgugaccugcgggaacggcauccaggugcggaucaagcccgggagcgcgaacaagcccaaggacgagcuggacuacgccaacgacaucgagaagaagaucugcaagauggagaagugcuccagcguc

SEQ ID NO: 2219 - RNA, 567 nt, Artificial Sequence
  derived and/or modified CDS sequence (opt1) from Pf(3D7)__XP_001351122.1__CSP(199-387)
gaccccaacgccaacccgaacgccaaccccaacgcgaaccccaacgccaaccccaacgccaacccgaacgccaaccccaacgccaaccccaacgcgaaccccaacgccaacccgaacgccaaccccaacgccaaccccaacgcgaaccccaacgccaacccgaacgccaaccccaacgccaaccccaacgccaaccccaacgcgaacccgaacgccaaccccaacaagaacaaccagggcaacgggcagggccacaacaugcccaacgaccccaaccgcaacguggacgagaacgccaacgccaacagcgccgucaagaacaacaacaacgaggagccguccgacaagcacaucaaggaguaccugaacaagauccagaacagccucuccaccgaguggagccccugcuccgugaccugcgggaacggcauccaggugcggaucaagcccgggagcgcgaacaagcccaaggacgagcuggacuacgccaacgacaucgagaagaagaucugcaagauggagaagugcuccagcgucuucaacguggugaacuccagcaucggccug

SEQ ID NO: 2220 - RNA, 57 nt, Artificial Sequence
  derived and/or modified CDS sequence (opt1) from Pf(3D7)__XP_001351122.1__CSP(309-327)__RIII region, Th2R
gaggagcccagcgacaagcacaucaaggaguaccugaacaagauccagaacucccuc

SEQ ID NO: 2221 - RNA, 63 nt, Artificial Sequence
  derived and/or modified CDS sequence (opt1) from Pf(3D7)__XP_001351122.1__CSP(346-366)__Th3R
aucaagcccggcagcgccaacaagccgaaggacgagcuggacuacgccaacgacaucgagaag

SEQ ID NO: 2222 - RNA, 93 nt, Artificial Sequence
  derived and/or modified CDS sequence (opt1) from Pf(3D7)__XP_001351122.1__CSP(346-376)__Th3R_CS.T3
aucaagcccggcagcgccaacaagccgaaggacgagcuggacuacgccaacgacaucgagaagaagaucugcaagauggagaagugcuccagc

SEQ ID NO: 2223 - RNA, 54 nt, Artificial Sequence; identical to SEQ ID NO: 2183
  derived and/or modified CDS sequence (opt1) from Pf(3D7)__XP_001351122.1__CSP(1-18)__signal peptide

SEQ ID NO: 2224 - RNA, 1074 nt, Artificial Sequence
  derived and/or modified CDS sequence (opt1) from Pf(3D7)__XP_001351122.1__CSP(27-384)__EcCSP fragment
ggcagcuccagcaacacccgcgugcugaacgagcucaacuacgacaacgccgggaccaaccuguacaacgagcuggagaugaacuacuacggcaagcaggagaacugguacucccucaagaagaacagccggucccugggggagaacgacgacggcaacaacgaggacaacgagaagcugcgcaagcccaagcacaagaagcucaagcagccggccgacgggaaccccgaccccaacgcgaaccccaacgucgacccgaacgccaaccccaacguggaccccaacgccaaccccaacguggacccgaacgccaaccccaacgccaaccccaacgcgaaccccaacgccaacccgaacgccaaccccaacgccaaccccaacgcgaaccccaacgccaacccgaacgccaaccccaacgccaaccccaacgccaaccccaacgcgaacccgaacgccaaccccaacgccaaccccaacgccaaccccaacgccaacccgaacgcgaaccccaacgucgaccccaacgccaaccccaacgccaacccgaacgccaaccccaacgccaaccccaacgcgaacccgaacgccaaccccaacgccaaccccaacgccaaccccaacgccaacccgaacgcgaaccccaacgccaaccccaacgccaaccccaacgccaacccgaacgcgaaccccaacgccaaccccaacgccaaccccaacgccaacccgaacgccaaccccaacaagaacaaccagggcaacggccaggggcacaacaugcccaacgaccccaaccggaacguggacgagaacgcgaacgccaacagcgccgugaagaacaacaacaacgaggagccguccgacaagcacaucaaggaguaccugaacaagauccagaacagccuguccacggaguggagccccugcuccgugaccugcggcaacgggauccagguccgcaucaagcccggcagcgccaacaagcccaaggacgagcucgacuacgccaacgacaucgagaagaagaucugcaagauggagaagugcuccagcguguucaacgucgugaacuccagc

SEQ ID NO: 2225 - RNA, 18 nt, Artificial Sequence
  derived and/or modified CDS sequence (opt1) from Pf(3D7)__XP_001351122.1__CSP(69-74)__3A1 antibody binding site
agccgcucccugggcgag

SEQ ID NO: 2226 - RNA, 930 nt, Artificial Sequence
  derived and/or modified CDS sequence (opt1) from Pf(3D7)__XP_001351122.1__CSP(74-383)__PpCSP fragment
gagaacgacgacggcaacaacgaggacaacgagaagcugcgcaagcccaagcacaagaagcucaagcagccggccgacgggaaccccgaccccaacgccaaccccaacguggacccgaacgcgaaccccaacgucgaccccaacgccaaccccaacguggacccgaacgccaaccccaacgccaaccccaacgccaaccccaacgcgaacccgaacgccaaccccaacgccaaccccaacgccaaccccaacgcgaacccgaacgccaaccccaacgccaaccccaacgccaaccccaacgccaacccgaacgcgaaccccaacgccaaccccaacgccaaccccaacgccaacccgaacgccaaccccaacguggaccccaacgcgaaccccaacgccaacccgaacgccaaccccaacgccaaccccaacgccaacccgaacgcgaaccccaacgccaaccccaacgccaaccccaacgccaacccgaacgccaaccccaacgcgaaccccaacgccaaccccaacgccaacccgaacgccaaccccaacgcgaaccccaacgccaaccccaacgccaacccgaacgccaaccccaacaagaacaaccagggcaacgggcagggccacaacaugcccaacgaccccaaccggaacgucgacgagaacgccaacgcgaacagcgccgugaagaacaacaacaacgaggagccguccgacaagcacaucaaggaguaccugaacaagauccagaacagccuguccaccgaguggagccccugcuccgugaccugcgggaacggcauccagguccgcaucaagcccggcagcgccaacaagcccaaggacgagcucgacuacgccaacgacaucgagaagaagaucugcaagauggagaagugcuccagcguguucaacguggucaacucc

SEQ ID NO: 2227 - RNA, 60 nt, Artificial Sequence
  derived and/or modified CDS sequence (opt1) from Pf(3D7)__XP_001351122.1__CSP(75-94)__2C3 antibody binding site
aacgacgacggcaacaacgaggacaacgagaagcugcgcaagcccaagcacaagaagcuc

SEQ ID NO: 2228 - RNA, 15 nt, Artificial Sequence
  derived and/or modified CDS sequence (opt1) from Pf(3D7)__XP_001351122.1__CSP(93-97)__RI region
aagcugaagcagccc

SEQ ID NO: 2229 - RNA, 18 nt, Artificial Sequence
  derived and/or modified CDS sequence (opt1) from Pf(3D7)__XP_001351122.1__CSP(95-100)__3H10/3B4 antibody binding site
aagcagcccgccgacggc

SEQ ID NO: 2230 - RNA, 525 nt, Artificial Sequence
  derived and/or modified CDS sequence (opt1) from Pf(3D7)__XP_001351122.1__CSP(98-272)__NANP repeat region
gccgacggcaaccccgacccgaacgccaaccccaacguggaccccaacgcgaaccccaacgucgacccgaacgccaaccccaacguggaccccaacgccaaccccaacgccaacccgaacgccaaccccaacgcgaaccccaacgccaaccccaacgccaacccgaacgccaaccccaacgcgaaccccaacgccaaccccaacgccaacccgaacgccaaccccaacgccaaccccaacgcgaaccccaacgccaacccgaacgccaaccccaacgccaaccccaacgccaaccccaacguggacccgaacgcgaaccccaacgccaaccccaacgccaaccccaacgccaacccgaacgccaaccccaacgcgaaccccaacgccaacccgaacgccaaccccaacgccaaccccaacgccaaccccaacgcgaacccgaacgccaaccccaacgccaaccccaacgccaaccccaacgcgaacccgaacgccaaccccaacgccaaccccaacgccaacccc

SEQ ID NO: 2231 - RNA, 504 nt, Artificial Sequence
  derived and/or modified CDS sequence (opt1) from Pf(3D7)__XP_001351122.1__CSP(105-272)__central repeat region
aacgccaaccccaacguggacccgaacgccaaccccaacgucgaccccaacgcgaaccccaacguggacccgaacgccaaccccaacgccaaccccaacgccaaccccaacgccaacccgaacgcgaaccccaacgccaaccccaacgccaaccccaacgccaacccgaacgcgaaccccaacgccaaccccaacgccaaccccaacgccaacccgaacgccaaccccaacgcgaaccccaacgccaaccccaacgccaacccgaacgccaaccccaacguggaccccaacgccaaccccaacgcgaacccgaacgccaaccccaacgccaaccccaacgccaaccccaacgccaacccgaacgcgaaccccaacgccaaccccaacgccaacccgaacgccaaccccaacgccaaccccaacgcgaaccccaacgccaacccgaacgccaaccccaacgccaaccccaacgcgaaccccaacgccaacccgaacgccaacccc

SEQ ID NO: 2232 - RNA, 567 nt, Artificial Sequence
  derived and/or modified CDS sequence (opt1) from Pf(3D7)__XP_001351122.1__CSP(207-395)__RTS,S fragment
aaccccaacgccaacccgaacgccaaccccaacgcgaaccccaacgccaaccccaacgccaacccgaacgccaaccccaacgccaaccccaacgcgaaccccaacgccaacccgaacgccaaccccaacgccaaccccaacgcgaaccccaacgccaacccgaacgccaaccccaacgccaaccccaacgccaaccccaacaagaacaaccagggcaacgggcagggccacaacaugccgaacgaccccaaccgcaacguggacgagaacgcgaacgccaacagcgccgucaagaacaacaacaacgaggagcccuccgacaagcacaucaaggaguaccugaacaagauccagaacagccucuccaccgaguggagccccugcuccgugaccugcgggaacggcauccaggugcggaucaagccggggagcgccaacaagcccaaggacgagcuggacuacgccaacgacaucgagaagaagaucugcaagauggagaagugcuccagcgucuucaacguggugaacuccagcaucggccugaucaugguccucuccuuccuguuc

SEQ ID NO: 2233 - RNA, 54 nt, Artificial Sequence
  derived and/or modified CDS sequence (opt1) from Pf(3D7)__XP_001351122.1__CSP(310-327)__RIII region, Th2R
gagcccagcgacaagcacaucaaggaguaccugaacaagauccagaacucccuc

SEQ ID NO: 2234 - RNA, 195 nt, Artificial Sequence
  derived and/or modified CDS sequence (opt1) from Pf(3D7)__XP_001351122.1__CSP(310-374)__RIII region_TSR (RII+)
gagcccagcgacaagcacaucaaggaguaccugaacaagauccagaacucccucagcaccgagugguccccgugcagcgugaccugcggcaacgggauccagguccgcaucaagcccggcuccgccaacaagcccaaggacgagcuggacuacgccaacgacaucgagaagaagaucugcaagauggagaagugc

SEQ ID NO: 2235 - RNA, 171 nt, Artificial Sequence
  derived and/or modified CDS sequence (opt1) from Pf(3D7)__XP_001351122.1__CSP(319-375)__TSR region v3
uaccugaacaagauccagaacagccucuccaccgaguggagccccugcuccgugaccugcggcaacgggauccagguccgcaucaagccgggcagcgccaacaagcccaaggacgagcuggacuacgccaacgacaucgagaagaagaucugcaagauggagaagugcucc

SEQ ID NO: 2236 - RNA, 147 nt, Artificial Sequence
  derived and/or modified CDS sequence (opt1) from Pf(3D7)__XP_001351122.1__CSP(326-374)__TSR region v1
agccuguccaccgaguggagccccugcuccgugaccugcggcaacgggauccagguccgcaucaagccgggcagcgccaacaagcccaaggacgagcucgacuacgccaacgacaucgagaagaagaucugcaagauggagaagugc

SEQ ID NO: 2237 - RNA, 141 nt, Artificial Sequence
  derived and/or modified CDS sequence (opt1) from Pf(3D7)__XP_001351122.1__CSP(328-374)__TSR region v2
agcaccgaguggucccccugcagcgugaccugcggcaacgggauccagguccgcaucaagccgggcuccgccaacaagcccaaggacgagcuggacuacgccaacgacaucgagaagaagaucugcaagauggagaagugc

SEQ ID NO: 2238 - RNA, 54 nt, Artificial Sequence
  derived and/or modified CDS sequence (opt1) from Pf(3D7)__XP_001351122.1__CSP(330-347)__RII+ region v1
gaguggagccccugcuccgugaccugcggcaacgggauccagguccgcaucaag

SEQ ID NO: 2239 - RNA, 66 nt, Artificial Sequence
  derived and/or modified CDS sequence (opt1) from Pf(3D7)__XP_001351122.1__CSP(330-351)__RII+ region v2
gaguggagccccugcuccgugaccugcggcaacgggauccagguccgcaucaagccgggcagcgcc

SEQ ID NO: 2240 - RNA, 69 nt, Artificial Sequence
  derived and/or modified CDS sequence (opt1) from Pf(3D7)__XP_001351122.1__CSP(375-397)__GPI anchor signal
agcuccguguucaacgucgugaacagcuccaucggccugaucauggugcucagcuuccuguuccugaac

SEQ ID NO: 2241 - RNA, 1194 nt, Artificial Sequence; identical to SEQ ID NO: 113
  derived and/or modified CDS sequence (opt2) from Pf(3D7)__XP_001351122.1__CSP

SEQ ID NO: 2242 - RNA, 1122 nt, Artificial Sequence; identical to SEQ ID NO: 114
  derived and/or modified CDS sequence (opt2) from Pf(3D7)__XP_001351122.1__CSP(1-374)__CSP-delGPI

SEQ ID NO: 2243 - RNA, 975 nt, Artificial Sequence; identical to SEQ ID NO: 115
  derived and/or modified CDS sequence (opt2) from Pf(3D7)__XP_001351122.1__CSP(1-325)__CSP-delTSR(v2)-delGPI

SEQ ID NO: 2244 - RNA, 1137 nt, Artificial Sequence
  derived and/or modified CDS sequence (opt2) from Pf(3D7)__XP_001351122.1__CSP(19-397)__CSP-delSP
cucuuccaggaguaccagugcuacggcuccuccuccaacacccgcguccucaacgagcucaacuacgacaacgccggcaccaaccucuacaacgagcucgagaugaacuacuacggcaagcaggagaacugguacucccucaagaagaacucccgcucccucggcgagaacgacgacggcaacaacgaggacaacgagaagcuccgcaagcccaagcacaagaagcucaagcagcccgccgacggcaaccccgaccccaacgccaaccccaacgucgaccccaacgccaaccccaacgucgaccccaacgccaaccccaacgucgaccccaacgccaaccccaacgccaaccccaacgccaaccccaacgccaaccccaacgccaaccccaacgccaaccccaacgccaaccccaacgccaaccccaacgccaaccccaacgccaaccccaacgccaaccccaacgccaaccccaacgccaaccccaacgccaaccccaacgccaaccccaacgccaaccccaacgccaaccccaacgucgaccccaacgccaaccccaacgccaaccccaacgccaaccccaacgccaaccccaacgccaaccccaacgccaaccccaacgccaaccccaacgccaaccccaacgccaaccccaacgccaaccccaacgccaaccccaacgccaaccccaacgccaaccccaacgccaaccccaacgccaaccccaacgccaaccccaacgccaaccccaacgccaaccccaacaagaacaaccagggcaacggccagggccacaacaugcccaacgaccccaaccgcaacgucgacgagaacgccaacgccaacuccgccgucaagaacaacaacaacgaggagcccuccgacaagcacaucaaggaguaccucaacaagauccagaacucccucuccaccgaguggucccccugcuccgucaccugcggcaacggcauccagguccgcaucaagcccggcuccgccaacaagcccaaggacgagcucgacuacgccaacgacaucgagaagaagaucugcaagauggagaagugcuccuccgucuucaacgucgucaacuccuccaucggccucaucaugguccucuccuuccucuuccucaac

SEQ ID NO: 2245 - RNA, 1068 nt, Artificial Sequence
  derived and/or modified CDS sequence (opt2) from Pf(3D7)__XP_001351122.1__CSP(19-374)__CSP-delSP-delGPI
cucuuccaggaguaccagugcuacggcuccuccuccaacacccgcguccucaacgagcucaacuacgacaacgccggcaccaaccucuacaacgagcucgagaugaacuacuacggcaagcaggagaacugguacucccucaagaagaacucccgcucccucggcgagaacgacgacggcaacaacgaggacaacgagaagcuccgcaagcccaagcacaagaagcucaagcagcccgccgacggcaaccccgaccccaacgccaaccccaacgucgaccccaacgccaaccccaacgucgaccccaacgccaaccccaacgucgaccccaacgccaaccccaacgccaaccccaacgccaaccccaacgccaaccccaacgccaaccccaacgccaaccccaacgccaaccccaacgccaaccccaacgccaaccccaacgccaaccccaacgccaaccccaacgccaaccccaacgccaaccccaacgccaaccccaacgccaaccccaacgccaaccccaacgccaaccccaacgucgaccccaacgccaaccccaacgccaaccccaacgccaaccccaacgccaaccccaacgccaaccccaacgccaaccccaacgccaaccccaacgccaaccccaacgccaaccccaacgccaaccccaacgccaaccccaacgccaaccccaacgccaaccccaacgccaaccccaacgccaaccccaacgccaaccccaacgccaaccccaacgccaaccccaacaagaacaaccagggcaacggccagggccacaacaugcccaacgaccccaaccgcaacgucgacgagaacgccaacgccaacuccgccgucaagaacaacaacaacgaggagcccuccgacaagcacaucaaggaguaccucaacaagauccagaacucccucuccaccgaguggucccccugcuccgucaccugcggcaacggcauccagguccgcaucaagcccggcuccgccaacaagcccaaggacgagcucgacuacgccaacgacaucgagaagaagaucugcaagauggagaagugc

SEQ ID NO: 2246 - RNA, 921 nt, Artificial Sequence
  derived and/or modified CDS sequence (opt2) from Pf(3D7)__XP_001351122.1__CSP(19-325)__CSP-delSP-delTSR(v2)-delGPI
cucuuccaggaguaccagugcuacggcuccuccuccaacacccgcguccucaacgagcucaacuacgacaacgccggcaccaaccucuacaacgagcucgagaugaacuacuacggcaagcaggagaacugguacucccucaagaagaacucccgcucccucggcgagaacgacgacggcaacaacgaggacaacgagaagcuccgcaagcccaagcacaagaagcucaagcagcccgccgacggcaaccccgaccccaacgccaaccccaacgucgaccccaacgccaaccccaacgucgaccccaacgccaaccccaacgucgaccccaacgccaaccccaacgccaaccccaacgccaaccccaacgccaaccccaacgccaaccccaacgccaaccccaacgccaaccccaacgccaaccccaacgccaaccccaacgccaaccccaacgccaaccccaacgccaaccccaacgccaaccccaacgccaaccccaacgccaaccccaacgccaaccccaacgccaaccccaacgucgaccccaacgccaaccccaacgccaaccccaacgccaaccccaacgccaaccccaacgccaaccccaacgccaaccccaacgccaaccccaacgccaaccccaacgccaaccccaacgccaaccccaacgccaaccccaacgccaaccccaacgccaaccccaacgccaaccccaacgccaaccccaacgccaaccccaacgccaaccccaacgccaaccccaacaagaacaaccagggcaacggccagggccacaacaugcccaacgaccccaaccgcaacgucgacgagaacgccaacgccaacuccgccgucaagaacaacaacaacgaggagcccuccgacaagcacaucaaggaguaccucaacaagauccagaac

SEQ ID NO: 2247 - RNA, 351 nt, Artificial Sequence
  derived and/or modified CDS sequence (opt2) from Pf(3D7)__XP_001351122.1__CSP(19-135)
cucuuccaggaguaccagugcuacggcuccuccuccaacacccgcguccucaacgagcucaacuacgacaacgccggcaccaaccucuacaacgagcucgagaugaacuacuacggcaagcaggagaacugguacucccucaagaagaacucccgcucccucggcgagaacgacgacggcaacaacgaggacaacgagaagcuccgcaagcccaagcacaagaagcucaagcagcccgccgacggcaaccccgaccccaacgccaaccccaacgucgaccccaacgccaaccccaacgucgaccccaacgccaaccccaacgucgaccccaacgccaaccccaacgccaac

SEQ ID NO: 2248 - RNA, 525 nt, Artificial Sequence
  derived and/or modified CDS sequence (opt2) from Pf(3D7)__XP_001351122.1__CSP(19-193)
cucuuccaggaguaccagugcuacggcuccuccuccaacacccgcguccucaacgagcucaacuacgacaacgccggcaccaaccucuacaacgagcucgagaugaacuacuacggcaagcaggagaacugguacucccucaagaagaacucccgcucccucggcgagaacgacgacggcaacaacgaggacaacgagaagcuccgcaagcccaagcacaagaagcucaagcagcccgccgacggcaaccccgaccccaacgccaaccccaacgucgaccccaacgccaaccccaacgucgaccccaacgccaaccccaacgucgaccccaacgccaaccccaacgccaaccccaacgccaaccccaacgccaaccccaacgccaaccccaacgccaaccccaacgccaaccccaacgccaaccccaacgccaaccccaacgccaaccccaacgccaaccccaacgccaaccccaacgccaaccccaacgccaaccccaacgccaaccccaacgccaaccccaac

SEQ ID NO: 2249 - RNA, 762 nt, Artificial Sequence
  derived and/or modified CDS sequence (opt2) from Pf(3D7)__XP_001351122.1__CSP(19-272)
cucuuccaggaguaccagugcuacggcuccuccuccaacacccgcguccucaacgagcucaacuacgacaacgccggcaccaaccucuacaacgagcucgagaugaacuacuacggcaagcaggagaacugguacucccucaagaagaacucccgcucccucggcgagaacgacgacggcaacaacgaggacaacgagaagcuccgcaagcccaagcacaagaagcucaagcagcccgccgacggcaaccccgaccccaacgccaaccccaacgucgaccccaacgccaaccccaacgucgaccccaacgccaaccccaacgucgaccccaacgccaaccccaacgccaaccccaacgccaaccccaacgccaaccccaacgccaaccccaacgccaaccccaacgccaaccccaacgccaaccccaacgccaaccccaacgccaaccccaacgccaaccccaacgccaaccccaacgccaaccccaacgccaaccccaacgccaaccccaacgccaaccccaacgccaaccccaacgucgaccccaacgccaaccccaacgccaaccccaacgccaaccccaacgccaaccccaacgccaaccccaacgccaaccccaacgccaaccccaacgccaaccccaacgccaaccccaacgccaaccccaacgccaaccccaacgccaaccccaacgccaaccccaacgccaaccccaacgccaaccccaacgccaaccccaacgccaaccccaacgccaacccc

SEQ ID NO: 2250 - RNA, 1098 nt, Artificial Sequence
  derived and/or modified CDS sequence (opt2) from Pf(3D7)__XP_001351122.1__CSP(19-384)
cucuuccaggaguaccagugcuacggcuccuccuccaacacccgcguccucaacgagcucaacuacgacaacgccggcaccaaccucuacaacgagcucgagaugaacuacuacggcaagcaggagaacugguacucccucaagaagaacucccgcucccucggcgagaacgacgacggcaacaacgaggacaacgagaagcuccgcaagcccaagcacaagaagcucaagcagcccgccgacggcaaccccgaccccaacgccaaccccaacgucgaccccaacgccaaccccaacgucgaccccaacgccaaccccaacgucgaccccaacgccaaccccaacgccaaccccaacgccaaccccaacgccaaccccaacgccaaccccaacgccaaccccaacgccaaccccaacgccaaccccaacgccaaccccaacgccaaccccaacgccaaccccaacgccaaccccaacgccaaccccaacgccaaccccaacgccaaccccaacgccaaccccaacgccaaccccaacgucgaccccaacgccaaccccaacgccaaccccaacgccaaccccaacgccaaccccaacgccaaccccaacgccaaccccaacgccaaccccaacgccaaccccaacgccaaccccaacgccaaccccaacgccaaccccaacgccaaccccaacgccaaccccaacgccaaccccaacgccaaccccaacgccaaccccaacgccaaccccaacgccaaccccaacaagaacaaccagggcaacggccagggccacaacaugcccaacgaccccaaccgcaacgucgacgagaacgccaacgccaacuccgccgucaagaacaacaacaacgaggagcccuccgacaagcacaucaaggaguaccucaacaagauccagaacucccucuccaccgaguggucccccugcuccgucaccugcggcaacggcauccagguccgcaucaagcccggcuccgccaacaagcccaaggacgagcucgacuacgccaacgacaucgagaagaagaucugcaagauggagaagugcuccuccgucuucaacgucgucaacuccucc

SEQ ID NO: 2251 - RNA, 948 nt, Artificial Sequence
  derived and/or modified CDS sequence (opt2) from Pf(3D7)__XP_001351122.1__CSP(82-397)
gacaacgagaagcuccgcaagcccaagcacaagaagcucaagcagcccgccgacggcaaccccgaccccaacgccaaccccaacgucgaccccaacgccaaccccaacgucgaccccaacgccaaccccaacgucgaccccaacgccaaccccaacgccaaccccaacgccaaccccaacgccaaccccaacgccaaccccaacgccaaccccaacgccaaccccaacgccaaccccaacgccaaccccaacgccaaccccaacgccaaccccaacgccaaccccaacgccaaccccaacgccaaccccaacgccaaccccaacgccaaccccaacgccaaccccaacgucgaccccaacgccaaccccaacgccaaccccaacgccaaccccaacgccaaccccaacgccaaccccaacgccaaccccaacgccaaccccaacgccaaccccaacgccaaccccaacgccaaccccaacgccaaccccaacgccaaccccaacgccaaccccaacgccaaccccaacgccaaccccaacgccaaccccaacgccaaccccaacgccaaccccaacaagaacaaccagggcaacggccagggccacaacaugcccaacgaccccaaccgcaacgucgacgagaacgccaacgccaacuccgccgucaagaacaacaacaacgaggagcccuccgacaagcacaucaaggaguaccucaacaagauccagaacucccucuccaccgaguggucccccugcuccgucaccugcggcaacggcauccagguccgcaucaagcccggcuccgccaacaagcccaaggacgagcucgacuacgccaacgacaucgagaagaagaucugcaagauggagaagugcuccuccgucuucaacgucgucaacuccuccaucggccucaucaugguccucuccuuccucuuccucaac

SEQ ID NO: 2252 - RNA, 300 nt, Artificial Sequence
  derived and/or modified CDS sequence (opt2) from Pf(3D7)__XP_001351122.1__CSP(93-192)
aagcucaagcagcccgccgacggcaaccccgaccccaacgccaaccccaacgucgaccccaacgccaaccccaacgucgaccccaacgccaaccccaacgucgaccccaacgccaaccccaacgccaaccccaacgccaaccccaacgccaaccccaacgccaaccccaacgccaaccccaacgccaaccccaacgccaaccccaacgccaaccccaacgccaaccccaacgccaaccccaacgccaaccccaacgccaaccccaacgccaaccccaacgccaaccccaacgccaacccc

SEQ ID NO: 2253 - RNA, 540 nt, Artificial Sequence
  derived and/or modified CDS sequence (opt2) from Pf(3D7)__XP_001351122.1__CSP(93-272)__RI region_NANP repeat region
aagcucaagcagcccgccgacggcaaccccgaccccaacgccaaccccaacgucgaccccaacgccaaccccaacgucgaccccaacgccaaccccaacgucgaccccaacgccaaccccaacgccaaccccaacgccaaccccaacgccaaccccaacgccaaccccaacgccaaccccaacgccaaccccaacgccaaccccaacgccaaccccaacgccaaccccaacgccaaccccaacgccaaccccaacgccaaccccaacgccaaccccaacgccaaccccaacgccaaccccaacgccaaccccaacgucgaccccaacgccaaccccaacgccaaccccaacgccaaccccaacgccaaccccaacgccaaccccaacgccaaccccaacgccaaccccaacgccaaccccaacgccaaccccaacgccaaccccaacgccaaccccaacgccaaccccaacgccaaccccaacgccaaccccaacgccaaccccaacgccaaccccaacgccaaccccaacgccaacccc

SEQ ID NO: 2254 - RNA, 915 nt, Artificial Sequence
  derived and/or modified CDS sequence (opt2) from Pf(3D7)__XP_001351122.1__CSP(93-397)
aagcucaagcagcccgccgacggcaaccccgaccccaacgccaaccccaacgucgaccccaacgccaaccccaacgucgaccccaacgccaaccccaacgucgaccccaacgccaaccccaacgccaaccccaacgccaaccccaacgccaaccccaacgccaaccccaacgccaaccccaacgccaaccccaacgccaaccccaacgccaaccccaacgccaaccccaacgccaaccccaacgccaaccccaacgccaaccccaacgccaaccccaacgccaaccccaacgccaaccccaacgccaaccccaacgucgaccccaacgccaaccccaacgccaaccccaacgccaaccccaacgccaaccccaacgccaaccccaacgccaaccccaacgccaaccccaacgccaaccccaacgccaaccccaacgccaaccccaacgccaaccccaacgccaaccccaacgccaaccccaacgccaaccccaacgccaaccccaacgccaaccccaacgccaaccccaacgccaaccccaacaagaacaaccagggcaacggccagggccacaacaugcccaacgaccccaaccgcaacgucgacgagaacgccaacgccaacuccgccgucaagaacaacaacaacgaggagcccuccgacaagcacaucaaggaguaccucaacaagauccagaacucccucuccaccgaguggucccccugcuccgucaccugcggcaacggcauccagguccgcaucaagcccggcuccgccaacaagcccaaggacgagcucgacuacgccaacgacaucgagaagaagaucugcaagauggagaagugcuccuccgucuucaacgucgucaacuccuccaucggccucaucaugguccucuccuuccucuuccucaac

SEQ ID NO: 2255 - RNA, 285 nt, Artificial Sequence
  derived and/or modified CDS sequence (opt2) from Pf(3D7)__XP_001351122.1__CSP(98-192)
gccgacggcaaccccgaccccaacgccaaccccaacgucgaccccaacgccaaccccaacgucgaccccaacgccaaccccaacgucgaccccaacgccaaccccaacgccaaccccaacgccaaccccaacgccaaccccaacgccaaccccaacgccaaccccaacgccaaccccaacgccaaccccaacgccaaccccaacgccaaccccaacgccaaccccaacgccaaccccaacgccaaccccaacgccaaccccaacgccaaccccaacgccaacccc

SEQ ID NO: 2256 - RNA, 831 nt, Artificial Sequence
  derived and/or modified CDS sequence (opt2) from Pf(3D7)__XP_001351122.1__CSP(98-374)
gccgacggcaaccccgaccccaacgccaaccccaacgucgaccccaacgccaaccccaacgucgaccccaacgccaaccccaacgucgaccccaacgccaaccccaacgccaaccccaacgccaaccccaacgccaaccccaacgccaaccccaacgccaaccccaacgccaaccccaacgccaaccccaacgccaaccccaacgccaaccccaacgccaaccccaacgccaaccccaacgccaaccccaacgccaaccccaacgccaaccccaacgccaaccccaacgccaaccccaacgucgaccccaacgccaaccccaacgccaaccccaacgccaaccccaacgccaaccccaacgccaaccccaacgccaaccccaacgccaaccccaacgccaaccccaacgccaaccccaacgccaaccccaacgccaaccccaacgccaaccccaacgccaaccccaacgccaaccccaacgccaaccccaacgccaaccccaacgccaaccccaacgccaaccccaacaagaacaaccagggcaacggccagggccacaacaugcccaacgaccccaaccgcaacgucgacgagaacgccaacgccaacuccgccgucaagaacaacaacaacgaggagcccuccgacaagcacaucaaggaguaccucaacaagauccagaacucccucuccaccgaguggucccccugcuccgucaccugcggcaacggcauccagguccgcaucaagcccggcuccgccaacaagcccaaggacgagcucgacuacgccaacgacaucgagaagaagaucugcaagauggagaagugc

SEQ ID NO: 2257 - RNA, 900 nt, Artificial Sequence
  derived and/or modified CDS sequence (opt2) from Pf(3D7)__XP_001351122.1__CSP(98-397)
gccgacggcaaccccgaccccaacgccaaccccaacgucgaccccaacgccaaccccaacgucgaccccaacgccaaccccaacgucgaccccaacgccaaccccaacgccaaccccaacgccaaccccaacgccaaccccaacgccaaccccaacgccaaccccaacgccaaccccaacgccaaccccaacgccaaccccaacgccaaccccaacgccaaccccaacgccaaccccaacgccaaccccaacgccaaccccaacgccaaccccaacgccaaccccaacgccaaccccaacgucgaccccaacgccaaccccaacgccaaccccaacgccaaccccaacgccaaccccaacgccaaccccaacgccaaccccaacgccaaccccaacgccaaccccaacgccaaccccaacgccaaccccaacgccaaccccaacgccaaccccaacgccaaccccaacgccaaccccaacgccaaccccaacgccaaccccaacgccaaccccaacgccaaccccaacaagaacaaccagggcaacggccagggccacaacaugcccaacgaccccaaccgcaacgucgacgagaacgccaacgccaacuccgccgucaagaacaacaacaacgaggagcccuccgacaagcacaucaaggaguaccucaacaagauccagaacucccucuccaccgaguggucccccugcuccgucaccugcggcaacggcauccagguccgcaucaagcccggcuccgccaacaagcccaaggacgagcucgacuacgccaacgacaucgagaagaagaucugcaagauggagaagugcuccuccgucuucaacgucgucaacuccuccaucggccucaucaugguccucuccuuccucuuccucaac

SEQ ID NO: 2258 - RNA, 537 nt, Artificial Sequence
  derived and/or modified CDS sequence (opt2) from Pf(3D7)__XP_001351122.1__CSP(199-377)
gaccccaacgccaaccccaacgccaaccccaacgccaaccccaacgccaaccccaacgccaaccccaacgccaaccccaacgccaaccccaacgccaaccccaacgccaaccccaacgccaaccccaacgccaaccccaacgccaaccccaacgccaaccccaacgccaaccccaacgccaaccccaacgccaaccccaacgccaaccccaacgccaaccccaacaagaacaaccagggcaacggccagggccacaacaugcccaacgaccccaaccgcaacgucgacgagaacgccaacgccaacuccgccgucaagaacaacaacaacgaggagcccuccgacaagcacaucaaggaguaccucaacaagauccagaacucccucuccaccgaguggucccccugcuccgucaccugcggcaacggcauccagguccgcaucaagcccggcuccgccaacaagcccaaggacgagcucgacuacgccaacgacaucgagaagaagaucugcaagauggagaagugcuccuccguc

SEQ ID NO: 2259 - RNA, 567 nt, Artificial Sequence
  derived and/or modified CDS sequence (opt2) from Pf(3D7)__XP_001351122.1__CSP(199-387)
gaccccaacgccaaccccaacgccaaccccaacgccaaccccaacgccaaccccaacgccaaccccaacgccaaccccaacgccaaccccaacgccaaccccaacgccaaccccaacgccaaccccaacgccaaccccaacgccaaccccaacgccaaccccaacgccaaccccaacgccaaccccaacgccaaccccaacgccaaccccaacgccaaccccaacaagaacaaccagggcaacggccagggccacaacaugcccaacgaccccaaccgcaacgucgacgagaacgccaacgccaacuccgccgucaagaacaacaacaacgaggagcccuccgacaagcacaucaaggaguaccucaacaagauccagaacucccucuccaccgaguggucccccugcuccgucaccugcggcaacggcauccagguccgcaucaagcccggcuccgccaacaagcccaaggacgagcucgacuacgccaacgacaucgagaagaagaucugcaagauggagaagugcuccuccgucuucaacgucgucaacuccuccaucggccuc

SEQ ID NO: 2260 - RNA, 57 nt, Artificial Sequence
  derived and/or modified CDS sequence (opt2) from Pf(3D7)__XP_001351122.1__CSP(309-327)__RIII region, Th2R
gaggagcccuccgacaagcacaucaaggaguaccucaacaagauccagaacucccuc

SEQ ID NO: 2261 - RNA, 63 nt, Artificial Sequence
  derived and/or modified CDS sequence (opt2) from Pf(3D7)__XP_001351122.1__CSP(346-366)__Th3R
aucaagcccggcuccgccaacaagcccaaggacgagcucgacuacgccaacgacaucgagaag

SEQ ID NO: 2262 - RNA, 93 nt, Artificial Sequence
  derived and/or modified CDS sequence (opt2) from Pf(3D7)__XP_001351122.1__CSP(346-376)__Th3R_CS.T3
aucaagcccggcuccgccaacaagcccaaggacgagcucgacuacgccaacgacaucgagaagaagaucugcaagauggagaagugcuccucc

SEQ ID NO: 2263 - RNA, 54 nt, Artificial Sequence
  derived and/or modified CDS sequence (opt2) from Pf(3D7)__XP_001351122.1__CSP(1-18)__signal peptide
augaugcgcaagcucgccauccucuccgucuccuccuuccucuucgucgaggcc

SEQ ID NO: 2264 - RNA, 1074 nt, Artificial Sequence
  derived and/or modified CDS sequence (opt2) from Pf(3D7)__XP_001351122.1__CSP(27-384)__EcCSP fragment
ggcuccuccuccaacacccgcguccucaacgagcucaacuacgacaacgccggcaccaaccucuacaacgagcucgagaugaacuacuacggcaagcaggagaacugguacucccucaagaagaacucccgcucccucggcgagaacgacgacggcaacaacgaggacaacgagaagcuccgcaagcccaagcacaagaagcucaagcagcccgccgacggcaaccccgaccccaacgccaaccccaacgucgaccccaacgccaaccccaacgucgaccccaacgccaaccccaacgucgaccccaacgccaaccccaacgccaaccccaacgccaaccccaacgccaaccccaacgccaaccccaacgccaaccccaacgccaaccccaacgccaaccccaacgccaaccccaacgccaaccccaacgccaaccccaacgccaaccccaacgccaaccccaacgccaaccccaacgccaaccccaacgccaaccccaacgccaaccccaacgucgaccccaacgccaaccccaacgccaaccccaacgccaaccccaacgccaaccccaacgccaaccccaacgccaaccccaacgccaaccccaacgccaaccccaacgccaaccccaacgccaaccccaacgccaaccccaacgccaaccccaacgccaaccccaacgccaaccccaacgccaaccccaacgccaaccccaacgccaaccccaacgccaaccccaacaagaacaaccagggcaacggccagggccacaacaugcccaacgaccccaaccgcaacgucgacgagaacgccaacgccaacuccgccgucaagaacaacaacaacgaggagcccuccgacaagcacaucaaggaguaccucaacaagauccagaacucccucuccaccgaguggucccccugcuccgucaccugcggcaacggcauccagguccgcaucaagcccggcuccgccaacaagcccaaggacgagcucgacuacgccaacgacaucgagaagaagaucugcaagauggagaagugcuccuccgucuucaacgucgucaacuccucc

SEQ ID NO: 2265 - RNA, 18 nt, Artificial Sequence
  derived and/or modified CDS sequence (opt2) from Pf(3D7)__XP_001351122.1__CSP(69-74)__3A1 antibody binding site
ucccgcucccucggcgag

SEQ ID NO: 2266 - RNA, 930 nt, Artificial Sequence
  derived and/or modified CDS sequence (opt2) from Pf(3D7)__XP_001351122.1__CSP(74-383)__PpCSP fragment
gagaacgacgacggcaacaacgaggacaacgagaagcuccgcaagcccaagcacaagaagcucaagcagcccgccgacggcaaccccgaccccaacgccaaccccaacgucgaccccaacgccaaccccaacgucgaccccaacgccaaccccaacgucgaccccaacgccaaccccaacgccaaccccaacgccaaccccaacgccaaccccaacgccaaccccaacgccaaccccaacgccaaccccaacgccaaccccaacgccaaccccaacgccaaccccaacgccaaccccaacgccaaccccaacgccaaccccaacgccaaccccaacgccaaccccaacgccaaccccaacgccaaccccaacgucgaccccaacgccaaccccaacgccaaccccaacgccaaccccaacgccaaccccaacgccaaccccaacgccaaccccaacgccaaccccaacgccaaccccaacgccaaccccaacgccaaccccaacgccaaccccaacgccaaccccaacgccaaccccaacgccaaccccaacgccaaccccaacgccaaccccaacgccaaccccaacgccaaccccaacaagaacaaccagggcaacggccagggccacaacaugcccaacgaccccaaccgcaacgucgacgagaacgccaacgccaacuccgccgucaagaacaacaacaacgaggagcccuccgacaagcacaucaaggaguaccucaacaagauccagaacucccucuccaccgaguggucccccugcuccgucaccugcggcaacggcauccagguccgcaucaagcccggcuccgccaacaagcccaaggacgagcucgacuacgccaacgacaucgagaagaagaucugcaagauggagaagugcuccuccgucuucaacgucgucaacucc

SEQ ID NO: 2267 - RNA, 60 nt, Artificial Sequence
  derived and/or modified CDS sequence (opt2) from Pf(3D7)__XP_001351122.1__CSP(75-94)__2C3 antibody binding site
aacgacgacggcaacaacgaggacaacgagaagcuccgcaagcccaagcacaagaagcuc

SEQ ID NO: 2268 - RNA, 15 nt, Artificial Sequence
  derived and/or modified CDS sequence (opt2) from Pf(3D7)__XP_001351122.1__CSP(93-97)__RI region
aagcucaagcagccc

SEQ ID NO: 2269 - RNA, 18 nt, Artificial Sequence
  derived and/or modified CDS sequence (opt2) from Pf(3D7)__XP_001351122.1__CSP(95-100)__3H10/3B4 antibody binding site
aagcagcccgccgacggc

SEQ ID NO: 2270 - RNA, 525 nt, Artificial Sequence
  derived and/or modified CDS sequence (opt2) from Pf(3D7)__XP_001351122.1__CSP(98-272)__NANP repeat region
gccgacggcaaccccgaccccaacgccaaccccaacgucgaccccaacgccaaccccaacgucgaccccaacgccaaccccaacgucgaccccaacgccaaccccaacgccaaccccaacgccaaccccaacgccaaccccaacgccaaccccaacgccaaccccaacgccaaccccaacgccaaccccaacgccaaccccaacgccaaccccaacgccaaccccaacgccaaccccaacgccaaccccaacgccaaccccaacgccaaccccaacgccaaccccaacgccaaccccaacgucgaccccaacgccaaccccaacgccaaccccaacgccaaccccaacgccaaccccaacgccaaccccaacgccaaccccaacgccaaccccaacgccaaccccaacgccaaccccaacgccaaccccaacgccaaccccaacgccaaccccaacgccaaccccaacgccaaccccaacgccaaccccaacgccaaccccaacgccaaccccaacgccaacccc

SEQ ID NO: 2271 - RNA, 504 nt, Artificial Sequence
  derived and/or modified CDS sequence (opt2) from Pf(3D7)__XP_001351122.1__CSP(105-272)__central repeat region
aacgccaaccccaacgucgaccccaacgccaaccccaacgucgaccccaacgccaaccccaacgucgaccccaacgccaaccccaacgccaaccccaacgccaaccccaacgccaaccccaacgccaaccccaacgccaaccccaacgccaaccccaacgccaaccccaacgccaaccccaacgccaaccccaacgccaaccccaacgccaaccccaacgccaaccccaacgccaaccccaacgccaaccccaacgccaaccccaacgccaaccccaacgucgaccccaacgccaaccccaacgccaaccccaacgccaaccccaacgccaaccccaacgccaaccccaacgccaaccccaacgccaaccccaacgccaaccccaacgccaaccccaacgccaaccccaacgccaaccccaacgccaaccccaacgccaaccccaacgccaaccccaacgccaaccccaacgccaaccccaacgccaaccccaacgccaacccc

SEQ ID NO: 2272 - RNA, 567 nt, Artificial Sequence
  derived and/or modified CDS sequence (opt2) from Pf(3D7)__XP_001351122.1__CSP(207-395)__RTS,S fragment
aaccccaacgccaaccccaacgccaaccccaacgccaaccccaacgccaaccccaacgccaaccccaacgccaaccccaacgccaaccccaacgccaaccccaacgccaaccccaacgccaaccccaacgccaaccccaacgccaaccccaacgccaaccccaacgccaaccccaacgccaaccccaacgccaaccccaacaagaacaaccagggcaacggccagggccacaacaugcccaacgaccccaaccgcaacgucgacgagaacgccaacgccaacuccgccgucaagaacaacaacaacgaggagcccuccgacaagcacaucaaggaguaccucaacaagauccagaacucccucuccaccgaguggucccccugcuccgucaccugcggcaacggcauccagguccgcaucaagcccggcuccgccaacaagcccaaggacgagcucgacuacgccaacgacaucgagaagaagaucugcaagauggagaagugcuccuccgucuucaacgucgucaacuccuccaucggccucaucaugguccucuccuuccucuuc

SEQ ID NO: 2273 - RNA, 54 nt, Artificial Sequence
  derived and/or modified CDS sequence (opt2) from Pf(3D7)__XP_001351122.1__CSP(310-327)__RIII region, Th2R
gagcccuccgacaagcacaucaaggaguaccucaacaagauccagaacucccuc

SEQ ID NO: 2274 - RNA, 195 nt, Artificial Sequence
  derived and/or modified CDS sequence (opt2) from Pf(3D7)__XP_001351122.1__CSP(310-374)__RIII region_TSR (RII+)
gagcccuccgacaagcacaucaaggaguaccucaacaagauccagaacucccucuccaccgaguggucccccugcuccgucaccugcggcaacggcauccagguccgcaucaagcccggcuccgccaacaagcccaaggacgagcucgacuacgccaacgacaucgagaagaagaucugcaagauggagaagugc

SEQ ID NO: 2275 - RNA, 171 nt, Artificial Sequence
  derived and/or modified CDS sequence (opt2) from Pf(3D7)__XP_001351122.1__CSP(319-375)__TSR region v3
uaccucaacaagauccagaacucccucuccaccgaguggucccccugcuccgucaccugcggcaacggcauccagguccgcaucaagcccggcuccgccaacaagcccaaggacgagcucgacuacgccaacgacaucgagaagaagaucugcaagauggagaagugcucc

SEQ ID NO: 2276 - RNA, 147 nt, Artificial Sequence
  derived and/or modified CDS sequence (opt2) from Pf(3D7)__XP_001351122.1__CSP(326-374)__TSR region v1
ucccucuccaccgaguggucccccugcuccgucaccugcggcaacggcauccagguccgcaucaagcccggcuccgccaacaagcccaaggacgagcucgacuacgccaacgacaucgagaagaagaucugcaagauggagaagugc

SEQ ID NO: 2277 - RNA, 141 nt, Artificial Sequence
  derived and/or modified CDS sequence (opt2) from Pf(3D7)__XP_001351122.1__CSP(328-374)__TSR region v2
uccaccgaguggucccccugcuccgucaccugcggcaacggcauccagguccgcaucaagcccggcuccgccaacaagcccaaggacgagcucgacuacgccaacgacaucgagaagaagaucugcaagauggagaagugc

SEQ ID NO: 2278 - RNA, 54 nt, Artificial Sequence
  derived and/or modified CDS sequence (opt2) from Pf(3D7)__XP_001351122.1__CSP(330-347)__RII+ region v1
gaguggucccccugcuccgucaccugcggcaacggcauccagguccgcaucaag

SEQ ID NO: 2279 - RNA, 66 nt, Artificial Sequence
  derived and/or modified CDS sequence (opt2) from Pf(3D7)__XP_001351122.1__CSP(330-351)__RII+ region v2
gaguggucccccugcuccgucaccugcggcaacggcauccagguccgcaucaagcccggcuccgcc

SEQ ID NO: 2280 - RNA, 69 nt, Artificial Sequence
  derived and/or modified CDS sequence (opt2) from Pf(3D7)__XP_001351122.1__CSP(375-397)__GPI anchor signal
uccuccgucuucaacgucgucaacuccuccaucggccucaucaugguccucuccuuccucuuccucaac

SEQ ID NO: 2281 - RNA, 1194 nt, Artificial Sequence; identical to SEQ ID NO: 149
  derived and/or modified CDS sequence (opt3) from Pf(3D7)__XP_001351122.1__CSP

SEQ ID NO: 2282 - RNA, 1122 nt, Artificial Sequence; identical to SEQ ID NO: 150
  derived and/or modified CDS sequence (opt3) from Pf(3D7)__XP_001351122.1__CSP(1-374)__CSP-delGPI

SEQ ID NO: 2283 - RNA, 975 nt, Artificial Sequence; identical to SEQ ID NO: 151
  derived and/or modified CDS sequence (opt3) from Pf(3D7)__XP_001351122.1__CSP(1-325)__CSP-delTSR(v2)-delGPI

SEQ ID NO: 2284 - RNA, 1137 nt, Artificial Sequence
  derived and/or modified CDS sequence (opt3) from Pf(3D7)__XP_001351122.1__CSP(19-397)__CSP-delSP
cuguuccaggaguaccaaugcuauggcagcuccucuaacaccagagugcucaaugaacuuaacuacgacaaugccgggacaaaccuguauaaugaguuggaaaugaacuacuauggaaagcaggagaauugguacucacugaaaaagaacaguaggagcuuaggugaaaaugaugacggcaacaaugaggauaacgagaaacuacggaagcccaaacacaagaagcucaaacagccugcugacgggaauccagauccgaacgcaaaucccaacgucgacccuaacgccaauccaaacguugaucccaaugcgaacccuaauguggacccaaacgcuaaucccaacgccaauccuaacgcaaauccaaacgccaauccgaacgcuaaucccaacgcaaacccuaaugccaacccaaaugcuaaccccaaugccaacccuaaugcgaacccaaaugcaaaccccaaugccaacccgaaugcuaacccuaaugccaaccccaacgcaaauccaaacgcuaauccuaacgccaaucccaacguagauccaaaugcgaaccccaaugccaacccuaaugcaaacccaaaugcuaacccgaaugccaaccccaacgcuaauccuaacgccaauccaaacgcaaaucccaacgccaauccuaacgcuaauccaaacgcgaaucccaacgcaaauccgaacgccaauccuaacgcuaauccaaacgccaaccccaaugcaaacccuaaugccaaccccaaugcuaacccaaauaagaacaaucagggaaacggccaaggucauaauaugccuaacgaccccaaucgcaacguggaugaaaaugccaacgcaaacuccgcggucaaaaauaacaauaacgaggaaccaucugacaagcacaucaaagaguaucugaauaagauucagaacucgcuuucaacugaguggagcccguguagugugacgugcgggaauggaauacagguucgaaucaagccuggcuccgcuaacaaacccaaggaugaacuggacuacgccaaugacauugagaaaaagaucuguaaaauggaaaagugcucuagcguguuuaacgucguaaauuccucaauuggcuugaucauggugcucaguuuccuguuucugaac

SEQ ID NO: 2285 - RNA, 1068 nt, Artificial Sequence
  derived and/or modified CDS sequence (opt3) from Pf(3D7)__XP_001351122.1__CSP(19-374)__CSP-delSP-delGPI
cuguuccaggaguaccaaugcuauggcagcuccucuaacaccagagugcucaaugaacuuaacuacgacaaugccgggacaaaccuguauaaugaguuggaaaugaacuacuauggaaagcaggagaauugguacucacugaaaaagaacaguaggagcuuaggugaaaaugaugacggcaacaaugaggauaacgagaaacuacggaagcccaaacacaagaagcucaaacagccugcugacgggaauccagauccgaacgcaaaucccaacgucgacccuaacgccaauccaaacguugaucccaaugcgaacccuaauguggacccaaacgcuaaucccaacgccaauccuaacgcaaauccaaacgccaauccgaacgcuaaucccaacgcaaacccuaaugccaacccaaaugcuaaccccaaugccaacccuaaugcgaacccaaaugcaaaccccaaugccaacccgaaugcuaacccuaaugccaaccccaacgcaaauccaaacgcuaauccuaacgccaaucccaacguagauccaaaugcgaaccccaaugccaacccuaaugcaaacccaaaugcuaacccgaaugccaaccccaacgcuaauccuaacgccaauccaaacgcaaaucccaacgccaauccuaacgcuaauccaaacgcgaaucccaacgcaaauccgaacgccaauccuaacgcuaauccaaacgccaaccccaaugcaaacccuaaugccaaccccaaugcuaacccaaauaagaacaaucagggaaacggccaaggucauaauaugccuaacgaccccaaucgcaacguggaugaaaaugccaacgcaaacuccgcggucaaaaauaacaauaacgaggaaccaucugacaagcacaucaaagaguaucugaauaagauucagaacucgcuuucaacugaguggagcccguguagugugacgugcgggaauggaauacagguucgaaucaagccuggcuccgcuaacaaacccaaggaugaacuggacuacgccaaugacauugagaaaaagaucuguaaaauggaaaagugc

SEQ ID NO: 2286 - RNA, 921 nt, Artificial Sequence
  derived and/or modified CDS sequence (opt3) from Pf(3D7)__XP_001351122.1__CSP(19-325)__CSP-delSP-delTSR(v2)-delGPI
cuguuccaggaguaccaaugcuauggcagcuccucuaacaccagagugcucaaugaacuuaacuacgacaaugccgggacaaaccuguauaaugaguuggaaaugaacuacuauggaaagcaggagaauugguacucacugaaaaagaacaguaggagcuuaggugaaaaugaugacggcaacaaugaggauaacgagaaacuacggaagcccaaacacaagaagcucaaacagccugcugacgggaauccagauccgaacgcaaaucccaacgucgacccuaacgccaauccaaacguugaucccaaugcgaacccuaauguggacccaaacgcuaaucccaacgccaauccuaacgcaaauccaaacgccaauccgaacgcuaaucccaacgcaaacccuaaugccaacccaaaugcuaaccccaaugccaacccuaaugcgaacccaaaugcaaaccccaaugccaacccgaaugcuaacccuaaugccaaccccaacgcaaauccaaacgcuaauccuaacgccaaucccaacguagauccaaaugcgaaccccaaugccaacccuaaugcaaacccaaaugcuaacccgaaugccaaccccaacgcuaauccuaacgccaauccaaacgcaaaucccaacgccaauccuaacgcuaauccaaacgcgaaucccaacgcaaauccgaacgccaauccuaacgcuaauccaaacgccaaccccaaugcaaacccuaaugccaaccccaaugcuaacccaaauaagaacaaucagggaaacggccaaggucauaauaugccuaacgaccccaaucgcaacguggaugaaaaugccaacgcaaacuccgcggucaaaaauaacaauaacgaggaaccaucugacaagcacaucaaagaguaucugaauaagauucagaac

SEQ ID NO: 2287 - RNA, 351 nt, Artificial Sequence
  derived and/or modified CDS sequence (opt3) from Pf(3D7)__XP_001351122.1__CSP(19-135)
cuguuccaggaguaccaaugcuauggcagcuccucuaacaccagagugcucaaugaacuuaacuacgacaaugccgggacaaaccuguauaaugaguuggaaaugaacuacuauggaaagcaggagaauugguacucacugaaaaagaacaguaggagcuuaggugaaaaugaugacggcaacaaugaggauaacgagaaacuacggaagcccaaacacaagaagcucaaacagccugcugacgggaauccagauccgaacgcaaaucccaacgucgacccuaacgccaauccaaacguugaucccaaugcgaacccuaauguggacccaaacgcuaaucccaacgccaau

SEQ ID NO: 2288 - RNA, 525 nt, Artificial Sequence
  derived and/or modified CDS sequence (opt3) from Pf(3D7)__XP_001351122.1__CSP(19-193)
cuguuccaggaguaccaaugcuauggcagcuccucuaacaccagagugcucaaugaacuuaacuacgacaaugccgggacaaaccuguauaaugaguuggaaaugaacuacuauggaaagcaggagaauugguacucacugaaaaagaacaguaggagcuuaggugaaaaugaugacggcaacaaugaggauaacgagaaacuacggaagcccaaacacaagaagcucaaacagccugcugacgggaauccagauccgaacgcaaaucccaacgucgacccuaacgccaauccaaacguugaucccaaugcgaacccuaauguggacccaaacgcuaaucccaacgccaauccuaacgcaaauccaaacgccaauccgaacgcuaaucccaacgcaaacccuaaugccaacccaaaugcuaaccccaaugccaacccuaaugcgaacccaaaugcaaaccccaaugccaacccgaaugcuaacccuaaugccaaccccaacgcaaauccaaacgcuaauccuaac

SEQ ID NO: 2289 - RNA, 762 nt, Artificial Sequence
  derived and/or modified CDS sequence (opt3) from Pf(3D7)__XP_001351122.1__CSP(19-272)
cuguuccaggaguaccaaugcuauggcagcuccucuaacaccagagugcucaaugaacuuaacuacgacaaugccgggacaaaccuguauaaugaguuggaaaugaacuacuauggaaagcaggagaauugguacucacugaaaaagaacaguaggagcuuaggugaaaaugaugacggcaacaaugaggauaacgagaaacuacggaagcccaaacacaagaagcucaaacagccugcugacgggaauccagauccgaacgcaaaucccaacgucgacccuaacgccaauccaaacguugaucccaaugcgaacccuaauguggacccaaacgcuaaucccaacgccaauccuaacgcaaauccaaacgccaauccgaacgcuaaucccaacgcaaacccuaaugccaacccaaaugcuaaccccaaugccaacccuaaugcgaacccaaaugcaaaccccaaugccaacccgaaugcuaacccuaaugccaaccccaacgcaaauccaaacgcuaauccuaacgccaaucccaacguagauccaaaugcgaaccccaaugccaacccuaaugcaaacccaaaugcuaacccgaaugccaaccccaacgcuaauccuaacgccaauccaaacgcaaaucccaacgccaauccuaacgcuaauccaaacgcgaaucccaacgcaaauccgaacgccaauccuaacgcuaauccaaacgccaaccccaaugcaaacccuaaugccaaccccaaugcuaaccca

SEQ ID NO: 2290 - RNA, 1098 nt, Artificial Sequence
  derived and/or modified CDS sequence (opt3) from Pf(3D7)__XP_001351122.1__CSP(19-384)
cuguuccaggaguaccaaugcuauggcagcuccucuaacaccagagugcucaaugaacuuaacuacgacaaugccgggacaaaccuguauaaugaguuggaaaugaacuacuauggaaagcaggagaauugguacucacugaaaaagaacaguaggagcuuaggugaaaaugaugacggcaacaaugaggauaacgagaaacuacggaagcccaaacacaagaagcucaaacagccugcugacgggaauccagauccgaacgcaaaucccaacguggacccuaacgccaauccaaacguugaucccaaugcgaacccuaauguggacccaaacgcuaaucccaacgccaauccuaacgcaaauccaaacgccaauccgaacgcuaaucccaacgcaaacccuaaugccaacccaaaugcuaaccccaaugccaacccuaaugcgaacccaaaugcaaaccccaaugccaacccgaaugcuaacccuaaugccaaccccaacgcaaauccaaacgcuaauccuaacgccaaucccaacguagauccaaaugcgaaccccaaugccaacccuaaugcaaacccaaaugcuaacccgaaugccaaccccaacgcuaauccuaacgccaauccaaacgcaaaucccaacgccaauccuaacgcuaauccaaacgcgaaucccaacgcaaauccgaacgccaauccuaacgcuaauccaaacgccaaccccaaugcaaacccuaaugccaaccccaaugcuaacccaaauaagaacaaucagggaaacggccaaggucauaauaugccuaacgaccccaaucgcaacguggaugaaaaugccaacgcaaacuccgcggucaaaaauaacaauaacgaggaaccaucugacaagcacaucaaagaguaucugaauaagauucagaacucgcuuucaacugaguggagcccguguagugugacgugcgggaauggaauacagguucgaaucaagccuggcuccgcuaacaaacccaaggaugaacuggacuacgccaaugacauugagaaaaagaucuguaaaauggaaaagugcucuagcguguuuaacgucgucaauuccuca

SEQ ID NO: 2291 - RNA, 948 nt, Artificial Sequence
  derived and/or modified CDS sequence (opt3) from Pf(3D7)__XP_001351122.1__CSP(82-397)
gacaacgagaagcugagaaaacccaagcacaaaaagcucaaacagccugccgauggcaauccagacccgaacgcuaaucccaacguggauccuaaugcaaacccaaaugucgaccccaacgccaauccuaacguugauccaaaugcgaaccccaaugcuaacccuaaugccaacccaaacgcaaauccgaacgccaaucccaacgcuaauccuaacgcaaauccaaacgccaaucccaacgcuaauccuaacgccaauccaaacgcgaaucccaacgcaaacccgaaugccaacccuaaugcuaaccccaaugccaacccaaaugcaaacccuaaugcuaaccccaauguggacccaaacgccaaucccaacgcgaauccuaacgccaacccaaaugcaaacccgaaugcuaaccccaaugccaacccuaaugcuaacccaaaugccaaccccaaugcaaacccuaaugccaacccaaaugcuaaccccaacgcgaauccgaacgcaaauccuaacgccaauccaaacgcuaaucccaacgccaauccuaacgcaaaucccaacgccaauccaaacaagaauaaccaggggaauggacagggucauaacaugccuaacgaucccaauaggaacguagacgaaaaugcuaacgccaauagcgcagugaagaacaauaacaaugaggaaccauccgauaaacacaucaaggaguaccuuaacaaaauucaaaauucucugucaaccgaauggaguccgugcagcgucacauguggcaacgggauacaggugcggaucaagccuggauccgcgaauaaacccaaggacgaguuggauuaugcuaacgacauugagaagaaaaucugcaagauggaaaaauguucuucgguuuucaauguggucaacucaagcauuggcuuaaucauggugcugaguuuucuauuccucaac

SEQ ID NO: 2292 - RNA, 300 nt, Artificial Sequence
  derived and/or modified CDS sequence (opt3) from Pf(3D7)__XP_001351122.1__CSP(93-192)
aagcugaaacagcccgccgacggcaacccugauccaaaugcuaacccgaauguggaccccaacgcaaauccuaacgucgauccaaaugccaaccccaauguugacccuaacgcgaauccaaacgcuaaucccaacgccaauccuaacgcaaacccaaaugccaacccgaaugcuaaccccaaugcaaacccuaaugccaacccaaaugcuaaccccaaugccaacccuaaugcgaacccaaaugcaaaccccaacgccaauccgaacgcuaauccuaacgccaaucccaacgcaaaucca

SEQ ID NO: 2293 - RNA, 540 nt, Artificial Sequence
  derived and/or modified CDS sequence (opt3) from Pf(3D7)__XP_001351122.1__CSP(93-272)__RI region_NANP repeat region
aagcugaaacagcccgccgacggcaacccugauccaaaugcuaacccgaauguggaccccaacgcaaauccuaacgucgauccaaaugccaaccccaauguugacccuaacgcgaauccaaacgcuaaucccaacgccaauccuaacgcaaacccaaaugccaacccgaaugcuaaccccaaugcaaacccuaaugccaacccaaaugcuaaccccaaugccaacccuaaugcgaacccaaaugcaaaccccaacgccaauccgaacgcuaauccuaacgccaaucccaacgcaaauccaaacgcuaauccuaacguggaucccaaugccaacccaaaugcgaaccccaaugccaacccuaacgcaaauccaaacgcuaauccgaacgccaaucccaacgcuaauccuaacgccaauccaaacgcaaaucccaacgccaauccuaacgcuaauccaaacgcgaaccccaaugcaaacccgaaugccaacccuaaugcuaacccaaaugccaaccccaaugcaaacccuaaugccaacccc

SEQ ID NO: 2294 - RNA, 915 nt, Artificial Sequence
  derived and/or modified CDS sequence (opt3) from Pf(3D7)__XP_001351122.1__CSP(93-397)
aagcugaaacagcccgccgacggcaacccugauccaaaugcuaacccgaauguggaccccaacgcaaauccuaacgucgauccaaaugccaaccccaauguugacccuaacgcgaauccaaacgcuaaucccaacgccaauccuaacgcaaacccaaaugccaacccgaaugcuaaccccaaugcaaacccuaaugccaacccaaaugcuaaccccaaugccaacccuaaugcgaacccaaaugcaaaccccaacgccaauccgaacgcuaauccuaacgccaaucccaacgcaaauccaaacgcuaauccuaacguggaucccaaugccaacccaaaugcgaaccccaaugccaacccuaacgcaaauccaaacgcuaauccgaacgccaaucccaacgcuaauccuaacgccaauccaaacgcaaaucccaacgccaauccuaacgcuaauccaaacgcgaaccccaaugcaaacccgaaugccaacccuaaugcuaacccaaaugccaaccccaaugcaaacccuaaugccaaccccaauaagaacaaucaagggaacggacagggucacaauaugccaaacgacccuaacagaaauguagaugagaacgcuaaugccaacagcgcagugaaaaauaacaauaacgaggaacccuccgacaagcauaucaaagaauaccucaauaagauucagaacucucuuucaaccgaguggaguccaugcagcgucacauguggcaaugggauacaggugaggaucaagccgggauccgcgaacaaaccuaaggaugaacuggacuaugcuaaugauauugagaaaaagaucugcaaaauggagaaguguucuucgguuuucaacguggucaauucaagcauuggcuugaucaugguguuaaguuuucuguuccuaaac

SEQ ID NO: 2295 - RNA, 285 nt, Artificial Sequence
  derived and/or modified CDS sequence (opt3) from Pf(3D7)__XP_001351122.1__CSP(98-192)
gccgacggcaaccccgauccuaaugcuaacccaaauguggacccgaacgcaaaucccaacgucgauccuaaugccaacccaaauguugaccccaacgcgaauccuaacgcuaauccaaacgccaaucccaacgcaaacccuaaugccaacccaaaugcuaacccgaaugcaaaccccaaugccaacccuaaugcuaacccaaaugccaaccccaaugcgaacccuaaugcaaacccaaacgccaaucccaacgcuaauccgaacgccaauccuaacgcaaauccc

SEQ ID NO: 2296 - RNA, 831 nt, Artificial Sequence
  derived and/or modified CDS sequence (opt3) from Pf(3D7)__XP_001351122.1__CSP(98-374)
gccgacggcaaccccgauccuaaugcuaacccaaauguggacccgaacgcaaaucccaacgucgauccuaaugccaacccaaauguugaccccaacgcgaauccuaacgcuaauccaaacgccaaucccaacgcaaacccuaaugccaacccaaaugcuaacccgaaugcaaaccccaaugccaacccuaaugcuaacccaaaugccaaccccaaugcgaacccuaaugcaaacccaaacgccaaucccaacgcuaauccgaacgccaauccuaacgcaaaucccaacgcuaauccaaacguggauccuaaugccaaccccaaugcgaacccaaaugccaaccccaacgcaaauccuaacgcuaauccaaacgccaauccgaacgcuaaucccaacgccaauccuaacgcaaauccaaacgccaaucccaacgcuaauccuaacgcgaacccaaaugcaaaccccaaugccaacccgaaugcuaacccuaaugccaacccaaaugcaaaccccaaugccaacccuaauaagaacaaucaggggaacggacaaggucacaauaugcccaacgacccaaacagaaauguagaugagaacgcuaaugccaacagcgcagugaaaaauaacaauaacgaggaaccuuccgacaagcauaucaaagaauaccugaauaagauucagaacucucucucaaccgaguggagucccugcagcgucacauguggcaaugggauacaggugaggaucaaaccaggauccgcgaacaagccgaaggaugaacuugacuaugcuaaugauauugagaaaaagaucugcaaaauggagaagugu

SEQ ID NO: 2297 - RNA, 900 nt, Artificial Sequence
  derived and/or modified CDS sequence (opt3) from Pf(3D7)__XP_001351122.1__CSP(98-397)
gccgacggcaaccccgauccuaaugcuaacccaaauguggacccgaacgcaaaucccaacgucgauccuaaugccaacccaaauguugaccccaacgcgaauccuaacgcuaauccaaacgccaaucccaacgcaaacccuaaugccaacccaaaugcuaacccgaaugcaaaccccaaugccaacccuaaugcuaacccaaaugccaaccccaaugcgaacccuaaugcaaacccaaacgccaaucccaacgcuaauccgaacgccaauccuaacgcaaaucccaacgcuaauccaaacguggauccuaaugccaaccccaaugcgaacccaaaugccaaccccaacgcaaauccuaacgcuaauccaaacgccaauccgaacgcuaaucccaacgccaauccuaacgcaaauccaaacgccaaucccaacgcuaauccuaacgcgaacccaaaugcaaaccccaaugccaacccgaaugcuaacccuaaugccaacccaaaugcaaaccccaaugccaacccuaauaagaacaaucaggggaacggacaaggucacaauaugcccaacgacccaaacagaaauguagaugagaacgcuaaugccaacagugcagugaaaaauaacaauaacgaggaaccuuccgacaagcauaucaaagaauaccugaauaagauucagaacucucucucaaccgaguggagucccugcagcgucacauguggcaaugggauacaggugaggaucaaaccaggauccgcgaacaagccgaaggaugaacuugacuaugcuaaugauauugagaaaaagaucugcaaaauggagaaguguucuucgguuuucaacguggucaauucaagcauuggccugaucaugguguugagcuuuuuauuccugaac

SEQ ID NO: 2298 - RNA, 537 nt, Artificial Sequence
  derived and/or modified CDS sequence (opt3) from Pf(3D7)__XP_001351122.1__CSP(199-377)
gaccccaacgccaauccuaacgcuaauccaaacgcaaauccgaacgccaaucccaacgcgaauccuaacgcuaauccaaacgccaaucccaacgcaaauccuaacgccaacccaaaugcuaaccccaaugcaaacccuaaugccaacccaaaugcuaacccgaaugccaaccccaaugcgaacccuaaugcaaacccaaaugccaaccccaacgcuaauccuaacaagaauaaccagggcaaugggcagggacacaacaugccaaaugaucccaacagaaauguggacgagaacgccaaugcaaacagcgcugucaaaaauaacaauaacgaggaaccguccgauaagcauaucaaagaauaccugaacaagauucaaaauucucucucaaccgaguggaguccuugcagcguuacaugugguaacggcauacaggugaggaucaaacccggguccgccaauaagccaaaggacgaacuugauuaugcgaacgacauugagaaaaagaucugcaaaauggagaaguguucuucggua

SEQ ID NO: 2299 - RNA, 567 nt, Artificial Sequence
  derived and/or modified CDS sequence (opt3) from Pf(3D7)__XP_001351122.1__CSP(199-387)
gaccccaacgccaauccuaacgcuaauccaaacgcaaauccgaacgccaaucccaacgcgaauccuaacgcuaauccaaacgccaaucccaacgcaaauccuaacgccaacccaaaugcuaaccccaaugcaaacccuaaugccaacccaaaugcuaacccgaaugccaaccccaaugcgaacccuaaugcaaacccaaaugccaaccccaacgcuaauccuaacaagaauaaccagggcaaugggcagggacacaacaugccaaaugaucccaacagaaauguggacgagaacgccaaugcaaacagcgcugucaaaaauaacaauaacgaggaaccguccgauaagcauaucaaagaauaccugaacaagauucaaaauucucucucaaccgaguggaguccuugcagcguuacaugugguaacggcauacaggugaggaucaaacccggguccgccaauaagccaaaggacgaacuugauuaugcgaacgacauugagaaaaagaucugcaaaauggagaaguguucuucgguauucaauguggucaacucaagcauuggacug

SEQ ID NO: 2300 - RNA, 57 nt, Artificial Sequence
  derived and/or modified CDS sequence (opt3) from Pf(3D7)__XP_001351122.1__CSP(309-327)__RIII region, Th2R
gaggaacccagcgacaagcacaucaaagaguaccugaauaagauucagaacucccuc

SEQ ID NO: 2301 - RNA, 63 nt, Artificial Sequence
  derived and/or modified CDS sequence (opt3) from Pf(3D7)__XP_001351122.1__CSP(346-366)__Th3R
aucaagcccggcagcgccaacaaaccuaaggacgagcuggauuacgcuaaugacauugaaaaa

SEQ ID NO: 2302 - RNA, 93 nt, Artificial Sequence
  derived and/or modified CDS sequence (opt3) from Pf(3D7)__XP_001351122.1__CSP(346-376)__Th3R_CS.T3
aucaagcccggcagcgccaacaaaccuaaggacgagcuggauuacgcuaaugacauugagaaaaagauaugcaaaauggaaaaguguuccucu

SEQ ID NO: 2303 - RNA, 54 nt, Artificial Sequence
  derived and/or modified CDS sequence (opt3) from Pf(3D7)__XP_001351122.1__CSP(1-18)__signal peptide
augaugagaaagcuggccauccucagcguguccucuuuccuuuuugucgaggcu

SEQ ID NO: 2304 - RNA, 1074 nt, Artificial Sequence
  derived and/or modified CDS sequence (opt3) from Pf(3D7)__XP_001351122.1__CSP(27-384)__EcCSP fragment
ggcagcuccucuaacaccagagugcugaaugagcucaacuacgacaaugccgggacaaaccuuuauaaugaacuggagaugaacuacuauggaaagcaggaaaauugguacucauugaaaaagaacaguaggagcuuaggugagaaugaugacggcaacaaugaagauaacgagaaacugcggaagcccaaacacaagaagcuaaaacaaccugcugacgggaauccagauccgaacgcaaaucccaacguggacccuaacgccaauccaaacguugaucccaaugcgaacccuaauguggacccaaacgcuaaucccaacgccaauccuaacgcaaauccaaacgccaauccgaacgcuaaucccaacgcaaacccuaaugccaacccaaaugcuaaccccaaugccaacccuaaugcgaacccaaaugcaaaccccaaugccaacccgaaugcuaacccuaaugccaaccccaacgcaaauccaaacgcuaauccuaacgccaaucccaacguagauccaaaugcgaaccccaaugccaacccuaaugcaaacccaaaugcuaacccgaaugccaaccccaacgcuaauccuaacgccaauccaaacgcaaaucccaacgccaauccuaacgcuaauccaaacgcgaaucccaacgcaaauccgaacgccaauccuaacgcuaauccaaacgccaaccccaaugcaaacccuaaugccaaccccaaugcuaacccaaauaagaacaaucagggaaacggccagggucauaauaugccuaacgaccccaaucgcaacguggaugagaaugccaacgcaaacuccgcggucaaaaauaacaauaacgaagaaccaucugacaagcacaucaaagaauaucucaauaagauucagaacucgcugucaacugaguggagcccgugcagugugacgugugggaauggaauacaaguucgaaucaagccuggcuccgcuaacaaacccaaggaugagcuugacuacgccaaugacauugagaaaaagaucugcaaaauggagaaguguucuagcguguucaacgucgucaauuccuca

SEQ ID NO: 2305 - RNA, 18 nt, Artificial Sequence
  derived and/or modified CDS sequence (opt3) from Pf(3D7)__XP_001351122.1__CSP(69-74)__3A1 antibody binding site
agcagaucccugggcgag

SEQ ID NO: 2306 - RNA, 930 nt, Artificial Sequence
  derived and/or modified CDS sequence (opt3) from Pf(3D7)__XP_001351122.1__CSP(74-383)__PpCSP fragment
gagaacgacgauggcaauaacgaagacaaugagaagcugagaaaacccaagcacaaaaagcucaaacagccugccgaugggaacccagacccgaaugcuaaccccaauguggauccuaacgcaaauccaaacgucgaccccaaugccaacccuaauguugauccaaacgcgaaucccaacgcuaacccuaaugccaacccaaaugcaaacccgaaugccaaccccaaugcuaacccuaaugcaaacccaaaugccaaccccaaugcuaacccuaaugccaacccaaacgcgaaucccaacgcaaauccgaacgccaauccuaacgcuaaucccaacgccaauccaaacgcaaauccuaacgcuaaucccaacguggacccaaaugccaaccccaacgcgaauccuaacgccaauccaaacgcaaauccgaacgcuaaucccaacgccaauccuaacgcuaauccaaacgccaaucccaacgcaaauccuaacgccaacccaaaugcuaaccccaaugcgaacccgaaugcaaacccuaaugccaacccaaaugcuaaccccaaugccaacccuaaugcaaaccccaaugccaacccaaauaagaacaaccaaggaaauggucagggccauaacaugccuaaugaucccaacaggaauguagacgaaaacgcuaaugccaacagcgcagugaagaauaacaauaacgaggaaccauccgauaaacacaucaaggaguaccuuaauaaaauucagaacucucugucaaccgaguggaguccgugcagcgucacaugugggaauggaauacaggugcggaucaagccuggcuccgcgaacaaacccaaggacgaauuggauuaugcuaacgacauugagaagaaaaucugcaagauggaaaaauguucuucgguuuucaauguggucaacuca

SEQ ID NO: 2307 - RNA, 60 nt, Artificial Sequence
  derived and/or modified CDS sequence (opt3) from Pf(3D7)__XP_001351122.1__CSP(75-94)__2C3 antibody binding site
aacgacgauggcaauaacgaggacaaugaaaagcugagaaaacccaagcacaaaaagcuc

SEQ ID NO: 2308 - RNA, 15 nt, Artificial Sequence
  derived and/or modified CDS sequence (opt3) from Pf(3D7)__XP_001351122.1__CSP(93-97)__RI region
aagcugaaacagccc

SEQ ID NO: 2309 - RNA, 18 nt, Artificial Sequence
  derived and/or modified CDS sequence (opt3) from Pf(3D7)__XP_001351122.1__CSP(95-100)__3H10/3B4 antibody binding site
aagcagcccgccgacggc

SEQ ID NO: 2310 - RNA, 525 nt, Artificial Sequence
  derived and/or modified CDS sequence (opt3) from Pf(3D7)__XP_001351122.1__CSP(98-272)__NANP repeat region
gccgacggcaaccccgauccuaaugcuaacccaaauguggacccgaacgcaaaucccaacgucgauccuaaugccaacccaaauguugaccccaacgcgaauccuaacgcuaauccaaacgccaaucccaacgcaaacccuaaugccaacccaaaugcuaacccgaaugcaaaccccaaugccaacccuaaugcuaacccaaaugccaaccccaaugcgaacccuaaugcaaacccaaacgccaaucccaacgcuaauccgaacgccaauccuaacgcaaaucccaacgcuaauccaaacguggauccuaaugccaaccccaaugcgaacccaaaugccaaccccaacgcaaauccuaacgcuaauccaaacgccaauccgaacgcuaaucccaacgccaauccuaacgcaaauccaaacgccaaucccaacgcuaauccuaacgcgaacccaaaugcaaaccccaaugccaacccgaaugcuaacccuaaugccaacccaaaugcaaaccccaaugccaacccu

SEQ ID NO: 2311 - RNA, 504 nt, Artificial Sequence
  derived and/or modified CDS sequence (opt3) from Pf(3D7)__XP_001351122.1__CSP(105-272)__central repeat region
aacgccaaucccaacguggacccuaaugcuaacccaaaugucgauccgaacgcaaaucccaacguugacccuaaugccaacccaaaugcgaaccccaaugcuaacccuaaugccaacccaaacgcaaaucccaacgccaauccuaacgcuaauccaaacgcaaauccgaacgccaaucccaacgcuaauccuaacgccaauccaaacgcgaaucccaacgcaaacccuaaugccaacccaaaugcuaaccccaaugccaacccgaaugcaaacccuaauguggaucccaacgcuaauccaaacgccaauccuaacgcgaaucccaacgccaacccaaaugcaaaccccaaugcuaacccuaaugccaacccaaaugcuaacccgaaugccaaccccaaugcaaacccuaaugccaacccaaaugcuaaccccaacgcgaauccuaacgcaaauccaaacgccaaucccaacgcuaauccgaacgccaauccuaacgcaaaucca

SEQ ID NO: 2312 - RNA, 567 nt, Artificial Sequence
  derived and/or modified CDS sequence (opt3) from Pf(3D7)__XP_001351122.1__CSP(207-395)__RTS,S fragment
aaccccaaugccaacccuaaugcuaacccaaaugcaaacccgaaugccaaccccaaugcgaacccuaaugcuaacccaaaugccaaccccaaugcaaacccuaacgccaauccaaacgcuaaucccaacgcaaauccuaacgccaauccaaacgcuaauccgaacgccaaucccaacgcgaauccuaacgcaaauccaaacaagaacaaucagggcaacgggcagggacacaauaugcccaacgacccuaauagaaacguggaugagaaugccaacgcuaauagugccgucaaaaacaauaacaaugaggaaccauccgacaagcauaucaaagaauaccugaacaagauucaaaauucucucucaaccgaguggagucccugcagcguuacaugugguaacggcauacaggugaggaucaaaccgggguccgcaaacaagccuaaggaugaacuugacuaugcuaaugauauugagaaaaagaucugcaaaauggagaaguguucuucgguauucaacguggucaauucaagcauuggacugaucaugguguugagcuuuuuauuc

SEQ ID NO: 2313 - RNA, 54 nt, Artificial Sequence
  derived and/or modified CDS sequence (opt3) from Pf(3D7)__XP_001351122.1__CSP(310-327)__RIII region, Th2R
gagcccagcgacaagcacaucaaagaauaccugaauaagauucagaacucccuc

SEQ ID NO: 2314 - RNA, 195 nt, Artificial Sequence
  derived and/or modified CDS sequence (opt3) from Pf(3D7)__XP_001351122.1__CSP(310-374)__RIII region_TSR (RII+)
gagcccagcgacaagcacaucaaagaauaccugaacaagauucaaaauucccucucuaccgaguggucaccuugcagugugacauguggcaacgggauacaggucagaaucaaaccaggaagcgccaauaagccgaaagaugaacuugacuaugcuaacgauauugagaagaagaucugcaaaauggaaaagugu

SEQ ID NO: 2315 - RNA, 171 nt, Artificial Sequence
  derived and/or modified CDS sequence (opt3) from Pf(3D7)__XP_001351122.1__CSP(319-375)__TSR region v3
uaccugaacaagauccagaauagccucuccaccgaguggucucccugcucagugacauguggcaacgggauucaagucagaauaaaaccuggaagugccaauaagccaaaagacgaacuugauuaugcuaacgacaucgagaagaaaauuugcaagauggaaaaguguagc

SEQ ID NO: 2316 - RNA, 147 nt, Artificial Sequence
  derived and/or modified CDS sequence (opt3) from Pf(3D7)__XP_001351122.1__CSP(326-374)__TSR region v1
agccuguccaccgaguggucucccugcucagugacauguggcaacgggauccaggucagaauuaagccuggaagugccaauaaaccaaaggacgaacucgauuacgcuaacgacauagagaaaaagaucugcaaaauggaaaagugu

SEQ ID NO: 2317 - RNA, 141 nt, Artificial Sequence
  derived and/or modified CDS sequence (opt3) from Pf(3D7)__XP_001351122.1__CSP(328-374)__TSR region v2
agcaccgaguggucccccugcucugugacauguggcaacgggauccaggucagaauuaagccuggaucagccaauaaaccaaaggacgaacuggauuacgcuaacgacauagagaaaaagaucugcaaaauggaaaagugu

SEQ ID NO: 2318 - RNA, 54 nt, Artificial Sequence
  derived and/or modified CDS sequence (opt3) from Pf(3D7)__XP_001351122.1__CSP(330-347)__RII+ region v1
gaguggagccccugcuccgugaccuguggcaacgggauccaggucagaauuaag

SEQ ID NO: 2319 - RNA, 66 nt, Artificial Sequence
  derived and/or modified CDS sequence (opt3) from Pf(3D7)__XP_001351122.1__CSP(330-351)__RII+ region v2
gaguggagccccugcuccgugaccuguggcaacgggauccaggucagaauuaagccuggaucugcc

SEQ ID NO: 2320 - RNA, 69 nt, Artificial Sequence
  derived and/or modified CDS sequence (opt3) from Pf(3D7)__XP_001351122.1__CSP(375-397)__GPI anchor signal
agcuccguguucaacgucguuaauucuucaaucggccugauuauggugcucaguuuucuuuuccugaac

SEQ ID NO: 2321 - RNA, 1194 nt, Artificial Sequence; identical to SEQ ID NO: 185
  derived and/or modified CDS sequence (opt4) from Pf(3D7)__XP_001351122.1__CSP

SEQ ID NO: 2322 - RNA, 1122 nt, Artificial Sequence; identical to SEQ ID NO: 186
  derived and/or modified CDS sequence (opt4) from Pf(3D7)__XP_001351122.1__CSP(1-374)__CSP-delGPI

SEQ ID NO: 2323 - RNA, 975 nt, Artificial Sequence; identical to SEQ ID NO: 187
  derived and/or modified CDS sequence (opt4) from Pf(3D7)__XP_001351122.1__CSP(1-325)__CSP-delTSR(v2)-delGPI

SEQ ID NO: 2324 - RNA, 1137 nt, Artificial Sequence
  derived and/or modified CDS sequence (opt4) from Pf(3D7)__XP_001351122.1__CSP(19-397)__CSP-delSP
cuguuccaggaguaccagugcuacggcagcagcagcaacaccagagugcugaacgagcugaacuacgacaacgccggcaccaaccuguacaacgagcuggagaugaacuacuacggcaagcaggagaacugguacagccugaagaagaacagcagaagccugggcgagaacgacgacggcaacaacgaggacaacgagaagcugagaaagcccaagcacaagaagcugaagcagcccgccgacggcaaccccgaccccaacgccaaccccaacguggaccccaacgccaaccccaacguggaccccaacgccaaccccaacguggaccccaacgccaaccccaacgccaaccccaacgccaaccccaacgccaaccccaacgccaaccccaacgccaaccccaacgccaaccccaacgccaaccccaacgccaaccccaacgccaaccccaacgccaaccccaacgccaaccccaacgccaaccccaacgccaaccccaacgccaaccccaacgccaaccccaacgccaaccccaacguggaccccaacgccaaccccaacgccaaccccaacgccaaccccaacgccaaccccaacgccaaccccaacgccaaccccaacgccaaccccaacgccaaccccaacgccaaccccaacgccaaccccaacgccaaccccaacgccaaccccaacgccaaccccaacgccaaccccaacgccaaccccaacgccaaccccaacgccaaccccaacgccaaccccaacaagaacaaccagggcaacggccagggccacaacaugcccaacgaccccaacagaaacguggacgagaacgccaacgccaacagcgccgugaagaacaacaacaacgaggagcccagcgacaagcacaucaaggaguaccugaacaagauccagaacagccugagcaccgaguggagccccugcagcgugaccugcggcaacggcauccaggugagaaucaagcccggcagcgccaacaagcccaaggacgagcuggacuacgccaacgacaucgagaagaagaucugcaagauggagaagugcagcagcguguucaacguggugaacagcagcaucggccugaucauggugcugagcuuccuguuccugaac

SEQ ID NO: 2325 - RNA, 1068 nt, Artificial Sequence
  derived and/or modified CDS sequence (opt4) from Pf(3D7)__XP_001351122.1__CSP(19-374)__CSP-delSP-delGPI
cuguuccaggaguaccagugcuacggcagcagcagcaacaccagagugcugaacgagcugaacuacgacaacgccggcaccaaccuguacaacgagcuggagaugaacuacuacggcaagcaggagaacugguacagccugaagaagaacagcagaagccugggcgagaacgacgacggcaacaacgaggacaacgagaagcugagaaagcccaagcacaagaagcugaagcagcccgccgacggcaaccccgaccccaacgccaaccccaacguggaccccaacgccaaccccaacguggaccccaacgccaaccccaacguggaccccaacgccaaccccaacgccaaccccaacgccaaccccaacgccaaccccaacgccaaccccaacgccaaccccaacgccaaccccaacgccaaccccaacgccaaccccaacgccaaccccaacgccaaccccaacgccaaccccaacgccaaccccaacgccaaccccaacgccaaccccaacgccaaccccaacgccaaccccaacguggaccccaacgccaaccccaacgccaaccccaacgccaaccccaacgccaaccccaacgccaaccccaacgccaaccccaacgccaaccccaacgccaaccccaacgccaaccccaacgccaaccccaacgccaaccccaacgccaaccccaacgccaaccccaacgccaaccccaacgccaaccccaacgccaaccccaacgccaaccccaacgccaaccccaacaagaacaaccagggcaacggccagggccacaacaugcccaacgaccccaacagaaacguggacgagaacgccaacgccaacagcgccgugaagaacaacaacaacgaggagcccagcgacaagcacaucaaggaguaccugaacaagauccagaacagccugagcaccgaguggagccccugcagcgugaccugcggcaacggcauccaggugagaaucaagcccggcagcgccaacaagcccaaggacgagcuggacuacgccaacgacaucgagaagaagaucugcaagauggagaagugc

SEQ ID NO: 2326 - RNA, 921 nt, Artificial Sequence
  derived and/or modified CDS sequence (opt4) from Pf(3D7)__XP_001351122.1__CSP(19-325)__CSP-delSP-delTSR(v2)-delGPI
cuguuccaggaguaccagugcuacggcagcagcagcaacaccagagugcugaacgagcugaacuacgacaacgccggcaccaaccuguacaacgagcuggagaugaacuacuacggcaagcaggagaacugguacagccugaagaagaacagcagaagccugggcgagaacgacgacggcaacaacgaggacaacgagaagcugagaaagcccaagcacaagaagcugaagcagcccgccgacggcaaccccgaccccaacgccaaccccaacguggaccccaacgccaaccccaacguggaccccaacgccaaccccaacguggaccccaacgccaaccccaacgccaaccccaacgccaaccccaacgccaaccccaacgccaaccccaacgccaaccccaacgccaaccccaacgccaaccccaacgccaaccccaacgccaaccccaacgccaaccccaacgccaaccccaacgccaaccccaacgccaaccccaacgccaaccccaacgccaaccccaacgccaaccccaacguggaccccaacgccaaccccaacgccaaccccaacgccaaccccaacgccaaccccaacgccaaccccaacgccaaccccaacgccaaccccaacgccaaccccaacgccaaccccaacgccaaccccaacgccaaccccaacgccaaccccaacgccaaccccaacgccaaccccaacgccaaccccaacgccaaccccaacgccaaccccaacgccaaccccaacaagaacaaccagggcaacggccagggccacaacaugcccaacgaccccaacagaaacguggacgagaacgccaacgccaacagcgccgugaagaacaacaacaacgaggagcccagcgacaagcacaucaaggaguaccugaacaagauccagaac

SEQ ID NO: 2327 - RNA, 351 nt, Artificial Sequence
  derived and/or modified CDS sequence (opt4) from Pf(3D7)__XP_001351122.1__CSP(19-135)
cuguuccaggaguaccagugcuacggcagcagcagcaacaccagagugcugaacgagcugaacuacgacaacgccggcaccaaccuguacaacgagcuggagaugaacuacuacggcaagcaggagaacugguacagccugaagaagaacagcagaagccugggcgagaacgacgacggcaacaacgaggacaacgagaagcugagaaagcccaagcacaagaagcugaagcagcccgccgacggcaaccccgaccccaacgccaaccccaacguggaccccaacgccaaccccaacguggaccccaacgccaaccccaacguggaccccaacgccaaccccaacgccaac

SEQ ID NO: 2328 - RNA, 525 nt, Artificial Sequence
  derived and/or modified CDS sequence (opt4) from Pf(3D7)__XP_001351122.1__CSP(19-193)
cuguuccaggaguaccagugcuacggcagcagcagcaacaccagagugcugaacgagcugaacuacgacaacgccggcaccaaccuguacaacgagcuggagaugaacuacuacggcaagcaggagaacugguacagccugaagaagaacagcagaagccugggcgagaacgacgacggcaacaacgaggacaacgagaagcugagaaagcccaagcacaagaagcugaagcagcccgccgacggcaaccccgaccccaacgccaaccccaacguggaccccaacgccaaccccaacguggaccccaacgccaaccccaacguggaccccaacgccaaccccaacgccaaccccaacgccaaccccaacgccaaccccaacgccaaccccaacgccaaccccaacgccaaccccaacgccaaccccaacgccaaccccaacgccaaccccaacgccaaccccaacgccaaccccaacgccaaccccaacgccaaccccaacgccaaccccaacgccaaccccaac

SEQ ID NO: 2329 - RNA, 762 nt, Artificial Sequence
  derived and/or modified CDS sequence (opt4) from Pf(3D7)__XP_001351122.1__CSP(19-272)
cuguuccaggaguaccagugcuacggcagcagcagcaacaccagagugcugaacgagcugaacuacgacaacgccggcaccaaccuguacaacgagcuggagaugaacuacuacggcaagcaggagaacugguacagccugaagaagaacagcagaagccugggcgagaacgacgacggcaacaacgaggacaacgagaagcugagaaagcccaagcacaagaagcugaagcagcccgccgacggcaaccccgaccccaacgccaaccccaacguggaccccaacgccaaccccaacguggaccccaacgccaaccccaacguggaccccaacgccaaccccaacgccaaccccaacgccaaccccaacgccaaccccaacgccaaccccaacgccaaccccaacgccaaccccaacgccaaccccaacgccaaccccaacgccaaccccaacgccaaccccaacgccaaccccaacgccaaccccaacgccaaccccaacgccaaccccaacgccaaccccaacgccaaccccaacguggaccccaacgccaaccccaacgccaaccccaacgccaaccccaacgccaaccccaacgccaaccccaacgccaaccccaacgccaaccccaacgccaaccccaacgccaaccccaacgccaaccccaacgccaaccccaacgccaaccccaacgccaaccccaacgccaaccccaacgccaaccccaacgccaaccccaacgccaaccccaacgccaacccc

SEQ ID NO: 2330 - RNA, 1098 nt, Artificial Sequence
  derived and/or modified CDS sequence (opt4) from Pf(3D7)__XP_001351122.1__CSP(19-384)
cuguuccaggaguaccagugcuacggcagcagcagcaacaccagagugcugaacgagcugaacuacgacaacgccggcaccaaccuguacaacgagcuggagaugaacuacuacggcaagcaggagaacugguacagccugaagaagaacagcagaagccugggcgagaacgacgacggcaacaacgaggacaacgagaagcugagaaagcccaagcacaagaagcugaagcagcccgccgacggcaaccccgaccccaacgccaaccccaacguggaccccaacgccaaccccaacguggaccccaacgccaaccccaacguggaccccaacgccaaccccaacgccaaccccaacgccaaccccaacgccaaccccaacgccaaccccaacgccaaccccaacgccaaccccaacgccaaccccaacgccaaccccaacgccaaccccaacgccaaccccaacgccaaccccaacgccaaccccaacgccaaccccaacgccaaccccaacgccaaccccaacgccaaccccaacguggaccccaacgccaaccccaacgccaaccccaacgccaaccccaacgccaaccccaacgccaaccccaacgccaaccccaacgccaaccccaacgccaaccccaacgccaaccccaacgccaaccccaacgccaaccccaacgccaaccccaacgccaaccccaacgccaaccccaacgccaaccccaacgccaaccccaacgccaaccccaacgccaaccccaacaagaacaaccagggcaacggccagggccacaacaugcccaacgaccccaacagaaacguggacgagaacgccaacgccaacagcgccgugaagaacaacaacaacgaggagcccagcgacaagcacaucaaggaguaccugaacaagauccagaacagccugagcaccgaguggagccccugcagcgugaccugcggcaacggcauccaggugagaaucaagcccggcagcgccaacaagcccaaggacgagcuggacuacgccaacgacaucgagaagaagaucugcaagauggagaagugcagcagcguguucaacguggugaacagcagc

SEQ ID NO: 2331 - RNA, 948 nt, Artificial Sequence
  derived and/or modified CDS sequence (opt4) from Pf(3D7)__XP_001351122.1__CSP(82-397)
gacaacgagaagcugagaaagcccaagcacaagaagcugaagcagcccgccgacggcaaccccgaccccaacgccaaccccaacguggaccccaacgccaaccccaacguggaccccaacgccaaccccaacguggaccccaacgccaaccccaacgccaaccccaacgccaaccccaacgccaaccccaacgccaaccccaacgccaaccccaacgccaaccccaacgccaaccccaacgccaaccccaacgccaaccccaacgccaaccccaacgccaaccccaacgccaaccccaacgccaaccccaacgccaaccccaacgccaaccccaacgccaaccccaacguggaccccaacgccaaccccaacgccaaccccaacgccaaccccaacgccaaccccaacgccaaccccaacgccaaccccaacgccaaccccaacgccaaccccaacgccaaccccaacgccaaccccaacgccaaccccaacgccaaccccaacgccaaccccaacgccaaccccaacgccaaccccaacgccaaccccaacgccaaccccaacgccaaccccaacaagaacaaccagggcaacggccagggccacaacaugcccaacgaccccaacagaaacguggacgagaacgccaacgccaacagcgccgugaagaacaacaacaacgaggagcccagcgacaagcacaucaaggaguaccugaacaagauccagaacagccugagcaccgaguggagccccugcagcgugaccugcggcaacggcauccaggugagaaucaagcccggcagcgccaacaagcccaaggacgagcuggacuacgccaacgacaucgagaagaagaucugcaagauggagaagugcagcagcguguucaacguggugaacagcagcaucggccugaucauggugcugagcuuccuguuccugaac

SEQ ID NO: 2332 - RNA, 300 nt, Artificial Sequence
  derived and/or modified CDS sequence (opt4) from Pf(3D7)__XP_001351122.1__CSP(93-192)
aagcugaagcagcccgccgacggcaaccccgaccccaacgccaaccccaacguggaccccaacgccaaccccaacguggaccccaacgccaaccccaacguggaccccaacgccaaccccaacgccaaccccaacgccaaccccaacgccaaccccaacgccaaccccaacgccaaccccaacgccaaccccaacgccaaccccaacgccaaccccaacgccaaccccaacgccaaccccaacgccaaccccaacgccaaccccaacgccaaccccaacgccaaccccaacgccaacccc

SEQ ID NO: 2333 - RNA, 540 nt, Artificial Sequence
  derived and/or modified CDS sequence (opt4) from Pf(3D7)__XP_001351122.1__CSP(93-272)__RI region_NANP repeat region
aagcugaagcagcccgccgacggcaaccccgaccccaacgccaaccccaacguggaccccaacgccaaccccaacguggaccccaacgccaaccccaacguggaccccaacgccaaccccaacgccaaccccaacgccaaccccaacgccaaccccaacgccaaccccaacgccaaccccaacgccaaccccaacgccaaccccaacgccaaccccaacgccaaccccaacgccaaccccaacgccaaccccaacgccaaccccaacgccaaccccaacgccaaccccaacgccaaccccaacgccaaccccaacguggaccccaacgccaaccccaacgccaaccccaacgccaaccccaacgccaaccccaacgccaaccccaacgccaaccccaacgccaaccccaacgccaaccccaacgccaaccccaacgccaaccccaacgccaaccccaacgccaaccccaacgccaaccccaacgccaaccccaacgccaaccccaacgccaaccccaacgccaaccccaacgccaacccc

SEQ ID NO: 2334 - RNA, 915 nt, Artificial Sequence
  derived and/or modified CDS sequence (opt4) from Pf(3D7)__XP_001351122.1__CSP(93-397)
aagcugaagcagcccgccgacggcaaccccgaccccaacgccaaccccaacguggaccccaacgccaaccccaacguggaccccaacgccaaccccaacguggaccccaacgccaaccccaacgccaaccccaacgccaaccccaacgccaaccccaacgccaaccccaacgccaaccccaacgccaaccccaacgccaaccccaacgccaaccccaacgccaaccccaacgccaaccccaacgccaaccccaacgccaaccccaacgccaaccccaacgccaaccccaacgccaaccccaacgccaaccccaacguggaccccaacgccaaccccaacgccaaccccaacgccaaccccaacgccaaccccaacgccaaccccaacgccaaccccaacgccaaccccaacgccaaccccaacgccaaccccaacgccaaccccaacgccaaccccaacgccaaccccaacgccaaccccaacgccaaccccaacgccaaccccaacgccaaccccaacgccaaccccaacgccaaccccaacaagaacaaccagggcaacggccagggccacaacaugcccaacgaccccaacagaaacguggacgagaacgccaacgccaacagcgccgugaagaacaacaacaacgaggagcccagcgacaagcacaucaaggaguaccugaacaagauccagaacagccugagcaccgaguggagccccugcagcgugaccugcggcaacggcauccaggugagaaucaagcccggcagcgccaacaagcccaaggacgagcuggacuacgccaacgacaucgagaagaagaucugcaagauggagaagugcagcagcguguucaacguggugaacagcagcaucggccugaucauggugcugagcuuccuguuccugaac

SEQ ID NO: 2335 - RNA, 285 nt, Artificial Sequence
  derived and/or modified CDS sequence (opt4) from Pf(3D7)__XP_001351122.1__CSP(98-192)
gccgacggcaaccccgaccccaacgccaaccccaacguggaccccaacgccaaccccaacguggaccccaacgccaaccccaacguggaccccaacgccaaccccaacgccaaccccaacgccaaccccaacgccaaccccaacgccaaccccaacgccaaccccaacgccaaccccaacgccaaccccaacgccaaccccaacgccaaccccaacgccaaccccaacgccaaccccaacgccaaccccaacgccaaccccaacgccaaccccaacgccaacccc

SEQ ID NO: 2336 - RNA, 831 nt, Artificial Sequence
  derived and/or modified CDS sequence (opt4) from Pf(3D7)__XP_001351122.1__CSP(98-374)
gccgacggcaaccccgaccccaacgccaaccccaacguggaccccaacgccaaccccaacguggaccccaacgccaaccccaacguggaccccaacgccaaccccaacgccaaccccaacgccaaccccaacgccaaccccaacgccaaccccaacgccaaccccaacgccaaccccaacgccaaccccaacgccaaccccaacgccaaccccaacgccaaccccaacgccaaccccaacgccaaccccaacgccaaccccaacgccaaccccaacgccaaccccaacgccaaccccaacguggaccccaacgccaaccccaacgccaaccccaacgccaaccccaacgccaaccccaacgccaaccccaacgccaaccccaacgccaaccccaacgccaaccccaacgccaaccccaacgccaaccccaacgccaaccccaacgccaaccccaacgccaaccccaacgccaaccccaacgccaaccccaacgccaaccccaacgccaaccccaacgccaaccccaacaagaacaaccagggcaacggccagggccacaacaugcccaacgaccccaacagaaacguggacgagaacgccaacgccaacagcgccgugaagaacaacaacaacgaggagcccagcgacaagcacaucaaggaguaccugaacaagauccagaacagccugagcaccgaguggagccccugcagcgugaccugcggcaacggcauccaggugagaaucaagcccggcagcgccaacaagcccaaggacgagcuggacuacgccaacgacaucgagaagaagaucugcaagauggagaagugc

SEQ ID NO: 2337 - RNA, 900 nt, Artificial Sequence
  derived and/or modified CDS sequence (opt4) from Pf(3D7)__XP_001351122.1__CSP(98-397)
gccgacggcaaccccgaccccaacgccaaccccaacguggaccccaacgccaaccccaacguggaccccaacgccaaccccaacguggaccccaacgccaaccccaacgccaaccccaacgccaaccccaacgccaaccccaacgccaaccccaacgccaaccccaacgccaaccccaacgccaaccccaacgccaaccccaacgccaaccccaacgccaaccccaacgccaaccccaacgccaaccccaacgccaaccccaacgccaaccccaacgccaaccccaacgccaaccccaacguggaccccaacgccaaccccaacgccaaccccaacgccaaccccaacgccaaccccaacgccaaccccaacgccaaccccaacgccaaccccaacgccaaccccaacgccaaccccaacgccaaccccaacgccaaccccaacgccaaccccaacgccaaccccaacgccaaccccaacgccaaccccaacgccaaccccaacgccaaccccaacgccaaccccaacaagaacaaccagggcaacggccagggccacaacaugcccaacgaccccaacagaaacguggacgagaacgccaacgccaacagcgccgugaagaacaacaacaacgaggagcccagcgacaagcacaucaaggaguaccugaacaagauccagaacagccugagcaccgaguggagccccugcagcgugaccugcggcaacggcauccaggugagaaucaagcccggcagcgccaacaagcccaaggacgagcuggacuacgccaacgacaucgagaagaagaucugcaagauggagaagugcagcagcguguucaacguggugaacagcagcaucggccugaucauggugcugagcuuccuguuccugaac

SEQ ID NO: 2338 - RNA, 537 nt, Artificial Sequence
  derived and/or modified CDS sequence (opt4) from Pf(3D7)__XP_001351122.1__CSP(199-377)
gaccccaacgccaaccccaacgccaaccccaacgccaaccccaacgccaaccccaacgccaaccccaacgccaaccccaacgccaaccccaacgccaaccccaacgccaaccccaacgccaaccccaacgccaaccccaacgccaaccccaacgccaaccccaacgccaaccccaacgccaaccccaacgccaaccccaacgccaaccccaacgccaaccccaacaagaacaaccagggcaacggccagggccacaacaugcccaacgaccccaacagaaacguggacgagaacgccaacgccaacagcgccgugaagaacaacaacaacgaggagcccagcgacaagcacaucaaggaguaccugaacaagauccagaacagccugagcaccgaguggagccccugcagcgugaccugcggcaacggcauccaggugagaaucaagcccggcagcgccaacaagcccaaggacgagcuggacuacgccaacgacaucgagaagaagaucugcaagauggagaagugcagcagcgug

SEQ ID NO: 2339 - RNA, 567 nt, Artificial Sequence
  derived and/or modified CDS sequence (opt4) from Pf(3D7)__XP_001351122.1__CSP(199-387)
gaccccaacgccaaccccaacgccaaccccaacgccaaccccaacgccaaccccaacgccaaccccaacgccaaccccaacgccaaccccaacgccaaccccaacgccaaccccaacgccaaccccaacgccaaccccaacgccaaccccaacgccaaccccaacgccaaccccaacgccaaccccaacgccaaccccaacgccaaccccaacgccaaccccaacaagaacaaccagggcaacggccagggccacaacaugcccaacgaccccaacagaaacguggacgagaacgccaacgccaacagcgccgugaagaacaacaacaacgaggagcccagcgacaagcacaucaaggaguaccugaacaagauccagaacagccugagcaccgaguggagccccugcagcgugaccugcggcaacggcauccaggugagaaucaagcccggcagcgccaacaagcccaaggacgagcuggacuacgccaacgacaucgagaagaagaucugcaagauggagaagugcagcagcguguucaacguggugaacagcagcaucggccug

SEQ ID NO: 2340 - RNA, 57 nt, Artificial Sequence
  derived and/or modified CDS sequence (opt4) from Pf(3D7)__XP_001351122.1__CSP(309-327)__RIII region, Th2R
gaggagcccagcgacaagcacaucaaggaguaccugaacaagauccagaacagccug

SEQ ID NO: 2341 - RNA, 63 nt, Artificial Sequence
  derived and/or modified CDS sequence (opt4) from Pf(3D7)__XP_001351122.1__CSP(346-366)__Th3R
aucaagcccggcagcgccaacaagcccaaggacgagcuggacuacgccaacgacaucgagaag

SEQ ID NO: 2342 - RNA, 93 nt, Artificial Sequence
  derived and/or modified CDS sequence (opt4) from Pf(3D7)__XP_001351122.1__CSP(346-376)__Th3R_CS.T3
aucaagcccggcagcgccaacaagcccaaggacgagcuggacuacgccaacgacaucgagaagaagaucugcaagauggagaagugcagcagc

SEQ ID NO: 2343 - RNA, 54 nt, Artificial Sequence
  derived and/or modified CDS sequence (opt4) from Pf(3D7)__XP_001351122.1__CSP(1-18)__signal peptide
augaugagaaagcuggccauccugagcgugagcagcuuccuguucguggaggcc

SEQ ID NO: 2344 - RNA, 1074 nt, Artificial Sequence
  derived and/or modified CDS sequence (opt4) from Pf(3D7)__XP_001351122.1__CSP(27-384)__EcCSP fragment
ggcagcagcagcaacaccagagugcugaacgagcugaacuacgacaacgccggcaccaaccuguacaacgagcuggagaugaacuacuacggcaagcaggagaacugguacagccugaagaagaacagcagaagccugggcgagaacgacgacggcaacaacgaggacaacgagaagcugagaaagcccaagcacaagaagcugaagcagcccgccgacggcaaccccgaccccaacgccaaccccaacguggaccccaacgccaaccccaacguggaccccaacgccaaccccaacguggaccccaacgccaaccccaacgccaaccccaacgccaaccccaacgccaaccccaacgccaaccccaacgccaaccccaacgccaaccccaacgccaaccccaacgccaaccccaacgccaaccccaacgccaaccccaacgccaaccccaacgccaaccccaacgccaaccccaacgccaaccccaacgccaaccccaacgccaaccccaacguggaccccaacgccaaccccaacgccaaccccaacgccaaccccaacgccaaccccaacgccaaccccaacgccaaccccaacgccaaccccaacgccaaccccaacgccaaccccaacgccaaccccaacgccaaccccaacgccaaccccaacgccaaccccaacgccaaccccaacgccaaccccaacgccaaccccaacgccaaccccaacgccaaccccaacaagaacaaccagggcaacggccagggccacaacaugcccaacgaccccaacagaaacguggacgagaacgccaacgccaacagcgccgugaagaacaacaacaacgaggagcccagcgacaagcacaucaaggaguaccugaacaagauccagaacagccugagcaccgaguggagccccugcagcgugaccugcggcaacggcauccaggugagaaucaagcccggcagcgccaacaagcccaaggacgagcuggacuacgccaacgacaucgagaagaagaucugcaagauggagaagugcagcagcguguucaacguggugaacagcagc

SEQ ID NO: 2345 - RNA, 18 nt, Artificial Sequence
  derived and/or modified CDS sequence (opt4) from Pf(3D7)__XP_001351122.1__CSP(69-74)__3A1 antibody binding site
agcagaagccugggcgag

SEQ ID NO: 2346 - RNA, 930 nt, Artificial Sequence
  derived and/or modified CDS sequence (opt4) from Pf(3D7)__XP_001351122.1__CSP(74-383)__PpCSP fragment
gagaacgacgacggcaacaacgaggacaacgagaagcugagaaagcccaagcacaagaagcugaagcagcccgccgacggcaaccccgaccccaacgccaaccccaacguggaccccaacgccaaccccaacguggaccccaacgccaaccccaacguggaccccaacgccaaccccaacgccaaccccaacgccaaccccaacgccaaccccaacgccaaccccaacgccaaccccaacgccaaccccaacgccaaccccaacgccaaccccaacgccaaccccaacgccaaccccaacgccaaccccaacgccaaccccaacgccaaccccaacgccaaccccaacgccaaccccaacgccaaccccaacguggaccccaacgccaaccccaacgccaaccccaacgccaaccccaacgccaaccccaacgccaaccccaacgccaaccccaacgccaaccccaacgccaaccccaacgccaaccccaacgccaaccccaacgccaaccccaacgccaaccccaacgccaaccccaacgccaaccccaacgccaaccccaacgccaaccccaacgccaaccccaacgccaaccccaacaagaacaaccagggcaacggccagggccacaacaugcccaacgaccccaacagaaacguggacgagaacgccaacgccaacagcgccgugaagaacaacaacaacgaggagcccagcgacaagcacaucaaggaguaccugaacaagauccagaacagccugagcaccgaguggagccccugcagcgugaccugcggcaacggcauccaggugagaaucaagcccggcagcgccaacaagcccaaggacgagcuggacuacgccaacgacaucgagaagaagaucugcaagauggagaagugcagcagcguguucaacguggugaacagc

SEQ ID NO: 2347 - RNA, 60 nt, Artificial Sequence
  derived and/or modified CDS sequence (opt4) from Pf(3D7)__XP_001351122.1__CSP(75-94)__2C3 antibody binding site
aacgacgacggcaacaacgaggacaacgagaagcugagaaagcccaagcacaagaagcug

SEQ ID NO: 2348 - RNA, 15 nt, Artificial Sequence
  derived and/or modified CDS sequence (opt4) from Pf(3D7)__XP_001351122.1__CSP(93-97)__RI region
aagcugaagcagccc

SEQ ID NO: 2349 - RNA, 18 nt, Artificial Sequence
  derived and/or modified CDS sequence (opt4) from Pf(3D7)__XP_001351122.1__CSP(95-100)__3H10/3B4 antibody binding site
aagcagcccgccgacggc

SEQ ID NO: 2350 - RNA, 525 nt, Artificial Sequence
  derived and/or modified CDS sequence (opt4) from Pf(3D7)__XP_001351122.1__CSP(98-272)__NANP repeat region
gccgacggcaaccccgaccccaacgccaaccccaacguggaccccaacgccaaccccaacguggaccccaacgccaaccccaacguggaccccaacgccaaccccaacgccaaccccaacgccaaccccaacgccaaccccaacgccaaccccaacgccaaccccaacgccaaccccaacgccaaccccaacgccaaccccaacgccaaccccaacgccaaccccaacgccaaccccaacgccaaccccaacgccaaccccaacgccaaccccaacgccaaccccaacgccaaccccaacguggaccccaacgccaaccccaacgccaaccccaacgccaaccccaacgccaaccccaacgccaaccccaacgccaaccccaacgccaaccccaacgccaaccccaacgccaaccccaacgccaaccccaacgccaaccccaacgccaaccccaacgccaaccccaacgccaaccccaacgccaaccccaacgccaaccccaacgccaaccccaacgccaacccc

SEQ ID NO: 2351 - RNA, 504 nt, Artificial Sequence
  derived and/or modified CDS sequence (opt4) from Pf(3D7)__XP_001351122.1__CSP(105-272)__central repeat region
aacgccaaccccaacguggaccccaacgccaaccccaacguggaccccaacgccaaccccaacguggaccccaacgccaaccccaacgccaaccccaacgccaaccccaacgccaaccccaacgccaaccccaacgccaaccccaacgccaaccccaacgccaaccccaacgccaaccccaacgccaaccccaacgccaaccccaacgccaaccccaacgccaaccccaacgccaaccccaacgccaaccccaacgccaaccccaacgccaaccccaacguggaccccaacgccaaccccaacgccaaccccaacgccaaccccaacgccaaccccaacgccaaccccaacgccaaccccaacgccaaccccaacgccaaccccaacgccaaccccaacgccaaccccaacgccaaccccaacgccaaccccaacgccaaccccaacgccaaccccaacgccaaccccaacgccaaccccaacgccaaccccaacgccaacccc

SEQ ID NO: 2352 - RNA, 567 nt, Artificial Sequence
  derived and/or modified CDS sequence (opt4) from Pf(3D7)__XP_001351122.1__CSP(207-395)__RTS,S fragment
aaccccaacgccaaccccaacgccaaccccaacgccaaccccaacgccaaccccaacgccaaccccaacgccaaccccaacgccaaccccaacgccaaccccaacgccaaccccaacgccaaccccaacgccaaccccaacgccaaccccaacgccaaccccaacgccaaccccaacgccaaccccaacgccaaccccaacaagaacaaccagggcaacggccagggccacaacaugcccaacgaccccaacagaaacguggacgagaacgccaacgccaacagcgccgugaagaacaacaacaacgaggagcccagcgacaagcacaucaaggaguaccugaacaagauccagaacagccugagcaccgaguggagccccugcagcgugaccugcggcaacggcauccaggugagaaucaagcccggcagcgccaacaagcccaaggacgagcuggacuacgccaacgacaucgagaagaagaucugcaagauggagaagugcagcagcguguucaacguggugaacagcagcaucggccugaucauggugcugagcuuccuguuc

SEQ ID NO: 2353 - RNA, 54 nt, Artificial Sequence
  derived and/or modified CDS sequence (opt4) from Pf(3D7)__XP_001351122.1__CSP(310-327)__RIII region, Th2R
gagcccagcgacaagcacaucaaggaguaccugaacaagauccagaacagccug

SEQ ID NO: 2354 - RNA, 195 nt, Artificial Sequence
  derived and/or modified CDS sequence (opt4) from Pf(3D7)__XP_001351122.1__CSP(310-374)__RIII region_TSR (RII+)
gagcccagcgacaagcacaucaaggaguaccugaacaagauccagaacagccugagcaccgaguggagccccugcagcgugaccugcggcaacggcauccaggugagaaucaagcccggcagcgccaacaagcccaaggacgagcuggacuacgccaacgacaucgagaagaagaucugcaagauggagaagugc

SEQ ID NO: 2355 - RNA, 171 nt, Artificial Sequence
  derived and/or modified CDS sequence (opt4) from Pf(3D7)__XP_001351122.1__CSP(319-375)__TSR region v3
uaccugaacaagauccagaacagccugagcaccgaguggagccccugcagcgugaccugcggcaacggcauccaggugagaaucaagcccggcagcgccaacaagcccaaggacgagcuggacuacgccaacgacaucgagaagaagaucugcaagauggagaagugcagc

SEQ ID NO: 2356 - RNA, 147 nt, Artificial Sequence
  derived and/or modified CDS sequence (opt4) from Pf(3D7)__XP_001351122.1__CSP(326-374)__TSR region v1
agccugagcaccgaguggagccccugcagcgugaccugcggcaacggcauccaggugagaaucaagcccggcagcgccaacaagcccaaggacgagcuggacuacgccaacgacaucgagaagaagaucugcaagauggagaagugc

SEQ ID NO: 2357 - RNA, 141 nt, Artificial Sequence
  derived and/or modified CDS sequence (opt4) from Pf(3D7)__XP_001351122.1__CSP(328-374)__TSR region v2
agcaccgaguggagccccugcagcgugaccugcggcaacggcauccaggugagaaucaagcccggcagcgccaacaagcccaaggacgagcuggacuacgccaacgacaucgagaagaagaucugcaagauggagaagugc

SEQ ID NO: 2358 - RNA, 54 nt, Artificial Sequence
  derived and/or modified CDS sequence (opt4) from Pf(3D7)__XP_001351122.1__CSP(330-347)__RII+ region v1
gaguggagccccugcagcgugaccugcggcaacggcauccaggugagaaucaag

SEQ ID NO: 2359 - RNA, 66 nt, Artificial Sequence
  derived and/or modified CDS sequence (opt4) from Pf(3D7)__XP_001351122.1__CSP(330-351)__RII+ region v2
gaguggagccccugcagcgugaccugcggcaacggcauccaggugagaaucaagcccggcagcgcc

SEQ ID NO: 2360 - RNA, 69 nt, Artificial Sequence
  derived and/or modified CDS sequence (opt4) from Pf(3D7)__XP_001351122.1__CSP(375-397)__GPI anchor signal
agcagcguguucaacguggugaacagcagcaucggccugaucauggugcugagcuuccuguuccugaac

SEQ ID NO: 2361 - RNA, 1194 nt, Artificial Sequence; identical to SEQ ID NO: 221
  derived and/or modified CDS sequence (opt5) from Pf(3D7)__XP_001351122.1__CSP

SEQ ID NO: 2362 - RNA, 1122 nt, Artificial Sequence; identical to SEQ ID NO: 222
  derived and/or modified CDS sequence (opt5) from Pf(3D7)__XP_001351122.1__CSP(1-374)__CSP-delGPI

SEQ ID NO: 2363 - RNA, 975 nt, Artificial Sequence; identical to SEQ ID NO: 223
  derived and/or modified CDS sequence (opt5) from Pf(3D7)__XP_001351122.1__CSP(1-325)__CSP-delTSR(v2)-delGPI

SEQ ID NO: 2364 - RNA, 1137 nt, Artificial Sequence
  derived and/or modified CDS sequence (opt5) from Pf(3D7)__XP_001351122.1__CSP(19-397)__CSP-delSP
cuguuccaggaguaccaaugcuauggcagcuccucuaacaccagagugcucaaugaacugaacuacgacaaugccgggacaaaccuuuauaaugagcuggaaaugaacuacuauggaaagcaggagaauugguacagccucaaaaagaacucccggucucugggcgaaaaugaugacgggaacaaugaggauaacgagaaacuucgcaagcccaaacacaagaagcugaaacagccugcugacggaaauccggaucccaacgccaauccuaacgucgaccccaacgcgaauccuaacguugaucccaaugcuaacccuaauguggacccgaacgccaaucccaacgccaauccuaacgcuaaucccaacgccaauccuaacgcuaaucccaacgccaacccgaaugcgaacccuaaugccaaccccaaugcuaacccuaaugccaaccccaaugcuaaccccaaugccaacccuaaugcgaacccgaaugccaaccccaacgcuaauccuaacgccaaucccaacgcuaauccuaacguggaucccaaugccaacccgaaugccaacccuaaugcuaaccccaaugcgaacccuaaugccaaccccaacgcuaauccuaacgccaaucccaacgccaauccgaacgcuaauccuaacgccaaucccaacgcgaaucccaacgcuaauccuaacgccaauccgaacgccaaucccaacgcuaacccuaaugccaaccccaaugcuaacccuaaugccaaccccaauaagaacaaucagggcaacgggcaaggacauaauaugccuaacgaccccaauagaaacgucgaugaaaaugcgaacgccaacagcgcugugaaaaauaacaauaacgaggaaccguccgacaagcacaucaaagaguaucucaauaagauucagaacucucugagcacggagugguccccuuguagcguuaccugcggcaauggcauccaggugcggauuaagcccgggucugccaacaaaccuaaggaugaacuggacuacgcuaaugacaucgagaaaaagauuuguaaaauggaaaagugcuccagcgucuuuaacgugguuaauucuuccaucggacucaucauggugcugagcuuccuuuuucugaac

SEQ ID NO: 2365 - RNA, 1068 nt, Artificial Sequence
  derived and/or modified CDS sequence (opt5) from Pf(3D7)__XP_001351122.1__CSP(19-374)__CSP-delSP-delGPI
cuguuccaggaguaccaaugcuauggcagcuccucuaacaccagagugcucaaugaacugaacuacgacaaugccgggacaaaccuuuauaaugagcuggaaaugaacuacuauggaaagcaggagaauugguacagccucaaaaagaacucccggucucugggcgaaaaugaugacgggaacaaugaggauaacgagaaacuucgcaagcccaaacacaagaagcugaaacagccugcugacggaaauccggaucccaacgccaauccuaacgucgaccccaacgcgaauccuaacguugaucccaaugcuaacccuaauguggacccgaacgccaaucccaacgccaauccuaacgcuaaucccaacgccaauccuaacgcuaaucccaacgccaacccgaaugcgaacccuaaugccaaccccaaugcuaacccuaaugccaaccccaaugcuaaccccaaugccaacccuaaugcgaacccgaaugccaaccccaacgcuaauccuaacgccaaucccaacgcuaauccuaacguggaucccaaugccaacccgaaugccaacccuaaugcuaaccccaaugcgaacccuaaugccaaccccaacgcuaauccuaacgccaaucccaacgccaauccgaacgcuaauccuaacgccaaucccaacgcgaaucccaacgcuaauccuaacgccaauccgaacgccaaucccaacgcuaacccuaaugccaaccccaaugcuaacccuaaugccaaccccaauaagaacaaucagggcaacgggcaaggacauaauaugccuaacgaccccaauagaaacgucgaugaaaaugcgaacgccaacagcgcugugaaaaauaacaauaacgaggaaccguccgacaagcacaucaaagaguaucucaauaagauucagaacucucugagcacggagugguccccuuguagcguuaccugcggcaauggcauccaggugcggauuaagcccgggucugccaacaaaccuaaggaugaacuggacuacgcuaaugacaucgagaaaaagauuuguaaaauggaaaagugc

SEQ ID NO: 2366 - RNA, 921 nt, Artificial Sequence
  derived and/or modified CDS sequence (opt5) from Pf(3D7)__XP_001351122.1__CSP(19-325)__CSP-delSP-delTSR(v2)-delGPI
cuguuccaggaguaccaaugcuauggcagcuccucuaacaccagagugcucaaugaacugaacuacgacaaugccgggacaaaccuuuauaaugagcuggaaaugaacuacuauggaaagcaggagaauugguacagccucaaaaagaacucccggucucugggcgaaaaugaugacgggaacaaugaggauaacgagaaacuucgcaagcccaaacacaagaagcugaaacagccugcugacggaaauccggaucccaacgccaauccuaacgucgaccccaacgcgaauccuaacguugaucccaaugcuaacccuaauguggacccgaacgccaaucccaacgccaauccuaacgcuaaucccaacgccaauccuaacgcuaaucccaacgccaacccgaaugcgaacccuaaugccaaccccaaugcuaacccuaaugccaaccccaaugcuaaccccaaugccaacccuaaugcgaacccgaaugccaaccccaacgcuaauccuaacgccaaucccaacgcuaauccuaacguggaucccaaugccaacccgaaugccaacccuaaugcuaaccccaaugcgaacccuaaugccaaccccaacgcuaauccuaacgccaaucccaacgccaauccgaacgcuaauccuaacgccaaucccaacgcgaaucccaacgcuaauccuaacgccaauccgaacgccaaucccaacgcuaacccuaaugccaaccccaaugcuaacccuaaugccaaccccaauaagaacaaucagggcaacgggcaaggacauaauaugccuaacgaccccaauagaaacgucgaugaaaaugcgaacgccaacagcgcugugaaaaauaacaauaacgaggaaccguccgacaagcacaucaaagaguaucucaauaagauucagaac

SEQ ID NO: 2367 - RNA, 351 nt, Artificial Sequence
  derived and/or modified CDS sequence (opt5) from Pf(3D7)__XP_001351122.1__CSP(19-135)
cuguuccaggaguaccaaugcuauggcagcuccucuaacaccagagugcucaaugaacugaacuacgacaaugccgggacaaaccuuuauaaugagcuggaaaugaacuacuauggaaagcaggagaauugguacagccucaaaaagaacucccggucucugggcgaaaaugaugacgggaacaaugaggauaacgagaaacuucgcaagcccaaacacaagaagcugaaacagccugcugacggaaauccggaucccaacgccaauccuaacgucgaccccaacgcgaauccuaacguugaucccaaugcuaacccuaauguggacccgaacgccaaucccaacgccaau

SEQ ID NO: 2368 - RNA, 525 nt, Artificial Sequence
  derived and/or modified CDS sequence (opt5) from Pf(3D7)__XP_001351122.1__CSP(19-193)
cuguuccaggaguaccaaugcuauggcagcuccucuaacaccagagugcucaaugaacugaacuacgacaaugccgggacaaaccuuuauaaugagcuggaaaugaacuacuauggaaagcaggagaauugguacagccucaaaaagaacucccggucucugggcgaaaaugaugacgggaacaaugaggauaacgagaaacuucgcaagcccaaacacaagaagcugaaacagccugcugacggaaauccggaucccaacgccaauccuaacgucgaccccaacgcgaauccuaacguugaucccaaugcuaacccuaauguggacccgaacgccaaucccaacgccaauccuaacgcuaaucccaacgccaauccuaacgcuaaucccaacgccaacccgaaugcgaacccuaaugccaaccccaaugcuaacccuaaugccaaccccaaugcuaaccccaaugccaacccuaaugcgaacccgaaugccaaccccaacgcuaauccuaacgccaaucccaac

SEQ ID NO: 2369 - RNA, 762 nt, Artificial Sequence
  derived and/or modified CDS sequence (opt5) from Pf(3D7)__XP_001351122.1__CSP(19-272)
cuguuccaggaguaccaaugcuauggcagcuccucuaacaccagagugcucaaugaacugaacuacgacaaugccgggacaaaccuuuauaaugagcuggaaaugaacuacuauggaaagcaggagaauugguacagccucaaaaagaacucccggucucugggcgaaaaugaugacgggaacaaugaggauaacgagaaacuucgcaagcccaaacacaagaagcugaaacagccugcugacggaaauccggaucccaacgccaauccuaacgucgaccccaacgcgaauccuaacguugaucccaaugcuaacccuaauguggacccgaacgccaaucccaacgccaauccuaacgcuaaucccaacgccaauccuaacgcuaaucccaacgccaacccgaaugcgaacccuaaugccaaccccaaugcuaacccuaaugccaaccccaaugcuaaccccaaugccaacccuaaugcgaacccgaaugccaaccccaacgcuaauccuaacgccaaucccaacgcuaauccuaacguggaucccaaugccaacccgaaugccaacccuaaugcuaaccccaaugcgaacccuaaugccaaccccaacgcuaauccuaacgccaaucccaacgccaauccgaacgcuaauccuaacgccaaucccaacgcgaaucccaacgcuaauccuaacgccaauccgaacgccaaucccaacgcuaacccuaaugccaaccccaaugcuaacccuaaugccaacccc

SEQ ID NO: 2370 - RNA, 1098 nt, Artificial Sequence
  derived and/or modified CDS sequence (opt5) from Pf(3D7)__XP_001351122.1__CSP(19-384)
cuguuccaggaguaccaaugcuauggcagcuccucuaacaccagagugcucaaugaacugaacuacgacaaugccgggacaaaccuuuauaaugagcuggaaaugaacuacuauggaaagcaggagaauugguacagccucaaaaagaacucccggucucugggcgaaaaugaugacgggaacaaugaggauaacgagaaacuucgcaagcccaaacacaagaagcugaaacagccugcugacggaaauccggaucccaacgccaauccuaacgucgaccccaacgcgaauccuaacguugaucccaaugcuaacccuaauguggacccgaacgccaaucccaacgccaauccuaacgcuaaucccaacgccaauccuaacgcuaaucccaacgccaacccgaaugcgaacccuaaugccaaccccaaugcuaacccuaaugccaaccccaaugcuaaccccaaugccaacccuaaugcgaacccgaaugccaaccccaacgcuaauccuaacgccaaucccaacgcuaauccuaacguggaucccaaugccaacccgaaugccaacccuaaugcuaaccccaaugcgaacccuaaugccaaccccaacgcuaauccuaacgccaaucccaacgccaauccgaacgcuaauccuaacgccaaucccaacgcgaaucccaacgcuaauccuaacgccaauccgaacgccaaucccaacgcuaacccuaaugccaaccccaaugcuaacccuaaugccaaccccaauaagaacaaucagggcaacgggcaaggacauaauaugccuaacgaccccaauagaaacgucgaugaaaaugcgaacgccaacagcgcugugaaaaauaacaauaacgaggaaccguccgacaagcacaucaaagaguaucucaauaagauucagaacucucugagcacggagugguccccuuguagcguuaccugcggcaauggcauccaggugcggauuaagcccgggucugccaacaaaccuaaggaugaacuggacuacgcuaaugacaucgagaaaaagauuuguaaaauggaaaagugcuccagcgucuuuaacgugguuaauucuucc

SEQ ID NO: 2371 - RNA, 948 nt, Artificial Sequence
  derived and/or modified CDS sequence (opt5) from Pf(3D7)__XP_001351122.1__CSP(82-397)
gacaacgagaagcugagaaaacccaagcacaaaaagcucaaacagccugccgauggcaauccggaccccaacgcuaauccuaacguggaucccaaugccaacccuaaugucgaccccaacgcgaauccuaacguugauccgaaugcuaaccccaaugccaacccuaaugccaaccccaacgcuaauccuaacgccaaucccaacgcuaauccgaacgccaauccuaacgcgaaucccaacgccaauccuaacgcuaaucccaacgccaaucccaacgcuaacccuaaugccaacccgaaugcgaaccccaaugccaacccuaaugcuaaccccaaugccaacccuaauguggaccccaacgcuaauccgaacgccaauccuaacgccaaccccaaugcuaacccuaaugcgaaccccaaugccaacccuaaugcuaaccccaaugccaacccgaaugccaacccuaaugcuaaccccaaugccaaccccaacgcgaauccuaacgcuaauccgaacgccaaucccaacgccaauccuaacgcuaaucccaacgccaauccuaacgcuaaucccaacaagaauaaccaggggaauggacagggccauaacaugccuaacgaucccaaucggaacguggacgaaaaugccaacgcgaauagcgccgucaagaacaauaacaaugaggaaccguccgauaaacacaucaaggaguaccugaacaaaauucaaaauucucuuagcaccgaaugguccccuugcucugugacaugugggaacggaauccagguucgcauuaagcccggcagcgcuaauaaaccuaaggacgagcuggauuaugccaacgacaucgagaagaaaauuugcaagauggaaaaauguuccucuguguucaaugucgugaacagcuccaucgggcucaucaugguucugagcuuucuuuuccugaac

SEQ ID NO: 2372 - RNA, 300 nt, Artificial Sequence
  derived and/or modified CDS sequence (opt5) from Pf(3D7)__XP_001351122.1__CSP(93-192)
aagcugaaacagcccgccgacggcaacccugauccgaaugcuaaccccaauguggacccuaacgccaaucccaacgucgauccuaaugcgaaccccaauguugacccuaacgcuaauccgaacgccaaucccaacgccaauccuaacgcuaaccccaaugccaacccuaaugcuaaccccaaugccaacccgaaugcgaacccuaaugccaaccccaaugcuaacccuaaugccaaccccaaugcuaaccccaacgccaauccuaacgcgaauccgaacgccaaucccaacgcuaauccu

SEQ ID NO: 2373 - RNA, 540 nt, Artificial Sequence
  derived and/or modified CDS sequence (opt5) from Pf(3D7)__XP_001351122.1__CSP(93-272)__RI region_NANP repeat region
aagcugaaacagcccgccgacggcaacccugauccgaaugcuaaccccaauguggacccuaacgccaaucccaacgucgauccuaaugcgaaccccaauguugacccuaacgcuaauccgaacgccaaucccaacgccaauccuaacgcuaaccccaaugccaacccuaaugcuaaccccaaugccaacccgaaugcgaacccuaaugccaaccccaaugcuaacccuaaugccaaccccaaugcuaaccccaacgccaauccuaacgcgaauccgaacgccaaucccaacgcuaauccuaacgccaaucccaacguggauccuaaugcuaaccccaaugccaacccgaaugccaacccuaacgcuaaucccaacgcgaauccuaacgccaaucccaacgcuaauccuaacgccaaucccaacgccaauccgaacgcuaauccuaacgccaaucccaacgcgaaccccaaugcuaacccuaaugccaacccgaaugccaaccccaaugcuaacccuaaugccaaccccaaugcuaacccu

SEQ ID NO: 2374 - RNA, 915 nt, Artificial Sequence
  derived and/or modified CDS sequence (opt5) from Pf(3D7)__XP_001351122.1__CSP(93-397)
aagcugaaacagcccgccgacggcaacccugauccgaaugcuaaccccaauguggacccuaacgccaaucccaacgucgauccuaaugcgaaccccaauguugacccuaacgcuaauccgaacgccaaucccaacgccaauccuaacgcuaaccccaaugccaacccuaaugcuaaccccaaugccaacccgaaugcgaacccuaaugccaaccccaaugcuaacccuaaugccaaccccaaugcuaaccccaacgccaauccuaacgcgaauccgaacgccaaucccaacgcuaauccuaacgccaaucccaacguggauccuaaugcuaaccccaaugccaacccgaaugccaacccuaacgcuaaucccaacgcgaauccuaacgccaaucccaacgcuaauccuaacgccaaucccaacgccaauccgaacgcuaauccuaacgccaaucccaacgcgaaccccaaugcuaacccuaaugccaacccgaaugccaaccccaaugcuaacccuaaugccaaccccaaugcuaacccuaauaagaacaaucaagggaacggacagggccacaauaugcccaacgacccuaacagaaauguggaugagaacgccaaugcgaacagcgccgucaaaaauaacaauaacgaggaacccuccgacaagcauaucaaagaauaccucaauaagauucagaacucucugagcaccgagugguccccgugcucugugacaugugggaauggaauccagguucggauuaagccuggcagcgcuaacaaacccaaggaugaacuugacuaugccaaugauaucgagaaaaagauuugcaaaauggagaaguguuccucuguguucaacgucgugaauagcuccaucgggcugaucaugguucucagcuuucuguuccuuaac

SEQ ID NO: 2375 - RNA, 285 nt, Artificial Sequence
  derived and/or modified CDS sequence (opt5) from Pf(3D7)__XP_001351122.1__CSP(98-192)
gccgacggcaaccccgauccuaaugcuaacccgaauguggaccccaacgccaauccuaacgucgaucccaaugcgaacccuaauguugaccccaacgcuaauccuaacgccaauccgaacgccaaucccaacgcuaacccuaaugccaaccccaaugcuaacccuaaugccaaccccaaugcgaacccgaaugccaacccuaaugcuaaccccaaugccaacccuaaugcuaaccccaacgccaaucccaacgcgaauccuaacgccaauccgaacgcuaauccc

SEQ ID NO: 2376 - RNA, 831 nt, Artificial Sequence
  derived and/or modified CDS sequence (opt5) from Pf(3D7)__XP_001351122.1__CSP(98-374)
gccgacggcaaccccgauccuaaugcuaacccgaauguggaccccaacgccaauccuaacgucgaucccaaugcgaacccuaauguugaccccaacgcuaauccuaacgccaauccgaacgccaaucccaacgcuaacccuaaugccaaccccaaugcuaacccuaaugccaaccccaaugcgaacccgaaugccaacccuaaugcuaaccccaaugccaacccuaaugcuaaccccaacgccaaucccaacgcgaauccuaacgccaauccgaacgcuaaucccaacgccaauccuaacguggaucccaaugcuaacccuaaugccaaccccaaugccaacccgaacgcuaauccuaacgcgaaucccaacgccaauccuaacgcuaaucccaacgccaauccuaacgccaaucccaacgcuaauccgaacgccaauccuaacgcgaaccccaaugcuaaccccaaugccaacccuaaugccaacccgaaugcuaaccccaaugccaacccuaaugcuaaccccaauaagaacaaucaggggaacggacaaggccacaauaugccuaacgaccccaacagaaauguggaugagaacgccaaugcgaacagcgccgucaaaaauaacaauaacgaggaaccuuccgacaagcauaucaaagaauaccugaauaagauucagaacucucucagcaccgaguggucccccugcucugugacaugugggaauggaauccagguucggauuaaaccgggcagcgcuaacaagccuaaggaugaacuggacuaugccaaugauaucgagaaaaagauuugcaaaauggagaagugu

SEQ ID NO: 2377 - RNA, 900 nt, Artificial Sequence
  derived and/or modified CDS sequence (opt5) from Pf(3D7)__XP_001351122.1__CSP(98-397)
gccgacggcaaccccgauccuaaugcuaacccgaauguggaccccaacgccaauccuaacgucgaucccaaugcgaacccuaauguugaccccaacgcuaauccuaacgccaauccgaacgccaaucccaacgcuaacccuaaugccaaccccaaugcuaacccuaaugccaaccccaaugcgaacccgaaugccaacccuaaugcuaaccccaaugccaacccuaaugcuaaccccaacgccaaucccaacgcgaauccuaacgccaauccgaacgcuaaucccaacgccaauccuaacguggaucccaaugcuaacccuaaugccaaccccaaugccaacccgaacgcuaauccuaacgcgaaucccaacgccaauccuaacgcuaaucccaacgccaauccuaacgccaaucccaacgcuaauccgaacgccaauccuaacgcgaaccccaaugcuaaccccaaugccaacccuaaugccaacccgaaugcuaaccccaaugccaacccuaaugcuaaccccaauaagaacaaucaggggaacggacaaggccacaauaugccuaacgaccccaacagaaauguggaugagaacgccaaugcgaacagcgccgucaaaaauaacaauaacgaggaaccuuccgacaagcauaucaaagaauaccugaauaagauucagaacucucucagcaccgaguggucccccugcucugugacaugugggaauggaauccagguucggauuaaaccgggcagcgcuaacaagccuaaggaugaacuggacuaugccaaugauaucgagaaaaagauuugcaaaauggagaaguguuccucuguguucaacgucgugaauagcuccaucgggcuuaucaugguucugagcuuucucuuccugaac

SEQ ID NO: 2378 - RNA, 537 nt, Artificial Sequence
  derived and/or modified CDS sequence (opt5) from Pf(3D7)__XP_001351122.1__CSP(199-377)
gaccccaacgccaauccuaacgcuaauccgaacgccaaucccaacgcgaauccuaacgcuaaucccaacgccaauccuaacgccaaucccaacgcuaauccuaacgccaacccgaaugcuaaccccaaugccaacccuaaugcgaaccccaaugccaacccuaaugcuaaccccaaugccaacccgaaugcuaacccuaaugccaaccccaacgcgaauccuaacaagaauaaccagggcaaugggcagggacacaacaugcccaaugaucccaacagaaauguggacgagaacgccaaugcuaacagcgccgucaaaaauaacaauaacgaggaaccuuccgauaagcauaucaaagaauaccugaacaagauucaaaauucucucagcaccgagugguccccgugcucuguuacauguggcaacgggauccaggugcggauuaaacccggaagcgcuaauaagccuaaggacgaacuggauuaugccaacgacaucgagaaaaagauuugcaaaauggagaaguguuccucugug

SEQ ID NO: 2379 - RNA, 567 nt, Artificial Sequence
  derived and/or modified CDS sequence (opt5) from Pf(3D7)__XP_001351122.1__CSP(199-387)
gaccccaacgccaauccuaacgcuaauccgaacgccaaucccaacgcgaauccuaacgcuaaucccaacgccaauccuaacgccaaucccaacgcuaauccuaacgccaacccgaaugcuaaccccaaugccaacccuaaugcgaaccccaaugccaacccuaaugcuaaccccaaugccaacccgaaugcuaacccuaaugccaaccccaacgcgaauccuaacaagaauaaccagggcaaugggcagggacacaacaugcccaaugaucccaacagaaauguggacgagaacgccaaugcuaacagcgccgucaaaaauaacaauaacgaggaaccuuccgauaagcauaucaaagaauaccugaacaagauucaaaauucucucagcaccgagugguccccgugcucuguuacauguggcaacgggauccaggugcggauuaaacccggaagcgcuaauaagccuaaggacgaacuggauuaugccaacgacaucgagaaaaagauuugcaaaauggagaaguguuccucuguguucaaugucgugaacagcuccaucggccuu

SEQ ID NO: 2380 - RNA, 57 nt, Artificial Sequence; identical to SEQ ID NO: 2300
  derived and/or modified CDS sequence (opt5) from Pf(3D7)__XP_001351122.1__CSP(309-327)__RIII region, Th2R

SEQ ID NO: 2381 - RNA, 63 nt, Artificial Sequence; identical to SEQ ID NO: 2301
  derived and/or modified CDS sequence (opt5) from Pf(3D7)__XP_001351122.1__CSP(346-366)__Th3R

SEQ ID NO: 2382 - RNA, 93 nt, Artificial Sequence
  derived and/or modified CDS sequence (opt5) from Pf(3D7)__XP_001351122.1__CSP(346-376)__Th3R_CS.T3
aucaagcccggcagcgccaacaaaccuaaggacgagcuggauuacgcuaaugacauugagaaaaagaucugcaaaauggaaaaguguuccucu

SEQ ID NO: 2383 - RNA, 54 nt, Artificial Sequence
  derived and/or modified CDS sequence (opt5) from Pf(3D7)__XP_001351122.1__CSP(1-18)__signal peptide
augaugagaaagcuggccauccucagcguguccucuuuccuguuugucgaggcu

SEQ ID NO: 2384 - RNA, 1074 nt, Artificial Sequence
  derived and/or modified CDS sequence (opt5) from Pf(3D7)__XP_001351122.1__CSP(27-384)__EcCSP fragment
ggcagcuccucuaacaccagagugcugaaugagcucaacuacgacaaugccgggacaaaccuguauaaugaacuugagaugaacuacuauggaaagcaggaaaauugguacagccugaaaaagaacucccggucucucggcgagaaugaugacgggaacaaugaagauaacgagaaacugcgcaagcccaaacacaagaaacuuaaacaaccugcugacggaaauccggaucccaacgccaauccuaacgucgaccccaacgcgaauccuaacguugaucccaaugcuaacccuaauguggacccgaacgccaaucccaacgccaauccuaacgcuaaucccaacgccaauccuaacgcuaaucccaacgccaacccgaaugcgaacccuaaugccaaccccaaugcuaacccuaaugccaaccccaaugcuaaccccaaugccaacccuaaugcgaacccgaaugccaaccccaacgcuaauccuaacgccaaucccaacgcuaauccuaacguggaucccaaugccaacccgaaugccaacccuaaugcuaaccccaaugcgaacccuaaugccaaccccaacgcuaauccuaacgccaaucccaacgccaauccgaacgcuaauccuaacgccaaucccaacgcgaaucccaacgcuaauccuaacgccaauccgaacgccaaucccaacgcuaacccuaaugccaaccccaaugcuaacccuaaugccaaccccaauaagaacaaucagggcaacgggcagggacauaauaugccuaacgaccccaauagaaacgucgaugagaaugcgaacgccaacagcgcugugaaaaauaacaauaacgaggaaccguccgacaagcacaucaaagaauaucugaauaagauucagaacucucucagcacggagugguccccuugcagcguuaccuguggcaauggcauccaagugcggauuaagcccgggucugccaacaaaccuaaggaugagcuggacuacgcuaaugacaucgaaaagaagauuugcaaaauggagaaguguuccagcgucuucaacgugguuaauucuucc

SEQ ID NO: 2385 - RNA, 18 nt, Artificial Sequence
  derived and/or modified CDS sequence (opt5) from Pf(3D7)__XP_001351122.1__CSP(69-74)__3A1 antibody binding site
agcagaucccugggcgag

SEQ ID NO: 2386 - RNA, 930 nt, Artificial Sequence
  derived and/or modified CDS sequence (opt5) from Pf(3D7)__XP_001351122.1__CSP(74-383)__PpCSP fragment
gagaacgacgauggcaauaacgaagacaaugagaagcugagaaaacccaagcacaaaaagcucaaacagccugccgaugggaacccggaccccaaugcuaacccuaauguggaucccaacgccaauccuaacgucgaccccaaugcgaacccuaauguugauccgaacgcuaaucccaacgccaacccuaaugccaaccccaaugcuaacccuaaugccaaccccaaugcuaacccgaaugccaacccuaaugcgaaccccaaugccaacccuaaugcuaaccccaacgccaaucccaacgcuaauccuaacgccaauccgaacgcgaaucccaacgccaauccuaacgcuaaucccaacgccaauccuaacguggaccccaaugcuaacccgaacgccaauccuaacgccaaucccaacgcuaauccuaacgcgaaucccaacgccaauccuaacgcuaaucccaacgccaauccgaacgccaauccuaacgcuaaccccaaugccaaccccaaugcgaacccuaaugcuaacccgaaugccaaccccaaugccaacccuaaugcuaaccccaaugccaacccuaaugcuaaccccaauaagaacaaccaaggaaauggccaggggcauaacaugccuaaugaucccaaccggaauguggacgaaaacgccaaugcgaacagcgccgucaagaauaacaauaacgaggaaccguccgauaaacacaucaaggaguaccugaauaaaauucagaacucucuuagcaccgagugguccccuugcucugugacauguggaaauggcauccagguucgcauuaagcccgggagcgcuaacaaaccuaaggacgaacuggauuaugccaacgacaucgagaagaaaauuugcaagauggaaaaauguuccucuguguucaaugucgugaacagc

SEQ ID NO: 2387 - RNA, 60 nt, Artificial Sequence; identical to SEQ ID NO: 2307
  derived and/or modified CDS sequence (opt5) from Pf(3D7)__XP_001351122.1__CSP(75-94)__2C3 antibody binding site

SEQ ID NO: 2388 - RNA, 15 nt, Artificial Sequence
  derived and/or modified CDS sequence (opt5) from Pf(3D7)__XP_001351122.1__CSP(93-97)__RI region
aagcugaaacagccc

SEQ ID NO: 2389 - RNA, 18 nt, Artificial Sequence
  derived and/or modified CDS sequence (opt5) from Pf(3D7)__XP_001351122.1__CSP(95-100)__3H10/3B4 antibody binding site
aagcagcccgccgacggc

SEQ ID NO: 2390 - RNA, 525 nt, Artificial Sequence
  derived and/or modified CDS sequence (opt5) from Pf(3D7)__XP_001351122.1__CSP(98-272)__NANP repeat region
gccgacggcaaccccgauccuaaugcuaacccgaauguggaccccaacgccaauccuaacgucgaucccaaugcgaacccuaauguugaccccaacgcuaauccuaacgccaauccgaacgccaaucccaacgcuaacccuaaugccaaccccaaugcuaacccuaaugccaaccccaaugcgaacccgaaugccaacccuaaugcuaaccccaaugccaacccuaaugcuaaccccaacgccaaucccaacgcgaauccuaacgccaauccgaacgcuaaucccaacgccaauccuaacguggaucccaaugcuaacccuaaugccaaccccaaugccaacccgaacgcuaauccuaacgcgaaucccaacgccaauccuaacgcuaaucccaacgccaauccuaacgccaaucccaacgcuaauccgaacgccaauccuaacgcgaaccccaaugcuaaccccaaugccaacccuaaugccaacccgaaugcuaaccccaaugccaacccuaaugcuaacccc

SEQ ID NO: 2391 - RNA, 504 nt, Artificial Sequence
  derived and/or modified CDS sequence (opt5) from Pf(3D7)__XP_001351122.1__CSP(105-272)__central repeat region
aacgccaaucccaacguggacccuaaugcuaacccgaaugucgaucccaacgccaauccuaacguugaccccaaugcgaacccuaaugcuaaccccaaugccaacccuaaugccaacccgaacgcuaaucccaacgccaauccuaacgcuaaucccaacgccaauccuaacgcgaaucccaacgccaauccgaacgcuaauccuaacgccaaucccaacgcuaacccuaaugccaaccccaaugcgaaccccaaugccaacccuaaugcuaacccgaauguggaucccaacgccaauccuaacgcuaaucccaacgccaauccuaacgccaaccccaaugcuaacccgaaugcgaacccuaaugccaaccccaaugcuaacccuaaugccaaccccaaugccaacccuaaugcuaaccccaaugccaacccgaacgcgaauccuaacgcuaaucccaacgccaaucccaacgccaauccuaacgcuaauccgaacgccaauccc

SEQ ID NO: 2392 - RNA, 567 nt, Artificial Sequence
  derived and/or modified CDS sequence (opt5) from Pf(3D7)__XP_001351122.1__CSP(207-395)__RTS,S fragment
aaccccaaugccaacccuaaugcuaacccgaaugccaaccccaaugcgaacccuaaugcuaaccccaaugccaacccuaaugccaaccccaaugcuaacccuaacgccaauccgaacgcuaaucccaacgccaauccuaacgcgaaucccaacgccaauccuaacgcuaaucccaacgccaauccgaacgcuaauccuaacaagaacaaucagggcaacgggcagggacacaauaugcccaacgacccuaauagaaacguggaugagaaugccaacgcgaauagcgccgucaaaaacaauaacaaugaggaacccuccgacaagcauaucaaagaauaccugaacaagauucaaaauucucucagcaccgaguggucccccugcucuguuacauguggcaacgggauccaggugcggauuaaaccuggaagcgcuaacaagccgaaggaugaacuggacuaugccaaugauaucgagaaaaagauuugcaaaauggagaaguguuccucuguguucaacgucgugaauagcuccaucggccuuaucaugguucugagcuuucucuuc

SEQ ID NO: 2393 - RNA, 54 nt, Artificial Sequence; identical to SEQ ID NO: 2313
  derived and/or modified CDS sequence (opt5) from Pf(3D7)__XP_001351122.1__CSP(310-327)__RIII region, Th2R

SEQ ID NO: 2394 - RNA, 195 nt, Artificial Sequence
  derived and/or modified CDS sequence (opt5) from Pf(3D7)__XP_001351122.1__CSP(310-374)__RIII region_TSR (RII+)
gagcccagcgacaagcacaucaaagaauaccugaacaagauucaaaauucccucucuaccgaguggagcccuugcuccgugacauguggcaacgggauccaggucagaauuaaaccgggaucugccaauaagcccaaagaugaacuggacuaugcuaacgauaucgagaagaagauuugcaaaauggaaaagugu

SEQ ID NO: 2395 - RNA, 171 nt, Artificial Sequence
  derived and/or modified CDS sequence (opt5) from Pf(3D7)__XP_001351122.1__CSP(319-375)__TSR region v3
uaccugaacaagauccagaauagccucuccaccgaguggucucccugcagcgugacauguggcaacgggauucaagucagaaucaaaccuggauccgccaauaagccgaaagacgaacuggauuaugcuaacgacauugagaagaaaaucugcaagauggaaaaguguucu

SEQ ID NO: 2396 - RNA, 147 nt, Artificial Sequence
  derived and/or modified CDS sequence (opt5) from Pf(3D7)__XP_001351122.1__CSP(326-374)__TSR region v1
agccuguccaccgaguggucucccugcagcgugacauguggcaacgggauccaggucagaauuaagccuggauccgccaauaaaccgaaggacgaacucgauuacgcuaacgacaucgagaaaaagauuugcaaaauggaaaagugu

SEQ ID NO: 2397 - RNA, 141 nt, Artificial Sequence
  derived and/or modified CDS sequence (opt5) from Pf(3D7)__XP_001351122.1__CSP(328-374)__TSR region v2
agcaccgaguggucccccugcucugugacauguggcaacgggauccaggucagaauuaagccuggaagcgccaauaaaccgaaggacgaacuggauuacgcuaacgacaucgagaaaaagauuugcaaaauggaaaagugu

SEQ ID NO: 2398 - RNA, 54 nt, Artificial Sequence; identical to SEQ ID NO: 2318
  derived and/or modified CDS sequence (opt5) from Pf(3D7)__XP_001351122.1__CSP(330-347)__RII+ region v1

SEQ ID NO: 2399 - RNA, 66 nt, Artificial Sequence; identical to SEQ ID NO: 2319
  derived and/or modified CDS sequence (opt5) from Pf(3D7)__XP_001351122.1__CSP(330-351)__RII+ region v2

SEQ ID NO: 2400 - RNA, 69 nt, Artificial Sequence
  derived and/or modified CDS sequence (opt5) from Pf(3D7)__XP_001351122.1__CSP(375-397)__GPI anchor signal
agcuccguguucaacgucguuaauucuagcaucggccugauuauggugcucuccuuucuguuccuuaac

SEQ ID NO: 2401 - RNA, 1194 nt, Artificial Sequence
  derived and/or modified CDS sequence (opt6) from Pf(3D7)__XP_001351122.1__CSP
augaugagaaaacucgcaauccuaucaguaagcucauucuuauucguagaagcacucuuccaagaauaccaaugcuacggaucaucaucaaacacacgcguacucaacgaacuaaacuacgauaacgcaggaacaaaccuauauaacgaacucgaaaugaacuacuacggaaaacaagaaaacugguacuccuuaaaaaaaaacagcagaagcuuaggagaaaacgacgacggcaauaacgaagacaacgaaaaacugagaaaacccaaacauaaaaaauuaaaacaaccagcagacggaaacccagacccaaacgcaaacccaaauguagaccccaacgcaaacccaaacguagacccaaacgcaaacccuaacguagacccaaacgcaaauccaaacgcgaacccaaacgcaaaccccaacgcaaacccaaacgcaaaccccaaugcaaacccaaaugccaacccaaacgcaaacccaaacgcaaacccaaacgcaaacccaaacgcaaacccaaacgcaaacccaaaugcaaauccaaacgcaaauccaaacgcaaauccaaacgcuaaccccaacgcaaacccaaacguagacccaaacgcaaacccuaacgcaaacccaaacgcaaacccgaacgccaaccccaacgcgaacccaaacgcaaacccaaacgcaaacccaaacgcaaacccaaacgcaaaccccaacgcaaauccaaaugcaaacccaaaugccaacccaaacgccaacccaaacgcaaaccccaaugcaaacccaaacgcaaacccaaacgcaaacccaaacgccaacccaaauaaaaacaaccaaggaaauggacaaggacacaacaugccaaacgacccaaacagaaacguagacgaaaacgcaaacgcaaacucagccguaaaaaacaacaacaacgaagaacccucagacaaacacaucaaagaauaccucaacaaaauacaaaacucacuaucaacagaauggucaccaugcucaguaacaugcggcaacggaauacaaguaagaauaaaaccaggcucagccaauaaaccaaaagacgaauuagacuacgccaacgacauagaaaaaaaaaucugcaaaauggaaaaaugcucauccguauucaacgucgucaauucaucaaucggauuaaucaugguacucucauucuuauuccugaacuaa

SEQ ID NO: 2402 - RNA, 1122 nt, Artificial Sequence
  derived and/or modified CDS sequence (opt6) from Pf(3D7)__XP_001351122.1__CSP(1-374)__CSP-delGPI
augaugagaaaacuagcaauccuaucaguaagcucauuccuauucguagaagcucuauuccaagaauaccaaugcuauggcucauccucaaacacacgaguacucaaugaacuaaauuacgacaacgccggcaccaaccuauacaacgaacuagaaaugaacuauuauggaaaacaagaaaacugguacucacuaaaaaaaaacagcagaucccuaggagaaaacgacgacggaaauaacgaagacaacgaaaaacuaagaaaaccuaaacacaaaaaauuaaaacaaccagcagacggaaacccagauccaaacgcaaacccaaacguagacccaaaugcaaacccaaacgucgacccaaacgcaaacccaaacguagacccaaacgcaaacccaaacgccaauccaaacgcaaacccaaaugcaaauccaaacgcaaacccaaaugcaaacccaaacgcaaacccaaaugcaaacccaaacgcaaacccaaaugcaaacccaaacgcaaacccaaacgcaaauccaaacgcaaauccaaacgcaaacccaaacgcaaacccaaaugcaaacccaaacgcaaacccaaaugucgacccgaacgcaaauccaaacgcaaacccaaacgcaaacccaaacgcaaacccaaacgcuaacccaaacgcaaauccaaacgccaacccgaacgcaaauccaaacgccaacccaaacgcaaacccaaacgcaaacccaaaugcaaaccccaacgcaaacccaaacgcaaacccaaacgcaaacccaaacgcaaauccaaacgcaaacccaaacgcaaacccaaacaaaaauaaccaaggaaacggacaaggacacaacaugccaaacgacccuaaccgaaacguagacgaaaacgcaaaugcaaacagcgcagucaaaaacaacaacaacgaagaaccaucagacaaacauauaaaagaauacuuaaacaaaauacaaaauucauuaucaacagaaugguccccaugcucagugacaugcggcaacggaauccaaguaagaauaaaaccaggaucagccaauaaaccaaaagacgaauuagacuacgccaaugacauagaaaaaaaaauauguaaaauggaaaaaugu

SEQ ID NO: 2403 - RNA, 975 nt, Artificial Sequence
  derived and/or modified CDS sequence (opt6) from Pf(3D7)__XP_001351122.1__CSP(1-325)__CSP-delTSR(v2)-delGPI
augaugagaaaacuagcaauauuaagcguauccucauuccuauucguagaagcacuauuccaagaauaccaauguuacggcucaucaucaaacacaagaguacuaaacgaacuaaacuacgacaaugcaggaacaaaccuauacaaugaacucgaaaugaauuacuacggaaaacaagaaaacugguacucauuaaaaaaaaacagcagaagccuaggagaaaacgacgacggaaacaacgaagacaacgaaaaacuacgcaaaccuaaacauaaaaaauuaaaacaaccagccgacggaaacccagaccccaacgcaaacccaaacguagauccaaacgcaaacccaaauguagaccccaacgcaaauccaaacguagacccaaacgcaaacccaaacgcaaauccaaacgcaaacccaaacgcaaacccaaacgcaaacccaaacgcaaacccaaacgcaaacccaaacgcaaaccccaacgcaaacccaaacgcaaacccaaacgcaaacccaaacgcaaacccaaacgcaaacccaaacgcaaacccaaacgcaaacccaaacgcaaacccaaacgccaauccaaacgucgacccaaacgcaaacccaaacgcaaacccaaacgcaaaccccaacgccaacccaaacgcaaacccaaacgcaaauccaaacgcaaaccccaacgcaaacccaaacgcaaacccaaacgcaaacccaaacgcaaauccaaacgcaaaccccaacgcaaacccaaacgcaaacccaaacgcaaaccccaacgcgaauccaaacgcaaacccgaacgcaaacccaaacaaaaacaaccaagguaacggacaaggacacaacaugcccaacgacccaaaccgcaacgucgacgaaaacgcaaacgcaaauuccgcaguaaaaaauaauaacaacgaagaacccucagacaaacacauaaaagaauaucuaaacaaaauccaaaac

SEQ ID NO: 2404 - RNA, 1137 nt, Artificial Sequence
  derived and/or modified CDS sequence (opt6) from Pf(3D7)__XP_001351122.1__CSP(19-397)__CSP-delSP
cuauuccaagaauaccaaugcuaugguucaagcucaaauacccguguccucaacgaacuaaacuacgacaacgccggaacaaaccuauacaaugaacuagaaaugaauuacuacggaaaacaagaaaacugguacucccuaaaaaaaaacucaagaucauuaggugagaacgacgacggaaacaacgaagauaacgaaaaacuaagaaaaccaaaacacaaaaaauuaaaacaacccgcagacggaaacccagacccaaaugcaaacccaaacguagacccaaacgcaaacccaaauguagacccaaacgccaacccaaacguagaccccaaugcaaacccaaacgcaaauccaaacgcaaauccaaacgcaaacccaaacgcaaauccaaacgcaaacccaaacgcaaaccccaacgcuaauccuaacgcaaauccaaacgcaaacccaaacgcaaacccaaacgccaacccaaaugcaaacccaaacgcaaacccaaacgcaaaccccaacgcaaacccaaacgcaaacccaaauguagacccaaacgcaaacccaaaugcaaacccaaacgcaaacccaaacgcaaacccaaacgccaaccccaacgcaaacccaaacgcaaacccaaaugcaaacccaaacgcaaaccccaacgcaaaccccaacgcaaacccaaacgcaaacccaaacgcaaaccccaacgcaaacccaaacgcaaaccccaaugcaaacccaaacgcuaacccaaaugcaaacccaaacaaaaauaaccaaggaaacggccaaggccacaacaugccaaacgacccaaaccgaaacguagacgaaaacgccaacgccaacucagcaguaaaaaacaacaacaacgaagaaccauccgacaaacacauaaaagaauaccuaaacaaaauacaaaacucacuaucaaccgaauggucacccugcucaguaacaugcggaaacggaauacaagucagaauaaaaccaggaucugccaacaaaccaaaagacgaauuagacuacgccaacgacauagaaaaaaaaaucugcaaaauggaaaaaugcucaucagucuuuaacguagucaacucaucaauaggacucauaaugguacucucauucuuauuccuaaac

SEQ ID NO: 2405 - RNA, 1068 nt, Artificial Sequence
  derived and/or modified CDS sequence (opt6) from Pf(3D7)__XP_001351122.1__CSP(19-374)__CSP-delSP-delGPI
cuauuccaagaauaccaaugcuacggaucaagcucaaacacaagaguacucaaugaauuaaacuaugacaaugcaggaaccaaccuauacaacgaacuagaaaugaacuacuacggaaaacaagaaaacugguacucacuaaaaaaaaacagcagaagcuuaggagaaaacgaugacggaaacaacgaagacaacgaaaaacuaagaaaaccaaaacacaaaaaacuaaaacaaccagcagacggaaauccagacccaaacgcaaacccaaacguagacccaaacgcaaacccaaauguagacccaaacgcaaauccaaacguagacccaaacgcaaacccaaacgcaaacccgaacgcaaauccaaacgcaaacccaaacgcaaacccgaacgcaaacccaaacgcaaacccaaacgcaaacccaaacgcaaacccaaacgcaaacccaaacgcaaacccaaacgcaaacccuaacgcaaacccaaacgcaaacccaaacgcaaacccaaacgcaaacccaaaugcaaacccaaacguagacccaaacgcaaauccaaacgcaaauccaaacgcaaacccaaacgcaaacccaaacgcaaacccaaacgcaaauccaaacgcaaaccccaacgcaaacccaaacgcaaaccccaacgcgaacccaaacgcaaacccgaacgcaaauccaaacgcaaacccaaacgcaaauccaaacgcaaacccaaacgcaaacccaaacgcgaacccaaacgcaaacccaaacaaaaacaaccaaggaaacggacaaggacacaacaugccaaacgaccccaaccgcaacguugaugaaaacgcaaacgcaaacagcgccguaaaaaacaauaacaacgaagaaccaucagacaaacacauaaaagaauaucuaaauaaaauccaaaacucacuaucaacagaauggucacccugcagcguaaccugcggcaacggcauacaaguaagaauaaaaccaggaucagccaacaaaccgaaagacgaauuagacuacgcaaacgacauagaaaaaaaaauaugcaaaauggaaaaaugc

SEQ ID NO: 2406 - RNA, 921 nt, Artificial Sequence
  derived and/or modified CDS sequence (opt6) from Pf(3D7)__XP_001351122.1__CSP(19-325)__CSP-delSP-delTSR(v2)-delGPI
cuauuccaagaauaccaaugcuacggcucaucuucaaacacaagaguacuaaacgaacuaaacuacgacaacgcaggaacaaaccuauacaaugaacucgaaaugaauuacuauggcaaacaagaaaacugguacucacuaaaaaaaaacucccgaucacuaggcgaaaacgacgacggaaacaacgaagacaacgaaaaacuacgcaaaccaaaacacaaaaaacucaaacaaccagcagacggaaacccagacccaaacgcaaacccaaacguagacccaaacgcaaacccaaacguagacccaaacgcaaacccuaacguagacccaaacgcaaacccaaacgcaaacccaaacgcaaacccaaacgcaaacccaaacgcaaacccaaacgcaaacccaaaugcaaacccaaacgcaaacccaaacgcaaacccaaacgcaaacccaaacgccaacccaaacgcaaacccaaacgccaacccaaacgcaaacccaaacgcaaaccccaacgcaaacccaaacgcaaacccaaacguagacccaaacgcaaacccaaacgccaacccaaacgcaaacccaaaugcaaacccaaacgcaaacccaaacgcaaaccccaacgccaacccaaacgcaaacccaaacgcaaacccaaacgcaaacccaaaugcaaacccaaacgcaaacccaaacgcaaacccaaacgcaaacccaaaugcaaacccaaacgcaaacccaaacgccaacccaaacgcaaacccaaacaaaaacaaccaaggaaacggacaaggacacaacaugccaaacgaccccaaccgcaacguagacgaaaacgccaacgccaacuccgcaguaaaaaacaacaacaacgaagaaccaucagacaaacacauaaaagaauaccuaaacaaaauacaaaac

SEQ ID NO: 2407 - RNA, 351 nt, Artificial Sequence
  derived and/or modified CDS sequence (opt6) from Pf(3D7)__XP_001351122.1__CSP(19-135)
cuauuccaagaauaccaaugcuacggaucaagcucaaacacaagaguacuaaacgaacuaaacuacgacaacgcaggaacaaaccuauacaacgaacuagaaaugaacuacuacggaaaacaagaaaacugguacucacuaaaaaaaaacagcagaagccuaggagaaaacgacgacggaaacaacgaagacaacgaaaaacuaagaaaaccaaaacacaaaaaacuaaaacaaccagcagacggaaacccagacccaaacgcaaacccaaacguagacccaaacgcaaacccaaacguagacccaaacgcaaacccaaacguagacccaaacgcaaacccaaacgcaaac

SEQ ID NO: 2408 - RNA, 525 nt, Artificial Sequence
  derived and/or modified CDS sequence (opt6) from Pf(3D7)__XP_001351122.1__CSP(19-193)
cuauuccaagaauaccaaugcuacggaucaagcucaaacacaagaguacucaacgaacuaaacuacgacaacgcaggaacaaaccuauacaacgaacuagaaaugaacuacuacggaaaacaagaaaacugguacucacuaaaaaaaaacucaagaagccuaggagaaaacgacgacggaaacaacgaagacaacgaaaaacuaagaaaaccaaaacacaaaaaacuaaaacaaccagcagacggaaacccagacccaaacgcaaacccaaacguagacccaaacgcaaacccaaacguagacccaaacgcaaacccaaacguagacccaaacgcaaacccaaacgcaaacccaaacgcaaacccaaacgcaaacccaaacgcaaacccaaacgcaaacccaaacgcaaacccaaacgcaaacccaaacgcaaacccaaacgcaaacccaaacgcaaacccaaacgcaaacccaaacgcaaacccaaacgcaaacccaaacgcaaacccaaacgcaaacccaaau

SEQ ID NO: 2409 - RNA, 762 nt, Artificial Sequence
  derived and/or modified CDS sequence (opt6) from Pf(3D7)__XP_001351122.1__CSP(19-272)
cucuuccaagaauaccaauguuacggaucaucaucaaacacacgcguacuaaacgaacuaaacuacgacaacgcaggaacaaaucucuacaacgaacuagaaaugaacuacuacggaaaacaagaaaauugguacucccuaaaaaaaaacagccgaagccuaggugaaaacgacgacggaaacaacgaagacaacgaaaaacuaagaaaaccaaaacacaaaaaauuaaaacaaccagcagacggaaacccagacccaaacgcaaacccaaacguagacccaaacgcaaacccaaacguagacccaaacgcaaacccaaacguagacccaaacgcaaacccaaacgcaaacccaaacgcaaacccaaacgcaaacccaaacgcaaacccaaacgcaaacccaaacgcaaacccaaacgcaaacccaaacgcaaacccaaacgcaaacccaaacgcaaacccaaacgcaaacccaaacgcaaaucccaacgccaacccaaacgcaaacccaaacgcaaaucccaacgcaaacccaaacguagacccaaacgcaaacccaaacgcaaacccaaacgcaaacccaaacgcaaacccaaacgcaaacccaaacgcaaacccaaacgcaaacccaaaugcaaacccaaacgcaaauccaaacgcaaacccaaacgccaacccaaacgcaaauccaaacgcaaacccaaacgcaaacccaaacgcaaauccaaacgcaaacccaaacgcaaacccaaacgcaaaccca

SEQ ID NO: 2410 - RNA, 1098 nt, Artificial Sequence
  derived and/or modified CDS sequence (opt6) from Pf(3D7)__XP_001351122.1__CSP(19-384)
cucuuccaagaauaucaaugcuacggcucauccucaaacacaagagucuuaaacgaacucaacuacgacaacgcaggaacaaaucuauacaacgaacuagaaaugaacuauuacggaaaacaagaaaauugguacucauuaaaaaaaaauuccagaucacuaggugaaaacgacgacggaaacaacgaagacaacgaaaaacuacgaaaaccaaaacacaaaaaacuaaaacaacccgcagacggaaacccagaucccaacgcaaacccaaacguagacccaaacgcaaacccaaacguagacccaaacgcaaacccaaacguagacccaaacgcaaacccaaaugcaaacccgaacgcaaauccaaacgcaaacccaaacgcaaacccaaacgcaaacccaaacgcaaacccuaacgcuaacccaaacgcaaacccaaacgcaaacccaaacgcaaauccaaacgcaaaccccaacgcaaacccaaacgcaaacccaaacgcaaauccuaacgcaaacccaaacgcaaacccaaacguagacccaaacgcaaacccaaacgcaaacccaaacgcaaacccaaaugccaacccaaacgcaaauccaaacgcaaacccaaacgcaaacccaaaugcaaacccaaacgccaaucccaacgcaaacccaaacgcaaacccaaacgccaacccaaacgcaaacccaaacgcaaauccaaacgcaaacccaaacgccaacccaaacgccaauccaaacgcaaacccaaauaaaaacaaccaaggaaacggacaaggacacaacaugccaaaugaccccaacagaaacgucgacgaaaaugcaaacgcaaacagcgcaguaaaaaacaacaacaaugaagaacccucagauaaacacauaaaagaauaccucaacaaaauacaaaacucacucuccacagaaugguccccaugcucaguaacaugcggaaacggaauccaaguaagaauaaaaccaggaucagcaaacaaaccaaaagacgaauuagacuacgcaaacgacauagaaaaaaaaauaugcaaaauggaaaaauguagcuccguauucaacguaguuaacucauca

SEQ ID NO: 2411 - RNA, 948 nt, Artificial Sequence
  derived and/or modified CDS sequence (opt6) from Pf(3D7)__XP_001351122.1__CSP(82-397)
gacaacgaaaaacuacgaaaacccaaacacaaaaaauuaaaacaaccagcagacggaaacccagacccaaacgccaauccaaauguagacccaaacgcaaacccaaacguagacccaaacgcaaacccaaacguagacccaaacgcaaaccccaacgcaaacccaaacgcaaacccaaacgcaaacccaaacgcaaacccaaacgccaauccaaacgcaaacccaaacgccaacccaaaugcaaacccaaacgcaaacccaaacgcaaauccaaacgcaaacccaaacgcaaacccaaaugcuaacccaaacgcaaacccaaacgcaaacccaaacgcaaaccccaauguagacccuaacgcaaacccaaacgcaaauccaaacgcaaacccaaacgcaaacccaaacgccaacccaaacgcaaacccaaacgcaaacccaaacgcaaacccaaacgcaaauccaaacgcaaacccaaacgcaaacccaaacgcaaaccccaaugcaaacccaaacgcaaaccccaacgcaaacccaaacgcaaacccaaacgcaaacccaaaugcaaacccaaacaaaaacaaccaaggaaacggacaaggacacaacaugccaaacgacccaaaccgcaacguagacgaaaacgccaacgccaacucagcaguaaaaaacaacaacaacgaagaaccaucagacaaacacauaaaagaauaccuaaacaaaauacaaaacucacuaucgacagaauggucaccaugcucaguaaccugcggaaacggcauacaaguacguauaaaaccaggaucagcaaacaaaccaaaagacgaacuagacuaugcaaacgacauagaaaaaaaaauaugcaaaauggaaaaaugcucaucaguauucaacguaguaaauagcucaauaggacuaauaaugguacucucauuucuauucuuaaac

SEQ ID NO: 2412 - RNA, 300 nt, Artificial Sequence
  derived and/or modified CDS sequence (opt6) from Pf(3D7)__XP_001351122.1__CSP(93-192)
aaacuaaaacaaccagcagacggaaacccagacccaaacgcaaacccaaacguagacccaaacgcaaacccaaacguagacccaaacgcaaacccaaacguagacccaaacgcaaacccaaacgcaaacccaaacgcaaacccaaacgcaaacccaaacgcaaacccaaacgcaaacccaaacgcaaacccaaacgcaaacccaaacgcaaacccaaacgcaaacccaaacgcaaacccaaacgcaaacccaaacgcaaacccaaacgcaaacccaaacgcaaacccaaacgcaaaccca

SEQ ID NO: 2413 - RNA, 540 nt, Artificial Sequence
  derived and/or modified CDS sequence (opt6) from Pf(3D7)__XP_001351122.1__CSP(93-272)__RI region_NANP repeat region
aaacuaaaacaacccgcagacggaaacccagacccaaacgcaaauccaaacguagacccaaacgcaaacccaaacguagacccaaacgcaaacccaaacguagacccaaacgcaaacccaaacgccaacccaaacgcaaacccaaacgcaaacccaaacgcaaacccaaacgcaaacccaaacgcaaacccaaacgcaaauccaaacgcaaacccaaacgccaacccaaacgcaaacccaaacgcaaacccaaacgcaaacccaaacgcaaacccaaacgcaaacccaaacgcaaacccaaacgcaaacccaaacguagacccaaacgcaaacccaaacgcaaacccaaacgcaaacccaaacgcaaacccaaacgcaaacccaaacgcaaacccaaacgccaacccaaacgcaaacccaaacgcaaacccaaacgcaaacccaaacgcaaacccaaacgcaaacccaaacgcaaacccaaacgcaaacccaaacgccaacccaaacgcaaacccaaacgcaaacccaaacgcaaaccca

SEQ ID NO: 2414 - RNA, 915 nt, Artificial Sequence
  derived and/or modified CDS sequence (opt6) from Pf(3D7)__XP_001351122.1__CSP(93-397)
aaauuaaaacaaccagcagacggaaacccagacccaaacgcaaacccaaacguagaccccaacgcaaacccaaacguagacccaaacgcaaauccaaacguagacccaaacgcaaaccccaaugcaaacccaaacgcaaacccaaaugcaaacccaaacgcaaacccaaacgcaaacccaaacgcaaacccaaacgcaaacccaaacgcaaacccaaacgcaaacccaaacgcaaacccaaacgcaaacccaaacgcaaacccaaacgcaaacccaaacgcaaacccaaacgcaaacccuaacgcgaacccaaacguagacccaaacgcaaauccaaacgccaacccaaacgcaaacccaaacgcaaacccaaacgcaaacccaaaugcaaacccaaacgcaaacccaaacgcaaacccaaacgcaaacccaaacgcaaacccaaacgcaaacccaaacgcaaauccaaacgcaaacccaaacgcaaauccaaacgcaaacccaaacgcaaacccaaacgcaaacccaaacgcaaacccaaacaaaaacaaccaaggcaauggacaaggacacaacaugccaaacgacccaaaccgaaacguagacgaaaacgccaacgccaauagcgcagucaaaaacaacaacaacgaagaaccaucagacaaacacauaaaagaauacuuaaacaaaauacaaaauucacuauccacagaauggucaccaugcuccgucaccugcggaaacggaauacaaguacgcauaaaaccgggaucagcaaacaaaccaaaagacgaauuagacuacgcaaacgacauagaaaaaaaaauaugcaaaauggaaaaaugcagcucaguauucaacguaguaaacagcucaauuggacuaauaaugguauuaucauuccuauucuuaaac

SEQ ID NO: 2415 - RNA, 285 nt, Artificial Sequence
  derived and/or modified CDS sequence (opt6) from Pf(3D7)__XP_001351122.1__CSP(98-192)
gcagacggaaacccagacccaaacgcaaacccaaacguagacccaaacgcaaacccaaacguagacccaaacgcaaacccaaacguagacccaaacgcaaacccaaacgcaaacccaaacgcaaacccaaacgcaaacccaaacgcaaacccaaacgcaaacccaaacgcaaacccaaacgcaaacccaaacgcaaacccaaacgcaaacccaaacgcaaacccaaacgcaaacccaaacgcaaacccaaacgcaaacccaaacgcaaacccaaacgcaaaccca

SEQ ID NO: 2416 - RNA, 831 nt, Artificial Sequence
  derived and/or modified CDS sequence (opt6) from Pf(3D7)__XP_001351122.1__CSP(98-374)
gcagacggaaauccagacccaaacgcaaacccaaacguagacccaaaugcaaacccaaacguagacccaaacgcaaacccaaacguagacccaaacgcaaacccaaaugcaaaccccaacgccaauccaaacgcaaacccaaacgcaaacccaaacgcaaacccaaaugcaaacccaaacgcaaacccaaacgcaaacccaaacgcaaacccaaacgcaaacccaaacgcaaacccaaacgcaaacccaaaugcaaacccaaaugcaaacccaaacgcaaacccaaacgcaaacccaaacguagacccaaacgcaaacccaaacgcaaaucccaacgcaaaccccaacgcaaacccaaacgcaaacccaaacgcaaacccaaacgcaaauccaaacgcaaacccaaacgcaaacccaaacgcaaauccaaacgcaaacccaaacgcaaacccaaacgcaaacccaaacgccaacccaaacgcaaacccaaaugcaaacccaaacgcaaacccaaacgcaaacccaaacaaaaacaaccaaggaaacggacaaggacacaacaugccaaacgaccccaacagaaacgucgacgaaaacgccaacgcaaacucagcaguaaaaaacaacaacaacgaagaaccaucagacaaacacauaaaagaauaccuaaacaaaauacaaaacucauuaucaacagaauggucacccugcagcgugacaugcggaaacggaauacaaguacgcauaaaaccaggauccgccaacaaaccaaaagacgaacuagacuacgcaaacgacauagaaaaaaaaauaugcaaaauggaaaaaugc

SEQ ID NO: 2417 - RNA, 900 nt, Artificial Sequence
  derived and/or modified CDS sequence (opt6) from Pf(3D7)__XP_001351122.1__CSP(98-397)
gcagacggaaacccagacccaaacgcaaacccaaacguagacccaaacgcaaacccaaacguagacccaaacgcaaaccccaacguagacccaaacgcaaacccaaacgcaaacccaaacgcaaacccaaacgcaaaccccaacgcaaacccaaaugcaaacccaaacgcaaacccaaacgcaaacccaaacgcaaacccaaacgcaaacccaaacgcaaacccaaacgcaaaccccaacgcaaacccaaacgcaaacccaaacgcaaaccccaacgcaaaccccaacgcaaacccaaauguagacccaaaugcaaacccaaacgcaaacccaaacgcaaacccaaacgcaaacccaaacgccaacccaaacgcaaacccaaacgcaaacccaaacgcaaacccaaacgcaaacccaaacgcaaacccaaacgcaaacccaaacgcaaacccaaaugcaaauccaaacgcaaauccaaacgccaacccaaacgccaacccaaacgcaaacccaaacgcaaacccaaacaaaaacaaccaaggaaacggacaaggacacaacaugccaaacgaccccaaccgcaacguagacgaaaacgcaaacgcaaacuccgcagucaaaaacaacaacaacgaagaaccaucagacaaacacauuaaagaauaccuaaacaaaauacaaaacucacuaucaacagaauggucaccuugcuccguaacaugcggcaacggaauacaaguaagaauaaaaccaggcucagcaaacaaaccaaaagacgaacuagacuacgcaaaugacauagaaaaaaaaauaugcaaaauggaaaaaugcuccucaguauucaacguagucaauagcucaaucggacucauaaugguacuaucauuccucuucuuaaac

SEQ ID NO: 2418 - RNA, 537 nt, Artificial Sequence
  derived and/or modified CDS sequence (opt6) from Pf(3D7)__XP_001351122.1__CSP(199-377)
gacccaaacgcaaacccaaacgcaaacccaaacgcaaacccaaacgcaaacccaaacgcaaacccaaacgcaaacccaaacgcaaacccaaacgcaaacccaaacgcaaacccaaacgcaaacccaaacgcaaacccaaacgcaaacccaaacgcaaacccaaacgcaaacccaaacgcaaacccaaacgcaaacccaaacgcaaacccaaacgcaaacccaaacaaaaacaaccaaggaaacggacaaggacacaacaugccaaacgacccaaacagaaacguagacgaaaacgcaaacgcaaacagcgcaguaaaaaacaacaacaacgaagaaccaucagacaaacacauaaaagaauaccuaaacaaaauacaaaacucacuaucaacagaauggucaccaugcucaguaacaugcggaaacggaauacaaguaagaauaaaaccaggaucagcaaauaaaccaaaagacgaacuagacuacgcaaacgacauagaaaaaaaaauaugcaaaauggaaaaauguagcucaguu

SEQ ID NO: 2419 - RNA, 567 nt, Artificial Sequence
  derived and/or modified CDS sequence (opt6) from Pf(3D7)__XP_001351122.1__CSP(199-387)
gacccaaacgcaaacccaaacgcaaacccaaacgcaaacccaaacgcaaacccaaacgcaaacccaaaugcaaacccaaacgcaaacccaaacgcaaaccccaacgcaaacccaaacgccaacccaaacgcaaacccaaacgcaaacccaaacgcaaacccaaacgcaaacccaaacgcaaacccaaacgcaaacccaaacgcaaacccaaacgcaaacccaaacaaaaacaaccaaggaaacggacaaggacacaacaugccaaacgacccaaacagaaacguagacgaaaacgcuaacgccaacagcgcaguaaaaaacaacaacaacgaagaaccaucagacaaacacauaaaagaauaccuaaacaaaauacaaaacucacuaucaacagaauggucaccaugcucaguaacaugcggaaacggaauacaaguaagaauaaaaccaggaucagcaaacaaaccaaaagacgaacuagacuacgcaaacgacauagaaaaaaaaauaugcaaaauggaaaaaugcucaucaguauucaacguaguaaacucaucaauaggauua

SEQ ID NO: 2420 - RNA, 57 nt, Artificial Sequence
  derived and/or modified CDS sequence (opt6) from Pf(3D7)__XP_001351122.1__CSP(309-327)__RIII region, Th2R
gaagaaccaucagacaaacacauaaaagaauaccuaaacaaaauacaaaacucacua

SEQ ID NO: 2421 - RNA, 63 nt, Artificial Sequence
  derived and/or modified CDS sequence (opt6) from Pf(3D7)__XP_001351122.1__CSP(346-366)__Th3R
auaaaaccaggaagcgcaaacaaaccaaaagacgaacuagacuacgcaaacgauauagaaaaa

SEQ ID NO: 2422 - RNA, 93 nt, Artificial Sequence
  derived and/or modified CDS sequence (opt6) from Pf(3D7)__XP_001351122.1__CSP(346-376)__Th3R_CS.T3
auaaaaccaggaagcgcaaacaaaccaaaagacgaacuagacuacgcaaacgacauagaaaaaaaaauaugcaaaauggaaaaaugcucaagc

SEQ ID NO: 2423 - RNA, 54 nt, Artificial Sequence
  derived and/or modified CDS sequence (opt6) from Pf(3D7)__XP_001351122.1__CSP(1-18)__signal peptide
augaugagaaagcucgcgaucuugagcgugagcucguucuuauucguggaagcg

SEQ ID NO: 2424 - RNA, 1074 nt, Artificial Sequence
  derived and/or modified CDS sequence (opt6) from Pf(3D7)__XP_001351122.1__CSP(27-384)__EcCSP fragment
ggcucaucaucaaacacacgaguacuaaacgaacuaaacuacgacaacgcaggaacaaaccuauacaacgaacuagaaaugaacuacuacggcaaacaagaaaacugguacucacucaaaaaaaacagcagaagccuaggcgaaaacgacgacggaaacaacgaagacaacgaaaaacuacgaaaaccaaaacacaaaaaacuaaaacaaccugcagauggaaacccagaccccaacgcaaacccgaacguagacccaaacgcaaacccaaauguagacccaaaugcaaacccaaacguagauccaaaugcgaacccaaacgcaaacccaaacgcaaacccaaacgcaaacccaaaugcaaacccaaacgccaaccccaacgcaaacccaaacgcaaacccaaacgcaaacccaaacgcaaacccaaacgcaaacccaaacgcaaacccaaacgcaaacccaaacgcaaacccaaacgcaaacccaaacgcaaacccaaaugcgaacccaaacguggacccaaacgcaaacccaaacgccaacccaaacgcaaacccaaacgcaaacccaaacgccaacccaaaugcaaaccccaacgcaaacccaaacgcgaaccccaacgccaacccaaacgcaaacccaaacgcaaauccaaacgcaaacccaaaugcaaacccaaacgccaacccaaacgcaaacccaaacgcaaacccaaacgcaaacccaaacgcaaacccuaacaaaaacaaucaaggaaacggacaaggacacaacaugccaaacgacccaaaucgaaacguagacgaaaacgcuaacgcaaacagcgcaguaaaaaacaacaauaaugaagaaccaucagacaaacacauaaaagaauaucuuaauaaaauccaaaacucacuaucaacugaauggucaccauguuccguaacaugcggaaacggaauacaaguacgaauaaaacccggaucagcaaacaaaccaaaagacgaacuagacuacgcaaacgacauagaaaaaaaaauaugcaaaauggaaaaaugcucauccguauucaacguaguaaacaguucg

SEQ ID NO: 2425 - RNA, 18 nt, Artificial Sequence
  derived and/or modified CDS sequence (opt6) from Pf(3D7)__XP_001351122.1__CSP(69-74)__3A1 antibody binding site
aguaggaguuuaggggag

SEQ ID NO: 2426 - RNA, 930 nt, Artificial Sequence
  derived and/or modified CDS sequence (opt6) from Pf(3D7)__XP_001351122.1__CSP(74-383)__PpCSP fragment
gaaaaugacgacggaaacaacgaagacaacgaaaaacuaagaaaaccaaaacacaaaaaacuaaaacaaccagcagacggaaacccagacccaaacgcaaacccaaacguagacccaaacgcaaaccccaacguagacccaaacgcaaacccgaacguagacccaaacgcaaacccaaacgcaaacccaaacgcaaacccaaacgcaaacccaaacgcaaacccaaacgcaaacccaaacgcaaauccaaacgcaaacccaaacgcaaacccaaacgcaaacccaaacgcaaacccaaacgcaaacccaaacgcaaacccaaacgcaaacccaaacgcaaacccaaacgcaaacccaaacgcaaacccaaacguagauccaaacgcaaacccaaacgcaaacccaaacgccaacccaaacgcaaauccaaacgcaaacccaaacgcaaacccaaacgcaaacccaaacgcaaacccaaacgcaaacccaaacgcaaacccaaacgcgaacccaaaugcaaacccaaacgcaaacccaaaugcaaacccaaacgcaaacccgaacgcgaacccaaacgcaaacccaaacgcaaacccaaacaaaaacaaccaaggaaacggacaagggcauaauaugccaaacgacccaaaucgaaacguagacgaaaaugcaaacgcaaacagcgcaguaaaaaacaacaacaacgaagaaccaucagacaaacacauaaaagaauacuuaaacaaaauucaaaacucacuaucaacagaauggucaccaugcagcguaacaugcggcaacggaauacaaguccgaaucaaaccaggcucagcaaacaaaccaaaagacgaacuagauuacgccaacgacauagaaaaaaaaauuugcaaaauggaaaaaugcuccucaguauucaacguaguaaacagc

SEQ ID NO: 2427 - RNA, 60 nt, Artificial Sequence
  derived and/or modified CDS sequence (opt6) from Pf(3D7)__XP_001351122.1__CSP(75-94)__2C3 antibody binding site
aacgacgacggaaacaacgaagacaacgaaaaacuaagaaaaccaaaacacaaaaaacua

SEQ ID NO: 2428 - RNA, 15 nt, Artificial Sequence
  derived and/or modified CDS sequence (opt6) from Pf(3D7)__XP_001351122.1__CSP(93-97)__RI region
aaacuaaaacaaccc

SEQ ID NO: 2429 - RNA, 18 nt, Artificial Sequence
  derived and/or modified CDS sequence (opt6) from Pf(3D7)__XP_001351122.1__CSP(95-100)__3H10/3B4 antibody binding site
aaacaaccagcagacgga

SEQ ID NO: 2430 - RNA, 525 nt, Artificial Sequence
  derived and/or modified CDS sequence (opt6) from Pf(3D7)__XP_001351122.1__CSP(98-272)__NANP repeat region
gcagacggaaacccagacccaaacgcaaacccaaacguagacccaaacgcaaacccaaacguagacccaaacgcaaacccaaacguagacccaaacgcaaacccaaacgcaaacccaaacgcaaacccaaacgcaaacccaaacgcaaacccaaacgcaaacccaaacgcaaacccaaaugcaaacccaaacgcaaacccaaacgcaaacccaaacgcaaacccaaacgcaaacccaaacgcaaacccaaacgcaaacccaaaugcaaacccaaacgcaaacccaaacgcaaacccaaacguagacccaaacgcaaacccaaacgcaaacccaaacgcaaacccaaacgcaaacccaaacgcaaacccaaacgcaaacccaaacgcaaacccaaacgcaaacccaaacgcaaacccaaacgcaaacccaaacgcaaacccaaacgcaaacccaaacgcaaacccaaacgcaaacccaaacgcaaacccaaacgcaaacccaaacgcaaacccaaacgcaaaccca

SEQ ID NO: 2431 - RNA, 504 nt, Artificial Sequence
  derived and/or modified CDS sequence (opt6) from Pf(3D7)__XP_001351122.1__CSP(105-272)__central repeat region
aacgcaaacccaaacguagacccaaacgcaaacccaaacguagacccaaacgcaaacccaaacguagacccaaacgcaaacccaaacgcaaacccaaacgcaaauccaaacgcaaacccaaacgcaaacccaaacgcaaacccaaacgcaaacccaaacgcaaauccaaacgcaaacccaaacgcaaacccaaacgcaaacccaaacgcaaacccaaacgcaaacccaaacgcaaacccaaacgcaaacccaaacgcaaacccaaacgcaaacccaaacguagacccaaacgcaaacccaaacgcaaacccaaacgcaaacccaaacgcaaacccaaacgcaaauccaaacgcaaacccaaacgcaaacccaaacgcaaacccaaacgcaaauccaaacgcaaacccaaacgcaaacccaaacgcaaacccaaacgcaaacccaaacgcaaacccaaacgcaaacccaaacgcaaacccaaacgcaaacccaaacgcaaaccca

SEQ ID NO: 2432 - RNA, 567 nt, Artificial Sequence
  derived and/or modified CDS sequence (opt6) from Pf(3D7)__XP_001351122.1__CSP(207-395)__RTS,S fragment
aacccaaacgcaaacccaaacgcaaacccaaacgcaaacccaaacgcaaacccaaacgcaaacccaaacgcaaacccaaacgcaaacccaaacgcaaacccaaacgcaaacccaaacgccaacccaaacgcaaacccaaacgcaaacccaaacgcaaaccccaacgccaacccaaacgcaaacccaaacgcaaauccaaacaaaaacaaccaaggaaacggacaaggacacaacaugccaaacgacccaaaccgaaacguagacgaaaacgcaaacgcaaacuccgcaguaaaaaacaacaacaacgaagaacccucagacaaacacauaaaagaauaccuaaacaaaauacaaaacucacuaucaacagaauggucaccaugcucaguaacaugcggaaacggaauacaaguaagaauaaaaccaggauccgcaaacaaaccaaaagacgaacuagacuacgcaaacgacauagaaaaaaaaauaugcaaaauggaaaaaugcagcucaguauucaacguaguaaacucaucaauaggauuaauaaugguacuaucauuccuauuc

SEQ ID NO: 2433 - RNA, 54 nt, Artificial Sequence
  derived and/or modified CDS sequence (opt6) from Pf(3D7)__XP_001351122.1__CSP(310-327)__RIII region, Th2R
gaacccucagacaaacacauaaaagaauaccuaaacaaaauacaaaacucacua

SEQ ID NO: 2434 - RNA, 195 nt, Artificial Sequence
  derived and/or modified CDS sequence (opt6) from Pf(3D7)__XP_001351122.1__CSP(310-374)__RIII region_TSR (RII+)
gaaccaagcgacaaacacauaaaagaauaccuaaacaaaauacaaaacagccuaagcacagaauggagcccaugcucaguaacaugcggaaacggaauacaaguaagaauaaaaccaggaagcgcaaacaaaccaaaagacgaacuagacuacgcaaacgacauagaaaaaaaaauaugcaaaauggaaaaaugc

SEQ ID NO: 2435 - RNA, 171 nt, Artificial Sequence
  derived and/or modified CDS sequence (opt6) from Pf(3D7)__XP_001351122.1__CSP(319-375)__TSR region v3
uaccuaaacaaaauacaaaacagccuaagcacagaauggagcccaugcucaguaacaugcggaaacggaauacaaguaagaauaaaaccaggaagcgcaaacaaaccaaaagacgaacuagacuacgcaaacgacauagaaaaaaaaauaugcaaaauggaaaaaugcuca

SEQ ID NO: 2436 - RNA, 147 nt, Artificial Sequence
  derived and/or modified CDS sequence (opt6) from Pf(3D7)__XP_001351122.1__CSP(326-374)__TSR region v1
agccuaagcacagaauggagcccaugcucaguaacaugcggaaacggaauacaaguaagaauaaaaccaggaagcgcaaacaaaccaaaagacgaacuagauuacgcaaacgacauagaaaaaaaaauauguaaaauggaaaaaugc

SEQ ID NO: 2437 - RNA, 141 nt, Artificial Sequence
  derived and/or modified CDS sequence (opt6) from Pf(3D7)__XP_001351122.1__CSP(328-374)__TSR region v2
agcacagaauggagcccaugcucaguaacaugcggaaacggaauacaaguaagaauaaaaccaggaagcgcaaacaaaccaaaagacgaacuagacuacgcaaacgacauagaaaaaaaaauauguaaaauggaaaaaugc

SEQ ID NO: 2438 - RNA, 54 nt, Artificial Sequence
  derived and/or modified CDS sequence (opt6) from Pf(3D7)__XP_001351122.1__CSP(330-347)__RII+ region v1
gaauggaguccauguagcguaacauguggaaauggaauacaaguaagaauaaaa

SEQ ID NO: 2439 - RNA, 66 nt, Artificial Sequence
  derived and/or modified CDS sequence (opt6) from Pf(3D7)__XP_001351122.1__CSP(330-351)__RII+ region v2
gaauggaguccauguaguguaacauguggaaauggaauacaaguaagaauaaaaccaggaagugca

SEQ ID NO: 2440 - RNA, 69 nt, Artificial Sequence
  derived and/or modified CDS sequence (opt6) from Pf(3D7)__XP_001351122.1__CSP(375-397)__GPI anchor signal
ucuucuguuuuuaauguuguuaauucuucuauuggucuuauuaugguccuuucuuuucuuuuucuuaau

SEQ ID NO: 2441 - RNA, 1194 nt, Artificial Sequence
  derived and/or modified CDS sequence (opt11) from Pf(3D7)__XP_001351122.1__CSP
augaugcgcaagcucgccauccuaagcguaagcucauuuuuauucguagaagcgcucuuccaagaauaccaaugcuacggcucuuccucgaacacccgcguacuaaacgaacuaaacuacgacaacgccggaacaaaccuuuacaaugagcucgaaaugaacuacuacggcaaacaagaaaacugguacucacucaaaaaaaauagcagaagccuaggcgagaacgacgacggaaacaacgaagacaacgaaaaacuccgaaaaccaaaacacaaaaaacuaaaacaacccgccgacggaaacccagaccccaacgcaaacccaaacgucgacccuaacgcaaaccccaacgucgacccgaacgcgaacccaaacgucgacccaaacgcuaacccaaacgccaacccuaacgcuaaccccaacgcaaaccccaacgcaaacccaaacgcaaaccccaacgcaaaccccaacgcaaacccaaacgcaaaccccaacgccaacccaaacgcaaacccuaacgccaacccaaacgcaaacccaaacgcgaaccccaacgccaaccccaacgcgaaccccaacgccaauccuaacguagacccaaacgccaaccccaacgcuaaccccaacgcaaaccccaacgcaaacccaaacgccaacccaaacgccaacccaaacgccaacccaaacgcaaacccaaacgccaaccccaacgccaacccgaacgcaaaccccaacgcaaaccccaacgcaaaccccaacgcuaacccaaacgcgaaccccaacgccaacccgaacgccaacccaaacgcuaacccaaacaaaaacaaccaaggaaacggacaaggccacaacaugccgaacgaccccaaccgcaacgucgacgaaaacgccaacgccaacucagcagucaaaaacaacaacaacgaagaacccuccgacaaacacauaaaagaauaccucaacaaaauccaaaacucgcucuccaccgaauggucacccugcuccguaaccugcggcaacggaauacaaguacgcaucaaaccuggcucagccaacaaaccgaaagacgaacucgacuacgccaacgacauagaaaaaaaaauaugcaaaauggaaaaaugcagcucagucuucaacgucgucaacagcuccauaggacucauaaugguacuaucauuccucuuccuaaacuag

SEQ ID NO: 2442 - RNA, 1122 nt, Artificial Sequence
  derived and/or modified CDS sequence (opt11) from Pf(3D7)__XP_001351122.1__CSP(1-374)__CSP-delGPI
augaugcgaaaacucgccauccuauccgucagcucguuccuauucguagaagcacucuuccaagaauaccaaugcuacggcuccuccucgaacacacgcguccucaacgaacugaacuacgacaacgcaggaacaaaccucuacaacgaacucgaaaugaacuacuacggcaaacaagaaaacugguacucacucaaaaaaaacagccggucacuaggagaaaacgacgacggcaacaacgaagacaacgaaaaacuccgcaaacccaaacacaaaaaacuaaaacaacccgcagacggaaaccccgacccaaaugccaaccccaacgucgacccuaacgcaaacccaaacguagaccccaacgcaaacccaaacguagacccaaacgcaaacccaaacgcaaacccaaacgcaaaccccaacgccaacccaaacgccaacccgaacgcaaaccccaacgcaaaccccaacgcuaacccaaacgcaaacccaaacgccaacccgaacgcaaacccaaacgcaaacccaaacgcgaaccccaacgcaaacccgaacgcaaacccgaacgccaacccaaacgcaaacccaaacguagacccaaacgcgaacccaaacgcaaacccaaacgccaacccaaacgcgaacccaaacgcaaacccgaacgcaaacccaaacgccaaccccaacgcaaaccccaacgcaaacccaaacgcgaaccccaacgcaaacccaaacgcaaacccaaacgccaaccccaacgcaaaccccaacgcaaacccaaacgcaaaccccaacgcgaacccaaacgcaaacccgaacaagaacaaccaaggaaacggccaaggccacaacaugccaaacgacccaaaccgaaacgucgacgaaaacgccaacgccaacuccgcagucaaaaacaacaacaaugaagaacccagcgacaaacacaucaaagaauaccugaacaaaauccagaacucacuaucgacugaauggucgcccugcagcguaaccugcggcaacggcauacaaguacgcauaaaaccaggcucagcuaacaaaccaaaagacgaacuagacuacgccaacgacauagaaaaaaaaauaugcaaaauggaaaaaugc

SEQ ID NO: 2443 - RNA, 975 nt, Artificial Sequence
  derived and/or modified CDS sequence (opt11) from Pf(3D7)__XP_001351122.1__CSP(1-325)__CSP-delTSR(v2)-delGPI
augaugcgaaaacucgcaauccuaagcguaagcuccuuccuauucguagaagcgcuuuuccaagaguaccaaugcuacggcuccagcucaaacacacgaguccucaacgaacucaacuacgacaacgccggaacaaaccucuacaacgaacucgaaaugaacuacuacggcaaacaagaaaacugguacucccucaagaaaaacagccgaucccuaggcgaaaacgacgacggaaacaacgaagacaacgaaaaacuacgcaaacccaaacacaagaaacuuaaacagcccgcagacggaaacccagacccgaacgcaaacccaaacguggaccccaacgcaaacccaaacgucgacccaaacgcaaacccaaacguagacccaaacgcaaacccaaacgcaaacccaaacgccaacccaaacgccaacccaaacgcaaacccaaacgcaaaccccaacgccaacccaaacgcaaacccgaacgcaaacccaaacgcaaaccccaacgccaaccccaacgcaaacccaaacgcaaacccaaacgcaaacccaaacgcgaacccgaacgcaaacccgaacgccaacccaaacguggacccaaacgcaaacccaaacgccaacccgaacgcaaacccaaacgcaaacccaaacgccaaccccaacgcaaaccccaacgccaacccaaacgcaaaccccaacgccaaccccaacgcaaacccaaacgcaaacccaaacgcaaacccaaacgcaaacccaaacgcaaacccaaacgcaaaccccaacgcaaacccgaacgcaaacccaaacgcaaacccaaacaaaaacaaccaaggcaacggacaaggacacaacaugccaaacgaccccaaccgcaacgucgacgaaaacgccaacgcaaacagcgccgucaaaaacaacaauaacgaagaacccuccgacaaacacauaaaagaauaccuaaacaaaauccaaaac

SEQ ID NO: 2444 - RNA, 1137 nt, Artificial Sequence
  derived and/or modified CDS sequence (opt11) from Pf(3D7)__XP_001351122.1__CSP(19-397)__CSP-delSP
cucuuccaagaauaccagugcuacggcucaagcucaaacacccgcguacuaaacgaacuaaacuacgacaacgccggcacaaaccucuacaacgagcucgaaaugaacuacuacggaaaacaagaaaacugguacucccucaagaaaaacuccagaucccucggagagaacgacgauggaaacaacgaagacaacgaaaaacuucgcaaaccaaaacacaaaaaacuaaaacaaccagcagacgggaaccccgacccaaacgcaaaccccaacgucgacccaaacgccaaccccaacguagacccaaacgcgaaccccaacguagacccuaacgccaaccccaacgccaacccaaacgccaacccaaacgccaaccccaacgcaaaccccaacgcaaacccaaaugccaacccaaacgcaaacccaaacgcaaaccccaacgccaaccccaacgcaaaccccaacgcaaauccaaacgccaaccccaacgccaacccaaacgcaaaccccaacgccaaccccaacgccaacccaaacgucgacccaaacgcaaacccgaacgccaaccccaaugcaaaccccaacgcaaaccccaacgcaaacccaaacgcaaaccccaacgccaacccaaacgccaacccaaacgccaaccccaacgcaaacccgaaugcgaaccccaacgcaaaccccaacgcaaacccaaacgccaacccaaacgcaaacccaaacgcaaaccccaacgcaaacccgaacgccaacccaaacaaaaacaaccaaggaaacggccaagggcacaacaugcccaacgaccccaaccgaaacguagacgaaaacgccaacgcaaacagcgccguaaaaaacaacaacaacgaagaacccucagacaaacacaucaaagaguaccuaaacaagauccagaacucgcucuccacagaauggucccccugcagcgucaccugcggcaacggaauacaaguccgaauaaaaccgggcucagcaaauaaacccaaagacgaauuagacuacgcaaacgacauagaaaaaaaaaucugcaaaauggaaaaauguuccuccgucuucaacguagucaacagcucaaucggccuaaucaugguccucucguucuuguuccuaaac

SEQ ID NO: 2445 - RNA, 1068 nt, Artificial Sequence
  derived and/or modified CDS sequence (opt11) from Pf(3D7)__XP_001351122.1__CSP(19-374)__CSP-delSP-delGPI
cucuuccaagaauaccaaugcuacggcuccagcucaaacacccgcguacuaaacgaacucaacuacgacaacgccggaaccaaccucuacaacgaacucgaaaugaacuacuacggcaaacaagaaaacugguacucacuaaaaaaaaacagcagaucccucggcgagaacgacgacggaaacaacgaagacaacgaaaaacuccgcaaacccaaacacaagaaacucaaacagcccgcagacggaaacccagacccgaacgccaacccaaacguagaccccaacgcaaaccccaacguagacccaaacgcaaacccgaacgucgacccaaacgcaaacccaaacgcaaacccaaacgcaaaccccaacgccaacccaaacgcuaaccccaacgcaaacccaaacgccaacccuaacgccaacccaaacgcaaacccaaacgcaaacccaaacgcaaacccaaacgcaaacccaaacgcaaacccaaacgcaaacccaaacgcaaauccaaacgcgaacccaaacgccaaccccaacguagacccaaacgcgaaccccaacgcuaacccaaacgcaaacccaaacgcaaaccccaacgcaaacccgaacgcaaaccccaacgccaacccaaacgccaacccaaacgccaaccccaacgcaaaccccaacgcaaaccccaacgccaacccaaacgccaaccccaacgcaaacccgaaugcaaacccaaacgcgaacccaaacgcaaacccaaacgccaacccaaacaaaaacaaccaaggaaacggacagggccacaacaugcccaaugaccccaaccgcaacgucgacgaaaacgccaacgccaacagcgccgucaaaaacaacaacaaugaagaacccucagacaaacacauaaaagaauaccuaaacaaaauacaaaacucccuaucaaccgaauggucccccugcuccguaaccugcggaaacggcauccaaguacgcaucaaacccggcucggcaaauaaaccaaaagacgaacuagacuacgccaacgacaucgaaaaaaaaaucugcaaaauggaaaaaugc

SEQ ID NO: 2446 - RNA, 921 nt, Artificial Sequence
  derived and/or modified CDS sequence (opt11) from Pf(3D7)__XP_001351122.1__CSP(19-325)__CSP-delSP-delTSR(v2)-delGPI
cucuuccaagaguaccaaugcuacggcucauccucaaacacacgcguccucaacgaacuaaacuacgacaacgccggaaccaaccuauacaacgaacucgaaaugaacuacuauggcaaacaagaaaacugguacucccuaaaaaaaaacagcaggagccucggcgaaaacgacgacggaaacaacgaagacaacgaaaaacuacgcaaacccaagcacaaaaaacucaaacaacccgcagacggaaacccagaccccaacgccaacccaaacgucgacccaaacgcaaaccccaacguagaccccaacgcaaaccccaacguagacccaaacgcaaacccaaacgccaacccaaacgcaaacccaaacgcaaacccaaaugcaaacccaaacgcaaacccaaacgcaaaccccaacgcaaaccccaacgcaaacccaaacgcaaacccaaacgcaaacccaaacgcaaaccccaacgcaaacccaaacgccaacccgaacgcaaacccaaacgcaaaccccaacgcaaacccaaacgucgacccaaacgccaacccaaacgccaaccccaacgcaaacccaaacgcaaacccaaacgcaaacccaaacgcaaacccaaacgcaaaccccaacgcgaaccccaacgcaaacccaaacgccaacccaaacgcaaaccccaacgcaaaccccaacgcaaacccaaacgcaaacccaaacgcaaaccccaacgcaaacccaaacgcaaaccccaacgcaaacccaaacaaaaacaaccaaggcaacggacaaggccacaacaugccaaacgaccccaaccgcaacgucgacgaaaacgcaaacgccaacagcgcaguaaaaaacaauaacaacgaagaaccaucggacaaacacauaaaagaauaccuaaacaaaauccaaaac

SEQ ID NO: 2447 - RNA, 351 nt, Artificial Sequence
  derived and/or modified CDS sequence (opt11) from Pf(3D7)__XP_001351122.1__CSP(19-135)
cucuuccaagaauaccaaugcuacggcuccuccuccaacacccgcguccucaacgaacucaacuacgacaacgccggcaccaaccucuacaacgaacucgaaaugaacuacuacggcaaacaagaaaacugguacucccucaaaaaaaacucccgcucccucggcgaaaacgacgacggaaacaacgaagacaacgaaaaacuccgcaaacccaaacacaaaaaacucaaacaacccgccgacggcaaccccgaccccaacgccaaccccaacgucgaccccaacgccaaccccaacgucgaccccaacgccaaccccaacgucgaccccaacgccaaccccaacgccaac

SEQ ID NO: 2448 - RNA, 525 nt, Artificial Sequence
  derived and/or modified CDS sequence (opt11) from Pf(3D7)__XP_001351122.1__CSP(19-193)
cucuuccaagaauaccaaugcuacggcucgagcucaaacacacgcguccucaacgaacugaacuacgacaacgccgggaccaaccucuacaacgaacucgaaaugaacuacuacggcaaacaagaaaacugguacucacucaaaaaaaacagcagaagccuaggcgaaaacgacgacggaaacaacgaagacaacgaaaaacuacgaaaacccaaacacaaaaaacuaaaacaacccgcagacggaaacccagacccaaacgcaaaccccaacguagacccaaacgcaaacccaaacguagacccaaacgcaaacccaaacguagacccaaacgcaaacccaaacgcaaacccaaacgcaaacccaaacgcaaacccgaacgcaaacccaaacgcaaacccaaacgcaaacccgaacgcaaacccaaacgcaaacccaaacgcaaacccaaacgcaaacccgaacgcgaacccaaacgcaaacccaaacgcaaacccaaacgcaaacccaaacgcaaacccaaac

SEQ ID NO: 2449 - RNA, 762 nt, Artificial Sequence
  derived and/or modified CDS sequence (opt11) from Pf(3D7)__XP_001351122.1__CSP(19-272)
cucuuccaagaauaccaaugcuacggcagcagcucaaacacacgcguacucaacgaacuaaacuacgacaacgccggaaccaaccucuacaacgaacuagaaaugaacuacuacggcaaacaagaaaacugguacucccucaaaaaaaacagcagaucccuaggugaaaacgacgacggaaacaacgaagacaacgaaaaacuacgaaaacccaaacacaaaaaacuaaaacaacccgccgacggcaacccagacccaaacgcaaacccaaacgucgacccaaacgcaaacccaaacguagacccaaacgcaaaccccaacguagacccaaacgcaaacccaaacgccaacccaaacgcaaacccaaacgcaaacccaaacgcaaacccaaacgcaaacccaaacgcaaacccgaacgcaaacccaaacgcaaacccaaacgcaaaccccaacgccaacccaaacgcaaacccaaacgcaaacccaaacgcaaacccaaacgcaaacccaaacgcaaacccaaacgcaaacccaaacguagacccaaacgcaaacccaaacgcaaacccaaacgccaacccaaacgcaaacccgaacgccaacccaaacgcaaacccaaacgcaaacccaaacgcgaacccaaacgcaaacccaaacgcaaacccaaacgcaaacccaaacgcaaacccaaacgcaaacccaaacgcaaacccaaacgccaacccaaacgcaaacccaaacgcaaacccaaacgcaaaccca

SEQ ID NO: 2450 - RNA, 1098 nt, Artificial Sequence
  derived and/or modified CDS sequence (opt11) from Pf(3D7)__XP_001351122.1__CSP(19-384)
cuauuccaagaauaccaaugcuacggcucaagcucaaacacacgcguccucaacgaacuuaacuacgacaacgcaggcacaaaccucuacaacgaacuagaaaugaacuacuacggcaaacaagaaaacugguacucacucaaaaaaaacagcagauccuuaggagaaaacgacgacgggaacaacgaagacaacgaaaaacuacgcaaacccaaacacaaaaaacuaaaacaaccugcagacggaaacccugacccaaacgcaaacccgaacguagacccaaacgccaacccaaacguggaccccaacgcaaaccccaacguggacccaaacgcaaacccaaacgcaaacccaaacgcgaaccccaacgcaaaccccaacgcgaaccccaacgcgaaccccaacgcaaaccccaacgcgaaccccaacgccaacccaaacgcaaacccaaacgccaaccccaacgcaaacccgaacgcaaaccccaacgcaaacccaaacgcaaacccaaacgcaaacccaaacgcaaaccccaacguagacccaaacgcaaacccaaaugccaacccaaacgccaacccaaacgccaaccccaaugcaaacccaaacgcaaacccaaacgcaaaccccaacgcaaacccaaacgccaaccccaacgcaaaccccaacgcaaacccgaacgcaaacccaaacgccaacccaaacgccaacccaaacgcaaaccccaacgcaaaccccaacgccaaccccaacgccaacccaaacaaaaacaaccaaggaaacggacaaggacacaacaugccgaacgaccccaacagaaaugucgacgaaaacgcaaacgccaacagcgccguaaaaaacaacaacaacgaagagcccucagacaaacacaucaaagaauaccuaaacaaaauccaaaauucgcucucaacagaguggucccccugcagcgucaccugcggcaacggaauccaaguacgcauaaaacccggaucagccaacaaacccaaagacgaacuggacuacgccaacgacauagaaaaaaaaauaugcaaaauggagaaaugcagcucagucuucaacguagucaacagcuca

SEQ ID NO: 2451 - RNA, 948 nt, Artificial Sequence
  derived and/or modified CDS sequence (opt11) from Pf(3D7)__XP_001351122.1__CSP(82-397)
gacaacgaaaaacuccgcaaacccaaacacaaaaaacuaaaacaaccagcagacggaaacccagacccaaacgcaaaccccaacgucgacccaaacgccaacccaaacgucgacccaaacgcaaauccaaacgucgacccgaacgcuaaccccaacgcaaacccaaacgcaaacccaaacgccaaccccaacgccaacccaaacgccaacccaaacgccaacccaaacgccaaccccaacgcaaaccccaacgcaaaccccaacgcaaaccccaacgcaaacccaaacgccaacccaaacgcaaacccaaacgccaacccaaacgccaacccaaacgcaaaccccaacguggaccccaacgcaaacccaaacgccaacccaaacgcgaacccaaacgccaacccaaacgcaaacccaaacgccaacccaaacgccaacccaaacgccaaccccaacgccaacccaaacgcaaacccaaacgcaaacccaaacgcgaaccccaaugccaaccccaacgcaaacccaaaugccaacccaaacgccaacccaaacgccaaccccaacgccaaccccaacaaaaacaaccaaggcaacggccaaggacacaacaugccgaacgacccaaaccgcaacgucgacgaaaacgccaacgccaacagcgcagucaaaaacaacaacaacgaagaacccucagacaaacacaucaaagaguaccuaaacaaaauccaaaacucccucuccaccgaauggucacccugcuccguaaccugcggcaacggcauccaaguccgcauaaaacccggcucagccaacaaaccaaaagacgaacucgacuacgccaacgacaucgaaaaaaaaauaugcaaaauggaaaaaugcucauccgucuucaacgucgucaacuccucaauaggacucaucauggucuuaucauuccuauuccucaac

SEQ ID NO: 2452 - RNA, 300 nt, Artificial Sequence
  derived and/or modified CDS sequence (opt11) from Pf(3D7)__XP_001351122.1__CSP(93-192)
aaacuaaaacaacccgcagacggaaacccagacccaaacgcaaacccaaacguagacccaaacgcaaaccccaacguagacccaaacgcaaacccaaacguagacccaaacgcaaacccaaacgcaaacccaaacgcaaacccaaacgcaaacccaaacgcaaacccaaacgcaaacccaaacgcaaacccaaacgcaaacccaaacgcaaacccaaacgcaaacccaaacgcaaacccaaacgcaaacccaaacgccaacccaaacgcaaacccaaacgcaaacccaaacgcaaaccca

SEQ ID NO: 2453 - RNA, 540 nt, Artificial Sequence
  derived and/or modified CDS sequence (opt11) from Pf(3D7)__XP_001351122.1__CSP(93-272)__RI region_NANP repeat region
aaacuaaaacaacccgcagacggaaacccagacccaaacgccaacccaaacguagacccaaacgccaacccaaacguagacccaaacgcaaaccccaacguagaccccaacgcaaacccaaacgcaaacccaaacgcaaacccaaacgcaaacccaaacgcaaacccaaacgcaaacccaaacgcaaacccaaacgcaaacccaaacgcaaacccaaacgccaacccaaacgcaaacccaaacgcaaacccaaacgcaaacccaaacgcaaacccaaacgcaaacccaaacgcaaacccaaacgcaaacccaaacguagacccaaacgcaaacccaaacgcaaacccaaacgcaaacccaaacgcaaacccaaacgcaaacccaaacgcaaacccaaacgcaaacccaaacgcaaacccaaacgcaaaccccaacgccaacccaaacgcaaacccaaacgcaaacccaaacgcaaacccaaacgcaaacccaaacgcaaacccaaacgcaaacccaaacgcaaacccaaacgcaaaccca

SEQ ID NO: 2454 - RNA, 915 nt, Artificial Sequence
  derived and/or modified CDS sequence (opt11) from Pf(3D7)__XP_001351122.1__CSP(93-397)
aaacucaaacaaccagcagacgggaacccagacccaaacgccaacccaaacguagacccaaacgccaacccaaacguagacccaaacgcaaaccccaacgucgacccgaacgcaaacccaaacgccaacccaaacgcgaacccaaacgccaaccccaacgcaaaccccaacgcaaaccccaacgcaaaccccaaugcaaacccaaacgcaaaccccaacgcaaaccccaacgcaaacccaaacgcaaaccccaacgcaaauccgaacgcaaacccaaacgcaaacccaaacgccaacccaaacgcaaaccccaacguagacccaaacgcaaacccaaacgccaaccccaacgcaaacccaaacgcaaacccaaacgcaaacccaaacgccaaccccaacgcgaacccaaacgcaaacccaaacgcaaaccccaacgccaaccccaacgcgaacccaaacgccaacccaaacgcaaacccaaacgcaaacccaaacgcaaaccccaacgcaaacccuaacgcaaacccaaacgccaacccaaacaaaaacaaccaaggaaacggacaaggacacaacaugccaaacgaccccaaccgaaacgucgacgaaaacgccaacgccaacuccgcagucaaaaacaacaacaacgaagaacccucagacaaacacauaaaagaauaccucaacaaaauccaaaacucacuaucaaccgaauggucacccugcucaguaaccugcggcaacggaauacaaguacgaaucaaaccaggcucagccaacaaaccaaaagacgaacuggacuacgccaacgacaucgaaaagaaaaucugcaaaauggaaaaaugcagcucagucuuuaacguaguaaacuccucaauaggccucauaaugguccucucauuccucuuccucaac

SEQ ID NO: 2455 - RNA, 285 nt, Artificial Sequence; identical to SEQ ID NO: 2415
  derived and/or modified CDS sequence (opt11) from Pf(3D7)__XP_001351122.1__CSP(98-192)

SEQ ID NO: 2456 - RNA, 831 nt, Artificial Sequence
  derived and/or modified CDS sequence (opt11) from Pf(3D7)__XP_001351122.1__CSP(98-374)
gcagacggaaaccccgacccaaacgcaaacccaaacguagacccaaacgcaaacccaaacgucgaccccaacgcaaaccccaauguagacccaaacgccaacccaaacgcaaacccaaacgccaaccccaacgcaaacccaaacgcaaacccaaaugccaacccaaacgccaacccaaacgcaaaccccaacgcaaacccaaacgccaacccaaacgcaaacccaaacgccaacccgaacgcaaacccaaacgcaaacccaaacgccaacccaaacgcaaacccaaacgcaaaccccaacguagacccaaacgcaaacccaaacgcaaacccaaacgcaaacccaaacgcaaacccaaacgcaaacccaaacgcaaaccccaacgcaaaccccaacgcaaacccaaacgccaacccaaacgcaaacccaaacgcaaacccaaacgcaaacccaaacgcaaacccaaacgcaaacccaaacgccaacccaaacgcaaaccccaacgccaacccaaacgccaaccccaacaaaaacaaccaaggaaacggacaaggacacaacaugccaaacgaccccaacagaaacgucgacgaaaacgccaacgccaacagcgcagucaaaaacaacaacaacgaagaacccucagacaaacacauaaaagaauaccucaacaaaauccaaaacucacucucaaccgaauggucacccugcuccguaaccugcggcaacggcauccaaguccgcauaaaaccaggcucagccaacaaacccaaagacgaacuagacuacgccaacgacauagaaaaaaaaauaugcaaaauggaaaaaugc

SEQ ID NO: 2457 - RNA, 900 nt, Artificial Sequence
  derived and/or modified CDS sequence (opt11) from Pf(3D7)__XP_001351122.1__CSP(98-397)
gccgacggaaacccagaccccaacgcaaacccaaacgucgacccaaacgcaaacccaaacguagacccaaacgcaaacccaaacguagacccaaacgcuaacccaaacgcaaaccccaacgcgaacccaaacgcaaaccccaacgcaaacccaaacgcaaaccccaacgcaaacccaaacgcaaaccccaaugcaaacccaaacgcaaacccaaacgcaaaccccaacgcaaacccaaacgcaaacccaaacgcaaacccaaacgcaaacccaaacgcaaacccaaacgcaaacccaaacguagacccaaacgcaaacccaaacgcaaacccaaacgcaaacccaaacgcgaacccaaacgcaaacccaaacgcaaacccaaacgcaaacccaaacgcaaacccaaacgcaaaccccaacgcaaacccaaacgccaacccaaacgcaaacccaaacgcaaacccaaacgcaaacccaaacgcaaacccgaacgcaaacccaaacgcaaacccaaacgccaaccccaacaaaaacaaccaaggaaacgggcaaggacacaacaugcccaacgaccccaaccgcaacgucgacgaaaacgccaacgcaaacuccgcaguuaaaaacaacaacaacgaagaacccucggacaaacacauaaaagaauaccuaaacaaaauccagaacucacucucaacagaauggucccccugcuccguaaccugcggaaacgguauacaaguacgcaucaaaccaggcuccgccaacaaacccaaagacgaacuggacuacgccaacgacauagaaaagaaaauaugcaaaauggaaaaaugcuccucagucuucaacguagucaacuccucaaucggccucaucaugguccucucauuucuauuccucaac

SEQ ID NO: 2458 - RNA, 537 nt, Artificial Sequence
  derived and/or modified CDS sequence (opt11) from Pf(3D7)__XP_001351122.1__CSP(199-377)
gaccccaacgccaacccaaacgccaaccccaacgccaaccccaacgccaaccccaacgccaaccccaacgccaaccccaacgccaaccccaacgccaacccaaacgcaaaccccaacgccaaccccaacgccaaccccaacgccaaccccaacgccaaccccaacgccaaccccaacgccaaccccaacgcaaaccccaacgccaaccccaacgccaaccccaacaaaaacaaccaaggcaacggccaaggccacaacaugcccaacgaccccaaccgcaacgucgacgaaaacgccaacgccaacuccgccgucaaaaacaacaacaacgaagaacccucagacaaacacaucaaagaauaccucaacaaaauccaaaacucccucuccaccgaauggucccccugcuccgucaccugcggcaacggcauccaaguccgcaucaaacccggcuccgccaacaaaccaaaagacgaacucgacuacgccaacgacaucgaaaaaaaaaucugcaaaauggaaaaaugcuccuccguc

SEQ ID NO: 2459 - RNA, 567 nt, Artificial Sequence
  derived and/or modified CDS sequence (opt11) from Pf(3D7)__XP_001351122.1__CSP(199-387)
gacccaaacgccaaccccaacgccaaccccaacgccaacccaaacgccaaccccaacgccaacccaaacgcaaacccaaacgccaaccccaacgccaaccccaacgccaaccccaacgccaaccccaacgccaaccccaacgcaaaccccaacgccaaccccaacgccaaccccaacgccaaccccaacgccaaccccaacgccaaccccaacgccaaccccaacaaaaacaaccaaggcaacggccaaggccacaacaugcccaacgaccccaaccgcaacgucgacgaaaacgccaacgcaaacuccgccgucaaaaacaacaacaacgaagaaccauccgacaaacacauaaaagaauaccucaacaaaauccaaaacucccucuccaccgaauggucccccugcucagucaccugcggcaacggcauccaaguccgcaucaaacccggcuccgccaacaaacccaaagacgaacucgacuacgccaacgacaucgaaaaaaaaaucugcaaaauggaaaaaugcuccuccguauucaacgucgucaacuccuccaucggccuc

SEQ ID NO: 2460 - RNA, 57 nt, Artificial Sequence
  derived and/or modified CDS sequence (opt11) from Pf(3D7)__XP_001351122.1__CSP(309-327)__RIII region, Th2R
gaggaacccucggacaagcacauaaaagaguaccugaacaagauccagaacucgcuc

SEQ ID NO: 2461 - RNA, 63 nt, Artificial Sequence
  derived and/or modified CDS sequence (opt11) from Pf(3D7)__XP_001351122.1__CSP(346-366)__Th3R
aucaagcccgggagcgcgaacaagcccaaggacgagcucgauuacgcgaacgauaucgagaaa

SEQ ID NO: 2462 - RNA, 93 nt, Artificial Sequence
  derived and/or modified CDS sequence (opt11) from Pf(3D7)__XP_001351122.1__CSP(346-376)__Th3R_CS.T3
aucaagcccgggagcgcgaacaagcccaaggacgagcucgauuacgcgaacgauaucgagaaaaagaucuguaaaauggaaaagugcucgagc

SEQ ID NO: 2463 - RNA, 54 nt, Artificial Sequence
  derived and/or modified CDS sequence (opt11) from Pf(3D7)__XP_001351122.1__CSP(1-18)__signal peptide
augaugcgcaaacucgccauccucuccgucuccuccuuccucuucgucgaagcc

SEQ ID NO: 2464 - RNA, 1074 nt, Artificial Sequence
  derived and/or modified CDS sequence (opt11) from Pf(3D7)__XP_001351122.1__CSP(27-384)__EcCSP fragment
ggcucaagcucaaacacacgaguacucaacgaacucaacuacgacaacgccggcacaaaccucuacaacgaacucgaaaugaacuacuacggcaagcaagaaaacugguacucacucaaaaaaaauagccgaagcuuaggagaaaacgacgauggaaacaacgaagacaacgaaaaacuacgcaaacccaaacacaaaaaacucaaacagcccgcagacgggaacccagacccaaacgccaacccaaacgucgauccaaacgccaaccccaacguagacccaaacgcaaacccaaacguagaccccaacgcaaaccccaacgccaacccaaacgccaacccaaacgcaaacccaaacgccaaccccaacgccaacccaaacgcaaacccaaacgccaacccaaacgccaacccgaacgcaaacccaaacgcaaacccaaacgccaaccccaacgcaaacccaaacgcaaacccaaacgccaaccccaacgccaacccuaacgcgaaccccaacgucgaccccaacgcaaaccccaacgcaaaccccaacgcaaacccaaacgcgaacccaaacgcaaaccccaacgccaaccccaacgcaaaccccaacgcaaacccaaacgccaacccaaacgcaaacccaaacgcgaaccccaacgcuaacccaaacgcgaaccccaacgcuaacccaaacgccaacccgaacgcaaaccccaacgccaaccccaacgcaaacccaaacaaaaacaaccaaggaaacggacaaggccacaacaugccgaacgaccccaaccgcaacgucgacgaaaacgccaacgccaacuccgcaguaaaaaacaacaacaacgaagagcccucagacaaacacauaaaagaauaccucaacaagauccaaaacucccuaucaaccgaauggucacccugcagcguaaccugcggcaauggaauacaaguacgcauaaaaccaggcucagccaacaaaccaaaagacgaacuagacuacgcaaacgacauagaaaaaaaaauaugcaaaauggaaaaaugcuccucggucuucaacguggucaacagcucc

SEQ ID NO: 2465 - RNA, 18 nt, Artificial Sequence
  derived and/or modified CDS sequence (opt11) from Pf(3D7)__XP_001351122.1__CSP(69-74)__3A1 antibody binding site
agcaggagcuugggcgag

SEQ ID NO: 2466 - RNA, 930 nt, Artificial Sequence
  derived and/or modified CDS sequence (opt11) from Pf(3D7)__XP_001351122.1__CSP(74-383)__PpCSP fragment
gaaaacgacgacggaaacaacgaagacaacgagaaacuacgaaaacccaaacacaaaaaacuaaaacaacccgcagacggaaacccagacccaaacgcaaacccaaacguagacccaaacgcaaacccaaacgucgacccgaacgcaaacccaaacguagacccaaacgcaaacccaaacgccaacccaaacgcaaacccaaacgcaaacccaaacgcaaaccccaacgccaaccccaacgccaacccaaacgcaaacccgaacgccaacccaaacgccaacccaaacgcaaacccaaacgcaaacccaaacgccaacccaaacgcaaacccaaacgcaaacccaaacgccaacccaaacgccaacccaaacguagacccaaacgcaaacccaaacgcaaacccaaacgcaaacccaaacgcaaacccaaacgcaaacccaaacgcaaacccaaacgcgaacccgaacgcaaacccaaacgcaaaccccaacgcaaacccaaacgccaacccgaacgccaaccccaacgcaaaccccaacgccaaccccaacgccaacccaaacgcaaacccaaacgcaaacccaaacgcaaacccaaacaaaaacaaccaaggcaacgggcaaggacacaacaugccaaacgaccccaaccgcaacgucgacgaaaacgccaacgcaaacagcgcagucaagaacaacaacaacgaagaaccaucagacaaacacauaaaagaauaccuaaacaaaauccaaaacucacucucaacagaauggucccccuguagcguaaccugcggcaacggaauccaaguacgaauaaaacccggcucagccaacaaaccaaaagacgaacuagacuacgccaacgacauagaaaaaaaaaucugcaaaauggaaaaaugcagcuccgucuucaacguagucaacagc

SEQ ID NO: 2467 - RNA, 60 nt, Artificial Sequence
  derived and/or modified CDS sequence (opt11) from Pf(3D7)__XP_001351122.1__CSP(75-94)__2C3 antibody binding site
aacgacgacggcaacaacgaagacaacgaaaaacuccgcaaacccaaacacaaaaaacua

SEQ ID NO: 2468 - RNA, 15 nt, Artificial Sequence
  derived and/or modified CDS sequence (opt11) from Pf(3D7)__XP_001351122.1__CSP(93-97)__RI region
aaacucaagcaaccg

SEQ ID NO: 2469 - RNA, 18 nt, Artificial Sequence
  derived and/or modified CDS sequence (opt11) from Pf(3D7)__XP_001351122.1__CSP(95-100)__3H10/3B4 antibody binding site
aaacagccggcagacgga

SEQ ID NO: 2470 - RNA, 525 nt, Artificial Sequence
  derived and/or modified CDS sequence (opt11) from Pf(3D7)__XP_001351122.1__CSP(98-272)__NANP repeat region
gcagacggaaacccagacccaaacgcaaacccaaacguagacccaaacgcaaacccgaacguagacccaaacgcaaacccaaacguagacccaaacgcaaacccaaacgcaaacccaaacgcaaacccaaacgcaaacccaaacgcaaacccaaacgcaaacccgaacgcaaacccaaacgcaaacccgaacgcaaacccaaacgcaaacccaaacgcaaacccaaacgcaaacccaaacgcaaacccaaacgcaaacccaaacgcaaacccaaacgcaaacccaaacgcaaacccaaacguagacccaaacgcaaacccaaacgcaaacccgaacgcaaacccaaacgcaaacccaaacgcaaacccaaacgcaaacccaaacgcaaacccaaacgcaaacccaaacgcaaacccaaacgcaaacccaaacgcaaacccaaacgcaaacccaaacgcaaacccaaacgcaaacccaaacgcaaacccaaacgcaaacccgaacgcaaacccaaacgcaaaccca

SEQ ID NO: 2471 - RNA, 504 nt, Artificial Sequence
  derived and/or modified CDS sequence (opt11) from Pf(3D7)__XP_001351122.1__CSP(105-272)__central repeat region
aacgcaaacccaaacguagacccaaacgcaaacccaaacguagacccaaacgcaaacccaaacguagacccaaacgcaaacccaaacgcaaacccaaacgcaaacccaaacgcgaacccaaacgcaaacccaaacgcaaacccaaacgcaaacccgaacgcaaacccaaacgcaaacccaaacgcaaacccaaacgcaaacccaaacgcaaacccaaacgcaaacccaaacgcaaacccaaacgcaaacccaaacgcaaacccaaacgcaaacccaaacguagacccaaacgcaaacccaaacgcaaacccaaacgcaaacccaaacgccaacccaaacgcaaacccaaacgcaaacccaaacgcaaacccaaacgcaaacccaaacgcaaacccaaacgcgaacccaaacgcaaacccaaacgcaaacccaaacgcaaacccaaacgcaaacccaaacgcaaacccaaacgcaaacccaaacgcgaacccaaacgcaaaccca

SEQ ID NO: 2472 - RNA, 567 nt, Artificial Sequence
  derived and/or modified CDS sequence (opt11) from Pf(3D7)__XP_001351122.1__CSP(207-395)__RTS,S fragment
aaccccaacgccaaccccaacgccaaccccaacgcaaacccaaacgccaaccccaacgccaacccaaacgccaaccccaacgccaaccccaacgccaaccccaacgccaaccccaacgccaacccaaacgccaaccccaacgcaaaccccaacgcaaaccccaacgccaacccaaacgccaaccccaacgccaaccccaacaaaaacaaccaaggaaacggccaaggccacaacaugcccaacgaccccaaccgcaacgucgacgaaaacgccaacgccaacucagccgucaaaaacaacaacaacgaagaacccuccgacaaacacaucaaagaauaccucaacaaaauccaaaacucccucuccaccgaguggucccccugcuccgucaccugcggcaacggaauccaaguccgaaucaaacccggauccgccaacaaacccaaagacgaacucgacuacgccaacgacaucgaaaaaaaaaucugcaaaauggaaaaaugcuccuccgucuucaacgucgucaacuccuccaucggccucaucaugguccucuccuuccucuuc

SEQ ID NO: 2473 - RNA, 54 nt, Artificial Sequence
  derived and/or modified CDS sequence (opt11) from Pf(3D7)__XP_001351122.1__CSP(310-327)__RIII region, Th2R
gagcccucggacaagcacauaaaagaguaccugaacaaaauccagaacucacuc

SEQ ID NO: 2474 - RNA, 195 nt, Artificial Sequence
  derived and/or modified CDS sequence (opt11) from Pf(3D7)__XP_001351122.1__CSP(310-374)__RIII region_TSR (RII+)
gaaccgagcgauaaacauaucaaggaauaucucaauaaaauacaaaauagcuugagcacggaauggagcccgugcucggucacgugcgggaacgggauccaggucaggaucaagcccgggagcgcgaacaagcccaaggacgagcucgauuacgcgaacgacaucgagaaaaagaucuguaaaauggaaaagugc

SEQ ID NO: 2475 - RNA, 171 nt, Artificial Sequence
  derived and/or modified CDS sequence (opt11) from Pf(3D7)__XP_001351122.1__CSP(319-375)__TSR region v3
uaucucaauaaaauacaaaauagcuugagcacggaauggagcccgugcucggucacgugcgggaacgggauccaggucaggaucaagcccgggagcgcgaacaagcccaaggacgagcucgauuacgcgaacgauaucgagaaaaagaucuguaaaauggaaaagugcucg

SEQ ID NO: 2476 - RNA, 147 nt, Artificial Sequence
  derived and/or modified CDS sequence (opt11) from Pf(3D7)__XP_001351122.1__CSP(326-374)__TSR region v1
agcuugagcacggaauggagcccgugcucggucacgugcgggaacgggauccaggucaggaucaagcccgggagcgcgaacaagcccaaggacgagcucgauuacgcgaacgauaucgagaaaaagaucuguaaaauggaaaagugc

SEQ ID NO: 2477 - RNA, 141 nt, Artificial Sequence
  derived and/or modified CDS sequence (opt11) from Pf(3D7)__XP_001351122.1__CSP(328-374)__TSR region v2
agcacggaauggagcccgugcucggucacgugcgggaacgggauccaggucaggaucaagcccgggagcgcgaacaagcccaaggacgagcucgauuacgcgaacgauaucgagaaaaagaucuguaaaauggaaaagugc

SEQ ID NO: 2478 - RNA, 54 nt, Artificial Sequence
  derived and/or modified CDS sequence (opt11) from Pf(3D7)__XP_001351122.1__CSP(330-347)__RII+ region v1
gaauggagcccgugcucgguaacgugcgggaacgggauacaggucaggauaaag

SEQ ID NO: 2479 - RNA, 66 nt, Artificial Sequence
  derived and/or modified CDS sequence (opt11) from Pf(3D7)__XP_001351122.1__CSP(330-351)__RII+ region v2
gaauggagcccgugcucggucacgugcgggaacgggauacaggucaggauaaagcccgggagcgcg

SEQ ID NO: 2480 - RNA, 69 nt, Artificial Sequence; identical to SEQ ID NO: 2280
  derived and/or modified CDS sequence (opt11) from Pf(3D7)__XP_001351122.1__CSP(375-397)__GPI anchor signal

SEQ ID NO: 2481 - protein, 397 aa, Artificial Sequence; identical to SEQ ID NO: 1
  derived and/or modified protein sequence (wt) from Pf(3D7)__XP_001351122.1__CSP

SEQ ID NO: 2482 - protein, 444 aa, Artificial Sequence
  derived and/or modified protein sequence (wt) from Pf(Pal97-089)__BAM84949.1__CSP
MMRKLAILSVSSFLFVEALFQEYQCYGSSSNTRVLNELNYDNAGTNLYNELEMNYYGKQENWYSLKKNSRSLGENDDGDNDNGDNGREGKDEDKRDGNNEDNEKLRKPKHKKLKQPGDGNPDPNANPNVDPNANPNVDPNANPNANPNANPNANPNANPNANPNANPNANPNANPNANPNANPNANPNANPNANPNANPNANPNANPNANPNANPNANPNANPNANPNANPNANPNANPNANPNANPNANPNANPNANPNANPNANPNANPNANPNANPNANPNANPNANPNANPNANPNANPNANPNANPNANPNANPNKNNQGNGQGHNMPNDPNRNVDENANANNAVKNNNNEEPSDKHIEQYLKKIQYSLSTEWSPCSVTCGNGIQVRIKPGSADKPKDQLDYENDIEKKICKMEKCSSVFNVVNSSIGLIMVLSFLFLN

SEQ ID NO: 2483 - protein, 442 aa, Artificial Sequence
  derived and/or modified protein sequence (wt) from Pf(T9/94)__BAD73956.1__CSP
MMRKLAILSVSSFLFVEALFQEYQCYGSSSNTRVLNELNYDNAGTNLYNELEMNYYGKQENWYSLKKNSRSLGENDDGDNDNGNNNNGNNNNGDNGREGKDEDKRDGNNEDNEKLRKPKHKKLKQPGDDNPDPNANPNVDPNANPNVDPNANPNANPNANPNANPNANPNANPNANPNANPNANPNANPNANPNANPNANPNANPNANPNVDPNANPNANPNANPNANPNANPNANPNANPNANPNANPNANPNANPNANPNANPNANPNANPNANPNANPNANPNANPNANPNANPNANPNANPNANPNANPNANPNKNNQGNGQGHNMPNDPNRNVDENANANNAVKNNNNEEPSDKHIEQYLKKIQNSLSTEWSPCSVTCGNGIQVRIKPGSADKPKDQLDYENDIEKKICKMEKCSSVFNVVNSSIGLIMVLSFLFLN

SEQ ID NO: 2484 - protein, 442 aa, Artificial Sequence
  derived and/or modified protein sequence (wt) from Pf(Tq/94)__AAA29551.1__CSP
MMRKLAILSVSSFLFVEALFQEYQCYGSSSNTRVLNELNYDNAGINLYNELEMNYYGKQENWYSLKKNSRSLGENDDGDNDNGNNNNGNNNNGDNGREGKDEDKRDGNNEDNEKLRKPKHKKLKQPGDGNPDPNANPNVDPNANPNVDPNANPNANPNANPNANPNANPNANPNANPNANPNANPNANPNANPNANPNANPNANPNANPNVDPNANPNANPNANPNANPNANPNANPNANPNANPNANPNANPNANPNANPNANPNANPNANPNANPNANPNANPNANPNANPNANPNANPNANPNANPNANPNANPNKNNQGNGQGHNMPNDPNRNVDENANANNAVKNNNNEEPSDKHIEQYLKKIQNSLSTEWSPCSVTCGNGIQVRIKPGSADKPKDQLDYENDIEKKICKMEKCSSVFNVVNSSIGLIMVLSFLFLN

SEQ ID NO: 2485 - protein, 442 aa, Artificial Sequence
  derived and/or modified protein sequence (wt) from Pf(Wellcome)__AAA29554.1__CSP
MMRKLAILSVSSFLFVEALFQEYQCYGSSSNTRVLNELNYDNAGTNLYNELEMNYYGKQENWYSLKKNSRSLGENDDGDNDNGNNNNGNNNNGDNGREGKDEDKRDGNNEDNEKLRKPKHKKLKQPGDGNPDPNANPNVDPNANPNVDPNANPNANPNANPNANPNANPNANPNANPNANPNANPNANPNANPNANPNANPNANPNANPNVDPNANPNANPNANPNANPNANPNANPNANPNANPNANPNANPNANPNANPNANPNANPNANPNANPNANPNANPNANPNANPNANPNANPNANPNANPNANPNANPNKNNQGNGQGHNMPNDPNRNVDENANANNAVKNNNNEEPSDKHIEQYLKKIQNSLSTEWSPCSVTCGNGIQVRIKPGSADKPKDQLDYENDIEKKICKMEKCSSVFNVVNSSIGLIMVLSFLFLN

SEQ ID NO: 2486 - protein, 440 aa, Artificial Sequence
  derived and/or modified protein sequence (wt) from Pf(Pal97-115)__BAM84958.1__CSP
MMRKLAILSVSSFLFVEALFQEYQCYGSSSNTRVLNELNYDNAGTNLYNELEMNYYGKQENWYSLKKNSRSLGENDDGNNNNGDNGREGKDEDKRDGNNEDNEKLRKPKHKKLKQPGDGNPDPNANPNVDPNANPNVDPNANPNVDPNANPNANPNANPNANPNANPNANPNANPNANPNANPNANPNANPNANPNANPNANPNANPNANPNANPNANPNANPNANPNANPNANPNVDPNANPNANPNANPNANPNANPNANPNANPNANPNANPNANPNANPNANPNANPNANPNANPNANPNANPNANPNANPNKNNQGNGQGHNMPNDPNRNVDENANANNAVKNNNNEEPSDQHIEKYLKIIQNSLSTEWSPCSVTCGNGIQVRIKPGSADKPKDQLDYANDIEKKICKMEKCSSVFNVVNSSIGLIMVLSFLFLN

SEQ ID NO: 2487 - protein, 440 aa, Artificial Sequence
  derived and/or modified protein sequence (wt) from Pf(PMS5)__BAN59428.1__CSP
MMRKLAILSVSSFLFVEALFQEYQCYGSSSNTRVLNELNYDNAGTNLYNELEMNYYGKQENWYSLKKNSRSLGENDDGNNNNGDNGREGKDEDKRDGNNEDNEKLRKPKHKKLKQPGDGNPDPNANPNVDPNANPNVDPNANPNVDPNANPNANPNANPNANPNANPNANPNANPNANPNANPNANPNANPNANPNANPNANPNANPNANPNANPNANPNANPNANPNANPNANPNANPNANPNANPNANPNANPNANPNANPNANPNANPNANPNANPNANPNANPNANPNANPNANPNANPNANPNANPNANPNKNNQGNGQGHNMPNDPNRNVDENANANNDVKNNNNEEPSDKHIEQYLKKIQYSLSTEWSPCSVTCGNGIQVRIKPGSADKPKDQLDYENDIEKKICKMEKCSSVFNVVNSSIGLIMVLSFLFLN

SEQ ID NO: 2488 - protein, 439 aa, Artificial Sequence
  derived and/or modified protein sequence (wt) from Pf(J2)__ACO49408.1__CSP
MRKLAILSVSSFLFVEALFQEYQCYGSSSNTRVLNELNYDNAGTNLYNELEMNYYGKQENWYSLKKNSRSLGENDDGNNNNGDNGREGKDEDKRDGNNEDNEKLRKPKHKKLKQPGDGNPDPNANPNVDPNANPNVDPNANPNVDPNANPNANPNANPNANPNANPNANPNANPNANPNANPNANPNANPNANPNANPNANPNANPNANPNVDPNANPNANPNANPNANPNANPNANPNANPNANPNANPNANPNANPNANPNANPNANPNANPNANPNANPNANPNANPNANPNANPNANPNANPNANPNANPNKNNQGNGQGHNMPNDPNRNVDENANANNDVKNNNNEEPSDKHIEQYLKKIQYSLSTEWSPCSVTCGNGIQVRIKPGSADKPKDQLDYENDIEKKICKMEKCSSVFNVVNSSIGLIMVLSFLFLN

SEQ ID NO: 2489 - protein, 439 aa, Artificial Sequence
  derived and/or modified protein sequence (wt) from Pf(M4)__ACO49420.1__CSP
MRKLAILSVSSFLFVEALFQEYQCYGSSSNTRVLNELNYDNAGTNLYNELEMNYYGKQENWYSLKKNSRSLGENDDGNNNNGDNGREGKDEDKRDGNNEDNEKLRKPKHKKLKQPGDGNPDPNANPNVDPNANPNVDPNANPNANPNANPNANPNANPNANPNANPNANPNANPNANPNANPNANPNANPNANPNANPNANPNVDPNANPNANPNANPNANPNANPNANPNANPNANPNANPNANPNANPNANPNANPNANPNANPNANPNANPNANPNANPNANPNANPNANPNANPNANPNANPNANPNANPNKNNQGNGQGHNMPNDPNRNVDENANANNAVKNNNNEEPSDKHITEYLKKIQNSLSTEWSPCSVTCGNGIQVRIKPGSAGKSKDELDYENDIEKKICKMEKCSSVFNVVNSSIGLIMVLSFLFLN

SEQ ID NO: 2490 - protein, 439 aa, Artificial Sequence
  derived and/or modified protein sequence (wt) from Pf(TMS121)__ACO49498.1__CSP
MRKLAILSVSSFLFVEALFQEYQCYGSSSNTRVLNELNYDNAGTNLYNELEMNYYGKQENWYSLKKNSRSLGENDDGNNNNGDNGREGKDEDKRDGNNEDNEKLRKPKHKKLKQPGDGNPDPNANPNVDPNANPNVDPNANPNVDPNANPNANPNANPNANPNANPNANPNANPNANPNANPNANPNANPNANPNANPNANPNANPNANPNANPNANPNANPNANPNANPNANPNANPNANPNANPNANPNANPNANPNANPNANPNANPNANPNANPNANPNANPNANPNANPNANPNANPNANPNANPNANPNKNNQGNGQGHNMPNDPNRNVDENANANNDVKNNNNEEPSDKHIEQYLKKIQNSLSTEWSPCSVTCGNGIQVRIKPGSANKPKDELDYENDIEKKICKMEKCSSVFNVVNSSIGLIMVLSFLFLN

SEQ ID NO: 2491 - protein, 439 aa, Artificial Sequence
  derived and/or modified protein sequence (wt) from Pf(TMS180)__ACO49505.1__CSP
MRKLAILSVSSFLFVEALFQEYQCYGSSSNTRVLNELNYDNAGTNLYNELEMNYYGKQENWYSLKKNSRSLGENDDGNNNNGDNGREGKDEDKRDGNNEDNEKLRKPKHKKLKQPGDGNPDPNANPNVDPNANPNVDPNANPNVDPNANPNANPNANPNANPNANPNANPNANPNANPNANPNANPNANPNANPNANPNANPNANPNANPNANPNANPNANPNANPNANPNANPNANPNANPNANPNANPNANPNANPNANPNANPNANPNANPNANPNANPNANPNANPNANPNANPNANPNANPNANPNANPNKNNQGNGQGHNMPNDPNRNVDENANANNDVKNNNNEEPSDKHIEQYLKKIQYSLSTEWSPCSVTCGNGIQVRIKPGSADKPKDQLDYENDIEKKICKMEKCSSVFNVVNSSIGLIMVLSFLFLN

SEQ ID NO: 2492 - protein, 436 aa, Artificial Sequence
  derived and/or modified protein sequence (wt) from Pf(836)__AAA29576.1__CSP
MMRKLAILSVSSFLFVEALFQEYQCYGSSSNTRVLNELNYDNAGINLYNELEMNYYGKQENWYSLKKNSRSLGENDDGNNNNGDNGREGKDEDKRDGNNEDNEKLRKPKHKKLKQPGDGNPDPNANPNVDPNANPNVDPNANPNANPNANPNANPNANPNANPNANPNANPNANPNANPNANPNANPNANPNANPNANPNVDPNANPNANPNANPNANPNANPNANPNANPNANPNANPNANPNANPNANPNANPNANPNANPNANPNANPNANPNANPNANPNANPNANPNANPNANPNANPNANPNANPNKNNQGNGQGHNMPNDPNRNVDENANANNAVKNNNNEEPSDKHITEYLKKIQNSLSTEWSPCSVTCGNGIQVRIKPGSAGKSKDELDYENDIEKKICKMEKCSSVFNVVNSSIGLIMVLSFLFLN

SEQ ID NO: 2493 - protein, 436 aa, Artificial Sequence
  derived and/or modified protein sequence (wt) from Pf(842)__AAA29545.1__CSP
MMRKLAILSVSSFLFVEALFQEYQCYGSSSNTRVLNELNYDNAGINLYNELEMNYYGKQENWYSLKKNSRSLGENDDGNNNNGDNGREGKDEDKRDGNNEDNEKLRKPKHKKLKQPGDGNPDPNANPNVDPNANPNVDPNANPNVDPNANPNANPNANPNANPNANPNANPNANPNANPNANPNANPNANPNANPNANPNANPNANPNANPNANPNANPNANPNANPNANPNANPNANPNANPNANPNANPNANPNANPNANPNANPNANPNANPNANPNANPNANPNANPNANPNANPNANPNANPNANPNKNNQGNGQGHNMPNDPNRNVDENANANNDVKNNNNEEPSDKHIEQYLKKIQYSLSTEWSPCSVTCGNGIQVRIKPGSADKPKDQLDYENDIEKKICKMEKCSSVFNVVNSSIGLIMVLSFLFLN

SEQ ID NO: 2494 - protein, 436 aa, Artificial Sequence
  derived and/or modified protein sequence (wt) from Pf(India)__AAN87576.1__CSP
MMRKLAILSVSSFLFVEALFQEYQCYGSSSNTRVLNELNYDNAGTNLYNELEMNYYGKQENWYSLKKNSRSLGENDDGNNNNGDNGREGKDEDKRDGNNEDNEKLRKPKHKKLKQPGDGNPDPNANPNVDPNANPNVDPNANPNANPNANPNANPNANPNANPNANPNANPNANPNANPNANPNANPNANPNANPNANPNANPNANPNANPNANPNANPNANPNANPNANPNANPNANPNANPNANPNANPNANPNANPNANPNANPNANPNANPNANPNANPNANPNANPNANPNANPNANPNANPNANPNKNNQGNGQGHNMPNDPNRNVDENANANNDVKNNNNEEPSDKHIEEYLKKIQNSLSTEWSPCSVTCGNGIQVRIKPGSANKPKDELNYENDIEKKICKMEKCSSVFNVVNSSIGLIMVLSFLFLN

SEQ ID NO: 2495 - protein, 436 aa, Artificial Sequence
  derived and/or modified protein sequence (wt) from Pf(India)__AAN87620.1__CSP
MMRKLAILSVSSFLFVEALFQEYQCYGSSSNTRVLNELNYDNAGTNLYNELEMNYYGKQENWYSLKKNSRSLGENDDGNNNNGDNGREGKDEDKRDGNNEDNEKLRKPKHKKLKQPGGDNPDPNANPNVDPNANPNANPNANPNANPNVNPNANPNANPNANPNANPNANPNANPNANPNANPNVDPNANPNANPNANPNANPNANPNANPNANPNANPNANPNANPNANPNANPNANPNANPNANPNANPNANPNANPNANPNANPNANPNANPNANPNANPNANPNANPNANPNANPNANPNANPNANPNKNNQGNGQGHNMPNDPNRNVDENANANNAVKNNNNEEPSDKHIEQYLKKIQNSLSTEWSPCSVTCGNGIQVRIKPGSANKPKDELDYENDIEKKICKMEKCSSVFNVVNSSIGLIMVLSFLFLN

SEQ ID NO: 2496 - protein, 436 aa, Artificial Sequence
  derived and/or modified protein sequence (wt) from Pf(PFS19)__BAN59401.1__CSP
MMRKLAILSVSSFLFVEALFQEYQCYGSSSNTRVLNELNYDNAGTNLYNELEMNYYGKQENWYSLKKNSRSLGENDDGNNNNGDNGREGKDEDKRDGNNEDNEKLRKPKHKKLKQPGDGNPDPNANPNVDPNANPNVDPNANPNVDPNANPNANPNANPNANPNANPNANPNANPNANPNANPNANPNANPNANPNANPNANPNANPNANPNANPNANPNANPNANPNANPNANPNANPNANPNANPNANPNANPNANPNANPNANPNANPNANPNANPNANPNANPNANPNANPNANPNANPNANPNANPNKNNQGNGQGHNMPNDPNRNVDENANANNAVKNNNNEEPSDKHIEQYLKKIQNSLSTEWSPCSVTCGNGIQVRIKPGSANKPKDELDYENDIEKKICKMEKCSSVFNVVNSSIGLIMVLSFLFLN

SEQ ID NO: 2497 - protein, 436 aa, Artificial Sequence
  derived and/or modified protein sequence (wt) from Pf(Sol95-121)__BAM85068.1__CSP
MMRKLAILSVSSFLFVEALFQEYQCYGSSSNTRVLNELNYDNAGTNLYNELEMNYYGKQENWYSLKKNSRSLGENDDGNNNNGDNGREGKDEDKRDGNNEDNEKLRKPKHKKLKQPVDGNPDPNANPNVDPNANPNVDPNANPNVDPNANPNANPNANPNANPNANPNANPNANPNANPNANPNANPNANPNANPNANPNANPNANPNANPNANPNANPNANPNANPNANPNANPNANPNANPNANPNANPNANPNANPNANPNANPNANPNANPNANPNANPNANPNANPNANPNANPNANPNAKPNANPNKNNQGNGQGHNMPNDPNRNVDENANANNAVKNNNNEEPSDKHIEQYLKKIQNSLSTEWSPCSVTCGNGIQVRIKPGSADKPKDQLDYENDIEKKICKMEKCSSVFNVVNSSIGLIMVLSFLFLN

SEQ ID NO: 2498 - protein, 436 aa, Artificial Sequence
  derived and/or modified protein sequence (wt) from Pf(T837)__BAM84914.1__CSP
MMRKLAILSVSSFLFVEALFQEYQCYGSSSNTRVLNELNYDNAGTNLYNELEMNYYGKQENWYSLKKNSRSLGENDDGNNNNGDNGREGKDEDKRDGNNEDNEKLRKPKHKKLKQPGDGNPDPNANPNVDPNANPNVDPNANPNANPNANPNANPNANPNANPNANPNANPNANPNANPNANPNANPNANPNANPNANPNVDPNANPNANPNANPNANPNANPNANPNANPNANPNANPNANPNANPNANPNANPNANPNANPNANPNANPNANPNANPNANPNANPNANPNANPNANPNANPNANPNANPNKNNQGNGQGHNMPNDPNRNVDENANANNAVKNNNNEEPSDKHITEYLKKIQNSLSTEWSPCSVTCGNGIQVRIKPGSAGKSKDELDYENDIEKKICKMEKCSSVFNVVNSSIGLIMVLSFLFLN

SEQ ID NO: 2499 - protein, 436 aa, Artificial Sequence
  derived and/or modified protein sequence (wt) from Pf(TiMS95-071)__BAM84865.1__CSP
MMRKLAILSVSSFLFVEALFQEYQCYGSSSNTRVLNELNYDNAGTNLYNELEMNYYGKQENWYSLKKNSRSLGENDDGNNNNGDNGREGKDEDKRDGNNEDNEKLRKPKHKKLKQPGDGNPDPNANPNVDPNANPNVDPNANPNVDPNANPNANPNANPNANPNANPNANPNANPNANPNANPNANPNANPNANPNANPNANPNANPNANPNANPNANPNANPNANPNANPNANPNANPNANPNANPNANPNANPNANPNANPNANPNANPNANPNANPNANPNANPNANPNANPNANPNANPNANPNANPNKNNQGNGQGHNMPNDPNRNVDENANANNDVKNNNNEEPSDKHIEQYLKKIQYSLSTEWSPCSVTCGNGIQVRIKPGSADKPKDQLDYENDIEKKICKMEKCSSVFNVVNSSIGLIMVLSFLFLN

SEQ ID NO: 2500 - protein, 435 aa, Artificial Sequence
  derived and/or modified protein sequence (wt) from Pf(TM69)__ACO49446.1__CSP
MRKLAILSVSSFLFVEALFQEYQCYGSSSNTRVLNELNYDNAGTNLYNELEMNYYGKQENWYSLKKNSRSLGENDDGNNNNGDNGREGKDEDKRDGNNEDNEKLRKPKHKKLKQPGDGNPDPNANPNVDPNANPNVDPNANPNVDPNANPNANPNANPNANPNANPNANPNANPNANPNANPNANPNANPNANPNANPNANPNANPNANPNANPNANPNANPNANPNANPNANPNANPNANPNANPNANPNANPNANPNANPNANPNANPNANPNANPNANPNANPNANPNANPNANPNANPNANPNANPNKNNQGNGQGHNMPNDPNRNVDENANANNDVKNNNNEEPSDKHIEQYLKKIQYSLSTEWSPCSVTCGNGIQVRIKPGSADKPKDQLDYENDIEKKICKMEKCSSVFNVVNSSIGLIMVLSFLFLN

SEQ ID NO: 2501 - protein, 435 aa, Artificial Sequence
  derived and/or modified protein sequence (wt) from Pf(TMS177)__ACO49503.1__CSP
MRKLAILSVSSFLFVEALFQEYQCYGSSSNTRVLNELNYDNAGTNLYNELEMNYYGKQENWYSLKKNSRSLGENDDGNNNNGDNGREGKDEDKRDGNNEDNEKLRKPKHKKLKQPGDGNPDPNANPNVDPNANPNVDPNANPNVDPNANPNANPNANPNANPNANPNANPNANPNANPNANPNANPNANPNANPNANPNANPNANPNANPNANPNANPNANPNANPNANPNANPNANPNANPNANPNANPNANPNANPNANPNANPNANPNANPNANPNANPNANPNANPNANPNANPNANPNANPNANPNKNNQGNGQGHNMPNDPNRNVDENANANNAVKNNNNEEPSDKHIEQYLKKIQNSLSTEWSPCSVTCGNGIQVRIKPGSANKPKDELDYENDIEKKICKMEKCSSVFNVVNSSIGLIMVLSFLFLN

SEQ ID NO: 2502 - protein, 435 aa, Artificial Sequence
  derived and/or modified protein sequence (wt) from Pf(TMS178)__ACO49504.1__CSP
MRKLAILSVSSFLFVEALFQEYQCYGSSSNTRVLNELNYDNAGTNLYNELEMNYYGKQENWYSLKKNSRSLGENDDGNNNNGDNGREGKDEDKRDGNNEDNEKLRKPKHKKLKQPGDGNPDPNANPNVDPNANPNVDPNANPNANPNANPNANPNANPNANPNANPNANPNANPNANPNANPNANPNANPNANPNANPNVDPNANPNANPNANPNANPNANPNANPNANPNANPNANPNANPNANPNANPNANPNANPNANPNANPNANPNANPNANPNANPNANPNANPNANPNANPNANPNANPNANPNKNNQGNGQGHNMPNDPNRNVDENANANNAVKNNNNEEPSDKHITEYLKKIQNSLSTEWSPCSVTCGNGIQVRIKPGSAGKSKDELDYENDIEKKICKMEKCSSVFNVVNSSIGLIMVLSFLFLN

SEQ ID NO: 2503 - protein, 434 aa, Artificial Sequence
  derived and/or modified protein sequence (wt) from Pf(YL864)__ADF48458.1__CSP
MRKLAILSVSSFLFVEALFQEYQCYGSSSNTRVLNELNYDNAGTNLYNELEMNYYGKQENWYSLKKNSRSLGENDDGNNNNGDNGREGKDEDKRDGNNEDNEKLRKPKHKKLKQPGDGNPDPNANPNVDPNANPNVDPNANPNVDPNANPNANPNANPNANPNANPNANPNANPNANPNANPNANPNANPNANPNANPNANPNANPNVDPNANPNANPNANPNANPNANPNANPNANPNANPNANPNANPNANPNANPNANPNANPNANPNANPNANPNANPNANPNANPNANPNANPNANPNANPNANPNKNNQGNGQGHNMPNDPNRNVDENANANNDENNNNEEPSDKHIEQYLKKIQYSLSTEWSPCSVTCGNGIQVRIKPGSADKPKDQLDYENDIEKKICKMEKCSSVFNVVNSSIGLIMVLSFLFLN

SEQ ID NO: 2504 - protein, 432 aa, Artificial Sequence
  derived and/or modified protein sequence (wt) from Pf(838)__AAA29543.1__CSP
MMRKLAILSVSSFLFVEALFQEYQCYGSSSNTRVLNELNYDNAGINLYNELEMNYYGKQENWYSLKKNSRSLGENDDGNNNNGDNGREGKDEDKRDGNNEDNEKLRKPKHKKLKQPGDGNPDPNANPNVDPNANPNVDPNANPNVDPNANPNANPNANPNANPNANPNANPNANPNANPNANPNANPNANPNANPNANPNANPNANPNANPNANPNANPNANPNANPNANPNANPNANPNANPNANPNANPNANPNANPNANPNANPNANPNANPNANPNANPNANPNANPNANPNANPNANPNANPNKNNQGNGQGHNMPNDPNRNVDENANANNAVKNNNNEEPSDKHIEQYLKKIQNSLSTEWSPCSVTCGNGIQVRIKPGSANKPKDELDYENDIEKKICKMEKCSSVFNVVNSSIGLIMVLSFLFLN

SEQ ID NO: 2505 - protein, 432 aa, Artificial Sequence
  derived and/or modified protein sequence (wt) from Pf(834a)__AAA29571.1__CSP
MMRKLAILSVSSFLFVEALFQEYQCYGSSSNTRVLNELNYDNAGINLYNELEMNYYGKQENWYSLKKNSRSLGENDDGNNNNGDNGREGKDEDKRDGNNEDNEKLRKPKHKKLKQPGDGNPDPNANPNVDPNANPNVDPNANPNVDPNANPNVDPNANPNANPNANPNANPNANPNANPNANPNANPNANPNANPNANPNANPNANPNANPNANPNANPNANPNANPNANPNANPNANPNANPNANPNANPNANPNANPNANPNANPNANPNANPNANPNANPNANPNANPNANPNANPNANPNANPNKNNQGNGQGHNMPNDPNRNVDENANANNAVKNNNNEEPSDKHIEQYLKKIQNSLSTEWSPCSVTCGNGIQVRIKPGSANKPKDELDYENDIEKKICKMEKCSSVFNVVNSSIGLIMVLSFLFLN

SEQ ID NO: 2506 - protein, 432 aa, Artificial Sequence
  derived and/or modified protein sequence (wt) from Pf(India)__AAN87622.1__CSP
MMRKLAILSVSSFLFVEALFQEYQCYGSSSNTRVLNELNYDNAGTNLYNELEMNYYGKQENWYSLKKNSRSLGENDDGNNNNGDNGREGKDEDKRDGNNEDNEKLRKPKHKKLKQPADGNPDPNANPNVDPNANPNANPNANPNANPNANPNANPNANPNANPNANPNANPNANPNANPNVDPNANPNANPNANPNANPNANPNANPNANPNANPNANPNANPNANPNANPNANPNANPNANPNANPNANPNANPNANPNANPNANPNANPNANPNANPNANPNANPNANPNANPNANPNANPNANPNKNNQGNGQGHNMPNDPNRNVDENANANNAVKNNNNEEPSDKHIEQYLKKIQNSLSTEWSPCSVTCGNGIQVRIKPGSANKPKDELDYENDIEKKICKMEKCSSVFNVVNSSIGLIMVLSFLFLN

SEQ ID NO: 2507 - protein, 432 aa, Artificial Sequence
  derived and/or modified protein sequence (wt) from Pf(PFS31)__BAN59407.1__CSP
MMRKLAILSVSSFLFVEALFQEYQCYGSSSNTRVLNELNYDNAGTNLYNELEMNYYGKQENWYSLKKNSRSLGENDDGNNNNGDNGREGKDEDKRDGNNEDNEKLRKPKHKKLKQPGDGNPDPNANPNVDPNANPNVDPNANPNVDPNANPNANPNANPNANPNANPNANPNANPNANPNANPNANPNANPNANPNANPNANPNANPNANPNANPNANPNANPNANPNANPNANPNANPNANPNANPNANPNANPNANPNANPNANPNANPNANPNANPNANPNANPNANPNANPNANPNANPNANPNKNNQGNGQGHNMPNDPNRNVDENANANNDVKNNNNEEPSDKHIEEYLKKIQNSLSTEWSPCSVTCGNGIQVRIKPGSANKPKDELNYENDIEKKICKMEKCSSVFNVVNSSIGLIMVLSFLFLN

SEQ ID NO: 2508 - protein, 432 aa, Artificial Sequence
  derived and/or modified protein sequence (wt) from Pf(PNG912-070)__BAM85010.1__CSP
MMRKLAILSVSSFLFVEALFQEYQCYGSSSNTRVLNELNYDNAGTNLYNELEMNYYGKQENWYSLKKNSRSLGENDDGNNNNGDNGREGKDEDKRDGNNEDNEKLRKPKHKKLKQPVDGNPDPNANPNVDPNANPNVDPNANPNVDPNANPNANPNANPNANPNANPNANPNANPNANPNANPNANPNANPNANPNANPNANPNANPNANPNANPNANPNANPNANPNANPNANPNANPNANPNANPNANPNANPNANPNANPNANPNANPNANPNANPNANPNANPNANPNANPNANPNANPNANPNKNNQGNGQGHNMPNDPNRNVDENANANNAVKNNNNEEPSDKHIEQYLKKIQNSLSTEWSPCSVTCGNGIQVRIKPGSADKPKDQLDYENDIEKKICKMEKCSSVFNVVNSSIGLIMVLSFLFLN

SEQ ID NO: 2509 - protein, 432 aa, Artificial Sequence
  derived and/or modified protein sequence (wt) from Pf(PVS20)__BAN59429.1__CSP
MMRKLAILSVSSFLFVEALFQEYQCYGSSSNTRVLNELNYDNAGTNLYNELEMNYYGKQENWYSLKKNSRSLGENDDGNNNNGDNGREGKDEDKRDGNNEDNEKLRKPKHKKLKQPGDGNPDPNANPNVDPNANPNVDPNANPNVDPNANPNANPNANPNANPNANPNANPNANPNANPNANPNANPNANPNANPNANPNANPNANPNANPNANPNANPNANPNANPNANPNANPNANPNANPNANPNANPNANPNANPNANPNANPNANPNANPNANPNANPNANPNANPNANPNANPNANPNANPNKNNQGNGQGHNMPNDPNRNVDENANANNAVKNNNNEEPSDKHIEQYLKKIQNSLSTEWSPCSVTCGNGIQVRIKPGSANKPKDELDYENDIEKKICKMEKCSSVFNVVNSSIGLIMVLSFLFLN

SEQ ID NO: 2510 - protein, 432 aa, Artificial Sequence
  derived and/or modified protein sequence (wt) from Pf(Sol95-241)__BAM85085.1__CSP
MMRKLAILSVSSFLFVEALFQEYQCYGSSSNTRVLNELNYDNAGTNLYNELEMNYYGKQENWYSLKKNSRSLGENDDGNNNNGDNGREGKDEDKRDGNNEDNEKLRKPKHKKLKQPGDGNPDPNANPNVDPNANPNVDPNANPNVDPNANPNVDPNANPNANPNANPNANPNANPNANPNANPNANPNANPNANPNANPNANPNANPNANPNANPNANPNANPNANPNANPNANPNANPNANPNANPNANPNANPNANPNANPNANPNANPNANPNANPNANPNANPNANPNANPNANPNANPNANPNKNNQGNGQGHNMPNDPNRNVDENANANNAVKNNNNEEPSDKHIEQYLKKIQNSLSTEWSPCSVTCGNGIQVRIKPGSANKPKDELDYENDIEKKICKMEKCSSVFNVVNSSIGLIMVLSFLFLN

SEQ ID NO: 2511 - protein, 432 aa, Artificial Sequence
  derived and/or modified protein sequence (wt) from Pf(TiMS95-198)__BAM84895.1__CSP
MMRKLAILSVSSFLFVEALFQEYQCYGSSSNTRVLNELNYDNAGTNLYNELEMNYYGKQENWYSLKKNSRSLGENDDGNNNNGDNGREGKDEDKRDGNNEDNEKLRKPKHKKLKQPGDGNPDPNANPNVDPNANPNVDPNANPNVDPNANPNANPNANPNANPNANPNANPNANPNANPNANPNANPNANPNANPNANPNANPNANPNANPNANPNANPNANPNANPNANPNANPNANPNANPNANPNANPNANPNANPNANPNANPNANPNANPNANPNANPNANPNANPNANPNANPNANPNANPNKNNQGNGQGHNMPNDPNRNVDENANANNAVKNNNNEEPSDKHIEQYLKNIQNSLSTEWSPCSVTCGNGIQVRIKPGSANKPKDELDYENDIEKKICKMEKCSSVFNVVNSSIGLIMVLSFLFLN

SEQ ID NO: 2512 - protein, 431 aa, Artificial Sequence
  derived and/or modified protein sequence (wt) from Pf(D164)__ACO49368.1__CSP
MRKLAILSVSSFLFVEALFQEYQCYGSSSNTRVLNELNYDNAGTNLYNELEMNYYGKQENWYSLKKNSRSLGENDDGNNNNGDNGREGKDEDKRDGNNEDNEKLRKPKHKKLKQPGDGNPDPNANPNVDPNANPNVDPNANPNVDPNANPNVDPNANPNANPNANPNANPNANPNANPNANPNANPNANPNANPNANPNANPNANPNANPNANPNANPNANPNANPNANPNANPNANPNANPNANPNANPNANPNANPNANPNANPNANPNANPNANPNANPNANPNANPNANPNANPNANPNANPNKNNQGNGQGHNMPNDPNRNVDENANANNAVKNNNNEEPSDKHIEQYLKKIQNSLSTEWSPCSVTCGNGIQVRIKPGSANKPKDELDYENDIEKKICKMEKCSSVFNVVNSSIGLIMVLSFLFLN

SEQ ID NO: 2513 - protein, 431 aa, Artificial Sequence
  derived and/or modified protein sequence (wt) from Pf(E28)__ACO49378.1__CSP
MRKLAILSVSSFLFVEALFQEYQCYGSSSNTRVLNELNYDNAGTNLYNELEMNYYGKQENWYSLKKNSRSLGENDDGNNNNGDNGREGKDEDKRDGNNEDNEKLRKPKHKKLKQPGDGNPDPNANPNVDPNANPNVDPNANPNVDPNANPNANPNANPNANPNANPNANPNANPNANPNANPNANPNANPNANPNANPNANPNANPNANPNANPNANPNANPNANPNANPNANPNANPNANPNANPNANPNANPNANPNANPNANPNANPNANPNANPNANPNANPNANPNANPNANPNANPNANPNKNNQGNGQGHNMPNDPNRNVDENANANNAVKNNNNEEPSDKHIEQYLKNIQNSLSTEWSPCSVTCGNGIQVRIKPGSANKPKDELDYENDIEKKICKMEKCSSVFNVVNSSIGLIMVLSFLFLN

SEQ ID NO: 2514 - protein, 431 aa, Artificial Sequence
  derived and/or modified protein sequence (wt) from Pf(TM121)__ACO49457.1__CSP
MRKLAILSVSSFLFVEALFQEYQCYGSSSNTRVLNELNYDNAGTNLYNELEMNYYGKQENWYSLKKNSRSLGENDDGNNNNGDNGREGKDEDKRDGNNEDNEKLRKPKHKKLKQPGDGNPDPNANPNVDPNANPNVDPNANPNVDPNANPNANPNANPNANPNANPNANPNANPNANPNANPNANPNANPNANPNANPNANPNANPNANPNANPNANPNANPNANPNANPNANPNANPNANPNANPNANPNANPNANPNANPNANPNANPNANPNANPNANPNANPNANPNANPNANPNANPNANPNKNNQGNGQGHNMPNDPNRNVDENANANNDVKNNNNEEPSDKHIEQYLKKIQYSLSTEWSPCSVTCGNGIQVRIKPGSANKPKDELDYENDIEKKICKMEKCSSVFNVVNSSIGLIMVLSFLFLN

SEQ ID NO: 2515 - protein, 431 aa, Artificial Sequence
  derived and/or modified protein sequence (wt) from Pf(TM176)__ACO49467.1__CSP
MRKLAILSVSSFLFVEALFQEYQCYGSSSNTRVLNELNYDNAGTNLYNELEMNYYGKQENWYSLKKNSRSLGENDDGNNNNGDNGREGKDEDKRDGNNEDNEKLRKPKHKKLKQPGDGNPDPNANPNVDPNANPNVDPNANPNVDPNANPNANPNANPNANPNANPNANPNANPNANPNANPNANPNANPNANPNANPNANPNANPNANPNANPNANPNANPNANPNANPNANPNANPNANPNANPNANPNANPNANPNANPNANPNANPNANPNANPNANPNANPNANPNANPNANPNANPNANPNKNNQGNGQGHNMPNDPNRNVDENANANNDVKNNNNEEPSDKHIEQYLKKIQYSLSTEWSPCSVTCGNGIQVRIKPGSADKPKDQLDYENDIEKKICKMEKCSSVFNVVNSSIGLIMVLSFLFLN

SEQ ID NO: 2516 - protein, 431 aa, Artificial Sequence
  derived and/or modified protein sequence (wt) from Pf(TSY650)__ACO49541.1__CSP
MRKLAILSVSSFLFVEALFQEYQCYGSSSNTRVLNELNYDNAGTNLYNELEMNYYGKQENWYSLKKNSRSLGENDDGNNNNGDNGREGKDEDKRDGNNEDNEKLRKPKHKKLKQPGDGNPDPNANPNVDPNANPNVDPNANPNVDPNANPNANPNANPNANPNANPNANPNANPNANPNANPNANPNANPNANPNANPNANPNANPNANPNANPNANPNANPNANPNANPNANPNANPNANPNANPNANPNANPNANPNANPNANPNANPNANPNANPNANPNANPNANPNANPNANPNANPNANPNKNNQGNGQGHNMPNDPNRNVDENANANNAVKNNNNEEPSDKHIEQYLKKIQNSLSTEWSPCSVTCGNGIQVRIKPGSANKPKDELDYENDIEKKICKMEKCSSVFNVVNSSIGLIMVLSFLFLN

SEQ ID NO: 2517 - protein, 431 aa, Artificial Sequence
  derived and/or modified protein sequence (wt) from Pf(TSY682)__ACO49544.1__CSP
MRKLAILSVSSFLFVEALFQEYQCYGSSSNTRVLNELNYDNAGTNLYNELEMNYYGKQENWYSLKKNSRSLGENDDGNNNNGDNGREGKDEDKRDGNNEDNEKLRKPKHKKLKQPGDGNPDPNANPNVDPNANPNVDPNANPNVDPNANPNANPNANPNANPNANPNANPNANPNANPNANPNANPNANPNANPNANPNANPNANPNANPNANPNANPNANPNANPNANPNANPNANPNANPNANPNANPNANPNANPNANPNANPNANPNANPNANPNANPNANPNANPNANPNANPNANPNANPNKNNQGNGQGHNMPNDPNRNVDENANANNDVKNNNNEEPSDKHIEEYLKKIQNSLSTEWSPCSVTCGNGIQVRIKPGSANKPKDELNYENDIEKKICKMEKCSSVFNVVNSSIGLIMVLSFLFLN

SEQ ID NO: 2518 - protein, 428 aa, Artificial Sequence
  derived and/or modified protein sequence (wt) from Pf(India)__AAN87575.1__CSP
MMRKLAILSVSSFLFVEALFQEYQCYGSSSNTRVLNELNYDNAGTNLYNELEMNYYGKQENWYSLKKNSRSLGENDDGNNNNGDNGREGKDEDKRDGNNEDNEKLRKPKHKKLKQPGDGNPDPNANPNVDPNANPNVDPNANPNANPNANPNANPNANPNANPNANPNANPNANPNANPNANPNANPNANPNANPNANPNANPNANPNANPNANPNANPNANPNANPNANPNANPNANPNANPNANPNANPNANPNANPNANPNANPNANPNANPNANPNANPNANPNANPNANPNANPNANPNKNNQGNGRGHNMPNDPNRNVDENANANNDVKNNNNEEPSDKHIEEYLKKIQNSLSTEWSPCSVTCGNGIQVRIKPGSANKPKDELNYENDIEKKICKMEKCSSVFNVVNSSIGLIMVLSFLFLN

SEQ ID NO: 2519 - protein, 428 aa, Artificial Sequence
  derived and/or modified protein sequence (wt) from Pf(Pal97-082)__BAM84946.1__CSP
MMRKLAILSVSSFLFVEALFQEYQCYGSSSNTRVLNELNYDNAGTNLYNELEMNYYGKQENWYSLKKNSRSLGENDDGNNNNGDNGREGKDEDKRDGNNEDNEKLRKPKHKKLKQPGDGNPDPNANPNVDPNANPNVDPNANPNVDPNANPNANPNANPNANPNANPNANPNANPNANPNANPNANPNANPNANPNANPNANPNANPNANPNANPNANPNANPNVDPNANPNANPNANPNANPNANPNANPNANPNANPNANPNANPNANPNANPNANPNANPNANPNANPNANPNANPNANPNKNNQGNGQGHNMPNDPNRNVDENANANNAVKNNNNEEPSDKHIEQYLKKIQNSLSTEWSPCSVTCGNGIQVRIKPGSAGKSKDELDYENDIEKKICKMEKCSSVFNVVNSSIGLIMVLSFLFLN

SEQ ID NO: 2520 - protein, 428 aa, Artificial Sequence
  derived and/or modified protein sequence (wt) from Pf(Pal97-084)__BAM84947.1__CSP
MMRKLAILSVSSFLFVEALFQEYQCYGSSSNTRVLNELNYDNAGTNLYNELEMNYYGKQENWYSLKKNSRSLGENDDGNNNNGDNGREGKDEDKRDGNNEDNEKLRKPKHKKLKQPGDGNPDPNANPNVDPNANPNVDPNANPNVDPNANPNANPNANPNANPNANPNANPNANPNANPNANPNANPNANPNANPNANPNANPNANPNANPNANPNANPNANPNANPNANPNANPNANPNANPNANPNANPNANPNANPNANPNANPNANPNANPNANPNANPNANPNANPNANPNANPNANPNKNNQGNGQGHNMPNDPNRNVDENANANNAVKNNNNEEPSDQHIEKYLKIIQNSLSTEWSPCSVTCGNGIQVRIKPGSADKPKDQLDYANDIEKKICKMEKCSSVFNVVNSSIGLIMVLSFLFLN

SEQ ID NO: 2521 - protein, 428 aa, Artificial Sequence
  derived and/or modified protein sequence (wt) from Pf(PFS54)__BAN59412.1__CSP
MMRKLAILSVSSFLFVEALFQEYQCYGSSSNTRVLNELNYDNAGTNLYNELEMNYYGKQENWYSLKKNSRSLGENDDGNNNNGDNGREGKDEDKRDGNNEDNEKLRKPKHKKLKQPGDDNPDPNANPNVDPNANPNVDPNANPNANPNANPNANPNANPNANPNANPNANPNANPNANPNANPNANPNANPNANPNVDPNANPNANPNANPNANPNANPNANPNANPNANPNANPNANPNANPNANPNANPNANPNANPNANPNANPNANPNANPNANPNANPNANPNANPNANPNANPNANPNKNNQGNGQGHNMPNDPNRNVDENANANNAVKNNNNEEPSDKHIEQYLKKIQYSLSTEWSPCSVTCGNGIQVRIKPGSADKPKDQLDYENDIEKKICKMEKCSSVFNVVNSSIGLIMVLSFLFLN

SEQ ID NO: 2522 - protein, 428 aa, Artificial Sequence
  derived and/or modified protein sequence (wt) from Pf(PFS79)__BAN59422.1__CSP
MMRKLAILSVSSFLFVEALFQEYQCYGSSSNTRVLNELNYDNAGTNLYNELEMNYYGKQENWYSLKKNSRSLGENDDGNNNNGDNGREGKDEDKRDGNNEDNEKLRKPKHKKLKQPGDGNPDPNANPNVDPNANPNVDPNANPNVDPNANPNANPNANPNANPNANPNANPNANPNANPNANPNANPNANPNANPNANPNANPNANPNANPNANPNANPNANPNANPNANPNANPNANPNANPNANPNANPNANPNANPNANPNANPNANPNANPNANPNANPNANPNANPNANPNANPNANPNKNNQGNGQGHNMPNDPNRNVDENANANNAVKNNNNEEPSDKHIEQYLKKIQNSLSTEWSPCSVTCGNGIQVRIKPGSANKPKDELDYENDIEKKICKMEKCSSVFNVVNSSIGLIMVLSFLFLN

SEQ ID NO: 2523 - protein, 428 aa, Artificial Sequence
  derived and/or modified protein sequence (wt) from Pf(PFS83)__BAN59424.1__CSP
MMRKLAILSVSSFLFVEALFQEYQCYGSSSNTRVLNELNYDNAGTNLYNELEMNYYGKQENWYSLKKNSRSLGENDDGNNNNGDNGREGKDEDKRDGNNEDNEKLRKPKHKKLKQPGDGNPDPNANPNVDPNANPNVDPNANPNVDPNANPNVDPNANPNANPNANPNANPNANPNANPNANPNANPNANPNANPNANPNANPNANPNANPNANPNANPNANPNANPNANPNANPNANPNANPNANPNANPNANPNANPNANPNANPNANPNANPNANPNANPNANPNANPNANPNANPNANPNKNNQGNGQGHNMPNDPNRNVDENANANNAVKNNNNEEPSDKHIEQYLKKIQNSLSTEWSPCSVTCGNGIQVRIKPGSANKPKDELDYENDIEKKICKMEKCSSVFNVVNSSIGLIMVLSFLFLN

SEQ ID NO: 2524 - protein, 428 aa, Artificial Sequence
  derived and/or modified protein sequence (wt) from Pf(TiMS95-112)__BAM84878.1__CSP
MMRKLAILSVSSFLFVEALFQEYQCYGSSSNTRVLNELNYDNAGTNLYNELEMNYYGKQENWYSLKKNSRSLGENDDGNNNNGDNGREGKDEDKRDGNNEDNEKLRKPKHKKLKQPGDGNPDPNANPNVDPNANPNVDPNANPNVDPNANPNANPNANPNANPNANPNANPNANPNANPNANPNANPNANPNANPNANPNANPNANPNANPNANPNANPNANPNANPNANPNANPNANPNANPNANPNANPNANPNANPNANPNANPNANPNANPNANPNANPNANPNANPNANPNANPNANPNKNNQGNGQGHNMPNDPNRNVDENANANNDVKNNNNEEPSDKHIEQYLKKIQYSLSTEWSPCSVTCGNGIQVRIKPGSADKPKDQLDYENDIEKKICKMEKCSSVFNVVNSSIGLIMVLSFLFLN

SEQ ID NO: 2525 - protein, 427 aa, Artificial Sequence
  derived and/or modified protein sequence (wt) from Pf(E103)__ACO49384.1__CSP
MRKLAILSVSSFLFVEALFQEYQCYGSSSNTRVLNELNYDNAGTNLYNELEMNYYGKQENWYSLKKNSRSLGENDDGNNNNGDNGREGKDEDKRDGNNEDNEKLRKPKHKKLKQPGDGNPDPNANPNVDPNANPNVDPNANPNVDPNANPNANPNANPNANPNANPNANPNANPNANPNANPNANPNANPNANPNANPNANPNANPNANPNANPNANPNANPNANPNANPNANPNANPNANPNANPNANPNANPNANPNANPNANPNANPNANPNANPNANPNANPNANPNANPNANPNANPNKNNQGNGQGHNMPNDPNRNVDENANANNAVKNNNNEEPSDKHIEQYLKNIQNSLSTEWSPCSVTCGNGIQVRIKPGSANKPKDELDYENDIEKKICKMEKCSSVFNVVNSSIGLIMVLSFLFLN

SEQ ID NO: 2526 - protein, 427 aa, Artificial Sequence
  derived and/or modified protein sequence (wt) from Pf(TMS75)__ACO49490.1__CSP
MRKLAILSVSSFLFVEALFQEYQCYGSSSNTRVLNELNYDNAGTNLYNELEMNYYGKQENWYSLKKNSRSLGENDDGNNNNGDNGREGKDEDKRDGNNEDNEKLRKPKHKKLKQPGDGNPDPNANPNVDPNANPNVDPNANPNVDPNANPNVDPNANPNANPNANPNANPNANPNANPNANPNANPNANPNANPNANPNANPNANPNANPNANPNANPNANPNANPNANPNANPNANPNANPNANPNANPNANPNANPNANPNANPNANPNANPNANPNANPNANPNANPNANPNANPNANPNKNNQGNGQGHNMPNDPNRNVDENANANNAVKNNNNEEPSDKHIEQYLKKIQNSLSTEWSPCSVTCGNGIQVRIKPGSANKPKDELDYENDIEKKICKMEKCSSVFNVVNSSIGLIMVLSFLFLN

SEQ ID NO: 2527 - protein, 427 aa, Artificial Sequence
  derived and/or modified protein sequence (wt) from Pf(TSY621)__ACO49538.1__CSP
MRKLAILSVSSFLFVEALFQEYQCYGSSSNTRVLNELNYDNAGTNLYNELEMNYYGKQENWYSLKKNSRSLGENDDGNNNNGDNGREGKDEDKRDGNNEDNEKLRKPKHKKLKQPGDGNPDPNANPNVDPNANPNVDPNANPNVDPNANPNANPNANPNANPNANPNANPNANPNANPNANPNANPNANPNANPNANPNANPNANPNANPNANPNANPNANPNANPNANPNANPNANPNANPNANPNANPNANPNANPNANPNANPNANPNANPNANPNANPNANPNANPNANPNANPNANPNKNNQGNGQGHNMPNDPNRNVDENANANNDVKNNNNEEPSDKHIEQYLKKIQYSLSTEWSPCSVTCGNGIQVRIKPGSADKPKDQLDYENDIEKKICKMEKCSSVFNVVNSSIGLIMVLSFLFLN

SEQ ID NO: 2528 - protein, 427 aa, Artificial Sequence
  derived and/or modified protein sequence (wt) from Pf(TSY646)__ACO49540.1__CSP
MRKLAILSVSSFLFVEALFQEYQCYGSSSNTRVLNELNYDNAGTNLYNELEMNYYGKQENWYSLKKNSRSLGENDDGNNNNGDNGREGKDEDKRDGNNEDNEKLRKPKHKKLKQPGDGNPDPNANPNVDPNANPNVDPNANPNVDPNANPNANPNANPNANPNANPNANPNANPNANPNANPNANPNANPNANPNANPNANPNANPNANPNANPNANPNANPNANPNANPNANPNANPNANPNANPNANPNANPNANPNANPNANPNANPNANPNANPNANPNANPNANPNANPNANPNANPNKNNQGNGQGHNMPNDPNRNVDENANANNAVKNNNNEEPSDKHIEQYLKKIQNSLSTEWSPCSVTCGNGIQVRIKPGSANKPKDELDYENDIEKKICKMEKCSSVFNVVNSSIGLIMVLSFLFLN

SEQ ID NO: 2529 - protein, 424 aa, Artificial Sequence
  derived and/or modified protein sequence (wt) from Pf(806)__AAA29562.1__CSP
MMRKLAILSVSSFLFVEALFQEYQCYGSSSNTRVLNELNYDNAGINLYNELEMNYYGKQENWYSLKKNSRSLGENDDGNNNNGDNGREGKDEDKRDGNNEDNEKLRKPKHKKLKQPGDGNPDPNANPNVDPNANPNVDPNANPNVDPNANPNANPNANPNANPNANPNANPNANPNANPNANPNANPNANPNANPNANPNANPNANPNANPNANPNANPNANPNANPNANPNANPNANPNANPNANPNANPNANPNANPNANPNANPNANPNANPNANPNANPNANPNANPNANPNANPNKNNQGNGQGHNMPNDPNRNVDENANANNAVKNNNNEEPSDKHIEQYLKKIQNSLSTEWSPCSVTCGNGIQVRIKPGSANKPKDELDYENDIEKKICKMEKCSSVFNVVNSSIGLIMVLSFLFLN

SEQ ID NO: 2530 - protein, 424 aa, Artificial Sequence
  derived and/or modified protein sequence (wt) from Pf(Pal97-100)__BAM84952.1__CSP
MMRKLAILSVSSFLFVEALFQEYQCYGSSSNTRVLNELNYDNAGTNLYNELEMNYYGKQENWYSLKKNSRSLGENDDGNNNNGDNGREGKDEDKRDGNNEDNEKLRKPKHKKLKQPGDGNPDPNANPNVDPNANPNVDPNANPNVDPNANPNANPNANPNANPNANPNANPNANPNANPNANPNANPNANPNVDPNANPNANPNANPNANPNANPNANPNANPNANPNANPNANPNANPNANPNANPNANPNANPNANPNANPNANPNANPNANPNANPNANPNANPNANPNANPNANPNKNNQGNGQGHNMPNDPNRNVDENANANNAVKNNNNEEPSDKHITEYLKKIQNSLSTEWSPCSVTCGNGIQVRIKPGSAGKSKDELDYENDIEKKICKMEKCSSVFNVVNSSIGLIMVLSFLFLN

SEQ ID NO: 2531 - protein, 424 aa, Artificial Sequence
  derived and/or modified protein sequence (wt) from Pf(PFS89)__BAN59425.1__CSP
MMRKLAILSVSSFLFVEALFQEYQCYGSSSNTRVLNELNYDNAGTNLYNELEMNYYGKQENWYSLKKNSRSLGENDDGNNNNGDNGREGKDEDKRDGNNEDNEKLRKPKHKKLKQPGDGNPDPNANPNVDPNANPNVDPNANPNVDPNANPNANPNANPNANPNANPNANPNANPNANPNANPNANPNANPNANPNANPNANPNANPNANPNANPNANPNANPNANPNANPNANPNANPNANPNANPNANPNANPNANPNANPNANPNANPNANPNANPNANPNANPNANPNANPNANPNKNNQGNGQGHNMPNDPNRNVDENANANNAVKNNNNEEPSDKHIEQYLKKIQNSLSTEWSPCSVTCGNGIQVRIKPGSANKPKDELDYENDIEKKICKMEKCSSVFNVVNSSIGLIMVLSFLFLN

SEQ ID NO: 2532 - protein, 424 aa, Artificial Sequence
  derived and/or modified protein sequence (wt) from Pf(PNG912-035)__BAM85007.1__CSP
MMRKLAILSVSSFLFVEALFQEYQCYGSSSNTRVLNELNYDNAGTNLYNELEMNYYGKQENWYSLKKNSRSLGENDDGNNNNGDNGREGKDEDKRDGNNEDNEKLRKPKHKKLKQPGDGNPDPNANPNVDPNANPNVDPNANPNVDPNANPNANPNANPNANPNANPNANPNANPNANPNANPNANPNANPNANPNANPNANPNANPNANPNANPNANPNVDPNANPNANPNANPNANPNANPNANPNANPNANPNANPNANPNANPNANPNANPNANPNANPNANPNANPNANPNANPNKNNQGNGQGHNMPNDPNRNVDENANANNAVKNNNNEEPSDKHIEQYLKKIQNSLSTEWSPCSVTCGNGIQVRIKPGSADKPKDQLDYENDIEKKICKMEKCSSVFNVVNSSIGLIMVLSFLFLN

SEQ ID NO: 2533 - protein, 424 aa, Artificial Sequence
  derived and/or modified protein sequence (wt) from Pf(Sol95-308)__BAM85089.1__CSP
MMRKLAILSVSSFLFVEALFQEYQCYGSSSNTRVLNELNYDNAGTNLYNELEMNYYGKQENWYSLKKNSRSLGENDDGNNNNGDNGREGKDEDKRDGNNEDNEKLRKPKHKKLKQPGDGNPDPNANPNVDPNANPNVDPNANPNVDPNANPNVDPNANPNANPNANPNANPNANPNANPNANPNANPNANPNANPNANPNANPNANPNANPNANPNANPNANPNANPNANPNANPNANPNANPNANPNANPNANPNANPNANPNANPNANPNANPNANPNANPNANPNANPNANPNANPNKNNQGNGQGHNMPNDPNRNVDENANANNAVKNNNNEEPSDKHIEQYLKKIQNSLSTEWSPCSVTCGNGIQVRIKPGSANKPKDELDYENDIEKKICKMEKCSSVFNVVNSSIGLIMVLSFLFLN

SEQ ID NO: 2534 - protein, 424 aa, Artificial Sequence
  derived and/or modified protein sequence (wt) from Pf(Sol95-346)__BAM85102.1__CSP
MMRKLAILSVSSFLFVEALFQEYQCYGSSSNTRVLNELNYDNAGTNLYNELEMNYYGKQENWYSLKKNSRSLGENDDGNNNNGDNGREGKDEDKRDGNNEDNEKLRKPKHKKLKQPGDGNPDPNANPNVDPNANPNVDPNANPNVDPNANPNANPNANPNANPNANPNANPNANPNANPNANPNANPNANPNANPNANPNANPNANPNANPNANPNANPNVDPNANPNANPNANPNANPNANPNANPNANPNANPNANPNANPNANPNANPNANPNANPNANPNANPNANPNANPNANPNKNNQGNGQGHNMPNDPNRNVDENANANNAVKNNNNEEPSDKHIEQYLKKIQNSLSTEWSPCSVTCGNGIQVRIKPGSAGKSKDELDYENDIEKKICKMEKCSSVFNVVNSSIGLIMVLSFLFLN

SEQ ID NO: 2535 - protein, 424 aa, Artificial Sequence
  derived and/or modified protein sequence (wt) from Pf(T4 Thailand)__AAA29555.1__CSP
MMRKLAILSVSSFLFVEALFQEYQCYGSSSNTRVLNELNYDNAGTNLYNELEMNYYGKQENWYSLKKNSRSLGENDDGNNNNGDNNREGKDEDKRDGNNEDNETLRKPKHKKLKQPGDGNPDPNANPNVDPNANPNVDPNANPNVDPNANPNANPNANPNANPNANPNANPNANPNANPNANPNANPNANPNANPNANPNANPNANPNANPNANPNANPNANPNANPNANPNANPNANPNANPNANPNANPNANPNANPNANPNANPNANPNANPNANPNANPNANPNANPNANPNANPNKNNQGNGQGHNMPNDPNRNVDENANANNAVKNNNNEEPSDKHIEQYLKKIQNSLSTEWSPCSVTCGNGIQVRIKPGSANKPKDELDYENDIEKKICKMEKCSSVFNVVNSSIGLIMVLSFLFLN

SEQ ID NO: 2536 - protein, 424 aa, Artificial Sequence
  derived and/or modified protein sequence (wt) from Pf(Tz03-025)__BAM84798.1__CSP
MMRKLAILSVSSFLFVEALFQEYQCYGSSSNTRVLNELNYDNAGTNLYNELEMNYYGKQENWYSLKKNSRSLGENDDGNNNNGDNGREGKDEDKRDGNNEDNEKLRKPKHKKLKQPADGNPDPNANPNVDPNANPNVDPNANPNVDPNANPNANPNANPNANPNANPNANPNANPNANPNANPNANPNANPNANPNANPNANPNANPNANPNANPNANPNVDPNANPNANPNANPNANPNANPNANPNANPNANPNANPNANPNANPNANPNANPNANPNANPNANPNANPNANPNANPNKNNQGNGQGHNMPNDPNRNVDENANANNAVKNNNNEEPSDQHIEKYLKTIKNSLSTEWSPCSVTCGNGIQVRIKPGSANKPKDQLDYANDIEKKICKMEKCSSVFNVVNSSIGLIMVLSFLFLN

SEQ ID NO: 2537 - protein, 423 aa, Artificial Sequence
  derived and/or modified protein sequence (wt) from Pf(NR62)__ADF48375.1__CSP
MRKLAILSVSSFLFVEALFQEYQCYGSSSNTRVLNELNYDNAGTNLYNELEMNYYGKQENWYSLKKNSRSLGENDDGNNNNGDNGREGKDEDKRDGNNEDNEKLRKPKHKKLKQPGDGNPDPNANPNVDPNANPNVDPNANPNVDPNANPNVDPNANPNANPNANPNANPNANPNANPNANPNANPNANPNANPNANPNANPNANPNANPNANPNANPNANPNANPNANPNANPNANPNANPNANPNANPNANPNANPNANPNANPNANPNANPNANPNANPNANPNANPNANPNANPNKNNQGNGQGHNMPNDPNRNVDENANANNAVKNNNNEEPSDKHIEQYLKKIQNSLSTEWSPCSVTCGNGIQVRIKPGSANKPKDELDYENDIEKKICKMEKCSSVFNVVNSSIGLIMVLSFLFLN

SEQ ID NO: 2538 - protein, 423 aa, Artificial Sequence
  derived and/or modified protein sequence (wt) from Pf(TSY673)__ACO49542.1__CSP
MRKLAILSVSSFLFVEALFQEYQCYGSSSNTRVLNELNYDNAGTNLYNELEMNYYGKQENWYSLKKNSRSLGENDDGNNNNGDNGREGKDEDKRDGNNEDNEKLRKPKHKKLKQPGDGNPDPNANPNVDPNANPNVDPNANPNVDPNANPNANPNANPNANPNANPNANPNANPNANPNANPNANPNANPNVDPNANPNANPNANPNANPNANPNANPNANPNANPNANPNANPNANPNANPNANPNANPNANPNANPNANPNANPNANPNANPNANPNANPNANPNANPNANPNANPNKNNQGNGQGHNMPNDPNRNVDENANANNAVKNNNNEEPSDKHITEYLKKIQNSLSTEWSPCSVTCGNGIQVRIKPGSAGKSKDELDYENDIEKKICKMEKCSSVFNVVNSSIGLIMVLSFLFLN

SEQ ID NO: 2539 - protein, 423 aa, Artificial Sequence
  derived and/or modified protein sequence (wt) from Pf(TSY688)__ACO49545.1__CSP
MRKLAILSVSSFLFVEALFQEYQCYGSSSNTRVLNELNYDNAGTNLYNELEMNYYGKQENWYSLKKNSRSLGENDDGNNNNGDNGREGKDEDKRDGNNEDNEKLRKPKHKKLKQPGDGNPDPNANPNVDPNANPNVDPNANPNVDPNANPNANPNANPNANPNANPNANPNANPNANPNANPNANPNANPNANPNANPNANPNANPNANPNANPNANPNANPNANPNANPNANPNANPNANPNANPNANPNANPNANPNANPNANPNANPNANPNANPNANPNANPNANPNANPNANPNKNNQGNGQGHNMPNDPNRNVDENANANNAVKNNNNEEPSDKHIEQYLKKIQNSLSTEWSPCSVTCGNGIQVRIKPGSANKPKDELDYENDIEKKICKMEKCSSVFNVVNSSIGLIMVLSFLFLN

SEQ ID NO: 2540 - protein, 420 aa, Artificial Sequence
  derived and/or modified protein sequence (wt) from Pf(835b)__AAA29574.1__CSP
MMRKLAILSVSSFLFVEALFQEYQCYGSSSNTRVLNELNYDNAGINLYNELEMNYYGKQENWYSLKKNSRSLGENDDGNNNNGDNGREGKDEDKRDGNNEDNEKLRKPKHKKLKQPGDGNPDPNANPNVDPNANPNVDPNANPNVDPNANPNANPNANPNANPNANPNANPNANPNANPNANPNANPNANPNANPNANPNANPNANPNANPNANPNANPNANPNVDPNANPNANPNANPNANPNANPNANPNANPNANPNANPNANPNANPNANPNANPNANPNANPNANPNANPNKNNQGNGQGHNMPNDPNRNVDENANANNAVKNNNNEEPSDKHIKEYLTKIQNSISTEWSPCSVTCGNGIQVRIKPGSAGKPKDELEYENDIEKKICKMEKCSSVFNVVNSSIGLIMVLSFLFLN

SEQ ID NO: 2541 - protein, 420 aa, Artificial Sequence
  derived and/or modified protein sequence (wt) from Pf(FCC1/HN)__AAW59565.1__CSP
MMRKLAILSVSSFLFVEALFQEYQCYGSSSNTRVLNELNYDNAGTNLYNELEMNYYGKQENWYSLKKNSRSLGENDDGNNNNGDNGREGKDEDKRDGNNEDNEKLRKPKHKKLKQPGDGNPDPNANPNVDPNANPNVDPNANPNVDPNANPNANPNANPNANPNANPNANPNANPNANPNANPNANPNANPNANPNANPNANPNANPNANPNANPNANPNANPNANPNANPNANPNANPNANPNANPNANPNANPNANPNANPNANPNANPNANPNANPNANPNANPNANPNANPNKNNQGNGQGHNMPNDPNRNVDENANANNAVKNNNNEEPSDKHIEQYLKKIQNSLSTEWSPCSVTCGNGIQARIKPGSANKPKDELDYENDIEKKICKMEKCSSVFNVVNSSIGLIMVLSFLFLN

SEQ ID NO: 2542 - protein, 420 aa, Artificial Sequence
  derived and/or modified protein sequence (wt) from Pf(K1)__AAA29552.1__CSP
MMRKLAILSVSSFLFVEALFQEYQCYGSSSNTRVLNELNYDNAGINLYNELEMNYYGKQENWYSLKKNSRSLGENDDGNNNNGDNGREGKDEDKRDGNNEDNEKLRKPKHKKLKQPGDGNPDPNANPNVDPNANPNVDPNANPNVDPNANPNANPNANPNANPNANPNANPNANPNANPNANPNANPNVDPNANPNANPNANPNANPNANPNANPNANPNANPNANPNANPNANPNANPNANPNANPNANPNANPNANPNANPNANPNANPNANPNANPNANPNANPNANPNANPNKNNQGNGQGHNMPNDPNRNVDENANANNDVKNNNNEEPSDKHIEQYLKKIQYSLSTEWSPCSVTCGNGIQVRIKPGSADKPKDQLDYENDIEKKICKMEKCSSVFNVVNSSIGLIMVLSFLFLN

SEQ ID NO: 2543 - protein, 420 aa, Artificial Sequence
  derived and/or modified protein sequence (wt) from Pf(K1)__BAD73952.1__CSP
MMRKLAILSVSSFLFVEALFQEYQCYGSSSNTRVLNELNYDNAGTNLYNELEMNYYGKQENWYSLKKNSRSLGENDDGNNNNGDNGREGKDEDKRDGNNEDNEKLRKPKHKKLKQPGDGNPDPNANPNVDPNANPNVDPNANPNVDPNANPNANPNANPNANPNANPNANPNANPNANPNANPNANPNVDPNANPNANPNANPNANPNANPNANPNANPNANPNANPNANPNANPNANPNANPNANPNANPNANPNANPNANPNANPNANPNANPNANPNANPNANPNANPNANPNKNNQGNGQGHNMPNDPNRNVDENANANNDVKNNNNEEPSDKHIEQYLKKIQYSLSTEWSPCSVTCGNGIQVRIKPGSADKPKDQLDYENDIEKKICKMEKCSSVFNVVNSSIGLIMVLSFLFLN

SEQ ID NO: 2544 - protein, 420 aa, Artificial Sequence
  derived and/or modified protein sequence (wt) from Pf(Pal97-074)__BAM84944.1__CSP
MMRKLAILSVSSFLFVEALFQEYQCYGSSSNTRVLNELNYDNAGTNLYNELEMNYYGKQENWYSLKKNSRSLGENDDGNNNNGDNGREGKDEDKRDGNNEDNEKLRKPKHKKLKQPVDGNPDPNANPNVDPNANPNVDPNANPNVDPNANPNANPNANPNANPNANPNANPNANPNANPNANPNANPNANPNANPNANPNANPNANPNANPNANPNANPNANPNANPNANPNANPNANPNANPNANPNANPNANPNANPNANPNANPNANPNANPNANPNANPNANPNANPNANPNKNNQGNGQGHNMPNDPNRNVDENANANNAVKNNNNEEPSDQHIEKYLKIIQNSLSTEWSPCSVTCGNGIQVRIKPGSADKPKDQLDYANDIEKKICKMEKCSSVFNVVNSSIGLIMVLSFLFLN

SEQ ID NO: 2545 - protein, 420 aa, Artificial Sequence
  derived and/or modified protein sequence (wt) from Pf(Pal97-108)__BAM84957.1__CSP
MMRKLAILSVSSFLFVEALFQEYQCYGSSSNTRVLNELNYDNAGTNLYNELEMNYYGKQENWYSLKKNSRSLGENDDGNNNNGDNGREGKDEDKRDGNNEDNEKLRKPKHKKLKQPGDGNPDPNANPNVDPNANPNVDPNANPNVDPNANPNANPNANPNANPNANPNANPNANPNANPNANPNANPNANPNANPNANPNANPNANPNANPNANPNANPNANPNANPNANPNANPNANPNANPNANPNANPNANPNANPNANPNANPNANPNANPNANPNANPNANPNANPNANPNKNNQGNGQGHNMPNDPNRNVDENANANNAVKNNNNEEPSDKHIKEYLTKIQNSISTEWSPCSVTCGNGIQVRIKPGSAGKPKDELNYENDIEKKICKMEKCSSVFNVVNSSIGLIMVLSFLFLN

SEQ ID NO: 2546 - protein, 420 aa, Artificial Sequence
  derived and/or modified protein sequence (wt) from Pf(PNG225-053)__BAM85032.1__CSP
MMRKLAILSVSSFLFVEALFQEYQCYGSSSNTRVLNELNYDNAGTNLYNELEMNYYGKQENWYSLKKNSRSLGENDDGNNNNGDNGREGKDEDKRDGNNEDNEKLRKPKHKKLKQPGDGNPDPNANPNVDPNANPNVDPNANPNVDPNANPNANPNANPNANPNANPNANPNANPNANPNANPNANPNANPNANPNANPNANPNANPNANPNANPNANPNANPNANPNANPNANPNANPNANPNANPNANPNANPNANPNANPNANPNANPNANPNANPNANPNANPNANPNANPNKNNQGNGQGHNMPNDPNRNVDENANANNAVKNNNNEEPSDKHIEQYLKKIQNSLSTEWSPCSVTCGNGIQVRIKPGSANKPKDELDYENDIEKKICKMEKCSSVFNVVNSSIGLIMVLSFLFLN

SEQ ID NO: 2547 - protein, 420 aa, Artificial Sequence
  derived and/or modified protein sequence (wt) from Pf(Sol95-113)__BAM85062.1__CSP
MMRKLAILSVSSFLFVEALFQEYQCYGSSSNTRVLNELNYDNAGTNLYNELEMNYYGKQENWYSLKKNSRSLGENDDGNNNNGDNGREGKDEDKRDGNNEDNEKLRKPKHKKLKQPGDGNPDPNANPNVDPNANPNVDPNANPNVDPNANPNVDPNANPNANPNANPNANPNANPNANPNANPNANPNANPNANPNANPNANPNANPNANPNANPNANPNANPNANPNANPNANPNANPNANPNANPNANPNANPNANPNANPNANPNANPNANPNANPNANPNANPNANPNANPNKNNQGNGQGHNMPNDPNRNVDENANANNAVKNNNNEEPSDKHIEQYLKKIQNSLSTEWSPCSVTCGNGIQVRIKPGSANKPKDELDYENDIEKKICKMEKCSSVFNVVNSSIGLIMVLSFLFLN

SEQ ID NO: 2548 - protein, 420 aa, Artificial Sequence
  derived and/or modified protein sequence (wt) from Pf(Sol95-328)__BAM85093.1__CSP
MMRKLAILSVSSFLFVEALFQEYQCYGSSSNTRVLNELNYDNAGTNLYNELEMNYYGKQENWYSLKKNSRSLGENDDGNNNNGDNGREGKDEDKRDGNNEDNEKLRKPKHKKLKQPGDGNPDPNANPNVDPNANPNVDPNANPNVDPNANPNANPNANPNANPNANPNANPNANPNANPNANPNANPNANPNANPNANPNANPNANPNANPNANPNVDPNANPNANPNANPNANPNANPNANPNANPNANPNANPNANPNANPNANPNANPNANPNANPNANPNANPNANPNANPNKNNQGNGQGHNMPNDPNRNVDENANANNAVKNNNNEEPSDKHIEQYLKKIQNSLSTEWSPCSVTCGNGIQVRIKPGSADKPKDQLDYENDIEKKICKMEKCSSVFNVVNSSIGLIMVLSFLFLN

SEQ ID NO: 2549 - protein, 420 aa, Artificial Sequence
  derived and/or modified protein sequence (wt) from Pf(TiMS95-208)__BAM84896.1__CSP
MMRKLAILSVSSFLFVEALFQEYQCYGSSSNTRVLNELNYDNAGTNLYNELEMNYYGKQENWYSLKKNSRSLGENDDGNNNNGDNGREGKDEDKRDGNNEDNEKLRKPKHKKLKQPGDGNPDPNANPNVDPNANPNVDPNANPNVDPNANPNANPNANPNANPNANPNANPNANPNANPNANPNANPNANPNANPNANPNANPNANPNANPNANPNANPNANPNANPNANPNANPNANPNANPNANPNANPNANPNANPNANPNANPNANPNANPNANPNANPNANPNANPNANPNKNNQGNGQGHNMPNDPNRNVDENANANNDVKNNNNEEPSDKHIEQYLKKIQYSLSTEWSPCSVTCGNGIQVRIKPGSADKPKDQLDYENDIEKKICKMEKCSSVFNVVNSSIGLIMVLSFLFLN

SEQ ID NO: 2550 - protein, 420 aa, Artificial Sequence
  derived and/or modified protein sequence (wt) from Pf(TiMS95-260)__BAM84907.1__CSP
MMRKLAILSVSSFLFVEALFQEYQCYGSSSNTRVLNELNYDNAGTNLYNELEMNYYGKQENWYSLKKNSRSLGENDDGNNNNGDNGREGKDEDKRDGNNEDNEKLRKPKHKKLKQPGDGNPDPNANPNVDPNANPNVDPNANPNVDPNANPNANPNANPNANPNANPNANPNANPNANPNANPNANPNANPNANPNANPNANPNANPNANPNANPNANPNANPNVDPNANPNANPNANPNANPNANPNANPNANPNANPNANPNANPNANPNANPNANPNANPNANPNANPNANPNKNNQGNGQGHNMPNDPNRNVDENANANNAVKNNNNEEPSDKHIKEYLTKIQNSISTEWSPCSVTCGNGIQVRIKPGSAGKPKDELNYENDIEKKICKMEKCSSVFNVVNSSIGLIMVLSFLFLN

SEQ ID NO: 2551 - protein, 420 aa, Artificial Sequence
  derived and/or modified protein sequence (wt) from Pf(Tz93-030)__BAM84756.1__CSP
MMRKLAILSVSSFLFVEALFQEYQCYGSSSNTRVLNELNYDNAGTNLYNELEMNYYGKQENWYSLKKNSRSLGENDDGNNNNGDNGREGKDEDKRDGNNEDNEKLRKPKHKKLKQPGDGNPDPNANPNVDPNANPNVDPNANPNVDPNANPNANPNANPNANPNANPNANPNANPNANPNANPNANPNANPNANPNANPNANPNANPNANPNVDPNANPNANPNANPNANPNANPNANPNANPNANPNANPNANPNANPNANPNANPNANPNANPNANPNANPNANPNANPNANPNKNNQGNGQGHNMPNDPNRNVDENANANNAVKNNNNEEPSDKHIKEYLNKIQNSISTEWSPCSVTCGNGIQVRIKPGSADKPKDQLDYINDIEKKICKMEKCSSVFNVVNSSIGLIMVLSFLFLN

SEQ ID NO: 2552 - protein, 420 aa, Artificial Sequence
  derived and/or modified protein sequence (wt) from Pf(Tz93-038)__BAM84758.1__CSP
MMRKLAILSVSSFLFVEALFQEYQCYGSSSNTRVLNELNYDNAGTNLYNELEMNYYGKQENWYSLKKNSRSLGENDDGNNNNGDNGREGKDEDKRDGNNEDNEKLRKPKHKKLKQPGDGNPDPNANPNVDPNANPNVDPNANPNVDPNANPNANPNANPNANPNANPNANPNANPNANPNANPNANPNANPNANPNANPNANPNANPNANPNANPNVDPNANPNANPNANPNANPNANPNANPNANPNANPNANPNANPNANPNANPNANPNANPNANPNANPNANPNANPNANPNKNNQGNGQGHNMPNDPNRNVDENANANNAVKNNNNEEPSDKHIKEYLNKIQNSISTEWSPCSVTCGNGIQVRIKPGSADKPKDQLDYINDIEKKICKMEKCSSVFNVVNSSIGLIMVLSFLFLN

SEQ ID NO: 2553 - protein, 419 aa, Artificial Sequence
  derived and/or modified protein sequence (wt) from Pf(TMS31)__ACO49480.1__CSP
MRKLAILSVSSFLFVEALFQEYQCYGSSSNTRVLNELNYDNAGTNLYNELEMNYYGKQENWYSLKKNSRSLGENDDGNNNNGDNGREGKDEDKRDGNNEDNEKLRKPKHKKLKQPGDGNPDPNANPNVDPNANPNVDPNANPNVDPNANPNANPNANPNANPNANPNANPNANPNANPNANPNANPNANPNANPNANPNANPNANPNANPNANPNANPNANPNANPNANPNANPNANPNANPNANPNANPNANPNANPNANPNANPNANPNANPNANPNANPNANPNANPNANPNKNNQGNGQGHNMPNDPNRNVDENANANNAVKNNNNEEPSDKHIEQYLKKMQNSLSTEWSPCSVTCGNGIQVRIKPGSANKPKDELDYENDIEKKICKMEKCSSVFNVVNSSIGLIMVLSFLFLN

SEQ ID NO: 2554 - protein, 419 aa, Artificial Sequence
  derived and/or modified protein sequence (wt) from Pf(TSY172)__ACO49517.1__CSP
MRKLAILSVSSFLFVEALFQEYQCYGSSSNTRVLNELNYDNAGTNLYNELEMNYYGKQENWYSLKKNSRSLGENDDGNNNNGDNGREGKDEDKRDGNNEDNEKLRKPKHKKLKQPGDGNPDPNANPNVDPNANPNVDPNANPNVDPNANPNANPNANPNANPNANPNANPNANPNANPNANPNANPNANPNANPNANPNANPNANPNANPNANPNANPNANPNANPNANPNANPNANPNANPNANPNANPNANPNANPNANPNANPNANPNANPNANPNANPNANPNANPNANPNKNNQGNGQGHNMPNDPNRNVDENANANNAVKNNNNEEPSDKHIEQYLKKIQNSLSTEWSPCSVTCGNGIQVRIKPGSANKPKDELDYENDIEKKICKMEKCSSVFNVVNSSIGLIMVLSFLFLN

SEQ ID NO: 2555 - protein, 416 aa, Artificial Sequence
  derived and/or modified protein sequence (wt) from Pf(Asembo Bay)__AAN87591.1__CSP
MMRKLAILSVSSFLFVEALFQEYQCYGSSSNTRVLNELNYDNAGTNLYNELEMNYYGKQENWYSLKKNSRSLGENDDGNNNNGDNGREGKDEDKRDGNNEDNEKLRKPKHKKLKQPGDGNPDPNANPNVDPNANPNVDPNANPNVDPNANPNANPNANPNANPNANPNANPNANPNANPNANPNANPNANPNANPNANPNANPNANPNANPNANPNVDPNANPNANPNANPNANPNANPNANPNANPNANPNANPNANPNANPNANPNANPNANPNANPNANPNANPNANPNKNNQGNGQGHNMPNDPNRNVDENANANNAVKNNNNEEPSDQHIEKYLKTIQNSLSTEWSPCSVTCGNGIQVRIKPGSANKPKDQLDYANDIEKKICKMEKCSSVFNVVNSSIGLIMVLSFLFLN

SEQ ID NO: 2556 - protein, 416 aa, Artificial Sequence
  derived and/or modified protein sequence (wt) from Pf(Asembo Bay)__AAN87590.1__CSP
MMRKLAILSVSSFLFVEALFQEYQCYGSSSNTRVLNELNYDNAGTNLYNELEMNYYGKQENWYSLKKNSRSLGENDDGNNNNGDNGREGKDEDKRDGNNEDNEKLRKPKHKKLKQPGDGNPDPNANPNVDPNANPNVDPNANPNVDPNANPNANPNANPNANPNANPNANPNANPNANPNANPNANPNANPNANPNVDPNANPNANPNANPNANPNANPNANPNANPNANPNANPNANPNANPNANPNANPNANPNANPNANPNANPNANPNANPNANPNANPNANPNANPNKNNQGNGQGHNMPNDPNRNVDENANANNAVKNNNNEEPSDQHIEKYLKTIQNSLSTEWSPCSVTCGNGIQVRIKPGSANKPKDQLDYANDIEKKICKMEKCSSVFNVVNSSIGLIMVLSFLFLN

SEQ ID NO: 2557 - protein, 416 aa, Artificial Sequence
  derived and/or modified protein sequence (wt) from Pf(Gha1108-097)__BAM84820.1__CSP
MMRKLAILSVSSFLFVEALFQEYQCYGSSSNTRVLNELNYDNAGTNLYNELEMNYYGKQENWYSLKKNGRSLGENDDGNNNNGDNGREGKDEDKRDGNNEDNEKLRKPKHKKLKQPADGNPDPNANPNVDPNANPNVDPNANPNVDPNANPNANPNANPNANPNANPNANPNANPNANPNANPNANPNANPNANPNANPNANPNANPNANPNVDPNANPNANPNANPNANPNANPNANPNANPNANPNANPNANPNANPNANPNANPNANPNANPNANPNANPNANPNANPNKNNQGNGQGHNMPNDPNRNVDENANANNGVKNNNNEEPSDKHIEQYLKRIQNSLSTEWSPCSVTCGNGIQVRIKPGSANKPKDELNYENDIEKKICKMEKCSSVFNVVNSSIGLIMVLSFLFLN

SEQ ID NO: 2558 - protein, 416 aa, Artificial Sequence
  derived and/or modified protein sequence (wt) from Pf(MAD20)__AAA29550.1__CSP
MMRKLAILSVSSFLFVEALFQEYQCYGSSSNTRVLNELNYDNAGINLYNELEMNYYGKQENWYSLKKNSRSLGENDDGNNNNGDNGREGKDEDKRDGNNEDNEKLRKPKHKKLKQPGDGNPDPNANPNVDPNANPNVDPNANPNVDPNANPNANPNANPNANPNANPNANPNANPNANPNANPNANPNANPNANPNANPNANPNANPNANPNVDPNANPNANPNANPNANPNANPNANPNANPNANPNANPNANPNANPNANPNANPNANPNANPNANPNANPNANPNANPNKNNQGNGQGHNMPNDPNRNVDENANANNAVKNNNNEEPSDKHIEQYLKKIQNSLSTEWSPCSVTCGNGIQVRIKPGSADKPKDQLDYENDIEKKICKMEKCSSVFNVVNSSIGLIMVLSFLFLN

SEQ ID NO: 2559 - protein, 416 aa, Artificial Sequence
  derived and/or modified protein sequence (wt) from Pf(Pal97-002)__BAM84917.1__CSP
MMRKLAILSVSSFLFVEALFQEYQCYGSSSNTRVLNELNYDNAGTNLYNELEMNYYGKQENWYSLKKNSRSLGENDDGNNNNGDNGREGKDEDKRDGNNEDNEKLRKPKHKKLKQPGDGNPDPNANPNVDPNANPNVDPNANPNVDPNANPNANPNANPNANPNANPNANPNANPNANPNANPNANPNANPNANPNANPNANPNANPNANPNVDPNANPNANPNANPNANPNANPNANPNANPNANPNANPNANPNANPNANPNANPNANPNANPNANPNANPNANPNANPNKNNQGNGQGHNMPNDPNRNVDENANANNAVKNNNNEEPSDQHIEKYIKKIQNSLSTEWSPCSVTCGNGIQVRIKPGSADKPKNELDYENDIEKKICKMEKCSSVFNVVNSSIGLIMVLSFLFLN

SEQ ID NO: 2560 - protein, 416 aa, Artificial Sequence
  derived and/or modified protein sequence (wt) from Pf(Pal97-102)__BAM84954.1__CSP
MMRKLAILSVSSFLFVEALFQEYQCYGSSSNTRVLNELNYDNAGTNLYNELEMNYYGKQENWYSLKKNSRSLGENDDGNNNNGDNGREGKDEDKRDGNNEDNEKLRKPKHKKLKQPGDGNPDPNANPNVDPNANPNVDPNANPNVDPNANPNANPNANPNANPNANPNANPNANPNANPNANPNANPNANPNANPNANPNANPNANPNANPNANPNANPNANPNANPNANPNANPNANPNANPNANPNANPNANPNANPNANPNANPNANPNANPNANPNANPNANPNANPNKNNQGNGQGHNMPNDPNRNVDENANANNAVKNNNNEEPSDKHIKEYLTKIQNSISTEWSPCSVTCGNGIQVRIKPGSAGKPKDELNYENDIEKKICKMEKCSSVFNVVNSSIGLIMVLSFLFLN

SEQ ID NO: 2561 - protein, 416 aa, Artificial Sequence
  derived and/or modified protein sequence (wt) from Pf(PNG227-255)__BAM85044.1__CSP
MMRKLAILSVSSFLFVEALFQEYQCYGSSSNTRVLNELNYDNAGTNLYNELEMNYYGKQENWYSLKKNSRSLGENDDGNNNNGDNGREGKDEDKRDGNNEDNEKLRKPKHKKLKQPGDGNPDPNANPNVDPNANPNVDPNANPNVDPNANPNVDPNANPNANPNANPNANPNANPNANPNANPNANPNANPNANPNANPNANPNANPNANPNVDPNANPNANPNANPNANPNANPNANPNANPNANPNANPNANPNANPNANPNANPNANPNANPNANPNANPNANPNANPNKNNQGNGQGHNMPNDPNRNVDENANANNAVKNNNNEEPSDKHIEQYLKKIQNSLSTEWSPCSVTCGNGIQVRIKPGSADKPKDQLDYENDIEKKICKMEKCSSVFNVVNSSIGLIMVLSFLFLN

SEQ ID NO: 2562 - protein, 416 aa, Artificial Sequence
  derived and/or modified protein sequence (wt) from Pf(PNG228-063)__BAM85045.1__CSP
MMRKLAILSVSSFLFVEALFQEYQCYGSSSNTRVLNELNYDNAGTNLYNELEMNYYGKQENWYSLKKNSRSLGENDDGNNNNGDNGREGKDEDKRDGNNEDNEKLRKPKHKKLKQPGDGNPDPNANPNVDPNANPNVDPNANPNVDPNANPNANPNANPNANPNANPNANPNANPNANPNANPNANPNANPNANPNANPNANPNANPNANPNVDPNANPNANPNANPNANPNANPNANPNANPNANPNANPNANPNANPNANPNANPNANPNANPNANPNANPNANPNANPNKNNQGNGQGHNMPNDPNRNVDENANANNAVKNNNNEEPSDKHIEQYLKKIQNSLSTEWSPCSVTCGNGIQVRIKPGSAGKSKDELDYENDIEKKICKMEKCSSVFNVVNSSIGLIMVLSFLFLN

SEQ ID NO: 2563 - protein, 416 aa, Artificial Sequence
  derived and/or modified protein sequence (wt) from Pf(PNG830-058)__BAM84987.1__CSP
MMRKLAILSVSSFLFVEALFQEYQCYGSSSNTRVLNELNYDNAGTNLYNELEMNYYGKQENWYSLKKNSRSLGENDDGNNNNGDNGREGKDEDKRDGNNEDNEKLRKPKHKKLKQPGDGNPDPNANPNVDPNANPNVDPNANPNVDPNANPNVDPNANPNANPNANPNANPNANPNANPNANPNANPNANPNANPNANPNANPNANPNANPNANPNANPNANPNANPNANPNANPNANPNANPNANPNANPNANPNANPNANPNANPNANPNANPNANPNANPNANPNANPNKNNQGNGQGHNMPNDPNRNVDENANANNAVKNNNNEEPSDKHIEQYLKKIQNSLSTEWSPCSVTCGNGIQVRIKPGSANKPKDELDYENDIEKKICKMEKCSSVFNVVNSSIGLIMVLSFLFLN

SEQ ID NO: 2564 - protein, 416 aa, Artificial Sequence
  derived and/or modified protein sequence (wt) from Pf(PNG903-136)__BAM84993.1__CSP
MMRKLAILSVSSFLFVEALFQEYQCYGSSSNTRVLNELNYDNAGTNLYNELEMNYYGKQENWYSLKKNSRSLGENDDGNNNNGDNGREGKDEDKRDGNNEDNEKLRKPKHKKLKQPGDGNPDPNANPNVDPNANPNVDPNANPNVDPNANPNANPNANPNANPNANPNANPNANPNANPNANPNANPNANPNANPNANPNANPNANPNANPNVDPNANPNANPNANPNANPNANPNANPNANPNANPNANPNANPNANPNANPNANPNANPNANPNANPNANPNANPNANPNKNNQGNGQGHNMPNDPNRNVDENANANNAVKNNNNEEPSDKHIEQYLKKIQNSLSTEWSPCSVTCGNGIQVRIKPGSANKPKDELDYENDIEKKICKMEKCSSVFNVVNSSIGLIMVLSFLFLN

SEQ ID NO: 2565 - protein, 416 aa, Artificial Sequence
  derived and/or modified protein sequence (wt) from Pf(Tz03-086)__BAM84805.1__CSP
MMRKLAILSVSSFLFVEALFQEYQCYGSSSNTRVLNELNYDNAGTNLYNELEMNYYGKQENWYSLKKNSRSLGENDDGNNNNGDNGREGKDEDKRDGNNEDNEKLRKPKHKKLKQPADGNPDPNANPNVDPNANPNVDPNANPNVDPNANPNANPNANPNANPNANPNANPNANPNANPNANPNANPNANPNANPNANPNANPNANPNANPNANPNANPNVDPNANPNANPNANPNANPNANPNANPNANPNANPNANPNANPNANPNANPNANPNANPNANPNANPNANPNKNNQGNGQGHNMPNDPNRNVDENANANNAVKNNNNEEPSDKHITEYLKKIQNSLSTEWSPCSVTCGNGIQVRIKPGSAGKSKNELDYENDIEKKICKMEKCSSVFNVVNSSIGLIMVLSFLFLN

SEQ ID NO: 2566 - protein, 416 aa, Artificial Sequence
  derived and/or modified protein sequence (wt) from Pf(Tz93-009)__BAM84750.1__CSP
MMRKLAILSVSSFLFVEALFQEYQCYGSSSNTRVLNELNYDNAGTNLYNELEMNYYGKQENWYSLKKNSRSLGENDDGNNNNGDNGREGKDEDKRDGNNEDNEKLRKPKHKKLKQPGDGNPDPNANPNVDPNANPNVDPNANPNVDPNANPNANPNANPNANPNANPNANPNANPNANPNANPNANPNANPNANPNANPNANPNANPNANPNVDPNANPNANPNANPNANPNANPNANPNANPNANPNANPNANPNANPNANPNANPNANPNANPNANPNANPNANPNANPNKNNQGNGQGHNMPNDPNRNVDENANANNAVKNNNNEEPSDKHIKEYLTKIKNSISTEWSPCSVTCGNGIQVRIKPGSANKPKDELDYENDIEKKICKMEKCSSVFNVVNSSIGLIMVLSFLFLN

SEQ ID NO: 2567 - protein, 416 aa, Artificial Sequence
  derived and/or modified protein sequence (wt) from Pf(Van98M305-147)__BAM85260.1__CSP
MMRKLAILSVSSFLFVEALFQEYQCYGSSSNTRVLNELNYDNAGTNLYNELEMNYYGKQENWYSLKKNSRSLGENDDGNNNNGDNGREGKDEDKRDGNNEDNEKLRKPKHKKLKQPGDGNPDPNANPNVDPNANPNVDPNANPNVDPNANPNANPNANPNANPNANPNANPNANPNANPNANPNANPNANPNANPNANPNANPNANPNANPNVDPNANPNANPNANPNANPNANPNANPNANPNANPNANPNANPNANPNANPNANPNANPNANPNANPNANPNANPNANPNKNNQGNGQGHNMPNDPNRNVDENANANNAVKNNNNEEPSDKHIEQYLKKIQNSLSTEWSPCSVTCGNGIQVRIKPGSADKPKDQLDYENDIEKKICKMEKCSSVFNVVNSSIGLIMVLSFLFLN

SEQ ID NO: 2568 - protein, 416 aa, Artificial Sequence
  derived and/or modified protein sequence (wt) from Pf(Van98P226-97)__BAM85298.1__CSP
MMRKLAILSVSSFLFVEALFQEYQCYGSSSNTRVLNELNYDNAGTNLYNELEMNYYGKQENWYSLKKNSRSLGENDDGNNNNGDNGREGKDEDKRDGNNEDNEKLRKPKHKKLKQPGDGNPDPNANPNVDPNANPNVDPNANPNVDPNANPNANPNANPNANPNANPNANPNANPNANPNANPNANPNANPNANPNANPNANPNANPNANPNANPNANPNANPNANPNANPNANPNANPNANPNANPNANPNANPNANPNANPNANPNANPNANPNANPNANPNANPNANPNKNNQGNGQGHNMPNDPNRNVDENANANNAVKNNNNEEPSDKHIEQYLKKIQNSLSTEWSPCSVTCGNGIQVRIKPGSANKPKDELDYENDIEKKICKMEKCSSVFNVVNSSIGLIMVLSFLFLN

SEQ ID NO: 2569 - protein, 416 aa, Artificial Sequence
  derived and/or modified protein sequence (wt) from Pf(Yaounde)__AAN87614.1__CSP
MMRKLAILSVSSFLFVEALFQEYQCYGSSSNTRVLNELNYDNAGTNLYNELEMNYYGKQENWYSLKKNSRSLGENDDGNNNNGDNGREGKDEDKRDGNNEDNEKLRKPKHKKLKQPADGNPDPNANPNVDPNANPNVDPNANPNVDPNANPNANPNANPNANPNANPNANPNANPNANPNANPNANPNANPNANPNANPNVDPNANPNANPNANPNANPNANPNANPNANPNANPNANPNANPNANPNANPNANPNANPNANPNANPNANPNANPNANPNANPNANPNANPNKNNQGNGQGHNMPNDPNRNVDENANANNAVKNNNNEEPSDQHIEKYLKIIKNSLSTEWSPCSVTCGNGIQVRIKPGSANKPKDQLDYANDIEKKICKMEKCSSVFNVVNSSIGLIMVLSFLFLN

SEQ ID NO: 2570 - protein, 415 aa, Artificial Sequence
  derived and/or modified protein sequence (wt) from Pf(A98)__ACO49328.1__CSP
MRKLAILSVSSFLFVEALFQEYQCYGSSSNTRVLNELNYDNAGTNLYNELEMNYYGKQENWYSLKKNSRSLGENDDGNNNNGDNGREGKDEDKRDGNNEDNEKLRKPKHKKLKQPGDGNPDPNANPNVDPNANPNVDPNANPNVDPNANPNANPNANPNANPNANPNANPNANPNANPNANPNANPNANPNANPNANPNANPNANPNANPNANPNANPNANPNANPNANPNANPNANPNANPNANPNANPNANPNANPNANPNANPNANPNANPNANPNANPNANPNANPNKNNQGNGQGHNMPNDPNRNVDENANANNAVKNNNNEEPSDKHIEQYLKNIQNSLSTEWSPCSVTCGNGIQVRIKPGSANKPKDELDYENDIEKKICKMEKCSSVFNVVNSSIGLIMVLSFLFLN

SEQ ID NO: 2571 - protein, 415 aa, Artificial Sequence
  derived and/or modified protein sequence (wt) from Pf(B60)__ACO49339.1__CSP
MRKLAILSVSSFLFVEALFQEYQCYGSSSNTRVLNELNYDNAGTNLYNELEMNYYGKQENWYSLKKNSRSLGENDDGNNNNGDNGREGKDEDKRDGNNEDNEKLRKPKHKKLKQPGDGNPDPNANPNVDPNANPNVDPNANPNVDPNANPNVDPNANPNANPNANPNANPNANPNANPNANPNANPNANPNANPNANPNANPNANPNANPNANPNANPNANPNANPNANPNANPNANPNANPNANPNANPNANPNANPNANPNANPNANPNANPNANPNANPNANPNANPNKNNQGNGQGHNMPNDPNRNVDENANANNAVKNNNNEEPSDKHIEQYLKKIQNSLSTEWSPCSVTCGNGIQVRIKPGSANKPKDELDYENDIEKKICKMEKCSSVFNVVNSSIGLIMVLSFLFLN

SEQ ID NO: 2572 - protein, 415 aa, Artificial Sequence
  derived and/or modified protein sequence (wt) from Pf(TM323)__ACO49493.1__CSP
MRKLAILSVSSFLFVEALFQEYQCYGSSSNTRVLNELNYDNAGTNLYNELEMNYYGKQENWYSLKKNSRSLGENDDGNNNNGDNGREGKDEDKRDGNNEDNEKLRKPKHKKLKQPGDGNPDPNANPNVDPNANPNVDPNANPNVDPNANPNANPNANPNANPNANPNANPNANPNANPNANPNANPNANPNANPNANPNANPNANPNANPNANPNANPNANPNANPNANPNANPNANPNANPNANPNANPNANPNANPNANPNANPNANPNANPNANPNANPNANPNANPNKNNQGNGQGHNMPNDPNRNVDENANANNAVKNNNNEEPSDKHIEKYLKEIQNSLSTEWSPCSVTCGNGIQVRIKPGSANKPKDQLDYENDIEKKICKMEKCSSVFNVVNSSIGLIMVLSFLFLN

SEQ ID NO: 2573 - protein, 412 aa, Artificial Sequence
  derived and/or modified protein sequence (wt) from Pf(22)__AGR53780.1__CSP
MMRKLAILSVSSFLFVEALFQEYQCYGSPSNTRVLNELNYDNAGTNLYNELEMNYYGKQENWYSLKKNSRSLGENDDGNNNNGDNGREGKDEDKRDGNNEDNEKLRKPKHKKLKQPADGNPDPNANPNVDPNANPNVDPNANPNVDPNANPNANPNANPNANPNANPNANPNANPNANPNANPNANPNANPNANPNANPNANPNANPNVDPNANPNANPNANPNANPNANPNANPNANPNANPNANPNANPNANPNANPNANPNANPNANPNANPNANPNANPNANPNKNNQGNGQGHNMPNDPNRNVDENANANNAVKNNNNEEPSDKHIEQYLKTIKNSLSTEWSPCSVTCGNGIQVRIKPGSANKPKDELNYENDIEKKICKMEKCSSVFNVVNSSIGLIMVLSFLFLN

SEQ ID NO: 2574 - protein, 412 aa, Artificial Sequence
  derived and/or modified protein sequence (wt) from Pf(Amazonas)__AAN87605.1__CSP
MMRKLAILSVSSFLFVEALFQEYQCYGSSSNTRVLNELNYDNAGTNLYNELEMNYYGKQENWYSLKKNSRSLGENDDGNNNNGDNGREGKDEDKRDGNNEDNEKLRKPKHKKLKQPADGNPDPNANPNVDPNANPNVDPNANPNVDPNANPNANPNANPNANPNANPNANPNANPNANPNANPNANPNANPNANPNANPNANPNANPNVDPNANPNANPNANPNANPNANPNANPNANPNANPNANPNANPNANPNANPNANPNANPNANPNANPNANPNANPNANPNKNNQGNGQGHNMPNDPNRNVDENANANNAVKNNNNEEPSDQHIEKYLKRIQNSLSTEWSPCSVTCGNGIQVRIKPGSANKPKDELDYENDIEKKICKMEKCSSVFNVVNSSIGLIMVLSFLFLN

SEQ ID NO: 2575 - protein, 412 aa, Artificial Sequence
  derived and/or modified protein sequence (wt) from Pf(Amazonas)__AAN87598.1__CSP
MMRKLAILSVSSFLFVEALFQEYQCYGSSSNTRVLNELNYDNAGTNLYNELEMNYYGKQENWYSLKKNSRSLGENDDGNNNNGDNGREGKDEDKRDGNNEDNEKLRKPKHKKLKQPADGNPDPNANPNVDPNANPNVDPNANPNVDPNANPNANPNANPNANPNANPNANPNANPNANPNANPNANPNANPNANPNANPNANPNANPNVDPNANPNANPNANPNANPNANPNANPNANPNANPNANPNANPNANPNANPNANPNANPNANPNANPNANPNANPNANPNKNNQGNGQGHNMPNDPNRNVDENANANNAVKNNNNEEPSDKHIKEYLKIIQNSLSTEWSPCSVTCGNGIQVRIKPGSAGKPKDELDYANDIEKKICKMEKCSSVFNVVNSSIGLIMVLSFLFLN

SEQ ID NO: 2576 - protein, 412 aa, Artificial Sequence
  derived and/or modified protein sequence (wt) from Pf(Asembo Bay)__AAN87611.1__CSP
MMRKLAILSVSSFLFVEALFQEYQCYGSSSNTRVLNELNYDNAGTNLYNELEMNYYGKQENWYSLKKNSRSLGENDDGNNNNGDNGREGKDEDKRDGNNEDNEKLRKPKHKKLKQPADGNPDPNANPNVDPNANPNVDPNANPNVDPNANPNANPNANPNANPNANPNANPNANPNANPNANPNANPNANPNANPNANPNANPNANPNANPNANPNVDPNANPNANPNANPNANPNANPNANPNANPNANPNANPNANPNANPNANPNANPNANPNANPNANPNANPNKNNQGNGQGHNMPNDPNRNVDENANANNAVKNNNNEEPSDKHIEQYLKIIKNSLSTEWSPCSVTCGNGIQVRIKPGSANKPKDELDYANDIEKKICKMEKCSSVFNVVNSSIGLIMVLSFLFLN

SEQ ID NO: 2577 - protein, 412 aa, Artificial Sequence
  derived and/or modified protein sequence (wt) from Pf(Asembo Bay)__AAN87589.1__CSP
MMRKLAILSVSSFLFVEALFQEYQCYGSSSNTRVLNELNYDNAGTNLYNELEMNYYGKQENWYSLKKNSRSLGENDDGNNNNGDNGREGKDEDKRDGNNEDNEKLRKPKHKKLKQPADGNPDPNANPNVDPNANPNVDPNANPNVDPNANPNANPNANPNANPNANPNANPNANPNANPNANPNANPNANPNVDPNANPNANPNANPNANPNANPNANPNANPNANPNANPNANPNANPNANPNANPNANPNANPNANPNANPNANPNANPNANPNANPNANPNANPNKNNQGNGQGHNMPNDPNRNVDENANANNAVKNNNNEEPSDQHIEKYLKKIQNSLSTEWSPCSVTCGNGIQVRIKPGSANKPKDQLDYANDIEKKICKMEKCSSVFNVVNSSIGLIMVLSFLFLN

SEQ ID NO: 2578 - protein, 412 aa, Artificial Sequence
  derived and/or modified protein sequence (wt) from Pf(BrB1)__BAM85131.1__CSP
MMRKLAILSVSSFLFVEALFQEYQCYGSSSNTRVLNELNYDNAGTNLYNELEMNYYGKQENWYSLKKNSRSLGENDDGNNNNGDNGREGKDEDKRDGNNEDNEKLRKPKHKKLKQPADGNPDPNANPNVDPNANPNVDPNANPNVDPNANPNANPNANPNANPNANPNANPNANPNANPNANPNANPNANPNANPNANPNANPNANPNVDPNANPNANPNANPNANPNANPNANPNANPNANPNANPNANPNANPNANPNANPNANPNANPNANPNANPNANPNANPNKNNQGNGQGHNMPNDPNRNVDENANANNAVKNNNNEEPSDKHIEQYLKKIKNSISTEWSPCSVTCGNGIQVRIKPGSANKPKDELDYENDIEKKICKMEKCSSVFNVVNSSIGLIMVLSFLFLN

SEQ ID NO: 2579 - protein, 412 aa, Artificial Sequence
  derived and/or modified protein sequence (wt) from Pf(BrP9)__BAM85145.1__CSP
MMRKLAILSVSSFLFVEALFQEYQCYGSSSNTRVLNELNYDNAGTNLYNELEMNYYGKQENWYSLKKNSRSLGENDDGNNNNGDNGREGKDEDKRDGNNEDNEKLRKPKHKKLKQPGDGNPDPNANPNVDPNANPNVDPNANPNVDPNANPNANPNANPNANPNANPNANPNANPNANPNANPNANPNANPNANPNANPNANPNANPNVDPNANPNANPNANPNANPNANPNANPNANPNANPNANPNANPNANPNANPNANPNANPNANPNANPNANPNANPNANPNKNNQGNGQGHNMPNDPNRNVDENANANNAVKNNNNEEPSDKHIEQYLKKIKNSISTEWSPCSVTCGNGIQVRIKPGSANKPKDELDYENDIEKKICKMEKCSSVFNVVNSSIGLIMVLSFLFLN

SEQ ID NO: 2580 - protein, 412 aa, Artificial Sequence
  derived and/or modified protein sequence (wt) from Pf(India)__AAN87606.1__CSP
MMRKLAILSVSSFLFVEALFQEYQCYGSSSNTRVLNELNYDNAGTNLYNELEMNYYGKQENWYSLKKNSRSLGENDDGNNNNGDNGREGKDEDKRDGNNEDNEKLRKPKHKKLKQPGDGNPDPNANPNVDPNANPNVDPNANPNVDPNANPNANPNANPNANPNANPNANPNANPNANPNANPNANPNANPNANPNANPNANPNANPNVDPNANPNANPNANPNANPNANPNANPNANPNANPNANPNANPNANPNANPNANPNANPNANPNANPNANPNANPNANPNKNNQGNGQGHNMPNDPNRNVDENANANNAVKNNNNEEPSDKHIEKYLKKIQNSLSTEWSPCSVTCGNGIQVRIKPGSANKPKDELDYENDIEKKICKMEKCSSVFNVVNSSIGLIMVLSFLFLN

SEQ ID NO: 2581 - protein, 412 aa, Artificial Sequence
  derived and/or modified protein sequence (wt) from Pf(Pal97-007)__BAM84921.1__CSP
MMRKLAILSVSSFLFVEALFQEYQCYGSSSNTRVLNELNYDNAGTNLYNELEMNYYGKQENWYSLKKNSRSLGENDDGNNNNGDNGREGKDEDKRDGNNEDNEKLRKPKHKKLKQPGDGNPDPNANPNVDPNANPNVDPNANPNVDPNANPNANPNANPNANPNANPNANPNANPNANPNANPNANPNANPNANPNANPNANPNANPNVDPNANPNANPNANPNANPNANPNANPNANPNANPNANPNANPNANPNANPNANPNANPNANPNANPNANPNANPNANPNKNNQGNGQGHNMPNDPNRNVDENANANNAVKNNNNEEPSDKHIKEYLTKIKNSISTEWSPCSVTCGNGIQVRIKPGSANKPKDELDYENDIEKKICKMEKCSSVFNVVNSSIGLIMVLSFLFLN

SEQ ID NO: 2582 - protein, 412 aa, Artificial Sequence
  derived and/or modified protein sequence (wt) from Pf(Pal97-037)__BAM84929.1__CSP
MMRKLAILSVSSFLFVEALFQEYQCYGSSSNTRVLNELNYDNAGTNLYNELEMNYYGKQENWYSLKKNSRSLGENDDGNNNNGDNGREGKDEDKRDGNNEDNEKLRKPKHKKLKQPGDGNPDPNANPNVDPNANPNVDPNANPNVDPNANPNANPNANPNANPNANPNANPNANPNANPNANPNANPNANPNANPNANPNANPNANPNVDPNANPNANPNANPNANPNANPNANPNANPNANPNANPNANPNANPNANPNANPNANPNANPNANPNANPNANPNANPNKNNQGNGQGHNMPNDPNRNVDENANANNAVKNNNNEEPSDQHIEKYIKKIQNSLSTEWSPCSVTCGNGIQVRIKPGSADKPKNELDYENDIEKKICKMEKCSSVFNVVNSSIGLIMVLSFLFLN

SEQ ID NO: 2583 - protein, 412 aa, Artificial Sequence
  derived and/or modified protein sequence (wt) from Pf(Pal97-052)__BAM84935.1__CSP
MMRKLAILSVSSFLFVEALFQEYQCYGSSSNTRVLNELNYDNAGTNLYNELEMNYYGKQENWYSLKKNSRSLGENDDGNNNNGDNGREGKDEDKRDGNNEDNEKLRKPKHKKLKQPGDGNPDPNANPNVDPNANPNVDPNANPNVDPNANPNANPNANPNANPNANPNANPNANPNANPNANPNANPNANPNANPNANPNANPNANPNVDPNANPNANPNANPNANPNANPNANPNANPNANPNANPNANPNANPNANPNANPNANPNANPNANPNANPNANPNANPNKNNQGNGQGHNMPNDPNRNVDENANANNAVKNNNNEEPSDQHIEKYLKIIQNSLSTEWSPCSVTCGNGIQVRIKPGSADKPKDQLDYANDIEKKICKMEKCSSVFNVVNSSIGLIMVLSFLFLN

SEQ ID NO: 2584 - protein, 412 aa, Artificial Sequence
  derived and/or modified protein sequence (wt) from Pf(Sol95-351)__BAM85103.1__CSP
MMRKLAILSVSSFLFVEALFQEYQCYGSSSNTRVLNELNYDNAGTNLYNELEMNYYGKQENWYSLKKNSRSLGENDDGNNNNGDNGREGKDEDKRDGNNEDNEKLRKPKHKKLKQPGDGNPDPNANPNVDPNANPNVDPNANPNVDPNANPNANPNANPNANPNANPNANPNANPNANPNANPNANPNANPNANPNANPNANPNANPNVDPNANPNANPNANPNANPNANPNANPNANPNANPNANPNANPNANPNANPNANPNANPNANPNANPNANPNANPNANPNKNNQGNGQGHNMPNDPNRNVDENANANNAVKNNNNEEPSDKHIEQYLKKIQNSLSTEWSPCSVTCGNGIQVRIKPGSADKPKDQLDYENDIEKKICKMEKCSSVFNVVNSSIGLIMVLSFLFLN

SEQ ID NO: 2585 - protein, 412 aa, Artificial Sequence
  derived and/or modified protein sequence (wt) from Pf(Tz03-038)__BAM84801.1__CSP
MMRKLAILSVSSFLFVEALFQEYQCYGSSSNTRVLNELNYDNAGTNLYNELEMNYYGKQENWYSLKKNSRSLGENDDGNNNNGDNGREGKDEDKRDGNNEDNEKLRKPKHKKLKQPGDGNPDPNANPNVDPNANPNVDPNANPNVDPNANPNANPNANPNANPNANPNANPNANPNANPNANPNANPNANPNVDPNANPNANPNANPNANPNANPNANPNANPNANPNANPNANPNANPNANPNANPNANPNANPNANPNANPNANPNANPNANPNANPNANPNANPNKNNQGNGQGHNMPNDPNRNVDENANANNAVKNNNNEEPSDKHIEQYLNKIKNSISTEWSPCSVTCGNGIQVRIKPGSANKPKDELNYENDIEKKICKMEKCSSVFNVVNSSIGLIMVLSFLFLN

SEQ ID NO: 2586 - protein, 412 aa, Artificial Sequence
  derived and/or modified protein sequence (wt) from Pf(Tz03-076)__BAM84804.1__CSP
MMRKLAILSVSSFLFVEALFQEYQCYGSSSNTRVLNELNYDNAGTNLYNELEMNYYGKQENWYSLKKNSRSLGENDDGNNNNGDNGREGKDEDKRDGNNEDNEKLRKPKHKKLKQPGDGNPDPNANPNVDPNANPNVDPNANPNVDPNANPNANPNANPNANPNANPNANPNANPNANPNANPNANPNANPNANPNANPNANPNANPNVDPNANPNANPNANPNANPNANPNANPNANPNANPNANPNANPNANPNANPNANPNANPNANPNANPNANPNANPNANPNKNNQGNGQGHNMPNDPNRNVDENANANNAVKNNNNEEPSDKHIEQYLKTIKNSLSTEWSPCSVTCGNGIQVRIKPGSANKPKDELNYENDIEKKICKMEKCSSVFNVVNSSIGLIMVLSFLFLN

SEQ ID NO: 2587 - protein, 412 aa, Artificial Sequence
  derived and/or modified protein sequence (wt) from Pf(Tz03-101)__BAM84806.1__CSP
MMRKLAILSVSSFLFVEALFQEYQCYGSSSNTRVLNELNYDNAGTNLYNELEMNYYGKQENWYSLKKNSRSLGENDDGNNNNGDNGREGKDEDKRDGNNEDNEKLRKPKHKKLKQPGDGNPDPNANPNVDPNANPNVDPNANPNVDPNANPNANPNANPNANPNANPNANPNANPNANPNANPNANPNANPNANPNANPNANPNANPNVDPNANPNANPNANPNANPNANPNANPNANPNANPNANPNANPNANPNANPNANPNANPNANPNANPNANPNANPNANPNKNNQGNGQGHNMPNDPNRNVDENANANNAVKNNNNEEPSDKHIKEYLNKIQNSISTEWSPCSVTCGNGIQVRIKPGSADKPKDQLDYINDIEKKICKMEKCSSVFNVVNSSIGLIMVLSFLFLN

SEQ ID NO: 2588 - protein, 412 aa, Artificial Sequence
  derived and/or modified protein sequence (wt) from Pf(Tz93-022)__BAM84753.1__CSP
MMRKLAILSVSSFLFVEALFQEYQCYGSSSNTRVLNELNYDNAGTNLYNELEMNYYGKQENWYSLKKNSRSLGENDDGNNNNGDNGREGKDEDKRDGNNEDNEKLRKPKHKKLKQPGDGNPDPNANPNVDPNANPNVDPNANPNVDPNANPNANPNANPNANPNANPNANPNANPNANPNANPNANPNANPNANPNANPNANPNANPNANPNANPNANPNANPNANPNANPNANPNANPNANPNANPNANPNANPNANPNANPNANPNANPNANPNANPNANPNANPNKNNQGNGQGHNMPNDPNRNVDENANANNAVKNNNNEEPSDKHIEKYLKEIQNSLSTEWSPCSVTCGNGIQVRIKPGSANKPKDQLDYENDIEKKICKMEKCSSVFNVVNSSIGLIMVLSFLFLN

SEQ ID NO: 2589 - protein, 412 aa, Artificial Sequence
  derived and/or modified protein sequence (wt) from Pf(Tz93-035)__BAM84757.1__CSP
MMRKLAILSVSSFLFVEALFQEYQCYGSSSNTRVLNELNYDNAGTNLYNELEMNYYGKQENWYSLKKNSRSLGENDDGNNNNGDNGREGKDEDKRDGNNEDNEKLRKPKHKKLKQPGDGNPDPNANPNVDPNANPNVDPNANPNVDPNANPNANPNANPNANPNANPNANPNANPNANPNANPNANPNANPNANPNANPNANPNANPNVDPNANPNANPNANPNANPNANPNANPNANPNANPNANPNANPNANPNANPNANPNANPNANPNANPNANPNANPNANPNKNNQGNGQGHNMPNDPNRNVDENANANNAVKNNNNEEPSDKHITEYLKKIKNSISTEWSPCSVTCGNGIQVRIKPGSANKPKDELDYENDIEKKICKMEKCSSVFNVVNSSIGLIMVLSFLFLN

SEQ ID NO: 2590 - protein, 412 aa, Artificial Sequence
  derived and/or modified protein sequence (wt) from Pf(Tz93-041)__BAM84759.1__CSP
MMRKLAILSVSSFLFVEALFQEYQCYGSSSNTRVLNELNYDNAGTNLYNELEMNYYGKQENWYSLKKNSRSLGENDDGNNNNGDNGREGKDEDKRDGNNEDNEKLRKPKHKKLKQPGDGNPDPNANPNVDPNANPNVDPNANPNVDPNANPNANPNANPNANPNANPNANPNANPNANPNANPNANPNANPNANPNANPNANPNANPNVDPNANPNANPNANPNANPNANPNANPNANPNANPNANPNANPNANPNANPNANPNANPNANPNANPNANPNANPNANPNKNNQGNGQGHNMPNDPNRNVDENANANNAVKNNNNEEPSDKHIEQYLKRIQNSLSTEWSPCSVTCGNGIQVRIKPGSAGKPKDELDYANDIEKKICKMEKCSSVFNVVNSSIGLIMVLSFLFLN

SEQ ID NO: 2591 - protein, 412 aa, Artificial Sequence
  derived and/or modified protein sequence (wt) from Pf(Tz93-051)__BAM84763.1__CSP
MMRKLAILSVSSFLFVEALFQEYQCYGSSSNTRVLNELNYDNAGTNLYNELEMNYYGKQENWYSLKKNSRSLGENDDGNNNNGDNGREGKDEDKRDGNNEDNEKLRKPKHKKLKQPGDGNPDPNANPNVDPNANPNVDPNANPNVDPNANPNANPNANPNANPNANPNANPNANPNANPNANPNANPNANPNANPNANPNANPNANPNVDPNANPNANPNANPNANPNANPNANPNANPNANPNANPNANPNANPNANPNANPNANPNANPNANPNANPNANPNANPNKNNQGNGQGHNMPNDPNRNVDENANANNAVKNNNNEEPSDKHIEQYLNKIKNSISTEWSPCSVTCGNGIQVRIKPGSANKPKDELNYENDIEKKICKMEKCSSVFNVVNSSIGLIMVLSFLFLN

SEQ ID NO: 2592 - protein, 412 aa, Artificial Sequence
  derived and/or modified protein sequence (wt) from Pf(Tz93-052)__BAM84764.1__CSP
MMRKLAILSVSSFLFVEALFQEYQCYGSSSNTRVLNELNYDNAGTNLYNELEMNYYGKQENWYSLKKNSRSLGENDDGNNNNGDNGREGKDEDKRDGNNEDNEKLRKPKHKKLKQPGDGNPDPNANPNVDPNANPNVDPNANPNVDPNANPNANPNANPNANPNANPNANPNANPNANPNANPNANPNANPNVDPNANPNANPNANPNANPNANPNANPNANPNANPNANPNANPNANPNANPNANPNANPNANPNANPNANPNANPNANPNANPNANPNANPNANPNKNNQGNGQGHNMPNDPNRNVDENANANNAVKNNNNEEPSDQHIEKYLKIIQNSLSTEWSPCSVTCGNGIQVRIKPGSANKPKDQLDYANDIEKKICKMEKCSSVFNVVNSSIGLIMVLSFLFLN

SEQ ID NO: 2593 - protein, 412 aa, Artificial Sequence
  derived and/or modified protein sequence (wt) from Pf(Tz93-061)__BAM84768.1__CSP
MMRKLAILSVSSFLFVEALFQEYQCYGSSSNTRVLNELNYDNAGTNLYNELEMNYYGKQENWYSLKKNSRSLGENDDGNNNNGDNGREGKDEDKRDGNNEDNEKLRKPKHKKLKQPADGNPDPNANPNVDPNANPNVDPNANPNVDPNANPNANPNANPNANPNANPNANPNANPNANPNANPNANPNANPNANPNANPNANPNANPNVDPNANPNANPNANPNANPNANPNANPNANPNANPNANPNANPNANPNANPNANPNANPNANPNANPNANPNANPNANPNKNNQGNGQGHNMPNDPNRNVDENANANNAVKNNNNEEPSDQHIEKYLKRIQNSLSTEWSPCSVTCGNGIQVRIKPGSANKPKDQLDYANDIEKKICKMEKCSSVFNVVNSSIGLIMVLSFLFLN

SEQ ID NO: 2594 - protein, 412 aa, Artificial Sequence
  derived and/or modified protein sequence (wt) from Pf(Tz93-075)__BAM84770.1__CSP
MMRKLAILSVSSFLFVEALFQEYQCYGSSSNTRVLNELNYDNAGTNLYNELEMNYYGKQENWYSLKKNSRSLGENDDGNNNNGDNGREGKDEDKRDGNNEDNEKLRKPKHKKLKQPGDGNPDPNANPNVDPNANPNVDPNANPNVDPNANPNANPNANPNANPNANPNANPNANPNANPNANPNANPNANPNANPNANPNANPNANPNVDPNANPNANPNANPNANPNANPNANPNANPNANPNANPNANPNANPNANPNANPNANPNANPNANPNANPNANPNANPNKNNQGNGQGHNMPNDPNRNVDENANANNAVKNNNNEEPSDKHIEQYLKTIKNSLSTEWSPCSVTCGNGIQVRIKPGSANKPKDQLDYENDIEKKICKMEKCSSVFNVVNSSIGLIMVLSFLFLN

SEQ ID NO: 2595 - protein, 412 aa, Artificial Sequence
  derived and/or modified protein sequence (wt) from Pf(Tz93-113)__BAM84775.1__CSP
MMRKLAILSVSSFLFVEALFQEYQCYGSSSNTRVLNELNYDNAGTNLYNELEMNYYGKQENWYSLKKNSRSLGENDDGNNNNGDNGREGKDEDKRDGNNEDNEKLRKPKHKKLKQPGDGNPDPNANPNVDPNANPNVDPNANPNVDPNANPNANPNANPNANPNANPNANPNANPNANPNANPNANPNANPNANPNANPNANPNANPNANPNVDPNANPNANPNANPNANPNANPNANPNANPNANPNANPNANPNANPNANPNANPNANPNANPNANPNANPNANPNKNNQGNGQGHNMPNDPNRNVDENANANNAVKNNNNEEPSDKHIEQYLNKIKNSISTEWSPCSVTCGNGIQVRIKPGSANKPKDELNYENDIEKKICKMEKCSSVFNVVNSSIGLIMVLSFLFLN

SEQ ID NO: 2596 - protein, 412 aa, Artificial Sequence
  derived and/or modified protein sequence (wt) from Pf(Tz93-123)__BAM84778.1__CSP
MMRKLAILSVSSFLFVEALFQEYQCYGSSSNTRVLNELNYDNAGTNLYNELEMNYYGKQENWYSLKKNSRSLGENDDGNNNNGDNGREGKDEDKRDGNNEDNEKLRKPKHKKLKQPADGNPDPNANPNVDPNANPNVDPNANPNVDPNANPNANPNANPNANPNANPNANPNANPNANPNANPNANPNANPNANPNANPNANPNANPNVDPNANPNANPNANPNANPNANPNANPNANPNANPNANPNANPNANPNANPNANPNANPNANPNANPNANPNANPNANPNKNNQGNGQGHNMPNDPNRNVDENANANNAAKNNNNEEPSDQHIEKYLKTIQNSLSTEWSPCSVTCGNGIQVRIKPGSANKPKDQLDYANDIEKKICKMEKCSSVFNVVNSSIGLIMVLSFLFLN

SEQ ID NO: 2597 - protein, 412 aa, Artificial Sequence
  derived and/or modified protein sequence (wt) from Pf(Tz93-124)__BAM84779.1__CSP
MMRKLAILSVSSFLFVEALFQEYQCYGSSSNTRVLNELNYDNAGTNLYNELEMNYYGKQENWYSLKKNSRSLGENDDGNNNNGDNGREGKDEDKRDGNNEDNEKLRKPKHKKLKQPADGNPDPNANPNVDPNANPNVDPNANPNVDPNANPNANPNANPNANPNANPNANPNANPNANPNANPNANPNANPNANPNANPNANPNANPNVDPNANPNANPNANPNANPNANPNANPNANPNANPNANPNANPNANPNANPNANPNANPNANPNANPNANPNANPNANPNKNNQGNGQGHNMPNDPNRNVDENANANNAVKNNNNEEPSDKHIEQYLKTIKNSLSTEWSPCSVTCGNGIQVRIKPGSADKPKDQLDYINDIEKKICKMEKCSSVFNVVNSSIGLIMVLSFLFLN

SEQ ID NO: 2598 - protein, 412 aa, Artificial Sequence
  derived and/or modified protein sequence (wt) from Pf(Tz98-009)__BAM84781.1__CSP
MMRKLAILSVSSFLFVEALFQEYQCYGSSSNTRVLNELNYDNAGTNLYNELEMNYYGKQENWYSLKKNSRSLGENDDGNNNNGDNGREGKDEDKRDGNNEDNEKLRKPKHKKLKQPADGNPDPNANPNVDPNANPNVDPNANPNVDPNANPNANPNANPNANPNANPNANPNANPNANPNANPNANPNANPNANPNANPNANPNANPNVDPNANPNANPNANPNANPNANPNANPNANPNANPNANPNANPNANPNANPNANPNANPNANPNANPNANPNANPNANPNKNNQGNGQGHNMPNDPNRNVDENANANNAVKNNNNEEPSDKHIKEYLNKIQNSISTEWSPCSVTCGNGIQVRIKPGSADKPKDQLDYINDIEKKICKMEKCSSVFNVVNSSIGLIMVLSFLFLN

SEQ ID NO: 2599 - protein, 412 aa, Artificial Sequence
  derived and/or modified protein sequence (wt) from Pf(Tz98-049)__BAM84789.1__CSP
MMRKLAILSVSSFLFVEALFQEYQCYGSSSNTRVLNELNYDNAGTNLYNELEMNYYGKQENWYSLKKNSRSLGENDDGNNNNGDNGREGKDEDKRDGNNEDNEKLRKPKHKKLKQPADGNPDPNANPNVDPNANPNVDPNANPNVDPNANPNANPNANPNANPNANPNANPNANPNANPNANPNANPNANPNANPNANPNANPNANPNVDPNANPNANPNANPNANPNANPNANPNANPNANPNANPNANPNANPNANPNANPNANPNANPNANPNANPNANPNANPNKNNQGNGQGHNMPNDPNRNVDENANANNAVKNNNNEEPSDKHIEQYLKTIKNSLSTEWSPCSVTCGNGIQVRIKPGSANKPKDQLDYENDIEKKICKMEKCSSVFNVVNSSIGLIMVLSFLFLN

SEQ ID NO: 2600 - protein, 412 aa, Artificial Sequence
  derived and/or modified protein sequence (wt) from Pf(Tz98-084)__BAM84792.1__CSP
MMRKLAILSVSSFLFVEALFQEYQCYGSSSNTRVLNELNYDNAGTNLYNELEMNYYGKQENWYSLKKNSRSLGENDDGNNNNGDNGREGKDEDKRDGNNEDNEKLRKPKHKKLKQPADGNPDPNANPNVDPNANPNVDPNANPNVDPNANPNANPNANPNANPNANPNANPNANPNANPNANPNANPNANPNANPNANPNANPNANPNVDPNANPNANPNANPNANPNANPNANPNANPNANPNANPNANPNANPNANPNANPNANPNANPNANPNANPNANPNANPNKNNQGNGQGHNMPNDPNRNVDENANANNAVKNNNNEEPSDQHIEKYLNKIQNSLSTEWSPCSVTCGNGIQVRIKPGSANKPKDQLDYANDIEKKICKMEKCSSVFNVVNSSIGLIMVLSFLFLN

SEQ ID NO: 2601 - protein, 412 aa, Artificial Sequence
  derived and/or modified protein sequence (wt) from Pf(Tz98-119)__BAM84797.1__CSP
MMRKLAILSVSSFLFVEALFQEYQCYGSSSNTRVLNELNYDNAGTNLYNELEMNYYGKQENWYSLKKNSRSLGENDDGNNNNGDNGREGKDEDKRDGNNEDNEKLRKPKHKKLKQPADGNPDPNANPNVDPNANPNVDPNANPNVDPNANPNANPNANPNANPNANPNANPNANPNANPNANPNANPNANPNANPNANPNANPNANPNVDPNANPNANPNANPNANPNANPNANPNANPNANPNANPNANPNANPNANPNANPNANPNANPNANPNANPNANPNANPNKNNQGNGQGHNMPNDPNRNVDENANANNAVKNNNNEEPSDQHIEKYLKTIQNSLSTEWSPCSVTCGNGIQVRIKPGSANKPKDQLDYANDIEKKICKMEKCSSVFNVVNSSIGLIMVLSFLFLN

SEQ ID NO: 2602 - protein, 412 aa, Artificial Sequence
  derived and/or modified protein sequence (wt) from Pf(Yaounde)__AAN87602.1__CSP
MMRKLAILSVSSFLFVEALFQEYQCYGSSSNTRVLNELNYDNAGTNLYNELEMNYYGKQENWYSLKKNSRSLGENDDGNNNNGDNGREGKDEDKRDGNNEDNEKLRKPKHKKLKQPADGNPDPNANPNVDPNANPNVDPNANPNVDPNANPNANPNANPNANPNANPNANPNANPNANPNANPNANPNANPNANPNANPNANPNANPNVDPNANPNANPNANPNANPNANPNANPNANPNANPNANPNANPNANPNANPNANPNANPNANPNANPNANPNANPNANPNKNNQGNGQGHNMPNDPNRNVDENANANNAVKNNNNEEPSDQHIEKYLNKIKNSLSTEWSPCSVTCGNGIQVRIKPGSANKPKDQLDYANDIEKKICKMEKCSSVFNVVNSSIGLIMVLSFLFLN

SEQ ID NO: 2603 - protein, 412 aa, Artificial Sequence
  derived and/or modified protein sequence (wt) from Pf(Yaounde)__AAN87587.1__CSP
MMRKLAILSVSSFLFVEALFQEYQCYGSSSNTRVLNELNYDNAGTNLYNELEMNYYGKQENWYSLKKNSRSLGENDDGNNNNGDNGREGKDEDKRDGNNEDNEKLRKPKHKKLKQPADGNPDPNANPNVDPNANPNVDPNANPNVDPNANPNANPNANPNANPNANPNANPNANPNANPNANPNANPNANPNANPNANPNANPNANPNVDPNANPNANPNANPNANPNANPNANPNANPNANPNANPNANPNANPNANPNANPNANPNANPNANPNANPNANPNANPNKNNQGNGQGHNMPNDPNRNVDENANANNAVKNNNNEEPSDQHIEKYLKTIKNSLSTEWSPCSVTCGNGIQVRIKPGSANKPKDQLDYANDIEKKICKMEKCSSVFNVVNSSIGLIMVLSFLFLN

SEQ ID NO: 2604 - protein, 411 aa, Artificial Sequence
  derived and/or modified protein sequence (wt) from Pf(A107)__ACO49330.1__CSP
MRKLAILSVSSFLFVEALFQEYQCYGSSSNTRVLNELNYDNAGTNLYNELEMNYYGKQENWYSLKKNSRSLGENDDGNNNNGDNGREGKDEDKRDGNNEDNEKLRKPKHKKLKQPGDGNPDPNANPNVDPNANPNVDPNANPNVDPNANPNANPNANPNANPNANPNANPNANPNANPNANPNANPNANPNANPNANPNANPNANPNANPNANPNANPNANPNANPNANPNANPNANPNANPNANPNANPNANPNANPNANPNANPNANPNANPNANPNANPNANPNKNNQGNGQGHNMPNDPNRNVDENANANNAVKNNNNEEPSDKHIEQYLKKIQNSLSTEWSPCSVTCGNGIQVRIKPGSANKPKDELDYENDIEKKICKMEKCSSVFNVVNSSIGLIMVLSFLFLN

SEQ ID NO: 2605 - protein, 410 aa, Artificial Sequence
  derived and/or modified protein sequence (wt) from Pf(IT)____CSP
MMRKLAILSVSSFLFVEALFQEYQCYGSSSNTRVLNELNYDNAGTNLYNELEMNYYGKQENWYSLKKNSRSLGENDDGDNDNGNNNNGNNNNGDNGREGKDEDKRDGNNEDNEKLRKPKHKKLKQPGDDNPDPNANPNVDPNANPNVDPNANPNANPNANPNANPNANPNANPNANPNVDPNANPNANPNANPNANPNANPNANPNANPNANPNANPNANPNANPNANPNANPNANPNANPNANPNANPNANPNANPNANPNANPNANPNANPNANPNANPNANPNKNNQGNGQGHNMPNDPNRNVDENANANNAVKNNNNEEPSDKHIEQYLKKIQNSLSTEWSPCSVTCGNGIQVRIKPGSADKPKDQLDYENDIEKKICKMEKCSSVFNVVNSSIGLIMVLSFLFLN

SEQ ID NO: 2606 - protein, 408 aa, Artificial Sequence
  derived and/or modified protein sequence (wt) from Pf(14)__AGR53782.1__CSP
MMRKLAILSVSSFLFVEALFQEYQCYGSSSNTRVLNELNYDNAGTNLYNELEMNYYGKQENWYSLKKNSRSLGENDDGNNNNGDNGREGKDEDKRDGNNEDNEKLRKPKHKKLKQPGDGNPDPNANPNVDPNANPNVDPNANPNVDPNANPNANPNANPNANPNANPNANPNANPNANPNANPNANPNANPNVDPNANPNANPNANPNANPNANPNANPNANPNANPNANPNANPNANPNANPNANPNANPNANPNANPNANPNANPNANPNANPNANPNANPNKNNQGNGQGHNMPNDPNRNVDENANANNAVKNNNNEEPSDQHIEKYLQKIQNSLSTEWSPCSVTCGNGIQVRIKPGSANKPKDQLNYENDIGKKICKMEKCSSVFNVVNSSIGLIMVLSFLFLN

SEQ ID NO: 2607 - protein, 408 aa, Artificial Sequence
  derived and/or modified protein sequence (wt) from Pf(Asembo Bay)__AAN87609.1__CSP
MMRKLAILSVSSFLFVEALFQEYQCYGSSSNTRVLNELNYDNAGTNLYNELEMNYYGKQENWYSLKKNSRSLGENDDGNNNNGDNGREGKDEDKRDGNNEDNEKLRKPKHKKLKQPADGNPDPNANPNVDPNANPNVDPNANPNVDPNANPNANPNANPNANPNANPNANPNANPNANPNANPNANPNANPNANPNANPNANPNVDPNANPNANPNANPNANPNANPNANPNANPNANPNANPNANPNANPNANPNANPNANPNANPNANPNANPNANPNANPNKNNQGNGQGHNMPNNPNRNVDENANANNAVKNNNNEEPSDKHIEQYLKTIQNSLSTEWSPCSVTCGNGIQVRIKPGSANKPKDQLDYANDIEKKICKMEKCSSVFNVVNSSIGLIMVLSFLFLN

SEQ ID NO: 2608 - protein, 408 aa, Artificial Sequence
  derived and/or modified protein sequence (wt) from Pf(Bolivar)__AAN87613.1__CSP
MMRKLAILSVSSFLFVEALFQEYQCYGSSSNTRVLNELNYDNAGTNLYNELEMNYYGKQENWYSLKKNSRSLGENDDGNNNNGDNGREGKDEDKRDGNNEDNEKLRKPKHKKLKQPGDGNPDPNANPNVDPNANPNVDPNANPNVDPNANPNANPNANPNANPNANPNANPNANPNANPNANPNANPNANPNVDPNANPNANPNANPNANPNANPNANPNANPNANPNANPNANPNANPNANPNANPNANPNANPNANPNANPNANPNANPNANPNANPNANPNKNNQGNGQGHNMPNDPNRNVDENANANNAVKNNNNEEPSDKHIEQYLKKIQNALSTEWSPCSVTCGNGIQVRIKPGSANKPKDQLDYENDIEKKICKMEKCSSVFNVVNSSIGLIMVLSFLFLN

SEQ ID NO: 2609 - protein, 408 aa, Artificial Sequence
  derived and/or modified protein sequence (wt) from Pf(Br419M3)__BAM85120.1__CSP
MMRKLAILSVSSFLFVEALFQEYQCYGSSSNTRVLNELNYDNAGTNLYNELEMNYYGKQENWYSLKKNSRSLGENDDGNNNNGDNGREGKDEDKRDGNNEDNEKLRKPKHKKLKQPADGNPDPNANPNVDPNANPNVDPNANPNVDPNANPNANPNANPNANPNANPNANPNANPNANPNANPNANPNANPNANPNANPNANPNANPNVDPNANPNANPNANPNANPNANPNANPNANPNANPNANPNANPNANPNANPNANPNANPNANPNANPNANPNANPNKNNQGNGQGHNMPNNPNRNVDENANANNAVKNNNNEEPSDKHIEQYLKKIQNSLSTEWSPCSVTCGNGIQVRIKPGSAGKSKDELDYENDIEKKICKMEKCSSVFNVVNSSIGLIMVLSFLFLN

SEQ ID NO: 2610 - protein, 408 aa, Artificial Sequence
  derived and/or modified protein sequence (wt) from Pf(Gha1110-003)__BAM84840.1__CSP
MMRKLAILSVSSFLFVEALFQEYQCYGSSSNTRVLNELNYDNAGTNLYNELEMNYYGKQENWYSLKKNSRSLGENDDGNNNNGDNGREGKDEDKRDGNNEDNEKLRKPKHKKLKQPADGNPDPNANPNVDPNANPNVDPNANPNVDPNANPNANPNANPNANPNANPNANPNANPNANPNANPNANPNANPNANPNANPNANPNVDPNANPNANPNANPNANPNANPNANPNANPNANPNANPNANPNANPNANPNANPNANPNANPNANPNANPNANPNANPNKNNQGNGQGHNMPNDPNRNVDENANANNAVKNNNNEEPSDQHIEKYLKTIKNSLSTEWSPCSVTCGNGIQVRIKPGSANKPKDQLDYANDIEKKICKMEKCSSVFNVVNSSIGLIMVLSFLFLN

SEQ ID NO: 2611 - protein, 408 aa, Artificial Sequence
  derived and/or modified protein sequence (wt) from Pf(Tz03-032)__BAM84799.1__CSP
MMRKLAILSVSSFLFVEALFQEYQCYGSSSNTRVLNELNYDNAGTNLYNELEMNYYGKQENWYSLKKNSRSLGENDDGNNNNGDNGREGKDEDKRDGNNEDNEKLRKPKHKKLKQPADGNPDPNANPNVDPNANPNVDPNANPNVDPNANPNANPNANPNANPNANPNANPNANPNANPNANPNANPNVDPNANPNANPNANPNANPNANPNANPNANPNANPNANPNANPNANPNANPNANPNANPNANPNANPNANPNANPNANPNANPNANPNANPNANPNKNNQGNGQGHNMPNDPNRNVDENANANNAVKNNNNEEPSDQHIEKYLKKIQNSLSTEWSPCSVTCGNGIQVRIKPGSANKPKDQLDYANDIEKKICKMEKCSSVFNVVNSSIGLIMVLSFLFLN

SEQ ID NO: 2612 - protein, 408 aa, Artificial Sequence
  derived and/or modified protein sequence (wt) from Pf(Tz03-033)__BAM84800.1__CSP
MMRKLAILSVSSFLFVEALFQEYQCYGSSSNTRVLNELNYDNAGTNLYNELEMNYYGKQENWYSLKKNSRSLGENDDGNNNNGDNGREGKDEDKRDGNNEDNEKLRKPKHKKLKQPADGNPDPNANPNVDPNANPNVDPNANPNVDPNANPNANPNANPNANPNANPNANPNANPNANPNANPNANPNANPNANPNANPNANPNVDPNANPNANPNANPNANPNANPNANPNANPNANPNANPNANPNANPNANPNANPNANPNANPNANPNANPNANPNANPNKNNQGNGQGHNMPNDPNRNVDENANANNAVKNNNNEEPSDQHIEKYLKTIKNSLSTEWSPCSVTCGNGIQVRIKPGSANKPKDELDYANDIEKKICKMEKCSSVFNVVNSSIGLIMVLSFLFLN

SEQ ID NO: 2613 - protein, 408 aa, Artificial Sequence
  derived and/or modified protein sequence (wt) from Pf(Tz93-056)__BAM84765.1__CSP
MMRKLAILSVSSFLFVEALFQEYQCYGSSSNTRVLNELNYDNAGTNLYNELEMNYYGKQENWYSLKKNSRSLGENDDGNNNNGDNGREGKDEDKRDGNNEDNEKLRKPKHKKLKQPADGNPDPNANPNVDPNANPNVDPNANPNVDPNANPNANPNANPNANPNANPNANPNANPNANPNANPNANPNANPNANPNANPNANPNVDPNANPNANPNANPNANPNANPNANPNANPNANPNANPNANPNANPNANPNANPNANPNANPNANPNANPNANPNANPNKNNQGNGQGHNMPNDPNRNVDENANANNAVKNNNNEEPSDKHIKEYLTKIKNSISTEWSPCSVTCGNGIQVRIKPGSANKPKDELDYENDIEKKICKMEKCSSVFNVVNSSIGLIMVLSFLFLN

SEQ ID NO: 2614 - protein, 408 aa, Artificial Sequence
  derived and/or modified protein sequence (wt) from Pf(Tz93-085)__BAM84771.1__CSP
MMRKLAILSVSSFLFVEALFQEYQCYGSSSNTRVLNELNYDNAGTNLYNELEMNYYGKQENWYSLKKNSRSLGENDDGNNNNGDNGREGKDEDKRDGNNEDNEKLRKPKHKKLKQPADGNPDPNANPNVDPNANPNVDPNANPNVDPNANPNANPNANPNANPNANPNANPNANPNANPNANPNANPNANPNANPNANPNANPNVDPNANPNANPNANPNANPNANPNANPNANPNANPNANPNANPNANPNANPNANPNANPNANPNANPNANPNANPNANPNKNNQGNGQGHNMPNDPNRNVDENAKANNAVKNNNNEEPSDKHIKEYLNKIQNSISTEWSPCSVTCGNGIQVRIKPGSADKPKDQLDYINDIEKKICKMEKCSSVFNVVNSSIGLIMVLSFLFLN

SEQ ID NO: 2615 - protein, 408 aa, Artificial Sequence
  derived and/or modified protein sequence (wt) from Pf(Tz93-102)__BAM84773.1__CSP
MMRKLAILSVSSFLFVEALFQEYQCYGSSSNTRVLNELNYDNAGTNLYNELEMNYYGKQENWYSLKKNSRSLGENDDGNNNNGDNGREGKDEDKRDGNNEDNEKLRKPKHKKLKQPGDGNPDPNANPNVDPNANPNVDPNANPNVDPNANPNANPNANPNANPNANPNANPNANPNANPNANPNANPNANPNANPNANPNANPNVDPNANPNANPNANPNANPNANPNANPNANPNANPNANPNANPNANPNANPNANPNANPNANPNANPNANPNANPNANPNKNNQGNGQGHNMPNDPNRNVDENANANNAVKNNNNEEPSDKHIEQYLKTIKNSLSTEWSPCSVTCGNGIQVRIKPGSANKPKDELNYENDIEKKICKMEKCSSVFNVVNSSIGLIMVLSFLFLN

SEQ ID NO: 2616 - protein, 408 aa, Artificial Sequence
  derived and/or modified protein sequence (wt) from Pf(Tz98-021)__BAM84783.1__CSP
MMRKLAILSVSSFLFVEALFQEYQCYGSSSNTRVLNELNYDNAGTNLYNELEMNYYGKQENWYSLKKNSRSLGENDDGNNNNGDNGREGKDEDKRDGNNEDNEKLRKPKHKKLKQPADGNPDPNANPNVDPNANPNVDPNANPNVDPNANPNANPNANPNANPNANPNANPNANPNANPNANPNANPNANPNVDPNANPNANPNANPNANPNANPNANPNANPNANPNANPNANPNANPNANPNANPNANPNANPNANPNANPNANPNANPNANPNANPNANPNKNNQGNGQGHNMPNDPNRNVDENANANNAVKNNNNEEPSDQHIEKYLKTIQNSLSTEWSPCSVTCGNGIQVRIKPGSANKPKDQLDYANDIEKKICKMEKCSSVFNVVNSSIGLIMVLSFLFLN

SEQ ID NO: 2617 - protein, 408 aa, Artificial Sequence
  derived and/or modified protein sequence (wt) from Pf(Tz98-030)__BAM84785.1__CSP
MMRKLAILSVSSFLFVEALFQEYQCYGSSSNTRVLNELNYDNAGTNLYNELEMNYYGKQENWYSLKKNSRSLGENDDGNNNNGDNGREGKDEDKRDGNNEDNEKLRKPKHKKLKQPGDGNPDPNANPNVDPNANPNVDPNANPNVDPNANPNANPNANPNANPNANPNANPNANPNANPNANPNANPNANPNVDPNANPNANPNANPNANPNANPNANPNANPNANPNANPNANPNANPNANPNANPNANPNANPNANPNANPNANPNANPNANPNANPNANPNKNNQGNGQGHNMPNDPNRNVDENANANNAVKNNNNEEPSDQHIEKYLQKIQNSLSTEWSPCSVTCGNGIQVRIKPGSANKPKDQLNYENDIEKKICKMEKCSSVFNVVNSSIGLIMVLSFLFLN

SEQ ID NO: 2618 - protein, 408 aa, Artificial Sequence
  derived and/or modified protein sequence (wt) from Pf(Tz98-070)__BAM84790.1__CSP
MMRKLAILSVSSFLFVEALFQEYQCYGSSSNTRVLNELNYDNAGTNLYNELEMNYYGKQENWYSLKKNSRSLGENDDGNNNNGDNGREGKDEDKRDGNNEDNEKLRKPKHKKLKQPGDGNPDPNANPNVDPNANPNVDPNANPNVDPNANPNANPNANPNANPNANPNANPNANPNANPNANPNANPNANPNANPNANPNANPNVDPNANPNANPNANPNANPNANPNANPNANPNANPNANPNANPNANPNANPNANPNANPNANPNANPNANPNANPNANPNKNNQGNGQGHNMPNDPNRNVDENANANDAVKNNNNEEPSDQHIEKYLKIIKNSLSTEWSPCSVTCGNGIQVRIKPGSANKPKDQLDYANDIEKKICKMEKCSSVFNVVNSSIGLIMVLSFLFLN

SEQ ID NO: 2619 - protein, 407 aa, Artificial Sequence
  derived and/or modified protein sequence (wt) from Pf(A150)__ACO49332.1__CSP
MRKLAILSVSSFLFVEALFQEYQCYGSSSNTRVLNELNYDNAGTNLYNELEMNYYGKQENWYSLKKNSRSLGENDDGNNNNGDNGREGKDEDKRDGNNEDNEKLRKPKHKKLKQPGDGNPDPNANPNVDPNANPNVDPNANPNVDPNANPNANPNANPNANPNANPNANPNANPNANPNANPNANPNANPNANPNANPNANPNANPNANPNANPNANPNANPNANPNANPNANPNANPNANPNANPNANPNANPNANPNANPNANPNANPNANPNANPNANPNKNNQGNGQGHNMPNDPNRNVDENANANNAVKNNNNEEPSDKHIEQYLKKIQNSLSTEWSPCSVTCGNGIQVRIKPGSANKPKDELDYENDIEKKICKMEKCSSVFNVVNSSIGLIMVLSFLFLN

SEQ ID NO: 2620 - protein, 404 aa, Artificial Sequence
  derived and/or modified protein sequence (wt) from Pf(Gha1109-183)__BAM84829.1__CSP
MMRKLAILSVSSFLFVEALFQEYQCYGSSSNTRVLNELNYDNAGTNLYNELEMNYYGKQENWYSLKKNSRSLGENDDGNNNNGDNGREGKDEDKRDGNNEDNEKLRKPKHKKLKQPADGNPDPNANPNVDPNANPNVDPNANPNVDPNANPNANPNANPNANPNANPNANPNANPNANPNANPNANPNANPNANPNANPNVDPNANPNANPNANPNANPNANPNANPNANPNANPNANPNANPNANPNANPNANPNANPNANPNANPNANPNANPNANPNKNNQGNGQGHNMPNDPNRNVDENANANNAVKNNNNEEPSDQHIEKYLKTIKNSLSTEWSPCSVTCGNGIQVRIKPGSANKPKDQLDYANDIEKKICKMEKCSSVFNVVNSSIGLIMVLSFLFLN

SEQ ID NO: 2621 - protein, 404 aa, Artificial Sequence
  derived and/or modified protein sequence (wt) from Pf(Pal97-107)__BAM84956.1__CSP
MMRKLAILSVSSFLFVEALFQEYQCYGSSSNTRVLNELNYDNAGTNLYNELEMNYYGKQENWYSLKKNSRSLGENDDGNNNNGDNGREGKDEDKRDGNNEDNEKLRKPKHKKLKQPGDGNPDPNANPNVDPNANPNVDPNANPNVDPNANPNANPNANPNANPNANPNANPNANPNANPNANPNANPNANPNANPNANPNVDPNANPNANPNANPNANPNANPNANPNANPNANPNANPNANPNANPNANPNANPNANPNANPNANPNANPNANPNANPNKNNQGNGQGHNMPNDPNRNVDENANANNAVKNNNNEEPSDKHIKEYLTKIKNSISTEWSPCSVTCGNGIQVRIKPGSANKPKDELDYENDIEKKICKMEKCSSVFNVVNSSIGLIMVLSFLFLN

SEQ ID NO: 2622 - protein, 404 aa, Artificial Sequence
  derived and/or modified protein sequence (wt) from Pf(Tz98-103)__BAM84795.1__CSP
MMRKLAILSVSSFLFVEALFQEYQCYGSSSNTRVLNELNYDNAGTNLYNELEMNYYGKQENWYSLKKNSRSLGENDDGNNNNGDNGREGKDEDKRDGNNEDNEKLRKPKHKKLKQPADGNPDPNANPNVDPNANPNVDPNANPNVDPNANPNANPNANPNANPNANPNANPNANPNANPNANPNANPNANPNANPNANPNANPNVDPNANPNANPNANPNANPNANPNANPNANPNANPNANPNANPNANPNANPNANPNANPNANPNANPNANPNANPNKNNQGNGQGHNMPNDPNRNVDENANANNAVKNNNNEEPSDKHITEYLKRIQNSLSTEWSPCSVTCGNGIQVRIKPGSAGKSKNELDYENDIEKKICKMEKCSSVFNVVNSSIGLIMVLSFLFLN

SEQ ID NO: 2623 - protein, 404 aa, Artificial Sequence
  derived and/or modified protein sequence (wt) from Pf(Yaounde)__AAN87588.1__CSP
MMRKLAILSVSSFLFVEALFQEYQCYGSSSNTRVLNELNYDNAGTNLYNELEMNYYGKQENWYSLKKNSRSLGENDDGNNNNGDNGREGKDEDKRDGNNEDNEKLRKPKHKKLKQPADGNPDPNANPNVDPNANPNVDPNANPNVDPNANPNANPNANPNANPNANPNANPNANPNANPNANPNVDPNANPNANPNANPNANPNANPNANPNANPNANPNANPNANPNANPNANPNANPNANPNANPNANPNANPNANPNANPNANPNANPNANPNANPNKNNQGNGQGHNMPNDPNRNVDENANANNAVKNNNNEEPSDQHIEKYLNKIKNSLSTEWSPCSVTCGNGIQVRIKPGSANKPKDQLDYANDIEKKICKMEKCSSVFNVVNSSIGLIMVLSFLFLN

SEQ ID NO: 2624 - protein, 402 aa, Artificial Sequence
  derived and/or modified protein sequence (wt) from Pf(CMC247)__ADF48384.1__CSP
MRKLAILSVSSFLFVEALFQEYQCYGSSSNTRVLNELNYDNAGTNLYNELEMNYYGKQENWYSLKKNSRSLGENDDGNNNNGDNGREGKDEDKRDGNNEDNEKLRKPKHKKLKQPGDGNPDPNANPNVDPNANPNVDPNANPNVDPNANPNANPNANPNANPNANPNANPNANPNANPNANPNANPNANPNANPNANPNANPNANPNANPNANPNANPNANPNANPNANPNANPNANPNANPNANPNANPNANPNANPNANPNANPNANPNANPNANPNKNNQGNGQGHNMPNDPNRNVDENANANNDENNNNEEPSDKHIEQYLKKIQYSLSTEWSPCSVTCGNGIQVRIKPGSADKPKDQLDYENDIEKKICKMEKCSSVFNVVNSSIGLIMVLSFLFLN

SEQ ID NO: 2625 - protein, 401 aa, Artificial Sequence
  derived and/or modified protein sequence (wt) from Pf(Gha1109-215)__BAM84833.1__CSP
MMRKLAILSVSSFLFVEALFQEYQCYGSSSNTRVLNELNYDNAGTNLYNELEMNYYGKQENWYSLKKNSRSLGENDDGNNEDNEKLRKPKHKKLKQPADGNPDPNANPNVDPNANPNVDPNANPNVDPNANPNANPNANPNANPNANPNANPNANPNANPNANPNANPNANPNANPNANPNANPNANPNANPNANPNVDPNANPNANPNANPNANPNANPNANPNANPNANPNANPNANPNANPNANPNANPNANPNANPNANPNANPNANPNANPNKNNQGNGQGHNMPNDPNRNVDENAKANNAVKNNNNEEPSDKHIEQYLKTIQNSLSTEWSPCSVTCGNGIQVRIKPGSANKPKDQLDYENDIEKKICKMEKCSSVFNVVNSSIGLIMVLSFLFLN

SEQ ID NO: 2626 - protein, 400 aa, Artificial Sequence
  derived and/or modified protein sequence (wt) from Pf(Gha1109-199)__BAM84831.1__CSP
MMRKLAILSVSSFLFVEALFQEYQCYGSSSNTRVLNELNYDNAGTNLYNELEMNYYGKQENWYSLKKNSRSLGENDDGNNNNGDNGREGKDEDKRDGNNEDNEKLRKPKHKKLKQPADGNPDPNANPNVDPNANPNVDPNANPNVDPNANPNANPNANPNANPNANPNANPNANPNANPNANPNANPNANPNANPNVDPNANPNANPNANPNANPNANPNANPNANPNANPNANPNANPNANPNANPNANPNANPNANPNANPNANPNANPNANPNKNNQGNGQGHNMPNDPNRNVDENANANSAVKNNNNEEPSDKHIKEYLNKIQNSLSTEWSPCSVTCGNGIQVRIKPGSANKPKDELDYANDIEKKICKMEKCSSVFNVVNSSIGLIMVLSFLFLN

SEQ ID NO: 2627 - protein, 397 aa, Artificial Sequence
  derived and/or modified protein sequence (wt) from Pf(Asembo Bay)__AAN87582.1__CSP
MMRKLAILSVSSFLFVEALFQEYQCYGSSSNTRVLNELNYDNAGTNLYNELEMNYYGKQENWYSLKKNSRSLGENDDGNNEDNEKLRKPKHKKLKQPADGNPDPNANPNVDPNANPNVDPNANPNVDPNANPNANPNANPNANPNANPNANPNANPNANPNANPNANPNANPNANPNANPNANPNANPNANPNANPNVDPNANPNANPNANPNANPNANPNANPNANPNANPNANPNANPNANPNANPNANPNANPNANPNANPNANPNANPNKNNQGNGQGHNMPNDPNRNVDENANANNAVKNNNNEEPSDQHIEKYLKTIQNSLSTEWSPCSVTCGNGIQVRIKPGSANKPKDQLDYANDIEKKICKMEKCSSVFNVVNSSIGLIMVLSFLFLN

SEQ ID NO: 2628 - protein, 397 aa, Artificial Sequence
  derived and/or modified protein sequence (wt) from Pf(Tz98-017)__BAM84782.1__CSP
MMRKLAILSVSSFLFVEALFQEYQCYGSSSNTRVLNELNYDNAGTNLYNELEMNYYGKQENWYSLKKNSRSLGENDDGNNEDNEKLRKPKHKKLKQPADGNPDPNANPNVDPNANPNVDPNANPNVDPNANPNANPNANPNANPNANPNANPNANPNANPNANPNANPNANPNANPNANPNANPNANPNANPNANPNVDPNANPNANPNANPNANPNANPNANPNANPNANPNANPNANPNANPNANPNANPNANPNANPNANPNANPNANPNKNNQGNGQGHNMPNDPNRNVDENANANNAVKNNNNEEPSDKHIEQYLNKIKNSISTEWSPCSVTCGNGIQVRIKPGSANKPKDELNYENDIEKKICKMEKCSSVFNVVNSSIGLIMVLSFLFLN

SEQ ID NO: 2629 - protein, 397 aa, Artificial Sequence
  derived and/or modified protein sequence (wt) from Pf(Yaounde)__AAN87583.1__CSP
MMRKLAILSVSSFLFVEALFQEYQCYGSSSNTRVLNELNYDNAGTNLYNELEMNYYGKQENWYSLKKNSRSLGENDDGNNEDNEKLRKPKHKKLKQPADGNPDPNANPNVDPNANPNVDPNANPNVDPNANPNANPNANPNANPNANPNANPNANPNANPNANPNANPNANPNANPNANPNANPNANPNANPNANPNVDPNANPNANPNANPNANPNANPNANPNANPNANPNANPNANPNANPNANPNANPNANPNANPNANPNANPNANPNKNNQGNGQGHNMPNDPNRNVDENANANNAVKNNNNEEPSDQHIEKYLKRIQNSLSTEWSPCSVTCGNGIQVRIKPGSANKPKDQLDYANDIEKKICKMEKCSSVFNVVNSSIGLIMVLSFLFLN

SEQ ID NO: 2630 - protein, 396 aa, Artificial Sequence
  derived and/or modified protein sequence (wt) from Pf(Amazonas)__AAN87593.1__CSP
MMRKLAILSVSSFLFVEALFQEYQCYGSSSNTRVLNELNYDNAGTNLYNELEMNYYGKQENWYSLKKNSRSLGENDDGNNNNGDNGREGKDEDKRDGNNEDNEKLRKPKHKKLKQPADGNPDPNANPNVDPNANPNVDPNANPNVDPNANPNANPNANPNANPNANPNANPNANPNANPNANPNANPNANPNANPNVDPNANPNANPNANPNANPNANPNANPNANPNANPNANPNANPNANPNANPNANPNANPNANPNANPNANPNANPNKNNQGNGQGHNMPNDPNRNVDENANANNAVKNNNNEEPSDKHITEYLKRIQNSLSTEWSPCSVTCGNGIQVRIKPGSAGKSKNELDYENDIEKKICKMEKCSSVFNVVNSSIGLIMVLSFLFLN

SEQ ID NO: 2631 - protein, 396 aa, Artificial Sequence
  derived and/or modified protein sequence (wt) from Pf(Amazonas)__AAN87594.1__CSP
MMRKLAILSVSSFLFVEALFQEYQCYGSSSNTRVLNELNYDNAGTNLYNELEMNYYGKQENWYSLKKNSRSLGENDDGNNNNGDNGREGKDEDKRDGNNEDNENLRKPKHKKLKQPADGNPDPNANPNVDPNANPNVDPNANPNVDPNANPNANPNANPNANPNANPNANPNANPNANPNANPNANPNANPNANPNVDPNANPNANPNANPNANPNANPNANPNANPNANPNANPNANPNANPNANPNANPNANPNANPNANPNANPNANPNKNNQGNGQGHNMPNDPNRNVDENANANNAVKNNNNEEPSDKHITEYLKRIQNSLSTEWSPCSVTCGNGIQVRIKPGSAGKSKNELDYENDIEKKICKMEKCSSVFNVVNSSIGLIMVLSFLFLN

SEQ ID NO: 2632 - protein, 396 aa, Artificial Sequence
  derived and/or modified protein sequence (wt) from Pf(Bolivar)__AAN87592.1__CSP
MMRKLAILSVSSFLFVEALFQEYQCYGSSSNTRVLNELNYDNAGTNLYNELEMNYYGKQENWYSLKKNSRSLGENDDGNNNNGDNGREGKDEDKRDGNNEDNEKLRKPKHKKLKQPADGNPDPNANPNVDPNANPNVDPNANPNVDPNANPNANPNANPNANPNANPNANPNANPNANPNANPNANPNANPNANPNVDPNANPNANPNANPNANPNANPNANPNANPNANPNANPNANPNANPNANPNANPNANPNANPNANPNANPNANPNKNNQGNGQGHNMPNDPNRNVDENANANNAVKNNNNEEPSDKHITEYLKRIQNSLSTEWSPCSVTCGNGIQVRIKPGSAGKSKNQLDYENDIEKKICKMEKCSSVFNVVNSSIGLIMVLSFLFLN

SEQ ID NO: 2633 - protein, 393 aa, Artificial Sequence
  derived and/or modified protein sequence (wt) from Pf(30)__AGR53781.1__CSP
MMRKLAILSVSSFLFVEALFQEYQCYGSSSNTRVLNELNYDNAGTNLYNELEMNYYGKQENWYSLKKNSRSLGENDDGNNEDNEKLRKPKHKKLKQPGDGNPDPNANPNVDPNANPNVDPNANPNVDPNANPNANPNANPNANPNANPNANPNANPNANPNANPNANPNANPNANPNANPNANPNANPNVDPNANPNANPNANPNANPNANPNANPNANPNANPNANPNANPNANPNANPNANPNANPNANPNANPNANPNANPNANPNKNNQGNGQGHNMPNDPNRNVDENANANNAVKNNNNEEPSDKHITEYLKKIQNSLSTEWSPCSVTCGNGIQVRIKPGSAGKSKNELDYENDIEKKICKMEKCSSVFNVVNSSIGLIMVLSFLFLN

SEQ ID NO: 2634 - protein, 393 aa, Artificial Sequence
  derived and/or modified protein sequence (wt) from Pf(Gha1108-087)__BAM84819.1__CSP
MMRKLAILSVSSFLFVEALFQEYQCYGSSSNTRVLNELNYDNAGTNLYNELEMNYYGKQENWYSLKKNSRSLGENDDGNNEDNEKLRKPKHKKLKQPADGNPDPNANPNVDPNANPNVDPNANPNVDPNANPNANPNANPNANPNANPNANPNANPNANPNANPNANPNANPNANPNANPNANPNANPNANPNVDPNANPNANPNANPNANPNANPNANPNANPNANPNANPNANPNANPNANPNANPNANPNANPNANPNANPNANPNKNNQGNGQGHNMPNDPNRNVDENANANNAVKNNNNEEPSDQHIEKYLKRIQNSLSTEWSPCSVTCGNGIQVRIKPGSANKPKDQLDYANDIEKKICKMEKCSSVFNVVNSSIGLIMVLSFLFLN

SEQ ID NO: 2635 - protein, 393 aa, Artificial Sequence
  derived and/or modified protein sequence (wt) from Pf(Gha1108-098)__BAM84821.1__CSP
MMRKLAILSVSSFLFVEALFQEYQCYGSSSNTRVLNELNYDNAGTNLYNELEMNYYGKQENWYSLKKNSRSLGENDDGNNEDNEKLRKPKHKKLKQPGDGNPDPNANPNVDPNANPNVDPNANPNVDPNANPNANPNANPNANPNANPNANPNANPNANPNANPNANPNANPNANPNANPNANPNANPNVDPNANPNANPNANPNANPNANPNANPNANPNANPNANPNANPNANPNANPNANPNANPNANPNANPNANPNANPNANPNKNNQGNGQGHNMPNEPNRNVDENANANNAVKNNNNEEPSDKHIEQYLNKIQNSLSTEWSPCSVTCGNGIQVRIKPGSANKPKDQLDYANDIEKKICKMEKCSSVFNVVNSSIGLIMVLSFLFLN

SEQ ID NO: 2636 - protein, 393 aa, Artificial Sequence
  derived and/or modified protein sequence (wt) from Pf(Gha1108-101)__BAM84808.1__CSP
MMRKLAILSVSSFLFVEALFQEYQCYGSSSNTRVLNELNYDNAGTNLYNELEMNYYGKQENWYSLKKNSRSLGENDDGNNEDNEKLRKPKHKKLKQPADGNPDPNANPNVDPNANPNVDPNANPNVDPNANPNANPNANPNANPNANPNANPNANPNANPNANPNANPNANPNANPNANPNANPNANPNVDPNANPNANPNANPNANPNANPNANPNANPNANPNANPNANPNANPNANPNANPNANPNANPNANPNANPNANPNANPNKNNQGNGQGHNMPNDPNRNVDENANANNAVKNNNNEEPSDQHIEKYLNKIKNSLSTEWSPCSVTCGNGIQVRIKPGSANKPKDQLDYANDIEKKICKMEKCSSVFNVVNSSIGLIMVLSFLFLN

SEQ ID NO: 2637 - protein, 393 aa, Artificial Sequence
  derived and/or modified protein sequence (wt) from Pf(Gha1108-148)__BAM84814.1__CSP
MMRKLAILSVSSFLFVEALFQEYQCYGSSSNTRVLNELNYDNAGTNLYNELEMNYYGKQENWYSLKKNSRSLGENDDGNNEDNEKLRKPKHKKLKQPGDGNPDPNANPNVDPNANPNVDPNANPNVDPNANPNANPNANPNANPNANPNANPNANPNANPNANPNANPNANPNANPNANPNANPNANPNVDPNANPNANPNANPNANPNANPNANPNANPNANPNANPNANPNANPNANPNANPNANPNANPNANPNANPNANPNANPNKNNQGNGQGHNMPNDPNRNVDENANANSAVKNNNNEEPSDKHIKEYLNKIQNSLSTEWSPCSVTCGNGIQVRIKPGSANKPKDELDYANDIEKKICKMEKCSSVFNVVNSSIGLIMVLSFLFLN

SEQ ID NO: 2638 - protein, 393 aa, Artificial Sequence
  derived and/or modified protein sequence (wt) from Pf(Gha1109-097)__BAM84838.1__CSP
MMRKLAILSVSSFLFVEALFQEYQCYGSSSNTRVLNELNYDNAGTNLYNELEMNYYGKQENWYSLKKNSRSLGENDDGNNEDNEKLRKPKHKKLKQPADGNPDPNANPNVDPNANPNVDPNANPNVDPNANPNANPNANPNANPNANPNANPNANPNANPNANPNANPNANPNANPNANPNANPNANPNVDPNANPNANPNANPNANPNANPNANPNANPNANPNANPNANPNANPNANPNANPNANPNANPNANPNANPNANPNANPNKNNQGNGQGHNMPNDPNRNVDENAKANNAVKNNNNEEPSDKHIEQYLKTIQNSLSTEWSPCSVTCGNGIQVRIKPGSANKPKDQLDYENDIEKKICKMEKCSSVFNVVNSSIGLIMVLSFLFLN

SEQ ID NO: 2639 - protein, 393 aa, Artificial Sequence
  derived and/or modified protein sequence (wt) from Pf(Gha1110-021)__BAM84839.1__CSP
MMRKLAILSVSSFLFVEALFQEYQCYGSSSNTRVLNELNYDNAGTNLYNELEMNYYGKQENWYSLKKNSRSLGENDDGNNEDNEKLRKPKHKKLKQPADGNPDPNANPNVDPNANPNVDPNANPNVDPNANPNANPNANPNANPNANPNANPNANPNANPNANPNANPNANPNANPNANPNANPNANPNVDPNANPNANPNANPNANPNANPNANPNANPNANPNANPNANPNANPNANPNANPNANPNANPNANPNANPNANPNANPNKNNQGNGQGHNMPNDPNRNVDENANANNAVKNNNNEEPSDKHIEQYLKTIKNSLSTEWSPCSVTCGNGIQVRIKPGSANKPKDELNYENDIEKKICKMEKCSSVFNVVNSSIGLIMVLSFLFLN

SEQ ID NO: 2640 - protein, 393 aa, Artificial Sequence
  derived and/or modified protein sequence (wt) from Pf(Tz03-068)__BAM84802.1__CSP
MMRKLAILSVSSFLFVEALFQEYQCYGSSSNTRVLNELNYDNAGTNLYNELEMNYYGKQENWYSLKKNSRSLGENDDGNNEDNEKLRKPKHKKLKQPADGNPDPNANPNVDPNANPNVDPNANPNVDPNANPNANPNANPNANPNANPNANPNANPNANPNANPNANPNANPNANPNANPNANPNANPNVDPNANPNANPNANPNANPNANPNANPNANPNANPNANPNANPNANPNANPNANPNANPNANPNANPNANPNANPNANPNKNNQGNGQGHNMPNDPNRNVDENANANNAVKNNNNEEPSDQHIEKYLKIIQNSLSTEWSPCSVTCGNGIQVRIKPGSANKPKDQLDYANDIEKKICKMEKCSSVFNVVNSSIGLIMVLSFLFLN

SEQ ID NO: 2641 - protein, 393 aa, Artificial Sequence
  derived and/or modified protein sequence (wt) from Pf(Tz03-070)__BAM84803.1__CSP
MMRKLAILSVSSFLFVEALFQEYQCYGSSSNTRVLNELNYDNAGTNLYNELEMNYYGKQENWYSLKKNSRSLGENDDGNNEDNEKLRKPKHKKLKQPADGNPDPNANPNVDPNANPNVDPNANPNVDPNANPNANPNANPNANPNANPNANPNANPNANPNANPNANPNANPNANPNANPNANPNANPNANPNVDPNANPNANPNANPNANPNANPNANPNANPNANPNANPNANPNANPNANPNANPNANPNANPNANPNANPNANPNKNNQGNGQGHNMPNDPNRNVDENANANNAVKNNNNEEPSDQHIEKYLQKIQNSLSTEWSPCSVTCGNGIQVRIKPGSANKPKDQLNYENDIEKKICKMEKCSSVFNVVNSSIGLIMVLSFLFLN

SEQ ID NO: 2642 - protein, 393 aa, Artificial Sequence
  derived and/or modified protein sequence (wt) from Pf(Yaounde)__AAN87579.1__CSP
MMRKLAILSVSSFLFVEALFQEYQCYGSSSNTRVLNELNYDNAGTNLYNELEMNYYGKQENWYSLKKNSRSLGENDDGNNEDNEKLRKPKHKKLKQPGDGNPDPNANPNVDPNANPNVDPNANPNVDPNANPNANPNANPNANPNANPNANPNANPNANPNANPNANPNANPNANPNANPNANPNANPNVDPNANPNANPNANPNANPNANPNANPNANPNANPNANPNANPNANPNANPNANPNANPNANPNANPNANPNANPNANPNKNNQGNGQGHNMPNDPNRNVDKNANANNAVKNNNNEEPSDKHIEEYLKKIKNSISTEWSPCSVTCGNGIQVRIKPGSANKPKDELDYENDIEKKICKMEKCSSVFNVVNSSIGLIMVLSFLFLN

SEQ ID NO: 2643 - protein, 393 aa, Artificial Sequence
  derived and/or modified protein sequence (wt) from Pf(Yaounde)__AAN87578.1__CSP
MMRKLAILSVSSFLFVEALFQEYQCYGSSSNTRVLNELNYDNAGTNLYNELEMNYYGKQENWYSLKKNSRSLGENDDGNNEDNEKLRKPKHKKLKQPGDGNPDPNANPNVDPNANPNVDPNANPNVDPNANPNANPNANPNANPNANPNANPNANPNANPNANPNANPNANPNANPNANPNANPNANPNVDPNANPNANPNANPNANPNANPNANPNANPNANPNANPNANPNANPNANPNANPNANPNANPNANPNANPNANPNANPNKNNQGNGQGHNMPNDPNRNVNENANANNAVKNNNNEEPSDKHIEKYLKEIQNSLSTEWSPCSVTCGNGIQVRIKPGSAGKPKNELDYENDIEKKICKMEKCSSVFNVVNSSIGLIMVLSFLFLN

SEQ ID NO: 2644 - protein, 392 aa, Artificial Sequence
  derived and/or modified protein sequence (wt) from Pf(Asembo Bay)__AAN87607.1__CSP
MMRKLAILSVSSFLFVEALFQEYQCYGSSSNTRVLNELNYDNAGTNLYNELEMNYYGKQENWYSLKKNSRSLGENDDGNNNNGDNGREGKDEDKRDGNNEDNEKLRKPKHKKLKQPADGNPDPNANPNVDPNANPNVDPNANPNANPNANPNANPNANPNANPNANPNANPNANPNANPNANPNANPNVDPNANPNANPNANPNANPNANPNANPNANPNANPNANPNANPNANPNANPNANPNANPNANPNANPNANPNANPNANPNKNNQGNGQGHNMPNDPNRNVDENANANNAVKNNNNEEPSDKHIEQYLNKIKNSISTEWSPCSVTCGNGIQVRIKPGSANKPKDQLDYENDIEKKICKMEKCSSVFNVVNSSIGLIMVLSFLFLN

SEQ ID NO: 2645 - protein, 392 aa, Artificial Sequence
  derived and/or modified protein sequence (wt) from Pf(Asembo Bay)__AAN87608.1__CSP
MMRKLAILSVSSFLFVEALFQEYQCYGSSSNTRVLNELNYDNAGTNLYNELEMNYYGKQENWYSLKKNSRSLGENDDGNNNNGDNGREGKDEDKRDGNNEDNEKLRKPKHKKLKQPADGNPDPNANPNVDPNANPNVDPNANPNVDPNANPNANPNANPNANPNANPNANPNANPNANPNANPNANPNVDPNANPNANPNANPNANPNANPNANPNANPNANPNANPNANPNANPNANPNANPNANPNANPNANPNANPNANPNANPNKNNQGNGQGHNMPNDPNRNVDENANANNAVKNNNNEEPSDKHIEQYLKIIKNSLSTEWSPCSVTCGNGIQVRIKPGSANKPKDELDYANDIEKKICKMEKCSSVFNVVNSSIGLIMVLSFLFLN

SEQ ID NO: 2646 - protein, 392 aa, Artificial Sequence
  derived and/or modified protein sequence (wt) from Pf(Asembo Bay)__AAN87595.1__CSP
MMRKLAILSVSSFLFVEALFQEYQCYGSSSNTRVLNELNYDNAGTNLYNELEMNYYGKQENWYSLKKNSRSLGENDDGNNNNGDNGREGKDEDKRDGNNEDNEKLRKPKHKKLKQPADGNPDPNANPNVDPNANPNVDPNANPNVDPNANPNANPNANPNANPNANPNANPNANPNANPNANPNANPNVDPNANPNANPNANPNANPNANPNANPNANPNANPNANPNANPNANPNANPNANPNANPNANPNANPNANPNANPNANPNKNNQGNGQGHNMPNDPNRNVDENANANNAVKNNNNEEPSDKHITEYLKRIQNSLSTEWSPCSVTCGNGIQVRIKPGSAGKSKNELDYENDIEKKICKMEKCSSVFNVVNSSIGLIMVLSFLFLN

SEQ ID NO: 2647 - protein, 392 aa, Artificial Sequence
  derived and/or modified protein sequence (wt) from Pf(India)__AAN87618.1__CSP
MMRKLAILSVSSFLFVEALFQEYQCYGSSSNTRVLNELNYDNAGTNLYNELEMNYYGKQENWYSLKKNSRSLGENDDGNNNNGDNGREGKDEDKRDGNNEDNEKLRKPKHKKLKQPGGDNPDPNANPNVDPNANPNANPNANPNANPNANPNANPNANPNANPNANPNANPNANPNANPNANPNANPNANPNANPNANPNANPNANPNANPNANPNANPNANPNANPNANPNANPNANPNANPNANPNANPNANPNANPNANPNANPNKNNQGNGQGHNMPNDPNRNVDENANANNAVKNNNNEEPSDKHIEQYLKKIQNSLSTEWSPCSVTCGNGIQVRIKPGSANKPKDELDYENDIEKKICKMEKCSSVFNVVNSSIGLIMVLSFLFLN

SEQ ID NO: 2648 - protein, 389 aa, Artificial Sequence
  derived and/or modified protein sequence (wt) from Pf(Asembo Bay)__AAN87585.1__CSP
MMRKLAILSVSSFLFVEALFQEYQCYGSSSNTRVLNELNYDNAGTNLYNELEMNYYGKQENWYSLKKNSRSLGENDDGNNEDNEKLRKPKHKKLKQPADGNPDPNANPNVDPNANPNVDPNANPNVDPNANPNANPNANPNANPNANPNANPNANPNANPNANPNANPNANPNANPNANPNANPNANPNVDPNANPNANPNANPNANPNANPNANPNANPNANPNANPNANPNANPNANPNANPNANPNANPNANPNANPNANPNKNNQGNGQGHNMPNDPNRNVDENANANNAVKNNNNEEPSDQHIEKYLKTIQNSLSTEWSPCSVTCGNGIQVRIKPGSANKPKDQLDYANDIEKKICKMEKCSSVFNVVNSSIGLIMVLSFLFLN

SEQ ID NO: 2649 - protein, 389 aa, Artificial Sequence
  derived and/or modified protein sequence (wt) from Pf(Asembo Bay)__AAN87577.1__CSP
MMRKLAILSVSSFLFVEALFQEYQCYGSSSNTRVLNELNYDNAGTNLYNELEMNYYGKQENWYSLKKNSRSLGENDDGNNEDNEKLRKPKHKKLKQPGDGNPDPNANPNVDPNANPNVDPNANPNVDPNANPNANPNANPNANPNANPNANPNANPNANPNANPNANPNANPNANPNANPNANPNVDPNANPNANPNANPNANPNANPNANPNANPNANPNANPNANPNANPNANPNANPNANPNANPNANPNANPNANPNANPNKNNQGNGQGHNMPNDPNRNVNENANANNAVKNNNNEEPSDKHIEKYLKEIQNSLSTEWSPCSVTCGNGIQVRIKPGSAGKPKNELDYENDIEKKICKMEKCSSVFNVVNSSIGLIMVLSFLFLN

SEQ ID NO: 2650 - protein, 389 aa, Artificial Sequence
  derived and/or modified protein sequence (wt) from Pf(Gha1108-043)__BAM84815.1__CSP
MMRKLAILSVSSFLFVEALFQEYQCYGSSSNTRVLNELNYDNAGTNLYNELEMNYYGKQENWYSLKKNSRSLGENDDGNNEDNEKLRKPKHKKLKQPGDGNPDPNANPNVDPNANPNVDPNANPNVDPNANPNANPNANPNANPNANPNANPNANPNANPNANPNANPNANPNANPNANPNANPNVDPNANPNANPNANPNANPNANPNANPNANPNANPNANPNANPNANPNANPNANPNANPNANPNANPNANPNANPNANPNKNNQGNGQGHNMPNDPNRNVDENANANSAVKNNNNEEPSDKHIKEYLNKIQNSLSTEWSPCSVTCGNGIQVRIKPGSANKPKDELDYANDIEKKICKMEKCSSVFNVVNSSIGLIMVLSFLFLN

SEQ ID NO: 2651 - protein, 389 aa, Artificial Sequence
  derived and/or modified protein sequence (wt) from Pf(Gha1108-052)__BAM84816.1__CSP
MMRKLAILSVSSFLFVEALFQEYQCYGSSSNTRVLNELNYDNAGTNLYNELEMNYYGKQENWYSLKKNSRSLGENDDGNNEDNEKLRKPKHKKLKQPADGNPDPNANPNVDPNANPNVDPNANPNVDPNANPNANPNANPNANPNANPNANPNANPNANPNANPNANPNANPNANPNANPNANPNVDPNANPNANPNANPNANPNANPNANPNANPNANPNANPNANPNANPNANPNANPNANPNANPNANPNANPNANPNANPNKNNQGNGQGHNMPNDPNRNVDENANANSAVKNNNNEEPSDKHIEQYLKTIQNSLSTEWSPCSVTCGNGIQVRIKPGSANKPKDQLDYENDIEKKICKMEKCSSVFNVVNSSIGLIMVLSFLFLN

SEQ ID NO: 2652 - protein, 389 aa, Artificial Sequence
  derived and/or modified protein sequence (wt) from Pf(Gha1108-124)__BAM84812.1__CSP
MMRKLAILSVSSFLFVEALFQEYQCYGSSSNTRVLNELNYDNAGTNLYNELEMNYYGKQENWYSLKKNSRSLGENDDGNNEDNEKLRKPKHKKLKQPADGNPDPNANPNVDPNANPNVDPNANPNVDPNANPNANPNANPNANPNANPNANPNANPNANPNANPNANPNANPNANPNANPNANPNANPNVDPNANPNANPNANPNANPNANPNANPNANPNANPNANPNANPNANPNANPNANPNANPNANPNANPNANPNANPNKNNQGNGQGHNMPNDPNRNVDENANANNAVKNNNNEEPSDQHIEKYLNKIKNSLSTEWSPCSVTCGNGIQVRIKPGSANKPKDQLDYANDIEKKICKMEKCSSVFNVVNSSIGLIMVLSFLFLN

SEQ ID NO: 2653 - protein, 389 aa, Artificial Sequence
  derived and/or modified protein sequence (wt) from Pf(Gha1109-003)__BAM84834.1__CSP
MMRKLAILSVSSFLFVEALFQEYQCYGSSSNTRVLNELNYDNAGTNLYNELEMNYYGKQENWYSLKKNSRSLGENDDGNNEDNEKLRKPKHKKLKQPADGNPDPNANPNVDPNANPNVDPNANPNVDPNANPNANPNANPNANPNANPNANPNANPNANPNANPNANPNANPNANPNANPNANPNVDPNANPNANPNANPNANPNANPNANPNANPNANPNANPNANPNANPNANPNANPNANPNANPNANPNANPNANPNANPNKNNQGNGQGHNMPNDPNRNVDENANANDAVKNNNNEEPSDQHIEKYLKIIKNSLSTEWSPCSVTCGNGIQVRIKPGSANKPKDQLDYANDIEKKICKMEKCSSVFNVVNSSIGLIMVLSFLFLN

SEQ ID NO: 2654 - protein, 389 aa, Artificial Sequence
  derived and/or modified protein sequence (wt) from Pf(Gha1109-058)__BAM84835.1__CSP
MMRKLAILSVSSFLFVEALFQEYQCYGSSSNTRVLNELNYDNAGTNLYNELEMNYYGKQENWYSLKKNSRSLGENDDGNNEDNEKLRKPKHKKLKQPGDGNPDPNANPNVDPNANPNVDPNANPNVDPNANPNANPNANPNANPNANPNANPNANPNANPNANPNANPNANPNANPNANPNANPNVDPNANPNANPNANPNANPNANPNANPNANPNANPNANPNANPNANPNANPNANPNANPNANPNANPNANPNANPNANPNKNNQGNGQGHNMPNDPNRNVDENANANNAVKNNNNEEPSDKHITEYLKKIQNSLSTEWSPCSVTCGNGIQVRIKPGSAGKSKNELDYENDIEKKICKMEKCSSVFNVVNSSIGLIMVLSFLFLN

SEQ ID NO: 2655 - protein, 389 aa, Artificial Sequence
  derived and/or modified protein sequence (wt) from Pf(Gha1109-105)__BAM84822.1__CSP
MMRKLAILSVSSFLFVEALFQEYQCYGSSSNTRVLNELNYDNAGTNLYNELEMNYYGKQENWYSLKKNSRSLGENDDGNNEDNEKLRKPKHKKLKQPADGNPDPNANPNVDPNANPNANPNANPNANPNANPNANPNVDPNANPNVDPNANPNANPNANPNANPNANPNANPNANPNANPNVDPNANPNANPNANPNANPNANPNANPNANPNANPNANPNANPNANPNANPNANPNANPNANPNANPNANPNANPNANPNANPNKNNQGNGQGHNMPNDPNRNVDENAKANNAVKNNNNEEPSDKHIEQYLKTIQNSLSTEWSPCSVTCGNGIQVRIKPGSANKPKDQLDYENDIEKKICKMEKCSSVFNVVNSSIGLIMVLSFLFLN

SEQ ID NO: 2656 - protein, 389 aa, Artificial Sequence
  derived and/or modified protein sequence (wt) from Pf(Gha1109-111)__BAM84823.1__CSP
MMRKLAILSVSSFLFVEALFQEYQCYGSSSNTRVLNELNYDNAGTNLYNELEMNYYGKQENWYSLKKNSRSLGENDDGNNEDNEKLRKPKHKKLKQPGDGNPDPNANPNVDPNANPNVDPNANPNVDPNANPNANPNANPNANPNANPNANPNANPNANPNANPNANPNANPNANPNANPNANPNVDPNANPNANPNANPNANPNANPNANPNANPNANPNANPNANPNANPNANPNANPNANPNANPNANPNANPNANPNANPNKNNQGNGQGHNMPNDPNRNVDENANANNAVKNNNNEEPSDKHIKEYLNKIQNSISTEWSPCSVTCGNGIQVRIKPGSADKPKDQLDYINDIEKKICKMEKCSSVFNVVNSSIGLIMVLSFLFLN

SEQ ID NO: 2657 - protein, 389 aa, Artificial Sequence
  derived and/or modified protein sequence (wt) from Pf(Gha1109-125)__BAM84824.1__CSP
MMRKLAILSVSSFLFVEALFQEYQCYGSSSNTRVLNELNYDNAGTNLYNELEMNYYGKQENWYSLKKNSRSLGENDDGNNEDNEKLRKPKHKKLKQPADGNPDPNANPNVDPNANPNVDPNANPNVDPNANPNANPNANPNANPNANPNANPNANPNANPNANPNANPNANPNANPNANPNANPNANPNVDPNANPNANPNANPNANPNANPNANPNANPNANPNANPNANPNANPNANPNANPNANPNANPNANPNANPNANPNKNNQGNGQGHNMPNDPNRNVDENANANNAVKNNNNEEPSDQHIEKYLKTIKNSLSTEWSPCSVTCGNGIQVRIKPGSANKPKDQLDYANDIEKKICKMEKCSSVFNVVNSSIGLIMVLSFLFLN

SEQ ID NO: 2658 - protein, 389 aa, Artificial Sequence
  derived and/or modified protein sequence (wt) from Pf(Gha1109-127)__BAM84825.1__CSP
MMRKLAILSVSSFLFVEALFQEYQCYGSSSNTRVLNELNYDNAGTNLYNELEMNYYGKQENWYSLKKNSRSLGENDDGNNEDNEKLRKPKHKKLKQPGDGNPDPNANPNVDPNANPNVDPNANPNVDPNANPNANPNANPNANPNANPNANPNANPNANPNANPNANPNANPNANPNANPNANPNVDPNANPNANPNANPNANPNANPNANPNANPNANPNANPNANPNANPNANPNANPNANPNANPNANPNANPNANPNANPNKNNQGNGQGHNMPNDPNRNVDENANANNAVKNNNNEEPSDKHITEYLKKIKNSLSTEWSPCSVTCGNGIQVRIKPGSAGKSKNELDYENDIEKKICKMEKCSSVFNVVNSSIGLIMVLSFLFLN

SEQ ID NO: 2659 - protein, 389 aa, Artificial Sequence
  derived and/or modified protein sequence (wt) from Pf(Gha1109-158)__BAM84826.1__CSP
MMRKLAILSVSSFLFVEALFQEYQCYGSSSNTRVLNELNYDNAGTNLYNELEMNYYGKQENWYSLKKNSRSLGENDDGNNEDNEKLRKPKHKKLKQPADGNPDPNANPNVDPNANPNVDPNANPNVDPNANPNANPNANPNANPNANPNANPNANPNANPNANPNANPNANPNANPNANPNANPNVDPNANPNANPNANPNANPNANPNANPNANPNANPNANPNANPNANPNANPNANPNANPNANPNANPNANPNANPNANPNKNNQGNGQGHNMPNDPNRNVDENANANNAVKNNNNEEPSDKHIEQYLKTIKNSLSTEWSPCSVTCGNGIQVRIKPGSANKPKDQLDYANDIEKKICKMEKCSSVFNVVNSSIGLIMVLSFLFLN

SEQ ID NO: 2660 - protein, 389 aa, Artificial Sequence
  derived and/or modified protein sequence (wt) from Pf(Gha1109-205)__BAM84832.1__CSP
MMRKLAILSVSSFLFVEALFQEYQCYGSSSNTRVLNELNYDNAGTNLYNELEMNYYGKQENWYSLKKNSRSLGENDDGNNEDNEKLRKPKHKKLKQPADGNPDPNANPNVDPNANPNVDPNANPNVDPNANPNANPNANPNANPNANPNANPNANPNANPNANPNANPNANPNANPNANPNANPNVDPNANPNANPNANPNANPNANPNANPNANPNANPNANPNANPNANPNANPNANPNANPNANPNANPNANPNANPNANPNKNNQGNGQGHNMPNDPNRNVDENANANNAVKNNNNEEPSDQHIEKYLKIIQNSLSTEWSPCSVTCGNGIQVRIKPGSANKPKDQLDYANDIEKKICKMEKCSSVFNVVNSSIGLIMVLSFLFLN

SEQ ID NO: 2661 - protein, 389 aa, Artificial Sequence
  derived and/or modified protein sequence (wt) from Pf(T9/96)__BAD73957.1__CSP
MMRKLAILSVSSFLFVEALFQEYQCYGSSSNTRVLNELNYDNAGTNLYNELEMNYYGKQENWYSLKKNSRSLGENDDGNNEDNEKLRKPKHKKLKQPADGNPDPNANPNVDPNANPNVDPNANPNVDPNANPNANPNANPNANPNANPNANPNANPNANPNANPNANPNANPNANPNANPNANPNVDPNANPNANPNANPNANPNANPNANPNANPNANPNANPNANPNANPNANPNANPNANPNANPNANPNANPNANPNANPNKNNQGNGQGHNMPNDPNRNVDENANANNAVKNNNNEEPSDKHIEQYLKTIKNSLSTEWSPCSVTCGNGIQVRIKPGSANKPKDELDYANDIEKKICKMEKCSSVFNVVNSSIGLIMVLSFLFLN

SEQ ID NO: 2662 - protein, 389 aa, Artificial Sequence
  derived and/or modified protein sequence (wt) from Pf(Tz93-015)__BAM84752.1__CSP
MMRKLAILSVSSFLFVEALFQEYQCYGSSSNTRVLNELNYDNAGTNLYNELEMNYYGKQENWYSLKKNSRSLGENDDGNNEDNEKLRKPKHKKLKQPGDGNPDPNANPNVDPNANPNVDPNANPNVDPNANPNANPNANPNANPNANPNANPNANPNANPNANPNANPNANPNANPNANPNANPNVDPNANPNANPNANPNANPNANPNANPNANPNANPNANPNANPNANPNANPNANPNANPNANPNANPNANPNANPNANPNKNNQGNGQGHNMPNDPNRNVDENANANDAVKNNNNEEPSDQHIEKYLKIIKNSLSTEWSPCSVTCGNGIQVRIKPGSANKPKDQLDYANDIEKKICKMEKCSSVFNVVNSSIGLIMVLSFLFLN

SEQ ID NO: 2663 - protein, 389 aa, Artificial Sequence
  derived and/or modified protein sequence (wt) from Pf(Tz93-050)__BAM84762.1__CSP
MMRKLAILSVSSFLFVEALFQEYQCYGSSSNTRVLNELNYDNAGTNLYNELEMNYYGKQENWYSLKKNSRSLGENDDGNNEDNEKLRKPKHKKLKQPGDGNPDPNANPNVDPNANPNVDPNANPNVDPNANPNANPNANPNANPNANPNANPNANPNANPNANPNANPNANPNANPNANPNANPNVDPNANPNANPNANPNANPNANPNANPNANPNANPNANPNANPNANPNANPNANPNANPNANPNANPNANPNANPNANPNKNNQGNGQGHNMPNDPNRNVDENANANNPVKNNNNEEPSDKHITEYLKKIKNSISTEWSPCSVTCGNGIQVRIKPGSANKPKDELDYENDIEKKICKMEKCSSVFNVVNSSIGLIMVLSFLFLN

SEQ ID NO: 2664 - protein, 389 aa, Artificial Sequence
  derived and/or modified protein sequence (wt) from Pf(Tz93-105)__BAM84774.1__CSP
MMRKLAILSVSSFLFVEALFQEYQCYGSSSNTRVLNELNYDNAGTNLYNELEMNYYGKQENWYSLKKNSRSLGENDDGNNEDNEKLRKPKHKKLKQPGDGNPDPNANPNVDPNANPNVDPNANPNVDPNANPNANPNANPNANPNANPNANPNANPNANPNANPNANPNANPNANPNANPNANPNVDPNANPNANPNANPNANPNANPNANPNANPNANPNANPNANPNANPNANPNANPNANPNANPNANPNANPNANPNANPNKNNQGNGQGHNMPNDPNRNVDENANANNAVKNNNNEEPSDQHIEKYLKIIQNSLSTEWSPCSVTCGNGIQVRIKPGSANKPKDQLDYANDIEKKICKMEKCSSVFNVVNSSIGLIMVLSFLFLN

SEQ ID NO: 2665 - protein, 389 aa, Artificial Sequence
  derived and/or modified protein sequence (wt) from Pf(Tz93-121)__BAM84777.1__CSP
MMRKLAILSVSSFLFVEALFQEYQCYGSSSNTRVLNELNYDNAGTNLYNELEMNYYGKQENWYSLKKNSRSLGENDDGNNEDNEKLRKPKHKKLKQPGDGNPDPNANPNVDPNANPNVDPNANPNVDPNANPNANPNANPNANPNANPNANPNANPNANPNANPNANPNANPNVDPNANPNANPNANPNANPNANPNANPNANPNANPNANPNANPNANPNANPNANPNANPNANPNANPNANPNANPNANPNANPNANPNANPNKNNQGNGQGHNMPNDPNRNVDENANANNAVKNNNNEEPSDQHIEKYLKKIKNSISTEWSPCSVTCGNGIQVRIKPGSANKPKDELDYENDIEKKICKMEKCSSVFNVVNSSIGLIMVLSFLFLN

SEQ ID NO: 2666 - protein, 389 aa, Artificial Sequence
  derived and/or modified protein sequence (wt) from Pf(Tz98-032)__BAM84786.1__CSP
MMRKLAILSVSSFLFVEALFQEYQCYGSSSNTRVLNELNYDNAGTNLYNELEMNYYGKQENWYSLKKNSRSLGENDDGNNEDNEKLRKPKHKKLKQPADGNPDPNANPNVDPNANPNVDPNANPNVDPNANPNANPNANPNANPNANPNANPNANPNANPNANPNANPNANPNANPNANPNANPNANPNVDPNANPNANPNANPNANPNANPNANPNANPNANPNANPNANPNANPNANPNANPNANPNANPNANPNANPNANPNKNNQGNGQGHNMPNDPNRNVDENANANNAVKNNNNEEPSDKHIEQYLNKIKNSISTEWSPCSVTCGNGIQVRIKPGSANKPKDELNYENDIEKKICKMEKCSSVFNVVNSSIGLIMVLSFLFLN

SEQ ID NO: 2667 - protein, 389 aa, Artificial Sequence
  derived and/or modified protein sequence (wt) from Pf(Tz98-107)__BAM84796.1__CSP
MMRKLAILSVSSFLFVEALFQEYQCYGSSSNTRVLNELNYDNAGTNLYNELEMNYYGKQENWYSLKKNSRSLGENDDGNNEDNEKLRKPKHKKLKQPADGNPDPNANPNVDPNANPNVDPNANPNVDPNANPNANPNANPNANPNANPNANPNANPNANPNANPNANPNANPNANPNANPNANPNVDPNANPNANPNANPNANPNANPNANPNANPNANPNANPNANPNANPNANPNANPNANPNANPNANPNANPNANPNANPNKNNQGNGQGHNMPNDPNRNVDENANANNAVKNNNNEEPSDQHIEKYLKRIQNSLSTEWSPCSVTCGNGIQVRIKPGSANKPKDQLDYANDIEKKICKMEKCSSVFNVVNSSIGLIMVLSFLFLN

SEQ ID NO: 2668 - protein, 388 aa, Artificial Sequence
  derived and/or modified protein sequence (wt) from Pf(Asembo Bay)__AAN87599.1__CSP
MMRKLAILSVSSFLFVEALFQEYQCYGSSSNTRVLNELNYDNAGTNLYNELEMNYYGKQENWYSLKKNSRSLGENDDGNNNNGDNGREGKDEDKRDGNNEDNEKLRKPKHKKLKQPADGNPDPNANPNVDPNANPNVDPNANPNVDPNANPNANPNANPNANPNANPNANPNANPNANPNANPNVDPNANPNANPNANPNANPNANPNANPNANPNANPNANPNANPNANPNANPNANPNANPNANPNANPNANPNANPNANPNKNNQGNGQGHNMPNDPNRNVDENANANNAVKNNNNEEPSDKHIEQYLNKIQNSLSTEWSPCSVTCGNGIQVRIKPGSANKPKDQLDYANDIEKKICKMEKCSSVFNVVNSSIGLIMVLSFLFLN

SEQ ID NO: 2669 - protein, 385 aa, Artificial Sequence
  derived and/or modified protein sequence (wt) from Pf(Asembo Bay)__AAN87581.1__CSP
MMRKLAILSVSSFLFVEALFQEYQCYGSSSNTRVLNELNYDNAGTNLYNELEMNYYGKQENWYSLKKNSRSLGENDDGNNEDNEKLRKPKHKKLKQPADGNPDPNANPNVDPNANPNVDPNANPNVDPNANPNANPNANPNANPNANPNANPNANPNANPNANPNANPNANPNANPNANPNVDPNANPNANPNANPNANPNANPNANPNANPNANPNANPNANPNANPNANPNANPNANPNANPNANPNANPNANPNANPNKNNQGNGQGHNMPNDPNRNVDENAKANNAVKNNNNEEPSDKHIKQYLKKIQNSISTEWSPCSVTCGNGIQVRIKPGSADKPKDQLDYDNDIEKKICKMEKCSSVFNVVNSSIGLIMVLSFLFLN

SEQ ID NO: 2670 - protein, 385 aa, Artificial Sequence
  derived and/or modified protein sequence (wt) from Pf(Gha1108-115)__BAM84810.1__CSP
MMRKLAILSVSSFLFVEALFQEYQCYGSSSNTRVLNELNYDNAGTNLYNELEMNYYGKQENWYSLKKNSRSLGENDDGNNEDNEKLRKPKHKKLKQPADGNPDPNANPNVDPNANPNVDPNANPNVDPNANPNANPNANPNANPNANPNANPNANPNANPNANPNANPNVDPNANPNANPNANPNANPNANPNANPNANPNANPNANPNANPNANPNANPNANPNANPNANPNANPNANPNANPNANPNANPNANPNANPNKNNQGNGQGHNMPNDPNRNVDENANANNAVKNNNNEEPSDQHIEKYLQKIQNSLSTEWSPCSVTCGNGIQVRIKPGSANKPKDQLNYENDIEKKICKMEKCSSVFNVVNSSIGLIMVLSFLFLN

SEQ ID NO: 2671 - protein, 385 aa, Artificial Sequence
  derived and/or modified protein sequence (wt) from Pf(Gha1108-119)__BAM84811.1__CSP
MMRKLAILSVSSFLFVEALFQEYQCYGSSSNTRVLNELNYDNAGTNLYNELEMNYYGKQENWYSLKKNSRSLGENDDGNNEDNEKLRKPKHKKLKQPGDGNPDPNANPNVDPNANPNVDPNANPNVDPNANPNANPNANPNANPNANPNANPNANPNANPNANPNANPNANPNANPNANPNVDPNANPNANPNANPNANPNANPNANPNANPNANPNANPNANPNANPNANPNANPNANPNANPNANPNANPNANPNANPNKNNQGNGQGHNMPNDPNRNVDENANANNAVKNNNNEEPSDQHIEKYLKTIKNSLSTEWSPCSVTCGNGIQVRIKPGSANKPKDQLDYENDIEKKICKMEKCSSVFNVVNSSIGLIMVLSFLFLN

SEQ ID NO: 2672 - protein, 385 aa, Artificial Sequence
  derived and/or modified protein sequence (wt) from Pf(Gha1109-071)__BAM84836.1__CSP
MMRKLAILSVSSFLFVEALFQEYQCYGSSSNTRVLNELNYDNAGTNLYNELEMNYYGKQENWYSLKKNSRSLGENDDGNNEDNEKLRKPKHKKLKQPGDGNPDPNANPNVDPNANPNVDPNANPNVDPNANPNANPNANPNANPNANPNANPNANPNANPNANPNANPNANPNANPNANPNANPNVDPNANPNANPNANPNANPNANPNANPNANPNANPNANPNANPNANPNANPNANPNANPNANPNANPNANPNANPNKNNQGNGQGHNMPNDPNRNVDENANANNAVKNNNNEEPSDQHIEKYIKKIQNSLSTEWSPCSVTCGNGIQVRIKPGSANKPKDELNYENDIEKKICKMEKCSSVFNVVNSSIGLIMVLSFLFLN

SEQ ID NO: 2673 - protein, 385 aa, Artificial Sequence
  derived and/or modified protein sequence (wt) from Pf(Gha1109-163)__BAM84827.1__CSP
MMRKLAILSVSSFLFVEALFQEYQCYGSSSNTRVLNELNYDNAGTNLYNELEMNYYGKQENWYSLKKNSRSLGENDDGNNEDNEKLRKPKHKKLKQPADGNPDPNANPNVDPNANPNVDPNANPNVDPNANPNANPNANPNANPNANPNANPNANPNANPNANPNANPNANPNANPNANPNANPNVDPNANPNANPNANPNANPNANPNANPNANPNANPNANPNANPNANPNANPNANPNANPNANPNANPNANPNANPNKNNQGNGQGHNMPNDPNRNVDENANANNAVKNNNNEEPSDQHIEKYLKTIQNSLSTEWSPCSVTCGNGIQVRIKPGSANKPKDQLDYANDIEKKICKMEKCSSVFNVVNSSIGLIMVLSFLFLN

SEQ ID NO: 2674 - protein, 385 aa, Artificial Sequence
  derived and/or modified protein sequence (wt) from Pf(Tz93-007)__BAM84748.1__CSP
MMRKLAILSVSSFLFVEALFQEYQCYGSSSNTRVLNELNYDNAGTNLYNELEMNYYGKQENWYSLKKNSRSLGENDDGNNEDNEKLRKPKHKKLKQPADGNPDPNANPNVDPNANPNVDPNANPNVDPNANPNANPNANPNANPNANPNANPNANPNANPNANPNANPNANPNANPNANPNVDPNANPNANPNANPNANPNANPNANPNANPNANPNANPNANPNANPNANPNANPNANPNANPNANPNANPNANPNANPNKNNQGNGQGHNMPNDPNRNVDENANANNAVKNNNNEEPSDKHIEQYLKTIKNSLSTEWSPCSVTCGNGIQVRIKPGSANKPKDELDYANDIEKKICKMEKCSSVFNVVNSSIGLIMVLSFLFLN

SEQ ID NO: 2675 - protein, 385 aa, Artificial Sequence
  derived and/or modified protein sequence (wt) from Pf(Tz93-008)__BAM84749.1__CSP
MMRKLAILSVSSFLFVEALFQEYQCYGSSSNTRVLNELNYDNAGTNLYNELEMNYYGKQENWYSLKKNSRSLGENDDGNNEDNEKLRKPKHKKLKQPADGNPDPNANPNVDPNANPNVDPNANPNVDPNANPNANPNANPNANPNANPNANPNANPNANPNANPNANPNANPNANPNANPNVDPNANPNANPNANPNANPNANPNANPNANPNANPNANPNANPNANPNANPNANPNANPNANPNANPNANPNANPNANPNKNNQGNGQGHNMPNDPNRNVDENANANNAVKNNNNEEPSDKHITEYLKKIQNSLSTEWSPCSVTCGNGIQVRIKPGSAGKSKNELDYENDIEKKICKMEKCSSVFNVVNSSIGLIMVLSFLFLN

SEQ ID NO: 2676 - protein, 385 aa, Artificial Sequence
  derived and/or modified protein sequence (wt) from Pf(Tz93-013)__BAM84751.1__CSP
MMRKLAILSVSSFLFVEALFQEYQCYGSSSNTRVLNELNYDNAGTNLYNELEMNYYGKQENWYSLKKNSRSLGENDDGNNEDNEKLRKPKHKKLKQPADGNPDPNANPNVDPNANPNVDPNANPNVDPNANPNANPNANPNANPNANPNANPNANPNANPNANPNANPNANPNANPNANPNVDPNANPNANPNANPNANPNANPNANPNANPNANPNANPNANPNANPNANPNANPNANPNANPNANPNANPNANPNANPNKNNQGNGQGHNMPNDPNRNVNENANANNAVKNNNNEEPSDKHITEYLKKIQNSLSTEWSPCSVTCGNGIQVRIKPGSAGKSRDELDYENDIEKKICKMEKCSSVFNVVNSSIGLIMVLSFLFLN

SEQ ID NO: 2677 - protein, 385 aa, Artificial Sequence
  derived and/or modified protein sequence (wt) from Pf(Tz93-048)__BAM84761.1__CSP
MMRKLAILSVSSFLFVEALFQEYQCYGSSSNTRVLNELNYDNAGTNLYNELEMNYYGKQENWYSLKKNSRSLGENDDGNNEDNEKLRKPKHKKLKQPADGNPDPNANPNVDPNANPNVDPNANPNVDPNANPNANPNANPNANPNANPNANPNANPNANPNANPNANPNANPNANPNANPNANPNVDPNANPNANPNANPNANPNANPNANPNANPNANPNANPNANPNANPNANPNANPNANPNANPNANPNANPNANPNKNNQGNGQGHNMPNDPNRNVDENANANNAVKNNNNEEPSDQHIEKYLKIIKNSLSTEWSPCSVTCGNGIQVRIKPGSANKPKDQLDYANDIEKKICKMEKCSSVFNVVNSSIGLIMVLSFLFLN

SEQ ID NO: 2678 - protein, 385 aa, Artificial Sequence
  derived and/or modified protein sequence (wt) from Pf(Tz93-120)__BAM84776.1__CSP
MMRKLAILSVSSFLFVEALFQEYQCYGSSSNTRVLNELNYDNAGTNLYNELEMNYYGKQENWYSLKKNSRSLGENDDGNNEDNEKLRKPKHKKLKQPADGNPDPNANPNVDPNANPNVDPNANPNVDPNANPNANPNANPNANPNANPNANPNANPNANPNANPNANPNANPNANPNANPNVDPNANPNANPNANPNANPNANPNANPNANPNANPNANPNANPNANPNANPNANPNANPNANPNANPNANPNANPNANPNKNNQGNGQGHNMPNDPNRNVDENANANNAVKNNNNEEPSDQHIEKYLKIIQNSLSTEWSPCSVTCGNGIQVRIKPGSANKPKDQLDYANDIEKKICKMEKCSSVFNVVNSSIGLIMVLSFLFLN

SEQ ID NO: 2679 - protein, 385 aa, Artificial Sequence
  derived and/or modified protein sequence (wt) from Pf(Tz98-101)__BAM84794.1__CSP
MMRKLAILSVSSFLFVEALFQEYQCYGSSSNTRVLNELNYDNAGTNLYNELEMNYYGKQENWYSLKKNSRSLGENDDGNNEDNEKLRKPKHKKLKQPADGNPDPNANPNVDPNANPNVDPNANPNVDPNANPNANPNANPNANPNANPNANPNANPNANPNANPNANPNANPNANPNANPNANPNVDPNANPNANPNANPNANPNANPNANPNANPNANPNANPNANPNANPNANPNANPNANPNANPNANPNANPNANPNKNNQGNGQGHNMPNDPNRNVDENANANNAVKNNNNEEPSDKHITEYLKRIQNSLSTEWSPCSVTCGNGIQVRIKPGSAGKSKNELDYENDIEKKICKMEKCSSVFNVVNSSIGLIMVLSFLFLN

SEQ ID NO: 2680 - protein, 385 aa, Artificial Sequence
  derived and/or modified protein sequence (wt) from Pf(Yaounde)__AAN87580.1__CSP
MMRKLAILSVSSFLFVEALFQEYQCYGSSSNTRVLNELNYDNAGTNLYNELEMNYYGKQENWYSLKKNSRSLGENDDGNNEDNEKLRKPKHKKLKQPADGNPDPNANPNVDPNANPNVDPNANPNVDPNANPNANPNANPNANPNANPNANPNANPNANPNANPNANPNANPNANPNANPNVDPNANPNANPNANPNANPNANPNANPNANPNANPNANPNANPNANPNANPNANPNANPNANPNANPNANPNANPNANPNKNNQGNGQGHNMPNDPNRNVDENAKANNAVKNNNNEEPSDKHIEQYLKTIQNSLSTEWSPCSVTCGNGIQVRIKPGSANKPKDQLDYENDIEKKICKMEKCSSVFNVVNSSIGLIMVLSFLFLN

SEQ ID NO: 2681 - protein, 380 aa, Artificial Sequence
  derived and/or modified protein sequence (wt) from Pf(Asembo Bay)__AAN87610.1__CSP
MMRKLAILSVSSFLFVEALFQEYQCYGSSSNTRVLNELNYDNAGTNLYNELEMNYYGKQENWYSLKKNSRSLGENDDGNNNNGDNGREGKDEDKRDGNNEDNEKLRKPKHKKLKQPGDGNPDPNANPNVDPNANPNVDPNANPNVDPNANPNANPNANPNANPNANPNANPNANPNANPNANPNANPNANPNANPNANPNANPNANPNANPNANPNANPNANPNANPNANPNANPNANPNANPNANPNANPNANPNKNNQGNGQGHNMPNDPNRNVDENANANNAVKNNNNEEPSDKHIEQYLNKIKNSISTEWSPCSVTCGNGIQVRIKPGSANKPKDQLDYANDIEKKICKMEKCSSVFNVVNSSIGLIMVLSFLFLN

SEQ ID NO: 2682 - protein, 380 aa, Artificial Sequence
  derived and/or modified protein sequence (wt) from Pf(India)__AAN87619.1__CSP
MMRKLAILSVSSFLFVEALFQEYQCYGSSSNTRVLNELNYDNAGTNLYNELEMNYYGKQENWYSLKKNSRSLGENDDGNNNNGDNGREGKDEDKRDGNNEDNEKLRKPKHKKLKQPGGDNPDPNANPNANPNANPNANPNANPNANPNVDPNANPNANPNANPNANPNANPNANPNANPNANPNANPNANPNANPNANPNANPNANPNANPNANPNANPNANPNANPNANPNANPNANPNANPNANPNANPNANPNKNNQGNGQGHNMPNDPNRNVDENANANNAVKNNNNEEPSDKHIEQYLKKIQNSLSTEWSPCSVTCGNGIQVRIKPGSANKPKDELDYENDIEKKICKMEKCSSVFNVVNSSIGLIMVLSFLFLN

SEQ ID NO: 2683 - protein, 368 aa, Artificial Sequence
  derived and/or modified protein sequence (wt) from Pf(India)__AAN87617.1__CSP
MMRKLAILSVSSFLFVEALFQEYQCYGSSSNTRVLNELNYDNAGTNLYNELEMNYYGKQENWYSLKKNSRSLGENDDGNNNNGDNGREGKDEDKRDGNNEDNEKLRKPKHKKLKQPGGDNPDPNANPNVDPNANPNANPNANPNANPNANPNANPNANPNANPNANPNANPNANPNANPNANPNANPNANPNANPNANPNANPNANPNANPNANPNANPNANPNANPNANPNANPNANPNANPNKNNQGNGQGHNMPNDPNRNVDENANANNAVKNNNNEEPSDKHIEQYLKKIQNSLSTEWSPCSVTCGNGIQVRIKPGSANKPKDELDYENDIEKKICKMEKCSSVFNVVNSSIGLIMVLSFLFLN

SEQ ID NO: 2684 - protein, 364 aa, Artificial Sequence
  derived and/or modified protein sequence (wt) from Pf(India)__AAN87616.1__CSP
MMRKLAILSVSSFLFVEALFQEYQCYGSSSNTRVLNELNYDNAGTNLYNELEMNYYGKQENWYSLKKNSRSLGENDDGNNNNGDNGREGKDEDKRDGNNEDNEKLRKPKHKKLKQPGGDNPDPNANPNVDPNANPNANPNANPNANPNANPNANPNANPNANPNANPNANPNANPNANPNANPNANPNANPNANPNANPNANPNANPNANPNANPNANPNANPNANPNANPNANPNANPNKNNQGNGQGHNMPNDPNRNVDENANANNAVKNNNNEEPSDKHIEQYLKKIQNSLSTEWSPCSVTCGNGIQVRIKPGSANKPKDELDYENDIEKKICKMEKCSSVFNVVNSSIGLIMVLSFLFLN

SEQ ID NO: 2685 - protein, 363 aa, Artificial Sequence
  derived and/or modified protein sequence (wt) from Pf(Bolivar)__AAN87600.1__CSP
MMRKLAILSVSSFLFVEALFQEYQCYGSSSNTRVLNELNYDNAGTNLYNELEMNYYGKQENWYSLKKNSRSLGENDDGNNNNGDNGREGKDEDKRDGNNEDNEKLRKPKHKKLKQPADGNPDPNANPNVDPNANPNPNANPPNANPNANPNANPNANPNVDPNANPNANPNANPNANPNANPNANPNANPNANPNANPNANPNANPNANPNANPNANPNANPNANPNANPNANPNANPNKNNQGNGQGHNMPNDPNRNVDENANANNAVKNNNNEEPSDKHIEQYLNKIQNSLSTEWSPCSVTCGNGIQVRIKPGSANKPKDQLDYANDIEKKICKMEKCSSVFNVVNSSIGLIMVLSFLFLN

SEQ ID NO: 2686 - protein, 360 aa, Artificial Sequence
  derived and/or modified protein sequence (wt) from Pf(Asembo Bay)__AAN87597.1__CSP
MMRKLAILSVSSFLFVEALFQEYQCYGSSSNTRVLNELNYDNAGTNLYNELEMNYYGKQENWYSLKKNSRSLGENDDGNNNNGDNGREGKDEDKRDGNNEDNEKLRKPKHKKLKQPADGNPDPNANPNVDPNANPNANPNANPNANPNANPNANPNVDPNANPNANPNANPNANPNANPNANPNANPNANPNANPNANPNANPNANPNANPNANPNANPNANPNANPNANPNANPNKNNQGNGQGHNMPNDPNRNVDENANANNAVKNNNNEEPSDKHIKEYLKIIPNSLSTEWSPCSVTCGNGIQVRIKPGSAGKPKDELDYANDIEKKICKMEKCSSVFNVVNSSIGLIMVLSFLFLN

SEQ ID NO: 2687 - protein, 360 aa, Artificial Sequence
  derived and/or modified protein sequence (wt) from Pf(Asembo Bay)__AAN87596.1__CSP
MMRKLAILSVSSFLFVEALFQEYQCYGSSSNTRVLNELNYDNAGTNLYNELEMNYYGKQENWYSLKKNSRSLGENDDGNNNNGDNGREGKDEDKRDGNNEDNEKLRKPKHKKLKQPADGNPDPNANPNVDPNANPNANPNANPNANPNANPNANPNVDPNANPNANPNANPNANPNANPNANPNANPNANPNANPNANPNANPNANPNANPNANPNANPNANPNANPNANPNANPNKNNQGNGQGHNMPNDPNRNVDENANANNAVKNNNNEEPSDKHIKEYLKIIQNSLSTEWSPCSVTCGNGIQVRIKPGSAGKPKDELDYANDIEKKICKMEKCSSVFNVVNSSIGLIMVLSFLFLN

SEQ ID NO: 2688 - protein, 356 aa, Artificial Sequence
  derived and/or modified protein sequence (wt) from Pf(India)__AAN87615.1__CSP
MMRKLAILSVSSFLFVEALFQEYQCYGSSSNTRVLNELNYDNAGTNLYNELEMNYYGKQENWYSLKKNSRSLGENDDGNNNNGDNGREGKDEDKRDGNNEDNEKLRKPKHKKLKQPGDGNPDPNANPNVDPNANPNANPNANPNANPNANPNANPNANPNANPNANPNANPNANPNANPNVNPNANPNANPNANPNANPNANPNANPNANPNANPNANPNANPNANPNANPNKNNQGNGQGHNMPNDPNRNVDENANVNNAVKNNNNEEPSDKHIEQYLKKIQNSLSTEWSPCSVTCGNGIQVRIKPGSANKPKDELDYENDIEKKICKMEKCSSVFNVVNSSIGLIMVLSFLFLN

SEQ ID NO: 2689 - protein, 369 aa, Artificial Sequence
  derived and/or modified protein sequence (wt) from Pk(UMMAC6)__AHF20622.1__CSP
MKNFILLAVSSILLVDLLPTHFEHNVDLSRAINVNGVSFNNVDTSSLGAAQVRQSASRGRGLGEKPKEGADKEKKKEKEKEKEEEPKKPNENKLIQPEQPAAGAGGEQPAAGAGGEQPAAGAGGEQPAAGAGGEQPAAGAGGEQPAAGARGEQPAAGAGGEQPAAGAGGEQPAAGAGGEQPAAGAGGEQPAAGAGGEQPAAGARGEQPAAGAGGEQPAAGAGGEQPAPAPRREQPAAGAGGEQPAPAPRREQPAPGAGAGDGARGGNAGAGKGQGQNNQGANVPNEKVVNDYLHKIRSSVTTEWTPCSVTCGNGVRIRRKGHAGNKKAEDLTMDDLEVEACVMDKCAGIFNVVSNSLGLVILLVLALFN

SEQ ID NO: 2690 - protein, 363 aa, Artificial Sequence
  derived and/or modified protein sequence (wt) from Pk(H (SL1_PK))__XP_002259002.1__CSP
MKNFILLAVSSILLVDLLPTHFEHNVDLSRAINVNGVSFNNVDTSSLGAAQVRQSASRGRGLGEKPKEGADKEKKKEKGKEKEEEPKKPNENKLKQPNEGQPQAQGDGANAGQPQAQGDGANAGQPQAQGDGANAGQPQAQGDGANAGQPQAQGDGANAGQPQAQGDGANAGQPQAQGDGANAGQPQAQGDGANAGQPQAQGDGANAGQPQAQGDGANAGQPQAQGDRANAGQPQAQGDGANVPRQGRNGGGAPAGGNEGNKQAGKGQGQNNQGANAPNEKVVNDYLHKIRSSVTTEWTPCSVTCGNGVRIRRKAHAGNKKAEDLTMDDLEVEACVMDKCAGIFNVVSNSLGLVILLVLALFN

SEQ ID NO: 2691 - protein, 480 aa, Artificial Sequence
  derived and/or modified protein sequence (wt) from Pk(SGEHIH2-im-Y09-12)__AFD97213.1__CSP
MKNFILLAVSSILLVDLLPTHFEHNVDLSRAINVNGVSFNNVDTSSLGAAQVRQSASRGRGLGEKPKEGDDKEKKKEKEKEEEPKKLNENNPKKPNEEGDGAKLKQPNEEGDGAKLKQPNAEGGAKLKQPNAEGGANAGQPNAEGGANAGQPNAEGGANAGQPNAGGANAGQPNAEGGANAGQPNAEGGANAGQPNAEGGANARQPNAEGGANARQPNAEGGANAGQPNAEGGANAGQPNAEGGANAGQPNAEGGANARQPNAEGGANAGQPNAEGGANAGQPNAEGGANAGQPNAEGGANAGQPNAEGGANARQPNAEGGANAGQPNAEGGANAGQPNAEGGANARQPQAEGGGANARQPQAEGGGANARQGGNEGNKQAGKGQGQNNQGANAPNEKVVNDYLQKIRSSVTIEWTPCSVTCGNGVRIRRRAHADKKKAEDLTMDDLEVEACVMDKCAGIFNVVSNSLGLVILLVLALFN

SEQ ID NO: 2692 - protein, 439 aa, Artificial Sequence
  derived and/or modified protein sequence (wt) from Pk(NB028)__AFG25469.1__CSP
MKNFILLAVSSILLVDLLPTHFEHNVDLSRAINVNGVSFNNVDTSSLGAAQVRQSASRGRGLGEKPKEGDDKEKKKEKEKEEEPKNLNENKPKQPNAEGDGAKLKQPNAEGDGAKLKQPQAEGDGANARQPQAEGNGANARQPQAEGDGANARQPQAEGDGANARQPQAEGDGANARQPQAEGDGANARQPQAEGDGANARQPQAEGDGANARQPQAEGGGANARQPQAEGDGANARQPQAEGDGANARQPQAEGDGANARQPQAEGDGANARQPQAEGDGANARQPQAEGGGANARQPQAEGDGANARQAQAQGDGGNARQGGNGGGAPAGGNEGNKQAGKGQGQNNQGANAPNEKVVNDYLQKIRSSVTTEWTPCSVTCGNGVRIRRRAHADKKKAEELTMDDLEVEACVMDKCAGIFNVVSNSLGLVILLVLALFN

SEQ ID NO: 2693 - protein, 425 aa, Artificial Sequence
  derived and/or modified protein sequence (wt) from Pk(SGEHIH1-im-Y09-102)__AFD97209.1__CSP
MKNFILLAVSSILLVDLLPTHFEHNVDLSRAINVNGVSFNNVDTSSLGAAQVRQSASRGRGLGEKPKEGDDKEKKKEKEKEEEPKKLNENNPKKPNEEGDGAKLKQPNEEGDGAKLKQPNAEGGAKLKQPNAEGGANAGQPNAEGGANAGQPNAEGGANAGQPNAGGANAGQPNAEGGANAGQPNAEGGANAGQPNAEGGANARQPNAEGGANARQPNAEGGANAGQPNAEGGANAGQPNAEGGANAGQPNAEGGANARQPNAEGGANAGQPNAEGGANAGQPNAEGGANARQPQAEGGGANARQPQAEGGGANARQGGNEGNKQAGKGQGQNNQGANAPNEKVVNDYLQKIRSSVTIEWTPCSVTCGNGVRIRRRAHADKKKAEDLTMDDLEVEACVMDRCAGIFNVVSNSLGLVILLVLALFN

SEQ ID NO: 2694 - protein, 425 aa, Artificial Sequence
  derived and/or modified protein sequence (wt) from Pk(SGEHIH1-im-Y09-17)__AFD97205.1__CSP
MRNFILLAVSSILLVDLLPTHFEHNVDLSRAINVNGVSFNNVDTSSLGAAQVRQSASRGRGLGEKPKEGDDKEKKKEKEKEEEPKKLNENNPKKPNEEGDGAKLKQPNEEGDGAKLKQPNAEGGAKLKQPNAEGGANAGQPNAEGGANAGQPNAEGGANAGQPNAGGANAGQPNAEGGANAGQPNAEGGANAGQPNAEGGANARQPNAEGGANARQPNAEGGANAGQPNAEGGANAGQPNAEGGANAGQPNAEGGANARQPNAEGGANAGQPNAEGGANAGQPNAEGGANARQPQAEGGGANARQPQAEGGGANARQGGNEGNKQAGKGQGQNNQGANAPNEKVVNDYLQKIRSSVTIEWTPCSVTCGNGVRIRRRAHADKKKAEDLTMDDLEVEACVMDKCAGIFNVVSNSLGLVILLVLALFN

SEQ ID NO: 2695 - protein, 425 aa, Artificial Sequence
  derived and/or modified protein sequence (wt) from Pk(SGEHIH1-im-Y09-25)__AFD97206.1__CSP
MKNFILLAVSSILLVDLLPTHFEHNVDLSRAINVNGVSFNNVDTSSLGAAQVRQSASRGRGLGEKPKEGDDKEKKKEKEKEEEPKKLNENNPKKPNEEGDGAKLKQPNEEGDGAKLKQPNAEGGAKLKQPNAEGGANAGQPNAEGGANAGQPNAEGGANAGQPNAGGANAGQPNAEGGANAGQPNAEGGANAGQPNAEGGANARQPNAEGGANARQPNAEGGANAGQPNAEGGANAGQPNAEGGANAGQPNAEGGANARQPNAEGGANAGQPNAEGGANAGQPNAEGGANARQPQAEGGGANARQPQAEGGGANARQGGNEGNKQAGKGQGQNNQGANAPNEKVVNDYLQKIRSSVTIEWTPCSVTCGNGVRIRRRAHADKKKAEDLTMDDLEVEACVMDKCAGIFNVVSNSLGLVILLVLALFN

SEQ ID NO: 2696 - protein, 425 aa, Artificial Sequence
  derived and/or modified protein sequence (wt) from Pk(SGEHIH2-im-Y09-11)__AFD97212.1__CSP
MKNFILLAVSSILLVDLLPTHFEHNVDLSRAINVNGVSFNNVDTSSLGAAQVRQSASRGRGLGEKPKEGDDKEKKKEKEKEEEPKKLNENNPKKPNEEGDGAKLKQPNEEGDGAKLKQPNAEGGAKLKQPNAEGGANAGQPNAEGGANAGQPNAEGGANAGQPNAGGANAGQPNAEGGANAGQPNAEGGANAGQPNAEGGANARQPNAEGGANARQPNAEGGANAGQPNAEGGANAGQPNAEGGANAGQPNAEGGANARQPNAEGGANAGQPNAEGGANAGQPNAEGGANARQPQAEGGGANARQPQAEGGGANARQGGNEGNKQAGKGQGQNNQGANAPNEKVVNDYLQKIRSSVTIEWTPCSVTCGNGVRIRRRAHADKKRAEDLTMDDLEVEACVMDKCAGIFNVVSNSLGLVILLVLALFN

SEQ ID NO: 2697 - protein, 425 aa, Artificial Sequence
  derived and/or modified protein sequence (wt) from Pk(SGEHIH2-im-Y09-18)__AFD97214.1__CSP
MKNFILLAVSSILLVDLLPTHFEHNVDLTRAINVNGVSFNNVDTSSLGAAQVRQSASRGRGLGEKPKEGDDKEKKKEKEKEEEPKKLNENNPKKPNEEGDGAKLKQPNEEGDGAKLKQPNAEGGAKLKQPNAEGGANAGQPNAEGGANAGQPNAEGGANAGQPNAGGANAGQPNAEGGANAGQPNAEGGANAGQPNAEGGANARQPNAEGGANARQPNAEGGANAGQPNAEGGANAGQPNAEGGANAGQPNAEGGANARQPNAEGGANAGQPNAEGGANAGQPNAEGGANARQPQAEGGGANARQPQAEGGGANARQGGNEGNKQAGKGQGQNNQGANAPNEKVVNDYLQKIRSSVTIEWTPCSVTCGNGVRIRRRAHADKKKAEDLTMDDLEVEACVMDKCAGIFNVVSNSLGLVILLVLALFN

SEQ ID NO: 2698 - protein, 425 aa, Artificial Sequence
  derived and/or modified protein sequence (wt) from Pk(SGEHIH2-im-Y09-3)__AFD97210.1__CSP
MKNFILLAVSSILLVDLLPTHFEHNVDLSRAINVNGVSFNNVDTSSLGAAQVRQSASRGRGLGEKPKEGDDKEKKKEKEKEEEPKKLNENNPKKPNEEGDGAKLKQPNEEGDGAKLKQPNAEGGAKLKQPNAEGGANAGQPNAEGGANAGQPNAEGGANAGQPNAGGANAGQPNAEGGANAGQPNAEGGANAGQPNAEGGANARQPNAEGGANARQPNAGGGANAGQPNAEGGANAGQPNAEGGANAGQPNAEGGANARQPNAEGGANAGQPNAEGGANAGQPNAEGGANARQPQAEGGGANARQPQAEGGGANARQGGNEGNKQAGKGQGQNNQGANAPNEKVVNDYLQKIRSSVTIEWTPCSVTCGNGVRIRRRAHADKKKAEDLTVDDLEVEACVMDKCAGIFNVVSNSLGLVILLVLALFN

SEQ ID NO: 2699 - protein, 425 aa, Artificial Sequence
  derived and/or modified protein sequence (wt) from Pk(SGEHIH2-im-Y09-7)__AFD97211.1__CSP
MRNFILLAVSSILLVDLLPTHFEHNVDLSRAINVNGVSFNNVDTSSLGAAQVRQSASRGRGLGEKPKEGDDKEKKKEKEKEEEPKKLNENNPKKPNEEGDGAKLKQPNEEGDGAKLKQPNAEGGAKLKQPNAEGGANAGQPNAEGGANAGQPNAEGGANAGQPNAGGANAGQPNAEGGANAGQPNAEGGANAGQPNAEGGANARQPNAEGGANARQPNAEGGANAGQPNAEGGANAGQPNAEGGANAGQPNAEGGANARQPNAEGGANAGQPNAEGGANAGQPNAEGGANARQPQAEGGGANARQPQAEGGGANARQGGNEGNKQAGKGQGQNNQGANAPNEKVVNDYLQKIRSSVTIEWTPCSVTCGNGVRIRRRAHADKKKAEDLTMDDLEVEACVMDKCAGIFNVVSNTLGLVILLVLALFN

SEQ ID NO: 2700 - protein, 425 aa, Artificial Sequence
  derived and/or modified protein sequence (wt) from Pk(UMNGC3)__AHF20628.1__CSP
MKNFILLAVSSILLVDLLPTHFEHNVDLSRAINVNGVSFNNVDTSSLGAAQVRQSASRGRGLGEKPKEGDDKEKKKEKEKEEEPKKLNENNPKKPNEEGDGAKLEQPNEEGDGAKLKQPNEEGDGAKLKQPNAEGGAKLKQPNAEGGANAGQPNAEGGANAGQPNAEGGANAGQPNAGGANAGQPNAEGGANAGQPNAEGGANAGQPNAEGGANAGQPNAEGGANARQPNAEGGANAGQPNAEGGANAGQPNAEGGANAGQPNAEGGANARQPNAEGGANAGQPNAEGGANAGQPNAEGGANARQPQAEGGGANARQGGNEGNKQAGKGQGQNNQGANAPNEKVVNDYLQKIRSSVTIEWTPCSVTCGNGVRIRRRAHADKKKAEDLTMGDLEVEACVMDKCAGVFNVVSNSLGLVILLVLALFN

SEQ ID NO: 2701 - protein, 424 aa, Artificial Sequence
  derived and/or modified protein sequence (wt) from Pk(prk-1)__ADX31295.1__CSP
MKNFILLAVSSILLVDLLPTHFEHNVDLSRAINVNGVSFNNVDTSSLGAAQVRQSASRGRGLGEKPKEGDDKEKKKEKEKEEEPKKLNENNPKKPNEEGDGAKLKQPDEEGDGAKLKQPNEEGDGAKLKQPNAEGGAKLKQPNAEGGANAGQPNAEGGANAGQPNAEGGANAGQPNAGGANAGQPNAEGGANAGQPNAEGGANAGQPNAEGGANAGQPNAEGGANARQPNAEGGANAGQPNAEGGANAGQPNAEGGANAGQPNAEGGANARQPNAEVEQTQDNRMQKVEQMQTTECRSGTNARQPQAEGGGANARQGGNEGNKQAGKGQGQNNQGANAPNEKVVNDYLQKIRSSVTIEWTPCSVTCGNGVRIRRRAHADKKKAEDLTMDDLEVEACVMDKCAGIFNVVSNSLGLVILLVLALFN

SEQ ID NO: 2702 - protein, 416 aa, Artificial Sequence
  derived and/or modified protein sequence (wt) from Pk(UM0018C10)__AHF20648.1__CSP
MKNFILLAVSSILLVDLLPTHFEHNVDLSRAINVNGVSFNNVDTSSLGAAQVRQSASRGRGLGEKPKEGDDKEKKKEKEKEEEPKKLNENKPKQPNVEGDGAKLKQPNEEGDGAKLKQPNEEGDGAKLKQPNAEGGAKLKQPNAEGGANAGQPNAEGGANAGQPNAEGGANAGQPNAEGGANAGQPNAEGGANAGQPNAEGGANAGQPNAEGGANAGQPNAEGGANARQPNAEGGANARQPNAEGGANARQPNAEGGANAGQPNAEGGANAGQPNAEGGANARQPQAEGGGANARQPQAEGGGANARQGGNEGNKQAGKGQGQNNQGANAPNEKVVNDYLQKIRSSVTTEWTPCSVTCGNGVRIRRRAHADKKKAEDLTMDDLEVEACVMDKCAGIFNVVSNSLGLVILLVLALFN

SEQ ID NO: 2703 - protein, 416 aa, Artificial Sequence
  derived and/or modified protein sequence (wt) from Pk(UM0018C6)__AHF20646.1__CSP
MKNFILLAVSSILLVDLLPTHFEHNVDLSRAINVNGVSFNNVDTSSLGAAQVRQSASRGRGLGEKPKEGDDKEKKKEKEKEEEPKKLNENKPKQPNVEGDGAKLKQPNEEGDGAKLKQPNEEGDGAKLKQPNAEGGAKLEQPNAEGGANAGQPNAEGGANAGQPNAEGGANAGQPNAEGGANAGQPNAEGGANAGQPNAEGGANAGQPNAEGGANAGQPNAEGGANARQPNAEGGANARQPNAEGGANARQPNAEGGANAGQPNAEGGANAGQPNAEGGANARQPQAEGGGANARQPQAEGGGANARQGGNEGNKQAGKGQGQNNQGANAPNEKVVNDYLQKIRSSVTTEWTPCSVTCGNGVRIRRRAHADKKKAEDLTMDDLEVEACVMDKCAGIFNVVSNSLGLVILLVLALFN

SEQ ID NO: 2704 - protein, 413 aa, Artificial Sequence
  derived and/or modified protein sequence (wt) from Pk(SGEHIH1-im-Y09-95)__AFD97208.1__CSP
MKNFILLAVSSILLVDLLPTHFEHNVDLSRAINVNGVSLNNVDTSSLGAAQVRQSASRGRGLGEKPKEGDDKEKKKEKEKEEEPKKLNENNPKKPNEEGDGAKLKQPNAEGGAKLKQPNAEGGANAGQPNAEGGANAGQPNAEGGANAGQPNAGGANAGQPNAEGGANAGQPNAEGGANVGQPNAEGGANARQPNAEGGANARQPNAEGGANAGQPNAEGGANAGQPNAEGGANAGQPNAEGGANARQPNAEGGANAGQPNAEGGANAGQPNAEGGANARQPQAEGGGANARQPQAEGGGANARQGGNEGNKRAGKGQGQNNQGANAPNEKVVNDYLQKIRSSVTIEWTPCSVTCGNGVRIRRRAHADKKKAEDLTMDDLEVEACVMDKCAGIFNVVSNSLGLVILLVLALFN

SEQ ID NO: 2705 - protein, 406 aa, Artificial Sequence
  derived and/or modified protein sequence (wt) from Pk(KH100)__ADN94497.1__CSP
MKNFILLAVSSILLVDLLPTHFEHNVDLSRAINVNGVSFNNVDTSSLGAAQVRQSASRGRGLGEKPKEGDDKEKKKEKEKEEEPKNLNENKPKQPNAEGDGAKPKQPNAEGDGAKLKQPNAEGDGAKLKQPNAEGDGGNARQPNAEGDGGNARQPNAEGDGGNARQPNAEGDGGNARQPNAEGDGGNARQPNAEGDGGNARQPNAEGDGGNARQPNAEGDGGNARQPNAEGDGGNARQPNAEGDGGNARQPNAEGDGGNARQPNAEGDGANARQPNAEGDGANARQPQAEGGGGNARQGGNEGNKQAGKGQGQNNQGANAPNEKVVNDYLQKIRSSVTTEWTPCSVTCGNGVRIRRRAHADKKKAEDLTMDDLEVEACVMDKCAGIFNVVSNSLGLVILLVLALFN

SEQ ID NO: 2706 - protein, 406 aa, Artificial Sequence
  derived and/or modified protein sequence (wt) from Pk(KH294)__ADN94542.1__CSP
MKNFILLAVSSILLVDLLPTHFEHNVDLSRAINVNGVSFNNVDTSSLGAAQVRQSASRGRGLGEKPKEGDDKEKKKEKEKEEEPKNLNENKPKQPNAEGDGAKPKQPNAEGDGAKLKQPNAEGDGAKLKQPNAEGDGGNARQPNAEGDGGNARQPNAEGDGGNARQPNAEGDGGNARQPNAEGDGGNARQPNAEGDGGNARQPNAEGDGGNARQPNAEGDGGNARQPNAEGDGGNARQPNAEGDGGNARQPNAEGDGGNARQPNAEGDGGNARQPNAEGDGANARQPQAEGGGGNARQGGNEGNKQAGKGQGQNNQGANAPNEKVVNDYLQKIRSSVTTEWTPCSVTCGNGVRIRRRAHADKKKAEDLTMDDLEVEACVMDKCAGIFNVVSNSLGLVILLVLALFN

SEQ ID NO: 2707 - protein, 405 aa, Artificial Sequence
  derived and/or modified protein sequence (wt) from Pk(UM0015C4)__AHF20661.1__CSP
MKNFILLAVSSILLVDLLPTHFEHNVDLSRAINVNGVSFNNVDTSSLGAAQVRQSASRGRGLGEKPKEGDDKEKKKEKEKEEEPKKLDENKPKQPNVEGDGAKLKQPNEEGDGAKLKQPNEEGDGAKLKQPNAEGGAKLKQPNAEGGANAGQPNAEGGANAGQPNAEGGANAGQPNAEGGANAGQPNAEGGANAGQPNAEGGANAGQPNAEGGANARQPNAEGGANARQPNAEGGANARQPNAEGGANAGQPNAEGGANAGQPNAEGGANARQPQAEGGGANARQPQAEGGGANARQGGNEGNKQAGKGQGQNNQGANAPNEKVVNDYLQKIRSSVTTEWTPCSVTCGNGVRIRRRAHADKKKAEDLTMDDLEVEACVMDKCAGIFSVVSNSLGLVILLVLALFN

SEQ ID NO: 2708 - protein, 405 aa, Artificial Sequence
  derived and/or modified protein sequence (wt) from Pk(UM0015C7)__AHF20662.1__CSP
MKNFILLAVSSILLVDLLPTHFEHNVDLSRAINVNGVSFNNVDTSSLGAAQVRQSASRGRGLGEKPKEGDDKEKKKEKEKEEEPKKLNENKPKQPNVEGDGAKLKQPNEEGDGAKLKQPNEEGDGAKLKQPNAEGGAKLKQPNAEGGANAGQPNAEGGANAGQPNAEGGANAGQPNAEGGANAGQPNAEGGANAGQPNAEGGANAGQPNAEGGANARQPNAEGGANARQPNAEGGANARQPNAEGGANAGQPNAEGGANAGQPNAEGGANARQPQAEGGGANARQPQAEGGGANARQGGNEGNKQAGKGQGQNNQGANAPNEKVVNDYLQKIRSSVTTEWTPCSVTCGNGVRIRRRAHADKKKAEDLTMDDLEVEACVMDKCAGIFNVVSNSLGLVILLVLALFN

SEQ ID NO: 2709 - protein, 405 aa, Artificial Sequence
  derived and/or modified protein sequence (wt) from Pk(UM009C4)__AHF20644.1__CSP
MKNFILLAVSSILLVDLLPTHFEHNVDLSRAINVNGVSFNNVDTSSLGAAQVRQSASRGRGLGEKPKEGDDKEKKKEKEKEEEPKKLNENKPKQPNVEGDGAKLKQPNEEGDGAKLKRPNEEGDGAKLKQPNAEGGAKPKQPNAEGGANAGQPNAEGGANAGQPNAEGGANAGQPNAEGGANAGQPNAEGGANAGQPNAEGGANAGQPNAEGGANARQPNAEGGANARQPNAEGGANARQPNAEGGANAGQPNAEGGANAGQPNAEGGANARQPQAEGGGANARRPQAEGGGANARQGGNEGNKQAGKGQGQNNQGANAPNEKVVNDYLQKIRSSVTTEWTPCSVTCGNGVRIRRRAHADKKKAEDLTMDDLEVEACVMDKCAGIFNVVSNSLGLVILLALALFN

SEQ ID NO: 2710 - protein, 403 aa, Artificial Sequence
  derived and/or modified protein sequence (wt) from Pk(TN027)__AFG25481.1__CSP
MKNFILLAVSSILLVDLLPTHFEHNVDLSRAINVNGVSFNNVDTSSLGAAQVRQSASRGRGLGEKPKEGDDKEKKKEKEKEEEPKNLNENKPKQPNAEGDGAKLKQPNAEGDGAKLKQPNAEGDGAKLKQPQAEGDGANARQPQAEGDGANARQPQAEGDGANARQPQAEGDGANARQPQAEGDGANARQPQAEGDGANARQPQAEGDGANARQPQAEGDGANARQPQAEGDGANARQPQAEGDGANARQPQAEGGGANARQPQAEGDGANARQAQAQGDGGNARQGGNGGGAPAGGNEGNKQAGKGQGQNNQGANAPNEKVVNDYLQKIRSSVTTEWTPCSVTCGNGVRIRRRAHADKKKAEDLTMDDLEVEACVMDKCAGIFNVVSNSLGLVILLVLALFN

SEQ ID NO: 2711 - protein, 395 aa, Artificial Sequence
  derived and/or modified protein sequence (wt) from Pk(UM0034C7)__AHF20657.1__CSP
MRNFILLAVSSILLVDLLPTHFEHNVDLSRAINVNGVSFNNVDTSSLGAAQVRQSASRGRGLGEKRKEGADKEKKKEKEEEPKKPNENKLKQPNPDQPQAQGNGANAGQPQAQGDGANAGQPQAQGDGANAGQPQAQGDGANAGQPQAQGDGANAGQPQAQGDGANAGQPQAQGDGANAGQPQAQGDGANAGQPQAQGDGANAGQPQAQGDGANAGQPQAQGDGANAGQPQAQGDGANAGQPQAQGDGANAGQPQAQGDRANAGQPQAQGDGANVPRQGRNGGGAPAGGNEGNKQAGKGQGQNNQGANAPNEKVVNDYLHKIRSSVTTEWTPCSVTCGNGVRIRRKAHAGNKKAEDLTMDDLEVEACVMDKCAGIFNVVSNSLGLVILLVLALFN

SEQ ID NO: 2712 - protein, 394 aa, Artificial Sequence
  derived and/or modified protein sequence (wt) from Pk(KH225)__ADN94498.1__CSP
MKNFILLAVSSILLVDLLPTHFEHNVDLSRAINVNGVSFNNVDTSSLGAAQVRQSASRGRGLGEKPKEGDDKEKKKEKEKEEEPKNLNENKPKQPNAEGDGAKLKQPNAEGDGAKLKQPNAEGDGGNARQPNAEGDGGNARQPNAEGDGGNARQPNAEGDGGNARQPNAEGDGGNARQPNAEGDGGNARQPNAEGDGGNARQPNAEGDGGNARQPNAEGDGGNARQPNAEGDGGNARQPNAEGDGGNARQPNAEGDGGNARQPNAEGDGANARQPQAEGGGGNARQGGNEGNKQAGKGQGQNNQGANAPNEKVVNDYLQKIRSSVTTEWTPCSVTCGNGVRIRRRAHADKKKAEDLTMDDLEVEACVMDKCAGIFNVVSNSLGLVILLVLALFN

SEQ ID NO: 2713 - protein, 392 aa, Artificial Sequence
  derived and/or modified protein sequence (wt) from Pk(UM001C7)__AHF20637.1__CSP
MKNFILLAVSSILLVDLLPTHFEHNVDLSRAINVNGVSFNNVDTSSLGAAQVRQSASRGRGLGEKPKEGADKEKKKEKGKEKEEEPKKPNENKLKQPNEGQPQAQGDGANAGQPQAQGDGANAGQPQAQGDGANAGQPQAQGDGANAGQPQAQGDGANAGQPQAQGDGANAGQPQAQGDGANAGQPQAQGDGANGDGANAGQPQAQGDGANAGQPQAQGDGANAGQPQAQGDGANAGQPQAQGDGANAGQPQAQGDRANAGQPQAQGDGANVPRQGRNGGGAPAGGNEGNKQAGKGQGQNNQGANAPNEKVVNDYLHKIRSSVTTEWTPCSVTCGNGVRIRRKAHAGNKKAEDLTMDDLEVEACVMDKCAGIFNVVSNSLGLVILLVLALFN

SEQ ID NO: 2714 - protein, 379 aa, Artificial Sequence
  derived and/or modified protein sequence (wt) from Pk(SGEHIWM4-Y09-15)__AFD97227.1__CSP
MKNFILLAVSSILLVDLLPTYFEHNVDLSRAVNVNGVSFNSVDTSSLGAAQVRQSASRGRGLGEKPKEGADKEKKKEKEKEEEPKKPNENKLKQPQGNGGAGQAQPEGNGGAGQAQPEGNGGAGQAQPEGNGGAGQAQPEGNGGAGQAQPEGNGGAGQAQPEGNGGAGQAQPEGNGGAGQAQPQGNGGAGQAQPQGNGGAGQAQPQGNGGAGQAQPQGNGGAGQAQPEGNGGAGQAQPQGNGGAGQAQPEGNREAPAQPQGNGGAGQAQPQKNEGGNAGARKGQGQNSQGANAPNEKVVNDYLQKIRSSVTTEWTPCSVTCGNGVRIRRRAHADKKKAGDLTMDDLEVEACVMDKCAGIFNAVSNSLGLVILLVLALFN

SEQ ID NO: 2715 - protein, 379 aa, Artificial Sequence
  derived and/or modified protein sequence (wt) from Pk(UM002C3)__AHF20638.1__CSP
MKNFILLAVSSILLVDLLPTYFEHNVDLSRAINVNGVSFNNVDTSSLGAAQVRQSASRGRGLGEKPKEGADKEKKKEKEKEKEEEPKKPNENKLKQPEGNGGAGPAQPEGNGGAGPAQPEGNGGAGPAQPEGNGGAGPAQPEGNGGAGPAQPEGNGGAGPAQPEGNGGAGPAQPEGNGGAGPAQPEGNGGAGPAQPGGQVQHNRKEMGGQVQHNRKEMGGQVQHNHKEMGGQVQHNHKEMGGAGPAQPQGNGGAGPAQPQGNGGAGQAQPQKNEGGNAGARKGQGQNNQGANAPNEKVVNDYLQKIRSSVTTEWTPCSVTCGDGVRIKRRAHADKKKAEDLTMDDLEVEACVMDKCAGIFNVVSNSLGLVILLVLALFN

SEQ ID NO: 2716 - protein, 375 aa, Artificial Sequence
  derived and/or modified protein sequence (wt) from Pk(UM0021C6)__AHF20666.1__CSP
MRNFILLAVSSILLVDLFPTHFEHNVDLSRAINVNGVSFNNVDTSSLGAAQVRQSASRGRGLGEKPKEGADKEKKKEKGKEKEEEPKKPNENKLKQPNEGQPQAQGDGANAGQPQAQGDGANAGQPQAQGDGANAGQPQAQGDGANAGQPQAQGDGANAGQPQAQGDGANAGQPQAQGDGANAGQPQAQGDGANAGQPQAQGDGANAGQPQAQGDGANTGQPQAQGDGANAGQPQAQGDRANAGQPQAQGDGANVPRQGRNGGGAPAGGNEGNKQAGKGQGQNNQGANAPNEKVVNDYLHKIRSSVTTEWTPCSVTCGNGVRIRRKAHAGNKKAEDLTMDDLEVEACVMDKCAGIFNVVSNSLGLVILLVLALFN

SEQ ID NO: 2717 - protein, 375 aa, Artificial Sequence
  derived and/or modified protein sequence (wt) from Pk(UM0050C2)__AHF20664.1__CSP
MKNFILLAVSSILLVDLLPTHFEHNVDLSRAINVNGVSFNNVDTSSLGAAQVRQSASRGRGLGEKPKEGADKEKKKEKGKEKEEEPKKPNENKLKQPNEGQPQAQGDGANAGQPQAQGDGANAGQPQAQGDGANAGQPQAQGDGANAGQPQAQGDGANAGQPQAQGDGANAGQPQAQGDGANAGQPQAQGDGANAGQPQAQGDGANAGQPQAQGDGANAGQPQAQGDGANAGQPQAQGDRANAGQPQAQGDGANVPRQGRNGGGAPAGGNEGNKQAGKGQGQNNQGANAPNEKVVNDYLHKIRSSVTTEWTPCSVTCGNGVRIRRKAHAGNKKAEDLTMDDLEVEACVMDKCAGIFNVVSNSLGLVILLVLALFN

SEQ ID NO: 2718 - protein, 375 aa, Artificial Sequence
  derived and/or modified protein sequence (wt) from Pk(UMMK569C20)__AHF20669.1__CSP
MKNFILLAVSSILLVDLLPTHFEHNVDLSRAINVNGVSFNNVDTSSLGAAQVRQSASRGRGLGEKPKEGADKEKKKEKGKEKEEEPKKPNENKLKQPNEGQPQAQGDGANAGQPQAQGDGANAGQPQAQGDGANAGQPQAQGDGANAGQPQARGDGANAGQPQAQGDGANAGQPQAQGDGANAGQPQAQGDGANAGQPQAQGDGANAGQPQAQGDGANAGQPQAQGDGANAGQPQAQGDRANAGQPQAQGDGANVPRQGRNGGGAPAGGNEGNKQAGKGQGQNNQGANAPNEKVVNDYLHKIRSSVTTEWTPCSVTCGNGVRIRRKAHAGNKKAEDLTMDDLEVEACVMDKCAGIFNVVSNSLGLVILLVLALFN

SEQ ID NO: 2719 - protein, 371 aa, Artificial Sequence
  derived and/or modified protein sequence (wt) from Pk(KH433)__ADN94489.1__CSP
MRNFILLAVSSILLVDLLPTHFEHNVDLSRAINVNGVSFNNVDTSSLGAAQVRQSASRGRGLGEKRKEGADKEKKKEKEEEPKKPNENKLKQPNPGQPQAQGDGANAGQPQAQGDGANAGQPQAQGDGANAGQPQAQGDGANAGQPQAQGDGANAGQPQAQGDGANAGQPQAQGDGANAGQPQAQGDGANAGQPQAQGDGANAGQPQAQGDGANAGQPQAQGDGANAGQPQAQGDRANAGQPQAQGDGANVPRQGRNGGGAPAGGNEGNKQAGKGQGQNNQGANAPNEKVVNDYLHKIRSSVTTEWTPCSVTCGNGVRIRRKAHAGNKKAEDLTMDDLEVEACVMDKCAGIFNVVSNSLGLVILLVLALFN

SEQ ID NO: 2720 - protein, 371 aa, Artificial Sequence
  derived and/or modified protein sequence (wt) from Pk(UM0034C10)__AHF20658.1__CSP
MRNFILLAVSSILLVDLLPTHFEHNVDLSRAINVNGVSFNNVDTSSLGAAQVRQSASRGRGLGEKRKEGADKEKKKEKEEEPKKPNENKLKQPNPDQPQAQGDGANAGQPQAQGDGANAGQPQAQGDGANAGQPQAQGDGANAGQPQAQGDGANAGQPQAQGDGANAGQPQAQGDGANAGQPQAQGDGANAGQPQAQGDGANAGQPQAQGDGANAGQPQAQGDGANAGQPQAQGDRANAGQPQAQGDGANVPRQGRNGGGAPAGGNEGNKQAGKGQGQNNQGANAPNEKVVNDYLHKIRSSVTTEWTPCSVTCGNGVRIRRRQNAGNKKAEDLTMDDLEAEACVMDKCAGIFNVVSNSLGLVILLVLALFN

SEQ ID NO: 2721 - protein, 371 aa, Artificial Sequence
  derived and/or modified protein sequence (wt) from Pk(UM0034C6)__AHF20656.1__CSP
MRNFILLAVSSILLVDLLPTHFEHNVDLSRAINVNGVSFNNVDTSSLGAAQVRQSASRGRGLGEKRKEGADKEKKKEKEEEPKKPNENKLKQPNPDQPQAQGDGANAGQPQAQGDGANAGQPQAQGDGANAGQPQAQGDGANAGQPQAQGDGANAGQPQAQGDGANAGQPQAQGDGANAGQPQAQGDGANAGQPQAQGDGANAGQPQAQGDGANAGQPQAQGDGANAGQPQAQGDRANAGQPQAQGDGANVPRQGRNGGGAPAGGNEGNKQAGKGQGQNNQGANAPNEKVVNDYLHKIRSSVTTEWTPCSVTCGNGVRIRRKAHAGNKKAEDLTMDDLEVEACVMDKCAGIFNVVSNSLGLVILLVLALFN

SEQ ID NO: 2722 - protein, 368 aa, Artificial Sequence
  derived and/or modified protein sequence (wt) from Pk(SGEHIWM16-Y09-85)__AFD97232.1__CSP
MKNFILLAVSSILLVDLLPTYFEHNVDLSRAINVNGVSFNSVDTSSLGAAQVRQSASRGRGLGEKPKEGADKEKKKEKEKEEEPKKPNENKLKQPQGNGGAGQAQPEGNGGAGQAQPEGNGGAGQAQPEGNGGAGQAQPEGNGGAGQAQPEGNGGAGQAQPEGNGGAGQAQPEGNGGAGQAQPEGNGGAGQAQPEGNGGAGQAQPQGNGGAGQAQPQGNGGAGQAQPQGNGGAGQAQPEGNREAPAQPQGNGGAGQAQPQKNEGGNAGARKGQGQNNQGANAPNEKVVNDYLQKIRSSVTTEWTPCSVTCGNGVRIRRRAHADKKKAEDLTMDDLEVEACVMDKCAGIFNVVSNSLGLVILLVLALFN

SEQ ID NO: 2723 - protein, 368 aa, Artificial Sequence
  derived and/or modified protein sequence (wt) from Pk(SGEHIWM4-Y09-13)__AFD97225.1__CSP
MKNFILLAVSSILLVDLLPTYFEHNVDLSRAINVNGVSFNSVDTSSLGAAQVRQSASRGRGLGEKPKEGADKEKKKEKEKEEEPKKPNENKLKQPQGNGGAGQAQPEGNGGAGQAQPEGNGGAGQAQPEGNGGAGQAQPEGNGGAGQAQPEGNGGAGQAQPEGNGGAGQAQPEGNGGAGQAQPEGNGGAGQAQPEGNGGAGQAQPQGNGGAGQAQPQGNGGAGQAQPQGNGGAGQAQPEGNREAPAQPQGNGGAGQAQPQKNEGGNAGARKGQGQNNQGANAPNEKVVNDYLQKIRSSVTTEWTPCSVTCGNGVRIRRRAHADKKKAEDLTVDDLEVEACVMDKCAGIFNVVSNSLGLVILLVLALFN

SEQ ID NO: 2724 - protein, 367 aa, Artificial Sequence
  derived and/or modified protein sequence (wt) from Pk(KH58)__ADN94493.1__CSP
MKNFILLAVSSILLVDLLPTHFEHNVDLSRAININGVSFNNVDTSSLGAAQVRQSASRGRGLGEKPKEGADKEKKKEKEKEEEPKKPNENKLKQPNAEGDGANARQPNAEGDGANARQPNAEGDGANARQPNAEGDGANARQPNAEGDGANARQPNAEGDGANARQPNAEGDGANARQPNAEGDGANARQPNAEGDGANARQPNAEGDGANARQPNAEGGGANARQPNAEGDGANARQPQAQGDGGNARQGGNGGGAPAGGNEGNKQAGKGQGQNNQGANAPNEKVVNDYLQKIRSSVTTEWTPCSVTCGNGVRIRRRAHADKKKAEDLTMDDLEVEACVMDKCAGIFNVVSNSLGLVILLVLALFN

SEQ ID NO: 2725 - protein, 367 aa, Artificial Sequence
  derived and/or modified protein sequence (wt) from Pk(UM0029C8)__AHF20651.1__CSP
MKNFILLAVSSILLVDLLPTHFEHNVDLSRAINVNGVSFNNVDTSSLGAAQVRQSASRGRGLGEKPKEGADKEKKKEKEKEKEEEPKKPNENKLKQPEQPAAGAGGEQPAAGAGGEQPAAGAGGEQPAAGAGGEQPAAGARGEQPAAGAGGEQPAAGARGEQPAAGAGGEQPAAGAGGEQPAAGAGGEQPAAGGEQPAAGAGGEQPAAGARGEQPAAGAGGEQPAPAPRREQPAAGAGGEQPAPAPRREQPAPGAGAGDGARGGNAGAGKGQGQNNQGANVPNEKVVNDYLHKIRSSVTTEWTPCSVTCGNGVRIRRKGHAGNKKAEDLTMDDLEVEACVMDKCAGIFNVVSNSLGLVILLVLALFN

SEQ ID NO: 2726 - protein, 367 aa, Artificial Sequence
  derived and/or modified protein sequence (wt) from Pk(UM0032C8)__AHF20655.1__CSP
MKNFILLAVSSILLVDLLPTHFEHNVDLSRAINVNGVSFNNVDTSSLGAAQVRQSASRGRGLGEKPKEGADKEKKKEKEKEEEPKKPNENKLKQPNAEGDGANARQPNAEGDGANARQPNAEGDGANARQPNAEGDGANARQPNAEGDGANARQPNAEGDGANARQPNAEGNGANARQPNAEGGGANARQPNAEGDGANARQPNAEGDGANARQPNAEGGGANARQPQAEGDGANARQPQAQGDGGNARQGGNGGGAPAGGNEGNKQAGKGQGQNNQGANAPNEKVVNDYLQKIRSSVTTEWTPCSVTCGNGVRIRRRAHADKKKAEDLTMDDLEVEACVMDKCAGIFNVVSNSLGFVILLVLALFN

SEQ ID NO: 2727 - protein, 366 aa, Artificial Sequence
  derived and/or modified protein sequence (wt) from Pk(LT22)__ADN94538.1__CSP
MRNFILLAVSSILLVDLLPTHFEHNVDLSRAINVNGVSFNNVDTSSLGAAQVRQSASRGRGLGEKRKEGADKEKKKEKEEEPKKPNENKLKQPNAEGGANAGQPNAEGGANAGQPNAEGGANAGQPNAEGGANAGQPNAEGGANAGQPNAEGGANAGQPNAEGGANAGQPNAEGGANAGQPNAEGGANAGQPNAEGGANAGQPNAEGGANARQPNAEGGANAGQPNAEGGANAGQPNAEGGANARQPQAEGGGANARQGGNEGNKQAGKGQGQNNQGANAPNEKVVNDYLQKIRSSVTTEWTPCSVTCGNGVRIRRRAHADKKKAEDLTMDDLEVEACVMDKCAGIFNVVSNSLGLVILLVLALFN

SEQ ID NO: 2728 - protein, 366 aa, Artificial Sequence
  derived and/or modified protein sequence (wt) from Pk(LT26)__ADN94539.1__CSP
MRNFILLAVSSILLVDLLPTHFEHNVDLSRAINVNGVSFNNVDTSSLGAAQVRQSASRGRGLGEKRKEGADKEKKKEKEEEPKKPNENKLKQPNAEGGANAGQPNAEGGANAGQPNAEGGANAGQPNAEGGANAGQPNAEGGANAGQPNAEGGANAGQPNAEGGANAGQPNAEGGANARQPNAEGGANAGQPNAEGGANAGQPNAEGGANAGQPNAEGGANAGQPNAEGGANAGQPNAEGGANARQPQAEGGGANARQGGNEGNKQAGKGQGQNNQGANAPNEKVVNDYLQKIRSSVTTEWTPCSVTCGNGVRIRRRAHADKKKAEDLTMDDLEVEACVMDKCAGIFNVVSNSLGLVILLVLALFN

SEQ ID NO: 2729 - protein, 366 aa, Artificial Sequence
  derived and/or modified protein sequence (wt) from Pk(TB013)__AFG25472.1__CSP
MRNFILLAVSSILLVDLLPTHFEHNVDLSRAINVNGVSFNNVDTSSLGAAQVRQSAGRGRGLGEKRKEGADKEKKKEKEEEPKKPNENKLKQPNAEGGANAGQPNAEGGANAGQPNAEGGANAGQPNAEGGANAGQPNAEGGANAGQPNAEGGANAGQPNAEGGANAGQPNAEGGANAGQPNAEGGANAGQPNAEGGANARQPNAEGGANARQPNAEGGANAGQPNAEGGANAGQPNAEGGANARQPQAEGGGANARQGGNEGNKQAGKGQGQNNQGANAPNEKVVNDYLQKIRSSVTTEWTPCSVTCGNGVRIRRRAHADKKKAEDLTMDDLEVEACVMDKCAGIFNVVSNSLGLVILLVLALFN

SEQ ID NO: 2730 - protein, 366 aa, Artificial Sequence
  derived and/or modified protein sequence (wt) from Pk(TB049)__AFG25474.1__CSP
MRNFILLAVSSILLVDLLPTHFEHNVDLSRAINVNGVSFNNVDTSSLGAAQVRQSASRGRGLGEKRKEGADKEKKKEKEEEPKKPNENKLKQPNAEGGANAGQPNAEGGANAGQPNAEGGANAGQPNAEGGANAGQPNAEGGANAGQPNAEGGANAGQPNAEGGANAGQPNAEGGANARQPNAEGGANAGQPNAEGGANAGQPNAEGGANARQPNAEGGANARQPNAEGGANAGQPNAEGGANARQPQAEGGGANARQGGNEGNKQAGKGQGQNNQGANAPNEKVVNDYLQKIRSSVTTEWTPCSVTCGNGVRIRRRAHADKKKAEDLTMDDLEVEACVMDKCAGIFNVVSNSLGLVILLVLALFN

SEQ ID NO: 2731 - protein, 366 aa, Artificial Sequence
  derived and/or modified protein sequence (wt) from Pk(TN024)__AFG25479.1__CSP
MRNFILLAVSSILLVDLLPTHFEHNVDLSRAINVNGVSFNNVDTSSLGAAQVRQSASRGRGLGERRKEGADKEKKKEKEEEPKKPNENKLKQPNAEGGANAGQPNAEGGANAGQPNAEGGANAGQPNAEGGANAGQPNAEGGANAGQPNAEGGANAGQPNAEGGANAGQPNAEGGANARQPNAEGGANAGQPNAEGGANAGQPNAEGGANARQPNAEGGANARQPNAEGGANAGQPNAEGGANARQPQAEGGGANARQGGNEGNKQAGKGQGQNNQGANAPNEKVVNDYLQKIRSSVTTEWTPCSVTCGNGVRIRRRAHADKKKAEDLTMDDLEVEACVMDKCAGIFNVVSNSLGLVILLVLALFN

SEQ ID NO: 2732 - protein, 364 aa, Artificial Sequence
  derived and/or modified protein sequence (wt) from Pk(KH369)__ADN94494.1__CSP
MKNFILLAVSSILLVDLFPTHFEHNVDLSRAINVNGVSFNNVDTSSLGAAQVRQSASRGRGLGEKPKEGADKEKKKEKEEPKKPNENKLKQPQAEGDGANARQPQAEGDGANARQPQAEGDGANARQPQAEGDGANARQPQAEGDGANARQPQAEGDGANARQPQAEGDGANARQPQAEGDGANARQPQAEGDGANARQPQAEGDGANARQPQAEGGGANARQPQAEGDGANARQPQAQGDGGNARQGGNGGGAPAGGNEGNKQAGKGQGQNNQGANAPNEKVVNDYLQKIRSSVTTEWTPCSVTCGNGVRIRRRAHADKKKAEDLTMDDLEVEACVMDKCAGIFNVVSNSLGLVILLVLALFN

SEQ ID NO: 2733 - protein, 364 aa, Artificial Sequence
  derived and/or modified protein sequence (wt) from Pk(LT48)__ADN94507.1__CSP
MKNFILLAVSSILLVDLLPTHFEHNVDLSRAININGVSFNNVDTSSLGAAQVRQSASRGRGLGEKPKEGADKEKKKEKEEPKKPNENKLKQPQAEGDGANARQPQAEGDGANARQPQAEGDGANARQPQAEGDGANARQPQAEGDGANARQPQAEGDGANARQPQAEGDGANARQPQAEGDGANARQPQAEGDGANARQPQAEGDGANARQPQAEGGGANARQPQAEGDGANARQPQAQGDGGNARQGGNGGGAPAGGNEGNKQAGKGQGQNNQGANAPNEKVVNDYLQKIRSSVTTEWTPCSVTCGNGVRIRRRAHADKKKAEDLTMDDLEVEACVMDKCAGIFNVVSNSLGLVILLVLALFN

SEQ ID NO: 2734 - protein, 363 aa, Artificial Sequence
  derived and/or modified protein sequence (wt) from Pk(LT22)__ADN94522.1__CSP
MRNFILLAVSSILLVDLLPTHFEHNVDLSRAINVNGVSFNNVDTSSLGAAQVRQSASRGRGLGEKRKEGADKEKKKEKEEEPKKPNENKLKQPDQAGPGGEQAGPGGEQAGPGGEQAGPRPGGEQAGPGGEQAGPRPGGEQAGPGGEQAGPRPGGEQAGPGGEQAGPGGEQAGPRPGGEQAGPGGEQAGPRPGGEQAGPGGEQAGPRPGGEQAGPGGEQPAPRPGGEQPAPAPRREQPAPAPGGEQPAPGAGAGDGARGGNPGAGKGQGQNNQGANVPNEKVVNDYLHKIRSSVTTEWTPCSVTCGNGVRIRRRQNAGNKKAEDLTMDDLEVEACVMDKCAGIFNVVSNSLGLVILLVLALFN

SEQ ID NO: 2735 - protein, 363 aa, Artificial Sequence
  derived and/or modified protein sequence (wt) from Pk(UM0020C1)__AHF20649.1__CSP
MKNFILLAVSSILLVDLLPTHFEHNVDLSRAINVNGVSFNNVDTSSLGASQVRQSASRGRGLGEKPKEGADKEKKKEKGKEKEEEPKKPNENKLKQPNEGQPQAQGDGANAGQPQAQGDGANAGQPQAQGDGANAGQPQAQGDGANAGQPQAQGDGANAGQPQAQGDGANAGQPQAQGDGANAGQPQAQGDGANAGQPQAQGDGANAGQPQAQGDGANAGQPQAQGDRANAGQPQAQGDGANVPRQGRNGGGAPAGGNEGNKQAGKGQGQNNQGANAPNEKVVNDYLHKIRSSVTTEWTPCSVTCGNGVRIRRRQNAGNKKAEDLTMDDLEVEACVMDKCAGIFNVVSNSLGLVILLVLALFN

SEQ ID NO: 2736 - protein, 363 aa, Artificial Sequence
  derived and/or modified protein sequence (wt) from Pk(UM0020C3)__AHF20650.1__CSP
MKNFILLAVSSILLVDLLPTHFEHNVDLSRAINVNGVGFNNVDTSSLGASQVRQSASRGRGLGEKPKEGADKEKKKEKGKEKEEEPKKPNENKLKQPNEGQPQAQGDGANAGQPQAQGDGANAGQPQAQGDGANAGQPQAQGDGANAGQPQAQGDGANAGQPQAQGDGANAGQPQAQGDGANAGQPQAQGDGANAGQPQAQGDGANAGQPQAQGDGANAGQPQAQGDRANAGQPQAQGDGANVPRQGRNGGGAPAGGNEGNKQAGKGQGQNNQGANAPNEKVVNDYLHKIRSSVTTEWTPCSVTCGNGVRIRRKAHAGNKKAEDLTMDDLEVEACVMDKCAGIFNVVSNSLGLVILLVLALFN

SEQ ID NO: 2737 - protein, 363 aa, Artificial Sequence
  derived and/or modified protein sequence (wt) from Pk(UM0021C19)__AHF20668.1__CSP
MRNFILLAVSSILLVDLFPTHFEHNVDLSRAINVNGVSFNNVDTSSLGAAQVRQSASRGRGLGEKRKEGADKEKKKEKEEEPKKPNENKLKQPDQAGPGGEQAGPGGEQAGPGGEQAGPGGEQAGPRPGGEQAGPGGEQAGPRPGGEQAGPRPGGEQAGPRPGGEQAGPGGEQAGPGGEQAGPGGEQAGPRPGGEQAGPGGEQAGPRPGGEQAGPGGEQPAPRPGGEQPAPAPRREQPAPGPGGEQPAPGAGAGDGARGGNPGAGKGQGQNNQGANVPNEKVVNDYLHKIRSSVTTEWTPCSVTCGNGVRIRRRQNAGNKKAEDLTMDDLEVEACVMDKCAGIFNVVSNSLGLVTLLVLALFN

SEQ ID NO: 2738 - protein, 363 aa, Artificial Sequence
  derived and/or modified protein sequence (wt) from Pk(UMGAC7)__AHF20617.1__CSP
MKNFILLAVSSILLVDLLPTHFEHNVDLSRAINVNGVSFNNVDTSSLGAAQVRQSASRGRGLGEKPKEGADKEKKKEKGKEKEEEPKKPNENKLKQPNEGQPQAQGDGANAGQPQAQGDGANAGQPQAQGDGANAGQPQAQGDGANAGQPQAQGDGANAGQPQAQGDGANAGQPQAQGDGANAGQPQAQGDGANAGQPQAQGDGANAGQPQAQGDGANAGQPQAQGDRANAGQPQAQGDGANVPRQGRNGGGAPAGGNEGNKQAGKGQGQNNQGANAPNEKVVNDYLHKIRSSVTTEWTPCSVTCGNGVRIRRKAHAGNKKAEDLTMDDLEVEACVMDKCAGIFNVVSNSLGLVILLVPALFN

SEQ ID NO: 2739 - protein, 363 aa, Artificial Sequence
  derived and/or modified protein sequence (wt) from Pk(UMMK566C6)__AHF20670.1__CSP
MKNFILLAVSSILLVDLLPTHFEHNVDLSRAINVNGVSFNNVDTSSLGAAQVRQSASRGRGLGEKPKEGADKEKKKEKGKEKEGEPKKPNENKLKQPNEGQPQAQGDGANAGQPQAQGDGANAGQPQAQGDGANAGQPQAQGDGANAGQPQAQGDGANAGQPQAQGDGANAGQPQAQGDGANAGQPQAQGDGANAGQPQAQGDGANAGQPQAQGDGANAGQPQAQGDRANAGQPQAQGDGANVPRQGRNGGGAPAGGNEGNKQAGKGQGQNNQGANAPNEKVVNDYLHKIRSSVTTEWTPCSVTCGNGVRIRRKAHAGNKKAEDLTMDDLEVEACVMDKCAGIFNVVSNSLGLVILLVLALFN

SEQ ID NO: 2740 - protein, 362 aa, Artificial Sequence
  derived and/or modified protein sequence (wt) from Pk(UMGAC1)__AHF20615.1__CSP
MKNFILLAVSSILLVDLLPTHFEHNVDLSRAINVNGVSFNNVDTSSLGAAQVRQSASRGRGLGEKPKEGADKEKKKEKGKEKEEPKKPNENKLKQPNEGQPQAQGDGANAGQPQAQGDGANAGQPQAQGDGANAGQPQAQGDGANAGQPQAQGDGANAGQPRAQGDGANAGQPQAQGDGANAGQPQAQGDGANAGQPQAQGDGANAGQPQAQGDGANAGQPQAQGDRANAGQPQAQGDGANVPRQGRNGGGAPAGGNEGNKQAGKGQGQNNQGANAPNEKVVNDYLHKIRSSVTTEWTPCSVTCGNGVRIRRKAHAGNKKAEDLTMDDLEVEACVMDKCAGIFNVVSNSLGLVILLVLALFN

SEQ ID NO: 2741 - protein, 361 aa, Artificial Sequence
  derived and/or modified protein sequence (wt) from Pk(NB032)__AFG25470.1__CSP
MKNFILLAVSSILLVDLFPTHFEHNVDLSRAINVNGVSFNNVDTSSLGAAQVRQSASRGRGLGEKPKEGADKEKKKEKEKEKEKEEEPKKPNENKLKQPEGNQDGRAQPEGNQDGRAQPEGNQDGRAQPEGNQDGRAQPEGNQDGRAQPEGNQDGRAQPEGNQDGRAQPEGNQDGRAQPEGNQDGRAQPEGNREAPAQPQGNGGAGQAQPEGNREAPAQPQGNGGAGQAQPEGNREAPAQPQGNGGAGQAQPQKNEGGNAGARKGQGQNNQGANAPNEKVVNDYLHKIRSSVTTEWTPCSVTCGNGVRIRRKAHADKKKAEDLTMDDLEVEACVMDKCAGIFNVVSNSLGLVILLVLALFN

SEQ ID NO: 2742 - protein, 360 aa, Artificial Sequence
  derived and/or modified protein sequence (wt) from Pk(UM002C4)__AHF20639.1__CSP
MKNFILLAVSSILLVDLLPTYFEHNVDLSRAINVNGVSFNNVDTSSLGAAQVRQSASRGRGLGEKPKEGADKEKKKEKEKEKEEEPKKPNENKLKQPEGNGGAGPAQPEGNGGAGPAQPEGNGGAGPAQPEGNGGAGPAQPEGNGGAGPAQPEGNGGAGPAQPEGNGGAGPAQPEGNGGAGPAQPEGNGGAGPAQPEGNGGAGPAQPQGNGGAGPAQPQGNGGAGPAQPQGNGGAGPAQPQGNGGAGQAQPQKNEGGNAGARKGQGQNNQGANAPNEKVVNDYLQKIRSSVTTEWTPCSVTCGNGVRIKRRAHADKKKAEDLTMDDLEVEACVMDKCAGIFNVVSNSLGLVILLVLALFN

SEQ ID NO: 2743 - protein, 359 aa, Artificial Sequence
  derived and/or modified protein sequence (wt) from Pk(CDK162)__ADN94495.1__CSP
MRNFILLAVSSILLVDLLPTHFEHNVDLSRAINVNGVSFNNVDTSSLGAAQVRQSASRGRGLGEKRKEGADKEKKKEKEEEPKKPNENKLKQPNPDQPQAQGDGANAGQPQAQGDGANAGQPQAQGDGANAGQPQAQGDGANAGQPQAQGDGANAGQPQAQGDGANAGQPQAQGDGANAGQPQAQGDGANAGQPQAQGDGANAGQPQAQGDGANAGQPQAQGDRANAGQPQAQGDGANVPRQGRNGGGAPAGGNEGNKQAGKGQGQNNQGANAPNEKVVNDYLHKIRSSVTTEWTPCSVTCGNGVRIRRRQNAGNKKAEDLTMDDLEVEACVMDKCAGIFNVVSNSLGLVILLVLALFN

SEQ ID NO: 2744 - protein, 359 aa, Artificial Sequence
  derived and/or modified protein sequence (wt) from Pk(KN010)__AFG25463.1__CSP
MRNFILLAVSSILLVDLLPTHFEHNVDLSRAINVNGVSFNNVDTSSLGAAQVRQSASRGRGLGEKRKEGADKEKKKEKEEEPKKPNENKLKQPNPDQPQAQGDGANAGQPQAQGDGANAGQPQAQGDGANAGQPQAQGDGANAGQPQAQGDGANTGQPQAQGDGANAGQPQAQGDGANAGQPQAQGDGANAGQPQAQGDGANAGQPQAQGDGANAGQPQAQGDRANAGQPQAQGDGANVPRQGRNGGGAPAGGNEGNKQAGKGQGQNNQGANAPNEKVVNDYLHKIRSSVTAEWTPCSVTCGNGVRIRRKAHAGNKKAEDLTMDDLEVEACVMDKCAGIFNVVSNSLGLVILLVLALFN

SEQ ID NO: 2745 - protein, 359 aa, Artificial Sequence
  derived and/or modified protein sequence (wt) from Pk(KN013)__AFG25464.1__CSP
MRNFILLAVSSILLVDLLPTHFEHNVDLSRAINVNGVSFNNVDTSSLGAAQVRQSASRGRGLGEKRKEGADKEKKKEKEEEPKKPNENKLKQPNPGQPQAQGDGANAGQPQAQGDGANAGQPQAQGDGANAGQPQAQGDGANAGQPQAQGDGANAGQPQAQGDGANAGQPQAQGDGANAGQPQAQGDGANAGQPQAQGDGANAGQPQAQGDGANAGQPQAQGDRANAGQPQAQGDGANVPRQGRNGGGAPAGGNGGNKQAGKGQGQNNQGANAPNEKVVNDYLHKIRSSVTTEWTPCSVTCGNGVRIRRKAHAGNKKAEDLTMDDLEVEACVMDKCAGIFNVVSNSLGLVILLVLALFN

SEQ ID NO: 2746 - protein, 359 aa, Artificial Sequence
  derived and/or modified protein sequence (wt) from Pk(LT57)__ADN94508.1__CSP
MKNFILLAVSSILLVDLFPTHFEHNVDLSRAINVNGVSFNNVDTSSLGAAQVRQSASRGRGLGEKPKEGADKEKKKEKEKEKEEEPKKPNENKLKQPEGNQDGRAQPEGNQDGRAQPEGNQDGRAQPEGNQDGRAQPEGNQDGRAQPEGNQDGRAQPEGNQDGRAQPEGNQDGRAQPEGNQDGRAQPEGNREAPAQPQGNGGAGQAQPEGNREAPAQPQGNGGAGQAQPEGNREAPAQPQGNGGAGQAQPQKNEGGNAGARKGQGQNNQGANAPNEKVVNDYLHKIRSSVTTEWTPCSVTCGNGVRIRRKAHADKKKAEDLTMDDLEVEACVMDKCAGIFNVVSNSLGLVILLVLALFN

SEQ ID NO: 2747 - protein, 359 aa, Artificial Sequence
  derived and/or modified protein sequence (wt) from Pk(NB046)__AFG25471.1__CSP
MRNFILLAVSSILLVDLLPTHFEHNVDLSRAINVNGVSFNNVDTSSLGAAQVRQSASRGRGLGEKRKEGADKEKKKEKEEEPKKPNENKLKQPNPDQPQAQGDGANAGQPQAQGDGANAGQPQAQGDGANAGQPQAQGDGANAGQPQAQGDGANAGQPQAQGDGANAGQPQAQGDGANAGQPQAQGDGANAGQPQAQGDGANAGQPQAQGDGANAGQPQAQGDRANAGQPQAQGDGANVPRQGRNGGGAPAGGNEGNKQAGKGQGQNNQGANAPNEKVVNDYLHKIRSSVTTEWTPCSVTCGNGVRIRRKAHAGNKKAEDLTMDDLEVEACVMDKCAGIFNVVSNSLGLVILLVLALFN

SEQ ID NO: 2748 - protein, 359 aa, Artificial Sequence
  derived and/or modified protein sequence (wt) from Pk(TN023)__AFG25478.1__CSP
MRNFILLAVSSILLVDLLPTHFEHNVDLSRAINVNGVSFNNVDISSLGAAQVRQSASRGRGLGEKRKEGADKEKKKEKEEEPKKPNENKLKQPNPDQPQAQGDGANAGQPQAQGDGANAGQPQAQGDGANAGQPQAQGDGANAGQPQAQGDGANAGQPQAQGDGANAGQPQAQGDGANAGQPQAQGDGANAGQPQAQGDGANAGQPQAQGDGANAGQPQAQGDRANAGQPQAQGDGANVPRQGRNGGGAPAGGNEGNKQAGKGQGQNNQGANAPNEKVVNDYLHKIRSSVTTEWTPCSVTCGNGVRIRRKAHAGNKKAEDLTMDDLEVEACVMDKCAGIFNVVSNSLGLVILLVLALFN

SEQ ID NO: 2749 - protein, 359 aa, Artificial Sequence
  derived and/or modified protein sequence (wt) from Pk(UM0016C2)__AHF20663.1__CSP
MKNFILLAVSSILLVDLLPTHFEHNVDLSRAINVNGVSFNNVDTSSLGAAQVRQSASRGRGLGEKPKEGADKEKKKEKEKEKEEEPKKPNENKLKQPEGNQDGRAQPEGNQDGRAQPEGNQDGRAQPEGNQDGRAQPEGNQDGRAQPEGNQDGRAQPEGNQDGRAQPEGNQDGRAQPEGNQDGRAQPEGNREAPAQPQGNGGAGQAQPEGNREAPAQPQGNGGAGQAQPEGNREAPAQPQGNGGAGQAQPQKNEGGNAGARKGQGQNNQGANAPNEKVVNDYLQKIRSSVTTEWTPCSVTCGNGVRIRRRAHADKKKAEDLTMDDLEVEACVMDKCAGIFNVVSNSLGLVILLVLALFN

SEQ ID NO: 2750 - protein, 358 aa, Artificial Sequence
  derived and/or modified protein sequence (wt) from Pk(LT48)__ADN94519.1__CSP
MRNFILLAVSSILLVDLLPTHFEHNVDLSRAINVNGVSFNNVDTSSLGAAQVRQSASRGRGLGEKRKEGADKEKKKEKEEEPKKPNENKLKQPNPDQPQAQGDGANAGQPQAQGDGANAGQPQAQGDGANAGQPQAQGDGANAGQPQAQGDGANAGQPQAQGDGANAGQPQAQGDGANAGQPQAQGDGANAGQPQAQGDGANAGQPQAQGDGANAGQPQAQGDRGMQDNHKHKEMGQMYHDKEETGEVHQQEEMRGINKQEKARDKTIRVECPKEKVVNDYLHKIRSSVTTEWTPCSVTCGNGVRIRRKAHAGNKKAEDLTMDDLEVEACVMDKCAGIFNVVSNSLGLVILLVLALFN

SEQ ID NO: 2751 - protein, 358 aa, Artificial Sequence
  derived and/or modified protein sequence (wt) from Pk(SGEHIWM4-Y09-9)__AFD97223.1__CSP
MKNFILLAVSSILLVDLLPTYFEHNVDLSRAINVNGVSFNSVDTSSLGAAQVRQSASRGRGLGEKPKEGADKEKKKEKEKEEEPKKPNENKLKQPQGNGGAGQAQPEGNGGAGQAQPEGNGGAGQAQPEGNGGAGQAQPEGNGGAGQAQPEGNGGAGQAQPEGNGGAGQAQPEGNGGAGQAQPEGNGGAGQAQPEGNGGAGQAQPEGNGGAGQAQPEGNGGAGQAQPEGNGGAGQAQPQGNGGAGQAQPQKNEGGNAGARKGQGQNNQGANAPNEKVVNDYLQKIRSSVTTEWTPCSVTCGNGVRIRRRAHADKKKAEDLTMDDLEVEACVMDKCAGIFNVVSNSLGLVILLVLALFN

SEQ ID NO: 2752 - protein, 356 aa, Artificial Sequence
  derived and/or modified protein sequence (wt) from Pk(LT15)__ADN94525.1__CSP
MRNFILLAVSSILLVDLLPTHFEHNVDLSRAINVNGVSFNNVDTSSLGAAQVRQSASRGRGLGEKRKEGADKEKKKEKEEEPKKPNENKLKQPEQAAPGAGGEQPAPGAGGEQPAPGAGGEQPAPGAGGERPAPGAGGEQPAPGAGGEQPAPGAGGERPAPGAGGEQPAPGAGGEQPAPGAGGEQPAPGAGGEQPAPGAGGERPAPGAGGERPAPGAGGEQPAPGAGGEQPAPAPRREQPAPGPGAGDGARGGNAGAGKGQGQNNQGANVPNEKVVNDYLHKIRSSVTTEWTPCSVTCGNGVRIRRRQNAGNKKAEDLTMDDLEVEACVMDKCAGIFNVVSNSLGLVILLVLALFN

SEQ ID NO: 2753 - protein, 356 aa, Artificial Sequence
  derived and/or modified protein sequence (wt) from Pk(LT57)__ADN94503.1__CSP
MKNFILLAVSSILLVDLFPTHFEHNVDLSRAINVNGVSFNNVDTSSLGAAQVRQSASRGRGLGEKPKEGADKEKKKEKEKEEPKKPNENKLKQPEGNQDGRAQPEGNQDGRAQPEGNQDGRAQPEGNQDGRAQPEGNQDGRAQPEGNQDGRAQPEGNQDGRAQPEGNQDGRAQPEGNQDGRAQPEGNREAPAQPQGNGGAGQAQPEGNREAPAQPQGNGGAGQAQPEGNREAPAQPQGNGGAGQAQPQKNEGGNAGARKGQGQNNQGANAPNEKVVNDYLQKIRSSVTTEWTPCSVTCGNGVRIRRRAHADKKKAEDLTMDDLEVEACVMDKCAGIFNAVSNSLGLVILLVLALFN

SEQ ID NO: 2754 - protein, 355 aa, Artificial Sequence
  derived and/or modified protein sequence (wt) from Pk(UMHIC2)__AHF20634.1__CSP
MKNFILLAVSSILLVDLLPTHFEHNVDLSRAINVNGVSFNNVDTSSLGAAQVRQSASRGRGLGEKPKEGADKEKKKEKEKEEEPKKPNENKLKQPEGNREAPGQPEGNREAPGQPEGNREAPGQPEGNREAPGQPEGNREAPGQPEGNREAPGQPEGNREAPGQPEGNREAPGQPEGNREAPGQPEGNREAPGQPEGNREAPAQPEGNREAPGQPEGNREAPAQPEGNREAPAQPQGNGGAGQAQPQKNEGGNAGARKGQGQNNQGANAPNEKVVNDYLQKIRSSVTTEWTPCSVTCGNGVRIKRKAHADKKKAEDLTMDDLEVEACVMDKCAGIFNVVSNSLGLVILLVLALFN

SEQ ID NO: 2755 - protein, 355 aa, Artificial Sequence
  derived and/or modified protein sequence (wt) from Pk(UMHIC6)__AHF20635.1__CSP
MKNFILLAVSSILLVDLLPTHFEHNVDLSRAINVNGVSFNNVDTSSLGAAQVRQSASRGRGLGEKPKEGADKEKKKEKEKEEEPKKPNENKLKQPEGNREAPGQPEGNREAPGQPEGNREAPGQPEGNREAPGQPEGNREAPGQPEGNREAPGQPEGNREAPGQPEGNREAPGQPEGNREAPGQPEGNREAPGQPEGNREAPGQPEGNREAPGQPEGNREAPAQPEGNREAPAQPQGNGGAGQAQPQKNEGGNAGARKGQGQNNQGANAPNEKVVNDYLQKIRSSVTTEWTPCSVTCGNGVRIKRKAHADKKKAEDLTMDDLEVEACVMDKCAGIFNVVSNSLGLVILLVLALFN

SEQ ID NO: 2756 - protein, 355 aa, Artificial Sequence
  derived and/or modified protein sequence (wt) from Pk(UMJUC1)__AHF20630.1__CSP
MKNFILLAVSSILLVDLLPTHFEHNVDLSRAINVNGVSLNNVDTSSLGAAQVRQSASRGRGLGEKPKEGADKEKKKEKEKEEEPKKPNENKLKQPEGNREAPGQPEGNREAPGQPEGNREAPGQPEGNREAPGQPEGNREAPGQPEGNREAPGQPEGNREAPGQPEGNREAPGQPEGNREAPGQPEGNREAPGQPEGDREAPAQPEGNREAPGQPEGNREVPAQPEGNREAPAQPQGNGGAGQAQPQKNEGGNAGARKGQGQNNQGANAPNEKVVNDYLQKIRSSVTTEWTPCSVTCGNGVRIKRKAHADKKKAEDLTMDDLEVEACVMDKCAGIFNVVSNSLGLVILLVLALFN

SEQ ID NO: 2757 - protein, 353 aa, Artificial Sequence
  derived and/or modified protein sequence (wt) from Pk(TN026)__AFG25480.1__CSP
MKNFILLAVSSILLVDLLPTHFEHNVDLSRAINVNGVSFNNVDTSSLGAAQVRQSASRGRGLGEKPKEGADKEKKKEKEKEKEKEEEPKKPNENKLKQPEQPAAGAGGEQPAAGAGGEQPAAGAGGEQPAAGAGGEQPAAGAGGEQPAAGAGGEQPAAGARGEQPAAGAGGEQPAAGAGGEQPAAGARGEQPAAGAGGEQPAAGARGEQPAAGAGGEQPAAGAGGEQPAPAPRREQPAPGAGAGDGARGGNAGAGKGQGQNNQGANVPNEKVVNDYLHKIRSSVTTEWTPCSVTCGNGVRIRGKGHAGNKKAEDLTMDDLEVEACVMDKCAGIFNVVSNSLGLVILLVLALFN

SEQ ID NO: 2758 - protein, 351 aa, Artificial Sequence
  derived and/or modified protein sequence (wt) from Pk(F08B49-1)__AHH02601.1__CSP
MKNFILLAVSSILLVDLLPTHFEHNVDLSRAINVNGVSFNNVDTSSLGAAQVRQSASRGRGLGEKPKEGADKEKKKEKEKEKEEEPKKPNENKLKQPEQPAAGAGGEQPAAGAGGEQPAAGAGGEQPAAGARGEQPAAGAGGEQPAAGAGGEQPAAGAGGEQPAAGAGGEQPAAGAGGEQPAAGARGEQPAAGAGGEQPAAGAGGEQPAAGARGEQPAAGAGGEQPAPAPRREQPAPGAGAGDGARGGNAGAGKGQGQNNQGANVPNEKVVNDYLHKIRSSVTTEWTPCSVTCGNGVRIRRKGHAGNKKAEDLTMDDLEVEACVMDKCAGIFNVVSNSLGLVILLVLALFN

SEQ ID NO: 2759 - protein, 351 aa, Artificial Sequence
  derived and/or modified protein sequence (wt) from Pk(F08B69-1)__AHH02602.1__CSP
MKNFILLAVSSILLVDLLPTHFEHNVDLSRAINVNGVSFNNVDTSSLGAAQVRQSASRGRGLGEKPKEGADKEKKKEKEKEKEEEPKKPNENKLKQPEQPAAGAGGEQPAAGAGGEQPAAGAGGEQPAAGARGEQPAAGAGGEQPAAGAGGEQPAAGAGGEQPAAGAGGEQPAAGAGGEQPAAGARGEQPAAGAGGEQPAAGAGGEQPAAGARGEQPAAGAGGEQPAPAPRREQPAPGAGAGDGARGGNAGAGKGQGQNNQGANVPNEKVVNDYLHKIRSSVTTEWTPCSVTCGNGVRIRRKGHAGNKKAEDLTMDDLDVEACVMDKCAGIFNVVSNSLGLVILLVLALFN

SEQ ID NO: 2760 - protein, 351 aa, Artificial Sequence
  derived and/or modified protein sequence (wt) from Pk(LT51)__ADN94540.1__CSP
MKNFILLAVSSILLVDLLPTHFEHNVDLSRAINVNGVSFNNVDTSSLGAAQVRQSASRGRGLGEKPKEGADKEKKKEKEKEKEEEPKKPNENKLKQPEQPAAGAGGEQPAAGAGGEQPAAGAGGEQPAAGAGGEQPAAGAGGEQPAAGAGGEQPAAGARGEQPAAGAGGEQPAAGAGGEQPAAGARGEQPAAGAGGEQPAAGAGGEQPAPAPRREQPAAGAGGEQPAPAPRREQPAPGAGAGDGARGGNAGAGKGQGQNNQGANVPNEKVVNDYLHKIRSSVTTEWTPCSVTCGNGVRIRRKGHAGNKKAEDLTMDDLEVEACVMDKCAGIFNVVSNSLGLVILLVLALFN

SEQ ID NO: 2761 - protein, 351 aa, Artificial Sequence
  derived and/or modified protein sequence (wt) from Pk(UM0029C9)__AHF20652.1__CSP
MKNFILLAVSSILLVDLLPTHFEHNVDLSRAINVNGVSFNNVDTSSLGAAQVRQSASRGRGLGEKPKEGADKEKKKEKEKEKEEEPKKPNENKLKQPEQPAAGAGGEQPAAGAGGEQPAAGAGGEQPAAGAGGEQPAAGARGEQPAAGAGGEQPAAGARGEQPAAGAGGEQPAAGAGGEQPAAGAGGEQPAAGARGEQPAAGAGGEQPAPAPRREQPAAGAGGEQPAPAPRREQPAPGAGAGDGAREGNAGAGKGQGQNNQGANVPNEKVVNDYLHKIRSSVTTEWTPCSVTCGNGVRIRRKGHAGNKKAEDLTMDDLEVEACVMDKCAGIFNVVSNSLGLVILLVLALFN

SEQ ID NO: 2762 - protein, 351 aa, Artificial Sequence
  derived and/or modified protein sequence (wt) from Pk(UM0050C7)__AHF20665.1__CSP
MKNFILLAVSSILLVDLLPTHFEHNVDLSRAINVNGVSFNNVDTSSPGAAQVRQSASRGRGLGEKPKEGADKEKKKEKEKEKEEEPKKPNENKLKQPEQPAAGAGGEQPAAGAGGEQPAAGAGGEQPAAGAGGEQPAAGARGEQPAAGAGGEQPAAGARGEQPAAGAGGEQPAAGAGGEQPAAGAGGEQPAAGAGGEQPAAGAGGEQPAPAPRREQPAAGAGGEQPAPAPRREQPAPGAGAGDGARGGNAGAGKGQGQNNQGANVPNEKVVNDYLRKIRSSVTTEWTPCSVTCGNGVRIRRKGHAGNKKAEDLTMDDLEVEACVMDKCAGIFNVVSNSLGLVILLVLALFN

SEQ ID NO: 2763 - protein, 351 aa, Artificial Sequence
  derived and/or modified protein sequence (wt) from Pk(UMHEC1)__AHF20620.1__CSP
MKNFILLAVSSILLVDLLPTHFEHNVDLSRAINVNGVSFNNVDTSSLGAAQVRQSASRGRGLGEKPKEGADKEKKKEKEKEKEEEPKKPNENKLKQPEQPAAGAGGEQPAAGAGGEQPAAGAGGEQPAAGAGGEQPAAGAGGEQPAAGARGEQPAAGAGGEQPAAGAGGEQPAAGAGGEQPAAGARGEQPAAGAGGEQPAAGAGGEQPAPAPRREQPAAGAGGEQPAPAPRREQPAPGAGAGDGARGGNAGAGKGQGQNNQGANVPNEKVVNDYLHKIRSSVTTEWTPCSVTCGNGVRIRRKGHAGNKKAEDLTMDDLEVEACVMDKCAGIFNVVSNSLGLVILLVLALFN

SEQ ID NO: 2764 - protein, 351 aa, Artificial Sequence
  derived and/or modified protein sequence (wt) from Pk(UMMAC4)__AHF20621.1__CSP
MKNFILLAVSSILLVDLLPTHFEHNVDLSRAINVNGVSFNNVDTSSLGAAQVRQSASRGRGLGEKPKEGADKEKKKGKEKEKEEEPKKPNENKLKQPEQPAAGAGGEQPAAGAGGEQPAAGAGGEQPAAGAGGEQPAAGAGGEQPAAGARGEQPAAGAGGEQPAAGAGGEQPAAGAGGEQPAAGARGEQPAAGAGGEQPAAGAGGEQPAPAPRREQPAAGAGGEQPAPAPRREQPAPGAGAGDGARGGNAGAGKGQGQNNQGANVPNEKVVNDYLHKIRSSVTTEWTPCSVTCGNGVRIRRKGHAGNKKAEDLTMDDLEVEACVMDKCAGIFNVVSNSLGLVILLVLALFN

SEQ ID NO: 2765 - protein, 351 aa, Artificial Sequence
  derived and/or modified protein sequence (wt) from Pk(UMMEC8)__AHF20623.1__CSP
MKNFILLAVSSILLVDLLPTHFEHNVDLSRAINVNGVSFNNVDTSSLGAAQVRQSASRGRGLGEKPKEGADKEKKKEKEKEKEEEPKKPNENKLKQPEQPAAGAGGEQPAAGAGGEQPAAGAGGEQPAAGAGGEQPAAGAGGEQPAAGARGEQPAAGAGGEQPAAGAGGEQPAAGAGGEQPAAGARGEQPAAGAGGEQPAAGAGGEQPAPAPRREQPAAGAGGEQPAPAPRREQPAPGAGAGDGARGGNAGAGKGQGQNNQGANVPNEKVVNDYLHKTRSSVTTEWTPCSVTCGNGVRIRRKGHAGNKKAEDLTMDDLEVEACVMDKCAGIFNVVSNSLGLVILLVLALFN

SEQ ID NO: 2766 - protein, 349 aa, Artificial Sequence
  derived and/or modified protein sequence (wt) from Pk(MPG45)__ACD86467.1__CSP
MKNFILLAVSSILLVDLLPTHFEHNVDLSRAINLNGVSFNNVDTSSLGAAQVRQSASRGRGLGEKPKEGADKEKKKEKDKEEEPKKPNENKLKQPNAGQPQAQGDGANAGQPQAQGDGANAGQPQAQGDGANAGQPQAQGDGANAGQPQAQGDGANAGQPQAQGDGANAGQPQAQGDGANAGQPQAQGDGANAGQPQAQGDGANAGQPQAQGDRANAGQPQAQGDGANVPRQGRNGGGAPAGGNEGNKQAGKGQGQNNQGANAPNEKVVNDYLQKIRSSVTTEWTPCSVTCGNGVRIRRRAHADKKKAEDLTMDDLEVEACVMDKCAGIFNVVSNSLGLVILLVLALFN

SEQ ID NO: 2767 - protein, 347 aa, Artificial Sequence
  derived and/or modified protein sequence (wt) from Pk(KH462)__ADN94491.1__CSP
MRNFILLAVSSILLVDLLPTHFEHNVDLSRAINVNGVSFNNVDTSSLGAAQVRQSASRGRGLGEKRKEGADKEKKKEKEEEPKKPNENKLKQPEQAAPGAGGEQPAPGAGGERPAPGAGGEQPAPGAGGEQPAPGAGGEQPAPGAGGEQPAPGAGGERPAPGAGGEQPAPGAGGERPAPGAGGEQPAPGAGGERPAPGAGGEQPAPGAGGEQPAPGAGGEQPAPAPRREQPAPAPGAGDGARGGNAGAGKGQGQNNQGANVPNEKVVNDYLHKIRSSVTTEWTPCSVTCGNGVRIRRKAHADKKKAEDLTMDDLEVEACVMDKCAGIFNVVSNSLGLVILLVLALFN

SEQ ID NO: 2768 - protein, 347 aa, Artificial Sequence
  derived and/or modified protein sequence (wt) from Pk(LT3)__ADN94521.1__CSP
MRNFILLAVSSILLVDLLPTHFEHNVDLSRAINVNGVSFNNVDTSSLGAAQVRQSASRGRGLGEKRKEGADKEKKKEKEEEPKKPNENKLKQPEQAAPGAGGEQPAPGAGGEQPAPGAGGERPAPGAGGEQPAPGAGGEQPAPGAGGERPAPGAGGEQPAPGAGGEQPAPGAGGEQPAPGAGGEQPAPGAGGELPAPGAGGERPAPGAGGEQPAPGAGGEQPAPAPRREQPAPGPGAGDGARGGNAGAGKGQGQNNQGANVPNEKVVNDYLHKIRSSVTTEWTPCSVTCGNGVRIRRRQNAGNKKAEDLTMDDLEVEACVMDKCAGIFNVVSNSLGLVILLVLALFN

SEQ ID NO: 2769 - protein, 347 aa, Artificial Sequence
  derived and/or modified protein sequence (wt) from Pk(LT33)__ADN94529.1__CSP
MRNFILLAVSSILLVDLLPTHFEHNVDLSRAINVNGVSFNNVDTSSLGAAQVRQSASRGRGLGEKRKEGADKEKKKEKEEEPKKPNENKLKQPEQAAPGAGGEQPAPGAGGERPAPGAGGEQPAPGAGGEQPAPGAGGEQPAPGAGGEQPAPGAGGERPAPGAGGEQPAPGAGGEQPAPGAGGEQPAPGAGGERPAPGAGGEQPAPGAGGERPAPGAGGEQPAPAPRREQPAPGPGAGDGARGGNAGAGKGQGQNNQGANVPNEKVVNDYLHKIRSSVTTEWTPCSVTCGNGVRIRRRQNAGNKKAEDLTMDDLEVEACVMDKCAGIFNVVSNSLGLVILLVLALFN

SEQ ID NO: 2770 - protein, 347 aa, Artificial Sequence
  derived and/or modified protein sequence (wt) from Pk(LT33)__ADN94527.1__CSP
MKNFILLAVSSILLVDLLPTHFEHNVDLSRAINVNGVSFNNVDTSSLGAAQVRQSASRGRGLGEKRKEGADKEKKKEKEEEPKKPNENKLKQPEQAAPGAGGEQPAPGAGGERPAPGAGGEQPAPGAGGEQPAPGAGGEQPAPGAGGEQPAPGAGGERPAPGAGGEQPAPGAGGEQPAPGAGGEQPAPGAGGERPAPGAGGEQPAPGAGGERPAPGAGGEQPAPAPRREQPAPGPGAGDGARGGNAGAGKGQGQNNQGANVPNEKVVNDYLHKIRSSVTTEWTPCSVTCGNGVRIRRRQNAGNKKAEDLTMDDLEVEACVMDKCAGIFNVVSNSLGLVILLVLALFN

SEQ ID NO: 2771 - protein, 347 aa, Artificial Sequence
  derived and/or modified protein sequence (wt) from Pk(TN029)__AFG25482.1__CSP
MRNFILLAVSSILLVDLLPTHFEHNVDLSRAINVNGVSFNNVDTSSLGAAQVRQSASRGRGLGEKRKEGADKEKKKEKEEEPKKPNENKLKQPEQAAPGAGGEQPAPGAGGEQPAPGAGGERPAPGAGGEQPAPGAGGEQPAPGAGGERPAPGAGGEQPAPGAGGEQPAPGAGGEQPAPGAGGEQPAPGAGGERPAPGAGGERPAPGAGGEQPAPGAGGEQPAPAPRREQPAPGPGAGDGARGGNAGAGKGQGQNNQGANVPNEKVVNDYLHKIRSSVTTEWTPCSVTCGNGVRIRRRQNAGNKKAEDLTMDDLEVEACVMDKCAGIFNVVSNSLGLVILLVLALFN

SEQ ID NO: 2772 - protein, 346 aa, Artificial Sequence
  derived and/or modified protein sequence (wt) from Pk(LT53)__ADN94501.1__CSP
MKNFILLAVSSILLVDLLPTHFEHNVDLSRAINVNGVSFNNVDTSSLGAAQVRQSASRGRGLGEKPKEGDDKEKKKEKEKEEEPKNLNENKPKQPNAEGDGAKPKQPNAEGDGAKLKQPNAEGDGAKLKQPNAEGDGGNARQPNAEGDGGNARQPNAEGDGGNARQPNAEGDGGNARQPNAEGDGGNARQPNAEGDGGNARQPNAEGDGGNARQPNAEGDGANARQPQAEGGGGNARQGGNEGNKQAGKGQGQNNQGANAPNEKVVNDYLQKIRSSVTTEWTPCSVTCGNGVRIRRRAHADKKKAEDLTMDDLEVEACVMDKCAGIFNVVSNSLGLVILLVLALFN

SEQ ID NO: 2773 - protein, 346 aa, Artificial Sequence
  derived and/or modified protein sequence (wt) from Pk(UMOTC3)__AHF20624.1__CSP
MKNFILLAVSSILLVDLLPTHFEHNVDLSRAINVNGVSFNNVDTSSLGAAQVRQSASRGRGLGEKPKEGADKEKKKEKEKEEEPKKPNENKLKQPEGNREAPGQPEGNREAPGQPEGNREAPGQPEGNREAPGQPEGNREAPGQPEGNREAPGQPEGNREAPGQPEGNREAPGQPEGNREAPAQPEGNREAPGQPEGNREAPAQPQGNGGAGQAQPEENREAPAQPQGNGGAGQAQPQKNEGGNAGARKGQGQNNQGANVPNEKVVNDYLHKIRSSVTTEWTPCSVTCGNGVRIRRKGHAGNKKAEDLTMDDLEVEACVMDKCAGIFNVVSNSLGLVILLVPALFN

SEQ ID NO: 2774 - protein, 345 aa, Artificial Sequence
  derived and/or modified protein sequence (wt) from Pk(UMSY2C2)__AHF20625.1__CSP
MKNFILLAVSSILLVDLLPTHFEHNVDLSRAINVNGVSFNNVDTSSLGAAQVRQSASRGRGLGEKPKEGADKEKKKEKEKEEEPKKPNENKLKQPEGNREAPGQPEGNREAPGQPEGNREAPGQPEGNREAPGQPEGNREAPGQPEGNREAPGQPEGNREAPGQPEGNREAPGQPEGNREAPGQPEGNREAPAQPEGNREAPGQPEGNREAPAQPEGNREAPAQPQGNGGAGQAQPQKNEGGNAGARKGQGQNNQGANAPNEKVVNDYLQKIRSSVTTEWTPCSVTCGNGVRIKRKAHADKKKAEDLTMDDLEVEACVMDKCAGIFNVVSNSLGLVILLVLALFN

SEQ ID NO: 2775 - protein, 342 aa, Artificial Sequence
  derived and/or modified protein sequence (wt) from Pk(KN045)__AFG25467.1__CSP
MKNFILLAVSSILLVDLLPTHFEHNVDLSRAINVNGVSFNNVDTSSLGAAQVRQSASRGRGLGEKPKEGADKEKKKEKEKEKEEEPKKPNENKLKQPEQPAAGAGGEQPAAGAGGEQPAAGAGGEQPAAGAGGEQPAAGAGGEQPAAGARGEQPAAGAGGEQPAAGAGGEQPAAGARGEQPAAGAGGEQPAAGAGGEQPAPAPRREQPAAGAGGEQPAPAPRREQPAPGAGAGDGARGGNAGAGKGQGQNNQGANVPNEKVVNDYLHKIRSSVTTEWTPCSVTCGNGVRIRRKGHAGNKKAEDLTMDDLEVEACVMDKCAGIFNVVSNSLGLVILLVLALFN

SEQ ID NO: 2776 - protein, 342 aa, Artificial Sequence
  derived and/or modified protein sequence (wt) from Pk(LT48)__ADN94515.1__CSP
MKNFILLAVSSILLVDLLPTHFEHNVDLSRAINVNGVSFNNVDTSSLGAAQVRQSASRGRGLGEKPKEGADKEKKKEKEKEKEEEPKKPNENKLKQPEQPAAGAGGEQPAAGAGGEQPAAGAGGEQPAAGAGGEQPAAGAGGEQPAAGAGGEQPAAGAGGEQPAAGAGGEQPAAGARGEQPAAGAGGEQPAAGAGGEQPAPAPRREQPAAGAGGEQPAPAPRREQPAPGAGAGDGARGGNAGAGKGQGQNNQGANVPNEKVVNDYLHKIRSSVTTEWTPCSVTCGNGVRIRRKGHAGNKKAEDLTMDDLEVEACVMDKCAGIFNVVSNSLGLVILLVLALFN

SEQ ID NO: 2777 - protein, 342 aa, Artificial Sequence
  derived and/or modified protein sequence (wt) from Pk(TB073)__AFG25476.1__CSP
MRNFFFLAVSSILLVDLLPTHFEHNVDLSRAINVNGVSFNNVDTSSLGAAQVRQSASRGRGLGEKRKEGADKEKKKEKEEEPKKPNENKLKQPEQARAGGEQPAAGGEQPAAGGEQPAAGGEQPAAGGEQPAAGGEQPAAGGEQPAAGGEQPAAGGEQPAAGGERPAAGGEQPAAGGERPAAGGEQPAAGGEQPAPAPRREQPAAGGEQPAPAPRREQPAAGGEQPAPGAGAGDGARGGNAGAGKGQGQNNQGANVPNEKVVNDYLHKTRSSVTTEWTPCSVTCGNGVRIRRKAHADKKKAENLTMDDLEVEACVMDKCAGIFNVVSNSLGLVILLVLALFN

SEQ ID NO: 2778 - protein, 341 aa, Artificial Sequence
  derived and/or modified protein sequence (wt) from Pk(SGEHIWM26-Y09-60)__AFD97238.1__CSP
MKNFILLAVSSILLVDLLPTHFEHNVDLSRAINVNGVSFNNVDTSSLGAARVRQSASRGRGLGEKPKEGADKEKKKEKEKEKEEPKKPNENKLKQPEQPAAGAGGEQPAAGAGGEQPAAGAGGEQPAAGAGGEQPAAGAGGEQPAAGAGGEQPAAGAGGEQPAAGAGGEQPAAGAGGEQPAAGAGGEQPAAGAGGEQPAPAPRREQPAAGAGGEQPAPAPRREQPAPGAGAGDGARGGNAGAGKGQGQNNQGANVPNEKVVNDYLHKIRSSVTTEWTPCSVTCGNGVRIRRRQNAGNKKAEDLTMDDLEVEACVMDKCAGIFNVVSNSLGLVILLVLALFN

SEQ ID NO: 2779 - protein, 341 aa, Artificial Sequence
  derived and/or modified protein sequence (wt) from Pk(SGEHIWM35-Y09-74)__AFD97243.1__CSP
MKNFILLAVSSILLVDLLPTHFEHNVDLSRAINVNGVSFNNVDTSSLGAAQVRQSASRGRGLGEKPKEGADKEKKKEKEKEKEEPKKPNENKLKQPEQPAAGAGGEQPAAGAGGEQPAAGAGGEQPAAGAGGEQPAAGAGGEQPAAGAGGEQPAAGAGGEQPAAGAGGEQPAAGAGGEQPAAGAGGEQPAAGAGGEQPAPAPRREQPAAGAGGEQPAPAPRREQPAPGAGAGDGARGGNAGAGKGQGQNNQGANVPNEKVVNDYLHKIRSSVTTEWTPCSVTCGNGVRIRRRQNAGNKKAEDLTMDDLEVEACVMDKCAGIFNVVSNSLGLVILLVLALFN

SEQ ID NO: 2780 - protein, 340 aa, Artificial Sequence
  derived and/or modified protein sequence (wt) from Pk(UM0014C4)__AHF20645.1__CSP
MKNFILLAVSSILLVDLLPTHFEHNVDLSRAINVNGVSFNNVDTSSLGAAQVRQSASRGRGLGEKPKEGADKEKKKEKEKEEEPKKPNENKLKQPEQARPGAGGEQPAPGAGGEQPAPGAGGEQPAPGAGGEQPAPGAGGEQPAPGAGGEQPAPGAGGEQPAPGAGGEQPAPGAGGGQPAPGAGGEQPAPGAGGEQPAPAPRREQPAPGPGGEQPAPAPRREQPAPGAGAGDGARGGNAGAGKGQGQNNQGANVPNEKVVNDYLHKIRSSVTTEWTPCSVTCGNGVRIRRKGHAGNKKAEDLTMDDLEVEACVMDKCAGIFNVVSNSLGLVILLVLALFN

SEQ ID NO: 2781 - protein, 339 aa, Artificial Sequence
  derived and/or modified protein sequence (wt) from Pk(LT57)__ADN94510.1__CSP
MKNFILLAVSSILLVDLLPTHFEHNVDLSRAINVNGVSFNNVDTSSLGAAQVRQSASRGRGLGEKRKEGADKEKKKEKEEPKKPNENKLKQPEQARAGGEQPAAGGEQPAAGGEQPAAGGEQPAAGGEQPAAGGEQPAAGGEQPAAGGEQPAAGGERPAAGGEQPAAGGEQPAAGGEQPAAGGERPAAGGERPAAGGEQPAAGGEQPAPAPRREQPAAGGEQPAPGAGAGDGARGGNAGAGKGQGQNNQGANVPNEKVVNDYLHKIRSSVTTEWTPCSVTCGNGVRIRRKAHADKKKAENLTMDDLEVEACVMDKCAGIFNVVSNSLGLVILLVLALFN

SEQ ID NO: 2782 - protein, 339 aa, Artificial Sequence
  derived and/or modified protein sequence (wt) from Pk(SGEHIWM17-Y09-4)__AFD97233.1__CSP
MKNFILLAVSSILLVDLLPTHFEHNVDLSRAINVNGVSFNNADTSSLGAAQVRQSASRGRGLGEKPKEGADKEKKKEKEEEPKKPNENKLKQPDAVPGGEEPAPGREQPAPGREEPAPGREQPAPGREEPAPGREQPAPGREEPAPGREQPAPGREQPAPGREEPAPGREQPAPGREEPAPGREQPAPGREQPAPGREQPAPGGEQPAPGREQPAPGGEQPAPAPGAGAGDGARGGNAGAGKGQGQNNQGANVPNEKVVNDYLHKIRSSVTTEWTPCSVTCGNGVRIRRKGHAGNKKAEDLTMDDLEVEACVMDKCAGIFNVVSNSLGLVILLVLALFN

SEQ ID NO: 2783 - protein, 339 aa, Artificial Sequence
  derived and/or modified protein sequence (wt) from Pk(SGEHIWM26-Y09-123)__AFD97240.1__CSP
MKNFILLAVSSILLVDLLPTHFEHNVDLSRAINVNGVSFNNVDTSSLGAAQVRQSASRGRGLGEKPKEGADKEKKKEKEEEPKKPNENKLKQPDAVPGGEEPAPGREQPAPGREEPAPGREQPAPGREEPAPGREQPAPGREEPAPGREQPAPGREQPAPGREEPAPGREQPAPGREEPAPGREQPAPGREQPAPGREQPAPGGEQPAPGREQPAPGGEQPAPAPGAGAGDGARGGNAGAGKGQGQNNQGANVPNEKVVNDYLHKIRSSVTTEWTPCSVTCGNGVRIRRKGHAGNKKAEDLTMDDLEVEACVMDKCAGIFNVVSNSLGLVILLVLALFN

SEQ ID NO: 2784 - protein, 339 aa, Artificial Sequence
  derived and/or modified protein sequence (wt) from Pk(TN003)__AFG25477.1__CSP
MKNFILLAVSSILLVDLFPTHFEHNVDLSRAINVNGVSFNNVDTSSLGAAQVRQSASRGRGLGEKPKEGADKEKKKEKEEKPKKPNENKLKQPAAGGEQPAAGGEQPAAGGEQPAAGGEQPAAGGEQPAAGGEQPAAGGERPAAGGEQPAAGGEQPAAGGERPAAGGEQPAAGGERPAAGGEQPAAGGEQPAAGGEQPAPAPRREQPVAGGEQPAPAPRREQPAPGAGAGDGARGGNAGAGKGQGQNNQGANVPNEKVVNDYLHKIRSSVTTEWTPCSVTCGNGVRIRRRQNAGNKKAEDLTMDDLEVEACVMDKCAGIFNVVSNSLGLVILLVLALFN

SEQ ID NO: 2785 - protein, 338 aa, Artificial Sequence
  derived and/or modified protein sequence (wt) from Pk(LT53)__ADN94524.1__CSP
MRNFILLAVSSILLVDLLPTHFEHNVDLSRAINVNGVSFNNVDTSSLGAAQVRQSASRGRGLGEKRKEGADKEKKKEKEEEPKKPNENKLKQPEQERPGGEQPAPGPGGEQPAPGPGGEQPAPRPGGEQPAPGPGGEQPAPGPGGEQPAPGPGGEQPAPRPGGEQPAPGPGGEQPAPRPGGEQPAPGPGGEQPAPRPGGEQPAPGPGGEQPAPAPRREQPAPAPGAGAGDGARGGNAGAGKGQGQNNQGANVPNEKVVNDYLHKIRSSVTTEWTPCSVTCGNGVRIRRRQNAGNKKAEDLTMDDLEVEACVMDKCAGIFNVVSNSLGLVILLVLALFN

SEQ ID NO: 2786 - protein, 337 aa, Artificial Sequence
  derived and/or modified protein sequence (wt) from Pk(KH229)__ADN94485.1__CSP
MRNFILLAVSSILLVDLLPTHFEHNVDLSRAINVNGVSFNNVDTSSLGAAQVRQSASRGRGLGEKPKEGADKEKKKEKEEKPKKPNENKLKQPGGEQPAAGGEQPAAGGEQPAAGGEQPAAGGERPAAGGEQPAAGGEQPAAGGEQPAAGGEQPAAGGERPAAGGEQPAAGGEQPAAGGEQPAAGGERPAAGGEQPAPAPRREQPAAGGEQPAPAPRREQPAPGAGAGDGARGGNAGAGKGQGQNNQGANVPNEKVVNDYLHKIRSSVTTEWTPCSVTCGNGVRIRRRQNAGNKKAEDLTMDDLEVEACVMDKCAGIFNVVSNSLGLVILLVLALFN

SEQ ID NO: 2787 - protein, 337 aa, Artificial Sequence
  derived and/or modified protein sequence (wt) from Pk(KH468)__ADN94487.1__CSP
MKNFILLAVSSILLVDLFPTHFEHNVDLSRAINVNGVSFNNVDTSSLGAAQVRQSASRGRGLGEKPKEGADKEKKKEKEEKPKKPNENKLKQPGGEQPAAGGEQPAAGGEQPAAGGEQPAAGGERPAAGGEQPAAGGEQPAAGGEQPAAGGEQPAAGGERPAAGGEQPAAGGEQPAAGGERPAAGGEQPAAGGEQPAPAPRREQPAAGGEQPAPAPRREQPAPGAGAGDGARGGNPGAGKGQGQNNQGANVPNEKVVNDYLHKIRSSVTTEWTPCSVTCGNGVRIRRRQNAGNKKAEDLTMDDLEVEACVMDKCAGIFNVVSNSLGLVILLVLALFN

SEQ ID NO: 2788 - protein, 337 aa, Artificial Sequence
  derived and/or modified protein sequence (wt) from Pk(LT33)__ADN94523.1__CSP
MRNFILLAVSSILLVDLLPTHFEHNVDLSRAINVNGVSFNNVDTSSLGAAQVRQSASRGRGLGEKRKEGADKEKKKEKEEEPKKPNENKLKQPGGEQPAAGGEQPAAGGEQPAAGGEQPAAGGERPAAGGEQPAAGGEQPAAGGEQPAAGGEQPAAGGERPAAGGEQPAAGGEQPAAGGERPAAGGEQPAAGGEQPAPAPRREQPAAGGEQPAPAPRREQPAPGAGAGDGARGGNPGAGKGQGQNNQGANVPNEKVVNDYLHKIRSSVTTEWTPCSVTCGNGVRIRRRQNAGNKKAEDLTMDDLEVEACVMDKCAGIFNVVSNSLGLVILLVLALFN

SEQ ID NO: 2789 - protein, 337 aa, Artificial Sequence
  derived and/or modified protein sequence (wt) from Pk(LT64)__ADN94520.1__CSP
MKNFILLAVSSILLVDLFPTHFEHNVDLSRAINVNGVSFNNVDTSSLGAAQVRQSASRGRGLGEKPKEGADKEKKKEKEEKPKKPNENKLKQPGGEQPAAGGEQPAAGGEQPAAGGEQPAAGGEQPAAGGEQPAAGGERPAAGGEQPAAGGEQPAAGGERPAAGGEQPAAGGERPAAGGEQPAAGGEQPAAGGEQPAPAPRREQPAAGGEQPAPAPRREQPAPGAGAGDGARGGNAGAGKGQGQNNQGANVPNEKVVNDYLHKIRSSVTTEWTPCSVTCGNGVRIRRRQNAGNKKAEDLTMDDLEVEACVMDKCAGIFNVVSNSLGLVILLVLALFN

SEQ ID NO: 2790 - protein, 337 aa, Artificial Sequence
  derived and/or modified protein sequence (wt) from Pk(TB016)__AFG25473.1__CSP
MKNFILLAVSSILLVDLFPTHFEHNVDLSRAINVNGVSFNNVDTSSLGAAQVRQSASRGRGLGEKPKEGADKEKKKEKEEKPKKPNENKLKQPGGEQPAAGGEQPAAGGEQPAAGGEQPAAGGERPAAGGEQPAAGGEQPAAGGEQPAAGGEQPAAGGERPAAGGEQPAAGGEQPAAGGERPAAGGEQPAAGGEQPAPAPRREQPAAGGEQPAPAPRREQPAPGAGAGDGARGGNAGAGKGQGQNNQGANVPNEKVVNDYLHKIRSSVTTEWTPCSVTCGNGVRIRRRQNAGNKKAEDLTMDDLEVEACVMDKCAGIFNVVSNSLGLVILLVLALFN

SEQ ID NO: 2791 - protein, 337 aa, Artificial Sequence
  derived and/or modified protein sequence (wt) from Pk(UM0021C10)__AHF20667.1__CSP
MKNFILLAVSSILLVDLFPTHFEHNVDLSRAINVNGVSFNNVDTSSLGAAQVRQSASRGRGLGEKPKEGADKEKKKEKEEKPKKPNENKLKQPGGEQSAAGGEQPAAGGEQPAAGGEQPAAGGEQPAAGGEQPAAGGERPAAGGEQPAAGGEQPAAGGERPAAGGEQPAAGGERPAAGGEQPAAGGEQPAAGGEQPAPAPRREQPAAGGEQPAPAPRREQPAPGAGAGDGARGGNAGAGKGQGQNNQGANVPNEKVVNDYLHKIRSSVTTEWTPCSVTCGNGVRIRRRQNAGNKKAEDLTMDDLEVEACVMDKCAGIFNVVSNSLGLVILLVLALFN

SEQ ID NO: 2792 - protein, 336 aa, Artificial Sequence
  derived and/or modified protein sequence (wt) from Pk(UMRAC2)__AHF20618.1__CSP
MKNFILLAVSSILLVDLLPTHFEHNVDLSRAINVNGVSFNNVDTSSLGAAQVRQSASRGRGLGEKPKEGADKEKKKEKEKEEEPKKPNENKLKQPEGNREAPGQPEGNREAPGQPEGNREAPGQPEGNREAPGQPEGNREAPGQPEGNREAPGQPEGNREAPGQPEGNREAPAQPEGNREAPGQPEGNREAPAQPQGNGGAGQAQPEGNREAPAQPQGNGGAGQAQPQKNEGGNAGARKGQGQNNQGANVPNEKVVNDYLHKIRSSVTTEWTPCSVTCGNGVRIRRKGHAGNKKAEDLTMDDLEVEACVMDKCAGIFNVVSNSLGLVILLVLALFN

SEQ ID NO: 2793 - protein, 335 aa, Artificial Sequence
  derived and/or modified protein sequence (wt) from Pk(UMANC1)__AHF20619.1__CSP
MKNFILLAVSSILLVDLLPTHFEHNVDLSRAINVNGVSFNNVDTSSLGAAQVRQSASRGRGLGEKPKEGADKEKKKEKEKEEEPKKPNENKLKQPEGNREAPGQPEGNREAPGQPEGNREAPGQPEGNREAPGQPEGNREAPGQPEGNREAPGQPEGNREAPGQPEGNREAPGQPEGNREAPGQPEGNREAPGQPEGNREAPAQPEGNREAPAQPQGNGGAGQAQPQKNEGGNAGARKGQGQNNQGANAPNEKVVNDYLQKIRSSVTTEWTPCSVTCGNGVRIKRKAHADKKKAEDLTMDDLEVEACVMDKCAGIFNVVSNSLGLVILLVLALFN

SEQ ID NO: 2794 - protein, 333 aa, Artificial Sequence
  derived and/or modified protein sequence (wt) from Pk(LT48)__ADN94505.1__CSP
MRNFILLAVSSILLVDLLPTHFEHNVDLSRAINVNGVSFNNVDTSSLGAAQVRQSASRGRGLGEKRKEGADKEKKKEKEEEPKKPNENKLKQPNAEGGANAGQPNAEGGANAGQPNAEGGANAGQPNAEGGANAGQPNAEGGANAGQPNAEGGANAGQPNAEGGANAGQPNAEGGANAGQPNAEGGANAGQPNAEGGANAGQPNAEGGANARQPQAEGGGANARQGGNEGNKQAGKGQGQNNQGANAPNEKVVNDYLQKIRSSVTTEWTPCSVTCGNGVRIRRRAHADKKKAEDLTMDDLEVEACVMDKCAGIFNVVSNSLGLVILLVLALFN

SEQ ID NO: 2795 - protein, 330 aa, Artificial Sequence
  derived and/or modified protein sequence (wt) from Pk(KH176)__ADN94486.1__CSP
MKNFILLAVSSILLVDLFPTHFEHNVDLSRAINVNGVSFNNVDTSSLGAAQVRQSASRGRGLGEKPKEGADKEKKKEKEEKPKKPNENKLKQPGGEQPAAGGEQPAAGGEQPAAGGEQPAAGGEQPAAGGERPAAGGEQPAAGGEQPAAGGERPAAGGEQPAAGGERPAAGGEQPAAGGEQPAAGGEQPAPAPRREQPAAGGEQPAPAPRREQPAPGAGAGDGARGGNAGAGKGQGQNNQGANVPNEKVVNDYLHKIRSSVTTEWTPCSVTCGNGVRIRRRQNAGNKKAEDLTMDDLEVEACVMDKCAGIFNVVSNSLGLVILLVLALFN

SEQ ID NO: 2796 - protein, 330 aa, Artificial Sequence
  derived and/or modified protein sequence (wt) from Pk(LT36)__ADN94511.1__CSP
MRNFILLAVSSILLVDLLPTHFEHNVDLSRAINVNGVSFNNVDTSSLGAAQVRQSASRGRGLGEKRKEGADKEKKKEKEEKPKKPNENKLKQPGGEQPAAGGEQPAAGGEQPAAGGEQPAAGGEQPAAGGEQPAAGGEQPAAGGEQPAAGGEQPAAGGEQPAAGGEQPAAGGEQPAPAPRREQPAAGGEQPAAGGEQPAPAPRREQPAPGGEQPAPGAGAGDGARGGNPGAGKGQGQNNQGANVPNEKVVNDYLHKIRSSVTTEWTPCSVTCGNGVRIRRKAHADKKKAENLTMDDLEVEACVMDKCAGIFNVVSNSLGLVILLVLALFN

SEQ ID NO: 2797 - protein, 330 aa, Artificial Sequence
  derived and/or modified protein sequence (wt) from Pk(TB066)__AFG25475.1__CSP
MKTLFLLAVSSILLVDLFPTHFEHNVDLSRAINVNGVSFNNVDTSSLGAAQVRQSASRGRGLGEKRKEGADKEKKKEKEEKPKKPNENKLKQPGGEQPAAGGEQPAAGGEQPAAGGEQPAAGGEQPAAGGEQPAAGGEQPAAGGEQPAAGGEQPAAGGEQPAAGGEQPAAGGEQPAPAPRREQPAAGGEQPAAGGEQPAPAPRREQPAAGGEQPAPGAGAGDGARGGNPGAGKGQGQNNQGANVPNEKVVNDYLHKIRSSVTTEWTPCSVTCGNGVRIRRKAHADKKKAENLTMDDLEVEACVMDKCAGIFNVVSNSLGLVILLVLALFN

SEQ ID NO: 2798 - protein, 330 aa, Artificial Sequence
  derived and/or modified protein sequence (wt) from Pk(UM006C6)__AHF20642.1__CSP
MKNFILLAVSSILLVDLLPTHFEHNVDLSRAINVNGVSFNNVDTSSLGAAQVRQSASRGRGLGEKPKEGADKEKKKEKEEEPKKPNGNKLKQPAPGGEQPAPGGEQPAPGGEQPAPGGEQPAPGGEQPAPGGEQPAPGGEQPAPGGEQPAPGGEQPAPGGEQPAPGGEQPAPGGEQPAPGGEQPAPAPRREQPAPGGEQPAPGGEQPAPRREQPAPGAGAGDGARGGNAGAGKGQGQNNQGASVPNEKVVNDYLHKIRSSVTTEWTPCSVTCGNGVRIRRKAHADKKKAEDLTMDDLEVEACVMDKCAGIFNVVSNSLGLVILLVLALFN

SEQ ID NO: 2799 - protein, 327 aa, Artificial Sequence
  derived and/or modified protein sequence (wt) from Pk(UM004C4)__AHF20641.1__CSP
MKNFILLAVSSILLVDLLPTHFEHNVDLSRAINVNGVSFNNVDTSSLGAAQVRQSASRGRGLGEKPKEGADKEKKKEKGKEKEEEPKKPNENKLKQPNEGQPQAQGDGANAGQPQAQGDGANAGQPQAQGDGANAGQPQAQGDGANAGQPQAQGDGANAGQPQAQGDGANAGQPQAQGDGANAGQPQAQGDRANAGQPQAQGDGANVPRQGRNGGGAPAGGNEGNKQAGKGQGQNNQGANAPNEKVVNDYLHKIRSSVTTEWTPCSVTCGNGVRIRRKAHAGNKKAEDLTVDDLEVEACVMDKCAGIFNVVSNSLGLVILLVLALFN

SEQ ID NO: 2800 - protein, 325 aa, Artificial Sequence
  derived and/or modified protein sequence (wt) from Pk(UMHAC5)__AHF20632.1__CSP
MKNFILLAVSSILLVDLLPTHFEHNVDLSRAINVNGVSFNNVDTSSLGAAQVRQSASRGRGLGEKPKEGADKEKKKEKEKEEEPKKPNENKLKQPEGNREAPGQPEGNREAPGQPEGNREAPGQPEGNREAPGQPEGNREAPGQPEGNREAPGQPEGNREAPGQPEGNREAPAQPEGNREAPGQPEGNREAPAQPEGNRETPAQPQGNGGAGQAQPQKNEGGNAGARKGQGQNNQGANAPNEKVVNDYLQKIRSSVTTEWTPCSVTCGNGVRIKRKAHADKKKAEDLTMDDLEVEACVMDKCAGIFNVVSNSLGLVILLVLALFN

SEQ ID NO: 2801 - protein, 325 aa, Artificial Sequence
  derived and/or modified protein sequence (wt) from Pk(UMSYC3)__AHF20626.1__CSP
MKNFILLAVSSILLVDLLPTHFEHNVDLSRAINVNGVSFNNVDTSSLGAAQVRQSASRGRGLGEKPKEGADKEKKKEKEKEEEPKKPNENKLKQPEGNREAPGQPEGNREAPGQPEGNREAPGQPEGNREAPGQPEGNREAPGQPEGNREAPGQPEGNREAPGQPEGNREAPAQPEGNREAPGQPEGNREAPAQPEGNREAPAQPQGNGGAGQAQPQKNEGGNAGARKGQGQNNQGANAPNEKVVNDYLQKIRSSVTTEWTPCSVTCGNGVRIKRKAHADKKKAEDLTMDDLEVEACVMDKCAGIFNVVSNSLGLVILLVLALFN

SEQ ID NO: 2802 - protein, 321 aa, Artificial Sequence
  derived and/or modified protein sequence (wt) from Pk(LT33)__ADN94509.1__CSP
MKNFILLAVSSILLVDLLPTHFEHNVDLSRAINVNGVSFNNVDTSSLGAAQVRQSASRGRGLGEKRKEGADKEKKKEKEEEPKKPNENKLKQPEQARAGGEQPAAGGEQPAAGGEQPAAGGEQPAAGGEQPAAGGEQPAAGGEQPAAGGEQPAAGGEQPAAGGEQPAAGGEQPAPAPRREQPAAGGEQPAPAPRREQPAAGGEQPAPGAGAGDGARGGNAGAGKGQGQNNQGANVPNEKVVNDYLHKIRSSVTTEWTPCSVTCGNGVRIRRKAHADKKKAENLTMDDLEVEACVMDKCAGIFNVVSNSLGLVILLVLALFN

SEQ ID NO: 2803 - protein, 319 aa, Artificial Sequence
  derived and/or modified protein sequence (wt) from Pk(UM0032C4)__AHF20653.1__CSP
MKNFILLAVSSILLVDLLPTHFEHNVDLSRAINVNGVSFNNVDTSSLGAAQVRQSASRGRGLGEKPKEGADKEKKKEKEKEEEPKKPNENKLKQPNAEGDGANARQPNAEGDGANARQPNAEGDGANARQPNAEGDGANARQPNAEGDGANARQPNAEGDGANARQPNAEGGGANARQPQAEGDGANARQPQAQGDGGNARQGGNGGGAPAGGNEGNKQAGKGQGQNNQGANAPNEKVVNDYLQKIRSSVTTEWTPCSVICGNGVRIRRRAHADKKKAEDLTMDDLEVEACVMDKCAGIFNVVSNSLGFVILLVLALFN

SEQ ID NO: 2804 - protein, 316 aa, Artificial Sequence
  derived and/or modified protein sequence (wt) from Pk(SGEHIH1-im-Y09-80)__AFD97207.1__CSP
MKNFILLAVSSILLVDLLPTHFEHNVDLSRAINVNGVSFNNVDTSSLGAAQVRQSASRGRGLGEKPKEGDDKEKKKEKEKEEEPKKLNENNPKKPNEEGDGAKLKQPNEEGDGAKLKQPNAEGGANAGQPNAEGGANAGQPNAEGGANARQPNAEGGANAGQPNAEGGANAGQPNAEGGANARQPQAEGGGANARQPQAEGGGANARQGGNEGNKQAGKGQGQNNQGANAPNEKVVNDYLQKIRSSVTIEWTPCSVTCGNGVRIRRRAHADKKKAEDLTMDDLEVEACVMDKCAGIFNVVSNSLGLVILLVLALFN

SEQ ID NO: 2805 - protein, 312 aa, Artificial Sequence
  derived and/or modified protein sequence (wt) from Pk(LT33)__ADN94514.1__CSP
MRNFILLAVSSILLVDLLPTHFEHNVDLSRAINVNGVSFNNVDTSSLGAAQVRQSASRGRGLGEKRKEGADKEKKKEKEEEPKKPNENKLKQPEQAAPGAGGEQPAPGAGGERPAPGAGGEQPAPGAGGEQPAPGAGGEQPAPGAGGEQPAAGGEQPAAGGEQPAPAPRREQPAAGGEQPAPAPRREQPAAGGEQPAPGAGAGDGARGGNAGAGKGQGQNNQGANVPNEKVVNDYLHKIRSSVTTEWTPCSVTCGNGVRIRRKAHADKKKAENLTMDDLEVEACVMDKCAGIFNVVSNSLGLVILLVLALFN

SEQ ID NO: 2806 - protein, 297 aa, Artificial Sequence
  derived and/or modified protein sequence (wt) from Pk(SGEHIWM26-Y09-98)__AFD97239.1__CSP
MKNFILLAVSSILLVDLLPTHFEHNVDLSRAINVNGVSFNNVDTSSLGAAQVRQSASRGRGLGEKPKEGADKEKKKEKEEEPKKPNENKLKQPDTVPGGEEPAPGREQPAPGREEPAPGREQPAPGREEPAPGREQPAPGREEPAPGREQPAPGREQPAPGREEPAPGREQPAPGREEPAPAPGAGAGDGARGGNAGAGKGQGQNNQGANVPNEKVVNDYLHKIRSSVTTEWTPCSVTCGNGVRIRRKGHAGNKKAEDLTMDDLEVEACVMDKCAGIFNVVSNSLGLVILLVLALFN

SEQ ID NO: 2807 - protein, 266 aa, Artificial Sequence
  derived and/or modified protein sequence (wt) from Pk(KH296)__ADN94490.1__CSP
MRNFILLAVSSILLVDLLPTHFEHNVDLSRAINVNGVSFNNVDTSSLGAAQVRQSASRGRGLGEKRKEGADKEKKKEKEEEPKKPNENKLKQPEQAAPGAGGEQPAPGAGGEQPAPGAGGEQPAPGAGGEQPAPGAGGEQPAPAPRREQPAPAPGAGDGARGGNAGAGKGQGQNNQGANVPNEKVVNDYLHKIRSSVTTEWTPCSVTCGNGVRIRRKAHADKKKAEDLTMDDLEVEACVMDKCAGIFNVVSNSLGLVILLVLALFN

SEQ ID NO: 2808 - protein, 266 aa, Artificial Sequence
  derived and/or modified protein sequence (wt) from Pk(LT33)__ADN94528.1__CSP
MRNFILLAVSSILLVDLLPTHFEHNVDLSRAINVNGVSFNNVDTSSLGAAQVRQSASRGRGLGEKRKEGADKEKKKEKEEEPKKPNENKLKQPEQAAPGAGGEQPAPGAGGERPAPGAGGEQPAPGAGGERPAPGAGGEQPAPAPRREQPAPGPGAGDGARGGNAGAGKGQGQNNQGANVPNEKVVNDYLHKIRSSVTTEWTPCSVTCGNGVRIRRRQNAGNKKAEDLTMDDLEVEACVMDKCAGIFNVVSNSLGLVILLVLALFN

SEQ ID NO: 2809 - protein, 247 aa, Artificial Sequence
  derived and/or modified protein sequence (wt) from Pk(SGEHIWM4-Y09-8)__AFD97222.1__CSP
MKNFILLAVSSILLVDLLPTYFEHNVDLSRAINVNGVSFNSVDTSSLGAAQVRQSASRGRGLGEKPKEGADKEKKKEKEKEEEPKKPNENKLKQPQGNGGAGQAQPQGNGGAGQAQPEGNREAPAQPQGNGGAGQAQPQKNEGGNAGARKGQGQNNQGANAPNEKVVNDYLQKIRSSVTTEWTPCSVTCGNGVRIRRRAHADKKKAEDLTMDDLEVEACVMDKCAGIFNVVSNSLGLVISLVLALFN

SEQ ID NO: 2810 - protein, 239 aa, Artificial Sequence
  derived and/or modified protein sequence (wt) from Pk(PT01)__ADN94512.1__CSP
MRNFILLAVSSILLVDLLPTHFEHNVDLSRAINVNGVSFNNVDTSSLGAAQVRQSASRGRGLGEKRKEGADKEKKKEKEEEPKKPNENKLKQPEQAAPGAGGEQPAPGAGGEQPAPAPRREQPAPAPGAGDGARGGNAGAGKGQGQNNQGANVPNEKVVNDYLHKIRSSVTTEWTPCSVTCGNGVRIRRKAHADKKKAEDLTMDDLEVEACVMDKCAGIFNVVSNSLGLVILLVLALFN

SEQ ID NO: 2811 - protein, 238 aa, Artificial Sequence
  derived and/or modified protein sequence (wt) from Pk(LT53)__ADN94502.1__CSP
MKNFILLAVSSILLVDLLPTHFEHNVDLSRAINVNGVSFNNVDTSSLGAAQVRQSASRGRGLGEKPKEGDDKEKKKEKEKEEEPKNLNENKPKQPNAEGDGAKPKQPNAEGDGANARQPQAEGGGGNARQGGNEGNKQAGKGQGQNNQGANAPNEKVVNDYLQKIRSSVTTEWTPCSVTCGNGVRIRRRAHADKKKAEDLTMDDLEVEACVMDKCAGIFNVVSNSLGLVILLVLALFN

SEQ ID NO: 2812 - protein, 233 aa, Artificial Sequence
  derived and/or modified protein sequence (wt) from Pk(SGEHIWM5-Y09-79)__AFD97229.1__CSP
MKNFILLAVSSILLVDLLPTHFEHNVDLSRAINVNGVSFNNVDTSSLGAAQVRQSASRGRGLGERPKEGADKEKKKEKEKEKEEPKKPNENKLKQPEQPAAGAGGEQPAPAPRREQPAPGAGAGDGARGGNAGAGKGQGQNNQGANVPNEKVVNDYLHKIRSSVTTEWTPCSVTCGNGVRIRRRQNAGNKKAEDLTMDDLEVEACVMDKCAGIFNVVSNSLGLVILLVLALFN

SEQ ID NO: 2813 - protein, 219 aa, Artificial Sequence
  derived and/or modified protein sequence (wt) from Pk(PT01)__ADN94513.1__CSP
MRNFILLAVSSILLVDLLPTHFEHNVDLSRAINVNGVSFNNVDTSSLGAAQVRQSASRGRGLGEKRKEGADKEKKKEKEEEPKKPNENKLKQPEQAAPRREQPAPAPGAGDGARGGNAGAGKGQGQNNQGANVPNEKVVNDYLHKIRSSVTTEWTPCSVTCGNGVRIRRKAHADKKKAEDLTMDDLEVEACVMDKCAGIFNVVSNSLGLVILLVLALFN

SEQ ID NO: 2814 - protein, 429 aa, Artificial Sequence
  derived and/or modified protein sequence (wt) from Pm(408/Cameroon)__CAA05623.1__CSP
MKKLSVLAISSFLIVDFLFPGYHHNSNSTKSRNLSELCYNNVDTKLFNELEVRYSTNQDHFYNYNKTIRLLNENNNEKDGNVTNERKKKPTKAVENKLKQPPGDDDGAGNDAGNDAGNAAGNAAGNAAGNAAGNAAGNDAGNAAGNAAGNAAGNAAGNAAGNDAGNAAGNDAGNAAGNAAGNAAGNAAGNAAGNDAGNAAGNAAGNAAGNAAGNAAGNAAGNAAGNAAGNAAGNAAGNDAGNAAGNAAGNAAGNAAGNAAGNAAGNAAGNAAGNAAGNAAGNAAGNAAGNAAGNAAGNAAGNAAGNAAGNAAGNEKAKNKDNKVDANTNKKDNQEENNDSSNGPSEEHIKNYLESIRNSITEEWSPCSVTCGSGIRTRRKVDAKNKKPAELVLSDLETEICSLDKCSSIFNVVSNSLGIVLVLVLILFH

SEQ ID NO: 2815 - protein, 429 aa, Artificial Sequence
  derived and/or modified protein sequence (wt) from Pm(Uganda 1-CDC)__AAA29557.1__CSP
MKKLSVLAISSFLIVDFLFPGYHHNSNSTKSRNLSELCYNNVDTKLFNELEVRYSTNQDHFYNYNKTIRLLNENNNEKDGNVTNERKKKPTKAVENKLKQPPGDDDGAGNDAGNDAGNDAGNAAGNAAGNAAGNAAGNAAGNAAGNAAGNAAGNAAGNAAGNDAGNAAGNAAGNAAGNAAGNAAGNDAGNAAGNAAGNAAGNAAGNAAGNAAGNAAGNAAGNAAGNAAGNDAGNAAGNAAGNAAGNAAGNAAGNAAGNAAGNAAGNAAGNAAGNAAGNAAGNAAGNAAGNAAGNAAGNAAGNAAGNAAGNAAGNEKAKNKDNKVDANTNKKDNQEENNDSSNGPSEEHIKNYLESIRNSITEEWSPCSVTCGSGIRARRKVGAKNKKPAELVLSDLETEICSLDKCSSIFNVVSNSLGIVLVLVLILFH

SEQ ID NO: 2816 - protein, 389 aa, Artificial Sequence
  derived and/or modified protein sequence (wt) from Pm(UG01)__SCN12386.1__CSP
MKKLSVLAISSFLIVDFLFPGYHHNSNSTKSRNLSELCYNNVDTKLFNELEVRYSTNQDHFYNYNKTIRLLNENNNEKDGNVTNERKKKPTKAVENKLKQPPGDDDGAGNDAGNDAGNAAGNAAGNAAGNAAGNDAGNAAGNAAGNAAGNAAGNAAGNAAGNAAGNAAGNAAGNAAGNAAGNAAGNAAGNAAGNAAGNAAAGNAAGNAAGNAAGAAGNAAGNAAGNAAGNAAGNAAGNAAGNAAGNAAGNAAGNAAGNAAGNAAGNAAGNAAGNEKAKNKDNKVDANTNKKDNQEENNDSSNGPSEEHIKNYLESIRNSITEEWSPCSVTCGSGIRARRKVDAKNKKPAELVLSDLETEICSLDKCSSIFNVVSNSLGIVLVLVLILFH

SEQ ID NO: 2817 - protein, 389 aa, Artificial Sequence; identical to SEQ ID NO: 2816
  derived and/or modified protein sequence (wt) from Pm()__SCN12386.1__CSP

SEQ ID NO: 2818 - protein, 294 aa, Artificial Sequence
  derived and/or modified protein sequence (wt) from Pm(PmlGA01)__SBT79431.1__CSP
MKKLSVLAISSFLIVDFLFPGYHHNSNSTKSRNLSELCYNNVDTKLFNELEVRYSTNQDHFYNYNKTIRLLNENNNAKDGNVTNERKKKPTKAVENKLKQPPGDEEDDAENGEGNERGNGEGNERGNGEGNERGNGEGNERGNGAGNERGNDAGNAAGNAAGNDAGNAAGNAAGNAAGNAAGNDAGNAAGNAAGNAAGNGENNDSSNGPSEEHIKNYLESIRNSITEEWSPCSVTCGNGIRARRKVDAKNKKPAELVLSDLETEICSLDKCSSIFNVVSNSLGIVLVLVLILFH

SEQ ID NO: 2819 - protein, 367 aa, Artificial Sequence
  derived and/or modified protein sequence (wt) from Poc(contig1754)__SBT00176.1__CSP
MRNLAIFAVSAFLFADSRYPVYAHNGNSTEGRKLNELCYNNVDLYNTLFNELDVGSSTNQAFFLNSKKTLRLLNENPKENKKKRKDDKKPVENKLKQGERENDPPAPRGEGNPPAPQGEGNPPAPQGEGNPPAPQGEGNPPAPQGEGNPPAPRGEGNPPAPQGEGNPPAPQGEGNPPAPQGEGNPPAPRGEGNPPAPQGEGNPPAPQGEGNPPAPQGEGNPPAAQGEGNPPAAQGNGNPPAAQGNGNPPAAQGNGNPPAPAGKGKNENQKEKEEKNAANNPPSEDDIKKYIDKIRNDITENWSPCSVTCGFGVRVRRKAGASAKKAQELTLSDLETEICKIENCSSIFNVVSNSLGLVIFLFLVFFH

SEQ ID NO: 2820 - protein, 295 aa, Artificial Sequence
  derived and/or modified protein sequence (wt) from Poc(GH01)__SBT84923.1__CSP
MRNLAIFAVSAFLFADSRYPVYAHNGNSTEGRKLNELCYNNVDLYNTLFNELDVGSSTNQAFFLNSKKTLRLLNENPKENKKKRKDDKKPVENKLKQGERENDPPAPQGEGNPPAPQGEGNPPAPQGEGNPPAPQGEGNPPAPQGEGNPPAAQGEGNPPAAQGNGNPPAAQGNGNPPAAQGNGNPPAPAGKGKNENQKEKEEKNAANNPPSEDDIKKYIDKIRNDITENWSPCSVTCGFGVRVRRKAGASAKKAQELTLSDLETEICKIENCSSIFNVVSNSLGLVIFLFLVFFH

SEQ ID NO: 2821 - protein, 275 aa, Artificial Sequence
  derived and/or modified protein sequence (wt) from Poc(contig251)__SBS83173.1__CSP
MRNLAIFAVSAFLFADSRYPVYAHNGNSTEGRKLNELCYNNVDLYNTLFNELDVGSSTNQAFFLNSKKTLRLLNENPKENKKKRKDDKKPVENKLKQGERENDPPAPRGEGNPPAPQGEGNPPAPQGEGNPPAPQGEGNPPAPQGEGNPPAAQGEGNPPAAQGNPPAPAGKGKNENQKEKEEKNAANNPPSEDDIKKYIDKIRNDITENWSPCSVTCGFGVRVRRKAGASAKKAQELTLSDLETEICKIENCSSIFNVVSNSLGLVIFLFLVFFH

SEQ ID NO: 2822 - protein, 314 aa, Artificial Sequence
  derived and/or modified protein sequence (wt) from Pow(contig93)__SBT35133.1__CSP
MRNLAIFAVSAFLFADSGYPVYAHNGNSMEGRKLNELCYNNVDLYNTLFDGLDVESSTNQAFFLNSKKTLRLLNENPKENKKKRKDDKIPVENKLKQGDRENDPPAPVPQGDPPAPVPQGDPPAAVPQGDPPAPVPQGDPPAPQGDPPAPVPQGDPPAPVPQGDPPAPVPQGDPPAPAPQGDPPAPAPQGDGKPPAPAPQGDGNQPAPGKGKSENQKEKDEKNAANNPPSEDDIKKYIDKIRKDITENWSPCSVTCGLGVRVRRKAGASAKKANELTINDVETEICKIENCSSIFNVVSNSIGLVIFLFLVFFH

SEQ ID NO: 2823 - protein, 296 aa, Artificial Sequence
  derived and/or modified protein sequence (wt) from Pow(contig72)__SBT34702.1__CSP
MRNLAIFAVSAFLFADSGYPVYAHNGNSMEGRKLNELCYNNVDLYNTLFDGLDVESSTNQAFFLNSKKTLRLLNENPKENKKKRKDDKIPVENKLKQGDRENDPPAPVPQGDPPAPVPQGDPPAPVPQGDPPAPVPQGDPPAPQGDPPAPVPQGDPPAPAPQGDPPAPAPQGDGKPPAPAPQGDGNQPAPGKGKSENQKEKDEKNAANNPPSEDDIKKYIDKIRKDITENWSPCSVTCGLGVRVRRKAGASAKKANELTINDVETEICKIENCSSIFNVVSNSIGLVIFLFLVFFH

SEQ ID NO: 2824 - protein, 339 aa, Artificial Sequence
  derived and/or modified protein sequence (wt) from Po(PowCR01)__SBT72933.1__CSP
MRNLAIFAVSAFLFADSGYPVYAHNGNSMEGRKLNELCYNNVDLYNTLFDGLDVESSTNQAFFLNSKKTLRLLNENPKENKKKRKDDKIPVENKLKQGDRENDPPAPVPQGDPPAPVPQGDPPAAVPQGDPPAPVPQGDPPAPQGDPPAPVPQGDPPAPVPQGDPPAPVPQGNPPAPVPQGDPPAPQGDPPAPVPQGDPPAPAPQGDPPAPAPQGDGKPPAPAPQGDGNQPAPGKGKSENQKEKDEKNAANNPPSEDDIKKYIDKIRKDITENWSPCSVTCGLGVRVRRKAGASAKKANELTINDVETEICKIENCSSIFNVVSNSIGLVIFLFLVFFH

SEQ ID NO: 2825 - protein, 387 aa, Artificial Sequence
  derived and/or modified protein sequence (wt) from Pv(Pt02.1)__ADB92551.1__CSP
MKNFILLAVSSILLVDLFPTHCGHNVDLSKAINLNGVGFNNVDASSLGAAHVGQSASRGRGLGENPDDEEGDAKKKKDGKKAEPKNPRENKLKQPEDGAGDQPGANGAGNQPGANGAGNQPGANGAGNQPGANGAGNQPGANGAGNQPGANGAGNQPGANGAGDQPGANGAGNQPGANGAGNQPGANGAGDQPGANGAGNQPGANGAGDQPGANGAGNQPGANGAGNQPGANGAGNQPGANGAGNQPGANGAGGQAAGGNAANKKAGDAGAGGQAAGGNAANKKAGDAGAGQGQNNEGANAPNEKSVKEYLDKVRATVGTEWTPCSVTCGVGVRVRRRVNAANKKPEDLTLNDLETDVCTMDKCAGIFNVVSNSLGLVILLVLALFN

SEQ ID NO: 2826 - protein, 377 aa, Artificial Sequence
  derived and/or modified protein sequence (wt) from Pv(Salvador I (Sal-1))__XP_001613068.1__CSP
MKNFILLAVSSILLVDLFPTHCGHNVDLSKAINLNGVNFNNVDASSLGAAHVGQSASRGRGLGENPDDEEGDAKKKKDGKKAEPKNPRENKLKQPGDRADGQPAGDRADGQPAGDRADGQPAGDRADGQPAGDRAAGQPAGDRADGQPAGDRADGQPAGDRADGQPAGDRADGQPAGDRAAGQPAGDRAAGQPAGDRADGQPAGDRAAGQPAGDRADGQPAGDRAAGQPAGDRADGQPAGDRAAGQPAGDRAAGQPAGDRAAGQAAGDRAAGQAAGGNAGGQGQNNEGANAPNEKSVKEYLDKVRATVGTEWTPCSVTCGVGVRVRRRVNAANKKPEDLTLNDLETDVCTMDKCAGIFNVVSNSLGLVILLVLALFN

SEQ ID NO: 2827 - protein, 363 aa, Artificial Sequence
  derived and/or modified protein sequence (wt) from Pv(P01)__SGX77278.1__CSP
MKNFILLAVSSILLVDLFPTHCGHNVDLSKAINLNGVNFNNVDASSLGAAHVGQSASRGRGLGENPDDEEGDAKKKKDGKKAEPKNPRENKLKQPAGDRADGQPAGDRADGQPAGDRADGQPAGDRAAGQPAGDRADGQPAGDRAAGQPAGDRADGQPAGDRAAGQPAGDRADGQPAGDRAAGQPAGDRAAGQPAGDRADGQPAGDRAAGQPAGDRADGQPAGDRAAGQPAGDRAAGQPAGNGAGGQAAGGNAGGNAGGNAGGNAGGQGQNNEGANAPNEKSVKEYLDKVRATVGTEWTPCSVTCGVGVRVRRRVNAANKKPEDLTLNDLETDVCTMDKCAGIFNVVSNSLGLVILLVLALFN

SEQ ID NO: 2828 - protein, 395 aa, Artificial Sequence
  derived and/or modified protein sequence (wt) from Pv(Cam22)__AHL69650.1__CSP
MKNFILLAVSSILLVDLFPTHCGHNVDLSKAINLNGVGFNNVDASSLGAAHVGQSASRGRGLGENPDDEEGDAKKKKDGKKAEPKNPRENKLKQPEDGAGNQPGANGAGNQPGANGAGNQPGANGAGNQPGANGAGNQPGANGAGNQPGANGAGNQPGANGAGNQPGANGADDQPGANGAGNQPGANGAGNQPGANGAGNQPGANGAGDQPGANGAGNQPGANGAGDQPGANGAGNQPGANGAGNQPGANGAGNQPGANGAGNQPGANGAGNQPGANGAGGQAAGGNAANKKAGDAGAGQGQNNEGANAPNEKSVKEYLDKVRATVGTEWTPCSVTCGVGVRVRRRVNAANKKPEDLTLNDLETDVCTMDKCAGIFNVVSNSLGLVILLVLALFN

SEQ ID NO: 2829 - protein, 395 aa, Artificial Sequence
  derived and/or modified protein sequence (wt) from Pv(Cam29)__AGN05257.1__CSP
MKNFILLAVSSILLVDLFPTHCGHNVDLSKAINLNGVGFNNVDASSLGAAHVGQSASRGRGLGENPDDEEGDAKKKKDGKKAEPKNPRENKLKQPEDGEGNQPGANGAGNQPGANGAGNQPGANGAGNQPGANGAGNQPGANGAGNQPGANGAGNQPGANGADDQPGANGAGNQPGANGAGNQPGANGAGNQPGANGAGDQPGANGAGNQPGANGAGNQPGANGAGNQPGANGAGNQPGANGAGNQPGANGAGNQPGANGAGNQPGANGAGNQPGANGAGGQAAGGNAANKKAGDAGAGQGQNNEGANAPNEKSVKEYLDKVRATVGTEWTPCSVTCGVGVRVRRRVNAANKKPEDLTLNDLETDVCTMDKCAGIFNVVSNSLGLVILLVLALFN

SEQ ID NO: 2830 - protein, 395 aa, Artificial Sequence
  derived and/or modified protein sequence (wt) from Pv(Cam9)__AGN05240.1__CSP
MKNFILLAVSSILLVDLFPTHCGHNVDLSKAINLNGVGFNNVDASSLGAAHVGQSASRGRGLGENPDDEEGDAKKKKDGKKAEPKNPRENKLKQPEDGAGNQPGANGAGNQPGANGAGNQPGANGAGNQPGANGAGNQPGANGAGNQPGANGAGNQPGANGAGNQPGANGADDQPGANGAGNQPGANGAGNQPGANGAGNQPGANGAGDQPGANGAGNQPGANGAGDQPGANGAGNQPGANGAGNQPGANEAGNQPGANGAGNQPGANGAGNQPGANGAGGQAAGGNAANKKAGDAGAGQGQNNEGANAPNEKSVKEYLDKVRATVGTEWTPCSVTCGVGVRVRRRVNAANKKPEDLTLNDLETDVCTMDKCAGIFNVVSNSLGLVILLVLALFN

SEQ ID NO: 2831 - protein, 393 aa, Artificial Sequence
  derived and/or modified protein sequence (wt) from Pv(Ca05)__ADB92533.1__CSP
MKNFILLAVSSILLVDLFPTHCGHNVDLSKAINLNGVGFNNVDASSLGAAHVGQSASRGRGLGENPDDEEGDAKKKKDGKKAEPKNPRENKLKQPEDGAGDQPGANGAGNQPGANGAGNQPGANGAGNQPGANGAGNQPGANGAGNQPGANGAGNQPGANGAGNQPGANGADDQPGANGAGNQPGANGAGNQPGANGAGNQPGANGAGDQPGANGAGNQPGANGAGDQPGANGAGNQPGANGAGNQPGANGAGNQPGANGAGNQPGANGAGGQAAGGNAANKKAGDAGGNAGGNAGGQGQNNEGANAPNEKSVKEYLDKVRATVGTEWTPCSVTCGVGVRVRRRVNAANKKPEDLTLNDLETDVCTMDKCAGIFNVVSNSLGLVILLVLALFN

SEQ ID NO: 2832 - protein, 393 aa, Artificial Sequence
  derived and/or modified protein sequence (wt) from Pv(Ch05)__ADB92538.1__CSP
MKNFILLAVSSILLVDLFPTHCGHNVDLSKAINLNGVGFNNVDASSLGAAHVGQSASRGRGLGENPDDEEGDAKKKKDGKKAEPKNPRENKLKQPEDGAGDQPGANGAGNQPGANGAGNQPGANGAGNQPGANGAGNQPGANGAGNQPGANGAGNQPGANGAGDQPGANGADDQPGANGAGNQPGANGAGNQPGANGAGDQPGANGAGDQPGANGAGNQPGANGAGDQPGANGAGNQPGANGAGNQPGANGAGNQPGANGAGNQPGANGAGGQAAGGNAANKKAGDAGGNAGGNAGGQGQNNEGANAPNEKSVKEYLDKVRATVGTEWTPCSVTCGVGVRVRRRVNAANKKPEDLTLNDLETDVCTMDKCAGIFNVVSNSLGLVILLVLALFN

SEQ ID NO: 2833 - protein, 390 aa, Artificial Sequence
  derived and/or modified protein sequence (wt) from Pv(Cam16)__AHL69649.1__CSP
MKNFILLAVSSILLVDLFPTHCGHNVDLSKAINLNGVGFNNVDASSLGAAHVGQSASRGRGLGENPDDEEGDAKKKKDGKKAEPKNPRENKLKQPEDGAGNQPGANGAGNQPGANGAGNQPGANGAGNQPGANGAGNQPGANGAGNQPGANGADDQPGANGAGNQPGANGAGNQPGANGAGNQPGANGAGNQPGANGAGNQPGANGAGDQPGANGAGNQPGANGAGDQPGANGAGNQPGANGAGNQPGANEAGNQPGANGAGNQPGANGAGNQPGANGAGGQAAGGNAGGNAGGQGQNNEGANAPNEKSVKEYLDKVRATVGTEWTPCSVTCGVGVRVRRRVNAANKKPEDLTLNDLETDVCTMDKCAGIFNVVSNSLGLVILLVLALFN

SEQ ID NO: 2834 - protein, 389 aa, Artificial Sequence
  derived and/or modified protein sequence (wt) from Pv(Cam26)__AGN05254.1__CSP
MKNFILLAVSSILLVDLFPTHCGHNVDLSKAINLNGVNFNNVDASSLGAAHVGQSASRGRGLGENPDDEEGDAKKKKDGKKAEPKNPRENKLKQPGDRADGQPAGDRADGQPAGDRADGQPAGDRAAGQPAGDRADGQPAGDRAAGQPAGDRAAGQPAGDRADGQPAGDRAAGQPAGDRAAGQPAGDRADGQPAGDRAAGQPAGDRADGQPAGDRAAGQPAGDRAAGQPAGDRADGQPAGDRAAGQPAGDRAAGQPAGDRAAGQPAGNGAGGQAAGGNAANKKAEDAGGNAGGQGQNNEGANAPNEKSVKEYLDKVRATVGTEWTPCSVTCGVGVRVRRRVNAANKKPEDLTLNDIETDVCTMDKCAGIFNVVSNSLGLVILLVLALFN

SEQ ID NO: 2835 - protein, 387 aa, Artificial Sequence
  derived and/or modified protein sequence (wt) from Pv(Ch01)__ADB92534.1__CSP
MKNFILLAVSSILLVDLFPTHCGHNVDLSKAINLNGVGFNNVDASSLGAAHVGQSASRGRGLGENPDDEEGDAKKKKDGKKAEPKNPRENKLKQPEDGAGDQPGANGAGNQPGANGAGNQPGANGAGNQPGANGAGNQPGANGAGNQPGANGAGNQPGANGAGNQPGANGADDQPGANGAGNQPGANGAGDQPGANGAGNQPGANGAGDQPGANGAGNQPGANGAGNQPGANGAGNQPGANGAGNQPGANGAGGQAAGGNAANKKAGDAGAGGQAAGGNAANKKAGDAGAGQGQNNEGANAPNEKSVKEYLDKVRATVGTEWTPCSVTCGVGVRVRRRVNAANKKPEDLTLNDLETDVCTMDKCAGIFNVVSNSLGLVILLVLALFN

SEQ ID NO: 2836 - protein, 387 aa, Artificial Sequence
  derived and/or modified protein sequence (wt) from Pv(Nr04)__ADB92542.1__CSP
MKNFILLAVSSILLVDLFPTHCGHNVDLSKAINLNGVGFNNVDASSLGAAHVGQSASRGRGLGENPDDEEGDAKKKKDGKKAEPKNPRENKLKQPEDGAGDQPGANGAGNQPGANGAGNQPGANGAGNQPGANGAGNQPGANGAGNQPGANGAGNQPGANGAGDQPGANGADNQPGANGAGNQPGANGAGNQPGANGAGNQPGANGAGDQPGANGAGNQPGANGAGDQPGANGAGNQPGANGAGNQPGANGAGGQAAGGNAANKKAGDAGAGGQAAGGNAANKKAGDAGAGQGQNNEGANAPNEKSVKEYLDKVRATVGTEWTPCSVTCGVGVRVRRRVNAANKKPEDLTLNDLETDVCTMDKCAGIFNVVSNSLGLVILLVLALFN

SEQ ID NO: 2837 - protein, 387 aa, Artificial Sequence
  derived and/or modified protein sequence (wt) from Pv(Pt03)__ADB92553.1__CSP
MKNFILLAVSSILLVDLFPTHCGHNVDLSKAINLNGVGFNNVDASSLGAAHVGQSASRGRGLGENPDDEEGDAKKKKDGKKAEPKNPRENKLKQPEDGAGDQPGANGAGNQPGANGAGNQPGANGAGNQPGANGAGDQPGANGAGNQPGANGAGDQPGANGAGNQPGANGAGNQPGANGAGNQPGANGAGNQPGANGAGNQPGANGAGDQPGANGAGNQPGANGAGNQPGANGAGNQPGANGAGNQPGANGAGGQAAGGNAANKKAGDAGAGGQAAGGNAANKKAGDAGAGQGQNNEGANAPNEKSVKEYLDKVRATVGTEWTPCSVTCGVGVRVRRRVNAANKKPEDLTLNDLETDVCTMDKCAGIFNVVSNSLGLVILLVLALFN

SEQ ID NO: 2838 - protein, 387 aa, Artificial Sequence
  derived and/or modified protein sequence (wt) from Pv(Vc03)__ADB92546.1__CSP
MKNFILLAVSSILLVDLFPTHCGHNVDLSKAINLNGVGFNNVDASSLGAAHVGQSASRGRGLGENPDDEEGDAKKKKDGKKAEPKNPRENKLKQPEDGAGDQPGANGAGNQPGANGAGNQPGANGAGNQPGANGAGNQPGANGAGNQPGANGAGNQPGANGAGDQPGANGADDQPGANGAGNQPGANGAGNQPGANGAGNQPGANGAGDQPGANGAGNQPGANGAGNQPGANGAGNQPGANGAGNQPGANGAGGQAAGGNAANKKAGDAGAGGQAAGGNAANKKAGDAGAGQGQNNEGANAPNEKSVKEYLDKVRATVGTEWTPCSVTCGVGVRVRRRVNAANKKPEDLTLNDLETDVCTMDKCAGIFNVVSNSLGLVILLVLALFN

SEQ ID NO: 2839 - protein, 387 aa, Artificial Sequence
  derived and/or modified protein sequence (wt) from Pv(Vc04)__ADB92547.1__CSP
MKNFILLAVSSILLVDLFPTHCGHNVDLSKAINLNGVGFNNVDASSLGAAHVGQSASRGRGLGENPDDEEGDAKKKKDGKKAEPKNPRENKLKQPEDGAGDQPGANGAGNQPGANGAGNQPGANGAGNQPGANGAGNQPGANGAGNQPGANGAGNQPGANGADDQPGANGAGDQPGANGAGNQPGANGAGNQPGANGAGDQPGANGAGDQPGANGAGNQPGANGAGDQPGANGAGNQPGANGAGNQPGANGAGGQAAGGNAANKKAGDAGAGGQAAGGNAANKKAGDAGAGQGQNNEGANAPNEKSVKEYLDKVRATVGTEWTPCSVTCGVGVRVRRRVNAANKKPEDLTLNDLETDVCTMDKCAGIFNVVSNSLGLVILLVLALFN

SEQ ID NO: 2840 - protein, 387 aa, Artificial Sequence
  derived and/or modified protein sequence (wt) from Pv(Vc05)__ADB92548.1__CSP
MKNFILLAVSSILLVDLFPTHCGHNVDLSKAINLNGVGFNNVDASSLGAAHVGQSASRGRGLGENPDDEEGDAKKKKDGKKAEPKNPRENKLKQPEDGAGDQPGANGAGNQPGANGAGNQPGANGAGNQPGANGAGNQPGANGAGNQPGANGAGNQPGANGAGDQPGANGAGNQPGANGAGNQPGANGAGNQPGANGAGDQPGANGAGDQPGANGAGNQPGANGAGNQPGANGAGNQPGANGAGNQPGANGAGGQAAGGNAANKKAGDAGAGGQAAGGNAANKKAGDAGAGQGQNNEGANAPNEKSVKEYLDKVRATVGTEWTPCSVTCGVGVRVRRRVNAANKKPEDLTLNDLETDVCTMDKCAGIFNVVSNSLGLVILLVLALFN

SEQ ID NO: 2841 - protein, 386 aa, Artificial Sequence
  derived and/or modified protein sequence (wt) from Pv(Ca03)__ADB92531.1__CSP
MKNFILLAVSSILLVDLFPTHCGHNVDLSKAINLNGVGFNNVDASSLGAAHVGQSASRGRGLGENPDDEEGDAKKKKDGKKAEPKNPRENKLKQPEDGAGDQPGANGAGNQPGANGAGNQPGANGAGNQPGANGAGNQPGANGAGNQPGANGAGNQPGANGADDQPGANGADDQPGANGAGNQPGANGAGNQPGANGAGDQPGANGAGDQPGANGAGNQPGANGAGDQPGANGAGNQPGANGAGNQPGANGAGNQPGANGAGNQPGANGAGGQAAGGNAANKKAGDAGGGQGQNNEGANAPNEKSVKEYLDKVRATVGTEWTPCSVTCGVGVRVRRRVNAANKKPEDLTLNDLETDVCTMDKCAGIFNVVSNSLGLVILLVLALFN

SEQ ID NO: 2842 - protein, 386 aa, Artificial Sequence
  derived and/or modified protein sequence (wt) from Pv(Cam5)__AHL69647.1__CSP
MKNFILLAVSSILLVDLFPTHCGHNVDLSKAINLNGVGFNNVDASSLGAAHVGQSASRGRGLGENPDDEEGDAKKKKDGKKAEPKNPRENKLKQPEDGAGNQPGANGAGNQPGANGAGNQPGANGAGNQPGANGAGNQPGANGAGNQPGANGAGNQPGANGADDQPGANGAGNQPGANGAGNQPGANGAGNQPGANGAGDQPGANGAGNQPGANGAGDQPGANGAGNQPGANGAGNQPGANEAGNQPGANGAGNQPGANGAGNQPGANGAGGQAAGGNAANKKAGDAGAGQGQNNEGANAPNEKSVKEYLDKVRATVGTEWTPCSVTCGVGVRVRRRVNAANKKPEDLTLNDLETDVCTMDKCAGIFNVVSNSLGLVILLVLALFN

SEQ ID NO: 2843 - protein, 386 aa, Artificial Sequence
  derived and/or modified protein sequence (wt) from Pv(Cam5)__AGN05236.2__CSP
MKNFILLAVSSILLVDLFPTHCGHNVDLSKAINLNGVNFNNVDASSLGAAHVGQSASRGRGLGENPDDEEGDAKKKKDGKKAEPKNPRENKLKQPGDRADGQPAGDGAAGQPAGDGAAGQPAGDRAAGQPAGDRAAGQPAGDGAAGQPAGDGAAGQPAGDRAAGQPAGDRAAGQPAGDRADGQPAGDRAAGQPAGDRAAGQPAGDRADGQPAGDRAAGQPAGDRAAGQPAGDRAAGQPAGDRADGQPAGDRAAGQPAGDRAAGQPAGDRAAGQPAGNGAGGQAAGGNAGGQGQNNEGANAPNEKSVKEYLDKVRATVGTEWTPCSVTCGVGVRVRRRVNAANKKPEDLTLNDLETDVCTMDKCAGIFNVVSNSLGLVILLVLALFN

SEQ ID NO: 2844 - protein, 386 aa, Artificial Sequence
  derived and/or modified protein sequence (wt) from Pv(Cam7)__AGN05238.1__CSP
MKNFILLAVSSILLVDLFPTHCGHNVDLSKAINLNGVGFNNVDASSLGAAHVGQSASRGRGLGENPDDEEGDAKKKKDGKKAEPKNPRENKLKQPEDGAGNQPGANGAGNQPGANGAGNQPGANGAGNQPGANGAGNQPGANGAGNQPGANGAGNQPGANGADDQPGANGAGNQPGANGAGNQPGANGAGNQPGANGAGNQPGANGAGDQPGANGAGNQPGANGAGDQPGANGAGNQPGANEAGNQPGANGAGNQPGANGAGNQPGANGAGGQAAGGNAANKKAGDAGAGQGQNNEGANAPNEKSVKEYLDKVRATVGTEWTPCSVTCGVGVRVRRRVNAANKKPEDLTLNDLETDVCTMDKCAGIFNVVSNSLGLVILLVLALFN

SEQ ID NO: 2845 - protein, 386 aa, Artificial Sequence
  derived and/or modified protein sequence (wt) from Pv(CSP27VK247)__ANS71607.1__CSP
MKNFILLAVSSILLVDLFPTHCGHNVDLSKAINLNGVGFNNVDASSLGAAHVGQSASRGRGLGENPDDEEGDAKKKKDGKKAEPKNPRENKLKQPEDGAGNQPGANGAGDQPGANGAGNQPGANGAGNQPGANGAGNQPGANGAGNQPGANGAGNQPGANGAGDQPGANGAGNQPGANGAGNQPGANGAGNQPGANGAGDQPGANGAGNQPGANGAGDQPGANGAGNQPGANGAGNQPGANGAGNQPGANGAGNQPGANGAGNQPGANGAGGQAAGGNAANKKAGDAGAGQGQNNEGANAPNEKSVKEYLDKVRTTVGTEWTPCSVTCGVGVRVRRRVNAANKKPEDLTLNDLETDVCTMDKCAGIFNVVSNSLGLVILLVLALFN

SEQ ID NO: 2846 - protein, 386 aa, Artificial Sequence
  derived and/or modified protein sequence (wt) from Pv(CSP38VK247)__ANS71618.1__CSP
MKNFILLAVSSILLVDLFPTHCGHNVDLSKAINLNGVNFNNVDASSLGAAHVGQSASRGRGLGENPDDEEGDAKKKKDGKKAEPKNPRENKLKQPEDGAGDQPGANGAGNQPGANGAGNQPGANGAGNQPGANGAGNQPGANGAGNQPGANGAGNQPGANGAGDQPGANGAGNQPGANGAGDQPGANGAGNQPGANGAGNQPGANGAGDQPGANGAGNQPGANGAGDQPGANGAGNQPGANGAGNQPGANGAGNQPGANGAGNQPGANGAGGQAAGGNAANKKAGDAGAGQGQNNEGANAPNEKSVKEYLDKVRATVGTEWTPCSVTCGVGVRVRRRVNAANKKPEDLTLNDIETDVCTMDKCAGIFNVVSNSLGLVILLVLALFN

SEQ ID NO: 2847 - protein, 386 aa, Artificial Sequence
  derived and/or modified protein sequence (wt) from Pv(CSP48VK247)__ANS71628.1__CSP
MKNFILLAVSSILLVDLFPTHCGHNVDLSKAINLNGVGFNNVDASSLGAAHVGQSASRGRGLGENPDDEEGDAKKKKDGKKAEPKNPRENKLKQPEDGAGNQPGANGAGDQPGANGAGNQPGANGAGNQPGANGAGNQPGANGAGNQPGANGAGNQPGANGAGDQPGANGAGNQPGANGAGNQPGANGAGNQPGANGAGDQPGANGAGNQPGANGAGDQPGANGAGNQPGANGAGNQPGANGAGNQPGANGAGNQPGANGAGNQPGANGAGGQAAGGNAANKKAGDAGAGQGQNNEGANAPNEKSVKEYLDKVRATVGTEWTPCSVTCGVGVRVRRRVNAANKKPEDLTLNDLETDVCTMDKCAGIFNVVSNSLGLVILLVLALFN

SEQ ID NO: 2848 - protein, 386 aa, Artificial Sequence
  derived and/or modified protein sequence (wt) from Pv(Nr01)__ADB92539.1__CSP
MKNFILLAVSSILLVDLFPTHCGHNVDLSKAINLNGVGFNNVDASSLGAAHVGQSASRGRGLGENPDDEEGDAKKKKDGKKAEPKNPRENKLKQPEDGAGDQPGANGAGNQPGANGAGNQPGANGAGNQPGANGAGNQPGANGAGNQPGANGAGNQPGANGAGDQPGANGADDQPGANGAGNQPGANGAGNQPGANGAGDQPGANGAGDQPGANGAGNQPGANGAGDQPGANGAGNQPGANGAGNQPGANGAGGQPGANGAGNQPGANGAGGQAAGGNAANKKAGDAGAGQGQNNEGANAPNEKSVKEYLDKVRATVGTEWTPCSVTCGVGVRVRRRVNAANKKPEDLTLNDLETDVCTMDKCAGIFNVVSNSLGLVILLVLALFN

SEQ ID NO: 2849 - protein, 386 aa, Artificial Sequence
  derived and/or modified protein sequence (wt) from Pv(Nr02)__ADB92540.1__CSP
MKNFILLAVSSILLVDLFPTHCGHNVDLSKAINLNGVGFNNVDASSLGAAHVGQSASRGRGLGENPDDEEGDAKKKKDGKKAEPKNPRENKLKQPEDGAGDQPGANGAGNQPGANGAGNQPGANGAGNQPGANGAGNQPGANGAGNQPGANGAGNQPGANGAGDQPGANGAGDQPGANGAGNQPGANGAGNQPGANGAGDQPGANGAGDQPGANGAGNQPGANGAGDQPGANGAGNQPGANGAGNQPGANGAGNQPGANGAGKQPGANGAGGQAAGGNAANKKAGDAGAGQGQNNEGANAPNEKSVKEYLDKVRATVGTEWTPCSVTCGVGVRVRRRVNAANKKPEDLTLNDLETDVCTMDKCAGIFNVVSNSLGLVILLVLALFN

SEQ ID NO: 2850 - protein, 386 aa, Artificial Sequence
  derived and/or modified protein sequence (wt) from Pv(Nr05)__ADB92543.1__CSP
MKNFILLAVSSILLVDLFPTHCGHNVDLSKAINLNGVGFNNVDASSLGAAHVGQSASRGRGLGENPDDEEGDAKKKKDGKKAEPKNPRENKLKQPEDGAGDQPGANGAGNQPGANGAGNQPGANGAGNQPGANGAGNQPGANGAGNQPGANGAGNQPGANGAGNQPGANGADDQPGANGAGNQPGANGAGNQPGANGAGNQPGANGAGDQPGANGAGNQPGANGAGDQPGANGAGNQPGANGAGNQPGANGAGNQPGANGAGNQPGANGAGGQAAGGNAANKKAGDAGAGQGQNNEGANAPNEKSVKEYLDKVRATVGTEWTPCSVTCGVGVRVRRRVNAANKKPEDLTLNDLETDVCTMDKCAGIFNVVSNSLGLVILLVLALFN

SEQ ID NO: 2851 - protein, 386 aa, Artificial Sequence
  derived and/or modified protein sequence (wt) from Pv(Vc01)__ADB92544.1__CSP
MKNFILLAVSSILLVDLFPTHCGHNVDLSKAINLNGVGFNNVDASSLGAAHVGQSASRGRGLGENPDDEEGDAKKKKDGKKAEPKNPRENKLKQPEDGAGDQPGANGAGNQPGANGAGNQPGANGAGNQPGANGAGNQPGANGAGNQPGANGAGNQPGANGAGNQPGANGADDQPGANGAGNQPGANGAGNQPGANGAGNQPGANGAGDQPGANGAGNQPGANGAGDQPGANGAGNQPGANGAGNQPGANGAGNQPGANGAGNQPGANGAGGQAAGGNAANKKAGDAGGGQGQNNEGANAPNEKSVKEYLDKVRATVGTEWTPCSVTCGVGVRVRRRVNAANKKPEDLTLNDLETDVCTMDKCAGIFNVVSNSLGLVILLVLALFN

SEQ ID NO: 2852 - protein, 386 aa, Artificial Sequence
  derived and/or modified protein sequence (wt) from Pv(Vc02)__ADB92545.1__CSP
MKNFILLAVSSILLVDLFPTHCGHNVDLSKAINLNGVGFNNVDASSLGAAHVGQSASRGRGLGENPDDEEGDAKKKKDGKKAEPKNPRENKLKQPEDGAGDQPGANGAGNQPGANGAGNQPGANGAGNQPGANGAGNQPGANGAGNQPGANGAGNQPGANGAGDQPGANGADDQPGANGAGNQPGANGAGNQPGANGAGDQPGANGAGDQPGANGAGNQPGANGAGDQPGANGAGNQPGANGAGNQPGANGAGNQPGANGAGNQPGANGAGGQAAGGNAANKKAGDAGAGQGQNNEGANAPNEKSVKEYLDKVRATVGTEWTPCSVTCGVGVRVRRRVNAANKKPEDLTLNDLETDVCTMDKCAGIFNVVSNSLGLVILLVLALFN

SEQ ID NO: 2853 - protein, 385 aa, Artificial Sequence
  derived and/or modified protein sequence (wt) from Pv(Cam46)__AHL69652.1__CSP
MKNFILLAVSSILLVDLFPTHCGHNVDLSKAINLNGVGFNNVDASSLGAAHVGQSASRGRGLGENPDDEEGDAKKKKDGKKAEPKNPRENKLKQPEDGAGNQPGANGAGNQPGANGAGNQPGANGADDQPGANGAGNQPGANGAGNQPGANGAGNQPGANGAGNQPGANGADDQPGANGAGNQPGANGAGNQPGANGAGNQPGANGAGDQPGANGAGNQPGANGAGNQPGANGAGNQPGANGAGNQPGANGAGNQPGANGAGNQPGANGAGGQAAGGNAGGNAGGNAGGQGQNNEGANAPNEKSVKEYLDKVRATVGTEWTPCSVTCGVGVRVRRRVNAANKKPEDLTLNDLETDVCTMDKCAGIFNVVSNSLGLVILLVLALFN

SEQ ID NO: 2854 - protein, 380 aa, Artificial Sequence
  derived and/or modified protein sequence (wt) from Pv(Cam20)__AGN05250.1__CSP
MKNFILLAVSSILLVDLFPTHCGHNVDLSKAINLNGVNFNNVDASSLGAAHVGQSASRGRGLGENPDDEEGDAKKKKDGKKAEPKNPRENKLKQPGDRADGQPAGDRADGQPAGDRADGQPAGDRAAGQPAGDRADGQPAGDRAAGQPAGDRADGQPAGDRAAGQPAGDRADGQPAGDRAAGQPAGDRADGQPAGDRAAGQPAGDRAAGQPAGDRAAGQPAGDRADGQPAGDRAAGQPAGDRAAGQPAGDRAAGQPAGNGAGGQAAGGNAANKKAEDAGGNAGGQGQNNEGANAPNEKSVKEYLDKVRATVGTEWTPCSVTCGVGVRVRRRVNAANKKPEDLTLNDIETDVCTMDKCAGIFNVVSNSLGLVILLVLALFN

SEQ ID NO: 2855 - protein, 380 aa, Artificial Sequence
  derived and/or modified protein sequence (wt) from Pv(Cam22)__AGN05252.1__CSP
MKNFILLAVSSILLVDLFPTHCGHNVDLSKAINLNGVNFNNVDASSLGAAHVGQSASRGRGLGENPDDEEGDAKKKKDGKKAEPKNPRENKLKQPGDRADGQPAGDRADGQPAGDRADGQPAGDRAAGQPAGDRADGQPAGDRAAGQPAGDRADGQPAGDRAAGQPAGDRAAGQPAGDRADGQPAGDRAAGQPAGDRADGQPAGDRAAGQPAGDRAAGQPAGDRADGQPAGDRAAGQPAGDRAAGQPAGDRAAGQPAGNGAGGQAAGGNAANKKAEDAGGNAGGQGQNNEGANAPNEKSVKEYLDKVRATVGTEWTPCSVTCGVGVRVRRRVNAANKKPEDLTLNDIETDVCTMDKCAGIFNVVSNSLGLVILLVLALFN

SEQ ID NO: 2856 - protein, 380 aa, Artificial Sequence
  derived and/or modified protein sequence (wt) from Pv(Cam36)__AHL69651.1__CSP
MKNFILLAVSSILLVDLFPTHCGHNVDLSKAINLNGVNFNNVDASSLGAAHVGQSASRGRGLGENPDDEEGDAKKKKDGKKAEPKNPRENKLKQPAGDGAAVQPAGDGAAVQPAGDGADGQPAGDGAAVQPAGDGAAGQPAGDRAAGQPAGNRAAGQPAGDRADGQPAGDRAAGQPAGDRAAGQPAGDRADGQPAGDRAAGQPAGDRAAGQPAGDRAAGQPAGDRADGQPAGDRAAGQPAGDRAAGQPAGDRAAGQAAGGNAGGNAGGNAGGNAGGNAGGNAGGQGQNNEGANAPNEKSVKEYLDKVRATVGTEWTPCSVTCGVGVRVRRRVNAANKKPEDLTLNDLETDVCTMDKCAGIFNVVSNSLGLVILLVLALFN

SEQ ID NO: 2857 - protein, 378 aa, Artificial Sequence
  derived and/or modified protein sequence (wt) from Pv(Pt01.7)__ADB92550.1__CSP
MKNFILLAVSSILLVDLFPTHCGHNVDLSKAINLNGVGFNNVDASSLGAAHVGQSASRGRGLGENPDDEEGDAKKKKDGKKAEPKNPRENKLKQPEDGAGDQPGANGAGNQPGANGAGNQPGANGAGNQPGANGAGNQPGANGADDQPGANGAGNQPGANGAGNQPGANGAGNQPGANGAGDQPGANGAGNQPGANGAGDQPGANGAGNQPGANGAGNQPGANGAGNQPGANGAGNQPGANGAGGQAAGGNAANKKAGDAGAGGQAAGGNAANKKAGDAGAGQGQNNEGANAPNEKSVKEYLDKVRATVGTEWTPCSVTCGVGVRVRRRVNAANKKPEDLTLNDLETDVCTMDKCAGIFNVVSNSLGLVILLVLALFN

SEQ ID NO: 2858 - protein, 377 aa, Artificial Sequence
  derived and/or modified protein sequence (wt) from Pv(Cam39)__AGN05267.1__CSP
MKNFILLAVSSILLVDLFPTHCGHNVDLSKAINLNGVGFNNVDASSLGAAHVGQSASRGRGLGENPDDEEGDAKKKKDGKKAEPKNPRENKLKQPAGDRADGQPAGDRADGQPAGDRADGQPAGDRAAGQPAGDRADGQPAGDRAAGQPAGDRADGQPAGDRAAGQPAGDRADGQPAGDRAAGQPAGDRAAGQPAGDRAAGQPAGDRADGQPAGDRAAGQPAGDRADGQPAGDRAAGQPAGDRAAGQPAGDRAAGQPAGNGAGGQAAGGNAGGNAGGNAGGQGQNNEGANAPNEKSVKEYLDKVRATVGTEWTPCSVTCGVGVRVRRRVNAANKKPEDLTLNDLETDVCTMDKCAGIFNVVSNSLGLVILLVLALFN

SEQ ID NO: 2859 - protein, 377 aa, Artificial Sequence
  derived and/or modified protein sequence (wt) from Pv(Nr03)__ADB92541.1__CSP
MKNFILLAVSSILLVDLFPTHCGHNVDLSKAINLNGVNFNNVDASSLGAAHVGQSASRGRGLGENPDDEEGDAKKKKDGKKAEPKNPRENKLKQPGDRADGQPAGDRADGQPAGDRADGQPAGDRADGQPAGDRADGQPAGDRADGQPAGDRADGQPAGDRADGQPAGDRADGQPAGDRADGQPAGDRADGQPAGDRADGQPAGDRADGQPAGDRADGQPAGDRADGQPAGDRADGQPAGDRAAGQPAGDRAAGQPAGDRAAGQPAGNGAGGQAAGGNAGGQGQNNEGANAPNEKSVKEYLDKVRATVGTEWTPCSVTCGVGVRVRRRVNAANKKPEDLTLNDLETDVCTMDKCAGIFNVVSNSLGLVILLVLALFN

SEQ ID NO: 2860 - protein, 377 aa, Artificial Sequence
  derived and/or modified protein sequence (wt) from Pv(Pt04.1)__ADB92554.1__CSP
MKNFILLAVSSILLVDLFPTHCGHNVDLSKAINLNGVNFNNVDASSLGAAHVGQSASRGRGLGENPDDEEGDAKKKKDGKKAEPKNPRENKLKQPGDRADGQPAGDRADGQPAGDRADGQPAGDRAAGQPAGDRAAGQPAGDRADGQPAGDRADGQPAGDRADGQPAGDRADGQPAGDRAAGQPAGDRAAGQPAGDRADGQPAGDRAAGQPAGDRADGQPAGDRAAGQPAGDRADGQPAGDRAAGQPAGDRAAGQPAGDRAAGQAAGDRAAGQAAGGNAGGQGQNNEGANAPNEKSVKEYLDKVRATVGTEWTPCSVTCGVGVRVRRRVNAANKKPEDLTLNDLETDVCTMDKCAGIFNVVSNSLGLVILLVLALFN

SEQ ID NO: 2861 - protein, 377 aa, Artificial Sequence; identical to SEQ ID NO: 2826
  derived and/or modified protein sequence (wt) from Pv(Sal1)__ADB92528.1__CSP

SEQ ID NO: 2862 - protein, 376 aa, Artificial Sequence
  derived and/or modified protein sequence (wt) from Pv(Cam27)__AGN05255.1__CSP
MKNFILLAVSSILLVDLFPTHCGHNVDLSKAINLNGVGFNNVDASSLGAAHVGQSASRGRGLGENPDDEEGDAKKKKDGKKAEPKNPRENKLKQPAGARADGQPAGDRADGQPAGDRADGQPAGDRAAGQPAGDRADGQPAGDRAAGQPAGDRADGQPAGDRAAGQPAGDRADGQPAGDRAAGQPAGDRAAGQPAGDRADGQPAGDRAAGQPAGDRADGQPAGDRAAGQPAGDRAAGQPAGDRAAGQPAGNGAGGQAAGGNAGGNAGGNAGGNAGGNAGGQGQNNEGANAPNEKSVKEYLDKVRATVGTEWTPCSVTCGVGVRVRRRVNAANKKPEDLTLNDLETDVCTMDKCAGIFNVVSNSLGLVILLVLALFN

SEQ ID NO: 2863 - protein, 376 aa, Artificial Sequence
  derived and/or modified protein sequence (wt) from Pv(Cam46)__AGN05273.2__CSP
MKNFILLAVSSILLVDLFPTHCGHNVDLSKAINLNGVNFNNVDASSLGAAHVGQSASRGRGLGENPDDEEGDAKKKKDGKKAEPKNPRENKLKQPAGDRADGQPAGDRADGQPAGDRADGQPAGDRAAGQPAGDRADGQPAGDRAAGQPAGDRADGQPAGDRAAGQPAGDRADGQPAGDRAAGQPAGDRAAGQPAGDRADGQPAGDRAAGQPAGDRADGQPAGDRAAGQPAGDRAAGQPAGDRAAGQPAGNGAGGQAAGGNAGGNAGGNAGGNAGGNAGGQGQNNEGANAPNEKSVKEYLDKVRATVGTEWTPCSVTCGVGVRVRRRVNAANKKPEDLTLNDLETDVCTMDKCAGIFNVVSNSLGLVILLVLALFN

SEQ ID NO: 2864 - protein, 375 aa, Artificial Sequence
  derived and/or modified protein sequence (wt) from Pv(CSP10VK210)__ANS71590.1__CSP
MKNFILLAVSSILLVDLFPTHCGHNVDLSKAINLNGVNFNNVDASSLGAAHVGQSASRGRGLGENPDDEEGDAKKKKDGKKAEPKNPRENKLKQPGDRADGQPAGDRADGQPAGDRADGQPAGDRADGQPAGDRAAGQPAGDRAAGQPAGDRADGQPAGDRAAGQPAGDRADGQPAGDRAAGQPAGDRAAGQPAGDRAAGQPAGDRADGQPAGDRAAGQPAGDRAAGQPAGDRAAGQPAGDRAAGQPAGNGAGGQAAGGNAANKKAEDAGGNAGGNAGGQGQNNEGANAPNEKSVKEYLDKVRATVGTEWTPCSVTCGVGVRVRRRVNAANKKPEDLTLNDLETDVCTMDKCAGIFNVVSNSLGLVILLVLALFN

SEQ ID NO: 2865 - protein, 373 aa, Artificial Sequence
  derived and/or modified protein sequence (wt) from Pv(Cam19)__AGN05249.1__CSP
MKNFILLAVSSILLVDLFPTHCGHNVDLSKAINLNGVGFNNVDASSLGAAHVGQSASRGRGLGENPDDEEGDAKKKKDGKKAEPKNPRENKLKQPAGDRADGQPAGDRADGQPAGDRADGQPAGDRADGQPAGDRADGQPAGDRAAGQPAGDRADGQPAGDRAAGQPAGDRADGQPAGDRADGQPAGDRAAGQPAGDRADGQPAGDRAAGQPAGDRADGQPAGDRAAGQPAGDRAAGQPAGDRAAGQPAGNGAGGQAAGGNAGGNAGGNAGGNAGAGQGQNNEGANAPNEKSVKEYLDKVRATVGTEWTPCSVTCGVGVRVRRRVNAANKKPEDLTLNDLETDVCTMDKCAGIFNVVSNSLGLVILLVLALFN

SEQ ID NO: 2866 - protein, 372 aa, Artificial Sequence
  derived and/or modified protein sequence (wt) from Pv(Cam10)__AGN05241.2__CSP
MKNFILLAVSSILLVDLFPTHCGHNVDLSKAINLNGVGFNNVDASSLGAAHVGQSASRGRGLGENPDDEEGDAKKKKDGKKAEPKNPRENKLKQPAGDRADGQPAGDRADGQPAGDRADGQPAGDRAAGQPAGDRADGQPAGDRAAGQPAGDRADGQPAGDRAAGQPAGDRADGQPAGDRAAGQPAGDRAAGQPAGDRADGQPAGDRAAGQPAGDRADGQPAGDRAAGQPAGDRAAGQPAGDRAAGQPAGNGAGGQAAGGNAGGNAGGNAGGNAGGQGQNNEGANAPNEKSVKEYLDKVRATVGTEWTPCSVTCGVGVRVRRRVNAANKKPEDLTLNDLETDVCTMDKCAGIFNVVSNSLGLVILLVLALFN

SEQ ID NO: 2867 - protein, 372 aa, Artificial Sequence
  derived and/or modified protein sequence (wt) from Pv(Cam3)__AGN05234.2__CSP
MKNFILLAVSSILLVDLFPTHCGHNVDLSKAINLNGVNFNNVDASSLGAAHVGQSASRGRGLGENPDDEEGDAKKKKDGKKAEPKNPRENKLKQPAGDRADGQPAGDRADGQPAGDRADGQPAGDRAAGQPAGDRADGQPAGDRAAGQPAGDRADGQPAGDRAAGQPAGDRADGQPAGDRAAGQPAGDRAAGQPAGDRADGQPAGDRAAGQPAGDRADGQPAGDRAAGQPAGDRAAGQPAGDRAAGQPAGNGAGGQAAGGNAGGNAGGNAGGNAGGQGQNNEGANAPNEKSVKEYLDKVRATVGTEWTPCSVTCGVGVRVRRRVNAANKKPEDLTLNDLETDVCTMDKCAGIFNVVSNSLGLVILLVLALFN

SEQ ID NO: 2868 - protein, 372 aa, Artificial Sequence
  derived and/or modified protein sequence (wt) from Pv(Cam30)__AGN05258.1__CSP
MKNFILLAVSSILLVDLFPTHCGHNVDLSKAINLNGVNFNNVDASSLGAAHVGQSASRGRGLGENPDDEEGDAKKKKDGKKAEPKNPRENKLKQPAGDGAAVQPAGDGAAVQPAGDGADGQPAGDGAAGQPAGDRADGQPAGDRAAGQPAGDRADGQPAGDRAAGQPAGDRADGQPAGDRAAGQPAGDRAAGQPAGDRADGQPAGDRAAGQPAGDRADGQPAGDRAAGQPAGDRAAGQPAGDRAAGQPAGNGAGGQAAGGNAGGNAGGNAGGNAGGQGQNNEGANAPNEKSVKEYLDKVRATVGTEWTPCSVTCGVGVRVRRRVNAANKKPEDLTLNDLETDVCTMDKCAGIFNVVSNSLGLVILLVLALFN

SEQ ID NO: 2869 - protein, 372 aa, Artificial Sequence
  derived and/or modified protein sequence (wt) from Pv(Cam43)__AGN05271.1__CSP
MKNFILLAVSSILLVDLFPTHCGHNVDLSKAINLNGVGFNNVDASSLGAAHVGQSASRGRGLGENPDDEEGDAKKKKDGKKAEPKNPRENKLKQPAGDRADGQPAGDRADGQPAGDRADGQPAGDRADGQPAGDRADGQPAGDRAAGQPAGDRADGQPAGDRAAGQPAGDRADGQPAGDRADGQPAGDRAAGQPAGDRADGQPAGDRAAGQPAGDRADGQPAGDRAAGQPAGDRAAGQPAGNGAGGQAAGGNAGGNAGGNAGGNAGGNAGGNAGAGQGQNNEGANAPNEKSVKEYLDKVRATVGTEWTPCSVTCGVGVRVRRRVNAANKKPEDLTLNDLETDVCTMDKCAGIFNVVSNSLGLVILLVLALFN

SEQ ID NO: 2870 - protein, 371 aa, Artificial Sequence
  derived and/or modified protein sequence (wt) from Pv(Cam40)__AGN05268.1__CSP
MKNFILLAVSSILLVDLFPTHCGHNVDLSKAINLNGVGFNNVDASSLGAAHVGQSASRGRGLGENPDDEEGDAKKKKDGKKTEPKNPRENKLKQPGDRADGQPAGDRADGQPAGDRAAGQPAGDRADGQPAGDRADGQPAGDRAAGQPAGDRADGQPAGDRAAGQPAGDRADGQPAGDRAAGQPAGDRAAGQPAGDRADGQPAGDRAAGQPAGDRADGQPAGDRAAGQPAGDRAAGQPAGDRAAGQPAGNGAGGQAAGGNAGGNAGGNAGGNAGGQGQNNEGANAPNEKSVKEYLDKVRATVGTEWTPCSVTCGVGVRVRRRVNAANKKPEDLTLNDLETDVCTMDKCAGIFNVVSNSLGLVILLVLALFN

SEQ ID NO: 2871 - protein, 371 aa, Artificial Sequence
  derived and/or modified protein sequence (wt) from Pv(CSP14VK210)__ANS71594.1__CSP
MKNFILLAVSSILLVDLFPTHCGHNVDLSKAINLNGVNFNNVDASSLGAAHVGQSASRGRGLGENPDDEEGDAKKKKDGKKAEPKNPRENKLKQPGDRADGQPAGDRADGQPAGDRAAGQPAGDRADGQPAGDRAAGQPAGDRADGQPAGDRAAGQPAGDRADGQPAGDRAAGQPAGDRADGQPAGDRAAGQPAGDRAAGQPAGDRADGQPAGDRADGQPAGDRAAGQPAGDRAAGQPAGDRAAGQPAGNGAGGQAAGGNAANKKAEDAGGNAGGQGQNNEGANAPNEKSVKEYLDKVRATVGTEWTPCSVTCGVGVRVRRRVNAANKKPEDLTLNDIETDVCTMDKCAGIFNVVSNSLGLVILLVLALFN

SEQ ID NO: 2872 - protein, 371 aa, Artificial Sequence
  derived and/or modified protein sequence (wt) from Pv(CSP22VK210)__ANS71602.1__CSP
MKNFILLAVSSILLVDLFPTHCGHNVDLSKAINLNGVNFNNVDASSLGAAHVGQSASRGRGLGENPDDEEGDAKKKKDGKKAEPKNPRENKLKQPGDRADGQPAGDRADGQPAGDRADGQPAGDRAAGQPAGDRADGQPAGDRAAGQPAGDRADGQPAGDRAAGQPAGDRAAGQPAGDRADGQPAGDRAAGQPAGDRAAGQPAGDRADGQPAGDRAAGQPAGDRAAGQPAGDRAAGQPAGDRAAGQPAGNGAGGQAAGGNAANKKAEDAGGNAGGQGQNNEGANAPNEKSVKEYLDKVRATVGTEWTPCSVTCGVGVRVRRRVNAANKKPEDLTLNDIETDVCTMDKCAGIFNVVSNSLGLVILLVLALFN

SEQ ID NO: 2873 - protein, 371 aa, Artificial Sequence
  derived and/or modified protein sequence (wt) from Pv(CSP28VK210)__ANS71608.1__CSP
MKNFILLAVSSILLVDLFPTHCGHNVDLSKAINLNGVNFNNVDASSLGAAHVGQSASRGRGLGENPDDEEGDAKKKKDGKKAEPKNPRENKLKQPGDRADGQPAGDRADGQPAGDRADGQPAGDRAAGQPAGDRADGQPAGDRAAGQPAGDRADGQPAGDRAAGQPAGDRADGQPAGDRAAGQPAGDRADGQPAGDRAAGQPAGDRAAGQPAGDRADGQPAGDRAAGQPAGDRAAGQPAGDRAAGQPAGNGAGGQAAGGNAANKKAEDAGGNAGGQGQNNEGANAPNEKSVKEYLDKVRATVGTEWTPCSVTCGVGVRVRRRVNAANKKPEDLTLNDIETDVCTMDKCAGIFNVVSNSLGLVILLVLALFN

SEQ ID NO: 2874 - protein, 371 aa, Artificial Sequence
  derived and/or modified protein sequence (wt) from Pv(CSP31VK210)__ANS71611.1__CSP
MKNFILLAVSSILLVDLFPTHCGHNVDLSKAINLNGVNFNNVDASSLGAAHVGQSASRGRGLGENPDDEEGDAKKKKDGKKAEPKNPRENKLKQPGDRADGQPAGDRADGQPAGDRAAGQPAGDRADGQPAGDRAAGQPAGDRADGQPAGDRAAGQPAGDRADGQPAGDRADGQPAGDRAAGQPAGDRAAGQPAGDRAAGQPAGDRADGQPAGDRAAGQPAGDRAAGQPAGDRAAGQPAGDRAAGQPAGNGAGGQAAGGNAANKKAEDAGGNAGGQGQNNEGANAPNEKSVKEYLDKVRATVGTEWTPCSVTCGVGVRVRRRVNAANKKPEDLTLNDIETDVCTMDKCAGIFNVVSNSLGLVILLVLALFN

SEQ ID NO: 2875 - protein, 371 aa, Artificial Sequence
  derived and/or modified protein sequence (wt) from Pv(CSP37VK210)__ANS71617.1__CSP
MKNFILLAVSSILLVDLFPTHCGHNVDLSKAINLNGVNFNNVDASSLGAAHVGQSASRGRGLGENPDDEEGDAKKKKDGKKAEPKNPRENKLKQPGDRADGQPAGDRADGQPAGDRADGQPAGDRAAGQPAGDRAAGQPAGDRAAGQPAGDRADGQPAGDRAAGQPAGDRADGQPAGDRAAGQPAGDRADGQPAGDRAAGQPAGDRAAGQPAGDRADGQPAGDRAAGQPAGDRAAGQPAGDRAAGQPAGNGAGGQAAGGNAANKKAEDAGGNAGGQGQNNEGANAPNEKSVKEYLDKVRATVGTEWTPCSVTCGVGVRVRRRVNAANKKPEDLTLNDIETDVCTMDKCAGIFNVVSNSLGLVILLVLALFN

SEQ ID NO: 2876 - protein, 371 aa, Artificial Sequence
  derived and/or modified protein sequence (wt) from Pv(CSP50VK210)__ANS71630.1__CSP
MKNFILLAVSSILLVDLFPTHCGHNVDLSKAINLNGVNFNNVDASSLGAAHVGQSASRGRGLGENPDDEEGDAKKKKDGKKAEPKNPRENKLKQPGDRADGQPAGDRADGQPAGDRAAGQPAGDRADGQPAGDRAAGQPAGDRADGQPAGDRAAGQPAGDRADGQPAGDRAAGQPAGDRADGQPAGDRAAGQPAGDRAAGQPAGDRADGQPAGDRAAGQPAGDRAAGQPAGDRAAGQPAGDRAAGQPAGNGAGGQAAGGNAANKKAEDAGGNAGGQGQNNEGANAPNEKSVKEYLDKVRATVGTEWTPCSVTCGVGVRVRRRVNAANKKPEDLTLNDIETDVCTMDKCAGIFNVVSNSLGLVILLVLALFN

SEQ ID NO: 2877 - protein, 368 aa, Artificial Sequence
  derived and/or modified protein sequence (wt) from Pv(Cam16)__AGN05247.1__CSP
MKNFILLAVSSILLVDLFPTHCGHNVDLSKAINLNGVNFNNVDASSLGAAHVGQSASRGRGLGENPDDEEGDAKKKKDGKKAEPKNPRENKLKQPAGDRADGQPAGDRADGQPAGDRAAGQPAGDRADGQPAGDRADGQPAGDRAAGQPAGDRADGQPAGDRAAGQPAGDRADGQPAGDRADGQPAGDRAAGQPAGDRADGQPAGDRAAGQPAGDRADGQPAGDRAAGQPAGDRAAGQPAGDRAAGQPAGNGAGGQAAGGNAGGNAGGNAGGQGQNNEGANAPNEKSVKEYLDKVRATVGTEWTPCSVTCGVGVRVRRRVNAANKKPEDLTLNDLETDVCTMDKCAGIFNVVSNSLGLVILLVLALFN

SEQ ID NO: 2878 - protein, 368 aa, Artificial Sequence
  derived and/or modified protein sequence (wt) from Pv(Cam32)__AGN05260.1__CSP
MKNFILLAVSSILLVDLFPTHCGHNVDLSKAINLNGVGFNNVDASSLGAAHVGQSASRGRGLGENPDDEEGDAKKKKDGKKAEPKNPRENKLKQPAGDRADGQPAGDRADGQPAGDRADGQPAGDRAAGQPAGDRADGQPAGDRAAGQPAGDRADGQPAGDRAAGQPAGDRADGQPAGDRAAGQPAGDRAAGQPAGDRADGQPAGDRAAGQPAGDRADGQPAGDRAAGQPAGDRAAGQPAGDRAAGQPAGNGAGGQAAGGNAGGNAGGNAGGQGQNNEGANAPNEKSVKEYLDKVRATVGTEWTPCSVTCGVGVRVRRRVNAANKKPEDLTLNDLETDVCTMDKCAGIFNVVSNSLGLVILLVLALFN

SEQ ID NO: 2879 - protein, 368 aa, Artificial Sequence
  derived and/or modified protein sequence (wt) from Pv(Cam38)__AGN05266.1__CSP
MKNFILLAVSSILLVDLFPTHCGHNVDLSKAINLNGVNFNNVDASSLGAAHVGQSASRGRGLGENPDDEEGDAKKKKDGKKAEPKNPRENKLKQPGDRADGQPAGDRADGQPAGDRAAGQPAGDRADGQPAGDRAAGQPAGDRADGQPAGDRAAGQPAGDRADGQPAGDRAAGQPAGDRADGQPAGDRAAGQPAGDRADGQPAGDRAAGQPAGDRAAGQPAGDRADGQPAGDRAAGQPAGDRAAGQPAGDRAAGQPAGNGAGGQAAGGNAGGQGQNNEGANAPNEKSVKEYLDKVRATVGTEWTPCSVTCGVGVRVRRRVNAANKKPEDLTLNDLETDVCTMDKCAGIFNVVSNSLGLVILLVLALFN

SEQ ID NO: 2880 - protein, 367 aa, Artificial Sequence
  derived and/or modified protein sequence (wt) from Pv(CSP19VK210)__ANS71599.1__CSP
MKNFILLAVSSILLVDLFPTHCGHNVDLSKAINLNGVNFNNVDASSLGAAHVGQSASRGRGLGENPDDEEGDAKKKKDGKKAEPKNPRENKLKQPGDRADGQPAGDRADGQPAGDRADGQPAGDRAAGQPAGDRADGQPAGDRAAGQPAGDRADGQPAGDRAAGQPAGDRADGQPAGDRAAGQPAGDRADGQPAGDRAAGQPAGDRAAGQPAGDRADGQPAGDRAAGQPAGDRAAGQPAGDRAAGQPAGNGAGGQAAGGNAANKKAEDAGGQGQNNEGANAPNEKSVKEYLDKVRATVGTEWTPCSVTCGVGVRVRRRVNAANKKPEDLTLNDIETDVCTMDKCAGIFNVVSNSLGLVILLVLALFN

SEQ ID NO: 2881 - protein, 362 aa, Artificial Sequence
  derived and/or modified protein sequence (wt) from Pv(CSP24VK210)__ANS71604.1__CSP
MKNFILLAVSSILLVDLFPTHCGHNVDLSKAINLNGVNFNNVDASSLGAAHVGQSASRGRGLGENPDDEEGDAKKKKDGKKAEPKNPRENKLKQPGDRADGQPAGDRADGQPAGDRADGQPAGDRAAGQPAGDRADGQPAGDRAAGQPAGDRADGQPAGDRAAGQPAGDRADGQPAGDRAAGQPAGDRADGQPAGDRAAGQPAGDRAAGQPAGDRADGQPAGDRAAGQPAGDRAAGQPAGNGAGGQAAGGNAANKKAEDAGGNAGGQGQNNEGANAPNEKSVKEYLDKVRATVGTEWTPCSVTCGVGVRVRRRVNAANKKPEDLTLNDIETDVCTMDKCAGIFNVVSNSLGLVILLVLALFN

SEQ ID NO: 2882 - protein, 362 aa, Artificial Sequence
  derived and/or modified protein sequence (wt) from Pv(CSP35VK210)__ANS71615.1__CSP
MKNFILLAVSSILLVDLFPTHCGHNVDLSKAINLNGVNFNNVDASSLGAAHVGQSASRGRGLGENPDDEEGDAKKKKDGKKAEPKNPRENKLKQPGDRADGQPAGDRADGQPAGDRAAGQPAGDRADGQPAGDRAAGQPAGDRADGQPAGDRAAGQPAGDRADGQPAGDRAAGQPAGDRADGQPAGDRAAGQPAGDRAAGQPAGDRADGQPAGDRAAGQPAGDRAAGQPAGDRAAGQPAGNGAGGQAAGGNAANKKAEDAGGNAGGQGQNNEGANAPNEKSVKEYLDKVRATVGTEWTPCSVTCGVGVRVRRRVNAANKKPEDLTLNDIETDVCTMDKCAGIFNVVSNSLGLVILLVLALFN

SEQ ID NO: 2883 - protein, 353 aa, Artificial Sequence
  derived and/or modified protein sequence (wt) from Pv(CSP9VK210)__ANS71589.1__CSP
MKNFILLAVSSILLVDLFPTHCGHNVDLSKAINLNGVNFNNVDASSLGAAHVGQSASRGRGLGENPDDEEGDAKKKKDGKKAEPKNPRENKLKQPGDRADGQPAGDRADGQPAGDRAAGQPAGDRADGQPAGDRAAGQPAGDRADGQPAGDRAAGQPAGDRADGQPAGDRAAGQPAGDRAAGQPAGDRADGQPAGDRAAGQPAGDRAAGQPAGDRAAGQPAGDRAAGQPAGNGAGGQAAGGNAANKKAEDAGGNAGGQGQNNEGANAPNEKSVKEYLDKVRATVGTEWTPCSVTCGVGVRVRRRVNAANKKPEDLTLNDIETDVCTMDKCAGIFNVVSNSLGLVILLVLALFN

SEQ ID NO: 2884 - protein, 297 aa, Artificial Sequence
  derived and/or modified protein sequence (wt) from Pv(Pt02.2)__ADB92552.1__CSP
MKNFILLAVSSILLVDLFPTHCGHNVDLSKAINLNGVGFNNVDASSLGAAHVGQSASRGRGLGENPDDEEGDAKKKKDGKKAEPKNPRENKLKQPEDGAGDQPGANGAGNQPGANGAGNQPGANGAGNQPGANGAGNQPGANGAGNQPGANGAGNQPGANGAGGQAAGGNAANKKAGDAGAGGQAAGGNAANKKAGDAGAGQGQNNEGANAPNEKSVKEYLDKVRATVGTEWTPCSVTCGVGVRVRRRVNAANKKPEDLTLNDLETDVCTMDKCAGIFNVVSNSLGLVILLVLALFN

SEQ ID NO: 2885 - protein, 279 aa, Artificial Sequence
  derived and/or modified protein sequence (wt) from Pv(Pt04.5)__ADB92555.1__CSP
MKNFILLAVSSILLVDLFPTHCGHNVDLSKAINLNGVGFNNVDASSLGAAHVGQSASRGRGLGENPDDEEGDAKKKKDGKKAEPKNPRENKLKQPEDGAGDQPGANGAGNQPGANGAGNQPGANGAGNQPGANGAGNQPGANGAGGQAAGGNAANKKAGDAGAGGQAAGGNAANKKAGDAGAGQGQNNEGANAPNEKSVKEYLDKVRATVGTEWTPCSVTCGVGVRVRRRVNAANKKPEDLTLNDLETDVCTMDKCAGIFNVVSNSLGLVILLVLALFN

SEQ ID NO: 2886 - protein, 340 aa, Artificial Sequence; identical to SEQ ID NO: 31
  derived and/or modified protein sequence (wt) from Pb(ANKA)__XP_022712148.1__CSP

SEQ ID NO: 2887 - RNA, 1194 nt, Artificial Sequence; identical to SEQ ID NO: 37
  derived and/or modified CDS sequence (wt) from Pf(3D7)__XP_001351122.1__CSP

SEQ ID NO: 2888 - RNA, 1335 nt, Artificial Sequence
  derived and/or modified CDS sequence (wt) from Pf(Pal97-089)__BAM84949.1__CSP
augaugagaaaauuagcuauuuuaucuguuucuuccuuuuuauuuguugaggccuuauuccaggaauaccagugcuauggaaguucgucaaacacaaggguucuaaaugaauuaaauuaugauaaugcaggcacuaauuuauauaaugaauuagaaaugaauuauuaugggaaacaggaaaauugguauagucuuaaaaaaaauaguagaucacuuggagaaaaugaugauggagauaaugauaauggagauaauggucgugaagguaaagaugaagauaaaagagauggaaauaacgaagacaacgagaaauuaaggaaaccaaaacauaaaaaauuaaagcaaccaggggaugguaauccugauccaaaugcaaacccaaauguagaucccaaugccaacccaaauguagauccaaaugcaaacccaaaugcaaacccaaaugcaaacccaaaugcaaacccaaaugcaaacccaaaugcaaacccaaaugcaaacccaaaugcaaacccaaaugcaaacccaaaugcaaacccaaaugcaaacccaaacgcaaaccccaaugcaaauccuaaugccaauccaaaugcaaauccaaaugcaaacccaaacgcaaaccccaaugcaaauccuaaugccaauccaaaugcaaauccaaaugcaaacccaaaugcaaacccaaacgcaaaccccaaugcaaauccuaaugcaaauccuaaugcaaauccuaaugccaauccaaaugcaaauccaaaugcaaacccaaacgcaaaccccaaugcaaauccuaaugccaauccaaaugcaaauccaaaugcaaacccaaacgcaaaccccaaugcaaauccuaaugccaauccaaaugcaaauccaaaugcaaaccccaaugcaaauccuaaugccaauccaaaugcaaauccaaaugcaaacccaaaugcaaacccaaaugcaaauccuaauaaaaacaaucaagguaauggacaaggucacaauaugccaaaugacccaaaccgaaauguagaugaaaaugcuaaugccaacaaugcuguaaaaaauaauaauaacgaagaaccaagugauaagcacauagaacaauauuuaaagaaaauacaauauucucuuucaacugaaugguccccauguaguguaacuuguggaaaugguauucaaguuagaauaaagccuggcucugcugauaaaccuaaagaccaauuagauuaugaaaaugauauugaaaaaaaaauuuguaaaauggaaaaauguuccaguguguuuaaugucguaaauaguucaauaggauuaauaaugguauuauccuucuuguuccuuaauuag

SEQ ID NO: 2889 - RNA, 1329 nt, Artificial Sequence
  derived and/or modified CDS sequence (wt) from Pf(T9/94)__BAD73956.1__CSP
augaugagaaaauuagcuauuuuaucuguuucuuccuuuuuauuuguugaggccuuauuccaggaauaccagugcuauggaaguucgucaaacacaaggguucuaaaugaauuaaauuaugauaaugcaggcacuaauuuauauaaugaauuagaaaugaauuauuaugggaaacaggaaaauugguauagucuuaaaaaaaauaguagaucacuuggagaaaaugaugauggagauaaugauaauggaaauaauaauaauggaaauaauaauaauggagauaauggucgugaagguaaagaugaagauaaaagagauggaaauaacgaagacaacgagaaauuaaggaaaccaaaacauaaaaaauuaaagcaaccaggggaugauaauccugauccaaaugccaacccaaauguagauccaaaugccaacccaaauguagauccaaaugcaaacccaaaugcaaacccaaaugcaaacccaaaugcaaacccaaaugcaaacccaaaugcaaacccaaaugcaaacccaaaugcaaacccaaaugcaaacccaaaugcaaacccaaaugcaaacccaaaugcaaacccaaaugcaaacccaaaugcaaacccaaaugcaaacccaaacguagauccuaaugcaaauccaaaugcaaacccaaaugcaaacccaaacgcaaaccccaaugcaaauccuaaugcaaauccuaaugcaaauccuaaugccaauccaaaugcaaauccaaaugcaaacccaaacgcaaaccccaaugcaaauccuaaugccaauccaaaugcaaauccaaaugcaaacccaaacgcaaaccccaaugcaaauccuaaugccaauccaaaugcaaauccaaaugcaaaccccaaugcaaauccuaaugccaauccaaaugcaaauccaaaugcaaacccaaaugcaaacccaaaugcaaauccuaauaaaaacaaucaagguaauggacaaggucacaauaugccaaaugacccaaaccgaaauguagaugaaaaugcuaaugccaacaaugcuguaaaaaauaauaauaacgaagaaccaagugauaagcacauagaacaauauuuaaagaaaauacaaaauucucuuucaacugaaugguccccauguaguguaacuuguggaaaugguauucaaguuagaauaaagccuggcucugcugauaaaccuaaagaccaauuagauuaugaaaaugauauugaaaaaaaaauuuguaaaauggaaaaauguuccaguguguuuaaugucguaaauaguucaauaggauuaauaaugguauuauccuucuuguuccuuaauuag

SEQ ID NO: 2890 - RNA, 1329 nt, Artificial Sequence
  derived and/or modified CDS sequence (wt) from Pf(Tq/94)__AAA29551.1__CSP
augaugagaaaauuagcuauuuuaucuguuucuuccuuuuuauuuguugaggccuuauuccaggaauaccagugcuauggaaguucgucaaacacaaggguucuaaaugaauuaaauuaugauaaugcaggcaucaauuuauauaaugaauuagaaaugaauuauuaugggaaacaggaaaauugguauagucuuaaaaaaaauaguagaucacuuggagaaaaugaugauggagauaaugauaauggaaauaauaauaauggaaauaauaauaauggagauaauggucgugaagguaaagaugaagauaaaagagauggaaauaacgaagacaacgagaaauuaaggaaaccaaaacauaaaaaauuaaagcaaccaggggaugguaauccugauccaaaugccaacccaaauguagauccaaaugccaacccaaauguagauccaaaugcaaacccaaaugcaaacccaaaugcaaacccaaaugcaaacccaaaugcaaacccaaaugcaaacccaaaugcaaacccaaaugcaaacccaaaugcaaacccaaaugcaaacccaaaugcaaacccaaaugcaaacccaaaugcaaacccaaaugcaaacccaaaugcaaacccaaacguagauccuaaugcaaauccaaaugcaaacccaaaugcaaacccaaacgcaaaccccaaugcaaauccuaaugcaaauccuaaugcaaauccuaaugccaauccaaaugcaaauccaaaugcaaacccaaacgcaaaccccaaugcaaauccuaaugccaauccaaaugcaaauccaaaugcaaacccaaacgcaaaccccaaugcaaauccuaaugccaauccaaaugcaaauccaaaugcaaaccccaaugcaaauccuaaugccaauccaaaugcaaauccaaaugcaaacccaaaugcaaacccaaaugcaaauccuaauaaaaacaaucaagguaauggacaaggucacaauaugccaaaugacccaaaccgaaauguagaugaaaaugcuaaugccaacaaugcuguaaaaaauaauaauaacgaagaaccaagugauaagcacauagaacaauauuuaaagaaaauacaaaauucucuuucaacugaaugguccccauguaguguaacuuguggaaaugguauucaaguuagaauaaagccuggcucugcugauaaaccuaaagaccaauuagauuaugaaaaugauauugaaaaaaaaauuuguaaaauggaaaaauguuccaguguguuuaaugucguaaauaguucaauaggauuaauaaugguauuauccuucuuguuccuuaauuag

SEQ ID NO: 2891 - RNA, 1329 nt, Artificial Sequence
  derived and/or modified CDS sequence (wt) from Pf(Wellcome)__AAA29554.1__CSP
augaugagaaaauuagcuauuuuaucuguuucuuccuuuuuauuuguugaggccuuauuccaggaauaccagugcuauggaaguucgucaaacacaaggguucuaaaugaauuaaauuaugauaaugcaggcacuaauuuauauaaugaauuagaaaugaauuauuaugggaaacaggaaaauugguauagucuuaaaaaaaauaguagaucacuuggagaaaaugaugauggagauaaugauaauggaaauaauaauaauggaaauaauaauaauggagauaauggucgugaagguaaagaugaagauaaaagagauggaaauaacgaagacaacgagaaauuaaggaaaccaaaacauaaaaaauuaaagcaaccaggggaugguaauccugauccaaaugccaacccaaauguagauccaaaugccaacccaaauguagauccaaaugcaaacccaaaugcaaacccaaaugcaaacccaaaugcaaacccaaaugcaaacccaaaugcaaacccaaaugcaaacccaaaugcaaacccaaaugcaaacccaaaugcaaacccaaaugcaaacccaaaugcaaacccaaaugcaaacccaaaugcaaacccaaaugcaaacccaaacguagauccuaaugcaaauccaaaugcaaacccaaaugcaaacccaaacgcaaacccaaaugcaaauccuaaugcaaauccuaaugcaaauccuaaugccaauccaaaugcaaauccaaaugcaaacccaaacgcaaaccccaaugcaaauccuaaugccaauccaaaugcaaauccaaaugcaaacccaaacgcaaaccccaaugcaaauccuaaugccaauccaaaugcaaauccaaaugcaaaccccaaugcaaauccuaaugccaauccaaaugcaaauccaaaugcaaacccaaaugcaaacccaaaugcaaauccuaauaaaaacaaucaagguaauggacaaggucacaauaugccaaaugacccaaaccgaaauguagaugaaaaugcuaaugccaacaaugcuguaaaaaauaauaauaacgaagaaccaagugauaagcacauagaacaauauuuaaagaaaauacaaaauucucuuucaacugaaugguccccauguaguguaacuuguggaaaugguauucaaguuagaauaaagccuggcucugcugauaaaccuaaagaccaauuagauuaugaaaaugauauugaaaaaaaaauuuguaaaauggaaaaauguuccaguguguuuaaugucguaaauaguucaauaggauuaauaaugguauuauccuucuuguuccuuaauuag

SEQ ID NO: 2892 - RNA, 1323 nt, Artificial Sequence
  derived and/or modified CDS sequence (wt) from Pf(Pal97-115)__BAM84958.1__CSP
augaugagaaaauuagcuauuuuaucuguuucuuccuuuuuauuuguugaggccuuauuccaggaauaccagugcuauggaaguucgucaaacacaaggguucuaaaugaauuaaauuaugauaaugcaggcacuaauuuauauaaugaauuagaaaugaauuauuaugggaaacaggaaaauugguauagucuuaaaaaaaauaguagaucacuuggagaaaaugaugauggaaauaauaauaauggagauaauggucgugaagguaaagaugaagauaaaagagauggaaauaacgaagacaacgagaaauuaaggaaaccaaaacauaaaaaauuaaagcaaccaggggaugguaauccugauccaaaugcaaacccaaauguagaucccaaugccaacccaaauguagauccaaaugcaaacccaaauguagauccaaaugcaaacccaaaugcaaacccaaaugcaaacccaaaugcaaacccaaaugcaaacccaaaugcaaacccaaaugcaaacccaaaugcaaacccaaaugcaaacccaaaugcaaacccaaaugcaaacccaaaugcaaacccaaaugcaaacccaaaugcaaacccaaaugcaaacccaaaugcaaacccaaaugcaaacccaaaugcaaacccaaaugcaaaccccaaugcaaauccuaaugcaaacccaaaugcaaacccaaacguagauccuaaugcaaauccaaaugcaaacccaaaugcaaacccaaacgcaaaccccaaugcaaauccuaaugcaaaccccaaugcaaauccuaaugcaaauccuaaugccaauccaaaugcaaauccaaaugcaaacccaaacgcaaaccccaaugcaaauccuaaugccaauccaaaugcaaauccaaaugcaaacccaaaugcaaacccaaaugcaaaccccaaugcaaauccuaauaaaaacaaucaagguaauggacaaggucacaauaugccaaaugacccaaaccgaaauguagaugaaaaugcuaaugccaacaaugcuguaaaaaauaauaauaacgaagaaccaagugaucagcacauagaaaaauauuuaaagauaauacaaaauucucuuucaacugaaugguccccauguaguguaacuuguggaaaugguauucaaguuagaauaaagccuggcucugcugauaaaccuaaagaccaauuagauuaugcaaaugauauugaaaaaaaaauuuguaaaauggaaaaauguuccaguguguuuaaugucguaaauaguucaauaggauuaauaaugguauuauccuucuuguuccuuaauuag

SEQ ID NO: 2893 - RNA, 1323 nt, Artificial Sequence
  derived and/or modified CDS sequence (wt) from Pf(PMS5)__BAN59428.1__CSP
augaugagaaaauuagcuauuuuaucuguuucuuccuuuuuauuuguugaggccuuauuccaggaauaccagugcuauggaaguucgucaaacacaaggguucuaaaugaauuaaauuaugauaaugcaggcacuaauuuauauaaugaauuagaaaugaauuauuaugggaaacaggaaaauugguauagucuuaaaaaaaauaguagaucacuuggagaaaaugaugauggaaauaauaauaauggagauaauggucgugaagguaaagaugaagauaaaagagauggaaauaacgaagacaacgagaaauuaaggaaaccaaaacauaaaaaauuaaagcaaccaggggaugguaauccugauccaaaugcaaacccaaauguagaucccaaugccaacccaaauguagauccaaaugcaaacccaaauguagauccaaaugcaaacccaaaugcaaacccaaaugcaaacccaaaugcaaacccaaaugcaaacccaaaugcaaacccaaaugcaaacccaaaugcaaacccaaaugcaaacccaaaugcaaacccaaaugcaaacccaaaugcaaacccaaaugcaaacccaaaugcaaaccccaaugcaaauccuaaugcaaacccaaaugcaaauccaaaugcaaacccaaaugcaaacccaaacgcaaaccccaaugcaaauccuaaugcaaauccuaaugcaaauccuaaugccaauccaaaugcaaauccaaaugcaaacccaaacgcaaaccccaaugcaaauccuaaugccaauccaaaugcaaauccaaaugcaaacccaaacgcaaaccccaaugcaaauccuaaugccaauccaaaugcaaauccaaaugcaaaccccaaugcaaauccuaaugccaauccaaaugcaaauccaaaugcaaacccaaaugcaaacccaaaugcaaauccuaauaaaaacaaucaagguaauggacaaggucacaauaugccaaaugacccaaaccgaaauguagaugaaaaugcuaaugccaacaaugauguaaaaaauaauaauaacgaagaaccaagugauaagcacauagaacaauauuuaaagaaaauacaauauucucuuucaacugaaugguccccauguaguguaacuuguggaaaugguauucaaguuagaauaaagccuggcucugcugauaaaccuaaagaccaauuagauuaugaaaaugauauugaaaaaaaaauuuguaaaauggaaaaauguuccaguguguuuaaugucguaaauaguucaauaggauuaauaaugguauuauccuucuuguuccuuaauuag

SEQ ID NO: 2894 - RNA, 1320 nt, Artificial Sequence
  derived and/or modified CDS sequence (wt) from Pf(J2)__ACO49408.1__CSP
augagaaaauuagcuauuuuaucuguuucuuccuuuuuauuuguugaggccuuauuccaggaauaccagugcuauggaaguucgucaaacacaaggguucuaaaugaauuaaauuaugauaaugcaggcacuaauuuauauaaugaauuagaaaugaauuauuaugggaaacaggaaaauugguauagucuuaaaaaaaauaguagaucacuuggagaaaaugaugauggaaauaauaauaauggagauaauggucgugaagguaaagaugaagauaaaagagauggaaauaacgaagacaacgagaaauuaaggaaaccaaaacauaaaaaauuaaagcaaccaggggaugguaauccugauccaaaugcaaacccaaauguagaucccaaugccaacccaaauguagauccaaaugcaaacccaaauguagauccaaaugcaaacccaaaugcaaacccaaaugcaaacccaaaugcaaacccaaaugcaaacccaaaugcaaacccaaaugcaaacccaaaugcaaacccaaaugcaaacccaaaugcaaacccaaaugcaaacccaaaugcaaacccaaaugcaaaccccaaugcaaauccuaaugcaaacccaaaugcaaacccaaacguagauccuaaugcaaauccaaaugcaaacccaaaugcaaacccaaacgcaaaccccaaugcaaauccuaaugcaaauccuaaugccaauccaaaugcaaauccaaaugcaaacccaaacgcaaaccccaaugcaaauccuaaugccaauccaaaugcaaauccaaaugcaaacccaaacgcaaaccccaaugcaaauccuaaugccaauccaaaugcaaauccaaaugcaaaccccaaugcaaauccuaaugccaauccaaaugcaaauccaaaugcaaacccaaaugcaaacccaaaugcaaauccuaauaaaaacaaucaagguaauggacaaggucacaauaugccaaaugacccaaaccgaaauguagaugaaaaugcuaaugccaacaaugauguaaaaaauaauaauaacgaagaaccaagugauaagcacauagaacaauauuuaaagaaaauacaauauucucuuucaacugaaugguccccauguaguguaacuuguggaaaugguauucaaguuagaauaaagccuggcucugcugauaaaccuaaagaccaauuagauuaugaaaaugauauugaaaaaaaaauuuguaaaauggaaaaauguuccaguguguuuaaugucguaaauaguucaauaggauuaauaaugguauuauccuucuuguuccuuaauuag

SEQ ID NO: 2895 - RNA, 1320 nt, Artificial Sequence
  derived and/or modified CDS sequence (wt) from Pf(M4)__ACO49420.1__CSP
augagaaaauuagcuauuuuaucuguuucuuccuuuuuauuuguugaggccuuauuccaggaauaccagugcuauggaaguucgucaaacacaaggguucuaaaugaauuaaauuaugauaaugcaggcacuaauuuauauaaugaauuagaaaugaauuauuaugggaaacaggaaaauugguauagucuuaaaaaaaauaguagaucacuuggagaaaaugaugauggaaauaauaauaauggagauaauggucgugaagguaaagaugaagauaaaagagauggaaauaacgaagacaacgagaaauuaaggaaaccaaaacauaaaaaauuaaagcaaccaggggaugguaauccugauccaaaugcaaacccaaauguagaucccaaugccaacccaaauguagauccaaaugcaaacccaaaugcaaacccaaaugcaaacccaaaugcaaacccaaaugcaaacccaaaugcaaacccaaaugcaaacccaaaugcaaacccaaaugcaaacccaaaugcaaacccaaaugcaaacccaaaugcaaacccaaaugcaaacccaaaugcaaacccaaaugcaaacccaaaugcaaacccaaacguagauccuaaugcaaauccaaaugcaaacccaaaugcaaacccaaacgcaaaccccaaugcaaauccuaaugcaaauccuaaugcaaauccuaaugccaauccaaaugcaaauccaaaugcaaacccaaacgcaaaccccaaugcaaauccuaaugcaaauccuaaugcaaauccuaaugccaauccaaaugcaaauccaaaugcaaacccaaacgcaaaccccaaugcaaauccuaaugccaauccaaaugcaaauccaaaugcaaacccaaaugcaaacccaaaugcaaacccaaaugcaaacccaaaugcaaaccccaaugcaaauccuaauaaaaacaaucaagguaauggacaaggucacaauaugccaaaugacccaaaccgaaauguagaugaaaaugcuaaugccaacaaugcuguaaaaaauaauaauaacgaagaaccaagugauaagcacauaacagaauauuuaaagaaaauacaaaauucucuuucaacugaaugguccccauguaguguaacuuguggaaaugguauucaaguuagaauaaagccuggcucugcugguaaaucuaaagacgaauuagauuaugaaaaugauauugaaaaaaaaauuuguaaaauggaaaaauguuccaguguguuuaaugucguaaauaguucaauaggauuaauaaugguauuauccuucuuguuccuuaauuag

SEQ ID NO: 2896 - RNA, 1320 nt, Artificial Sequence
  derived and/or modified CDS sequence (wt) from Pf(TMS121)__ACO49498.1__CSP
augagaaaauuagcuauuuuaucuguuucuuccuuuuuauuuguugaggccuuauuccaggaauaccagugcuauggaaguucgucaaacacaaggguucuaaaugaauuaaauuaugauaaugcaggcacuaauuuauauaaugaauuagaaaugaauuauuaugggaaacaggaaaauugguauagucuuaaaaaaaauaguagaucacuuggagaaaaugaugauggaaauaauaauaauggagauaauggucgugaagguaaagaugaagauaaaagagauggaaauaacgaagacaacgagaaauuaaggaaaccaaaacauaaaaaauuaaagcaaccaggggaugguaauccugauccaaaugcaaacccaaauguagaucccaaugccaacccaaauguagauccaaaugcaaacccaaauguagauccaaaugcaaacccaaaugcaaacccaaaugcaaacccaaaugcaaacccaaaugcaaacccaaaugcaaacccaaaugcaaacccaaaugcaaacccaaaugcaaacccaaaugcaaacccaaaugcaaacccaaaugcaaacccaaaugcaaacccaaaugcaaacccaaaugcaaacccaaaugcaaauccaaaugcaaauccaaaugcaaacccaaaugcaaacccaaacgcaaaccccaaugcaaauccuaaugcaaauccuaaugcaaauccuaaugccaauccaaaugcaaauccaaaugcaaacccaaacgcaaaccccaaugcaaauccuaaugccaauccaaaugcaaauccaaaugcaaacccaaacgcaaaccccaaugcaaauccuaaugccaauccaaaugcaaauccaaaugcaaaccccaaugcaaauccuaaugccaauccaaaugcaaauccaaaugcaaacccaaaugcaaacccaaaugcaaauccuaauaaaaacaaucaagguaauggacaaggucacaauaugccaaaugacccaaaccgaaauguagaugaaaaugcuaaugccaacaaugauguaaaaaauaauaauaacgaagaaccaagugauaagcacauagaacaauauuuaaagaaaauacaaaauucucuuucaacugaaugguccccauguaguguaacuuguggaaaugguauucaaguuagaauaaagccuggcucugcuaauaaaccuaaagacgaauuagauuaugaaaaugauauugaaaaaaaaauuuguaaaauggaaaaauguuccaguguguuuaaugucguaaauaguucaauaggauuaauaaugguauuauccuucuuguuccuuaauuag

SEQ ID NO: 2897 - RNA, 1320 nt, Artificial Sequence
  derived and/or modified CDS sequence (wt) from Pf(TMS180)__ACO49505.1__CSP
augagaaaauuagcuauuuuaucuguuucuuccuuuuuauuuguugaggccuuauuccaggaauaccagugcuauggaaguucgucaaacacaaggguucuaaaugaauuaaauuaugauaaugcaggcacuaauuuauauaaugaauuagaaaugaauuauuaugggaaacaggaaaauugguauagucuuaaaaaaaauaguagaucacuuggagaaaaugaugauggaaauaauaauaauggagauaauggucgugaagguaaagaugaagauaaaagagauggaaauaacgaagacaacgagaaauuaaggaaaccaaaacauaaaaaauuaaagcaaccaggggaugguaauccugauccaaaugcaaacccaaauguagaucccaaugccaacccaaauguagauccaaaugcaaacccaaauguagauccaaaugcaaacccaaaugcaaacccaaaugcaaacccaaaugcaaacccaaaugcaaacccaaaugcaaacccaaaugcaaacccaaaugcaaacccaaaugcaaacccaaaugcaaacccaaaugcaaacccaaaugcaaacccaaaugcaaacccaaaugcaaaccccaaugcaaauccuaaugcaaacccaaaugcaaauccaaaugcaaacccaaaugcaaacccaaacgcaaaccccaaugcaaauccuaaugcaaauccuaaugcaaauccuaaugccaauccaaaugcaaauccaaaugcaaacccaaacgcaaaccccaaugcaaauccuaaugccaauccaaaugcaaauccaaaugcaaacccaaacgcaaaccccaaugcaaauccuaaugccaauccaaaugcaaauccaaaugcaaaccccaaugcaaauccuaaugccaauccaaaugcaaauccaaaugcaaacccaaaugcaaacccaaaugcaaauccuaauaaaaacaaucaagguaauggacaaggucacaauaugccaaaugacccaaaccgaaauguagaugaaaaugcuaaugccaacaaugauguaaaaaauaauaauaacgaagaaccaagugauaagcacauagaacaauauuuaaagaaaauacaauauucucuuucaacugaaugguccccauguaguguaacuuguggaaaugguauucaaguuagaauaaagccuggcucugcugauaaaccuaaagaccaauuagauuaugaaaaugauauugaaaaaaaaauuuguaaaauggaaaaauguuccaguguguuuaaugucguaaauaguucaauaggauuaauaaugguauuauccuucuuguuccuuaauuag

SEQ ID NO: 2898 - RNA, 1311 nt, Artificial Sequence
  derived and/or modified CDS sequence (wt) from Pf(836)__AAA29576.1__CSP
augaugagaaaauuagcuauuuuaucuguuucuuccuuuuuauuuguugaggccuuauuccaggaauaccagugcuauggaaguucgucaaacacaaggguucuaaaugaauuaaauuaugauaaugcaggcaucaauuuauauaaugaauuagaaaugaauuauuaugggaaacaggaaaauugguauagucuuaaaaaaaauaguagaucacuuggagaaaaugaugauggaaauaauaauaauggagauaauggucgugaagguaaagaugaagauaaaagagauggaaauaacgaagacaacgagaaauuaaggaaaccaaaacauaaaaaauuaaagcaaccaggggaugguaauccugauccaaaugcaaacccaaauguagaucccaaugccaacccaaauguagauccaaaugcaaacccaaaugcaaacccaaaugcaaacccaaaugcaaacccaaaugcaaacccaaaugcaaacccaaaugcaaacccaaaugcaaacccaaaugcaaacccaaaugcaaacccaaaugcaaacccaaaugcaaacccaaaugcaaacccaaaugcaaacccaaaugcaaacccaaacguagauccuaaugcaaauccaaaugcaaacccaaaugcaaacccuaacgcaaaccccaaugcaaauccuaaugcaaauccuaaugcaaauccuaaugccaauccaaaugcaaauccaaaugcaaacccaaacgcaaaccccaaugcaaauccuaaugcaaauccuaaugcaaauccuaaugccaauccaaaugcaaauccaaaugcaaacccaaacgcaaaccccaaugcaaauccuaaugccaauccaaaugcaaauccaaaugcaaacccaaaugcaaacccaaaugcaaacccaaaugcaaacccaaaugcaaaccccaaugcaaauccuaauaaaaacaaucaagguaauggacaaggucacaauaugccaaaugacccaaaccgaaauguagaugaaaaugcuaaugccaacaaugcuguaaaaaauaauaauaacgaagaaccaagugauaagcacauaacagaauauuuaaagaaaauacaaaauucucuuucaacugaaugguccccauguaguguaacuuguggaaaugguauucaaguuagaauaaagccuggcucugcugguaaaucuaaagacgaauuagauuaugaaaaugauauugaaaaaaaaauuuguaaaauggaaaaauguuccaguguguuuaaugucguaaauaguucaauaggauuaauaaugguauuauccuucuuguuccuuaauuag

SEQ ID NO: 2899 - RNA, 1311 nt, Artificial Sequence
  derived and/or modified CDS sequence (wt) from Pf(842)__AAA29545.1__CSP
augaugagaaaauuagcuauuuuaucuguuucuuccuuuuuauuuguugaggccuuauuccaggaauaccagugcuauggaaguucgucaaacacaaggguucuaaaugaauuaaauuaugauaaugcaggcaucaauuuauauaaugaauuagaaaugaauuauuaugggaaacaggaaaauugguauagucuuaaaaaaaauaguagaucacuuggagaaaaugaugauggaaauaauaauaauggagauaauggucgugaagguaaagaugaagauaaaagagauggaaauaacgaagacaacgagaaauuaaggaaaccaaaacauaaaaaauuaaagcaaccaggggaugguaauccugauccaaaugcaaacccaaauguagaucccaaugccaacccaaauguagauccaaaugcaaacccaaauguagauccaaaugcaaacccaaaugcaaacccaaaugcaaacccaaaugcaaacccaaaugcaaacccaaaugcaaacccaaaugcaaacccaaaugcaaacccaaaugcaaacccaaaugcaaacccaaaugcaaacccaaaugcaaacccaaaugcaaacccaaaugcaaacccaaaugcaaacccaaaugcaaaccccaaugcaaacccaaaugcaaaccccaaugcaaauccuaaugcaaacccaaaugcaaacccaaaugcaaacccaaaugcaaaccccaaugcaaauccuaaugcaaaccccaaugcaaauccuaaugcaaauccuaaugccaauccaaaugcaaauccaaaugcaaacccaaacgcaaaccccaaugcaaauccuaaugccaauccaaaugcaaauccaaaugcaaaccccaaugcaaauccuaaugccaauccaaaugcaaauccaaaugcaaacccaaaugcaaacccaaaugcaaauccuaauaaaaacaaucaagguaauggacaaggucacaauaugccaaaugacccaaaccgaaauguagaugaaaaugcuaaugccaacaaugauguaaaaaauaauaauaacgaagaaccaagugauaagcacauagaacaauauuuaaagaaaauacaauauucucuuucaacugaaugguccccauguaguguaacuuguggaaaugguauucaaguuagaauaaagccuggcucugcugauaaaccuaaagaccaauuagauuaugaaaaugauauugaaaaaaaaauuuguaaaauggaaaaauguuccaguguguuuaaugucguaaauaguucaauaggauuaauaaugguauuauccuucuuguuccuuaauuag

SEQ ID NO: 2900 - RNA, 1311 nt, Artificial Sequence
  derived and/or modified CDS sequence (wt) from Pf(India)__AAN87576.1__CSP
augaugagaaaauuagcuauuuuaucuguuucuuccuuuuuauuuguugaggccuuauuccaggaauaccagugcuauggaaguucgucaaacacaaggguucuaaaugaauuaaauuaugauaaugcaggcacuaauuuauauaaugaauuagaaaugaauuauuaugggaaacaggaaaauugguauagucuuaaaaaaaauaguagaucacuuggagaaaaugaugauggaaauaauaauaauggagauaauggucgugaagguaaagaugaagauaaaagagauggaaauaacgaagacaacgagaaauuaaggaaaccaaaacauaaaaaauuaaagcaaccaggggaugguaauccugauccaaaugcaaacccaaauguagaucccaaugccaacccaaauguagauccaaaugcaaacccaaaugcaaacccaaaugcaaacccaaaugcaaacccaaaugcaaacccaaaugcaaacccaaaugcaaacccaaaugcaaacccaaaugcaaacccaaaugcaaacccaaaugcaaacccaaaugcaaacccaaaugcaaacccaaaugcaaacccaaaugcaaacccaaaugcaaacccaaaugcaaacccaaaugcaaauccaaaugcaaacccaaaugcaaacccaaacgcaaaccccaaugcaaauccuaaugcaaauccuaaugcaaauccuaaugccaauccaaaugcaaauccaaaugcaaacccaaacgcaaaccccaaugcaaauccuaaugccaauccaaaugcaaauccaaaugcaaacccaaacgcaaaccccaaugcaaauccuaaugccaauccaaaugcaaauccaaaugcaaaccccaaugcaaauccuaaugccaauccaaaugcaaauccaaaugcaaacccaaaugcaaacccaaaugcaaauccuaauaaaaacaaucaagguaauggacaaggucacaauaugccaaaugacccaaaccgaaauguagaugaaaaugcuaaugccaacaaugauguaaaaaauaauaauaacgaagaaccaagugauaagcacauagaagaauauuuaaagaaaauacaaaauucucuuucaacugaaugguccccauguaguguaacuuguggaaaugguauucaaguuagaauaaagccuggcucugcuaauaaaccuaaagacgaauuaaauuaugaaaaugauauugaaaaaaaaauuuguaaaauggaaaaauguuccaguguguuuaaugucguaaauaguucaauaggauuaauaaugguauuauccuucuuguuccuuaauuag

SEQ ID NO: 2901 - RNA, 1311 nt, Artificial Sequence
  derived and/or modified CDS sequence (wt) from Pf(India)__AAN87620.1__CSP
augaugagaaaauuagcuauuuuaucuguuucuuccuuuuuauuuguugaggccuuauuccaggaauaccagugcuauggaaguucgucaaacacaaggguucuaaaugaauuaaauuaugauaaugcaggcacuaauuuauauaaugaauuagaaaugaauuauuaugggaaacaggaaaauugguauagucuuaaaaaaaauaguagaucacuuggagaaaaugaugauggaaauaauaauaauggagauaauggucgugaagguaaagaugaagauaaaagagauggaaauaacgaagacaacgagaaauuaaggaaaccaaaacauaaaaaauuaaagcaaccagggggugauaauccugauccaaaugcaaacccaaauguagauccaaaugcaaacccaaaugcaaacccaaaugcaaacccaaaugcaaacccaaauguaaacccaaaugcaaacccaaaugcaaacccaaaugcaaacccaaaugcaaacccaaaugcaaacccaaaugcaaacccaaaugcaaacccaaaugcaaacccaaacguagauccuaaugcaaauccaaaugcaaacccaaaugcaaacccaaacgcaaaccccaaugcaaauccuaaugcaaauccuaaugcaaauccuaaugccaauccaaaugcaaauccaaaugcaaacccaaacgcaaaccccaaugcaaauccuaaugccaauccaaaugcaaauccaaaugcaaacccaaacgcaaaccccaaugcaaauccuaaugccaauccaaaugcaaauccaaaugcaaacccaaacgcaaaccccaaugcaaauccuaaugccaauccaaaugcaaauccaaaugcaaaccccaaugcaaauccuaaugccaauccaaaugcaaauccaaaugcaaacccaaaugcaaacccaaaugcaaauccuaauaaaaacaaucaagguaauggacaaggucacaauaugccaaaugacccaaaccgaaauguagaugaaaaugcuaaugccaacaaugcuguaaaaaauaauaauaacgaagaaccaagugauaagcacauagaacaauauuuaaagaaaauacaaaauucucuuucaacugaaugguccccauguaguguaacuuguggaaaugguauucaaguuagaauaaagccuggcucugcuaauaaaccuaaagacgaauuagauuaugaaaaugauauugaaaaaaaaauuuguaaaauggaaaaauguuccaguguguuuaaugucguaaauaguucaauaggauuaauaaugguauuauccuucuuguuccuuaauuag

SEQ ID NO: 2902 - RNA, 1311 nt, Artificial Sequence
  derived and/or modified CDS sequence (wt) from Pf(PFS19)__BAN59401.1__CSP
augaugagaaaauuagcuauuuuaucuguuucuuccuuuuuauuuguugaggccuuauuccaggaauaccagugcuauggaaguucgucaaacacaaggguucuaaaugaauuaaauuaugauaaugcaggcacuaauuuauauaaugaauuagaaaugaauuauuaugggaaacaggaaaauugguauagucuuaaaaaaaauaguagaucacuuggagaaaaugaugauggaaauaauaauaauggagauaauggucgugaagguaaagaugaagauaaaagagauggaaauaacgaagacaacgagaaauuaaggaaaccaaaacauaaaaaauuaaagcaaccaggggaugguaauccugauccaaaugcaaacccaaauguagaucccaaugccaacccaaauguagauccaaaugcaaacccaaauguagauccaaaugcaaacccaaaugcaaacccaaaugcaaacccaaaugcaaacccaaaugcaaacccaaaugcaaacccaaaugcaaacccaaaugcaaacccaaaugcaaacccaaaugcaaacccaaaugcaaacccaaaugcaaacccaaaugcaaacccaaaugcaaacccaaaugcaaacccaaaugcaaacccaaaugcaaacccaaaugcaaacccaaaugcaaaccccaaugcaaacccaaaugcaaaccccaaugcaaauccuaaugcaaacccaaaugcaaacccaaaugcaaacccaaacgcaaaccccaaugcaaauccuaaugcaaaccccaaugcaaauccuaaugcaaauccuaaugccaauccaaaugcaaauccaaaugcaaacccaaacgcaaaccccaaugcaaauccuaaugccaauccaaaugcaaauccaaaugcaaacccaaaugcaaacccaaaugcaaaccccaaugcaaauccuaauaaaaacaaucaagguaauggacaaggucacaauaugccaaaugacccaaaccgaaauguagaugaaaaugcuaaugccaacaaugcuguaaaaaauaauaauaacgaagaaccaagugauaagcacauagaacaauauuuaaagaaaauacaaaauucucuuucaacugaaugguccccauguaguguaacuuguggaaaugguauucaaguuagaauaaagccuggcucugcuaauaaaccuaaagacgaauuagauuaugaaaaugauauugaaaaaaaaauuuguaaaauggaaaaauguuccaguguguuuaaugucguaaauaguucaauaggauuaauaaugguauuauccuucuuguuccuuaauuag

SEQ ID NO: 2903 - RNA, 1311 nt, Artificial Sequence
  derived and/or modified CDS sequence (wt) from Pf(Sol95-121)__BAM85068.1__CSP
augaugagaaaauuagcuauuuuaucuguuucuuccuuuuuauuuguugaggccuuauuccaggaauaccagugcuauggaaguucgucaaacacaaggguucuaaaugaauuaaauuaugauaaugcaggcacuaauuuauauaaugaauuagaaaugaauuauuaugggaaacaggaaaauugguauagucuuaaaaaaaauaguagaucacuuggagaaaaugaugauggaaauaauaauaauggagauaauggucgugaagguaaagaugaagauaaaagagauggaaauaacgaagacaacgagaaauuaaggaaaccaaaacauaaaaaauuaaagcaaccaguggaugguaauccugauccaaaugcaaacccaaauguagaucccaaugccaacccaaauguagauccaaaugcaaacccaaauguagauccaaaugcaaacccaaaugcaaacccaaaugcaaacccaaaugcaaacccaaaugcaaacccaaaugcaaacccaaaugcaaacccaaacgcaaaccccaaugcaaauccuaaugccaauccaaaugcaaauccaaaugcaaacccaaacgcaaaccccaaugcaaauccuaaugccaauccaaaugcaaauccaaaugcaaacccaaacgcaaaccccaaugcaaauccuaaugccaauccaaaugcaaauccuaaugcaaauccuaaugccaauccaaaugcaaauccaaaugcaaacccaaacgcaaaccccaaugcaaauccuaaugccaauccaaaugcaaauccaaaugcaaacccaaacgcaaaccccaaugcaaauccuaaugccaauccaaaugcaaauccaaaugcaaaccccaaugcaaauccuaaugccaauccaaaugcaaauccaaaugcaaacccaaaugcaaaaccaaaugcaaauccuaauaaaaacaaucaagguaauggacaaggucacaauaugccaaaugacccaaaccgaaauguagaugaaaaugcuaaugccaacaaugcuguaaaaaauaauaauaacgaagaaccaagugauaagcacauagaacaauauuuaaagaaaauacaaaauucucuuucaacugaaugguccccauguaguguaacuuguggaaaugguauucaaguuagaauaaagccuggcucugcugauaaaccuaaagaccaauuagauuaugaaaaugauauugaaaaaaaaauuuguaaaauggaaaaauguuccaguguguuuaaugucguaaauaguucaauaggauuaauaaugguauuauccuucuuguuccuuaauuag

SEQ ID NO: 2904 - RNA, 1311 nt, Artificial Sequence
  derived and/or modified CDS sequence (wt) from Pf(T837)__BAM84914.1__CSP
augaugagaaaauuagcuauuuuaucuguuucuuccuuuuuauuuguugaggccuuauuccaggaauaccagugcuauggaaguucgucaaacacaaggguucuaaaugaauuaaauuaugauaaugcaggcacuaauuuauauaaugaauuagaaaugaauuauuaugggaaacaggaaaauugguauagucuuaaaaaaaauaguagaucacuuggagaaaaugaugauggaaauaauaauaauggagauaauggucgugaagguaaagaugaagauaaaagagauggaaauaacgaagacaacgagaaauuaaggaaaccaaaacauaaaaaauuaaagcaaccaggggaugguaauccugauccaaaugcaaacccaaauguagaucccaaugccaacccaaauguagauccaaaugcaaacccaaaugcaaacccaaaugcaaacccaaaugcaaacccaaaugcaaacccaaaugcaaacccaaaugcaaacccaaaugcaaacccaaaugcaaacccaaaugcaaacccaaaugcaaacccaaaugcaaacccaaaugcaaacccaaaugcaaacccaaaugcaaacccaaacguagauccuaaugcaaauccaaaugcaaacccaaaugcaaacccaaacgcaaaccccaaugcaaauccuaaugcaaauccuaaugcaaauccuaaugccaauccaaaugcaaauccaaaugcaaacccaaacgcaaaccccaaugcaaauccuaaugcaaauccuaaugcaaauccuaaugccaauccaaaugcaaauccaaaugcaaacccaaacgcaaaccccaaugcaaauccuaaugccaauccaaaugcaaauccaaaugcaaacccaaaugcaaacccaaaugcaaacccaaaugcaaacccaaaugcaaaccccaaugcaaauccuaauaaaaacaaucaagguaauggacaaggucacaauaugccaaaugacccaaaccgaaauguagaugaaaaugcuaaugccaacaaugcuguaaaaaauaauaauaacgaagaaccaagugauaagcacauaacagaauauuuaaagaaaauacaaaauucucuuucaacugaaugguccccauguaguguaacuuguggaaaugguauucaaguuagaauaaagccuggcucugcugguaaaucuaaagacgaauuagauuaugaaaaugauauugaaaaaaaaauuuguaaaauggaaaaauguuccaguguguuuaaugucguaaauaguucaauaggauuaauaaugguauuauccuucuuguuccuuaauuag

SEQ ID NO: 2905 - RNA, 1311 nt, Artificial Sequence
  derived and/or modified CDS sequence (wt) from Pf(TiMS95-071)__BAM84865.1__CSP
augaugagaaaauuagcuauuuuaucuguuucuuccuuuuuauuuguugaggccuuauuccaggaauaccagugcuauggaaguucgucaaacacaaggguucuaaaugaauuaaauuaugauaaugcaggcacuaauuuauauaaugaauuagaaaugaauuauuaugggaaacaggaaaauugguauagucuuaaaaaaaauaguagaucacuuggagaaaaugaugauggaaauaauaauaauggagauaauggucgugaagguaaagaugaagauaaaagagauggaaauaacgaagacaacgagaaauuaaggaaaccaaaacauaaaaaauuaaagcaaccaggggaugguaauccugauccaaaugcaaacccaaauguagaucccaaugccaacccaaauguagauccaaaugcaaacccaaauguagauccaaaugcaaacccaaaugcaaacccaaaugcaaacccaaaugcaaacccaaaugcaaacccaaaugcaaacccaaaugcaaacccaaaugcaaacccaaaugcaaacccaaaugcaaacccaaaugcaaacccaaaugcaaacccaaaugcaaacccaaaugcaaacccaaaugcaaacccaaaugcaaaccccaaugcaaacccaaaugcaaaccccaaugcaaauccuaaugcaaacccaaaugcaaacccaaaugcaaacccaaacgcaaaccccaaugcaaauccuaaugcaaaccccaaugcaaauccuaaugcaaauccuaaugccaauccaaaugcaaauccaaaugcaaacccaaacgcaaaccccaaugcaaauccuaaugccaauccaaaugcaaauccaaaugcaaaccccaaugcaaauccuaaugccaauccaaaugcaaauccaaaugcaaacccaaaugcaaacccaaaugcaaauccuaauaaaaacaaucaagguaauggacaaggucacaauaugccaaaugacccaaaccgaaauguagaugaaaaugcuaaugccaacaaugauguaaaaaauaauaauaacgaagaaccaagugauaagcacauagaacaauauuuaaagaaaauacaauauucucuuucaacugaaugguccccauguaguguaacuuguggaaaugguauucaaguuagaauaaagccuggcucugcugauaaaccuaaagaccaauuagauuaugaaaaugauauugaaaaaaaaauuuguaaaauggaaaaauguuccaguguguuuaaugucguaaauaguucaauaggauuaauaaugguauuauccuucuuguuccuuaauuag

SEQ ID NO: 2906 - RNA, 1308 nt, Artificial Sequence
  derived and/or modified CDS sequence (wt) from Pf(TM69)__ACO49446.1__CSP
augagaaaauuagcuauuuuaucuguuucuuccuuuuuauuuguugaggccuuauuccaggaauaccagugcuauggaaguucgucaaacacaaggguucuaaaugaauuaaauuaugauaaugcaggcacuaauuuauauaaugaauuagaaaugaauuauuaugggaaacaggaaaauugguauagucuuaaaaaaaauaguagaucacuuggagaaaaugaugauggaaauaauaauaauggagauaauggucgugaagguaaagaugaagauaaaagagauggaaauaacgaagacaacgagaaauuaaggaaaccaaaacauaaaaaauuaaagcaaccaggggaugguaauccugauccaaaugcaaacccaaauguagaucccaaugccaacccaaauguagauccaaaugcaaacccaaauguagauccaaaugcaaacccaaaugcaaacccaaaugcaaacccaaaugcaaacccaaaugcaaacccaaaugcaaacccaaaugcaaacccaaaugcaaacccaaaugcaaacccaaaugcaaacccaaaugcaaacccaaaugcaaacccaaaugcaaacccaaaugcaaacccaaaugcaaacccaaaugcaaaccccaaugcaaacccaaaugcaaaccccaaugcaaauccuaaugcaaacccaaaugcaaacccaaaugcaaacccaaacgcaaaccccaaugcaaauccuaaugcaaaccccaaugcaaauccuaaugcaaauccuaaugccaauccaaaugcaaauccaaaugcaaacccaaacgcaaaccccaaugcaaauccuaaugccaauccaaaugcaaauccaaaugcaaaccccaaugcaaauccuaaugccaauccaaaugcaaauccaaaugcaaacccaaaugcaaacccaaaugcaaauccuaauaaaaacaaucaagguaauggacaaggucacaauaugccaaaugacccaaaccgaaauguagaugaaaaugcuaaugccaacaaugauguaaaaaauaauaauaacgaagaaccaagugauaagcacauagaacaauauuuaaagaaaauacaauauucucuuucaacugaaugguccccauguaguguaacuuguggaaaugguauucaaguuagaauaaagccuggcucugcugauaaaccuaaagaccaauuagauuaugaaaaugauauugaaaaaaaaauuuguaaaauggaaaaauguuccaguguguuuaaugucguaaauaguucaauaggauuaauaaugguauuauccuucuuguuccuuaauuag

SEQ ID NO: 2907 - RNA, 1308 nt, Artificial Sequence
  derived and/or modified CDS sequence (wt) from Pf(TMS177)__ACO49503.1__CSP
augagaaaauuagcuauuuuaucuguuucuuccuuuuuauuuguugaggccuuauuccaggaauaccagugcuauggaaguucgucaaacacaaggguucuaaaugaauuaaauuaugauaaugcaggcacuaauuuauauaaugaauuagaaaugaauuauuaugggaaacaggaaaauugguauagucuuaaaaaaaauaguagaucacuuggagaaaaugaugauggaaauaauaauaauggagauaauggucgugaagguaaagaugaagauaaaagagauggaaauaacgaagacaacgagaaauuaaggaaaccaaaacauaaaaaauuaaagcaaccaggggaugguaauccugauccaaaugcaaacccaaauguagaucccaaugccaacccaaauguagauccaaaugcaaacccaaauguagauccaaaugcaaacccaaaugcaaacccaaaugcaaacccaaaugcaaacccaaaugcaaacccaaaugcaaacccaaaugcaaacccaaaugcaaacccaaaugcaaacccaaaugcaaacccaaaugcaaacccaaaugcaaacccaaaugcaaacccaaaugcaaacccaaaugcaaacccaaaugcaaacccaaaugcaaacccaaaugcaaacccaaaugcaaaccccaaugcaaacccaaaugcaaaccccaaugcaaauccuaaugcaaacccaaaugcaaacccaaaugcaaacccaaacgcaaaccccaaugcaaauccuaaugcaaaccccaaugcaaauccuaaugcaaauccuaaugccaauccaaaugcaaauccaaaugcaaacccaaacgcaaaccccaaugcaaauccuaaugccaauccaaaugcaaauccaaaugcaaacccaaaugcaaacccaaaugcaaaccccaaugcaaauccuaauaaaaacaaucaagguaauggacaaggucacaauaugccaaaugacccaaaccgaaauguagaugaaaaugcuaaugccaacaaugcuguaaaaaauaauaauaacgaagaaccaagugauaagcacauagaacaauauuuaaagaaaauacaaaauucucuuucaacugaaugguccccauguaguguaacuuguggaaaugguauucaaguuagaauaaagccuggcucugcuaauaaaccuaaagacgaauuagauuaugaaaaugauauugaaaaaaaaauuuguaaaauggaaaaauguuccaguguguuuaaugucguaaauaguucaauaggauuaauaaugguauuauccuucuuguuccuuaauuag

SEQ ID NO: 2908 - RNA, 1308 nt, Artificial Sequence
  derived and/or modified CDS sequence (wt) from Pf(TMS178)__ACO49504.1__CSP
augagaaaauuagcuauuuuaucuguuucuuccuuuuuauuuguugaggccuuauuccaggaauaccagugcuauggaaguucgucaaacacaaggguucuaaaugaauuaaauuaugauaaugcaggcacuaauuuauauaaugaauuagaaaugaauuauuaugggaaacaggaaaauugguauagucuuaaaaaaaauaguagaucacuuggagaaaaugaugauggaaauaauaauaauggagauaauggucgugaagguaaagaugaagauaaaagagauggaaauaacgaagacaacgagaaauuaaggaaaccaaaacauaaaaaauuaaagcaaccaggggaugguaauccugauccaaaugcaaacccaaauguagaucccaaugccaacccaaauguagauccaaaugcaaacccaaaugcaaacccaaaugcaaacccaaaugcaaacccaaaugcaaacccaaaugcaaacccaaaugcaaacccaaaugcaaacccaaaugcaaacccaaaugcaaacccaaaugcaaacccaaaugcaaacccuaaugcaaaccccaaugcaaacccaaaugcaaacccaaacguagauccuaaugcaaauccaaaugcaaacccaaaugcaaacccaaacgcaaaccccaaugcaaauccuaaugcaaauccuaaugcaaauccuaaugccaauccaaaugcaaauccaaaugcaaacccaaacgcaaaccccaaugcaaauccuaaugcaaauccuaaugcaaauccuaaugccaauccaaaugcaaauccaaaugcaaacccaaacgcaaaccccaaugcaaauccuaaugccaauccaaaugcaaauccaaaugcaaacccaaaugcaaacccaaaugcaaacccaaaugcaaacccaaaugcaaaccccaaugcaaauccuaauaaaaacaaucaagguaauggacaaggucacaauaugccaaaugacccaaaccgaaauguagaugaaaaugcuaaugccaacaaugcuguaaaaaauaauaauaacgaagaaccaagugauaagcacauaacagaauauuuaaagaaaauacaaaauucucuuucaacugaaugguccccauguaguguaacuuguggaaaugguauucaaguuagaauaaagccuggcucugcugguaaaucuaaagacgaauuagauuaugaaaaugauauugaaaaaaaaauuuguaaaauggaaaaauguuccaguguguuuaaugucguaaauaguucaauaggauuaauaaugguauuauccuucuuguuccuuaauuag

SEQ ID NO: 2909 - RNA, 1305 nt, Artificial Sequence
  derived and/or modified CDS sequence (wt) from Pf(YL864)__ADF48458.1__CSP
augagaaaauuagcuauuuuaucuguuucuuccuuuuuauuuguugaggccuuauuccaggaauaccagugcuauggaaguucgucaaacacaaggguucuaaaugaauuaaauuaugauaaugcaggcacuaauuuauauaaugaauuagaaaugaauuauuaugggaaacaggaaaauugguauagucuuaaaaaaaauaguagaucacuuggagaaaaugaugauggaaauaauaauaauggagauaauggucgugaagguaaagaugaagauaaaagagauggaaauaacgaagacaacgagaaauuaaggaaaccaaaacauaaaaaauuaaagcaaccaggggaugguaauccugauccaaaugcaaacccaaauguagaucccaaugccaacccaaauguagauccaaaugcaaacccaaauguagauccaaaugcaaacccaaaugcaaacccaaaugcaaacccaaaugcaaacccaaaugcaaacccaaaugcaaacccaaaugcaaacccaaaugcaaacccaaaugcaaacccaaaugcaaacccaaaugcaaacccaaaugcaaaccccaaugcaaauccuaaugcaaacccaaaugcaaacccaaacguagauccuaaugcaaauccaaaugcaaacccaaaugcaaacccaaacgcaaaccccaaugcaaauccuaaugcaaauccuaaugccaauccaaaugcaaauccaaaugcaaacccaaacgcaaaccccaaugcaaauccuaaugccaauccaaaugcaaauccaaaugcaaacccaaacgcaaaccccaaugcaaauccuaaugccaauccaaaugcaaauccaaaugcaaaccccaaugcaaauccuaaugccaauccaaaugcaaauccaaaugcaaacccaaaugcaaacccaaaugcaaauccuaauaaaaacaaucaagguaauggacaaggucacaauaugccaaaugacccaaaccgaaauguagaugaaaaugcuaaugccaacaaugaugaaaauaauaauaacgaagaaccaagugauaagcacauagaacaauauuuaaagaaaauacaauauucucuuucaacugaaugguccccauguaguguaacuuguggaaaugguauucaaguuagaauaaagccuggcucugcugauaaaccuaaagaccaauuagauuaugaaaaugauauugaaaaaaaaauuuguaaaauggaaaaauguuccaguguguuuaaugucguaaauaguucaauaggauuaauaaugguauuauccuucuuguuccuuaauuag

SEQ ID NO: 2910 - RNA, 1299 nt, Artificial Sequence
  derived and/or modified CDS sequence (wt) from Pf(838)__AAA29543.1__CSP
augaugagaaaauuagcuauuuuaucuguuucuuccuuuuuauuuguugaggccuuauuccaggaauaccagugcuauggaaguucgucaaacacaaggguucuaaaugaauuaaauuaugauaaugcaggcaucaauuuauauaaugaauuagaaaugaauuauuaugggaaacaggaaaauugguauagucuuaaaaaaaauaguagaucacuuggagaaaaugaugauggaaauaauaauaauggagauaauggucgugaagguaaagaugaagauaaaagagauggaaauaacgaagacaacgagaaauuaaggaaaccaaaacauaaaaaauuaaagcaaccaggggaugguaauccugauccaaaugcaaacccaaauguagaucccaaugccaacccaaauguagauccaaaugcaaacccaaauguagauccaaaugcaaacccaaaugcaaacccaaaugcaaacccaaaugcaaacccaaaugcaaacccaaaugcaaacccaaaugcaaacccaaaugcaaacccaaaugcaaacccaaaugcaaacccaaaugcaaacccaaaugcaaacccaaaugcaaacccaaaugcaaacccaaaugcaaacccaaaugcaaacccaaaugcaaacccaaaugcaaaccccaaugcaaauccuaaugcaaauccuaaugcaaauccuaaugccaauccaaaugcaaauccaaaugcaaacccaaacgcaaaccccaaugcaaauccuaaugccaauccaaaugcaaauccaaaugcaaacccaaacgcaaaccccaaugcaaauccuaaugccaauccaaaugcaaauccaaaugcaaaccccaaugcaaauccuaaugccaauccaaaugcaaauccaaaugcaaacccaaaugcaaacccaaaugcaaauccuaauaaaaacaaucaagguaauggacaaggucacaauaugccaaaugacccaaaccgaaauguagaugaaaaugcuaaugccaacaaugcuguaaaaaauaauaauaacgaagaaccaagugauaagcacauagaacaauauuuaaagaaaauacaaaauucucuuucaacugaaugguccccauguaguguaacuuguggaaaugguauucaaguuagaauaaagccuggcucugcuaauaaaccuaaagacgaauuagauuaugaaaaugauauugaaaaaaaaauuuguaaaauggaaaaauguuccaguguguuuaaugucguaaauaguucaauaggauuaauaaugguauuauccuucuuguuccuuaauuag

SEQ ID NO: 2911 - RNA, 1299 nt, Artificial Sequence
  derived and/or modified CDS sequence (wt) from Pf(834a)__AAA29571.1__CSP
augaugagaaaauuagcuauuuuaucuguuucuuccuuuuuauuuguugaggccuuauuccaggaauaccagugcuauggaaguucgucaaacacaaggguucuaaaugaauuaaauuaugauaaugcaggcaucaauuuauauaaugaauuagaaaugaauuauuaugggaaacaggaaaauugguauagucuuaaaaaaaauaguagaucacuuggagaaaaugaugauggaaauaauaauaauggagauaauggucgugaagguaaagaugaagauaaaagagauggaaauaacgaagacaacgagaaauuaaggaaaccaaaacauaaaaaauuaaagcaaccaggggaugguaauccugauccaaaugcaaacccaaauguagaucccaaugccaacccaaauguagaucccaaugccaacccaaauguagauccaaaugcaaacccaaauguagauccaaaugcaaacccaaaugcaaacccaaaugcaaacccaaaugcaaacccaaaugcaaacccaaaugcaaacccaaaugcaaacccaaaugcaaacccaaaugcaaacccaaaugcaaacccaaaugcaaacccaaaugcaaacccaaaugcaaacccaaaugcaaacccaaaugcaaacccaaaugcaaaccccaaugcaaacccaaaugcaaaccccaaugcaaauccuaaugcaaacccaaaugcaaacccaaaugcaaacccaaacgcaaaccccaaugcaaauccuaaugcaaaccccaaugcaaauccuaaugcaaauccuaaugccaauccaaaugcaaauccaaaugcaaacccaaacgcaaaccccaaugcaaauccuaaugccaauccaaaugcaaauccaaaugcaaacccaaaugcaaacccaaaugcaaaccccaaugcaaauccuaauaaaaacaaucaagguaauggacaaggucacaauaugccaaaugacccaaaccgaaauguagaugaaaaugcuaaugccaacaaugcuguaaaaaauaauaauaacgaagaaccaagugauaagcacauagaacaauauuuaaagaaaauacaaaauucucuuucaacugaaugguccccauguaguguaacuuguggaaaugguauucaaguuagaauaaagccuggcucugcuaauaaaccuaaagacgaauuagauuaugaaaaugauauugaaaaaaaaauuuguaaaauggaaaaauguuccaguguguuuaaugucguaaauaguucaauaggauuaauaaugguauuauccuucuuguuccuuaauuag

SEQ ID NO: 2912 - RNA, 1299 nt, Artificial Sequence
  derived and/or modified CDS sequence (wt) from Pf(India)__AAN87622.1__CSP
augaugagaaaauuagcuauuuuaucuguuucuuccuuuuuauuuguugaggccuuauuccaggaauaccagugcuauggaaguucgucaaacacaaggguucuaaaugaauuaaauuaugauaaugcaggcacuaauuuauauaaugaauuagaaaugaauuauuaugggaaacaggaaaauugguauagucuuaaaaaaaauaguagaucacuuggagaaaaugaugauggaaauaauaauaauggagauaauggucgugaagguaaagaugaagauaagagagauggaaauaacgaagacaacgagaaauuaaggaaaccaaaacauaaaaaauuaaagcaaccagcggaugguaauccugauccaaaugcaaacccaaauguagauccaaaugcaaacccaaaugcaaacccaaaugcaaacccaaaugcaaacccaaaugcaaacccaaaugcaaacccaaaugcaaacccaaaugcaaacccaaaugcaaacccaaaugcaaacccaaaugcaaacccaaaugcaaacccaaacguagauccuaaugcaaauccaaaugcaaacccaaaugcaaacccaaacgcaaaccccaaugcaaauccuaaugcaaauccuaaugcaaauccuaaugccaauccaaaugcaaauccaaaugcaaacccaaacgcaaaccccaaugcaaauccuaaugccaauccaaaugcaaauccaaaugcaaacccaaacgcaaaccccaaugcaaauccuaaugccaauccaaaugcaaauccaaaugcaaacccaaacgcaaaccccaaugcaaauccuaaugccaauccaaaugcaaauccaaaugcaaaccccaaugcaaauccuaaugccaauccaaaugcaaauccaaaugcaaacccaaaugcaaacccaaaugcaaauccuaauaaaaacaaucaagguaauggacaaggucacaauaugccaaaugacccaaaccgaaauguagaugaaaaugcuaaugccaacaaugcuguaaaaaauaauaauaacgaagaaccaagugauaagcacauagaacaauauuuaaagaaaauacaaaauucucuuucaacugaaugguccccauguaguguaacuuguggaaaugguauucaaguuagaauaaagccuggcucugcuaauaaaccuaaagacgaauuagauuaugaaaaugauauugaaaaaaaaauuuguaaaauggaaaaauguuccaguguguuuaaugucguaaauaguucaauaggauuaauaaugguauuauccuucuuguuccuuaauuag

SEQ ID NO: 2913 - RNA, 1299 nt, Artificial Sequence
  derived and/or modified CDS sequence (wt) from Pf(PFS31)__BAN59407.1__CSP
augaugagaaaauuagcuauuuuaucuguuucuuccuuuuuauuuguugaggccuuauuccaggaauaccagugcuauggaaguucgucaaacacaaggguucuaaaugaauuaaauuaugauaaugcaggcacuaauuuauauaaugaauuagaaaugaauuauuaugggaaacaggaaaauugguauagucuuaaaaaaaauaguagaucacuuggagaaaaugaugauggaaauaauaauaauggagauaauggucgugaagguaaagaugaagauaaaagagauggaaauaacgaagacaacgagaaauuaaggaaaccaaaacauaaaaaauuaaagcaaccaggggaugguaauccugauccaaaugcaaacccaaauguagaucccaaugccaacccaaauguagauccaaaugcaaacccaaauguagauccaaaugcaaacccaaaugcaaacccaaaugcaaacccaaaugcaaacccaaaugcaaacccaaaugcaaacccaaaugcaaacccaaaugcaaacccaaaugcaaacccaaaugcaaacccaaaugcaaacccaaaugcaaacccaaaugcaaacccaaaugcaaacccaaaugcaaauccaaaugcaaacccaaaugcaaacccaaacgcaaaccccaaugcaaauccuaaugcaaauccuaaugcaaauccuaaugccaauccaaaugcaaauccaaaugcaaacccaaacgcaaaccccaaugcaaauccuaaugccaauccaaaugcaaauccaaaugcaaacccaaacgcaaaccccaaugcaaauccuaaugccaauccaaaugcaaauccaaaugcaaaccccaaugcaaauccuaaugccaauccaaaugcaaauccaaaugcaaacccaaaugcaaacccaaaugcaaauccuaauaaaaacaaucaagguaauggacaaggucacaauaugccaaaugacccaaaccgaaauguagaugaaaaugcuaaugccaacaaugauguaaaaaauaauaauaacgaagaaccaagugauaagcacauagaagaauauuuaaagaaaauacaaaauucucuuucaacugaaugguccccauguaguguaacuuguggaaaugguauucaaguuagaauaaagccuggcucugcuaauaaaccuaaagacgaauuaaauuaugaaaaugauauugaaaaaaaaauuuguaaaauggaaaaauguuccaguguguuuaaugucguaaauaguucaauaggauuaauaaugguauuauccuucuuguuccuuaauuag

SEQ ID NO: 2914 - RNA, 1299 nt, Artificial Sequence
  derived and/or modified CDS sequence (wt) from Pf(PNG912-070)__BAM85010.1__CSP
augaugagaaaauuagcuauuuuaucuguuucuuccuuuuuauuuguugaggccuuauuccaggaauaccagugcuauggaaguucgucaaacacaaggguucuaaaugaauuaaauuaugauaaugcaggcacuaauuuauauaaugaauuagaaaugaauuauuaugggaaacaggaaaauugguauagucuuaaaaaaaauaguagaucacuuggagaaaaugaugauggaaauaauaauaauggagauaauggucgugaagguaaagaugaagauaaaagagauggaaauaacgaagacaacgagaaauuaaggaaaccaaaacauaaaaaauuaaagcaaccaguggaugguaauccugauccaaaugcaaacccaaauguagaucccaaugccaacccaaauguagauccaaaugcaaacccaaauguagauccaaaugcaaacccaaaugcaaacccaaaugcaaacccaaaugcaaacccaaaugcaaacccaaaugcaaacccaaacgcaaaccccaaugcaaauccuaaugccaauccaaaugcaaauccaaaugcaaacccaaacgcaaaccccaaugcaaauccuaaugccaauccaaaugcaaauccaaaugcaaacccaaacgcaaaccccaaugcaaauccuaaugccaauccaaaugcaaauccuaaugcaaauccuaaugccaauccaaaugcaaauccaaaugcaaacccaaacgcaaaccccaaugcaaauccuaaugccaauccaaaugcaaauccaaaugcaaacccaaacgcaaaccccaaugcaaauccuaaugccaauccaaaugcaaauccaaaugcaaaccccaaugcaaauccuaaugccaauccaaaugcaaauccaaaugcaaacccaaaugcaaacccaaaugcaaauccuaauaaaaacaaucaagguaauggacaaggucacaauaugccaaaugacccaaaccgaaauguagaugaaaaugcuaaugccaacaaugcuguaaaaaauaauaauaacgaagaaccaagugauaagcacauagaacaauauuuaaagaaaauacaaaauucucuuucaacugaaugguccccauguaguguaacuuguggaaaugguauucaaguuagaauaaagccuggcucugcugauaaaccuaaagaccaauuagauuaugaaaaugauauugaaaaaaaaauuuguaaaauggaaaaauguuccaguguguuuaaugucguaaauaguucaauaggauuaauaaugguauuauccuucuuguuccuuaauuag

SEQ ID NO: 2915 - RNA, 1299 nt, Artificial Sequence
  derived and/or modified CDS sequence (wt) from Pf(PVS20)__BAN59429.1__CSP
augaugagaaaauuagcuauuuuaucuguuucuuccuuuuuauuuguugaggccuuauuccaggaauaccagugcuauggaaguucgucaaacacaaggguucuaaaugaauuaaauuaugauaaugcaggcacuaauuuauauaaugaauuagaaaugaauuauuaugggaaacaggaaaauugguauagucuuaaaaaaaauaguagaucacuuggagaaaaugaugauggaaauaauaauaauggagauaauggucgugaagguaaagaugaagauaaaagagauggaaauaacgaagacaacgagaaauuaaggaaaccaaaacauaaaaaauuaaagcaaccaggggaugguaauccugauccaaaugcaaacccaaauguagaucccaaugccaacccaaauguagauccaaaugcaaacccaaauguagauccaaaugcaaacccaaaugcaaacccaaaugcaaacccaaaugcaaacccaaaugcaaacccaaaugcaaacccaaaugcaaacccaaaugcaaacccaaaugcaaacccaaaugcaaacccaaaugcaaacccaaaugcaaacccaaaugcaaacccaaaugcaaacccaaaugcaaacccaaaugcaaacccaaaugcaaacccaaaugcaaaccccaaugcaaacccaaaugcaaaccccaaugcaaauccuaaugcaaacccaaaugcaaacccaaaugcaaacccaaacgcaaaccccaaugcaaauccuaaugcaaaccccaaugcaaauccuaaugcaaauccuaaugccaauccaaaugcaaauccaaaugcaaacccaaacgcaaaccccaaugcaaauccuaaugccaauccaaaugcaaauccaaaugcaaacccaaaugcaaacccaaaugcaaaccccaaugcaaauccuaauaaaaacaaucaagguaauggacaaggucacaauaugccaaaugacccaaaccgaaauguagaugaaaaugcuaaugccaacaaugcuguaaaaaauaauaauaacgaagaaccaagugauaagcacauagaacaauauuuaaagaaaauacaaaauucucuuucaacugaaugguccccauguaguguaacuuguggaaaugguauucaaguuagaauaaagccuggcucugcuaauaaaccuaaagacgaauuagauuaugaaaaugauauugaaaaaaaaauuuguaaaauggaaaaauguuccaguguguuuaaugucguaaauaguucaauaggauuaauaaugguauuauccuucuuguuccuuaauuag

SEQ ID NO: 2916 - RNA, 1299 nt, Artificial Sequence
  derived and/or modified CDS sequence (wt) from Pf(Sol95-241)__BAM85085.1__CSP
augaugagaaaauuagcuauuuuaucuguuucuuccuuuuuauuuguugaggccuuauuccaggaauaccagugcuauggaaguucgucaaacacaaggguucuaaaugaauuaaauuaugauaaugcaggcacuaauuuauauaaugaauuagaaaugaauuauuaugggaaacaggaaaauugguauagucuuaaaaaaaauaguagaucacuuggagaaaaugaugauggaaauaauaauaauggagauaauggucgugaagguaaagaugaagauaaaagagauggaaauaacgaagacaacgagaaauuaaggaaaccaaaacauaaaaaauuaaagcaaccaggggaugguaauccugauccaaaugcaaacccaaauguagaucccaaugccaacccaaauguagaucccaaugccaacccaaauguagauccaaaugcaaacccaaauguagauccaaaugcaaacccaaaugcaaacccaaaugcaaacccaaaugcaaacccaaaugcaaacccaaaugcaaacccaaaugcaaacccaaaugcaaacccaaaugcaaacccaaaugcaaacccaaaugcaaacccaaaugcaaacccaaaugcaaacccaaaugcaaacccaaaugcaaacccaaaugcaaaccccaaugcaaacccaaaugcaaaccccaaugcaaauccuaaugcaaacccaaaugcaaacccaaaugcaaacccaaacgcaaaccccaaugcaaauccuaaugcaaaccccaaugcaaauccuaaugcaaauccuaaugccaauccaaaugcaaauccaaaugcaaacccaaacgcaaaccccaaugcaaauccuaaugccaauccaaaugcaaauccaaaugcaaacccaaaugcaaacccaaaugcaaaccccaaugcaaauccuaauaaaaacaaucaagguaauggacaaggucacaauaugccaaaugacccaaaccgaaauguagaugaaaaugcuaaugccaacaaugcuguaaaaaauaauaauaacgaagaaccaagugauaagcacauagaacaauauuuaaagaaaauacaaaauucucuuucaacugaaugguccccauguaguguaacuuguggaaaugguauucaaguuagaauaaagccuggcucugcuaauaaaccuaaagacgaauuagauuaugaaaaugauauugaaaaaaaaauuuguaaaauggaaaaauguuccaguguguuuaaugucguaaauaguucaauaggauuaauaaugguauuauccuucuuguuccuuaauuag

SEQ ID NO: 2917 - RNA, 1299 nt, Artificial Sequence
  derived and/or modified CDS sequence (wt) from Pf(TiMS95-198)__BAM84895.1__CSP
augaugagaaaauuagcuauuuuaucuguuucuuccuuuuuauuuguugaggccuuauuccaggaauaccagugcuauggaaguucgucaaacacaaggguucuaaaugaauuaaauuaugauaaugcaggcacuaauuuauauaaugaauuagaaaugaauuauuaugggaaacaggaaaauugguauagucuuaaaaaaaauaguagaucacuuggagaaaaugaugauggaaauaauaauaauggagauaauggucgugaagguaaagaugaagauaaaagagauggaaauaacgaagacaacgagaaauuaaggaaaccaaaacauaaaaaauuaaagcaaccaggggaugguaauccugauccaaaugcaaacccaaauguagaucccaaugccaacccaaauguagauccaaaugcaaacccaaauguagauccaaaugcaaacccaaaugcaaacccaaaugcaaacccaaaugcaaacccaaaugcaaacccaaaugcaaacccaaaugcaaacccaaaugcaaacccaaaugcaaacccaaaugcaaacccaaaugcaaacccaaaugcaaacccaaaugcaaacccaaaugcaaacccaaaugcaaacccaaaugcaaacccaaaugcaaacccaaaugcaaaccccaaugcaaacccaaaugcaaaccccaaugcaaauccuaaugcaaacccaaaugcaaacccaaaugcaaacccaaacgcaaaccccaaugcaaauccuaaugcaaaccccaaugcaaauccuaaugcaaauccuaaugccaauccaaaugcaaauccaaaugcaaacccaaacgcaaaccccaaugcaaauccuaaugccaauccaaaugcaaauccaaaugcaaacccaaaugcaaacccaaaugcaaaccccaaugcaaauccuaauaaaaacaaucaagguaauggacaaggucacaauaugccaaaugacccaaaccgaaauguagaugaaaaugcuaaugccaacaaugcuguaaaaaauaauaauaacgaagaaccaagugauaagcacauagaacaauauuuaaagaauauacaaaauucucuuucaacugaaugguccccauguaguguaacuuguggaaaugguauucaaguuagaauaaagccuggcucugcuaauaaaccuaaagacgaauuagauuaugaaaaugauauugaaaaaaaaauuuguaaaauggaaaaauguuccaguguguuuaaugucguaaauaguucaauaggauuaauaaugguauuauccuucuuguuccuuaauuag

SEQ ID NO: 2918 - RNA, 1296 nt, Artificial Sequence
  derived and/or modified CDS sequence (wt) from Pf(D164)__ACO49368.1__CSP
augagaaaauuagcuauuuuaucuguuucuuccuuuuuauuuguugaggccuuauuccaggaauaccagugcuauggaaguucgucaaacacaaggguucuaaaugaauuaaauuaugauaaugcaggcacuaauuuauauaaugaauuagaaaugaauuauuaugggaaacaggaaaauugguauagucuuaaaaaaaauaguagaucacuuggagaaaaugaugauggaaauaauaauaauggagauaauggucgugaagguaaagaugaagauaaaagagauggaaauaacgaagacaacgagaaauuaaggaaaccaaaacauaaaaaauuaaagcaaccaggggaugguaauccugauccaaaugcaaacccaaauguagaucccaaugccaacccaaauguagaucccaaugccaacccaaauguagauccaaaugcaaacccaaauguagauccaaaugcaaacccaaaugcaaacccaaaugcaaacccaaaugcaaacccaaaugcaaacccaaaugcaaacccaaaugcaaacccaaaugcaaacccaaaugcaaacccaaaugcaaacccaaaugcaaacccaaaugcaaacccaaaugcaaacccaaaugcaaacccaaaugcaaacccaaaugcaaaccccaaugcaaacccaaaugcaaaccccaaugcaaauccuaaugcaaacccaaaugcaaacccaaaugcaaacccaaacgcaaaccccaaugcaaauccuaaugcaaaccccaaugcaaauccuaaugcaaauccuaaugccaauccaaaugcaaauccaaaugcaaacccaaacgcaaaccccaaugcaaauccuaaugccaauccaaaugcaaauccaaaugcaaacccaaaugcaaacccaaaugcaaaccccaaugcaaauccuaauaaaaacaaucaagguaauggacaaggucacaauaugccaaaugacccaaaccgaaauguagaugaaaaugcuaaugccaacaaugcuguaaaaaauaauaauaacgaagaaccaagugauaagcacauagaacaauauuuaaagaaaauacaaaauucucuuucaacugaaugguccccauguaguguaacuuguggaaaugguauucaaguuagaauaaagccuggcucugcuaauaaaccuaaagacgaauuagauuaugaaaaugauauugaaaaaaaaauuuguaaaauggaaaaauguuccaguguguuuaaugucguaaauaguucaauaggauuaauaaugguauuauccuucuuguuccuuaauuag

SEQ ID NO: 2919 - RNA, 1296 nt, Artificial Sequence
  derived and/or modified CDS sequence (wt) from Pf(E28)__ACO49378.1__CSP
augagaaaauuagcuauuuuaucuguuucuuccuuuuuauuuguugaggccuuauuccaggaauaccagugcuauggaaguucgucaaacacaaggguucuaaaugaauuaaauuaugauaaugcaggcacuaauuuauauaaugaauuagaaaugaauuauuaugggaaacaggaaaauugguauagucuuaaaaaaaauaguagaucacuuggagaaaaugaugauggaaauaauaauaauggagauaauggucgugaagguaaagaugaagauaaaagagauggaaauaacgaagacaacgagaaauuaaggaaaccaaaacauaaaaaauuaaagcaaccaggggaugguaauccugauccaaaugcaaacccaaauguagaucccaaugccaacccaaauguagauccaaaugcaaacccaaauguagauccaaaugcaaacccaaaugcaaacccaaaugcaaacccaaaugcaaacccaaaugcaaacccaaaugcaaacccaaaugcaaacccaaaugcaaacccaaaugcaaacccaaaugcaaacccaaaugcaaacccaaaugcaaacccaaaugcaaacccaaaugcaaacccaaaugcaaacccaaaugcaaacccaaaugcaaacccaaaugcaaaccccaaugcaaacccaaaugcaaaccccaaugcaaauccuaaugcaaacccaaaugcaaacccaaaugcaaacccaaacgcaaaccccaaugcaaauccuaaugcaaaccccaaugcaaauccuaaugcaaauccuaaugccaauccaaaugcaaauccaaaugcaaacccaaacgcaaaccccaaugcaaauccuaaugccaauccaaaugcaaauccaaaugcaaacccaaaugcaaacccaaaugcaaaccccaaugcaaauccuaauaaaaacaaucaagguaauggacaaggucacaauaugccaaaugacccaaaccgaaauguagaugaaaaugcuaaugccaacaaugcuguaaaaaauaauaauaacgaagaaccaagugauaagcacauagaacaauauuuaaagaauauacaaaauucucuuucaacugaaugguccccauguaguguaacuuguggaaaugguauucaaguuagaauaaagccuggcucugcuaauaaaccuaaagacgaauuagauuaugaaaaugauauugaaaaaaaaauuuguaaaauggaaaaauguuccaguguguuuaaugucguaaauaguucaauaggauuaauaaugguauuauccuucuuguuccuuaauuag

SEQ ID NO: 2920 - RNA, 1296 nt, Artificial Sequence
  derived and/or modified CDS sequence (wt) from Pf(TM121)__ACO49457.1__CSP
augagaaaauuagcuauuuuaucuguuucuuccuuuuuauuuguugaggccuuauuccaggaauaccagugcuauggaaguucgucaaacacaaggguucuaaaugaauuaaauuaugauaaugcaggcacuaauuuauauaaugaauuagaaaugaauuauuaugggaaacaggaaaauugguauagucuuaaaaaaaauaguagaucacuuggagaaaaugaugauggaaauaauaauaauggagauaauggucgugaagguaaagaugaagauaaaagagauggaaauaacgaagacaacgagaaauuaaggaaaccaaaacauaaaaaauuaaagcaaccaggggaugguaauccugauccaaaugcaaacccaaauguagaucccaaugccaacccaaauguagauccaaaugcaaacccaaauguagauccaaaugcaaacccaaaugcaaacccaaaugcaaacccaaaugcaaacccaaaugcaaacccaaaugcaaacccaaaugcaaacccaaaugcaaacccaaaugcaaacccaaaugcaaacccaaaugcaaacccaaaugcaaacccaaaugcaaacccaaaugcaaacccaaaugcaaauccaaaugcaaauccaaaugcaaacccaaacgcaaaccccaaugcaaauccuaaugcaaauccuaaugcaaauccuaaugccaauccaaaugcaaauccaaaugcaaacccaaacgcaaaccccaaugcaaauccuaaugccaauccaaaugcaaauccaaaugcaaacccaaacgcaaaccccaaugcaaauccuaaugccaauccaaaugcaaauccaaaugcaaaccccaaugcaaauccuaaugccaauccaaaugcaaauccaaaugcaaacccaaaugcaaacccaaaugcaaauccuaauaaaaacaaucaagguaauggacaaggucacaauaugccaaaugacccaaaccgaaauguagaugaaaaugcuaaugccaacaaugauguaaaaaauaauaauaacgaagaaccaagugauaagcacauagaacaauauuuaaagaaaauacaauauucucuuucaacugaaugguccccauguaguguaacuuguggaaaugguauucaaguuagaauaaagccuggcucugcuaauaaaccuaaagacgaauuagauuaugaaaaugauauugaaaaaaaaauuuguaaaauggaaaaauguuccaguguguuuaaugucguaaauaguucaauaggauuaauaaugguauuauccuucuuguuccuuaauuag

SEQ ID NO: 2921 - RNA, 1296 nt, Artificial Sequence
  derived and/or modified CDS sequence (wt) from Pf(TM176)__ACO49467.1__CSP
augagaaaauuagcuauuuuaucuguuucuuccuuuuuauuuguugaggccuuauuccaggaauaccagugcuauggaaguucgucaaacacaaggguucuaaaugaauuaaauuaugauaaugcaggcacuaauuuauauaaugaauuagaaaugaauuauuaugggaaacaggaaaauugguauagucuuaaaaaaaauaguagaucacuuggagaaaaugaugauggaaauaauaauaauggagauaauggucgugaagguaaagaugaagauaaaagagauggaaauaacgaagacaacgagaaauuaaggaaaccaaaacauaaaaaauuaaagcaaccaggggaugguaauccugauccaaaugcaaacccaaauguagaucccaaugccaacccaaauguagauccaaaugcaaacccaaauguagauccaaaugcaaacccaaaugcaaacccaaaugcaaacccaaaugcaaacccaaaugcaaacccaaaugcaaacccaaaugcaaacccaaaugcaaacccaaaugcaaacccaaaugcaaacccaaaugcaaacccaaaugcaaaccccaaugcaaauccuaaugcaaacccaaaugcaaauccaaaugcaaacccaaaugcaaacccaaacgcaaaccccaaugcaaauccuaaugcaaauccuaaugcaaauccuaaugccaauccaaaugcaaauccaaaugcaaacccaaacgcaaaccccaaugcaaauccuaaugccaauccaaaugcaaauccaaaugcaaacccaaacgcaaaccccaaugcaaauccuaaugccaauccaaaugcaaauccaaaugcaaaccccaaugcaaauccuaaugccaauccaaaugcaaauccaaaugcaaacccaaaugcaaacccaaaugcaaauccuaauaaaaacaaucaagguaauggacaaggucacaauaugccaaaugacccaaaccgaaauguagaugaaaaugcuaaugccaacaaugauguaaaaaauaauaauaacgaagaaccaagugauaagcacauagaacaauauuuaaagaaaauacaauauucucuuucaacugaaugguccccauguaguguaacuuguggaaaugguauucaaguuagaauaaagccuggcucugcugauaaaccuaaagaccaauuagauuaugaaaaugauauugaaaaaaaaauuuguaaaauggaaaaauguuccaguguguuuaaugucguaaauaguucaauaggauuaauaaugguauuauccuucuuguuccuuaauuag

SEQ ID NO: 2922 - RNA, 1296 nt, Artificial Sequence
  derived and/or modified CDS sequence (wt) from Pf(TSY650)__ACO49541.1__CSP
augagaaaauuagcuauuuuaucuguuucuuccuuuuuauuuguugaggccuuauuccaggaauaccagugcuauggaaguucgucaaacacaaggguucuaaaugaauuaaauuaugauaaugcaggcacuaauuuauauaaugaauuagaaaugaauuauuaugggaaacaggaaaauugguauagucuuaaaaaaaauaguagaucacuuggagaaaaugaugauggaaauaauaauaauggagauaauggucgugaagguaaagaugaagauaaaagagauggaaauaacgaagacaacgagaaauuaaggaaaccaaaacauaaaaaauuaaagcaaccaggggaugguaauccugauccaaaugcaaacccaaauguagaucccaaugccaacccaaauguagauccaaaugcaaacccaaauguagauccaaaugcaaacccaaaugcaaacccaaaugcaaacccaaaugcaaacccaaaugcaaacccaaaugcaaacccaaaugcaaacccaaaugcaaacccaaaugcaaacccaaaugcaaacccaaaugcaaacccaaaugcaaacccaaaugcaaacccaaaugcaaauccaaaugcaaauccaaaugcaaacccaaaugcaaacccaaacgcaaaccccaaugcaaauccuaaugcaaauccuaaugcaaauccuaaugccaauccaaaugcaaauccaaaugcaaacccaaacgcaaaccccaaugcaaauccuaaugccaauccaaaugcaaauccaaaugcaaacccaaacgcaaaccccaaugcaaauccuaaugccaauccaaaugcaaauccaaaugcaaaccccaaugcaaauccuaaugccaauccaaaugcaaauccaaaugcaaacccaaaugcaaacccaaaugcaaauccuaauaaaaacaaucaagguaauggacaaggucacaauaugccaaaugacccaaaccgaaauguagaugaaaaugcuaaugccaacaaugcuguaaaaaauaauaauaacgaagaaccaagugauaagcacauagaacaauauuuaaagaaaauacaaaauucucuuucaacugaaugguccccauguaguguaacuuguggaaaugguauucaaguuagaauaaagccuggcucugcuaauaaaccuaaagacgaauuagauuaugaaaaugauauugaaaaaaaaauuuguaaaauggaaaaauguuccaguguguuuaaugucguaaauaguucaauaggauuaauaaugguauuauccuucuuguuccuuaauuag

SEQ ID NO: 2923 - RNA, 1296 nt, Artificial Sequence
  derived and/or modified CDS sequence (wt) from Pf(TSY682)__ACO49544.1__CSP
augagaaaauuagcuauuuuaucuguuucuuccuuuuuauuuguugaggccuuauuccaggaauaccagugcuauggaaguucgucaaacacaaggguucuaaaugaauuaaauuaugauaaugcaggcacuaauuuauauaaugaauuagaaaugaauuauuaugggaaacaggaaaauugguauagucuuaaaaaaaauaguagaucacuuggagaaaaugaugauggaaauaauaauaauggagauaauggucgugaagguaaagaugaagauaaaagagauggaaauaacgaagacaacgagaaauuaaggaaaccaaaacauaaaaaauuaaagcaaccaggggaugguaauccugauccaaaugcaaacccaaauguagaucccaaugccaacccaaauguagauccaaaugcaaacccaaauguagauccaaaugcaaacccaaaugcaaacccaaaugcaaacccaaaugcaaacccaaaugcaaacccaaaugcaaacccaaaugcaaacccaaaugcaaacccaaaugcaaacccaaaugcaaacccaaaugcaaacccaaaugcaaacccaaaugcaaacccaaaugcaaacccaaaugcaaauccaaaugcaaacccaaaugcaaacccaaacgcaaaccccaaugcaaauccuaaugcaaauccuaaugcaaauccuaaugccaauccaaaugcaaauccaaaugcaaacccaaacgcaaaccccaaugcaaauccuaaugccaauccaaaugcaaauccaaaugcaaacccaaacgcaaaccccaaugcaaauccuaaugccaauccaaaugcaaauccaaaugcaaaccccaaugcaaauccuaaugccaauccaaaugcaaauccaaaugcaaacccaaaugcaaacccaaaugcaaauccuaauaaaaacaaucaagguaauggacaaggucacaauaugccaaaugacccaaaccgaaauguagaugaaaaugcuaaugccaacaaugauguaaaaaauaauaauaacgaagaaccaagugauaagcacauagaagaauauuuaaagaaaauacaaaauucucuuucaacugaaugguccccauguaguguaacuuguggaaaugguauucaaguuagaauaaagccuggcucugcuaauaaaccuaaagacgaauuaaauuaugaaaaugauauugaaaaaaaaauuuguaaaauggaaaaauguuccaguguguuuaaugucguaaauaguucaauaggauuaauaaugguauuauccuucuuguuccuuaauuag

SEQ ID NO: 2924 - RNA, 1287 nt, Artificial Sequence
  derived and/or modified CDS sequence (wt) from Pf(India)__AAN87575.1__CSP
augaugagaaaauuagcuauuuuaucuguuucuuccuuuuuauuuguugaggccuuauuccaggaauaccagugcuauggaaguucgucaaacacaaggguucuaaaugaauuaaauuaugauaaugcaggcacuaauuuauauaaugaauuagaaaugaauuauuaugggaaacaggaaaauugguauagucuuaaaaaaaauaguagaucacuuggagaaaaugaugauggaaauaauaauaauggagauaauggucgugaagguaaagaugaagauaaaagagauggaaauaacgaagacaacgagaaauuaaggaaaccaaaacauaaaaaauuaaagcaaccaggggaugguaauccugaucccaaugcaaacccaaauguagauccaaaugcaaacccaaauguagauccaaaugcaaacccaaaugcaaacccaaaugcaaacccaaaugcaaacccaaaugcaaacccaaaugcaaacccaaaugcaaacccaaaugcaaacccaaaugcaaacccaaaugcaaacccaaaugcaaacccaaaugcaaacccaaaugcaaacccaaaugcaaacccaaaugcaaacccaaaugcaaauccaaaugcaaacccaaaugcaaacccaaacgcaaaccccaaugcaaauccuaaugcaaauccuaaugcaaauccuaaugccaauccaaaugcaaauccaaaugcaaacccaaacgcaaaccccaaugcaaauccuaaugccaauccaaaugcaaauccaaacgcaaacccaaacgcaaaccccaaugcaaauccuaaugccaauccaaaugcaaauccaaaugcaaaccccaaugcaaauccuaaugccaauccaaaugcaaauccaaaugcaaacccaaaugcaaacccaaaugcaaauccuaauaaaaacaaucaagguaauggacgaggucacaauaugccaaaugacccaaaccgaaauguagaugaaaaugcuaaugccaacaaugauguaaaaaauaauaauaacgaagaaccaagugauaagcacauagaagaauauuuaaagaaaauacaaaauucucuuucaacugaaugguccccauguaguguaacuuguggaaaugguauucaaguuagaauaaagccuggcucugcuaauaaaccuaaagacgaauuaaauuaugaaaaugauauugaaaaaaaaauuuguaaaauggaaaaauguuccaguguguuuaaugucguaaauaguucaauaggauuaauaaugguauuauccuucuuguuccuuaauuag

SEQ ID NO: 2925 - RNA, 1287 nt, Artificial Sequence
  derived and/or modified CDS sequence (wt) from Pf(Pal97-082)__BAM84946.1__CSP
augaugagaaaauuagcuauuuuaucuguuucuuccuuuuuauuuguugaggccuuauuccaggaauaccagugcuauggaaguucgucaaacacaaggguucuaaaugaauuaaauuaugauaaugcaggcacuaauuuauauaaugaauuagaaaugaauuauuaugggaaacaggaaaauugguauagucuuaaaaaaaauaguagaucacuuggagaaaaugaugauggaaauaauaauaauggagauaauggucgugaagguaaagaugaagauaaaagagauggaaauaacgaagacaacgagaaauuaaggaaaccaaaacauaaaaaauuaaagcaaccaggggaugguaauccugauccaaaugcaaacccaaauguagaucccaaugccaacccaaauguagauccaaaugcaaacccaaauguagauccaaaugcaaacccaaaugcaaacccaaaugcaaacccaaaugcaaacccaaaugcaaacccaaaugcaaacccaaaugcaaacccaaaugcaaacccaaaugcaaacccaaaugcaaacccaaaugcaaacccaaaugcaaacccaaaugcaaaccccaaugcaaauccuaaugcaaauccuaaugcaaacccaaaugcaaauccuaaugcaaacccaaaugcaaacccaaacguagauccuaaugcaaauccaaaugcaaacccaaaugcaaacccaaacgcaaaccccaaugcaaauccuaaugcaaaccccaaugcaaauccuaaugcaaauccuaaugccaauccaaaugcaaauccaaaugcaaacccaaacgcaaaccccaaugcaaauccuaaugccaauccaaaugcaaauccaaaugcaaacccaaaugcaaacccaaaugcaaaccccaaugcaaauccuaauaaaaacaaucaagguaauggacaaggucacaauaugccaaaugacccaaaccgaaauguagaugaaaaugcuaaugccaacaaugcuguaaaaaauaauaauaacgaagaaccaagugauaagcacauagaacaauauuuaaagaaaauacaaaauucucuuucaacugaaugguccccauguaguguaacuuguggaaaugguauucaaguuagaauaaagccuggcucugcugguaaaucuaaagacgaauuagauuaugaaaaugauauugaaaaaaaaauuuguaaaauggaaaaauguuccaguguguuuaaugucguaaauaguucaauaggauuaauaaugguauuauccuucuuguuccuuaauuag

SEQ ID NO: 2926 - RNA, 1287 nt, Artificial Sequence
  derived and/or modified CDS sequence (wt) from Pf(Pal97-084)__BAM84947.1__CSP
augaugagaaaauuagcuauuuuaucuguuucuuccuuuuuauuuguugaggccuuauuccaggaauaccagugcuauggaaguucgucaaacacaaggguucuaaaugaauuaaauuaugauaaugcaggcacuaauuuauauaaugaauuagaaaugaauuauuaugggaaacaggaaaauugguauagucuuaaaaaaaauaguagaucacuuggagaaaaugaugauggaaauaauaauaauggagauaauggucgugaagguaaagaugaagauaaaagagauggaaauaacgaagacaacgagaaauuaaggaaaccaaaacauaaaaaauuaaagcaaccaggggaugguaauccugauccaaaugcaaacccaaauguagaucccaaugccaacccaaauguagauccaaaugcaaacccaaauguagauccaaaugcaaacccaaaugcaaacccaaaugcaaacccaaaugcaaacccaaaugcaaacccaaaugcaaacccaaaugcaaacccaaaugcaaacccaaaugcaaacccaaaugcaaacccaaaugcaaacccaaaugcaaacccaaaugcaaacccaaaugcaaacccaaaugcaaacccaaaugcaaacccaaaugcaaaccccaaugcaaacccaaaugcaaaccccaaugcaaauccuaaugcaaacccaaaugcaaacccaaaugcaaacccaaacgcaaaccccaaugcaaauccuaaugcaaaccccaaugcaaauccuaaugcaaauccuaaugccaauccaaaugcaaauccaaaugcaaacccaaacgcaaaccccaaugcaaauccuaaugccaauccaaaugcaaauccaaaugcaaacccaaaugcaaacccaaaugcaaaccccaaugcaaauccuaauaaaaacaaucaagguaauggacaaggucacaauaugccaaaugacccaaaccgaaauguagaugaaaaugcuaaugccaacaaugcuguaaaaaauaauaauaacgaagaaccaagugaucagcacauagaaaaauauuuaaagauaauacaaaauucucuuucaacugaaugguccccauguaguguaacuuguggaaaugguauucaaguuagaauaaagccuggcucugcugauaaaccuaaagaccaauuagauuaugcaaaugauauugaaaaaaaaauuuguaaaauggaaaaauguuccaguguguuuaaugucguaaauaguucaauaggauuaauaaugguauuauccuucuuguuccuuaauuag

SEQ ID NO: 2927 - RNA, 1287 nt, Artificial Sequence
  derived and/or modified CDS sequence (wt) from Pf(PFS54)__BAN59412.1__CSP
augaugagaaaauuagcuauuuuaucuguuucuuccuuuuuauuuguugaggccuuauuccaggaauaccagugcuauggaaguucgucaaacacaaggguucuaaaugaauuaaauuaugauaaugcaggcacuaauuuauauaaugaauuagaaaugaauuauuaugggaaacaggaaaauugguauagucuuaaaaaaaauaguagaucacuuggagaaaaugaugauggaaauaauaauaauggagauaauggucgugaagguaaagaugaagauaaaagagauggaaauaacgaagacaacgagaaauuaaggaaaccaaaacauaaaaaauuaaagcaaccaggggaugauaauccugauccaaaugccaacccaaauguagauccaaaugccaacccaaauguagauccaaaugcaaacccaaaugcaaacccaaaugcaaacccaaaugcaaacccaaaugcaaacccaaaugcaaacccaaaugcaaacccaaaugcaaacccaaaugcaaacccaaaugcaaacccaaaugcaaacccaaaugcaaacccaaaugcaaacccaaaugcaaacccaaacguagauccuaaugcaaauccaaaugcaaacccaaaugcaaacccaaacgcaaaccccaaugcaaauccuaaugcaaauccuaaugcaaauccuaaugccaauccaaaugcaaauccaaaugcaaacccaaacgcaaaccccaaugcaaauccuaaugccaauccaaaugcaaauccaaaugcaaacccaaacgcaaaccccaaugcaaauccuaaugccaauccaaaugcaaauccaaaugcaaaccccaaugcaaauccuaaugccaauccaaaugcaaauccaaaugcaaacccaaaugcaaacccaaaugcaaauccuaauaaaaacaaucaagguaauggacaaggucacaauaugccaaaugacccaaaccgaaauguagaugaaaaugcuaaugccaacaaugcuguaaaaaauaauaauaacgaagaaccaagugauaagcacauagaacaauauuuaaagaaaauacaauauucucuuucaacugaaugguccccauguaguguaacuuguggaaaugguauucaaguuagaauaaagccuggcucugcugauaaaccuaaagaccaauuagauuaugaaaaugauauugaaaaaaaaauuuguaaaauggaaaaauguuccaguguguuuaaugucguaaauaguucaauaggauuaauaaugguauuauccuucuuguuccuuaauuag

SEQ ID NO: 2928 - RNA, 1287 nt, Artificial Sequence
  derived and/or modified CDS sequence (wt) from Pf(PFS79)__BAN59422.1__CSP
augaugagaaaauuagcuauuuuaucuguuucuuccuuuuuauuuguugaggccuuauuccaggaauaccagugcuauggaaguucgucaaacacaaggguucuaaaugaauuaaauuaugauaaugcaggcacuaauuuauauaaugaauuagaaaugaauuauuaugggaaacaggaaaauugguauagucuuaaaaaaaauaguagaucacuuggagaaaaugaugauggaaauaauaauaauggagauaauggucgugaagguaaagaugaagauaaaagagauggaaauaacgaagacaacgagaaauuaaggaaaccaaaacauaaaaaauuaaagcaaccaggggaugguaauccugauccaaaugcaaacccaaauguagaucccaaugccaacccaaauguagauccaaaugcaaacccaaauguagauccaaaugcaaacccaaaugcaaacccaaaugcaaacccaaaugcaaacccaaaugcaaacccaaaugcaaacccaaaugcaaacccaaaugcaaacccaaaugcaaacccaaaugcaaacccaaaugcaaacccaaaugcaaacccaaaugcaaacccaaaugcaaacccaaaugcaaacccaaaugcaaacccaaaugcaaaccccaaugcaaacccaaaugcaaaccccaaugcaaauccuaaugcaaacccaaaugcaaacccaaaugcaaacccaaacgcaaaccccaaugcaaauccuaaugcaaaccccaaugcaaauccuaaugcaaauccuaaugccaauccaaaugcaaauccaaaugcaaacccaaacgcaaaccccaaugcaaauccuaaugccaauccaaaugcaaauccaaaugcaaacccaaaugcaaacccaaaugcaaaccccaaugcaaauccuaauaaaaacaaucaagguaauggacaaggucacaauaugccaaaugacccaaaccgaaauguagaugaaaaugcuaaugccaacaaugcuguaaaaaauaauaauaacgaagaaccaagugauaagcacauagaacaauauuuaaagaaaauacaaaauucucuuucaacugaaugguccccauguaguguaacuuguggaaaugguauucaaguuagaauaaagccuggcucugcuaauaaaccuaaagacgaauuagauuaugaaaaugauauugaaaaaaaaauuuguaaaauggaaaaauguuccaguguguuuaaugucguaaauaguucaauaggauuaauaaugguauuauccuucuuguuccuuaauuag

SEQ ID NO: 2929 - RNA, 1287 nt, Artificial Sequence
  derived and/or modified CDS sequence (wt) from Pf(PFS83)__BAN59424.1__CSP
augaugagaaaauuagcuauuuuaucuguuucuuccuuuuuauuuguugaggccuuauuccaggaauaccagugcuauggaaguucgucaaacacaaggguucuaaaugaauuaaauuaugauaaugcaggcacuaauuuauauaaugaauuagaaaugaauuauuaugggaaacaggaaaauugguauagucuuaaaaaaaauaguagaucacuuggagaaaaugaugauggaaauaauaauaauggagauaauggucgugaagguaaagaugaagauaaaagagauggaaauaacgaagacaacgagaaauuaaggaaaccaaaacauaaaaaauuaaagcaaccaggggaugguaauccugauccaaaugcaaacccaaauguagaucccaaugccaacccaaauguagaucccaaugccaacccaaauguagauccaaaugcaaacccaaauguagauccaaaugcaaacccaaaugcaaacccaaaugcaaacccaaaugcaaacccaaaugcaaacccaaaugcaaacccaaaugcaaacccaaaugcaaacccaaaugcaaacccaaaugcaaacccaaaugcaaacccaaaugcaaacccaaaugcaaacccaaaugcaaacccaaaugcaaaccccaaugcaaacccaaaugcaaaccccaaugcaaauccuaaugcaaacccaaaugcaaacccaaaugcaaacccaaacgcaaaccccaaugcaaauccuaaugcaaaccccaaugcaaauccuaaugcaaauccuaaugccaauccaaaugcaaauccaaaugcaaacccaaacgcaaaccccaaugcaaauccuaaugccaauccaaaugcaaauccaaaugcaaacccaaaugcaaacccaaaugcaaaccccaaugcaaauccuaauaaaaacaaucaagguaauggacaaggucacaauaugccaaaugacccaaaccgaaauguagaugaaaaugcuaaugccaacaaugcuguaaaaaauaauaauaacgaagaaccaagugauaagcacauagaacaauauuuaaagaaaauacaaaauucucuuucaacugaaugguccccauguaguguaacuuguggaaaugguauucaaguuagaauaaagccuggcucugcuaauaaaccuaaagacgaauuagauuaugaaaaugauauugaaaaaaaaauuuguaaaauggaaaaauguuccaguguguuuaaugucguaaauaguucaauaggauuaauaaugguauuauccuucuuguuccuuaauuag

SEQ ID NO: 2930 - RNA, 1287 nt, Artificial Sequence
  derived and/or modified CDS sequence (wt) from Pf(TiMS95-112)__BAM84878.1__CSP
augaugagaaaauuagcuauuuuaucuguuucuuccuuuuuauuuguugaggccuuauuccaggaauaccagugcuauggaaguucgucaaacacaaggguucuaaaugaauuaaauuaugauaaugcaggcacuaauuuauauaaugaauuagaaaugaauuauuaugggaaacaggaaaauugguauagucuuaaaaaaaauaguagaucacuuggagaaaaugaugauggaaauaauaauaauggagauaauggucgugaagguaaagaugaagauaaaagagauggaaauaacgaagacaacgagaaauuaaggaaaccaaaacauaaaaaauuaaagcaaccaggggaugguaauccugauccaaaugcaaacccaaauguagaucccaaugccaacccaaauguagauccaaaugcaaacccaaauguagauccaaaugcaaacccaaaugcaaacccaaaugcaaacccaaaugcaaacccaaaugcaaacccaaaugcaaacccaaaugcaaacccaaaugcaaacccaaaugcaaacccaaaugcaaacccaaaugcaaacccaaaugcaaacccaaaugcaaacccaaaugcaaauccaaaugcaaacccaaaugcaaacccaaacgcaaaccccaaugcaaauccuaaugcaaauccuaaugcaaauccuaaugccaauccaaaugcaaauccaaaugcaaacccaaacgcaaaccccaaugcaaauccuaaugccaauccaaaugcaaauccaaaugcaaacccaaacgcaaaccccaaugcaaauccuaaugccaauccaaaugcaaauccaaaugcaaaccccaaugcaaauccuaaugccaauccaaaugcaaauccaaaugcaaacccaaaugcaaacccaaaugcaaauccuaauaaaaacaaucaagguaauggacaaggucacaauaugccaaaugacccaaaccgaaauguagaugaaaaugcuaaugccaacaaugauguaaaaaauaauaauaacgaagaaccaagugauaagcacauagaacaauauuuaaagaaaauacaauauucucuuucaacugaaugguccccauguaguguaacuuguggaaaugguauucaaguuagaauaaagccuggcucugcugauaaaccuaaagaccaauuagauuaugaaaaugauauugaaaaaaaaauuuguaaaauggaaaaauguuccaguguguuuaaugucguaaauaguucaauaggauuaauaaugguauuauccuucuuguuccuuaauuag

SEQ ID NO: 2931 - RNA, 1284 nt, Artificial Sequence
  derived and/or modified CDS sequence (wt) from Pf(E103)__ACO49384.1__CSP
augagaaaauuagcuauuuuaucuguuucuuccuuuuuauuuguugaggccuuauuccaggaauaccagugcuauggaaguucgucaaacacaaggguucuaaaugaauuaaauuaugauaaugcaggcacuaauuuauauaaugaauuagaaaugaauuauuaugggaaacaggaaaauugguauagucuuaaaaaaaauaguagaucacuuggagaaaaugaugauggaaauaauaauaauggagauaauggucgugaagguaaagaugaagauaaaagagauggaaauaacgaagacaacgagaaauuaaggaaaccaaaacauaaaaaauuaaagcaaccaggggaugguaauccugauccaaaugcaaacccaaauguagaucccaaugccaacccaaauguagauccaaaugcaaacccaaauguagauccaaaugcaaacccaaaugcaaacccaaaugcaaacccaaaugcaaacccaaaugcaaacccaaaugcaaacccaaaugcaaacccaaaugcaaacccaaaugcaaacccaaaugcaaacccaaaugcaaacccaaaugcaaacccaaaugcaaacccaaaugcaaacccaaaugcaaacccaaaugcaaacccaaaugcaaacccaaaugcaaaccccaaugcaaacccaaaugcaaaccccaaugcaaauccuaaugcaaacccaaaugcaaacccaaaugcaaacccaaacgcaaaccccaaugcaaauccuaaugcaaaccccaaugcaaauccuaaugcaaauccuaaugccaauccaaaugcaaauccaaaugcaaacccaaacgcaaaccccaaugcaaauccuaaugccaauccaaaugcaaauccaaaugcaaacccaaaugcaaaccccaaugcaaauccuaauaaaaacaaucaagguaauggacaaggucacaauaugccaaaugacccaaaccgaaauguagaugaaaaugcuaaugccaacaaugcuguaaaaaauaauaauaacgaagaaccaagugauaagcacauagaacaauauuuaaagaauauacaaaauucucuuucaacugaaugguccccauguaguguaacuuguggaaaugguauucaaguuagaauaaagccuggcucugcuaauaaaccuaaagacgaauuagauuaugaaaaugauauugaaaaaaaaauuuguaaaauggaaaaauguuccaguguguuuaaugucguaaauaguucaauaggauuaauaaugguauuauccuucuuguuccuuaauuag

SEQ ID NO: 2932 - RNA, 1284 nt, Artificial Sequence
  derived and/or modified CDS sequence (wt) from Pf(TMS75)__ACO49490.1__CSP
augagaaaauuagcuauuuuaucuguuucuuccuuuuuauuuguugaggccuuauuccaggaauaccagugcuauggaaguucgucaaacacaaggguucuaaaugaauuaaauuaugauaaugcaggcacuaauuuauauaaugaauuagaaaugaauuauuaugggaaacaggaaaauugguauagucuuaaaaaaaauaguagaucacuuggagaaaaugaugauggaaauaauaauaauggagauaauggucgugaagguaaagaugaagauaaaagagauggaaauaacgaagacaacgagaaauuaaggaaaccaaaacauaaaaaauuaaagcaaccaggggaugguaauccugauccaaaugcaaacccaaauguagaucccaaugccaacccaaauguagaucccaaugccaacccaaauguagauccaaaugcaaacccaaauguagauccaaaugcaaacccaaaugcaaacccaaaugcaaacccaaaugcaaacccaaaugcaaacccaaaugcaaacccaaaugcaaacccaaaugcaaacccaaaugcaaacccaaaugcaaacccaaaugcaaacccaaaugcaaacccaaaugcaaacccaaaugcaaacccaaaugcaaaccccaaugcaaacccaaaugcaaaccccaaugcaaauccuaaugcaaacccaaaugcaaacccaaaugcaaacccaaacgcaaaccccaaugcaaauccuaaugcaaaccccaaugcaaauccuaaugcaaauccuaaugccaauccaaaugcaaauccaaaugcaaacccaaacgcaaaccccaaugcaaauccuaaugccaauccaaaugcaaauccaaaugcaaacccaaaugcaaacccaaaugcaaaccccaaugcaaauccuaauaaaaacaaucaagguaauggacaaggucacaauaugccaaaugacccaaaccgaaauguagaugaaaaugcuaaugccaacaaugcuguaaaaaauaauaauaacgaagaaccaagugauaagcacauagaacaauauuuaaagaaaauacaaaauucucuuucaacugaaugguccccauguaguguaacuuguggaaaugguauucaaguuagaauaaagccuggcucugcuaauaaaccuaaagacgaauuagauuaugaaaaugauauugaaaaaaaaauuuguaaaauggaaaaauguuccaguguguuuaaugucguaaauaguucaauaggauuaauaaugguauuauccuucuuguuccuuaauuag

SEQ ID NO: 2933 - RNA, 1284 nt, Artificial Sequence
  derived and/or modified CDS sequence (wt) from Pf(TSY621)__ACO49538.1__CSP
augagaaaauuagcuauuuuaucuguuucuuccuuuuuauuuguugaggccuuauuccaggaauaccagugcuauggaaguucgucaaacacaaggguucuaaaugaauuaaauuaugauaaugcaggcacuaauuuauauaaugaauuagaaaugaauuauuaugggaaacaggaaaauugguauagucuuaaaaaaaauaguagaucacuuggagaaaaugaugauggaaauaauaauaauggagauaauggucgugaagguaaagaugaagauaaaagagauggaaauaacgaagacaacgagaaauuaaggaaaccaaaacauaaaaaauuaaagcaaccaggggaugguaauccugauccaaaugcaaacccaaauguagaucccaaugccaacccaaauguagauccaaaugcaaacccaaauguagauccaaaugcaaacccaaaugcaaacccaaaugcaaacccaaaugcaaacccaaaugcaaacccaaaugcaaacccaaaugcaaacccaaaugcaaacccaaaugcaaacccaaaugcaaacccaaaugcaaacccaaaugcaaacccaaaugcaaacccaaaugcaaacccaaaugcaaacccaaaugcaaaccccaaugcaaacccaaaugcaaaccccaaugcaaauccuaaugcaaacccaaaugcaaacccaaaugcaaacccaaacgcaaaccccaaugcaaauccuaaugcaaaccccaaugcaaauccuaaugcaaauccuaaugccaauccaaaugcaaauccaaaugcaaacccaaacgcaaaccccaaugcaaauccuaaugccaauccuaaugccaauccaaaugcaaauccaaaugcaaacccaaaugcaaacccaaaugcaaacccaaaugcaaauccuaauaaaaacaaucaagguaauggacaaggucacaauaugccaaaugacccaaaccgaaauguagaugaaaaugcuaaugccaacaaugauguaaaaaauaauaauaacgaagaaccaagugauaagcacauagaacaauauuuaaagaaaauacaauauucucuuucaacugaaugguccccauguaguguaacuuguggaaaugguauucaaguuagaauaaagccuggcucugcugauaaaccuaaagaccaauuagauuaugaaaaugauauugaaaaaaaaauuuguaaaauggaaaaauguuccaguguguuuaaugucguaaauaguucaauaggauuaauaaugguauuauccuucuuguuccuuaauuag

SEQ ID NO: 2934 - RNA, 1284 nt, Artificial Sequence
  derived and/or modified CDS sequence (wt) from Pf(TSY646)__ACO49540.1__CSP
augagaaaauuagcuauuuuaucuguuucuuccuuuuuauuuguugaggccuuauuccaggaauaccagugcuauggaaguucgucaaacacaaggguucuaaaugaauuaaauuaugauaaugcaggcacuaauuuauauaaugaauuagaaaugaauuauuaugggaaacaggaaaauugguauagucuuaaaaaaaauaguagaucacuuggagaaaaugaugauggaaauaauaauaauggagauaauggucgugaagguaaagaugaagauaaaagagauggaaauaacgaagacaacgagaaauuaaggaaaccaaaacauaaaaaauuaaagcaaccaggggaugguaauccugauccaaaugcaaacccaaauguagaucccaaugccaacccaaauguagauccaaaugcaaacccaaauguagauccaaaugcaaacccaaaugcaaacccaaaugcaaacccaaaugcaaacccaaaugcaaacccaaaugcaaacccaaaugcaaacccaaaugcaaacccaaaugcaaacccaaaugcaaacccaaaugcaaacccaaaugcaaacccaaaugcaaacccaaaugcaaacccaaaugcaaacccaaaugcaaacccaaaugcaaaccccaaugcaaacccaaaugcaaaccccaaugcaaauccuaaugcaaacccaaaugcaaacccaaaugcaaacccaaacgcaaaccccaaugcaaauccuaaugcaaaccccaaugcaaauccuaaugcaaauccuaaugccaauccaaaugcaaauccaaaugcaaacccaaacgcaaaccccaaugcaaauccuaaugccaauccaaaugcaaauccaaaugcaaacccaaaugcaaacccaaaugcaaaccccaaugcaaauccuaauaaaaacaaucaagguaauggacaaggucacaauaugccaaaugacccaaaccgaaauguagaugaaaaugcuaaugccaacaaugcuguaaaaaauaauaauaacgaagaaccaagugauaagcacauagaacaauauuuaaagaaaauacaaaauucucuuucaacugaaugguccccauguaguguaacuuguggaaaugguauucaaguuagaauaaagccuggcucugcuaauaaaccuaaagacgaauuagauuaugaaaaugauauugaaaaaaaaauuuguaaaauggaaaaauguuccaguguguuuaaugucguaaauaguucaauaggauuaauaaugguauuauccuucuuguuccuuaauuag

SEQ ID NO: 2935 - RNA, 1275 nt, Artificial Sequence
  derived and/or modified CDS sequence (wt) from Pf(806)__AAA29562.1__CSP
augaugagaaaauuagcuauuuuaucuguuucuuccuuuuuauuuguugaggccuuauuccaggaauaccagugcuauggaaguucgucaaacacaaggguucuaaaugaauuaaauuaugauaaugcaggcaucaauuuauauaaugaauuagaaaugaauuauuaugggaaacaggaaaauugguauagucuuaaaaaaaauaguagaucacuuggagaaaaugaugauggaaauaauaauaauggagauaauggucgugaagguaaagaugaagauaaaagagauggaaauaacgaagacaacgagaaauuaaggaaaccaaaacauaaaaaauuaaagcaaccaggggaugguaauccugauccaaaugcaaacccaaauguagaucccaaugccaacccaaauguagauccaaaugcaaacccaaauguagauccaaaugcaaacccaaaugcaaacccaaaugcaaacccaaaugcaaacccaaaugcaaacccaaaugcaaacccaaaugcaaacccaaaugcaaacccaaaugcaaacccaaaugcaaacccaaaugcaaacccaaaugcaaacccaaaugcaaacccaaaugcaaacccaaaugcaaacccaaaugcaaacccaaaugcaaacccaaaugcaaaccccaaugcaaauccuaaugcaaacccaaaugcaaacccaaaugcaaacccaaacgcaaaccccaaugcaaauccuaaugcaaaccccaaugcaaauccuaaugcaaauccuaaugccaauccaaaugcaaauccaaaugcaaacccaaacgcaaaccccaaugcaaauccuaaugccaauccaaaugcaaauccaaaugcaaacccaaaugcaaacccaaaugcaaaccccaaugcaaauccuaauaaaaacaaucaagguaauggacaaggucacaauaugccaaaugacccaaaccgaaauguagaugaaaaugcuaaugccaacaaugcuguaaaaaauaauaauaacgaagaaccaagugauaagcacauagaacaauauuuaaagaaaauacaaaauucucuuucaacugaaugguccccauguaguguaacuuguggaaaugguauucaaguuagaauaaagccuggcucugcuaauaaaccuaaagacgaauuagauuaugaaaaugauauugaaaaaaaaauuuguaaaauggaaaaauguuccaguguguuuaaugucguaaauaguucaauaggauuaauaaugguauuauccuucuuguuccuuaauuag

SEQ ID NO: 2936 - RNA, 1275 nt, Artificial Sequence
  derived and/or modified CDS sequence (wt) from Pf(Pal97-100)__BAM84952.1__CSP
augaugagaaaauuagcuauuuuaucuguuucuuccuuuuuauuuguugaggccuuauuccaggaauaccagugcuauggaaguucgucaaacacaaggguucuaaaugaauuaaauuaugauaaugcaggcacuaauuuauauaaugaauuagaaaugaauuauuaugggaaacaggaaaauugguauagucuuaaaaaaaauaguagaucacuuggagaaaaugaugauggaaauaauaauaauggagauaauggucgugaagguaaagaugaagauaaaagagauggaaauaacgaagacaacgagaaauuaaggaaaccaaaacauaaaaaauuaaagcaaccaggggaugguaauccugauccaaaugcaaacccaaauguagaucccaaugccaacccaaauguagauccaaaugcaaacccaaauguagauccaaaugcaaacccaaaugcaaacccaaaugcaaacccaaaugcaaacccaaaugcaaacccaaaugcaaacccaaaugcaaacccaaaugcaaacccaaaugcaaacccaaaugcaaacccaaaugcaaacccaaacguagauccuaaugcaaauccaaaugcaaacccaaaugcaaacccaaacgcaaaccccaaugcaaauccuaaugcaaauccuaaugcaaauccuaaugccaauccaaaugcaaauccaaaugcaaacccaaacgcaaaccccaaugcaaauccuaaugcaaauccuaaugcaaauccuaaugccaauccaaaugcaaauccaaaugcaaacccaaacgcaaaccccaaugcaaauccuaaugccaauccaaaugcaaauccaaaugcaaacccaaaugcaaacccaaaugcaaacccaaaugcaaaccccaaugcaaauccuaauaaaaacaaucaagguaauggacaaggucacaauaugccaaaugacccaaaccgaaauguagaugaaaaugcuaaugccaacaaugcuguaaaaaauaauaauaacgaagaaccaagugauaagcacauaacagaauauuuaaagaaaauacaaaauucucuuucaacugaaugguccccauguaguguaacuuguggaaaugguauucaaguuagaauaaagccuggcucugcugguaaaucuaaagacgaauuagauuaugaaaaugauauugaaaaaaaaauuuguaaaauggaaaaauguuccaguguguuuaaugucguaaauaguucaauaggauuaauaaugguauuauccuucuuguuccuuaauuag

SEQ ID NO: 2937 - RNA, 1275 nt, Artificial Sequence
  derived and/or modified CDS sequence (wt) from Pf(PFS89)__BAN59425.1__CSP
augaugagaaaauuagcuauuuuaucuguuucuuccuuuuuauuuguugaggccuuauuccaggaauaccagugcuauggaaguucgucaaacacaaggguucuaaaugaauuaaauuaugauaaugcaggcacuaauuuauauaaugaauuagaaaugaauuauuaugggaaacaggaaaauugguauagucuuaaaaaaaauaguagaucacuuggagaaaaugaugauggaaauaauaauaauggagauaauggucgugaagguaaagaugaagauaaaagagauggaaauaacgaagacaacgagaaauuaaggaaaccaaaacauaaaaaauuaaagcaaccaggggaugguaauccugauccaaaugcaaacccaaauguagaucccaaugccaacccaaauguagauccaaaugcaaacccaaauguagauccaaaugcaaacccaaaugcaaacccaaaugcaaacccaaaugcaaacccaaaugcaaacccaaaugcaaacccaaaugcaaacccaaaugcaaacccaaaugcaaacccaaaugcaaacccaaaugcaaacccaaaugcaaacccaaaugcaaacccaaaugcaaacccaaaugcaaacccaaaugcaaaccccaaugcaaacccaaaugcaaaccccaaugcaaauccuaaugcaaacccaaaugcaaacccaaaugcaaacccaaacgcaaaccccaaugcaaauccuaaugcaaaccccaaugcaaauccuaaugcaaauccuaaugccaauccaaaugcaaauccaaaugcaaacccaaacgcaaaccccaaugcaaauccuaaugccaauccaaaugcaaauccaaaugcaaacccaaaugcaaacccaaaugcaaaccccaaugcaaauccuaauaaaaacaaucaagguaauggacaaggucacaauaugccaaaugacccaaaccgaaauguagaugaaaaugcuaaugccaacaaugcuguaaaaaauaauaauaacgaagaaccaagugauaagcacauagaacaauauuuaaagaaaauacaaaauucucuuucaacugaaugguccccauguaguguaacuuguggaaaugguauucaaguuagaauaaagccuggcucugcuaauaaaccuaaagacgaauuagauuaugaaaaugauauugaaaaaaaaauuuguaaaauggaaaaauguuccaguguguuuaaugucguaaauaguucaauaggauuaauaaugguauuauccuucuuguuccuuaauuag

SEQ ID NO: 2938 - RNA, 1275 nt, Artificial Sequence
  derived and/or modified CDS sequence (wt) from Pf(PNG912-035)__BAM85007.1__CSP
augaugagaaaauuagcuauuuuaucuguuucuuccuuuuuauuuguugaggccuuauuccaggaauaccagugcuauggaaguucgucaaacacaaggguucuaaaugaauuaaauuaugauaaugcaggcacuaauuuauauaaugaauuagaaaugaauuauuaugggaaacaggaaaauugguauagucuuaaaaaaaauaguagaucacuuggagaaaaugaugauggaaauaauaauaauggagauaauggucgugaagguaaagaugaagauaaaagagauggaaauaacgaagacaacgagaaauuaaggaaaccaaaacauaaaaaauuaaagcaaccaggggaugguaauccugauccaaaugcaaacccaaauguagaucccaaugccaacccaaauguagauccaaaugcaaacccaaauguagauccaaaugcaaacccaaaugcaaacccaaaugcaaacccaaaugcaaacccaaaugcaaacccaaaugcaaacccaaaugcaaacccaaaugcaaacccaaaugcaaacccaaaugcaaacccaaaugcaaacccaaaugcaaaccccaaugcaaauccuaaugcaaauccuaaugcaaacccaaaugcaaauccuaaugcaaacccaaaugcaaacccaaacguagauccuaaugcaaauccaaaugcaaacccaaaugcaaacccaaacgcaaaccccaaugcaaauccuaaugcaaaccccaaugcaaauccuaaugcaaauccuaaugccaauccaaaugcaaauccaaaugcaaacccaaacgcaaaccccaaugcaaauccuaaugccaauccaaaugcaaauccaaaugcaaacccaaaugcaaacccaaaugcaaaccccaaugcaaauccuaauaaaaacaaucaagguaauggacaaggucacaauaugccaaaugacccaaaccgaaauguagaugaaaaugcuaaugccaacaaugcuguaaaaaauaauaauaacgaagaaccaagugauaagcacauagaacaauauuuaaagaaaauacaaaauucucuuucaacugaaugguccccauguaguguaacuuguggaaaugguauucaaguuagaauaaagccuggcucugcugauaaaccuaaagaccaauuagauuaugaaaaugauauugaaaaaaaaauuuguaaaauggaaaaauguuccaguguguuuaaugucguaaauaguucaauaggauuaauaaugguauuauccuucuuguuccuuaauuag

SEQ ID NO: 2939 - RNA, 1275 nt, Artificial Sequence
  derived and/or modified CDS sequence (wt) from Pf(Sol95-308)__BAM85089.1__CSP
augaugagaaaauuagcuauuuuaucuguuucuuccuuuuuauuuguugaggccuuauuccaggaauaccagugcuauggaaguucgucaaacacaaggguucuaaaugaauuaaauuaugauaaugcaggcacuaauuuauauaaugaauuagaaaugaauuauuaugggaaacaggaaaauugguauagucuuaaaaaaaauaguagaucacuuggagaaaaugaugauggaaauaauaauaauggagauaauggucgugaagguaaagaugaagauaaaagagauggaaauaacgaagacaacgagaaauuaaggaaaccaaaacauaaaaaauuaaagcaaccaggggaugguaauccugauccaaaugcaaacccaaauguagaucccaaugccaacccaaauguagaucccaaugccaacccaaauguagauccaaaugcaaacccaaauguagauccaaaugcaaacccaaaugcaaacccaaaugcaaacccaaaugcaaacccaaaugcaaacccaaaugcaaacccaaaugcaaacccaaaugcaaacccaaaugcaaacccaaaugcaaacccaaaugcaaacccaaaugcaaacccaaaugcaaacccaaaugcaaaccccaaugcaaacccaaaugcaaaccccaaugcaaauccuaaugcaaacccaaaugcaaacccaaaugcaaacccaaacgcaaaccccaaugcaaauccuaaugcaaaccccaaugcaaauccuaaugcaaauccuaaugccaauccaaaugcaaauccaaaugcaaacccaaacgcaaaccccaaugcaaauccuaaugccaauccaaaugcaaauccaaaugcaaacccaaaugcaaacccaaaugcaaaccccaaugcaaauccuaauaaaaacaaucaagguaauggacaaggucacaauaugccaaaugacccaaaccgaaauguagaugaaaaugcuaaugccaacaaugcuguaaaaaauaauaauaacgaagaaccaagugauaagcacauagaacaauauuuaaagaaaauacaaaauucucuuucaacugaaugguccccauguaguguaacuuguggaaaugguauucaaguuagaauaaagccuggcucugcuaauaaaccuaaagacgaauuagauuaugaaaaugauauugaaaaaaaaauuuguaaaauggaaaaauguuccaguguguuuaaugucguaaauaguucaauaggauuaauaaugguauuauccuucuuguuccuuaauuag

SEQ ID NO: 2940 - RNA, 1275 nt, Artificial Sequence
  derived and/or modified CDS sequence (wt) from Pf(Sol95-346)__BAM85102.1__CSP
augaugagaaaauuagcuauuuuaucuguuucuuccuuuuuauuuguugaggccuuauuccaggaauaccagugcuauggaaguucgucaaacacaaggguucuaaaugaauuaaauuaugauaaugcaggcacuaauuuauauaaugaauuagaaaugaauuauuaugggaaacaggaaaauugguauagucuuaaaaaaaauaguagaucacuuggagaaaaugaugauggaaauaauaauaauggagauaauggucgugaagguaaagaugaagauaaaagagauggaaauaacgaagacaacgagaaauuaaggaaaccaaaacauaaaaaauuaaagcaaccaggggaugguaauccugauccaaaugcaaacccaaauguagaucccaaugccaacccaaauguagauccaaaugcaaacccaaauguagauccaaaugcaaacccaaaugcaaacccaaaugcaaacccaaaugcaaacccaaaugcaaacccaaaugcaaacccaaaugcaaacccaaaugcaaacccaaaugcaaacccaaaugcaaacccaaaugcaaacccaaaugcaaaccccaaugcaaauccuaaugcaaauccuaaugcaaacccaaaugcaaauccuaaugcaaacccaaaugcaaacccaaacguagauccuaaugcaaauccaaaugcaaacccaaaugcaaacccaaacgcaaaccccaaugcaaauccuaaugcaaaccccaaugcaaauccuaaugcaaauccuaaugccaauccaaaugcaaauccaaaugcaaacccaaacgcaaaccccaaugcaaauccuaaugccaauccaaaugcaaauccaaaugcaaacccaaaugcaaacccaaaugcaaaccccaaugcaaauccuaauaaaaacaaucaagguaauggacaaggucacaauaugccaaaugacccaaaccgaaauguagaugaaaaugcuaaugccaacaaugcuguaaaaaauaauaauaacgaagaaccaagugauaagcacauagaacaauauuuaaagaaaauacaaaauucucuuucaacugaaugguccccauguaguguaacuuguggaaaugguauucaaguuagaauaaagccuggcucugcugguaaaucuaaagacgaauuagauuaugaaaaugauauugaaaaaaaaauuuguaaaauggaaaaauguuccaguguguuuaaugucguaaauaguucaauaggauuaauaaugguauuauccuucuuguuccuuaauuag

SEQ ID NO: 2941 - RNA, 1275 nt, Artificial Sequence
  derived and/or modified CDS sequence (wt) from Pf(T4 Thailand)__AAA29555.1__CSP
augaugagaaaauuagcuauuuuaucuguuucuuccuuuuuauuuguugaggccuuauuccaggaauaccagugcuauggaaguucgucaaacacaaggguucuaaaugaauuaaauuaugauaaugcaggcacuaauuuauauaaugaauuagaaaugaauuauuaugggaaacaggaaaauugguauagucuuaaaaaaaauaguagaucacuuggagaaaaugaugauggaaauaauaauaauggagauaauaaucgugaagguaaagaugaagauaaaagagauggaaauaacgaagacaacgagacauuaaggaaaccaaaacauaaaaaauuaaagcaaccaggggaugguaauccugauccaaaugcaaacccaaauguagaucccaaugccaacccaaauguagauccaaaugcaaacccaaauguagauccaaaugcaaacccaaaugcaaacccaaaugcaaacccaaaugcaaacccaaaugcaaacccaaaugcaaacccaaaugcaaacccaaaugcaaacccaaaugcaaacccaaaugcaaacccaaaugcaaacccaaaugcaaacccaaaugcaaacccaaaugcaaacccaaaugcaaacccaaaugcaaaccccaaugcaaacccaaaugcaaaccccaaugcaaauccuaaugcaaacccaaaugcaaacccaaaugcaaacccaaacgcaaaccccaaugcaaauccuaaugcaaaccccaaugcaaauccuaaugcaaauccuaaugccaauccaaaugcaaauccaaaugcaaacccaaacgcaaaccccaaugcaaauccuaaugccaauccaaaugcaaauccaaaugcaaacccaaaugcaaacccaaaugcaaaccccaaugcaaauccuaauaaaaacaaucaagguaauggacaaggucacaauaugccaaaugacccaaaccgaaauguagaugaaaaugcuaaugccaacaaugcuguaaaaaauaauaauaacgaagaaccaagugauaagcacauagaacaauauuuaaagaaaauacaaaauucucuuucaacugaaugguccccauguaguguaacuuguggaaaugguauucaaguuagaauaaagccuggcucugcuaauaaaccuaaagacgaauuagauuaugaaaaugauauugaaaaaaaaauuuguaaaauggaaaaauguuccaguguguuuaaugucguaaauaguucaauaggauuaauaaugguauuauccuucuuguuccuuaauuag

SEQ ID NO: 2942 - RNA, 1275 nt, Artificial Sequence
  derived and/or modified CDS sequence (wt) from Pf(Tz03-025)__BAM84798.1__CSP
augaugagaaaauuagcuauuuuaucuguuucuuccuuuuuauuuguugaggccuuauuccaggaauaccagugcuauggaaguucgucaaacacaaggguucuaaaugaauuaaauuaugauaaugcaggcacuaauuuauauaaugaauuagaaaugaauuauuaugggaaacaggaaaauugguauagucuuaaaaaaaauaguagaucacuuggagaaaaugaugauggaaauaauaauaauggagauaauggucgugaagguaaagaugaagauaaaagagauggaaauaacgaagacaacgagaaauuaaggaaaccaaaacauaaaaaauuaaagcaaccagcggaugguaauccugauccaaaugcaaacccaaauguagaucccaaugccaacccaaauguagauccaaaugcaaacccaaauguagauccaaaugcaaacccaaaugcaaacccaaaugcaaacccaaaugcaaacccaaaugcaaacccaaaugcaaacccaaaugcaaacccaaaugcaaacccaaaugcaaacccaaaugcaaacccaaaugcaaacccaaaugcaaacccaaaugcaaacccaaaugcaaacccaaaugcaaaccccaaugcaaauccuaaugcaaacccaaaugcaaacccaaacguagauccuaaugcaaauccaaaugcaaacccaaacgcaaaccccaaugcaaauccuaaugcaaaccccaaugcaaauccuaaugcaaauccuaaugccaauccaaaugcaaauccaaaugcaaacccaaacgcaaaccccaaugcaaauccuaaugccaauccaaaugcaaauccaaaugcaaacccaaaugcaaacccaaaugcaaacccaaaugcaaaccccaaugcaaauccuaauaaaaacaaucaagguaauggacaaggucacaauaugccaaaugacccaaaccgaaauguagaugaaaaugcuaaugccaacaaugcuguaaaaaauaauaauaacgaagaaccaagugaucagcacauagaaaaauauuuaaagacaauaaaaaauucucuuucaacugaaugguccccauguaguguaacuuguggaaaugguauucaaguuagaauaaagccuggcucugcuaauaaaccuaaagaccaauuagauuaugcaaaugauauugaaaaaaaaauuuguaaaauggaaaaauguuccaguguguuuaaugucguaaauaguucaauaggauuaauaaugguauuauccuucuuguuccuuaauuag

SEQ ID NO: 2943 - RNA, 1272 nt, Artificial Sequence
  derived and/or modified CDS sequence (wt) from Pf(NR62)__ADF48375.1__CSP
augagaaaauuagcuauuuuaucuguuucuuccuuuuuauuuguugaggccuuauuccaggaauaccagugcuauggaaguucgucaaacacaaggguucuaaaugaauuaaauuaugauaaugcaggcacuaauuuauauaaugaauuagaaaugaauuauuaugggaaacaggaaaauugguauagucuuaaaaaaaauaguagaucacuuggagaaaaugaugauggaaauaauaauaauggagauaauggucgugaagguaaagaugaagauaaaagagauggaaauaacgaagacaacgagaaauuaaggaaaccaaaacauaaaaaauuaaagcaaccaggggaugguaauccugauccaaaugcaaacccaaauguagaucccaaugccaacccaaauguagaucccaaugccaacccaaauguagauccaaaugcaaacccaaauguagauccaaaugcaaacccaaaugcaaacccaaaugcaaacccaaaugcaaacccaaaugcaaacccaaaugcaaacccaaaugcaaacccaaaugcaaacccaaaugcaaacccaaaugcaaacccaaaugcaaacccaaaugcaaacccaaaugcaaacccaaaugcaaaccccaaugcaaacccaaaugcaaaccccaaugcaaauccuaaugcaaacccaaaugcaaacccaaaugcaaacccaaacgcaaaccccaaugcaaauccuaaugcaaaccccaaugcaaauccuaaugcaaauccuaaugccaauccaaaugcaaauccaaaugcaaacccaaacgcaaaccccaaugcaaauccuaaugccaauccaaaugcaaauccaaaugcaaacccaaaugcaaacccaaaugcaaaccccaaugcaaauccuaauaaaaacaaucaagguaauggacaaggucacaauaugccaaaugacccaaaccgaaauguagaugaaaaugcuaaugccaacaaugcuguaaaaaauaauaauaacgaagaaccaagugauaagcacauagaacaauauuuaaagaaaauacaaaauucucuuucaacugaaugguccccauguaguguaacuuguggaaaugguauucaaguuagaauaaagccuggcucugcuaauaaaccuaaagacgaauuagauuaugaaaaugauauugaaaaaaaaauuuguaaaauggaaaaauguuccaguguguuuaaugucguaaauaguucaauaggauuaauaaugguauuauccuucuuguuccuuaauuag

SEQ ID NO: 2944 - RNA, 1272 nt, Artificial Sequence
  derived and/or modified CDS sequence (wt) from Pf(TSY673)__ACO49542.1__CSP
augagaaaauuagcuauuuuaucuguuucuuccuuuuuauuuguugaggccuuauuccaggaauaccagugcuauggaaguucgucaaacacaaggguucuaaaugaauuaaauuaugauaaugcaggcacuaauuuauauaaugaauuagaaaugaauuauuaugggaaacaggaaaauugguauagucuuaaaaaaaauaguagaucacuuggagaaaaugaugauggaaauaauaauaauggagauaauggucgugaagguaaagaugaagauaaaagagauggaaauaacgaagacaacgagaaauuaaggaaaccaaaacauaaaaaauuaaagcaaccaggggaugguaauccugauccaaaugcaaacccaaauguagaucccaaugccaacccaaauguagauccaaaugcaaacccaaauguagauccaaaugcaaacccaaaugcaaacccaaaugcaaacccaaaugcaaacccaaaugcaaacccaaaugcaaacccaaaugcaaacccaaaugcaaacccaaaugcaaacccaaaugcaaacccaaaugcaaacccaaacguagauccuaaugcaaauccaaaugcaaacccaaaugcaaacccaaacgcaaaccccaaugcaaauccuaaugcaaauccuaaugcaaauccuaaugccaauccaaaugcaaauccaaaugcaaacccaaacgcaaaccccaaugcaaauccuaaugcaaauccuaaugcaaauccuaaugccaauccaaaugcaaauccaaaugcaaacccaaacgcaaaccccaaugcaaauccuaaugccaauccaaaugcaaauccaaaugcaaacccaaaugcaaacccaaaugcaaacccaaaugcaaaccccaaugcaaauccuaauaaaaacaaucaagguaauggacaaggucacaauaugccaaaugacccaaaccgaaauguagaugaaaaugcuaaugccaacaaugcuguaaaaaauaauaauaacgaagaaccaagugauaagcacauaacagaauauuuaaagaaaauacaaaauucucuuucaacugaaugguccccauguaguguaacuuguggaaaugguauucaaguuagaauaaagccuggcucugcugguaaaucuaaagacgaauuagauuaugaaaaugauauugaaaaaaaaauuuguaaaauggaaaaauguuccaguguguuuaaugucguaaauaguucaauaggauuaauaaugguauuauccuucuuguuccuuaauuag

SEQ ID NO: 2945 - RNA, 1272 nt, Artificial Sequence
  derived and/or modified CDS sequence (wt) from Pf(TSY688)__ACO49545.1__CSP
augagaaaauuagcuauuuuaucuguuucuuccuuuuuauuuguugaggccuuauuccaggaauaccagugcuauggaaguucgucaaacacaaggguucuaaaugaauuaaauuaugauaaugcaggcacuaauuuauauaaugaauuagaaaugaauuauuaugggaaacaggaaaauugguauagucuuaaaaaaaauaguagaucacuuggagaaaaugaugauggaaauaauaauaauggagauaauggucgugaagguaaagaugaagauaaaagagauggaaauaacgaagacaacgagaaauuaaggaaaccaaaacauaaaaaauuaaagcaaccaggggaugguaauccugauccaaaugcaaacccaaauguagaucccaaugccaacccaaauguagauccaaaugcaaacccaaauguagauccaaaugcaaacccaaaugcaaacccaaaugcaaacccaaaugcaaacccaaaugcaaacccaaaugcaaacccaaaugcaaacccaaaugcaaacccaaaugcaaacccaaaugcaaacccaaaugcaaacccaaaugcaaacccaaaugcaaacccaaaugcaaacccaaaugcaaacccaaaugcaaaccccaaugcaaacccaaaugcaaaccccaaugcaaauccuaaugcaaacccaaaugcaaacccaaaugcaaacccaaacgcaaaccccaaugcaaauccuaaugcaaaccccaaugcaaauccuaaugcaaauccuaaugccaauccaaaugcaaauccaaaugcaaacccaaacgcaaaccccaaugcaaauccuaaugccaauccaaaugcaaauccaaaugcaaacccaaaugcaaacccaaaugcaaaccccaaugcaaauccuaauaaaaacaaucaagguaauggacaaggucacaauaugccaaaugacccaaaccgaaauguagaugaaaaugcuaaugccaacaaugcuguaaaaaauaauaauaacgaagaaccaagugauaagcacauagaacaauauuuaaagaaaauacaaaauucucuuucaacugaaugguccccauguaguguaacuuguggaaaugguauucaaguuagaauaaagccuggcucugcuaauaaaccuaaagacgaauuagauuaugaaaaugauauugaaaaaaaaauuuguaaaauggaaaaauguuccaguguguuuaaugucguaaauaguucaauaggauuaauaaugguauuauccuucuuguuccuuaauuag

SEQ ID NO: 2946 - RNA, 1263 nt, Artificial Sequence
  derived and/or modified CDS sequence (wt) from Pf(835b)__AAA29574.1__CSP
augaugagaaaauuagcuauuuuaucuguuucuuccuuuuuauuuguugaggccuuauuccaggaauaccagugcuauggaaguucgucaaacacaaggguucuaaaugaauuaaauuaugauaaugcaggcaucaauuuauauaaugaauuagaaaugaauuauuaugggaaacaggaaaauugguauagucuuaaaaaaaauaguagaucacuuggagaaaaugaugauggaaauaauaauaauggagauaauggucgugaagguaaagaugaagauaaaagagauggaaauaacgaagacaacgagaaauuaaggaaaccaaaacauaaaaaauuaaagcaaccaggggaugguaauccugauccaaaugcaaacccaaauguagaucccaaugccaacccaaauguagauccaaaugcaaacccaaauguagauccaaaugcaaacccaaaugcaaacccaaaugcaaacccaaaugcaaacccaaaugcaaacccaaaugcaaacccaaaugcaaacccaaaugcaaacccaaaugcaaacccaaaugcaaacccaaaugcaaacccaaaugcaaacccaaaugcaaacccaaaugcaaacccaaaugcaaacccaaaugcaaacccaaaugcaaauccuaaugcaaacccaaaugcaaacccaaauguagauccuaaugcaaauccaaaugcaaacccaaaugcaaacccaaacgcaaaccccaaugcaaauccuaaugcaaauccuaaugccaauccaaaugcaaauccaaaugcaaacccaaacgcaaacccaaaugcaaauccuaaugccaauccaaaugcaaauccaaaugcaaacccaaaugcaaacccaaaugcaaaccccaaugcaaauccuaauaaaaacaaucaagguaauggacaaggucacaauaugccaaaugacccaaaccgaaauguagaugaaaaugcuaaugccaacaaugcuguaaaaaauaauaauaacgaagaaccaagugauaagcacauaaaagaauauuuaacgaaaauacaaaauucuauuucaacugaaugguccccauguaguguaacuuguggaaaugguauucaaguuagaauaaagccuggcucugcugguaaaccuaaagacgaauuagaauaugaaaaugauauugaaaaaaaaauuuguaaaauggaaaaauguuccaguguguuuaaugucguaaauaguucaauaggauuaauaaugguauuauccuucuuguuccuuaauuag

SEQ ID NO: 2947 - RNA, 1263 nt, Artificial Sequence
  derived and/or modified CDS sequence (wt) from Pf(FCC1/HN)__AAW59565.1__CSP
augaugagaaaauuagcuauuuuaucuguuucuuccuuuuuauuuguugaggccuuauuccaggaauaccagugcuauggaaguucgucaaacacaaggguucuaaaugaauuaaauuaugauaaugcaggcacuaauuuauauaaugaauuagaaaugaauuauuaugggaaacaggaaaauugguauagucuuaaaaaaaauaguagaucacuuggagaaaaugaugauggaaauaauaauaauggagauaauggucgugaagguaaagaugaagauaaaagagauggaaauaacgaagacaacgagaaauuaaggaaaccaaaacauaaaaaauuaaagcaaccaggggaugguaauccugauccaaaugcaaacccaaauguagaucccaaugccaacccaaauguagauccaaaugcaaacccaaauguagauccaaaugcaaacccaaaugcaaacccaaaugcaaacccaaaugcaaacccaaaugcaaacccaaaugcaaacccaaaugcaaacccaaaugcaaacccaaaugcaaacccaaaugcaaacccaaaugcaaacccaaaugcaaacccaaaugcaaacccaaaugcaaacccaaaugcaaaccccaaugcaaacccaaaugcaaaccccaaugcaaauccuaaugcaaacccaaaugcaaacccaaaugcaaacccaaacgcaaaccccaaugcaaauccuaaugcaaaccccaaugcaaauccuaaugcaaauccuaaugccaauccaaaugcaaauccaaaugcaaacccaaacgcaaaccccaaugcaaauccuaaugccaauccaaaugcaaauccaaaugcaaacccaaaugcaaacccaaaugcaaaccccaaugcaaauccuaauaaaaacaaucaagguaauggacaaggucacaauaugccaaaugacccaaaccgaaauguagaugaaaaugcuaaugccaacaaugcuguaaaaaauaauaauaacgaagaaccaagugauaagcacauagaacaauauuuaaagaaaauacaaaauucucuuucaacugaaugguccccauguaguguaacuuguggaaaugguauucaagcuagaauaaagccuggcucugcuaauaaaccuaaagacgaauuagauuaugaaaaugauauugaaaaaaaaauuuguaaaauggaaaaauguuccaguguguuuaaugucguaaauaguucaauaggauuaauaaugguauuauccuucuuguuccuuaauuag

SEQ ID NO: 2948 - RNA, 1263 nt, Artificial Sequence
  derived and/or modified CDS sequence (wt) from Pf(K1)__AAA29552.1__CSP
augaugagaaaauuagcuauuuuaucuguuucuuccuuuuuauuuguugaggccuuauuccaggaauaccagugcuauggaaguucgucaaacacaaggguucuaaaugaauuaaauuaugauaaugcaggcaucaauuuauauaaugaauuagaaaugaauuauuaugggaaacaggaaaauugguauagucuuaaaaaaaauaguagaucacuuggagaaaaugaugauggaaauaauaauaauggagauaauggucgugaagguaaagaugaagauaaaagagauggaaauaacgaagacaacgagaaauuaaggaaaccaaaacauaaaaaauuaaagcaaccaggggaugguaauccugauccaaaugcaaacccaaauguagaucccaaugccaacccaaauguagauccaaaugcaaacccaaauguagauccaaaugcaaacccaaaugcaaacccaaaugcaaacccaaaugcaaacccaaaugcaaacccaaaugcaaacccaaaugcaaacccaaaugcaaacccaaaugcaaacccaaaugcaaacccaaacguagauccuaaugcaaauccaaaugcaaacccaaaugcaaacccaaacgcaaaccccaaugcaaauccuaaugcaaauccuaaugcaaauccuaaugccaauccaaaugcaaauccaaaugcaaacccaaacgcaaaccccaaugcaaauccuaaugccaauccaaaugcaaauccaaaugcaaacccaaacgcaaaccccaaugcaaauccuaaugccaauccaaaugcaaauccaaaugcaaaccccaaugcaaauccuaaugccaauccaaaugcaaauccaaaugcaaacccaaaugcaaacccaaaugcaaauccuaauaaaaacaaucaagguaauggacaaggucacaauaugccaaaugacccaaaccgaaauguagaugaaaaugcuaaugccaacaaugauguaaaaaauaauaauaacgaagaaccaagugauaagcacauagaacaauauuuaaagaaaauacaauauucucuuucaacugaaugguccccauguaguguaacuuguggaaaugguauucaaguuagaauaaagccuggcucugcugauaaaccuaaagaccaauuagauuaugaaaaugauauugaaaaaaaaauuuguaaaauggaaaaauguuccaguguguuuaaugucguaaauaguucaauaggauuaauaaugguauuauccuucuuguuccuuaauuag

SEQ ID NO: 2949 - RNA, 1263 nt, Artificial Sequence
  derived and/or modified CDS sequence (wt) from Pf(K1)__BAD73952.1__CSP
augaugagaaaauuagcuauuuuaucuguuucuuccuuuuuauuuguugaggccuuauuccaggaauaccagugcuauggaaguucgucaaacacaaggguucuaaaugaauuaaauuaugauaaugcaggcacuaauuuauauaaugaauuagaaaugaauuauuaugggaaacaggaaaauugguauagucuuaaaaaaaauaguagaucacuuggagaaaaugaugauggaaauaauaauaauggagauaauggucgugaagguaaagaugaagauaaaagagauggaaauaacgaagacaacgagaaauuaaggaaaccaaaacauaaaaaauuaaagcaaccaggggaugguaauccugauccaaaugcaaacccaaauguagaucccaaugccaacccaaauguagauccaaaugcaaacccaaauguagauccaaaugcaaacccaaaugcaaacccaaaugcaaacccaaaugcaaacccaaaugcaaacccaaaugcaaacccaaaugcaaacccaaaugcaaacccaaaugcaaacccaaaugcaaacccaaacguagauccuaaugcaaauccaaaugcaaacccaaaugcaaacccaaacgcaaaccccaaugcaaauccuaaugcaaauccuaaugcaaauccuaaugccaauccaaaugcaaauccaaaugcaaacccaaacgcaaaccccaaugcaaauccuaaugccaauccaaaugcaaauccaaaugcaaacccaaacgcaaaccccaaugcaaauccuaaugccaauccaaaugcaaauccaaaugcaaaccccaaugcaaauccuaaugccaauccaaaugcaaauccaaaugcaaacccaaaugcaaacccaaaugcaaauccuaauaaaaacaaucaagguaauggacaaggucacaauaugccaaaugacccaaaccgaaauguagaugaaaaugcuaaugccaacaaugauguaaaaaauaauaauaacgaagaaccaagugauaagcacauagaacaauauuuaaagaaaauacaauauucucuuucaacugaaugguccccauguaguguaacuuguggaaaugguauucaaguuagaauaaagccuggcucugcugauaaaccuaaagaccaauuagauuaugaaaaugauauugaaaaaaaaauuuguaaaauggaaaaauguuccaguguguuuaaugucguaaauaguucaauaggauuaauaaugguauuauccuucuuguuccuuaauuag

SEQ ID NO: 2950 - RNA, 1263 nt, Artificial Sequence
  derived and/or modified CDS sequence (wt) from Pf(Pal97-074)__BAM84944.1__CSP
augaugagaaaauuagcuauuuuaucuguuucuuccuuuuuauuuguugaggccuuauuccaggaauaccagugcuauggaaguucgucaaacacaaggguucuaaaugaauuaaauuaugauaaugcaggcacuaauuuauauaaugaauuagaaaugaauuauuaugggaaacaggaaaauugguauagucuuaaaaaaaauaguagaucacuuggagaaaaugaugauggaaauaauaauaauggagauaauggucgugaagguaaagaugaagauaaaagagauggaaauaacgaagacaacgagaaauuaaggaaaccaaaacauaaaaaauuaaagcaaccaguggaugguaauccugauccaaaugcaaacccaaauguagaucccaaugccaacccaaauguagauccaaaugcaaacccaaauguagauccaaaugcaaacccaaaugcaaacccaaaugcaaacccaaaugcaaacccaaaugcaaacccaaaugcaaacccaaacgcaaaccccaaugcaaauccuaaugccaauccaaaugcaaauccaaaugcaaacccaaacgcaaaccccaaugcaaauccuaaugccaauccaaaugcaaauccaaaugcaaacccaaacgcaaaccccaaugcaaauccuaaugccaauccaaaugcaaauccuaaugcaaauccuaaugccaauccaaaugcaaauccaaaugcaaacccaaacgcaaaccccaaugcaaauccuaaugccaauccaaaugcaaauccaaaugcaaacccaaacgcaaaccccaaugcaaauccuaaugccaauccaaaugcaaauccaaaugcaaacccaaaugcaaacccaaaugcaaaccccaaugcaaauccuaauaaaaacaaucaagguaauggacaaggucacaauaugccaaaugacccaaaccgaaauguagaugaaaaugcuaaugccaacaaugcuguaaaaaauaauaauaacgaagaaccaagugaucagcacauagaaaaauauuuaaagauaauacaaaauucucuuucaacugaaugguccccauguaguguaacuuguggaaaugguauucaaguuagaauaaagccuggcucugcugauaaaccuaaagaccaauuagauuaugcaaaugauauugaaaaaaaaauuuguaaaauggaaaaauguuccaguguguuuaaugucguaaauaguucaauaggauuaauaaugguauuauccuucuuguuccuuaauuag

SEQ ID NO: 2951 - RNA, 1263 nt, Artificial Sequence
  derived and/or modified CDS sequence (wt) from Pf(Pal97-108)__BAM84957.1__CSP
augaugagaaaauuagcuauuuuaucuguuucuuccuuuuuauuuguugaggccuuauuccaggaauaccagugcuauggaaguucgucaaacacaaggguucuaaaugaauuaaauuaugauaaugcaggcacuaauuuauauaaugaauuagaaaugaauuauuaugggaaacaggaaaauugguauagucuuaaaaaaaauaguagaucacuuggagaaaaugaugauggaaauaauaauaauggagauaauggucgugaagguaaagaugaagauaaaagagauggaaauaacgaagacaacgagaaauuaaggaaaccaaaacauaaaaaauuaaagcaaccaggggaugguaauccugauccaaaugcaaacccaaauguagaucccaaugccaacccaaauguagauccaaaugcaaacccaaauguagauccaaaugcaaacccaaaugcaaacccaaaugcaaacccaaaugcaaacccaaaugcaaacccaaaugcaaacccaaaugcaaacccaaaugcaaacccaaaugcaaacccaaaugcaaacccaaaugcaaacccaaaugcaaacccaaaugcaaacccaaaugcaaacccaaaugcaaaccccaaugcaaacccaaaugcaaaccccaaugcaaauccuaaugcaaacccaaaugcaaacccaaaugcaaacccaaacgcaaaccccaaugcaaauccuaaugcaaaccccaaugcaaauccuaaugcaaauccuaaugccaauccaaaugcaaauccaaaugcaaacccaaacgcaaaccccaaugcaaauccuaaugccaauccaaaugcaaauccaaaugcaaacccaaaugcaaacccaaaugcaaaccccaaugcaaauccuaauaaaaacaaucaagguaauggacaaggucacaauaugccaaaugacccaaaccgaaauguagaugaaaaugcuaaugccaacaaugcuguaaaaaauaauaauaacgaagaaccaagugauaagcacauaaaagaauauuuaacgaaaauacaaaauucuauuucaacugaaugguccccauguaguguaacuuguggaaaugguauucaaguuagaauaaagccuggcucugcugguaaaccuaaagacgaauuaaauuaugaaaaugauauugaaaaaaaaauuuguaaaauggaaaaauguuccaguguguuuaaugucguaaauaguucaauaggauuaauaaugguauuauccuucuuguuccuuaauuag

SEQ ID NO: 2952 - RNA, 1263 nt, Artificial Sequence
  derived and/or modified CDS sequence (wt) from Pf(PNG225-053)__BAM85032.1__CSP
augaugagaaaauuagcuauuuuaucuguuucuuccuuuuuauuuguugaggccuuauuccaggaauaccagugcuauggaaguucgucaaacacaaggguucuaaaugaauuaaauuaugauaaugcaggcacuaauuuauauaaugaauuagaaaugaauuauuaugggaaacaggaaaauugguauagucuuaaaaaaaauaguagaucacuuggagaaaaugaugauggaaauaauaauaauggagauaauggucgugaagguaaagaugaagauaaaagagauggaaauaacgaagacaacgagaaauuaaggaaaccaaaacauaaaaaauuaaagcaaccaggggaugguaauccugauccaaaugcaaacccaaauguagaucccaaugccaacccaaauguagauccaaaugcaaacccaaauguagauccaaaugcaaacccaaaugcaaacccaaaugcaaacccaaaugcaaacccaaaugcaaacccaaaugcaaacccaaaugcaaacccaaaugcaaacccaaaugcaaacccaaaugcaaacccaaaugcaaacccaaaugcaaacccaaaugcaaacccaaaugcaaacccaaaugcaaaccccaaugcaaacccaaaugcaaaccccaaugcaaauccuaaugcaaacccaaaugcaaacccaaaugcaaacccaaacgcaaaccccaaugcaaauccuaaugcaaaccccaaugcaaauccuaaugcaaauccuaaugccaauccaaaugcaaauccaaaugcaaacccaaacgcaaaccccaaugcaaauccuaaugccaauccaaaugcaaauccaaaugcaaacccaaaugcaaacccaaaugcaaaccccaaugcaaauccuaauaaaaacaaucaagguaauggacaaggucacaauaugccaaaugacccaaaccgaaauguagaugaaaaugcuaaugccaacaaugcuguaaaaaauaauaauaacgaagaaccaagugauaagcacauagaacaauauuuaaagaaaauacaaaauucucuuucaacugaaugguccccauguaguguaacuuguggaaaugguauucaaguuagaauaaagccuggcucugcuaauaaaccuaaagacgaauuagauuaugaaaaugauauugaaaaaaaaauuuguaaaauggaaaaauguuccaguguguuuaaugucguaaauaguucaauaggauuaauaaugguauuauccuucuuguuccuuaauuag

SEQ ID NO: 2953 - RNA, 1263 nt, Artificial Sequence
  derived and/or modified CDS sequence (wt) from Pf(Sol95-113)__BAM85062.1__CSP
augaugagaaaauuagcuauuuuaucuguuucuuccuuuuuauuuguugaggccuuauuccaggaauaccagugcuauggaaguucgucaaacacaaggguucuaaaugaauuaaauuaugauaaugcaggcacuaauuuauauaaugaauuagaaaugaauuauuaugggaaacaggaaaauugguauagucuuaaaaaaaauaguagaucacuuggagaaaaugaugauggaaauaauaauaauggagauaauggucgugaagguaaagaugaagauaaaagagauggaaauaacgaagacaacgagaaauuaaggaaaccaaaacauaaaaaauuaaagcaaccaggggaugguaauccugauccaaaugcaaacccaaauguagaucccaaugccaacccaaauguagaucccaaugccaacccaaauguagauccaaaugcaaacccaaauguagauccaaaugcaaacccaaaugcaaacccaaaugcaaacccaaaugcaaacccaaaugcaaacccaaaugcaaacccaaaugcaaacccaaaugcaaacccaaaugcaaacccaaaugcaaacccaaaugcaaacccaaaugcaaacccaaaugcaaaccccaaugcaaacccaaaugcaaaccccaaugcaaauccuaaugcaaacccaaaugcaaacccaaaugcaaacccaaacgcaaaccccaaugcaaauccuaaugcaaaccccaaugcaaauccuaaugcaaauccuaaugccaauccaaaugcaaauccaaaugcaaacccaaacgcaaaccccaaugcaaauccuaaugccaauccaaaugcaaauccaaaugcaaacccaaaugcaaacccaaaugcaaaccccaaugcaaauccuaauaaaaacaaucaagguaauggacaaggucacaauaugccaaaugacccaaaccgaaauguagaugaaaaugcuaaugccaacaaugcuguaaaaaauaauaauaacgaagaaccaagugauaagcacauagaacaauauuuaaagaaaauacaaaauucucuuucaacugaaugguccccauguaguguaacuuguggaaaugguauucaaguuagaauaaagccuggcucugcuaauaaaccuaaagacgaauuagauuaugaaaaugauauugaaaaaaaaauuuguaaaauggaaaaauguuccaguguguuuaaugucguaaauaguucaauaggauuaauaaugguauuauccuucuuguuccuuaauuag

SEQ ID NO: 2954 - RNA, 1263 nt, Artificial Sequence
  derived and/or modified CDS sequence (wt) from Pf(Sol95-328)__BAM85093.1__CSP
augaugagaaaauuagcuauuuuaucuguuucuuccuuuuuauuuguugaggccuuauuccaggaauaccagugcuauggaaguucgucaaacacaaggguucuaaaugaauuaaauuaugauaaugcaggcacuaauuuauauaaugaauuagaaaugaauuauuaugggaaacaggaaaauugguauagucuuaaaaaaaauaguagaucacuuggagaaaaugaugauggaaauaauaauaauggagauaauggucgugaagguaaagaugaagauaaaagagauggaaauaacgaagacaacgagaaauuaaggaaaccaaaacauaaaaaauuaaagcaaccaggggaugguaauccugauccaaaugcaaacccaaauguagaucccaaugccaacccaaauguagauccaaaugcaaacccaaauguagauccaaaugcaaacccaaaugcaaacccaaaugcaaacccaaaugcaaacccaaaugcaaacccaaaugcaaacccaaaugcaaacccaaaugcaaacccaaaugcaaacccaaaugcaaacccaaaugcaaaccccaaugcaaauccuaaugcaaauccuaaugcaaacccaaaugcaaauccuaaugcaaacccaaaugcaaacccaaacguagauccuaaugcaaauccaaaugcaaacccaaaugcaaacccaaacgcaaaccccaaugcaaauccuaaugcaaaccccaaugcaaauccuaaugcaaauccuaaugccaauccaaaugcaaauccaaaugcaaacccaaacgcaaaccccaaugcaaauccuaaugccaauccaaaugcaaauccaaaugcaaacccaaaugcaaacccaaaugcaaaccccaaugcaaauccuaauaaaaacaaucaagguaauggacaaggucacaauaugccaaaugacccaaaccgaaauguagaugaaaaugcuaaugccaacaaugcuguaaaaaauaauaauaacgaagaaccaagugauaagcacauagaacaauauuuaaagaaaauacaaaauucucuuucaacugaaugguccccauguaguguaacuuguggaaaugguauucaaguuagaauaaagccuggcucugcugauaaaccuaaagaccaauuagauuaugaaaaugauauugaaaaaaaaauuuguaaaauggaaaaauguuccaguguguuuaaugucguaaauaguucaauaggauuaauaaugguauuauccuucuuguuccuuaauuag

SEQ ID NO: 2955 - RNA, 1263 nt, Artificial Sequence
  derived and/or modified CDS sequence (wt) from Pf(TiMS95-208)__BAM84896.1__CSP
augaugagaaaauuagcuauuuuaucuguuucuuccuuuuuauuuguugaggccuuauuccaggaauaccagugcuauggaaguucgucaaacacaaggguucuaaaugaauuaaauuaugauaaugcaggcacuaauuuauauaaugaauuagaaaugaauuauuaugggaaacaggaaaauugguauagucuuaaaaaaaauaguagaucacuuggagaaaaugaugauggaaauaauaauaauggagauaauggucgugaagguaaagaugaagauaaaagagauggaaauaacgaagacaacgagaaauuaaggaaaccaaaacauaaaaaauuaaagcaaccaggggaugguaauccugauccaaaugcaaacccaaauguagaucccaaugccaacccaaauguagauccaaaugcaaacccaaauguagauccaaaugcaaacccaaaugcaaacccaaaugcaaacccaaaugcaaacccaaaugcaaacccaaaugcaaacccaaaugcaaacccaaaugcaaacccaaaugcaaacccaaaugcaaacccaaaugcaaacccaaaugcaaacccaaaugcaaacccaaaugcaaacccaaaugcaaaccccaaugcaaacccaaaugcaaaccccaaugcaaauccuaaugcaaacccaaaugcaaacccaaaugcaaacccaaacgcaaaccccaaugcaaauccuaaugccaauccaaaugcaaauccaaaugcaaacccaaacgcaaaccccaaugcaaauccuaaugccaauccaaaugcaaauccaaaugcaaaccccaaugcaaauccuaaugccaauccaaaugcaaauccaaaugcaaacccaaaugcaaacccaaaugcaaauccuaauaaaaacaaucaagguaauggacaaggucacaauaugccaaaugacccaaaccgaaauguagaugaaaaugcuaaugccaacaaugauguaaaaaauaauaauaacgaagaaccaagugauaagcacauagaacaauauuuaaagaaaauacaauauucucuuucaacugaaugguccccauguaguguaacuuguggaaaugguauucaaguuagaauaaagccuggcucugcugauaaaccuaaagaccaauuagauuaugaaaaugauauugaaaaaaaaauuuguaaaauggaaaaauguuccaguguguuuaaugucguaaauaguucaauaggauuaauaaugguauuauccuucuuguuccuuaauuag

SEQ ID NO: 2956 - RNA, 1263 nt, Artificial Sequence
  derived and/or modified CDS sequence (wt) from Pf(TiMS95-260)__BAM84907.1__CSP
augaugagaaaauuagcuauuuuaucuguuucuuccuuuuuauuuguugaggccuuauuccaggaauaccagugcuauggaaguucgucaaacacaaggguucuaaaugaauuaaauuaugauaaugcaggcacuaauuuauauaaugaauuagaaaugaauuauuaugggaaacaggaaaauugguauagucuuaaaaaaaauaguagaucacuuggagaaaaugaugauggaaauaauaauaauggagauaauggucgugaagguaaagaugaagauaaaagagauggaaauaacgaagacaacgagaaauuaaggaaaccaaaacauaaaaaauuaaagcaaccaggggaugguaauccugauccaaaugcaaacccaaauguagaucccaaugccaacccaaauguagauccaaaugcaaacccaaauguagauccaaaugcaaacccaaaugcaaacccaaaugcaaacccaaaugcaaacccaaaugcaaacccaaaugcaaacccaaaugcaaacccaaaugcaaacccaaaugcaaacccaaaugcaaacccaaaugcaaacccaaaugcaaacccaaaugcaaacccaaaugcaaacccaaaugcaaacccaaaugcaaaccccaaugcaaauccuaaugcaaacccaaaugcaaacccaaacguagauccuaaugcaaauccaaaugcaaacccaaaugcaaacccaaacgcaaaccccaaugcaaauccuaaugcaaauccuaaugccaauccaaaugcaaauccaaaugcaaacccaaacgcaaaccccaaugcaaauccuaaugccaauccaaaugcaaauccaaaugcaaacccaaaugcaaacccaaaugcaaaccccaaugcaaauccuaauaaaaacaaucaagguaauggacaaggucacaauaugccaaaugacccaaaccgaaauguagaugaaaaugcuaaugccaacaaugcuguaaaaaauaauaauaacgaagaaccaagugauaagcacauaaaagaauauuuaacgaaaauacaaaauucuauuucaacugaaugguccccauguaguguaacuuguggaaaugguauucaaguuagaauaaagccuggcucugcugguaaaccuaaagacgaauuaaauuaugaaaaugauauugaaaaaaaaauuuguaaaauggaaaaauguuccaguguguuuaaugucguaaauaguucaauaggauuaauaaugguauuauccuucuuguuccuuaauuag

SEQ ID NO: 2957 - RNA, 1263 nt, Artificial Sequence
  derived and/or modified CDS sequence (wt) from Pf(Tz93-030)__BAM84756.1__CSP
augaugagaaaauuagcuauuuuaucuguuucuuccuuuuuauuuguugaggccuuauuccaggaauaccagugcuauggaaguucgucaaacacaaggguucuaaaugaauuaaauuaugauaaugcaggcacuaauuuauauaaugaauuagaaaugaauuauuaugggaaacaggaaaauugguauagucuuaaaaaaaauaguagaucacuuggagaaaaugaugauggaaauaauaauaauggagauaauggucgugaagguaaagaugaagauaaaagagauggaaauaacgaagacaacgagaaauuaaggaaaccaaaacauaaaaaauuaaagcaaccaggggaugguaauccugauccaaaugcaaacccaaauguagaucccaaugccaacccaaauguagauccaaaugcaaacccaaauguagauccaaaugcaaacccaaaugcaaacccaaaugcaaacccaaaugcaaacccaaaugcaaacccaaaugcaaacccaaaugcaaacccaaaugcaaacccaaaugcaaacccaaaugcaaacccaaaugcaaacccaaaugcaaacccaaaugcaaaccccaaugcaaauccuaaugcaaacccaaaugcaaacccaaacguagauccuaaugcaaauccaaaugcaaacccaaaugcaaacccaaacgcaaaccccaaugcaaauccuaaugcaaaccccaaugcaaauccuaaugcaaauccuaaugccaauccaaaugcaaauccaaaugcaaacccaaacgcaaaccccaaugcaaauccuaaugccaauccaaaugcaaauccaaaugcaaacccaaaugcaaacccaaaugcaaacccaaaugcaaaccccaaugcaaauccuaauaaaaacaaucaagguaauggacaaggucacaauaugccaaaugacccaaaccgaaauguagaugaaaaugcuaaugccaacaaugcuguaaaaaauaauaauaacgaagaaccaagugauaagcacauaaaagaauauuuaaacaaaauacaaaauucuauuucaacugaaugguccccauguaguguaacuuguggaaaugguauucaaguuagaauaaagccuggcucugcugauaaaccuaaagaccaauuagauuauauaaaugauauugaaaaaaaaauuuguaaaauggaaaaauguuccaguguguuuaaugucguaaauaguucaauaggauuaauaaugguauuauccuucuuguuccuuaauuag

SEQ ID NO: 2958 - RNA, 1263 nt, Artificial Sequence
  derived and/or modified CDS sequence (wt) from Pf(Tz93-038)__BAM84758.1__CSP
augaugagaaaauuagcuauuuuaucuguuucuuccuuuuuauuuguugaggccuuauuccaggaauaccagugcuauggaaguucgucaaacacaaggguucuaaaugaauuaaauuaugauaaugcaggcacuaauuuauauaaugaauuagaaaugaauuauuaugggaaacaggaaaauugguauagucuuaaaaaaaauaguagaucacuuggagaaaaugaugauggaaauaauaauaauggagauaauggucgugaagguaaagaugaagauaaaagagauggaaauaacgaagacaacgagaaauuaaggaaaccaaaacauaaaaaauuaaagcaaccaggggaugguaauccugauccaaaugcaaacccaaauguagaucccaaugccaacccaaauguagauccaaaugcaaacccaaauguagauccaaaugcaaacccaaaugcaaacccaaaugcaaacccaaaugcaaacccaaaugcaaacccaaaugcaaacccaaaugcaaacccaaaugcaaacccaaaugcaaacccaaaugcaaacccaaaugcaaacccaaaugcaaacccaaaugcaaaccccaaugcaaauccuaaugcaaauccuaaugcaaacccaaaugcaaacccaaacguagauccuaaugcaaauccaaaugcaaacccaaaugcaaacccaaacgcaaaccccaaugcaaauccuaaugcaaaccccaaugcaaauccuaaugcaaauccuaaugccaauccaaaugcaaauccaaaugcaaacccaaacgcaaaccccaaugcaaauccuaaugccaauccaaaugcaaauccaaaugcaaacccaaaugcaaacccaaaugcaaaccccaaugcaaauccuaauaaaaacaaucaagguaauggacaaggucacaauaugccaaaugacccaaaccgaaauguagaugaaaaugcuaaugccaacaaugcuguaaaaaauaauaauaacgaagaaccaagugauaagcacauaaaagaauauuuaaacaaaauacaaaauucuauuucaacugaaugguccccauguaguguaacuuguggaaaugguauucaaguuagaauaaagccuggcucugcugauaaaccuaaagaccaauuagauuauauaaaugauauugaaaaaaaaauuuguaaaauggaaaaauguuccaguguguuuaaugucguaaauaguucaauaggauuaauaaugguauuauccuucuuguuccuuaauuag

SEQ ID NO: 2959 - RNA, 1260 nt, Artificial Sequence
  derived and/or modified CDS sequence (wt) from Pf(TMS31)__ACO49480.1__CSP
augagaaaauuagcuauuuuaucuguuucuuccuuuuuauuuguugaggccuuauuccaggaauaccagugcuauggaaguucgucaaacacaaggguucuaaaugaauuaaauuaugauaaugcaggcacuaauuuauauaaugaauuagaaaugaauuauuaugggaaacaggaaaauugguauagucuuaaaaaaaauaguagaucacuuggagaaaaugaugauggaaauaauaauaauggagauaauggucgugaagguaaagaugaagauaaaagagauggaaauaacgaagacaacgagaaauuaaggaaaccaaaacauaaaaaauuaaagcaaccaggggaugguaauccugauccaaaugcaaacccaaauguagaucccaaugccaacccaaauguagauccaaaugcaaacccaaauguagauccaaaugcaaacccaaaugcaaacccaaaugcaaacccaaaugcaaacccaaaugcaaacccaaaugcaaacccaaaugcaaacccaaaugcaaacccaaaugcaaacccaaaugcaaacccaaaugcaaacccaaaugcaaacccaaaugcaaacccaaaugcaaacccaaaugcaaaccccaaugcaaacccaaaugcaaaccccaaugcaaauccuaaugcaaacccaaaugcaaacccaaaugcaaacccaaacgcaaaccccaaugcaaauccuaaugcaaaccccaaugcaaauccuaaugcaaauccuaaugccaauccaaaugcaaauccaaaugcaaacccaaacgcaaaccccaaugcaaauccuaaugccaauccaaaugcaaauccaaaugcaaacccaaaugcaaacccaaaugcaaaccccaaugcaaauccuaauaaaaacaaucaagguaauggacaaggucacaauaugccaaaugacccaaaccgaaauguagaugaaaaugcuaaugccaacaaugcuguaaaaaauaauaauaacgaagaaccaagugauaagcacauagaacaauauuuaaagaaaaugcaaaauucucuuucaacugaaugguccccauguaguguaacuuguggaaaugguauucaaguuagaauaaagccuggcucugcuaauaaaccuaaagacgaauuagauuaugaaaaugauauugaaaaaaaaauuuguaaaauggaaaaauguuccaguguguuuaaugucguaaauaguucaauaggauuaauaaugguauuauccuucuuguuccuuaauuag

SEQ ID NO: 2960 - RNA, 1260 nt, Artificial Sequence
  derived and/or modified CDS sequence (wt) from Pf(TSY172)__ACO49517.1__CSP
augagaaaauuagcuauuuuaucuguuucuuccuuuuuauuuguugaggccuuauuccaggaauaccagugcuauggaaguucgucaaacacaaggguucuaaaugaauuaaauuaugauaaugcaggcacuaauuuauauaaugaauuagaaaugaauuauuaugggaaacaggaaaauugguauagucuuaaaaaaaauaguagaucacuuggagaaaaugaugauggaaauaauaauaauggagauaauggucgugaagguaaagaugaagauaaaagagauggaaauaacgaagacaacgagaaauuaaggaaaccaaaacauaaaaaauuaaagcaaccaggggaugguaauccugauccaaaugcaaacccaaauguagaucccaaugccaacccaaauguagauccaaaugcaaacccaaauguagauccaaaugcaaacccaaaugcaaacccaaaugcaaacccaaaugcaaacccaaaugcaaacccaaaugcaaacccaaaugcaaacccaaaugcaaacccaaaugcaaacccaaaugcaaacccaaaugcaaacccaaaugcaaacccaaaugcaaacccaaaugcaaacccaaaugcaaaccccaaugcaaacccaaaugcaaaccccaaugcaaauccuaaugcaaacccaaaugcaaacccaaaugcaaacccaaacgcaaaccccaaugcaaauccuaaugcaaaccccaaugcaaauccuaaugcaaauccuaaugccaauccaaaugcaaauccaaaugcaaacccaaacgcaaaccccaaugcaaauccuaaugccaauccaaaugcaaauccaaaugcaaacccaaaugcaaacccaaaugcaaaccccaaugcaaauccuaauaaaaacaaucaagguaauggacaaggucacaauaugccaaaugacccaaaccgaaauguagaugaaaaugcuaaugccaacaaugcuguaaaaaauaauaauaacgaagaaccaagugauaagcacauagaacaauauuuaaagaaaauacaaaauucucuuucaacugaaugguccccauguaguguaacuuguggaaaugguauucaaguuagaauaaagccuggcucugcuaauaaaccuaaagacgaauuagauuaugaaaaugauauugaaaaaaaaauuuguaaaauggaaaaauguuccaguguguuuaaugucguaaauaguucaauaggauuaauaaugguauuauccuucuuguuccuuaauuag

SEQ ID NO: 2961 - RNA, 1251 nt, Artificial Sequence
  derived and/or modified CDS sequence (wt) from Pf(Asembo Bay)__AAN87591.1__CSP
augaugagaaaauuagcuauuuuaucuguuucuuccuuuuuauuuguugaggccuuauuccaggaauaccagugcuauggaaguucgucaaacacaaggguucuaaaugaauuaaauuaugauaaugcaggcacuaauuuauauaaugaauuagaaaugaauuauuaugggaaacaggaaaauugguauagucuuaaaaaaaauaguagaucacuuggagaaaaugaugauggaaauaauaauaauggagauaauggucgugaagguaaagaugaagauaaaagagauggaaauaacgaagacaacgagaaauuaaggaaaccaaaacauaaaaaauuaaagcaaccaggggaugguaauccugauccaaaugcaaacccaaauguagaucccaaugccaacccaaauguagauccaaaugcaaacccaaauguagauccaaaugcaaacccaaaugcaaacccaaaugcaaacccaaaugcaaacccaaaugcaaacccaaaugcaaacccaaaugcaaacccaaaugcaaacccaaaugcaaacccaaaugcaaacccaaaugcaaacccaaaugcaaacccaaaugcaaacccaaaugcaaaccccaaugcaaacccaaaugcaaaccccaaugcaaacccaaacguagauccuaaugcaaauccaaaugcaaacccaaacgcaaaccccaaugcaaauccuaaugcaaaccccaaugcaaauccuaaugcaaauccuaaugccaauccaaaugcaaauccaaaugcaaacccaaacgcaaaccccaaugcaaauccuaaugccaauccaaaugcaaauccaaaugcaaacccaaaugcaaacccaaaugcaaaccccaaugcaaauccuaauaaaaacaaucaagguaauggacaaggucacaauaugccaaaugacccaaaccgaaauguagaugaaaaugcuaaugccaacaaugcuguaaaaaauaauaauaacgaagaaccaagugaucagcacauagaaaaauauuuaaagacaauacaaaauucucuuucaacugaaugguccccauguaguguaacuuguggaaaugguauucaaguuagaauaaagccuggcucugcuaauaaaccuaaagaccaauuagauuaugcaaaugauauugaaaaaaaaauuuguaaaauggaaaaauguuccaguguguuuaaugucguaaauaguucaauaggauuaauaaugguauuauccuucuuguuccuuaauuag

SEQ ID NO: 2962 - RNA, 1251 nt, Artificial Sequence
  derived and/or modified CDS sequence (wt) from Pf(Asembo Bay)__AAN87590.1__CSP
augaugagaaaauuagcuauuuuaucuguuucuuccuuuuuauuuguugaggccuuauuccaggaauaccagugcuauggaaguucgucaaacacaaggguucuaaaugaauuaaauuaugauaaugcaggcacuaauuuauauaaugaauuagaaaugaauuauuaugggaaacaggaaaauugguauagucuuaaaaaaaauaguagaucacuuggagaaaaugaugauggaaauaauaauaauggagauaauggucgugaagguaaagaugaagauaaaagagauggaaauaacgaagacaacgaaaaauuaaggaaaccaaaacauaaaaaauuaaagcaaccaggggaugguaauccugauccaaaugcaaacccaaauguagaucccaaugccaacccaaauguagauccaaaugcaaacccaaauguagauccaaaugcaaacccaaaugcaaacccaaaugcaaacccaaaugcaaacccaaaugcaaacccaaaugcaaacccaaaugcaaacccaaaugcaaacccaaaugcaaacccaaaugcaaacccaaaugcaaauccuaaugcaaacccaaacguagauccuaaugcaaacccaaaugcaaacccaaacgcaaaccccaaugcaaaccccaaugcaaauccaaaugcaaacccaaaugcaaacccaaacgcaaaccccaaugcaaauccuaaugcaaaccccaaugcaaauccuaaugcaaauccuaaugccaauccaaaugcaaauccaaaugcaaacccaaacgcaaaccccaaugcaaauccuaaugccaauccaaaugcaaauccaaaugcaaacccaaaugcaaacccaaaugcaaaccccaaugcaaauccuaauaaaaacaaucaagguaauggacaaggucacaauaugccaaaugacccaaaccgaaauguagaugaaaaugcuaaugccaacaaugcuguaaaaaauaauaauaacgaagaaccaagugaucagcacauagaaaaauauuuaaagacaauacaaaauucucuuucaacugaaugguccccauguaguguaacuuguggaaaugguauucaaguuagaauaaagccuggcucugcuaauaaaccuaaagaccaauuagauuaugcaaaugauauugaaaaaaaaauuuguaaaauggaaaaauguuccaguguguuuaaugucguaaauaguucaauaggauuaauaaugguauuauccuucuuguuccuuaauuag

SEQ ID NO: 2963 - RNA, 1251 nt, Artificial Sequence
  derived and/or modified CDS sequence (wt) from Pf(Gha1108-097)__BAM84820.1__CSP
augaugagaaaauuagcuauuuuaucuguuucuuccuuuuuauuuguugaggccuuauuccaggaauaccagugcuauggaaguucgucaaacacaaggguucuaaaugaauuaaauuaugauaaugcaggcacuaauuuauauaaugaauuagaaaugaauuauuaugggaaacaggaaaauugguauagucuuaaaaaaaaugguagaucacuuggagaaaaugaugauggaaauaauaauaauggagauaauggucgugaagguaaagaugaagauaaaagagauggaaauaacgaagacaacgagaaauuaaggaaaccaaaacauaaaaaauuaaagcaaccagcggaugguaauccugauccaaaugcaaacccaaauguagaucccaaugccaacccaaauguagauccaaaugcaaacccaaauguagauccaaaugcaaacccaaaugcaaacccaaaugcaaacccaaaugcaaacccaaaugcaaacccaaaugcaaacccaaaugcaaacccaaaugcaaacccaaaugcaaacccaaaugcaaaccccaaugcaaauccuaaugcaaauccuaaugcaaacccaaaugcaaauccuaaugcaaacccaaaugcaaacccaaacguagauccuaaugcaaauccaaaugcaaacccaaaugcaaacccaaacgcaaaccccaaugcaaauccuaaugcaaaccccaaugcaaauccuaaugcaaauccuaaugccaauccaaaugcaaauccaaaugcaaacccaaacgcaaaccccaaugcaaauccuaaugccaauccaaaugcaaauccaaaugcaaacccaaaugcaaacccaaaugcaaaccccaaugcaaauccuaauaaaaacaaucaagguaauggacaaggucacaauaugccaaaugacccaaaccgaaauguagaugaaaaugcuaaugccaacaaugguguaaaaaauaauaauaacgaagaaccaagugauaagcacauagaacaauauuuaaagagaauacaaaauucucuuucaacugaaugguccccauguaguguaacuuguggaaaugguauucaaguuagaauaaagccuggcucugcuaauaaaccuaaagacgaauuaaauuaugaaaaugauauugaaaaaaaaauuuguaaaauggaaaaauguuccaguguguuuaaugucguaaauaguucaauaggauuaauaaugguauuauccuucuuguuccuuaauuag

SEQ ID NO: 2964 - RNA, 1251 nt, Artificial Sequence
  derived and/or modified CDS sequence (wt) from Pf(MAD20)__AAA29550.1__CSP
augaugagaaaauuagcuauuuuaucuguuucuuccuuuuuauuuguugaggccuuauuccaggaauaccagugcuauggaaguucgucaaacacaaggguucuaaaugaauuaaauuaugauaaugcaggcaucaauuuauauaaugaauuagaaaugaauuauuaugggaaacaggaaaauugguauagucuuaaaaaaaauaguagaucacuuggagaaaaugaugauggaaauaauaauaauggagauaauggucgugaagguaaagaugaagauaaaagagauggaaauaacgaagacaacgagaaauuaaggaaaccaaaacauaaaaaauuaaagcaaccaggggaugguaauccugauccaaaugcaaacccaaauguagaucccaaugccaacccaaauguagauccaaaugcaaacccaaauguagauccaaaugcaaacccaaaugcaaacccaaaugcaaacccaaaugcaaacccaaaugcaaacccaaaugcaaacccaaaugcaaacccaaaugcaaacccaaaugcaaacccaaaugcaaaccccaaugcaaauccuaaugcaaauccuaaugcaaacccaaaugcaaauccuaaugcaaacccaaaugcaaacccaaacguagauccuaaugcaaauccaaaugcaaacccaaaugcaaacccaaacgcaaaccccaaugcaaauccuaaugcaaaccccaaugcaaauccuaaugcaaauccuaaugccaauccaaaugcaaauccaaaugcaaacccaaacgcaaaccccaaugcaaauccuaaugccaauccaaaugcaaauccaaaugcaaacccaaaugcaaacccaaaugcaaaccccaaugcaaauccuaauaaaaacaaucaagguaauggacaaggucacaauaugccaaaugacccaaaccgaaauguagaugaaaaugcuaaugccaacaaugcuguaaaaaauaauaauaacgaagaaccaagugauaagcacauagaacaauauuuaaagaaaauacaaaauucucuuucaacugaaugguccccauguaguguaacuuguggaaaugguauucaaguuagaauaaagccuggcucugcugauaaaccuaaagaccaauuagauuaugaaaaugauauugaaaaaaaaauuuguaaaauggaaaaauguuccaguguguuuaaugucguaaauaguucaauaggauuaauaaugguauuauccuucuuguuccuuaauuag

SEQ ID NO: 2965 - RNA, 1251 nt, Artificial Sequence
  derived and/or modified CDS sequence (wt) from Pf(Pal97-002)__BAM84917.1__CSP
augaugagaaaauuagcuauuuuaucuguuucuuccuuuuuauuuguugaggccuuauuccaggaauaccagugcuauggaaguucgucaaacacaaggguucuaaaugaauuaaauuaugauaaugcaggcacuaauuuauauaaugaauuagaaaugaauuauuaugggaaacaggaaaauugguauagucuuaaaaaaaauaguagaucacuuggagaaaaugaugauggaaauaauaauaauggagauaauggucgugaagguaaagaugaagauaaaagagauggaaauaacgaagacaacgagaaauuaaggaaaccaaaacauaaaaaauuaaagcaaccaggggaugguaauccugauccaaaugcaaacccaaauguagaucccaaugccaacccaaauguagauccaaaugcaaacccaaauguagauccaaaugcaaacccaaaugcaaacccaaaugcaaacccaaaugcaaacccaaaugcaaacccaaaugcaaacccaaaugcaaacccaaaugcaaacccaaaugcaaacccaaaugcaaacccaaaugcaaacccaaaugcaaacccaaaugcaaaccccaaugcaaauccuaaugcaaacccaaaugcaaacccaaacguagauccuaaugcaaauccaaaugcaaacccaaaugcaaacccaaacgcaaaccccaaugcaaauccuaaugcaaaccccaaugcaaauccuaaugcaaauccuaaugccaauccaaaugcaaauccaaaugcaaacccaaacgcaaaccccaaugcaaauccuaaugccaauccaaaugcaaauccaaaugcaaacccaaaugcaaacccaaaugcaaaccccaaugcaaauccuaauaaaaacaaucaagguaauggacaaggucacaauaugccaaaugacccaaaccgaaauguagaugaaaaugcuaaugccaacaaugcuguaaaaaauaauaauaacgaagaaccaagugaucagcacauagaaaaauauauaaagaaaauacaaaauucucuuucaacugaaugguccccauguaguguaacuuguggaaaugguauucaaguuagaauaaagccuggcucugcugauaaaccuaaaaacgaauuagauuaugaaaaugauauugaaaaaaaaauuuguaaaauggaaaaauguuccaguguguuuaaugucguaaauaguucaauaggauuaauaaugguauuauccuucuuguuccuuaauuag

SEQ ID NO: 2966 - RNA, 1251 nt, Artificial Sequence
  derived and/or modified CDS sequence (wt) from Pf(Pal97-102)__BAM84954.1__CSP
augaugagaaaauuagcuauuuuaucuguuucuuccuuuuuauuuguugaggccuuauuccaggaauaccagugcuauggaaguucgucaaacacaaggguucuaaaugaauuaaauuaugauaaugcaggcacuaauuuauauaaugaauuagaaaugaauuauuaugggaaacaggaaaauugguauagucuuaaaaaaaauaguagaucacuuggagaaaaugaugauggaaauaauaauaauggagauaauggucgugaagguaaagaugaagauaaaagagauggaaauaacgaagacaacgagaaauuaaggaaaccaaaacauaaaaaauuaaagcaaccaggggaugguaauccugauccaaaugcaaacccaaauguagaucccaaugccaacccaaauguagauccaaaugcaaacccaaauguagauccaaaugcaaacccaaaugcaaacccaaaugcaaacccaaaugcaaacccaaaugcaaacccaaaugcaaacccaaaugcaaacccaaaugcaaacccaaaugcaaacccaaaugcaaacccaaaugcaaacccaaaugcaaacccaaaugcaaacccaaaugcaaaccccaaugcaaacccaaaugcaaaccccaaugcaaauccuaaugcaaacccaaaugcaaacccaaaugcaaacccaaacgcaaaccccaaugcaaauccuaaugcaaaccccaaugcaaauccuaaugcaaauccuaaugccaauccaaaugcaaauccaaaugcaaacccaaacgcaaaccccaaugcaaauccuaaugccaauccaaaugcaaauccaaaugcaaacccaaaugcaaacccaaaugcaaaccccaaugcaaauccuaauaaaaacaaucaagguaauggacaaggucacaauaugccaaaugacccaaaccgaaauguagaugaaaaugcuaaugccaacaaugcuguaaaaaauaauaauaacgaagaaccaagugauaagcacauaaaagaauauuuaacgaaaauacaaaauucuauuucaacugaaugguccccauguaguguaacuuguggaaaugguauucaaguuagaauaaagccuggcucugcugguaaaccuaaagacgaauuaaauuaugaaaaugauauugaaaaaaaaauuuguaaaauggaaaaauguuccaguguguuuaaugucguaaauaguucaauaggauuaauaaugguauuauccuucuuguuccuuaauuag

SEQ ID NO: 2967 - RNA, 1251 nt, Artificial Sequence
  derived and/or modified CDS sequence (wt) from Pf(PNG227-255)__BAM85044.1__CSP
augaugagaaaauuagcuauuuuaucuguuucuuccuuuuuauuuguugaggccuuauuccaggaauaccagugcuauggaaguucgucaaacacaaggguucuaaaugaauuaaauuaugauaaugcaggcacuaauuuauauaaugaauuagaaaugaauuauuaugggaaacaggaaaauugguauagucuuaaaaaaaauaguagaucacuuggagaaaaugaugauggaaauaauaauaauggagauaauggucgugaagguaaagaugaagauaaaagagauggaaauaacgaagacaacgagaaauuaaggaaaccaaaacauaaaaaauuaaagcaaccaggggaugguaauccugauccaaaugcaaacccaaauguagaucccaaugccaacccaaauguagaucccaaugccaacccaaauguagauccaaaugcaaacccaaauguagauccaaaugcaaacccaaaugcaaacccaaaugcaaacccaaaugcaaacccaaaugcaaacccaaaugcaaacccaaaugcaaacccaaaugcaaaccccaaugcaaauccuaaugcaaauccuaaugcaaacccaaaugcaaauccuaaugcaaacccaaaugcaaacccaaacguagauccuaaugcaaauccaaaugcaaacccaaaugcaaacccaaacgcaaaccccaaugcaaauccuaaugcaaaccccaaugcaaauccuaaugcaaauccuaaugccaauccaaaugcaaauccaaaugcaaacccaaacgcaaaccccaaugcaaauccuaaugccaauccaaaugcaaauccaaaugcaaacccaaaugcaaacccaaaugcaaaccccaaugcaaauccuaauaaaaacaaucaagguaauggacaaggucacaauaugccaaaugacccaaaccgaaauguagaugaaaaugcuaaugccaacaaugcuguaaaaaauaauaauaacgaagaaccaagugauaagcacauagaacaauauuuaaagaaaauacaaaauucucuuucaacugaaugguccccauguaguguaacuuguggaaaugguauucaaguuagaauaaagccuggcucugcugauaaaccuaaagaccaauuagauuaugaaaaugauauugaaaaaaaaauuuguaaaauggaaaaauguuccaguguguuuaaugucguaaauaguucaauaggauuaauaaugguauuauccuucuuguuccuuaauuag

SEQ ID NO: 2968 - RNA, 1251 nt, Artificial Sequence
  derived and/or modified CDS sequence (wt) from Pf(PNG228-063)__BAM85045.1__CSP
augaugagaaaauuagcuauuuuaucuguuucuuccuuuuuauuuguugaggccuuauuccaggaauaccagugcuauggaaguucgucaaacacaaggguucuaaaugaauuaaauuaugauaaugcaggcacuaauuuauauaaugaauuagaaaugaauuauuaugggaaacaggaaaauugguauagucuuaaaaaaaauaguagaucacuuggagaaaaugaugauggaaauaauaauaauggagauaauggucgugaagguaaagaugaagauaaaagagauggaaauaacgaagacaacgagaaauuaaggaaaccaaaacauaaaaaauuaaagcaaccaggggaugguaauccugauccaaaugcaaacccaaauguagaucccaaugccaacccaaauguagauccaaaugcaaacccaaauguagauccaaaugcaaacccaaaugcaaacccaaaugcaaacccaaaugcaaacccaaaugcaaacccaaaugcaaacccaaaugcaaacccaaaugcaaacccaaaugcaaacccaaaugcaaaccccaaugcaaauccuaaugcaaauccuaaugcaaacccaaaugcaaauccuaaugcaaacccaaaugcaaacccaaacguagauccuaaugcaaauccaaaugcaaacccaaaugcaaacccaaacgcaaaccccaaugcaaauccuaaugcaaaccccaaugcaaauccuaaugcaaauccuaaugccaauccaaaugcaaauccaaaugcaaacccaaacgcaaaccccaaugcaaauccuaaugccaauccaaaugcaaauccaaaugcaaacccaaaugcaaacccaaaugcaaaccccaaugcaaauccuaauaaaaacaaucaagguaauggacaaggucacaauaugccaaaugacccaaaccgaaauguagaugaaaaugcuaaugccaacaaugcuguaaaaaauaauaauaacgaagaaccaagugauaagcacauagaacaauauuuaaagaaaauacaaaauucucuuucaacugaaugguccccauguaguguaacuuguggaaaugguauucaaguuagaauaaagccuggcucugcugguaaaucuaaagacgaauuagauuaugaaaaugauauugaaaaaaaaauuuguaaaauggaaaaauguuccaguguguuuaaugucguaaauaguucaauaggauuaauaaugguauuauccuucuuguuccuuaauuag

SEQ ID NO: 2969 - RNA, 1251 nt, Artificial Sequence
  derived and/or modified CDS sequence (wt) from Pf(PNG830-058)__BAM84987.1__CSP
augaugagaaaauuagcuauuuuaucuguuucuuccuuuuuauuuguugaggccuuauuccaggaauaccagugcuauggaaguucgucaaacacaaggguucuaaaugaauuaaauuaugauaaugcaggcacuaauuuauauaaugaauuagaaaugaauuauuaugggaaacaggaaaauugguauagucuuaaaaaaaauaguagaucacuuggagaaaaugaugauggaaauaauaauaauggagauaauggucgugaagguaaagaugaagauaaaagagauggaaauaacgaagacaacgagaaauuaaggaaaccaaaacauaaaaaauuaaagcaaccaggggaugguaauccugauccaaaugcaaacccaaauguagaucccaaugccaacccaaauguagaucccaaugccaacccaaauguagauccaaaugcaaacccaaauguagauccaaaugcaaacccaaaugcaaacccaaaugcaaacccaaaugcaaacccaaaugcaaacccaaaugcaaacccaaaugcaaacccaaaugcaaacccaaaugcaaacccaaaugcaaacccaaaugcaaacccaaaugcaaaccccaaugcaaacccaaaugcaaaccccaaugcaaauccuaaugcaaacccaaaugcaaacccaaaugcaaacccaaacgcaaaccccaaugcaaauccuaaugcaaaccccaaugcaaauccuaaugcaaauccuaaugccaauccaaaugcaaauccaaaugcaaacccaaacgcaaaccccaaugcaaauccuaaugccaauccaaaugcaaauccaaaugcaaacccaaaugcaaacccaaaugcaaaccccaaugcaaauccuaauaaaaacaaucaagguaauggacaaggucacaauaugccaaaugacccaaaccgaaauguagaugaaaaugcuaaugccaacaaugcuguaaaaaauaauaauaacgaagaaccaagugauaagcacauagaacaauauuuaaagaaaauacaaaauucucuuucaacugaaugguccccauguaguguaacuuguggaaaugguauucaaguuagaauaaagccuggcucugcuaauaaaccuaaagacgaauuagauuaugaaaaugauauugaaaaaaaaauuuguaaaauggaaaaauguuccaguguguuuaaugucguaaauaguucaauaggauuaauaaugguauuauccuucuuguuccuuaauuag

SEQ ID NO: 2970 - RNA, 1251 nt, Artificial Sequence
  derived and/or modified CDS sequence (wt) from Pf(PNG903-136)__BAM84993.1__CSP
augaugagaaaauuagcuauuuuaucuguuucuuccuuuuuauuuguugaggccuuauuccaggaauaccagugcuauggaaguucgucaaacacaaggguucuaaaugaauuaaauuaugauaaugcaggcacuaauuuauauaaugaauuagaaaugaauuauuaugggaaacaggaaaauugguauagucuuaaaaaaaauaguagaucacuuggagaaaaugaugauggaaauaauaauaauggagauaauggucgugaagguaaagaugaagauaaaagagauggaaauaacgaagacaacgagaaauuaaggaaaccaaaacauaaaaaauuaaagcaaccaggggaugguaauccugauccaaaugcaaacccaaauguagaucccaaugccaacccaaauguagauccaaaugcaaacccaaauguagauccaaaugcaaacccaaaugcaaacccaaaugcaaacccaaaugcaaacccaaaugcaaacccaaaugcaaacccaaaugcaaacccaaaugcaaacccaaaugcaaacccaaaugcaaaccccaaugcaaauccuaaugcaaauccuaaugcaaacccaaaugcaaauccuaaugcaaacccaaaugcaaacccaaacguagauccuaaugcaaauccaaaugcaaacccaaaugcaaacccaaacgcaaaccccaaugcaaauccuaaugcaaaccccaaugcaaauccuaaugcaaauccuaaugccaauccaaaugcaaauccaaaugcaaacccaaacgcaaaccccaaugcaaauccuaaugccaauccaaaugcaaauccaaaugcaaacccaaaugcaaacccaaaugcaaaccccaaugcaaauccuaauaaaaacaaucaagguaauggacaaggucacaauaugccaaaugacccaaaccgaaauguagaugaaaaugcuaaugccaacaaugcuguaaaaaauaauaauaacgaagaaccaagugauaagcacauagaacaauauuuaaagaaaauacaaaauucucuuucaacugaaugguccccauguaguguaacuuguggaaaugguauucaaguuagaauaaagccuggcucugcuaauaaaccuaaagacgaauuagauuaugaaaaugauauugaaaaaaaaauuuguaaaauggaaaaauguuccaguguguuuaaugucguaaauaguucaauaggauuaauaaugguauuauccuucuuguuccuuaauuag

SEQ ID NO: 2971 - RNA, 1251 nt, Artificial Sequence
  derived and/or modified CDS sequence (wt) from Pf(Tz03-086)__BAM84805.1__CSP
augaugagaaaauuagcuauuuuaucuguuucuuccuuuuuauuuguugaggccuuauuccaggaauaccagugcuauggaaguucgucaaacacaaggguucuaaaugaauuaaauuaugauaaugcaggcacuaauuuauauaaugaauuagaaaugaauuauuaugggaaacaggaaaauugguauagucuuaaaaaaaauaguagaucacuuggagaaaaugaugauggaaauaauaauaauggagauaauggucgugaagguaaagaugaagauaaaagagauggaaauaacgaagacaacgagaaauuaaggaaaccaaaacauaaaaaauuaaagcaaccagcggaugguaauccugauccaaaugcaaacccaaauguagaucccaaugccaacccaaauguagauccaaaugcaaacccaaauguagauccaaaugcaaacccaaaugcaaacccaaaugcaaacccaaaugcaaacccaaaugcaaacccaaaugcaaacccaaaugcaaacccaaaugcaaacccaaaugcaaaccccaaugcaaauccuaaugcaaauccuaaugcaaacccaaaugcaaauccuaaugcaaacccaaaugcaaaccccaaugcaaauccuaaugcaaacccaaaugcaaacccaaacguagauccuaaugcaaauccaaaugcaaacccaaaugcaaacccaaacgcaaaccccaaugcaaauccuaaugcaaauccuaaugccaauccaaaugcaaacccaaacgcaaaccccaaugcaaauccuaaugccaauccaaaugcaaauccaaaugcaaacccaaaugcaaacccaaaugcaaacccaaaugcaaaccccaaugcaaauccuaauaaaaacaaucaagguaauggacaaggucacaauaugccaaaugacccaaaccgaaauguagaugaaaaugcuaaugccaacaaugcuguaaaaaauaauaauaacgaagaaccaagugauaagcacauaacagaauauuuaaagaaaauacaaaauucucuuucaacugaaugguccccauguaguguaacuuguggaaaugguauucaaguuagaauaaagccuggcucugcugguaaaucuaaaaacgaauuagauuaugaaaaugauauugaaaaaaaaauuuguaaaauggaaaaauguuccaguguguuuaaugucguaaauaguucaauaggauuaauaaugguauuauccuucuuguuccuuaauuag

SEQ ID NO: 2972 - RNA, 1251 nt, Artificial Sequence
  derived and/or modified CDS sequence (wt) from Pf(Tz93-009)__BAM84750.1__CSP
augaugagaaaauuagcuauuuuaucuguuucuuccuuuuuauuuguugaggccuuauuccaggaauaccagugcuauggaaguucgucaaacacaaggguucuaaaugaauuaaauuaugauaaugcaggcacuaauuuauauaaugaauuagaaaugaauuauuaugggaaacaggaaaauugguauagucuuaaaaaaaauaguagaucacuuggagaaaaugaugauggaaauaauaauaauggagauaauggucgugaagguaaagaugaagauaaaagagauggaaauaacgaagacaacgagaaauuaaggaaaccaaaacauaaaaaauuaaagcaaccaggggaugguaauccugauccaaaugcaaacccaaauguagaucccaaugccaacccaaauguagauccaaaugcaaacccaaauguagauccaaaugcaaacccaaaugcaaacccaaaugcaaacccaaaugcaaacccaaaugcaaacccaaaugcaaacccaaaugcaaacccaaaugcaaacccaaaugcaaacccaaaugcaaacccaaaugcaaacccaaaugcaaacccaaaugcaaaccccaaugcaaauccuaaugcaaacccaaaugcaaacccaaacguagauccuaaugcaaauccaaaugcaaacccaaaugcaaacccaaacgcaaaccccaaugcaaauccuaaugcaaaccccaaugcaaauccuaaugcaaauccuaaugccaauccaaaugcaaauccaaaugcaaacccaaacgcaaaccccaaugcaaauccuaaugccaauccaaaugcaaauccaaaugcaaacccaaaugcaaacccaaaugcaaaccccaaugcaaauccuaauaaaaacaaucaagguaauggacaaggucacaauaugccaaaugacccaaaccgaaauguagaugaaaaugcuaaugccaacaaugcuguaaaaaauaauaauaacgaagaaccaagugauaagcacauaaaagaauauuuaacgaaaauaaaaaauucuauuucaacugaaugguccccauguaguguaacuuguggaaaugguauucaaguuagaauaaagccuggcucugcuaauaaaccuaaagacgaauuagauuaugaaaaugauauugaaaaaaaaauuuguaaaauggaaaaauguuccaguguguuuaaugucguaaauaguucaauaggauuaauaaugguauuauccuucuuguuccuuaauuag

SEQ ID NO: 2973 - RNA, 1251 nt, Artificial Sequence
  derived and/or modified CDS sequence (wt) from Pf(Van98M305-147)__BAM85260.1__CSP
augaugagaaaauuagcuauuuuaucuguuucuuccuuuuuauuuguugaggccuuauuccaggaauaccagugcuauggaaguucgucaaacacaaggguucuaaaugaauuaaauuaugauaaugcaggcacuaauuuauauaaugaauuagaaaugaauuauuaugggaaacaggaaaauugguauagucuuaaaaaaaauaguagaucacuuggagaaaaugaugauggaaauaauaauaauggagauaauggucgugaagguaaagaugaagauaaaagagauggaaauaacgaagacaacgagaaauuaaggaaaccaaaacauaaaaaauuaaagcaaccaggggaugguaauccugauccaaaugcaaacccaaauguagaucccaaugccaacccaaauguagauccaaaugcaaacccaaauguagauccaaaugcaaacccaaaugcaaacccaaaugcaaacccaaaugcaaacccaaaugcaaacccaaaugcaaacccaaaugcaaacccaaaugcaaacccaaaugcaaacccaaaugcaaaccccaaugcaaauccuaaugcaaauccuaaugcaaacccaaaugcaaauccuaaugcaaacccaaaugcaaacccaaacguagauccuaaugcaaauccaaaugcaaacccaaaugcaaacccaaacgcaaaccccaaugcaaauccuaaugcaaaccccaaugcaaauccuaaugcaaauccuaaugccaauccaaaugcaaauccaaaugcaaacccaaacgcaaaccccaaugcaaauccuaaugccaauccaaaugcaaauccaaaugcaaacccaaaugcaaacccaaaugcaaaccccaaugcaaauccuaauaaaaacaaucaagguaauggacaaggucacaauaugccaaaugacccaaaccgaaauguagaugaaaaugcuaaugccaacaaugcuguaaaaaauaauaauaacgaagaaccaagugauaagcacauagaacaauauuuaaagaaaauacaaaauucucuuucaacugaaugguccccauguaguguaacuuguggaaaugguauucaaguuagaauaaagccuggcucugcugauaaaccuaaagaccaauuagauuaugaaaaugauauugaaaaaaaaauuuguaaaauggaaaaauguuccaguguguuuaaugucguaaauaguucaauaggauuaauaaugguauuauccuucuuguuccuuaauuag

SEQ ID NO: 2974 - RNA, 1251 nt, Artificial Sequence
  derived and/or modified CDS sequence (wt) from Pf(Van98P226-97)__BAM85298.1__CSP
augaugagaaaauuagcuauuuuaucuguuucuuccuuuuuauuuguugaggccuuauuccaggaauaccagugcuauggaaguucgucaaacacaaggguucuaaaugaauuaaauuaugauaaugcaggcacuaauuuauauaaugaauuagaaaugaauuauuaugggaaacaggaaaauugguauagucuuaaaaaaaauaguagaucacuuggagaaaaugaugauggaaauaauaauaauggagauaauggucgugaagguaaagaugaagauaaaagagauggaaauaacgaagacaacgagaaauuaaggaaaccaaaacauaaaaaauuaaagcaaccaggggaugguaauccugauccaaaugcaaacccaaauguagaucccaaugccaacccaaauguagauccaaaugcaaacccaaauguagauccaaaugcaaacccaaaugcaaacccaaaugcaaacccaaaugcaaacccaaaugcaaacccaaaugcaaacccaaaugcaaacccaaaugcaaacccaaaugcaaacccaaaugcaaacccaaaugcaaacccaaaugcaaacccaaaugcaaacccaaaugcaaacccaaaugcaaaccccaaugcaaacccaaaugcaaaccccaaugcaaauccuaaugcaaacccaaaugcaaacccaaaugcaaacccaaacgcaaaccccaaugcaaauccuaaugcaaaccccaaugcaaauccuaaugcaaauccuaaugccaauccaaaugcaaauccaaaugcaaacccaaacgcaaaccccaaugcaaauccuaaugccaauccaaaugcaaauccaaaugcaaacccaaaugcaaaccccaaugcaaauccuaauaaaaacaaucaagguaauggacaaggucacaauaugccaaaugacccaaaccgaaauguagaugaaaaugcuaaugccaacaaugcuguaaaaaauaauaauaacgaagaaccaagugauaagcacauagaacaauauuuaaagaaaauacaaaauucucuuucaacugaaugguccccauguaguguaacuuguggaaaugguauucaaguuagaauaaagccuggcucugcuaauaaaccuaaagacgaauuagauuaugaaaaugauauugaaaaaaaaauuuguaaaauggaaaaauguuccaguguguuuaaugucguaaauaguucaauaggauuaauaaugguauuauccuucuuguuccuuaauuag

SEQ ID NO: 2975 - RNA, 1251 nt, Artificial Sequence
  derived and/or modified CDS sequence (wt) from Pf(Yaounde)__AAN87614.1__CSP
augaugagaaaauuagcuauuuuaucuguuucuuccuuuuuauuuguugaggccuuauuccaggaauaccagugcuauggaaguucgucaaacacaaggguucuaaaugaauuaaauuaugauaaugcaggcacuaauuuauauaaugaauuagaaaugaauuauuaugggaaacaggaaaauugguauagucuuaaaaaaaauaguagaucacuuggagaaaaugaugauggaaauaauaauaauggagauaauggucgugaagguaaagaugaagauaaaagagauggaaauaacgaagacaacgagaaauuaaggaaaccaaaacauaaaaaauuaaagcaaccagcggaugguaauccugauccaaaugcaaacccaaauguagaucccaaugccaacccaaauguagauccaaaugcaaacccaaauguagauccaaaugcaaacccaaaugcaaacccaaaugcaaacccaaaugcaaacccaaaugcaaacccaaaugcaaacccaaaugcaaacccaaaugcaaaccccaaugcaaauccuaaugcaaauccuaaugcaaacccaaaugcaaacccaaaugcaaacccaaacguagauccuaaugcaaacccaaaugcaaacccaaacgcaaaccccaaugcaaaccccaaugcaaauccuaaugcaaauccuaaugccaauccaaaugcaaauccaaaugcaaacccaaacgcaaaccccaaugcaaauccuaaugccaauccaaaugcaaauccaaaugcaaacccaaacgcaaaccccaaugcaaauccuaaugccaauccaaaugcaaauccaaaugcaaacccaaaugcaaacccaaaugcaaaccccaaugcaaauccuaauaaaaacaaucaagguaauggacaaggucacaauaugccaaaugacccaaaccgaaauguagaugaaaaugcuaaugccaacaaugcuguaaaaaauaauaauaacgaagaaccaagugaucagcacauagaaaaauauuuaaagauaauaaaaaauucucuuucaacugaaugguccccauguaguguaacuuguggaaaugguauucaaguuagaauaaagccuggcucugcuaauaaaccuaaagaccaauuagauuaugcaaaugauauugaaaaaaaaauuuguaaaauggaaaaauguuccaguguguuuaaugucguaaauaguucaauaggauuaauaaugguauuauccuucuuguuccuuaauuag

SEQ ID NO: 2976 - RNA, 1248 nt, Artificial Sequence
  derived and/or modified CDS sequence (wt) from Pf(A98)__ACO49328.1__CSP
augagaaaauuagcuauuuuaucuguuucuuccuuuuuauuuguugaggccuuauuccaggaauaccagugcuauggaaguucgucaaacacaaggguucuaaaugaauuaaauuaugauaaugcaggcacuaauuuauauaaugaauuagaaaugaauuauuaugggaaacaggaaaauugguauagucuuaaaaaaaauaguagaucacuuggagaaaaugaugauggaaauaauaauaauggagauaauggucgugaagguaaagaugaagauaaaagagauggaaauaacgaagacaacgagaaauuaaggaaaccaaaacauaaaaaauuaaagcaaccaggggaugguaauccugauccaaaugcaaacccaaauguagaucccaaugccaacccaaauguagauccaaaugcaaacccaaauguagauccaaaugcaaacccaaaugcaaacccaaaugcaaacccaaaugcaaacccaaaugcaaacccaaaugcaaacccaaaugcaaacccaaaugcaaacccaaaugcaaacccaaaugcaaacccaaaugcaaacccaaaugcaaacccaaaugcaaacccaaaugcaaacccaaaugcaaaccccaaugcaaacccaaaugcaaaccccaaugcaaauccuaaugcaaacccaaaugcaaacccaaaugcaaacccaaacgcaaaccccaaugcaaauccuaaugcaaaccccaaugcaaauccuaaugcaaauccuaaugccaauccaaaugcaaauccaaaugcaaacccaaacgcaaaccccaaugcaaauccuaaugccaauccaaaugcaaauccaaaugcaaacccaaaugcaaaccccaaugcaaauccuaauaaaaacaaucaagguaauggacaaggucacaauaugccaaaugacccaaaccgaaauguagaugaaaaugcuaaugccaacaaugcuguaaaaaauaauaauaacgaagaaccaagugauaagcacauagaacaauauuuaaagaauauacaaaauucucuuucaacugaaugguccccauguaguguaacuuguggaaaugguauucaaguuagaauaaagccuggcucugcuaauaaaccuaaagacgaauuagauuaugaaaaugauauugaaaaaaaaauuuguaaaauggaaaaauguuccaguguguuuaaugucguaaauaguucaauaggauuaauaaugguauuauccuucuuguuccuuaauuag

SEQ ID NO: 2977 - RNA, 1248 nt, Artificial Sequence
  derived and/or modified CDS sequence (wt) from Pf(B60)__ACO49339.1__CSP
augagaaaauuagcuauuuuaucuguuucuuccuuuuuauuuguugaggccuuauuccaggaauaccagugcuauggaaguucgucaaacacaaggguucuaaaugaauuaaauuaugauaaugcaggcacuaauuuauauaaugaauuagaaaugaauuauuaugggaaacaggaaaauugguauagucuuaaaaaaaauaguagaucacuuggagaaaaugaugauggaaauaauaauaauggagauaauggucgugaagguaaagaugaagauaaaagagauggaaauaacgaagacaacgagaaauuaaggaaaccaaaacauaaaaaauuaaagcaaccaggggaugguaauccugauccaaaugcaaacccaaauguagaucccaaugccaacccaaauguagaucccaaugccaacccaaauguagauccaaaugcaaacccaaauguagauccaaaugcaaacccaaaugcaaacccaaaugcaaacccaaaugcaaacccaaaugcaaacccaaaugcaaacccaaaugcaaacccaaaugcaaacccaaaugcaaacccaaaugcaaacccaaaugcaaacccaaaugcaaacccaaaugcaaaccccaaugcaaacccaaaugcaaaccccaaugcaaauccuaaugcaaacccaaaugcaaacccaaaugcaaacccaaacgcaaaccccaaugcaaauccuaaugcaaaccccaaugcaaauccuaaugcaaauccuaaugccaauccaaaugcaaauccaaaugcaaacccaaacgcaaaccccaaugcaaauccuaaugccaauccaaaugcaaauccaaaugcaaacccaaaugcaaaccccaaugcaaauccuaauaaaaacaaucaagguaauggacaaggucacaauaugccaaaugacccaaaccgaaauguagaugaaaaugcuaaugccaacaaugcuguaaaaaauaauaauaacgaagaaccaagugauaagcacauagaacaauauuuaaagaaaauacaaaauucucuuucaacugaaugguccccauguaguguaacuuguggaaaugguauucaaguuagaauaaagccuggcucugcuaauaaaccuaaagacgaauuagauuaugaaaaugauauugaaaaaaaaauuuguaaaauggaaaaauguuccaguguguuuaaugucguaaauaguucaauaggauuaauaaugguauuauccuucuuguuccuuaauuag

SEQ ID NO: 2978 - RNA, 1248 nt, Artificial Sequence
  derived and/or modified CDS sequence (wt) from Pf(TM323)__ACO49493.1__CSP
augagaaaauuagcuauuuuaucuguuucuuccuuuuuauuuguugaggccuuauuccaggaauaccagugcuauggaaguucgucaaacacaaggguucuaaaugaauuaaauuaugauaaugcaggcacuaauuuauauaaugaauuagaaaugaauuauuaugggaaacaggaaaauugguauagucuuaaaaaaaauaguagaucacuuggagaaaaugaugauggaaauaauaauaauggagauaauggucgugaagguaaagaugaagauaaaagagauggaaauaacgaagacaacgagaaauuaaggaaaccaaaacauaaaaaauuaaagcaaccaggggaugguaauccugauccaaaugcaaacccaaauguagaucccaaugccaacccaaauguagauccaaaugcaaacccaaauguagauccaaaugcaaacccaaaugcaaacccaaaugcaaacccaaaugcaaacccaaaugcaaacccaaaugcaaacccaaaugcaaacccaaaugcaaacccaaaugcaaacccaaaugcaaacccaaaugcaaacccaaaugcaaacccaaaugcaaacccaaaugcaaaccccaaugcaaacccaaaugcaaaccccaaugcaaauccuaaugcaaacccaaaugcaaacccaaaugcaaacccaaacgcaaaccccaaugcaaauccuaaugcaaaccccaaugcaaauccuaaugcaaauccuaaugccaauccaaaugcaaauccaaaugcaaacccaaacgcaaaccccaaugcaaauccuaaugccaauccaaaugcaaauccaaaugcaaacccaaaugcaaacccaaaugcaaaccccaaugcaaauccuaauaaaaacaaucaagguaauggacaaggucacaauaugccaaaugacccaaaccgaaauguagaugaaaaugcuaaugccaacaaugcuguaaaaaauaauaauaacgaagaaccaagugauaagcacauagaaaaauauuuaaaggaaauacaaaauucucuuucaacugaaugguccccauguaguguaacuuguggaaaugguauucaaguuagaauaaagccuggcucugcuaauaaaccuaaagaccaauuagauuaugaaaaugauauugaaaaaaaaauuuguaaaauggaaaaauguuccaguguguuuaaugucguaaauaguucaauaggauuaauaaugguauuauccuucuuguuccuuaauuag

SEQ ID NO: 2979 - RNA, 1239 nt, Artificial Sequence
  derived and/or modified CDS sequence (wt) from Pf(22)__AGR53780.1__CSP
augaugagaaaauuagcuauuuuaucuguuucuuccuuuuuauuuguugaggccuuauuccaggaauaccagugcuauggaaguccgucaaacacaaggguucuaaaugaauuaaauuaugauaaugcaggcacuaauuuauauaaugaauuagaaaugaauuauuaugggaaacaggaaaauugguauagucuuaaaaaaaauaguagaucacuuggagaaaaugaugauggaaauaauaauaauggagauaauggucgugaagguaaagaugaagacaaaagagauggaaauaacgaagacaacgagaaauuaaggaaaccaaaacauaaaaaauuaaagcaaccagcggaugguaauccugauccaaaugcaaacccaaauguagaucccaaugccaacccaaauguagauccaaaugcaaacccaaauguagauccaaaugcaaacccaaaugcaaacccaaaugcaaacccaaaugcaaacccaaaugcaaacccaaaugcaaacccaaaugcaaacccaaaugcaaacccaaaugcaaacccaaaugcaaaccccaaugcaaauccuaaugcaaacccaaaugcaaauccuaaugcaaacccaaaugcaaacccaaacguagauccuaaugcaaauccaaaugcaaacccaaaugcaaacccaaacgcaaaccccaaugcaaauccuaaugcaaaccccaaugcaaauccuaaugcaaauccuaaugccaauccaaaugcaaauccaaaugcaaacccaaacgcaaaccccaaugcaaauccuaaugccaauccaaaugcaaauccaaaugcaaacccaaaugcaaacccaaaugcaaaccccaaugcaaauccuaauaaaaacaaucaagguaauggacaaggucacaauaugccaaaugacccaaaccgaaauguagaugaaaaugcuaaugccaacaaugcuguaaaaaauaauaauaacgaagaaccaagugauaagcacauagaacaauauuuaaagacaauaaaaaauucucuuucaacugaaugguccccauguaguguaacuuguggaaaugguauucaaguuagaauaaagccuggcucugcuaauaaaccuaaagacgaauuaaauuaugaaaaugauauugaaaaaaaaauuuguaaaauggaaaaauguuccaguguguuuaaugucguaaauaguucaauaggauuaauaaugguauuauccuucuuguuccuuaauuag

SEQ ID NO: 2980 - RNA, 1239 nt, Artificial Sequence
  derived and/or modified CDS sequence (wt) from Pf(Amazonas)__AAN87605.1__CSP
augaugagaaaauuagcuauuuuaucuguuucuuccuuuuuauuuguugaggccuuauuccaggaauaccagugcuauggaaguucgucaaacacaaggguucuaaaugaauuaaauuaugauaaugcaggcacuaauuuauauaaugaauuagaaaugaauuauuaugggaaacaggaaaauugguauagucuuaaaaaaaauaguagaucacuuggagaaaaugaugauggaaauaauaauaauggagauaauggucgugaagguaaagaugaagauaaaagagauggaaauaacgaagacaacgagaaauuaaggaaaccaaaacauaaaaaauuaaagcaaccagcggaugguaauccugauccaaaugcaaacccaaauguagaucccaaugccaacccaaauguagauccaaaugcaaacccaaauguagauccaaaugcaaacccaaaugcaaacccaaaugcaaacccaaaugcaaacccaaaugcaaacccaaaugcaaacccaaaugcaaacccaaaugcaaacccaaaugcaaaccccaaugcaaauccuaaugcaaauccuaaugcaaacccaaaugcaaauccuaaugcaaacccaaaugcaaacccaaacguagauccuaaugcaaauccaaaugcaaacccaaaugcaaacccaaacgcaaaccccaaugcaaauccuaaugcaaaccccaaugcaaauccuaaugcaaauccuaaugccaauccaaaugcaaauccaaaugcaaacccaaacgcaaaccccaaugcaaauccuaaugccaauccaaaugcaaauccaaaugcaaacccaaaugcaaacccaaaugcaaaccccaaugcaaauccuaauaaaaacaaucaagguaauggacaaggucacaauaugccaaaugacccaaaccgaaauguagaugaaaaugcuaaugccaacaaugcuguaaaaaauaauaauaacgaagaaccaagugaucagcacauagaaaaauauuuaaagagaauacaaaauucucuuucaacugaaugguccccauguaguguaacuuguggaaaugguauucaaguuagaauaaagccuggcucugcuaauaaaccuaaagacgaauuagauuaugaaaaugauauugaaaaaaaaauuuguaaaauggaaaaauguuccaguguguuuaaugucguaaauaguucaauaggauuaauaaugguauuauccuucuuguuccuuaauuag

SEQ ID NO: 2981 - RNA, 1239 nt, Artificial Sequence
  derived and/or modified CDS sequence (wt) from Pf(Amazonas)__AAN87598.1__CSP
augaugagaaaauuagcuauuuuaucuguuucuuccuuuuuauuuguugaggccuuauuccaggaauaccagugcuauggaaguucgucaaacacaaggguucuaaaugaauuaaauuaugauaaugcaggcacuaauuuauauaaugaauuagaaaugaauuauuaugggaaacaggaaaauugguauagucuuaaaaaaaauaguagaucacuuggagaaaaugaugauggaaauaauaauaauggagauaauggucgugaagguaaagaugaagauaaaagagauggaaauaacgaagacaacgagaaauuaaggaaaccaaaacauaaaaaauuaaagcaaccagcggaugguaauccugauccaaaugcaaacccaaauguagaucccaaugccaacccaaauguagauccaaaugcaaacccaaauguagauccaaaugcaaacccaaaugcaaacccaaaugcaaacccaaaugcaaacccaaaugcaaacccaaaugcaaacccaaaugcaaacccaaaugcaaacccaaaugcaaaccccaaugcaaauccuaaugcaaauccuaaugcaaacccaaaugcaaauccuaaugcaaacccaaaugcaaacccaaacguagauccuaaugcaaauccaaaugcaaacccaaaugcaaacccaaacgcaaaccccaaugcaaauccuaaugcaaaccccaaugcaaauccuaaugcaaauccuaaugccaauccaaaugcaaauccaaaugcaaacccaaacgcaaaccccaaugcaaauccuaaugccaauccaaaugcaaauccaaaugcaaacccaaaugcaaacccaaaugcaaaccccaaugcaaauccuaauaaaaacaaucaagguaauggacaaggucacaauaugccaaaugacccaaaccgaaauguagaugaaaaugcuaaugccaacaaugcuguaaaaaauaauaauaacgaagaaccaagugauaagcacauaaaagaauauuuaaagauaauacaaaauucucuuucaacugaaugguccccauguaguguaacuuguggaaaugguauucaaguuagaauaaagccuggcucugcugguaaaccuaaagacgaauuagauuaugcaaaugauauugaaaaaaaaauuuguaaaauggaaaaauguuccaguguguuuaaugucguaaauaguucaauaggauuaauaaugguauuauccuucuuguuccuuaauuag

SEQ ID NO: 2982 - RNA, 1239 nt, Artificial Sequence
  derived and/or modified CDS sequence (wt) from Pf(Asembo Bay)__AAN87611.1__CSP
augaugagaaaauuagcuauuuuaucuguuucuuccuuuuuauuuguugaggccuuauuccaggaauaccagugcuauggaaguucgucaaacacaaggguucuaaaugaauuaaauuaugauaaugcaggcacuaauuuauauaaugaauuagaaaugaauuauuaugggaaacaggaaaauugguauagucuuaaaaaaaauaguagaucacuuggagaaaaugaugauggaaauaauaauaauggagauaauggucgugaagguaaagaugaagauaaaagagauggaaauaacgaagacaacgagaaauuaaggaaaccaaaacauaaaaaauuaaagcaaccagcggaugguaauccugauccaaaugcaaacccaaauguagaucccaaugccaacccaaauguagauccaaaugcaaacccaaauguagauccaaaugcaaacccaaaugcaaacccaaaugcaaacccaaaugcaaacccaaaugcaaacccaaaugcaaacccaaaugcaaacccaaaugcaaaccccaaugcaaauccuaaugcaaauccuaaugcaaacccaaaugcaaauccuaaugcaaacccaaaugcaaaccccaaugcaaauccuaaugcaaacccaaaugcaaacccaaacguagauccuaaugcaaauccaaaugcaaacccaaaugcaaacccaaacgcaaaccccaaugcaaauccuaaugcaaauccuaaugccaauccaaaugcaaauccaaaugcaaacccaaacgcaaaccccaaugcaaauccuaaugccaauccaaaugcaaauccaaaugcaaacccaaaugcaaacccaaaugcaaaccccaaugcaaauccuaauaaaaacaaucaagguaauggacaaggucacaauaugccaaaugacccaaaccgaaauguagaugaaaaugcuaaugccaacaaugcuguaaaaaauaauaauaacgaagaaccaagugauaagcacauagaacaauauuuaaagauaauaaaaaauucucuuucaacugaaugguccccauguaguguaacuuguggaaaugguauucaaguuagaauaaagccuggcucugcuaauaaaccuaaagacgaauuagauuaugcaaaugauauugaaaaaaaaauuuguaaaauggaaaaauguuccaguguguuuaaugucguaaauaguucaauaggauuaauaaugguauuauccuucuuguuccuuaauuag

SEQ ID NO: 2983 - RNA, 1239 nt, Artificial Sequence
  derived and/or modified CDS sequence (wt) from Pf(Asembo Bay)__AAN87589.1__CSP
augaugagaaaauuagcuauuuuaucuguuucuuccuuuuuauuuguugaggccuuauuccaggaauaccagugcuauggaaguucgucaaacacaaggguucuaaaugaauuaaauuaugauaaugcaggcacuaauuuauauaaugaauuagaaaugaauuauuaugggaaacaggaaaauugguauagucuuaaaaaaaauaguagaucacuuggagaaaaugaugauggaaauaauaauaauggagauaauggucgugaagguaaagaugaagauaaaagagauggaaauaacgaagacaacgagaaauuaaggaaaccaaaacauaaaaaauuaaagcaaccagcggaugguaauccugauccaaaugcaaacccaaauguagaucccaaugccaacccaaauguagauccaaaugcaaacccaaauguagauccaaaugcaaacccaaaugcaaacccaaaugcaaacccaaaugcaaacccaaaugcaaacccaaaugcaaacccaaaugcaaacccaaaugcaaacccaaaugcaaauccuaaugcaaacccaaaugcaaacccaaacguagaucccaaugcaaacccaaaugcaaacccaaacgcaaaccccaaugcaaaccccaaugcaaauccaaaugcaaacccaaaugcaaacccaaacgcaaaccccaaugcaaauccuaaugcaaaccccaaugcaaauccuaaugcaaauccuaaugccaauccaaaugcaaauccaaaugcaaacccaaacgcaaaccccaaugcaaauccuaaugccaauccaaaugcaaauccaaaugcaaacccaaaugcaaacccaaaugcaaaccccaaugcaaauccuaauaaaaacaaucaagguaauggacaaggucacaauaugccaaaugacccaaaccgaaauguagaugaaaaugcuaaugccaacaaugcuguaaaaaauaauaauaacgaagaaccaagugaucagcacauagaaaaauauuuaaagaaaauacaaaauucucuuucaacugaaugguccccauguaguguaacuuguggaaaugguauucaaguuagaauaaagccuggcucugcuaauaaaccuaaagaccaauuagauuaugcaaaugauauugaaaaaaaaauuuguaaaauggaaaaauguuccaguguguuuaaugucguaaauaguucaauaggauuaauaaugguauuauccuucuuguuccuuaauuag

SEQ ID NO: 2984 - RNA, 1239 nt, Artificial Sequence
  derived and/or modified CDS sequence (wt) from Pf(BrB1)__BAM85131.1__CSP
augaugagaaaauuagcuauuuuaucuguuucuuccuuuuuauuuguugaggccuuauuccaggaauaccagugcuauggaaguucgucaaacacaaggguucuaaaugaauuaaauuaugauaaugcaggcacuaauuuauauaaugaauuagaaaugaauuauuaugggaaacaggaaaauugguauagucuuaaaaaaaauaguagaucacuuggagaaaaugaugauggaaauaauaauaauggagauaauggucgugaagguaaagaugaagauaaaagagauggaaauaacgaagacaacgagaaauuaaggaaaccaaaacauaaaaaauuaaagcaaccagcggaugguaauccugauccaaaugcaaacccaaauguagaucccaaugccaacccaaauguagauccaaaugcaaacccaaauguagauccaaaugcaaacccaaaugcaaacccaaaugcaaacccaaaugcaaacccaaaugcaaacccaaaugcaaacccaaaugcaaacccaaaugcaaacccaaaugcaaaccccaaugcaaauccuaaugcaaauccuaaugcaaacccaaaugcaaauccuaaugcaaacccaaaugcaaacccaaacguagauccuaaugcaaauccaaaugcaaacccaaaugcaaacccaaacgcaaaccccaaugcaaauccuaaugcaaaccccaaugcaaauccuaaugcaaauccuaaugccaauccaaaugcaaauccaaaugcaaacccaaacgcaaaccccaaugcaaauccuaaugccaauccaaaugcaaauccaaaugcaaacccaaaugcaaacccaaaugcaaaccccaaugcaaauccuaauaaaaacaaucaagguaauggacaaggucacaauaugccaaaugacccaaaccgaaauguagaugaaaaugcuaaugccaacaaugcuguaaaaaauaauaauaacgaagaaccaagugauaagcacauagaacaauauuuaaagaaaauaaaaaauucuauuucaacugaaugguccccauguaguguaacuuguggaaaugguauucaaguuagaauaaagccuggcucugcuaauaaaccuaaagacgaauuagauuaugaaaaugauauugaaaaaaaaauuuguaaaauggaaaaauguuccaguguguuuaaugucguaaauaguucaauaggauuaauaaugguauuauccuucuuguuccuuaauuag

SEQ ID NO: 2985 - RNA, 1239 nt, Artificial Sequence
  derived and/or modified CDS sequence (wt) from Pf(BrP9)__BAM85145.1__CSP
augaugagaaaauuagcuauuuuaucuguuucuuccuuuuuauuuguugaggccuuauuccaggaauaccagugcuauggaaguucgucaaacacaaggguucuaaaugaauuaaauuaugauaaugcaggcacuaauuuauauaaugaauuagaaaugaauuauuaugggaaacaggaaaauugguauagucuuaaaaaaaauaguagaucacuuggagaaaaugaugauggaaauaauaauaauggagauaauggucgugaagguaaagaugaagauaaaagagauggaaauaacgaagacaacgagaaauuaaggaaaccaaaacauaaaaaauuaaagcaaccaggggaugguaauccugauccaaaugcaaacccaaauguagaucccaaugccaacccaaauguagauccaaaugcaaacccaaauguagauccaaaugcaaacccaaaugcaaacccaaaugcaaacccaaaugcaaacccaaaugcaaacccaaaugcaaacccaaaugcaaacccaaaugcaaacccaaaugcaaaccccaaugcaaauccuaaugcaaauccuaaugcaaacccaaaugcaaauccuaaugcaaacccaaaugcaaacccaaacguagauccuaaugcaaauccaaaugcaaacccaaaugcaaacccaaacgcaaaccccaaugcaaauccuaaugcaaaccccaaugcaaauccuaaugcaaauccuaaugccaauccaaaugcaaauccaaaugcaaacccaaacgcaaaccccaaugcaaauccuaaugccaauccaaaugcaaauccaaaugcaaacccaaaugcaaacccaaaugcaaaccccaaugcaaauccuaauaaaaacaaucaagguaauggacaaggucacaauaugccaaaugacccaaaccgaaauguagaugaaaaugcuaaugccaacaaugcuguaaaaaauaauaauaacgaagaaccaagugauaagcacauagaacaauauuuaaagaaaauaaaaaauucuauuucaacugaaugguccccauguaguguaacuuguggaaaugguauucaaguuagaauaaagccuggcucugcuaauaaaccuaaagacgaauuagauuaugaaaaugauauugaaaaaaaaauuuguaaaauggaaaaauguuccaguguguuuaaugucguaaauaguucaauaggauuaauaaugguauuauccuucuuguuccuuaauuag

SEQ ID NO: 2986 - RNA, 1239 nt, Artificial Sequence
  derived and/or modified CDS sequence (wt) from Pf(India)__AAN87606.1__CSP
augaugagaaaauuagcuauuuuaucuguuucuuccuuuuuauuuguugaggccuuauuccaggaauaccagugcuauggaaguucgucaaacacaaggguucuaaaugaauuaaauuaugauaaugcaggcacuaauuuauauaaugaauuagaaaugaauuauuaugggaaacaggaaaauugguauagucuuaaaaaaaauaguagaucacuuggagaaaaugaugauggaaauaauaauaauggagauaauggucgugaagguaaagaugaagauaaaagagauggaaauaacgaagacaacgagaaauuaaggaaaccaaaacauaaaaaauuaaagcaaccaggggaugguaauccugauccaaaugcaaacccaaauguagaucccaaugccaacccaaauguagauccaaaugcaaacccaaauguagauccaaaugcaaacccaaaugcaaacccaaaugcaaacccaaaugcaaacccaaaugcaaacccaaaugcaaacccaaaugcaaacccaaaugcaaacccaaaugcaaaccccaaugcaaauccuaaugcaaauccuaaugcaaacccaaaugcaaauccaaaugcaaacccaaaugcaaacccaaacguagauccuaaugcaaauccaaaugcaaacccaaaugcaaacccaaacgcaaaccccaaugcaaauccuaaugcaaaccccaaugcaaauccuaaugcaaauccuaaugccaauccaaaugcaaauccaaaugcaaacccaaacgcaaaccccaaugcaaauccuaaugccaauccaaaugcaaauccaaaugcaaacccaaaugcaaacccgaaugcaaacccaaaugcaaauccuaauaaaaacaaucaagguaauggacaaggucacaauaugccaaaugacccaaaccgaaauguagaugaaaaugcuaaugccaacaaugcuguaaaaaauaauaauaacgaagaaccaagugauaagcacauagaaaaauauuuaaagaaaauacaaaauucucuuucaacugaaugguccccauguaguguaacuugugggaaugguauucaaguuagaauaaagccuggcucugcuaauaaaccuaaagacgaauuagauuaugaaaaugauauugaaaaaaaaauuuguaaaauggaaaaauguuccaguguguuuaaugucguaaauaguucaauaggauuaauaaugguauuauccuucuuguuccuuaauuag

SEQ ID NO: 2987 - RNA, 1239 nt, Artificial Sequence
  derived and/or modified CDS sequence (wt) from Pf(Pal97-007)__BAM84921.1__CSP
augaugagaaaauuagcuauuuuaucuguuucuuccuuuuuauuuguugaggccuuauuccaggaauaccagugcuauggaaguucgucaaacacaaggguucuaaaugaauuaaauuaugauaaugcaggcacuaauuuauauaaugaauuagaaaugaauuauuaugggaaacaggaaaauugguauagucuuaaaaaaaauaguagaucacuuggagaaaaugaugauggaaauaauaauaauggagauaauggucgugaagguaaagaugaagauaaaagagauggaaauaacgaagacaacgagaaauuaaggaaaccaaaacauaaaaaauuaaagcaaccaggggaugguaauccugauccaaaugcaaacccaaauguagaucccaaugccaacccaaauguagauccaaaugcaaacccaaauguagauccaaaugcaaacccaaaugcaaacccaaaugcaaacccaaaugcaaacccaaaugcaaacccaaaugcaaacccaaaugcaaacccaaaugcaaacccaaaugcaaaccccaaugcaaauccuaaugcaaauccuaaugcaaacccaaaugcaaauccuaaugcaaacccaaaugcaaacccaaacguagauccuaaugcaaauccaaaugcaaacccaaaugcaaacccaaacgcaaaccccaaugcaaauccuaaugcaaaccccaaugcaaauccuaaugcaaauccuaaugccaauccaaaugcaaauccaaaugcaaacccaaacgcaaaccccaaugcaaauccuaaugccaauccaaaugcaaauccaaaugcaaacccaaaugcaaacccaaaugcaaaccccaaugcaaauccuaauaaaaacaaucaagguaauggacaaggucacaauaugccaaaugacccaaaccgaaauguagaugaaaaugcuaaugccaacaaugcuguaaaaaauaauaauaacgaagaaccaagugauaagcacauaaaagaauauuuaacgaaaauaaaaaauucuauuucaacugaaugguccccauguaguguaacuuguggaaaugguauucaaguuagaauaaagccuggcucugcuaauaaaccuaaagacgaauuagauuaugaaaaugauauugaaaaaaaaauuuguaaaauggaaaaauguuccaguguguuuaaugucguaaauaguucaauaggauuaauaaugguauuauccuucuuguuccuuaauuag

SEQ ID NO: 2988 - RNA, 1239 nt, Artificial Sequence
  derived and/or modified CDS sequence (wt) from Pf(Pal97-037)__BAM84929.1__CSP
augaugagaaaauuagcuauuuuaucuguuucuuccuuuuuauuuguugaggccuuauuccaggaauaccagugcuauggaaguucgucaaacacaaggguucuaaaugaauuaaauuaugauaaugcaggcacuaauuuauauaaugaauuagaaaugaauuauuaugggaaacaggaaaauugguauagucuuaaaaaaaauaguagaucacuuggagaaaaugaugauggaaauaauaauaauggagauaauggucgugaagguaaagaugaagauaaaagagauggaaauaacgaagacaacgagaaauuaaggaaaccaaaacauaaaaaauuaaagcaaccaggggaugguaauccugauccaaaugcaaacccaaauguagaucccaaugccaacccaaauguagauccaaaugcaaacccaaauguagauccaaaugcaaacccaaaugcaaacccaaaugcaaacccaaaugcaaacccaaaugcaaacccaaaugcaaacccaaaugcaaacccaaaugcaaacccaaaugcaaacccaaaugcaaacccaaaugcaaacccaaaugcaaaccccaaugcaaauccuaaugcaaacccaaaugcaaacccaaacguagauccuaaugcaaauccaaaugcaaacccaaaugcaaacccaaacgcaaaccccaaugcaaauccuaaugcaaaccccaaugcaaauccuaaugcaaauccuaaugccaauccaaaugcaaauccaaaugcaaacccaaacgcaaaccccaaugcaaauccuaaugccaauccaaaugcaaauccaaaugcaaacccaaaugcaaacccaaaugcaaaccccaaugcaaauccuaauaaaaacaaucaagguaauggacaaggucacaauaugccaaaugacccaaaccgaaauguagaugaaaaugcuaaugccaacaaugcuguaaaaaauaauaauaacgaagaaccaagugaucagcacauagaaaaauauauaaagaaaauacaaaauucucuuucaacugaaugguccccauguaguguaacuuguggaaaugguauucaaguuagaauaaagccuggcucugcugauaaaccuaaaaacgaauuagauuaugaaaaugauauugaaaaaaaaauuuguaaaauggaaaaauguuccaguguguuuaaugucguaaauaguucaauaggauuaauaaugguauuauccuucuuguuccuuaauuag

SEQ ID NO: 2989 - RNA, 1239 nt, Artificial Sequence
  derived and/or modified CDS sequence (wt) from Pf(Pal97-052)__BAM84935.1__CSP
augaugagaaaauuagcuauuuuaucuguuucuuccuuuuuauuuguugaggccuuauuccaggaauaccagugcuauggaaguucgucaaacacaaggguucuaaaugaauuaaauuaugauaaugcaggcacuaauuuauauaaugaauuagaaaugaauuauuaugggaaacaggaaaauugguauagucuuaaaaaaaauaguagaucacuuggagaaaaugaugauggaaauaauaauaauggagauaauggucgugaagguaaagaugaagauaaaagagauggaaauaacgaagacaacgagaaauuaaggaaaccaaaacauaaaaaauuaaagcaaccaggggaugguaauccugauccaaaugcaaacccaaauguagaucccaaugccaacccaaauguagauccaaaugcaaacccaaauguagauccaaaugcaaacccaaaugcaaacccaaaugcaaacccaaaugcaaacccaaaugcaaacccaaaugcaaacccaaaugcaaacccaaaugcaaacccaaaugcaaacccaaaugcaaacccaaaugcaaacccaaaugcaaaccccaaugcaaauccuaaugcaaacccaaaugcaaacccaaacguagauccuaaugcaaauccaaaugcaaacccaaaugcaaacccaaacgcaaaccccaaugcaaauccuaaugcaaaccccaaugcaaauccuaaugcaaauccuaaugccaauccaaaugcaaauccaaaugcaaacccaaacgcaaaccccaaugcaaauccuaaugccaauccaaaugcaaauccaaaugcaaacccaaaugcaaacccaaaugcaaaccccaaugcaaauccuaauaaaaacaaucaagguaauggacaaggucacaauaugccaaaugacccaaaccgaaauguagaugaaaaugcuaaugccaacaaugcuguaaaaaauaauaauaacgaagaaccaagugaucagcacauagaaaaauauuuaaagauaauacaaaauucucuuucaacugaaugguccccauguaguguaacuuguggaaaugguauucaaguuagaauaaagccuggcucugcugauaaaccuaaagaccaauuagauuaugcaaaugauauugaaaaaaaaauuuguaaaauggaaaaauguuccaguguguuuaaugucguaaauaguucaauaggauuaauaaugguauuauccuucuuguuccuuaauuag

SEQ ID NO: 2990 - RNA, 1239 nt, Artificial Sequence
  derived and/or modified CDS sequence (wt) from Pf(Sol95-351)__BAM85103.1__CSP
augaugagaaaauuagcuauuuuaucuguuucuuccuuuuuauuuguugaggccuuauuccaggaauaccagugcuauggaaguucgucaaacacaaggguucuaaaugaauuaaauuaugauaaugcaggcacuaauuuauauaaugaauuagaaaugaauuauuaugggaaacaggaaaauugguauagucuuaaaaaaaauaguagaucacuuggagaaaaugaugauggaaauaauaauaauggagauaauggucgugaagguaaagaugaagauaaaagagauggaaauaacgaagacaacgagaaauuaaggaaaccaaaacauaaaaaauuaaagcaaccaggggaugguaauccugauccaaaugcaaacccaaauguagaucccaaugccaacccaaauguagauccaaaugcaaacccaaauguagauccaaaugcaaacccaaaugcaaacccaaaugcaaacccaaaugcaaacccaaaugcaaacccaaaugcaaacccaaaugcaaacccaaaugcaaacccaaaugcaaaccccaaugcaaauccuaaugcaaauccuaaugcaaacccaaaugcaaauccuaaugcaaacccaaaugcaaacccaaacguagauccuaaugcaaauccaaaugcaaacccaaaugcaaacccaaacgcaaaccccaaugcaaauccuaaugcaaaccccaaugcaaauccuaaugcaaauccuaaugccaauccaaaugcaaauccaaaugcaaacccaaacgcaaaccccaaugcaaauccuaaugccaauccaaaugcaaauccaaaugcaaacccaaaugcaaacccaaaugcaaaccccaaugcaaauccuaauaaaaacaaucaagguaauggacaaggucacaauaugccaaaugacccaaaccgaaauguagaugaaaaugcuaaugccaacaaugcuguaaaaaauaauaauaacgaagaaccaagugauaagcacauagaacaauauuuaaagaaaauacaaaauucucuuucaacugaaugguccccauguaguguaacuuguggaaaugguauucaaguuagaauaaagccuggcucugcugauaaaccuaaagaccaauuagauuaugaaaaugauauugaaaaaaaaauuuguaaaauggaaaaauguuccaguguguuuaaugucguaaauaguucaauaggauuaauaaugguauuauccuucuuguuccuuaauuag

SEQ ID NO: 2991 - RNA, 1239 nt, Artificial Sequence
  derived and/or modified CDS sequence (wt) from Pf(Tz03-038)__BAM84801.1__CSP
augaugagaaaauuagcuauuuuaucuguuucuuccuuuuuauuuguugaggccuuauuccaggaauaccagugcuauggaaguucgucaaacacaaggguucuaaaugaauuaaauuaugauaaugcaggcacuaauuuauauaaugaauuagaaaugaauuauuaugggaaacaggaaaauugguauagucuuaaaaaaaauaguagaucacuuggagaaaaugaugauggaaauaauaauaauggagauaauggucgugaagguaaagaugaagauaaaagagauggaaauaacgaagacaacgagaaauuaaggaaaccaaaacauaaaaaauuaaagcaaccaggggaugguaauccugauccaaaugcaaacccaaauguagaucccaaugccaacccaaauguagauccaaaugcaaacccaaauguagauccaaaugcaaacccaaaugcaaacccaaaugcaaacccaaaugcaaacccaaaugcaaacccaaaugcaaacccaaaugcaaacccaaaugcaaacccaaaugcaaauccuaaugcaaacccaaaugcaaacccaaacguagauccuaaugcaaacccaaaugcaaacccaaacgcaaaccccaaugcaaaccccaaugcaaauccaaaugcaaacccaaaugcaaacccaaacgcaaaccccaaugcaaauccuaaugcaaaccccaaugcaaauccuaaugcaaauccuaaugccaauccaaaugcaaauccaaaugcaaacccaaacgcaaaccccaaugcaaauccuaaugccaauccaaaugcaaauccaaaugcaaacccaaaugcaaacccaaaugcaaaccccaaugcaaauccuaauaaaaacaaucaagguaauggacaaggucacaauaugccaaaugacccaaaccgaaauguagaugaaaaugcuaaugccaacaaugcuguaaaaaauaauaauaacgaagaaccaagugauaagcacauagaacaauauuuaaacaaaauaaaaaauucuauuucaacugaaugguccccauguaguguaacuuguggaaaugguauucaaguuagaauaaagccuggcucugcuaauaaaccuaaagacgaauuaaauuaugaaaaugauauugaaaaaaaaauuuguaaaauggaaaaauguuccaguguguuuaaugucguaaauaguucaauaggauuaauaaugguauuauccuucuuguuccuuaauuag

SEQ ID NO: 2992 - RNA, 1239 nt, Artificial Sequence
  derived and/or modified CDS sequence (wt) from Pf(Tz03-076)__BAM84804.1__CSP
augaugagaaaauuagcuauuuuaucuguuucuuccuuuuuauuuguugaggccuuauuccaggaauaccagugcuauggaaguucgucaaacacaaggguucuaaaugaauuaaauuaugauaaugcaggcacuaauuuauauaaugaauuagaaaugaauuauuaugggaaacaggaaaauugguauagucuuaaaaaaaauaguagaucacuuggagaaaaugaugauggaaauaauaauaauggagauaauggucgugaagguaaagaugaagauaaaagagauggaaauaacgaagacaacgagaaauuaaggaaaccaaaacauaaaaaauuaaagcaaccaggggaugguaauccugauccaaaugcaaacccaaauguagaucccaaugccaacccaaauguagauccaaaugcaaacccaaauguagauccaaaugcaaacccaaaugcaaacccaaaugcaaacccaaaugcaaacccaaaugcaaacccaaaugcaaacccaaaugcaaacccaaaugcaaacccaaaugcaaacccaaaugcaaaccccaaugcaaauccuaaugcaaacccaaaugcaaauccuaaugcaaacccaaaugcaaacccaaacguagauccuaaugcaaauccaaaugcaaacccaaaugcaaacccaaacgcaaaccccaaugcaaauccuaaugcaaaccccaaugcaaauccuaaugcaaauccuaaugccaauccaaaugcaaauccaaaugcaaacccaaacgcaaaccccaaugcaaauccuaaugccaauccaaaugcaaauccaaaugcaaacccaaaugcaaacccaaaugcaaaccccaaugcaaauccuaauaaaaacaaucaagguaauggacaaggucacaauaugccaaaugacccaaaccgaaauguagaugaaaaugcuaaugccaacaaugcuguaaaaaauaauaauaacgaagaaccaagugauaagcacauagaacaauauuuaaagacaauaaaaaauucucuuucaacugaaugguccccauguaguguaacuuguggaaaugguauucaaguuagaauaaagccuggcucugcuaauaaaccuaaagacgaauuaaauuaugaaaaugauauugaaaaaaaaauuuguaaaauggaaaaauguuccaguguguuuaaugucguaaauaguucaauaggauuaauaaugguauuauccuucuuguuccuuaauuag

SEQ ID NO: 2993 - RNA, 1239 nt, Artificial Sequence
  derived and/or modified CDS sequence (wt) from Pf(Tz03-101)__BAM84806.1__CSP
augaugagaaaauuagcuauuuuaucuguuucuuccuuuuuauuuguugaggccuuauuccaggaauaccagugcuauggaaguucgucaaacacaaggguucuaaaugaauuaaauuaugauaaugcaggcacuaauuuauauaaugaauuagaaaugaauuauuaugggaaacaggaaaauugguauagucuuaaaaaaaauaguagaucacuuggagaaaaugaugauggaaauaauaauaauggagauaauggucgugaagguaaagaugaagauaaaagagauggaaauaacgaagacaacgagaaauuaaggaaaccaaaacauaaaaaauuaaagcaaccaggggaugguaauccugauccaaaugcaaacccaaauguagaucccaaugccaacccaaauguagauccaaaugcaaacccaaauguagauccaaaugcaaacccaaaugcaaacccaaaugcaaacccaaaugcaaacccaaaugcaaacccaaaugcaaacccaaaugcaaacccaaaugcaaacccaaaugcaaacccaaaugcaaaccccaaugcaaauccuaaugcaaacccaaaugcaaauccuaaugcaaacccaaaugcaaacccaaacguagauccuaaugcaaauccaaaugcaaacccaaaugcaaacccaaacgcaaaccccaaugcaaauccuaaugcaaaccccaaugcaaauccuaaugcaaauccuaaugccaauccaaaugcaaauccaaaugcaaacccaaacgcaaaccccaaugcaaauccuaaugccaauccaaaugcaaauccaaaugcaaacccaaaugcaaacccaaaugcaaaccccaaugcaaauccuaauaaaaacaaucaagguaauggacaaggucacaauaugccaaaugacccaaaccgaaauguagaugaaaaugcuaaugccaacaaugcuguaaaaaauaauaauaacgaagaaccaagugauaagcacauaaaagaauauuuaaacaaaauacaaaauucuauuucaacugaaugguccccauguaguguaacuuguggaaaugguauucaaguuagaauaaagccuggcucugcugauaaaccuaaagaccaauuagauuauauaaaugauauugaaaaaaaaauuuguaaaauggaaaaauguuccaguguguuuaaugucguaaauaguucaauaggauuaauaaugguauuauccuucuuguuccuuaauuag

SEQ ID NO: 2994 - RNA, 1239 nt, Artificial Sequence
  derived and/or modified CDS sequence (wt) from Pf(Tz93-022)__BAM84753.1__CSP
augaugagaaaauuagcuauuuuaucuguuucuuccuuuuuauuuguugaggccuuauuccaggaauaccagugcuauggaaguucgucaaacacaaggguucuaaaugaauuaaauuaugauaaugcaggcacuaauuuauauaaugaauuagaaaugaauuauuaugggaaacaggaaaauugguauagucuuaaaaaaaauaguagaucacuuggagaaaaugaugauggaaauaauaauaauggagauaauggucgugaagguaaagaugaagauaaaagagauggaaauaacgaagacaacgagaaauuaaggaaaccaaaacauaaaaaauuaaagcaaccaggggaugguaauccugauccaaaugcaaacccaaauguagaucccaaugccaacccaaauguagauccaaaugcaaacccaaauguagauccaaaugcaaacccaaaugcaaacccaaaugcaaacccaaaugcaaacccaaaugcaaacccaaaugcaaacccaaaugcaaacccaaaugcaaacccaaaugcaaacccaaaugcaaacccaaaugcaaacccaaaugcaaacccaaaugcaaaccccaaugcaaacccaaaugcaaaccccaaugcaaauccuaaugcaaacccaaaugcaaacccaaaugcaaacccaaacgcaaaccccaaugcaaauccuaaugcaaaccccaaugcaaauccuaaugcaaauccuaaugccaauccaaaugcaaauccaaaugcaaacccaaacgcaaaccccaaugcaaauccuaaugccaauccaaaugcaaauccaaaugcaaacccaaaugcaaacccaaaugcaaaccccaaugcaaauccuaauaaaaacaaucaagguaauggacaaggucacaauaugccaaaugacccaaaccgaaauguagaugaaaaugcuaaugccaacaaugcuguaaaaaauaauaauaacgaagaaccaagugauaagcacauagaaaaauauuuaaaggaaauacaaaauucucuuucaacugaaugguccccauguaguguaacuuguggaaaugguauucaaguuagaauaaagccuggcucugcuaauaaaccuaaagaccaauuagauuaugaaaaugauauugaaaaaaaaauuuguaaaauggaaaaauguuccaguguguuuaaugucguaaauaguucaauaggauuaauaaugguauuauccuucuuguuccuuaauuag

SEQ ID NO: 2995 - RNA, 1239 nt, Artificial Sequence
  derived and/or modified CDS sequence (wt) from Pf(Tz93-035)__BAM84757.1__CSP
augaugagaaaauuagcuauuuuaucuguuucuuccuuuuuauuuguugaggccuuauuccaggaauaccagugcuauggaaguucgucaaacacaaggguucuaaaugaauuaaauuaugauaaugcaggcacuaauuuauauaaugaauuagaaaugaauuauuaugggaaacaggaaaauugguauagucuuaaaaaaaauaguagaucacuuggagaaaaugaugauggaaauaauaauaauggagauaauggucgugaagguaaagaugaagauaaaagagauggaaauaacgaagacaacgagaaauuaaggaaaccaaaacauaaaaaauuaaagcaaccaggggaugguaauccugauccaaaugcaaacccaaauguagaucccaaugccaacccaaauguagauccaaaugcaaacccaaauguagauccaaaugcaaacccaaaugcaaacccaaaugcaaacccaaaugcaaacccaaaugcaaacccaaaugcaaacccaaaugcaaacccaaaugcaaacccaaaugcaaacccaaaugcaaacccaaaugcaaacccaaaugcaaaccccaaugcaaauccuaaugcaaacccaaaugcaaacccaaacguagauccuaaugcaaauccaaaugcaaacccaaaugcaaacccaaacgcaaaccccaaugcaaauccuaaugcaaaccccaaugcaaauccuaaugcaaauccuaaugccaauccaaaugcaaauccaaaugcaaacccaaacgcaaaccccaaugcaaauccuaaugccaauccaaaugcaaauccaaaugcaaacccaaaugcaaacccaaaugcaaaccccaaugcaaauccuaauaaaaacaaucaagguaauggacaaggucacaauaugccaaaugacccaaaccgaaauguagaugaaaaugcuaaugccaacaaugcuguaaaaaauaauaauaacgaagaaccaagugauaagcacauaacagaauauuuaaagaaaauaaaaaauucuauuucaacugaaugguccccauguaguguaacuuguggaaaugguauucaaguuagaauaaagccuggcucugcuaauaaaccuaaagacgaauuagauuaugaaaaugauauugaaaaaaaaauuuguaaaauggaaaaauguuccaguguguuuaaugucguaaauaguucaauaggauuaauaaugguauuauccuucuuguuccuuaauuag

SEQ ID NO: 2996 - RNA, 1239 nt, Artificial Sequence
  derived and/or modified CDS sequence (wt) from Pf(Tz93-041)__BAM84759.1__CSP
augaugagaaaauuagcuauuuuaucuguuucuuccuuuuuauuuguugaggccuuauuccaggaauaccagugcuauggaaguucgucaaacacaaggguucuaaaugaauuaaauuaugauaaugcaggcacuaauuuauauaaugaauuagaaaugaauuauuaugggaaacaggaaaauugguauagucuuaaaaaaaauaguagaucacuuggagaaaaugaugauggaaauaauaauaauggagauaauggucgugaagguaaagaugaagauaaaagagauggaaauaacgaagacaacgagaaauuaaggaaaccaaaacauaaaaaauuaaagcaaccaggggaugguaauccugauccaaaugcaaacccaaauguagaucccaaugccaacccaaauguagauccaaaugcaaacccaaauguagauccaaaugcaaacccaaaugcaaacccaaaugcaaacccaaaugcaaacccaaaugcaaacccaaaugcaaacccaaaugcaaacccaaaugcaaacccaaaugcaaacccaaaugcaaacccaaaugcaaacccaaaugcaaaccccaaugcaaauccuaaugcaaacccaaaugcaaacccaaacguagauccuaaugcaaauccaaaugcaaacccaaaugcaaacccaaacgcaaaccccaaugcaaauccuaaugcaaaccccaaugcaaauccuaaugcaaauccuaaugccaauccaaaugcaaauccaaaugcaaacccaaacgcaaaccccaaugcaaauccuaaugccaauccaaaugcaaauccaaaugcaaacccaaaugcaaacccaaaugcaaaccccaaugcaaauccuaauaaaaacaaucaagguaauggacaaggucacaauaugccaaaugacccaaaccgaaauguagaugaaaaugcuaaugccaacaaugcuguaaaaaauaauaauaacgaagaaccaagugauaagcacauagaacaauauuuaaagagaauacaaaauucucuuucaacugaaugguccccauguaguguaacuuguggaaaugguauucaaguuagaauaaagccuggcucugcugguaaaccuaaagacgaauuagauuaugcaaaugauauugaaaaaaaaauuuguaaaauggaaaaauguuccaguguguuuaaugucguaaauaguucaauaggauuaauaaugguauuauccuucuuguuccuuaauuag

SEQ ID NO: 2997 - RNA, 1239 nt, Artificial Sequence
  derived and/or modified CDS sequence (wt) from Pf(Tz93-051)__BAM84763.1__CSP
augaugagaaaauuagcuauuuuaucuguuucuuccuuuuuauuuguugaggccuuauuccaggaauaccagugcuauggaaguucgucaaacacaaggguucuaaaugaauuaaauuaugauaaugcaggcacuaauuuauauaaugaauuagaaaugaauuauuaugggaaacaggaaaauugguauagucuuaaaaaaaauaguagaucacuuggagaaaaugaugauggaaauaauaauaauggagauaauggucgugaagguaaagaugaagauaaaagagauggaaauaacgaagacaacgagaaauuaaggaaaccaaaacauaaaaaauuaaagcaaccaggggaugguaauccugauccaaaugcaaacccaaauguagaucccaaugccaacccaaauguagauccaaaugcaaacccaaauguagauccaaaugcaaacccaaaugcaaacccaaaugcaaacccaaaugcaaacccaaaugcaaacccaaaugcaaacccaaaugcaaacccaaaugcaaacccaaaugcaaacccaaaugcaaacccaaaugcaaacccaaaugcaaaccccaaugcaaauccuaaugcaaacccaaaugcaaacccaaacguagauccuaaugcaaauccaaaugcaaacccaaaugcaaacccaaacgcaaaccccaaugcaaauccuaaugcaaaccccaaugcaaauccuaaugcaaauccuaaugccaauccaaaugcaaauccaaaugcaaacccaaacgcaaaccccaaugcaaauccuaaugccaauccaaaugcaaauccaaaugcaaacccaaaugcaaacccaaaugcaaaccccaaugcaaauccuaauaaaaacaaucaagguaauggacaaggucacaauaugccaaaugacccaaaccgaaauguagaugaaaaugcuaaugccaacaaugcuguaaaaaauaauaauaacgaagaaccaagugauaagcacauagaacaauauuuaaacaaaauaaaaaauucuauuucaacugaaugguccccauguaguguaacuuguggaaaugguauucaaguuagaauaaagccuggcucugcuaauaaaccuaaagacgaauuaaauuaugaaaaugauauugaaaaaaaaauuuguaaaauggaaaaauguuccaguguguuuaaugucguaaauaguucaauaggauuaauaaugguauuauccuucuuguuccuuaauuag

SEQ ID NO: 2998 - RNA, 1239 nt, Artificial Sequence
  derived and/or modified CDS sequence (wt) from Pf(Tz93-052)__BAM84764.1__CSP
augaugagaaaauuagcuauuuuaucuguuucuuccuuuuuauuuguugaggccuuauuccaggaauaccagugcuauggaaguucgucaaacacaaggguucuaaaugaauuaaauuaugauaaugcaggcacuaauuuauauaaugaauuagaaaugaauuauuaugggaaacaggaaaauugguauagucuuaaaaaaaauaguagaucacuuggagaaaaugaugauggaaauaauaauaauggagauaauggucgugaagguaaagaugaagauaaaagagauggaaauaacgaagacaacgagaaauuaaggaaaccaaaacauaaaaaauuaaagcaaccaggggaugguaauccugauccaaaugcaaacccaaauguagaucccaaugccaacccaaauguagauccaaaugcaaacccaaauguagauccaaaugcaaacccaaaugcaaacccaaaugcaaacccaaaugcaaacccaaaugcaaacccaaaugcaaacccaaaugcaaacccaaaugcaaacccaaaugcaaauccuaaugcaaacccaaaugcaaacccaaacguagauccuaaugcaaacccaaaugcaaacccaaacgcaaaccccaaugcaaaccccaaugcaaauccaaaugcaaacccaaaugcaaacccaaacgcaaaccccaaugcaaauccuaaugcaaaccccaaugcaaauccuaaugcaaauccuaaugccaauccaaaugcaaauccaaaugcaaacccaaacgcaaaccccaaugcaaauccuaaugccaauccaaaugcaaauccaaaugcaaacccaaaugcaaacccaaaugcaaaccccaaugcaaauccuaauaaaaacaaucaagguaauggacaaggucacaauaugccaaaugacccaaaccgaaauguagaugaaaaugcuaaugccaacaaugcuguaaaaaauaauaauaacgaagaaccaagugaucagcacauagaaaaauauuuaaagauaauacaaaauucucuuucaacugaaugguccccauguaguguaacuuguggaaaugguauucaaguuagaauaaagccuggcucugcuaauaaaccuaaagaccaauuagauuaugcaaaugauauugaaaaaaaaauuuguaaaauggaaaaauguuccaguguguuuaaugucguaaauaguucaauaggauuaauaaugguauuauccuucuuguuccuuaauuag

SEQ ID NO: 2999 - RNA, 1239 nt, Artificial Sequence
  derived and/or modified CDS sequence (wt) from Pf(Tz93-061)__BAM84768.1__CSP
augaugagaaaauuagcuauuuuaucuguuucuuccuuuuuauuuguugaggccuuauuccaggaauaccagugcuauggaaguucgucaaacacaaggguucuaaaugaauuaaauuaugauaaugcaggcacuaauuuauauaaugaauuagaaaugaauuauuaugggaaacaggaaaauugguauagucuuaaaaaaaauaguagaucacuuggagaaaaugaugauggaaauaauaauaauggagauaauggucgugaagguaaagaugaagauaaaagagauggaaauaacgaagacaacgagaaauuaaggaaaccaaaacauaaaaaauuaaagcaaccagcggaugguaauccugauccaaaugcaaacccaaauguagaucccaaugccaacccaaauguagauccaaaugcaaacccaaauguagauccaaaugcaaacccaaaugcaaacccaaaugcaaacccaaaugcaaacccaaaugcaaacccaaaugcaaacccaaaugcaaacccaaaugcaaacccaaaugcaaaccccaaugcaaauccuaaugcaaauccuaaugcaaacccaaaugcaaauccuaaugcaaacccaaaugcaaacccaaacguagauccuaaugcaaauccaaaugcaaacccaaaugcaaacccaaacgcaaaccccaaugcaaauccuaaugcaaaccccaaugcaaauccuaaugcaaauccuaaugccaauccaaaugcaaauccaaaugcaaacccaaacgcaaaccccaaugcaaauccuaaugccaauccaaaugcaaauccaaaugcaaacccaaaugcaaacccaaaugcaaaccccaaugcaaauccuaauaaaaacaaucaagguaauggacaaggucacaauaugccaaaugacccaaaccgaaauguagaugaaaaugcuaaugccaacaaugcuguaaaaaauaauaauaacgaagaaccaagugaucagcacauagaaaaauauuuaaagagaauacaaaauucucuuucaacugaaugguccccauguaguguaacuuguggaaaugguauucaaguuagaauaaagccuggcucugcuaauaaaccuaaagaccaauuagauuaugcaaaugauauugaaaaaaaaauuuguaaaauggaaaaauguuccaguguguuuaaugucguaaauaguucaauaggauuaauaaugguauuauccuucuuguuccuuaauuag

SEQ ID NO: 3000 - RNA, 1239 nt, Artificial Sequence
  derived and/or modified CDS sequence (wt) from Pf(Tz93-075)__BAM84770.1__CSP
augaugagaaaauuagcuauuuuaucuguuucuuccuuuuuauuuguugaggccuuauuccaggaauaccagugcuauggaaguucgucaaacacaaggguucuaaaugaauuaaauuaugauaaugcaggcacuaauuuauauaaugaauuagaaaugaauuauuaugggaaacaggaaaauugguauagucuuaaaaaaaauaguagaucacuuggagaaaaugaugauggaaauaauaauaauggagauaauggucgugaagguaaagaugaagauaaaagagauggaaauaacgaagacaacgagaaauuaaggaaaccaaaacauaaaaaauuaaagcaaccaggggaugguaauccugauccaaaugcaaacccaaauguagaucccaaugccaacccaaauguagauccaaaugcaaacccaaauguagauccaaaugcaaacccaaaugcaaacccaaaugcaaacccaaaugcaaacccaaaugcaaacccaaaugcaaacccaaaugcaaacccaaaugcaaacccaaaugcaaacccaaaugcaaaccccaaugcaaauccuaaugcaaacccaaaugcaaauccuaaugcaaacccaaaugcaaacccaaacguagauccuaaugcaaauccaaaugcaaacccaaaugcaaacccaaacgcaaaccccaaugcaaauccuaaugcaaaccccaaugcaaauccuaaugcaaauccuaaugccaauccaaaugcaaauccaaaugcaaacccaaacgcaaaccccaaugcaaauccuaaugccaauccaaaugcaaauccaaaugcaaacccaaaugcaaacccaaaugcaaaccccaaugcaaauccuaauaaaaacaaucaagguaauggacaaggucacaauaugccaaaugacccaaaccgaaauguagaugaaaaugcuaaugccaacaaugcuguaaaaaauaauaauaacgaagaaccaagugauaagcacauagaacaauauuuaaagacaauaaaaaauucucuuucaacugaaugguccccauguaguguaacuuguggaaaugguauucaaguuagaauaaagccuggcucugcuaauaaaccuaaagaccaauuagauuaugaaaaugauauugaaaaaaaaauuuguaaaauggaaaaauguuccaguguguuuaaugucguaaauaguucaauaggauuaauaaugguauuauccuucuuguuccuuaauuag

SEQ ID NO: 3001 - RNA, 1239 nt, Artificial Sequence
  derived and/or modified CDS sequence (wt) from Pf(Tz93-113)__BAM84775.1__CSP
augaugagaaaauuagcuauuuuaucuguuucuuccuuuuuauuuguugaggccuuauuccaggaauaccagugcuauggaaguucgucaaacacaaggguucuaaaugaauuaaauuaugauaaugcaggcacuaauuuauauaaugaauuagaaaugaauuauuaugggaaacaggaaaauugguauagucuuaaaaaaaauaguagaucacuuggagaaaaugaugauggaaauaauaauaauggagauaauggucgugaagguaaagaugaagauaaaagagauggaaauaacgaagacaacgagaaauuaaggaaaccaaaacauaaaaaauuaaagcaaccaggggaugguaauccugauccaaaugcaaacccaaauguagaucccaaugccaacccaaauguagauccaaaugcaaacccaaauguagauccaaaugcaaacccaaaugcaaacccaaaugcaaacccaaaugcaaacccaaaugcaaacccaaaugcaaacccaaaugcaaacccaaaugcaaacccaaaugcaaacccaaaugcaaaccccaaugcaaauccuaaugcaaauccuaaugcaaacccaaaugcaaauccuaaugcaaacccaaaugcaaacccaaacguagauccuaaugcaaauccaaaugcaaacccaaaugcaaacccaaacgcaaaccccaaugcaaauccuaaugcaaaccccaaugcaaauccuaaugcaaauccuaaugccaauccaaaugcaaauccaaaugcaaacccaaacgcaaaccccaaugcaaauccuaaugccaauccaaaugcaaauccaaaugcaaacccaaaugcaaaccccaaugcaaauccuaauaaaaacaaucaagguaauggacaaggucacaauaugccaaaugacccaaaccgaaauguagaugaaaaugcuaaugccaacaaugcuguaaaaaauaauaauaacgaagaaccaagugauaagcacauagaacaauauuuaaacaaaauaaaaaauucuauuucaacugaaugguccccauguaguguaacuuguggaaaugguauucaaguuagaauaaagccuggcucugcuaauaaaccuaaagacgaauuaaauuaugaaaaugauauugaaaaaaaaauuuguaaaauggaaaaauguuccaguguguuuaaugucguaaauaguucaauaggauuaauaaugguauuauccuucuuguuccuuaauuag

SEQ ID NO: 3002 - RNA, 1239 nt, Artificial Sequence
  derived and/or modified CDS sequence (wt) from Pf(Tz93-123)__BAM84778.1__CSP
augaugagaaaauuagcuauuuuaucuguuucuuccuuuuuauuuguugaggccuuauuccaggaauaccagugcuauggaaguucgucaaacacaaggguucuaaaugaauuaaauuaugauaaugcaggcacuaauuuauauaaugaauuagaaaugaauuauuaugggaaacaggaaaauugguauagucuuaaaaaaaauaguagaucacuuggagaaaaugaugauggaaauaauaauaauggagauaauggucgugaagguaaagaugaagauaaaagagauggaaauaacgaagacaacgagaaauuaaggaaaccaaaacauaaaaaauuaaagcaaccagcggaugguaauccugauccaaaugcaaacccaaauguagaucccaaugccaacccaaauguagauccaaaugcaaacccaaauguagauccaaaugcaaacccaaaugcaaacccaaaugcaaacccaaaugcaaacccaaaugcaaacccaaaugcaaacccaaaugcaaacccaaaugcaaacccaaaugcaaacccaaaugcaaacccaaaugcaaacccaaaugcaaaccccaaugcaaauccuaaugcaaacccaaaugcaaacccaaacguagauccuaaugcaaauccaaaugcaaacccaaaugcaaacccaaacgcaaaccccaaugcaaauccuaaugcaaaccccaaugcaaauccuaaugcaaauccuaaugccaauccaaaugcaaauccaaaugcaaacccaaacgcaaaccccaaugcaaauccuaaugccaauccaaaugcaaauccaaaugcaaacccaaaugcaaacccaaaugcaaaccccaaugcaaauccuaauaaaaacaaucaagguaauggacaaggucacaauaugccaaaugacccaaaccgaaauguagaugaaaaugcuaaugccaacaaugcugcaaaaaauaauaauaacgaagaaccaagugaucagcacauagaaaaauauuuaaagacaauacaaaauucucuuucaacugaaugguccccauguaguguaacuuguggaaaugguauucaaguuagaauaaagccuggcucugcuaauaaaccuaaagaccaauuagauuaugcaaaugauauugaaaaaaaaauuuguaaaauggaaaaauguuccaguguguuuaaugucguaaauaguucaauaggauuaauaaugguauuauccuucuuguuccuuaauuag

SEQ ID NO: 3003 - RNA, 1239 nt, Artificial Sequence
  derived and/or modified CDS sequence (wt) from Pf(Tz93-124)__BAM84779.1__CSP
augaugagaaaauuagcuauuuuaucuguuucuuccuuuuuauuuguugaggccuuauuccaggaauaccagugcuauggaaguucgucaaacacaaggguucuaaaugaauuaaauuaugauaaugcaggcacuaauuuauauaaugaauuagaaaugaauuauuaugggaaacaggaaaauugguauagucuuaaaaaaaauaguagaucacuuggagaaaaugaugauggaaauaauaauaauggagauaauggucgugaagguaaagaugaagauaaaagagauggaaauaacgaagacaacgagaaauuaaggaaaccaaaacauaaaaaauuaaagcaaccagcggaugguaauccugauccaaaugcaaacccaaauguagaucccaaugccaacccaaauguagauccaaaugcaaacccaaauguagauccaaaugcaaacccaaaugcaaacccaaaugcaaacccaaaugcaaacccaaaugcaaacccaaaugcaaacccaaaugcaaacccaaaugcaaaccccaaugcaaauccuaaugcaaauccuaaugcaaauccuaaugcaaacccaaaugcaaauccuaaugcaaacccaaaugcaaacccaaacguagauccuaaugcaaauccaaaugcaaacccaaaugcaaacccaaacgcaaaccccaaugcaaauccuaaugcaaaccccaaugcaaauccuaaugcaaauccuaaugccaauccaaaugcaaauccaaaugcaaacccaaacgcaaaccccaaugcaaauccuaaugccaauccaaaugcaaauccaaaugcaaacccaaaugcaaacccaaaugcaaaccccaaugcaaauccuaauaaaaacaaucaagguaauggacaaggucacaauaugccaaaugacccaaaccgaaauguagaugaaaaugcuaaugccaacaaugcuguaaaaaauaauaauaacgaagaaccaagugauaagcacauagaacaauauuuaaagacaauaaaaaauucucuuucaacugaaugguccccauguaguguaacuuguggaaaugguauucaaguuagaauaaagccuggcucugcugauaaaccuaaagaccaauuagauuauauaaaugauauugaaaaaaaaauuuguaaaauggaaaaauguuccaguguguuuaaugucguaaauaguucaauaggauuaauaaugguauuauccuucuuguuccuuaauuag

SEQ ID NO: 3004 - RNA, 1239 nt, Artificial Sequence
  derived and/or modified CDS sequence (wt) from Pf(Tz98-009)__BAM84781.1__CSP
augaugagaaaauuagcuauuuuaucuguuucuuccuuuuuauuuguugaggccuuauuccaggaauaccagugcuauggaaguucgucaaacacaaggguucuaaaugaauuaaauuaugauaaugcaggcacuaauuuauauaaugaauuagaaaugaauuauuaugggaaacaggaaaauugguauagucuuaaaaaaaauaguagaucacuuggagaaaaugaugauggaaauaauaauaauggagauaauggucgugaagguaaagaugaagauaaaagagauggaaauaacgaagacaacgagaaauuaaggaaaccaaaacauaaaaaauuaaagcaaccagcggaugguaauccugauccaaaugcaaacccaaauguagaucccaaugccaacccaaauguagauccaaaugcaaacccaaauguagauccaaaugcaaacccaaaugcaaacccaaaugcaaacccaaaugcaaacccaaaugcaaacccaaaugcaaacccaaaugcaaacccaaaugcaaacccaaaugcaaaccccaaugcaaauccuaaugcaaauccuaaugcaaacccaaaugcaaauccuaaugcaaacccaaaugcaaacccaaacguagauccuaaugcaaauccaaaugcaaacccaaaugcaaacccaaacgcaaaccccaaugcaaauccuaaugcaaaccccaaugcaaauccuaaugcaaauccuaaugccaauccaaaugcaaauccaaaugcaaacccaaacgcaaaccccaaugcaaauccuaaugccaauccaaaugcaaauccaaaugcaaacccaaaugcaaacccaaaugcaaaccccaaugcaaauccuaauaaaaacaaucaagguaauggacaaggucacaauaugccaaaugacccaaaccgaaauguagaugaaaaugcuaaugccaacaaugcuguaaaaaauaauaauaacgaagaaccaagugauaagcacauaaaagaauauuuaaacaaaauacaaaauucuauuucaacugaaugguccccauguaguguaacuuguggaaaugguauucaaguuagaauaaagccuggcucugcugauaaaccuaaagaccaauuagauuauauaaaugauauugaaaaaaaaauuuguaaaauggaaaaauguuccaguguguuuaaugucguaaauaguucaauaggauuaauaaugguauuauccuucuuguuccuuaauuag

SEQ ID NO: 3005 - RNA, 1239 nt, Artificial Sequence
  derived and/or modified CDS sequence (wt) from Pf(Tz98-049)__BAM84789.1__CSP
augaugagaaaauuagcuauuuuaucuguuucuuccuuuuuauuuguugaggccuuauuccaggaauaccagugcuauggaaguucgucaaacacaaggguucuaaaugaauuaaauuaugauaaugcaggcacuaauuuauauaaugaauuagaaaugaauuauuaugggaaacaggaaaauugguauagucuuaaaaaaaauaguagaucacuuggagaaaaugaugauggaaauaauaauaauggagauaauggucgugaagguaaagaugaagauaaaagagauggaaauaacgaagacaacgagaaauuaaggaaaccaaaacauaaaaaauuaaagcaaccagcggaugguaauccugauccaaaugcaaacccaaauguagaucccaaugccaacccaaauguagauccaaaugcaaacccaaauguagauccaaaugcaaacccaaaugcaaacccaaaugcaaacccaaaugcaaacccaaaugcaaacccaaaugcaaacccaaaugcaaacccaaaugcaaaccccaaugcaaauccuaaugcaaauccuaaugcaaauccuaaugcaaacccaaaugcaaauccuaaugcaaacccaaaugcaaacccaaacguagauccuaaugcaaauccaaaugcaaacccaaaugcaaacccaaacgcaaaccccaaugcaaauccuaaugcaaaccccaaugcaaauccuaaugcaaauccuaaugccaauccaaaugcaaauccaaaugcaaacccaaacgcaaaccccaaugcaaauccuaaugccaauccaaaugcaaauccaaaugcaaacccaaaugcaaacccaaaugcaaaccccaaugcaaauccuaauaaaaacaaucaagguaauggacaaggucacaauaugccaaaugacccaaaccgaaauguagaugaaaaugcuaaugccaacaaugcuguaaaaaauaauaauaacgaagaaccaagugauaagcacauagaacaauauuuaaagacaauaaaaaauucucuuucaacugaaugguccccauguaguguaacuuguggaaaugguauucaaguuagaauaaagccuggcucugcuaauaaaccuaaagaccaauuagauuaugaaaaugauauugaaaaaaaaauuuguaaaauggaaaaauguuccaguguguuuaaugucguaaauaguucaauaggauuaauaaugguauuauccuucuuguuccuuaauuag

SEQ ID NO: 3006 - RNA, 1239 nt, Artificial Sequence
  derived and/or modified CDS sequence (wt) from Pf(Tz98-084)__BAM84792.1__CSP
augaugagaaaauuagcuauuuuaucuguuucuuccuuuuuauuuguugaggccuuauuccaggaauaccagugcuauggaaguucgucaaacacaaggguucuaaaugaauuaaauuaugauaaugcaggcacuaauuuauauaaugaauuagaaaugaauuauuaugggaaacaggaaaauugguauagucuuaaaaaaaauaguagaucacuuggagaaaaugaugauggaaauaauaauaauggagauaauggucgugaagguaaagaugaagauaaaagagauggaaauaacgaagacaacgagaaauuaaggaaaccaaaacauaaaaaauuaaagcaaccagcggaugguaauccugauccaaaugcaaacccaaauguagaucccaaugccaacccaaauguagauccaaaugcaaacccaaauguagauccaaaugcaaacccaaaugcaaacccaaaugcaaacccaaaugcaaacccaaaugcaaacccaaaugcaaacccaaaugcaaacccaaaugcaaacccaaaugcaaaccccaaugcaaauccuaaugcaaauccuaaugcaaacccaaaugcaaauccuaaugcaaacccaaaugcaaacccaaacguagauccuaaugcaaauccaaaugcaaacccaaaugcaaacccaaacgcaaaccccaaugcaaauccuaaugcaaaccccaaugcaaauccuaaugcaaauccuaaugccaauccaaaugcaaauccaaaugcaaacccaaacgcaaaccccaaugcaaauccuaaugccaauccaaaugcaaauccaaaugcaaacccaaaugcaaacccaaaugcaaaccccaaugcaaauccuaauaaaaacaaucaagguaauggacaaggucacaauaugccaaaugacccaaaccgaaauguagaugaaaaugcuaaugccaacaaugcuguaaaaaauaauaauaacgaagaaccaagugaucagcacauagaaaaauauuuaaacaaaauacaaaauucucuuucaacugaaugguccccauguaguguaacuuguggaaaugguauucaaguuagaauaaagccuggcucugcuaauaaaccuaaagaccaauuagauuaugcaaaugauauugaaaaaaaaauuuguaaaauggaaaaauguuccaguguguuuaaugucguaaauaguucaauaggauuaauaaugguauuauccuucuuguuccuuaauuag

SEQ ID NO: 3007 - RNA, 1239 nt, Artificial Sequence
  derived and/or modified CDS sequence (wt) from Pf(Tz98-119)__BAM84797.1__CSP
augaugagaaaauuagcuauuuuaucuguuucuuccuuuuuauuuguugaggccuuauuccaggaauaccagugcuauggaaguucgucaaacacaaggguucuaaaugaauuaaauuaugauaaugcaggcacuaauuuauauaaugaauuagaaaugaauuauuaugggaaacaggaaaauugguauagucuuaaaaaaaauaguagaucacuuggagaaaaugaugauggaaauaauaauaauggagauaauggucgugaagguaaagaugaagauaaaagagauggaaauaacgaagacaacgagaaauuaaggaaaccaaaacauaaaaaauuaaagcaaccagcggaugguaauccugauccaaaugcaaacccaaauguagaucccaaugccaacccaaauguagauccaaaugcaaacccaaauguagauccaaaugcaaacccaaaugcaaacccaaaugcaaacccaaaugcaaacccaaaugcaaacccaaaugcaaacccaaaugcaaacccaaaugcaaacccaaaugcaaaccccaaugcaaauccuaaugcaaauccuaaugcaaacccaaaugcaaauccuaaugcaaacccaaaugcaaacccaaacguagauccuaaugcaaauccaaaugcaaacccaaaugcaaacccaaacgcaaaccccaaugcaaauccuaaugcaaaccccaaugcaaauccuaaugcaaauccuaaugccaauccaaaugcaaauccaaaugcaaacccaaacgcaaaccccaaugcaaauccuaaugccaauccaaaugcaaauccaaaugcaaacccaaaugcaaacccaaaugcaaaccccaaugcaaauccuaauaaaaacaaucaagguaauggacaaggucacaauaugccaaaugacccaaaccgaaauguagaugaaaaugcuaaugccaacaaugcuguaaaaaauaauaauaacgaagaaccaagugaucagcacauagaaaaauauuuaaagacaauacaaaauucucuuucaacugaaugguccccauguaguguaacuuguggaaaugguauucaaguuagaauaaagccuggcucugcuaauaaaccuaaagaccaauuagauuaugcaaaugauauugaaaaaaaaauuuguaaaauggaaaaauguuccaguguguuuaaugucguaaauaguucaauaggauuaauaaugguauuauccuucuuguuccuuaauuag

SEQ ID NO: 3008 - RNA, 1239 nt, Artificial Sequence
  derived and/or modified CDS sequence (wt) from Pf(Yaounde)__AAN87602.1__CSP
augaugagaaaauuagcuauuuuaucuguuucuuccuuuuuauuuguugaggccuuauuccaggaauaccagugcuauggaaguucgucaaacacaaggguucuaaaugaauuaaauuaugauaaugcaggcacuaauuuauauaaugaauuagaaaugaauuauuaugggaaacaggaaaauugguauagucuuaaaaaaaauaguagaucacuuggagaaaaugaugauggaaauaauaauaauggagauaauggucgugaagguaaagaugaagauaaaagagauggaaauaacgaagacaacgagaaauuaaggaaaccaaaacauaaaaaauuaaagcaaccagcggaugguaauccugauccaaaugcaaacccaaauguagaucccaaugccaacccaaauguagauccaaaugcaaacccaaauguagauccaaaugcaaacccaaaugcaaacccaaaugcaaacccaaaugcaaacccaaaugcaaacccaaaugcaaacccaaaugcaaacccaaaugcaaacccaaaugcaaaccccaaugcaaauccuaaugcaaauccuaaugcaaacccaaaugcaaauccuaaugcaaacccaaaugcaaacccaaacguagauccuaaugcaaauccaaaugcaaacccaaaugcaaacccaaacgcaaaccccaaugcaaauccuaaugcaaaccccaaugcaaauccuaaugcaaauccuaaugccaauccaaaugcaaauccaaaugcaaacccaaacgcaaaccccaaugcaaauccuaaugccaauccaaaugcaaauccaaaugcaaacccaaaugcaaacccaaaugcaaaccccaaugcaaauccuaauaaaaacaaucaagguaauggacaaggucacaauaugccaaaugacccaaaccgaaauguagaugaaaaugcuaaugccaacaaugcuguaaaaaauaauaauaacgaagaaccaagugaucagcacauagaaaaauauuuaaacaaaauaaaaaauucucuuucaacugaaugguccccauguaguguaacuuguggaaaugguauucaaguuagaauaaagccuggcucugcuaauaaaccuaaagaccaauuagauuaugcaaaugauauugaaaaaaaaauuuguaaaauggaaaaauguuccaguguguuuaaugucguaaauaguucaauaggauuaauaaugguauuauccuucuuguuccuuaauuag

SEQ ID NO: 3009 - RNA, 1239 nt, Artificial Sequence
  derived and/or modified CDS sequence (wt) from Pf(Yaounde)__AAN87587.1__CSP
augaugagaaaauuagcuauuuuaucuguuucuuccuuuuuauuuguugaggccuuauuccaggaauaccagugcuauggaaguucgucaaacacaaggguucuaaaugaauuaaauuaugauaaugcaggcacuaauuuauauaaugaauuagaaaugaauuauuaugggaaacaggaaaauugguauagucuuaaaaaaaauaguagaucacuuggagaaaaugaugauggaaauaauaauaauggagauaauggucgugaagguaaagaugaagauaaaagagauggaaauaacgaagacaacgagaaauuaaggaaaccaaaacauaaaaaauuaaagcaaccagcggaugguaauccugauccaaaugcaaacccaaauguagaucccaaugccaacccaaauguagauccaaaugcaaacccaaauguagauccaaaugcaaacccaaaugcaaacccaaaugcaaacccaaaugcaaacccaaaugcaaacccaaaugcaaacccaaaugcaaacccaaaugcaaacccaaaugcaaacccaaaugcaaacccaaaugcaaacccaaaugcaaaccccaaugcuaauccuaaugcaaacccaaaugcaaacccaaacguagauccuaaugcaaauccaaaugcaaacccaaacgcaaaccccaaugcaaauccuaaugcaaaccccaaugcaaauccuaaugcaaauccuaaugccaauccaaaugcaaauccaaaugcaaacccaaacgcaaaccccaaugcaaauccuaaugccaauccaaaugcaaauccaaaugcaaacccaaaugcaaacccaaaugcaaacccaaaugcaaaccccaaugcaaauccuaauaaaaacaaucaagguaauggacaaggucacaauaugccaaaugacccaaaccgaaauguagaugaaaaugcuaaugccaacaaugcuguaaaaaauaauaauaacgaagaaccaagugaucagcacauagaaaaauauuuaaagacaauaaaaaauucucuuucaacugaaugguccccauguaguguaacuuguggaaaugguauucaaguuagaauaaagccuggcucugcuaauaaaccuaaagaccaauuagauuaugcaaaugauauugaaaaaaaaauuuguaaaauggaaaaauguuccaguguguuuaaugucguaaauaguucaauaggauuaauaaugguauuauccuucuuguuccuuaauuag

SEQ ID NO: 3010 - RNA, 1236 nt, Artificial Sequence
  derived and/or modified CDS sequence (wt) from Pf(A107)__ACO49330.1__CSP
augagaaaauuagcuauuuuaucuguuucuuccuuuuuauuuguugaggccuuauuccaggaauaccagugcuauggaaguucgucaaacacaaggguucuaaaugaauuaaauuaugauaaugcaggcacuaauuuauauaaugaauuagaaaugaauuauuaugggaaacaggaaaauugguauagucuuaaaaaaaauaguagaucacuuggagaaaaugaugauggaaauaauaauaauggagauaauggucgugaagguaaagaugaagauaaaagagauggaaauaacgaagacaacgagaaauuaaggaaaccaaaacauaaaaaauuaaagcaaccaggggaugguaauccugauccaaaugcaaacccaaauguagaucccaaugccaacccaaauguagauccaaaugcaaacccaaauguagauccaaaugcaaacccaaaugcaaacccaaaugcaaacccaaaugcaaacccaaaugcaaacccuaaugcaaacccaaaugcaaacccaaaugcaaacccaaaugcaaacccaaaugcaaacccaaaugcaaacccaaaugcaaaccccaaugcaaacccaaaugcaaaccccaaugcaaauccuaaugcaaacccaaaugcaaacccaaaugcaaacccaaacgcaaaccccaaugcaaauccuaaugcaaaccccaaugcaaauccuaaugcaaauccuaaugccaauccaaaugcaaauccaaaugcaaacccaaacgcaaaccccaaugcaaauccuaaugccaauccaaaugcaaauccaaaugcaaauccaaaugcaaacccaaaugcaaacccaaaugcaaaccccaaugcaaauccuaauaaaaacaaucaagguaauggacaaggucacaauaugccaaaugacccaaaccgaaauguagaugaaaaugcuaaugccaacaaugcuguaaaaaauaauaauaacgaagaaccaagugauaagcacauagaacaauauuuaaagaaaauacaaaauucucuuucaacugaaugguccccauguaguguaacuuguggaaaugguauucaaguuagaauaaagccuggcucugcuaauaaaccuaaagacgaauuagauuaugaaaaugauauugaaaaaaaaauuuguaaaauggaaaaauguuccaguguguuuaaugucguaaauaguucaauaggauuaauaaugguauuauccuucuuguuccuuaauuag

SEQ ID NO: 3011 - RNA, 1233 nt, Artificial Sequence
  derived and/or modified CDS sequence (wt) from Pf(IT)____CSP
augaugagaaaauuagcuauuuuaucuguuucuuccuuuuuauuuguugaggccuuauuccaggaauaccagugcuauggaaguucgucaaacacaaggguucuaaaugaauuaaauuaugauaaugcaggcacuaauuuauauaaugaauuagaaaugaauuauuaugggaaacaggaaaauugguauagucuuaaaaaaaauaguagaucacuuggagaaaaugaugauggagauaaugauaauggaaauaauaauaauggaaauaauaauaauggagauaauggucgugaagguaaagaugaagauaaaagagauggaaauaacgaagacaacgagaaauuaaggaaaccaaaacauaaaaaauuaaagcaaccaggggaugauaauccugauccaaaugccaacccaaauguagauccaaaugccaacccaaauguagauccaaaugcaaacccaaaugcaaacccaaaugcaaacccaaaugcaaacccaaaugcaaacccaaaugcaaacccaaaugcaaacccaaacguagauccuaaugcaaauccaaaugcaaacccaaaugcaaacccaaacgcaaaccccaaugcaaauccuaaugcaaauccuaaugcaaauccuaaugccaauccaaaugcaaauccaaaugcaaacccaaacgcaaaccccaaugcaaauccuaaugccaauccaaaugcaaauccaaaugcaaacccaaacgcaaaccccaaugcaaauccuaaugccaauccaaaugcaaauccaaaugcaaaccccaaugcaaauccuaaugccaauccaaaugcaaauccaaaugcaaacccaaaugcaaacccaaaugcaaauccuaauaaaaacaaucaagguaauggacaaggucacaauaugccaaaugacccaaaccgaaauguagaugaaaaugcuaaugccaacaaugcuguaaaaaauaauaauaacgaagaaccaagugauaagcacauagaacaauauuuaaagaaaauacaaaauucucuuucaacugaaugguccccauguaguguaacuuguggaaaugguauucaaguuagaauaaagccuggcucugcugauaaaccuaaagaccaauuagauuaugaaaaugauauugaaaaaaaaauuuguaaaauggaaaaauguuccaguguguuuaaugucguaaauaguucaauaggauuaauaaugguauuauccuucuuguuccuuaauuag

SEQ ID NO: 3012 - RNA, 1227 nt, Artificial Sequence
  derived and/or modified CDS sequence (wt) from Pf(14)__AGR53782.1__CSP
augaugagaaaauuagcuauuuuaucuguuucuuccuuuuuauuuguugaggccuuauuccaggaauaccagugcuauggaaguucgucaaacacaaggguucuaaaugaauuaaauuaugauaaugcaggcacuaauuuauauaaugaauuagaaaugaauuauuaugggaaacaggaaaauugguauagucuuaaaaaaaauaguagaucacuuggagaaaaugaugauggaaauaauaauaauggagauaauggucgugaagguaaagaugaagauaaaagagauggaaauaacgaagacaacgagaaauuaaggaaaccaaaacauaaaaaauuaaagcaaccaggggaugguaauccugauccaaaugcaaacccaaauguagaucccaaugccaacccaaauguagauccaaaugcaaacccaaauguagauccaaaugcaaacccaaaugcaaacccaaaugcaaacccaaaugcaaacccaaaugcaaacccaaaugcaaacccaaaugcaaacccaaaugcaaacccaaaugcaaacccaaaugcaaaccccaaugcaaacccaaacguagauccuaaugcaaauccaaaugcaaacccaaaugcaaacccaaacgcaaaccccaaugcaaauccuaaugcaaauccuaaugccaauccaaaugcaaauccaaaugcaaacccaaacgcaaaccccaaugcaaauccuaaugccaauccaaaugcaaauccaaaugcaaacccaaacgcaaaccccaaugcaaauccuaaugccaauccaaaugcaaauccaaaugcaaacccaaaugcaaacccaaaugcaaaccccaaugcaaauccuaauaaaaacaaucaagguaauggacaaggucacaauaugccaaaugacccaaaccgaaauguagaugaaaaugcuaaugccaacaaugcuguaaaaaauaauaauaacgaagaaccaagugaucagcacauagaaaaauauuuacagaaaauacaaaauucucuuucaacugaaugguccccauguaguguaacuuguggaaaugguauucaaguuagaauaaagccuggcucugcuaauaaaccuaaagaccaauuaaauuaugaaaaugauauuggaaaaaaaauuuguaaaauggaaaaauguuccaguguguuuaaugucguaaauaguucaauaggauuaauaaugguauuauccuucuuguuccuuaauuag

SEQ ID NO: 3013 - RNA, 1227 nt, Artificial Sequence
  derived and/or modified CDS sequence (wt) from Pf(Asembo Bay)__AAN87609.1__CSP
augaugagaaaauuagcuauuuuaucuguuucuuccuuuuuauuuguugaggccuuauuccaggaauaccagugcuauggaaguucgucaaacacaaggguucuaaaugaauuaaauuaugauaaugcaggcacuaauuuauauaaugaauuagaaaugaauuauuaugggaaacaggaaaauugguauagucuuaaaaaaaauaguagaucacuuggagaaaaugaugauggaaauaauaauaauggagauaauggucgugaagguaaagaugaagauaaaagagauggaaauaacgaagacaacgagaaauuaaggaaaccaaaacauaaaaaauuaaagcaaccagcggaugguaauccugauccaaaugcaaacccaaauguagaucccaaugccaacccaaauguagauccaaaugcaaacccaaauguagauccaaaugcaaacccaaaugcaaacccaaaugcaaacccaaaugcaaacccaaaugcaaacccaaaugcaaacccaaaugcaaacccaaaugcaaacccaaaugcaaacccaaaugcaaacccaaaugcaaaccccaaugcaaauccuaaugcaaacccaaaugcaaacccaaacguagauccuaaugcaaauccaaaugcaaacccaaaugcaaacccaaacgcaaaccccaaugcaaauccuaaugcaaaccccaaugcaaauccuaaugcaaauccuaaugccaauccaaaugcaaauccaaaugcaaacccaaacgcaaaccccaaugcaaauccuaaugccaauccaaaugcaaauccaaaugcaaacccaaaugcaaacccaaaugcaaaccccaaugcaaauccuaauaaaaacaaucaagguaauggacaaggucacaauaugccaaauaacccaaaccgaaauguagaugaaaaugcuaaugccaacaaugcuguaaaaaauaauaauaacgaagaaccaagugauaagcacauagaacaauauuuaaagacaauacaaaauucucuuucaacugaaugguccccauguaguguaacuuguggaaaugguauucaaguuagaauaaagccuggcucugcuaauaaaccuaaagaccaauuagauuaugcaaaugauauugaaaaaaaaauuuguaaaauggaaaaauguuccaguguguuuaaugucguaaauaguucaauaggauuaauaaugguauuauccuucuuguuccuuaauuag

SEQ ID NO: 3014 - RNA, 1227 nt, Artificial Sequence
  derived and/or modified CDS sequence (wt) from Pf(Bolivar)__AAN87613.1__CSP
augaugagaaaauuagcuauuuuaucuguuucuuccuuuuuauuuguugaggccuuauuccaggaauaccagugcuauggaaguucgucaaacacaaggguucuaaaugaauuaaauuaugauaaugcaggcacuaauuuauauaaugaauuagaaaugaauuauuaugggaaacaggaaaauugguauagucuuaaaaaaaauaguagaucacuuggagaaaaugaugauggaaauaauaauaauggagauaauggucgugaagguaaagaugaagauaaaagagauggaaauaacgaagacaacgagaaauuaaggaaaccaaaacauaaaaaauuaaagcaaccaggggaugguaauccugauccaaaugcaaacccaaauguagaucccaaugccaacccaaauguagauccaaaugcaaacccaaauguagauccaaaugcaaacccaaaugcaaacccaaaugcaaacccaaaugcaaacccaaaugcaaacccaaaugcaaacccaaaugcaaacccaaacgcaaacccaaaugcaaacccaaaugcaaacccaaaugcaaacccaaacguagauccuaaugcaaacccaaaugcaaacccaaacgcaaaccccaaugcaaaccccaaugcaaauccuaaugcaaauccuaaugccaauccaaaugcaaacccaaaugcaaacccaaacgcaaaccccaaugcaaauccuaaugccaauccaaaugcaaauccaaaugcaaacccaaacgcaaaccccaaugcaaauccuaaugccaauccaaaugcaaauccgaaugcaaacccaaaugcaaacccaaaugcaaaccccaaugcaaauccuaauaaaaacaaucaagguaauggacaaggucacaauaugccaaaugacccaaaccgaaauguagaugaaaaugcuaaugccaacaaugcuguaaaaaauaauaauaacgaagaaccaagugauaagcacauagaacaauauuuaaagaaaauacaaaaugcucucucaacugaaugguccccauguaguguaacuuguggaaaugguauucaaguuagaauaaagccuggcucugcuaauaaaccuaaagaccaauuagauuaugaaaaugauauugaaaaaaaaauuuguaaaauggaaaaauguuccaguguguuuaaugucguaaauaguucaauaggauuaauaaugguauuauccuucuuguuccuuaauuag

SEQ ID NO: 3015 - RNA, 1227 nt, Artificial Sequence
  derived and/or modified CDS sequence (wt) from Pf(Br419M3)__BAM85120.1__CSP
augaugagaaaauuagcuauuuuaucuguuucuuccuuuuuauuuguugaggccuuauuccaggaauaccagugcuauggaaguucgucaaacacaaggguucuaaaugaauuaaauuaugauaaugcaggcacuaauuuauauaaugaauuagaaaugaauuauuaugggaaacaggaaaauugguauagucuuaaaaaaaauaguagaucacuuggagaaaaugaugauggaaauaauaauaauggagauaauggucgugaagguaaagaugaagauaaaagagauggaaauaacgaagacaacgagaaauuaaggaaaccaaaacauaaaaaauuaaagcaaccagcggaugguaauccugauccaaaugcaaacccaaauguagaucccaaugccaacccaaauguagauccaaaugcaaacccaaauguagauccaaaugcaaacccaaaugcaaacccaaaugcaaacccaaaugcaaacccaaaugcaaacccaaaugcaaacccaaaugcaaacccaaaugcaaacccaaaugcaaacccaaaugcaaacccaaaugcaaacccaaaugcaaaccccaaugcaaauccuaaugcaaacccaaaugcaaacccaaacguagauccuaaugcaaauccaaaugcaaacccaaacgcaaaccccaaugcaaauccuaaugcaaaccccaaugcaaauccuaaugcaaauccuaaugccaauccaaaugcaaauccaaaugcaaacccaaacgcaaaccccaaugcaaauccuaaugccaauccaaaugcaaauccaaaugcaaacccaaaugcaaacccaaaugcaaaccccaaugcaaauccuaauaaaaacaaucaagguaauggacaaggucacaauaugccaaauaacccaaaccgaaauguagaugaaaaugcuaaugccaacaaugcuguaaaaaauaauaauaacgaagaaccaagugauaagcacauagaacaauauuuaaagaaaauacaaaauucucuuucaacugaaugguccccauguaguguaacuuguggaaaugguauucaaguuagaauaaagccuggcucugcugguaaaucuaaagacgaauuagauuaugaaaaugauauugaaaaaaaaauuuguaaaauggaaaaauguuccaguguguuuaaugucguaaauaguucaauaggauuaauaaugguauuauccuucuuguuccuuaauuag

SEQ ID NO: 3016 - RNA, 1227 nt, Artificial Sequence
  derived and/or modified CDS sequence (wt) from Pf(Gha1110-003)__BAM84840.1__CSP
augaugagaaaauuagcuauuuuaucuguuucuuccuuuuuauuuguugaggccuuauuccaggaauaccagugcuauggaaguucgucaaacacaaggguucuaaaugaauuaaauuaugauaaugcaggcacuaauuuauauaaugaauuagaaaugaauuauuaugggaaacaggaaaauugguauagucuuaaaaaaaauaguagaucacuuggagaaaaugaugauggaaauaauaauaauggagauaauggucgugaagguaaagaugaagauaaaagagauggaaauaacgaagacaacgagaaauuaaggaaaccaaaacauaaaaaauuaaagcaaccagcggaugguaauccugauccaaaugcaaacccaaauguagaucccaaugccaacccaaauguagauccaaaugcaaacccaaauguagauccaaaugcaaacccaaaugcaaacccaaaugcaaacccaaaugcaaacccaaaugcaaacccaaaugcaaacccaaaugcaaacccaaaugcaaacccaaaugcaaacccaaaugcaaacccaaaugcaaaccccaaugcaaauccuaaugcaaacccaaaugcaaacccaaacguagauccuaaugcaaauccaaaugcaaacccaaacgcaaaccccaaugcaaauccuaaugcaaaccccaaugcaaauccuaaugcaaauccuaaugccaauccaaaugcaaauccaaaugcaaacccaaacgcaaaccccaaugcaaauccuaaugccaauccaaaugcaaauccaaaugcaaacccaaaugcaaacccaaaugcaaacccaaaugcaaaccccaaugcaaauccuaauaaaaacaaucaagguaauggacaaggucacaauaugccaaaugacccaaaccgaaauguagaugaaaaugcuaaugccaacaaugcuguaaaaaauaauaauaacgaagaaccaagugaucagcacauagaaaaauauuuaaagacaauaaaaaauucucuuucaacugaaugguccccauguaguguaacuuguggaaaugguauucaaguuagaauaaagccuggcucugcuaauaaaccuaaagaccaauuagauuaugcaaaugauauugaaaaaaaaauuuguaaaauggaaaaauguuccaguguguuuaaugucguaaauaguucaauaggauuaauaaugguauuauccuucuuguuccuuaauuag

SEQ ID NO: 3017 - RNA, 1227 nt, Artificial Sequence
  derived and/or modified CDS sequence (wt) from Pf(Tz03-032)__BAM84799.1__CSP
augaugagaaaauuagcuauuuuaucuguuucuuccuuuuuauuuguugaggccuuauuccaggaauaccagugcuauggaaguucgucaaacacaaggguucuaaaugaauuaaauuaugauaaugcaggcacuaauuuauauaaugaauuagaaaugaauuauuaugggaaacaggaaaauugguauagucuuaaaaaaaauaguagaucacuuggagaaaaugaugauggaaauaauaauaauggagauaauggucgugaagguaaagaugaagauaaaagagauggaaauaacgaagacaacgagaaauuaaggaaaccaaaacauaaaaaauuaaagcaaccagcggaugguaauccugauccaaaugcaaacccaaauguagaucccaaugccaacccaaauguagauccaaaugcaaacccaaauguagauccaaaugcaaacccaaaugcaaacccaaaugcaaacccaaaugcaaacccaaaugcaaacccaaaugcaaacccaaaugcaaacccaaaugcaaauccuaaugcaaacccaaaugcaaacccaaacguagauccuaaugcaaacccaaaugcaaacccaaacgcaaaccccaaugcaaaccccaaugcaaauccaaaugcaaacccaaaugcaaacccaaacgcaaaccccaaugcaaauccuaaugcaaaccccaaugcaaauccuaaugcaaauccuaaugccaauccaaaugcaaauccaaaugcaaacccaaacgcaaaccccaaugcaaauccuaaugccaauccaaaugcaaauccaaaugcaaacccaaaugcaaacccaaaugcaaaccccaaugcaaauccuaauaaaaacaaucaagguaauggacaaggucacaauaugccaaaugacccaaaccgaaauguagaugaaaaugcuaaugccaacaaugcuguaaaaaauaauaauaacgaagaaccaagugaucagcacauagaaaaauauuuaaagaaaauacaaaauucucuuucaacugaaugguccccauguaguguaacuuguggaaaugguauucaaguuagaauaaagccuggcucugcuaauaaaccuaaagaccaauuagauuaugcaaaugauauugaaaaaaaaauuuguaaaauggaaaaauguuccaguguguuuaaugucguaaauaguucaauaggauuaauaaugguauuauccuucuuguuccuuaauuag

SEQ ID NO: 3018 - RNA, 1227 nt, Artificial Sequence
  derived and/or modified CDS sequence (wt) from Pf(Tz03-033)__BAM84800.1__CSP
augaugagaaaauuagcuauuuuaucuguuucuuccuuuuuauuuguugaggccuuauuccaggaauaccagugcuauggaaguucgucaaacacaaggguucuaaaugaauuaaauuaugauaaugcaggcacuaauuuauauaaugaauuagaaaugaauuauuaugggaaacaggaaaauugguauagucuuaaaaaaaauaguagaucacuuggagaaaaugaugauggaaauaauaauaauggagauaauggucgugaagguaaagaugaagauaaaagagauggaaauaacgaagacaacgagaaauuaaggaaaccaaaacauaaaaaauuaaagcaaccagcggaugguaauccugauccaaaugcaaacccaaauguagaucccaaugccaacccaaauguagauccaaaugcaaacccaaauguagauccaaaugcaaacccaaaugcaaacccaaaugcaaacccaaaugcaaacccaaaugcaaacccaaaugcaaacccaaaugcaaacccaaaugcaaacccaaaugcaaacccaaaugcaaacccaaaugcaaaccccaaugcaaauccuaaugcaaacccaaaugcaaacccaaacguagauccuaaugcaaauccaaaugcaaacccaaacgcaaaccccaaugcaaauccuaaugcaaaccccaaugcaaauccuaaugcaaauccuaaugccaauccaaaugcaaauccaaaugcaaacccaaacgcaaaccccaaugcaaauccuaaugccaauccaaaugcaaauccaaaugcaaacccaaaugcaaacccaaaugcaaacccaaaugcaaaccccaaugcaaauccuaauaaaaacaaucaagguaauggacaaggucacaauaugccaaaugacccaaaccgaaauguagaugaaaaugcuaaugccaacaaugcuguaaaaaauaauaauaacgaagaaccaagugaucagcacauagaaaaauauuuaaagacaauaaaaaauucucuuucaacugaaugguccccauguaguguaacuuguggaaaugguauucaaguuagaauaaagccuggcucugcuaauaaaccuaaagacgaauuagauuaugcaaaugauauugaaaaaaaaauuuguaaaauggaaaaauguuccaguguguuuaaugucguaaauaguucaauaggauuaauaaugguauuauccuucuuguuccuuaauuag

SEQ ID NO: 3019 - RNA, 1227 nt, Artificial Sequence
  derived and/or modified CDS sequence (wt) from Pf(Tz93-056)__BAM84765.1__CSP
augaugagaaaauuagcuauuuuaucuguuucuuccuuuuuauuuguugaggccuuauuccaggaauaccagugcuauggaaguucgucaaacacaaggguucuaaaugaauuaaauuaugauaaugcaggcacuaauuuauauaaugaauuagaaaugaauuauuaugggaaacaggaaaauugguauagucuuaaaaaaaauaguagaucacuuggagaaaaugaugauggaaauaauaauaauggagauaauggucgugaagguaaagaugaagauaaaagagauggaaauaacgaagacaacgagaaauuaaggaaaccaaaacauaaaaaauuaaagcaaccagcggaugguaauccugauccaaaugcaaacccaaauguagaucccaaugccaacccaaauguagauccaaaugcaaacccaaauguagauccaaaugcaaacccaaaugcaaacccaaaugcaaacccaaaugcaaacccaaaugcaaacccaaaugcaaacccaaaugcaaacccaaaugcaaauccuaaugcaaacccaaaugcaaacccaaaugcaaaccccaaugcaaauccuaaugcaaacccaaaugcaaacccaaacguagauccuaaugcaaauccaaaugcaaacccaaaugcaaacccaaacgcaaaccccaaugcaaauccuaaugcaaaccccaaugcaaauccuaaugcaaauccuaaugccaauccaaaugcaaauccaaaugcaaacccaaacgcaaaccccaaugcaaauccuaaugccaauccaaaugcaaauccaaaugcaaacccaaaugcaaacccaaaugcaaaccccaaugcaaauccuaauaaaaacaaucaagguaauggacaaggucacaauaugccaaaugacccaaaccgaaauguagaugaaaaugcuaaugccaacaaugcuguaaaaaauaauaauaacgaagaaccaagugauaagcacauaaaagaauauuuaacgaaaauaaaaaauucuauuucaacugaaugguccccauguaguguaacuuguggaaaugguauucaaguuagaauaaagccuggcucugcuaauaaaccuaaagacgaauuagauuaugaaaaugauauugaaaaaaaaauuuguaaaauggaaaaauguuccaguguguuuaaugucguaaauaguucaauaggauuaauaaugguauuauccuucuuguuccuuaauuag

SEQ ID NO: 3020 - RNA, 1227 nt, Artificial Sequence
  derived and/or modified CDS sequence (wt) from Pf(Tz93-085)__BAM84771.1__CSP
augaugagaaaauuagcuauuuuaucuguuucuuccuuuuuauuuguugaggccuuauuccaggaauaccagugcuauggaaguucgucaaacacaaggguucuaaaugaauuaaauuaugauaaugcaggcacuaauuuauauaaugaauuagaaaugaauuauuaugggaaacaggaaaauugguauagucuuaaaaaaaauaguagaucacuuggagaaaaugaugauggaaauaauaauaauggagauaauggucgugaagguaaagaugaagauaaaagagauggaaauaacgaagacaacgagaaauuaaggaaaccaaaacauaaaaaauuaaagcaaccagcggaugguaauccugauccaaaugcaaacccaaauguagaucccaaugccaacccaaauguagauccaaaugcaaacccaaauguagauccaaaugcaaacccaaaugcaaacccaaaugcaaacccaaaugcaaacccaaaugcaaacccaaaugcaaacccaaaugcaaacccaaaugcaaacccaaaugcaaacccaaaugcaaaccccaaugcaaauccuaaugcaaauccuaaugcaaacccaaaugcaaacccaaacguagauccuaaugcaaauccaaaugcaaacccaaaugcaaacccaaacgcaaaccccaaugcaaauccuaaugcaaaccccaaugcaaauccuaaugcaaauccuaaugccaauccaaaugcaaauccaaaugcaaacccaaacgcaaaccccaaugcaaauccuaaugccaauccaaaugcaaauccaaaugcaaacccaaaugcaaacccaaaugcaaaccccaaugcaaauccuaauaaaaacaaucaagguaauggacaaggucacaauaugccaaaugacccaaaccgaaauguagaugaaaaugcuaaagccaacaaugcuguaaaaaauaauaauaacgaagaaccaagugauaagcacauaaaagaauauuuaaacaaaauacaaaauucuauuucaacugaaugguccccauguaguguaacuuguggaaaugguauucaaguuagaauaaagccuggcucugcugauaaaccuaaagaccaauuagauuauauaaaugauauugaaaaaaaaauuuguaaaauggaaaaauguuccaguguguuuaaugucguaaauaguucaauaggauuaauaaugguauuauccuucuuguuccuuaauuag

SEQ ID NO: 3021 - RNA, 1227 nt, Artificial Sequence
  derived and/or modified CDS sequence (wt) from Pf(Tz93-102)__BAM84773.1__CSP
augaugagaaaauuagcuauuuuaucuguuucuuccuuuuuauuuguugaggccuuauuccaggaauaccagugcuauggaaguucgucaaacacaaggguucuaaaugaauuaaauuaugauaaugcaggcacuaauuuauauaaugaauuagaaaugaauuauuaugggaaacaggaaaauugguauagucuuaaaaaaaauaguagaucacuuggagaaaaugaugauggaaauaauaauaauggagauaauggucgugaagguaaagaugaagauaaaagagauggaaauaacgaagacaacgagaaauuaaggaaaccaaaacauaaaaaauuaaagcaaccaggggaugguaauccugauccaaaugcaaacccaaauguagaucccaaugccaacccaaauguagauccaaaugcaaacccaaauguagauccaaaugcaaacccaaaugcaaacccaaaugcaaacccaaaugcaaacccaaaugcaaacccaaaugcaaacccaaaugcaaacccaaaugcaaacccaaaugcaaaccccaaugcaaauccuaaugcaaacccaaaugcaaauccuaaugcaaacccaaaugcaaacccaaacguagauccuaaugcaaauccaaaugcaaacccaaaugcaaacccaaacgcaaaccccaaugcaaauccuaaugcaaaccccaaugcaaauccuaaugcaaauccuaaugccaauccaaaugcaaauccaaaugcaaacccaaacgcaaaccccaaugcaaauccuaaugccaauccaaaugcaaauccaaaugcaaacccaaaugcaaacccaaaugcaaaccccaaugcaaauccuaauaaaaacaaucaagguaauggacaaggucacaauaugccaaaugacccaaaccgaaauguagaugaaaaugcuaaugccaacaaugcuguaaaaaauaauaauaacgaagaaccaagugauaagcacauagaacaauauuuaaagacaauaaaaaauucucuuucaacugaaugguccccauguaguguaacuuguggaaaugguauucaaguuagaauaaagccuggcucugcuaauaaaccuaaagacgaauuaaauuaugaaaaugauauugaaaaaaaaauuuguaaaauggaaaaauguuccaguguguuuaaugucguaaauaguucaauaggauuaauaaugguauuauccuucuuguuccuuaauuag

SEQ ID NO: 3022 - RNA, 1227 nt, Artificial Sequence
  derived and/or modified CDS sequence (wt) from Pf(Tz98-021)__BAM84783.1__CSP
augaugagaaaauuagcuauuuuaucuguuucuuccuuuuuauuuguugaggccuuauuccaggaauaccagugcuauggaaguucgucaaacacaaggguucuaaaugaauuaaauuaugauaaugcaggcacuaauuuauauaaugaauuagaaaugaauuauuaugggaaacaggaaaauugguauagucuuaaaaaaaauaguagaucacuuggagaaaaugaugauggaaauaauaauaauggagauaauggucgugaagguaaagaugaagauaaaagagauggaaauaacgaagacaacgagaaauuaaggaaaccaaaacauaaaaaauuaaagcaaccagcggaugguaauccugauccaaaugcaaacccaaauguagaucccaaugccaacccaaauguagauccaaaugcaaacccaaauguagauccaaaugcaaacccaaaugcaaacccaaaugcaaacccaaaugcaaacccaaaugcaaacccaaaugcaaacccaaaugcaaacccaaaugcaaacccaaaugcaaauccuaaugcaaacccaaaugcaaacccaaacguagauccuaaugcaaacccaaaugcaaacccaaacgcaaaccccaaugcaaaccccaaugcaaauccuaaugcaaauccuaaugccaauccaaaugcaaauccaaaugcaaacccaaacgcaaaccccaaugcaaauccuaaugccaauccaaaugcaaauccaaaugcaaacccaaacgcaaaccccaaugcaaauccuaaugccaauccaaaugcaaauccaaaugcaaacccaaaugcaaacccaaaugcaaaccccaaugcaaauccuaauaaaaacaaucaagguaauggacaaggucacaauaugccaaaugacccaaaccgaaauguagaugaaaaugcuaaugccaacaaugcuguaaaaaauaauaauaacgaagaaccaagugaucagcacauagaaaaauauuuaaagacaauacaaaauucucuuucaacugaaugguccccauguaguguaacuuguggaaaugguauucaaguuagaauaaagccuggcucugcuaauaaaccuaaagaccaauuagauuaugcaaaugauauugaaaaaaaaauuuguaaaauggaaaaauguuccaguguguuuaaugucguaaauaguucaauaggauuaauaaugguauuauccuucuuguuccuuaauuag

SEQ ID NO: 3023 - RNA, 1227 nt, Artificial Sequence
  derived and/or modified CDS sequence (wt) from Pf(Tz98-030)__BAM84785.1__CSP
augaugagaaaauuagcuauuuuaucuguuucuuccuuuuuauuuguugaggccuuauuccaggaauaccagugcuauggaaguucgucaaacacaaggguucuaaaugaauuaaauuaugauaaugcaggcacuaauuuauauaaugaauuagaaaugaauuauuaugggaaacaggaaaauugguauagucuuaaaaaaaauaguagaucacuuggagaaaaugaugauggaaauaauaauaauggagauaauggucgugaagguaaagaugaagauaaaagagauggaaauaacgaagacaacgagaaauuaaggaaaccaaaacauaaaaaauuaaagcaaccaggggaugguaauccugauccaaaugcaaacccaaauguagaucccaaugccaacccaaauguagauccaaaugcaaacccaaauguagauccaaaugcaaacccaaaugcaaacccaaaugcaaacccaaaugcaaacccaaaugcaaacccaaaugcaaacccaaaugcaaacccaaaugcaaacccaaaugcaaacccaaaugcaaaccccaaugcaaacccaaacguagauccuaaugcaaauccaaaugcaaacccaaaugcaaacccaaacgcaaaccccaaugcaaauccuaaugcaaauccuaaugccaauccaaaugcaaauccaaaugcaaacccaaacgcaaaccccaaugcaaauccuaaugccaauccaaaugcaaauccaaaugcaaacccaaacgcaaaccccaaugcaaauccuaaugccaauccaaaugcaaauccaaaugcaaacccaaaugcaaacccaaaugcaaaccccaaugcaaauccuaauaaaaacaaucaagguaauggacaaggucacaauaugccaaaugacccaaaccgaaauguagaugaaaaugcuaaugccaacaaugcuguaaaaaauaauaauaacgaagaaccaagugaucagcacauagaaaaauauuuacagaaaauacaaaauucucuuucaacugaaugguccccauguaguguaacuuguggaaaugguauucaaguuagaauaaagccuggcucugcuaauaaaccuaaagaccaauuaaauuaugaaaaugauauugaaaaaaaaauuuguaaaauggaaaaauguuccaguguguuuaaugucguaaauaguucaauaggauuaauaaugguauuauccuucuuguuccuuaauuag

SEQ ID NO: 3024 - RNA, 1227 nt, Artificial Sequence
  derived and/or modified CDS sequence (wt) from Pf(Tz98-070)__BAM84790.1__CSP
augaugagaaaauuagcuauuuuaucuguuucuuccuuuuuauuuguugaggccuuauuccaggaauaccagugcuauggaaguucgucaaacacaaggguucuaaaugaauuaaauuaugauaaugcaggcacuaauuuauauaaugaauuagaaaugaauuauuaugggaaacaggaaaauugguauagucuuaaaaaaaauaguagaucacuuggagaaaaugaugauggaaauaauaauaauggagauaauggucgugaagguaaagaugaagauaaaagagauggaaauaacgaagacaacgagaaauuaaggaaaccaaaacauaaaaaauuaaagcaaccaggggaugguaauccugauccaaaugcaaacccaaauguagaucccaaugccaacccaaauguagauccaaaugcaaacccaaauguagauccaaaugcaaacccaaaugcaaacccaaaugcaaacccaaaugcaaacccaaaugcaaacccaaaugcaaacccaaaugcaaacccaaaugcaaaccccaaugcaaauccuaaugcaaauccuaaugcaaacccaaaugcaaauccuaaugcaaacccaaaugcaaacccaaacguagauccuaaugcaaauccaaaugcaaacccaaaugcaaacccaaacgcaaaccccaaugcaaauccuaaugcaaaccccaaugcaaauccuaaugcaaauccuaaugccaauccaaaugcaaauccaaaugcaaacccaaacgcaaaccccaaugcaaauccuaaugccaauccaaaugcaaauccaaaugcaaacccaaaugcaaacccaaaugcaaaccccaaugcaaauccuaauaaaaacaaucaagguaauggacaaggucacaauaugccaaaugacccaaaccgaaauguagaugaaaaugcuaaugccaacgaugcuguaaaaaauaauaauaacgaagaaccaagugaucagcacauagaaaaauauuuaaagauaauaaaaaauucucuuucaacugaaugguccccauguaguguaacuuguggaaaugguauucaaguuagaauaaagccuggcucugcuaauaaaccuaaagaccaauuagauuaugcaaaugauauugaaaaaaaaauuuguaaaauggaaaaauguuccaguguguuuaaugucguaaauaguucaauaggauuaauaaugguauuauccuucuuguuccuuaauuag

SEQ ID NO: 3025 - RNA, 1224 nt, Artificial Sequence
  derived and/or modified CDS sequence (wt) from Pf(A150)__ACO49332.1__CSP
augagaaaauuagcuauuuuaucuguuucuuccuuuuuauuuguugaggccuuauuccaggaauaccagugcuauggaaguucgucaaacacaaggguucuaaaugaauuaaauuaugauaaugcaggcacuaauuuauauaaugaauuagaaaugaauuauuaugggaaacaggaaaauugguauagucuuaaaaaaaauaguagaucacuuggagaaaaugaugauggaaauaauaauaauggagauaauggucgugaagguaaagaugaagauaaaagagauggaaauaacgaagacaacgagaaauuaaggaaaccaaaacauaaaaaauuaaagcaaccaggggaugguaauccugauccaaaugcaaacccaaauguagaucccaaugccaacccaaauguagauccaaaugcaaacccaaauguagauccaaaugcaaacccaaaugcaaacccaaaugcaaacccaaaugcaaacccaaaugcaaacccuaaugcaaacccaaaugcaaacccaaaugcaaacccaaaugcaaacccaaaugcaaacccaaaugcaaacccaaaugcaaaccccaaugcaaacccaaaugcaaaccccaaugcaaauccuaaugcaaacccaaaugcaaacccaaaugcaaacccaaacgcaaaccccaaugcaaauccuaaugcaaaccccaaugcaaauccuaaugcaaauccuaaugccaauccaaaugcaaauccaaaugcaaacccaaacgcaaaccccaaugcaaauccuaaugccaauccaaaugcaaauccaaaugcaaacccaaaugcaaacccaaaugcaaaccccaaugcaaauccuaauaaaaacaaucaagguaauggacaaggucacaauaugccaaaugacccaaaccgaaauguagaugaaaaugcuaaugccaacaaugcuguaaaaaauaauaauaacgaagaaccaagugauaagcacauagaacaauauuuaaagaaaauacaaaauucucuuucaacugaaugguccccauguaguguaacuuguggaaaugguauucaaguuagaauaaagccuggcucugcuaauaaaccuaaagacgaauuagauuaugaaaaugauauugaaaaaaaaauuuguaaaauggaaaaauguuccaguguguuuaaugucguaaauaguucaauaggauuaauaaugguauuauccuucuuguuccuuaauuag

SEQ ID NO: 3026 - RNA, 1215 nt, Artificial Sequence
  derived and/or modified CDS sequence (wt) from Pf(Gha1109-183)__BAM84829.1__CSP
augaugagaaaauuagcuauuuuaucuguuucuuccuuuuuauuuguugaggccuuauuccaggaauaccagugcuauggaaguucgucaaacacaaggguucuaaaugaauuaaauuaugauaaugcaggcacuaauuuauauaaugaauuagaaaugaauuauuaugggaaacaggaaaauugguauagucuuaaaaaaaauaguagaucacuuggagaaaaugaugauggaaauaauaauaauggagauaauggucgugaagguaaagaugaagauaaaagagauggaaauaacgaagacaacgagaaauuaaggaaaccaaaacauaaaaaauuaaagcaaccagcggaugguaauccugauccaaaugcaaacccaaauguagaucccaaugccaacccaaauguagauccaaaugcaaacccaaauguagauccaaaugcaaacccaaaugcaaacccaaaugcaaacccaaaugcaaacccaaaugcaaacccaaaugcaaacccaaaugcaaacccaaaugcaaacccaaaugcaaacccaaaugcaaaccccaaugcaaauccuaaugcaaacccaaaugcaaacccaaacguagauccuaaugcaaauccaaaugcaaacccaaacgcaaaccccaaugcaaauccuaaugcaaaccccaaugcaaauccuaaugcaaauccuaaugccaauccaaaugcaaauccaaaugcaaacccaaacgcaaaccccaaugcaaauccuaaugccaauccaaaugcaaauccaaaugcaaacccaaaugcaaacccaaaugcaaacccaaaugcaaaccccaaugcaaauccuaauaaaaacaaucaagguaauggacaaggucacaauaugccaaaugacccaaaccgaaauguagaugaaaaugcuaaugccaacaaugcuguaaaaaauaauaauaacgaagaaccaagugaucagcacauagaaaaauauuuaaagacaauaaaaaauucucuuucaacugaaugguccccauguaguguaacuuguggaaaugguauucaaguuagaauaaagccuggcucugcuaauaaaccuaaagaccaauuagauuaugcaaaugauauugaaaaaaaaauuuguaaaauggaaaaauguuccaguguguuuaaugucguaaauaguucaauaggauuaauaaugguauuauccuucuuguuccuuaauuag

SEQ ID NO: 3027 - RNA, 1215 nt, Artificial Sequence
  derived and/or modified CDS sequence (wt) from Pf(Pal97-107)__BAM84956.1__CSP
augaugagaaaauuagcuauuuuaucuguuucuuccuuuuuauuuguugaggccuuauuccaggaauaccagugcuauggaaguucgucaaacacaaggguucuaaaugaauuaaauuaugauaaugcaggcacuaauuuauauaaugaauuagaaaugaauuauuaugggaaacaggaaaauugguauagucuuaaaaaaaauaguagaucacuuggagaaaaugaugauggaaauaauaauaauggagauaauggucgugaagguaaagaugaagauaaaagagauggaaauaacgaagacaacgagaaauuaaggaaaccaaaacauaaaaaauuaaagcaaccaggggaugguaauccugauccaaaugcaaacccaaauguagaucccaaugccaacccaaauguagauccaaaugcaaacccaaauguagauccaaaugcaaacccaaaugcaaacccaaaugcaaacccaaaugcaaacccaaaugcaaacccaaaugcaaacccaaaugcaaaccccaaugcaaauccuaaugcaaauccuaaugcaaacccaaaugcaaauccuaaugcaaacccaaaugcaaacccaaacguagauccuaaugcaaauccaaaugcaaacccaaaugcaaacccaaacgcaaaccccaaugcaaauccuaaugcaaaccccaaugcaaauccuaaugcaaauccuaaugccaauccaaaugcaaauccaaaugcaaacccaaacgcaaaccccaaugcaaauccuaaugccaauccaaaugcaaauccaaaugcaaacccaaaugcaaacccaaaugcaaaccccaaugcaaauccuaauaaaaacaaucaagguaauggacaaggucacaauaugccaaaugacccaaaccgaaauguagaugaaaaugcuaaugccaacaaugcuguaaaaaauaauaauaacgaagaaccaagugauaagcacauaaaagaauauuuaacgaaaauaaaaaauucuauuucaacugaaugguccccauguaguguaacuuguggaaaugguauucaaguuagaauaaagccuggcucugcuaauaaaccuaaagacgaauuagauuaugaaaaugauauugaaaaaaaaauuuguaaaauggaaaaauguuccaguguguuuaaugucguaaauaguucaauaggauuaauaaugguauuauccuucuuguuccuuaauuag

SEQ ID NO: 3028 - RNA, 1215 nt, Artificial Sequence
  derived and/or modified CDS sequence (wt) from Pf(Tz98-103)__BAM84795.1__CSP
augaugagaaaauuagcuauuuuaucuguuucuuccuuuuuauuuguugaggccuuauuccaggaauaccagugcuauggaaguucgucaaacacaaggguucuaaaugaauuaaauuaugauaaugcaggcacuaauuuauauaaugaauuagaaaugaauuauuaugggaaacaggaaaauugguauagucuuaaaaaaaauaguagaucacuuggagaaaaugaugauggaaauaauaauaauggagauaauggucgugaagguaaagaugaagauaaaagagauggaaauaacgaagacaacgagaaauuaaggaaaccaaaacauaaaaaauuaaagcaaccagcggaugguaauccugauccaaaugcaaacccaaauguagaucccaaugccaacccaaauguagauccaaaugcaaacccaaauguagauccaaaugcaaacccaaaugcaaacccaaaugcaaacccaaaugcaaacccaaaugcaaacccaaaugcaaacccaaaugcaaacccaaaugcaaacccaaaugcaaacccaaaugcaaacccaaaugcaaaccccaaugcaaauccuaaugcaaacccaaaugcaaacccaaacguagauccuaaugcaaauccaaaugcaaacccaaaugcaaacccaaacgcaaaccccaaugcaaauccuaaugcaaaccccaaugcaaauccuaaugcaaauccuaaugccaauccaaaugcaaauccaaaugcaaacccaaacgcaaaccccaaugcaaauccuaaugccaauccaaaugcaaauccaaaugcaaacccaaaugcaaaccccaaugcaaauccuaauaaaaacaaucaagguaauggacaaggucacaauaugccaaaugacccaaaccgaaauguagaugaaaaugcuaaugccaacaaugcuguaaaaaauaauaauaacgaagaaccaagugauaagcacauaacagaauauuuaaagagaauacaaaauucucuuucaacugaaugguccccauguaguguaacuuguggaaaugguauucaaguuagaauaaagccuggcucugcugguaaaucuaaaaacgaauuagauuaugaaaaugauauugaaaaaaaaauuuguaaaauggaaaaauguuccaguguguuuaaugucguaaauaguucaauaggauuaauaaugguauuauccuucuuguuccuuaauuag

SEQ ID NO: 3029 - RNA, 1215 nt, Artificial Sequence
  derived and/or modified CDS sequence (wt) from Pf(Yaounde)__AAN87588.1__CSP
augaugagaaaauuagcuauuuuaucuguuucuuccuuuuuauuuguugaggccuuauuccaggaauaccagugcuauggaaguucgucaaacacaaggguucuaaaugaauuaaauuaugauaaugcaggcacuaauuuauauaaugaauuagaaaugaauuauuaugggaaacaggaaaauugguauagucuuaaaaaaaauaguagaucacuuggagaaaaugaugauggaaauaauaauaauggagauaauggucgugaagguaaagaugaagauaaaagagauggaaauaacgaagacaacgagaaauuaaggaaaccaaaacauaaaaaauuaaagcaaccagcggaugguaauccugauccaaaugcaaacccaaauguagaucccaaugccaacccaaauguagauccaaaugcaaacccaaauguagauccaaaugcaaacccaaaugcaaacccaaaugcaaacccaaaugcaaacccaaaugcaaacccaaaugcaaacccaaaugcaaacccaaaugcaaacccaaaugcaaacccaaacguagauccuaaugcaaacccaaaugcaaacccaaacgcaaaccccaaugcaaaccccaaugcaaauccaaaugcaaacccaaaugcaaacccaaacgcaaaccccaaugcaaauccuaaugcaaaccccaaugcaaauccuaaugcaaauccuaaugccaauccaaaugcaaauccaaaugcaaacccaaacgcaaaccccaaugcaaauccuaaugccaauccaaaugcaaauccaaaugcaaacccaaaugcaaacccaaaugcaaaccccaaugcaaauccuaauaaaaacaaucaagguaauggacaaggucacaauaugccaaaugacccaaaccgaaauguagaugaaaaugcuaaugccaacaaugcuguaaaaaauaauaauaacgaagaaccaagugaucagcacauagaaaaauauuuaaacaaaauaaaaaauucucuuucaacugaaugguccccauguaguguaacuuguggaaaugguauucaaguuagaauaaagccuggcucugcuaauaaaccuaaagaccaauuagauuaugcaaaugauauugaaaaaaaaauuuguaaaauggaaaaauguuccaguguguuuaaugucguaaauaguucaauaggauuaauaaugguauuauccuucuuguuccuuaauuag

SEQ ID NO: 3030 - RNA, 1209 nt, Artificial Sequence
  derived and/or modified CDS sequence (wt) from Pf(CMC247)__ADF48384.1__CSP
augagaaaauuagcuauuuuaucuguuucuuccuuuuuauuuguugaggccuuauuccaggaauaccagugcuauggaaguucgucaaacacaaggguucuaaaugaauuaaauuaugauaaugcaggcacuaauuuauauaaugaauuagaaaugaauuauuaugggaaacaggaaaauugguauagucuuaaaaaaaauaguagaucacuuggagaaaaugaugauggaaauaauaauaauggagauaauggucgugaagguaaagaugaagauaaaagagauggaaauaacgaagacaacgagaaauuaaggaaaccaaaacauaaaaaauuaaagcaaccaggggaugguaauccugauccaaaugcaaacccaaauguagaucccaaugccaacccaaauguagauccaaaugcaaacccaaauguagauccaaaugcaaacccaaaugcaaacccaaaugcaaacccaaaugcaaacccaaaugcaaacccaaaugcaaacccaaaugcaaacccaaaugcaaacccaaaugcaaacccaaaugcaaacccaaaugcaaacccaaaugcaaaccccaaugcaaauccuaaugcaaauccuaaugccaauccaaaugcaaauccaaaugcaaacccaaacgcaaaccccaaugcaaauccuaaugccaauccaaaugcaaauccaaaugcaaacccaaacgcaaaccccaaugcaaauccuaaugccaauccaaaugcaaauccaaaugcaaaccccaaugcaaauccuaaugccaauccaaaugcaaauccaaaugcaaacccaaaugcaaacccaaaugcaaauccuaauaaaaacaaucaagguaauggacaaggucacaauaugccaaaugacccaaaccgaaauguagaugaaaaugcuaaugccaacaaugaugaaaauaauaauaacgaagaaccaagugauaagcacauagaacaauauuuaaagaaaauacaauauucucuuucaacugaaugguccccauguaguguaacuuguggaaaugguauucaaguuagaauaaagccuggcucugcugauaaaccuaaagaccaauuagauuaugaaaaugauauugaaaaaaaaauuuguaaaauggaaaaauguuccaguguguuuaaugucguaaauaguucaauaggauuaauaaugguauuauccuucuuguuccuuaauuag

SEQ ID NO: 3031 - RNA, 1206 nt, Artificial Sequence
  derived and/or modified CDS sequence (wt) from Pf(Gha1109-215)__BAM84833.1__CSP
augaugagaaaauuagcuauuuuaucuguuucuuccuuuuuauuuguugaggccuuauuccaggaauaccagugcuauggaaguucgucaaacacaaggguucuaaaugaauuaaauuaugauaaugcaggcacuaauuuauauaaugaauuagaaaugaauuauuaugggaaacaggaaaauugguauagucuuaaaaaaaauaguagaucacuuggagaaaaugaugauggaaauaacgaagacaacgagaaauuaaggaaaccaaaacauaaaaaauuaaagcaaccagcggaugguaauccugauccaaaugcaaacccaaauguagaucccaaugccaacccaaauguagauccaaaugcaaacccaaauguagauccaaaugcaaacccaaaugcaaacccaaaugcaaacccaaaugcaaacccaaaugcaaacccaaaugcaaacccaaaugcaaacccaaaugcaaacccaaaugcaaacccaaaugcaaacccaaaugcaaacccaaaugcaaacccaaaugcaaacccaaaugcaaaccccaaugcaaauccuaaugcaaacccaaaugcaaacccaaacguagauccuaaugcaaauccaaaugcaaacccaaaugcaaacccaaacgcaaaccccaaugcaaauccuaaugcaaaccccaaugcaaauccuaaugcaaauccuaaugccaauccaaaugcaaauccaaaugcaaacccaaacgcaaaccccaaugcaaauccuaaugccaauccaaaugcaaauccaaaugcaaacccaaaugcaaacccaaaugcaaaccccaaugcaaauccuaauaaaaacaaucaagguaauggacaaggucacaauaugccaaaugacccaaaccgaaauguagaugaaaaugcuaaagccaacaaugcuguaaaaaauaauaauaacgaagaaccaagugauaagcacauagaacaauauuuaaagacaauacaaaauucucuuucaacugaaugguccccauguaguguaacuuguggaaaugguauucaaguuagaauaaagccuggcucugcuaauaaaccuaaagaccaauuagauuaugaaaaugauauugaaaaaaaaauuuguaaaauggaaaaauguuccaguguguuuaaugucguaaauaguucaauaggauuaauaaugguauuauccuucuuguuccuuaauuag

SEQ ID NO: 3032 - RNA, 1203 nt, Artificial Sequence
  derived and/or modified CDS sequence (wt) from Pf(Gha1109-199)__BAM84831.1__CSP
augaugagaaaauuagcuauuuuaucuguuucuuccuuuuuauuuguugaggccuuauuccaggaauaccagugcuauggaaguucgucaaacacaaggguucuaaaugaauuaaauuaugauaaugcaggcacuaauuuauauaaugaauuagaaaugaauuauuaugggaaacaggaaaauugguauagucuuaaaaaaaauaguagaucacuuggagaaaaugaugauggaaauaauaauaauggagauaauggucgugaagguaaagaugaagauaaaagagauggaaauaacgaagacaacgagaaauuaaggaaaccaaaacauaaaaaauuaaagcaaccagcggaugguaauccugauccaaaugcaaacccaaauguagaucccaaugccaacccaaauguagauccaaaugcaaacccaaauguagauccaaaugcaaacccaaaugcaaacccaaaugcaaacccaaaugcaaacccaaaugcaaacccaaaugcaaacccaaaugcaaacccaaaugcaaaccccaaugcaaauccuaaugcaaauccuaaugcaaacccaaaugcaaacccaaacguagauccuaaugcaaauccaaaugcaaacccaaaugcaaacccaaacgcaaaccccaaugcaaauccuaaugcaaaccccaaugcaaauccuaaugcaaauccuaaugccaauccaaaugcaaauccaaaugcaaacccaaacgcaaaccccaaugcaaauccuaaugccaauccaaaugcaaauccaaaugcaaacccaaaugcaaacccaaaugcaaaccccaaugcaaauccuaauaaaaacaaucaagguaauggacaaggucacaauaugccaaaugacccaaaccgaaauguagaugaaaaugcuaaugccaacagugcuguaaaaaauaauaauaacgaagaaccaagugauaagcacauaaaagaauauuuaaacaaaauacaaaauucucuuucaacugaaugguccccauguaguguaacuuguggaaaugguauucaaguuagaauaaagccuggcucugcuaauaaaccuaaagacgaauuagauuaugcaaaugauauugaaaaaaaaauuuguaaaauggaaaaauguuccaguguguuuaaugucguaaauaguucaauaggauuaauaaugguauuauccuucuuguuccuuaauuag

SEQ ID NO: 3033 - RNA, 1194 nt, Artificial Sequence
  derived and/or modified CDS sequence (wt) from Pf(Asembo Bay)__AAN87582.1__CSP
augaugagaaaauuagcuauuuuaucuguuucuuccuuuuuauuuguugaggccuuauuccaggaauaccagugcuauggaaguucgucaaacacaaggguucuaaaugaauuaaauuaugauaaugcaggcacuaauuuauauaaugaauuagaaaugaauuauuaugggaaacaggaaaauugguauagucuuaaaaaaaauaguagaucacuuggagaaaaugaugauggaaauaacgaagacaacgagaaauuaaggaaaccaaaacauaaaaaauuaaagcaaccagcggaugguaauccugauccaaaugcaaacccaaauguagaucccaaugccaacccaaauguagauccaaaugcaaacccaaauguagauccaaaugcaaacccaaaugcaaauccaaaugcaaacccaaaugcaaacccaaaugcaaacccaaaugcaaacccaaaugcaaacccaaaugcaaacccaaaugcaaacccaaaugcaaacccaaaugcaaacccaaaugcaaacccaaaugcaaacccaaaugcaaaccccaaugcaaauccuaaugcaaacccaaaugcaaacccaaacguagauccuaaugcaaauccaaaugcaaacccaaacgcaaaccccaaugcaaauccuaaugcaaaccccaaugcaaauccuaaugcaaauccuaaugccaauccaaaugcaaauccaaaugcaaacccaaacgcaaaccccaaugcaaauccuaaugccaauccaaaugcaaauccaaaugcaaacccaaaugcaaacccaaaugcaaaccccaaugcaaauccuaauaaaaacaaucaagguaauggacaaggucacaauaugccaaaugacccaaaccgaaauguagaugaaaaugcuaaugccaacaaugcuguaaaaaauaauaauaacgaagaaccaagugaucagcacauagaaaaauauuuaaagacaauacaaaauucucuuucaacugaaugguccccauguaguguaacuuguggaaaugguauucaaguuagaauaaagccuggcucugcuaauaaaccuaaagaccaauuagauuaugcaaaugauauugaaaaaaaaauuuguaaaauggaaaaauguuccaguguguuuaaugucguaaauaguucaauaggauuaauaaugguauuauccuucuuguuccuuaauuag

SEQ ID NO: 3034 - RNA, 1194 nt, Artificial Sequence
  derived and/or modified CDS sequence (wt) from Pf(Tz98-017)__BAM84782.1__CSP
augaugagaaaauuagcuauuuuaucuguuucuuccuuuuuauuuguugaggccuuauuccaggaauaccagugcuauggaaguucgucaaacacaaggguucuaaaugaauuaaauuaugauaaugcaggcacuaauuuauauaaugaauuagaaaugaauuauuaugggaaacaggaaaauugguauagucuuaaaaaaaauaguagaucacuuggagaaaaugaugauggaaauaacgaagacaacgagaaauuaaggaaaccaaaacauaaaaaauuaaagcaaccagcggaugguaauccugauccaaaugcaaacccaaauguagaucccaaugccaacccaaauguagauccaaaugcaaacccaaauguagauccaaaugcaaacccaaaugcaaacccaaaugcaaacccaaaugcaaacccaaaugcaaacccaaaugcaaacccaaaugcaaacccaaaugcaaaccccaaugcaaauccuaaugcaaauccuaaugcaaacccaaaugcaaauccuaaugcaaacccaaaugcaaaccccaaugcaaauccuaaugcaaacccaaaugcaaacccaaacguagauccuaaugcaaauccaaaugcaaacccaaaugcaaacccaaacgcaaaccccaaugcaaauccuaaugcaaaccccaaugcaaauccuaaugcaaauccuaaugccaauccaaaugcaaauccaaaugcaaacccaaacgcaaaccccaaugcaaauccuaaugccaauccaaaugcaaauccaaaugcaaacccaaaugcaaaccccaaugcaaauccuaauaaaaacaaucaagguaauggacaaggucacaauaugccaaaugacccaaaccgaaauguagaugaaaaugcuaaugccaacaaugcuguaaaaaauaauaauaacgaagaaccaagugauaagcacauagaacaauauuuaaacaaaauaaaaaauucuauuucaacugaaugguccccauguaguguaacuuguggaaaugguauucaaguuagaauaaagccuggcucugcuaauaaaccuaaagacgaauuaaauuaugaaaaugauauugaaaaaaaaauuuguaaaauggaaaaauguuccaguguguuuaaugucguaaauaguucaauaggauuaauaaugguauuauccuucuuguuccuuaauuag

SEQ ID NO: 3035 - RNA, 1194 nt, Artificial Sequence
  derived and/or modified CDS sequence (wt) from Pf(Yaounde)__AAN87583.1__CSP
augaugagaaaauuagcuauuuuaucuguuucuuccuuuuuauuuguugaggccuuauuccaggaauaccagugcuauggaaguucgucaaacacaaggguucuaaaugaauuaaauuaugauaaugcaggcacuaauuuauauaaugaauuagaaaugaauuauuaugggaaacaggaaaauugguauagucuuaaaaaaaauaguagaucacuuggagaaaaugaugauggaaauaacgaagacaacgagaaauuaaggaaaccaaaacauaaaaaauuaaagcaaccagcggaugguaauccugauccaaaugcaaacccaaauguagaucccaaugccaacccaaauguagauccaaaugcaaacccaaauguagauccaaaugcaaacccaaaugcaaacccaaaugcaaacccaaaugcaaacccaaaugcaaacccaaaugcaaacccaaaugcaaacccaaaugcaaacccaaaugcaaacccaaaugcaaacccaaaugcaaacccaaaugcaaacccaaaugcaaacccaaaugcaaaccccaaugcaaauccuaaugcaaacccaaaugcaaacccaaacguagauccuaaugcaaauccaaaugcaaacccaaacgcaaaccccaaugcaaauccuaaugcaaaccccaaugcaaauccuaaugcaaauccuaaugccaauccaaaugcaaauccaaaugcaaacccaaacgcaaaccccaaugcaaauccuaaugccaauccaaaugcaaauccaaaugcaaacccaaaugcaaacccaaaugcaaaccccaaugcaaauccuaauaaaaacaaucaagguaauggacaaggucacaauaugccaaaugacccaaaccgaaauguagaugaaaaugcuaaugccaacaaugcuguaaaaaauaauaauaacgaagaaccaagugaucagcacauagaaaaauauuuaaagagaauacaaaauucucuuucaacugaaugguccccauguaguguaacuuguggaaaugguauucaaguuagaauaaagccuggcucugcuaauaaaccuaaagaccaauuagauuaugcaaaugauauugaaaaaaaaauuuguaaaauggaaaaauguuccaguguguuuaaugucguaaauaguucaauaggauuaauaaugguauuauccuucuuguuccuuaauuag

SEQ ID NO: 3036 - RNA, 1191 nt, Artificial Sequence
  derived and/or modified CDS sequence (wt) from Pf(Amazonas)__AAN87593.1__CSP
augaugagaaaauuagcuauuuuaucuguuucuuccuuuuuauuuguugaggccuuauuccaggaauaccagugcuauggaaguucgucaaacacaaggguucuaaaugaauuaaauuaugauaaugcaggcacuaauuuauauaaugaauuagaaaugaauuauuaugggaaacaggaaaauugguauagucuuaaaaaaaauaguagaucacuuggagaaaaugaugauggaaauaauaauaauggagauaauggucgugaagguaaagaugaagauaaaagagauggaaauaacgaagacaacgagaaauuaaggaaaccaaaacauaaaaaauuaaagcaaccagcggaugguaauccugauccaaaugcaaacccaaauguagauccaaaugccaacccaaauguagauccaaaugcaaacccaaauguagauccaaaugcaaacccaaaugcaaacccaaaugcaaacccaaaugcaaacccaaaugcaaacccaaaugcaaacccaaaugcaaacccaaaugcaaaucccaaugcaaaccccaaugcaaauccuaaugcaaacccaaaugcaaacccaaacguagauccuaaugcaaauccaaaugcaaacccaaaugcaaacccaaacgcaaaccccaaugcaaauccuaaugcaaaccccaaugcaaauccuaaugcaaauccuaaugccaauccaaaugcaaauccaaaugcaaacccaaacgcaaaccccaaugcaaauccuaaugccaauccaaaugcaaauccaaaugcaaacccaaaugcaaaccccaaugcaaauccuaauaaaaacaaucaagguaauggacaaggucacaauaugccaaaugacccaaaccgaaauguagaugaaaaugcuaaugccaacaaugcuguaaaaaauaauaauaacgaagaaccaagugauaagcacauaacagaauauuuaaagagaauacaaaauucucuuucaacugaaugguccccauguaguguaacuuguggaaaugguauucaaguuagaauaaagccuggcucugcugguaaaucuaaaaacgaauuagauuaugaaaaugauauugaaaaaaaaauuuguaaaauggaaaaauguuccaguguguuuaaugucguaaauaguucaauaggauuaauaaugguauuauccuucuuguuccuuaauuag

SEQ ID NO: 3037 - RNA, 1191 nt, Artificial Sequence
  derived and/or modified CDS sequence (wt) from Pf(Amazonas)__AAN87594.1__CSP
augaugagaaaauuagcuauuuuaucuguuucuuccuuuuuauuuguugaggccuuauuccaggaauaccagugcuauggaaguucgucaaacacaaggguucuaaaugaauuaaauuaugauaaugcaggcacuaauuuauauaaugaauuagaaaugaauuauuaugggaaacaggaaaauugguauagucuuaaaaaaaauaguagaucacuuggagaaaaugaugauggaaauaauaauaauggagauaauggucgugaagguaaagaugaagauaaaagagauggaaauaacgaagacaacgagaauuuaaggaaaccaaaacauaaaaaauuaaagcaaccagcggaugguaauccugauccaaaugcaaacccaaauguagaucccaaugccaacccaaauguagauccaaaugcaaacccaaauguagauccaaaugcaaacccaaaugcaaacccaaaugcaaacccaaaugcaaacccaaaugcaaacccaaaugcaaacccaaaugcaaacccaaaugcaaacccaaaugcaaaccccaaugcaaauccuaaugcaaacccaaaugcaaacccaaacguagauccuaaugcaaauccaaaugcaaacccaaaugcaaacccaaacgcaaaccccaaugcaaauccuaaugcaaaccccaaugcaaauccuaaugcaaauccuaaugccaauccaaaugcaaauccaaaugcaaacccaaacgcaaaccccaaugcaaauccuaaugccaauccaaaugcaaauccaaaugcaaacccaaaugcaaaccccaaugcaaauccuaauaaaaacaaucaagguaauggacaaggucacaauaugccaaaugacccaaaccgaaauguagaugaaaaugcuaaugccaacaaugcuguaaaaaauaauaauaacgaagaaccaagugauaagcacauaacagaauauuuaaagagaauacaaaauucucuuucaacugaaugguccccauguaguguaacuuguggaaaugguauucaaguuagaauaaagccuggcucugcugguaaaucuaaaaacgaauuagauuaugaaaaugauauugaaaaaaaaauuuguaaaauggaaaaauguuccaguguguuuaaugucguaaauaguucaauaggauuaauaaugguauuauccuucuuguuccuuaauuag

SEQ ID NO: 3038 - RNA, 1191 nt, Artificial Sequence
  derived and/or modified CDS sequence (wt) from Pf(Bolivar)__AAN87592.1__CSP
augaugagaaaauuagcuauuuuaucuguuucuuccuuuuuauuuguugaggccuuauuccaggaauaccagugcuauggaaguucgucaaacacaaggguucuaaaugaauuaaauuaugauaaugcaggcacuaauuuauauaaugaauuagaaaugaauuauuaugggaaacaggaaaauugguauagucuuaaaaaaaauaguagaucacuuggagaaaaugaugauggaaauaauaauaauggagauaauggucgugaagguaaagaugaagauaaaagagauggaaauaacgaagacaacgagaaauuaaggaaaccaaaacauaaaaaauuaaagcaaccagcggaugguaauccugauccaaaugcaaacccaaauguagauccaaaugccaacccaaauguagauccaaaugcaaacccaaauguagauccaaaugcaaacccaaaugcaaacccaaaugcaaacccaaaugcaaacccaaaugcaaacccaaaugcaaacccaaaugcaaacccaaaugcaaacccaaaugcaaaccccaaugcaaauccuaaugcaaacccaaaugcaaacccaaacguagauccuaaugcaaauccaaaugcaaacccaaaugcaaacccaaacgcaaaccccaaugcaaauccuaaugcaaaccccaaugcaaauccuaaugcaaauccuaaugccaauccaaaugcaaauccaaaugcaaacccaaacgcaaaccccaaugcaaauccuaaugccaauccaaaugcaaauccaaaugcaaacccaaaugcaaaccccaaugcaaauccuaauaaaaacaaucaagguaauggacaaggucacaauaugccaaaugacccaaaccgaaauguagaugaaaaugcuaaugccaacaaugcuguaaaaaauaauaauaacgaagaaccaagugauaagcacauaacagaauauuuaaagagaauacaaaauucucuuucaacugaaugguccccauguaguguaacuuguggaaaugguauucaaguuagaauaaagccuggcucugcugguaaaucuaaaaaccaauuagauuaugaaaaugauauugaaaaaaaaauuuguaaaauggaaaaauguuccaguguguuuaaugucguaaauaguucaauaggauuaauaaugguauuauccuucuuguuccuuaauuag

SEQ ID NO: 3039 - RNA, 1182 nt, Artificial Sequence
  derived and/or modified CDS sequence (wt) from Pf(30)__AGR53781.1__CSP
augaugagaaaauuagcuauuuuaucuguuucuuccuuuuuauuuguugaggccuuauuccaggaauaccagugcuauggaaguucgucaaacacaaggguucuaaaugaauuaaauuaugauaaugcaggcacuaauuuauauaaugaauuagaaaugaauuauuaugggaaacaggaaaauugguauagucuuaaaaaaaauaguagaucacuuggagaaaaugaugauggaaauaacgaagacaacgagaaauuaaggaaaccaaaacauaaaaaauuaaagcaaccaggggaugguaauccugauccaaaugcaaacccaaauguagaucccaaugccaacccaaauguagauccaaaugcaaacccaaauguagauccaaaugcaaacccaaaugcaaacccaaaugcaaacccaaaugcaaacccaaaugcaaacccaaaugcaaacccaaaugcaaacccaaaugcaaacccaaaugcaaacccaaaugcaaacccaaaugcaaacccaaaugcaaaccccaaugcaaauccuaaugcaaacccaaaugcaaacccaaacguagauccuaaugcaaauccaaaugcaaacccaaaugcaaacccaaacgcaaaccccaaugcaaauccuaaugcaaaccccaaugcaaauccuaaugcaaauccuaaugccaauccaaaugcaaauccaaaugcaaacccaaacgcaaaccccaaugcaaauccuaaugccaauccaaaugcaaauccaaaugcaaacccaaaugcaaacccaaaugcaaaccccaaugcaaauccuaauaaaaacaaucaagguaauggacaaggucacaauaugccaaaugacccaaaccgaaauguagaugaaaaugcuaaugccaacaaugcuguaaaaaauaauaauaacgaagaaccaagugauaagcacauaacagaauauuuaaagaaaauacaaaauucucuuucaacugaaugguccccauguaguguaacuuguggaaaugguauucaaguuagaauaaagccuggcucugcugguaaaucuaaaaacgaauuagauuaugaaaaugauauugaaaaaaaaauuuguaaaauggaaaaauguuccaguguguuuaaugucguaaauaguucaauaggauuaauaaugguauuauccuucuuguuccuuaauuag

SEQ ID NO: 3040 - RNA, 1182 nt, Artificial Sequence
  derived and/or modified CDS sequence (wt) from Pf(Gha1108-087)__BAM84819.1__CSP
augaugagaaaauuagcuauuuuaucuguuucuuccuuuuuauuuguugaggccuuauuccaggaauaccagugcuauggaaguucgucaaacacaaggguucuaaaugaauuaaauuaugauaaugcaggcacuaauuuauauaaugaauuagaaaugaauuauuaugggaaacaggaaaauugguauagucuuaaaaaaaauaguagaucacuuggagaaaaugaugauggaaauaacgaagacaacgagaaauuaaggaaaccaaaacauaaaaaauuaaagcaaccagcggaugguaauccugauccaaaugcaaacccaaauguagaucccaaugccaacccaaauguagauccaaaugcaaacccaaauguagauccaaaugcaaacccaaaugcaaacccaaaugcaaacccaaaugcaaacccaaaugcaaacccaaaugcaaacccaaaugcaaacccaaaugcaaacccaaaugcaaacccaaaugcaaacccaaaugcaaacccaaaugcaaacccaaaugcaaaccccaaugcaaauccuaaugcaaacccaaaugcaaacccaaacguagauccuaaugcaaauccaaaugcaaacccaaacgcaaaccccaaugcaaauccuaaugcaaaccccaaugcaaauccuaaugcaaauccuaaugccaauccaaaugcaaauccaaaugcaaacccaaacgcaaaccccaaugcaaauccuaaugccaauccaaaugcaaauccaaaugcaaacccaaaugcaaacccaaaugcaaaccccaaugcaaauccuaauaaaaacaaucaagguaauggacaaggucacaauaugccaaaugacccaaaccgaaauguagaugaaaaugcuaaugccaacaaugcuguaaaaaauaauaauaacgaagaaccaagugaucagcacauagaaaaauauuuaaagagaauacaaaauucucuuucaacugaaugguccccauguaguguaacuuguggaaaugguauucaaguuagaauaaagccuggcucugcuaauaaaccuaaagaccaauuagauuaugcaaaugauauugaaaaaaaaauuuguaaaauggaaaaauguuccaguguguuuaaugucguaaauaguucaauaggauuaauaaugguauuauccuucuuguuccuuaauuag

SEQ ID NO: 3041 - RNA, 1182 nt, Artificial Sequence
  derived and/or modified CDS sequence (wt) from Pf(Gha1108-098)__BAM84821.1__CSP
augaugagaaaauuagcuauuuuaucuguuucuuccuuuuuauuuguugaggccuuauuccaggaauaccagugcuauggaaguucgucaaacacaaggguucuaaaugaauuaaauuaugauaaugcaggcacuaauuuauauaaugaauuagaaaugaauuauuaugggaaacaggaaaauugguauagucuuaaaaaaaauaguagaucacuuggagaaaaugaugauggaaauaacgaagacaacgagaaauuaaggaaaccaaaacauaaaaaauuaaagcaaccaggggaugguaauccugauccaaaugcaaacccaaauguagaucccaaugccaacccaaauguagauccaaaugcaaacccaaauguagauccaaaugcaaacccaaaugcaaacccaaaugcaaacccaaaugcaaacccaaaugcaaacccaaaugcaaacccaaaugcaaacccaaaugcaaacccaaaugcaaacccaaaugcaaacccaaaugcaaacccaaaugcaaaccccaaugcaaauccuaaugcaaacccaaaugcaaacccaaacguagauccuaaugcaaauccaaaugcaaacccaaaugcaaacccaaacgcaaaccccaaugcaaauccuaaugcaaaccccaaugcaaauccuaaugcaaauccuaaugccaauccaaaugcaaauccaaaugcaaacccaaacgcaaaccccaaugcaaauccuaaugccaauccaaaugcaaauccaaaugcaaacccaaaugcaaacccaaaugcaaaccccaaugcaaauccuaauaaaaacaaucaagguaauggacaaggucacaauaugccaaaugagccaaaccgaaauguagaugaaaaugcuaaugccaacaaugcuguaaaaaauaauaauaacgaagaaccaagugauaagcacauagaacaauauuuaaacaaaauacaaaauucucuuucaacugaaugguccccauguaguguaacuuguggaaaugguauucaaguuagaauaaagccuggcucugcuaauaaaccuaaagaccaauuagauuaugcaaaugauauugaaaaaaaaauuuguaaaauggaaaaauguuccaguguguuuaaugucguaaauaguucaauaggauuaauaaugguauuauccuucuuguuccuuaauuag

SEQ ID NO: 3042 - RNA, 1182 nt, Artificial Sequence
  derived and/or modified CDS sequence (wt) from Pf(Gha1108-101)__BAM84808.1__CSP
augaugagaaaauuagcuauuuuaucuguuucuuccuuuuuauuuguugaggccuuauuccaggaauaccagugcuauggaaguucgucaaacacaaggguucuaaaugaauuaaauuaugauaaugcaggcacuaauuuauauaaugaauuagaaaugaauuauuaugggaaacaggaaaauugguauagucuuaaaaaaaauaguagaucacuuggagaaaaugaugauggaaauaacgaagacaacgagaaauuaaggaaaccaaaacauaaaaaauuaaagcaaccagcggaugguaauccugauccaaaugcaaacccaaauguagaucccaaugccaacccaaauguagauccaaaugcaaacccaaauguagauccaaaugcaaacccaaaugcaaacccaaaugcaaacccaaaugcaaacccaaaugcaaacccaaaugcaaacccaaaugcaaacccaaaugcaaacccaaaugcaaaccccaaugcaaauccuaaugcaaauccuaaugcaaacccaaaugcaaauccuaaugcaaacccaaaugcaaacccaaacguagauccuaaugcaaauccaaaugcaaacccaaaugcaaacccaaacgcaaaccccaaugcaaauccuaaugcaaaccccaaugcaaauccuaaugcaaauccuaaugccaauccaaaugcaaauccaaaugcaaacccaaacgcaaaccccaaugcaaauccuaaugccaauccaaaugcaaauccaaaugcaaacccaaaugcaaacccaaaugcaaaccccaaugcaaauccuaauaaaaacaaucaagguaauggacaaggucacaauaugccaaaugacccaaaccgaaauguagaugaaaaugcuaaugccaacaaugcuguaaaaaauaauaauaacgaagaaccaagugaucagcacauagaaaaauauuuaaacaaaauaaaaaauucucuuucaacugaaugguccccauguaguguaacuuguggaaaugguauucaaguuagaauaaagccuggcucugcuaauaaaccuaaagaccaauuagauuaugcaaaugauauugaaaaaaaaauuuguaaaauggaaaaauguuccaguguguuuaaugucguaaauaguucaauaggauuaauaaugguauuauccuucuuguuccuuaauuag

SEQ ID NO: 3043 - RNA, 1182 nt, Artificial Sequence
  derived and/or modified CDS sequence (wt) from Pf(Gha1108-148)__BAM84814.1__CSP
augaugagaaaauuagcuauuuuaucuguuucuuccuuuuuauuuguugaggccuuauuccaggaauaccagugcuauggaaguucgucaaacacaaggguucuaaaugaauuaaauuaugauaaugcaggcacuaauuuauauaaugaauuagaaaugaauuauuaugggaaacaggaaaauugguauagucuuaaaaaaaauaguagaucacuuggagaaaaugaugauggaaauaacgaagacaacgagaaauuaaggaaaccaaaacauaaaaaauuaaagcaaccaggggaugguaauccugauccaaaugcaaacccaaauguagaucccaaugccaacccaaauguagauccaaaugcaaacccaaauguagauccaaaugcaaacccaaaugcaaacccaaaugcaaacccaaaugcaaacccaaaugcaaacccaaaugcaaacccaaaugcaaacccaaaugcaaacccaaaugcaaacccaaaugcaaacccaaaugcaaacccaaaugcaaaccccaaugcaaauccuaaugcaaacccaaaugcaaacccaaacguagauccuaaugcaaauccaaaugcaaacccaaaugcaaacccaaacgcaaaccccaaugcaaauccuaaugcaaaccccaaugcaaauccuaaugcaaauccuaaugccaauccaaaugcaaauccaaaugcaaacccaaacgcaaaccccaaugcaaauccuaaugccaauccaaaugcaaauccaaaugcaaacccaaaugcaaacccaaaugcaaaccccaaugcaaauccuaauaaaaacaaucaagguaauggacaaggucacaauaugccaaaugacccaaaccgaaauguagaugaaaaugcuaaugccaacagugcuguaaaaaauaauaauaacgaagaaccaagugauaagcacauaaaagaauauuuaaacaaaauacaaaauucucuuucaacugaaugguccccauguaguguaacuuguggaaaugguauucaaguuagaauaaagccuggcucugcuaauaaaccuaaagacgaauuagauuaugcaaaugauauugaaaaaaaaauuuguaaaauggaaaaauguuccaguguguuuaaugucguaaauaguucaauaggauuaauaaugguauuauccuucuuguuccuuaauuag

SEQ ID NO: 3044 - RNA, 1182 nt, Artificial Sequence
  derived and/or modified CDS sequence (wt) from Pf(Gha1109-097)__BAM84838.1__CSP
augaugagaaaauuagcuauuuuaucuguuucuuccuuuuuauuuguugaggccuuauuccaggaauaccagugcuauggaaguucgucaaacacaaggguucuaaaugaauuaaauuaugauaaugcaggcacuaauuuauauaaugaauuagaaaugaauuauuaugggaaacaggaaaauugguauagucuuaaaaaaaauaguagaucacuuggagaaaaugaugauggaaauaacgaagacaacgagaaauuaaggaaaccaaaacauaaaaaauuaaagcaaccagcggaugguaauccugauccaaaugcaaacccaaauguagaucccaaugccaacccaaauguagauccaaaugcaaacccaaauguagauccaaaugcaaacccaaaugcaaacccaaaugcaaacccaaaugcaaacccaaaugcaaacccaaaugcaaacccaaaugcaaacccaaaugcaaacccaaaugcaaacccaaaugcaaacccaaaugcaaacccaaaugcaaaccccaaugcaaauccuaaugcaaacccaaaugcaaacccaaacguagauccuaaugcaaauccaaaugcaaacccaaaugcaaacccaaacgcaaaccccaaugcaaauccuaaugcaaaccccaaugcaaauccuaaugcaaauccuaaugccaauccaaaugcaaauccaaaugcaaacccaaacgcaaaccccaaugcaaauccuaaugccaauccaaaugcaaauccaaaugcaaacccaaaugcaaacccaaaugcaaaccccaaugcaaauccuaauaaaaacaaucaagguaauggacaaggucacaauaugccaaaugacccaaaccgaaauguagaugaaaaugcuaaagccaacaaugcuguaaaaaauaauaauaacgaagaaccaagugauaagcacauagaacaauauuuaaagacaauacaaaauucucuuucaacugaaugguccccauguaguguaacuuguggaaaugguauucaaguuagaauaaagccuggcucugcuaauaaaccuaaagaccaauuagauuaugaaaaugauauugaaaaaaaaauuuguaaaauggaaaaauguuccaguguguuuaaugucguaaauaguucaauaggauuaauaaugguauuauccuucuuguuccuuaauuag

SEQ ID NO: 3045 - RNA, 1182 nt, Artificial Sequence
  derived and/or modified CDS sequence (wt) from Pf(Gha1110-021)__BAM84839.1__CSP
augaugagaaaauuagcuauuuuaucuguuucuuccuuuuuauuuguugaggccuuauuccaggaauaccagugcuauggaaguucgucaaacacaaggguucuaaaugaauuaaauuaugauaaugcaggcacuaauuuauauaaugaauuagaaaugaauuauuaugggaaacaggaaaauugguauagucuuaaaaaaaauaguagaucacuuggagaaaaugaugauggaaauaacgaagacaacgagaaauuaaggaaaccaaaacauaaaaaauuaaagcaaccagcggaugguaauccugauccaaaugcaaacccaaauguagaucccaaugccaacccaaauguagauccaaaugcaaacccaaauguagauccaaaugcaaacccaaaugcaaacccaaaugcaaacccaaaugcaaacccaaaugcaaacccaaaugcaaacccaaaugcaaacccaaaugcaaaccccaaugcaaauccuaaugcaaauccuaaugcaaauccuaaugcaaacccaaaugcaaauccuaaugcaaacccaaaugcaaacccaaacguagauccuaaugcaaauccaaaugcaaacccaaaugcaaacccaaacgcaaaccccaaugcaaauccuaaugcaaaccccaaugcaaauccuaaugcaaauccuaaugccaauccaaaugcaaauccaaaugcaaacccaaacgcaaaccccaaugcaaauccuaaugccaauccaaaugcaaauccaaaugcaaacccaaaugcaaacccaaaugcaaaccccaaugcaaauccuaauaaaaacaaucaagguaauggacaaggucacaauaugccaaaugacccaaaccgaaauguagaugaaaaugcuaaugccaacaaugcuguaaaaaauaauaauaacgaagaaccaagugauaagcacauagaacaauauuuaaagacaauaaaaaauucucuuucaacugaaugguccccauguaguguaacuuguggaaaugguauucaaguuagaauaaagccuggcucugcuaauaaaccuaaagacgaauuaaauuaugaaaaugauauugaaaaaaaaauuuguaaaauggaaaaauguuccaguguguuuaaugucguaaauaguucaauaggauuaauaaugguauuauccuucuuguuccuuaauuag

SEQ ID NO: 3046 - RNA, 1182 nt, Artificial Sequence
  derived and/or modified CDS sequence (wt) from Pf(Tz03-068)__BAM84802.1__CSP
augaugagaaaauuagcuauuuuaucuguuucuuccuuuuuauuuguugaggccuuauuccaggaauaccagugcuauggaaguucgucaaacacaaggguucuaaaugaauuaaauuaugauaaugcaggcacuaauuuauauaaugaauuagaaaugaauuauuaugggaaacaggaaaauugguauagucuuaaaaaaaauaguagaucacuuggagaaaaugaugauggaaauaacgaagacaacgagaaauuaaggaaaccaaaacauaaaaaauuaaagcaaccagcggaugguaauccugauccaaaugcaaacccaaauguagaucccaaugccaacccaaauguagauccaaaugcaaacccaaauguagauccaaaugcaaacccaaaugcaaacccaaaugcaaacccaaaugcaaacccaaaugcaaacccaaaugcaaacccaaaugcaaacccaaaugcaaacccaaaugcaaacccaaaugcaaacccaaaugcaaacccaaaugcaaaccccaaugcaaauccuaaugcaaacccaaaugcaaacccaaacguagauccuaaugcaaauccaaaugcaaacccaaaugcaaacccaaacgcaaaccccaaugcaaauccuaaugcaaaccccaaugcaaauccuaaugcaaauccuaaugccaauccaaaugcaaauccaaaugcaaacccaaacgcaaaccccaaugcaaauccuaaugccaauccaaaugcaaauccaaaugcaaacccaaaugcaaacccaaaugcaaaccccaaugcaaauccuaauaaaaacaaucaagguaauggacaaggucacaauaugccaaaugacccaaaccgaaauguagaugaaaaugcuaaugccaacaaugcuguaaaaaauaauaauaacgaagaaccaagugaucagcacauagaaaaauauuuaaagauaauacaaaauucucuuucaacugaaugguccccauguaguguaacuuguggaaaugguauucaaguuagaauaaagccuggcucugcuaauaaaccuaaagaccaauuagauuaugcaaaugauauugaaaaaaaaauuuguaaaauggaaaaauguuccaguguguuuaaugucguaaauaguucaauaggauuaauaaugguauuauccuucuuguuccuuaauuag

SEQ ID NO: 3047 - RNA, 1182 nt, Artificial Sequence
  derived and/or modified CDS sequence (wt) from Pf(Tz03-070)__BAM84803.1__CSP
augaugagaaaauuagcuauuuuaucuguuucuuccuuuuuauuuguugaggccuuauuccaggaauaccagugcuauggaaguucgucaaacacaaggguucuaaaugaauuaaauuaugauaaugcaggcacuaauuuauauaaugaauuagaaaugaauuauuaugggaaacaggaaaauugguauagucuuaaaaaaaauaguagaucacuuggagaaaaugaugauggaaauaacgaagacaacgagaaauuaaggaaaccaaaacauaaaaaauuaaagcaaccagcggaugguaauccugauccaaaugcaaacccaaauguagaucccaaugccaacccaaauguagauccaaaugcaaacccaaauguagauccaaaugcaaacccaaaugcaaacccaaaugcaaacccaaaugcaaacccaaaugcaaacccaaaugcaaacccaaaugcaaacccaaaugcaaacccaaaugcaaacccaaaugcaaacccaaaugcaaacccaaaugcaaacccaaaugcaaaccccaaugcaaauccuaaugcaaacccaaaugcaaacccaaacguagauccuaaugcaaauccaaaugcaaacccaaacgcaaaccccaaugcaaauccuaaugcaaaccccaaugcaaauccuaaugcaaauccuaaugccaauccaaaugcaaauccaaaugcaaacccaaacgcaaaccccaaugcaaauccuaaugccaauccaaaugcaaauccaaaugcaaacccaaaugcaaacccaaaugcaaaccccaaugcaaauccuaauaaaaacaaucaagguaauggacaaggucacaauaugccaaaugacccaaaccgaaauguagaugaaaaugcuaaugccaacaaugcuguaaaaaauaauaauaacgaagaaccaagugaucagcacauagaaaaauauuuacagaaaauacaaaauucucuuucaacugaaugguccccauguaguguaacuuguggaaaugguauucaaguuagaauaaagccuggcucugcuaauaaaccuaaagaccaauuaaauuaugaaaaugauauugaaaaaaaaauuuguaaaauggaaaaauguuccaguguguuuaaugucguaaauaguucaauaggauuaauaaugguauuauccuucuuguuccuuaauuag

SEQ ID NO: 3048 - RNA, 1182 nt, Artificial Sequence
  derived and/or modified CDS sequence (wt) from Pf(Yaounde)__AAN87579.1__CSP
augaugagaaaauuagcuauuuuaucuguuucuuccuuuuuauuuguugaggccuuauuccaggaauaccagugcuauggaaguucgucaaacacaaggguucuaaaugaauuaaauuaugauaaugcaggcacuaauuuauauaaugaauuagaaaugaauuauuaugggaaacaggaaaauugguauagucuuaaaaaaaauaguagaucacuuggagaaaaugaugauggaaauaacgaagacaacgagaaauuaaggaaaccaaaacauaaaaaauuaaagcaaccaggggaugguaauccugauccaaaugcaaacccaaauguagaucccaaugccaacccaaauguagauccaaaugcaaacccaaauguagauccaaaugcaaacccaaaugcaaacccaaaugcaaacccaaaugcaaacccaaaugcaaacccaaaugcaaacccaaaugcaaacccaaaugcaaacccaaaugcaaacccaaaugcaaacccaaaugcaaacccaaaugcaaaccccaaugcaaauccuaaugcaaacccaaaugcaaacccaaacguagauccuaaugcaaauccaaaugcaaacccaaaugcaaacccaaacgcaaaccccaaugcaaauccuaaugcaaaccccaaugcaaauccuaaugcaaauccuaaugccaauccaaaugcaaauccaaaugcaaacccaaacgcaaaccccaaugcaaauccuaaugccaauccaaaugcaaauccaaaugcaaacccaaaugcaaacccaaaugcaaaccccaaugcaaauccuaauaaaaacaaucaagguaauggacaaggucacaauaugccaaaugacccaaaccgaaauguagauaaaaaugcuaaugccaacaaugcuguaaaaaauaauaauaacgaagaaccaagugauaagcacauagaagaauauuuaaagaaaauaaaaaauucuauuucaacugaaugguccccauguaguguaacuuguggaaaugguauucaaguuagaauaaagccuggcucugcuaauaaaccuaaagacgaauuagauuaugaaaaugauauugaaaaaaaaauuuguaaaauggaaaaauguuccaguguguuuaaugucguaaauaguucaauaggauuaauaaugguauuauccuucuuguuccuuaauuag

SEQ ID NO: 3049 - RNA, 1182 nt, Artificial Sequence
  derived and/or modified CDS sequence (wt) from Pf(Yaounde)__AAN87578.1__CSP
augaugagaaaauuagcuauuuuaucuguuucuuccuuuuuauuuguugaggccuuauuccaggaauaccagugcuauggaaguucgucaaacacaaggguucuaaaugaauuaaauuaugauaaugcaggcacuaauuuauauaaugaauuagaaaugaauuauuaugggaaacaggaaaauugguauagucuuaaaaaaaauaguagaucacuuggagaaaaugaugauggaaauaacgaagacaacgagaaauuaaggaaaccaaaacauaaaaaauuaaagcaaccaggggaugguaauccugauccaaaugcaaacccaaauguagaucccaaugccaacccaaauguagauccaaaugcaaacccaaauguagauccaaaugcaaacccaaaugcaaacccaaaugcaaacccaaaugcaaacccaaaugcaaacccaaaugcaaacccaaaugcaaacccaaaugcaaacccaaaugcaaacccaaaugcaaacccaaaugcaaacccaaaugcaaaccccaaugcaaauccuaaugcaaacccaaaugcaaacccaaacguagauccuaaugcaaauccaaaugcaaacccaaaugcaaacccaaacgcaaaccccaaugcaaauccuaaugcaaaccccaaugcaaauccuaaugcaaauccuaaugccaauccaaaugcaaauccaaaugcaaacccaaacgcaaaccccaaugcaaauccuaaugccaauccaaaugcaaauccaaaugcaaacccaaaugcaaacccaaaugcaaaccccaaugcaaauccuaauaaaaacaaucaagguaauggacaaggucacaauaugccaaaugacccaaaccgaaauguaaaugaaaaugcuaaugccaacaaugcuguaaaaaauaauaauaacgaagaaccaagugauaagcacauagaaaaauauuuaaaggaaauacaaaauucucuuucaacugaaugguccccauguaguguaacuuguggaaaugguauucaaguuagaauaaagccuggcucugcugguaaaccuaaaaacgaauuagauuaugaaaaugauauugaaaaaaaaauuuguaaaauggaaaaauguuccaguguguuuaaugucguaaauaguucaauaggauuaauaaugguauuauccuucuuguuccuuaauuag

SEQ ID NO: 3050 - RNA, 1179 nt, Artificial Sequence
  derived and/or modified CDS sequence (wt) from Pf(Asembo Bay)__AAN87607.1__CSP
augaugagaaaauuagcuauuuuaucuguuucuuccuuuuuauuuguugaggccuuauuccaggaauaccagugcuauggaaguucgucaaacacaaggguucuaaaugaauuaaauuaugauaaugcaggcacuaauuuauauaaugaauuagaaaugaauuauuaugggaaacaggaaaauugguauagucuuaaaaaaaauaguagaucacuuggagaaaaugaugauggaaauaauaauaauggagauaauggucgugaagguaaagaugaagauaaaagagauggaaauaacgaagacaacgagaaauuaaggaaaccaaaacauaaaaaauuaaagcaaccagcggaugguaauccugauccaaaugcaaacccaaauguagauccaaaugcaaacccaaauguagauccaaaugcaaacccaaaugcaaacccaaaugcaaacccaaaugcaaacccaaaugcaaacccaaaugcaaacccaaaugcaaacccaaaugcaaacccaaaugcaaaccccaaugcaaauccuaaugcaaacccaaaugcaaacccaaacguagauccuaaugcaaauccaaaugcaaacccaaaugcaaacccaaacgcaaaccccaaugcaaauccuaaugcaaaccccaaugcaaauccuaaugcaaauccuaaugccaauccaaaugcaaauccaaaugcaaacccaaacgcaaaccccaaugcaaauccuaaugccaauccaaaugcaaauccaaaugcaaacccaaaugcaaacccaaaugcaaaccccaaugcaaauccuaauaaaaacaaucaagguaauggacaaggucacaauaugccaaaugacccaaaccgaaauguagaugaaaaugcuaaugccaacaaugcuguaaaaaauaauaauaacgaagaaccaagugauaagcacauagaacaauauuuaaacaaaauaaaaaauucuauuucaacugaaugguccccauguaguguaacuuguggaaaugguauucaaguuagaauaaagccuggcucugcuaauaaaccuaaagaccaauuagauuaugaaaaugauauugaaaaaaaaauuuguaaaauggaaaaauguuccaguguguuuaaugucguaaauaguucaauaggauuaauaaugguauuauccuucuuguuccuuaauuag

SEQ ID NO: 3051 - RNA, 1179 nt, Artificial Sequence
  derived and/or modified CDS sequence (wt) from Pf(Asembo Bay)__AAN87608.1__CSP
augaugagaaaauuagcuauuuuaucuguuucuuccuuuuuauuuguugaggccuuauuccaggaauaccagugcuauggaaguucgucaaacacaaggguucuaaaugaauuaaauuaugauaaugcaggcacuaauuuauauaaugaauuagaaaugaauuauuaugggaaacaggaaaauugguauagucuuaaaaaaaauaguagaucacuuggagaaaaugaugauggaaauaauaauaauggagauaauggucgugaagguaaagaugaagauaaaagagauggaaauaacgaagacaacgagaaauuaaggaaaccaaaacauaaaaaauuaaagcaaccagcggaugguaauccugauccaaaugcaaacccaaauguagaucccaaugccaacccaaauguagauccaaaugcaaacccaaauguagauccaaaugcaaacccaaaugcaaacccaaaugcaaacccaaaugcaaacccaaaugcaaacccaaaugcaaacccaaaugcaaaccccaaugcaaauccuaaugcaaacccaaaugcaaacccaaacguagauccuaaugcaaauccaaaugcaaacccaaaugcaaacccaaacgcaaaccccaaugcaaauccuaaugcaaaccccaaugcaaauccuaaugcaaauccuaaugccaauccaaaugcaaauccaaaugcaaacccaaacgcaaaccccaaugcaaauccuaaugccaauccaaaugcaaacccaaaugcaaacccaaaugcaaacccaaaugcaaaccccaaugcaaauccuaauaaaaacaaucaagguaauggacaaggucacaauaugccaaaugacccaaaccgaaauguagaugaaaaugcuaaugccaacaaugcuguaaaaaauaauaauaacgaagaaccaagugauaagcacauagaacaauauuuaaagauaauaaaaaauucucuuucaacugaaugguccccauguaguguaacuuguggaaaugguauucaaguuagaauaaagccuggcucugcuaauaaaccuaaagacgaauuagauuaugcaaaugauauugaaaaaaaaauuuguaaaauggaaaaauguuccaguguguuuaaugucguaaauaguucaauaggauuaauaaugguauuauccuucuuguuccuuaauuag

SEQ ID NO: 3052 - RNA, 1179 nt, Artificial Sequence
  derived and/or modified CDS sequence (wt) from Pf(Asembo Bay)__AAN87595.1__CSP
augaugagaaaauuagcuauuuuaucuguuucuuccuuuuuauuuguugaggccuuauuccaggaauaccagugcuauggaaguucgucaaacacaaggguucuaaaugaauuaaauuaugauaaugcaggcacuaauuuauauaaugaauuagaaaugaauuauuaugggaaacaggaaaauugguauagucuuaaaaaaaauaguagaucacuuggagaaaaugaugauggaaauaauaauaauggagauaauggucgugaagguaaagaugaagauaaaagagauggaaauaacgaagacaacgagaaauuaaggaaaccaaaacauaaaaaauuaaagcaaccagcggaugguaauccugauccaaaugcaaacccaaauguagaucccaaugccaacccaaauguagauccaaaugcaaacccaaauguagauccaaaugcaaacccaaaugcaaacccaaaugcaaacccaaaugcaaacccaaaugcaaacccaaaugcaaacccaaaugcaaaccccaaugcaaauccuaaugcaaacccaaaugcaaacccaaacguagauccuaaugcaaauccaaaugcaaacccaaaugcaaacccaaacgcaaaccccaaugcaaauccuaaugcaaaccccaaugcaaauccuaaugcaaauccuaaugccaauccaaaugcaaauccaaaugcaaacccaaacgcaaaccccaaugcaaauccuaaugccaauccaaaugcaaacccaaaugcaaacccaaaugcaaacccaaaugcaaaccccaaugcaaauccuaauaaaaacaaucaagguaauggacaaggucacaauaugccaaaugacccaaaccgaaauguagaugaaaaugcuaaugccaacaaugcuguaaaaaauaauaauaacgaagaaccaagugauaagcacauaacagaauauuuaaagagaauacaaaauucucuuucaacugaaugguccccauguaguguaacuuguggaaaugguauucaaguuagaauaaagccuggcucugcugguaaaucuaaaaacgaauuagauuaugaaaaugauauugaaaaaaaaauuuguaaaauggaaaaauguuccaguguguuuaaugucguaaauaguucaauaggauuaauaaugguauuauccuucuuguuccuuaauuag

SEQ ID NO: 3053 - RNA, 1179 nt, Artificial Sequence
  derived and/or modified CDS sequence (wt) from Pf(India)__AAN87618.1__CSP
augaugagaaaauuagcuauuuuaucuguuucuuccuuuuuauuuguugaggccuuauuccaggaauaccagugcuauggaaguucgucaaacacaaggguucuaaaugaauuaaauuaugauaaugcaggcacuaauuuauauaaugaauuagaaaugaauuauuaugggaaacaggaaaauugguauagucuuaaaaaaaauaguagaucacuuggagaaaaugaugauggaaauaauaauaauggagauaauggucgugaagguaaagaugaagauaaaagagauggaaauaacgaagacaacgagaaauuaaggaaaccaaaacauaaaaaauuaaagcaaccagggggugauaauccugauccaaaugcaaacccaaauguagauccaaaugcaaacccaaaugcaaacccaaaugcaaacccaaaugcaaacccaaaugcaaacccaaaugcaaacccaaaugcaaacccaaaugcaaacccaaaugcaaacccaaaugcaaacccaaaugcaaacccaaaugcaaacccaaaugcaaacccaaacgcaaaccccaaugcaaauccuaaugccaauccaaaugcaaacccaaaugcaaacccaaacgcaaaccccaaugcaaauccuaaugccaauccuaaugcaaauccaaaugcaaacccaaacgcaaaccccaaugcaaauccuaaugccaauccaaaugcaaauccaaaugcaaaccccaaugcaaauccuaaugccaauccaaaugcaaauccaaaugcaaacccaaaugcaaacccaaaugcaaauccuaauaaaaacaaucaagguaauggacaaggucacaauaugccaaaugacccaaaccgaaauguagaugaaaaugcuaaugccaacaaugcuguaaaaaauaauaauaacgaagaaccaagugauaagcacauagaacaauauuuaaagaaaauacaaaauucucuuucaacugaaugguccccauguaguguaacuuguggaaaugguauucaaguuagaauaaagccuggcucugcuaauaaaccuaaagacgaauuagauuaugaaaaugauauugaaaaaaaaauuuguaaaauggaaaaauguuccaguguguuuaaugucguaaauaguucaauaggauuaauaaugguauuauccuucuuguuccuuaauuag

SEQ ID NO: 3054 - RNA, 1170 nt, Artificial Sequence
  derived and/or modified CDS sequence (wt) from Pf(Asembo Bay)__AAN87585.1__CSP
augaugagaaaauuagcuauuuuaucuguuucuuccuuuuuauuuguugaggccuuauuccaggaauaccagugcuauggaaguucgucaaacacaaggguucuaaaugaauuaaauuaugauaaugcaggcacuaauuuauauaaugaauuagaaaugaauuauuaugggaaacaggaaaauugguauagucuuaaaaaaaauaguagaucacuuggagaaaaugaugauggaaauaacgaagacaacgagaaauuaaggaaaccaaaacauaaaaaauuaaagcaaccagcggaugguaauccugauccaaaugcaaacccaaauguagaucccaaugccaacccaaauguagauccaaaugcaaacccaaauguagauccaaaugcaaacccaaaugcaaacccaaaugcaaacccaaaugcaaacccaaaugcaaacccaaaugcaaacccaaaugcaaacccaaaugcaaacccaaaugcaaacccaaaugcaaacccaaaugcaaacccaaaugcaaaccccaaugcaaauccuaaugcaaacccaaaugcaaacccaaacguagauccuaaugcaaauccaaaugcaaacccaaacgcaaaccccaaugcaaauccuaaugcaaaccccaaugcaaauccuaaugcaaauccuaaugccaauccaaaugcaaauccaaaugcaaacccaaacgcaaaccccaaugcaaauccuaaugccaauccaaaugcaaauccaaaugcaaacccaaaugcaaacccaaaugcaaaccccaaugcaaauccuaauaaaaacaaucaagguaauggacaaggucacaauaugccaaaugacccaaaccgaaauguagaugaaaaugcuaaugccaacaaugcuguaaaaaauaauaauaacgaagaaccaagugaucagcacauagaaaaauauuuaaagacaauacaaaauucucuuucaacugaaugguccccauguaguguaacuuguggaaaugguauucaaguuagaauaaagccuggcucugcuaauaaaccuaaagaccaauuagauuaugcaaaugauauugaaaaaaaaauuuguaaaauggaaaaauguuccaguguguuuaaugucguaaauaguucaauaggauuaauaaugguauuauccuucuuguuccuuaauuag

SEQ ID NO: 3055 - RNA, 1170 nt, Artificial Sequence
  derived and/or modified CDS sequence (wt) from Pf(Asembo Bay)__AAN87577.1__CSP
augaugagaaaauuagcuauuuuaucuguuucuuccuuuuuauuuguugaggccuuauuccaggaauaccagugcuauggaaguucgucaaacacaaggguucuaaaugaauuaaauuaugauaaugcaggcacuaauuuauauaaugaauuagaaaugaauuauuaugggaaacaggaaaauugguauagucuuaaaaaaaauaguagaucacuuggagaaaaugaugauggaaauaacgaagacaacgagaaauuaaggaaaccaaaacauaaaaaauuaaagcaaccaggggaugguaauccugauccaaaugcaaacccaaauguagaucccaaugccaacccaaauguagauccaaaugcaaacccaaauguagauccaaaugcaaacccaaaugcaaacccaaaugcaaacccaaaugcaaacccaaaugcaaacccaaaugcaaacccaaaugcaaacccaaaugcaaacccaaaugcaaacccaaaugcaaacccaaaugcaaaccccaaugcaaauccuaaugcaaacccaaaugcaaacccaaacguagauccuaaugcaaauccaaaugcaaacccaaaugcaaacccaaacgcaaaccccaaugcaaauccuaaugcaaaccccaaugcaaauccuaaugcaaauccuaaugccaauccaaaugcaaauccaaaugcaaacccaaacgcaaaccccaaugcaaauccuaaugccaauccaaaugcaaauccaaaugcaaacccaaaugcaaacccaaaugcaaaccccaaugcaaauccuaauaaaaacaaucaagguaauggacaaggucacaauaugccaaaugacccaaaccgaaauguaaaugaaaaugcuaaugccaacaaugcuguaaaaaauaauaauaacgaagaaccaagugauaagcacauagaaaaauauuuaaaggaaauacaaaauucucuuucaacugaaugguccccauguaguguaacuuguggaaaugguauucaaguuagaauaaagccuggcucugcugguaaaccuaaaaacgaauuagauuaugaaaaugauauugaaaaaaaaauuuguaaaauggaaaaauguuccaguguguuuaaugucguaaauaguucaauaggauuaauaaugguauuauccuucuuguuccuuaauuag

SEQ ID NO: 3056 - RNA, 1170 nt, Artificial Sequence
  derived and/or modified CDS sequence (wt) from Pf(Gha1108-043)__BAM84815.1__CSP
augaugagaaaauuagcuauuuuaucuguuucuuccuuuuuauuuguugaggccuuauuccaggaauaccagugcuauggaaguucgucaaacacaaggguucuaaaugaauuaaauuaugauaaugcaggcacuaauuuauauaaugaauuagaaaugaauuauuaugggaaacaggaaaauugguauagucuuaaaaaaaauaguagaucacuuggagaaaaugaugauggaaauaacgaagacaacgagaaauuaaggaaaccaaaacauaaaaaauuaaagcaaccaggggaugguaauccugauccaaaugcaaacccaaauguagaucccaaugccaacccaaauguagauccaaaugcaaacccaaauguagauccaaaugcaaacccaaaugcaaacccaaaugcaaacccaaaugcaaacccaaaugcaaacccaaaugcaaacccaaaugcaaacccaaaugcaaacccaaaugcaaacccaaaugcaaacccaaaugcaaaccccaaugcaaauccuaaugcaaacccaaaugcaaacccaaacguagauccuaaugcaaauccaaaugcaaacccaaaugcaaacccaaacgcaaaccccaaugcaaauccuaaugcaaaccccaaugcaaauccuaaugcaaauccuaaugccaauccaaaugcaaauccaaaugcaaacccaaacgcaaaccccaaugcaaauccuaaugccaauccaaaugcaaauccaaaugcaaacccaaaugcaaacccaaaugcaaaccccaaugcaaauccuaauaaaaacaaucaagguaauggacaaggucacaauaugccaaaugacccaaaccgaaauguagaugaaaaugcuaaugccaacagugcuguaaaaaauaauaauaacgaagaaccaagugauaagcacauaaaagaauauuuaaacaaaauacaaaauucucuuucaacugaaugguccccauguaguguaacuuguggaaaugguauucaaguuagaauaaagccuggcucugcuaauaaaccuaaagacgaauuagauuaugcaaaugauauugaaaaaaaaauuuguaaaauggaaaaauguuccaguguguuuaaugucguaaauaguucaauaggauuaauaaugguauuauccuucuuguuccuuaauuag

SEQ ID NO: 3057 - RNA, 1170 nt, Artificial Sequence
  derived and/or modified CDS sequence (wt) from Pf(Gha1108-052)__BAM84816.1__CSP
augaugagaaaauuagcuauuuuaucuguuucuuccuuuuuauuuguugaggccuuauuccaggaauaccagugcuauggaaguucgucaaacacaaggguucuaaaugaauuaaauuaugauaaugcaggcacuaauuuauauaaugaauuagaaaugaauuauuaugggaaacaggaaaauugguauagucuuaaaaaaaauaguagaucacuuggagaaaaugaugauggaaauaacgaagacaacgagaaauuaaggaaaccaaaacauaaaaaauuaaagcaaccagcggaugguaauccugauccaaaugcaaacccaaauguagaucccaaugccaacccaaauguagauccaaaugcaaacccaaauguagauccaaaugcaaacccaaaugcaaacccaaaugcaaacccaaaugcaaacccaaaugcaaacccaaaugcaaacccaaaugcaaacccaaaugcaaacccaaaugcaaacccaaaugcaaaccccaaugcaaauccuaaugcaaauccuaaugcaaacccaaaugcaaacccaaacguagauccuaaugcaaauccaaaugcaaacccaaaugcaaacccaaacgcaaaccccaaugcaaauccuaaugcaaaccccaaugcaaauccuaaugcaaauccuaaugccaauccaaaugcaaauccaaaugcaaacccaaacgcaaaccccaaugcaaauccuaaugccaauccaaaugcaaauccaaaugcaaacccaaaugcaaacccaaaugcaaaccccaaugcaaauccuaauaaaaacaaucaagguaauggacaaggucacaauaugccaaaugacccaaaccgaaauguagaugaaaaugcuaaugccaacagugcuguaaaaaauaauaauaacgaagaaccaagugauaagcacauagaacaauauuuaaagacaauacaaaauucucuuucaacugaaugguccccauguaguguaacuuguggaaaugguauucaaguuagaauaaagccuggcucugcuaauaaaccuaaagaccaauuagauuaugaaaaugauauugaaaaaaaaauuuguaaaauggaaaaauguuccaguguguuuaaugucguaaauaguucaauaggauuaauaaugguauuauccuucuuguuccuuaauuag

SEQ ID NO: 3058 - RNA, 1170 nt, Artificial Sequence
  derived and/or modified CDS sequence (wt) from Pf(Gha1108-124)__BAM84812.1__CSP
augaugagaaaauuagcuauuuuaucuguuucuuccuuuuuauuuguugaggccuuauuccaggaauaccagugcuauggaaguucgucaaacacaaggguucuaaaugaauuaaauuaugauaaugcaggcacuaauuuauauaaugaauuagaaaugaauuauuaugggaaacaggaaaauugguauagucuuaaaaaaaauaguagaucacuuggagaaaaugaugauggaaauaacgaagacaacgagaaauuaaggaaaccaaaacauaaaaaauuaaagcaaccagcggaugguaauccugauccaaaugcaaacccaaauguagaucccaaugccaacccaaauguagauccaaaugcaaacccaaauguagauccaaaugcaaacccaaaugcaaacccaaaugcaaacccaaaugcaaacccaaaugcaaacccaaaugcaaacccaaaugcaaacccaaaugcaaacccaaaugcaaacccaaaugcaaacccaaaugcaaacccaaaugcaaacccaaaugcaaaccccaaugcaaauccuaaugcaaacccaaacguagauccuaaugcaaauccaaaugcaaacccaaacgcaaaccccaaugcaaauccuaaugcaaaccccaaugcaaauccuaaugcaaauccuaaugccaauccaaaugcaaauccaaaugcaaacccaaacgcaaaccccaaugcaaauccuaaugccaauccaaaugcaaauccaaaugcaaacccaaaugcaaacccaaaugcaaaccccaaugcaaauccuaauaaaaacaaucaagguaauggacaaggucacaauaugccaaaugacccaaaccgaaauguagaugaaaaugcuaaugccaacaaugcuguaaaaaauaauaauaacgaagaaccaagugaucagcacauagaaaaauauuuaaacaaaauaaaaaauucucuuucaacugaaugguccccauguaguguaacuuguggaaaugguauucaaguuagaauaaagccuggcucugcuaauaaaccuaaagaccaauuagauuaugcaaaugauauugaaaaaaaaauuuguaaaauggaaaaauguuccaguguguuuaaugucguaaauaguucaauaggauuaauaaugguauuauccuucuuguuccuuaauuag

SEQ ID NO: 3059 - RNA, 1170 nt, Artificial Sequence
  derived and/or modified CDS sequence (wt) from Pf(Gha1109-003)__BAM84834.1__CSP
augaugagaaaauuagcuauuuuaucuguuucuuccuuuuuauuuguugaggccuuauuccaggaauaccagugcuauggaaguucgucaaacacaaggguucuaaaugaauuaaauuaugauaaugcaggcacuaauuuauauaaugaauuagaaaugaauuauuaugggaaacaggaaaauugguauagucuuaaaaaaaauaguagaucacuuggagaaaaugaugauggaaauaacgaagacaacgagaaauuaaggaaaccaaaacauaaaaaauuaaagcaaccagcggaugguaauccugauccaaaugcaaacccaaauguagaucccaaugccaacccaaauguagauccaaaugcaaacccaaauguagauccaaaugcaaacccaaaugcaaacccaaaugcaaacccaaaugcaaacccaaaugcaaacccaaaugcaaacccaaaugcaaacccaaaugcaaaccccaaugcaaauccuaaugcaaauccuaaugcaaacccaaaugcaaauccuaaugcaaacccaaaugcaaacccaaacguagauccuaaugcaaauccaaaugcaaacccaaaugcaaacccaaacgcaaaccccaaugcaaauccuaaugcaaaccccaaugcaaauccuaaugcaaauccuaaugccaauccaaaugcaaauccaaaugcaaacccaaacgcaaaccccaaugcaaauccuaaugccaauccaaaugcaaauccaaaugcaaacccaaaugcaaacccaaaugcaaaccccaaugcaaauccuaauaaaaacaaucaagguaauggacaaggucacaauaugccaaaugacccaaaccgaaauguagaugaaaaugcuaaugccaacgaugcuguaaaaaauaauaauaacgaagaaccaagugaucagcacauagaaaaauauuuaaagauaauaaaaaauucucuuucaacugaaugguccccauguaguguaacuuguggaaaugguauucaaguuagaauaaagccuggcucugcuaauaaaccuaaagaccaauuagauuaugcaaaugauauugaaaaaaaaauuuguaaaauggaaaaauguuccaguguguuuaaugucguaaauaguucaauaggauuaauaaugguauuauccuucuuguuccuuaauuag

SEQ ID NO: 3060 - RNA, 1170 nt, Artificial Sequence
  derived and/or modified CDS sequence (wt) from Pf(Gha1109-058)__BAM84835.1__CSP
augaugagaaaauuagcuauuuuaucuguuucuuccuuuuuauuuguugaggccuuauuccaggaauaccagugcuauggaaguucgucaaacacaaggguucuaaaugaauuaaauuaugauaaugcaggcacuaauuuauauaaugaauuagaaaugaauuauuaugggaaacaggaaaauugguauagucuuaaaaaaaauaguagaucacuuggagaaaaugaugauggaaauaacgaagacaacgagaaauuaaggaaaccaaaacauaaaaaauuaaagcaaccaggggaugguaauccugauccaaaugcaaacccaaauguagaucccaaugccaacccaaauguagauccaaaugcaaacccaaauguagauccaaaugcaaacccaaaugcaaacccaaaugcaaacccaaaugcaaacccaaaugcaaacccaaaugcaaacccaaaugcaaacccaaaugcaaacccaaaugcaaacccaaaugcaaacccaaaugcaaaccccaaugcaaauccuaaugcaaacccaaaugcaaacccaaacguagauccuaaugcaaauccaaaugcaaacccaaaugcaaacccaaacgcaaaccccaaugcaaauccuaaugcaaaccccaaugcaaauccuaaugcaaauccuaaugccaauccaaaugcaaauccaaaugcaaacccaaacgcaaaccccaaugcaaauccuaaugccaauccaaaugcaaauccaaaugcaaacccaaaugcaaacccaaaugcaaaccccaaugcaaauccuaauaaaaacaaucaagguaauggacaaggucacaauaugccaaaugacccaaaccgaaauguagaugaaaaugcuaaugccaacaaugcuguaaaaaauaauaauaacgaagaaccaagugauaagcacauaacagaauauuuaaagaaaauacaaaauucucuuucaacugaaugguccccauguaguguaacuuguggaaaugguauucaaguuagaauaaagccuggcucugcugguaaaucuaaaaacgaauuagauuaugaaaaugauauugaaaaaaaaauuuguaaaauggaaaaauguuccaguguguuuaaugucguaaauaguucaauaggauuaauaaugguauuauccuucuuguuccuuaauuag

SEQ ID NO: 3061 - RNA, 1170 nt, Artificial Sequence
  derived and/or modified CDS sequence (wt) from Pf(Gha1109-105)__BAM84822.1__CSP
augaugagaaaauuagcuauuuuaucuguuucuuccuuuuuauuuguugaggccuuauuccaggaauaccagugcuauggaaguucgucaaacacaaggguucuaaaugaauuaaauuaugauaaugcaggcacuaauuuauauaaugaauuagaaaugaauuauuaugggaaacaggaaaauugguauagucuuaaaaaaaauaguagaucacuuggagaaaaugaugauggaaauaacgaagacaacgagaaauuaaggaaaccaaaacauaaaaaauuaaagcaaccagcggaugguaauccugauccaaaugcaaacccaaauguagaucccaaugcaaauccuaaugcaaaccccaaugcaaauccuaaugcaaauccuaaugccaauccaaaugcaaacccaaauguagaucccaaugccaacccaaauguagauccaaaugcaaacccaaaugcaaacccaaaugcaaacccaaaugcaaacccaaaugcaaacccaaaugcaaaccccaaugcaaauccuaaugcaaacccaaacguagauccuaaugcaaauccaaaugcaaacccaaaugcaaacccaaacgcaaaccccaaugcaaauccuaaugcaaaccccaaugcaaauccuaaugcaaauccuaaugccaauccaaaugcaaauccaaaugcaaacccaaacgcaaaccccaaugcaaaccccaaugcaaauccuaaugccaauccaaaugcaaauccaaaugcaaacccaaaugcaaacccaaaugcaaaccccaaugcaaauccuaauaaaaacaaucaagguaauggacaaggucacaauaugccaaaugacccaaaccgaaauguagaugaaaaugcuaaagccaacaaugcuguaaaaaauaauaauaacgaagaaccaagugauaagcacauagaacaauauuuaaagacaauacaaaauucucuuucaacugaaugguccccauguaguguaacuuguggaaaugguauucaaguuagaauaaagccuggcucugcuaauaaaccuaaagaccaauuagauuaugaaaaugauauugaaaaaaaaauuuguaaaauggaaaaauguuccaguguguuuaaugucguaaauaguucaauaggauuaauaaugguauuauccuucuuguuccuuaauuag

SEQ ID NO: 3062 - RNA, 1170 nt, Artificial Sequence
  derived and/or modified CDS sequence (wt) from Pf(Gha1109-111)__BAM84823.1__CSP
augaugagaaaauuagcuauuuuaucuguuucuuccuuuuuauuuguugaggccuuauuccaggaauaccagugcuauggaaguucgucaaacacaaggguucuaaaugaauuaaauuaugauaaugcaggcacuaauuuauauaaugaauuagaaaugaauuauuaugggaaacaggaaaauugguauagucuuaaaaaaaauaguagaucacuuggagaaaaugaugauggaaauaacgaagacaacgagaaauuaaggaaaccaaaacauaaaaaauuaaagcaaccaggggaugguaauccugauccaaaugcaaacccaaauguagaucccaaugccaacccaaauguagauccaaaugcaaacccaaauguagauccaaaugcaaacccaaaugcaaacccaaaugcaaacccaaaugcaaacccaaaugcaaacccaaaugcaaacccaaaugcaaacccaaaugcaaacccaaaugcaaacccaaaugcaaacccaaaugcaaaccccaaugcaaauccuaaugcaaacccaaaugcaaacccaaacguagauccuaaugcaaauccaaaugcaaacccaaaugcaaacccaaacgcaaaccccaaugcaaauccuaaugcaaaccccaaugcaaauccuaaugcaaauccuaaugccaauccaaaugcaaauccaaaugcaaacccaaacgcaaaccccaaugcaaauccuaaugccaauccaaaugcaaauccaaaugcaaacccaaaugcaaacccaaaugcaaaccccaaugcaaauccuaauaaaaacaaucaagguaauggacaaggucacaauaugccaaaugacccaaaccgaaauguagaugaaaaugcuaaugccaacaaugcuguaaaaaauaauaauaacgaagaaccaagugauaagcacauaaaagaauauuuaaacaaaauacaaaauucuauuucaacugaaugguccccauguaguguaacuuguggaaaugguauucaaguuagaauaaagccuggcucugcugauaaaccuaaagaccaauuagauuauauaaaugauauugaaaaaaaaauuuguaaaauggaaaaauguuccaguguguuuaaugucguaaauaguucaauaggauuaauaaugguauuauccuucuuguuccuuaauuag

SEQ ID NO: 3063 - RNA, 1170 nt, Artificial Sequence
  derived and/or modified CDS sequence (wt) from Pf(Gha1109-125)__BAM84824.1__CSP
augaugagaaaauuagcuauuuuaucuguuucuuccuuuuuauuuguugaggccuuauuccaggaauaccagugcuauggaaguucgucaaacacaaggguucuaaaugaauuaaauuaugauaaugcaggcacuaauuuauauaaugaauuagaaaugaauuauuaugggaaacaggaaaauugguauagucuuaaaaaaaauaguagaucacuuggagaaaaugaugauggaaauaacgaagacaacgagaaauuaaggaaaccaaaacauaaaaaauuaaagcaaccagcggaugguaauccugauccaaaugcaaacccaaauguagaucccaaugccaacccaaauguagauccaaaugcaaacccaaauguagauccaaaugcaaacccaaaugcaaacccaaaugcaaacccaaaugcaaacccaaaugcaaacccaaaugcaaacccaaaugcaaacccaaaugcaaacccaaaugcaaacccaaaugcaaacccaaaugcaaacccaaaugcaaaccccaaugcaaauccuaaugcaaacccaaaugcaaacccaaacguagauccuaaugcaaauccaaaugcaaacccaaacgcaaaccccaaugcaaauccuaaugcaaaccccaaugcaaauccuaaugcaaauccuaaugccaauccaaaugcaaauccaaaugcaaacccaaacgcaaaccccaaugcaaauccuaaugccaauccaaaugcaaauccaaaugcaaacccaaaugcaaacccaaaugcaaaccccaaugcaaauccuaauaaaaacaaucaagguaauggacaaggucacaauaugccaaaugacccaaaccgaaauguagaugaaaaugcuaaugccaacaaugcuguaaaaaauaauaauaacgaagaaccaagugaucagcacauagaaaaauauuuaaagacaauaaaaaauucucuuucaacugaaugguccccauguaguguaacuuguggaaaugguauucaaguuagaauaaagccuggcucugcuaauaaaccuaaagaccaauuagauuaugcaaaugauauugaaaaaaaaauuuguaaaauggaaaaauguuccaguguguuuaaugucguaaauaguucaauaggauuaauaaugguauuauccuucuuguuccuuaauuag

SEQ ID NO: 3064 - RNA, 1170 nt, Artificial Sequence
  derived and/or modified CDS sequence (wt) from Pf(Gha1109-127)__BAM84825.1__CSP
augaugagaaaauuagcuauuuuaucuguuucuuccuuuuuauuuguugaggccuuauuccaggaauaccagugcuauggaaguucgucaaacacaaggguucuaaaugaauuaaauuaugauaaugcaggcacuaauuuauauaaugaauuagaaaugaauuauuaugggaaacaggaaaauugguauagucuuaaaaaaaauaguagaucacuuggagaaaaugaugauggaaauaacgaagacaacgagaaauuaaggaaaccaaaacauaaaaaauuaaagcaaccaggggaugguaauccugauccaaaugcaaacccaaauguagaucccaaugccaacccaaauguagauccaaaugcaaacccaaauguagauccaaaugcaaacccaaaugcaaacccaaaugcaaacccaaaugcaaacccaaaugcaaacccaaaugcaaacccaaaugcaaacccaaaugcaaacccaaaugcaaacccaaaugcaaacccaaaugcaaaccccaaugcaaauccuaaugcaaacccaaaugcaaacccaaacguagauccuaaugcaaauccaaaugcaaacccaaaugcaaacccaaacgcaaaccccaaugcaaauccuaaugcaaaccccaaugcaaauccuaaugcaaauccuaaugccaauccaaaugcaaauccaaaugcaaacccaaacgcaaaccccaaugcaaauccuaaugccaauccaaaugcaaauccaaaugcaaacccaaaugcaaacccaaaugcaaaccccaaugcaaauccuaauaaaaacaaucaagguaauggacaaggucacaauaugccaaaugacccaaaccgaaauguagaugaaaaugcuaaugccaacaaugcuguaaaaaauaauaauaacgaagaaccaagugauaagcacauaacagaauauuuaaagaaaauaaaaaauucucuuucaacugaaugguccccauguaguguaacuuguggaaaugguauucaaguuagaauaaagccuggcucugcugguaaaucuaaaaacgaauuagauuaugaaaaugauauugaaaaaaaaauuuguaaaauggaaaaauguuccaguguguuuaaugucguaaauaguucaauaggauuaauaaugguauuauccuucuuguuccuuaauuag

SEQ ID NO: 3065 - RNA, 1170 nt, Artificial Sequence
  derived and/or modified CDS sequence (wt) from Pf(Gha1109-158)__BAM84826.1__CSP
augaugagaaaauuagcuauuuuaucuguuucuuccuuuuuauuuguugaggccuuauuccaggaauaccagugcuauggaaguucgucaaacacaaggguucuaaaugaauuaaauuaugauaaugcaggcacuaauuuauauaaugaauuagaaaugaauuauuaugggaaacaggaaaauugguauagucuuaaaaaaaauaguagaucacuuggagaaaaugaugauggaaauaacgaagacaacgagaaauuaaggaaaccaaaacauaaaaaauuaaagcaaccagcggaugguaauccugauccaaaugcaaacccaaauguagaucccaaugccaacccaaauguagauccaaaugcaaacccaaauguagauccaaaugcaaacccaaaugcaaacccaaaugcaaacccaaaugcaaacccaaaugcaaacccaaaugcaaacccaaaugcaaacccaaaugcaaacccaaaugcaaacccaaaugcaaacccaaaugcaaauccuaaugcaaacccaaaugcaaacccaaaugcaaacccaaacguagauccuaaugcaaauccaaaugcaaacccaaaugcaaacccaaacgcaaaccccaaugcaaauccuaaugcaaaccccaaugcaaauccuaaugcaaauccuaaugccaauccaaaugcaaauccaaaugcaaacccaaacgcaaaccccaaugcaaauccuaaugccaauccaaaugcaaauccaaaugcaaacccaaaugcaaacccaaaugcaaaccccaaugcaaauccuaauaaaaacaaucaagguaauggacaaggucacaauaugccaaaugacccaaaccgaaauguagaugaaaaugcuaaugccaacaaugcuguaaaaaauaauaauaacgaagaaccaagugauaagcacauagaacaauauuuaaagacaauaaaaaauucucuuucaacugaaugguccccauguaguguaacuuguggaaaugguauucaaguuagaauaaagccuggcucugcuaauaaaccuaaagaccaauuagauuaugcaaaugauauugaaaaaaaaauuuguaaaauggaaaaauguuccaguguguuuaaugucguaaauaguucaauaggauuaauaaugguauuauccuucuuguuccuuaauuag

SEQ ID NO: 3066 - RNA, 1170 nt, Artificial Sequence
  derived and/or modified CDS sequence (wt) from Pf(Gha1109-205)__BAM84832.1__CSP
augaugagaaaauuagcuauuuuaucuguuucuuccuuuuuauuuguugaggccuuauuccaggaauaccagugcuauggaaguucgucaaacacaaggguucuaaaugaauuaaauuaugauaaugcaggcacuaauuuauauaaugaauuagaaaugaauuauuaugggaaacaggaaaauugguauagucuuaaaaaaaauaguagaucacuuggagaaaaugaugauggaaauaacgaagacaacgagaaauuaaggaaaccaaaacauaaaaaauuaaagcaaccagcggaugguaauccugauccaaaugcaaacccaaauguagaucccaaugccaacccaaauguagauccaaaugcaaacccaaauguagauccaaaugcaaacccaaaugcaaacccaaaugcaaacccaaaugcaaacccaaaugcaaacccaaaugcaaacccaaaugcaaacccaaaugcaaacccaaaugcaaacccaaaugcaaacccaaaugcaaaccccaaugcaaauccuaaugcaaacccaaaugcaaacccaaacguagauccuaaugcaaauccaaaugcaaacccaaaugcaaacccaaacgcaaaccccaaugcaaauccuaaugcaaaccccaaugcaaauccuaaugcaaauccuaaugccaauccaaaugcaaauccaaaugcaaacccaaacgcaaaccccaaugcaaauccuaaugccaauccaaaugcaaauccaaaugcaaacccaaaugcaaacccaaaugcaaaccccaaugcaaauccuaauaaaaacaaucaagguaauggacaaggucacaauaugccaaaugacccaaaccgaaauguagaugaaaaugcuaaugccaacaaugcuguaaaaaauaauaauaacgaagaaccaagugaucagcacauagaaaaauauuuaaagauaauacaaaauucucuuucaacugaaugguccccauguaguguaacuuguggaaaugguauucaaguuagaauaaagccuggcucugcuaauaaaccuaaagaccaauuagauuaugcaaaugauauugaaaaaaaaauuuguaaaauggaaaaauguuccaguguguuuaaugucguaaauaguucaauaggauuaauaaugguauuauccuucuuguuccuuaauuag

SEQ ID NO: 3067 - RNA, 1170 nt, Artificial Sequence
  derived and/or modified CDS sequence (wt) from Pf(T9/96)__BAD73957.1__CSP
augaugagaaaauuagcuauuuuaucuguuucuuccuuuuuauuuguugaggccuuauuccaggaauaccagugcuauggaaguucgucaaacacaaggguucuaaaugaauuaaauuaugauaaugcaggcacuaauuuauauaaugaauuagaaaugaauuauuaugggaaacaggaaaauugguauagucuuaaaaaaaauaguagaucacuuggagaaaaugaugauggaaauaacgaagacaacgagaaauuaaggaaaccaaaacauaaaaaauuaaagcaaccagcggaugguaauccugauccaaaugcaaacccaaauguagaucccaaugccaacccaaauguagauccaaaugcaaacccaaauguagauccaaaugcaaacccaaaugcaaacccaaaugcaaacccaaaugcaaacccaaaugcaaacccaaaugcaaacccaaaugcaaacccaaaugcaaacccaaaugcaaacccaaaugcaaacccaaaugcaaauccuaaugcaaacccaaaugcaaacccaaaugcaaacccaaacguagauccuaaugcaaauccaaaugcaaacccaaaugcaaacccaaacgcaaaccccaaugcaaauccuaaugcaaaccccaaugcaaauccuaaugcaaauccuaaugccaauccaaaugcaaauccaaaugcaaacccaaacgcaaaccccaaugcaaauccuaaugccaauccaaaugcaaauccaaaugcaaacccaaaugcaaacccaaaugcaaaccccaaugcaaauccuaauaaaaacaaucaagguaauggacaaggucacaauaugccaaaugacccaaaccgaaauguagaugaaaaugcuaaugccaacaaugcuguaaaaaauaauaauaacgaagaaccaagugauaagcacauagaacaauauuuaaagacaauaaaaaauucucuuucaacugaaugguccccauguaguguaacuuguggaaaugguauucaaguuagaauaaagccuggcucugcuaauaaaccuaaagacgaauuagauuaugcaaaugauauugaaaaaaaaauuuguaaaauggaaaaauguuccaguguguuuaaugucguaaauaguucaauaggauuaauaaugguauuauccuucuuguuccuuaauuag

SEQ ID NO: 3068 - RNA, 1170 nt, Artificial Sequence
  derived and/or modified CDS sequence (wt) from Pf(Tz93-015)__BAM84752.1__CSP
augaugagaaaauuagcuauuuuaucuguuucuuccuuuuuauuuguugaggccuuauuccaggaauaccagugcuauggaaguucgucaaacacaaggguucuaaaugaauuaaauuaugauaaugcaggcacuaauuuauauaaugaauuagaaaugaauuauuaugggaaacaggaaaauugguauagucuuaaaaaaaauaguagaucacuuggagaaaaugaugauggaaauaacgaagacaacgagaaauuaaggaaaccaaaacauaaaaaauuaaagcaaccaggggaugguaauccugauccaaaugcaaacccaaauguagaucccaaugccaacccaaauguagauccaaaugcaaacccaaauguagauccaaaugcaaacccaaaugcaaacccaaaugcaaacccaaaugcaaacccaaaugcaaacccaaaugcaaacccaaaugcaaacccaaaugcaaaccccaaugcaaauccuaaugcaaauccuaaugcaaacccaaaugcaaauccuaaugcaaacccaaaugcaaacccaaacguagauccuaaugcaaauccaaaugcaaacccaaaugcaaacccaaacgcaaaccccaaugcaaauccuaaugcaaaccccaaugcaaauccuaaugcaaauccuaaugccaauccaaaugcaaauccaaaugcaaacccaaacgcaaaccccaaugcaaauccuaaugccaauccaaaugcaaauccaaaugcaaacccaaaugcaaacccaaaugcaaaccccaaugcaaauccuaauaaaaacaaucaagguaauggacaaggucacaauaugccaaaugacccaaaccgaaauguagaugaaaaugcuaaugccaacgaugcuguaaaaaauaauaauaacgaagaaccaagugaucagcacauagaaaaauauuuaaagauaauaaaaaauucucuuucaacugaaugguccccauguaguguaacuuguggaaaugguauucaaguuagaauaaagccuggcucugcuaauaaaccuaaagaccaauuagauuaugcaaaugauauugaaaaaaaaauuuguaaaauggaaaaauguuccaguguguuuaaugucguaaauaguucaauaggauuaauaaugguauuauccuucuuguuccuuaauuag

SEQ ID NO: 3069 - RNA, 1170 nt, Artificial Sequence
  derived and/or modified CDS sequence (wt) from Pf(Tz93-050)__BAM84762.1__CSP
augaugagaaaauuagcuauuuuaucuguuucuuccuuuuuauuuguugaggccuuauuccaggaauaccagugcuauggaaguucgucaaacacaaggguucuaaaugaauuaaauuaugauaaugcaggcacuaauuuauauaaugaauuagaaaugaauuauuaugggaaacaggaaaauugguauagucuuaaaaaaaauaguagaucacuuggagaaaaugaugauggaaauaacgaagacaacgagaaauuaaggaaaccaaaacauaaaaaauuaaagcaaccaggggaugguaauccugauccaaaugcaaacccaaauguagaucccaaugccaacccaaauguagauccaaaugcaaacccaaauguagauccaaaugcaaacccaaaugcaaacccaaaugcaaacccaaaugcaaacccaaaugcaaacccaaaugcaaacccaaaugcaaacccaaaugcaaaccccaaugcaaauccuaaugcaaauccuaaugcaaacccaaaugcaaauccuaaugcaaacccaaaugcaaacccaaacguagauccuaaugcaaauccaaaugcaaacccaaaugcaaacccaaacgcaaaccccaaugcaaauccuaaugcaaaccccaaugcaaauccuaaugcaaauccuaaugccaauccaaaugcaaauccaaaugcaaacccaaacgcaaaccccaaugcaaauccuaaugccaauccaaaugcaaauccaaaugcaaacccaaaugcaaacccaaaugcaaaccccaaugcaaauccuaauaaaaacaaucaagguaauggacaaggucacaauaugccaaaugacccaaaccgaaauguagaugaaaaugcuaaugccaacaauccuguaaaaaauaauaauaacgaagaaccaagugauaagcacauaacagaauauuuaaagaaaauaaaaaauucuauuucaacugaaugguccccauguaguguaacuuguggaaaugguauucaaguuagaauaaagccuggcucugcuaauaaaccuaaagacgaauuagauuaugaaaaugauauugaaaaaaaaauuuguaaaauggaaaaauguuccaguguguuuaaugucguaaauaguucaauaggauuaauaaugguauuauccuucuuguuccuuaauuag

SEQ ID NO: 3070 - RNA, 1170 nt, Artificial Sequence
  derived and/or modified CDS sequence (wt) from Pf(Tz93-105)__BAM84774.1__CSP
augaugagaaaauuagcuauuuuaucuguuucuuccuuuuuauuuguugaggccuuauuccaggaauaccagugcuauggaaguucgucaaacacaaggguucuaaaugaauuaaauuaugauaaugcaggcacuaauuuauauaaugaauuagaaaugaauuauuaugggaaacaggaaaauugguauagucuuaaaaaaaauaguagaucacuuggagaaaaugaugauggaaauaacgaagacaacgagaaauuaaggaaaccaaaacauaaaaaauuaaagcaaccaggggaugguaauccugauccaaaugcaaacccaaauguagaucccaaugccaacccaaauguagauccaaaugcaaacccaaauguagauccaaaugcaaacccaaaugcaaacccaaaugcaaacccaaaugcaaacccaaaugcaaacccaaaugcaaacccaaaugcaaacccaaaugcaaacccaaaugcaaacccaaaugcaaacccaaaugcaaaccccaaugcaaauccuaaugcaaacccaaaugcaaacccaaacguagauccuaaugcaaauccaaaugcaaacccaaaugcaaacccaaacgcaaaccccaaugcaaauccuaaugcaaaccccaaugcaaauccuaaugcaaauccuaaugccaauccaaaugcaaauccaaaugcaaacccaaacgcaaaccccaaugcaaauccuaaugccaauccaaaugcaaauccaaaugcaaacccaaaugcaaacccaaaugcaaaccccaaugcaaauccuaauaaaaacaaucaagguaauggacaaggucacaauaugccaaaugacccaaaccgaaauguagaugaaaaugcuaaugccaacaaugcuguaaaaaauaauaauaacgaagaaccaagugaucagcacauagaaaaauauuuaaagauaauacaaaauucucuuucaacugaaugguccccauguaguguaacuuguggaaaugguauucaaguuagaauaaagccuggcucugcuaauaaaccuaaagaccaauuagauuaugcaaaugauauugaaaaaaaaauuuguaaaauggaaaaauguuccaguguguuuaaugucguaaauaguucaauaggauuaauaaugguauuauccuucuuguuccuuaauuag

SEQ ID NO: 3071 - RNA, 1170 nt, Artificial Sequence
  derived and/or modified CDS sequence (wt) from Pf(Tz93-121)__BAM84777.1__CSP
augaugagaaaauuagcuauuuuaucuguuucuuccuuuuuauuuguugaggccuuauuccaggaauaccagugcuauggaaguucgucaaacacaaggguucuaaaugaauuaaauuaugauaaugcaggcacuaauuuauauaaugaauuagaaaugaauuauuaugggaaacaggaaaauugguauagucuuaaaaaaaauaguagaucacuuggagaaaaugaugauggaaauaacgaagacaacgagaaauuaaggaaaccaaaacauaaaaaauuaaagcaaccaggggaugguaauccugauccaaaugcaaacccaaauguagaucccaaugccaacccaaauguagauccaaaugcaaacccaaauguagauccaaaugcaaacccaaaugcaaacccaaaugcaaacccaaaugcaaacccaaaugcaaacccaaaugcaaacccaaaugcaaacccaaaugcaaacccaaaugcaaauccuaaugcaaacccaaaugcaaacccaaacguagauccuaaugcaaacccaaaugcaaacccaaacgcaaaccccaaugcaaaccccaaugcaaauccuaaugcaaauccuaaugccaauccaaaugcaaauccaaaugcaaacccaaacgcaaaccccaaugcaaauccuaaugccaauccaaaugcaaauccaaaugcaaacccaaacgcaaaccccaaugcaaauccuaaugccaauccaaaugcaaauccaaaugcaaacccaaaugcaaacccaaaugcaaaccccaaugcaaauccuaauaaaaacaaucaagguaauggacaaggucacaauaugccaaaugacccaaaccgaaauguagaugaaaaugcuaaugccaacaaugcuguaaaaaauaauaauaacgaagaaccaagugaucagcacauagaaaaauauuuaaagaaaauaaaaaauucuauuucaacugaaugguccccauguaguguaacuuguggaaaugguauucaaguuagaauaaagccuggcucugcuaauaaaccuaaagacgaauuagauuaugaaaaugauauugaaaaaaaaauuuguaaaauggaaaaauguuccaguguguuuaaugucguaaauaguucaauaggauuaauaaugguauuauccuucuuguuccuuaauuag

SEQ ID NO: 3072 - RNA, 1170 nt, Artificial Sequence
  derived and/or modified CDS sequence (wt) from Pf(Tz98-032)__BAM84786.1__CSP
augaugagaaaauuagcuauuuuaucuguuucuuccuuuuuauuuguugaggccuuauuccaggaauaccagugcuauggaaguucgucaaacacaaggguucuaaaugaauuaaauuaugauaaugcaggcacuaauuuauauaaugaauuagaaaugaauuauuaugggaaacaggaaaauugguauagucuuaaaaaaaauaguagaucacuuggagaaaaugaugauggaaauaacgaagacaacgagaaauuaaggaaaccaaaacauaaaaaauuaaagcaaccagcggaugguaauccugauccaaaugcaaacccaaauguagaucccaaugccaacccaaauguagauccaaaugcaaacccaaauguagauccaaaugcaaacccaaaugcaaacccaaaugcaaacccaaaugcaaacccaaaugcaaacccaaaugcaaacccaaaugcaaacccaaaugcaaacccaaaugcaaacccaaaugcaaacccaaaugcaaacccaaaugcaaaccccaaugcaaauccuaaugcaaacccaaaugcaaacccaaacguagauccuaaugcaaauccaaaugcaaacccaaacgcaaaccccaaugcaaauccuaaugcaaaccccaaugcaaauccuaaugcaaauccuaaugccaauccaaaugcaaauccaaaugcaaacccaaacgcaaaccccaaugcaaauccuaaugccaauccaaaugcaaauccaaaugcaaacccaaaugcaaacccaaaugcaaaccccaaugcaaauccuaauaaaaacaaucaagguaauggacaaggucacaauaugccaaaugacccaaaccgaaauguagaugaaaaugcuaaugccaacaaugcuguaaaaaauaauaauaacgaagaaccaagugauaagcacauagaacaauauuuaaacaaaauaaaaaauucuauuucaacugaaugguccccauguaguguaacuuguggaaaugguauucaaguuagaauaaagccuggcucugcuaauaaaccuaaagacgaauuaaauuaugaaaaugauauugaaaaaaaaauuuguaaaauggaaaaauguuccaguguguuuaaugucguaaauaguucaauaggauuaauaaugguauuauccuucuuguuccuuaauuag

SEQ ID NO: 3073 - RNA, 1170 nt, Artificial Sequence
  derived and/or modified CDS sequence (wt) from Pf(Tz98-107)__BAM84796.1__CSP
augaugagaaaauuagcuauuuuaucuguuucuuccuuuuuauuuguugaggccuuauuccaggaauaccagugcuauggaaguucgucaaacacaaggguucuaaaugaauuaaauuaugauaaugcaggcacuaauuuauauaaugaauuagaaaugaauuauuaugggaaacaggaaaauugguauagucuuaaaaaaaauaguagaucacuuggagaaaaugaugauggaaauaacgaagacaacgagaaauuaaggaaaccaaaacauaaaaaauuaaagcaaccagcggaugguaauccugauccaaaugcaaacccaaauguagaucccaaugccaacccaaauguagauccaaaugcaaacccaaauguagauccaaaugcaaacccaaaugcaaacccaaaugcaaacccaaaugcaaacccaaaugcaaacccaaaugcaaacccaaaugcaaacccaaaugcaaacccaaaugcaaacccaaaugcaaacccaaaugcaaaccccaaugcaaauccuaaugcaaacccaaaugcaaacccaaacguagauccuaaugcaaauccaaaugcaaacccaaaugcaaacccaaacgcaaaccccaaugcaaauccuaaugcaaaccccaaugcaaauccuaaugcaaauccuaaugccaauccaaaugcaaauccaaaugcaaacccaaacgcaaaccccaaugcaaauccuaaugccaauccaaaugcaaauccaaaugcaaacccaaaugcaaacccaaaugcaaaccccaaugcaaauccuaauaaaaacaaucaagguaauggacaaggucacaauaugccaaaugacccaaaccgaaauguagaugaaaaugcuaaugccaacaaugcuguaaaaaauaauaauaacgaagaaccaagugaucagcacauagaaaaauauuuaaagagaauacaaaauucucuuucaacugaaugguccccauguaguguaacuuguggaaaugguauucaaguuagaauaaagccuggcucugcuaauaaaccuaaagaccaauuagauuaugcaaaugauauugaaaaaaaaauuuguaaaauggaaaaauguuccaguguguuuaaugucguaaauaguucaauaggauuaauaaugguauuauccuucuuguuccuuaauuag

SEQ ID NO: 3074 - RNA, 1167 nt, Artificial Sequence
  derived and/or modified CDS sequence (wt) from Pf(Asembo Bay)__AAN87599.1__CSP
augaugagaaaauuagcuauuuuaucuguuucuuccuuuuuauuuguugaggccuuauuccaggaauaccagugcuauggaaguucgucaaacacaaggguucuaaaugaauuaaauuaugauaaugcaggcacuaauuuauauaaugaauuagaaaugaauuauuaugggaaacaggaaaauugguauagucuuaaaaaaaauaguagaucacuuggagaaaaugaugauggaaauaauaauaauggagauaauggucgugaagguaaagaugaagauaaaagagauggaaauaacgaagacaacgagaaauuaaggaaaccaaaacauaaaaaauuaaagcaaccagcggaugguaauccugauccaaaugcaaacccaaauguagaucccaaugccaacccaaauguagauccaaaugcaaacccaaauguagauccaaaugcaaacccaaaugcaaacccaaaugcaaaccccaaugcaaauccaaaugcaaauccuaaugcaaacccaaaugcaaauccuaaugcaaacccaaaugcaaacccaaacguagauccuaaugcaaauccaaaugcaaacccaaaugcaaacccaaacgcaaaccccaaugcaaauccuaaugcaaaccccaaugcaaauccuaaugcaaauccuaaugccaauccaaaugcaaauccaaaugcaaacccaaacgcaaaccccaaugcaaauccuaaugccaauccaaaugcaaauccaaaugcaaacccaaaugcaaacccaaaugcaaaccccaaugcaaauccuaauaaaaacaaucaagguaauggacaaggucacaauaugccaaaugacccaaaccgaaauguagaugaaaaugcuaaugccaacaaugcuguaaaaaauaauaauaacgaagaaccaagugauaagcacauagaacaauauuuaaacaaaauacaaaauucucuuucaacugaaugguccccauguaguguaacuuguggaaaugguauucaaguuagaauaaagccuggcucugcuaauaaaccuaaagaccaauuagauuaugcaaaugauauugaaaaaaaaauuuguaaaauggaaaaauguuccaguguguuuaaugucguaaauaguucaauaggauuaauaaugguauuauccuucuuguuccuuaauuag

SEQ ID NO: 3075 - RNA, 1158 nt, Artificial Sequence
  derived and/or modified CDS sequence (wt) from Pf(Asembo Bay)__AAN87581.1__CSP
augaugagaaaauuagcuauuuuaucuguuucuuccuuuuuauuuguugaggccuuauuccaggaauaccagugcuauggaaguucgucaaacacaaggguucuaaaugaauuaaauuaugauaaugcaggcacuaauuuauauaaugaauuagaaaugaauuauuaugggaaacaggaaaauugguauagucuuaaaaaaaauaguagaucacuuggagaaaaugaugauggaaauaacgaagacaacgagaaauuaaggaaaccaaaacauaaaaaauuaaagcaaccagcggaugguaauccugauccaaaugcaaacccaaauguagaucccaaugccaacccaaauguagauccaaaugcaaacccaaauguagauccaaaugcaaacccaaaugcaaacccaaaugcaaacccaaaugcaaacccaaaugcaaacccaaaugcaaacccaaaugcaaacccaaaugcaaacccaaaugcaaacccaaaugcaaaccccaaugcaaauccuaaugcaaacccaaaugcaaacccaaacguagauccuaaugcaaauccaaaugcaaacccaaaugcaaacccaaacgcaaaccccaaugcaaauccuaaugcaaaccccaaugcaaauccuaaugcaaauccuaaugccaauccaaaugcaaauccaaaugcaaacccaaacgcaaaccccaaugcaaauccuaaugccaauccaaaugcaaauccaaaugcaaacccaaaugcaaacccaaaugcaaaccccaaugcaaauccuaauaaaaacaaucaagguaauggacaaggucacaauaugccaaaugacccaaaccgaaauguagaugaaaaugcuaaagccaacaaugcuguaaaaaauaauaauaacgaagaaccaagugauaagcacauaaaacaauauuuaaagaaaauacaaaauucuauuucaacugaaugguccccauguaguguaacuuguggaaaugguauucaaguuagaauaaagccuggcucugcugauaaaccuaaagaccaauuagauuaugauaaugauauugaaaaaaaaauuuguaaaauggaaaaauguuccaguguguuuaaugucguaaauaguucaauaggauuaauaaugguauuauccuucuuguuccuuaauuag

SEQ ID NO: 3076 - RNA, 1158 nt, Artificial Sequence
  derived and/or modified CDS sequence (wt) from Pf(Gha1108-115)__BAM84810.1__CSP
augaugagaaaauuagcuauuuuaucuguuucuuccuuuuuauuuguugaggccuuauuccaggaauaccagugcuauggaaguucgucaaacacaaggguucuaaaugaauuaaauuaugauaaugcaggcacuaauuuauauaaugaauuagaaaugaauuauuaugggaaacaggaaaauugguauagucuuaaaaaaaauaguagaucacuuggagaaaaugaugauggaaauaacgaagacaacgagaaauuaaggaaaccaaaacauaaaaaauuaaagcaaccagcggaugguaauccugauccaaaugcaaacccaaauguagaucccaaugccaacccaaauguagauccaaaugcaaacccaaauguagauccaaaugcaaacccaaaugcaaacccaaaugcaaacccaaaugcaaacccaaaugcaaacccaaaugcaaacccaaaugcaaacccaaaugcaaacccaaaugcaaaccccaaugcaaacccaaacguagauccuaaugcaaauccaaaugcaaacccaaaugcaaacccaaacgcaaaccccaaugcaaauccuaaugcaaauccuaaugccaauccaaaugcaaauccaaaugcaaacccaaacgcaaaccccaaugcaaauccuaaugccaauccaaaugcaaauccaaaugcaaacccaaacgcaaaccccaaugcaaauccuaaugccaauccaaaugcaaauccaaaugcaaacccaaaugcaaacccaaaugcaaaccccaaugcaaauccuaauaaaaacaaucaagguaauggacaaggucacaauaugccaaaugacccaaaccgaaauguagaugaaaaugcuaaugccaacaaugcuguaaaaaauaauaauaacgaagaaccaagugaucagcacauagaaaaauauuuacagaaaauacaaaauucucuuucaacugaaugguccccauguaguguaacuuguggaaaugguauucaaguuagaauaaagccuggcucugcuaauaaaccuaaagaccaauuaaauuaugaaaaugauauugaaaaaaaaauuuguaaaauggaaaaauguuccaguguguuuaaugucguaaauaguucaauaggauuaauaaugguauuauccuucuuguuccuuaauuag

SEQ ID NO: 3077 - RNA, 1158 nt, Artificial Sequence
  derived and/or modified CDS sequence (wt) from Pf(Gha1108-119)__BAM84811.1__CSP
augaugagaaaauuagcuauuuuaucuguuucuuccuuuuuauuuguugaggccuuauuccaggaauaccagugcuauggaaguucgucaaacacaaggguucuaaaugaauuaaauuaugauaaugcaggcacuaauuuauauaaugaauuagaaaugaauuauuaugggaaacaggaaaauugguauagucuuaaaaaaaauaguagaucacuuggagaaaaugaugauggaaauaacgaagacaacgagaaauuaaggaaaccaaaacauaaaaaauuaaagcaaccaggggaugguaauccugauccaaaugcaaacccaaauguagaucccaaugccaacccaaauguagauccaaaugcaaacccaaauguagauccaaaugcaaacccaaaugcaaacccaaaugcaaacccaaaugcaaacccaaaugcaaacccaaaugcaaacccaaaugcaaacccaaaugcaaaccccaaugcaaauccuaaugcaaacccaaaugcaaauccuaaugcaaacccaaaugcaaacccaaacguagauccuaaugcaaauccaaaugcaaacccaaaugcaaacccaaacgcaaaccccaaugcaaauccuaaugcaaaccccaaugcaaauccuaaugcaaauccuaaugccaauccaaaugcaaauccaaaugcaaacccaaacgcaaaccccaaugcaaauccuaaugccaauccaaaugcaaauccaaaugcaaacccaaaugcaaacccaaaugcaaaccccaaugcaaauccuaauaaaaacaaucaagguaauggacaaggucacaauaugccaaaugacccaaaccgaaauguagaugaaaaugcuaaugccaacaaugcuguaaaaaauaauaauaacgaagaaccaagugaucagcacauagaaaaauauuuaaagacaauaaaaaauucucuuucaacugaaugguccccauguaguguaacuuguggaaaugguauucaaguuagaauaaagccuggcucugcuaauaaaccuaaagaccaauuagauuaugaaaaugauauugaaaaaaaaauuuguaaaauggaaaaauguuccaguguguuuaaugucguaaauaguucaauaggauuaauaaugguauuauccuucuuguuccuuaauuag

SEQ ID NO: 3078 - RNA, 1158 nt, Artificial Sequence
  derived and/or modified CDS sequence (wt) from Pf(Gha1109-071)__BAM84836.1__CSP
augaugagaaaauuagcuauuuuaucuguuucuuccuuuuuauuuguugaggccuuauuccaggaauaccagugcuauggaaguucgucaaacacaaggguucuaaaugaauuaaauuaugauaaugcaggcacuaauuuauauaaugaauuagaaaugaauuauuaugggaaacaggaaaauugguauagucuuaaaaaaaauaguagaucacuuggagaaaaugaugauggaaauaacgaagacaacgagaaauuaaggaaaccaaaacauaaaaaauuaaagcaaccaggggaugguaauccugauccaaaugcaaacccaaauguagaucccaaugccaacccaaauguagauccaaaugcaaacccaaauguagauccaaaugcaaacccaaaugcaaacccaaaugcaaacccaaaugcaaacccaaaugcaaacccaaaugcaaacccaaaugcaaaccccaaugcaaaccccaaugcaaauccuaaugcaaauccuaaugcaaacccaaaugcaaauccuaaugcaaacccaaaugcaaacccaaacguagauccuaaugcaaauccaaaugcaaacccaaacgcaaaccccaaugcaaauccuaaugcaaaccccaaugcaaauccuaaugcaaauccuaaugccaauccaaaugcaaauccaaaugcaaacccaaacgcaaaccccaaugcaaauccuaaugccaauccaaaugcaaauccaaaugcaaacccaaaugcaaacccaaaugcaaaccccaaugcaaauccuaauaaaaacaaucaagguaauggacaaggucacaauaugccaaaugacccaaaccgaaauguagaugaaaaugcuaaugccaacaaugcuguaaaaaauaauaauaacgaagaaccaagugaucagcacauagaaaaauauauaaagaaaauacaaaauucucuuucaacugaaugguccccauguaguguaacuuguggaaaugguauucaaguuagaauaaagccuggcucugcuaauaaaccuaaagacgaauuaaauuaugaaaaugauauugaaaaaaaaauuuguaaaauggaaaaauguuccaguguguuuaaugucguaaauaguucaauaggauuaauaaugguauuauccuucuuguuccuuaauuag

SEQ ID NO: 3079 - RNA, 1158 nt, Artificial Sequence
  derived and/or modified CDS sequence (wt) from Pf(Gha1109-163)__BAM84827.1__CSP
augaugagaaaauuagcuauuuuaucuguuucuuccuuuuuauuuguugaggccuuauuccaggaauaccagugcuauggaaguucgucaaacacaaggguucuaaaugaauuaaauuaugauaaugcaggcacuaauuuauauaaugaauuagaaaugaauuauuaugggaaacaggaaaauugguauagucuuaaaaaaaauaguagaucacuuggagaaaaugaugauggaaauaacgaagacaacgagaaauuaaggaaaccaaaacauaaaaaauuaaagcaaccagcggaugguaauccugauccaaaugcaaacccaaauguagaucccaaugccaacccaaauguagauccaaaugcaaacccaaauguagauccaaaugcaaacccaaaugcaaacccaaaugcaaacccaaaugcaaacccaaaugcaaacccaaaugcaaacccaaaugcaaacccaaaugcaaacccaaaugcaaacccaaaugcaaacccaaaugcaaaccccaaugcaaauccuaaugcaaacccaaaugcaaacccaaacguagauccuaaugcaaauccaaaugcaaacccaaacgcaaaccccaaugcaaauccuaaugcaaaccccaaugcaaauccuaaugcaaauccuaaugccaauccaaaugcaaauccaaaugcaaacccaaacgcaaaccccaaugcaaauccuaaugccaauccaaaugcaaauccaaaugcaaacccaaaugcaaacccaaaugcaaaccccaaugcaaauccuaauaaaaacaaucaagguaauggacaaggucacaauaugccaaaugacccaaaccgaaauguagaugaaaaugcuaaugccaacaaugcuguaaaaaauaauaauaacgaagaaccaagugaucagcacauagaaaaauauuuaaagacaauacaaaauucucuuucaacugaaugguccccauguaguguaacuuguggaaaugguauucaaguuagaauaaagccuggcucugcuaauaaaccuaaagaccaauuagauuaugcaaaugauauugaaaaaaaaauuuguaaaauggaaaaauguuccaguguguuuaaugucguaaauaguucaauaggauuaauaaugguauuauccuucuuguuccuuaauuag

SEQ ID NO: 3080 - RNA, 1158 nt, Artificial Sequence
  derived and/or modified CDS sequence (wt) from Pf(Tz93-007)__BAM84748.1__CSP
augaugagaaaauuagcuauuuuaucuguuucuuccuuuuuauuuguugaggccuuauuccaggaauaccagugcuauggaaguucgucaaacacaaggguucuaaaugaauuaaauuaugauaaugcaggcacuaauuuauauaaugaauuagaaaugaauuauuaugggaaacaggaaaauugguauagucuuaaaaaaaauaguagaucacuuggagaaaaugaugauggaaauaacgaagacaacgagaaauuaaggaaaccaaaacauaaaaaauuaaagcaaccagcggaugguaauccugauccaaaugcaaacccaaauguagaucccaaugccaacccaaauguagauccaaaugcaaacccaaauguagauccaaaugcaaacccaaaugcaaacccaaaugcaaacccaaaugcaaacccaaaugcaaacccaaaugcaaacccaaaugcaaacccaaaugcaaacccaaaugcaaacccaaaugcaaauccuaaugcaaacccaaaugcaaacccaaaugcaaacccaaacguagauccuaaugcaaauccaaaugcaaacccaaaugcaaacccaaacgcaaaccccaaugcaaauccuaaugcaaaccccaaugcaaauccuaaugcaaauccuaaugccaauccaaaugcaaauccaaaugcaaacccaaacgcaaaccccaaugcaaauccuaaugccaauccaaaugcaaauccaaaugcaaacccaaaugcaaacccaaaugcaaaccccaaugcaaauccuaauaaaaacaaucaagguaauggacaaggucacaauaugccaaaugacccaaaccgaaauguagaugaaaaugcuaaugccaacaaugcuguaaaaaauaauaauaacgaagaaccaagugauaagcacauagaacaauauuuaaagacaauaaaaaauucucuuucaacugaaugguccccauguaguguaacuuguggaaaugguauucaaguuagaauaaagccuggcucugcuaauaaaccuaaagacgaauuagauuaugcaaaugauauugaaaaaaaaauuuguaaaauggaaaaauguuccaguguguuuaaugucguaaauaguucaauaggauuaauaaugguauuauccuucuuguuccuuaauuag

SEQ ID NO: 3081 - RNA, 1158 nt, Artificial Sequence
  derived and/or modified CDS sequence (wt) from Pf(Tz93-008)__BAM84749.1__CSP
augaugagaaaauuagcuauuuuaucuguuucuuccuuuuuauuuguugaggccuuauuccaggaauaccagugcuauggaaguucgucaaacacaaggguucuaaaugaauuaaauuaugauaaugcaggcacuaauuuauauaaugaauuagaaaugaauuauuaugggaaacaggaaaauugguauagucuuaaaaaaaauaguagaucacuuggagaaaaugaugauggaaauaacgaagacaacgagaaauuaaggaaaccaaaacauaaaaaauuaaagcaaccagcggaugguaauccugauccaaaugcaaacccaaauguagaucccaaugccaacccaaauguagauccaaaugcaaacccaaauguagauccaaaugcaaacccaaaugcaaacccaaaugcaaacccaaaugcaaacccaaaugcaaacccaaaugcaaacccaaaugcaaacccaaaugcaaacccaaaugcaaacccaaaugcaaaccccaaugcaaauccuaaugcaaacccaaaugcaaacccaaacguagauccuaaugcaaauccaaaugcaaacccaaaugcaaacccaaacgcaaaccccaaugcaaauccuaaugcaaaccccaaugcaaauccuaaugcaaauccuaaugccaauccaaaugcaaauccaaaugcaaacccaaacgcaaaccccaaugcaaauccuaaugccaauccaaaugcaaauccaaaugcaaacccaaaugcaaacccaaaugcaaaccccaaugcaaauccuaauaaaaacaaucaagguaauggacaaggucacaauaugccaaaugacccaaaccgaaauguagaugaaaaugcuaaugccaacaaugcuguaaaaaauaauaauaacgaagaaccaagugauaagcacauaacagaauauuuaaagaaaauacaaaauucucuuucaacugaaugguccccauguaguguaacuuguggaaaugguauucaaguuagaauaaagccuggcucugcugguaaaucuaaaaacgaauuagauuaugaaaaugauauugaaaaaaaaauuuguaaaauggaaaaauguuccaguguguuuaaugucguaaauaguucaauaggauuaauaaugguauuauccuucuuguuccuuaauuag

SEQ ID NO: 3082 - RNA, 1158 nt, Artificial Sequence
  derived and/or modified CDS sequence (wt) from Pf(Tz93-013)__BAM84751.1__CSP
augaugagaaaauuagcuauuuuaucuguuucuuccuuuuuauuuguugaggccuuauuccaggaauaccagugcuauggaaguucgucaaacacaaggguucuaaaugaauuaaauuaugauaaugcaggcacuaauuuauauaaugaauuagaaaugaauuauuaugggaaacaggaaaauugguauagucuuaaaaaaaauaguagaucacuuggagaaaaugaugauggaaauaacgaagacaacgagaaauuaaggaaaccaaaacauaaaaaauuaaagcaaccagcggaugguaauccugauccaaaugcaaacccaaauguagaucccaaugccaacccaaauguagauccaaaugcaaacccaaauguagauccaaaugcaaacccaaaugcaaacccaaaugcaaacccaaaugcaaacccaaaugcaaacccaaaugcaaacccaaaugcaaacccaaaugcaaacccaaaugcaaacccaaaugcaaaccccaaugcaaauccuaaugcaaacccaaaugcaaacccaaacguagauccuaaugcaaauccaaaugcaaacccaaaugcaaacccaaacgcaaaccccaaugcaaauccuaaugcaaaccccaaugcaaauccuaaugcaaauccuaaugccaauccaaaugcaaauccaaaugcaaacccaaacgcaaaccccaaugcaaauccuaaugccaauccaaaugcaaauccaaaugcaaacccaaaugcaaacccaaaugcaaaccccaaugcaaauccuaauaaaaacaaucaagguaauggacaaggucacaauaugccaaaugacccaaaccgaaauguaaaugaaaaugcuaaugccaacaaugcuguaaaaaauaauaauaacgaagaaccaagugauaagcacauaacagaauauuuaaagaaaauacaaaauucucuuucaacugaaugguccccauguaguguaacuuguggaaaugguauucaaguuagaauaaagccuggcucugcugguaaaucuagagacgaauuagauuaugaaaaugauauugaaaaaaaaauuuguaaaauggaaaaauguuccaguguguuuaaugucguaaauaguucaauaggauuaauaaugguauuauccuucuuguuccuuaauuag

SEQ ID NO: 3083 - RNA, 1158 nt, Artificial Sequence
  derived and/or modified CDS sequence (wt) from Pf(Tz93-048)__BAM84761.1__CSP
augaugagaaaauuagcuauuuuaucuguuucuuccuuuuuauuuguugaggccuuauuccaggaauaccagugcuauggaaguucgucaaacacaaggguucuaaaugaauuaaauuaugauaaugcaggcacuaauuuauauaaugaauuagaaaugaauuauuaugggaaacaggaaaauugguauagucuuaaaaaaaauaguagaucacuuggagaaaaugaugauggaaauaacgaagacaacgagaaauuaaggaaaccaaaacauaaaaaauuaaagcaaccagcggaugguaauccugauccaaaugcaaacccaaauguagaucccaaugccaacccaaauguagauccaaaugcaaacccaaauguagauccaaaugcaaacccaaaugcaaacccaaaugcaaacccaaaugcaaacccaaaugcaaacccaaaugcaaacccaaaugcaaacccaaaugcaaacccaaaugcaaacccaaaugcaaacccaaaugcaaaccccaaugcaaauccuaaugcaaacccaaaugcaaacccaaacguagauccuaaugcaaauccaaaugcaaacccaaacgcaaaccccaaugcaaauccuaaugcaaaccccaaugcaaauccuaaugcaaauccuaaugccaauccaaaugcaaauccaaaugcaaacccaaacgcaaaccccaaugcaaauccuaaugccaauccaaaugcaaauccaaaugcaaacccaaaugcaaacccaaaugcaaaccccaaugcaaauccuaauaaaaacaaucaagguaauggacaaggucacaauaugccaaaugacccaaaccgaaauguagaugaaaaugcuaaugccaacaaugcuguaaaaaauaauaauaacgaagaaccaagugaucagcacauagaaaaauauuuaaagauaauaaaaaauucucuuucaacugaaugguccccauguaguguaacuuguggaaaugguauucaaguuagaauaaagccuggcucugcuaauaaaccuaaagaccaauuagauuaugcaaaugauauugaaaaaaaaauuuguaaaauggaaaaauguuccaguguguuuaaugucguaaauaguucaauaggauuaauaaugguauuauccuucuuguuccuuaauuag

SEQ ID NO: 3084 - RNA, 1158 nt, Artificial Sequence
  derived and/or modified CDS sequence (wt) from Pf(Tz93-120)__BAM84776.1__CSP
augaugagaaaauuagcuauuuuaucuguuucuuccuuuuuauuuguugaggccuuauuccaggaauaccagugcuauggaaguucgucaaacacaaggguucuaaaugaauuaaauuaugauaaugcaggcacuaauuuauauaaugaauuagaaaugaauuauuaugggaaacaggaaaauugguauagucuuaaaaaaaauaguagaucacuuggagaaaaugaugauggaaauaacgaagacaacgagaaauuaaggaaaccaaaacauaaaaaauuaaagcaaccagcggaugguaauccugauccaaaugcaaacccaaauguagaucccaaugccaacccaaauguagauccaaaugcaaacccaaauguagauccaaaugcaaacccaaaugcaaacccaaaugcaaacccaaaugcaaacccaaaugcaaacccaaaugcaaacccaaaugcaaacccaaaugcaaacccaaaugcaaacccaaaugcaaaccccaaugcaaauccuaaugcaaacccaaaugcaaacccaaacguagauccuaaugcaaauccaaaugcaaacccaaaugcaaacccaaacgcaaaccccaaugcaaauccuaaugcaaaccccaaugcaaauccuaaugcaaauccuaaugccaauccaaaugcaaauccaaaugcaaacccaaacgcaaaccccaaugcaaauccuaaugccaauccaaaugcaaauccaaaugcaaacccaaaugcaaacccaaaugcaaaccccaaugcaaauccuaauaaaaacaaucaagguaauggacaaggucacaauaugccaaaugacccaaaccgaaauguagaugaaaaugcuaaugccaacaaugcuguaaaaaauaauaauaacgaagaaccaagugaucagcacauagaaaaauauuuaaagauaauacaaaauucucuuucaacugaaugguccccauguaguguaacuuguggaaaugguauucaaguuagaauaaagccuggcucugcuaauaaaccuaaagaccaauuagauuaugcaaaugauauugaaaaaaaaauuuguaaaauggaaaaauguuccaguguguuuaaugucguaaauaguucaauaggauuaauaaugguauuauccuucuuguuccuuaauuag

SEQ ID NO: 3085 - RNA, 1158 nt, Artificial Sequence
  derived and/or modified CDS sequence (wt) from Pf(Tz98-101)__BAM84794.1__CSP
augaugagaaaauuagcuauuuuaucuguuucuuccuuuuuauuuguugaggccuuauuccaggaauaccagugcuauggaaguucgucaaacacaaggguucuaaaugaauuaaauuaugauaaugcaggcacuaauuuauauaaugaauuagaaaugaauuauuaugggaaacaggaaaauugguauagucuuaaaaaaaauaguagaucacuuggagaaaaugaugauggaaauaacgaagacaacgagaaauuaaggaaaccaaaacauaaaaaauuaaagcaaccagcggaugguaauccugauccaaaugcaaacccaaauguagaucccaaugccaacccaaauguagauccaaaugcaaacccaaauguagauccaaaugcaaacccaaaugcaaacccaaaugcaaacccaaaugcaaacccaaaugcaaacccaaaugcaaacccaaaugcaaacccaaaugcaaacccaaaugcaaacccaaaugcaaacccaaaugcaaaccccaaugcaaauccuaaugcaaacccaaaugcaaacccaaacguagauccuaaugcaaauccaaaugcaaacccaaacgcaaaccccaaugcaaauccuaaugcaaaccccaaugcaaauccuaaugcaaauccuaaugccaauccaaaugcaaauccaaaugcaaacccaaacgcaaaccccaaugcaaauccuaaugccaauccaaaugcaaauccaaaugcaaacccaaaugcaaacccaaaugcaaaccccaaugcaaauccuaauaaaaacaaucaagguaauggacaaggucacaauaugccaaaugacccaaaccgaaauguagaugaaaaugcuaaugccaacaaugcuguaaaaaauaauaauaacgaagaaccaagugauaagcacauaacagaauauuuaaagagaauacaaaauucucuuucaacugaaugguccccauguaguguaacuuguggaaaugguauucaaguuagaauaaagccuggcucugcugguaaaucuaaaaacgaauuagauuaugaaaaugauauugaaaaaaaaauuuguaaaauggaaaaauguuccaguguguuuaaugucguaaauaguucaauaggauuaauaaugguauuauccuucuuguuccuuaauuag

SEQ ID NO: 3086 - RNA, 1158 nt, Artificial Sequence
  derived and/or modified CDS sequence (wt) from Pf(Yaounde)__AAN87580.1__CSP
augaugagaaaauuagcuauuuuaucuguuucuuccuuuuuauuuguugaggccuuauuccaggaauaccagugcuauggaaguucgucaaacacaaggguucuaaaugaauuaaauuaugauaaugcaggcacuaauuuauauaaugaauuagaaaugaauuauuaugggaaacaggaaaauugguauagucuuaaaaaaaauaguagaucacuuggagaaaaugaugauggaaauaacgaagacaacgagaaauuaaggaaaccaaaacauaaaaaauuaaagcaaccagcggaugguaauccugauccaaaugcaaacccaaauguagaucccaaugccaacccaaauguagauccaaaugcaaacccaaauguagauccaaaugcaaacccaaaugcaaacccaaaugcaaacccaaaugcaaacccaaaugcaaacccaaaugcaaacccaaaugcaaacccaaaugcaaacccaaaugcaaacccaaaugcaaaccccaaugcaaauccuaaugcaaacccaaaugcaaacccaaacguagauccuaaugcaaauccaaaugcaaacccaaaugcaaacccaaacgcaaaccccaaugcaaauccuaaugcaaaccccaaugcaaauccuaaugcaaauccuaaugccaauccaaaugcaaauccaaaugcaaacccaaacgcaaaccccaaugcaaauccuaaugccaauccaaaugcaaauccaaaugcaaacccaaaugcaaacccaaaugcaaaccccaaugcaaauccuaauaaaaacaaucaagguaauggacaaggucacaauaugccaaaugacccaaaccgaaauguagaugaaaaugcuaaagccaacaaugcuguaaaaaauaauaauaacgaagaaccaagugauaagcacauagaacaauauuuaaagacaauacaaaauucucuuucaacugaaugguccccauguaguguaacuuguggaaaugguauucaaguuagaauaaagccuggcucugcuaauaaaccuaaagaccaauuagauuaugaaaaugauauugaaaaaaaaauuuguaaaauggaaaaauguuccaguguguuuaaugucguaaauaguucaauaggauuaauaaugguauuauccuucuuguuccuuaauuag

SEQ ID NO: 3087 - RNA, 1143 nt, Artificial Sequence
  derived and/or modified CDS sequence (wt) from Pf(Asembo Bay)__AAN87610.1__CSP
augaugagaaaauuagcuauuuuaucuguuucuuccuuuuuauuuguugaggccuuauuccaggaauaccagugcuauggaaguucgucaaacacaaggguucuaaaugaauuaaauuaugauaaugcaggcacuaauuuauauaaugaauuagaaaugaauuauuaugggaaacaggaaaauugguauagucuuaaaaaaaauaguagaucacuuggagaaaaugaugauggaaauaauaauaauggagauaauggucgugaagguaaagaugaagauaaaagagauggaaauaacgaagacaacgagaaauuaaggaaaccaaaacauaaaaaauuaaagcaaccaggggaugguaauccugauccaaaugcaaacccaaauguagaucccaaugccaacccaaauguagauccaaaugcaaacccaaauguagauccaaaugcaaacccaaaugcaaacccaaaugcaaacccaaaugcaaacccaaaugcaaacccaaaugcaaacccaaaugcaaacccaaacgcaaaccccaaugcaaaccccaaugcaaauccaaaugcaaacccaaaugcaaacccaaacgcaaaccccaaugcaaauccuaaugcaaaccccaaugcaaauccuaaugcaaauccuaaugccaauccaaaugcaaauccaaaugcaaaccccaaugcaaauccuaaugccaauccaaaugcaaauccaaaugcaaacccaaaugcaaacccaaaugcaaaccccaaugcaaauccuaauaaaaacaaucaagguaauggacaaggucacaauaugccaaaugacccaaaccgaaauguagaugaaaaugcuaaugccaacaaugcuguaaaaaauaauaauaacgaagaaccaagugauaagcacauagaacaauauuuaaacaaaauaaaaaauucuauuucaacugaaugguccccauguaguguaacuuguggaaaugguauucaaguuagaauaaagccuggcucugcuaauaaaccuaaagaccaauuagauuaugcaaaugauauugaaaaaaaaauuuguaaaauggaaaaauguuccaguguguuuaaugucguaaauaguucaauaggauuaauaaugguauuauccuucuuguuccuuaauuag

SEQ ID NO: 3088 - RNA, 1143 nt, Artificial Sequence
  derived and/or modified CDS sequence (wt) from Pf(India)__AAN87619.1__CSP
augaugagaaaauuagcuauuuuaucuguuucuuccuuuuuauuuguugaggccuuauuccaggaauaccagugcuauggaaguucgucaaacacaaggguucuaaaugaauuaaauuaugauaaugcaggcacuaauuuauauaaugaauuagaaaugaauuauuaugggaaacaggaaaauugguauagucuuaaaaaaaauaguagaucacuuggagaaaaugaugauggaaauaauaauaauggagauaauggucgugaagguaaagaugaagauaaaagagauggaaauaacgaagacaacgagaaauuaaggaaaccaaaacauaaaaaauuaaagcaaccagggggugauaauccugauccaaaugcaaacccaaaugcaaacccaaaugcaaacccaaaugcaaacccaaaugcaaacccaaaugcaaacccaaacguagauccuaaugcaaauccaaaugcaaacccaaaugcaaacccaaacgcaaaccccaaugcaaacccaaacgcaaaccccaaugcaaauccuaaugccaauccaaaugcaaauccaaaugcaaacccaaacgcaaaccccaaugcaaauccuaaugccaauccaaaugcaaauccaaaugcaaacccaaacgcaaaccccaaugcaaauccuaaugccaauccaaaugcaaauccaaaugcaaaccccaaugcaaauccuaaugccaauccaaaugcaaauccaaaugcaaacccaaaugcaaacccaaaugcaaauccuaauaaaaacaaucaagguaauggacaaggucacaauaugccaaaugacccaaaccgaaauguagaugaaaaugcuaaugccaacaaugcuguaaaaaauaauaauaacgaagaaccaagugauaagcacauagaacaauauuuaaagaaaauacaaaauucucuuucaacugaaugguccccauguaguguaacuuguggaaaugguauucaaguuagaauaaagccuggcucugcuaauaaaccuaaagacgaauuagauuaugaaaaugauauugaaaaaaaaauuuguaaaauggaaaaauguuccaguguguuuaaugucguaaauaguucaauaggauuaauaaugguauuauccuucuuguuccuuaauuag

SEQ ID NO: 3089 - RNA, 1107 nt, Artificial Sequence
  derived and/or modified CDS sequence (wt) from Pf(India)__AAN87617.1__CSP
augaugagaaaauuagcuauuuuaucuguuucuuccuuuuuauuuguugaggccuuauuccaggaauaccagugcuauggaaguucgucaaacacaaggguucuaaaugaauuaaauuaugauaaugcaggcacuaauuuauauaaugaauuagaaaugaauuauuaugggaaacaggaaaauugguauagucuuaaaaaaaauaguagaucacuuggagaaaaugaugauggaaauaauaauaauggagauaauggucgugaagguaaagaugaagauaaaagagauggaaauaacgaagacaacgagaaauuaaggaaaccaaaacauaaaaaauuaaagcaaccagggggugauaauccugauccaaaugcaaacccaaauguagauccaaaugcaaacccaaaugcaaacccaaaugcaaacccaaaugcaaacccaaaugcaaacccaaaugcaaacccaaaugcaaacccaaaugcaaacccaaaugcaaauccuaaugccaauccaaaugcaaauccaaaugcaaacccaaacgcaaaccccaaugcaaauccuaaugccaauccaaaugcaaauccaaaugcaaacccaaacgcaaaccccaaugcaaauccuaaugccaauccaaaugcaaauccaaaugcaaaccccaaugcaaauccuaaugccaauccaaaugcaaauccaaaugcaaacccaaaugcaaacccaaaugcaaauccuaauaaaaacaaucaagguaauggacaaggucacaauaugccaaaugacccaaaccgaaauguagaugaaaaugcuaaugccaacaaugcuguaaaaaauaauaauaacgaagaaccaagugauaagcacauagaacaauauuuaaagaaaauacaaaauucucuuucaacugaaugguccccauguaguguaacuuguggaaaugguauucaaguuagaauaaagccuggcucugcuaauaaaccuaaagacgaauuagauuaugaaaaugauauugaaaaaaaaauuuguaaaauggaaaaauguuccaguguguuuaaugucguaaauaguucaauaggauuaauaaugguauuauccuucuuguuccuuaauuag

SEQ ID NO: 3090 - RNA, 1095 nt, Artificial Sequence
  derived and/or modified CDS sequence (wt) from Pf(India)__AAN87616.1__CSP
augaugagaaaauuagcuauuuuaucuguuucuuccuuuuuauuuguugaggccuuauuccaggaauaccagugcuauggaaguucgucaaacacaaggguucuaaaugaauuaaauuaugauaaugcaggcacuaauuuauauaaugaauuagaaaugaauuauuaugggaaacaggaaaauugguauagucuuaaaaaaaauaguagaucacuuggagaaaaugaugauggaaauaauaauaauggagauaauggucgugaagguaaagaugaagauaaaagagauggaaauaacgaagacaacgagaaauuaaggaaaccaaaacauaaaaaauuaaagcaaccagggggugauaauccugauccaaaugcaaacccaaauguagauccaaaugcaaacccaaaugcaaacccaaaugcaaacccaaaugcaaacccaaaugcaaacccaaaugcaaacccaaaugcaaacccaaaugcaaacccaaaugcaaacccaaaugcaaacccaaaugcaaacccaaaugcaaacccaaaugcaaauccuaaugccaauccaaaugcaaauccaaaugcaaacccaaacgcaaaccccaaugcaaauccuaaugccaauccaaaugcaaauccaaaugcaaaccccaaugcaaauccuaaugccaauccaaaugcaaauccaaaugcaaacccaaaugcaaacccaaaugcaaauccuaauaaaaacaaucaagguaauggacaaggucacaauaugccaaaugacccaaaccgaaauguagaugaaaaugcuaaugccaacaaugcuguaaaaaauaauaauaacgaagaaccaagugauaagcacauagaacaauauuuaaagaaaauacaaaauucucuuucaacugaaugguccccauguaguguaacuuguggaaaugguauucaaguuagaauaaagccuggcucugcuaauaaaccuaaagacgaauuagauuaugaaaaugauauugaaaaaaaaauuuguaaaauggaaaaauguuccaguguguuuaaugucguaaauaguucaauaggauuaauaaugguauuauccuucuuguuccuuaauuag

SEQ ID NO: 3091 - RNA, 1092 nt, Artificial Sequence
  derived and/or modified CDS sequence (wt) from Pf(Bolivar)__AAN87600.1__CSP
augaugagaaaauuagcuauuuuaucuguuucuuccuuuuuauuuguugaggccuuauuccaggaauaccagugcuauggaaguucgucaaacacaaggguucuaaaugaauuaaauuaugauaaugcaggcacuaauuuauauaaugaauuagaaaugaauuauuaugggaaacaggaaaauugguauagucuuaaaaaaaauaguagaucacuuggagaaaaugaugauggaaauaauaauaauggagauaauggucgugaagguaaagaugaagauaaaagagauggaaauaacgaggacaacgagaaauuaaggaaaccaaaacauaaaaaauuaaagcaaccagcggaugguaauccugauccaaaugcaaacccaaauguagaucccaaugccaacccaaauccuaaugcaaauccuccuaaugcaaacccaaaugcaaauccuaaugcaaacccaaaugcaaacccaaacguagauccuaaugcaaauccaaaugcaaacccaaaugcaaacccaaacgcaaaccccaaugcaaauccuaaugcaaaccccaaugcaaauccuaaugcaaauccuaaugccaauccaaaugcaaauccaaaugcaaacccaaacgcaaaccccaaugcaaauccuaaugccaauccaaaugcaaauccaaaugcaaacccaaaugcaaacccaaaugcaaaccccaaugcaaauccuaauaaaaacaaucaagguaauggacaaggucacaauaugccaaaugacccaaaccgaaauguagaugaaaaugcuaaugccaacaaugcuguaaaaaauaauaauaacgaagaaccaagugauaagcacauagaacaauauuuaaacaaaauacaaaauucucuuucaacugaaugguccccauguaguguaacuuguggaaaugguauucaaguuagaauaaagccuggcucugcuaauaaaccuaaagaccaauuagauuaugcaaaugauauugaaaaaaaaauuuguaaaauggaaaaauguuccaguguguuuaaugucguaaauaguucaauaggauuaauaaugguauuauccuucuuguuccuuaauuag

SEQ ID NO: 3092 - RNA, 1083 nt, Artificial Sequence
  derived and/or modified CDS sequence (wt) from Pf(Asembo Bay)__AAN87597.1__CSP
augaugagaaaauuagcuauuuuaucuguuucuuccuuuuuauuuguugaggccuuauuccaggaauaccagugcuauggaaguucgucaaacacaaggguucuaaaugaauuaaauuaugauaaugcaggcacuaauuuauauaaugaauuagaaaugaauuauuaugggaaacaggaaaauugguauagucuuaaaaaaaauaguagaucacuuggagaaaaugaugauggaaauaauaauaauggagauaauggucgugaagguaaagaugaagauaaaagagauggaaauaacgaagacaacgagaaauuaaggaaaccaaaacauaaaaaauuaaagcaaccagcggaugguaauccugauccaaaugcaaacccaaauguagaucccaaugccaacccaaaugcaaauccuaaugcaaacccaaaugcaaauccuaaugcaaacccaaaugcaaacccaaacguagauccuaaugcaaauccaaaugcaaacccaaaugcaaacccaaacgcaaaccccaaugcaaauccuaaugcaaaccccaaugcaaauccuaaugcaaauccuaaugccaauccaaaugcaaauccaaaugcaaacccaaacgcaaaccccaaugcaaauccuaaugccaauccaaaugcaaauccaaaugcaaacccaaaugcaaacccaaaugcaaaccccaaugcaaauccuaauaaaaacaaucaagguaauggacaaggucacaauaugccaaaugacccaaaccgaaauguagaugaaaaugcuaaugccaacaaugcuguaaaaaauaauaauaacgaagaaccaagugauaagcacauaaaagaauauuuaaagauaauaccaaauucucuuucaacugaaugguccccauguaguguaacuuguggaaaugguauucaaguuagaauaaagccuggcucugcugguaaaccuaaagacgaauuagauuaugcaaaugauauugaaaaaaaaauuuguaaaauggaaaaauguuccaguguguuuaaugucguaaauaguucaauaggauuaauaaugguauuauccuucuuguuccuuaauuag

SEQ ID NO: 3093 - RNA, 1083 nt, Artificial Sequence
  derived and/or modified CDS sequence (wt) from Pf(Asembo Bay)__AAN87596.1__CSP
augaugagaaaauuagcuauuuuaucuguuucuuccuuuuuauuuguugaggccuuauuccaggaauaccagugcuauggaaguucgucaaacacaaggguucuaaaugaauuaaauuaugauaaugcaggcacuaauuuauauaaugaauuagaaaugaauuauuaugggaaacaggaaaauugguauagucuuaaaaaaaauaguagaucacuuggagaaaaugaugauggaaauaauaauaauggagauaauggucgugaagguaaagaugaagauaaaagagauggaaauaacgaagacaacgagaaauuaaggaaaccaaaacauaaaaaauuaaagcaaccagcggaugguaauccugauccaaaugcaaacccaaauguagaucccaaugccaacccaaaugcaaauccuaaugcaaacccaaaugcaaauccuaaugcaaacccaaaugcaaacccaaacguagauccuaaugcaaauccaaaugcaaacccaaaugcaaacccaaacgcaaaccccaaugcaaauccuaaugcaaaccccaaugcaaauccuaaugcaaauccuaaugccaauccaaaugcaaauccaaaugcaaacccaaacgcaaaccccaaugcaaauccuaaugccaauccaaaugcaaauccaaaugcaaacccaaaugcaaacccaaaugcaaaccccaaugcaaauccuaauaaaaacaaucaagguaauggacaaggucacaauaugccaaaugacccaaaccgaaauguagaugaaaaugcuaaugccaacaaugcuguaaaaaauaauaauaacgaagaaccaagugauaagcacauaaaagaauauuuaaagauaauacaaaauucucuuucaacugaaugguccccauguaguguaacuuguggaaaugguauucaaguuagaauaaagccuggcucugcugguaagccuaaagacgaauuagauuaugcaaaugauauugaaaaaaaaauuuguaaaauggaaaaauguuccaguguguuuaaugucguaaauaguucaauaggauuaauaaugguauuauccuucuuguuccuuaauuag

SEQ ID NO: 3094 - RNA, 1071 nt, Artificial Sequence
  derived and/or modified CDS sequence (wt) from Pf(India)__AAN87615.1__CSP
augaugagaaaauuagcuauuuuaucuguuucuuccuuuuuauuuguugaggccuuauuccaggaauaccagugcuauggaaguucgucaaacacaaggguucuaaaugaauuaaauuaugauaaugcaggcacuaauuuauauaaugaauuagaaaugaauuauuaugggaaacaggaaaauugguauagucuuaaaaaaaauaguagaucacuuggagaaaaugaugauggaaauaauaauaauggagauaauggucgugaagguaaagaugaagauaaaagagauggaaauaacgaagacaacgagaaauuaaggaaaccaaaacauaaaaaauuaaagcaaccaggggaugguaauccugauccaaaugcaaacccaaauguagaucccaaugccaacccaaaugcaaacccaaaugcaaacccaaaugcaaacccaaaugcaaacccaaaugcaaacccaaaugcaaacccaaaugcaaacccaaaugcaaacccaaaugcaaacccaaaugcaaacccaaaugcaaacccaaacguaaauccaaaugcaaacccaaacgcaaaccccaaugcaaauccuaaugccaauccaaaugcaaauccaaaugcaaaccccaaugcaaauccuaaugccaauccaaaugcaaauccaaaugcaaacccaaaugcaaacccaaaugcaaauccuaauaaaaacaaucaagguaauggacaaggucacaauaugccaaaugacccaaaccgaaauguagaugaaaaugcuaaugucaacaaugcuguaaaaaauaauaauaacgaagaaccaagugauaagcacauagaacaauauuuaaagaaaauacaaaauucucuuucaacugaaugguccccauguaguguaacuuguggaaaugguauucaaguuagaauaaagccuggcucugcuaauaaaccuaaagacgaauuagauuaugaaaaugauauugaaaaaaaaauuuguaaaauggaaaaauguuccaguguguuuaaugucguaaauaguucaauaggauuaauaaugguauuauccuucuuguuccuuaauuag

SEQ ID NO: 3095 - RNA, 1110 nt, Artificial Sequence
  derived and/or modified CDS sequence (wt) from Pk(UMMAC6)__AHF20622.1__CSP
augaagaacuucauucucuuggccgucuccuccauccuguugguggacuugcuccccacacacuucgaacauaauguagaucucuccagggccauaaauguaaauggaguaagcuucaauaauguagacaccaguucacuuggcgcagcacagguaagacaaagugcuagccgaggcagaggacuuggugagaagccaaaagaaggagcugauaaagaaaagaaaaaagaaaaagaaaaagaaaaagaagaagaaccaaagaagccaaaugaaaauaagcugauacaaccggaacaaccagcagcaggagcagggggcgaacaaccagcagcaggagcagggggcgaacaaccagcagcaggagcaggaggcgaacaaccagcagcaggagcaggaggcgaacaaccagcagcaggagcaggaggcgaacaaccagcagcaggagcaagaggcgaacaaccagcagcaggagcaggaggcgaacaaccagcagcaggagcaggaggcgaacaaccagcagcaggagcaggaggcgaacaaccagcagcaggagcaggaggcgaacaaccagcagcaggagcaggaggcgaacaaccagcagcaggagcaagaggcgaacaaccagcagcaggagcaggaggcgaacaaccagcagcaggagcaggaggcgaacaaccagcaccagcaccaaggagggaacaaccagcagcaggagcagggggcgaacaaccagcaccagcaccaaggagggaacaaccagcaccaggagcaggugcgggagauggagcacgaggaggaaacgcaggggcagguaaaggacagggacaaaacaaucagggugcgaaugucccaaaugaaaaaguugugaaugauuaccuacacaaaauuagaucuagcguuaccaccgaguggacuccaugcaguguaaccuguggaaaugguguaagaauuagaagaaaaggucaugcagguaauaaaaaggcagaggaccuuacuauggaugaccuugagguggaagcuuguguaauggauaagugcgcuggcauauuuaacguugugaguaauucacuaggcuuagucauauuguuaguccuagcauuauucaauuaa

SEQ ID NO: 3096 - RNA, 1092 nt, Artificial Sequence
  derived and/or modified CDS sequence (wt) from Pk(H (SL1_PK))__XP_002259002.1__CSP
augaagaacuucauucucuuggccgucuccuccauccugcugguggacuugcuccccacacacuucgaacauaauguagaucucuccagggccauaaauguaaauggaguaagcuucaauaauguagacaccaguucacuuggcgcagcacaggugagacaaagugcuagccgaggcagaggacuuggugagaagccaaaagaaggagcugauaaagaaaagaaaaaagaaaaaggaaaagaaaaagaagaagaaccaaagaagccaaaugaaaauaagcugaaacaaccgaaugaaggacaaccacaagcacagggugauggagcaaaugcaggacaaccacaagcacaaggagauggagcaaaugcaggacaaccacaagcacagggugauggagcaaaugcaggacaaccacaagcacagggugauggagcaaaugcaggacaaccacaagcacaaggagauggagcaaaugcaggacaaccacaagcacagggugauggagcaaaugcagggcaaccacaagcacagggugauggagcaaaugcaggacaaccacaagcacaaggagauggagcaaaugcaggacaaccacaagcacaaggagauggagcaaaugcaggacaaccacaagcacagggugauggagcaaaugcaggacaaccacaagcacagggugauagggcgaaugcaggacaaccacaagcacaaggagauggggcaaauguaccacgacaaggaagaaacgggggaggugcaccagcaggaggaaaugaggggaauaaacaagcaggaaaaggacagggacaaaacaaucagggugcgaaugccccaaaugaaaaaguugugaaugauuaccuacacaaaauuagaucuagcguuaccaccgaguggacuccaugcaguguaaccuguggaaaugguguaagaauuagaagaaaagcucaugcagguaauaaaaaggcagaggaccuuacuauggaugaccuugagguggaagcuuguguaauggauaagugcgcuggcauauuuaacguugugaguaauucauuaggcuuagucauauuguuaguccuagcauuauucaauuaa

SEQ ID NO: 3097 - RNA, 1443 nt, Artificial Sequence
  derived and/or modified CDS sequence (wt) from Pk(SGEHIH2-im-Y09-12)__AFD97213.1__CSP
augaagaacuucauucucuuggccgucuccuccauccugcugguggacuugcuccccacacacuucgaacauaauguagaucucuccagggccauaaauguaaauggaguaagcuucaauaauguagacaccaguucacuuggcgcagcacagguaagacaaagugcuagccgaggcagaggacuuggugagaagccaaaagaaggagaugauaaagaaaagaaaaaagaaaaagaaaaagaagaagaaccaaagaagcuaaaugaaaauaauccgaaaaaaccgaaugaagaaggugauggagcuaagcugaaacaaccgaaugaagaaggugauggagcuaagcugaaacaaccgaaugcagaagguggagcuaagcugaaacaaccgaaugcagaagguggagcaaaugcaggacaaccgaaugcagaagguggagcaaaugcaggacaaccgaaugcagaagguggagcaaaugcaggacaaccgaaugcagguggagcaaaugcaggacaaccgaaugcagaagguggagcaaaugcaggacaaccgaaugcagaagguggagcaaaugcaggacaaccgaaugcagaagguggagcaaaugcacgacaaccgaaugcagaagguggagcaaaugcacgacaaccuaaugcagaggguggagcaaaugcaggacaaccgaaugcagaagguggagcaaaugcaggacaaccgaaugcagaagguggagcaaaugcaggacaaccgaaugcagaagguggagcaaaugcacgacaaccuaaugcagaagguggagcaaacgcaggacaaccgaaugcagaagguggagcaaaugcaggacaaccgaaugcagaagguggagcaaaugcaggacaaccgaaugcagaagguggagcaaaugcaggacaaccgaaugcagaagguggagcaaaugcacgacaaccuaaugcagaagguggagcaaacgcaggacaaccgaaugcagaagguggagcaaaugcaggacaaccgaaugcagaagguggagcaaaugcacgacagccacaggcagaaggugguggagcaaaugcacgacagccacaggcagaaggugguggagcaaaugcacgacaaggaggaaaugaggggaauaaacaagcaggaaaaggacagggacaaaacaaucagggugcgaaugccccaaaugaaaaaguuguaaaugauuaccuacagaaaauuagaucuagcguuaccaucgaguggacuccaugcaguguaaccuguggaaaugguguaagaauuagaagaagagcucaugcagauaagaaaaaggcagaggaccuuacuauggaugaccuugaaguggaagcuuguguaauggauaagugugcuggcauauuuaacguugugaguaauucauuaggguuaguaauauuguuaguccuagcauuauucaauuaa

SEQ ID NO: 3098 - RNA, 1320 nt, Artificial Sequence
  derived and/or modified CDS sequence (wt) from Pk(NB028)__AFG25469.1__CSP
augaagaacuucauucucuuggccgucuccuccauccugcugguggacuugcuccccacacacuucgaacauaauguagaucucuccagggccauaaauguaaauggaguaagcuucaauaauguagacaccaguucacuuggcgcagcacagguaagacaaagugcuagccgaggcagaggacuuggugagaagccaaaagaaggagaugauaaagaaaagaaaaaagaaaaagaaaaagaagaagaaccaaagaaccuaaaugaaaauaagccgaaacaaccuaaugcagaaggugauggagcuaagcugaaacaaccgaaugcagaaggugauggagcuaagcugaaacaaccacaggcagaaggugauggagcaaaugcacgacagccacaggcagaagguaauggagcaaaugcacgacaaccacaggcagaaggugauggagcaaaugcacgacagccacaggcagaaggugauggagcaaaugcacgacaaccacaggcagaaggugauggagcaaaugcacgacagccacaggcagaaggugauggagcaaaugcacgacaaccacaggcagaaggugauggagcaaaugcacgacagccacaggcagaaggugauggagcaaaugcacgacaaccacaggcagaaggugguggagcaaaugcacgacagccacaggcagaaggugauggagcaaaugcacgacaaccacaggcagaaggcgauggagcaaaugcacgacaaccacaggcagaaggugauggagcaaaugcacgacaaccacaggcagaaggugauggagcaaaugcacggcaaccacaggcagaaggugauggagcaaaugcacgacagccacaggcagaaggugguggagcaaaugcacgacagccacaggcagaaggugauggagcaaaugcacgacaagcacaagcacaaggagauggaggaaaugcacgacaaggaggaaacgggggaggugcaccagcaggaggaaaugaggggaauaaacaagcaggaaaaggacagggacaaaacaaucagggugcgaaugccccaaaugaaaaaguuguaaaugauuaccuacagaaaauuagaucuagcguuaccaccgaguggacuccaugcaguguaaccuguggaaaugguguaagaauuagaagaagagcucaugcagauaagaaaaaggcagaggaacuuacuauggaugaccuugaaguggaagcuuguguaauggauaagugugcuggcauauuuaacguugugaguaauucauuaggguuagucauauuguuaguccuagcauuauucaauuaa

SEQ ID NO: 3099 - RNA, 1278 nt, Artificial Sequence
  derived and/or modified CDS sequence (wt) from Pk(SGEHIH1-im-Y09-102)__AFD97209.1__CSP
augaagaacuucauucucuuggccgucuccuccauccugcugguggacuugcuccccacacacuucgaacauaauguagaucucuccagggccauaaauguaaauggaguaagcuucaauaauguagacaccaguucacuuggcgcagcacagguaagacaaagugcuagccgaggcagaggacuuggugagaagccaaaagaaggagaugauaaagaaaagaaaaaagaaaaagaaaaagaagaagaaccaaagaagcuaaaugaaaauaauccgaaaaaaccgaaugaagaaggugauggagcuaagcugaaacaaccgaaugaagaaggugauggagcuaagcugaaacaaccgaaugcagaagguggagcuaagcugaaacaaccgaaugcagaagguggagcaaaugcaggacaaccgaaugcagaagguggagcaaaugcaggacaaccgaaugcagaagguggagcaaaugcaggacaaccgaaugcagguggagcaaaugcaggacaaccgaaugcagaagguggagcaaaugcaggacaaccgaaugcagaagguggagcaaaugcaggacaaccgaaugcagaagguggagcaaaugcacgacaaccgaaugcagaagguggagcaaaugcacgacaaccuaaugcagaagguggagcaaaugcaggacaaccgaaugcagaagguggagcaaaugcaggacaaccgaaugcagaagguggagcaaaugcaggacaaccgaaugcagaagguggagcaaaugcacgacaaccuaaugcagaagguggagcaaacgcaggacaaccgaaugcagaagguggagcaaaugcaggacaaccgaaugcagaagguggagcaaaugcacgacagccacaggcagaaggugguggagcaaaugcacgacagccacaggcagaaggugguggagcaaaugcacgacaaggaggaaaugaggggaauaaacaagcaggaaaaggacagggacaaaacaaucagggugcgaaugccccaaaugaaaaaguuguaaaugauuaccuacagaaaauuagaucuagcguuaccaucgaguggacuccaugcaguguaaccuguggaaaugguguaagaauuagaagaagagcucaugcagauaagaaaaaggcagaggaccuuacuauggaugaccuugaaguggaagcuuguguaauggauaggugugcuggcauauuuaacguugugaguaauucauuaggguuaguaauauuguugguccuagcauuauucaauuaa

SEQ ID NO: 3100 - RNA, 1278 nt, Artificial Sequence
  derived and/or modified CDS sequence (wt) from Pk(SGEHIH1-im-Y09-17)__AFD97205.1__CSP
augaggaacuucauucucuuggccgucuccuccauccugcugguggacuugcuccccacacacuucgaacauaauguagaucucuccagggccauaaauguaaauggaguaagcuucaauaauguagacaccaguucacuuggcgcagcacagguaagacaaagugcuagccgaggcagaggacuuggugagaagccaaaagaaggagaugauaaagaaaagaaaaaagaaaaagaaaaagaagaagaaccaaagaagcuaaaugaaaauaauccgaaaaaaccgaaugaagaaggugauggagcuaagcugaaacaaccgaaugaagaaggugauggagcuaagcugaaacaaccgaaugcagaagguggagcuaagcugaaacaaccgaaugcggaagguggagcaaaugcaggacaaccgaaugcagaagguggagcaaaugcaggacaaccgaaugcagaagguggagcaaaugcaggacaaccgaaugcagguggagcaaaugcaggacaaccgaaugcagaagguggagcaaaugcaggacaaccgaaugcagaagguggagcaaaugcaggacaaccgaaugcagaagguggagcaaaugcacgacaaccgaaugcagaagguggagcaaaugcacgacaaccuaaugcagaagguggagcaaaugcaggacaaccgaaugcagaagguggagcaaaugcaggacaaccgaaugcagaagguggagcaaaugcaggacaaccgaaugcagaagguggagcaaaugcacgacaaccuaaugcagaagguggagcaaacgcaggacaaccgaaugcagaagguggagcaaaugcaggacaaccgaaugcagaagguggagcaaaugcacgacagccacaggcagaaggugguggagcaaaugcacgacagccacaggcagaaggugguggagcaaaugcacgacaaggaggaaaugaggggaauaaacaagcaggaaaaggacagggacaaaacaaucagggugcgaaugccccaaaugaaaaaguuguaaaugauuaccuacagaaaauuagaucuagcguuaccaucgaguggacuccaugcaguguaaccuguggaaaugguguaagaauuagaagaagagcucaugcagauaagaaaaaggcagaggaccuuacuauggaugaccuugaaguggaagcuuguguaauggauaagugugcuggcauauuuaacguugugaguaauucauuaggguuaguaauauuguuaguccuagcauuauucaauuaa

SEQ ID NO: 3101 - RNA, 1278 nt, Artificial Sequence
  derived and/or modified CDS sequence (wt) from Pk(SGEHIH1-im-Y09-25)__AFD97206.1__CSP
augaagaacuucauucucuuggccgucuccuccauccugcugguggacuugcuccccacacacuucgaacauaauguagaucucuccagggccauaaauguaaauggaguaagcuucaauaauguagacaccaguucacuuggcgcagcacagguaagacaaagugcuagccgaggcagaggacuuggugagaagccaaaagaaggagaugauaaagaaaagaaaaaagaaaaagaaaaagaagaagaaccaaagaagcuaaaugaaaauaauccgaaaaaaccgaaugaagaaggugauggagcuaagcugaaacaaccgaaugaagaaggugauggagcuaagcugaaacaaccgaaugcagaagguggagcuaagcugaaacaaccgaaugcagaagguggagcaaaugcaggacaaccgaaugcagaagguggagcaaaugcaggacaaccgaaugcagaagguggagcaaaugcaggacaaccgaaugcagguggagcaaaugcaggacaaccgaaugcagaagguggagcaaaugcaggacaaccgaaugcagaagguggagcaaaugcaggacaaccgaaugcagaagguggagcaaaugcacgacaaccgaaugcagaagguggagcaaaugcacgacaaccuaaugcagaagguggagcaaaugcaggacaaccgaaugcagaagguggagcaaaugcaggacaaccgaaugcagaagguggagcaaaugcaggacaaccgaaugcagaagguggagcaaaugcacgacaaccuaaugcagaagguggagcaaacgcaggacaaccgaaugcagaagguggagcaaaugcaggacaaccgaaugcagaagguggagcaaaugcacgacagccacaggcagaaggugguggagcaaaugcacgacagccacaggcagaaggugguggagcaaaugcacgacaaggaggaaaugaggggaauaaacaagcaggaaaaggacagggacaaaacaaucagggugcgaaugccccaaaugaaaaaguuguaaaugacuaccuacagaaaauuagaucuagcguuaccaucgaguggacuccaugcaguguaacuuguggaaaugguguaagaauuagaagaagagcucaugcagauaagaaaaaggcagaggaccuuacuauggaugaccuugaaguggaagcuuguguaauggauaagugugcuggcauauuuaacguugugaguaauucauuaggguuaguaauauuguuaguccuagcauuauucaauuaa

SEQ ID NO: 3102 - RNA, 1278 nt, Artificial Sequence
  derived and/or modified CDS sequence (wt) from Pk(SGEHIH2-im-Y09-11)__AFD97212.1__CSP
augaagaacuucauucucuuggccgucuccuccauccugcugguggacuugcuccccacacacuucgaacauaauguagaucucuccagggccauaaauguaaauggaguaagcuucaauaauguggacaccaguucacuuggcgcagcacagguaagacaaagugcuagccgaggcagaggacuuggugagaagccaaaagaaggagaugauaaagaaaagaaaaaagaaaaagaaaaagaagaagaaccaaagaagcuaaaugaaaauaauccgaaaaaaccgaaugaagaaggugauggagcuaagcugaaacaaccgaaugaagaaggugauggagcuaagcugaaacaaccgaaugcagaagguggagcuaagcugaaacaaccgaaugcagaagguggagcaaaugcaggacaaccgaaugcagaagguggagcaaaugcaggacaaccgaaugcagaagguggagcaaaugcaggacaaccgaaugcagguggggcaaaugcaggacaaccgaaugcagaagguggagcaaaugcaggacaaccgaaugcagaagguggagcaaaugcaggacaaccgaaugcagaagguggagcaaaugcacgacaaccgaaugcagaagguggagcaaaugcacgacaaccuaaugcagaagguggagcaaaugcaggacaaccgaaugcagaagguggagcaaaugcaggacaaccgaaugcagaagguggagcaaaugcaggacaaccgaaugcagaagguggagcaaaugcacgacaaccuaaugcagaagguggagcaaacgcaggacaaccgaaugcagaagguggagcaaaugcaggacaaccgaaugcagaagguggagcaaaugcacgacagccacaggcagaaggugguggagcaaaugcacgacagccacaggcagaaggugguggagcaaaugcacgacaaggaggaaaugaggggaauaaacaagcaggaaaaggacagggacagaacaaucagggugcgaaugccccaaaugaaaaaguuguaaaugauuaccuacagaaaauuagaucuagcguuaccaucgaguggacuccaugcaguguaaccuguggaaaugguguaagaauuagaagaagagcucaugcagauaagaaaagggcagaggaccuuacuauggaugaccuugagguggaagcuuguguaauggauaagugugcuggcauauuuaacguugugaguaauucauuaggguuaguaauauuguuaguccuagcauuauucaauuaa

SEQ ID NO: 3103 - RNA, 1278 nt, Artificial Sequence
  derived and/or modified CDS sequence (wt) from Pk(SGEHIH2-im-Y09-18)__AFD97214.1__CSP
augaagaacuucauucucuuggccgucuccuccauccugcugguggacuugcuccccacacacuucgaacauaauguagaucucaccagggccauaaauguaaauggaguaagcuucaauaauguagacaccaguucacuuggcgcagcacagguaagacaaagugcuagccgaggcagaggacuuggugagaagccaaaagaaggagaugauaaagaaaagaaaaaagaaaaagaaaaagaagaagaaccaaagaagcuaaaugaaaauaauccgaaaaaaccgaaugaagaaggugauggagcuaagcugaaacaaccgaaugaagaaggugauggagcuaagcugaaacaaccgaaugcagaagguggagcuaagcugaaacaaccgaaugcagaagguggagcaaaugcaggacaaccgaaugcagaagguggagcaaaugcaggacaaccgaaugcagaagguggagcaaaugcaggacaaccgaaugcagguggagcaaaugcaggacaaccgaaugcagaagguggagcaaaugcaggacaaccgaaugcagaagguggagcaaaugcaggacaaccgaaugcagaagguggagcaaaugcacgacaaccgaaugcagaagguggagcaaaugcacgacaaccuaaugcagaagguggagcaaaugcaggacaaccgaaugcagaagguggagcaaaugcaggacaaccgaaugcagaagguggagcaaaugcaggacaaccgaaugcagaagguggagcaaaugcacgacaaccuaaugcagaagguggagcaaacgcaggacaaccgaaugcagaagguggagcaaaugcaggacaaccgaaugcagaagguggagcaaaugcacgacagccacaggcagaaggugguggagcaaaugcacgacagccacaggcagaaggugguggagcaaaugcacgacaaggaggaaaugaggggaauaaacaagcaggaaaaggacagggacaaaacaaucagggugcgaaugccccaaaugaaaaaguuguaaaugauuaccuacagaaaauuagaucuagcguuaccaucgaguggacuccaugcaguguaaccuguggaaaugguguaagaauuagaagaagagcucaugcagauaagaaaaaggcagaggaccuuacuauggaugaccuugaaguggaagcuuguguaauggauaagugugcuggcauauuuaacguugugaguaauucauuaggguuaguaauauuguuaguccuagcauuauucaauuaa

SEQ ID NO: 3104 - RNA, 1278 nt, Artificial Sequence
  derived and/or modified CDS sequence (wt) from Pk(SGEHIH2-im-Y09-3)__AFD97210.1__CSP
augaagaacuucauucucuuggccgucuccuccauccugcugguggacuugcuccccacacacuucgaacauaauguagaucucuccagggccauaaauguaaauggaguaagcuucaauaauguagacaccaguucacuuggcgcagcacagguaagacaaagugcuagccgaggcagaggacuuggugagaagccaaaagaaggagaugauaaagaaaagaaaaaagaaaaagaaaaagaagaagaaccaaagaagcuaaaugaaaauaauccgaaaaaaccgaaugaagaaggugauggagcuaagcugaaacaaccgaaugaagaaggugauggagcuaagcugaaacaaccgaaugcagaagguggagcuaagcugaaacaaccgaaugcagaagguggagcaaaugcaggacaaccgaaugcagaagguggagcaaaugcaggacaaccgaaugcagaagguggagcaaaugcaggacaaccgaaugcagguggagcaaaugcaggacaaccgaaugcagaagguggagcaaaugcaggacaaccgaaugcagaagguggagcaaaugcaggacaaccgaaugcagaagguggagcaaaugcacgacaaccgaaugcagaagguggagcaaaugcacgacaaccuaaugcaggagguggagcaaaugcaggacaaccgaaugcagaagguggagcaaaugcaggacaaccgaaugcagaagguggagcaaaugcaggacaaccgaaugcagaagguggagcaaaugcacgacagccuaaugcagaagguggagcaaacgcaggacaaccgaaugcagaagguggagcaaaugcaggacaaccgaaugcagaagguggagcaaaugcacgacagccacaggcagaaggugguggagcaaaugcacgacagccacaggcagaaggugguggagcaaaugcacgacaaggaggaaaugaggggaauaaacaagcaggaaaaggacagggacaaaacaaucagggugcgaaugccccaaaugaaaaaguuguaaaugauuaccuacagaaaauuagaucuagcguuaccaucgaguggacuccaugcaguguaaccuguggaaaugguguaagaauuagaagaagagcucaugcagauaagaaaaaggcagaggaccuuacuguggaugaccuugaaguggaagcuuguguaauggauaagugugcuggcauauuuaacguugugaguaauucauuaggguuaguaauauuguuaguccuagcauuauucaauuaa

SEQ ID NO: 3105 - RNA, 1278 nt, Artificial Sequence
  derived and/or modified CDS sequence (wt) from Pk(SGEHIH2-im-Y09-7)__AFD97211.1__CSP
augaggaacuucauucucuuggccgucuccuccauccugcugguggacuugcuccccacacacuucgaacauaauguagaucucuccagggccauaaauguaaauggaguaagcuucaauaauguagacaccaguucacuuggcgcagcacagguaagacaaagugcuagccgaggcagaggacuuggugagaagccaaaagaaggagaugauaaagaaaagaaaaaagaaaaagaaaaagaagaagaaccaaagaagcuaaaugaaaauaauccgaaaaaaccgaaugaagaaggugauggagcuaagcugaaacaaccgaaugaagaaggugauggagcuaagcugaaacaaccgaaugcagaagguggagcuaagcugaaacaaccgaaugcagaagguggagcaaaugcaggacaaccgaaugcagaagguggagcaaaugcaggacaaccgaaugcagaagguggagcaaaugcaggacaaccgaaugcagguggagcaaaugcaggacaaccgaaugcagaagguggagcaaaugcaggacaaccgaaugcagaagguggagcaaaugcaggacaaccgaaugcagaagguggagcaaaugcacgacaaccgaaugcagaagguggagcaaaugcacgacaaccuaaugcagaagguggagcaaaugcaggacaaccgaaugcagaagguggagcaaaugcaggacaaccgaaugcagaagguggagcaaaugcaggacaaccgaaugcagaagguggagcaaaugcacgacaaccuaaugcagaagguggagcaaacgcaggacaaccgaaugcagaagguggagcaaaugcaggacaaccgaaugcagaagguggagcaaaugcacgacagccacaggcagaaggugguggagcaaaugcacgacagccacaggcagaaggugguggagcaaaugcacgacaaggaggaaaugaggggaauaaacaagcaggaaaaggacagggacaaaacaaucagggugcgaaugccccaaaugaaaaaguuguaaaugauuaccuacagaaaauuagaucuagcguuaccaucgaguggacuccaugcaguguaaccuguggaaaugguguaagaauuagaagaagagcucaugcagauaagaaaaaggcagaggaccuuacuauggaugaccuugaaguggaagcuuguguaauggauaagugugcuggcauauuuaacguugugaguaauacauuaggguuaguaauauuguuaguccuagcauuauucaauuaa

SEQ ID NO: 3106 - RNA, 1278 nt, Artificial Sequence
  derived and/or modified CDS sequence (wt) from Pk(UMNGC3)__AHF20628.1__CSP
augaagaacuucauucucuuggccgucuccuccauccugcugguggacuugcuccccacacacuucgaacauaauguagaucucuccagggccauaaauguaaauggaguaagcuucaauaauguagacaccaguucacuuggcgcagcacagguaagacaaagugcuagccgaggcagaggacuuggugagaagccaaaagaaggagaugauaaagaaaagaaaaaagaaaaagaaaaagaagaagaaccaaagaagcuaaaugaaaauaauccgaaaaaaccgaaugaagaaggugauggagcuaagcuggaacaaccgaaugaagaaggugauggagcuaagcugaaacaaccgaaugaagaaggugauggagcuaagcugaaacaaccgaaugcagaagguggagcuaagcugaaacaaccgaaugcagaagguggagcaaaugcaggacaaccgaaugcagaagguggagcaaaugcaggacaaccgaaugcagaagguggagcaaaugcaggacaaccgaaugcagguggagcaaaugcaggacaaccgaaugcagaagguggagcaaaugcaggacaaccgaaugcagaagguggagcaaaugcaggacaaccgaaugcagaagguggagcaaaugcaggacaaccgaaugcagaagguggagcaaaugcacgacaaccuaaugcagaagguggagcaaaugcaggacaaccgaaugcagaagguggagcaaaugcaggacaaccgaaugcagaagguggagcaaaugcaggacaaccgaaugcagaagguggagcaaaugcacgacaaccuaaugcagaagguggagcaaacgcaggacaaccgaaugcagaagguggagcaaaugcaggacaaccgaaugcagaagguggagcaaaugcacgacagccacaggcagaaggugguggagcaaaugcacgacaaggaggaaaugaggggaauaaacaagcaggaaaaggacagggacaaaacaaucagggugcgaaugccccaaaugaaaaaguuguaaaugauuaccuacagaaaauuagaucuagcguuaccaucgaguggacuccaugcaguguaaccuguggaaaugguguaagaauuagaagaagagcucaugcagauaagaaaaaggcagaggaccuuacuaugggugaccuugaaguggaagcuuguguaauggauaagugugcuggcguauuuaacguugugaguaauucauuaggguuaguaauauuguuaguccuagcauuauucaauuaa

SEQ ID NO: 3107 - RNA, 1275 nt, Artificial Sequence
  derived and/or modified CDS sequence (wt) from Pk(prk-1)__ADX31295.1__CSP
augaagaacuucauucucuuggccgucuccuccauccugcugguggacuugcuccccacacacuucgaacauaauguagaucucuccagggccauaaauguaaauggaguaagcuucaauaauguagacaccaguucacuuggcgcagcacagguaagacaaagugcuagccgaggcagaggacuuggugagaagccaaaagaaggagaugauaaagaaaagaaaaaagaaaaagaaaaagaagaagaaccaaagaagcuaaaugaaaauaauccgaaaaaaccgaaugaagaaggugauggagcuaagcugaaacaaccggaugaagaaggugauggagcuaagcugaaacaaccgaaugaagaaggugauggagcuaagcugaaacaaccgaaugcagaagguggagcuaagcugaaacaaccgaaugcagaagguggagcaaaugcaggacaaccgaaugcagaagguggagcaaaugcaggacaaccgaaugcagaagguggagcaaaugcaggacaaccgaaugcagguggagcaaaugcaggacaaccgaaugcagaagguggagcaaaugcaggacaaccgaaugcagaagguggagcaaaugcaggacaaccgaaugcagaagguggagcaaaugcaggacaaccgaaugcagaagguggagcaaaugcacgacaaccuaaugcagaagguggagcaaaugcaggacaaccgaaugcagaagguggagcaaaugcaggacaaccgaaugcagaagguggagcaaaugcaggacaaccgaaugcagaagguggagcaaaugcacgacaaccuaaugcagaaguggagcaaacgcaggacaaccgaaugcagaaaguggagcaaaugcagacaaccgaaugcagaaguggaacaaaugcacgacagccacaggcagaaggugguggagcaaaugcacgacaaggaggaaaugaggggaauaaacaggcaggaaaaggacagggacaaaacaaucagggugcgaaugccccaaaugaaaaaguuguaaaugauuaccuacagaaaauuagaucuagcguuaccaucgaguggacuccaugcaguguaaccuguggaaaugguguaagaauuagaagaagagcucaugcagauaagaaaaaggcagaggaccuuacuauggaugaccuugaaguggaagcuuguguaauggauaagugugcuggcauauuuaacguugugaguaauucauuaggguuaguaauauuguuaguccuagcauuauucaauuaa

SEQ ID NO: 3108 - RNA, 1251 nt, Artificial Sequence
  derived and/or modified CDS sequence (wt) from Pk(UM0018C10)__AHF20648.1__CSP
augaagaacuucauucucuuggccgucuccuccauccugcugguggacuugcuccccacacacuucgaacauaauguagaucucuccagggccauaaauguaaauggaguaagcuucaauaauguagacaccaguucacuuggcgcagcacagguaagacaaagugcuagccgaggcagaggacuuggugagaagccaaaagaaggagaugauaaagaaaagaaaaaagaaaaagaaaaagaagaagaaccaaagaagcuaaaugaaaauaagccgaaacaaccgaauguagaaggugauggagcuaagcugaaacaaccgaaugaagaaggugauggagcuaagcugaaacaaccgaaugaagaaggugauggagcuaagcugaaacaaccgaaugcagaagguggagcuaagcugaaacaaccgaaugcagaagguggagcaaaugcaggacaaccgaaugcagaagguggagcaaaugcaggacaaccgaaugcagaagguggagcaaaugcaggacaaccgaaugcagaagguggagcaaaugcaggacaaccgaaugcagaagguggagcaaaugcaggacaaccgaaugcagaagguggagcaaaugcaggacaaccgaaugcagaagguggagcaaaugcaggacaaccgaaugcagaagguggagcaaaugcacgacaaccgaaugcagaagguggagcaaaugcacgacaaccgaaugcagaagguggagcaaaugcacgacaaccuaaugcagaagguggagcaaaugcaggacaaccgaaugcagaagguggagcaaaugcaggacaaccgaaugcagaagguggagcaaaugcacgacagccacaggcagaaggugguggagcaaaugcacgacagccacaggcagaaggugguggagcaaaugcacgacaaggaggaaaugaggggaauaaacaagcaggaaaaggacagggacaaaacaaucagggugcgaaugccccaaaugaaaaaguuguaaaugauuaccuacagaaaauuagaucuagcguuaccaccgaguggacuccaugcaguguaaccuguggaaaugguguaagaauuagaagaagagcucaugcagauaagaaaaaggcagaggaccuuacuauggaugaccuugaaguggaagcuuguguaauggauaagugugcuggcauauuuaacguugugaguaauucauuaggguuaguaauauuguuaguccuagcauuauucaauuaa

SEQ ID NO: 3109 - RNA, 1251 nt, Artificial Sequence
  derived and/or modified CDS sequence (wt) from Pk(UM0018C6)__AHF20646.1__CSP
augaagaacuucauucucuuggccgucuccuccauccugcugguggacuugcuccccacacacuucgaacauaauguagaucucuccagggccauaaauguaaauggaguaagcuucaauaauguagacaccaguucacuuggcgcagcacagguaagacaaagugcuagccgaggcagaggacuuggugagaagccaaaagaaggagaugauaaagaaaagaaaaaagaaaaagaaaaagaagaagaaccaaagaagcuaaaugaaaauaagccgaaacaaccgaauguagaaggugauggagcuaagcugaaacaaccgaaugaagaaggugauggagcuaagcugaaacaaccgaaugaagaaggugauggagcuaagcugaaacaaccgaaugcagaagguggagcuaagcuggaacaaccgaaugcagaagguggagcaaaugcaggacaaccgaaugcagaagguggagcaaaugcaggacaaccgaaugcagaagguggagcaaaugcaggacaaccgaaugcagaagguggagcaaaugcaggacaaccgaaugcagaagguggagcaaaugcaggacaaccgaaugcagaagguggagcaaaugcaggacaaccgaaugcagaagguggagcaaaugcaggacaaccgaaugcagaagguggagcaaaugcacgacaaccgaaugcagaagguggagcaaaugcacgacaaccgaaugcagaagguggagcaaaugcacgacaaccuaaugcagaagguggagcaaaugcaggacaaccgaaugcagaagguggagcaaaugcaggacaaccgaaugcagaagguggagcaaaugcacgacagccacaggcagaaggugguggagcaaaugcacgacagccacaggcagaaggugguggagcaaaugcacgacaaggaggaaaugaggggaauaaacaagcaggaaaaggacagggacaaaacaaucagggugcgaaugccccaaaugaaaaaguuguaaaugauuaccuacagaaaauuagaucuagcguuaccaccgaguggacuccaugcaguguaaccuguggaaaugguguaagaauuagaagaagagcucaugcagauaagaaaaaggcagaggaccuuacuauggaugaccuugaaguggaagcuuguguaauggauaagugugcuggcauauuuaacguugugaguaauucauuaggguuaguaauauuguuaguccuagcauuauucaauuaa

SEQ ID NO: 3110 - RNA, 1242 nt, Artificial Sequence
  derived and/or modified CDS sequence (wt) from Pk(SGEHIH1-im-Y09-95)__AFD97208.1__CSP
augaagaacuucauucucuuggccgucuccuccauccugcugguggacuugcuccccacacacuucgaacauaauguagaucucuccagggccauaaauguaaauggaguaagccucaauaauguagacaccaguucacuuggcgcagcacagguaagacaaagugcuagccgaggcagaggacuuggugagaagccaaaagaaggagaugauaaagaaaagaaaaaagaaaaagaaaaagaagaagaaccaaagaagcuaaaugaaaauaauccgaaaaaaccgaaugaagaaggugauggagcuaagcugaaacaaccgaaugcagaagguggagcuaagcugaaacaaccgaaugcagaagguggagcaaaugcaggacaaccgaaugcagaagguggagcaaaugcaggacaaccgaaugcagaagguggagcaaaugcaggacaaccgaaugcagguggagcaaaugcaggacaaccgaaugcagaagguggagcaaaugcaggacaaccgaaugcagaagguggagcaaauguaggacaaccgaaugcagaagguggagcaaaugcacgacaaccgaaugcagaagguggagcaaaugcacgacaaccuaaugcagaagguggagcaaaugcaggacaaccgaaugcagaagguggagcaaaugcaggacaaccgaaugcagaagguggagcaaaugcaggacaaccgaaugcagaagguggagcaaaugcacgacaaccuaaugcagaagguggagcaaacgcaggacaaccgaaugcagaagguggagcaaaugcaggacaaccgaaugcagaagguggagcaaaugcacgacagccacaggcagaaggugguggagcaaaugcacgacagccacaggcagaaggugguggagcaaaugcacgacaaggaggaaaugaggggaauaaacgagcaggaaaaggacagggacaaaacaaucagggugcgaaugccccaaaugaaaaaguuguaaaugauuaccuacagaaaauuagaucuagcguuaccaucgaguggacuccaugcaguguaaccuguggaaaugguguaagaauuagaagaagagcucaugcagauaagaaaaaggcagaggaccuuacuauggaugaccuugaaguggaagcuuguguaauggauaagugugcuggcauauuuaacguugugaguaauucauuaggguuaguaauauuguuaguccuagcauuauucaauuaa

SEQ ID NO: 3111 - RNA, 1221 nt, Artificial Sequence
  derived and/or modified CDS sequence (wt) from Pk(KH100)__ADN94497.1__CSP
augaagaacuucauucucuuggccgucuccuccauccugcugguggacuugcuccccacacacuucgaacauaauguagaucucuccagggccauaaauguaaauggaguaagcuucaauaauguagacaccaguucacuuggcgcagcacagguaagacaaagugcuagccgaggcagaggacuuggugagaagccaaaagaaggagaugauaaagaaaagaaaaaagaaaaagaaaaagaagaagaaccaaagaaccuaaaugaaaauaagccgaaacaaccgaaugcagaaggugauggagcuaagccgaaacaaccgaaugcagaaggugauggagcuaagcugaaacaaccgaaugcagaaggugauggagcuaagcugaaacaaccgaaugcagaaggugauggaggaaaugcacgacaaccgaaugcagaaggugauggaggaaaugcacgacaaccgaaugcagaaggugauggaggaaaugcacgacaaccgaaugcagaaggugauggaggaaaugcacgacaaccgaaugcagaaggugauggaggaaaugcacgacaaccgaaugcagaaggugauggaggaaaugcacgacaaccuaaugcagaaggugauggaggaaaugcacgacaaccgaaugcagaaggugauggaggaaaugcacgacaaccgaaugcagaaggugauggaggaaaugcacgacaaccuaaugcagaaggugauggaggaaaugcacgacaaccuaaugcagaaggugauggaggaaaugcacgacaaccuaaugcagaaggugauggagcaaaugcacgacaaccgaaugcagaaggugauggagcaaaugcacgacagccacaggcagaaggugguggaggaaaugcacgacaaggaggaaaugaggggaauaaacaagcaggaaaaggacagggacaaaacaaucagggugcgaaugccccaaaugaaaaaguuguaaaugauuaccuacagaaaauuagaucuagcguuaccaccgaguggacuccaugcaguguaaccuguggaaaugguguaagaauuagaagaagagcucaugcagauaagaaaaaggcagaggaccuuacuauggaugaccuugaaguggaagcuuguguaauggauaagugugcuggcauauuuaacguugugaguaauucauuaggguuagucauauuguuaguccuagcauuauucaauuaa

SEQ ID NO: 3112 - RNA, 1221 nt, Artificial Sequence
  derived and/or modified CDS sequence (wt) from Pk(KH294)__ADN94542.1__CSP
augaagaacuucauucucuuggccgucuccuccauccugcugguggacuugcuccccacacacuucgaacauaauguagaucucuccagggccauaaauguaaauggaguaagcuucaauaauguagacaccaguucacuuggcgcagcacagguaagacaaagugcuagccgaggcagaggacuuggugagaagccaaaagaaggagaugauaaagaaaagaaaaaagaaaaagaaaaagaagaagaaccaaagaaccuaaaugaaaauaagccgaaacaaccgaaugcagaaggugauggagcuaagccgaaacaaccgaaugcagaaggugauggagcuaagcugaaacaaccgaaugcagaaggugauggagcuaagcugaaacaaccgaaugcagaaggugauggaggaaaugcacgacaaccgaaugcagaaggugauggaggaaaugcacgacaaccgaaugcagaaggugauggaggaaaugcacgacaaccgaaugcagaaggugauggaggaaaugcacgacaaccgaaugcagaaggugauggaggaaaugcacgacaaccgaaugcagaaggugauggaggaaaugcacgacaaccuaaugcagaaggugauggaggaaaugcacgacaaccgaaugcagaaggugauggaggaaaugcacgacaaccgaaugcagaaggugauggaggaaaugcacgacaaccuaaugcagaaggugauggaggaaaugcacgacaaccuaaugcagaaggugauggaggaaaugcacgacaaccuaaugcagaaggugauggaggaaaugcacgacaaccgaaugcagaaggugauggagcaaaugcacgacagccacaggcagaaggugguggaggaaaugcacgacaaggaggaaaugaggggaauaaacaagcaggaaaaggacagggacaaaacaaucagggugcgaaugccccaaaugaaaaaguuguaaaugauuaccuacagaaaauuagaucuagcguuaccaccgaguggacuccaugcaguguaaccuguggaaaugguguaagaauuagaagaagagcucaugcagauaagaaaaaggcagaggaccuuacuauggaugaccuugaaguggaagcuuguguaauggauaagugugcuggcauauuuaacguugugaguaauucauuaggguuagucauauuguuaguccuagcauuauucaauuaa

SEQ ID NO: 3113 - RNA, 1218 nt, Artificial Sequence
  derived and/or modified CDS sequence (wt) from Pk(UM0015C4)__AHF20661.1__CSP
augaagaacuucauucucuuggccgucuccuccauccugcugguggacuugcuccccacacacuucgaacauaauguagaucucuccagggccauaaauguaaauggaguaagcuucaauaauguagacaccaguucacuuggcgcagcacagguaagacaaagugcuagccgaggcagaggacuuggugagaagccaaaagaaggagaugauaaagaaaagaaaaaagaaaaagaaaaagaagaagaaccaaagaagcuagaugaaaauaagccgaaacaaccgaauguagaaggugauggagcuaagcugaaacaaccgaaugaagaaggugauggagcuaagcugaaacaaccgaaugaagaaggugauggagcuaagcugaaacaaccgaaugcagaagguggagcuaagcugaaacaaccgaaugcagaagguggagcaaaugcaggacaaccgaaugcagaagguggagcaaaugcaggacaaccgaaugcagaagguggagcaaaugcaggacaaccgaaugcagaagguggagcaaaugcaggacaaccgaaugcagaagguggagcaaaugcaggacaaccgaaugcagaagguggagcaaaugcaggacaaccgaaugcagaagguggagcaaaugcacgacaaccgaaugcagaagguggagcaaaugcacgacaaccgaaugcagaagguggagcaaaugcacgacaaccuaaugcagaagguggagcaaaugcaggacaaccgaaugcagaagguggagcaaaugcaggacaaccgaaugcagaagguggagcaaaugcacgacagccacaggcagaaggugguggagcaaaugcacgacagccacaggcagaaggugguggagcaaaugcacgacaaggaggaaaugaggggaauaaacaagcaggaaaaggacagggacaaaacaaucagggugcgaaugccccaaaugaaaaaguuguaaaugauuaccuacagaaaauuagaucuagcguuaccaccgaguggacuccaugcaguguaaccuguggaaaugguguaagaauuagaagaagagcucaugcagauaagaaaaaggcagaggaccuuacuauggaugaccuugaaguggaagcuuguguaauggauaagugugcuggcauauuuagcguugugaguaauucauuaggguuaguaauauuguuaguccuagcauuauucaauuaa

SEQ ID NO: 3114 - RNA, 1218 nt, Artificial Sequence
  derived and/or modified CDS sequence (wt) from Pk(UM0015C7)__AHF20662.1__CSP
augaagaacuucauucucuuggccgucuccuccauccugcugguggacuugcuccccacacacuucgaacauaauguagaucucuccagggccauaaauguaaauggaguaagcuucaauaauguagacaccaguucacuuggcgcagcacagguaagacaaagugcuagccgaggcagaggacuuggugagaagccaaaagaaggagaugauaaagaaaagaaaaaagaaaaagaaaaagaagaagaaccaaagaagcuaaaugaaaauaagccgaaacaaccgaauguagaaggugauggagcuaagcugaaacaaccgaaugaagaaggugauggagcuaagcugaaacaaccgaaugaagaaggugauggagcuaagcugaaacaaccgaaugcagaagguggagcuaagcugaaacaaccgaaugcagaagguggagcaaaugcaggacaaccgaaugcagaagguggagcaaaugcaggacaaccgaaugcagaagguggagcaaaugcaggacaaccgaaugcagaagguggagcaaaugcaggacaaccgaaugcagaagguggagcaaaugcaggacaaccgaaugcagaagguggagcgaaugcaggacaaccgaaugcagaagguggagcaaaugcacgacaaccgaaugcagaagguggagcaaaugcacgacaaccgaaugcagaagguggagcaaaugcacgacaaccuaaugcagaagguggagcaaaugcaggacaaccgaaugcagaagguggagcaaaugcaggacaaccgaaugcagaagguggagcaaaugcacgacagccacaggcagaaggugguggagcaaaugcacgacagccacaggcagaaggugguggagcaaaugcacgacaaggaggaaaugaggggaauaaacaagcaggaaaaggacagggacaaaacaaucagggugcgaaugccccaaaugaaaaaguuguaaaugauuaccuacagaaaauuagaucuagcguuaccaccgaguggacuccaugcaguguaaccuguggaaaugguguaagaauuagaagaagagcucaugcagauaagaaaaaggcagaggaccuuacuauggaugaccuugaaguggaagcuuguguaauggauaagugugcuggcauauuuaacguugugaguaauucauuaggguuaguaauauuguuaguccuagcauuauucaauuaa

SEQ ID NO: 3115 - RNA, 1218 nt, Artificial Sequence
  derived and/or modified CDS sequence (wt) from Pk(UM009C4)__AHF20644.1__CSP
augaagaacuucauucucuuggccgucuccuccauccugcugguggacuugcuccccacacacuucgaacauaauguagaucucuccagggccauaaauguaaauggaguaagcuucaauaauguagacaccaguucacuuggcgcagcacagguaagacaaagugcuagccgaggcagaggacuuggugagaagccaaaagaaggagaugauaaagaaaagaaaaaagaaaaagaaaaggaagaagaaccaaagaagcuaaaugaaaauaagccgaaacaaccgaauguagaaggugauggagcuaagcugaaacaaccgaaugaagaaggugauggagcuaagcugaaacgaccgaaugaagaaggugauggagcuaagcugaaacaaccgaaugcagaagguggagcuaagccgaaacaaccgaaugcagaagguggagcaaaugcaggacaaccgaaugcagaagguggagcaaaugcaggacaaccgaaugcagaagguggagcaaaugcaggacaaccgaaugcagaagguggagcaaaugcaggacaaccgaaugcagaagguggagcaaaugcaggacaaccgaaugcagaagguggagcaaaugcaggacaaccgaaugcagaagguggagcaaaugcacgacaaccgaaugcagaagguggagcaaaugcacgacaaccgaaugcagaagguggagcaaaugcacgacaaccuaaugcagaagguggagcaaaugcaggacaaccgaaugcagaagguggagcaaaugcaggacaaccgaaugcagaagguggagcaaaugcacgacagccacaggcagaaggugguggagcaaaugcacgacggccacaggcagaaggugguggagcaaaugcacgacaaggaggaaaugaggggaauaaacaagcaggaaaaggacagggacaaaacaaucagggugcgaaugccccaaaugaaaaaguuguaaaugauuaccuacagaaaauuagaucuagcguuaccaccgaguggacuccaugcaguguaaccuguggaaaugguguaagaauuagaagaagagcucaugcagauaagaaaaaggcagaggaccuuacuauggaugaccuugaaguggaagcuuguguaauggauaagugugcuggcauauuuaacguugugaguaacucauuaggguuaguaauauuguuagcccuagcauuauucaauuaa

SEQ ID NO: 3116 - RNA, 1212 nt, Artificial Sequence
  derived and/or modified CDS sequence (wt) from Pk(TN027)__AFG25481.1__CSP
augaagaacuucauucucuuggccgucuccuccauccugcugguggacuugcuccccacacacuucgaacauaauguagaucucuccagggccauaaauguaaauggaguaagcuucaauaauguagacaccaguucacuuggcgcagcacagguaagacaaagugcuagccgaggcagaggacuuggugagaagccaaaagaaggagaugauaaagaaaagaaaaaagaaaaagaaaaagaagaagaaccaaagaaccuaaaugaaaauaagccgaaacaaccgaaugcagaaggugauggagcuaagcugaaacaaccgaaugcagaaggugauggggcuaagcugaaacaaccgaaugcagaaggugauggagcuaagcugaaacaaccacaggcagaaggugauggagcaaaugcacgacagccacaggcagaaggugauggagcaaaugcacgacaaccacaggcagaaggugauggagcaaaugcacgacagccacaggcagaaggugauggagcaaaugcacgacaaccacaggcagaaggugauggagcaaaugcacgacagccacaggcagaaggugauggagcaaaugcacgacaaccacaggcagaaggugauggagcaaaugcacgacaaccacaggcagaaggugauggagcaaaugcacgacaaccacaggcagaaggugauggagcaaaugcacggcaaccacaggcagaaggugauggagcaaaugcacgacagccacaggcggaaggugguggagcaaaugcacgacagccacaggcagaaggugauggagcaaaugcacgacaagcacaagcacaaggagauggaggaaaugcacgacaaggaggaaacgggggaggugcaccagcaggaggaaaugaggggaauaaacaagcaggaaaaggacagggacaaaacaaucagggugcgaaugccccaaaugaaaaaguuguaaaugauuaccuacagaaaauuagaucuagcguuaccaccgaguggacuccaugcaguguaaccuguggaaaugguguaagaauuagaagaagagcucaugcagauaagaaaaaggcagaggaccuuacuauggaugaccuugaaguggaagcuuguguaauggauaagugugcuggcauauuuaacguugugaguaauucauuaggguuagucauauuguuaguccuagcauuauucaauuaa

SEQ ID NO: 3117 - RNA, 1188 nt, Artificial Sequence
  derived and/or modified CDS sequence (wt) from Pk(UM0034C7)__AHF20657.1__CSP
augaggaacuucauucucuuggccgucuccuccauccugcugguggacuugcuccccacacacuucgaacauaauguagaucucuccagggccauaaauguaaauggaguaagcuucaauaauguagacaccaguucacuuggcgcagcacagguaagacaaagugcuagccgaggcagaggacuuggugagaagcgaaaagaaggagcugauaaagaaaagaaaaaagaaaaagaagaagaaccaaagaagccaaaugaaaauaagcugaaacaaccgaauccagaccaaccacaagcacaggguaauggagcaaaugcaggacaaccacaagcacaaggagauggagcaaaugcaggacaaccacaagcacaaggagauggagcaaaugcaggacaaccacaagcacaaggagauggagcaaaugcaggacaaccacaagcacaaggagauggagcaaaugcaggacaaccacaagcacaaggagauggagcaaaugcaggacaaccacaagcacaaggagauggagcaaaugcaggacaaccacaagcacaaggagauggagcaaaugcaggacaaccacaagcacagggugauggagcaaaugcaggacaaccacaagcacaaggagauggagcaaaugcaggacaaccacaagcacagggugauggagcaaaugcaggacaaccacaagcacagggugauggagcaaaugcaggacaaccacaagcacagggugauggagcaaaugcaggacaaccacaagcacagggugauagggcgaaugcaggacaaccacaagcacaaggagauggggcaaauguaccacgacaaggaagaaacgggggaggugcaccagcaggaggaaaugaggggaauaaacaagcaggaaaaggacagggacaaaacaaucagggugcgaaugccccaaaugaaaaaguugugaaugauuaccuacacaaaauuagaucuagcguuaccaccgaguggacuccaugcaguguaaccuguggaaaugguguaagaauuagaagaaaagcucaugcagguaauaaaaaggcagaggaccuuacuauggaugaccuugagguggaagcuuguguaauggauaagugcgcuggcauauuuaacguugugaguaauucauuaggguuagucauauuguuaguccuagcauuauucaauuaa

SEQ ID NO: 3118 - RNA, 1185 nt, Artificial Sequence
  derived and/or modified CDS sequence (wt) from Pk(KH225)__ADN94498.1__CSP
augaagaacuucauucucuuggccgucuccuccauccugcugguggacuugcuccccacacacuucgaacauaauguagaucucuccagggccauaaauguaaauggaguaagcuucaauaauguagacaccaguucacuuggcgcagcacagguaagacaaagugcuagccgaggcagaggacuuggugagaagccaaaagaaggagaugauaaagaaaagaaaaaagaaaaagaaaaagaagaagaaccaaagaaccuaaaugaaaauaagccgaaacaaccgaaugcagaaggugauggagcuaagcugaaacaaccgaaugcagaaggugauggagcuaagcugaaacaaccgaaugcagaaggugauggaggaaaugcacgacaaccgaaugcagaaggugauggaggaaaugcacgacaaccgaaugcagaaggugauggaggaaaugcacgacaaccgaaugcagaaggugauggaggaaaugcacgacaaccgaaugcagaaggugauggaggaaaugcacgacaaccgaaugcagaaggugauggaggaaaugcacgacaaccuaaugcagaaggugauggaggaaaugcacgacaaccgaaugcagaaggugauggaggaaaugcacgacaaccgaaugcagaaggugauggaggaaaugcacgacaaccuaaugcagaaggugauggaggaaaugcacgacaaccuaaugcagaaggugauggaggaaaugcacgacaaccuaaugcagaaggugauggaggaaaugcacgacaaccgaaugcagaaggugauggagcaaaugcacgacagccacaggcagaaggugguggaggaaaugcacgacaaggaggaaaugaggggaauaaacaagcaggaaaaggacagggacaaaacaaucagggugcgaaugccccaaaugaaaaaguuguaaaugauuaccuacagaaaauuagaucuagcguuaccaccgaguggacuccaugcaguguaaccuguggaaaugguguaagaauuagaagaagagcucaugcagauaagaaaaaggcagaggaccuuacuauggaugaccuugaaguggaagcuuguguaauggauaagugugcuggcauauuuaacguugugaguaauucauuaggguuagucauauuguuaguccuagcauuauucaauuaa

SEQ ID NO: 3119 - RNA, 1179 nt, Artificial Sequence
  derived and/or modified CDS sequence (wt) from Pk(UM001C7)__AHF20637.1__CSP
augaagaacuucauucucuuggccgucuccuccauccugcugguggacuugcuccccacacacuucgaacauaauguagaucucuccagggccauaaauguaaauggaguaagcuucaauaauguagacaccaguucacuuggcgcagcacaggugagacaaagcgcuagccgaggcagaggacuuggugagaagccaaaagaaggagcugauaaagaaaagaaaaaagaaaaaggaaaagaaaaagaagaagaaccaaagaagccaaaugaaaauaagcugaaacaaccgaaugaaggacaaccacaagcacagggugauggagcaaaugcaggacaaccacaagcacaaggagauggagcaaaugcaggacaaccacaagcacaaggagauggagcaaaugcaggacaaccacaagcacagggugauggagcaaaugcaggacaaccacaagcacagggugauggagcaaaugcaggacaaccacaagcacaaggagauggagcaaaugcaggacaaccacaagcacagggugauggagcaaaugcagggcaaccacaagcacagggugauggagcaaauggugauggagcaaaugcagggcaaccacaagcacagggugauggagcaaaugcaggacaaccacaagcacaaggagauggagcaaaugcaggacaaccacaagcacaaggagauggagcaaaugcaggacaaccacaagcacagggugauggagcaaaugcaggacaaccacaagcacagggugauagggcgaaugcaggacaaccacaagcacaaggagauggggcaaauguaccacgacaaggaagaaacgggggaggugcaccagcaggaggaaaugaggggaauaaacaagcaggaaaaggacagggacaaaacaaucagggugcgaaugccccaaaugaaaaaguugugaaugauuaccuacacaaaauuagaucuagcguuaccaccgaguggacuccaugcaguguaaccuguggaaaugguguaagaauuagaagaaaagcucaugcagguaauaaaaaggcagaggaccuuacuauggaugaccuugagguggaagcuuguguaauggauaagugcgcuggcauauuuaacguugugaguaauucauuaggcuuagucauauuguuaguccuagcauuauucaauuaa

SEQ ID NO: 3120 - RNA, 1140 nt, Artificial Sequence
  derived and/or modified CDS sequence (wt) from Pk(SGEHIWM4-Y09-15)__AFD97227.1__CSP
augaagaacuucauucucuuggccgucuccuccauccugcugguggacuugcuccccacauacuucgaacauaauguagaucucuccagggccguaaauguaaauggaguaagcuucaauaguguagacaccaguucacuuggcgcagcacagguaagacaaagugcuagccgaggcagaggacuuggugagaagccaaaagaaggagcugauaaagaaaagaaaaaagaaaaagaaaaagaagaagaaccaaagaagccaaaugaaaauaagcugaaacaaccacaaggaaaugggggggcaggucaagcacaaccagaaggaaaugggggggcaggucaagcacaaccggaaggaaaugggggggcaggucaagcacaaccagaaggaaaugggggggcaggucaagcacaaccggaaggaaaugggggggcaggucaagcacaaccggaaggaaaugggggggcaggucaagcacaaccggaaggaaaugggggggcaggucaagcacaaccggaaggaaaugggggggcaggucaagcacaaccacaaggaaaugggggggcaggucaagcacaaccacaaggaaaugggggggcaggucaagcacaaccacaaggaaaugggggggcaggucaagcacaaccacaaggaaaugggggggcaggucaagcacaaccggaaggaaaugggggggcaggucaagcacaaccacaaggaaaugggggggcaggucaagcacaaccggaaggaaauagggaagcuccagcacaaccacaaggaaaugggggggcaggucaagcacaaccacaaaaaaacgaaggaggaaacgcaggagcacggaaaggacagggacaaaacagucagggugcgaaugccccaaaugaaaaaguuguaaaugauuaccuacagaaaauuagaucuagcguuaccaccgaguggacuccaugcaguguaaccuguggaaaugguguaagaauuagaaggagagcucaugcagauaagaaaaaggcaggggaccuuacuauggaugaccuugaaguggaagcuuguguaauggauaagugugcuggcauauuuaacgcugugaguaauucauuaggguuagucauauuguuaguccuagcauuauucaauuaa

SEQ ID NO: 3121 - RNA, 1140 nt, Artificial Sequence
  derived and/or modified CDS sequence (wt) from Pk(UM002C3)__AHF20638.1__CSP
augaagaacuucauucucuuggccgucuccuccauccugcugguggacuugcuccccacauacuucgaacauaauguagaucucuccagggccauaaauguaaauggaguaagcuucaauaauguagacaccaguucacuuggcgcagcacagguaagacaaagugcuagccgaggcagaggacuuggugagaagccaaaagaaggagcugauaaagaaaagaaaaaagaaaaagaaaaagaaaaagaagaagaaccaaagaagccaaaugaaaauaagcugaaacaaccggaaggaaaugggggggcagguccagcacaaccggaaggaaaugggggcgcagguccagcacaaccggaaggaaaugggggggcagguccagcacaaccggaaggaaaugggggggcagguccagcacaaccggaaggaaaugggggggcagguccagcacaaccggaaggaaaugggggggcagguccagcacaaccagaaggaaaugggggggcagguccagcacaaccggaaggaaaugggggggcagguccagcacaaccggaaggaaaugggggggcagguccagcacaaccgggggggcagguccagcacaaccggaaggaaaugggggggcagguccagcacaaccggaaggaaaugggggggcagguccagcacaaccacaaggaaaugggggggcagguccagcacaaccacaaggaaauggggggggcagguccagcacaaccacaaggaaaugggggggcagguccagcacaaccacaaggaaaugggggggcaggucaagcacaaccacaaaaaaacgaaggaggaaacgcaggagcacggaaaggacagggacaaaacaaucagggugcgaaugccccaaaugaaaaaguuguaaaugauuaccuacagaaaauuagaucuagcguuaccaccgaguggacuccaugcaguguaaccuguggagaugguguaagaauuaaaagaagagcucaugcagauaagaaaaaggcagaggaccuuacuauggaugaccuugaaguggaagcuuguguaauggauaagugugcuggcauauuuaacguugugaguaauucauuaggguuagucauauuguuaguccuagcauuauucaauuaa

SEQ ID NO: 3122 - RNA, 1128 nt, Artificial Sequence
  derived and/or modified CDS sequence (wt) from Pk(UM0021C6)__AHF20666.1__CSP
augaggaacuucauucucuuggccgucuccuccauccugcugguggacuuguuccccacacacuucgaacauaauguagaucucuccagggccauaaauguaaauggaguaagcuucaauaauguagacaccaguucacuuggcgcagcacaggugagacaaagugcuagccgaggcagaggacuuggugagaagccaaaagaaggagcugauaaagaaaagaaaaaagaaaaaggaaaagaaaaagaagaagaaccaaagaagccaaaugaaaauaagcugaaacaaccgaaugaaggacaaccacaagcacagggugauggagcaaaugcaggacaaccacaagcacaaggagauggagcaaaugcaggacaaccacaagcacaaggagauggagcaaaugcaggacaaccacaagcacagggugauggagcaaaugcaggacaaccacaagcacagggugauggagcaaaugcaggacaaccacaagcacaaggagauggagcaaaugcaggacaaccacaagcacagggugauggagcaaaugcagggcaaccacaagcacagggugauggagcaaaugcaggacaaccacaagcacaaggagauggagcaaaugcaggacaaccacaagcacaaggagauggagcaaauacaggacaaccacaagcacagggugauggagcaaaugcaggacaaccacaagcacagggugauagggcgaaugcaggacaaccacaagcacaaggagauggggcaaauguaccacgacaaggaagaaacgggggaggugcaccagcaggaggaaaugaggggaauaaacaagcaggaaaaggacagggacaaaacaaucagggugcgaaugccccaaaugaaaaaguugugaaugauuaccuacacaaaauuagaucuagcguuaccaccgaguggacuccaugcaguguaaccuguggaaaugguguaagaauuagaagaaaagcucaugcagguaauaaaaaggcagaggaccuuacuauggaugaccuugagguggaagcuuguguaauggauaagugcgcuggcauauuuaacguugugaguaauucauuaggcuuagucauauuguuaguccuagcauuauucaauuaa

SEQ ID NO: 3123 - RNA, 1128 nt, Artificial Sequence
  derived and/or modified CDS sequence (wt) from Pk(UM0050C2)__AHF20664.1__CSP
augaagaacuucauucucuuggccgucuccuccauccugcugguggacuugcuccccacacacuucgaacauaauguagaucucuccagggccauaaauguaaauggaguaagcuucaauaauguagacaccaguucacuuggcgcagcacaggugagacaaagugcuagccgaggcagaggacuuggugagaagccaaaagaaggagcugauaaagaaaagaaaaaagaaaaaggaaaagaaaaagaagaagaaccaaagaagccaaaugaaaauaagcugaaacaaccgaaugaaggacaaccacaagcacagggugauggagcaaaugcaggacaaccacaagcacaaggagauggagcaaaugcaggacaaccacaagcacaaggagauggagcaaaugcaggacaaccacaagcacagggugauggagcaaaugcaggacaaccacaagcacagggugauggagcaaaugcaggacaaccacaagcacaaggagauggagcaaaugcaggacaaccacaagcacagggugauggagcaaaugcagggcaaccacaagcacagggugauggagcaaaugcaggacaaccacaagcacaaggagauggagcaaaugcaggacaaccacaagcacaaggagauggagcaaaugcaggacaaccacaagcacagggugauggagcaaaugcaggacaaccacaagcacagggugauagggcgaaugcaggacaaccacaagcacaaggagauggggcaaauguaccacgacaaggaagaaacgggggaggugcaccagcaggaggaaaugaggggaauaaacaagcaggaaaaggacagggacaaaacaaucagggugcgaaugccccaaaugaaaaaguugugaaugauuaccuacacaaaauuagaucuagcguuaccaccgaguggacuccaugcaguguaaccuguggaaaugguguaagaauuagaagaaaagcucaugcagguaauaaaaaggcagaggaccuuacuauggaugaccuugaaguggaagcuuguguaauggauaagugugcuggcauauuuaacguugugaguaauucauuaggguuagucauauuguuaguccuagcauuauucaauuaa

SEQ ID NO: 3124 - RNA, 1128 nt, Artificial Sequence
  derived and/or modified CDS sequence (wt) from Pk(UMMK569C20)__AHF20669.1__CSP
augaagaacuucauucucuuggccgucuccuccauccugcugguggacuugcuccccacacacuucgaacauaauguagaucucuccagggccauaaauguaaauggaguaagcuucaauaauguagacaccaguucacuuggcgcagcacaggugagacaaagugcuagccgaggcagaggacuuggugagaagccaaaagaaggagcugauaaagaaaagaaaaaagaaaaaggaaaagaaaaagaagaagaaccaaagaagccaaaugaaaauaagcugaaacaaccgaaugaaggacaaccacaagcacagggugauggagcaaaugcaggacaaccacaagcacaaggagauggagcaaaugcaggacaaccacaagcacagggugauggagcaaaugcaggacaaccacaagcacagggugauggagcaaaugcaggacaaccacaagcacgaggagauggagcaaaugcaggacaaccacaagcacagggugauggagcaaaugcaggacaaccacaagcacagggugauggagcaaaugcagggcaaccacaagcacagggugauggagcaaaugcaggacaaccacaagcacaaggagauggagcaaaugcaggacaaccacaagcacaaggagauggagcaaaugcaggacaaccacaagcacagggugauggagcaaaugcaggacaaccacaagcacagggugauagggcgaaugcagggcaaccacaagcacaaggagauggggcaaauguaccacgacaaggaagaaacgggggaggugcaccagcaggaggaaaugaggggaauaaacaagcaggaaaaggacagggacaaaacaaucagggugcgaaugccccaaaugaaaaaguugugaaugauuaccuacacaaaauuagaucuagcguuaccaccgaguggacuccaugcaguguaaccuguggaaaugguguaagaauuagaagaaaagcucaugcagguaauaaaaaggcagaggaccuuacuauggaugaccuugagguggaagcuuguguaauggauaagugcgcuggcauauuuaacguuguaaguaauucauuaggcuuagucauauuguuaguccuagcauuauucaauuaa

SEQ ID NO: 3125 - RNA, 1116 nt, Artificial Sequence
  derived and/or modified CDS sequence (wt) from Pk(KH433)__ADN94489.1__CSP
augaggaacuucauucucuuggccgucuccuccauccugcugguggacuugcuccccacacacuucgaacauaauguagaucucuccagggccauaaauguaaauggaguaagcuucaauaauguagacaccaguucacuuggcgcagcacagguaagacaaagugcuagccgaggcagaggacuuggugagaagcgaaaagaaggagcugauaaagaaaagaaaaaagaaaaagaagaagaaccaaagaagccaaaugaaaauaagcugaaacaaccgaauccaggacaaccacaagcacaaggagauggagcaaaugcaggacaaccacaagcacaaggagauggagcaaaugcaggacaaccacaagcacagggugauggagcaaaugcaggacaaccacaagcacaaggagauggagcaaaugcaggacaaccacaagcacagggugauggagcaaaugcaggacaaccacaagcacaaggagauggagcaaaugcaggacaaccacaagcacagggugauggagcaaaugcaggacaaccacaagcacaaggagauggagcaaaugcaggacaaccacaagcacagggugauggagcaaaugcaggacaaccacaagcacagggugauggagcaaaugcaggacaaccacaagcacagggugauggagcaaaugcaggacaaccacaagcacagggugauagggcgaaugcaggacaaccacaagcacaaggagauggggcaaauguaccacgacaaggaagaaacgggggaggugcaccagcaggaggaaaugaggggaauaaacaagcaggaaaaggacagggacaaaacaaucagggugcgaaugccccaaaugaaaaaguugugaaugauuaccuacacaaaauuagaucuagcguuaccaccgaguggacuccaugcaguguaaccuguggaaaugguguaagaauuagaagaaaagcucaugcagguaauaaaaaggcagaggaccuuacuauggaugaccuugagguggaagcuuguguaauggauaagugcgcuggcauauuuaacguugugaguaauucauuaggcuuagucauauuguuaguccuagcauuauucaauuaa

SEQ ID NO: 3126 - RNA, 1116 nt, Artificial Sequence
  derived and/or modified CDS sequence (wt) from Pk(UM0034C10)__AHF20658.1__CSP
augaggaacuucauucucuuggccgucuccuccauccugcugguggacuugcuccccacacacuucgaacauaauguagaucucuccagggccauaaauguaaauggaguaagcuucaauaauguagacaccaguucacuuggcgcagcacagguaagacaaagugcuagccgaggcagaggacuuggugagaagcgaaaagaaggagcugauaaagaaaagaaaaaagaaaaagaagaagaaccaaagaagccaaaugaaaauaagcugaaacaaccgaauccagaccaaccacaagcacagggugauggagcaaaugcaggacaaccacaagcacaaggagauggagcaaaugcaggacaaccacaagcacaaggagauggagcaaaugcaggacaaccacaagcacaaggagauggagcaaaugcaggacaaccacaagcacaaggagauggagcaaaugcaggacaaccacaagcacaaggagauggagcaaaugcaggacaaccacaagcacagggugauggagcaaaugcaggacaaccacaagcacaaggagauggagcaaaugcaggacaaccacaagcacagggugauggagcaaaugcaggacaaccacaagcacagggugauggagcaaaugcaggacagccacaagcacagggugauggagcaaaugcaggacaaccacaagcacagggugauagggcgaaugcaggacaaccacaagcacaaggagauggggcaaauguaccacgacaaggaagaaacgggggaggugcaccagcaggaggaaaugaggggaauaaacaagcaggaaaaggacagggacaaaacaaucagggugcgaaugccccaaaugaaaaaguugugaaugauuaccuacacaaaauuagaucuagcguuaccaccgaguggacuccaugcaguguaaccuguggaaaugguguaagaauuagaagaagacagaaugcugguaauaaaaaggcagaggaccuuacuauggaugaccuugaggcggaagcuuguguaauggauaagugcgcuggcauauuuaacguugugaguaauucauuaggguuagucauauuguuaguccuagcauuauucaauuaa

SEQ ID NO: 3127 - RNA, 1116 nt, Artificial Sequence
  derived and/or modified CDS sequence (wt) from Pk(UM0034C6)__AHF20656.1__CSP
augaggaacuucauucucuuggccgucuccuccauccugcugguggacuugcuccccacacacuucgaacauaauguagaucucuccagggccauaaauguaaauggaguaagcuucaauaauguagacaccaguucacuuggcgcagcacagguaagacaaagugcuagccgaggcagaggacuuggugagaagcgaaaagaaggagcugauaaagaaaagaaaaaagaaaaagaagaagaaccaaagaagccaaaugaaaauaagcugaaacaaccgaauccagaccaaccacaagcacagggugauggagcaaaugcaggacaaccacaagcacaaggagauggagcaaaugcaggacaaccacaagcacaaggagauggagcaaaugcaggacaaccacaagcacaaggagauggagcaaaugcaggacaaccacaagcacaaggagauggagcaaaugcaggacaaccacaggcacaaggagauggagcaaaugcaggacaaccacaagcacagggugauggagcaaaugcaggacaaccacaagcacaaggagauggagcaaaugcaggacaaccacaagcacagggugauggagcaaaugcaggacaaccacaagcacagggugauggagcaaaugcaggacaaccacaagcacagggugauggagcaaaugcaggacaaccacaagcacagggugauagggcgaaugcaggacaaccacaagcacaaggagauggggcaaauguaccacgacaaggaagaaacgggggaggugcaccagcaggaggaaaugaggggaauaaacaagcaggaaaaggacagggacaaaacaaucagggugcgaaugccccaaaugaaaaaguugugaaugauuaccuacacaaaauuagaucuagcguuaccaccgaguggacuccaugcaguguaaccuguggaaaugguguaagaauuagaagaaaagcucaugcggguaauaaaaaggcagaggaccuuacuauggaugaccuugagguggaagcuuguguaauggauaagugcgcuggcauauuuaacguugugaguaauucauuaggguuagucauauuguuaguccuagcauuauucaauuaa

SEQ ID NO: 3128 - RNA, 1107 nt, Artificial Sequence
  derived and/or modified CDS sequence (wt) from Pk(SGEHIWM16-Y09-85)__AFD97232.1__CSP
augaagaacuucauucucuuggccgucuccuccauccugcugguggacuugcuccccacauacuucgaacauaauguagaucucuccagggccauaaauguaaauggaguaagcuucaauaguguagacaccaguucacuuggcgcagcacagguaagacaaagugcuagccgaggcagaggacuuggugagaagccaaaagaaggagcugauaaagaaaagaaaaaagaaaaagaaaaagaagaagaaccaaagaagccaaaugaaaauaagcugaaacaaccacaaggaaaugggggggcaggucaagcacaaccagaaggaaaugggggggcaggucaagcacaaccggaaggaaaugggggggcaggucaagcacaaccagaaggaaaugggggggcaggucaagcacaaccggaaggaaaugggggggcaggucaagcacaaccggaaggaaaugggggggcaggucaagcacaaccggaaggaaaugggggggcaggucaagcacaaccggaaggaaaugggggggcaggucaagcacaaccggaaggaaaugggggggcaggucaagcacaaccggaaggaaaugggggggcaggucaagcacaaccacaaggaaaugggggggcaggucaagcacaaccacaaggaaaugggggggcaggucaagcacaaccacaaggaaaugggggggcaggucaagcacaaccggaaggaaauagggaagcuccagcacaaccacaaggaaaugggggggcaggucaagcacaaccacaaaaaaacgaaggaggaaacgcaggagcacggaaaggacagggacaaaacaaucagggugcgaaugccccaaaugaaaaaguuguaaaugauuaccuacagaaaauuagaucuagcguuaccaccgaguggacuccaugcaguguaaccuguggaaaugguguaagaauuagaagaagagcucaugcagauaagaaaaaggcagaggaccuuacuauggaugaccuugaaguggaagcuuguguaauggauaagugugcuggcauauuuaacguugugaguaauucauuaggguuagucauauuguuaguccuagcauuauucaauuaa

SEQ ID NO: 3129 - RNA, 1107 nt, Artificial Sequence
  derived and/or modified CDS sequence (wt) from Pk(SGEHIWM4-Y09-13)__AFD97225.1__CSP
augaagaacuucauucucuuggccgucuccuccauccugcugguggacuugcuccccacauacuucgaacauaauguagaucucuccagggccauaaauguaaauggaguaagcuucaauaguguagacaccaguucacuuggcgcagcacagguaagacagagugcuagccgaggcagaggacuuggugagaagccaaaagaaggagcugauaaagaaaagaaaaaagaaaaagaaaaagaagaagaaccaaagaagccaaaugaaaauaagcugaaacaaccacaaggaaaugggggggcaggucaagcacaaccagaaggaaaugggggggcaggucaagcacaaccggaaggaaaugggggggcaggucaagcacaaccagaaggaaaugggggggcaggucaagcacaaccggaaggaaaugggggggcaggucaagcacaaccggaaggaaaugggggggcaggucaagcacaaccggaaggaaaugggggggcaggucaagcacaaccggaaggaaaugggggggcaggucaagcacaaccggaaggaaaugggggggcaggucaagcacaaccggaaggaaaugggggggcaggucaagcacaaccacaaggaaaugggggggcaggucaagcacaaccacaaggaaaugggggggcaggucaagcacaaccacaaggaaaugggggggcaggucaagcacaaccggaaggaaauagggaagcuccagcacaaccacaaggaaaugggggggcaggucaagcacagccacaaaaaaacgaaggaggaaacgcaggagcacggaaaggacagggacaaaacaaucagggugcgaaugccccaaaugaaaaaguuguaaaugauuaccuacagaaaauuagaucuagcguuaccaccgaguggacuccaugcaguguaaccuguggaaaugguguaagaauuagaagaagagcucaugcagauaagaaaaaggcagaggaccuuacuguggaugaccuugaaguggaagcuuguguaauggauaagugugcuggcauauuuaacguugugaguaauucauuaggguuagucauauuguuaguccuagcauuauucaauuaa

SEQ ID NO: 3130 - RNA, 1104 nt, Artificial Sequence
  derived and/or modified CDS sequence (wt) from Pk(KH58)__ADN94493.1__CSP
augaagaacuucauucucuuggccgucuccuccauccugcugguggacuugcuccccacacacuucgaacauaauguagaucucuccagggccauaaauauaaauggaguaagcuucaauaauguagacaccaguucacuuggcgcagcacagguaagacaaagugcuagccgaggcagaggacuuggugaaaagccaaaagaaggagcugauaaagaaaagaaaaaagaaaaagaaaaagaagaagaaccaaagaagccaaaugaaaauaagcugaaacaaccuaaugcagaaggugauggagcaaaugcacgacaaccgaaugcagaaggugauggagcaaaugcacgacaaccuaaugcagaaggugauggagcaaaugcacgacaaccgaaugcagaaggugauggagcaaaugcacgacaaccuaaugcagaaggugauggagcaaaugcacgacaaccuaaugcagaaggugauggagcaaaugcacgacaaccuaaugcagaaggugauggagcaaaugcacgacaaccgaaugcagaaggugauggagcaaaugcacgacaaccgaaugcagaaggugauggagcaaaugcacgacaaccuaaugcagaaggugauggagcaaaugcacgacaaccgaaugcagaaggugguggagcaaaugcacgacaaccgaaugcagaaggugauggagcaaaugcacgacaaccacaagcacaaggagauggaggaaaugcacgacaaggaggaaacgggggaggugcaccagcaggaggaaaugaggggaauaaacaagcaggaaaaggacagggacaaaacaaucagggugcgaaugccccaaaugaaaaaguuguaaaugauuaccuacagaaaauuagaucuagcguuaccaccgaguggacuccaugcaguguaaccuguggaaaugguguaagaauuagaagaagagcucaugcagauaagaaaaaggcagaggaccuuacuauggaugaccuugaaguggaagcuuguguaauggauaagugugcuggcauauuuaacguugugaguaauucauuaggguuagucauauuguuaguccuagcauuauucaauuaa

SEQ ID NO: 3131 - RNA, 1104 nt, Artificial Sequence
  derived and/or modified CDS sequence (wt) from Pk(UM0029C8)__AHF20651.1__CSP
augaagaacuucauucucuuggccgucuccuccauccugcugguggacuugcuccccacacacuucgaacauaauguagaucucuccagggccauaaauguaaauggaguaagcuucaauaauguagacaccaguucacuuggcgcagcacagguaagacaaagugcuagccgaggcagaggacuuggugagaagccaaaagaaggagcugauaaagaaaagaaaaaagaaaaagaaaaagaaaaagaagaagaaccaaagaagccaaaugaaaauaagcugaaacaaccggaacaaccagcagcaggagcagggggcgaacaaccagcagcaggagcaggaggcgaacaaccagcagcaggagcaggaggcgaacaaccagcagcaggagcaggaggcgaacaaccagcagcaggagcaagaggcgaacaaccagcagcaggagcaggaggcgaacaaccagcagcaggagcaagaggcgaacaaccagcagcaggagcaggaggcgaacaaccagcagcaggagcaggaggcgaacaaccagcagcaggagcaggaggcgaacaaccagcagcaggaggcgaacaaccagcagcaggagcaggaggcgaacaaccagcagcaggagcaagaggcgaacaaccagcagcaggagcaggaggcgaacaaccagcaccagcaccaaggagggaacaaccagcagcaggagcagggggcgaacaaccagcaccagcaccaaggagggaacaaccagcaccaggagcaggugcgggagauggagcacgaggaggaaacgcaggggcagguaaaggacagggacaaaacaaucagggugcgaaugucccaaaugaaaaaguugugaaugauuaccuacacaaaauuagaucuagcguuaccaccgaguggacuccaugcaguguaaccuguggaaaugguguaagaauuagaagaaaaggucaugcagguaauaaaaaggcagaggaccuuacuauggaugaccuugagguggaagcuuguguaauggauaagugcgcuggcauauuuaacguugugaguaauucauuaggcuuagucauauuguuaguccuagcauuauucaauuaa

SEQ ID NO: 3132 - RNA, 1104 nt, Artificial Sequence
  derived and/or modified CDS sequence (wt) from Pk(UM0032C8)__AHF20655.1__CSP
augaagaacuucauucucuuggccgucuccuccauccugcugguggacuugcuccccacacacuucgaacauaauguagaucucuccagggccauaaauguaaauggaguaagcuucaauaauguagacaccaguucacuuggcgcagcacaggugagacaaagugcuagccgaggcagaggacuuggugagaagccaaaagaaggagcugauaaagaaaagaaaaaagaaaaagaaaaagaagaagaaccaaagaagccaaaugaaaauaagcugaaacaaccuaaugcagaaggugauggggcaaaugcacgacaaccuaaugcagaaggugauggagcaaaugcacgacaaccgaaugcagaaggugauggagcaaaugcacgacaaccuaaugcagaaggugauggagcaaaugcacgacaaccuaaugcagaaggugauggagcaaaugcacgacaaccuaaugcagaaggugauggagcaaaugcacgacaaccuaaugcagaagguaauggagcaaaugcacgacaaccgaaugcagaaggugguggagcaaaugcacgacaaccgaaugcagaaggugauggagcaaaugcacgacaaccuaaugcagaaggugauggagcaaaugcacgacaaccgaaugcagaaggugguggagcaaaugcacgacagccacaggcagaaggugauggagcaaaugcacgacaaccacaagcacaaggagauggaggaaaugcacgacaaggaggaaacgggggaggugcaccagcaggaggaaaugaggggaauaaacaagcaggaaaaggacagggacaaaacaaucagggugcgaaugccccaaaugaaaaaguuguaaaugauuaccuacagaaaauuagaucuagcguuaccaccgaguggacuccaugcaguguaaccuguggaaaugguguaagaauuagaagaagagcucaugcagauaagaaaaaggcagaggaccuuacuauggaugaccuugaaguggaagcuuguguaauggauaagugugcuggcauauuuaacguugugaguaauucauuaggguucgucauauuguuaguccuagcauuauucaauuaa

SEQ ID NO: 3133 - RNA, 1101 nt, Artificial Sequence
  derived and/or modified CDS sequence (wt) from Pk(LT22)__ADN94538.1__CSP
augaggaacuucauucucuuggccgucuccuccauccugcugguggacuugcuccccacacacuucgaacauaauguagaucucuccagggccauaaauguaaauggaguaagcuucaauaauguagacaccaguucacuuggcgcagcacagguaagacaaagugcuagccgaggcagaggacuuggugagaagcgaaaagaaggagcugauaaagaaaagaaaaaagaaaaagaagaagaaccaaagaagccaaaugaaaauaagcugaaacaaccuaaugcagaagguggagcaaaugcaggacaaccgaaugcagaagguggagcaaaugcaggacaaccgaaugcagaagguggagcaaaugcaggacaaccuaaugcagaagguggagcaaaugcaggacaaccgaaugcagaagguggagcaaaugcaggacaaccuaaugcagaagguggagcaaaugcaggacaaccgaaugcagaagguggagcaaaugcaggacaaccgaaugcagaagguggagcaaaugcaggacaaccgaaugcagaagguggagcaaaugcaggacaaccgaaugcagaagguggagcaaaugcaggacaaccgaaugcagaagguggagcaaaugcacgacaaccgaaugcagaagguggagcaaaugcaggacaaccgaaugcagaagguggagcaaaugcaggacaaccgaaugcagaagguggagcaaaugcacgacagccacaggcagaaggugguggagcaaaugcacgacaaggaggaaaugaggggaauaaacaagcaggaaaaggacagggacaaaacaaucagggugcgaaugccccaaaugaaaaaguuguaaaugauuaccuacagaaaauuagaucuagcguuaccaccgaguggacuccaugcaguguaaccuguggaaaugguguaagaauuagaagaagagcucaugcagauaagaaaaaggcagaggaccuuacuauggaugaccuugaaguggaagcuuguguaauggauaagugugcuggcauauuuaacguugugaguaauucauuaggguuagucauauuguuaguccuagcauuauucaauuaa

SEQ ID NO: 3134 - RNA, 1101 nt, Artificial Sequence
  derived and/or modified CDS sequence (wt) from Pk(LT26)__ADN94539.1__CSP
augaggaacuucauucucuuggccgucuccuccauccugcugguggacuugcuccccacacacuucgaacauaauguagaucucuccagggccauaaauguaaauggaguaagcuucaauaauguagacaccaguucacuuggcgcagcacagguaagacaaagugcuagccgaggcagaggacuuggugagaagcgaaaagaaggagcugauaaagaaaagaaaaaagaaaaagaagaagaaccaaagaagccaaaugaaaauaagcugaaacaaccgaaugcagaagguggagcaaaugcaggacaaccgaaugcagaagguggagcaaaugcaggacaaccgaaugcagaagguggagcaaaugcaggacaaccuaaugcagaagguggagcaaaugcaggacaaccgaaugcagaagguggagcaaaugcaggacaaccuaaugcagaagguggagcaaaugcaggacaaccgaaugcagaagguggagcaaaugcaggacaaccgaaugcagaagguggagcaaaugcacgacaaccgaaugcagaagguggagcaaaugcaggacaaccgaaugcagaagguggagcaaaugcaggacaaccgaaugcagaagguggagcaaaugcaggacaaccgaaugcagaagguggagcaaaugcaggacaaccgaaugcagaagguggagcaaaugcaggacaaccgaaugcagaagguggagcaaaugcacgacagccacaggcagaaggugguggagcaaaugcacgacaaggaggaaaugaggggaauaaacaagcaggaaaaggacagggacaaaacaaucagggugcgaaugccccaaaugaaaaaguuguaaaugauuaccuacagaaaauuagaucuagcguuaccaccgaguggacuccaugcaguguaaccuguggaaaugguguaagaauuagaagaagagcucaugcagauaagaaaaaggcagaggaccuuacuauggaugaccuugaaguggaagcuuguguaauggauaagugugcuggcauauuuaacguugugaguaauucauuaggguuagucauauuguuaguccuagcauuauucaauuaa

SEQ ID NO: 3135 - RNA, 1101 nt, Artificial Sequence
  derived and/or modified CDS sequence (wt) from Pk(TB013)__AFG25472.1__CSP
augaggaacuucauucucuuggccgucuccuccauccugcugguggacuugcuccccacacacuucgaacauaauguagaucucuccagggccauaaauguaaauggaguaagcuucaauaauguagacaccaguucacuuggcgcagcacagguaagacaaagugcuggccgaggcagaggacuuggugagaagcgaaaagaaggagcugauaaagaaaagaaaaaagaaaaagaagaagaaccaaagaagccaaaugaaaauaagcugaaacaaccuaaugcagaagguggagcaaaugcaggacaaccgaaugcagaagguggagcaaaugcaggacaaccgaaugcagaagguggagcaaaugcaggacaaccuaaugcagaagguggagcaaaugcaggacaaccgaaugcagaagguggagcaaaugcaggacaaccuaaugcagaagguggagcaaaugcaggacaaccgaaugcagaagguggagcaaaugcaggacaaccgaaugcagaagguggagcaaaugcaggacaaccgaaugcagaagguggagcaaaugcaggacaaccgaaugcagaagguggagcaaaugcacgacaaccgaaugcagaagguggagcaaaugcacgacaaccgaaugcagaagguggagcaaaugcaggacaaccgaaugcagaagguggagcaaaugcaggacaaccgaaugcagaagguggagcaaaugcacgacagccacaggcagaaggugguggagcaaaugcacgacaaggaggaaaugaggggaauaaacaagcaggaaaaggacagggacaaaacaaucagggugcgaaugccccaaaugaaaaaguuguaaaugauuaccuacagaaaauuagaucuagcguuaccaccgaguggacuccaugcaguguaaccuguggaaaugguguaagaauuagaagaagagcucaugcagauaagaaaaaggcagaggaccuuacuauggaugaccuugaaguggaagcuuguguaauggauaagugugcuggcauauuuaacguugugaguaauucauuaggguuagucauauuguuaguccuagcauuauucaauuaa

SEQ ID NO: 3136 - RNA, 1101 nt, Artificial Sequence
  derived and/or modified CDS sequence (wt) from Pk(TB049)__AFG25474.1__CSP
augaggaacuucauucucuuggccgucuccuccauccugcugguggacuugcuccccacacacuucgaacauaauguagaucucuccagggccauaaauguaaauggaguaagcuucaauaauguagacaccaguucacuuggcgcagcacagguaagacaaagugcuagccgaggcagaggacuuggugagaagcgaaaagaaggagcugauaaagaaaagaaaaaagaaaaagaagaagaaccaaagaagccaaaugaaaauaagcugaaacaaccgaaugcagaagguggagcaaaugcaggacaaccgaaugcagaagguggagcaaaugcaggacagccgaaugcagaagguggagcaaaugcaggacaaccuaaugcagaagguggagcaaaugcaggacaaccgaaugcagaagguggagcaaaugcaggacaaccuaaugcagaagguggagcaaaugcaggacaaccgaaugcagaagguggagcaaaugcaggacaaccgaaugcagaagguggagcaaaugcacgacaaccgaaugcagaagguggagcaaaugcaggacaaccgaaugcagaagguggagcaaaugcaggacaaccgaaugcagaagguggagcaaaugcacgacaaccgaaugcagaagguggagcaaaugcacgacaaccgaaugcagaagguggagcaaaugcaggacaaccgaaugcagaagguggagcaaaugcacgacagccacaggcagaaggugguggagcaaaugcacgacaaggaggaaaugaggggaauaaacaagcaggaaaaggacagggacaaaacaaucagggugcgaaugccccaaaugaaaaaguuguaaaugauuaccuacagaaaauuagaucuagcguuaccaccgaguggacuccaugcaguguaaccuguggaaaugguguaagaauuagaagaagagcucaugcagauaagaaaaaggcagaggaccuuacuauggaugaccuugaaguggaagcuuguguaauggauaagugugcuggcauauuuaacguugugaguaauucauuaggguuagucauauuguuaguccuagcauuauucaauuaa

SEQ ID NO: 3137 - RNA, 1101 nt, Artificial Sequence
  derived and/or modified CDS sequence (wt) from Pk(TN024)__AFG25479.1__CSP
augaggaacuucauucucuuggccgucuccuccauccugcugguggacuugcuccccacacacuucgaacauaauguagaucucuccagggccauaaauguaaauggaguaagcuucaauaauguagacaccaguucacuuggcgcagcacagguaagacaaagugcuagccgaggcagaggacuuggugagaggcgaaaagaaggagcugauaaagaaaagaaaaaagaaaaagaagaagaaccaaagaagccaaaugaaaauaagcugaaacaaccuaaugcagaagguggagcaaaugcaggacaaccgaaugcagaagguggagcaaaugcaggacaaccgaaugcagaagguggagcaaaugcaggacaaccuaaugcagaagguggagcaaaugcaggacaaccgaaugcagaagguggagcaaaugcaggacaaccuaaugcagaagguggagcaaaugcaggacaaccgaaugcagaagguggagcaaaugcaggacaaccgaaugcagaagguggagcaaaugcacgacaaccgaaugcagaagguggagcaaaugcaggacaaccgaaugcagaagguggagcaaaugcaggacaaccgaaugcagaagguggagcaaaugcacgacaaccgaaugcagaagguggagcaaaugcacgacaaccgaaugcagaagguggagcaaaugcaggacaaccgaaugcagaagguggagcaaaugcacgacagccacaggcagaaggugguggagcaaaugcacgacaaggaggaaaugaggggaauaaacaagcaggaaaaggacagggacaaaacaaucagggugcgaaugccccaaaugaaaaaguuguaaaugauuaccuacagaaaauuagaucuagcguuaccaccgaguggacuccaugcaguguaaccuguggaaaugguguaagaauuagaagaagagcucaugcagauaagaaaaaggcagaggaccuuacuauggaugaccuugaaguggaagcuuguguaauggauaagugugcuggcauauuuaacguugugaguaauucauuaggguuagucauauuguuaguccuagcauuauucaauuaa

SEQ ID NO: 3138 - RNA, 1095 nt, Artificial Sequence
  derived and/or modified CDS sequence (wt) from Pk(KH369)__ADN94494.1__CSP
augaagaacuucauucucuuggccgucuccuccauccugcugguggacuuguuccccacacacuucgaacauaauguagaucucuccagggccauaaauguaaauggaguaagcuucaauaauguagacaccaguucacuuggcgcagcacagguaagacaaagugcuagccgaggcagaggacuuggugagaagccaaaagaaggagcugauaaagaaaagaaaaaagaaaaagaagaaccaaagaagccaaaugaaaauaagcugaaacaaccacaagcagaaggugauggagcaaaugcacgacaaccacaggcagaaggugauggagcaaaugcacgacaaccacaagcagaaggugauggagcaaaugcacgacaaccacaggcagaaggugauggagcaaaugcacgacaaccacaggcagaaggugauggagcaaaugcacgacaaccacaagcagaaggugauggagcaaaugcacgacaaccacaggcagaaggugauggagcaaaugcacgacaaccacaggcagaaggugauggagcaaaugcacgacaaccacaagcagaaggugauggagcaaaugcacgacagccacaggcagaaggugauggagcaaaugcacgacagccacaggcagaaggugguggagcaaaugcacgacagccacaggcagaaggugauggagcaaaugcacgacaaccacaagcacaaggagauggaggaaaugcacgacaaggaggaaacgggggaggugcaccagcaggaggaaaugaggggaauaaacaagcaggaaaaggacagggacaaaacaaucagggugcgaaugccccaaaugaaaaaguuguaaaugauuaccuacagaaaauuagaucuagcguuaccaccgaguggacuccaugcaguguaaccuguggaaaugguguaagaauuagaagaagagcucaugcagauaagaaaaaggcagaggaccuuacuauggaugaccuugaaguggaagcuuguguaauggauaagugugcuggcauauuuaacguugugaguaauucauuaggguuagucauauuguuaguccuagcauuauucaauuaa

SEQ ID NO: 3139 - RNA, 1095 nt, Artificial Sequence
  derived and/or modified CDS sequence (wt) from Pk(LT48)__ADN94507.1__CSP
augaagaacuucauucucuuggccgucuccuccauccugcugguggacuugcuccccacacacuucgaacauaauguagaucucuccagggccauaaauauaaauggaguaagcuucaauaauguagacaccaguucacuuggcgcagcacagguaagacaaagugcuagccgaggcagaggacuuggugaaaagccaaaagaaggagcugauaaagaaaaaaaaaaagaaaaagaagaaccaaagaagccaaaugaaaauaagcugaaacaaccacaagcagaaggugauggagcaaaugcacgacaaccacaggcagaaggugauggagcaaaugcacgacaaccacaagcagaaggugauggagcaaaugcacgacaaccacaggcagaaggugauggagcaaaugcacgacaaccacaggcagaaggugauggagcaaaugcacgacaaccacaagcagaaggugauggagcaaaugcacgacaaccacaggcagaaggugauggagcaaaugcacgacaaccacaggcagaaggugauggagcaaaugcacgacaaccacaagcagaaggugauggagcaaaugcacgacagccacaggcagaaggugauggagcaaaugcacgacagccacaggcagaaggugguggagcaaaugcacgacagccacaggcagaaggugauggagcaaaugcacgacaaccacaagcacaaggagauggaggaaaugcacgacaaggaggaaacgggggaggugcaccagcaggaggaaaugaggggaauaaacaagcaggaaaaggacagggacaaaacaaucagggugcgaaugccccaaaugaaaaaguuguaaaugauuaccuacagaaaauuagaucuagcguuaccaccgaguggacuccaugcaguguaaccuguggaaaugguguaagaauuagaagaagagcucaugcagauaagaaaaaggcagaggaccuuacuauggaugaccuugaaguggaagcuuguguaauggauaagugugcuggcauauuuaacguugugaguaauucauuaggguuagucauauuguuaguccuagcauuauucaauuaa

SEQ ID NO: 3140 - RNA, 1092 nt, Artificial Sequence
  derived and/or modified CDS sequence (wt) from Pk(LT22)__ADN94522.1__CSP
augaggaacuucauucucuuggccgucuccuccauccugcugguggacuugcuccccacacacuucgaacauaauguagaucucuccagggccauaaauguaaauggaguaagcuucaauaauguagacaccaguucacuuggcgcagcacagguaagacaaagugcuagccgaggcagaggacuuggugagaagcgaaaagaaggagcugauaaagaaaagaaaaaagaaaaagaagaagaaccaaagaagccaaaugaaaauaagcugaaacaaccggaucaagcaggaccagggggcgaacaagcaggaccaggaggcgaacaagcaggaccaggaggcgaacaagcaggaccaagaccagggggcgaacaagcaggaccaggaggcgaacaagcaggaccaagaccagggggcgaacaagcaggaccaggaggcgaacaagcaggaccaagaccagggggcgaacaagcaggaccaggaggcgaacaagcaggaccaggaggcgaacaagcaggaccaagaccagggggcgaacaagcaggaccagggggcgaacaagcaggaccaagaccagggggcgaacaagcaggaccaggaggcgaacaagcaggaccaagaccagggggcgaacaagcaggaccagggggcgaacaaccagcaccaagaccagggggagaacaaccagcaccagcaccaaggagggaacaaccagcaccagcaccagggggcgaacaaccagcaccaggagcaggugcgggagauggagcacgaggaggaaacccaggggcagguaaaggacagggacaaaacaaucagggugcaaaugucccaaaugaaaaaguugugaaugauuaccuacacaaaauuagaucuagcguuaccaccgaguggacuccaugcaguguaaccuguggaaaugguguaagaauuagaagaagacagaaugcugguaauaaaaaggcagaggaccuuacuauggaugaccuugagguggaagcuuguguaauggauaagugcgcuggcauauuuaacguugugaguaauucauuaggguuagucauauuguuaguccuagcauuauucaauuaa

SEQ ID NO: 3141 - RNA, 1092 nt, Artificial Sequence
  derived and/or modified CDS sequence (wt) from Pk(UM0020C1)__AHF20649.1__CSP
augaagaacuucauucucuuggccgucuccuccauccugcugguggacuugcuccccacacacuucgaacauaauguagaucucuccagggccauaaauguaaauggaguaagcuucaauaauguagacaccaguucacuuggcgcaucacaggugagacaaagugcuagccgaggcagaggacuuggugagaagccaaaagaaggagcugauaaagaaaagaaaaaagaaaaaggaaaagaaaaagaagaagaaccaaagaagccaaaugaaaauaagcugaaacaaccgaaugaaggacaaccacaagcacagggugauggagcaaaugcaggacaaccacaagcacaaggagauggagcaaaugcaggacaaccacaagcacaaggagauggagcaaaugcaggacaaccacaagcacagggugauggagcaaaugcaggacaaccacaagcacaaggagauggagcaaaugcaggacaaccacaagcacagggugauggagcaaaugcagggcaaccacaagcacagggugauggagcaaaugcaggacaaccacaagcacaaggagauggagcaaaugcaggacaaccacaagcacaaggagauggagcaaaugcaggacaaccacaagcacagggugauggagcaaaugcaggacaaccacaagcacagggugauagggcgaaugcaggacaaccacaagcacaaggagauggggcaaauguaccacgacaaggaagaaacgggggaggugcaccagcaggaggaaaugaggggaauaaacaagcaggaaaaggacagggacaaaacaaucagggugcgaaugccccaaaugaaaaaguugugaaugauuaccuacacaaaauuagaucuagcguuaccaccgaguggacuccaugcaguguaaccuguggaaaugguguaagaauuagaagaagacagaaugcugguaauaaaaaggcagaggaccuuacuauggaugaccuugagguggaagcuuguguaauggauaagugcgcuggcauauuuaacguugugaguaauucauuaggguuagucauauuguuaguccuagcauuauucaauuaa

SEQ ID NO: 3142 - RNA, 1092 nt, Artificial Sequence
  derived and/or modified CDS sequence (wt) from Pk(UM0020C3)__AHF20650.1__CSP
augaagaacuucauucucuuggccgucuccuccauccugcugguggacuugcuccccacacacuucgaacauaauguagaucucuccagggccauaaauguaaauggaguaggcuucaauaauguagacaccaguucacuuggcgcaucacaggugagacaaagugcuagccgaggcagaggacuuggugagaagccaaaagaaggagcugauaaagaaaagaaaaaagaaaaaggaaaagaaaaagaagaagaaccaaagaagccaaaugaaaauaagcugaaacaaccgaaugaaggacaaccacaagcacagggugauggagcaaaugcaggacaaccacaagcacaaggagauggagcaaaugcaggacaaccacaagcacaaggagauggagcaaaugcaggacaaccacaagcacagggugauggagcaaaugcaggacaaccacaagcacaaggagauggagcaaaugcaggacaaccacaagcacagggugauggagcaaaugcagggcaaccacaagcacagggugauggagcaaaugcaggacaaccacaagcacaaggagauggagcaaaugcaggacaaccacaagcacaaggagauggagcaaaugcaggacaaccacaagcacagggugauggagcaaaugcaggacaaccacaagcacagggugauagggcgaaugcaggacaaccacaagcacaaggagauggggcaaauguaccacgacaaggaagaaacgggggaggugcaccagcaggaggaaaugaggggaauaaacaagcaggaaaaggacagggacaaaacaaucagggugcgaaugccccaaaugaaaaaguugugaaugauuaccuacacaaaauuagaucuagcguuaccaccgaguggacuccaugcaguguaaccuguggaaaugguguaagaauuagaagaaaagcucaugcagguaauaaaaaggcagaggaccuuacuauggaugaccuugagguggaagcuuguguaauggauaagugcgcuggcauauuuaacguugugaguaauucauuaggcuuagucauauuguuaguccuagcauuauucaauuaa

SEQ ID NO: 3143 - RNA, 1092 nt, Artificial Sequence
  derived and/or modified CDS sequence (wt) from Pk(UM0021C19)__AHF20668.1__CSP
augaggaacuucauucucuuggccgucuccuccauccugcugguggacuuguuccccacacacuucgaacauaauguagaucucuccagggccauaaauguaaauggaguaagcuucaauaauguagacaccaguucacuuggcgcagcacaggugagacaaagugcuagccgaggcagaggacuuggugagaagcgaaaagaaggagcugauaaggaaaagaaaaaagaaaaagaagaagaaccaaagaagccaaaugaaaauaagcugaaacaaccggaucaagcaggaccagggggcgaacaagcaggaccaggaggcgaacaagcaggaccaggaggcgaacaagcaggaccaggaggcgaacaagcaggaccaagaccagggggcgaacaagcaggaccaggaggcgaacaagcaggaccaagaccagggggcgaacaagcaggaccaagaccagggggcgaacaagcaggaccaagaccagggggcgaacaagcaggaccaggaggcgaacaagcaggaccagggggcgaacaagcaggaccagggggcgaacaagcaggaccaagaccagggggcgaacaagcaggaccaggaggcgaacaagcaggaccaagaccagggggcgaacaagcaggaccagggggcgaacaaccagcaccaagaccagggggagaacaaccagcaccagcaccaaggagggaacaaccagcaccaggaccagggggcgaacaaccagcaccaggagcaggugcgggagauggagcacgaggaggaaacccaggggcagguaaaggacagggacaaaacaaucagggugcaaaugucccaaaugaaaaaguugugaaugauuaccuacacaaaauuagaucuagcguuaccaccgaguggacuccaugcaguguaaccuguggaaaugguguaagaauuagaagaagacagaaugcugguaauaaaaaggcagaggaccuuacuauggaugaccuugagguggaagcuuguguaauggauaagugcgcuggcauauuuaacguugugaguaauucauuaggguuagucacauuguuaguccuagcauuauucaauuaa

SEQ ID NO: 3144 - RNA, 1092 nt, Artificial Sequence
  derived and/or modified CDS sequence (wt) from Pk(UMGAC7)__AHF20617.1__CSP
augaagaacuucauucucuuggccgucuccuccauccugcugguggacuugcuccccacacacuucgaacauaauguagaucucuccagggccauaaauguaaauggaguaagcuucaauaauguagacaccaguucacuuggcgcagcacaggugagacaaagugcuagccgaggcagaggacuuggugagaagccaaaagaaggagcugauaaagaaaagaaaaaagaaaaaggaaaagaaaaagaagaagaaccaaagaagccaaaugaaaauaagcugaaacaaccgaaugaaggacaaccacaagcacagggugauggagcaaaugcaggacaaccacaagcacaaggagauggagcaaaugcaggacaaccacaagcacagggugauggagcaaaugcagggcaaccacaagcacagggugauggagcaaaugcaggacaaccacaagcacaaggagauggagcaaaugcaggacaaccacaagcacagggugauggagcaaaugcagggcaaccacaagcacagggugauggagcaaaugcaggacaaccacaagcacaaggagauggagcaaaugcaggacaaccacaagcacaaggagauggagcaaaugcaggacaaccacaagcacagggugauggagcaaaugcaggacaaccacaagcacagggugauagggcgaaugcaggacaaccacaagcacaaggagauggggcaaauguaccacgacaaggaagaaacgggggaggugcaccagcaggaggaaaugaggggaauaaacaagcaggaaaaggacagggacaaaacaaucagggugcgaaugccccaaaugaaaaaguugugaaugauuaccuacacaaaauuagaucuagcguuaccaccgaguggacuccaugcaguguaaccuguggaaaugguguaagaauuagaagaaaagcucaugcagguaauaaaaaggcagaggaccuuacuauggaugaccuugagguggaagcuuguguaauggauaagugcgcuggcauauuuaacguugugaguaauucauuaggcuuagucauauuguuagucccagcauuauucaauuaa

SEQ ID NO: 3145 - RNA, 1092 nt, Artificial Sequence
  derived and/or modified CDS sequence (wt) from Pk(UMMK566C6)__AHF20670.1__CSP
augaagaacuucauucucuuggccgucuccuccauccugcugguggacuugcuccccacacacuucgaacauaauguagaucucuccagggccauaaauguaaauggaguaagcuucaauaauguagacaccaguucacuuggcgcagcacaggugagacaaagugcuagccgaggcagaggacuuggugagaagccaaaagaaggagcugauaaagaaaagaaaaaagaaaaaggaaaagaaaaagaaggagaaccaaagaagccaaaugaaaauaagcugaaacaaccgaaugaaggacaaccacaagcacagggugauggagcaaaugcaggacagccacaagcacaaggagauggagcaaaugcaggacaaccacaagcacagggugauggagcaaaugcaggacaaccacaagcacagggugauggagcaaaugcaggacaaccacaagcacaaggagauggagcaaaugcaggacaaccacaagcacagggugauggagcaaaugcagggcaaccacaagcacagggugauggagcaaaugcaggacaaccacaagcacaaggagauggagcaaaugcaggacaaccacaagcacaaggagauggagcaaaugcaggacaaccacaagcacagggugauggagcaaaugcaggacaaccacaagcacagggugauagggcgaaugcaggacaaccacaagcacaaggagauggggcaaauguaccacgacaaggaagaaacgggggaggugcaccagcaggaggaaaugaggggaauaaacaagcaggaaaagggcagggacaaaacaaucagggugcgaaugccccaaaugaaaaaguugugaaugauuaccuacacaaaauuagaucuagcguuaccaccgaguggacuccaugcaguguaaccuguggaaaugguguaagaauuagaagaaaagcucaugcagguaauaaaaaggcagaggaccuuacuauggaugaccuugagguggaagcuuguguaauggauaagugcgcuggcauauuuaacguugugaguaauucauuaggcuuagucauauuguuaguccuagcauuauucaauuaa

SEQ ID NO: 3146 - RNA, 1089 nt, Artificial Sequence
  derived and/or modified CDS sequence (wt) from Pk(UMGAC1)__AHF20615.1__CSP
augaagaacuucauucucuuggccgucuccuccauccugcugguggacuugcuccccacacacuucgaacauaauguagaucucuccagggccauaaauguaaauggaguaagcuucaauaauguagacaccaguucacuuggcgcagcacaggugagacaaagugcuagccgaggcagaggacuuggugagaagccaaaagaaggagcugauaaagaaaagaaaaaagaaaaaggaaaagaaaaagaagaaccaaagaagccaaaugaaaauaagcugaaacaaccgaaugaaggacaaccacaagcacagggugauggagcaaaugcaggacaaccacaagcacaaggagauggagcaaaugcaggacaaccacaagcacagggugauggagcaaaugcagggcaaccacaagcacagggugauggagcaaaugcaggacaaccacaagcacaaggagauggagcaaaugcgggacaaccacgagcacagggugauggagcaaaugcagggcaaccacaagcacagggugauggagcaaaugcaggacaaccacaagcacaaggagauggagcaaaugcaggacaaccacaagcacaaggagauggagcaaaugcaggacaaccacaagcacagggugauggagcaaaugcaggacaaccacaagcacagggugauagggcgaaugcaggacaaccacaagcacaaggagauggggcaaauguaccacgacaaggaagaaacgggggaggugcaccagcaggaggaaaugaggggaauaaacaagcaggaaaaggacagggacaaaacaaucagggugcgaaugccccaaaugaaaaaguugugaaugauuaccuacacaaaauuagaucuagcguuaccaccgaguggacuccaugcaguguaaccuguggaaaugguguaagaauuagaagaaaagcucaugcagguaauaaaaaggcagaggaccuuacuauggaugaccuugagguggaagcuuguguaauggauaagugcgcuggcauauuuaacguugugaguaauucauuaggcuuagucauauuguuaguccuagcauuauucaauuaa

SEQ ID NO: 3147 - RNA, 1086 nt, Artificial Sequence
  derived and/or modified CDS sequence (wt) from Pk(NB032)__AFG25470.1__CSP
augaagaacuucauucucuuggccgucuccuccauccugcugguggacuuguuccccacacacuucgaacauaauguagaucucuccagggccauaaauguaaauggaguaagcuucaauaauguagacaccaguucacuuggcgcagcacagguaagacaaagugcuagccgaggcagaggacuuggugagaagccaaaagaaggagcugauaaagaaaagaaaaaagaaaaagaaaaagaaaaagaaaaagaagaagaaccaaagaagccaaaugaaaauaagcugaagcaaccggaaggaaaucaagaugggcgagcacaaccggaaggaaaucaggauggucgagcgcaaccggaaggaaaucaggauggucgagcgcaaccggaaggaaaucaagaugggcgagcacaaccggaaggaaaucaggauggucgagcgcaaccggaaggaaaucaagaugggcgagcacaaccggaaggaaaucaggauggucgagcgcaaccggaaggaaaucaggaugggcgagcgcaaccggaaggaaaucaggauggacgagcacaaccggaaggaaauagggaagcuccagcacaaccacaaggaaaugggggggcaggucaagcacaaccggaaggaaauagggaagcuccagcacaaccacaaggaaaugggggggcaggucaagcacaaccggaaggaaauagggaagcuccagcacaaccacaaggaaaugggggggcaggucaagcacaaccacaaaaaaacgaaggaggaaacgcaggagcacggaaaggacagggacaaaacaaucagggugcgaaugccccaaaugaaaaaguugugaaugauuaccuacacaaaauuagaucuagcguuaccaccgaguggacuccaugcaguguaaccuguggaaaugguguaagaauuagaagaaaagcucaugcagauaagaaaaaggcagaggaccuuacuauggaugaccuugaaguggaagcuuguguaauggauaagugcgcuggcauauuuaacguugugaguaauucauuaggguuagucauauuguuaguccuagcauuauucaauuaa

SEQ ID NO: 3148 - RNA, 1083 nt, Artificial Sequence
  derived and/or modified CDS sequence (wt) from Pk(UM002C4)__AHF20639.1__CSP
augaagaacuucauucucuuggccgucuccuccauccugcugguggacuugcuccccacauacuucgaacauaauguagaucucuccagggccauaaauguaaauggaguaagcuucaauaauguagacaccaguucacuuggcgcagcacagguaagacaaagugcuagccgaggcagaggacuuggugagaagccaaaagaaggagcugauaaagaaaagaaaaaagaaaaagaaaaagaaaaagaagaagaaccaaagaagccaaaugaaaauaagcugaaacaaccggaaggaaaugggggggcagguccagcacaaccggaaggaaaugggggcgcagguccagcacaaccggaaggaaaugggggggcagguccagcacaaccggaaggaaaugggggggcagguccagcacaaccggaaggaaaugggggggcagguccagcacaaccggaaggaaaugggggggcagguccagcacaaccagaaggaaaugggggggcagguccagcacaaccggaaggaaaugggggggcagguccagcacaaccggaaggaaaugggggggcagguccagcacaaccggaaggaaaugggggggcagguccagcacaaccacaaggaaaugggggggcagguccagcacaaccacaaggaaaugggggggcagguccagcacaaccacaaggaaaugggggggcagguccagcacaaccacaaggaaaugggggggcaggucaagcacaaccacaaaaaaacgaaggaggaaacgcaggagcacggaaaggacagggacaaaacaaucagggugcgaaugccccaaaugaaaaaguuguaaaugauuaccuacagaaaauuagaucuagcguuaccaccgaguggacuccaugcaguguaaccuguggaaaugguguaagaauuaaaagaagagcucaugcagauaagaaaaaggcagaggaccuuacuauggaugaccuugaaguggaagcuuguguaauggauaagugugcuggcauauuuaacguugugaguaauucauuaggguuagucauauuguuaguccuagcauuauucaauuaa

SEQ ID NO: 3149 - RNA, 1080 nt, Artificial Sequence
  derived and/or modified CDS sequence (wt) from Pk(CDK162)__ADN94495.1__CSP
augaggaacuucauucucuuggccgucuccuccauccugcugguggacuugcuccccacacacuucgaacauaauguagaucucuccagggccauaaauguaaauggaguaagcuucaauaauguagacaccaguucacuuggcgcagcacagguaagacaaagugcuagccgaggcagaggacuuggugagaagcgaaaagaaggagcugauaaagaaaagaaaaaagaaaaagaagaagaaccaaagaagccaaaugaaaauaagcugaaacaaccgaauccagaccaaccacaagcacagggugauggagcaaaugcaggacaaccacaagcacaaggagauggagcaaaugcaggacaaccacaagcacaaggagauggagcaaaugcaggacaaccacaagcacagggugauggagcaaaugcaggacaaccacaagcacaaggagauggagcaaaugcaggacaaccacaagcacaaggagauggagcaaaugcaggacaaccacaagcacaaggagauggagcaaaugcaggacaaccacaagcacagggugauggagcaaaugcaggacaaccacaagcacaaggagauggagcaaaugcaggacaaccacaagcacagggugauggagcaaaugcaggacaaccacaagcacagggugauagggcgaaugcaggacaaccacaagcacaaggagauggggcaaauguaccacgacaaggaagaaacgggggaggugcaccagcaggaggaaaugaggggaauaaacaagcaggaaaaggacagggacaaaacaaucagggugcgaaugccccaaaugaaaaaguugugaaugauuaccuacacaaaauuagaucuagcguuaccaccgaguggacuccaugcaguguaaccuguggaaaugguguaagaauuagaagaagacagaaugcugguaauaaaaaggcagaggaccuuacuauggaugaccuugagguggaagcuuguguaauggauaagugcgcuggcauauuuaacguugugaguaauucauuaggguuagucauauuguuaguccuagcauuauucaauuaa

SEQ ID NO: 3150 - RNA, 1080 nt, Artificial Sequence
  derived and/or modified CDS sequence (wt) from Pk(KN010)__AFG25463.1__CSP
augaggaacuucauucucuuggccgucuccuccauccugcugguggacuugcuccccacacacuucgaacauaauguagaucucuccagggccauaaauguaaauggaguaagcuucaauaauguagacaccaguucacuuggcgcagcacagguaagacaaagugcuagccgaggcagaggacuuggugagaagcgaaaagaaggagcugauaaagaaaagaaaaaagaaaaagaagaagaaccaaagaagccaaaugaaaauaagcugaaacaaccgaauccagaccaaccacaagcacagggugauggagcaaaugcaggacaaccacaagcacaaggagauggagcaaaugcaggacaaccacaagcacaaggagauggagcaaaugcaggacaaccacaagcacagggugauggagcaaaugcaggacaaccacaagcacaaggagauggagcaaauacaggacaaccacaagcacagggugauggagcaaaugcaggacaaccacaagcacaaggagauggagcaaaugcaggacaaccacaagcacagggugauggagcaaaugcaggacaaccacaagcacagggugauggagcaaaugcaggacaaccacaagcacagggugauggagcaaaugcaggacaaccacaagcacagggugauagggcgaaugcaggacaaccacaagcacaaggagauggggcaaauguaccacgacaaggaagaaacgggggaggugcaccagcaggaggaaaugaggggaauaaacaagcaggaaaaggacagggacaaaacaaucagggugcgaaugccccaaaugaaaaaguugugaaugauuaccuacacaaaauuagaucuagcguuaccgccgaguggacuccaugcaguguaaccuguggaaaugguguaagaauuagaagaaaagcucaugcagguaauaaaaaggcagaggaccuuacuauggaugaccuugagguggaagcuuguguaauggauaagugcgcuggcauauuuaacguugugaguaauucauuaggguuagucauauuguuaguccuagcauuauucaauuaa

SEQ ID NO: 3151 - RNA, 1080 nt, Artificial Sequence
  derived and/or modified CDS sequence (wt) from Pk(KN013)__AFG25464.1__CSP
augaggaacuucauucucuuggccgucuccuccauccugcugguggacuugcuccccacacacuucgaacauaauguagaucucuccagggccauaaauguaaauggaguaagcuucaauaauguagacaccaguucacuuggcgcagcacagguaagacaaagugcuagccgaggcagaggacuuggugagaagcgaaaagaaggagcugauaaagaaaagaaaaaagaaaaagaagaagaaccaaagaagccaaaugaaaauaagcugaaacaaccgaauccaggacaaccacaagcacagggugauggagcaaaugcaggacaaccacaagcacaaggagauggagcaaaugcaggacaaccacaagcacaaggagauggagcaaaugcaggacaaccacaagcacagggugauggagcaaaugcaggacaaccacaagcacaaggagauggagcaaaugcaggacaaccacaagcacagggugauggagcaaaugcaggacaaccacaagcacaaggagauggagcaaaugcaggacaaccacaagcacagggugauggagcaaaugcaggacaaccacaagcacagggugauggagcaaaugcaggacaaccacaagcacagggugauggagcaaaugcaggacaaccacaagcacagggugauagggcgaaugcaggacaaccacaagcacaaggagauggggcaaauguaccacgacaaggaagaaacgggggaggugcaccagcaggaggaaauggggggaauaaacaagcaggaaaaggacagggacaaaacaaucagggugcgaaugccccaaaugaaaaaguugugaaugauuaccuacacaaaauuagaucuagcguuaccaccgaguggacuccaugcaguguaaccuguggaaaugguguaagaauuagaagaaaagcucaugcagguaauaaaaaggcagaggaccuuacuauggaugaccuugagguggaagcuuguguaauggauaagugcgcuggcauauuuaacguugugaguaauucauuaggguuagucauauuguuaguccuagcauuauucaauuaa

SEQ ID NO: 3152 - RNA, 1080 nt, Artificial Sequence
  derived and/or modified CDS sequence (wt) from Pk(LT57)__ADN94508.1__CSP
augaagaacuucauucucuuggccgucuccuccauccugcugguggacuuguuccccacacacuucgaacauaauguagaucucuccagggccauaaauguaaauggaguaagcuucaauaauguagacaccaguucacuuggcgcagcacaggugagacaaagugcuagccgaggcagaggacuuggugagaagccaaaagaaggagcugauaaagaaaagaaaaaagaaaaagaaaaagaaaaagaagaagaaccaaagaagccaaaugaaaauaagcugaaacaaccggaaggaaaucaagaugggcgagcacaaccggaaggaaaucaggauggucgagcgcaaccggaaggaaaucaggauggucgagcgcaaccggaaggaaaucaagaugggcgagcacaaccggaaggaaaucaggauggucgagcgcaaccggaaggaaaucaagaugggcgagcacaaccggaaggaaaucaggauggucgagcgcaaccggaaggaaaucaggaugggcgagcgcaaccggaaggaaaucaggauggacgagcacaaccggaaggaaauagggaagcuccagcacaaccacaaggaaaugggggggcaggucaagcacaaccggaaggaaauagggaagcuccagcacaaccacaaggaaaugggggggcaggucaagcacaaccggaaggaaauagggaagcuccagcacaaccacaaggaaaugggggggcaggucaagcacaaccacaaaaaaacgaaggaggaaacgcaggagcacggaaaggacagggacaaaacaaucagggugcgaaugccccaaaugaaaaaguugugaaugauuaccuacacaaaauuagaucuagcguuaccaccgaguggacuccaugcaguguaaccuguggaaaugguguaagaauuagaagaaaagcucaugcagauaagaaaaaggcagaggaccuuacuauggaugaccuugaaguggaagcuuguguaauggauaagugcgcuggcauauuuaacguugugaguaauucauuaggguuagucauauuguuaguccuagcauuauucaauuaa

SEQ ID NO: 3153 - RNA, 1080 nt, Artificial Sequence
  derived and/or modified CDS sequence (wt) from Pk(NB046)__AFG25471.1__CSP
augaggaacuucauucucuuggccgucuccuccauccugcugguggacuugcuccccacacacuucgaacauaauguagaucucuccagggccauaaauguaaauggaguaagcuucaauaauguagacaccaguucacuuggcgcagcacagguaagacaaagugcuagccgaggcagaggacuuggugagaagcgaaaagaaggagcugauaaagaaaagaaaaaagaaaaagaagaagaaccaaagaagccaaaugaaaauaagcugaaacaaccgaauccagaccaaccacaagcacagggugauggagcaaaugcaggacaaccacaagcacaaggagauggagcaaaugcaggacaaccacaagcacaaggagauggagcaaaugcaggacaaccacaagcacagggugauggagcaaaugcaggacaaccacaagcacaaggagauggagcaaaugcaggacaaccacaagcacagggugauggagcaaaugcaggacaaccacaagcacaaggagauggagcaaaugcaggacaaccacaagcacagggugauggagcaaaugcaggacaaccacaagcacagggugauggagcaaaugcaggacaaccacaagcacagggugauggagcaaaugcaggacaaccacaagcacagggugauagggcgaaugcaggacaaccacaagcacaaggagauggggcaaauguaccacgacaaggaagaaacgggggaggugcaccagcaggaggaaaugaggggaauaaacaagcaggaaaaggacagggacaaaacaaucagggugcgaaugccccaaaugaaaaaguugugaaugauuaccuacacaaaauuagaucuagcguuaccaccgaguggacuccaugcaguguaaccuguggaaaugguguaagaauuagaagaaaagcucaugcagguaauaaaaaggcagaggaccuuacuauggaugaccuugagguggaagcuuguguaauggauaagugcgcuggcauauuuaacguugugaguaauucauuaggguuagucauauuguuaguccuagcauuauucaauuaa

SEQ ID NO: 3154 - RNA, 1080 nt, Artificial Sequence
  derived and/or modified CDS sequence (wt) from Pk(TN023)__AFG25478.1__CSP
augaggaacuucauucucuuggccgucuccuccauccugcugguggacuugcuccccacacacuucgaacauaauguagaucucuccagggccauaaauguaaauggaguaagcuucaauaauguagacaucaguucacuuggcgcagcacagguaagacaaagugcuagccgaggcagaggacuuggugagaagcgaaaagaaggagcugauaaagaaaagaaaaaagaaaaagaagaagaaccaaagaagccaaaugaaaauaagcugaaacaaccgaauccagaccaaccacaagcacagggugauggagcaaaugcaggacaaccacaagcacaaggagauggagcaaaugcaggacaaccacaagcacaaggagauggagcaaaugcaggacaaccacaagcacagggugauggagcaaaugcaggacaaccacaagcacaaggagauggagcaaaugcaggacaaccacaagcacagggugauggagcaaaugcaggacaaccacaagcacaaggagauggagcaaaugcaggacaaccacaagcacagggugauggagcaaaugcaggacaaccacaagcacagggugauggagcaaaugcaggacaaccacaagcacagggugauggagcaaaugcaggacaaccacaagcacagggugauagggcgaaugcaggacaaccacaagcacaaggagauggggcaaauguaccacgacaaggaagaaacgggggaggugcaccagcaggaggaaaugaggggaauaaacaagcaggaaaaggacagggacaaaacaaucagggugcgaaugccccaaaugaaaaaguugugaaugauuaccuacacaaaauuagaucuagcguuaccaccgaguggacuccaugcaguguaaccuguggaaaugguguaagaauuagaagaaaagcucaugcagguaauaaaaaggcagaggaccuuacuauggaugaccuugagguggaagcuuguguaauggauaagugcgcuggcauauuuaacguugugaguaauucauuaggguuagucauauuguuaguccuagcauuauucaauuaa

SEQ ID NO: 3155 - RNA, 1080 nt, Artificial Sequence
  derived and/or modified CDS sequence (wt) from Pk(UM0016C2)__AHF20663.1__CSP
augaagaacuucauucucuuggccgucuccuccauccugcugguggacuugcuccccacacacuucgaacauaauguagaucucuccagggccauaaauguaaauggaguaagcuucaauaauguagacaccaguucacuuggcgcagcacagguaagacaaagugcuagccgaggcagaggacuuggugagaagccaaaagaaggagcugauaaagaaaagaaaaaagaaaaagaaaaagaaaaagaagaagaaccaaagaagccaaaugaaaauaagcugaaacaaccggaaggaaaucaagaugggcgagcacaaccggaaggaaaucaggauggucgagcgcaaccggaaggaaaucaggauggucgagcucaaccggaaggaaaucaagaugggcgagcacaaccggaaggaaaucaggauggucgagcgcaaccggaaggaaaucaagaugggcgagcacaaccggaaggaaaucaggauggucgagcacaaccggaaggaaaucaggauggucgagcgcaaccggaaggaaaucaggauggacgagcacaaccggaaggaaauagggaagcuccagcacaaccacaaggaaaugggggggcaggucaagcacaaccggaaggaaauagggaagcuccagcacaaccacaaggaaaugggggggcaggucaagcacaaccggaaggaaauagggaagcuccagcacaaccacaaggaaaugggggggcaggucaagcacaaccacaaaaaaacgaaggaggaaacgcaggagcacggaaaggacagggacaaaacaaucagggugcgaaugccccaaaugaaaaaguuguaaaugauuaccuacagaaaauuagaucuagcguuaccaccgaguggacuccaugcaguguaaccuguggaaaugguguaagaauuagaagaagagcucaugcagauaagaaaaaggcagaggaccuuacuauggaugaccuugaaguggaagcuuguguaauggauaagugugcuggcauauuuaacguugugaguaauucauuaggguuagucauauuguuaguccuagcauuauucaauuaa

SEQ ID NO: 3156 - RNA, 1077 nt, Artificial Sequence
  derived and/or modified CDS sequence (wt) from Pk(LT48)__ADN94519.1__CSP
augaggaacuucauucucuuggccgucuccuccauccugcugguggacuugcuccccacacacuucgaacauaauguagaucucuccagggccauaaauguaaauggaguaagcuucaauaauguagacaccaguucacuuggcgcagcacagguaagacaaagugcuagccgaggcagaggacuuggugagaagcgaaaagaaggagcugauaaagaaaagaaaaaagaaaaagaagaagaaccaaagaagccaaaugaaaauaagcugaaacaaccgaauccagaccaaccacaagcacagggugauggagcaaaugcaggacaaccacaagcacaaggagauggagcaaaugcaggacaaccacaagcacaaggagauggagcaaaugcaggacaaccacaagcacagggugauggagcaaaugcaggacaaccacaagcacaaggagauggagcaaaugcaggacaaccacaagcacagggugauggagcaaaugcaggacaaccacaagcacaaggagauggagcaaaugcaggacaaccacaagcacagggugauggagcaaaugcaggacaaccacaagcacagggugauggagcaaaugcaggacaaccacaagcacagggugauggagcaaaugcaggacaaccacaagcacagggugauaggggaaugcaggacaaccacaagcacaaggagauggggcaaauguaccacgacaaggaagaaacgggggaggugcaccagcaggaggaaaugaggggaauaaacaagcaggaaaaggccagggacaaaacaaucaggguggaaugccccaaagaaaaaguugugaaugauuaccuacacaaaauuagaucuagcguuaccaccgaguggacuccaugcaguguaaccuguggaaaugguguaagaauuagaagaaaagcucaugcagguaauaaaaaggcagaggaccuuacuauggaugaccuugagguggaagcuuguguaauggauaagugcgcuggcauauuuaacguugugaguaauucauuaggguuagucauauuguuaguccuagcauuauucaauuaa

SEQ ID NO: 3157 - RNA, 1077 nt, Artificial Sequence
  derived and/or modified CDS sequence (wt) from Pk(SGEHIWM4-Y09-9)__AFD97223.1__CSP
augaagaacuucauucucuuggccgucuccuccauccugcugguggaccugcuccccacauacuucgaacauaauguagaucucuccagggccauaaauguaaauggaguaagcuucaauaguguagacaccaguucacuuggcgcagcacagguaagacaaagugcuagccgaggcagaggacuuggugagaagccaaaagaaggagcugauaaagaaaagaaaaaagaaaaagaaaaagaagaagaaccaaagaagccaaaugaaaauaagcugaaacaaccacaaggaaaugggggggcaggucaagcacaaccagaaggaaaugggggggcaggucaagcacaaccggaaggaaaugggggggcaggucaagcacaaccagaaggaaaugggggggcaggucaagcacaaccggaaggaaaugggggggcaggucaagcacaaccggaaggaaaugggggggcaggucaagcacaaccggaaggaaaugggggggcaggucaagcacaaccggaaggaaaugggggggcaggucaagcacaaccggaaggaaaugggggggcaggucaagcacaaccggaaggaaaugggggggcaggucaagcacaaccggaaggaaaugggggggcaggucaagcacaaccggaaggaaaugggggggcaggucaagcacaaccggaaggaaaugggggggcaggucaagcacaaccacaaggaaaugggggggcaggucaagcacaaccacaaaaaaacgaaggaggaaacgcaggagcacggaaaggacagggacaaaacaaucagggugcgaaugccccaaaugaaaaaguuguaaaugauuaccuacagaaaauuagaucuagcguuaccaccgaguggacuccaugcaguguaaccuguggaaaugguguaagaauuagaagaagagcucaugcagauaagaaaaaggcagaggaccuuacuauggaugaccuugaaguggaagcuuguguaauggauaagugugcuggcauauuuaacguugugaguaauucauuaggguuagucauauuguuaguccuagcauuauucaauuaa

SEQ ID NO: 3158 - RNA, 1071 nt, Artificial Sequence
  derived and/or modified CDS sequence (wt) from Pk(LT15)__ADN94525.1__CSP
augaggaacuucauucucuuggccgucuccuccauccugcugguggacuugcuccccacacacuucgaacauaauguagaucucuccagggccauaaauguaaauggaguaagcuucaauaauguagacaccaguucacuuggcgcagcacagguaagacaaagugcuagccgaggcagaggacuuggugagaagcgaaaagaaggagcugauaaagaaaagaaaaaagaaaaagaagaagaaccaaagaagccaaaugaaaauaagcugaaacaaccggaacaagcagcaccaggagcagggggagaacaaccagcaccaggagcagggggagaacaaccagcaccaggagcagggggagaacaaccagcaccaggagcagggggagaacgaccagcaccaggagcagggggagaacaaccagcaccaggagcagggggagaacaaccagcaccaggagcagggggagaacgaccagcaccaggagcagggggagaacaaccagcaccaggagcagggggagaacaaccagcaccaggagcagggggagaacaaccagcaccaggagcagggggagaacaaccagcaccaggagcagggggagaacgaccagcaccaggagcagggggagaacgaccagcaccaggagcagggggagaacaaccagcaccaggagcagggggagaacaaccagcaccagcaccaaggagggaacaaccagcaccaggaccaggugcgggagauggagcacgaggaggaaacgcaggggcagguaaaggacagggacaaaacaaucagggugcgaaugucccaaaugaaaaaguugugaaugauuaccuacacaaaauuagaucuagcguuaccaccgaguggacuccaugcaguguaaccuguggaaaugguguaagaauuagaagaagacagaaugcugguaauaaaaaggcagaggaccuuacuauggaugaccuugagguggaagcuuguguaauggauaagugcgcuggcauauuuaacguugugaguaauucauuaggguuagucauauuguuaguccuagcauuauucaauuaa

SEQ ID NO: 3159 - RNA, 1071 nt, Artificial Sequence
  derived and/or modified CDS sequence (wt) from Pk(LT57)__ADN94503.1__CSP
augaagaacuucauucucuuggccgucuccuccauccugcugguggacuuguuccccacacacuucgaacauaauguagaucucuccagggccauaaauguaaauggaguaagcuucaauaauguagacaccaguucacuuggcgcagcacagguaagacaaagugcuagccgaggcagaggacuuggugagaagccaaaagaaggagcugauaaagaaaagaaaaaagaaaaagaaaaagaagaaccaaagaagccaaaugaaaauaagcugaaacaaccggaaggaaaucaagaugggcgagcacaaccggaaggaaaucaggauggucgagcgcaaccggaaggaaaucaggauggucgagcgcagccggaaggaaaucaagaugggcgagcacaaccggaaggaaaucaggauggucgagcgcaaccggaaggaaaucaggauggucgagcgcagccggaaggaaaucaggauggucgagcgcagccggaaggaaaucaggaugggcgagcgcaaccggaaggaaaucaggauggacgagcacaaccggaaggaaauagggaagcuccagcacaaccacaaggaaaugggggggcaggucaagcacaaccggaaggaaauagggaagcuccagcacaaccacaaggaaaugggggggcaggucaagcacaaccggaaggaaauagggaagcuccagcacaaccacaaggaaaugggggggcaggucaagcacaaccacaaaaaaacgaaggaggaaacgcaggagcacggaaaggacagggacaaaacaaucagggugcgaaugccccaaaugaaaaaguuguaaaugauuaccuacagaaaauuagaucuagcguuaccaccgaguggacuccaugcaguguaaccuguggaaaugguguaagaauuagaagaagagcucaugcagauaagaaaaaggcagaggaccuuacuauggaugaccuugaaguggaagcuuguguaauggauaagugugcuggcauauuuaacgcugugaguaauucauuaggguuagucauauuguuaguccuagcauuauucaauuaa

SEQ ID NO: 3160 - RNA, 1068 nt, Artificial Sequence
  derived and/or modified CDS sequence (wt) from Pk(UMHIC2)__AHF20634.1__CSP
augaagaacuucauucucuuggccgucuccuccauccugcugguggacuugcucccaacacacuucgaacauaauguagaucucuccagggccauaaauguaaauggaguaagcuucaauaauguagacaccaguucacuuggcgcagcacagguaagacaaagugcuagccgaggcagaggacuuggugagaaaccaaaagaaggagcugauaaagaaaagaaaaaagaaaaagaaaaagaagaagaaccaaagaagccaaaugaaaauaagcugaaacaaccggaaggaaauagggaagcuccaggacaaccggaaggaaauagggaagcuccaggacaaccggaaggaaauagggaagcuccaggacaaccggaaggaaauagggaagcuccaggacaaccggaaggaaauagggaagcuccaggacaaccggaaggaaauagggaagcuccaggacaaccggaaggaaauagggaagcuccaggacaaccggaaggaaauagggaagcuccaggacaaccggaaggaaauagggaagcuccaggacaaccggaaggaaauagggaagcuccaggacaaccggaaggaaauagggaagcuccagcacaaccggaaggaaauagggaagcuccaggacaaccggaaggaaauagggaagcuccagcacaaccggaaggaaauagggaagcuccagcacaaccacaaggaaaugggggggcaggucaagcacaaccacaaaaaaacgaaggaggaaacgcaggagcacggaaaggacagggacaaaacaaucagggugcgaaugccccaaaugaaaaaguuguaaaugauuaccuacagaaaauuagaucuagcguuaccaccgaguggacuccaugcaguguaaccuguggaaaugguguaagaauuaaaagaaaagcucaugcagauaagaaaaaggcagaggaccuuacuauggaugaccuugaaguggaagcuuguguaauggauaagugugcuggcauauuuaacguugugaguaauucauuaggguuagucauauuguuaguccuagcauuauucaauuaa

SEQ ID NO: 3161 - RNA, 1068 nt, Artificial Sequence
  derived and/or modified CDS sequence (wt) from Pk(UMHIC6)__AHF20635.1__CSP
augaagaacuucauucucuuggccgucuccuccauccugcugguggacuugcucccaacacacuucgaacauaauguagaucucuccagggccauaaauguaaauggaguaagcuucaauaauguagacaccaguucacuuggcgcagcacagguaagacaaagugcuagccgaggcagaggacuuggugagaaaccaaaagaaggagcugauaaagaaaagaaaaaagaaaaagaaaaagaagaagaaccaaagaagccaaaugaaaauaagcugaaacaaccggaaggaaauagggaagcuccaggacaaccggaaggaaauagggaagcuccaggacaaccggaaggaaauagggaagcuccaggacaaccggaaggaaauagggaagcuccaggacaaccggaaggaaauagggaagcuccaggacaaccggaaggaaauagggaagcuccaggacaaccggaaggaaauagggaagcuccaggacaaccggaaggaaauagggaagcuccaggacaaccggaaggaaauagggaagcuccaggacaaccggaaggaaauagggaagcuccaggacaaccggaaggaaauagggaagcuccaggacaaccggaaggaaauagggaagcuccaggacaaccggaaggaaauagggaagcuccagcacaaccggaaggaaauagggaagcuccagcacaaccacaaggaaaugggggggcaggucaagcacaaccacaaaaaaacgaaggaggaaacgcaggagcacggaaaggacagggacaaaacaaucagggugcgaaugccccaaaugaaaaaguuguaaaugauuaccuacagaaaauuagaucuagcguuaccaccgaguggacuccaugcaguguaaccuguggaaaugguguaagaauuaaaagaaaagcucaugcagauaagaaaaaggcagaggaccuuacuauggaugaccuugaaguggaagcuuguguaauggauaagugugcuggcauauuuaacguugugaguaauucauuaggguuagucauauuguuaguccuagcauuauucaauuaa

SEQ ID NO: 3162 - RNA, 1068 nt, Artificial Sequence
  derived and/or modified CDS sequence (wt) from Pk(UMJUC1)__AHF20630.1__CSP
augaagaacuucauucucuuggccgucuccuccauccugcugguggacuugcucccaacacacuucgaacauaauguagaucucuccagggccauaaauguaaauggaguaagccucaauaauguagacaccaguucacuuggcgcagcacagguaagacaaagugcuagccgaggcagaggacuuggugagaaaccaaaagaaggagcugauaaagaaaagaaaaaagaaaaagaaaaagaagaagaaccaaagaagccaaaugaaaauaagcugaaacaaccggaaggaaauagggaagcuccaggacaaccggaaggaaauagggaagcuccaggacaaccggaaggaaauagggaagcuccaggacaaccggaaggaaauagggaagcuccaggacaaccggaaggaaauagggaagcuccaggacaaccggaaggaaauagggaagcuccaggacaaccggaaggaaauagggaagcuccaggacaaccggaaggaaauagggaagcuccaggacaaccggaaggaaauagggaagcuccaggacaaccggaaggaaauagggaagcuccaggacaaccggaaggagauagggaagcuccagcacaaccggaaggaaauagggaagcuccaggacaaccggaaggaaauagggaaguuccagcacaaccggaaggaaauagggaagcuccagcacaaccacaaggaaaugggggggcaggucaagcacaaccacaaaaaaacgaaggaggaaacgcaggagcacggaaaggacagggacaaaacaaucagggugcgaaugccccaaaugaaaaaguuguaaaugauuaccuacagaaaauuagaucuagcguuaccaccgaguggacuccaugcaguguaaccuguggaaaugguguaagaauuaaaagaaaagcucaugcagauaagaaaaaggcagaggaccuuacuauggaugaccuugaaguggaagcuuguguaauggauaagugugcuggcauauuuaacguugugaguaauucauuaggguuagucauauuguuaguccuagcauuauucaauuaa

SEQ ID NO: 3163 - RNA, 1062 nt, Artificial Sequence
  derived and/or modified CDS sequence (wt) from Pk(TN026)__AFG25480.1__CSP
augaagaacuucauucucuuggccgucuccuccauccugcugguggacuugcuccccacacacuucgaacauaauguagaucucuccagggccauaaauguaaauggaguaagcuucaauaauguagacaccaguucacuuggcgcagcacagguaagacaaagugcuagccgaggcagaggacuuggugagaagccaaaagaaggagcugauaaagaaaagaaaaaagaaaaagaaaaagaaaaagaaaaagaagaagaaccaaagaagccaaaugaaaauaagcugaaacaaccggaacaaccagcagcaggagcagggggcgaacaaccagcagcaggagcaggaggcgaacaaccagcagcaggagcaggaggcgaacaaccagcagcaggagcaggaggcgaacaaccagcagcaggagcaggaggcgaacaaccagcagcaggagcaggaggcgaacaaccagcagcaggagcaagaggcgaacaaccagcagcaggagcaggaggcgaacaaccagcagcaggagcaggaggcgaacaaccagcagcaggagcaagaggcgaacaaccagcagcaggagcaggaggcgaacaaccagcagcaggagcaagaggcgaacaaccagcagcaggagcaggaggcgaacaaccagcagcaggagcaggaggcgaacaaccagcaccagcaccaaggagggaacaaccagcaccaggagcaggugcgggagauggagcacgaggaggaaacgcaggggcagguaaaggacagggacaaaacaaucagggugcgaaugucccaaaugaaaaaguugugaaugauuaccuacacaaaauuagaucuagcguuaccaccgaguggacuccaugcaguguaaccuguggaaaugguguaagaauuagaggaaaaggucaugcagguaauaaaaaggcagaggaccuuacuauggaugaccuugagguggaagcuuguguaauggauaagugcgcuggcauauuuaacguugugaguaauucauuaggcuuagucauauuguuaguccuagcauuauucaauuaa

SEQ ID NO: 3164 - RNA, 1056 nt, Artificial Sequence
  derived and/or modified CDS sequence (wt) from Pk(F08B49-1)__AHH02601.1__CSP
augaagaacuucauucucuuggccgucuccuccauccugcugguggacuugcuccccacacacuucgaacauaauguagaucucuccagggccauaaauguaaauggaguaagcuucaauaauguagacaccaguucacuuggcgcagcacagguaagacaaagugcuagccgaggcagaggacuuggugagaagccaaaagaaggagcugauaaagaaaagaaaaaagaaaaagaaaaagaaaaagaagaagaaccaaagaagccaaaugaaaauaagcugaaacaaccggaacaaccagcagcaggagcaggaggcgaacaaccagcagcaggagcaggaggcgaacaaccagcagcaggagcaggaggcgaacaaccagcagcaggagcaagaggcgaacaaccagcagcaggagcaggaggcgaacaaccagcagcaggagcaggaggcgaacaaccagcagcaggagcaggaggcgaacaaccagcagcaggagcaggaggcgaacaaccagcagcaggagcaggaggcgaacaaccagcagcaggagcaagaggcgaacaaccagcagcaggagcaggaggcgaacaaccagcagcaggagcaggaggcgaacaaccagcagcaggagcaagaggcgaacaaccagcagcaggagcaggaggcgaacaaccagcaccagcaccaaggagggaacaaccagcaccaggagcaggugcgggagauggagcacgaggaggaaacgcaggggcagguaaaggacagggacaaaacaaucagggugcgaaugucccaaaugaaaaaguugugaaugauuaccuacacaaaauuagaucuagcguuaccaccgaguggacuccaugcaguguaaccuguggaaaugguguaagaauuagaagaaaaggucaugcagguaauaaaaaggcagaggaccuuacuauggaugaccuugagguggaagcuuguguaauggauaagugcgcuggcauauuuaacguugugaguaauucauuaggcuuagucauauuguuaguccuagcauuauucaauuaa

SEQ ID NO: 3165 - RNA, 1056 nt, Artificial Sequence
  derived and/or modified CDS sequence (wt) from Pk(F08B69-1)__AHH02602.1__CSP
augaagaacuucauucucuuggccgucuccuccauccugcugguggacuugcuccccacacacuucgaacauaauguagaucucuccagggccauaaauguaaauggaguaagcuucaauaauguagacaccaguucacuuggcgcagcacagguaagacaaagugcuagccgaggcagaggacuuggugagaagccaaaagaaggagcugauaaagaaaagaaaaaagaaaaagaaaaagaaaaagaagaagaaccaaagaagccaaaugaaaauaagcugaaacaaccggaacaaccagcagcaggagcaggaggcgaacaaccagcagcaggagcaggaggcgaacaaccagcagcaggagcaggaggcgaacaaccagcagcaggagcaagaggcgaacaaccagcagcaggagcaggaggcgaacaaccagcagcaggagcaggaggcgaacaaccagcagcaggagcaggaggcgaacaaccagcagcaggagcaggaggcgaacaaccagcagcaggagcaggaggcgaacaaccagcagcaggagcaagaggcgaacaaccagcagcaggagcaggaggcgaacaaccagcagcaggagcaggaggcgaacaaccagcagcaggagcaagaggcgaacaaccagcagcaggagcaggaggcgaacaaccagcaccagcaccaaggagggaacaaccagcaccaggagcaggugcgggagauggagcacgaggaggaaacgcaggggcagguaaaggacagggacaaaacaaucagggugcgaaugucccaaaugaaaaaguugugaaugauuaccuacacaaaauuagaucuagcguuaccaccgaguggacuccaugcaguguaaccuguggaaaugguguaagaauuagaagaaaaggucaugcagguaauaaaaaggcagaggaccuuacuauggaugaccuugauguggaagcuuguguaauggauaagugcgcuggcauauuuaacguugugaguaauucauuaggcuuagucauauuguuaguccuagcauuauucaauuaa

SEQ ID NO: 3166 - RNA, 1056 nt, Artificial Sequence
  derived and/or modified CDS sequence (wt) from Pk(LT51)__ADN94540.1__CSP
augaagaacuucauucucuuggccgucuccuccauccugcugguggacuugcuccccacacacuucgaacauaauguagaucucuccagggccauaaauguaaauggaguaagcuucaauaauguagacaccaguucacuuggcgcagcacagguaagacaaagugcuagccgaggcagaggacuuggugagaagccaaaagaaggagcugauaaagaaaagaaaaaagaaaaagaaaaagaaaaagaagaagaaccaaagaagccaaaugaaaauaagcugaaacaaccggaacaaccagcagcaggagcagggggcgaacaaccagcagcaggagcaggaggcgaacaaccagcagcaggagcaggaggcgaacaaccagcagcaggagcaggaggcgaacaaccagcagcaggagcaggaggcgaacaaccagcagcaggagcaggaggcgaacaaccagcagcaggagcaagaggcgaacaaccagcagcaggagcaggaggcgaacaaccagcagcaggagcaggaggcgaacaaccagcagcaggagcaagaggcgaacaaccagcagcaggagcaggaggcgaacaaccagcagcaggagcaggaggcgaacaaccagcaccagcaccaaggagggaacaaccagcagcaggagcagggggcgaacaaccagcaccagcaccaaggagggaacaaccagcaccaggagcaggugcgggagauggagcacgaggaggaaacgcaggggcagguaaaggacagggacaaaacaaucagggugcgaaugucccaaaugaaaaaguugugaaugauuaccuacacaaaauuagaucuagcguuaccaccgaguggacuccaugcaguguaaccuguggaaaugguguaagaauuagaagaaaaggucaugcagguaauaaaaaggcagaggaccuuacuauggaugaccuugagguggaagcuuguguaauggauaagugcgcuggcauauuuaacguugugaguaauucauuaggcuuagucauauuguuaguccuagcauuauucaauuaa

SEQ ID NO: 3167 - RNA, 1056 nt, Artificial Sequence
  derived and/or modified CDS sequence (wt) from Pk(UM0029C9)__AHF20652.1__CSP
augaagaacuucauucucuuggccgucuccuccauccugcugguggacuugcuccccacacacuucgaacauaauguagaucucuccagggccauaaauguaaauggaguaagcuucaauaauguagacaccaguucacuuggcgcagcacagguaagacaaagugcuagccgaggcagaggacuuggugagaagccaaaagaaggagcugauaaagaaaagaaaaaagaaaaagaaaaagaaaaagaagaagaaccaaagaagccaaaugaaaauaagcugaaacaaccggaacaaccagcagcaggagcagggggcgaacaaccagcagcaggagcaggaggcgaacaaccagcagcaggagcaggaggcgaacaaccagcagcaggagcaggaggcgaacaaccagcagcaggagcaagaggcgaacaaccagcagcaggagcaggaggcgaacaaccagcagcaggagcaagaggcgaacaaccagcagcaggagcaggaggcgaacaaccagcagcaggagcaggaggcgaacaaccagcagcaggagcaggaggcgaacaaccagcagcaggagcaagaggcgaacaaccagcagcaggagcaggaggcgaacaaccagcaccagcaccaaggagggaacaaccagcagcaggagcagggggcgaacaaccagcaccagcaccaaggagggaacaaccagcaccaggagcaggugcgggagauggagcacgagaaggaaacgcaggggcagguaaaggacagggacaaaacaaucagggugcgaaugucccaaaugaaaaaguugugaaugauuaccuacacaaaauuagaucuagcguuaccaccgaguggacuccaugcaguguaaccuguggaaaugguguaagaauuagaagaaaaggucaugcagguaauaaaaaggcagaggaccuuacuauggaugaccuugagguggaagcuuguguaauggauaagugcgcuggcauauuuaacguugugaguaauucauuaggcuuagucauauuguuaguccuagcauuauucaauuaa

SEQ ID NO: 3168 - RNA, 1056 nt, Artificial Sequence
  derived and/or modified CDS sequence (wt) from Pk(UM0050C7)__AHF20665.1__CSP
augaagaacuucauucucuuggccgucuccuccauccugcugguggacuugcuccccacacacuucgaacauaauguagaucucuccagggccauaaauguaaauggaguaagcuucaauaauguagacaccaguucaccuggcgcagcacagguaagacaaagugcuagccgaggcagaggacuuggugagaagccaaaagaaggagcugauaaagaaaagaaaaaagaaaaagaaaaagaaaaagaagaagaaccaaagaagccaaaugaaaauaagcugaaacaaccggaacaaccagcagcaggagcagggggcgaacaaccagcagcaggagcaggaggcgaacaaccagcagcaggagcaggaggcgaacaaccagcagcaggagcaggaggcgaacaaccagcagcaggagcaagaggcgaacaaccagcagcaggagcaggaggcgaacaaccagcagcaggagcaagaggcgaacaaccagcagcaggagcaggaggcgaacaaccagcagcaggagcaggaggcgaacaaccagcagcaggagcaggaggcgaacaaccagcagcaggagcagggggcgaacaaccagcagcaggagcaggaggcgaacaaccagcaccagcaccaaggagggaacaaccagcagcaggagcagggggcgaacaaccagcaccagcaccaaggagggaacaaccagcaccaggagcaggugcgggagauggagcacgaggaggaaacgcaggggcagguaaaggacagggacaaaacaaucagggugcgaaugucccaaaugaaaaaguugugaaugauuaccuacgcaaaauuagaucuagcguuaccaccgaguggacuccaugcaguguaaccuguggaaaugguguaagaauuagaagaaaaggucaugcagguaauaaaaaggcagaggaccuuacuauggaugaccuugagguggaagcuuguguaauggauaagugcgcuggcauauuuaacguugugaguaauucauuaggcuuagucauauuguuaguccuagcauuauucaauuaa

SEQ ID NO: 3169 - RNA, 1056 nt, Artificial Sequence
  derived and/or modified CDS sequence (wt) from Pk(UMHEC1)__AHF20620.1__CSP
augaagaacuucauucucuuggccgucuccuccauccugcugguggacuugcuccccacacacuucgaacauaauguagaucucuccagggccauaaauguaaauggaguaagcuucaauaauguagacaccaguucacuuggcgcagcacagguaagacaaagugcuagccgaggcagaggacuuggugagaagccaaaagaaggagcugauaaagaaaagaaaaaagaaaaagaaaaagaaaaagaagaagaaccaaagaagccaaaugaaaauaagcugaaacaaccggaacaaccagcagcaggagcagggggcgaacaaccagcagcaggagcaggaggcgaacaaccagcagcaggagcaggaggcgaacaaccagcagcaggagcaggaggcgaacaaccagcagcaggagcaggaggcgaacaaccagcagcaggagcaagaggcgaacaaccagcagcaggagcaggaggcgaacaaccagcagcaggagcaggaggcgaacaaccagcagcaggagcaggaggcgaacaaccagcagcaggagcaagaggcgaacaaccagcagcaggagcaggaggcgaacaaccagcagcaggagcaggaggcgaacaaccagcaccagcaccaaggagggaacaaccagcagcaggagcagggggcgaacaaccagcaccagcaccaaggagggaacaaccagcaccaggagcaggugcgggagauggagcacgaggaggaaacgcaggggcagguaaaggacagggacaaaacaaucagggugcgaaugucccaaaugaaaaaguugugaaugauuaccuacacaaaauuagaucuagcguuaccaccgaguggacuccaugcaguguaaccuguggaaaugguguaagaauuagaagaaaaggucaugcagguaauaaaaaggcagaggaccuuacuauggaugaccuugagguggaagcuuguguaauggauaagugcgcuggcauauuuaacguugugaguaauucauuaggcuuagucauauuguuaguccuagcauuauucaauuaa

SEQ ID NO: 3170 - RNA, 1056 nt, Artificial Sequence
  derived and/or modified CDS sequence (wt) from Pk(UMMAC4)__AHF20621.1__CSP
augaagaacuucauucucuuggccgucuccuccauccugcugguggacuugcuccccacacacuucgaacauaauguagaucucuccagggccauaaauguaaauggaguaagcuucaauaauguagacaccaguucacuuggcgcagcacagguaagacaaagugcuagccgaggcagaggacuuggugagaagccaaaagaaggagcugauaaagaaaagaaaaaaggaaaagaaaaagaaaaagaagaagaaccaaagaagccaaaugaaaauaagcugaaacaaccggaacaaccagcagcaggagcagggggcgaacaaccagcagcaggagcaggaggcgaacaaccagcagcaggagcaggaggcgaacaaccagcagcaggagcaggaggcgaacaaccagcagcaggagcaggaggcgaacaaccagcagcaggagcaagaggcgaacaaccagcagcaggagcaggaggcgaacaaccagcagcaggagcaggaggcgaacaaccagcagcaggagcaggaggcgaacaaccagcagcaggagcaagaggcgaacaaccagcagcaggagcaggaggcgaacaaccagcagcaggagcaggaggcgaacaaccagcaccagcaccaaggagggaacaaccagcagcaggagcagggggcgaacaaccagcaccagcaccaaggagggaacaaccagcaccaggagcaggugcgggagauggagcacgaggaggaaacgcaggggcagguaaaggacagggacaaaacaaucagggugcgaaugucccaaaugaaaaaguugugaaugauuaccuacacaaaauuagaucuagcguuaccaccgaguggacuccaugcaguguaaccuguggaaaugguguaagaauuagaagaaaaggucaugcagguaauaaaaaggcagaggaccuuacuauggaugaccuugagguggaagcuuguguaauggauaagugcgcuggcauauuuaacguugugaguaauucauuaggcuuagucauauuguuaguccuagcauuauucaauuaa

SEQ ID NO: 3171 - RNA, 1056 nt, Artificial Sequence
  derived and/or modified CDS sequence (wt) from Pk(UMMEC8)__AHF20623.1__CSP
augaagaacuucauucucuuggccgucuccuccauccugcugguggacuugcuccccacacacuucgaacauaauguagaucucuccagggccauaaauguaaauggaguaagcuucaauaauguagacaccaguucacuuggcgcagcacagguaagacaaagugcuagccgaggcagaggacuuggugagaagccaaaagaaggagcugauaaagaaaagaaaaaagaaaaagaaaaagaaaaagaagaagaaccaaagaagccuaaugaaaauaagcugaaacaaccggaacaaccagcagcaggagcagggggcgaacaaccagcagcaggagcaggaggcgaacaaccagcagcaggagcaggaggcgaacaaccagcagcaggagcaggaggcgaacaaccagcagcaggagcaggaggcgaacaaccagcagcaggagcaagaggcgaacaaccagcagcaggagcaggaggcgaacaaccagcagcaggagcaggaggcgaacaaccagcagcaggagcaggaggcgaacaaccagcagcaggagcaagaggcgaacaaccagcagcaggagcaggaggcgaacaaccagcagcaggagcaggaggcgaacaaccagcaccagcaccaaggagggaacaaccagcagcaggagcagggggcgaacaaccagcaccagcaccaaggagggaacaaccagcaccaggagcaggugcgggagauggagcacgaggaggaaacgcaggggcagguaaaggacagggacaaaacaaucagggugcgaaugucccaaaugaaaaaguugugaaugauuaccuacacaaaacuagaucuagcguuaccaccgaguggacuccaugcaguguaaccuguggaaaugguguaagaauuagaagaaaaggucaugcagguaauaaaaaggcagaggaccuuacuauggaugaccuugagguggaagcuuguguaauggauaagugugcuggcauauuuaacguugugaguaauucauuaggcuuagucauauuguuaguccuagcauuauucaauuaa

SEQ ID NO: 3172 - RNA, 1050 nt, Artificial Sequence
  derived and/or modified CDS sequence (wt) from Pk(MPG45)__ACD86467.1__CSP
augaagaacuucauucucuuggccgucuccuccauccugcugguggacuugcuccccacacacuucgaacauaauguagaucucuccagggccauaaaucuaaauggaguaagcuucaauaauguagacaccaguucacuuggcgcagcacagguaagacaaagugcuagccgaggcagaggacuuggugagaaaccaaaagaaggagcugauaaagaaaagaaaaaagaaaaagauaaagaagaagaaccaaagaagccaaaugaaaauaagcugaaacaaccgaaugcaggacaaccacaagcacagggugauggagcaaaugcaggacaaccacaagcacaaggagauggagcaaaugcaggacaaccacaagcacagggugauggagcaaaugcaggacaaccacaagcacaaggagauggagcaaaugcaggacaaccacaagcacaaggagauggagcaaaugcaggacaaccacaagcacaaggagauggagcaaaugcaggacaaccacaagcacagggugauggagcaaaugcaggacaaccacaagcacagggugauggagcaaaugcaggacaaccacaagcacagggugauggagcaaaugcaggacaaccacaagcacagggugauagggcgaaugcaggacaaccacaagcacaaggagauggggcaaauguaccacgacaaggaagaaacgggggaggugcaccagcaggaggaaaugaggggaauaaacaagcaggaaaaggacagggacaaaacaaucagggugcgaaugccccaaaugaaaaaguuguaaaugauuaccuacagaaaauuagaucuagcguuaccaccgaguggacuccaugcaguguaaccuguggaaaugguguaagaauuagaagaagagcucaugcagauaagaaaaaggcagaggaccuuacuauggaugaccuugagguggaagcuuguguaauggauaagugcgcuggcauauuuaacguugugaguaauucauuaggguuagucauauuguuaguccuagcauuauucaauuaa

SEQ ID NO: 3173 - RNA, 1044 nt, Artificial Sequence
  derived and/or modified CDS sequence (wt) from Pk(KH462)__ADN94491.1__CSP
augaggaacuucauucucuuggccgucuccuccauccugcugguggacuugcuccccacacacuucgaacauaauguagaucucuccagggccauaaauguaaauggaguaagcuucaauaauguagacaccaguucacuuggcgcagcacagguaagacaaagugcuagccgaggcagaggacuuggugagaagcgaaaagaaggagcugauaaagaaaagaaaaaagaaaaagaagaagaaccaaagaagccaaaugaaaauaagcugaaacaaccggaacaagcagcaccaggagcagggggagaacaaccagcaccaggagcagggggagaacgaccagcaccaggagcagggggagaacaaccagcaccaggagcagggggagaacaaccagcaccaggagcagggggagaacaaccagcaccaggagcagggggagaacaaccagcaccaggagcagggggagaacgaccagcaccaggagcagggggagaacaaccagcaccaggagcagggggagaacgaccagcaccaggagcagggggagaacaaccagcaccaggagcagggggagaacgaccagcaccaggagcagggggagaacaaccagcaccaggagcagggggagaacaaccagcaccaggagcagggggagaacaaccagcaccagcaccaaggagggaacaaccagcaccagcaccaggugcgggagauggagcacgaggaggaaacgcaggggcagguaaaggacagggacaaaacaaucagggugcgaaugucccaaaugaaaaaguugugaaugauuaccuacacaaaauuagaucuagcguuaccaccgaguggacuccaugcaguguaaccuguggaaaugguguaagaauuagaagaaaagcucaugcagauaagaaaaaggcagaggaccuuacuauggaugaccuugaaguggaagcuuguguaauggauaagugcgcuggcauauuuaacguugugaguaauucauuaggguuagucauauuguuaguccuagcauuauucaauuaa

SEQ ID NO: 3174 - RNA, 1044 nt, Artificial Sequence
  derived and/or modified CDS sequence (wt) from Pk(LT3)__ADN94521.1__CSP
augaggaacuucauucucuuggccgucuccuccauccugcugguggacuugcuccccacacacuucgaacauaauguagaucucuccagggccauaaauguaaauggaguaagcuucaauaauguagacaccaguucacuuggcgcagcacagguaagacaaagugcuagccgaggcagaggacuuggugagaagcgaaaagaaggagcugauaaagaaaagaaaaaagaaaaagaagaagaaccaaagaagccaaaugaaaauaagcugaaacaaccggaacaagcagcaccaggagcagggggagaacaaccagcaccaggagcagggggagaacaaccagcaccaggagcagggggagaacgaccagcaccaggagcagggggagaacaaccagcaccaggagcagggggagaacaaccagcaccaggagcagggggagaacgaccagcaccaggagcagggggagaacaaccagcaccaggagcagggggagaacaaccagcaccaggagcagggggagaacaaccagcaccaggagcagggggagaacaaccagcaccaggagcagggggagaacuaccagcaccaggagcagggggagaacgaccagcaccaggagcagggggagaacaaccagcaccaggagcagggggagaacaaccagcaccagcaccaaggagggaacaaccagcaccaggaccaggugcgggagauggagcacgaggaggaaacgcaggggcagguaaaggacagggacaaaacaaucagggugcgaaugucccaaaugaaaaaguugugaaugauuaccuacacaaaauuagaucuagcguuaccaccgaguggacuccaugcaguguaaccuguggaaaugguguaagaauuagaagaagacagaaugcugguaauaaaaaggcagaggaccuuacuauggaugaccuugagguggaagcuuguguaauggauaagugcgcuggcauauuuaacgucgugaguaauucauuaggguuagucauauuguuaguccuagcauuauucaauuaa

SEQ ID NO: 3175 - RNA, 1044 nt, Artificial Sequence
  derived and/or modified CDS sequence (wt) from Pk(LT33)__ADN94529.1__CSP
augaggaacuucauucucuuggccgucuccuccauccugcugguggacuugcuccccacacacuucgaacauaauguagaucucuccagggccauaaauguaaauggaguaagcuucaauaauguagacaccaguucacuuggcgcagcacagguaagacaaagugcuagucgaggcagaggacuuggugagaagcgaaaagaaggagcugauaaagaaaagaaaaaagaaaaagaagaagaaccaaagaagccaaaugaaaauaagcugaaacaaccggaacaagcagcaccaggagcagggggagaacaaccagcaccaggagcagggggagaacgaccagcaccaggagcagggggagaacaaccagcaccaggagcagggggagaacaaccagcaccaggagcagggggagaacaaccagcaccaggagcagggggagaacaaccagcaccaggagcagggggagaacgaccagcaccaggagcagggggagaacaaccagcaccaggagcagggggagaacaaccagcaccaggagcagggggagaacaaccagcaccaggagcagggggagaacgaccagcaccaggagcagggggagaacaaccagcaccaggagcagggggagaacgaccagcaccaggagcagggggagaacaaccagcaccagcaccaaggagggaacaaccagcaccaggaccaggugcgggagauggagcacgaggaggaaacgcaggggcagguaaaggacagggacaaaacaaucagggugcgaaugucccaaaugaaaaaguugugaaugauuaccuacacaaaauuagaucuagcguuaccaccgaguggacuccaugcaguguaaccuguggaaaugguguaagaauuagaagaagacagaaugcugguaauaaaaaggcagaggaccuuacuauggaugaccuugagguggaagcuuguguaauggauaagugcgcuggcauauuuaacguugugaguaauucauuaggguuagucauauuguuaguccuagcauuauucaauuaa

SEQ ID NO: 3176 - RNA, 1044 nt, Artificial Sequence
  derived and/or modified CDS sequence (wt) from Pk(LT33)__ADN94527.1__CSP
augaagaacuucauucucuuggccgucuccuccauccugcugguggacuugcuccccacacacuucgaacauaauguagaucucuccagggccauaaauguaaauggaguaagcuucaauaauguagacaccaguucacuuggcgcagcacagguaagacaaagugcuagucgaggcagaggacuuggugagaagcgaaaagaaggagcugauaaagaaaagaaaaaagaaaaagaagaagaaccaaagaagccaaaugaaaauaagcugaaacaaccggaacaagcagcaccaggagcagggggagaacaaccagcaccaggagcagggggagaacgaccagcaccaggagcagggggagaacaaccagcaccaggagcagggggagaacaaccagcaccaggagcagggggagaacaaccagcaccaggagcagggggagaacaaccagcaccaggagcagggggagaacgaccagcaccaggagcagggggagaacaaccagcaccaggagcagggggagaacaaccagcaccaggagcagggggagaacaaccagcaccaggagcagggggagaacgaccagcaccaggagcagggggagaacaaccagcaccaggagcagggggagaacgaccagcaccaggagcagggggagaacaaccagcaccagcaccaaggagggaacaaccagcaccaggaccaggugcgggagauggagcacgaggaggaaacgcaggggcagguaaaggacagggacaaaacaaucagggugcgaaugucccaaaugaaaaaguugugaaugauuaccuacacaaaauuagaucuagcguuaccaccgaguggacuccaugcaguguaaccuguggaaaugguguaagaauuagaagaagacagaaugcugguaauaaaaaggcagaggaccuuacuauggaugaccuugagguggaagcuuguguaauggauaagugcgcuggcauauuuaacguugugaguaauucauuaggguuagucauauuguuaguccuagcauuauucaauuaa

SEQ ID NO: 3177 - RNA, 1044 nt, Artificial Sequence
  derived and/or modified CDS sequence (wt) from Pk(TN029)__AFG25482.1__CSP
augaggaacuucauucucuuggccgucuccuccauccugcugguggacuugcuccccacacacuucgaacauaauguagaucucuccagggccauaaauguaaauggaguaagcuucaauaauguagacaccaguucacuuggcgcagcacagguaagacaaagugcuagccgaggcagaggacuuggugagaagcgaaaagaaggagcugauaaagaaaagaaaaaagaaaaagaagaagaaccaaagaagccaaaugaaaauaagcugaaacaaccggaacaagcagcaccaggagcagggggagaacaaccagcaccaggagcagggggagaacaaccagcaccaggagcagggggagaacgaccagcaccaggagcagggggagaacaaccagcaccaggagcagggggagaacaaccagcaccaggagcagggggagaacgaccagcaccaggagcagggggagaacaaccagcaccaggagcagggggagaacaaccagcaccaggagcagggggagaacaaccagcaccaggagcagggggagaacaaccagcaccaggagcagggggagaacgaccagcaccaggagcagggggagaacgaccagcaccaggagcagggggagaacaaccagcaccaggagcagggggagaacaaccagcaccagcaccaaggagggaacaaccagcaccaggaccaggugcgggagauggagcacgaggaggaaacgcaggggcagguaaaggacagggacaaaacaaucagggugcgaaugucccaaaugaaaaaguugugaaugauuaccuacacaaaauuagaucuagcguuaccaccgaguggacuccaugcaguguaaccuguggaaaugguguaagaauuagaagaagacagaaugcugguaauaaaaaggcagaggaccuuacuauggaugaccuugagguggaagcuuguguaauggauaagugcgcuggcauauuuaacguugugaguaauucauuaggguuagucauauuguuaguccuagcauuauucaauuaa

SEQ ID NO: 3178 - RNA, 1041 nt, Artificial Sequence
  derived and/or modified CDS sequence (wt) from Pk(LT53)__ADN94501.1__CSP
augaagaacuucauucucuuggccgucuccuccauccugcugguggacuugcuccccacacacuucgaacauaauguagaucucuccagggccauaaauguaaauggaguaagcuucaauaauguagacaccaguucacuuggcgcagcacagguaagacaaagugcuagccgaggcagaggacuuggugagaagccaaaagaaggagaugauaaagaaaagaaaaaagaaaaagaaaaagaagaagaaccaaagaaccuaaaugaaaauaagccgaaacaaccgaaugcagaaggugauggagcuaagccgaaacaaccgaaugcagaaggugauggagcuaagcugaaacaaccgaaugcagaaggugauggagcuaagcugaaacaaccgaaugcagaaggugauggaggaaaugcacgacaaccgaaugcagaaggugauggaggaaaugcacgacaaccgaaugcagaaggugauggaggaaaugcacgacaaccgaaugcagaaggugauggaggaaaugcacgacaaccuaaugcagaaggugauggaggaaaugcacgacaaccuaaugcagaaggugauggaggaaaugcacgacaaccuaaugcagaaggugauggaggaaaugcacgacaaccgaaugcagaaggugauggagcaaaugcacgacagccacaggcagaaggugguggaggaaaugcacgacaaggaggaaaugaggggaauaaacaagcaggaaaaggacagggacaaaacaaucagggugcgaaugccccaaaugaaaaaguuguaaaugauuaccuacagaaaauuagaucuagcguuaccaccgaguggacuccaugcaguguaaccuguggaaaugguguaagaauuagaagaagagcucaugcagauaagaaaaaggcagaggaccuuacuauggaugaccuugaaguggaagcuuguguaauggauaagugugcuggcauauuuaacguugugaguaauucauuaggguuagucauauuguuaguccuagcauuauucaauuaa

SEQ ID NO: 3179 - RNA, 1041 nt, Artificial Sequence
  derived and/or modified CDS sequence (wt) from Pk(UMOTC3)__AHF20624.1__CSP
augaagaacuucauucucuuggccgucuccuccauccugcugguggacuugcuccccacacacuucgaacauaauguagaucucuccagggccauaaauguaaauggaguaagcuucaauaauguagacaccaguucacuuggcgcagcacagguaagacaaagugcuagccgaggcagaggacuuggugagaaaccaaaagaaggagcugauaaagaaaagaaaaaagaaaaagaaaaagaagaagaaccaaagaagccaaaugaaaauaagcugaaacaaccggaaggaaauagggaagcuccaggacaaccggaaggaaauagggaagcuccaggacaaccggaaggaaauagggaagcuccaggacaaccggaaggaaauagggaagcuccaggacaaccggaaggaaauagggaagcuccaggacaaccggaaggaaauagggaagcuccaggacaaccggaaggaaauagggaagcuccaggacaaccggaaggaaauagggaagcuccaggacaaccggaaggaaauagggaagcuccagcacaaccggaaggaaauagggaagcuccaggacaaccggaaggaaauagggaagcuccagcacaaccacaaggaaaugggggggcaggucaagcacaaccggaagaaaauagggaagcuccagcacaaccacaaggaaaugggggggcaggucaagcacaaccacaaaaaaacgaaggaggaaacgcaggagcacggaaaggacagggacaaaacaaucagggugcgaaugucccaaaugaaaaaguugugaaugauuaccuacacaaaauuagaucuagcguuaccaccgaguggacuccaugcaguguaaccuguggaaaugguguaagaauuagaagaaaaggucaugcagguaauaaaaaggcagaggaccuuacuauggaugaccuugagguggaagcuuguguaauggauaagugcgcuggcauauuuaacguugugaguaauucauuaggcuuagucauauuguuagucccagcauuauucaauuaa

SEQ ID NO: 3180 - RNA, 1038 nt, Artificial Sequence
  derived and/or modified CDS sequence (wt) from Pk(UMSY2C2)__AHF20625.1__CSP
augaagaacuucauucucuuggccgucuccuccauccugcugguggacuugcucccaacacacuucgaacauaauguagaucucuccagggccauaaauguaaauggaguaagcuucaauaauguagacaccaguucacuuggcgcagcacagguaagacaaagugcuagccgaggcagaggacuuggugagaaaccaaaagaaggagcugauaaagaaaagaaaaaagaaaaagaaaaagaagaagaaccaaagaagccaaaugaaaauaagcugaaacaaccggaaggaaauagggaagcuccaggacaaccggaaggaaauagggaagcuccaggacaaccggaaggaaauagggaagcuccaggacaaccggaaggaaauagggaagcuccaggacaaccggaaggaaauagggaagcuccaggacaaccggaaggaaauagggaagcuccaggacaaccggaaggaaauagggaagcuccaggacaaccggaaggaaauagggaagcuccaggacaaccggaaggaaauagggaagcuccaggacaaccggaaggaaauagggaagcuccagcacaaccggaaggaaauagggaagcuccaggacaaccggaaggaaauagggaagcuccagcacaaccggaaggaaauagggaagcuccagcacaaccacaaggaaaugggggggcaggucaagcacaaccacaaaaaaacgaaggaggaaacgcaggagcacggaaaggacagggacaaaacaaucagggugcgaaugccccaaaugaaaaaguuguaaaugauuaccuacagaaaauuagaucuagcguuaccaccgaguggacuccaugcaguguaaccuguggaaaugguguaagaauuaaaagaaaagcucaugcagauaagaaaaaggcagaggaccuuacuauggaugaccuugaaguggaagcuuguguaauggauaagugugcuggcauauuuaacguugugaguaauucauuaggguuagucauauuguuaguccuagcauuauucaauuaa

SEQ ID NO: 3181 - RNA, 1029 nt, Artificial Sequence
  derived and/or modified CDS sequence (wt) from Pk(KN045)__AFG25467.1__CSP
augaagaacuucauucucuuggccgucuccuccauccugcugguggacuugcuccccacacacuucgaacauaauguagaucucuccagggccauaaauguaaauggaguaagcuucaauaauguagacaccaguucacuuggcgcagcacagguaagacaaagugcuagccgaggcagaggacuuggugagaagccaaaagaaggagcugauaaagaaaagaaaaaagaaaaagaaaaagaaaaagaagaagaaccaaagaagccaaaugaaaauaagcugaaacaaccggaacaaccagcagcaggagcagggggcgaacaaccagcagcaggagcaggaggcgaacaaccagcagcaggagcaggaggcgaacaaccagcagcaggagcaggaggcgaacaaccagcagcaggagcaggaggcgaacaaccagcagcaggagcaagaggcgaacaaccagcagcaggagcaggaggcgaacaaccagcagcaggagcaggaggcgaacaaccagcagcaggagcaagaggcgaacaaccagcagcaggagcaggaggcgaacaaccagcagcaggagcaggaggcgaacaaccagcaccagcaccaaggagggaacaaccagcagcaggagcagggggcgaacaaccagcaccagcaccaaggagggaacaaccagcaccaggagcaggugcgggagauggagcacgaggaggaaacgcaggggcaggaaaaggacagggacaaaacaaucagggugcgaaugucccaaaugaaaaaguugugaaugauuaccuacacaaaauuagaucuagcguuaccaccgaguggacuccaugcaguguaaccuguggaaaugguguaagaauuagaagaaaaggucaugcagguaauaaaaaggcagaggaccuuacuauggaugaccuugagguggaagcuuguguaauggauaagugcgcuggcauauuuaacguugugaguaauucauuaggcuuagucauauuguuaguccuagcauuauucaauuaa

SEQ ID NO: 3182 - RNA, 1029 nt, Artificial Sequence
  derived and/or modified CDS sequence (wt) from Pk(LT48)__ADN94515.1__CSP
augaagaacuucauucucuuggccgucuccuccauccugcugguggacuugcuccccacacacuucgaacauaauguagaucucuccagggccauaaauguaaauggaguaagcuucaauaauguagacaccaguucacuuggcgcagcacagguaagacaaagugcuagccgaggcagaggacuuggugagaagccaaaagaaggagcugauaaagaaaagaaaaaagaaaaagaaaaagaaaaagaagaagaaccaaagaagccaaaugaaaauaagcugaaacaaccggaacaaccagcagcaggagcagggggcgaacaaccagcagcaggagcaggaggcgaacaaccagcagcaggagcaggaggcgaacaaccagcagcaggagcaggaggcgaacaaccagcagcaggagcaggaggcgaacaaccagcagcaggagcaggaggcgaacaaccagcagcaggagcaggaggcgaacaaccagcagcaggagcaggaggcgaacaaccagcagcaggagcaagaggcgaacaaccagcagcaggagcaggaggcgaacaaccagcagcaggagcaggaggcgaacaaccagcaccagcaccaaggagggaacaaccagcagcaggagcagggggcgaacaaccagcaccagcaccaaggagggaacaaccagcaccaggagcaggugcgggagauggagcacgaggaggaaacgcaggggcagguaaaggacagggacaaaacaaucagggugcgaaugucccaaaugaaaaaguugugaaugauuaccuacacaaaauuagaucuagcguuaccaccgaguggacuccaugcaguguaaccuguggaaaugguguaagaauuagaagaaaaggucaugcagguaauaaaaaggcagaggaccuuacuauggaugaccuugagguggaagcuuguguaauggauaagugcgcuggcauauuuaacguugugaguaauucauuaggcuuagucauauuguuaguccuagcauuauucaauuaa

SEQ ID NO: 3183 - RNA, 1029 nt, Artificial Sequence
  derived and/or modified CDS sequence (wt) from Pk(TB073)__AFG25476.1__CSP
augaggaacuucuucuucuuggccgucuccuccauccugcugguggacuugcuccccacacacuucgaacauaauguagaucucuccagggccauaaauguaaauggaguaagcuucaauaauguagacaccaguucacuuggcgcagcacaggugagacaaagugcuagccgaggcagaggacuuggugagaagcgaaaagaaggagcugauaaagaaaagaaaaaagaaaaagaagaagaaccaaagaagccaaaugaaaauaagcugaaacaaccggaacaagcaagagcagggggcgaacaaccagcagcagggggcgaacaaccagcagcagggggcgaacaaccagcagcagggggcgaacaaccagcagcagggggugaacaaccagcagcagggggcgaacaaccagcagcagggggcgaacaaccagcagcagggggcgaacaaccagcagcagggggugaacaaccagcagcagggggcgaacgaccagcagcagggggcgaacaaccagcagcagggggcgaacgaccagcagcagggggugaacaaccagcagcagggggugaacaaccagcaccagcaccaaggagggaacaaccagcagcagggggugaacaaccagcaccagcaccaaggagggaacaaccagcagcagggggcgaacaaccagcaccaggagcaggugcgggagauggagcacgaggaggaaacgcaggggcagguaaaggacagggacaaaacaaucagggugcgaaugucccaaaugaaaaaguugugaaugauuaccuacacaaaacuagaucuagcguuaccaccgaguggacuccaugcaguguaaccuguggaaaugguguaagaauuagaagaaaagcucaugcagauaagaaaaaggcagagaaccuuacuauggaugaccuugaaguggaagcuuguguaauggauaagugcgcuggcauauuuaacguugugaguaauucauuaggguuagucauauuguuaguccuagcauuauucaauuaa

SEQ ID NO: 3184 - RNA, 1026 nt, Artificial Sequence
  derived and/or modified CDS sequence (wt) from Pk(SGEHIWM26-Y09-60)__AFD97238.1__CSP
augaagaacuucauucucuuggccgucuccuccauccugcugguggacuugcuccccacacacuucgaacauaauguagaucucuccagggccauaaauguaaauggaguaagcuucaauaauguagacaccaguucacuuggcgcagcacgggugagacaaagugcuagccgaggcagaggacuuggugagaagccaaaagaaggagcugauaaagaaaagaaaaaagaaaaagaaaaagaaaaagaagaaccaaagaagccaaaugaaaauaagcugaaacaaccggaacaaccagcagcaggagcagggggcgaacaaccagcagcaggagcaggaggcgaacaaccagcagcaggagcaggaggcgaacaaccagcagcaggagcaggaggcgaacaaccagcggcaggagcagggggcgaacaaccagcagcaggagcaggaggcgaacaaccagcagcaggagcaggaggcgaacaaccagcagcaggagcaggaggcgaacaaccagcagcaggagcaggaggcgaacaaccagcagcaggagcagggggcgaacaaccagcagcaggagcaggaggcgaacaaccagcaccagcaccaaggagggaacaaccagcagcaggagcagggggcgaacaaccagcaccagcaccaaggagggaacaaccagcaccaggagcaggugcgggagauggagcacgaggaggaaacgcaggggcagguaaaggacagggacaaaacaaucagggugcgaaugucccaaaugaaaaaguugugaaugauuaccuacacaaaauuagaucuagcguuaccaccgaguggacuccaugcaguguaaccuguggaaaugguguaagaauuagaagaagacagaaugcugguaauaaaaaggcagaggaccuuacuauggacgaccuugagguggaagcuuguguaauggauaagugcgcuggcauauuuaacguugugaguaauucauuaggcuuagucauauuguuagucuuagcauuauucaauuaa

SEQ ID NO: 3185 - RNA, 1026 nt, Artificial Sequence
  derived and/or modified CDS sequence (wt) from Pk(SGEHIWM35-Y09-74)__AFD97243.1__CSP
augaagaacuucauucucuuggccgucuccuccauccugcugguggacuugcuccccacacacuucgaacauaauguagaucucuccagggccauaaauguaaauggaguaagcuucaauaauguagacaccaguucacuuggcgcagcacaggugagacaaagugcuagccgaggcagaggacuuggugagaagccaaaagaaggagcugauaaagaaaagaaaaaagaaaaagaaaaagaaaaagaagaaccaaagaagccaaaugaaaauaagcugaaacaaccggaacaaccagcagcaggagcagggggcgaacaaccagcagcaggagcaggaggcgaacaaccagcagcaggagcaggaggcgaacaaccagcagcaggagcaggaggcgaacaaccagcggcaggagcagggggcgaacaaccagcagcaggagcaggaggcgaacaaccagcagcaggagcaggaggcgaacaaccagcagcaggagcaggaggcgaacaaccagcagcaggagcaggaggcgaacaaccagcagcaggagcagggggcgaacaaccagcagcaggagcaggaggcgaacaaccagcaccagcaccaaggagggaacaaccagcagcaggagcagggggcgaacaaccagcaccagcaccaaggagggaacaaccagcaccaggagcaggugcgggagauggagcacgaggaggaaacgcaggggcagguaaaggacagggacaaaacaaucagggugcgaaugucccaaaugaaaaaguugugaaugauuaccuacacaaaauuagaucuagcguuaccaccgaguggacuccaugcaguguaaccuguggaaaugguguaagaauuagaagaagacagaaugcugguaauaaaaaggcagaggaccuuacuauggaugaccuugagguggaagcuuguguaauggauaagugcgcuggcauauuuaacguugugaguaauucauuaggcuuagucauauuguuagucuuagcauuauucaauuaa

SEQ ID NO: 3186 - RNA, 1023 nt, Artificial Sequence
  derived and/or modified CDS sequence (wt) from Pk(UM0014C4)__AHF20645.1__CSP
augaagaacuucauucucuuggccgucuccuccauccugcugguggacuugcuccccacacacuucgaacauaauguagaucucuccagggccauaaauguaaauggaguaagcuucaauaauguagacaccaguucacuuggcgcagcacaggugagacaaagugcuagccgaggcagaggacuuggugagaagccaaaagaaggagcugauaaagaaaagaaaaaagaaaaagaaaaagaagaagaaccaaagaagccaaaugaaaauaagcugaaacaaccggaacaagcaagaccaggagcaggaggcgagcaaccagcaccaggagcaggaggcgaacaaccagcaccaggagcaggaggcgaacaaccagcaccaggagcaggaggcgagcaaccagcaccaggagcaggaggcgagcaaccagcaccaggagcaggaggcgaacaaccagcaccaggagcagggggcgaacaaccagcaccaggagcaggaggcgaacaaccagcaccaggagcagggggcggacaaccagcaccaggagcaggaggcgaacaaccagcaccaggagcaggaggcgaacaaccagcaccagcaccaaggagggaacaaccagcaccaggaccagggggcgaacaaccagcaccagcaccaaggagggaacaaccagcaccaggagcaggugcgggagauggagcacgaggaggaaacgcaggggcagguaaaggacagggacaaaacaaucagggugcgaaugucccaaaugaaaaaguugugaaugauuaccuacacaaaauuagaucuagcguuaccaccgaguggacuccaugcaguguaaccuguggaaaugguguaagaauuagaagaaaaggucaugcagguaauaaaaaggcagaggaccuuacuauggaugaccuugagguggaagcuuguguaauggauaagugcgcuggcauauuuaacguugugaguaauucauuaggcuuagucauauuguuaguccuagcauuauucaauuaa

SEQ ID NO: 3187 - RNA, 1020 nt, Artificial Sequence
  derived and/or modified CDS sequence (wt) from Pk(LT57)__ADN94510.1__CSP
augaagaacuucauucucuuggccgucuccuccauccugcugguggacuugcuccccacacacuucgaacauaauguagaucucuccagggccauaaauguaaauggaguaagcuucaauaauguagacaccaguucacuuggcgcagcacagguaagacaaagugcuagccgaggcagaggacuuggugagaagcgaaaagaaggagcugauaaagaaaagaaaaaagaaaaagaagaaccaaagaagccaaaugaaaauaagcugaaacaaccggaacaagcaagagcagggggcgaacaaccagcagcagggggcgaacaaccagcagcagggggcgaacaaccagcagcagggggcgaacaaccagcagcagggggugaacaaccagcagcagggggcgaacaaccagcagcagggggcgaacaaccagcagcagggggugaacaaccagcagcagggggcgaacgaccagcagcagggggcgaacaaccagcagcagggggcgaacaaccagcagcagggggcgaacaaccagcagcagggggcgaacgaccagcagcagggggugaacgaccagcagcagggggugaacaaccagcagcagggggugaacaaccagcaccagcaccaaggagggaacaaccagcagcagggggcgaacaaccagcaccaggagcaggugcgggagauggagcacgaggaggaaacgcaggggcagguaaaggacagggacaaaacaaucagggugcgaaugucccaaaugaaaaaguugugaaugauuaccuacacaaaauuagaucuagcguuaccaccgaguggacuccaugcaguguaaccuguggaaaugguguaagaauuagaagaaaagcucaugcagauaagaaaaaggcagagaaccuuacuauggaugaccuugaaguggaagcuuguguaauggauaagugcgcuggcauauuuaacguugugaguaauucauuaggguuagucauauuguuaguccuagcauuauucaauuaa

SEQ ID NO: 3188 - RNA, 1020 nt, Artificial Sequence
  derived and/or modified CDS sequence (wt) from Pk(SGEHIWM17-Y09-4)__AFD97233.1__CSP
augaagaacuucauucucuuggccgucuccuccauccugcugguggacuugcuccccacacacuucgaacauaauguagaucucuccagggccauaaauguaaauggaguaagcuucaauaaugcagacaccaguucacuuggcgcagcacaggugagacaaagugcuagccgaggcagaggacuuggugagaagccaaaagaaggagcugauaaagaaaagaaaaaagaaaaagaagaagaaccaaagaagccaaaugaaaauaagcugaaacaaccggaugcaguaccagggggcgaagaaccagcaccaggaagggaacagccagcaccaggaagggaggaaccagcaccaggaagggaacagccagcaccaggaagggaagaaccagcaccaggaagggaacagccagcaccaggaagggaagaaccagcgccaggaagggaacagccagcaccaggaagggaacagccagcaccaggaagggaggaaccagcaccaggaagggaacaaccagcaccaggaagggaggaaccagcaccaggaagggaacaaccagcaccaggaagggagcagccagcaccaggaagggaacagccagcaccggggggugaacaaccagcaccaggaagggaacagccagcaccggguggugaacaaccagcaccagcaccaggagcaggugcgggagauggagcacgaggaggaaacgcaggggcagggaaaggacagggacaaaacaaucagggugcaaaugucccaaaugaaaaaguugugaaugauuaccuacacaaaauuagaucuagcguuaccaccgaguggacuccaugcaguguaaccuguggaaaugguguaagaauuagaagaaaaggucaugcagguaauaaaaaggcagaggaccuuacuauggaugaccuugagguggaagcuuguguaauggauaagugcgcuggcauauuuaacguugugaguaauucauuaggcuuagucauauuguuaguccuagcauuauucaauuaa

SEQ ID NO: 3189 - RNA, 1020 nt, Artificial Sequence
  derived and/or modified CDS sequence (wt) from Pk(SGEHIWM26-Y09-123)__AFD97240.1__CSP
augaagaacuucauucucuuggccgucuccuccauccugcugguggacuugcuccccacacacuucgaacacaauguagaucucuccagggccauaaauguaaauggaguaagcuucaauaauguagacaccaguucacuuggcgcagcacaggugagacaaagugcuagccgaggcagaggacuuggugagaagccaaaagaaggagcugauaaagaaaagaaaaaagaaaaagaagaagaaccaaagaagccaaaugaaaauaagcugaaacaaccggaugcaguaccagggggcgaagaaccagcaccaggaagggaacagccagcaccaggaagggaggaaccagcaccaggaagggaacagccagcaccaggaagggaagaaccagcaccaggaagggaacagccagcaccaggaagggaagaaccagcgccaggaagggaacagccagcaccaggaagggaacagccagcaccaggaagggaggaaccagcaccaggaagggaacaaccagcaccaggaagggaggaaccagcaccaggaagggaacaaccagcaccaggaagggaacagccagcaccaggaagggaacagccagcaccggggggugaacaaccagcaccaggaagggaacagccagcaccggguggugaacaaccagcaccagcaccaggagcaggugcgggagauggagcacgaggaggaaacgcaggggcagggaaaggacagggacaaaacaaucagggugcaaaugucccaaaugaaaaaguugugaaugauuaccuacacaaaauuagaucuagcguuaccaccgaguggacuccaugcaguguaaccuguggaaaugguguaagaauuagaagaaaaggucaugcagguaauaaaaaggcagaggaccuuacuauggaugaccuugagguggaagcuuguguaauggauaagugcgcuggcauauuuaacguugugaguaauucauuaggcuuagucauauuguuaguccuagcauuauucaauuaa

SEQ ID NO: 3190 - RNA, 1020 nt, Artificial Sequence
  derived and/or modified CDS sequence (wt) from Pk(TN003)__AFG25477.1__CSP
augaagaacuucauucucuuggccgucuccuccauccugcugguggacuuguuccccacacacuucgaacauaauguagaucucuccagggccauaaauguaaauggaguaagcuucaauaauguagacaccaguucacuuggcgcagcacaggugagacaaagugcuagccgaggcagaggacuuggugagaagccaaaagaaggagcugauaaagaaaagaaaaaagaaaaagaagaaaaaccaaagaagccaaaugaaaauaagcugaaacaaccagcagcagggggcgaacaaccagcagcagggggcgaacaaccagcagcagggggcgaacaaccagcagcagggggugaacaaccagcagcagggggugaacaaccagcagcagggggugaacaaccagcagcagggggcgaacgaccagcagcagggggcgaacaaccagcagcagggggugaacaaccagcagcagggggcgaacgaccagcagcagggggugaacaaccagcagcagggggcgaacgaccagcagcagggggcgaacaaccagcagcagggggcgaacaaccagcagcagggggugaacaaccagcaccagcaccaaggagggaacaaccaguagcagggggcgaacaaccagcaccagcaccaaggagggaacaaccagcaccaggagcaggugcgggagauggagcacgaggaggaaacgcaggggcagguaaaggacagggacaaaacaaucagggugcgaaugucccaaaugaaaaaguugugaaugauuaccuacacaaaauuagaucuagcguuaccaccgaguggacuccaugcaguguaaccuguggaaaugguguaagaauuagaagaagacagaaugcugguaauaaaaaggcagaggaccuuacuauggaugaccuugagguggaagcuuguguaauggauaagugcgcuggcauauuuaacguugugaguaauucauuaggguuagucauauuguuaguccuagcauuauucaauuaa

SEQ ID NO: 3191 - RNA, 1017 nt, Artificial Sequence
  derived and/or modified CDS sequence (wt) from Pk(LT53)__ADN94524.1__CSP
augaggaacuucauucucuuggccgucuccuccauccugcugguggacuugcuccccacacacuucgaacauaauguagaucucuccagggccauaaauguaaauggaguaagcuucaauaauguagacaccaguucacuuggcgcagcacagguaagacaaagugcuagccgaggcagaggacuuggugagaagcgaaaagaaggagcugauaaagaaaagaaaaaagaaaaagaagaagaaccaaagaagccaaaugaaaauaagcugaaacaaccggaacaagaaagaccagggggagaacaaccagcaccaggaccagggggcgaacaaccagcaccaggaccagggggcgaacaaccagcaccaagaccagggggagaacaaccagcaccaggaccagggggagaacaaccagcaccaggaccagggggagaacaaccagcaccaggaccagggggcgaacaaccagcaccaagaccagggggagaacaaccagcaccaggaccagggggcgaacaaccagcaccaagaccagggggagaacaaccagcaccaggaccagggggcgaacaaccagcaccaagaccagggggagaacaaccagcaccaggaccagggggcgaacaaccagcaccagcaccaaggagggaacaaccagcaccagcaccaggagcaggugcgggagauggagcacgaggaggaaacgcaggggcagguaaaggacagggacaaaacaaucagggugcgaaugucccaaaugaaaaaguugugaaugauuaccuacacaaaauuagaucuagcguuaccaccgaguggacuccaugcaguguaaccuguggaaaugguguaagaauuagaagaagacagaaugcugguaauaaaaaggcagaggaccuuacuauggaugaccuugagguggaagcuuguguaauggauaagugcgcuggcauauuuaacguugugaguaauucauuaggguuagucauauuguuaguccuagcauuauucaauuaa

SEQ ID NO: 3192 - RNA, 1014 nt, Artificial Sequence
  derived and/or modified CDS sequence (wt) from Pk(KH229)__ADN94485.1__CSP
augaggaacuucauucucuuggccgucuccuccauccugcugguggacuugcuccccacacacuucgaacauaauguagaucucuccagggccauaaauguaaauggaguaagcuucaauaauguagacaccaguucacuuggcgcagcacaggugagacaaagugcuagccgaggcagaggacuuggugagaagccaaaagaaggagcugauaaagaaaagaaaaaagaaaaagaagaaaaaccaaagaagccaaaugaaaauaagcugaaacaaccagggggcgaacaaccagcagcagggggcgaacaaccagcagcagggggcgaacaaccagcagcagggggugaacaaccagcagcagggggcgaacgaccagcagcagggggcgaacaaccagcagcagggggugaacaaccagcagcagggggcgaacaaccagcagcagggggcgaacaaccagcagcagggggcgaacgaccagcagcagggggcgaacaaccagcagcagggggugaacaaccagcagcagggggugaacaaccagcagcagggggcgaacgaccagcagcagggggcgaacaaccagcaccagcaccaaggagggaacaaccagcagcagggggcgaacaaccagcaccagcaccaaggagggaacaaccagcaccaggagcaggugcgggagauggagcacgaggaggaaacgcaggggcagguaaaggacagggacaaaacaaucagggugcgaaugucccaaaugaaaaaguugugaaugauuaccuacacaaaauuagaucuagcguuaccaccgaguggacuccaugcaguguaaccuguggaaaugguguaagaauuagaagaagacagaaugcugguaauaaaaaggcagaggaccuuacuauggaugaccuugagguggaagcuuguguaauggauaagugcgcuggcauauuuaacguugugaguaauucauuaggguuagucauauuguuaguccuagcauuauucaauuaa

SEQ ID NO: 3193 - RNA, 1014 nt, Artificial Sequence
  derived and/or modified CDS sequence (wt) from Pk(KH468)__ADN94487.1__CSP
augaagaacuucauucucuuggccgucuccuccauccugcugguggacuuguuccccacacacuucgaacauaauguagaucucuccagggccauaaauguaaauggaguaagcuucaauaauguagacaccaguucacuuggcgcagcacaggugagacaaagugcuagccgaggcagaggacuuggugagaagccaaaagaaggagcugauaaagaaaagaaaaaagaaaaagaagaaaaaccaaagaagccaaaugaaaauaagcugaaacaaccagggggcgaacaaccagcagcagggggcgaacaaccagcagcagggggcgaacaaccagcagcagggggugaacaaccagcagcagggggcgaacgaccagcagcagggggcgaacaaccagcagcaggaggugaacaaccagcagcagggggcgaacaaccagcagcagggggcgaacaaccagcagcagggggcgaacgaccagcagcagggggcgaacaaccagcagcagggggugaacaaccagcagcagggggcgaacgaccagcagcagggggcgaacaaccagcagcagggggugaacaaccagcaccagcaccaaggagggaacaaccagcagcagggggcgaacaaccagcaccagcaccaaggagggaacaaccagcaccaggagcaggugcgggagauggagcacgaggaggaaacccaggggcagguaaaggacagggacaaaacaaucagggugcgaaugucccaaaugaaaaaguugugaaugauuaccuacacaaaauuagaucuagcguuaccaccgaguggacuccaugcaguguaaccuguggaaaugguguaagaauuagaagaagacagaaugcugguaauaaaaaggcagaggaccuuacuauggaugaccuugagguggaagcuuguguaauggauaagugcgcuggcauauuuaacguugugaguaauucauuaggguuagucauauuguuaguccuagcauuauucaauuaa

SEQ ID NO: 3194 - RNA, 1014 nt, Artificial Sequence
  derived and/or modified CDS sequence (wt) from Pk(LT33)__ADN94523.1__CSP
augaggaacuucauucucuuggccgucuccuccauccugcugguggacuugcuccccacacacuucgaacauaauguagaucucuccagggccauaaauguaaauggaguaagcuucaauaauguagacaccaguucacuuggcgcagcacagguaagacaaagugcuagccgaggcagaggacuuggugagaagcgaaaagaaggagcugauaaagaaaagaaaaaagaaaaagaagaagaaccaaagaagccaaaugaaaauaagcugaaacaaccagggggcgaacaaccagcagcagggggcgaacaaccagcagcagggggcgaacaaccagcagcagggggugaacaaccagcagcagggggcgaacgaccagcagcagggggcgaacaaccagcagcaggaggugaacaaccagcagcagggggcgaacaaccagcagcagggggcgaacaaccagcagcagggggcgaacgaccagcagcagggggcgaacaaccagcagcagggggugaacaaccagcagcagggggcgaacgaccagcagcagggggcgaacaaccagcagcagggggugaacaaccagcaccagcaccaaggagggaacaaccagcagcagggggcgaacaaccagcaccagcaccaaggagggaacaaccagcaccaggagcaggugcgggagauggagcacgaggaggaaacccaggggcagguaaaggacagggacaaaacaaucagggugcgaaugucccaaaugaaaaaguugugaaugauuaccuacacaaaauuagaucuagcguuaccaccgaguggacuccaugcaguguaaccuguggaaaugguguaagaauuagaagaagacagaaugcugguaauaaaaaggcagaggaccuuacuauggaugaccuugagguggaagcuuguguaauggauaagugcgcuggcauauuuaacguugugaguaauucauuaggguuagucauauuguuaguccuagcauuauucaauuaa

SEQ ID NO: 3195 - RNA, 1014 nt, Artificial Sequence
  derived and/or modified CDS sequence (wt) from Pk(LT64)__ADN94520.1__CSP
augaagaacuucauucucuuggccgucuccuccauccugcugguggacuuguuccccacacacuucgaacauaauguagaucucuccagggccauaaauguaaauggaguaagcuucaauaauguagacaccaguucacuuggcgcagcacaggugagacaaagugcuagccgaggcagaggacuuggugagaagccaaaagaaggagcugauaaagaaaagaaaaaagaaaaagaagaaaaaccaaagaagccaaaugaaaauaagcugaaacaaccagggggcgaacaaccagcagcagggggcgaacaaccagcagcagggggcgaacaaccagcagcagggggugaacaaccagcagcagggggugaacaaccagcagcagggggugaacaaccagcagcagggggcgaacgaccagcagcagggggcgaacaaccagcagcagggggugaacaaccagcagcagggggcgaacgaccagcagcagggggugaacaaccagcagcagggggcgaacgaccagcagcagggggcgaacaaccagcagcagggggcgaacaaccagcagcagggggugaacaaccagcaccagcaccaaggagggaacaaccagcagcagggggcgaacaaccagcaccagcaccaaggagggaacaaccagcaccaggagcaggugcgggagauggagcacgaggaggaaacgcaggggcagguaaaggacagggacaaaacaaucagggugcgaaugucccaaaugaaaaaguugugaaugauuaccuacacaaaauuagaucuagcguuaccaccgaguggacuccaugcaguguaaccuguggaaaugguguaagaauuagaagaagacagaaugcugguaauaaaaaggcagaggaccuuacuauggaugaccuugagguggaagcuuguguaauggauaagugcgcuggcauauuuaacguugugaguaauucauuaggguuagucauauuguuaguccuagcauuauucaauuaa

SEQ ID NO: 3196 - RNA, 1014 nt, Artificial Sequence
  derived and/or modified CDS sequence (wt) from Pk(TB016)__AFG25473.1__CSP
augaagaacuucauucucuuggccgucuccuccauccugcugguggacuuguuccccacacacuucgaacauaauguagaucucuccagggccauaaauguaaauggaguaagcuucaauaauguagacaccaguucacuuggcgcagcacaggugagacaaagugcuagccgaggcagaggacuuggugagaagccaaaagaaggagcugauaaagaaaagaaaaaagaaaaagaagaaaaaccaaagaagccaaaugaaaauaagcugaaacaaccagggggcgaacaaccagcagcagggggcgaacaaccagcagcagggggugaacaaccagcagcagggggcgaacaaccagcagcagggggcgaacgaccagcagcagggggcgaacaaccagcagcagggggugaacaaccagcagcagggggcgaacaaccagcagcagggggcgaacaaccagcagcagggggcgaacgaccagcagcagggggcgaacaaccagcagcagggggugaacaaccagcagcagggggcgaacgaccagcagcagggggcgaacaaccagcagcagggggugaacaaccagcaccagcaccaaggagggaacaaccagcagcagggggcgaacaaccagcaccagcaccaaggagggaacaaccagcaccaggagcaggugcgggagauggagcacgaggaggaaacgcaggggcagguaaaggacagggacaaaacaaucagggugcgaaugucccaaaugaaaaaguugugaaugauuaccuacacaaaauuagaucuagcguuaccaccgaguggacuccaugcaguguaaccuguggaaaugguguaagaauuagaagaagacagaaugcugguaauaaaaaggcagaggaccuuacuauggaugaccuugagguggaagcuuguguaauggauaagugcgcuggcauauuuaacguugugaguaauucauuaggguuagucauauuguuaguccuagcauuauucaauuaa

SEQ ID NO: 3197 - RNA, 1014 nt, Artificial Sequence
  derived and/or modified CDS sequence (wt) from Pk(UM0021C10)__AHF20667.1__CSP
augaagaacuucauucucuuggccgucuccuccauccugcugguggacuuguuccccacacacuucgaacauaauguagaucucuccagggccauaaauguaaauggaguaagcuucaauaauguagacaccaguucacuuggcgcagcacaggugagacaaagugcuagccgaggcagaggacuuggugagaagccaaaagaaggagcugauaaagaaaagaaaaaagaaaaagaagaaaaaccaaagaagccaaaugaaaauaagcugaaacaaccagggggcgaacaaucagcagcagggggcgaacaaccagcagcagggggcgaacaaccagcagcagggggugaacaaccagcagcagggggugaacaaccagcagcagggggugaacaaccagcagcagggggcgaacgaccagcagcagggggcgaacaaccagcagcagggggugaacaaccagcagcagggggcgaacgaccagcagcagggggugaacaaccagcagcagggggcgaacgaccagcagcagggggcgaacaaccagcagcagggggcgaacaaccagcagcagggggugaacaaccagcgccagcaccaaggagggaacaaccagcagcagggggcgaacaaccagcaccagcaccaaggagggaacaaccagcaccaggagcaggugcgggagauggagcacgaggaggaaacgcaggggcagguaaaggacagggacaaaacaaucagggugcgaaugucccaaaugaaaaaguugugaaugauuaccuacacaaaauuagaucuagcguuaccaccgaguggacuccaugcaguguaaccuguggaaaugguguaagaauuagaagaagacagaaugcugguaauaaaaaggcagaggaccuuacuauggaugaccuugagguggaagcuuguguaauggauaagugcgcuggcauauuuaacguugugaguaauucauuaggguuagucauauuguuaguccuagcauuauucaauuaa

SEQ ID NO: 3198 - RNA, 1011 nt, Artificial Sequence
  derived and/or modified CDS sequence (wt) from Pk(UMRAC2)__AHF20618.1__CSP
augaagaacuucauucucuuggccgucuccuccauccugcugguggacuugcuccccacacacuucgaacauaauguagaucucuccagggccauaaauguaaauggaguaagcuucaauaauguagacaccaguucacuuggcgcagcacagguaagacaaagugcuagccgaggcagaggacuuggugagaaaccaaaagaaggagcugauaaagaaaagaaaaaagaaaaagaaaaagaagaagaaccaaagaagccaaaugaaaauaagcugaaacaaccggaaggaaauagggaagcuccaggacaaccggaaggaaauagggaagcuccaggacaaccggaaggaaauagggaagcuccaggacaaccggaaggaaauagggaagcuccaggacaaccggaaggaaauagggaagcuccaggacaaccggaaggaaauagggaagcuccaggacaaccggaaggaaauagggaagcuccaggacaaccggaaggaaauagggaagcuccagcacaaccggaaggaaauagggaagcuccaggacaaccggaaggaaauagggaagcuccagcacaaccacaaggaaaugggggggcaggucaagcacaaccggaaggaaauagggaagcuccagcacaaccacaaggaaaugggggggcaggucaagcacaaccacaaaaaaacgaaggaggaaacgcaggagcacggaaaggacagggacaaaacaaucagggugcgaaugucccaaaugaaaaaguugugaaugauuaccuacacaaaauuagaucuagcguuaccaccgaguggacuccaugcaguguaaccuguggaaaugguguaagaauuagaagaaaaggucaugcagguaauaaaaaggcagaggaccuuacuauggaugaccuugagguggaagcuuguguaauggauaagugcgcuggcauauuuaacguugugaguaauucauuaggcuuagucauauuguuaguccuagcauuauucaauuaa

SEQ ID NO: 3199 - RNA, 1008 nt, Artificial Sequence
  derived and/or modified CDS sequence (wt) from Pk(UMANC1)__AHF20619.1__CSP
augaagaacuucauucucuuggccgucuccuccauccugcugguggacuugcucccaacacacuucgaacauaauguagaucucuccagggccauaaauguaaauggaguaagcuucaauaauguagacaccaguucacuuggcgcagcacagguaagacaaagugcuagccgaggcagaggacuuggugagaaaccaaaagaaggagcugauaaagaaaagaaaaaagaaaaagaaaaagaagaagaaccaaagaagccaaaugaaaauaagcugaaacaaccggaaggaaauagggaagcuccaggacaaccggaaggaaauagggaagcuccaggacaaccggaaggaaauagggaagcuccaggacaaccggaaggaaauagggaagcuccaggacaaccggaaggaaauagggaagcuccaggacaaccggaaggaaauagggaagcuccaggacaaccggaaggaaauagggaagcuccaggacaaccggaaggaaauagggaagcuccaggacaaccggaaggaaauagggaagcuccaggacaaccggaaggaaauagggaagcuccaggacaaccggaaggaaauagggaagcuccagcacaaccggaaggaaauagggaagcuccagcacaaccacaaggaaaugggggggcaggucaagcacaaccacaaaaaaacgaaggaggaaacgcaggagcacggaaaggacagggacaaaacaaucagggugcgaaugccccaaaugaaaaaguuguaaaugauuaccuacagaaaauuagaucuagcguuaccaccgaguggacuccaugcaguguaaccuguggaaaugguguaagaauuaaaagaaaagcucaugcagauaagaaaaaggcagaggaccuuacuauggaugaccuugaaguggaagcuuguguaauggauaagugugcuggcauauuuaacguugugaguaauucauuaggguuagucauauuguuaguccuagcauuauucaauuaa

SEQ ID NO: 3200 - RNA, 1002 nt, Artificial Sequence
  derived and/or modified CDS sequence (wt) from Pk(LT48)__ADN94505.1__CSP
augaggaacuucauucucuuggccgucuccuccauccugcugguggacuugcuccccacacacuucgaacauaauguagaucucuccagggccauaaauguaaauggaguaagcuucaauaauguagacaccaguucacuuggcgcagcacagguaagacaaagugcuagccgaggcagaggacuuggugagaagcgaaaagaaggagcugauaaagaaaagaaaaaagaaaaagaagaagaaccaaagaagccaaaugaaaauaagcugaaacaaccgaaugcagaagguggagcaaaugcaggacaaccgaaugcagaagguggagcaaaugcaggacaaccgaaugcagaagguggagcaaaugcaggacaaccuaaugcagaagguggagcaaaugcaggacaaccgaaugcagaagguggagcaaaugcaggacaaccuaaugcagaagguggagcaaaugcaggacaaccgaaugcagaagguggagcaaaugcaggacaaccgaaugcagaagguggagcaaaugcaggacaaccgaaugcagaagguggagcaaaugcaggacaaccgaaugcagaagguggagcaaaugcaggacaaccgaaugcagaagguggagcaaaugcacgacagccacaggcagaaggugguggagcaaaugcacgacaaggaggaaaugaggggaauaaacaagcaggaaaaggacagggacaaaacaaucagggugcgaaugccccaaaugaaaaaguuguaaaugauuaccuacagaaaauuagaucuagcguuaccaccgaguggacuccaugcaguguaaccuguggaaaugguguaagaauuagaagaagagcucaugcagauaagaaaaaggcagaggaccuuacuauggaugaccuugaaguggaagcuuguguaauggauaagugugcuggcauauuuaacguugugaguaauucauuaggguuagucauauuguuaguccuagcauuauucaauuaa

SEQ ID NO: 3201 - RNA, 993 nt, Artificial Sequence
  derived and/or modified CDS sequence (wt) from Pk(KH176)__ADN94486.1__CSP
augaagaacuucauucucuuggccgucuccuccauccugcugguggacuuguuccccacacacuucgaacauaauguagaucucuccagggccauaaauguaaauggaguaagcuucaauaauguagacaccaguucacuuggcgcagcacaggugagacaaagugcuagccgaggcagaggacuuggugagaagccaaaagaaggagcugauaaagaaaagaaaaaagaaaaagaagaaaaaccaaagaagccaaaugaaaauaagcugaaacaaccagggggcgaacaaccagcagcagggggcgaacaaccagcagcagggggugaacaaccagcagcagggggugaacaaccagcagcagggggugaacaaccagcagcagggggcgaacgaccagcagcagggggcgaacaaccagcagcagggggugaacaaccagcagcagggggcgaacgaccagcagcagggggugaacaaccagcagcagggggcgaacgaccagcagcagggggcgaacaaccagcagcagggggcgaacaaccagcagcagggggugaacaaccagcaccagcaccaaggagggaacaaccagcagcagggggcgaacaaccagcaccagcaccaaggagggaacaaccagcaccaggagcaggugcgggagauggagcacgaggaggaaacgcaggggcagguaaaggacagggacaaaacaaucagggugcgaaugucccaaaugaaaaaguugugaaugauuaccuacacaaaauuagaucuagcguuaccaccgaguggacuccaugcaguguaaccuguggaaaugguguaagaauuagaagaagacagaaugcugguaauaaaaaggcagaggaccuuacuauggaugaccuugagguggaagcuuguguaauggauaagugcgcuggcauauuuaacguugugaguaauucauuaggguuagucauauuguuaguccuagcauuauucaauuaa

SEQ ID NO: 3202 - RNA, 993 nt, Artificial Sequence
  derived and/or modified CDS sequence (wt) from Pk(LT36)__ADN94511.1__CSP
augaggaacuucauucucuuggccgucuccuccauccugcugguggacuugcuccccacacacuucgaacauaauguagaucucuccagggccauaaauguaaauggaguaagcuucaauaauguagacaccaguucacuuggcgcagcacaggugagacaaagugcuagccgaggcagaggacuuggugagaagcgaaaagaaggagcugauaaagaaaagaaaaaagaaaaagaagaaaaaccaaagaagccaaaugaaaauaagcugaaacaaccagggggcgaacaaccagcagcagggggugaacaaccagcagcagggggcgaacaaccagcagcagggggcgaacaaccagcagcagggggcgaacaaccagcagcagggggugaacaaccagcagcagggggugaacaaccagcagcagggggcgaacaaccagcagcagggggcgaacaaccagcagcagggggcgaacaaccagcagcagggggcgaacaaccagcagcagggggugaacaaccagcaccagcaccaaggagggaacaaccagcagcagggggugaacaaccagcagcagggggugaacaaccagcaccagcaccaaggagggaacaaccagcaccagggggcgaacaaccagcaccaggagcaggugcgggagauggagcacgaggaggaaacccaggggcagguaaaggacagggacaaaacaaucagggugcgaaugucccaaaugaaaaaguugugaaugauuaccuacacaaaauuagaucuagcguuaccaccgaguggacuccaugcaguguaaccuguggaaaugguguaagaauuagaagaaaagcucaugcagauaagaaaaaggcagagaaccuuacuauggaugaccuugaaguggaagcuuguguaauggauaaaugcgcuggcauauuuaacguugugaguaauucauuaggguuagucauauuguuaguccuagcauuauucaauuaa

SEQ ID NO: 3203 - RNA, 993 nt, Artificial Sequence
  derived and/or modified CDS sequence (wt) from Pk(TB066)__AFG25475.1__CSP
augaagacuuuauuucucuuggccgucuccuccauccugcugguggacuuguuccccacacacuucgaacauaauguagaucucuccagggccauaaauguaaauggaguaagcuucaauaauguagacaccaguucacuuggcgcagcacagguaagacaaagugcuagccgaggcagaggacuuggugagaagcgaaaagaaggagcugauaaagaaaagaaaaaagaaaaagaagaaaaaccaaagaagccaaaugaaaauaagcugaaacaaccagggggcgaacaaccagcagcagggggugaacaaccagcagcagggggcgaacaaccagcagcagggggcgaacaaccagcagcagggggugaacaaccagcagcagggggcgaacaaccagcagcagggggcgaacaaccagcagcagggggcgaacaaccagcagcagggggcgaacaaccagcagcagggggcgaacaaccagcagcagggggugaacaaccagcagcagggggugaacaaccagcaccagcaccaaggagggaacaaccagcagcagggggugaacaaccagcagcagggggugaacaaccagcaccagcaccaaggagggaacaaccagcagcagggggugaacaaccagcaccaggagcaggugcgggagauggagcacgaggaggaaacccaggggcagguaaaggacagggacaaaacaaucagggugcgaaugucccaaaugaaaaaguugugaaugauuaccuacacaaaauuagaucuagcguuaccaccgaguggacuccaugcaguguaaccuguggaaaugguguaagaauuagaagaaaagcucaugcagauaagaaaaaggcagagaaccuuacuauggaugaccuugaaguggaagcuuguguaauggauaaaugcgcuggcauauuuaacguugugaguaauucauuaggguuagucauauuguuaguccuagcauuauucaauuaa

SEQ ID NO: 3204 - RNA, 993 nt, Artificial Sequence
  derived and/or modified CDS sequence (wt) from Pk(UM006C6)__AHF20642.1__CSP
augaagaacuucauucucuuggccgucuccuccauccugcugguggacuugcuccccacacacuucgaacauaauguagaucucuccagggccauaaauguaaauggaguaagcuucaauaauguagacaccaguucacuuggcgcagcacagguaagacaaagugcuagccgaggcagaggacuuggugagaagccaaaagaaggagcugauaaagaaaagaaaaaagaaaaagaagaagaaccaaagaagccaaauggaaauaagcugaaacaaccagcaccagggggcgaacaaccggcaccagggggcgaacaaccagcaccagggggcgaacaaccagcaccagggggcgaacaaccagcaccagggggcgaacaaccagcaccagggggcgaacaaccggcaccagggggcgaacaaccggcaccagggggcgaacaaccagcaccagggggcgaacaaccagcaccagggggcgaacaaccagcaccagggggcgaacaaccagcaccagggggcgaacaaccagcaccggggggugaacaaccagcaccagcaccaaggagggaacaaccagcaccagggggcgaacaaccagcaccagggggcgaacaaccagcaccaaggagggaacaaccagcaccaggagcaggugcgggagauggagcacgaggaggaaacgcaggggcagggaaaggacagggacaaaacaaucagggugcgagugucccaaaugaaaaaguugugaaugauuaccuacacaaaauuagaucuagcguuaccaccgaguggacuccaugcaguguaaccuguggaaaugguguaagaauuagaagaaaagcucaugcagauaagaaaaaggcagaggaccuuacuauggaugaccuugaaguggaagcuuguguaauggauaagugugcuggcauauuuaacguugugaguaauucauuaggguuagucauauuguuaguccuagcauuauucaauuaa

SEQ ID NO: 3205 - RNA, 984 nt, Artificial Sequence
  derived and/or modified CDS sequence (wt) from Pk(UM004C4)__AHF20641.1__CSP
augaagaacuucauucucuuggccgucuccuccauccugcugguggacuugcuccccacacacuucgaacauaauguagaucucuccagggccauaaauguaaauggaguaagcuucaauaauguagacaccaguucacuuggcgcagcacaggugagacaaagugcuagccgaggcagaggacuuggugagaagccaaaagaaggagcugauaaagaaaagaaaaaagaaaaaggaaaagaaaaagaagaagaaccaaagaagccaaaugaaaauaagcugaaacaaccgaaugaaggacaaccacaagcacagggugauggagcaaaugcaggacaaccacaagcacaaggagauggagcaaaugcaggacaaccacaagcacaaggagauggagcaaaugcaggacaaccacaagcacagggugauggagcaaaugcaggacaaccacaagcacagggugauggagcaaaugcaggacaaccacaagcacaaggagauggagcaaaugcaggacaaccacaagcacagggugauggagcaaaugcaggacaaccacaagcacagggugauagggcgaaugcaggacaaccacaagcacaaggagauggggcaaauguaccacgacaaggaagaaacgggggaggugcaccagcaggaggaaaugaggggaauaaacaagcaggaaaaggacagggacaaaacaaucagggugcgaaugccccaaaugaaaaaguugugaaugauuaccuacacaaaauuagaucuagcguuaccaccgaguggacuccaugcaguguaaccuguggaaaugguguaagaauuagaagaaaagcucaugcagguaauaaaaaggcagaggaccuuacuguggaugaccuugagguggaagcuuguguaauggauaagugcgcuggcauauuuaacguugugaguaauucauuaggcuuagucauauuguuaguccuagcauuauucaauuaa

SEQ ID NO: 3206 - RNA, 978 nt, Artificial Sequence
  derived and/or modified CDS sequence (wt) from Pk(UMHAC5)__AHF20632.1__CSP
augaagaacuucauucucuuggccgucuccuccauccugcugguggacuugcucccaacacacuucgaacauaauguagaucucuccagggccauaaauguaaauggaguaagcuucaauaauguagacaccaguucacuuggcgcagcacagguaagacaaagugcuagccgaggcagaggacuuggugagaaaccaaaagaaggagcugauaaagaaaagaaaaaagaaaaagaaaaagaagaagaaccaaagaagccaaaugaaaauaagcugaaacaaccggaaggaaauagggaagcuccaggacaaccggaaggaaauagggaagcuccaggacaaccggaaggaaauagggaagcuccaggacaaccggaaggaaauagggaagcuccaggacaaccggaaggaaauagggaagcuccaggacaaccggaaggaaauagggaagcuccaggacaaccggaaggaaauagggaagcuccaggacaaccggaaggaaauagggaagcuccagcacaaccggaaggaaauagggaagcuccaggacaaccggaaggaaauagggaagcuccagcacaaccggaaggaaauagggaaacuccagcacaaccacaaggaaaugggggggcaggucaagcacaaccacaaaaaaacgaaggaggaaacgcaggagcacggaaaggacagggacaaaacaaucagggugcgaaugccccaaaugaaaaaguuguaaaugauuaccuacagaaaauuagaucuagcguuaccaccgaguggacuccaugcaguguaaccuguggaaaugguguaagaauuaaaagaaaagcucaugcagauaagaaaaaggcagaggaccuuacuauggaugaccuugaaguggaagcuuguguaauggauaagugugcuggcauauuuaacguugugaguaauucauuaggguuagucauauuguuaguccuagcauuauucaauuaa

SEQ ID NO: 3207 - RNA, 978 nt, Artificial Sequence
  derived and/or modified CDS sequence (wt) from Pk(UMSYC3)__AHF20626.1__CSP
augaagaacuucauucucuuggccgucuccuccauccugcugguggacuugcucccaacacacuucgaacauaauguagaucucuccagggccauaaauguaaauggaguaagcuucaauaauguagacaccaguucacuuggcgcagcacagguaagacaaagugcuagccgaggcagaggacuuggugagaaaccaaaagaaggagcugauaaagaaaagaaaaaagaaaaagaaaaagaagaagaaccaaagaagccaaaugaaaauaagcugaaacaaccggaaggaaauagggaagcuccaggacaaccggaaggaaauagggaagcuccaggacaaccggaaggaaauagggaagcuccaggacaaccggaaggaaauagggaagcuccaggacaaccggaaggaaauagggaagcuccaggacaaccggaaggaaauagggaagcuccaggacaaccggaaggaaauagggaagcuccaggacaaccggaaggaaauagggaagcuccagcacaaccggaaggaaauagggaagcuccaggacaaccggaaggaaauagggaagcuccagcacaaccggaaggaaauagggaagcuccagcacaaccacaaggaaaugggggggcaggucaagcacaaccacaaaaaaacgaaggaggaaacgcaggagcacggaaaggacagggacaaaacaaucagggugcgaaugccccaaaugaaaaaguuguaaaugauuaccuacagaaaauuagaucuagcguuaccaccgaguggacuccaugcaguguaaccuguggaaaugguguaagaauuaaaagaaaagcucaugcagauaagaaaaaggcagaggaccuuacuauggaugaccuugaaguggaagcuuguguaauggauaagugugcuggcauauuuaacguugugaguaauucauuaggguuagucauauuguuaguccuagcauuauucaauuaa

SEQ ID NO: 3208 - RNA, 966 nt, Artificial Sequence
  derived and/or modified CDS sequence (wt) from Pk(LT33)__ADN94509.1__CSP
augaagaacuucauucucuuggccgucuccuccauccugcugguggacuugcuccccacacacuucgaacauaauguagaucucuccagggccauaaauguaaauggaguaagcuucaauaauguagacaccaguucacuuggcgcagcacaggugagacaaagugcuagccgaggcagaggacuuggugagaagcgaaaagaaggagcugauaaagaaaagaaaaaagaaaaagaagaagaaccaaagaagccaaaugaaaauaagcugaaacaaccggaacaagcaagagcagggggcgaacaaccagcagcagggggcgaacaaccagcagcagggggcgaacaaccagcagcagggggcgaacaaccagcagcagggggcgaacaaccagcagcagggggugaacaaccagcagcagggggcgaacaaccagcagcagggggcgaacaaccagcagcagggggugaacaaccagcagcagggggugaacaaccagcagcagggggugaacaaccagcaccagcaccaaggagggaacaaccagcagcagggggugaacaaccagcaccagcaccaaggagggaacaaccagcagcagggggcgaacaaccagcaccaggagcaggugcgggagauggagcacgaggaggaaacgcaggggcagguaaaggacagggacaaaacaaucagggugcgaaugucccaaaugaaaaaguugugaaugauuaccuacacaaaauuagaucuagcguuaccaccgaguggacuccaugcaguguaaccuguggaaaugguguaagaauuagaagaaaagcucaugcagauaagaaaaaggcagagaaccuuacuauggaugaccuugaaguggaagcuuguguaauggauaagugcgcuggcauauuuaacguugugaguaauucauuaggguuagucauauuguuaguccuagcauuauucaauuaa

SEQ ID NO: 3209 - RNA, 960 nt, Artificial Sequence
  derived and/or modified CDS sequence (wt) from Pk(UM0032C4)__AHF20653.1__CSP
augaagaacuucauucucuuggccgucuccuccauccugcugguggacuugcuccccacacacuucgaacauaauguagaucucuccagggccauaaauguaaauggaguaagcuucaauaauguagacaccaguucacuuggcgcagcacaggugagacaaagugcuagccgaggcagaggacuuggugagaagccaaaagaaggagcugauaaagaaaagaaaaaagaaaaagaaaaagaagaagaaccaaagaagccaaaugaaaauaagcugaaacaaccuaaugcagaaggugauggagcaaaugcacgacaaccuaaugcagaaggugauggagcaaaugcacgacaaccgaaugcagaaggugauggagcaaaugcacgacaaccuaaugcagaaggugauggagcaaaugcacgacaaccgaaugcagaaggugauggagcaaaugcacgacaaccuaaugcagaaggugauggagcaaaugcacgacaaccgaaugcagaaggugguggagcaaaugcacgacaaccacaggcagaaggugauggagcaaaugcacgacaaccacaagcacaaggagauggaggaaaugcacgacaaggaggaaacgggggaggugcaccagcaggaggaaaugaggggaauaaacaagcaggaaaaggacagggacaaaacaaucagggugcgaaugccccaaaugaaaaaguuguaaaugauuaccuacagaaaauuagaucuagcguuaccaccgaguggacuccaugcaguguaaucuguggaaaugguguaagaauuagaagaagagcucaugcagauaagaaaaaggcagaggaccuuacuauggaugaccuugaaguggaagcuuguguaauggauaagugugcuggcauauuuaacguugugaguaauucauuaggguucgucauauuguuaguccuagcauuauucaauuaa

SEQ ID NO: 3210 - RNA, 951 nt, Artificial Sequence
  derived and/or modified CDS sequence (wt) from Pk(SGEHIH1-im-Y09-80)__AFD97207.1__CSP
augaagaacuucauucucuuggccgucuccuccauccugcugguggacuugcuccccacacacuucgaacauaauguagaucucuccagggccauaaauguaaauggaguaagcuucaauaauguagacaccaguucacuuggcgcagcacagguaagacaaagugcuagccgaggcagaggacuuggugagaagccaaaagaaggagaugauaaagaaaagaaaaaagaaaaagaaaaagaagaagaaccaaagaagcuaaaugaaaauaauccgaaaaaaccgaaugaagaaggugauggagcuaagcugaaacaaccgaaugaagaaggugauggagcuaagcugaaacaaccgaaugcagaagguggagcaaaugcaggacaaccgaaugcagaagguggagcaaaugcaggacaaccgaaugcagaagguggagcaaaugcacgacaaccuaaugcagaagguggagcaaacgcaggacaaccgaaugcagaagguggagcaaaugcaggacaaccgaaugcagaagguggagcaaaugcacgacagccacaggcagaaggugguggagcaaaugcacgacagccacaggcagaaggugguggagcaaaugcacgacaaggaggaaaugaggggaauaaacaagcaggaaaaggacagggacaaaacaaucagggugcgaaugccccaaaugaaaaaguuguaaaugauuaccuacagaaaauuagaucuagcguuaccaucgaguggacuccaugcaguguaaccuguggaaaugguguaagaauuagaagaagagcucaugcagauaagaaaaaggcagaggaccuuacuauggaugaccuugaaguggaagcuuguguaauggauaagugugcuggcauauuuaacguugugaguaauucauuaggguuaguaauauuguuaguccuagcauuauucaauuaa

SEQ ID NO: 3211 - RNA, 939 nt, Artificial Sequence
  derived and/or modified CDS sequence (wt) from Pk(LT33)__ADN94514.1__CSP
augaggaacuucauucucuuggccgucuccuccauccugcugguggacuugcuccccacacacuucgaacauaauguagaucucuccagggccauaaauguaaauggaguaagcuucaauaauguagacaccaguucacuuggcgcagcacagguaagacaaagugcuagucgaggcagaggacuuggugagaagcgaaaagaaggagcugauaaagaaaagaaaaaagaaaaagaagaagaaccaaagaagccaaaugaaaauaagcugaaacaaccggaacaagcagcaccaggagcagggggagaacaaccagcaccaggagcagggggagaacgaccagcaccaggagcagggggagaacaaccagcaccaggagcagggggagaacaaccagcaccaggagcagggggagaacaaccagcaccaggagcagggggagaacaaccagcagcagggggugaacaaccagcagcagggggugaacaaccagcaccagcaccaaggagggaacaaccagcagcagggggugaacaaccagcaccagcaccaaggagggaacaaccagcagcagggggcgaacaaccagcaccaggagcaggugcgggagauggagcacgaggaggaaacgcaggggcagguaaaggacagggacaaaacaaucagggugcgaaugucccaaaugaaaaaguugugaaugauuaccuacacaaaauuagaucuagcguuaccaccgaguggacuccaugcaguguaaccuguggaaaugguguaagaauuagaagaaaagcucaugcagauaagaaaaaggcagagaaccuuacuauggaugaccuugaaguggaagcuuguguaauggauaagugcgcuggcauauuuaacguugugaguaauucauuaggguuagucauauuguuaguccuagcauuauucaauuaa

SEQ ID NO: 3212 - RNA, 894 nt, Artificial Sequence
  derived and/or modified CDS sequence (wt) from Pk(SGEHIWM26-Y09-98)__AFD97239.1__CSP
augaagaacuucauucucuuggccgucuccuccauccugcugguggacuugcuccccacacacuucgaacauaauguagaucucuccagggccauaaauguaaauggaguaagcuucaauaauguagacaccaguucacuuggcgcagcacaggugagacaaagugcuagccgaggcagaggacuuggugagaagccaaaagaaggagcugauaaagaaaagaaaaaagaaaaagaagaagaaccaaagaagccaaaugaaaauaagcugaaacaaccggauacaguaccagggggcgaagaaccagcaccaggaagggaacagccagcaccaggaagggaggaaccagcaccaggaagggaacagccagcaccaggaagggaagaaccagcaccaggaagggaacagccagcaccaggaagggaagaaccagcgccaggaagggaacagccagcaccaggaagggaacagccagcaccaggaagggaggaaccagcaccaggaagggaacaaccagcaccaggaagggaggaaccagcaccagcaccaggagcaggugcgggagauggagcacgaggaggaaacgcaggggcagggaaaggacagggacaaaacaaucagggugcaaaugucccaaaugaaaaaguugugaaugauuaccuacacaaaauuagaucuagcguuaccaccgaguggacuccaugcaguguaaccuguggaaaugguguaagaauuagaagaaaaggucaugcagguaauaaaaaggcagaggaccuuacuauggaugaccuugagguggaagcuuguguaauggauaagugcgcuggcauauuuaacguugugaguaauucauuaggcuuagucauauuguuaguccuagcauuauucaauuaa

SEQ ID NO: 3213 - RNA, 801 nt, Artificial Sequence
  derived and/or modified CDS sequence (wt) from Pk(KH296)__ADN94490.1__CSP
augaggaacuucauucucuuggccgucuccuccauccugcugguggacuugcuccccacacacuucgaacauaauguagaucucuccagggccauaaauguaaauggaguaagcuucaauaauguagacaccaguucacuuggcgcagcacagguaagacaaagugcuagccgaggcagaggacuuggugagaagcgaaaagaaggagcugauaaagaaaagaaaaaagaaaaagaagaagaaccaaagaagccaaaugaaaauaagcugaaacaaccggaacaagcagcaccaggagcagggggagaacaaccagcaccaggagcagggggagaacaaccagcaccaggagcagggggagaacaaccagcaccaggagcagggggagaacaaccagcaccaggagcagggggagaacaaccagcaccagcaccaaggagggaacaaccagcaccagcaccaggugcgggagauggagcacgaggaggaaacgcaggggcagguaaaggacagggacaaaacaaucagggugcgaaugucccaaaugaaaaaguugugaaugauuaccuacacaaaauuagaucuagcguuaccaccgaguggacuccaugcaguguaaccuguggaaaugguguaagaauuagaagaaaagcucaugcagauaagaaaaaggcagaggaccuuacuauggaugaccuugaaguggaagcuuguguaauggauaagugcgcuggcauauuuaacguugugaguaauucauuaggguuagucauauuguuaguccuagcauuauucaauuaa

SEQ ID NO: 3214 - RNA, 801 nt, Artificial Sequence
  derived and/or modified CDS sequence (wt) from Pk(LT33)__ADN94528.1__CSP
augaggaacuucauucucuuggccgucuccuccauccugcugguggacuugcuccccacacacuucgaacauaauguagaucucuccagggccauaaauguaaauggaguaagcuucaauaauguagacaccaguucacuuggcgcagcacagguaagacaaagugcuagucgaggcagaggacuuggugagaagcgaaaagaaggagcugauaaagaaaagaaaaaagaaaaagaagaagaaccaaagaagccaaaugaaaauaagcugaaacaaccggaacaagcagcaccaggagcagggggagaacaaccagcaccaggagcagggggagaacgaccagcaccaggagcagggggagaacaaccagcaccaggagcagggggagaacgaccagcaccaggagcagggggagaacaaccagcaccagcaccaaggagggaacaaccagcaccaggaccaggugcgggagauggagcacgaggaggaaacgcaggggcagguaaaggacagggacaaaacaaucagggugcgaaugucccaaaugaaaaaguugugaaugauuaccuacacaaaauuagaucuagcguuaccaccgaguggacuccaugcaguguaaccuguggaaaugguguaagaauuagaagaagacagaaugcugguaauaaaaaggcagaggaccuuacuauggaugaccuugagguggaagcuuguguaauggauaagugcgcuggcauauuuaacguugugaguaauucauuaggguuagucauauuguuaguccuagcauuauucaauuaa

SEQ ID NO: 3215 - RNA, 744 nt, Artificial Sequence
  derived and/or modified CDS sequence (wt) from Pk(SGEHIWM4-Y09-8)__AFD97222.1__CSP
augaagaacuucauucucuuggccgucuccuccauccugcugguggacuugcuccccacauacuucgaacauaauguagaucucuccagggccauaaauguaaauggagugagcuucaauaguguagacaccaguucacuuggcgcagcacagguaagacaaagugcuagccgaggcagaggacuuggugagaagccaaaagaaggagcugauaaagaaaagaaaaaagaaaaagaaaaagaagaagaaccaaagaagccaaaugaaaauaagcugaaacaaccacaaggaaaugggggggcaggucaagcacaaccacaaggaaaugggggggcaggucaagcacaaccggaaggaaauagggaagcuccagcacaaccacaaggaaauggaggggcaggucaagcacaaccacaaaaaaacgaaggaggaaacgcaggagcacggaaaggacagggacaaaacaaucagggugcgaaugccccaaaugaaaaaguuguaaaugauuaccuacagaaaauuagaucuagcguuaccaccgaguggacuccaugcaguguaaccuguggaaaugguguaagaauuagaagaagagcucaugcagauaagaaaaaggcagaggaccuuacuauggaugaccuugaaguggaagcuuguguaauggauaagugugcuggcauauuuaacguugugaguaauucauuaggguuagucauaucguuaguccuagcauuauucaauuaa

SEQ ID NO: 3216 - RNA, 720 nt, Artificial Sequence
  derived and/or modified CDS sequence (wt) from Pk(PT01)__ADN94512.1__CSP
augaggaacuucauucucuuggccgucuccuccauccugcugguggacuugcuccccacacacuucgaacauaauguagaucucuccagggccauaaauguaaauggaguaagcuucaauaauguagacaccaguucacuuggcgcagcacagguaagacaaagugcuagccgaggcagaggacuuggugagaagcgaaaagaaggagcugauaaagaaaagaaaaaagaaaaagaagaagaaccaaagaagccaaaugaaaauaagcugaaacaaccggaacaagcagcaccaggagcagggggagaacaaccagcaccaggagcagggggagaacaaccagcaccagcaccaaggagggaacaaccagcaccagcaccaggugcgggagauggagcacgaggaggaaacgcaggggcagguaaaggacagggacaaaacaaucagggugcgaaugucccaaaugaaaaaguugugaaugauuaccuacacaaaauuagaucuagcguuaccaccgaguggacuccaugcaguguaaccuguggaaaugguguaagaauuagaagaaaagcucaugcagauaagaaaaaggcagaggaccuuacuauggaugaccuugaaguggaagcuuguguaauggauaagugcgcuggcauauuuaacguugugaguaauucauuaggguuagucauauuguuaguccuagcauuauucaauuaa

SEQ ID NO: 3217 - RNA, 717 nt, Artificial Sequence
  derived and/or modified CDS sequence (wt) from Pk(LT53)__ADN94502.1__CSP
augaagaacuucauucucuuggccgucuccuccauccugcugguggacuugcuccccacacacuucgaacauaauguagaucucuccagggccauaaauguaaauggaguaagcuucaauaauguagacaccaguucacuuggcgcagcacagguaagacaaagugcuagccgaggcagaggacuuggugagaagccaaaagaaggagaugauaaagaaaagaaaaaagaaaaagaaaaagaagaagaaccaaagaaccuaaaugaaaauaagccgaaacaaccgaaugcagaaggugauggagcuaagccgaaacaaccgaaugcagaaggugauggagcaaaugcacgacagccacaggcagaaggugguggaggaaaugcacgacaaggaggaaaugaggggaauaaacaagcaggaaaaggacagggacaaaacaaucagggugcgaaugccccaaaugaaaaaguuguaaaugauuaccuacagaaaauuagaucuagcguuaccaccgaguggacuccaugcaguguaaccuguggaaaugguguaagaauuagaagaagagcucaugcagauaagaaaaaggcagaggaccuuacuauggaugaccuugaaguggaagcuuguguaauggauaagugugcuggcauauuuaacguugugaguaauucauuaggguuagucauauuguuaguccuagcauuauucaauuaa

SEQ ID NO: 3218 - RNA, 702 nt, Artificial Sequence
  derived and/or modified CDS sequence (wt) from Pk(SGEHIWM5-Y09-79)__AFD97229.1__CSP
augaagaacuucauucucuuggccgucuccuccauccugcugguggacuugcuccccacacacuucgaacauaauguagaucucuccagggccauaaauguaaauggaguaagcuucaauaauguagacaccaguucacuuggcgcagcacaggugagacaaagugcuagccgaggcagaggacuuggugagaggccaaaagaaggagcugauaaagaaaagaaaaaagaaaaagaaaaagaaaaagaagaaccaaagaagccaaaugaaaauaagcugaaacaaccggaacaaccagcagcaggagcagggggcgaacaaccagcaccagcaccaaggagggaacaaccagcaccaggagcaggugcgggagauggagcacgaggaggaaacgcaggggcagguaaaggacagggacaaaacaaucagggugcgaaugucccaaaugaaaaaguugugaaugauuaccuacacaaaauuagaucuagcguuaccaccgaguggacuccaugcaguguaaccuguggaaaugguguaagaauuagaagaagacagaaugcugguaauaaaaaggcagaggaccuuacuauggaugaccuugagguggaagcuuguguaauggauaagugcgcuggcauauuuaacguugugaguaauucauuaggcuuagucauauuguuagucuuagcauuauucaauuaa

SEQ ID NO: 3219 - RNA, 660 nt, Artificial Sequence
  derived and/or modified CDS sequence (wt) from Pk(PT01)__ADN94513.1__CSP
augaggaacuucauucucuuggccgucuccuccauccugcugguggacuugcuccccacacacuucgaacauaauguagaucucuccagggccauaaauguaaauggaguaagcuucaauaauguagacaccaguucacuuggcgcagcacagguaagacaaagugcuagccgaggcagaggacuuggugagaagcgaaaagaaggagcugauaaagaaaagaaaaaagaaaaagaagaagaaccaaagaagccaaaugaaaauaagcugaaacaaccggaacaagcagcaccaaggagggaacaaccagcaccagcaccaggugcgggagauggagcacgaggaggaaacgcaggggcagguaaaggacagggacaaaacaaucagggugcgaaugucccaaaugaaaaaguugugaaugauuaccuacacaaaauuagaucuagcguuaccaccgaguggacuccaugcaguguaaccuguggaaaugguguaagaauuagaagaaaagcucaugcagauaagaaaaaggcagaggaccuuacuauggaugaccuugaaguggaagcuuguguaauggauaagugcgcuggcauauuuaacguugugaguaauucauuaggguuagucauauuguuaguccuagcauuauucaauuaa

SEQ ID NO: 3220 - RNA, 1290 nt, Artificial Sequence
  derived and/or modified CDS sequence (wt) from Pm(408/Cameroon)__CAA05623.1__CSP
augaagaaguuaucugucuuagcaauauccucuuuuuuaauuguugauuuccucuucccuggauaucaucacaacucaaauuccaccaagucaagaaauuuaagugaguuguguuacaauaauguggacacuaaauuauuuaaugaguuagaagucagauauagcacgaaucaagaucauuucuauaacuauaauaagacaaucagauuacuuaaugaaaauaacaaugaaaaagauggaaaugugaccaaugaaagaaaaaaaaaacccacaaaagcuguugaaaauaaauugaaacaaccccccggagaugaugauggcgcaggaaaugaugcaggaaaugaugcaggaaaugcagcaggaaaugcagcaggaaaugcagcaggaaaugcagcaggaaaugcagcaggaaaugaugcaggaaaugcagcaggaaaugcagcaggaaaugcagcagguaacgcagcaggaaaugcagcaggaaaugaugcaggaaaugcagcaggaaaugaugcaggaaaugcagcagguaacgcagcaggaaaugcagcaggaaaugcagcaggaaaugcagcaggaaaugaugcaggaaaugcagcaggaaaugcagcaggaaaugcagcagguaacgcagcaggaaaugcagcaggaaaugcagcagguaacgcagcagguaacgcagcaggaaaugcagcaggaaaugcagcaggaaaugaugcaggaaaugcagcagguaacgcagcaggaaaugcagcaggaaaugcagcaggaaaugcagcagguaacgcagcagguaacgcagcaggaaaugcagcaggaaaugcagcagguaacgcagcaggaaaugcagcaggaaaugcagcagguaacgcagcaggaaaugcagcaggaaaugcagcagguaacgcagcaggaaaugcagcaggaaaugcagcaggaaaugaaaaagcgaaaaauaaggauaauaaaguggaugcaaauacgaauaaaaaggacaaccaggaagaaaauaaugauucgucuaaugguccaucugaagaacauauaaagaauuauuuagaaaguauucguaauaguauuacggaggaauggucaccauguaguguaacuuguggaagugguauaaggacuagaagaaagguugaugcaaaaaauaagaaaccugcagaauuaguuuuaagugaccuugaaacugaaauuuguucacuagauaaaugcuccaguauauuuaaugucguaaguaauucguuaggaauaguauuaguuuuagucuuaauacucuuucacuaa

SEQ ID NO: 3221 - RNA, 1290 nt, Artificial Sequence
  derived and/or modified CDS sequence (wt) from Pm(Uganda 1-CDC)__AAA29557.1__CSP
augaagaaguuaucugucuuagcaauauccucuuuuuuaauuguugauuuccucuucccuggauaucaucacaacucaaauuccaccaagucaagaaauuuaagugaguuguguuacaauaauguggacacuaaauuauuuaaugaguuagaagucagauauagcacgaaucaagaucauuucuauaacuauaauaagacaaucagauuacuuaaugaaaauaacaaugaaaaagauggaaaugugaccaaugaaagaaaaaaaaaacccacaaaagcuguugaaaauaaauugaaacaaccccccggagaugaugauggcgcaggaaaugaugcaggaaaugaugcaggaaaugaugcaggaaaugcagcaggaaaugcagcaggaaaugcagcaggaaaugcagcagguaacgcagcagguaacgcagcaggaaaugcagcaggaaaugcagcagguaacgcagcaggaaaugcagcaggaaaugaugcaggaaaugcagcagguaacgcagcaggaaaugcagcaggaaaugcagcaggaaaugcagcaggaaaugaugcaggaaaugcagcaggaaaugcagcaggaaaugcagcagguaacgcagcaggaaaugcagcaggaaaugcagcagguaacgcagcagguaacgcagcaggaaaugcagcaggaaaugcagcaggaaaugaugcaggaaaugcagcagguaacgcagcaggaaaugcagcaggaaaugcagcagguaacgcagcagguaacgcagcaggaaaugcagcaggaaaugcagcagguaacgcagcaggaaaugcagcaggaaaugcagcagguaacgcagcagguaacgcagcaggaaaugcagcaggaaaugcagcagguaacgcagcaggaaaugcagcaggaaaugcagcagguaacgcagcaggaaaugcagcaggaaaugaaaaagcgaaaaauaaggauaauaaaguggaugcaaauacgaauaaaaaggacaaccaggaagaaaauaaugauucgucuaaugguccaucugaagaacauauaaagaauuauuuagaaaguauucguaauaguauuacggaggaauggucaccauguaguguaacuuguggaagugguauaagggcuagaagaaagguuggugcaaaaaauaagaaaccugcagaauuaguuuuaagugaccuugaaacugaaauuuguucacuagauaaaugcuccaguauauuuaaugucguaaguaauucguuaggaauaguauuaguuuuagucuuaauacucuuucacuaa

SEQ ID NO: 3222 - RNA, 1170 nt, Artificial Sequence
  derived and/or modified CDS sequence (wt) from Pm(UG01)__SCN12386.1__CSP
augaagaaguuaucugucuuagcaauauccucuuuuuuaauuguugauuuccucuucccuggauaucaucacaacucaaauuccaccaagucaagaaauuuaagugaguuguguuacaauaauguggacacuaaauuauuuaaugaguuagaagucagauauagcacgaaucaagaucauuucuauaacuauaauaagacaaucagauuacuuaaugaaaauaacaaugaaaaagauggaaaugugaccaaugaaagaaaaaaaaaacccacaaaagcuguugaaaauaaauugaaacaaccccccggagaugaugauggcgcaggaaaugaugcaggaaaugaugcaggaaaugcagcaggaaaugcagcaggaaaugcagcaggaaaugcagcaggaaaugaugcaggaaaugcagcaggaaaugcagcaggaaaugcagcagguaacgcagcaggaaaugcagcaggaaaugcagcaggaaaugcagcaggaaaugcagcaggaaaugcagcaggaaaugcagcaggaaaugcagcaggaaaugcagcaggaaaugcagcaggaaaugcagcaggaaaugcagcaggaaaugcagcagcaggaaaugcagcaggaaaugcagcaggaaaugcagcaggugcagcagguaacgcagcaggaaaugcagcaggaaaugcagcaggaaaugcagcaggaaaugcagcagguaacgcagcaggaaaugcagcaggaaaugcagcagguaacgcagcaggaaaugcagcaggaaaugcagcagguaacgcagcaggaaaugcagcaggaaaugcagcaggaaaugaaaaagcgaaaaauaaggauaauaaaguggaugcaaauacgaauaaaaaggacaaccaggaagaaaauaaugauucgucuaaugguccaucugaagaacauauaaagaauuauuuagaaaguauucguaauaguauuacggaggaauggucaccauguaguguaacuuguggaagugguauaagggcuagaagaaagguugaugcaaaaaauaagaaaccugcagaauuaguuuuaagugaccuugaaacugaaauuuguucacuagauaaaugcuccaguauauuuaaugucguaaguaauucguuaggaauaguauuaguuuuagucuuaauacucuuucacuaa

SEQ ID NO: 3223 - RNA, 1170 nt, Artificial Sequence; identical to SEQ ID NO: 3222
  derived and/or modified CDS sequence (wt) from Pm()__SCN12386.1__CSP

SEQ ID NO: 3224 - RNA, 885 nt, Artificial Sequence
  derived and/or modified CDS sequence (wt) from Pm(PmlGA01)__SBT79431.1__CSP
augaagaaguuaucugucuuagcaauauccucuuuuuuaauuguugauuuccucuucccuggauaucaucacaacucaaauuccaccaagucaagaaauuuaagugaguuguguuacaauaauguggacacuaaauuauuuaaugaguuagaagucagauauagcacgaaucaagaucauuucuauaacuauaauaagacaaucagauuacuuaaugaaaauaacaaugcaaaagauggaaaugugaccaaugaaagaaaaaaaaaacccacaaaagcuguugaaaauaaauugaaacaaccccccggagaugaagaagaugacgcagaaaauggugaaggaaaugaaagaggaaauggugaaggaaaugaaagaggaaauggugaaggaaaugaaagaggaaauggugaaggaaaugaaagaggaaauggugcaggaaaugaaagaggaaaugaugcaggaaaugcagcaggaaacgcagcaggaaaugaugcaggaaaugcagcaggaaaugcagcaggaaacgcagcaggaaaugcagcaggaaaugaugcaggaaaugcagcagguaacgcagcaggaaaugcagcagguaacggagaaaauaaugauucgucuaaugguccaucugaagaacauauaaagaauuauuuagaaaguauucguaacaguauuacugaggaauggucaccauguaguguaacuuguggaaaugguauaagggcuagaagaaagguugaugcaaaaaauaagaaaccugcagaauuaguuuuaagugaccuugaaacugaaauuuguucacuagauaaaugcuccaguauauuuaaugucguaaguaauucguuaggaauaguauuaguuuuagucuuaauacucuuucacuaa

SEQ ID NO: 3225 - RNA, 1104 nt, Artificial Sequence
  derived and/or modified CDS sequence (wt) from Poc(contig1754)__SBT00176.1__CSP
augaggaacuuggccauuuucgccgugucagcguuuuuauuugcugacucucgauacccuguauaugcacacaauggaaauuccacggaaggaagaaaauuaaaugaguuguguuauaauaauguggaccuuuacaauaccuuauuuaaugaauuagacguaggaucaaguacaaaccaagcauuuuuccuuaacagcaagaaaacacuuagauuacuuaaugaaaacccaaaagaaaacaaaaaaaaaagaaaagaugauaaaaaaccgguugagaauaaauugaagcaaggagagagagaaaaugauccaccagcaccacgaggugaagguaacccaccagcaccacaaggugaagguaacccaccagcaccacaaggcgaagguaacccaccagcaccacaaggugaagguaacccaccagcaccacaaggugaagguaacccaccagcaccacgaggcgaagguaacccaccagcaccacaaggugaagguaacccaccagcaccacaaggugaagguaacccaccagcaccacaaggcgaagguaacccaccagcaccacgaggcgaagguaacccaccagcaccacaaggcgaagguaacccaccagcaccacaaggugaagguaacccaccagcaccacaaggcgaagguaauccaccagcagcacaaggcgaagguaauccaccagcagcacaagguaaugguaacccaccagcagcacaagguaaugguaacccaccagcagcacaagguaaugguaacccaccagcaccagcaggaaaagggaaaaaugaaaaucagaaagaaaaggaagagaaaaaugcagcaaacaauccuccaucggaagaugauauaaagaaguauauagauaagauuaggaaugauauaacugaaaacuggucaccauguagcguuacaugugguuuuggaguaaggguuagaagaaaggcaggugcaagugcuaagaaagcccaagaauuaacucuaagugaucuugagacagaaauuugcaaaauagaaaauugcuccaguauauuuaauguugugaguaauucauuaggacuaguuaucuucuuauuccuaguauucuuucauuaa

SEQ ID NO: 3226 - RNA, 888 nt, Artificial Sequence
  derived and/or modified CDS sequence (wt) from Poc(GH01)__SBT84923.1__CSP
augaggaacuuggccauuuucgccgugucagcguuuuuauuugcugacucucgauacccuguauaugcacacaauggaaauuccacggaaggaagaaaauuaaaugaguuguguuauaauaauguggaccuuuacaauaccuuauuuaaugaauuagacguaggaucaaguacaaaccaagcauuuuuccuuaacagcaagaaaacacuuagauuacuuaaugaaaacccaaaagaaaacaaaaaaaaaagaaaagaugauaaaaaaccgguugagaauaaauugaagcaaggagagagagaaaaugauccaccagcaccacaaggugaagguaacccaccagcaccacaaggugaagguaacccaccagcaccacaaggcgaagguaacccaccagcaccacaaggugaagguaacccaccagcaccacaaggcgaagguaauccaccagcagcacaaggcgaagguaauccaccagcagcacaagguaaugguaacccaccagcagcacaagguaaugguaacccaccagcagcacaagguaaugguaacccaccagcaccagcaggaaaagggaaaaaugaaaaucagaaagaaaaggaagagaaaaaugcagcaaacaauccuccaucggaagaugauauaaagaaguauauagauaagauuaggaaugauauaacugaaaacuggucaccauguagcguuacaugugguuuuggaguaaggguuagaagaaaggcaggugcaagugcuaagaaagcccaagaauuaacucuaagugaucuugagacagaaauuugcaaaauagaaaauugcuccaguauauuuaauguugugaguaauucauuaggacuaguuaucuucuuauuccuaguauucuuucauuaa

SEQ ID NO: 3227 - RNA, 828 nt, Artificial Sequence
  derived and/or modified CDS sequence (wt) from Poc(contig251)__SBS83173.1__CSP
augaggaacuuggccauuuucgccgugucagcguuuuuauuugcugacucucgauacccuguauaugcacacaauggaaauuccacggaaggaagaaaauuaaaugaguuguguuauaauaauguggaccuuuacaauaccuuauuuaaugaauuagacguaggaucaaguacaaaccaagcauuuuuccuuaacagcaagaaaacacuuagauuacuuaaugaaaacccaaaagaaaacaaaaaaaaaagaaaagaugauaaaaaaccgguugagaauaaauugaagcaaggagagagagaaaaugauccaccagcaccacgaggugaagguaacccaccagcaccacaaggugaagguaacccaccagcaccacaaggagaagguaacccaccagcaccacaaggugaagguaacccaccagcaccacaaggcgaagguaauccaccagcagcacaaggcgaagguaauccaccagcagcacaagguaacccaccagcaccagcaggaaaagggaaaaaugaaaaucagaaagaaaaggaagagaaaaaugcagcaaacaauccuccaucggaagaugauauaaagaaguauauagauaagauuaggaaugauauaacugaaaacuggucaccauguagcguuacaugugguuuuggaguaaggguuagaagaaaggcaggugcaagugcuaagaaagcccaagaauuaacucuaagugaucuugagacagaaauuugcaaaauagaaaauugcuccaguauauuuaauguugugaguaauucauuaggacuaguuaucuucuuauuccuaguauucuuucauuaa

SEQ ID NO: 3228 - RNA, 945 nt, Artificial Sequence
  derived and/or modified CDS sequence (wt) from Pow(contig93)__SBT35133.1__CSP
augaggaacuuggccauuuucgccgugucagcguuuuuauuugcugacucuggauacccuguauaugcacacaauggaaauuccauggaaggaagaaaauuaaaugaguuguguuauaauaauguggaccuuuacaauaccuuauuugauggauuagacguagaaucaaguacaaaccaagcauuuuuccuuaacagcaagaaaacacuuagauuacuuaaugaaaacccaaaagaaaacaaaaaaaaaagaaaagaugauaaaauaccgguugagaauaaauugaagcaaggagauagagaaaaugauccaccagcaccaguaccacaaggugacccaccagcaccaguaccacaaggugacccaccagcagcaguaccacaaggugacccaccagcaccaguaccacaaggcgacccaccugcaccacaaggugacccaccagcaccaguaccacaaggcgacccaccagcaccaguaccacaaggugacccaccagcaccaguaccacaaggcgacccaccugcaccagcaccacaaggagacccaccugcaccagcaccacaaggugacgguaaaccgccagcaccagcaccacaaggugacgguaaccaaccagcaccaggaaaaggaaaaagugaaaaucagaaagaaaaggaugagaaaaaugcagcaaacaauccuccaucggaagaugauauaaagaaguauauagauaagauuagaaaggauauaacugaaaacuggucaccauguaguguuacaugugguuugggaguacggguuagaagaaaggcuggugcaagugcuaagaaagcuaaugaauuaacuauaaaugacguugagacagaaauuuguaaaauugaaaauugcuccaguauauuuaauguuguuaguaauucaauaggacuagugaucuuuuuauuccuaguauucuuucauuaa

SEQ ID NO: 3229 - RNA, 891 nt, Artificial Sequence
  derived and/or modified CDS sequence (wt) from Pow(contig72)__SBT34702.1__CSP
augaggaacuuggccauuuucgccgugucagcguuuuuauuugcugacucuggauacccuguauaugcacacaauggaaauuccauggaaggaagaaaauuaaaugaguuguguuauaauaauguggaccuuuacaauaccuuauuugauggauuagacguagaaucaaguacaaaccaagcauuuuuccuuaacagcaagaaaacacuuagauuacuuaaugaaaacccaaaagaaaacaaaaaaaaaagaaaagaugauaaaauaccgguugagaauaaauugaagcaaggagauagagaaaaugauccaccagcaccaguaccacaaggugacccaccagcaccaguaccacaaggugacccaccagcaccaguaccacaaggugacccaccagcaccaguaccacaaggcgacccaccugcaccacaaggugacccaccagcaccaguaccacaaggcgacccaccugcaccagcaccacaaggagacccaccugcaccagcaccacaaggugacgguaaaccgccagcaccagcaccacaaggugacgguaaccaaccagcaccaggaaaaggaaaaagugaaaaucagaaagaaaaggaugagaaaaaugcagcaaacaauccuccaucggaagaugauauaaagaaguauauagauaagauuagaaaggauauaacugaaaacuggucaccauguaguguuacaugugguuugggaguacggguuagaagaaaggcuggugcaagugcuaagaaagcuaaugaauuaacuauaaaugacguugagacagaaauuuguaaaauugaaaauugcuccaguauauuuaauguuguuaguaauucaauaggacuagugaucuuuuuauuccuaguauucuuucauuaa

SEQ ID NO: 3230 - RNA, 1020 nt, Artificial Sequence
  derived and/or modified CDS sequence (wt) from Po(PowCR01)__SBT72933.1__CSP
augaggaacuuggccauuuucgccgugucagcguuuuuauuugcugacucuggauacccuguauaugcacacaauggaaauuccauggaaggaagaaaauuaaaugaguuguguuauaauaauguggaccuuuacaauaccuuauuugauggauuagacguagaaucaaguacaaaccaagcauuuuuccuuaacagcaagaaaacacuuagauuacuuaaugaaaacccaaaagaaaacaaaaaaaaaagaaaagaugauaaaauaccgguugagaauaaauugaagcaaggagauagagaaaaugauccaccagcaccaguaccacaaggugacccaccagcaccaguaccacaaggugacccaccagcagcaguaccacaaggugacccaccagcaccaguaccacaaggcgacccaccugcaccacaaggugacccaccagcaccaguaccacaaggcgacccaccagcaccaguaccacaaggugacccaccagcaccaguaccacaagguaacccaccagcaccaguaccacaaggugacccaccugcaccacaaggugacccaccagcaccaguaccacaaggcgacccaccugcaccagcaccacaaggagacccaccugcaccagcaccacaaggugacgguaaaccgccagcaccagcaccacaaggugacgguaaccaaccagcaccaggaaaaggaaaaagugaaaaucagaaagaaaaggaugagaaaaaugcagcaaacaauccuccaucggaagaugauauaaagaaguauauagauaagauuagaaaggauauaacugaaaacuggucaccauguaguguuacaugugguuugggaguacggguuagaagaaaggcuggugcaagugcuaagaaagcuaaugaauuaacuauaaaugacguugagacagaaauuuguaaaauugaaaauugcuccaguauauuuaauguuguuaguaauucaauaggacuagugaucuuuuuauuccuaguauucuuucauuaa

SEQ ID NO: 3231 - RNA, 1164 nt, Artificial Sequence
  derived and/or modified CDS sequence (wt) from Pv(Pt02.1)__ADB92551.1__CSP
augaagaacuucauucucuuggcuguuucuuccauccuguugguggacuuguuccccacgcacugcgggcacaauguagaucuguccaaggccauaaauuuaaauggaguaggcuucaauaauguagacgccaguucacuuggcgcggcacacguaggacaaagugcuagccgaggcagaggacuuggugagaacccagaugacgaggaaggagaugcuaaaaaaaaaaaggauggaaagaaagcagaaccaaaaaauccacgugaaaauaagcugaaacaaccagaagauggggcaggugaucaaccaggagcaaauggggcaggcaaucaaccaggagcaaauggggcaggcaaucaaccaggagcaaauggggcaggcaaucaaccaggagcaaauggggcuggcaaucaaccaggagcaaauggggcuggcaaucaaccaggagcaaauggggcagguaaucaaccaggagcaaauggagcaggcgaucaaccaggagcaaauggggcuggcaaucaaccaggagcaaauggggcagguaaucaaccaggagcaaauggagcaggugaucaaccaggagcaaauggggcuggcaaucaaccaggagcaaauggagcaggugaucaaccaggagcaaauggggccggcaaucaaccaggagcaaauggggcagguaaucaaccaggagcaaauggggcuggcaaucaaccaggagcaaauggggcagguaaucaaccaggagcaaauggagcagguggacaggcagcaggaggaaaugcugcaaacaaaaaggcaggagacgcaggagcagguggacaggcagcaggaggaaaugcugcaaacaaaaaggcaggagacgcaggagcaggacagggacaaaauaaugaaggugcgaaugccccaaaugaaaagucugugaaagaauaccuagauaaaguuagagcuaccguuggcaccgaauggacuccaugcaguguaaccuguggaguggguguaagagucagaagaagaguuaaugcagcuaacaaaaaaccagaggaucuuacuuugaaugaccuugagacugauguuuguacaauggauaagugugcuggcauauuuaacguugugaguaauucauuagggcuagucauauuguuaguccuagcauuauucaauuaa

SEQ ID NO: 3232 - RNA, 1134 nt, Artificial Sequence
  derived and/or modified CDS sequence (wt) from Pv(Salvador I (Sal-1))__XP_001613068.1__CSP
augaagaacuucauucucuuggcuguuucuuccauccuguugguggacuuguuccccacgcacugcgggcacaauguagaucuguccaaggccauaaauuuaaauggaguaaacuucaauaauguagacgccaguucacuuggcgcggcacacguaggacaaagugcuagccgaggcagaggacuuggugagaacccagaugacgaggaaggagaugcuaaaaaaaaaaaggauggaaagaaagcagaaccaaaaaauccacgugaaaauaagcugaaacaaccaggagacagagcagauggacagccagcaggagacagagcagauggacagccagcaggagacagagcagauggacagccagcaggugauagagcagauggacaaccagcaggagauagagcagcuggacagccagcaggagauagagcagauggacagccagcaggagacagagcagauggacagccagcaggagacagagcagauggacagccagcaggagacagagcagauggacagccagcaggugauagagcagcuggacaaccagcaggugauagagcagcuggacagccagcaggcgauagagcagauggacagccagcaggagauagagcagcuggacagccagcaggcgauagagcagauggacagccagcaggagauagagcagcuggacaaccagcaggagauagagcagauggacaaccagcaggagauagagcagcuggacagccagcaggagauagagcagcuggacagccagcaggagauagagcagcuggacaggcagcaggagauagagcagcuggacaggcagcaggaggaaacgcaggaggacagggacaaaauaaugaaggugcgaaugccccaaaugaaaagucugugaaagaauaccuagauaaaguuagagcuaccguuggcaccgaauggacuccaugcaguguaaccuguggaguggguguaagagucagaagaagaguuaaugcagcuaacaaaaaaccagaggaucuuacuuugaaugaccuugagacugauguuuguacaauggauaagugugcuggcauauuuaacguugugaguaauucauuagggcuagucauauuguuaguccuagcauuauucaauuaa

SEQ ID NO: 3233 - RNA, 1092 nt, Artificial Sequence
  derived and/or modified CDS sequence (wt) from Pv(P01)__SGX77278.1__CSP
augaagaacuucauucucuuggcuguuucuuccauccuguugguggacuuguuccccacgcacugcgggcacaauguagaucuguccaaggccauaaauuuaaauggaguaaacuucaauaauguagacgccaguucacuuggcgcggcacacguaggacaaagugcuagccgaggcagaggacuuggugagaacccagaugacgaggaaggagaugcuaaaaaaaaaaaggauggaaagaaagcagaaccaaaaaauccacgugaaaauaagcugaaacaaccagcaggugauagagcagauggacagccagcaggugauagagcagauggacagccagcaggugauagagcagauggacagccagcaggugauagagcagcuggacaaccagcaggugauagagcagauggacagccagcaggcgauagagcagcuggacaaccagcaggugauagagcagauggacagccagcaggagauagagcagcuggacagccagcaggcgauagagcagauggacagccagcaggagauagagcagcuggacaaccagcaggugauagagcagcuggacaaccagcaggugauagagcagauggacagccagcaggcgauagagcagcuggacaaccagcaggugauagagcagauggacaaccagcaggagauagagcagcuggacagccagcaggagauagagcagcuggacagccagcaggaaauggugcagguggacaggcagcaggaggaaacgcaggaggaaacgcaggaggaaacgcaggaggaaacgcaggaggacagggacaaaauaaugaaggugcgaaugccccaaaugaaaagucugugaaagaauaccuagauaaaguuagagcuaccguuggcaccgaauggacuccaugcaguguaaccuguggaguggguguaagagucagaagaagaguuaaugcagcuaacaaaaaaccagaggaucuuacuuugaaugaccuugagacugauguuuguacaauggauaagugugcuggcauauuuaacguugugaguaauucauuagggcuagucauauuguuaguccuagcauuauucaauuaa

SEQ ID NO: 3234 - RNA, 1188 nt, Artificial Sequence
  derived and/or modified CDS sequence (wt) from Pv(Cam22)__AHL69650.1__CSP
augaagaacuucauucucuuggcuguuucuuccauccuguugguggacuuguuccccacgcacugcgggcacaauguagaucuguccaaggccauaaauuuaaauggaguaggcuucaauaauguagacgccaguucacuuggcgcggcacacguaggacaaagugcuagccgaggcagaggacuuggugagaacccagaugacgaggaaggagaugcuaaaaaaaaaaaggauggaaagaaagcagaaccaaaaaauccacgugaaaauaagcugaaacaaccagaagauggggcaggcaaucaaccaggagcaaauggagcaggcaaucaaccaggagcaaauggggcaggcaaucaaccaggagcaaauggggcaggcaaucaaccaggagcaaauggggcuggcaaucaaccaggagcaaauggggcuggcaaucaaccaggagcaaauggggcuggcaaucaaccaggagcaaauggggcuggcaaucaaccaggagcaaauggagcagaugaucaaccaggagcaaauggggcaggcaaucaaccaggagcaaauggggcuggcaaucaaccaggagcaaauggggcagguaaucaaccaggagcaaauggagcaggugaucaaccaggagcaaauggggcuggcaaucaaccaggagcaaauggagcaggugaucaaccaggagcaaauggggccggcaaucaaccaggagcaaauggggccggcaaucaaccaggagcaaauggggcagguaaucaaccaggagcaaauggggcuggcaaucaaccaggagcaaauggggcagguaaucaaccaggagcaaauggagcagguggacaggcagcaggaggaaaugcugcaaacaaaaaggcaggagacgcaggagcaggacagggacaaaauaaugaaggugcgaaugccccaaaugaaaagucugugaaagaauaccuagauaaaguuagagcuaccguuggcaccgaauggacuccaugcaguguaaccuguggaguggguguaagagucagaagaagaguuaaugcagcuaacaaaaaaccagaggaucuuacuuugaaugaccuugagacugauguuuguacaauggauaagugugcuggcauauuuaacguugugaguaauucauuagggcuagucauauuguuaguccuagcauuauucaauuaa

SEQ ID NO: 3235 - RNA, 1188 nt, Artificial Sequence
  derived and/or modified CDS sequence (wt) from Pv(Cam29)__AGN05257.1__CSP
augaagaacuucauucucuuggcuguuucuuccauccuguugguggacuuguuccccacgcacugcgggcacaauguagaucuguccaaggccauaaauuuaaauggaguaggcuucaauaauguagacgccaguucacuuggcgcggcacacguaggacaaagugcuagccgaggcagaggacuuggugagaacccagaugacgaggaaggagaugcuaaaaaaaaaaaggauggaaagaaagcagaaccaaaaaauccacgugaaaauaagcugaaacaaccagaagauggggaaggcaaucaaccaggagcaaauggggcuggcaaucaaccaggagcaaauggggcuggcaaucaaccaggagcaaauggggcaggcaaucaaccaggagcaaauggggcuggcaaucaaccaggagcaaauggggcuggcaaucaaccaggagcaaauggggcuggcaaucaaccaggagcaaauggagcagaugaucaaccaggagcaaauggggcaggcaaucaaccaggagcaaauggggcuggcaaucaaccaggagcaaauggggcagguaaucaaccaggagcaaauggagcaggugaucaaccaggagcaaauggggccggcaaucaaccaggagcaaauggggccggcaaucaaccaggagcaaauggggccggcaaucaaccaggagcaaauggggccggcaaucaaccaggagcaaauggggccggcaaucaaccaggagcaaauggggcagguaaucaaccaggagcaaauggggcuggcaaucaaccaggagcaaauggggcagguaaucaaccaggagcaaauggagcagguggacaggcagcaggaggaaaugcugcaaacaaaaaggcaggagacgcaggagcaggacagggacaaaauaaugaaggugcgaaugccccaaaugaaaagucugugaaagaauaccuagauaaaguuagagcuaccguuggcaccgaauggacuccaugcaguguaaccuguggaguggguguaagagucagaagaagaguuaaugcagcuaacaaaaaaccagaggaucuuacuuugaaugaccuugagacugauguuuguacaauggauaagugugcuggcauauuuaacguugugaguaauucauuagggcuagucauauuguuaguccuagcauuauucaauuaa

SEQ ID NO: 3236 - RNA, 1188 nt, Artificial Sequence
  derived and/or modified CDS sequence (wt) from Pv(Cam9)__AGN05240.1__CSP
augaagaacuucauucucuuggcuguuucuuccauccuguugguggacuuguuccccacgcacugcgggcacaauguagaucuguccaaggccauaaauuuaaauggaguaggcuucaauaauguagacgccaguucacuuggcgcggcacacguaggacaaagugcuagccgaggcagaggacuuggugagaacccagaugacgaggaaggagaugcuaaaaaaaaaaaggauggaaagaaagcagaaccaaaaaauccacgugaaaauaagcugaaacaaccagaagauggggcaggcaaucaaccaggagcaaauggagcaggcaaucaaccaggagcaaauggagcaggcaaucaaccaggagcaaauggggcaggcaaucaaccaggagcaaauggggcaggcaaucaaccaggagcaaauggggcuggcaaucaaccaggagcaaauggggcuggcaaucaaccaggagcaaauggggcuggcaaucaaccaggagcaaauggagcagaugaucaaccaggagcaaauggggcaggcaaucaaccaggagcaaauggggcuggcaaucaaccaggagcaaauggggcagguaaucaaccaggagcaaauggagcaggugaucaaccaggagcaaauggggcuggcaaucaaccaggagcaaauggagcaggugaucaaccaggagcaaauggggccggcaaucaaccaggagcaaauggggccggcaaucaaccaggagcaaaugaggcagguaaucaaccaggagcaaauggggcuggcaaucaaccaggagcaaauggggcagguaaucaaccaggagcaaauggagcagguggacaggcagcaggaggaaaugcugcaaacaaaaaggcaggagacgcaggagcaggacagggacaaaauaaugaaggugcgaaugccccaaaugaaaagucugugaaagaauaccuagauaaaguuagagcuaccguuggcaccgaauggacuccaugcaguguaaccuguggaguggguguaagagucagaagaagaguuaaugcagcuaacaaaaaaccagaggaucuuacuuugaaugaccuugagacugauguuuguacaauggauaagugugcuggcauauuuaacguugugaguaauucauuagggcuagucauauuguuaguccuagcauuauucaauuaa

SEQ ID NO: 3237 - RNA, 1182 nt, Artificial Sequence
  derived and/or modified CDS sequence (wt) from Pv(Ca05)__ADB92533.1__CSP
augaagaacuucauucucuuggcuguuucuuccauccuguugguggacuuguuccccacgcacugcgggcacaauguagaucuguccaaggccauaaauuuaaauggaguaggcuucaauaauguagacgccaguucacuuggcgcggcacacguaggacaaagugcuagccgaggcagaggacuuggugagaacccagaugacgaggaaggagaugcuaaaaaaaaaaaggauggaaagaaagcagaaccaaaaaauccacgugaaaauaagcugaaacaaccagaagauggggcaggugaucaaccaggagcaaauggggcaggcaaucaaccaggagcaaauggggcaggcaaucaaccaggagcaaauggggcaggcaaucaaccaggagcaaauggggcaggcaaucaaccaggagcaaauggggcuggcaaucaaccaggagcaaauggggcuggcaaucaaccaggagcaaauggggcuggcaaucaaccaggagcaaauggagcagaugaucaaccaggagcaaauggggcaggcaaucaaccaggagcaaauggggcuggcaaucaaccaggagcaaauggggcagguaaucaaccaggagcaaauggagcaggugaucaaccaggagcaaauggggccggcaaucaaccaggagcaaauggagcaggugaucaaccaggagcaaauggggccggcaaucaaccaggagcaaauggggcagguaaucaaccaggagcaaauggggcuggcaaucaaccaggagcaaauggggcagguaaucaaccaggagcaaauggagcagguggacaggcagcaggaggaaaugcugcaaacaaaaaggcaggagacgcaggaggaaacgcaggaggaaacgcaggaggacagggacaaaauaaugaaggugcgaaugccccaaaugaaaagucugugaaagaauaccuagauaaaguuagagcuaccguuggcaccgaauggacuccaugcaguguaaccuguggaguggguguaagagucagaagaagaguuaaugcagcuaacaaaaaaccagaggaucuuacuuugaaugaccuugagacugauguuuguacaauggauaagugugcuggcauauuuaacguugugaguaauucauuagggcuagucauauuguuaguccuagcauuauucaauuaa

SEQ ID NO: 3238 - RNA, 1182 nt, Artificial Sequence
  derived and/or modified CDS sequence (wt) from Pv(Ch05)__ADB92538.1__CSP
augaagaacuucauucucuuggcuguuucuuccauccuguugguggacuuguuccccacgcacugcgggcacaauguagaucuguccaaggccauaaauuuaaauggaguaggcuucaauaauguagacgccaguucacuuggcgcggcacacguaggacaaagugcuagccgaggcagaggacuuggugagaacccagaugacgaggaaggagaugcuaaaaaaaaaaaggauggaaagaaagcagaaccaaaaaauccacgugaaaauaagcugaaacaaccagaagauggggcaggugaucaaccaggagcaaauggggcaggcaaucaaccaggugcaaauggggcaggcaaucaaccaggagcaaauggggcaggcaaucaaccaggagcaaauggggcaggcaaucaaccaggagcaaauggggcuggcaaucaaccaggagcaaauggggcuggcaaucaaccaggagcaaauggagcaggugaucaaccaggagcaaauggagcagaugaucaaccaggagcaaauggggcaggcaaucaaccaggagcaaauggggcagguaaucaaccaggagcaaauggagcaggugaucaaccaggagcaaauggagcaggugaucaaccaggagcaaauggggcuggcaaucaaccaggagcaaauggagcaggugaucaaccaggagcaaauggggccggcaaucaaccaggagcaaauggggcagguaaucaaccaggagcaaauggggcuggcaaucaaccaggagcaaauggggcagguaaucaaccaggagcaaauggagcagguggacaggcggcaggaggaaaugcugcaaacaaaaaggcaggagacgcaggaggaaacgcaggaggaaacgcaggaggacagggacaaaauaaugaaggugcgaaugccccaaaugaaaagucugugaaagaauaccuagauaaaguuagagcuaccguuggcaccgaauggacuccaugcaguguaaccuguggaguggguguaagagucagaagaagaguuaaugcagcuaacaaaaaaccagaggaucuuacuuugaaugaccuugagacugauguuuguacaauggauaagugugcuggcauauuuaacguugugaguaauucauuagggcuagucauauuguuaguccuagcauuauucaauuaa

SEQ ID NO: 3239 - RNA, 1173 nt, Artificial Sequence
  derived and/or modified CDS sequence (wt) from Pv(Cam16)__AHL69649.1__CSP
augaagaacuucauucucuuggcuguuucuuccauccuguugguggacuuguuccccacgcacugcgggcacaauguagaucuguccaaggccauaaauuuaaauggaguaggcuucaauaauguagacgccaguucacuuggcgcggcacacguaggacaaagugcuagccgaggcagaggacuuggugagaacccagaugacgaggaaggagaugcuaaaaaaaaaaaggauggaaagaaagcagaaccaaaaaauccacgugaaaauaagcugaaacaaccagaagauggggcaggcaaucaaccaggagcaaauggggcaggcaaucaaccaggagcaaauggggcaggcaaucaaccaggagcaaauggggcuggcaaucaaccaggagcaaauggggcuggcaaucaaccaggagcaaauggggcuggcaaucaaccaggagcaaauggagcagaugaucaaccaggagcaaauggggcaggcaaucaaccaggagcaaauggggcuggcaaucaaccaggagcaaauggggcagguaaucaaccaggagcaaauggggcuggcaaucaaccaggagcaaauggggcagguaaucaaccaggagcaaauggagcaggugaucaaccaggagcaaauggggcuggcaaucaaccaggagcaaauggagcaggugaucaaccaggagcaaauggggccggcaaucaaccaggagcaaauggggccggcaaucaaccaggagcaaaugaggcagguaaucaaccaggagcaaauggggcuggcaaucaaccaggagcaaauggggcagguaaucaaccaggagcaaauggagcagguggacaggcagcaggaggaaacgcaggaggaaacgcaggaggacagggacaaaauaaugaaggugcgaaugccccaaaugaaaagucugugaaagaauaccuagauaaaguuagagcuaccguuggcaccgaauggacuccaugcaguguaaccuguggaguggguguaagagucagaagaagaguuaaugcagcuaacaaaaaaccagaggaucuuacuuugaaugaccuugagacugauguuuguacaauggauaagugugcuggcauauuuaacguugugaguaauucauuagggcuagucauauuguuaguccuagcauuauucaauuaa

SEQ ID NO: 3240 - RNA, 1170 nt, Artificial Sequence
  derived and/or modified CDS sequence (wt) from Pv(Cam26)__AGN05254.1__CSP
augaagaacuucauucucuuggcuguuucuuccauccuguugguggacuuguuccccacgcacugcgggcacaauguagaucuguccaaggccauaaauuuaaauggaguaaacuucaauaauguagacgccaguucacuuggcgcggcacacguaggacaaagugcuagccgaggcagaggacuuggugagaacccagaugacgaggaaggagaugcuaaaaaaaaaaaggauggaaagaaagcagaaccaaaaaauccacgugaaaauaagcugaaacaaccaggagacagagcagauggacagccagcaggagacagagcagauggacagccagcaggagacagagcagauggacagccagcaggugauagagcagcuggacaaccagcaggugauagagcagauggacagccagcaggcgauagagcagcuggacagccagcaggcgauagagcagcuggacagccagcaggcgauagagcagauggacagccagcaggagauagagcagcuggacagccagcaggagauagagcagcuggacagccagcaggcgauagagcagauggacagccagcaggagauagagcagcuggacagccagcaggcgauagagcagauggacagccagcaggagauagagcagcuggacaaccagcaggugauagagcagcuggacaaccagcaggagauagagcagauggacaaccagcaggagauagagcagcuggacagccagcaggagauagagcagcuggacagccagcaggagauagagcagcuggacagccagcaggaaauggugcagguggacaggcagcaggaggaaaugcggcaaacaagaaggcagaagacgcaggaggaaacgcaggaggacagggacaaaauaaugaaggugcgaaugccccaaaugaaaagucugugaaagaauaccuagauaaaguuagagcuaccguuggcaccgaauggacuccaugcaguguaaccuguggaguggguguaagagucagaagaagaguuaaugcagcuaacaagaaaccagaggaucuuacuuugaaugacauugagacugauguuuguacaauggauaagugugcuggcauauuuaacguugugaguaauucauuagggcuagucauauuguuaguccuagcauuauucaauuaa

SEQ ID NO: 3241 - RNA, 1164 nt, Artificial Sequence
  derived and/or modified CDS sequence (wt) from Pv(Ch01)__ADB92534.1__CSP
augaagaacuucauucucuuggcuguuucuuccauccuguugguggacuuguuccccacgcacugcgggcacaauguagaucuguccaaggccauaaauuuaaauggaguaggcuucaauaauguagacgccaguucacuuggcgcggcacacguaggacaaagugcuagccgaggcagaggacuuggugagaacccagaugacgaggaaggagaugcuaaaaaaaaaaaggauggaaagaaagcagaaccaaaaaauccacgugaaaauaagcugaaacaaccagaagauggggcaggugaucaaccaggagcaaauggggcaggcaaucaaccaggagcaaauggggcaggcaaucaaccaggagcaaauggggcaggcaaucaaccaggagcaaauggggcaggcaaucaaccaggagcaaauggggcuggcaaucaaccaggagcaaauggggcagguaaucaaccaggagcaaauggggcaggcaaucaaccaggagcaaauggagcagaugaucaaccaggagcaaauggggcaggcaaucaaccaggagcaaauggggcaggugaucaaccaggagcaaauggggcuggcaaucaaccaggagcaaauggagcaggugaucaaccaggagcaaauggggccggcaaucaaccaggagcaaauggggcagguaaucaaccaggagcaaauggggcuggcaaucaaccaggagcaaauggggcagguaaucaaccaggagcaaauggagcagguggacaggcagcaggaggaaaugcugcaaacaaaaaggcaggagacgcaggagcagguggacaggcagcaggaggaaaugcugcaaacaaaaaggcaggagacgcaggagcaggacagggacaaaauaaugaaggugcgaaugccccaaaugaaaagucugugaaagaauaccuagauaaaguuagagcuaccguuggcaccgaauggacuccaugcaguguaaccuguggaguggguguaagagucagaagaagaguuaaugcagcuaacaaaaaaccagaggaucuuacuuugaaugaccuugagacugauguuuguacaauggauaagugugcuggcauauuuaacguugugaguaauucauuagggcuagucauauuguuaguccuagcauuauucaauuaa

SEQ ID NO: 3242 - RNA, 1164 nt, Artificial Sequence
  derived and/or modified CDS sequence (wt) from Pv(Nr04)__ADB92542.1__CSP
augaagaacuucauucucuuggcuguuucuuccauccuguugguggacuuguuccccacgcacugcgggcacaauguagaucuguccaaggccauaaauuuaaauggaguaggcuucaauaauguagacgccaguucacuuggcgcggcacacguaggacaaagugcuagccgaggcagaggacuuggugagaacccagaugacgaggaaggagaugcuaaaaaaaaaaaggauggaaagaaagcagaaccaaaaaauccacgugaaaauaagcugaaacaaccagaagauggggcaggugaucaaccaggagcaaauggggcaggcaaucaaccaggagcaaauggggcaggcaaucaaccaggagcaaauggggcaggcaaucaaccaggagcaaauggggcuggcaaucaaccaggagcaaauggggcuggcaaucaaccaggagcaaauggggcaggcaaucaaccaggagcaaauggggcaggcgaucaaccaggagcaaauggagcagacaaucaaccaggagcaaauggggcaggcaaucaaccaggagcaaauggggcagguaaucaaccaggagcaaauggggcuggcaaucaaccaggagcaaauggagcaggugaucaaccaggagcaaauggggcuggcaaucaaccaggagcaaauggagcaggugaucaaccaggagcaaauggggcuggcaaucaaccaggagcaaauggggcagguaaucaaccaggagcaaauggagcagguggacaggcagcaggaggaaaugcugcaaacaaaaaggcaggagacgcaggagcagguggacaggcagcaggaggaaaugcugcaaacaaaaaggcaggagacgcaggagcaggacagggacaaaauaaugaaggugcgaaugccccaaaugaaaagucugugaaagaauaccuagauaaaguuagagcuaccguuggcaccgaauggacuccaugcaguguaaccuguggaguggguguaagagucagaagaagaguuaaugcagcuaacaaaaaaccagaggaucuuacuuugaaugaccuugagacugauguuuguacaauggauaagugugcuggcauauuuaacguugugaguaauucauuagggcuagucauauuguuaguccuagcauuauucaauuaa

SEQ ID NO: 3243 - RNA, 1164 nt, Artificial Sequence
  derived and/or modified CDS sequence (wt) from Pv(Pt03)__ADB92553.1__CSP
augaagaacuucauucucuuggcuguuucuuccauccuguugguggacuuguuccccacgcacugcgggcacaauguagaucuguccaaggccauaaauuuaaauggaguaggcuucaauaauguagacgccaguucacuuggcgcggcacacguaggacaaagugcuagccgaggcagaggacuuggugagaacccagaugacgaggaaggagaugcuaaaaaaaaaaaggauggaaagaaagcagaaccaaaaaauccacgugaaaauaagcugaaacaaccagaagauggggcaggugaucaaccaggagcaaauggggcaggcaaucaaccaggagcaaauggggcaggcaaucaaccaggagcaaauggggcaggcaaucaaccaggagcaaauggagcaggcgaucaaccaggagcaaauggggcuggcaaucaaccaggagcaaauggggcaggugaucaaccaggagcaaauggggcaggcaaucaaccaggagcaaauggggcaggcaaucaaccaggagcaaauggggcaggcaaucaaccaggagcaaauggggcagguaaucaaccaggagcaaauggggcuggcaaucaaccaggagcaaauggagcaggugaucaaccaggagcaaauggggccggcaaucaaccaggagcaaauggggcagguaaucaaccaggagcaaauggggcuggcaaucaaccaggagcaaauggggcagguaaucaaccaggagcaaauggagcagguggacaggcagcaggaggaaaugcugcaaacaaaaaggcaggagacgcaggagcagguggacaggcagcaggaggaaaugcugcaaacaaaaaggcaggagacgcaggagcaggacagggacaaaauaaugaaggugcgaaugccccaaaugaaaagucugugaaagaauaccuagauaaaguuagagcuaccguuggcaccgaauggacuccaugcaguguaaccuguggaguggguguaagagucagaagaagaguuaaugcagcuaacaaaaaaccagaggaucuuacuuugaaugaccuugagacugauguuuguacaauggauaagugugcuggcauauuuaacguugugaguaauucauuagggcuagucauauuguuaguccuagcauuauucaauuaa

SEQ ID NO: 3244 - RNA, 1164 nt, Artificial Sequence
  derived and/or modified CDS sequence (wt) from Pv(Vc03)__ADB92546.1__CSP
augaagaacuucauucucuuggcuguuucuuccauccuguugguggacuuguuccccacgcacugcgggcacaauguagaucuguccaaggccauaaauuuaaauggaguaggcuucaauaauguagacgccaguucacuuggcgcggcacacguaggacaaagugcuagccgaggcagaggacuuggugagaacccagaugacgaggaaggagaugcuaaaaaaaaaaaggauggaaagaaagcagaaccaaaaaauccacgugaaaauaagcugaaacaaccagaagauggggcaggugaucaaccaggagcaaauggggcaggcaaucaaccaggagcaaauggggcaggcaaucaaccaggagcaaauggggcaggcaaucaaccaggagcaaauggggcuggcaaucaaccaggagcaaauggggcuggcaaucaaccaggagcaaauggggcagguaaucaaccaggagcaaauggagcaggugaucaaccaggagcaaauggagcagacgaucaaccaggagcaaauggggcaggcaaucaaccaggagcaaauggggcagguaaucaaccaggagcaaauggagcaggcaaucaaccaggagcaaauggagcaggugaucaaccaggagcaaauggggccggcaaucaaccaggagcaaauggggcagguaaucaaccaggagcaaauggggcuggcaaucaaccaggagcaaauggggcagguaaucaaccaggagcaaauggagcagguggacaggcagcaggaggaaaugcugcaaacaaaaaggcaggagacgcaggagcagguggacaggcagcaggaggaaaugcugcaaacaaaaaggcaggagacgcaggagcaggacagggacaaaauaaugaaggugcgaaugccccaaaugaaaagucugugaaagaauaccuagauaaaguuagagcuaccguuggcaccgaauggacuccaugcaguguaaccuguggaguggguguaagagucagaagaagaguuaaugcagcuaacaaaaaaccagaggaucuuacuuugaaugaccuugagacugauguuuguacaauggauaagugugcuggcauauuuaacguugugaguaauucauuagggcuagucauauuguuaguccuagcauuauucaauuaa

SEQ ID NO: 3245 - RNA, 1164 nt, Artificial Sequence
  derived and/or modified CDS sequence (wt) from Pv(Vc04)__ADB92547.1__CSP
augaagaacuucauucucuuggcuguuucuuccauccuguugguggacuuguuccccacgcacugcgggcacaauguagaucuguccaaggccauaaauuuaaauggaguaggcuucaauaauguagacgccaguucacuuggcgcggcacacguaggacaaagugcuagccgaggcagaggacuuggugagaacccagaugacgaggaaggagaugcuaaaaaaaaaaaggauggaaagaaagcagaaccaaaaaauccacgugaaaauaagcugaaacaaccagaagauggggcaggugaucaaccaggagcaaauggggcaggcaaucaaccaggagcaaauggggcaggcaaucaaccaggagcaaauggggcaggcaaucaaccaggagcaaauggggcuggcaaucaaccaggagcaaauggggcuggcaaucaaccaggagcaaauggggcuggcaaucaaccaggagcaaauggagcagaugaucaaccaggagcaaauggggcaggcgaucaaccaggagcaaauggggcaggcaaucaaccaggagcaaauggggcagguaaucaaccaggagcaaauggagcaggugaucaaccaggagcaaauggagcaggugaucaaccaggagcaaauggggccggcaaucaaccaggagcaaauggggcaggugaucaaccaggagcaaauggggcuggcaaucaaccaggagcaaauggggcagguaaucaaccaggagcaaauggagcagguggacaggcagcaggaggaaaugcugcaaacaaaaaggcaggagacgcaggagcagguggacaggcagcaggaggaaaugcugcaaacaaaaaggcaggagacgcaggagcaggacagggacaaaauaaugaaggugcgaaugccccaaaugaaaagucugugaaagaauaccuagauaaaguuagagcuaccguuggcaccgaauggacuccaugcaguguaaccuguggaguggguguaagagucagaagaagaguuaaugcagcuaacaaaaaaccagaggaucuuacuuugaaugaccuugagacugauguuuguacaauggauaagugugcuggcauauuuaacguugugaguaauucauuagggcuagucauauuguuaguccuagcauuauucaauuaa

SEQ ID NO: 3246 - RNA, 1164 nt, Artificial Sequence
  derived and/or modified CDS sequence (wt) from Pv(Vc05)__ADB92548.1__CSP
augaagaacuucauucucuuggcuguuucuuccauccuguugguggacuuguuccccacgcacugcgggcacaauguagaucuguccaaggccauaaauuuaaauggaguaggcuucaauaauguagacgccaguucacuuggcgcggcacacguaggacaaagugcuagccgaggcagaggacuuggugagaacccagaugacgaggaaggagaugcuaaaaaaaaaaaggauggaaagaaagcagaaccaaaaaauccacgugaaaauaagcugaaacaaccagaagauggggcaggugaucaaccaggagcaaauggggcaggcaaucaaccaggagcaaauggggcaggcaaucaaccaggagcaaauggggcaggcaaucaaccaggagcaaauggggcuggcaaucaaccaggagcaaauggggcuggcaaucaaccaggagcaaauggggcagguaaucaaccaggagcaaauggagcaggugaucaaccaggagcaaauggggcaggcaaucaaccaggagcaaauggggcaggcaaucaaccaggagcaaauggggcagguaaucaaccaggagcaaauggggcaggugaucaaccaggagcaaauggagcaggugaucaaccaggagcaaauggggccggcaaucaaccaggagcaaauggggcagguaaucaaccaggagcaaauggggcuggcaaucaaccaggagcaaauggggcagguaaucaaccaggagcaaauggagcagguggacaggcagcaggaggaaaugcugcaaacaaaaaggcaggagacgcaggagcagguggacaggcagcaggaggaaaugcugcaaacaaaaaggcaggagacgcaggagcaggacagggacaaaauaaugaaggugcgaaugccccaaaugaaaagucugugaaagaauaccuagauaaaguuagagcuaccguuggcaccgaauggacuccaugcaguguaaccuguggaguggguguaagagucagaagaagaguuaaugcagcuaacaaaaaaccagaggaucuuacuuugaaugaccuugagacugauguuuguacaauggauaagugugcuggcauauuuaacguugugaguaauucauuagggcuagucauauuguuaguccuagcauuauucaauuaa

SEQ ID NO: 3247 - RNA, 1161 nt, Artificial Sequence
  derived and/or modified CDS sequence (wt) from Pv(Ca03)__ADB92531.1__CSP
augaagaacuucauucucuuggcuguuucuuccauccuguugguggacuuguuccccacgcacugcgggcacaauguagaucuguccaaggccauaaauuuaaauggaguaggcuucaauaauguagacgccaguucacuuggcgcggcacacguaggacaaagugcuagccgaggcagaggacuuggugagaacccagaugacgaggaaggagaugcuaaaaaaaaaaaggauggaaagaaagcagaaccaaaaaauccacgugaaaauaagcugaaacaaccagaagauggggcaggugaucaaccaggagcaaauggggcaggcaaucaaccaggagcaaauggggcaggcaaucaaccaggagcaaauggggcaggcaaucaaccaggagcaaauggggcuggcaaucaaccaggagcaaauggggcuggcaaucaaccaggagcaaauggggcuggcaaucaaccaggagcaaauggagcagaugaucaaccaggagcaaauggagcagaugaucaaccaggagcaaauggggcaggcaaucaaccaggagcaaauggggcagguaaucaaccaggagcaaauggagcaggugaucaaccaggagcaaauggagcaggugaucaaccaggagcaaauggggcuggcaaucaaccaggagcaaauggagcaggugaucaaccaggagcaaauggggccggcaaucaaccaggagcaaauggggcagguaaucaaccaggagcaaauggggcuggcaaucaaccaggagcaaauggggcagguaaucaaccaggagcaaauggagcagguggacaggcagcaggaggaaaugcugcaaacaaaaaggcaggagacgcaggaggaggacagggacaaaauaaugaaggugcgaaugccccaaaugaaaagucugugaaagaauaccuagauaaaguuagagcuaccguuggcaccgaauggacuccaugcaguguaaccuguggaguggguguaagagucagaagaagaguuaaugcagcuaacaaaaaaccagaggaucuuacuuugaaugaccuugagacugauguuuguacaauggauaagugugcuggcauauuuaacguugugaguaauucauuagggcuagucauauuguuaguccuagcauuauucaauuaa

SEQ ID NO: 3248 - RNA, 1161 nt, Artificial Sequence
  derived and/or modified CDS sequence (wt) from Pv(Cam5)__AHL69647.1__CSP
augaagaacuucauucucuuggcuguuucuuccauccuguugguggacuuguuccccacgcacugcgggcacaauguagaucuguccaaggccauaaauuuaaauggaguaggcuucaauaauguagacgccaguucacuuggcgcggcacacguaggacaaagugcuagccgaggcagaggacuuggugagaacccagaugacgaggaaggagaugcuaaaaaaaaaaaggauggaaagaaagcagaaccaaaaaauccacgugaaaauaagcugaaacaaccagaagauggggcaggcaaucaaccaggagcaaauggagcaggcaaucaaccaggagcaaauggggcaggcaaucaaccaggagcaaauggggcaggcaaucaaccaggagcaaauggggcuggcaaucaaccaggagcaaauggggcuggcaaucaaccaggagcaaauggggcuggcaaucaaccaggagcaaauggagcagaugaucaaccaggagcaaauggggcaggcaaucaaccaggagcaaauggggcuggcaaucaaccaggagcaaauggggcagguaaucaaccaggagcaaauggagcaggugaucaaccaggagcaaauggggcuggcaaucaaccaggagcaaauggagcaggugaucaaccaggagcaaauggggccggcaaucaaccaggagcaaauggggccggcaaucaaccaggagcaaaugaggcagguaaucaaccaggagcaaauggggcuggcaaucaaccaggagcaaauggggcagguaaucaaccaggagcaaauggagcagguggacaggcagcaggaggaaaugcugcaaacaaaaaggcaggagacgcaggagcaggacagggacaaaauaaugaaggugcgaaugccccaaaugaaaagucugugaaagaauaccuagauaaaguuagagcuaccguuggcaccgaauggacuccaugcaguguaaccuguggaguggguguaagagucagaagaagaguuaaugcagcuaacaaaaaaccagaggaucuuacuuugaaugaccuugagacugauguuuguacaauggauaagugugcuggcauauuuaacguugugaguaauucauuagggcuagucauauuguuaguccuagcauuauucaauuaa

SEQ ID NO: 3249 - RNA, 1161 nt, Artificial Sequence
  derived and/or modified CDS sequence (wt) from Pv(Cam5)__AGN05236.2__CSP
augaagaacuucauucucuuggcuguuucuuccauccuguugguggacuuguuccccacgcacugcgggcacaauguagaucuguccaaggccauaaauuuaaauggaguaaacuucaauaauguagacgccaguucacuuggcgcggcacacguaggacaaagugcuagccgaggcagaggacuuggugagaacccagaugacgaggaaggagaugcuaaaaaaaaaaaggauggaaagaaagcagaaccaaaaaauccacgugaaaauaagcugaaacaaccaggagacagagcagauggacagccagcaggugauggagcagcuggacaaccagcaggugauggagcagcuggacaaccagcaggugauagagcagcuggacagccagcaggcgauagagcagcuggacagccagcaggcgauggagcagcuggacaaccagcaggugauggagcagcuggacaaccagcaggugauagagcagcuggacagccagcaggcgauagagcagcuggacagccagcaggcgauagagcagauggacagccagcaggagauagagcagcuggacagccagcaggagauagagcagcuggacagccagcaggcgauagagcagauggacagccagcaggagauagagcagcuggacagccagcaggagauagagcagcuggacagccagcaggcgauagagcagcuggacaaccagcaggagauagagcagauggacaaccagcaggagauagagcagcuggacagccagcaggagauagagcagcuggacagccagcaggagauagagcagcuggacagccagcaggaaauggugcagguggacaggcagcaggaggaaacgcaggaggacagggacaaaauaaugaaggugcgaaugccccaaaugaaaagucugugaaagaauaccuagauaaaguuagagcuaccguuggcaccgaauggacuccaugcaguguaaccuguggaguggguguaagagucagaagaagaguuaaugcagcuaacaaaaaaccagaggaucuuacuuugaaugaccuugagacugauguuuguacaauggauaagugugcuggcauauuuaacguugugaguaauucauuagggcuagucauauuguuaguccuagcauuauucaauuaa

SEQ ID NO: 3250 - RNA, 1161 nt, Artificial Sequence
  derived and/or modified CDS sequence (wt) from Pv(Cam7)__AGN05238.1__CSP
augaagaacuucauucucuuggcuguuucuuccauccuguugguggacuuguuccccacgcacugcgggcacaauguagaucuguccaaggccauaaauuuaaauggaguaggcuucaauaauguagacgccaguucacuuggcgcggcacacguaggacaaagugcuagccgaggcagaggacuuggugagaacccagaugacgaggaaggagaugcuaaaaaaaaaaaggauggaaagaaagcagaaccaaaaaauccacgugaaaauaagcugaaacaaccagaagauggggcaggcaaucaaccaggagcaaauggagcaggcaaucaaccaggagcaaauggggcaggcaaucaaccaggagcaaauggggcaggcaaucaaccaggagcaaauggggcuggcaaucaaccaggagcaaauggggcuggcaaucagccaggagcaaauggggcuggcaaucaaccaggagcaaauggagcagaugaucaaccaggagcaaauggggcaggcaaucaaccaggagcaaauggggcuggcaaucaaccaggagcaaauggggcuggcaaucaaccaggagcaaauggggcagguaaucaaccaggagcaaauggagcaggugaucaaccaggagcaaauggggcuggcaaucaaccaggagcaaauggagcaggugaucaaccaggagcaaauggggccggcaaucaaccaggagcaaaugaggcagguaaucaaccaggagcaaauggggcuggcaaucaaccaggagcaaauggggcagguaaucaaccaggagcaaauggagcagguggacaggcagcaggaggaaaugcugcaaacaaaaaggcaggagacgcaggagcaggacagggacaaaauaaugaaggugcgaaugccccaaaugaaaagucugugaaagaauaccuagauaaaguuagagcuaccguuggcaccgaauggacuccaugcaguguaaccuguggaguggguguaagagucagaagaagaguuaaugcagcuaacaaaaaaccagaggaucuuacuuugaaugaccuugagacugauguuuguacaauggauaagugugcuggcauauuuaacguugugaguaauucauuagggcuagucauauuguuaguccuagcauuauucaauuaa

SEQ ID NO: 3251 - RNA, 1161 nt, Artificial Sequence
  derived and/or modified CDS sequence (wt) from Pv(CSP27VK247)__ANS71607.1__CSP
augaagaacuucauucucuuggcuguuucuuccauccuguugguggacuuguuccccacgcacugcgggcacaauguagaucuguccaaggccauaaauuuaaauggaguaggcuucaauaauguagacgccaguucacuuggcgcggcacacguaggacaaagugcuagccgaggcagaggacuuggugagaacccagaugacgaggaaggagaugcuaaaaaaaaaaaggauggaaagaaagcagaaccaaaaaauccacgugaaaauaagcugaaacaaccagaagauggggcaggcaaucaaccaggagcaaauggagcaggugaucaaccaggagcaaauggggcaggcaaucaaccaggagcaaauggggcaggcaaucaaccaggagcaaauggggcuggcaaucaaccaggagcaaauggggcuggcaaucaaccaggagcaaauggggcuggcaaucaaccaggagcaaauggagcaggugaucaaccaggagcaaauggggcaggcaaucaaccaggagcaaauggggcuggcaaucaaccaggagcaaauggggcagguaaucaaccaggagcaaauggagcaggugaucaaccaggagcaaauggggcuggcaaucaaccaggagcaaauggagcaggugaucaaccaggagcaaauggggccggcaaucaaccaggagcaaauggggccggcaaucaaccaggagcaaauggggcagguaaucaaccaggagcaaauggggcuggcaaucaaccaggagcaaauggggcagguaaucaaccaggagcaaauggagcagguggacaggcagcaggaggaaaugcugcaaacaaaaaggcaggagacgcaggagcaggacagggacaaaauaaugaaggugcgaaugccccaaaugaaaagucugugaaagaauaccuagauaaaguuagaacuaccguuggcaccgaauggacuccaugcaguguaaccuguggaguggguguaagagucagaagaagaguuaaugcagcuaacaaaaaaccagaggaucuuacuuugaaugaccuugagacugauguuuguacaauggauaagugugcuggcauauuuaacguugugaguaauucauuagggcuagucauauuguuaguccuagcauuauucaauuaa

SEQ ID NO: 3252 - RNA, 1161 nt, Artificial Sequence
  derived and/or modified CDS sequence (wt) from Pv(CSP38VK247)__ANS71618.1__CSP
augaagaacuucauucucuuggcuguuucuuccauccuguugguggacuuguuccccacgcacugcgggcacaauguagaucuguccaaggccauaaauuuaaauggaguaaacuucaauaauguagacgccaguucacuuggcgcggcacacguaggacaaagugcuagccgaggcagaggacuuggugagaacccagaugacgaggaaggagaugcuaaaaaaaaaaaggauggaaagaaagcagaaccaaaaaauccacgugaaaauaagcugaaacaaccagaagauggagcaggugaucaaccaggagcaaauggggcaggcaaucaaccaggagcaaauggggcaggcaaucaaccaggagcaaauggggcaggcaaucaaccaggagcaaauggggcaggcaaucaaccaggagcaaauggggcuggcaaucaaccaggagcaaauggggcagguaaucaaccaggagcaaauggagcaggugaucaaccaggagcaaauggggcuggcaaucaaccaggagcaaauggagcaggugaucaaccaggagcaaauggggcuggcaaucaaccaggagcaaauggggcagguaaucaaccaggagcaaauggagcaggugaucaaccaggagcaaauggggcuggcaaucaaccaggagcaaauggagcaggugaucaaccaggagcaaauggggccggcaaucaaccaggagcaaauggggcagguaaucaaccaggagcaaauggggcuggcaaucaaccaggagcaaauggggcagguaaucaaccaggagcaaauggagcagguggacaggcagcaggaggaaaugcugcaaacaaaaaggcaggagacgcaggagcaggacagggacaaaauaaugaaggugcgaaugccccaaaugaaaagucugugaaagaauaccuagauaaaguuagagcuaccguuggcaccgaauggacuccaugcaguguaaccuguggaguggguguaagagucagaagaagaguuaaugcagcuaacaagaaaccagaggaucuuacuuugaaugacauugagacugauguuuguacaauggauaagugugcuggcauauuuaacguugugaguaauucauuagggcuagucauauuguuaguccuagcauuauucaauuaa

SEQ ID NO: 3253 - RNA, 1161 nt, Artificial Sequence
  derived and/or modified CDS sequence (wt) from Pv(CSP48VK247)__ANS71628.1__CSP
augaagaacuucauucucuuggcuguuucuuccauccuguugguggacuuguuccccacgcacugcgggcacaauguagaucuguccaaggccauaaauuuaaauggaguaggcuucaauaauguagacgccaguucacuuggcgcggcacacguaggacaaagugcuagccgaggcagaggacuuggugagaacccagaugacgaggaaggagaugcuaaaaaaaaaaaggauggaaagaaagcagaaccaaaaaauccacgugaaaauaagcugaaacaaccagaagauggggcaggcaaucaaccaggagcaaauggagcaggugaucaaccaggagcaaauggggcaggcaaucaaccaggagcaaauggggcaggcaaucaaccaggagcaaauggggcaggcaaucaaccaggagcaaauggggcaggcaaucaaccaggagcaaauggggcuggcaaucaaccaggagcaaauggagcaggugaucaaccaggagcaaauggggcaggcaaucaaccaggagcaaauggggcuggcaaucaaccaggagcaaauggggcagguaaucaaccaggagcaaauggagcaggugaucaaccaggagcaaauggggcuggcaaucaaccaggagcaaauggagcaggugaucaaccaggagcaaauggggccggcaaucaaccaggagcaaauggggccggcaaucaaccaggagcaaauggggcagguaaucaaccaggagcaaauggggcuggcaaucaaccaggagcaaauggggcagguaaucaaccaggagcaaauggagcagguggacaggcagcaggaggaaaugcugcaaacaaaaaggcaggagacgcaggagcaggacagggacaaaauaaugaaggugcgaaugccccaaaugaaaagucugugaaagaauaccuagauaaaguuagagcuaccguuggcaccgaauggacuccaugcaguguaaccuguggaguggguguaagagucagaagaagaguuaaugcagcuaacaaaaaaccagaggaucuuacuuugaaugaccuugagacugauguuuguacaauggauaagugugcuggcauauuuaacguugugaguaauucauuagggcuagucauauuguuaguccuagcauuauucaauuaa

SEQ ID NO: 3254 - RNA, 1161 nt, Artificial Sequence
  derived and/or modified CDS sequence (wt) from Pv(Nr01)__ADB92539.1__CSP
augaagaacuucauucucuuggcuguuucuuccauccuguugguggacuuguuccccacgcacugcgggcacaauguagaucuguccaaggccauaaauuuaaauggaguaggcuucaauaauguagacgccaguucacuuggcgcggcacacguaggacaaagugcuagccgaggcagaggacuuggugagaacccagaugacgaggaaggagaugcuaaaaaaaaaaaggauggaaagaaagcagaaccaaaaaauccacgugaaaauaagcugaaacaaccagaagauggggcaggugaucaaccaggagcaaauggggcaggcaaucaaccaggagcaaauggggcaggcaaucaaccaggagcaaauggggcaggcaaucaaccaggagcaaauggggcuggcaaucaaccaggagcaaauggggcuggcaaucaaccaggagcaaauggggcaggcaaucaaccaggagcaaauggagcaggugaucaaccaggagcaaauggagcagaugaucaaccaggagcaaauggggcaggcaaucaaccaggagcaaauggggcagguaaucaaccaggagcaaauggagcaggugaucaaccaggagcaaauggagcaggugaucaaccaggagcaaauggggcuggcaaucaaccaggagcaaauggagcaggugaucaaccaggagcaaauggggcuggcaaucaaccaggagcaaauggggcagguaaucaaccaggagcaaauggagcagguggacaaccaggagcaaauggggcagguaaucaaccaggagcaaauggagcagguggacaggcagcaggaggaaaugcugcaaacaaaaaggcaggagacgcaggagcaggacagggacaaaauaaugaaggugcgaaugccccaaaugaaaagucugugaaagaauaccuagauaaaguuagagcuaccguuggcaccgaauggacuccaugcaguguaaccuguggaguggguguaagagucagaagaagaguuaaugcagcuaacaaaaaaccagaggaucuuacuuugaaugaccuugagacugauguuuguacaauggauaagugugcuggcauauuuaacguugugaguaauucauuagggcuagucauauuguuaguccuagcauuauucaauuaa

SEQ ID NO: 3255 - RNA, 1161 nt, Artificial Sequence
  derived and/or modified CDS sequence (wt) from Pv(Nr02)__ADB92540.1__CSP
augaagaacuucauucucuuggcuguuucuuccauccuguugguggacuuguuccccacgcacugcgggcacaauguagaucuguccaaggccauaaauuuaaauggaguaggcuucaauaauguagacgccaguucacuuggcgcggcacacguaggacaaagugcuagccgaggcagaggacuuggugagaacccagaugacgaggaaggagaugcuaaaaaaaaaaaggauggaaagaaagcagaaccaaaaaauccacgugaaaauaagcugaaacaaccagaagauggggcaggugaucaaccaggagcaaauggggcaggcaaucaaccaggagcaaauggggcaggcaaucaaccaggagcaaauggggcaggcaaucaaccaggagcaaauggggcuggcaaucaaccaggagcaaauggggcuggcaaucaaccaggagcaaauggggcagguaaucaaccaggagcaaauggagcaggugaucaaccaggagcaaauggggcaggcgaucaaccaggagcaaauggggcaggcaaucaaccaggagcaaauggggcagguaaucaaccaggagcaaauggagcaggugaucaaccaggagcaaauggagcaggugaucaaccaggagcaaauggggccggcaaucaaccaggagcaaauggagcaggugaucaaccaggagcaaauggggcaggcaaucaaccaggagcaaauggggcagguaaucaaccaggagcaaauggagcuggaaaucaaccaggagcaaauggggcagguaaacagccaggagcaaauggagcagguggacaggcagcaggaggaaaugcugcaaacaaaaaggcaggagacgcaggagcaggacagggacaaaauaaugaaggugcgaaugccccaaaugaaaagucugugaaagaauaccuagauaaaguuagagcuaccguuggcaccgaauggacuccaugcaguguaaccuguggaguggguguaagagucagaagaagaguuaaugcagcuaacaaaaaaccagaggaucuuacuuugaaugaccuugagacugauguuuguacaauggauaagugugcuggcauauuuaacguugugaguaauucauuagggcuagucauauuguuaguccuagcauuauucaauuaa

SEQ ID NO: 3256 - RNA, 1161 nt, Artificial Sequence
  derived and/or modified CDS sequence (wt) from Pv(Nr05)__ADB92543.1__CSP
augaagaacuucauucucuuggcuguuucuuccauccuguugguggacuuguuccccacgcacugcgggcacaauguagaucuguccaaggccauaaauuuaaauggaguaggcuucaauaauguagacgccaguucacuuggcgcggcacacguaggacaaagugcuagccgaggcagaggacuuggugagaacccagaugacgaggaaggagaugcuaaaaaaaaaaaggauggaaagaaagcagaaccaaaaaauccacgugaaaauaagcugaaacaaccagaagauggggcaggugaucaaccaggagcaaauggggcaggcaaucaaccaggagcaaauggggcaggcaaucaaccaggagcaaauggggcaggcaaucaaccaggagcaaauggggcuggcaaucaaccaggagcaaauggggcuggcaaucaaccaggagcaaauggggcuggcaaucaaccaggagcaaauggggcuggcaaucaaccaggagcaaauggagcagaugaucaaccaggagcaaauggggcaggcaaucaaccaggagcaaauggggcuggcaaucaaccaggagcaaauggggcagguaaucaaccaggagcaaauggagcaggugaucaaccaggagcaaauggggcuggcaaucaaccaggagcaaauggagcaggugaucaaccaggagcaaauggggcuggcaaucaaccaggagcaaauggggcagguaaucaaccaggagcaaauggggcuggcaaucaaccaggagcaaauggugcaggcaaucagccaggagcaaauggagcagguggacaggcagcaggaggaaaugcugcaaacaaaaaggcaggagacgcaggagcaggacagggacaaaauaaugaaggugcgaaugccccaaaugaaaagucugugaaagaauaccuagauaaaguuagagcuaccguuggcaccgaauggacuccaugcaguguaaccuguggaguggguguaagagucagaagaagaguuaaugcagcuaacaaaaaaccagaggaucuuacuuugaaugaccuugagacugauguuuguacaauggauaagugugcuggcauauuuaacguugugaguaauucauuagggcuagucauauuguuaguccuagcauuauucaauuaa

SEQ ID NO: 3257 - RNA, 1161 nt, Artificial Sequence
  derived and/or modified CDS sequence (wt) from Pv(Vc01)__ADB92544.1__CSP
augaagaacuucauucucuuggcuguuucuuccauccuguugguggacuuguuccccacgcacugcgggcacaauguagaucuguccaaggccauaaauuuaaauggaguaggcuucaauaauguagacgccaguucacuuggcgcggcacacguaggacaaagugcuagccgaggcagaggacuuggugagaacccagaugacgaggaaggagaugcuaaaaaaaaaaaggauggaaagaaagcagaaccaaaaaauccacgugaaaauaagcugaaacaaccagaagauggggcaggugaucaaccaggagcaaauggggcaggcaaucaaccaggagcaaauggggcaggcaaucaaccaggagcaaauggggcaggcaaucaaccaggagcaaauggggcaggcaaucaaccaggagcaaauggggcuggcaaucaaccaggagcaaauggggcuggcaaucaaccaggagcaaauggggcuggcaaucaaccaggagcaaauggagcagaugaucaaccaggagcaaauggggcaggcaaucaaccaggagcaaauggggcuggcaaucaaccaggagcaaauggggcagguaaucaaccaggagcaaauggagcaggugaucaaccaggagcaaauggggcuggcaaucaaccaggagcaaauggagcaggugaucaaccaggagcaaauggggccggcaaucaaccaggagcaaauggggcagguaaucaaccaggagcaaauggggcuggcaaucaaccaggagcaaauggggcagguaaucaaccaggagcaaauggagcagguggacaggcagcaggaggaaaugcugcaaacaaaaaggcaggagacgcaggaggaggacagggacaaaauaaugaaggugcgaaugccccaaaugaaaagucugugaaagaauaccuagauaaaguuagagcuaccguuggcaccgaauggacuccaugcaguguaaccuguggaguggguguaagagucagaagaagaguuaaugcagcuaacaaaaaaccagaggaucuuacuuugaaugaccuugagacugauguuuguacaauggauaagugugcuggcauauuuaacguugugaguaauucauuagggcuagucauauuguuaguccuagcauuauucaauuaa

SEQ ID NO: 3258 - RNA, 1161 nt, Artificial Sequence
  derived and/or modified CDS sequence (wt) from Pv(Vc02)__ADB92545.1__CSP
augaagaacuucauucucuuggcuguuucuuccauccuguugguggacuuguuccccacgcacugcgggcacaauguagaucuguccaaggccauaaauuuaaauggaguaggcuucaauaauguagacgccaguucacuuggcgcggcacacguaggacaaagugcuagccgaggcagaggacuuggugagaacccagaugacgaggaaggagaugcuaaaaaaaaaaaggauggaaagaaagcagaaccaaaaaauccacgugaaaauaagcugaaacaaccagaagauggggcaggugaucaaccaggagcaaauggggcaggcaaucaaccaggagcaaauggggcaggcaaucaaccaggagcaaauggggcaggcaaucaaccaggagcaaauggggcaggcaaucaaccaggagcaaauggggcuggcaaucaaccaggagcaaauggggcuggcaaucaaccaggagcaaauggagcaggugaucaaccaggagcaaauggagcagaugaucaaccaggagcaaauggggcaggcaaucaaccaggagcaaauggggcagguaaucaaccaggagcaaauggagcaggugaucaaccaggagcaaauggagcaggugaucaaccaggagcaaauggggcuggcaaucaaccaggagcaaauggagcaggugaucaaccaggagcaaauggggccggcaaucaaccaggagcaaauggggcagguaaucaaccaggagcaaauggggcuggcaaucaaccaggagcaaauggggcagguaaucaaccaggagcaaauggagcagguggacaggcagcaggaggaaaugcugcaaacaaaaaggcaggagacgcaggagcaggacagggacaaaauaaugaaggugcgaaugccccaaaugaaaagucugugaaagaauaccuagauaaaguuagagcuaccguuggcaccgaauggacuccaugcaguguaaccuguggaguggguguaagagucagaagaagaguuaaugcagcuaacaaaaaaccagaggaucuuacuuugaaugaccuugagacugauguuuguacaauggauaagugugcuggcauauuuaacguugugaguaauucauuagggcuagucauauuguuaguccuagcauuauucaauuaa

SEQ ID NO: 3259 - RNA, 1158 nt, Artificial Sequence
  derived and/or modified CDS sequence (wt) from Pv(Cam46)__AHL69652.1__CSP
augaagaacuucauucucuuggcuguuucuuccauccuguugguggacuuguuccccacgcacugcgggcacaauguagaucuguccaaggccauaaauuuaaauggaguaggcuucaauaauguagacgccaguucacuuggcgcggcacacguaggacaaagugcuagccgaggcagaggacuuggugagaacccagaugacgaggaaggagaugcuaaaaaaaaaaaggauggaaagaaagcagaaccaaaaaauccacgugaaaauaagcugaaacaaccagaagauggggcaggcaaucaaccaggagcaaauggggcuggcaaucaaccaggagcaaauggggcuggcaaucaaccaggagcaaauggagcagaugaucaaccaggagcaaauggggcaggcaaucaaccaggagcaaauggggcuggcaaucaaccaggagcaaauggggcuggcaaucaaccaggagcaaauggggcuggcaaucaaccaggagcaaauggagcagaugaucaaccaggagcaaauggggcaggcaaucaaccaggagcaaauggggcuggcaaucaaccaggagcaaauggggcagguaaucaaccaggagcaaauggagcaggugaucaaccaggagcaaauggggccggcaaucaaccaggagcaaauggggccggcaaucaaccaggagcaaauggggccggcaaucaaccaggagcaaauggggccggcaaucaaccaggagcaaauggggccggcaaucaaccaggagcaaauggggcagguaaucaaccaggagcaaauggagcagguggacaggcagcaggaggaaacgcaggaggaaacgcaggaggaaacgcaggaggacagggacaaaauaaugaaggugcgaaugccccaaaugaaaagucugugaaagaauaccuagauaaaguuagagcuaccguuggcaccgaauggacuccaugcaguguaaccuguggaguggguguaagagucagaagaagaguuaaugcagcuaacaaaaaaccagaggaucuuacuuugaaugaccuugagacugauguuuguacaauggauaagugugcuggcauauuuaacguugugaguaauucauuagggcuagucauauuguuaguccuagcauuauucaauuaa

SEQ ID NO: 3260 - RNA, 1143 nt, Artificial Sequence
  derived and/or modified CDS sequence (wt) from Pv(Cam20)__AGN05250.1__CSP
augaagaacuucauucucuuggcuguuucuuccauccuguugguggacuuguuccccacgcacugcgggcacaauguagaucuguccaaggccauaaauuuaaauggaguaaacuucaauaauguagacgccaguucacuuggcgcggcacacguaggacaaagugcuagccgaggcagaggacuuggugagaacccagaugacgaggaaggagaugcuaaaaaaaaaaaggauggaaagaaagcagaaccaaaaaauccacgugaaaauaagcugaaacaaccaggagacagagcagauggacagccagcaggagacagagcagauggacagccagcaggagacagagcagauggacagccagcaggugauagagcagcuggacaaccagcaggugauagagcagauggacagccagcaggcgauagagcagcuggacagccagcaggcgauagagcagauggacagccagcaggagauagagcagcuggacagccagcaggcgauagagcagauggacagccagcaggagauagagcagcuggacagccagcaggcgauagagcagauggacagccagcaggagauagagcagcuggacaaccagcaggugauagagcagcuggacaaccagcaggagauagagcagcuggacaaccagcaggagauagagcagauggacaaccagcaggagauagagcagcuggacagccagcaggagauagagcagcuggacagccagcaggagauagagcagcuggacagccagcaggaaauggugcagguggacaggcagcaggaggaaaugcggcaaacaagaaggcagaagacgcaggaggaaacgcaggaggacagggacaaaauaaugaaggugcgaaugccccaaaugaaaagucugugaaagaauaccuagauaaaguuagagcuaccguuggcaccgaauggacuccaugcaguguaaccuguggaguggguguaagagucagaagaagaguuaaugcagcuaacaagaaaccagaggaucuuacuuugaaugacauugagacugauguuuguacaauggauaagugugcuggcauauuuaacguugugaguaauucauuagggcuagucauauuguuaguccuagcauuauucaauuaa

SEQ ID NO: 3261 - RNA, 1143 nt, Artificial Sequence
  derived and/or modified CDS sequence (wt) from Pv(Cam22)__AGN05252.1__CSP
augaagaacuucauucucuuggcuguuucuuccauccuguugguggacuuguuccccacgcacugcgggcacaauguagaucuguccaaggccauaaauuuaaauggaguaaacuucaauaauguagacgccaguucacuuggcgcggcacacguaggacaaagugcuagccgaggcagaggacuuggugagaacccagaugacgaggaaggagaugcuaaaaaaaaaaaggauggaaagaaagcagaaccaaaaaauccacgugaaaauaagcugaaacaaccaggagacagagcagauggacagccagcaggagacagagcagauggacagccagcaggagacagagcagauggacagccagcaggugauagagcagcuggacaaccagcaggugauagagcagauggacagccagcaggcgauagagcagcuggacagccagcaggcgauagagcagauggacagccagcaggagauagagcagcuggacagccagcaggagauagagcagcuggacagccagcaggcgauagagcagauggacagccagcaggagauagagcagcuggacagccagcaggcgauagagcagauggacagccagcaggagauagagcagcuggacaaccagcaggugauagagcagcuggacaaccagcaggagauagagcagauggacaaccagcaggagauagagcagcuggacagccagcaggagauagagcagcuggacagccagcaggagauagagcagcuggacagccagcaggaaauggugcagguggacaggcagcaggaggaaaugcggcaaacaagaaggcagaagacgcaggaggaaacgcaggaggacagggacaaaauaaugaaggugcgaaugccccaaaugaaaagucugugaaagaauaccuagauaaaguuagagcuaccguuggcaccgaauggacuccaugcaguguaaccuguggaguggguguaagagucagaagaagaguuaaugcagcuaacaagaaaccagaggaucuuacuuugaaugacauugagacugauguuuguacaauggauaagugugcuggcauauuuaacguugugaguaauucauuagggcuagucauauuguuaguccuagcauuauucaauuaa

SEQ ID NO: 3262 - RNA, 1143 nt, Artificial Sequence
  derived and/or modified CDS sequence (wt) from Pv(Cam36)__AHL69651.1__CSP
augaagaacuucauucucuuggcuguuucuuccauccuguugguggacuuguuccccacgcacugcgggcacaauguagaucuguccaaggccauaaauuuaaauggaguaaacuucaauaauguagacgccaguucacuuggcgcggcacacguaggacaaagugcuagccgaggcagaggacuuggugagaacccagaugacgaggaaggagaugcuaaaaaaaaaaaggauggaaagaaagcagaaccaaaaaauccacgugaaaauaagcugaaacaaccagcaggugauggagcagcuguacagccagcaggugauggagcagcuguacaaccagcaggugauggagcagauggacagccagcaggugauggagcagcuguacaaccagcaggugauggagcagcuggacaaccagcaggugauagagcagcuggacagccagcaggcaauagagcagcuggacaaccagcaggugauagagcagauggacagccagcaggagauagagcagcuggacagccagcaggagauagagcagcuggacagccagcaggcgauagagcagauggacagccagcaggagauagagcagcuggacagccagcaggagauagagcagcuggacagccagcaggcgauagagcagcuggacaaccagcaggagauagagcagauggacaaccagcaggagauagagcagcuggacagccagcaggagauagagcagcuggacagccagcaggagauagagcagcuggacaggcagcaggaggaaacgcaggaggaaacgcaggaggaaacgcaggaggaaacgcaggaggaaacgcaggaggaaacgcaggaggacagggacaaaauaaugaaggugcgaaugccccaaaugaaaagucugugaaagaauaccuagauaaaguuagagcuaccguuggcaccgaauggacuccaugcaguguaaccuguggaguggguguaagagucagaagaagaguuaaugcagcuaacaaaaaaccagaggaucuuacuuugaaugaccuugagacugauguuuguacaauggauaagugugcuggcauauuuaacguugugaguaauucauuagggcuagucauauuguuaguccuagcauuauucaauuaa

SEQ ID NO: 3263 - RNA, 1137 nt, Artificial Sequence
  derived and/or modified CDS sequence (wt) from Pv(Pt01.7)__ADB92550.1__CSP
augaagaacuucauucucuuggcuguuucuuccauccuguugguggacuuguuccccacgcacugcgggcacaauguagaucuguccaaggccauaaauuuaaauggaguaggcuucaauaauguagacgccaguucacuuggcgcggcacacguaggacaaagugcuagccgaggcagaggacuuggugagaacccagaugacgaggaaggagaugcuaaaaaaaaaaaggauggaaagaaagcagaaccaaaaaauccacgugaaaauaagcugaaacaaccagaagauggggcaggugaucaaccaggagcaaauggggcaggcaaucaaccaggagcaaauggggcaggcaaucaaccaggagcaaauggggcuggcaaucaaccaggagcaaauggggcuggcaaucaaccaggagcaaauggagcagaugaucaaccaggagcaaauggggcaggcaaucaaccaggagcaaauggggcuggcaaucaaccaggagcaaauggggcagguaaucaaccaggagcaaauggagcaggugaucaaccaggagcaaauggggcuggcaaucaaccaggagcaaauggagcaggugaucaaccaggagcaaauggggccggcaaucaaccaggagcaaauggggcagguaaucaaccaggagcaaauggggcuggcaaucaaccaggagcaaauggggcagguaaucaaccaggagcaaauggagcagguggacaggcagcaggaggaaaugcugcaaacaaaaaggcaggagacgcaggagcagguggacaggcagcaggaggaaaugcugcaaacaaaaaggcaggagacgcaggagcaggacagggacaaaauaaugaaggugcgaaugccccaaaugaaaagucugugaaagaauaccuagauaaaguuagagcuaccguuggcaccgaauggacuccaugcaguguaaccuguggaguggguguaagagucagaagaagaguuaaugcagcuaacaaaaaaccagaggaucuuacuuugaaugaccuugagacugauguuuguacaauggauaagugugcuggcauauuuaacguugugaguaauucauuagggcuagucauauuguuaguccuagcauuauucaauuaa

SEQ ID NO: 3264 - RNA, 1134 nt, Artificial Sequence
  derived and/or modified CDS sequence (wt) from Pv(Cam39)__AGN05267.1__CSP
augaagaacuucauucucuuggcuguuucuuccauccuguugguggacuuguuccccacgcacugcgggcacaauguagaucuguccaaggccauaaauuuaaauggaguaggcuucaauaauguagacgccaguucacuuggcgcggcacacguaggacaaagugcuagccgaggcagaggacuuggugagaacccagaugacgaggaaggagaugcuaaaaaaaaaaaggauggaaagaaagcagaaccaaaaaauccacgugaaaauaagcugaaacaaccagcaggugauagagcagauggacagccagcaggugauagagcagauggacagccagcaggugauagagcagauggacagccagcaggugauagagcagcuggacaaccagcaggugauagagcagauggacagccagcaggcgauagagcagcuggacaaccagcaggugauagagcagauggacagccagcaggagauagagcagcuggacagccagcaggcgauagagcagauggacagccagcaggagauagagcagcuggacaaccagcaggugauagagcagcuggacaaccagcaggugauagagcagcuggacaaccagcaggcgauagagcagauggacagccagcaggugauagagcagcuggacaaccagcaggugauagagcagauggacaaccagcaggagauagagcagcuggacagccagcaggagauagagcagcuggacagccagcaggagauagagcagcuggacagccagcaggaaauggugcagguggacaggcagcaggaggaaacgcaggaggaaacgcaggaggaaacgcaggaggacagggacaaaauaaugaaggugcgaaugccccaaaugaaaagucugugaaagaauaccuagauaaaguuagagcuaccguuggcaccgaauggacuccaugcaguguaaccuguggaguggguguaagagucagaagaagaguuaaugcagcuaacaaaaaaccagaggaucuuacuuugaaugaccuugagacugauguuuguacaauggauaagugugcuggcauauuuaacguugugaguaauucauuagggcuagucauauuguuaguccuagcauuauucaauuaa

SEQ ID NO: 3265 - RNA, 1134 nt, Artificial Sequence
  derived and/or modified CDS sequence (wt) from Pv(Nr03)__ADB92541.1__CSP
augaagaacuucauucucuuggcuguuucuuccauccuguugguggacuuguuccccacgcacugcgggcacaauguagaucuguccaaggccauaaauuuaaauggaguaaacuucaauaauguagacgccaguucacuuggcgcggcacacguaggacaaagugcuagccgaggcagaggacuuggugagaacccagaugacgaggaaggagaugcuaaaaaaaaaaaggauggaaagaaagcagaaccaaaaaauccacgugaaaauaagcugaaacaaccaggagacagagcagauggacagccagcaggagacagagcagauggacagccagcaggagauagagcagauggacagccagcaggugauagagcagauggacaaccagcaggagauagagcagauggacagccagcaggagauagagcagauggacagccagcaggagacagagcagauggacagccagcaggagacagagcagauggacagccagcaggagauagagcagauggacagccagcaggugauagagcagauggacaaccagcaggagauagagcagauggacagccagcaggagauagagcagauggacagccagcaggagauagagcagauggacagccagcaggagacagagcagauggacagccagcaggagacagagcagauggacagccagcaggagauagagcagauggacagccagcaggagauagagcagcuggacagccagcaggagauagagcagcuggacagccagcaggagauagagcagcuggacagccagcaggaaauggugcagguggacaggcagcaggaggaaacgcaggaggacagggacaaaauaaugaaggugcgaaugccccaaaugaaaagucugugaaagaauaccuagauaaaguuagagcuaccguuggcaccgaauggacuccaugcaguguaaccuguggaguggguguaagagucagaagaagaguuaaugcagcuaacaaaaaaccagaggaucuuacuuugaaugaccuugagacugauguuuguacaauggauaagugugcuggcauauuuaacguugugaguaauucauuagggcuagucauauuguuaguccuagcauuauucaauuaa

SEQ ID NO: 3266 - RNA, 1134 nt, Artificial Sequence
  derived and/or modified CDS sequence (wt) from Pv(Pt04.1)__ADB92554.1__CSP
augaagaacuucauucucuuggcuguuucuuccauccuguugguggacuuguuccccacgcacugcgggcacaauguagaucuguccaaggccauaaauuuaaauggaguaaacuucaauaauguagacgccaguucacuuggcgcggcacacguaggacaaagugcuagccgaggcagaggacuuggugagaacccagaugacgaggaaggagaugcuaaaaaaaaaaaggauggaaagaaagcagaaccaaaaaauccacgugaaaauaagcugaaacaaccaggagacagagcagauggacagccagcaggagacagagcagauggacagccagcaggugauagagcagauggacaaccagcaggagauagagcagcuggacagccagcaggagauagagcagcuggacagccagcaggagauagagcagauggacagccagcaggagacagagcagauggacagccagcaggagacagagcagauggacagccagcaggagacagagcagauggacagccagcaggugauagagcagcuggacaaccagcaggugauagagcagcuggacagccagcaggcgauagagcagauggacagccagcaggagauagagcagcuggacagccagcaggcgauagagcagauggacagccagcaggagauagagcagcuggacaaccagcaggagauagagcagauggacaaccagcaggagauagagcagcuggacagccagcaggagauagagcagcuggacagccagcaggagauagagcagcuggacaggcagcaggagauagagcagcuggacaggcagcaggaggaaacgcaggaggacagggacaaaauaaugaaggugcgaaugccccaaaugaaaagucugugaaagaauaccuagauaaaguuagagcuaccguuggcaccgaauggacuccaugcaguguaaccuguggaguggguguaagagucagaagaagaguuaaugcagcuaacaaaaaaccagaggaucuuacuuugaaugaccuugagacugauguuuguacaauggauaagugugcuggcauauuuaacguugugaguaauucauuagggcuagucauauuguuaguccuagcauuauucaauuaa

SEQ ID NO: 3267 - RNA, 1134 nt, Artificial Sequence; identical to SEQ ID NO: 3232
  derived and/or modified CDS sequence (wt) from Pv(Sal1)__ADB92528.1__CSP

SEQ ID NO: 3268 - RNA, 1131 nt, Artificial Sequence
  derived and/or modified CDS sequence (wt) from Pv(Cam27)__AGN05255.1__CSP
augaagaacuucauucucuuggcuguuucuuccauccuguugguggacuuguuccccacgcacugcgggcacaauguagaucuguccaaggccauaaauuuaaauggaguaggcuucaauaauguagacgccaguucacuuggcgcggcacacguaggacaaagugcuagccgaggcagaggacuuggugagaacccagaugacgaggaaggagaugcuaaaaaaaaaaaggauggaaagaaagcagaaccaaaaaauccacgugaaaauaagcugaaacaaccagcaggugcuagagcagauggacagccagcaggugauagagcagauggacagccagcaggugauagagcagauggacagccagcaggugauagagcagcuggacaaccagcaggugauagagcagauggacagccagcaggcgauagagcagcuggacaaccagcaggugauagagcagauggacagccagcaggagauagagcagcuggacagccagcaggcgauagagcagauggacagccagcaggagauagagcagcuggacaaccagcaggugauagagcagcuggacaaccagcaggugauagagcagauggacagccagcaggcgauagagcagcuggacaaccagcaggugauagagcagauggacaaccagcaggagauagagcagcuggacagccagcaggagauagagcagcuggacagccagcaggagauagagcagcuggacagccagcaggaaauggugcagguggacaggcagcaggaggaaacgcaggaggaaacgcaggaggaaacgcaggaggaaacgcaggaggaaacgcaggaggacagggacaaaauaaugaaggugcgaaugccccaaaugaaaagucugugaaagaauaccuagauaaaguuagagcuaccguuggcaccgaauggacuccaugcaguguaaccuguggaguggguguaagagucagaagaagaguuaaugcagcuaacaaaaaaccagaggaucuuacuuugaaugaccuugagacugauguuuguacaauggauaagugugcuggcauauuuaacguugugaguaauucauuagggcuagucauauuguuaguccuagcauuauucaauuaa

SEQ ID NO: 3269 - RNA, 1131 nt, Artificial Sequence
  derived and/or modified CDS sequence (wt) from Pv(Cam46)__AGN05273.2__CSP
augaagaacuucauucucuuggcuguuucuuccauccuguugguggacuuguuccccacgcacugcgggcacaauguagaucuguccaaggccauaaauuuaaauggaguaaacuucaauaauguagacgccaguucacuuggcgcggcacacguaggacaaagugcuagccgaggcagaggacuuggugagaacccagaugacgaggaaggagaugcuaaaaaaaaaaaggauggaaagaaagcagaaccaaaaaauccacgugaaaauaagcugaaacaaccagcaggugauagagcagauggacagccagcaggugauagagcagauggacagccagcaggugauagagcagauggacagccagcaggugauagagcagcuggacaaccagcaggugauagagcagauggacagccagcaggcgauagagcagcuggacaaccagcaggugauagagcagauggacagccagcaggagauagagcagcuggacagccagcaggcgauagagcagauggacagccagcaggagauagagcagcuggacaaccagcaggugauagagcagcuggacaaccagcaggugauagagcagauggacagccagcaggcgauagagcagcuggacaaccagcaggugauagagcagauggacaaccagcaggagauagagcagcuggacagccagcaggagauagagcagcuggacagccagcaggagauagagcagcuggacagccagcaggaaauggugcagguggacaggcagcaggaggaaacgcaggaggaaacgcaggaggaaacgcaggaggaaacgcaggaggaaacgcaggaggacagggacaaaauaaugaaggugcgaaugccccaaaugaaaagucugugaaagaauaccuagauaaaguuagagcuaccguuggcaccgaauggacuccaugcaguguaaccuguggaguggguguaagagucagaagaagaguuaaugcagcuaacaaaaaaccagaggaucuuacuuugaaugaccuugagacugauguuuguacaauggauaagugugcuggcauauuuaacguugugaguaauucauuagggcuagucauauuguuaguccuagcauuauucaauuaa

SEQ ID NO: 3270 - RNA, 1128 nt, Artificial Sequence
  derived and/or modified CDS sequence (wt) from Pv(CSP10VK210)__ANS71590.1__CSP
augaagaacuucauucucuuggcuguuucuuccauccuguugguggacuuguuccccacgcacugcgggcacaauguagaucuguccaaggccauaaauuuaaauggaguaaacuucaauaauguagacgccaguucacuuggcgcggcacacguaggacaaagugcuagccgaggcagaggacuuggugagaacccagaugacgaggaaggagaugcuaaaaaaaaaaaggauggaaagaaagcagaaccaaaaaauccacgugaaaauaagcugaaacaaccaggagacagagcagauggacagccagcaggagacagagcagauggacagccagcaggagacagagcagauggacagccagcaggagacagagcagauggacagccagcaggugauagagcagcuggacaaccagcaggugauagagcagcuggacagccagcaggcgauagagcagauggacagccagcaggagauagagcagcuggacagccagcaggcgauagagcagauggacagccagcaggagauagagcagcuggacagccagcaggagauagagcagcuggacaaccagcaggugauagagcagcuggacaaccagcaggagauagagcagauggacaaccagcaggagauagagcagcuggacagccagcaggagauagagcagcuggacagccagcaggagauagagcagcuggacagccagcaggagauagagcagcuggacagccagcaggaaauggugcagguggacaggcagcaggaggaaaugcggcaaacaagaaggcagaagacgcaggaggaaacgcaggaggaaacgcaggaggacagggacaaaauaaugaaggugcgaaugccccaaaugaaaagucugugaaagaauaccuagauaaaguuagagcuaccguuggcaccgaauggacuccaugcaguguaaccuguggaguggguguaagagucagaagaagaguuaaugcagcuaacaaaaaaccagaggaucuuacuuugaaugaccuugagacugauguuuguacaauggauaagugugcuggcauauuuaacguugugaguaauucauuagggcuagucauauuguuaguccuagcauuauucaauuaa

SEQ ID NO: 3271 - RNA, 1122 nt, Artificial Sequence
  derived and/or modified CDS sequence (wt) from Pv(Cam19)__AGN05249.1__CSP
augaagaacuucauucucuuggcuguuucuuccauccuguugguggacuuguuccccacgcacugcgggcacaauguagaucuguccaaggccauaaauuuaaauggaguaggcuucaauaauguagacgccaguucacuuggcgcggcacacguaggacaaagugcuagccgaggcagaggacuuggugagaacccagaugacgaggaaggagaugcuaaaaaaaaaaaggauggaaagaaagcagaaccaaaaaauccacgugaaaauaagcugaaacaaccagcaggugauagagcagauggacagccagcaggugauagagcagauggacagccagcaggugauagagcagauggacagccagcaggugauagagcagauggacagccagcaggugauagagcagauggacagccagcaggcgauagagcagcuggacaaccagcaggugauagagcagauggacagccagcaggagauagagcagcuggacagccagcaggcgauagagcagauggacagccagcaggagauagagcagauggacagccagcaggugauagagcagcuggacaaccagcaggugauagagcagauggacagccagcaggcgauagagcagcuggacaaccagcaggugauagagcagauggacaaccagcaggagauagagcagcuggacagccagcaggagauagagcagcuggacagccagcaggagauagagcagcuggacagccagcaggaaauggugcagguggacaggcagcaggaggaaacgcaggaggaaacgcaggaggaaacgcaggaggaaacgcaggagcaggacagggacaaaauaaugaaggugcgaaugccccaaaugaaaagucugugaaagaauaccuagauaaaguuagagcuaccguuggcaccgaauggacuccaugcaguguaaccuguggaguggguguaagagucagaagaagaguuaaugcagcuaacaaaaaaccagaggaucuuacuuugaaugaccuugagacugauguuuguacaauggauaagugugcuggcauauuuaacguugugaguaauucauuagggcuagucauauuguuaguccuagcauuauucaauuaa

SEQ ID NO: 3272 - RNA, 1119 nt, Artificial Sequence
  derived and/or modified CDS sequence (wt) from Pv(Cam10)__AGN05241.2__CSP
augaagaacuucauucucuuggcuguuucuuccauccuguugguggacuuguuccccacgcacugcgggcacaauguagaucuguccaaggccauaaauuuaaauggaguaggcuucaauaauguagacgccaguucacuuggcgcggcacacguaggacaaagugcuagccgaggcagaggacuuggugagaacccagaugacgaggaaggagaugcuaaaaaaaaaaaggauggaaagaaagcagaaccaaaaaauccacgugaaaauaagcugaaacaaccagcaggugauagagcagauggacagccagcaggugauagagcagauggacagccagcaggugauagagcagauggacagccagcaggugauagagcagcuggacaaccagcaggugauagagcagauggacagccagcaggcgauagagcagcuggacaaccagcaggugauagagcagauggacagccagcaggagauagagcagcuggacagccagcaggcgauagagcagauggacagccagcaggagauagagcagcuggacaaccagcaggugauagagcagcuggacaaccagcaggugauagagcagauggacagccagcaggcgauagagcagcuggacaaccagcaggugauagagcagauggacaaccagcaggagauagagcagcuggacagccagcaggagauagagcagcuggacagccagcaggagauagagcagcuggacagccagcaggaaauggugcagguggacaggcagcaggaggaaacgcaggaggaaacgcaggaggaaacgcaggaggaaacgcaggaggacagggacaaaauaaugaaggugcgaaugccccaaaugaaaagucugugaaagaauaccuagauaaaguuagagcuaccguuggcaccgaauggacuccaugcaguguaaccuguggaguggguguaagagucagaagaagaguuaaugcagcuaacaaaaaaccagaggaucuuacuuugaaugaccuugagacugauguuuguacaauggauaagugugcuggcauauuuaacguugugaguaauucauuagggcuagucauauuguuaguccuagcauuauucaauuaa

SEQ ID NO: 3273 - RNA, 1119 nt, Artificial Sequence
  derived and/or modified CDS sequence (wt) from Pv(Cam3)__AGN05234.2__CSP
augaagaacuucauucucuuggcuguuucuuccauccuguugguggacuuguuccccacgcacugcgggcacaauguagaucuguccaaggccauaaauuuaaauggaguaaacuucaauaauguagacgccaguucacuuggcgcggcacacguaggacaaagugcuagccgaggcagaggacuuggugagaacccagaugacgaggaaggagaugcuaaaaaaaaaaaggauggaaagaaagcagaaccaaaaaauccacgugaaaauaagcugaaacaaccagcaggugauagagcagauggacagccagcaggugauagagcagauggacagccagcaggugauagagcagauggacagccagcaggugauagagcagcuggacaaccagcaggugauagagcagauggacagccagcaggcgauagagcagcuggacaaccagcaggugauagagcagauggacagccagcaggagauagagcagcuggacagccagcaggcgauagagcagauggacagccagcaggagauagagcagcuggacaaccagcaggugauagagcagcuggacaaccagcaggugauagagcagauggacagccagcaggcgauagagcagcuggacaaccagcaggugauagagcagauggacaaccagcaggagauagagcagcuggacagccagcaggagauagagcagcuggacagccagcaggagauagagcagcuggacagccagcaggaaauggugcagguggacaggcagcaggaggaaacgcaggaggaaacgcaggaggaaacgcaggaggaaacgcaggaggacagggacaaaauaaugaaggugcgaaugccccaaaugaaaagucugugaaagaauaccuagauaaaguuagagcuaccguuggcaccgaauggacuccaugcaguguaaccuguggaguggguguaagagucagaagaagaguuaaugcagcuaacaaaaaaccagaggaucuuacuuugaaugaccuugagacugauguuuguacaauggauaagugugcuggcauauuuaacguugugaguaauucauuagggcuagucauauuguuaguccuagcauuauucaauuaa

SEQ ID NO: 3274 - RNA, 1119 nt, Artificial Sequence
  derived and/or modified CDS sequence (wt) from Pv(Cam30)__AGN05258.1__CSP
augaagaacuucauucucuuggcuguuucuuccauccuguugguggacuuguuccccacgcacugcgggcacaauguagaucuguccaaggccauaaauuuaaauggaguaaacuucaauaauguagacgccaguucacuuggcgcggcacacguaggacaaagugcuagccgaggcagaggacuuggugagaacccagaugacgaggaaggagaugcuaaaaaaaaaaaggauggaaagaaagcagaaccaaaaaauccacgugaaaauaagcugaaacaaccagcaggugauggagcagcuguacagccagcaggugauggagcagcuguacaaccagcaggugauggagcagauggacagccagcaggugauggagcagcuggacaaccagcaggugauagagcagauggacagccagcaggcgauagagcagcuggacaaccagcaggugauagagcagauggacagccagcaggagauagagcagcuggacagccagcaggcgauagagcagauggacagccagcaggagauagagcagcuggacaaccagcaggugauagagcagcuggacaaccagcaggugauagagcagauggacagccagcaggcgauagagcagcuggacaaccagcaggugauagagcagauggacaaccagcaggagauagagcagcuggacagccagcaggagauagagcagcuggacagccagcaggagauagagcagcuggacagccagcaggaaauggugcagguggacaggcagcaggaggaaacgcaggaggaaacgcaggaggaaacgcaggaggaaacgcaggaggacagggacaaaauaaugaaggugcgaaugccccaaaugaaaagucugugaaagaauaccuagauaaaguuagagcuaccguuggcaccgaauggacuccaugcaguguaaccuguggaguggguguaagagucagaagaagaguuaaugcagcuaacaaaaaaccagaggaucuuacuuugaaugaccuugagacugauguuuguacaauggauaagugugcuggcauauuuaacguugugaguaauucauuagggcuagucauauuguuaguccuagcauuauucaauuaa

SEQ ID NO: 3275 - RNA, 1119 nt, Artificial Sequence
  derived and/or modified CDS sequence (wt) from Pv(Cam43)__AGN05271.1__CSP
augaagaacuucauucucuuggcuguuucuuccauccuguugguggacuuguuccccacgcacugcgggcacaauguagaucuguccaaggccauaaauuuaaauggaguaggcuucaauaauguagacgccaguucacuuggcgcggcacacguaggacaaagugcuagccgaggcagaggacuuggugagaacccagaugacgaggaaggagaugcuaaaaaaaaaaaggauggaaagaaagcagaaccaaaaaauccacgugaaaauaagcugaaacaaccagcaggugauagagcagauggacagccagcaggugauagagcagauggacagccagcaggugauagagcagauggacagccagcaggugauagagcagauggacagccagcaggugauagagcagauggacagccagcaggcgauagagcagcuggacaaccagcaggugauagagcagauggacagccagcaggagauagagcagcuggacagccagcaggcgauagagcagauggacagccagcaggagauagagcagauggacagccagcaggugauagagcagcuggacaaccagcaggugauagagcagauggacagccagcaggcgauagagcagcuggacaaccagcaggugauagagcagauggacaaccagcaggagauagagcagcuggacagccagcaggagauagagcagcuggacagccagcaggaaauggugcagguggacaggcagcaggaggaaacgcaggaggaaacgcaggaggaaacgcaggaggaaacgcaggaggaaacgcaggaggaaacgcaggagcaggacagggacaaaauaaugaaggugcgaaugccccaaaugaaaagucugugaaagaauaccuagauaaaguuagagcuaccguuggcaccgaauggacuccaugcaguguaaccuguggaguggguguaagagucagaagaagaguuaaugcagcuaacaaaaaaccagaggaucuuacuuugaaugaccuugagacugauguuuguacaauggauaagugugcuggcauauuuaacguugugaguaauucauuagggcuagucauauuguuaguccuagcauuauucaauuaa

SEQ ID NO: 3276 - RNA, 1116 nt, Artificial Sequence
  derived and/or modified CDS sequence (wt) from Pv(Cam40)__AGN05268.1__CSP
augaagaacuucauucucuuggcuguuucuuccauccuguugguggacuuguuccccacgcacugcgggcacaauguagaucuguccaaggccauaaauuuaaauggaguaggcuucaauaauguagacgccaguucacuuggcgcggcacacguaggacaaagugcuagccgaggcagaggacuuggugagaacccagaugacgaggaaggagaugcuaaaaaaaaaaaggauggaaagaaaacagaaccaaaaaauccacgugaaaauaagcugaaacaaccaggagacagagcagauggacagccagcaggagacagagcagauggacagccagcaggugauagagcagcuggacaaccagcaggugauagagcagauggacagccagcaggcgauagagcagauggacagccagcaggcgauagagcagcuggacaaccagcaggugauagagcagauggacagccagcaggagauagagcagcuggacagccagcaggcgauagagcagauggacagccagcaggagauagagcagcuggacaaccagcaggugauagagcagcuggacaaccagcaggugauagagcagauggacagccagcaggcgauagagcagcuggacaaccagcaggugauagagcagauggacaaccagcaggagauagagcagcuggacagccagcaggagauagagcagcuggacagccagcaggagauagagcagcuggacagccagcaggaaauggugcagguggacaggcagcaggaggaaacgcaggaggaaacgcaggaggaaacgcaggaggaaacgcaggaggacagggacaaaauaaugaaggugcgaaugccccaaaugaaaagucugugaaagaauaccuagauaaaguuagagcuaccguuggcaccgaauggacuccaugcaguguaaccuguggaguggguguaagagucagaagaagaguuaaugcagcuaacaaaaaaccagaggaucuuacuuugaaugaccuugagacugauguuuguacaauggauaagugugcuggcauauuuaacguugugaguaauucauuagggcuagucauauuguuaguccuagcauuauucaauuaa

SEQ ID NO: 3277 - RNA, 1116 nt, Artificial Sequence
  derived and/or modified CDS sequence (wt) from Pv(CSP14VK210)__ANS71594.1__CSP
augaagaacuucauucucuuggcuguuucuuccauccuguugguggacuuguuccccacgcacugcgggcacaauguagaucuguccaaggccauaaauuuaaauggaguaaacuucaauaauguagacgccaguucacuuggcgcggcacacguaggacaaagugcuagccgaggcagaggacuuggugagaacccagaugacgaggaaggagaugcuaaaaaaaaaaaggauggaaagaaagcagaaccaaaaaauccacgugaaaauaagcugaaacaaccaggagacagagcagauggacagccagcaggagacagagcagauggacagccagcaggugauagagcagcuggacaaccagcaggugauagagcagauggacagccagcaggcgauagagcagcuggacagccagcaggcgauagagcagauggacagccagcaggagauagagcagcuggacagccagcaggcgauagagcagauggacagccagcaggagauagagcagcuggacagccagcaggcgauagagcagauggacagccagcaggagauagagcagcuggacaaccagcaggugauagagcagcuggacaaccagcaggagauagagcagauggacaaccagcaggagauagagcagauggacaaccagcaggagauagagcagcuggacagccagcaggagauagagcagcuggacagccagcaggagauagagcagcuggacagccagcaggaaauggugcagguggacaggcagcaggaggaaaugcggcaaacaagaaggcagaagacgcaggaggaaacgcaggaggacagggacaaaauaaugaaggugcgaaugccccaaaugaaaagucugugaaagaauaccuagauaaaguuagagcuaccguuggcaccgaauggacuccaugcaguguaaccuguggaguggguguaagagucagaagaagaguuaaugcagcuaacaaaaaaccagaggaucuuacuuugaaugacauugagacugauguuuguacaauggauaagugugcuggcauauuuaacguugugaguaauucauuagggcuagucauauuguuaguccuagcauuauucaauuaa

SEQ ID NO: 3278 - RNA, 1116 nt, Artificial Sequence
  derived and/or modified CDS sequence (wt) from Pv(CSP22VK210)__ANS71602.1__CSP
augaagaacuucauucucuuggcuguuucuuccauccuguugguggacuuguuccccacgcacugcgggcacaauguagaucuguccaaggccauaaauuuaaauggaguaaacuucaauaauguagacgccaguucacuuggcgcggcacacguaggacaaagugcuagccgaggcagaggacuuggugagaacccagaugacgaggaaggagaugcuaaaaaaaaaaaggauggaaagaaagcagaaccaaaaaauccacgugaaaauaagcugaaacaaccaggagacagagcagauggacagccagcaggagacagagcagauggacagccagcaggagacagagcagauggacagccagcaggugauagagcagcuggacaaccagcaggugauagagcagauggacagccagcaggcgauagagcagcuggacagccagcaggcgauagagcagauggacagccagcaggagauagagcagcuggacagccagcaggcgauagagcagcuggacagccagcaggcgauagagcagauggacagccagcaggagauagagcagcuggacaaccagcaggugauagagcagcuggacaaccagcaggagauagagcagauggacaaccagcaggagauagagcagcuggacagccagcaggagauagagcagcuggacagccagcaggagauagagcagcuggacagccagcaggagauagagcagcuggacagccagcaggaaauggugcagguggacaggcagcaggaggaaaugcggcaaacaagaaggcagaagacgcaggaggaaacgcaggaggacagggacaaaauaaugaaggugcgaaugccccaaaugaaaagucugugaaagaauaccuagauaaaguuagagcuaccguuggcaccgaauggacuccaugcaguguaaccuguggaguggguguaagagucagaagaagaguuaaugcagcuaacaagaaaccagaggaucuuacuuugaaugacauugagacugauguuuguacaauggauaagugugcuggcauauuuaacguugugaguaauucauuagggcuagucauauuguuaguccuagcauuauucaauuaa

SEQ ID NO: 3279 - RNA, 1116 nt, Artificial Sequence
  derived and/or modified CDS sequence (wt) from Pv(CSP28VK210)__ANS71608.1__CSP
augaagaacuucauucucuuggcuguuucuuccauccuguugguggacuuguuccccacgcacugcgggcacaauguagaucuguccaaggccauaaauuuaaauggaguaaacuucaauaauguagacgccaguucacuuggcgcggcacacguaggacaaagugcuagccgaggcagaggacuuggugagaacccagaugacgaggaaggagaugcuaaaaaaaaaaaggauggaaagaaagcagaaccaaaaaauccacgugaaaauaagcugaaacaaccaggagacagagcagauggacagccagcaggagacagagcagauggacagccagcaggagacagagcagauggacagccagcaggugauagagcagcuggacaaccagcaggugauagagcagauggacagccagcaggcgauagagcagcuggacagccagcaggcgauagagcagauggacagccagcaggagauagagcagcuggacagccagcaggcgauagagcagauggacagccagcaggagauagagcagcuggacagccagcaggcgauagagcagauggacagccagcaggagauagagcagcuggacaaccagcaggugauagagcagcuggacaaccagcaggagauagagcagauggacaaccagcaggagauagagcagcuggacagccagcaggagauagagcagcuggacagccagcaggagauagagcagcuggacagccagcaggaaauggugcagguggacaggcagcaggaggaaaugcggcaaacaagaaggcagaagacgcaggaggaaacgcaggaggacagggacaaaauaaugaaggugcgaaugccccaaaugaaaagucugugaaagaauaccuagauaaaguuagagcuaccguuggcaccgaauggacuccaugcaguguaaccuguggaguggguguaagagucagaagaagaguuaaugcagcuaacaagaaaccagaggaucuuacuuugaaugacauugagacugauguuuguacaauggauaagugugcuggcauauuuaacguugugaguaauucauuagggcuagucauauuguuaguccuagcauuauucaauuaa

SEQ ID NO: 3280 - RNA, 1116 nt, Artificial Sequence
  derived and/or modified CDS sequence (wt) from Pv(CSP31VK210)__ANS71611.1__CSP
augaagaacuucauucucuuggcuguuucuuccauccuguugguggacuuguuccccacgcacugcgggcacaauguagaucuguccaaggccauaaauuuaaauggaguaaacuucaauaauguagacgccaguucacuuggcgcggcacacguaggacaaagugcuagccgaggcagaggacuuggugagaacccagaugacgaggaaggagaugcuaaaaaaaaaaaggauggaaagaaagcagaaccaaaaaauccacgugaaaauaagcugaaacaaccaggagacagagcagauggacagccagcaggagacagagcagauggacagccagcaggugauagagcagcuggacaaccagcaggugauagagcagauggacagccagcaggcgauagagcagcuggacagccagcaggcgauagagcagauggacagccagcaggagauagagcagcuggacagccagcaggcgauagagcagauggacagccagcaggagauagagcagauggacaaccagcaggagauagagcagcuggacagccagcaggagauagagcagcuggacaaccagcaggugauagagcagcuggacaaccagcaggagauagagcagauggacaaccagcaggagauagagcagcuggacagccagcaggagauagagcagcuggacagccagcaggagauagagcagcuggacagccagcaggagauagagcagcuggacagccagcaggaaauggugcagguggacaggcagcaggaggaaaugcggcaaacaagaaggcagaagacgcaggaggaaacgcaggaggacagggacaaaauaaugaaggugcgaaugccccaaaugaaaagucugugaaagaauaccuagauaaaguuagagcuaccguuggcaccgaauggacuccaugcaguguaaccuguggaguggguguaagagucagaagaagaguuaaugcagcuaacaagaaaccagaggaucuuacuuugaaugacauugagacugauguuuguacaauggauaagugugcuggcauauuuaacguugugaguaauucauuagggcuagucauauuguuaguccuagcauuauucaauuaa

SEQ ID NO: 3281 - RNA, 1116 nt, Artificial Sequence
  derived and/or modified CDS sequence (wt) from Pv(CSP37VK210)__ANS71617.1__CSP
augaagaacuucauucucuuggcuguuucuuccauccuguugguggacuuguuccccacgcacugcgggcacaauguagaucuguccaaggccauaaauuuaaauggaguaaacuucaauaauguagacgccaguucacuuggcgcggcacacguaggacaaagugcuagccgaggcagaggacuuggugagaacccagaugacgaggaaggagaugcuaaaaaaaaaaaggauggaaagaaagcagaaccaaaaaauccacgugaaaauaagcugaaacaaccaggagacagagcagauggacagccagcaggagacagagcagauggacagccagcaggagacagagcagauggacagccagcaggugauagagcagcuggacaaccagcaggugauagagcagcuggacagccagcaggcgauagagcagcuggacagccagcaggcgauagagcagauggacagccagcaggagauagagcagcuggacagccagcaggcgauagagcagauggacagccagcaggagauagagcagcuggacagccagcaggcgauagagcagauggacagccagcaggagauagagcagcuggacaaccagcaggugauagagcagcuggacaaccagcaggagauagagcagauggacaaccagcaggagauagagcagcuggacagccagcaggagauagagcagcuggacagccagcaggagauagagcagcuggacagccagcaggaaauggugcagguggacaggcagcaggaggaaaugcggcaaacaagaaggcagaagacgcaggaggaaacgcaggaggacagggacaaaauaaugaaggugcgaaugccccaaaugaaaagucugugaaagaauaccuagauaaaguuagagcuaccguuggcaccgaauggacuccaugcaguguaaccuguggaguggguguaagagucagaagaagaguuaaugcagcuaacaagaaaccagaggaucuuacuuugaaugacauugagacugauguuuguacaauggauaagugugcuggcauauuuaacguugugaguaauucauuagggcuagucauauuguuaguccuagcauuauucaauuaa

SEQ ID NO: 3282 - RNA, 1116 nt, Artificial Sequence
  derived and/or modified CDS sequence (wt) from Pv(CSP50VK210)__ANS71630.1__CSP
augaagaacuucauucucuuggcuguuucuuccauccuguugguggacuuguuccccacgcacugcgggcacaauguagaucuguccaaggccauaaauuuaaauggaguaaacuucaauaauguagacgccaguucacuuggcgcggcacacguaggacaaagugcuagccgaggcagaggacuuggugagaacccagaugacgaggaaggagaugcuaaaaaaaaaaaggauggaaagaaagcagaaccaaaaaauccacgugaaaauaagcugaaacaaccaggagacagagcagauggacagccagcaggagacagagcagauggacagccagcaggugauagagcagcuggacaaccagcaggugauagagcagauggacagccagcaggcgauagagcagcuggacagccagcaggcgauagagcagauggacagccagcaggagauagagcagcuggacagccagcaggcgauagagcagauggacagccagcaggagauagagcagcuggacagccagcaggcgauagagcagauggacagccagcaggagauagagcagcuggacaaccagcaggugauagagcagcuggacaaccagcaggagauagagcagauggacaaccagcaggagauagagcagcuggacagccagcaggagauagagcagcuggacagccagcaggagauagagcagcuggacagccagcaggagauagagcagcuggacagccagcaggaaauggugcagguggacaggcagcaggaggaaaugcggcaaacaagaaggcagaagacgcaggaggaaacgcaggaggacagggacaaaauaaugaaggugcgaaugccccaaaugaaaagucugugaaagaauaccuagauaaaguuagagcuaccguuggcaccgaauggacuccaugcaguguaaccuguggaguggguguaagagucagaagaagaguuaaugcagcuaacaagaaaccagaggaucuuacuuugaaugacauugagacugauguuuguacaauggauaagugugcuggcauauuuaacguugugaguaauucauuagggcuagucauauuguuaguccuagcauuauucaauuaa

SEQ ID NO: 3283 - RNA, 1107 nt, Artificial Sequence
  derived and/or modified CDS sequence (wt) from Pv(Cam16)__AGN05247.1__CSP
augaagaacuucauucucuuggcuguuucuuccauccuguugguggacuuguuccccacgcacugcgggcacaauguagaucuguccaaggccauaaauuuaaauggaguaaacuucaauaauguagacgccaguucacuuggcgcggcacacguaggacaaagugcuagccgaggcagaggacuuggugagaacccagaugacgaggaaggagaugcuaaaaaaaaaaaggauggaaagaaagcagaaccaaaaaauccacgugaaaauaagcugaaacaaccagcaggugauagagcagauggacagccagcaggugauagagcagauggacagccagcaggugauagagcagcuggacaaccagcaggugauagagcagauggacagccagcaggcgauagagcagauggacagccagcaggcgauagagcagcuggacaaccagcaggugauagagcagauggacagccagcaggagauagagcagcuggacagccagcaggcgauagagcagauggacagccagcaggagauagagcagauggacagccagcaggugauagagcagcuggacaaccagcaggugauagagcagauggacagccagcaggcgauagagcagcuggacaaccagcaggugauagagcagauggacaaccagcaggagauagagcagcuggacagccagcaggagauagagcagcuggacagccagcaggagauagagcagcuggacagccagcaggaaauggugcagguggacaggcagcaggaggaaacgcaggaggaaacgcaggaggaaacgcaggaggacagggacaaaauaaugaaggugcgaaugccccaaaugaaaagucugugaaagaauaccuagauaaaguuagagcuaccguuggcaccgaauggacuccaugcaguguaaccuguggaguggguguaagagucagaagaagaguuaaugcagcuaacaaaaaaccagaggaucuuacuuugaaugaccuugagacugauguuuguacaauggauaagugugcuggcauauuuaacguugugaguaauucauuagggcuagucauauuguuaguccuagcauuauucaauuaa

SEQ ID NO: 3284 - RNA, 1107 nt, Artificial Sequence
  derived and/or modified CDS sequence (wt) from Pv(Cam32)__AGN05260.1__CSP
augaagaacuucauucucuuggcuguuucuuccauccuguugguggacuuguuccccacgcacugcgggcacaauguagaucuguccaaggccauaaauuuaaauggaguaggcuucaauaauguagacgccaguucacuuggcgcggcacacguaggacaaagugcuagccgaggcagaggacuuggugagaacccagaugacgaggaaggagaugcuaaaaaaaaaaaggauggaaagaaagcagaaccaaaaaauccacgugaaaauaagcugaaacaaccagcaggugauagagcagauggacagccagcaggugauagagcagauggacagccagcaggugauagagcagauggacagccagcaggugauagagcagcuggacaaccagcaggugauagagcagauggacagccagcaggcgauagagcagcuggacaaccagcaggugauagagcagauggacagccagcaggagauagagcagcuggacagccagcaggcgauagagcagauggacagccagcaggagauagagcagcuggacaaccagcaggugauagagcagcuggacaaccagcaggugauagagcagauggacagccagcaggcgauagagcagcuggacaaccagcaggugauagagcagauggacaaccagcaggagauagagcagcuggacagccagcaggagauagagcagcuggacagccagcaggagauagagcagcuggacagccagcaggaaauggugcagguggacaggcagcaggaggaaacgcaggaggaaacgcaggaggaaacgcaggaggacagggacaaaauaaugaaggugcgaaugccccaaaugaaaagucugugaaagaauaccuagauaaaguuagagcuaccguuggcaccgaauggacuccaugcaguguaaccuguggaguggguguaagagucagaagaagaguuaaugcagcuaacaaaaaaccagaggaucuuacuuugaaugaccuugagacugauguuuguacaauggauaagugugcuggcauauuuaacguugugaguaauucauuagggcuagucauauuguuaguccuagcauuauucaauuaa

SEQ ID NO: 3285 - RNA, 1107 nt, Artificial Sequence
  derived and/or modified CDS sequence (wt) from Pv(Cam38)__AGN05266.1__CSP
augaagaacuucauucucuuggcuguuucuuccauccuguugguggacuuguuccccacgcacugcgggcacaauguagaucuguccaaggccauaaauuuaaauggaguaaacuucaauaauguagacgccaguucacuuggcgcggcacacguaggacaaagugcuagccgaggcagaggacuuggugagaacccagaugacgaggaaggagaugcuaaaaaaaaaaaggauggaaagaaagcagaaccaaaaaauccacgugaaaauaagcugaaacaaccaggagacagagcagauggacagccagcaggagacagagcagauggacagccagcaggugauagagcagcuggacaaccagcaggugauagagcagauggacagccagcaggcgauagagcagcuggacagccagcaggcgauagagcagauggacagccagcaggagauagagcagcuggacagccagcaggcgauagagcagauggacagccagcaggagauagagcagcuggacagccagcaggcgauagagcagauggacagccagcaggagauagagcagcuggacagccagcaggcgauagagcagauggacagccagcaggagauagagcagcuggacaaccagcaggugauagagcagcuggacaaccagcaggagauagagcagauggacaaccagcaggagauagagcagcuggacagccagcaggagauagagcagcuggacagccagcaggagauagagcagcuggacagccagcaggaaauggugcagguggacaggcagcaggaggaaacgcaggaggacagggacaaaauaaugaaggugcgaaugccccaaaugaaaagucugugaaagaauaccuagauaaaguuagagcuaccguuggcaccgaauggacuccaugcaguguaaccuguggaguggguguaagagucagaagaagaguuaaugcagcuaacaaaaaaccagaggaucuuacuuugaaugaccuugagacugauguuuguacaauggauaagugugcuggcauauuuaacguugugaguaauucauuagggcuagucauauuguuaguccuagcauuauucaauuaa

SEQ ID NO: 3286 - RNA, 1104 nt, Artificial Sequence
  derived and/or modified CDS sequence (wt) from Pv(CSP19VK210)__ANS71599.1__CSP
augaagaacuucauucucuuggcuguuucuuccauccuguugguggacuuguuccccacgcacugcgggcacaauguagaucuguccaaggccauaaauuuaaauggaguaaacuucaauaauguagacgccaguucacuuggcgcggcacacguaggacaaagugcuagccgaggcagaggacuuggugagaacccagaugacgaggaaggagaugcuaaaaaaaaaaaggauggaaagaaagcagaaccaaaaaauccacgugaaaauaagcugaaacaaccaggagacagagcagauggacagccagcaggagacagagcagauggacagccagcaggagacagagcagauggacagccagcaggugauagagcagcuggacaaccagcaggugauagagcagauggacagccagcaggcgauagagcagcuggacagccagcaggcgauagagcagauggacagccagcaggagauagagcagcuggacagccagcaggcgauagagcagauggacagccagcaggagauagagcagcuggacagccagcaggcgauagagcagauggacagccagcaggagauagagcagcuggacaaccagcaggugauagagcagcuggacaaccagcaggagauagagcagauggacaaccagcaggagauagagcagcuggacagccagcaggagauagagcagcuggacagccagcaggagauagagcagcuggacagccagcaggaaauggugcagguggacaggcagcaggaggaaaugcggcaaacaagaaggcagaagacgcaggaggacagggacaaaauaaugaaggugcgaaugccccaaaugaaaagucugugaaagaauaccuagauaaaguuagagcuaccguuggcaccgaauggacuccaugcaguguaaccuguggaguggguguaagagucagaagaagaguuaaugcagcuaacaagaaaccagaggaucuuacuuugaaugacauugagacugauguuuguacaauggauaagugugcuggcauauuuaacguugugaguaauucauuagggcuagucauauuguuaguccuagcauuauucaauuaa

SEQ ID NO: 3287 - RNA, 1089 nt, Artificial Sequence
  derived and/or modified CDS sequence (wt) from Pv(CSP24VK210)__ANS71604.1__CSP
augaagaacuucauucucuuggcuguuucuuccauccuguugguggacuuguuccccacgcacugcgggcacaauguagaucuguccaaggccauaaauuuaaauggaguaaacuucaauaauguagacgccaguucacuuggcgcggcacacguaggacaaagugcuagccgaggcagaggacuuggugagaacccagaugacgaggaaggagaugcuaaaaaaaaaaaggauggaaagaaagcagaaccaaaaaauccacgugaaaauaagcugaaacaaccaggagacagagcagauggacagccagcaggagacagagcagauggacagccagcaggagacagagcagauggacagccagcaggugauagagcagcuggacaaccagcaggugauagagcagauggacagccagcaggcgauagagcagcuggacagccagcaggcgauagagcagauggacagccagcaggagauagagcagcuggacagccagcaggcgauagagcagauggacagccagcaggagauagagcagcuggacagccagcaggcgauagagcagauggacagccagcaggagauagagcagcuggacaaccagcaggugauagagcagcuggacaaccagcaggagauagagcagauggacaaccagcaggagauagagcagcuggacagccagcaggagauagagcagcuggacagccagcaggaaauggugcagguggacaggcagcaggaggaaaugcggcaaacaagaaggcagaagacgcaggaggaaacgcaggaggacagggacaaaauaaugaaggugcgaaugccccaaaugaaaagucugugaaagaauaccuagauaaaguuagagcuaccguuggcaccgaauggacuccaugcaguguaaccuguggaguggguguaagagucagaagaagaguuaaugcagcuaacaagaaaccagaggaucuuacuuugaaugacauugagacugauguuuguacaauggauaagugugcuggcauauuuaacguugugaguaauucauuagggcuagucauauuguuaguccuagcauuauucaauuaa

SEQ ID NO: 3288 - RNA, 1089 nt, Artificial Sequence
  derived and/or modified CDS sequence (wt) from Pv(CSP35VK210)__ANS71615.1__CSP
augaagaacuucauucucuuggcuguuucuuccauccuguugguggacuuguuccccacgcacugcgggcacaauguagaucuguccaaggccauaaauuuaaauggaguaaacuucaauaauguagacgccaguucacuuggcgcggcacacguaggacaaagugcuagccgaggcagaggacuuggugagaacccagaugacgaggaaggagaugcuaaaaaaaaaaaggauggaaagaaagcagaaccaaaaaauccacgugaaaauaagcugaaacaaccaggagacagagcagauggacagccagcaggagacagagcagauggacagccagcaggugauagagcagcuggacaaccagcaggugauagagcagauggacagccagcaggcgauagagcagcuggacagccagcaggcgauagagcagauggacagccagcaggagauagagcagcuggacagccagcaggcgauagagcagauggacagccagcaggagauagagcagcuggacagccagcaggcgauagagcagauggacagccagcaggagauagagcagcuggacaaccagcaggugauagagcagcuggacaaccagcaggagauagagcagauggacaaccagcaggagauagagcagcuggacagccagcaggagauagagcagcuggacagccagcaggagauagagcagcuggacagccagcaggaaauggugcagguggacaggcagcaggaggaaaugcggcaaacaagaaggcagaagacgcaggaggaaacgcaggaggacagggacaaaauaaugaaggugcgaaugccccaaaugaaaagucugugaaagaauaccuagauaaaguuagagcuaccguuggcaccgaauggacuccaugcaguguaaccuguggaguggguguaagagucagaagaagaguuaaugcagcuaacaagaaaccagaggaucuuacuuugaaugacauugagacugauguuuguacaauggauaagugugcuggcauauuuaacguugugaguaauucauuagggcuagucauauuguuaguccuagcauuauucaauuaa

SEQ ID NO: 3289 - RNA, 1062 nt, Artificial Sequence
  derived and/or modified CDS sequence (wt) from Pv(CSP9VK210)__ANS71589.1__CSP
augaagaacuucauucucuuggcuguuucuuccauccuguugguggacuuguuccccacgcacugcgggcacaauguagaucuguccaaggccauaaauuuaaauggaguaaacuucaauaauguagacgccaguucacuuggcgcggcacacguaggacaaagugcuagccgaggcagaggacuuggugagaacccagaugacgaggaaggagaugcuaaaaaaaaaaaggauggaaagaaagcagaaccaaaaaauccacgugaaaauaagcugaaacaaccaggagacagagcagauggacagccagcaggagacagagcagauggacagccagcaggugauagagcagcuggacaaccagcaggugauagagcagauggacagccagcaggagauagagcagcuggacagccagcaggcgauagagcagauggacagccagcaggagauagagcagcuggacagccagcaggcgauagagcagauggacagccagcaggagauagagcagcuggacaaccagcaggugauagagcagcuggacaaccagcaggagauagagcagauggacaaccagcaggagauagagcagcuggacagccagcaggagauagagcagcuggacagccagcaggagauagagcagcuggacagccagcaggagauagagcagcuggacagccagcaggaaauggugcagguggacaggcagcaggaggaaaugcggcaaacaagaaggcagaagacgcaggaggaaacgcaggaggacagggacaaaauaaugaaggugcgaaugccccaaaugaaaagucugugaaagaauaccuagauaaaguuagagcuaccguuggcaccgaauggacuccaugcaguguaaccuguggaguggguguaagagucagaagaagaguuaaugcagcuaacaagaaaccagaggaucuuacuuugaaugacauugagacugauguuuguacaauggauaagugugcuggcauauuuaacguugugaguaauucauuagggcuagucauauuguuaguccuagcauuauucaauuaa

SEQ ID NO: 3290 - RNA, 894 nt, Artificial Sequence
  derived and/or modified CDS sequence (wt) from Pv(Pt02.2)__ADB92552.1__CSP
augaagaacuucauucucuuggcuguuucuuccauccuguugguggacuuguuccccacgcacugcgggcacaauguagaucuguccaaggccauaaauuuaaauggaguaggcuucaauaauguagacgccaguucacuuggcgcggcacacguaggacaaagugcuagccgaggcagaggacuuggugagaacccagaugacgaggaaggagaugcuaaaaaaaaaaaggauggaaagaaagcagaaccaaaaaauccacgugaaaauaagcugaaacaaccagaagauggggcaggugaucaaccaggagcaaauggggcaggcaaucaaccaggagcaaauggggcaggcaaucaaccaggagcaaauggggcaggcaaucaaccaggagcaaauggggcugguaaucaaccaggagcaaauggggcuggcaaucaaccaggagcaaauggggcagguaaucaaccaggagcaaauggagcagguggacaggcagcaggaggaaaugcugcaaacaaaaaggcaggagacgcaggagcagguggacaggcagcaggaggaaaugcugcaaacaaaaaggcaggagacgcaggagcaggacagggacaaaauaaugaaggugcgaaugccccaaaugaaaagucugugaaagaauaccuagauaaaguuagagcuaccguuggcaccgaauggacuccaugcaguguaaccuguggaguggguguaagagucagaagaagaguuaaugcagcuaacaaaaaaccagaggaucuuacuuugaaugaccuugagacugauguuuguacaauggauaagugugcuggcauauuuaacguugugaguaauucauuagggcuagucauauuguuaguccuagcauuauucaauuaa

SEQ ID NO: 3291 - RNA, 840 nt, Artificial Sequence
  derived and/or modified CDS sequence (wt) from Pv(Pt04.5)__ADB92555.1__CSP
augaagaacuucauucucuuggcuguuucuuccauccuguugguggacuuguuccccacgcacugcgggcacaauguagaucuguccaaggccauaaauuuaaauggaguaggcuucaauaauguagacgccaguucacuuggcgcggcacacguaggacaaagugcuagccgaggcagaggacuuggugagaacccagaugacgaggaaggagaugcuaaaaaaaaaaaggauggaaagaaagcagaaccaaaaaauccacgugaaaauaagcugaaacaaccagaagauggggcaggugaucaaccaggagcaaauggggcaggcaaucaaccaggagcaaauggggcaggcaaucaaccaggagcaaauggggcuggcaaucaaccaggagcaaauggggcagguaaucaaccaggagcaaauggagcagguggacaggcagcaggaggaaaugcugcaaacaaaaaggcaggagacgcaggagcagguggacaggcagcaggaggaaaugcugcaaacaaaaaggcaggagacgcaggagcaggacagggacaaaauaaugaaggugcgaaugccccaaaugaaaagucugugaaagaauaccuagauaaaguuagagcuaccguuggcaccgaauggacuccaugcaguguaaccuguggaguggguguaagagucagaagaagaguuaaugcagcuaacaaaaaaccagaggaucuuacuuugaaugaccuugagacugauguuuguacaauggauaagugugcuggcauauuuaacguugugaguaauucauuagggcuagucauauuguuaguccuagcauuauucaauuaa

SEQ ID NO: 3292 - RNA, 1023 nt, Artificial Sequence; identical to SEQ ID NO: 40
  derived and/or modified CDS sequence (wt) from Pb(ANKA)__XP_022712148.1__CSP

SEQ ID NO: 3293 - RNA, 1194 nt, Artificial Sequence; identical to SEQ ID NO: 41
  derived and/or modified CDS sequence (opt1) from Pf(3D7)__XP_001351122.1__CSP

SEQ ID NO: 3294 - RNA, 1335 nt, Artificial Sequence
  derived and/or modified CDS sequence (opt1) from Pf(Pal97-089)__BAM84949.1__CSP
augaugcgcaagcuggccauccucagcguguccagcuuccuguucgucgaggcccuguuccaggaguaccagugcuacggcuccagcuccaacacccgggugcucaacgagcugaacuacgacaacgcggggaccaaccuguacaacgagcucgagaugaacuacuacggcaagcaggagaacugguacagccugaagaagaacucccgcagccugggggagaacgacgacggcgacaacgacaacggggacaacggccgggagggcaaggacgaggacaagcgcgacgggaacaacgaggacaacgagaagcuccggaagcccaagcacaagaagcugaagcagccgggcgacgggaaccccgaccccaacgccaaccccaacguggacccgaacgccaaccccaacgucgaccccaacgccaaccccaacgccaacccgaacgcgaaccccaacgccaaccccaacgccaaccccaacgccaacccgaacgcgaaccccaacgccaaccccaacgccaaccccaacgccaacccgaacgccaaccccaacgcgaaccccaacgccaaccccaacgccaacccgaacgccaaccccaacgccaaccccaacgcgaaccccaacgccaacccgaacgccaaccccaacgccaaccccaacgccaaccccaacgcgaacccgaacgccaaccccaacgccaaccccaacgccaacccgaacgccaaccccaacgcgaaccccaacgccaaccccaacgccaacccgaacgccaaccccaacgcgaaccccaacgccaaccccaacgccaacccgaacgccaaccccaacgccaaccccaacgcgaaccccaacgccaacccgaacgccaaccccaacgccaaccccaacgccaaccccaacgcgaacccgaacgccaaccccaacgccaaccccaacgccaaccccaacgccaacccgaacaagaacaaccagggcaacgggcagggccacaacaugcccaacgaccccaaccgcaacguggacgagaacgcgaacgccaacaacgccgugaagaacaacaacaacgaggagcccuccgacaagcacaucgagcaguaccugaagaagauccaguacagccucuccacggaguggagcccgugcuccgugaccugcggcaacgggauccagguccggaucaagcccggcagcgccgacaagcccaaggaccagcuggacuacgagaacgacaucgagaagaagaucugcaagauggagaagugcuccagcguguucaacgucgugaacuccagcaucgggcugaucauggugcucuccuuccuguuccugaacuga

SEQ ID NO: 3295 - RNA, 1329 nt, Artificial Sequence
  derived and/or modified CDS sequence (opt1) from Pf(T9/94)__BAD73956.1__CSP
augaugcgcaagcuggccauccucagcguguccagcuuccuguucgucgaggcccuguuccaggaguaccagugcuacggcuccagcuccaacacccgggugcucaacgagcugaacuacgacaacgcggggaccaaccuguacaacgagcucgagaugaacuacuacggcaagcaggagaacugguacagccugaagaagaacucccgcagccugggggagaacgacgacggcgacaacgacaacgggaacaacaacaacggcaacaacaacaacggcgacaacgggcgggagggcaaggacgaggacaagcgcgacgggaacaacgaggacaacgagaagcuccggaagcccaagcacaagaagcugaagcagccgggcgacgacaaccccgaccccaacgccaaccccaacguggacccgaacgccaaccccaacgucgaccccaacgccaaccccaacgccaacccgaacgcgaaccccaacgccaaccccaacgccaaccccaacgccaacccgaacgcgaaccccaacgccaaccccaacgccaaccccaacgccaacccgaacgccaaccccaacgcgaaccccaacgccaaccccaacgccaacccgaacgccaaccccaacguggaccccaacgccaaccccaacgcgaacccgaacgccaaccccaacgccaaccccaacgccaaccccaacgccaacccgaacgcgaaccccaacgccaaccccaacgccaacccgaacgccaaccccaacgccaaccccaacgcgaaccccaacgccaacccgaacgccaaccccaacgccaaccccaacgcgaaccccaacgccaacccgaacgccaaccccaacgccaaccccaacgccaaccccaacgcgaacccgaacgccaaccccaacgccaaccccaacgccaaccccaacgccaacccgaacgcgaaccccaacaagaacaaccaggggaacggccagggccacaacaugcccaacgaccccaaccgcaacguggacgagaacgccaacgccaacaacgccgucaagaacaacaacaacgaggagccguccgacaagcacaucgagcaguaccugaagaagauccagaacagccucuccacggaguggagccccugcuccgugaccugcgggaacggcauccaggugcggaucaagcccgggagcgccgacaagcccaaggaccagcuggacuacgagaacgacaucgagaagaagaucugcaagauggagaagugcuccagcgucuucaacguggugaacuccagcaucggccugaucaugguccucuccuuccuguuccugaacuga

SEQ ID NO: 3296 - RNA, 1329 nt, Artificial Sequence
  derived and/or modified CDS sequence (opt1) from Pf(Tq/94)__AAA29551.1__CSP
augaugcgcaagcuggccauccucagcguguccagcuuccuguucgucgaggcccuguuccaggaguaccagugcuacggcuccagcuccaacacccgggugcucaacgagcugaacuacgacaacgcggggaucaaccuguacaacgagcucgagaugaacuacuacggcaagcaggagaacugguacagccugaagaagaacucccgcagccugggggagaacgacgacggcgacaacgacaacgggaacaacaacaacggcaacaacaacaacggcgacaacgggcgggagggcaaggacgaggacaagcgcgacgggaacaacgaggacaacgagaagcuccggaagcccaagcacaagaagcugaagcagccgggcgacgggaaccccgaccccaacgccaaccccaacguggacccgaacgccaaccccaacgucgaccccaacgccaaccccaacgccaacccgaacgcgaaccccaacgccaaccccaacgccaaccccaacgccaacccgaacgcgaaccccaacgccaaccccaacgccaaccccaacgccaacccgaacgccaaccccaacgcgaaccccaacgccaaccccaacgccaacccgaacgccaaccccaacguggaccccaacgccaaccccaacgcgaacccgaacgccaaccccaacgccaaccccaacgccaaccccaacgccaacccgaacgcgaaccccaacgccaaccccaacgccaacccgaacgccaaccccaacgccaaccccaacgcgaaccccaacgccaacccgaacgccaaccccaacgccaaccccaacgcgaaccccaacgccaacccgaacgccaaccccaacgccaaccccaacgccaaccccaacgcgaacccgaacgccaaccccaacgccaaccccaacgccaaccccaacgccaacccgaacgcgaaccccaacaagaacaaccagggcaacggccaggggcacaacaugcccaacgaccccaaccgcaacguggacgagaacgccaacgccaacaacgccgucaagaacaacaacaacgaggagccguccgacaagcacaucgagcaguaccugaagaagauccagaacagccucuccaccgaguggagccccugcuccgugacgugcggcaacgggauccaggugcggaucaagcccggcagcgccgacaagcccaaggaccagcuggacuacgagaacgacaucgagaagaagaucugcaagauggagaagugcuccagcgucuucaacguggugaacuccagcaucggccugaucaugguccucuccuuccuguuccugaacuga

SEQ ID NO: 3297 - RNA, 1329 nt, Artificial Sequence
  derived and/or modified CDS sequence (opt1) from Pf(Wellcome)__AAA29554.1__CSP
augaugcgcaagcuggccauccucagcguguccagcuuccuguucgucgaggcccuguuccaggaguaccagugcuacggcuccagcuccaacacccgggugcucaacgagcugaacuacgacaacgcggggaccaaccuguacaacgagcucgagaugaacuacuacggcaagcaggagaacugguacagccugaagaagaacucccgcagccugggggagaacgacgacggcgacaacgacaacgggaacaacaacaacggcaacaacaacaacggcgacaacgggcgggagggcaaggacgaggacaagcgcgacgggaacaacgaggacaacgagaagcuccggaagcccaagcacaagaagcugaagcagccgggcgacgggaaccccgaccccaacgccaaccccaacguggacccgaacgccaaccccaacgucgaccccaacgccaaccccaacgccaacccgaacgcgaaccccaacgccaaccccaacgccaaccccaacgccaacccgaacgcgaaccccaacgccaaccccaacgccaaccccaacgccaacccgaacgccaaccccaacgcgaaccccaacgccaaccccaacgccaacccgaacgccaaccccaacguggaccccaacgccaaccccaacgcgaacccgaacgccaaccccaacgccaaccccaacgccaaccccaacgccaacccgaacgcgaaccccaacgccaaccccaacgccaacccgaacgccaaccccaacgccaaccccaacgcgaaccccaacgccaacccgaacgccaaccccaacgccaaccccaacgcgaaccccaacgccaacccgaacgccaaccccaacgccaaccccaacgccaaccccaacgcgaacccgaacgccaaccccaacgccaaccccaacgccaaccccaacgccaacccgaacgcgaaccccaacaagaacaaccagggcaacggccaggggcacaacaugcccaacgaccccaaccgcaacguggacgagaacgccaacgccaacaacgccgucaagaacaacaacaacgaggagccguccgacaagcacaucgagcaguaccugaagaagauccagaacagccucuccacggaguggagccccugcuccgugaccugcggcaacgggauccaggugcggaucaagcccggcagcgccgacaagcccaaggaccagcuggacuacgagaacgacaucgagaagaagaucugcaagauggagaagugcuccagcgucuucaacguggugaacuccagcaucggccugaucaugguccucuccuuccuguuccugaacuga

SEQ ID NO: 3298 - RNA, 1323 nt, Artificial Sequence
  derived and/or modified CDS sequence (opt1) from Pf(Pal97-115)__BAM84958.1__CSP
augaugcgcaagcuggccauccucagcguguccagcuuccuguucgucgaggcccuguuccaggaguaccagugcuacggcuccagcuccaacacccgggugcucaacgagcugaacuacgacaacgcggggaccaaccuguacaacgagcucgagaugaacuacuacggcaagcaggagaacugguacagccugaagaagaacucccgcagccugggggagaacgacgacggcaacaacaacaacggggacaacggccgggagggcaaggacgaggacaagcgcgacgggaacaacgaggacaacgagaagcuccggaagcccaagcacaagaagcugaagcagccgggcgacgggaaccccgaccccaacgccaaccccaacguggacccgaacgccaaccccaacgucgaccccaacgccaaccccaacguggacccgaacgccaaccccaacgcgaaccccaacgccaaccccaacgccaacccgaacgccaaccccaacgcgaaccccaacgccaaccccaacgccaacccgaacgccaaccccaacgccaaccccaacgcgaaccccaacgccaacccgaacgccaaccccaacgccaaccccaacgccaaccccaacgcgaacccgaacgccaaccccaacgccaaccccaacgccaaccccaacgccaacccgaacgcgaaccccaacgccaaccccaacguggacccgaacgccaaccccaacgccaaccccaacgccaaccccaacgcgaacccgaacgccaaccccaacgccaaccccaacgccaaccccaacgcgaacccgaacgccaaccccaacgccaaccccaacgccaaccccaacgccaacccgaacgcgaaccccaacgccaaccccaacgccaaccccaacgccaacccgaacgccaaccccaacgcgaaccccaacgccaaccccaacaagaacaaccagggcaacgggcagggccacaacaugccgaacgaccccaaccgcaacgucgacgagaacgccaacgccaacaacgccgugaagaacaacaacaacgaggagcccuccgaccagcacaucgagaaguaccugaagaucauccagaacagccucuccacggaguggagccccugcuccgugaccugcggcaacgggauccagguccggaucaagccgggcagcgcggacaagcccaaggaccagcuggacuacgccaacgacaucgagaagaagaucugcaagauggagaagugcuccagcguguucaacguggucaacuccagcaucgggcugaucauggugcucuccuuccuguuccugaacuga

SEQ ID NO: 3299 - RNA, 1323 nt, Artificial Sequence
  derived and/or modified CDS sequence (opt1) from Pf(PMS5)__BAN59428.1__CSP
augaugcgcaagcuggccauccucagcguguccagcuuccuguucgucgaggcccuguuccaggaguaccagugcuacggcuccagcuccaacacccgggugcucaacgagcugaacuacgacaacgcggggaccaaccuguacaacgagcucgagaugaacuacuacggcaagcaggagaacugguacagccugaagaagaacucccgcagccugggggagaacgacgacggcaacaacaacaacggggacaacggccgggagggcaaggacgaggacaagcgcgacgggaacaacgaggacaacgagaagcuccggaagcccaagcacaagaagcugaagcagccgggcgacgggaaccccgaccccaacgccaaccccaacguggacccgaacgccaaccccaacgucgaccccaacgccaaccccaacguggacccgaacgccaaccccaacgcgaaccccaacgccaaccccaacgccaacccgaacgccaaccccaacgcgaaccccaacgccaaccccaacgccaacccgaacgccaaccccaacgccaaccccaacgcgaaccccaacgccaacccgaacgccaaccccaacgccaaccccaacgccaaccccaacgcgaacccgaacgccaaccccaacgccaaccccaacgccaaccccaacgccaacccgaacgcgaaccccaacgccaaccccaacgccaacccgaacgccaaccccaacgccaaccccaacgcgaaccccaacgccaacccgaacgccaaccccaacgccaaccccaacgcgaaccccaacgccaacccgaacgccaaccccaacgccaaccccaacgccaaccccaacgcgaacccgaacgccaaccccaacgccaaccccaacgccaaccccaacgccaacccgaacgcgaaccccaacgccaaccccaacgccaaccccaacaagaacaaccagggcaacgggcagggccacaacaugccgaacgaccccaaccgcaacguggacgagaacgccaacgccaacaacgacgucaagaacaacaacaacgaggagcccuccgacaagcacaucgagcaguaccugaagaagauccaguacagccucuccacggaguggagccccugcuccgugaccugcggcaacgggauccaggugcggaucaagccgggcagcgcggacaagcccaaggaccagcuggacuacgagaacgacaucgagaagaagaucugcaagauggagaagugcuccagcgucuucaacguggugaacuccagcaucgggcugaucaugguccucuccuuccuguuccugaacuga

SEQ ID NO: 3300 - RNA, 1320 nt, Artificial Sequence
  derived and/or modified CDS sequence (opt1) from Pf(J2)__ACO49408.1__CSP
augcgcaagcuggccauccucagcguguccagcuuccuguucgucgaggcccuguuccaggaguaccagugcuacggcuccagcuccaacacccgggugcucaacgagcugaacuacgacaacgcggggaccaaccuguacaacgagcucgagaugaacuacuacggcaagcaggagaacugguacagccugaagaagaacucccgcagccugggggagaacgacgacggcaacaacaacaacggggacaacggccgggagggcaaggacgaggacaagcgcgacgggaacaacgaggacaacgagaagcuccggaagcccaagcacaagaagcugaagcagccgggcgacgggaaccccgaccccaacgccaaccccaacguggacccgaacgccaaccccaacgucgaccccaacgccaaccccaacguggacccgaacgccaaccccaacgcgaaccccaacgccaaccccaacgccaacccgaacgccaaccccaacgcgaaccccaacgccaaccccaacgccaacccgaacgccaaccccaacgccaaccccaacgcgaaccccaacgccaacccgaacgccaaccccaacgccaaccccaacgccaaccccaacgcgaacccgaacguggaccccaacgccaaccccaacgccaaccccaacgccaacccgaacgccaaccccaacgcgaaccccaacgccaacccgaacgccaaccccaacgccaaccccaacgccaaccccaacgcgaacccgaacgccaaccccaacgccaaccccaacgccaaccccaacgcgaacccgaacgccaaccccaacgccaaccccaacgccaaccccaacgccaacccgaacgcgaaccccaacgccaaccccaacgccaaccccaacgccaacccgaacgccaaccccaacgcgaaccccaacgccaaccccaacaagaacaaccagggcaacgggcagggccacaacaugccgaacgaccccaaccgcaacgucgacgagaacgccaacgccaacaacgacgugaagaacaacaacaacgaggagcccuccgacaagcacaucgagcaguaccugaagaagauccaguacagccucuccacggaguggagccccugcuccgugaccugcggcaacgggauccagguccggaucaagccgggcagcgccgacaagcccaaggaccagcuggacuacgagaacgacaucgagaagaagaucugcaagauggagaagugcuccagcguguucaacguggucaacuccagcaucgggcugaucauggugcucuccuuccuguuccugaacuga

SEQ ID NO: 3301 - RNA, 1320 nt, Artificial Sequence
  derived and/or modified CDS sequence (opt1) from Pf(M4)__ACO49420.1__CSP
augcgcaagcuggccauccucagcguguccagcuuccuguucgucgaggcccuguuccaggaguaccagugcuacggcuccagcuccaacacccgggugcucaacgagcugaacuacgacaacgcggggaccaaccuguacaacgagcucgagaugaacuacuacggcaagcaggagaacugguacagccugaagaagaacucccgcagccugggggagaacgacgacggcaacaacaacaacggggacaacggccgggagggcaaggacgaggacaagcgcgacgggaacaacgaggacaacgagaagcuccggaagcccaagcacaagaagcugaagcagccgggcgacgggaaccccgaccccaacgccaaccccaacguggacccgaacgccaaccccaacgucgaccccaacgccaaccccaacgccaacccgaacgcgaaccccaacgccaaccccaacgccaaccccaacgccaacccgaacgcgaaccccaacgccaaccccaacgccaaccccaacgccaacccgaacgccaaccccaacgcgaaccccaacgccaaccccaacgccaacccgaacgccaaccccaacgccaaccccaacguggaccccaacgcgaacccgaacgccaaccccaacgccaaccccaacgccaaccccaacgccaacccgaacgcgaaccccaacgccaaccccaacgccaacccgaacgccaaccccaacgccaaccccaacgcgaaccccaacgccaacccgaacgccaaccccaacgccaaccccaacgcgaaccccaacgccaacccgaacgccaaccccaacgccaaccccaacgccaaccccaacgcgaacccgaacgccaaccccaacgccaaccccaacgccaaccccaacgccaacccgaacgcgaaccccaacgccaaccccaacgccaaccccaacaagaacaaccagggcaacgggcagggccacaacaugccgaacgaccccaaccgcaacguggacgagaacgccaacgccaacaacgcggucaagaacaacaacaacgaggagcccuccgacaagcacaucacggaguaccugaagaagauccagaacagccucuccaccgaguggagccccugcuccgugaccugcggcaacgggauccaggugcggaucaagccgggcagcgccgggaaguccaaggacgagcuggacuacgagaacgacaucgagaagaagaucugcaagauggagaagugcagcuccgucuucaacguggugaacagcuccaucggccugaucaugguccucagcuuccuguuccugaacuga

SEQ ID NO: 3302 - RNA, 1320 nt, Artificial Sequence
  derived and/or modified CDS sequence (opt1) from Pf(TMS121)__ACO49498.1__CSP
augcgcaagcuggccauccucagcguguccagcuuccuguucgucgaggcccuguuccaggaguaccagugcuacggcuccagcuccaacacccgggugcucaacgagcugaacuacgacaacgcggggaccaaccuguacaacgagcucgagaugaacuacuacggcaagcaggagaacugguacagccugaagaagaacucccgcagccugggggagaacgacgacggcaacaacaacaacggggacaacggccgggagggcaaggacgaggacaagcgcgacgggaacaacgaggacaacgagaagcuccggaagcccaagcacaagaagcugaagcagccgggcgacgggaaccccgaccccaacgccaaccccaacguggacccgaacgccaaccccaacgucgaccccaacgccaaccccaacguggacccgaacgccaaccccaacgcgaaccccaacgccaaccccaacgccaacccgaacgccaaccccaacgcgaaccccaacgccaaccccaacgccaacccgaacgccaaccccaacgccaaccccaacgcgaaccccaacgccaacccgaacgccaaccccaacgccaaccccaacgccaaccccaacgcgaacccgaacgccaaccccaacgccaaccccaacgccaaccccaacgccaacccgaacgcgaaccccaacgccaaccccaacgccaacccgaacgccaaccccaacgccaaccccaacgcgaaccccaacgccaacccgaacgccaaccccaacgccaaccccaacgcgaaccccaacgccaacccgaacgccaaccccaacgccaaccccaacgccaaccccaacgcgaacccgaacgccaaccccaacgccaaccccaacgccaaccccaacgccaacccgaacgcgaaccccaacgccaaccccaacgccaaccccaacaagaacaaccagggcaacgggcagggccacaacaugccgaacgaccccaaccgcaacguggacgagaacgccaacgccaacaacgacgucaagaacaacaacaacgaggagcccuccgacaagcacaucgagcaguaccugaagaagauccagaacagccucuccacggaguggagccccugcuccgugaccugcggcaacgggauccaggugcggaucaagccgggcagcgcgaacaagcccaaggacgagcuggacuacgagaacgacaucgagaagaagaucugcaagauggagaagugcuccagcgucuucaacguggugaacuccagcaucgggcugaucaugguccucuccuuccuguuccugaacuga

SEQ ID NO: 3303 - RNA, 1320 nt, Artificial Sequence
  derived and/or modified CDS sequence (opt1) from Pf(TMS180)__ACO49505.1__CSP
augcgcaagcuggccauccucagcguguccagcuuccuguucgucgaggcccuguuccaggaguaccagugcuacggcuccagcuccaacacccgggugcucaacgagcugaacuacgacaacgcggggaccaaccuguacaacgagcucgagaugaacuacuacggcaagcaggagaacugguacagccugaagaagaacucccgcagccugggggagaacgacgacggcaacaacaacaacggggacaacggccgggagggcaaggacgaggacaagcgcgacgggaacaacgaggacaacgagaagcuccggaagcccaagcacaagaagcugaagcagccgggcgacgggaaccccgaccccaacgccaaccccaacguggacccgaacgccaaccccaacgucgaccccaacgccaaccccaacguggacccgaacgccaaccccaacgcgaaccccaacgccaaccccaacgccaacccgaacgccaaccccaacgcgaaccccaacgccaaccccaacgccaacccgaacgccaaccccaacgccaaccccaacgcgaaccccaacgccaacccgaacgccaaccccaacgccaaccccaacgccaaccccaacgcgaacccgaacgccaaccccaacgccaaccccaacgccaaccccaacgccaacccgaacgcgaaccccaacgccaaccccaacgccaacccgaacgccaaccccaacgccaaccccaacgcgaaccccaacgccaacccgaacgccaaccccaacgccaaccccaacgcgaaccccaacgccaacccgaacgccaaccccaacgccaaccccaacgccaaccccaacgcgaacccgaacgccaaccccaacgccaaccccaacgccaaccccaacgccaacccgaacgcgaaccccaacgccaaccccaacgccaaccccaacaagaacaaccagggcaacgggcagggccacaacaugccgaacgaccccaaccgcaacguggacgagaacgccaacgccaacaacgacgucaagaacaacaacaacgaggagcccuccgacaagcacaucgagcaguaccugaagaagauccaguacagccucuccacggaguggagccccugcuccgugaccugcggcaacgggauccaggugcggaucaagccgggcagcgcggacaagcccaaggaccagcuggacuacgagaacgacaucgagaagaagaucugcaagauggagaagugcuccagcgucuucaacguggugaacuccagcaucgggcugaucaugguccucuccuuccuguuccugaacuga

SEQ ID NO: 3304 - RNA, 1311 nt, Artificial Sequence
  derived and/or modified CDS sequence (opt1) from Pf(836)__AAA29576.1__CSP
augaugcgcaagcuggccauccucagcguguccagcuuccuguucgucgaggcccuguuccaggaguaccagugcuacggcuccagcuccaacacccgggugcucaacgagcugaacuacgacaacgcggggaucaaccuguacaacgagcucgagaugaacuacuacggcaagcaggagaacugguacagccugaagaagaacucccgcagccugggggagaacgacgacggcaacaacaacaacggggacaacggccgggagggcaaggacgaggacaagcgcgacgggaacaacgaggacaacgagaagcuccggaagcccaagcacaagaagcugaagcagccgggcgacgggaaccccgaccccaacgccaaccccaacguggacccgaacgccaaccccaacgucgaccccaacgccaaccccaacgccaacccgaacgcgaaccccaacgccaaccccaacgccaaccccaacgccaacccgaacgcgaaccccaacgccaaccccaacgccaaccccaacgccaacccgaacgccaaccccaacgcgaaccccaacgccaaccccaacgccaacccgaacgccaaccccaacguggaccccaacgccaaccccaacgcgaacccgaacgccaaccccaacgccaaccccaacgccaaccccaacgccaacccgaacgcgaaccccaacgccaaccccaacgccaacccgaacgccaaccccaacgccaaccccaacgcgaaccccaacgccaacccgaacgccaaccccaacgccaaccccaacgcgaaccccaacgccaacccgaacgccaaccccaacgccaaccccaacgccaaccccaacgcgaacccgaacgccaaccccaacgccaaccccaacgccaaccccaacgccaacccgaacgcgaaccccaacgccaaccccaacaagaacaaccagggcaacgggcagggccacaacaugcccaacgacccgaaccgcaacguggacgagaacgccaacgccaacaacgccgucaagaacaacaacaacgaggagcccuccgacaagcacaucaccgaguaccugaagaagauccagaacagccucuccacggaguggagccccugcuccgugaccugcggcaacgggauccaggugcggaucaagcccggcagcgcggggaaguccaaggacgagcuggacuacgagaacgacaucgagaagaagaucugcaagauggagaagugcagcuccgucuucaacguggugaacagcuccaucggccugaucaugguccucagcuuccuguuccugaacuga

SEQ ID NO: 3305 - RNA, 1311 nt, Artificial Sequence
  derived and/or modified CDS sequence (opt1) from Pf(842)__AAA29545.1__CSP
augaugcgcaagcuggccauccucagcguguccagcuuccuguucgucgaggcccuguuccaggaguaccagugcuacggcuccagcuccaacacccgggugcucaacgagcugaacuacgacaacgcggggaucaaccuguacaacgagcucgagaugaacuacuacggcaagcaggagaacugguacagccugaagaagaacucccgcagccugggggagaacgacgacggcaacaacaacaacggggacaacggccgggagggcaaggacgaggacaagcgcgacgggaacaacgaggacaacgagaagcuccggaagcccaagcacaagaagcugaagcagccgggcgacgggaaccccgaccccaacgccaaccccaacguggacccgaacgccaaccccaacgucgaccccaacgccaaccccaacguggacccgaacgccaaccccaacgcgaaccccaacgccaaccccaacgccaacccgaacgccaaccccaacgcgaaccccaacgccaaccccaacgccaacccgaacgccaaccccaacgccaaccccaacgcgaaccccaacgccaacccgaacgccaaccccaacgccaaccccaacgccaaccccaacgcgaacccgaacgccaaccccaacgccaaccccaacgccaaccccaacgccaacccgaacgcgaaccccaacgccaaccccaacgccaacccgaacgccaaccccaacgccaaccccaacgcgaaccccaacgccaacccgaacgccaaccccaacgccaaccccaacgcgaaccccaacgccaacccgaacgccaaccccaacgccaaccccaacgccaaccccaacgcgaacccgaacgccaaccccaacgccaaccccaacgccaaccccaacgccaacccgaacgcgaaccccaacgccaaccccaacaagaacaaccagggcaacgggcagggccacaacaugcccaacgacccgaaccgcaacguggacgagaacgccaacgccaacaacgacgucaagaacaacaacaacgaggagcccuccgacaagcacaucgagcaguaccugaagaagauccaguacagccucuccaccgaguggagccccugcuccgugacgugcggcaacgggauccaggugcggaucaagcccggcagcgccgacaagccgaaggaccagcuggacuacgagaacgacaucgagaagaagaucugcaagauggagaagugcuccagcgucuucaacguggugaacuccagcaucgggcugaucaugguccucuccuuccuguuccugaacuga

SEQ ID NO: 3306 - RNA, 1311 nt, Artificial Sequence
  derived and/or modified CDS sequence (opt1) from Pf(India)__AAN87576.1__CSP
augaugcgcaagcuggccauccucagcguguccagcuuccuguucgucgaggcccuguuccaggaguaccagugcuacggcuccagcuccaacacccgggugcucaacgagcugaacuacgacaacgcggggaccaaccuguacaacgagcucgagaugaacuacuacggcaagcaggagaacugguacagccugaagaagaacucccgcagccugggggagaacgacgacggcaacaacaacaacggggacaacggccgggagggcaaggacgaggacaagcgcgacgggaacaacgaggacaacgagaagcuccggaagcccaagcacaagaagcugaagcagccgggcgacgggaaccccgaccccaacgccaaccccaacguggacccgaacgccaaccccaacgucgaccccaacgccaaccccaacgccaacccgaacgcgaaccccaacgccaaccccaacgccaaccccaacgccaacccgaacgcgaaccccaacgccaaccccaacgccaaccccaacgccaacccgaacgccaaccccaacgcgaaccccaacgccaaccccaacgccaacccgaacgccaaccccaacgccaaccccaacgcgaaccccaacgccaacccgaacgccaaccccaacgccaaccccaacgccaaccccaacgcgaacccgaacgccaaccccaacgccaaccccaacgccaacccgaacgccaaccccaacgcgaaccccaacgccaaccccaacgccaacccgaacgccaaccccaacgcgaaccccaacgccaaccccaacgccaacccgaacgccaaccccaacgccaaccccaacgcgaaccccaacgccaacccgaacgccaaccccaacgccaaccccaacgccaaccccaacgcgaacccgaacgccaaccccaacgccaaccccaacaagaacaaccagggcaacgggcagggccacaacaugcccaacgacccgaaccgcaacguggacgagaacgccaacgccaacaacgacgugaagaacaacaacaacgaggagcccuccgacaagcacaucgaggaguaccugaagaagauccagaacagccucuccacggaguggagccccugcuccgugaccugcggcaacgggauccagguccggaucaagcccggcagcgcgaacaagccgaaggacgagcugaacuacgagaacgacaucgagaagaagaucugcaagauggagaagugcuccagcguguucaacgucgugaacuccagcaucgggcugaucauggugcucuccuuccuguuccugaacuga

SEQ ID NO: 3307 - RNA, 1311 nt, Artificial Sequence
  derived and/or modified CDS sequence (opt1) from Pf(India)__AAN87620.1__CSP
augaugcgcaagcuggccauccucagcguguccagcuuccuguucgucgaggcccuguuccaggaguaccagugcuacggcuccagcuccaacacccgggugcucaacgagcugaacuacgacaacgcggggaccaaccuguacaacgagcucgagaugaacuacuacggcaagcaggagaacugguacagccugaagaagaacucccgcagccugggggagaacgacgacggcaacaacaacaacggggacaacggccgggagggcaaggacgaggacaagcgcgacgggaacaacgaggacaacgagaagcuccggaagcccaagcacaagaagcugaagcagccgggcggggacaaccccgaccccaacgccaaccccaacguggacccgaacgccaaccccaacgccaaccccaacgccaaccccaacgcgaacccgaacgucaaccccaacgccaaccccaacgccaaccccaacgccaacccgaacgcgaaccccaacgccaaccccaacgccaaccccaacgccaacccgaacgccaaccccaacguggaccccaacgcgaaccccaacgccaacccgaacgccaaccccaacgccaaccccaacgccaaccccaacgcgaacccgaacgccaaccccaacgccaaccccaacgccaaccccaacgccaacccgaacgcgaaccccaacgccaaccccaacgccaacccgaacgccaaccccaacgccaaccccaacgcgaaccccaacgccaacccgaacgccaaccccaacgccaaccccaacgcgaaccccaacgccaacccgaacgccaaccccaacgccaaccccaacgccaaccccaacgcgaacccgaacgccaaccccaacgccaaccccaacgccaaccccaacgccaacccgaacgcgaaccccaacgccaaccccaacaagaacaaccagggcaacgggcagggccacaacaugcccaacgacccgaaccgcaacguggacgagaacgccaacgccaacaacgccgucaagaacaacaacaacgaggagcccuccgacaagcacaucgagcaguaccugaagaagauccagaacagccucuccacggaguggagccccugcuccgugaccugcggcaacgggauccaggugcggaucaagcccggcagcgcgaacaagccgaaggacgagcuggacuacgagaacgacaucgagaagaagaucugcaagauggagaagugcuccagcgucuucaacguggugaacuccagcaucgggcugaucaugguccucuccuuccuguuccugaacuga

SEQ ID NO: 3308 - RNA, 1311 nt, Artificial Sequence
  derived and/or modified CDS sequence (opt1) from Pf(PFS19)__BAN59401.1__CSP
augaugcgcaagcuggccauccucagcguguccagcuuccuguucgucgaggcccuguuccaggaguaccagugcuacggcuccagcuccaacacccgggugcucaacgagcugaacuacgacaacgcggggaccaaccuguacaacgagcucgagaugaacuacuacggcaagcaggagaacugguacagccugaagaagaacucccgcagccugggggagaacgacgacggcaacaacaacaacggggacaacggccgggagggcaaggacgaggacaagcgcgacgggaacaacgaggacaacgagaagcuccggaagcccaagcacaagaagcugaagcagccgggcgacgggaaccccgaccccaacgccaaccccaacguggacccgaacgccaaccccaacgucgaccccaacgccaaccccaacguggacccgaacgccaaccccaacgcgaaccccaacgccaaccccaacgccaacccgaacgccaaccccaacgcgaaccccaacgccaaccccaacgccaacccgaacgccaaccccaacgccaaccccaacgcgaaccccaacgccaacccgaacgccaaccccaacgccaaccccaacgccaaccccaacgcgaacccgaacgccaaccccaacgccaaccccaacgccaaccccaacgccaacccgaacgcgaaccccaacgccaaccccaacgccaacccgaacgccaaccccaacgccaaccccaacgcgaaccccaacgccaacccgaacgccaaccccaacgccaaccccaacgcgaaccccaacgccaacccgaacgccaaccccaacgccaaccccaacgccaaccccaacgcgaacccgaacgccaaccccaacgccaaccccaacgccaaccccaacgccaacccgaacgcgaaccccaacgccaaccccaacaagaacaaccagggcaacgggcagggccacaacaugcccaacgacccgaaccgcaacguggacgagaacgccaacgccaacaacgccgucaagaacaacaacaacgaggagcccuccgacaagcacaucgagcaguaccugaagaagauccagaacagccucuccacggaguggagccccugcuccgugaccugcggcaacgggauccaggugcggaucaagcccggcagcgcgaacaagccgaaggacgagcuggacuacgagaacgacaucgagaagaagaucugcaagauggagaagugcuccagcgucuucaacguggugaacuccagcaucgggcugaucaugguccucuccuuccuguuccugaacuga

SEQ ID NO: 3309 - RNA, 1311 nt, Artificial Sequence
  derived and/or modified CDS sequence (opt1) from Pf(Sol95-121)__BAM85068.1__CSP
augaugcgcaagcuggccauccucagcguguccagcuuccuguucgucgaggcccuguuccaggaguaccagugcuacggcuccagcuccaacacccgggugcucaacgagcugaacuacgacaacgcggggaccaaccuguacaacgagcucgagaugaacuacuacggcaagcaggagaacugguacagccugaagaagaacucccgcagccugggggagaacgacgacggcaacaacaacaacggggacaacggccgggagggcaaggacgaggacaagcgcgacgggaacaacgaggacaacgagaagcuccggaagcccaagcacaagaagcugaagcagccgguggacggcaaccccgaccccaacgccaaccccaacgucgacccgaacgccaaccccaacguggaccccaacgccaaccccaacguggacccgaacgccaaccccaacgcgaaccccaacgccaaccccaacgccaacccgaacgccaaccccaacgcgaaccccaacgccaaccccaacgccaacccgaacgccaaccccaacgccaaccccaacgcgaaccccaacgccaacccgaacgccaaccccaacgccaaccccaacgccaaccccaacgcgaacccgaacgccaaccccaacgccaaccccaacgccaaccccaacgccaacccgaacgcgaaccccaacgccaaccccaacgccaacccgaacgccaaccccaacgccaaccccaacgcgaaccccaacgccaacccgaacgccaaccccaacgccaaccccaacgcgaaccccaacgccaacccgaacgccaaccccaacgccaaccccaacgccaaccccaacgcgaacccgaacgccaaccccaacgccaaccccaacgccaaccccaacgccaacccgaacgcgaagcccaacgccaaccccaacaagaacaaccaggggaacggccaggggcacaacaugcccaacgacccgaaccgcaacgucgacgagaacgccaacgccaacaacgccgugaagaacaacaacaacgaggagcccuccgacaagcacaucgagcaguaccugaagaagauccagaacagccucuccacggaguggagccccugcuccgugaccugcggcaacggcauccagguccggaucaagcccgggagcgcggacaagccgaaggaccagcuggacuacgagaacgacaucgagaagaagaucugcaagauggagaagugcuccagcguguucaacguggucaacuccagcaucggccugaucauggugcucuccuuccuguuccugaacuga

SEQ ID NO: 3310 - RNA, 1311 nt, Artificial Sequence
  derived and/or modified CDS sequence (opt1) from Pf(T837)__BAM84914.1__CSP
augaugcgcaagcuggccauccucagcguguccagcuuccuguucgucgaggcccuguuccaggaguaccagugcuacggcuccagcuccaacacccgggugcucaacgagcugaacuacgacaacgcggggaccaaccuguacaacgagcucgagaugaacuacuacggcaagcaggagaacugguacagccugaagaagaacucccgcagccugggggagaacgacgacggcaacaacaacaacggggacaacggccgggagggcaaggacgaggacaagcgcgacgggaacaacgaggacaacgagaagcuccggaagcccaagcacaagaagcugaagcagccgggcgacgggaaccccgaccccaacgccaaccccaacguggacccgaacgccaaccccaacgucgaccccaacgccaaccccaacgccaacccgaacgcgaaccccaacgccaaccccaacgccaaccccaacgccaacccgaacgcgaaccccaacgccaaccccaacgccaaccccaacgccaacccgaacgccaaccccaacgcgaaccccaacgccaaccccaacgccaacccgaacgccaaccccaacguggaccccaacgccaaccccaacgcgaacccgaacgccaaccccaacgccaaccccaacgccaaccccaacgccaacccgaacgcgaaccccaacgccaaccccaacgccaacccgaacgccaaccccaacgccaaccccaacgcgaaccccaacgccaacccgaacgccaaccccaacgccaaccccaacgcgaaccccaacgccaacccgaacgccaaccccaacgccaaccccaacgccaaccccaacgcgaacccgaacgccaaccccaacgccaaccccaacgccaaccccaacgccaacccgaacgcgaaccccaacgccaaccccaacaagaacaaccagggcaacgggcagggccacaacaugcccaacgacccgaaccgcaacguggacgagaacgccaacgccaacaacgccgucaagaacaacaacaacgaggagcccuccgacaagcacaucacggaguaccugaagaagauccagaacagccucuccaccgaguggagccccugcuccgugaccugcggcaacgggauccaggugcggaucaagcccggcagcgcggggaaguccaaggacgagcuggacuacgagaacgacaucgagaagaagaucugcaagauggagaagugcagcuccgucuucaacguggugaacagcuccaucggccugaucaugguccucagcuuccuguuccugaacuga

SEQ ID NO: 3311 - RNA, 1311 nt, Artificial Sequence
  derived and/or modified CDS sequence (opt1) from Pf(TiMS95-071)__BAM84865.1__CSP
augaugcgcaagcuggccauccucagcguguccagcuuccuguucgucgaggcccuguuccaggaguaccagugcuacggcuccagcuccaacacccgggugcucaacgagcugaacuacgacaacgcggggaccaaccuguacaacgagcucgagaugaacuacuacggcaagcaggagaacugguacagccugaagaagaacucccgcagccugggggagaacgacgacggcaacaacaacaacggggacaacggccgggagggcaaggacgaggacaagcgcgacgggaacaacgaggacaacgagaagcuccggaagcccaagcacaagaagcugaagcagccgggcgacgggaaccccgaccccaacgccaaccccaacguggacccgaacgccaaccccaacgucgaccccaacgccaaccccaacguggacccgaacgccaaccccaacgcgaaccccaacgccaaccccaacgccaacccgaacgccaaccccaacgcgaaccccaacgccaaccccaacgccaacccgaacgccaaccccaacgccaaccccaacgcgaaccccaacgccaacccgaacgccaaccccaacgccaaccccaacgccaaccccaacgcgaacccgaacgccaaccccaacgccaaccccaacgccaaccccaacgccaacccgaacgcgaaccccaacgccaaccccaacgccaacccgaacgccaaccccaacgccaaccccaacgcgaaccccaacgccaacccgaacgccaaccccaacgccaaccccaacgcgaaccccaacgccaacccgaacgccaaccccaacgccaaccccaacgccaaccccaacgcgaacccgaacgccaaccccaacgccaaccccaacgccaaccccaacgccaacccgaacgcgaaccccaacgccaaccccaacaagaacaaccagggcaacgggcagggccacaacaugcccaacgacccgaaccgcaacguggacgagaacgccaacgccaacaacgacgucaagaacaacaacaacgaggagcccuccgacaagcacaucgagcaguaccugaagaagauccaguacagccucuccacggaguggagccccugcuccgugaccugcggcaacgggauccaggugcggaucaagcccggcagcgccgacaagccgaaggaccagcuggacuacgagaacgacaucgagaagaagaucugcaagauggagaagugcuccagcgucuucaacguggugaacuccagcaucgggcugaucaugguccucuccuuccuguuccugaacuga

SEQ ID NO: 3312 - RNA, 1308 nt, Artificial Sequence
  derived and/or modified CDS sequence (opt1) from Pf(TM69)__ACO49446.1__CSP
augcgcaagcuggccauccucagcguguccagcuuccuguucgucgaggcccuguuccaggaguaccagugcuacggcuccagcuccaacacccgggugcucaacgagcugaacuacgacaacgcggggaccaaccuguacaacgagcucgagaugaacuacuacggcaagcaggagaacugguacagccugaagaagaacucccgcagccugggggagaacgacgacggcaacaacaacaacggggacaacggccgggagggcaaggacgaggacaagcgcgacgggaacaacgaggacaacgagaagcuccggaagcccaagcacaagaagcugaagcagccgggcgacgggaaccccgaccccaacgccaaccccaacguggacccgaacgccaaccccaacgucgaccccaacgccaaccccaacguggacccgaacgccaaccccaacgcgaaccccaacgccaaccccaacgccaacccgaacgccaaccccaacgcgaaccccaacgccaaccccaacgccaacccgaacgccaaccccaacgccaaccccaacgcgaaccccaacgccaacccgaacgccaaccccaacgccaaccccaacgccaaccccaacgcgaacccgaacgccaaccccaacgccaaccccaacgccaaccccaacgccaacccgaacgcgaaccccaacgccaaccccaacgccaacccgaacgccaaccccaacgccaaccccaacgcgaaccccaacgccaacccgaacgccaaccccaacgccaaccccaacgcgaaccccaacgccaacccgaacgccaaccccaacgccaaccccaacgccaaccccaacgcgaacccgaacgccaaccccaacgccaaccccaacgccaaccccaacgccaacccgaacgcgaaccccaacgccaaccccaacaagaacaaccagggcaacgggcagggccacaacaugcccaacgacccgaaccgcaacguggacgagaacgccaacgccaacaacgacgucaagaacaacaacaacgaggagcccuccgacaagcacaucgagcaguaccugaagaagauccaguacagccucuccacggaguggagccccugcuccgugaccugcggcaacgggauccaggugcggaucaagcccggcagcgccgacaagccgaaggaccagcuggacuacgagaacgacaucgagaagaagaucugcaagauggagaagugcuccagcgucuucaacguggugaacuccagcaucgggcugaucaugguccucuccuuccuguuccugaacuga

SEQ ID NO: 3313 - RNA, 1308 nt, Artificial Sequence
  derived and/or modified CDS sequence (opt1) from Pf(TMS177)__ACO49503.1__CSP
augcgcaagcuggccauccucagcguguccagcuuccuguucgucgaggcccuguuccaggaguaccagugcuacggcuccagcuccaacacccgggugcucaacgagcugaacuacgacaacgcggggaccaaccuguacaacgagcucgagaugaacuacuacggcaagcaggagaacugguacagccugaagaagaacucccgcagccugggggagaacgacgacggcaacaacaacaacggggacaacggccgggagggcaaggacgaggacaagcgcgacgggaacaacgaggacaacgagaagcuccggaagcccaagcacaagaagcugaagcagccgggcgacgggaaccccgaccccaacgccaaccccaacguggacccgaacgccaaccccaacgucgaccccaacgccaaccccaacguggacccgaacgccaaccccaacgcgaaccccaacgccaaccccaacgccaacccgaacgccaaccccaacgcgaaccccaacgccaaccccaacgccaacccgaacgccaaccccaacgccaaccccaacgcgaaccccaacgccaacccgaacgccaaccccaacgccaaccccaacgccaaccccaacgcgaacccgaacgccaaccccaacgccaaccccaacgccaaccccaacgccaacccgaacgcgaaccccaacgccaaccccaacgccaacccgaacgccaaccccaacgccaaccccaacgcgaaccccaacgccaacccgaacgccaaccccaacgccaaccccaacgcgaaccccaacgccaacccgaacgccaaccccaacgccaaccccaacgccaaccccaacgcgaacccgaacgccaaccccaacgccaaccccaacgccaaccccaacgccaacccgaacgcgaaccccaacgccaaccccaacaagaacaaccagggcaacgggcagggccacaacaugcccaacgacccgaaccgcaacguggacgagaacgccaacgccaacaacgccgucaagaacaacaacaacgaggagcccuccgacaagcacaucgagcaguaccugaagaagauccagaacagccucuccacggaguggagccccugcuccgugaccugcggcaacgggauccaggugcggaucaagcccggcagcgcgaacaagccgaaggacgagcuggacuacgagaacgacaucgagaagaagaucugcaagauggagaagugcuccagcgucuucaacguggugaacuccagcaucgggcugaucaugguccucuccuuccuguuccugaacuga

SEQ ID NO: 3314 - RNA, 1308 nt, Artificial Sequence
  derived and/or modified CDS sequence (opt1) from Pf(TMS178)__ACO49504.1__CSP
augcgcaagcuggccauccucagcguguccagcuuccuguucgucgaggcccuguuccaggaguaccagugcuacggcuccagcuccaacacccgggugcucaacgagcugaacuacgacaacgcggggaccaaccuguacaacgagcucgagaugaacuacuacggcaagcaggagaacugguacagccugaagaagaacucccgcagccugggggagaacgacgacggcaacaacaacaacggggacaacggccgggagggcaaggacgaggacaagcgcgacgggaacaacgaggacaacgagaagcuccggaagcccaagcacaagaagcugaagcagccgggcgacgggaaccccgaccccaacgccaaccccaacguggacccgaacgccaaccccaacgucgaccccaacgccaaccccaacgccaacccgaacgcgaaccccaacgccaaccccaacgccaaccccaacgccaacccgaacgcgaaccccaacgccaaccccaacgccaaccccaacgccaacccgaacgccaaccccaacgcgaaccccaacgccaaccccaacgccaacccgaacgccaaccccaacguggaccccaacgccaaccccaacgcgaacccgaacgccaaccccaacgccaaccccaacgccaaccccaacgccaacccgaacgcgaaccccaacgccaaccccaacgccaacccgaacgccaaccccaacgccaaccccaacgcgaaccccaacgccaacccgaacgccaaccccaacgccaaccccaacgcgaaccccaacgccaacccgaacgccaaccccaacgccaaccccaacgccaaccccaacgcgaacccgaacgccaaccccaacgccaaccccaacgccaaccccaacgccaacccgaacgcgaaccccaacgccaaccccaacaagaacaaccagggcaacgggcagggccacaacaugcccaacgacccgaaccgcaacguggacgagaacgccaacgccaacaacgccgucaagaacaacaacaacgaggagcccuccgacaagcacaucacggaguaccugaagaagauccagaacagccucuccaccgaguggagccccugcuccgugaccugcggcaacgggauccaggugcggaucaagcccggcagcgcggggaaguccaaggacgagcuggacuacgagaacgacaucgagaagaagaucugcaagauggagaagugcagcuccgucuucaacguggugaacagcuccaucggccugaucaugguccucagcuuccuguuccugaacuga

SEQ ID NO: 3315 - RNA, 1305 nt, Artificial Sequence
  derived and/or modified CDS sequence (opt1) from Pf(YL864)__ADF48458.1__CSP
augcgcaagcuggccauccucagcguguccagcuuccuguucgucgaggcccuguuccaggaguaccagugcuacggcuccagcuccaacacccgggugcucaacgagcugaacuacgacaacgcggggaccaaccuguacaacgagcucgagaugaacuacuacggcaagcaggagaacugguacagccugaagaagaacucccgcagccugggggagaacgacgacggcaacaacaacaacggggacaacggccgggagggcaaggacgaggacaagcgcgacgggaacaacgaggacaacgagaagcuccggaagcccaagcacaagaagcugaagcagccgggcgacgggaaccccgaccccaacgccaaccccaacguggacccgaacgccaaccccaacgucgaccccaacgccaaccccaacguggacccgaacgccaaccccaacgcgaaccccaacgccaaccccaacgccaacccgaacgccaaccccaacgcgaaccccaacgccaaccccaacgccaacccgaacgccaaccccaacgccaaccccaacgcgaaccccaacgccaacccgaacgccaaccccaacgccaaccccaacgccaaccccaacguggacccgaacgcgaaccccaacgccaaccccaacgccaaccccaacgccaacccgaacgccaaccccaacgcgaaccccaacgccaacccgaacgccaaccccaacgccaaccccaacgccaaccccaacgcgaacccgaacgccaaccccaacgccaaccccaacgccaaccccaacgcgaacccgaacgccaaccccaacgccaaccccaacgccaaccccaacgccaacccgaacgcgaaccccaacgccaaccccaacgccaaccccaacgccaacccgaacgccaaccccaacgcgaaccccaacaagaacaaccagggcaacgggcagggccacaacaugcccaacgacccgaaccgcaacgucgacgagaacgccaacgccaacaacgacgagaacaacaacaacgaggagcccuccgacaagcacaucgagcaguaccugaagaagauccaguacagccucuccacggaguggagccccugcuccgugaccugcggcaacgggauccaggugcggaucaagcccggcagcgccgacaagccgaaggaccagcuggacuacgagaacgacaucgagaagaagaucugcaagauggagaagugcuccagcgucuucaacguggugaacuccagcaucgggcugaucaugguccucuccuuccuguuccugaacuga

SEQ ID NO: 3316 - RNA, 1299 nt, Artificial Sequence
  derived and/or modified CDS sequence (opt1) from Pf(838)__AAA29543.1__CSP
augaugcgcaagcuggccauccucagcguguccagcuuccuguucgucgaggcccuguuccaggaguaccagugcuacggcuccagcuccaacacccgggugcucaacgagcugaacuacgacaacgcggggaucaaccuguacaacgagcucgagaugaacuacuacggcaagcaggagaacugguacagccugaagaagaacucccgcagccugggggagaacgacgacggcaacaacaacaacggggacaacggccgggagggcaaggacgaggacaagcgcgacgggaacaacgaggacaacgagaagcuccggaagcccaagcacaagaagcugaagcagccgggcgacgggaaccccgaccccaacgccaaccccaacguggacccgaacgccaaccccaacgucgaccccaacgccaaccccaacguggacccgaacgccaaccccaacgcgaaccccaacgccaaccccaacgccaacccgaacgccaaccccaacgcgaaccccaacgccaaccccaacgccaacccgaacgccaaccccaacgccaaccccaacgcgaaccccaacgccaacccgaacgccaaccccaacgccaaccccaacgccaaccccaacgcgaacccgaacgccaaccccaacgccaaccccaacgccaaccccaacgccaacccgaacgcgaaccccaacgccaaccccaacgccaacccgaacgccaaccccaacgccaaccccaacgcgaaccccaacgccaacccgaacgccaaccccaacgccaaccccaacgcgaaccccaacgccaacccgaacgccaaccccaacgccaaccccaacgccaaccccaacgcgaacccgaacgccaaccccaacgccaaccccaacgccaaccccaacgccaacccgaacgcgaaccccaacaagaacaaccagggcaacgggcagggccacaacaugcccaacgaccccaaccgcaacguggacgagaacgccaacgccaacaacgccgucaagaacaacaacaacgaggagccguccgacaagcacaucgagcaguaccugaagaagauccagaacagccucuccaccgaguggagccccugcuccgugacgugcggcaacgggauccaggugcggaucaagcccggcagcgccaacaagcccaaggacgagcuggacuacgagaacgacaucgagaagaagaucugcaagauggagaagugcuccagcgucuucaacguggugaacuccagcaucgggcugaucaugguccucuccuuccuguuccugaacuga

SEQ ID NO: 3317 - RNA, 1299 nt, Artificial Sequence
  derived and/or modified CDS sequence (opt1) from Pf(834a)__AAA29571.1__CSP
augaugcgcaagcuggccauccucagcguguccagcuuccuguucgucgaggcccuguuccaggaguaccagugcuacggcuccagcuccaacacccgggugcucaacgagcugaacuacgacaacgcggggaucaaccuguacaacgagcucgagaugaacuacuacggcaagcaggagaacugguacagccugaagaagaacucccgcagccugggggagaacgacgacggcaacaacaacaacggggacaacggccgggagggcaaggacgaggacaagcgcgacgggaacaacgaggacaacgagaagcuccggaagcccaagcacaagaagcugaagcagccgggcgacgggaaccccgaccccaacgccaaccccaacguggacccgaacgccaaccccaacgucgaccccaacgccaaccccaacguggacccgaacgccaaccccaacguggaccccaacgcgaaccccaacgccaacccgaacgccaaccccaacgccaaccccaacgcgaaccccaacgccaacccgaacgccaaccccaacgccaaccccaacgccaaccccaacgcgaacccgaacgccaaccccaacgccaaccccaacgccaaccccaacgccaacccgaacgcgaaccccaacgccaaccccaacgccaaccccaacgccaacccgaacgccaaccccaacgcgaaccccaacgccaacccgaacgccaaccccaacgccaaccccaacgccaaccccaacgcgaacccgaacgccaaccccaacgccaaccccaacgccaaccccaacgcgaacccgaacgccaaccccaacgccaaccccaacgccaaccccaacgccaacccgaacgcgaaccccaacgccaaccccaacgccaaccccaacgccaacccgaacgccaaccccaacaagaacaaccagggcaacgggcagggccacaacaugcccaacgaccccaaccgcaacgucgacgagaacgcgaacgccaacaacgccgugaagaacaacaacaacgaggagccguccgacaagcacaucgagcaguaccugaagaagauccagaacagccucuccaccgaguggagccccugcuccgugacgugcggcaacgggauccagguccggaucaagcccggcagcgccaacaagcccaaggacgagcuggacuacgagaacgacaucgagaagaagaucugcaagauggagaagugcuccagcguguucaacguggucaacuccagcaucgggcugaucauggugcucuccuuccuguuccugaacuga

SEQ ID NO: 3318 - RNA, 1299 nt, Artificial Sequence
  derived and/or modified CDS sequence (opt1) from Pf(India)__AAN87622.1__CSP
augaugcgcaagcuggccauccucagcguguccagcuuccuguucgucgaggcccuguuccaggaguaccagugcuacggcuccagcuccaacacccgggugcucaacgagcugaacuacgacaacgcggggaccaaccuguacaacgagcucgagaugaacuacuacggcaagcaggagaacugguacagccugaagaagaacucccgcagccugggggagaacgacgacggcaacaacaacaacggggacaacggccgggagggcaaggacgaggacaagcgcgacgggaacaacgaggacaacgagaagcuccggaagcccaagcacaagaagcugaagcagccggccgacggcaaccccgaccccaacgccaaccccaacguggacccgaacgccaaccccaacgccaaccccaacgcgaaccccaacgccaacccgaacgccaaccccaacgccaaccccaacgcgaaccccaacgccaacccgaacgccaaccccaacgccaaccccaacgccaaccccaacgcgaacccgaacgucgaccccaacgccaaccccaacgccaaccccaacgccaacccgaacgccaaccccaacgcgaaccccaacgccaaccccaacgccaacccgaacgccaaccccaacgccaaccccaacgcgaaccccaacgccaacccgaacgccaaccccaacgccaaccccaacgccaacccgaacgcgaaccccaacgccaaccccaacgccaaccccaacgccaacccgaacgcgaaccccaacgccaaccccaacgccaaccccaacgccaacccgaacgccaaccccaacgcgaaccccaacgccaaccccaacgccaacccgaacgccaaccccaacgccaaccccaacgcgaaccccaacgccaacccgaacgccaaccccaacaagaacaaccaggggaacggccaggggcacaacaugcccaacgaccccaaccgcaacguggacgagaacgccaacgccaacaacgcggugaagaacaacaacaacgaggagccguccgacaagcacaucgagcaguaccugaagaagauccagaacagccucuccacggaguggagccccugcuccgugaccugcggcaacggcauccagguccggaucaagcccgggagcgccaacaagcccaaggacgagcuggacuacgagaacgacaucgagaagaagaucugcaagauggagaagugcuccagcguguucaacgucgugaacuccagcaucggccugaucauggugcucuccuuccuguuccugaacuga

SEQ ID NO: 3319 - RNA, 1299 nt, Artificial Sequence
  derived and/or modified CDS sequence (opt1) from Pf(PFS31)__BAN59407.1__CSP
augaugcgcaagcuggccauccucagcguguccagcuuccuguucgucgaggcccuguuccaggaguaccagugcuacggcuccagcuccaacacccgggugcucaacgagcugaacuacgacaacgcggggaccaaccuguacaacgagcucgagaugaacuacuacggcaagcaggagaacugguacagccugaagaagaacucccgcagccugggggagaacgacgacggcaacaacaacaacggggacaacggccgggagggcaaggacgaggacaagcgcgacgggaacaacgaggacaacgagaagcuccggaagcccaagcacaagaagcugaagcagccgggcgacgggaaccccgaccccaacgccaaccccaacguggacccgaacgccaaccccaacgucgaccccaacgccaaccccaacguggacccgaacgccaaccccaacgcgaaccccaacgccaaccccaacgccaacccgaacgccaaccccaacgcgaaccccaacgccaaccccaacgccaacccgaacgccaaccccaacgccaaccccaacgcgaaccccaacgccaacccgaacgccaaccccaacgccaaccccaacgccaaccccaacgcgaacccgaacgccaaccccaacgccaaccccaacgccaaccccaacgccaacccgaacgcgaaccccaacgccaaccccaacgccaacccgaacgccaaccccaacgccaaccccaacgcgaaccccaacgccaacccgaacgccaaccccaacgccaaccccaacgcgaaccccaacgccaacccgaacgccaaccccaacgccaaccccaacgccaaccccaacgcgaacccgaacgccaaccccaacgccaaccccaacgccaaccccaacgccaacccgaacgcgaaccccaacaagaacaaccagggcaacgggcagggccacaacaugcccaacgaccccaaccgcaacguggacgagaacgccaacgccaacaacgacgucaagaacaacaacaacgaggagccguccgacaagcacaucgaggaguaccugaagaagauccagaacagccucuccacggaguggagccccugcuccgugaccugcggcaacgggauccaggugcggaucaagcccggcagcgccaacaagcccaaggacgagcugaacuacgagaacgacaucgagaagaagaucugcaagauggagaagugcuccagcgucuucaacguggugaacuccagcaucgggcugaucaugguccucuccuuccuguuccugaacuga

SEQ ID NO: 3320 - RNA, 1299 nt, Artificial Sequence
  derived and/or modified CDS sequence (opt1) from Pf(PNG912-070)__BAM85010.1__CSP
augaugcgcaagcuggccauccucagcguguccagcuuccuguucgucgaggcccuguuccaggaguaccagugcuacggcuccagcuccaacacccgggugcucaacgagcugaacuacgacaacgcggggaccaaccuguacaacgagcucgagaugaacuacuacggcaagcaggagaacugguacagccugaagaagaacucccgcagccugggggagaacgacgacggcaacaacaacaacggggacaacggccgggagggcaaggacgaggacaagcgcgacgggaacaacgaggacaacgagaagcuccggaagcccaagcacaagaagcugaagcagccgguggacggcaaccccgaccccaacgccaaccccaacgucgacccgaacgccaaccccaacguggaccccaacgccaaccccaacguggacccgaacgccaaccccaacgcgaaccccaacgccaaccccaacgccaacccgaacgccaaccccaacgcgaaccccaacgccaaccccaacgccaacccgaacgccaaccccaacgccaaccccaacgcgaaccccaacgccaacccgaacgccaaccccaacgccaaccccaacgccaaccccaacgcgaacccgaacgccaaccccaacgccaaccccaacgccaaccccaacgccaacccgaacgcgaaccccaacgccaaccccaacgccaacccgaacgccaaccccaacgccaaccccaacgcgaaccccaacgccaacccgaacgccaaccccaacgccaaccccaacgcgaaccccaacgccaacccgaacgccaaccccaacgccaaccccaacgccaaccccaacgcgaacccgaacgccaaccccaacgccaaccccaacgccaaccccaacgccaacccgaacgcgaaccccaacaagaacaaccaggggaacggccaggggcacaacaugcccaacgaccccaaccgcaacgucgacgagaacgccaacgccaacaacgccgugaagaacaacaacaacgaggagccguccgacaagcacaucgagcaguaccugaagaagauccagaacagccucuccacggaguggagccccugcuccgugaccugcggcaacggcauccagguccggaucaagcccgggagcgccgacaagcccaaggaccagcuggacuacgagaacgacaucgagaagaagaucugcaagauggagaagugcuccagcguguucaacguggucaacuccagcaucggccugaucauggugcucuccuuccuguuccugaacuga

SEQ ID NO: 3321 - RNA, 1299 nt, Artificial Sequence
  derived and/or modified CDS sequence (opt1) from Pf(PVS20)__BAN59429.1__CSP
augaugcgcaagcuggccauccucagcguguccagcuuccuguucgucgaggcccuguuccaggaguaccagugcuacggcuccagcuccaacacccgggugcucaacgagcugaacuacgacaacgcggggaccaaccuguacaacgagcucgagaugaacuacuacggcaagcaggagaacugguacagccugaagaagaacucccgcagccugggggagaacgacgacggcaacaacaacaacggggacaacggccgggagggcaaggacgaggacaagcgcgacgggaacaacgaggacaacgagaagcuccggaagcccaagcacaagaagcugaagcagccgggcgacgggaaccccgaccccaacgccaaccccaacguggacccgaacgccaaccccaacgucgaccccaacgccaaccccaacguggacccgaacgccaaccccaacgcgaaccccaacgccaaccccaacgccaacccgaacgccaaccccaacgcgaaccccaacgccaaccccaacgccaacccgaacgccaaccccaacgccaaccccaacgcgaaccccaacgccaacccgaacgccaaccccaacgccaaccccaacgccaaccccaacgcgaacccgaacgccaaccccaacgccaaccccaacgccaaccccaacgccaacccgaacgcgaaccccaacgccaaccccaacgccaacccgaacgccaaccccaacgccaaccccaacgcgaaccccaacgccaacccgaacgccaaccccaacgccaaccccaacgcgaaccccaacgccaacccgaacgccaaccccaacgccaaccccaacgccaaccccaacgcgaacccgaacgccaaccccaacgccaaccccaacgccaaccccaacgccaacccgaacgcgaaccccaacaagaacaaccagggcaacgggcagggccacaacaugcccaacgaccccaaccgcaacguggacgagaacgccaacgccaacaacgccgucaagaacaacaacaacgaggagccguccgacaagcacaucgagcaguaccugaagaagauccagaacagccucuccacggaguggagccccugcuccgugaccugcggcaacgggauccaggugcggaucaagcccggcagcgccaacaagcccaaggacgagcuggacuacgagaacgacaucgagaagaagaucugcaagauggagaagugcuccagcgucuucaacguggugaacuccagcaucgggcugaucaugguccucuccuuccuguuccugaacuga

SEQ ID NO: 3322 - RNA, 1299 nt, Artificial Sequence
  derived and/or modified CDS sequence (opt1) from Pf(Sol95-241)__BAM85085.1__CSP
augaugcgcaagcuggccauccucagcguguccagcuuccuguucgucgaggcccuguuccaggaguaccagugcuacggcuccagcuccaacacccgggugcucaacgagcugaacuacgacaacgcggggaccaaccuguacaacgagcucgagaugaacuacuacggcaagcaggagaacugguacagccugaagaagaacucccgcagccugggggagaacgacgacggcaacaacaacaacggggacaacggccgggagggcaaggacgaggacaagcgcgacgggaacaacgaggacaacgagaagcuccggaagcccaagcacaagaagcugaagcagccgggcgacgggaaccccgaccccaacgccaaccccaacguggacccgaacgccaaccccaacgucgaccccaacgccaaccccaacguggacccgaacgccaaccccaacguggaccccaacgcgaaccccaacgccaacccgaacgccaaccccaacgccaaccccaacgcgaaccccaacgccaacccgaacgccaaccccaacgccaaccccaacgccaaccccaacgcgaacccgaacgccaaccccaacgccaaccccaacgccaaccccaacgccaacccgaacgcgaaccccaacgccaaccccaacgccaaccccaacgccaacccgaacgccaaccccaacgcgaaccccaacgccaacccgaacgccaaccccaacgccaaccccaacgccaaccccaacgcgaacccgaacgccaaccccaacgccaaccccaacgccaaccccaacgcgaacccgaacgccaaccccaacgccaaccccaacgccaaccccaacgccaacccgaacgcgaaccccaacgccaaccccaacgccaaccccaacgccaacccgaacgccaaccccaacaagaacaaccagggcaacgggcagggccacaacaugcccaacgaccccaaccgcaacgucgacgagaacgcgaacgccaacaacgccgugaagaacaacaacaacgaggagccguccgacaagcacaucgagcaguaccugaagaagauccagaacagccucuccacggaguggagccccugcuccgugaccugcggcaacgggauccagguccggaucaagcccggcagcgccaacaagcccaaggacgagcuggacuacgagaacgacaucgagaagaagaucugcaagauggagaagugcuccagcguguucaacguggucaacuccagcaucgggcugaucauggugcucuccuuccuguuccugaacuga

SEQ ID NO: 3323 - RNA, 1299 nt, Artificial Sequence
  derived and/or modified CDS sequence (opt1) from Pf(TiMS95-198)__BAM84895.1__CSP
augaugcgcaagcuggccauccucagcguguccagcuuccuguucgucgaggcccuguuccaggaguaccagugcuacggcuccagcuccaacacccgggugcucaacgagcugaacuacgacaacgcggggaccaaccuguacaacgagcucgagaugaacuacuacggcaagcaggagaacugguacagccugaagaagaacucccgcagccugggggagaacgacgacggcaacaacaacaacggggacaacggccgggagggcaaggacgaggacaagcgcgacgggaacaacgaggacaacgagaagcuccggaagcccaagcacaagaagcugaagcagccgggcgacgggaaccccgaccccaacgccaaccccaacguggacccgaacgccaaccccaacgucgaccccaacgccaaccccaacguggacccgaacgccaaccccaacgcgaaccccaacgccaaccccaacgccaacccgaacgccaaccccaacgcgaaccccaacgccaaccccaacgccaacccgaacgccaaccccaacgccaaccccaacgcgaaccccaacgccaacccgaacgccaaccccaacgccaaccccaacgccaaccccaacgcgaacccgaacgccaaccccaacgccaaccccaacgccaaccccaacgccaacccgaacgcgaaccccaacgccaaccccaacgccaacccgaacgccaaccccaacgccaaccccaacgcgaaccccaacgccaacccgaacgccaaccccaacgccaaccccaacgcgaaccccaacgccaacccgaacgccaaccccaacgccaaccccaacgccaaccccaacgcgaacccgaacgccaaccccaacgccaaccccaacgccaaccccaacgccaacccgaacgcgaaccccaacaagaacaaccagggcaacgggcagggccacaacaugcccaacgaccccaaccgcaacguggacgagaacgccaacgccaacaacgccgucaagaacaacaacaacgaggagccguccgacaagcacaucgagcaguaccugaagaacauccagaacagccucuccacggaguggagccccugcuccgugaccugcggcaacgggauccaggugcggaucaagcccggcagcgccaacaagcccaaggacgagcuggacuacgagaacgacaucgagaagaagaucugcaagauggagaagugcuccagcgucuucaacguggugaacuccagcaucgggcugaucaugguccucuccuuccuguuccugaacuga

SEQ ID NO: 3324 - RNA, 1296 nt, Artificial Sequence
  derived and/or modified CDS sequence (opt1) from Pf(D164)__ACO49368.1__CSP
augcgcaagcuggccauccucagcguguccagcuuccuguucgucgaggcccuguuccaggaguaccagugcuacggcuccagcuccaacacccgggugcucaacgagcugaacuacgacaacgcggggaccaaccuguacaacgagcucgagaugaacuacuacggcaagcaggagaacugguacagccugaagaagaacucccgcagccugggggagaacgacgacggcaacaacaacaacggggacaacggccgggagggcaaggacgaggacaagcgcgacgggaacaacgaggacaacgagaagcuccggaagcccaagcacaagaagcugaagcagccgggcgacgggaaccccgaccccaacgccaaccccaacguggacccgaacgccaaccccaacgucgaccccaacgccaaccccaacguggacccgaacgccaaccccaacguggaccccaacgcgaaccccaacgccaacccgaacgccaaccccaacgccaaccccaacgcgaaccccaacgccaacccgaacgccaaccccaacgccaaccccaacgccaaccccaacgcgaacccgaacgccaaccccaacgccaaccccaacgccaaccccaacgccaacccgaacgcgaaccccaacgccaaccccaacgccaaccccaacgccaacccgaacgccaaccccaacgcgaaccccaacgccaacccgaacgccaaccccaacgccaaccccaacgccaaccccaacgcgaacccgaacgccaaccccaacgccaaccccaacgccaaccccaacgcgaacccgaacgccaaccccaacgccaaccccaacgccaaccccaacgccaacccgaacgcgaaccccaacgccaaccccaacgccaaccccaacgccaacccgaacgccaaccccaacaagaacaaccagggcaacgggcagggccacaacaugcccaacgaccccaaccgcaacgucgacgagaacgcgaacgccaacaacgccgugaagaacaacaacaacgaggagccguccgacaagcacaucgagcaguaccugaagaagauccagaacagccucuccacggaguggagccccugcuccgugaccugcggcaacgggauccagguccggaucaagcccggcagcgccaacaagcccaaggacgagcuggacuacgagaacgacaucgagaagaagaucugcaagauggagaagugcuccagcguguucaacguggucaacuccagcaucgggcugaucauggugcucuccuuccuguuccugaacuga

SEQ ID NO: 3325 - RNA, 1296 nt, Artificial Sequence
  derived and/or modified CDS sequence (opt1) from Pf(E28)__ACO49378.1__CSP
augcgcaagcuggccauccucagcguguccagcuuccuguucgucgaggcccuguuccaggaguaccagugcuacggcuccagcuccaacacccgggugcucaacgagcugaacuacgacaacgcggggaccaaccuguacaacgagcucgagaugaacuacuacggcaagcaggagaacugguacagccugaagaagaacucccgcagccugggggagaacgacgacggcaacaacaacaacggggacaacggccgggagggcaaggacgaggacaagcgcgacgggaacaacgaggacaacgagaagcuccggaagcccaagcacaagaagcugaagcagccgggcgacgggaaccccgaccccaacgccaaccccaacguggacccgaacgccaaccccaacgucgaccccaacgccaaccccaacguggacccgaacgccaaccccaacgcgaaccccaacgccaaccccaacgccaacccgaacgccaaccccaacgcgaaccccaacgccaaccccaacgccaacccgaacgccaaccccaacgccaaccccaacgcgaaccccaacgccaacccgaacgccaaccccaacgccaaccccaacgccaaccccaacgcgaacccgaacgccaaccccaacgccaaccccaacgccaaccccaacgccaacccgaacgcgaaccccaacgccaaccccaacgccaacccgaacgccaaccccaacgccaaccccaacgcgaaccccaacgccaacccgaacgccaaccccaacgccaaccccaacgcgaaccccaacgccaacccgaacgccaaccccaacgccaaccccaacgccaaccccaacgcgaacccgaacgccaaccccaacgccaaccccaacgccaaccccaacgccaacccgaacgcgaaccccaacaagaacaaccagggcaacgggcagggccacaacaugcccaacgaccccaaccgcaacguggacgagaacgccaacgccaacaacgccgucaagaacaacaacaacgaggagccguccgacaagcacaucgagcaguaccugaagaacauccagaacagccucuccacggaguggagccccugcuccgugaccugcggcaacgggauccaggugcggaucaagcccggcagcgccaacaagcccaaggacgagcuggacuacgagaacgacaucgagaagaagaucugcaagauggagaagugcuccagcgucuucaacguggugaacuccagcaucgggcugaucaugguccucuccuuccuguuccugaacuga

SEQ ID NO: 3326 - RNA, 1296 nt, Artificial Sequence
  derived and/or modified CDS sequence (opt1) from Pf(TM121)__ACO49457.1__CSP
augcgcaagcuggccauccucagcguguccagcuuccuguucgucgaggcccuguuccaggaguaccagugcuacggcuccagcuccaacacccgggugcucaacgagcugaacuacgacaacgcggggaccaaccuguacaacgagcucgagaugaacuacuacggcaagcaggagaacugguacagccugaagaagaacucccgcagccugggggagaacgacgacggcaacaacaacaacggggacaacggccgggagggcaaggacgaggacaagcgcgacgggaacaacgaggacaacgagaagcuccggaagcccaagcacaagaagcugaagcagccgggcgacgggaaccccgaccccaacgccaaccccaacguggacccgaacgccaaccccaacgucgaccccaacgccaaccccaacguggacccgaacgccaaccccaacgcgaaccccaacgccaaccccaacgccaacccgaacgccaaccccaacgcgaaccccaacgccaaccccaacgccaacccgaacgccaaccccaacgccaaccccaacgcgaaccccaacgccaacccgaacgccaaccccaacgccaaccccaacgccaaccccaacgcgaacccgaacgccaaccccaacgccaaccccaacgccaaccccaacgccaacccgaacgcgaaccccaacgccaaccccaacgccaacccgaacgccaaccccaacgccaaccccaacgcgaaccccaacgccaacccgaacgccaaccccaacgccaaccccaacgcgaaccccaacgccaacccgaacgccaaccccaacgccaaccccaacgccaaccccaacgcgaacccgaacgccaaccccaacgccaaccccaacgccaaccccaacgccaacccgaacgcgaaccccaacaagaacaaccagggcaacgggcagggccacaacaugcccaacgaccccaaccgcaacguggacgagaacgccaacgccaacaacgacgucaagaacaacaacaacgaggagccguccgacaagcacaucgagcaguaccugaagaagauccaguacagccucuccacggaguggagccccugcuccgugaccugcggcaacgggauccaggugcggaucaagcccggcagcgccaacaagcccaaggacgagcuggacuacgagaacgacaucgagaagaagaucugcaagauggagaagugcuccagcgucuucaacguggugaacuccagcaucgggcugaucaugguccucuccuuccuguuccugaacuga

SEQ ID NO: 3327 - RNA, 1296 nt, Artificial Sequence
  derived and/or modified CDS sequence (opt1) from Pf(TM176)__ACO49467.1__CSP
augcgcaagcuggccauccucagcguguccagcuuccuguucgucgaggcccuguuccaggaguaccagugcuacggcuccagcuccaacacccgggugcucaacgagcugaacuacgacaacgcggggaccaaccuguacaacgagcucgagaugaacuacuacggcaagcaggagaacugguacagccugaagaagaacucccgcagccugggggagaacgacgacggcaacaacaacaacggggacaacggccgggagggcaaggacgaggacaagcgcgacgggaacaacgaggacaacgagaagcuccggaagcccaagcacaagaagcugaagcagccgggcgacgggaaccccgaccccaacgccaaccccaacguggacccgaacgccaaccccaacgucgaccccaacgccaaccccaacguggacccgaacgccaaccccaacgcgaaccccaacgccaaccccaacgccaacccgaacgccaaccccaacgcgaaccccaacgccaaccccaacgccaacccgaacgccaaccccaacgccaaccccaacgcgaaccccaacgccaacccgaacgccaaccccaacgccaaccccaacgccaaccccaacgcgaacccgaacgccaaccccaacgccaaccccaacgccaaccccaacgccaacccgaacgcgaaccccaacgccaaccccaacgccaacccgaacgccaaccccaacgccaaccccaacgcgaaccccaacgccaacccgaacgccaaccccaacgccaaccccaacgcgaaccccaacgccaacccgaacgccaaccccaacgccaaccccaacgccaaccccaacgcgaacccgaacgccaaccccaacgccaaccccaacgccaaccccaacgccaacccgaacgcgaaccccaacaagaacaaccagggcaacgggcagggccacaacaugcccaacgaccccaaccgcaacguggacgagaacgccaacgccaacaacgacgucaagaacaacaacaacgaggagccguccgacaagcacaucgagcaguaccugaagaagauccaguacagccucuccacggaguggagccccugcuccgugaccugcggcaacgggauccaggugcggaucaagcccggcagcgccgacaagcccaaggaccagcuggacuacgagaacgacaucgagaagaagaucugcaagauggagaagugcuccagcgucuucaacguggugaacuccagcaucgggcugaucaugguccucuccuuccuguuccugaacuga

SEQ ID NO: 3328 - RNA, 1296 nt, Artificial Sequence
  derived and/or modified CDS sequence (opt1) from Pf(TSY650)__ACO49541.1__CSP
augcgcaagcuggccauccucagcguguccagcuuccuguucgucgaggcccuguuccaggaguaccagugcuacggcuccagcuccaacacccgggugcucaacgagcugaacuacgacaacgcggggaccaaccuguacaacgagcucgagaugaacuacuacggcaagcaggagaacugguacagccugaagaagaacucccgcagccugggggagaacgacgacggcaacaacaacaacggggacaacggccgggagggcaaggacgaggacaagcgcgacgggaacaacgaggacaacgagaagcuccggaagcccaagcacaagaagcugaagcagccgggcgacgggaaccccgaccccaacgccaaccccaacguggacccgaacgccaaccccaacgucgaccccaacgccaaccccaacguggacccgaacgccaaccccaacgcgaaccccaacgccaaccccaacgccaacccgaacgccaaccccaacgcgaaccccaacgccaaccccaacgccaacccgaacgccaaccccaacgccaaccccaacgcgaaccccaacgccaacccgaacgccaaccccaacgccaaccccaacgccaaccccaacgcgaacccgaacgccaaccccaacgccaaccccaacgccaaccccaacgccaacccgaacgcgaaccccaacgccaaccccaacgccaacccgaacgccaaccccaacgccaaccccaacgcgaaccccaacgccaacccgaacgccaaccccaacgccaaccccaacgcgaaccccaacgccaacccgaacgccaaccccaacgccaaccccaacgccaaccccaacgcgaacccgaacgccaaccccaacgccaaccccaacgccaaccccaacgccaacccgaacgcgaaccccaacaagaacaaccagggcaacgggcagggccacaacaugcccaacgaccccaaccgcaacguggacgagaacgccaacgccaacaacgccgucaagaacaacaacaacgaggagccguccgacaagcacaucgagcaguaccugaagaagauccagaacagccucuccacggaguggagccccugcuccgugaccugcggcaacgggauccaggugcggaucaagcccggcagcgccaacaagcccaaggacgagcuggacuacgagaacgacaucgagaagaagaucugcaagauggagaagugcuccagcgucuucaacguggugaacuccagcaucgggcugaucaugguccucuccuuccuguuccugaacuga

SEQ ID NO: 3329 - RNA, 1296 nt, Artificial Sequence
  derived and/or modified CDS sequence (opt1) from Pf(TSY682)__ACO49544.1__CSP
augcgcaagcuggccauccucagcguguccagcuuccuguucgucgaggcccuguuccaggaguaccagugcuacggcuccagcuccaacacccgggugcucaacgagcugaacuacgacaacgcggggaccaaccuguacaacgagcucgagaugaacuacuacggcaagcaggagaacugguacagccugaagaagaacucccgcagccugggggagaacgacgacggcaacaacaacaacggggacaacggccgggagggcaaggacgaggacaagcgcgacgggaacaacgaggacaacgagaagcuccggaagcccaagcacaagaagcugaagcagccgggcgacgggaaccccgaccccaacgccaaccccaacguggacccgaacgccaaccccaacgucgaccccaacgccaaccccaacguggacccgaacgccaaccccaacgcgaaccccaacgccaaccccaacgccaacccgaacgccaaccccaacgcgaaccccaacgccaaccccaacgccaacccgaacgccaaccccaacgccaaccccaacgcgaaccccaacgccaacccgaacgccaaccccaacgccaaccccaacgccaaccccaacgcgaacccgaacgccaaccccaacgccaaccccaacgccaaccccaacgccaacccgaacgcgaaccccaacgccaaccccaacgccaacccgaacgccaaccccaacgccaaccccaacgcgaaccccaacgccaacccgaacgccaaccccaacgccaaccccaacgcgaaccccaacgccaacccgaacgccaaccccaacgccaaccccaacgccaaccccaacgcgaacccgaacgccaaccccaacgccaaccccaacgccaaccccaacgccaacccgaacgcgaaccccaacaagaacaaccagggcaacgggcagggccacaacaugcccaacgaccccaaccgcaacguggacgagaacgccaacgccaacaacgacgucaagaacaacaacaacgaggagccguccgacaagcacaucgaggaguaccugaagaagauccagaacagccucuccacggaguggagccccugcuccgugaccugcggcaacgggauccaggugcggaucaagcccggcagcgccaacaagcccaaggacgagcugaacuacgagaacgacaucgagaagaagaucugcaagauggagaagugcuccagcgucuucaacguggugaacuccagcaucgggcugaucaugguccucuccuuccuguuccugaacuga

SEQ ID NO: 3330 - RNA, 1287 nt, Artificial Sequence
  derived and/or modified CDS sequence (opt1) from Pf(India)__AAN87575.1__CSP
augaugcgcaagcuggccauccucagcguguccagcuuccuguucgucgaggcccuguuccaggaguaccagugcuacggcuccagcuccaacacccgggugcucaacgagcugaacuacgacaacgcggggaccaaccuguacaacgagcucgagaugaacuacuacggcaagcaggagaacugguacagccugaagaagaacucccgcagccugggggagaacgacgacggcaacaacaacaacggggacaacggccgggagggcaaggacgaggacaagcgcgacgggaacaacgaggacaacgagaagcuccggaagcccaagcacaagaagcugaagcagccgggcgacgggaaccccgaccccaacgccaaccccaacguggacccgaacgccaaccccaacgucgaccccaacgccaaccccaacgccaacccgaacgcgaaccccaacgccaaccccaacgccaaccccaacgccaacccgaacgcgaaccccaacgccaaccccaacgccaaccccaacgccaacccgaacgccaaccccaacgcgaaccccaacgccaaccccaacgccaacccgaacgccaaccccaacgccaaccccaacgcgaaccccaacgccaacccgaacgccaaccccaacgccaaccccaacgccaaccccaacgcgaacccgaacgccaaccccaacgccaaccccaacgccaacccgaacgccaaccccaacgcgaaccccaacgccaaccccaacgccaacccgaacgccaaccccaacgcgaaccccaacgccaaccccaacgccaacccgaacgccaaccccaacgccaaccccaacgcgaaccccaacgccaacccgaacgccaaccccaacgccaaccccaacgccaaccccaacgcgaacccgaacaagaacaaccagggcaacgggcgcggccacaacaugcccaacgaccccaaccggaacguggacgagaacgccaacgccaacaacgacgugaagaacaacaacaacgaggagcccuccgacaagcacaucgaggaguaccugaagaagauccagaacagccucuccacggaguggagcccgugcuccgugaccugcggcaacgggauccagguccgcaucaagcccggcagcgccaacaagcccaaggacgagcugaacuacgagaacgacaucgagaagaagaucugcaagauggagaagugcuccagcguguucaacgucgugaacuccagcaucgggcugaucauggugcucuccuuccuguuccugaacuga

SEQ ID NO: 3331 - RNA, 1287 nt, Artificial Sequence
  derived and/or modified CDS sequence (opt1) from Pf(Pal97-082)__BAM84946.1__CSP
augaugcgcaagcuggccauccucagcguguccagcuuccuguucgucgaggcccuguuccaggaguaccagugcuacggcuccagcuccaacacccgggugcucaacgagcugaacuacgacaacgcggggaccaaccuguacaacgagcucgagaugaacuacuacggcaagcaggagaacugguacagccugaagaagaacucccgcagccugggggagaacgacgacggcaacaacaacaacggggacaacggccgggagggcaaggacgaggacaagcgcgacgggaacaacgaggacaacgagaagcuccggaagcccaagcacaagaagcugaagcagccgggcgacgggaaccccgaccccaacgccaaccccaacguggacccgaacgccaaccccaacgucgaccccaacgccaaccccaacguggacccgaacgccaaccccaacgcgaaccccaacgccaaccccaacgccaacccgaacgccaaccccaacgcgaaccccaacgccaaccccaacgccaacccgaacgccaaccccaacgccaaccccaacgcgaaccccaacgccaacccgaacgccaaccccaacgccaaccccaacgccaaccccaacgcgaacccgaacgccaaccccaacgccaaccccaacgccaaccccaacguggacccgaacgccaaccccaacgcgaaccccaacgccaacccgaacgccaaccccaacgccaaccccaacgccaaccccaacgcgaacccgaacgccaaccccaacgccaaccccaacgccaaccccaacgcgaacccgaacgccaaccccaacgccaaccccaacgccaaccccaacgccaacccgaacgcgaaccccaacgccaaccccaacgccaaccccaacgccaacccgaacaagaacaaccagggcaacgggcagggccacaacaugcccaacgaccccaaccgcaacgucgacgagaacgccaacgcgaacaacgccgugaagaacaacaacaacgaggagcccuccgacaagcacaucgagcaguaccugaagaagauccagaacagccucuccacggaguggagcccgugcuccgugaccugcggcaacgggauccagguccggaucaagcccggcagcgccgggaaguccaaggacgagcuggacuacgagaacgacaucgagaagaagaucugcaagauggagaagugcagcuccguguucaacguggucaacagcuccaucggccugaucauggugcucagcuuccuguuccugaacuga

SEQ ID NO: 3332 - RNA, 1287 nt, Artificial Sequence
  derived and/or modified CDS sequence (opt1) from Pf(Pal97-084)__BAM84947.1__CSP
augaugcgcaagcuggccauccucagcguguccagcuuccuguucgucgaggcccuguuccaggaguaccagugcuacggcuccagcuccaacacccgggugcucaacgagcugaacuacgacaacgcggggaccaaccuguacaacgagcucgagaugaacuacuacggcaagcaggagaacugguacagccugaagaagaacucccgcagccugggggagaacgacgacggcaacaacaacaacggggacaacggccgggagggcaaggacgaggacaagcgcgacgggaacaacgaggacaacgagaagcuccggaagcccaagcacaagaagcugaagcagccgggcgacgggaaccccgaccccaacgccaaccccaacguggacccgaacgccaaccccaacgucgaccccaacgccaaccccaacguggacccgaacgccaaccccaacgcgaaccccaacgccaaccccaacgccaacccgaacgccaaccccaacgcgaaccccaacgccaaccccaacgccaacccgaacgccaaccccaacgccaaccccaacgcgaaccccaacgccaacccgaacgccaaccccaacgccaaccccaacgccaaccccaacgcgaacccgaacgccaaccccaacgccaaccccaacgccaaccccaacgccaacccgaacgcgaaccccaacgccaaccccaacgccaacccgaacgccaaccccaacgccaaccccaacgcgaaccccaacgccaacccgaacgccaaccccaacgccaaccccaacgcgaaccccaacgccaacccgaacgccaaccccaacgccaaccccaacgccaaccccaacgcgaacccgaacgccaaccccaacgccaaccccaacgccaaccccaacgccaacccgaacaagaacaaccagggcaacgggcagggccacaacaugcccaacgaccccaaccgcaacguggacgagaacgcgaacgccaacaacgccgucaagaacaacaacaacgaggagcccuccgaccagcacaucgagaaguaccugaagaucauccagaacagccucuccacggaguggagcccgugcuccgugaccugcggcaacgggauccaggugcggaucaagcccggcagcgccgacaagcccaaggaccagcuggacuacgccaacgacaucgagaagaagaucugcaagauggagaagugcuccagcgucuucaacguggugaacuccagcaucgggcugaucaugguccucuccuuccuguuccugaacuga

SEQ ID NO: 3333 - RNA, 1287 nt, Artificial Sequence
  derived and/or modified CDS sequence (opt1) from Pf(PFS54)__BAN59412.1__CSP
augaugcgcaagcuggccauccucagcguguccagcuuccuguucgucgaggcccuguuccaggaguaccagugcuacggcuccagcuccaacacccgggugcucaacgagcugaacuacgacaacgcggggaccaaccuguacaacgagcucgagaugaacuacuacggcaagcaggagaacugguacagccugaagaagaacucccgcagccugggggagaacgacgacggcaacaacaacaacggggacaacggccgggagggcaaggacgaggacaagcgcgacgggaacaacgaggacaacgagaagcuccggaagcccaagcacaagaagcugaagcagccgggcgacgacaaccccgaccccaacgccaaccccaacguggacccgaacgccaaccccaacgucgaccccaacgccaaccccaacgccaacccgaacgcgaaccccaacgccaaccccaacgccaaccccaacgccaacccgaacgcgaaccccaacgccaaccccaacgccaaccccaacgccaacccgaacgccaaccccaacgcgaaccccaacgccaaccccaacgccaacccgaacguggaccccaacgccaaccccaacgccaaccccaacgcgaacccgaacgccaaccccaacgccaaccccaacgccaaccccaacgccaacccgaacgcgaaccccaacgccaaccccaacgccaacccgaacgccaaccccaacgccaaccccaacgcgaaccccaacgccaacccgaacgccaaccccaacgccaaccccaacgcgaaccccaacgccaacccgaacgccaaccccaacgccaaccccaacgccaaccccaacgcgaacccgaacgccaaccccaacgccaaccccaacgccaaccccaacgccaacccgaacaagaacaaccaggggaacggccaggggcacaacaugcccaacgaccccaaccgcaacguggacgagaacgcgaacgccaacaacgccgucaagaacaacaacaacgaggagcccuccgacaagcacaucgagcaguaccugaagaagauccaguacagccucuccacggaguggagcccgugcuccgugaccugcggcaacggcauccaggugcggaucaagcccgggagcgccgacaagcccaaggaccagcuggacuacgagaacgacaucgagaagaagaucugcaagauggagaagugcuccagcgucuucaacguggugaacuccagcaucggccugaucaugguccucuccuuccuguuccugaacuga

SEQ ID NO: 3334 - RNA, 1287 nt, Artificial Sequence
  derived and/or modified CDS sequence (opt1) from Pf(PFS79)__BAN59422.1__CSP
augaugcgcaagcuggccauccucagcguguccagcuuccuguucgucgaggcccuguuccaggaguaccagugcuacggcuccagcuccaacacccgggugcucaacgagcugaacuacgacaacgcggggaccaaccuguacaacgagcucgagaugaacuacuacggcaagcaggagaacugguacagccugaagaagaacucccgcagccugggggagaacgacgacggcaacaacaacaacggggacaacggccgggagggcaaggacgaggacaagcgcgacgggaacaacgaggacaacgagaagcuccggaagcccaagcacaagaagcugaagcagccgggcgacgggaaccccgaccccaacgccaaccccaacguggacccgaacgccaaccccaacgucgaccccaacgccaaccccaacguggacccgaacgccaaccccaacgcgaaccccaacgccaaccccaacgccaacccgaacgccaaccccaacgcgaaccccaacgccaaccccaacgccaacccgaacgccaaccccaacgccaaccccaacgcgaaccccaacgccaacccgaacgccaaccccaacgccaaccccaacgccaaccccaacgcgaacccgaacgccaaccccaacgccaaccccaacgccaaccccaacgccaacccgaacgcgaaccccaacgccaaccccaacgccaacccgaacgccaaccccaacgccaaccccaacgcgaaccccaacgccaacccgaacgccaaccccaacgccaaccccaacgcgaaccccaacgccaacccgaacgccaaccccaacgccaaccccaacgccaaccccaacgcgaacccgaacgccaaccccaacgccaaccccaacgccaaccccaacgccaacccgaacaagaacaaccagggcaacgggcagggccacaacaugcccaacgaccccaaccgcaacguggacgagaacgcgaacgccaacaacgccgucaagaacaacaacaacgaggagcccuccgacaagcacaucgagcaguaccugaagaagauccagaacagccucuccacggaguggagcccgugcuccgugaccugcggcaacgggauccaggugcggaucaagcccggcagcgccaacaagcccaaggacgagcuggacuacgagaacgacaucgagaagaagaucugcaagauggagaagugcuccagcgucuucaacguggugaacuccagcaucgggcugaucaugguccucuccuuccuguuccugaacuga

SEQ ID NO: 3335 - RNA, 1287 nt, Artificial Sequence
  derived and/or modified CDS sequence (opt1) from Pf(PFS83)__BAN59424.1__CSP
augaugcgcaagcuggccauccucagcguguccagcuuccuguucgucgaggcccuguuccaggaguaccagugcuacggcuccagcuccaacacccgggugcucaacgagcugaacuacgacaacgcggggaccaaccuguacaacgagcucgagaugaacuacuacggcaagcaggagaacugguacagccugaagaagaacucccgcagccugggggagaacgacgacggcaacaacaacaacggggacaacggccgggagggcaaggacgaggacaagcgcgacgggaacaacgaggacaacgagaagcuccggaagcccaagcacaagaagcugaagcagccgggcgacgggaaccccgaccccaacgccaaccccaacguggacccgaacgccaaccccaacgucgaccccaacgccaaccccaacguggacccgaacgccaaccccaacguggaccccaacgcgaaccccaacgccaacccgaacgccaaccccaacgccaaccccaacgcgaaccccaacgccaacccgaacgccaaccccaacgccaaccccaacgccaaccccaacgcgaacccgaacgccaaccccaacgccaaccccaacgccaaccccaacgccaacccgaacgcgaaccccaacgccaaccccaacgccaaccccaacgccaacccgaacgccaaccccaacgcgaaccccaacgccaacccgaacgccaaccccaacgccaaccccaacgccaaccccaacgcgaacccgaacgccaaccccaacgccaaccccaacgccaaccccaacgcgaacccgaacgccaaccccaacgccaaccccaacgccaaccccaacgccaacccgaacgcgaaccccaacgccaaccccaacgccaaccccaacgccaacccgaacaagaacaaccagggcaacgggcagggccacaacaugcccaacgaccccaaccgcaacgucgacgagaacgccaacgcgaacaacgccgugaagaacaacaacaacgaggagcccuccgacaagcacaucgagcaguaccugaagaagauccagaacagccucuccacggaguggagcccgugcuccgugaccugcggcaacgggauccagguccggaucaagcccggcagcgccaacaagcccaaggacgagcuggacuacgagaacgacaucgagaagaagaucugcaagauggagaagugcuccagcguguucaacguggucaacuccagcaucgggcugaucauggugcucuccuuccuguuccugaacuga

SEQ ID NO: 3336 - RNA, 1287 nt, Artificial Sequence
  derived and/or modified CDS sequence (opt1) from Pf(TiMS95-112)__BAM84878.1__CSP
augaugcgcaagcuggccauccucagcguguccagcuuccuguucgucgaggcccuguuccaggaguaccagugcuacggcuccagcuccaacacccgggugcucaacgagcugaacuacgacaacgcggggaccaaccuguacaacgagcucgagaugaacuacuacggcaagcaggagaacugguacagccugaagaagaacucccgcagccugggggagaacgacgacggcaacaacaacaacggggacaacggccgggagggcaaggacgaggacaagcgcgacgggaacaacgaggacaacgagaagcuccggaagcccaagcacaagaagcugaagcagccgggcgacgggaaccccgaccccaacgccaaccccaacguggacccgaacgccaaccccaacgucgaccccaacgccaaccccaacguggacccgaacgccaaccccaacgcgaaccccaacgccaaccccaacgccaacccgaacgccaaccccaacgcgaaccccaacgccaaccccaacgccaacccgaacgccaaccccaacgccaaccccaacgcgaaccccaacgccaacccgaacgccaaccccaacgccaaccccaacgccaaccccaacgcgaacccgaacgccaaccccaacgccaaccccaacgccaaccccaacgccaacccgaacgcgaaccccaacgccaaccccaacgccaacccgaacgccaaccccaacgccaaccccaacgcgaaccccaacgccaacccgaacgccaaccccaacgccaaccccaacgcgaaccccaacgccaacccgaacgccaaccccaacgccaaccccaacgccaaccccaacgcgaacccgaacgccaaccccaacgccaaccccaacgccaaccccaacgccaacccgaacaagaacaaccagggcaacgggcagggccacaacaugcccaacgaccccaaccgcaacguggacgagaacgcgaacgccaacaacgacgucaagaacaacaacaacgaggagcccuccgacaagcacaucgagcaguaccugaagaagauccaguacagccucuccacggaguggagcccgugcuccgugaccugcggcaacgggauccaggugcggaucaagcccggcagcgccgacaagcccaaggaccagcuggacuacgagaacgacaucgagaagaagaucugcaagauggagaagugcuccagcgucuucaacguggugaacuccagcaucgggcugaucaugguccucuccuuccuguuccugaacuga

SEQ ID NO: 3337 - RNA, 1284 nt, Artificial Sequence
  derived and/or modified CDS sequence (opt1) from Pf(E103)__ACO49384.1__CSP
augcgcaagcuggccauccucagcguguccagcuuccuguucgucgaggcccuguuccaggaguaccagugcuacggcuccagcuccaacacccgggugcucaacgagcugaacuacgacaacgcggggaccaaccuguacaacgagcucgagaugaacuacuacggcaagcaggagaacugguacagccugaagaagaacucccgcagccugggggagaacgacgacggcaacaacaacaacggggacaacggccgggagggcaaggacgaggacaagcgcgacgggaacaacgaggacaacgagaagcuccggaagcccaagcacaagaagcugaagcagccgggcgacgggaaccccgaccccaacgccaaccccaacguggacccgaacgccaaccccaacgucgaccccaacgccaaccccaacguggacccgaacgccaaccccaacgcgaaccccaacgccaaccccaacgccaacccgaacgccaaccccaacgcgaaccccaacgccaaccccaacgccaacccgaacgccaaccccaacgccaaccccaacgcgaaccccaacgccaacccgaacgccaaccccaacgccaaccccaacgccaaccccaacgcgaacccgaacgccaaccccaacgccaaccccaacgccaaccccaacgccaacccgaacgcgaaccccaacgccaaccccaacgccaacccgaacgccaaccccaacgccaaccccaacgcgaaccccaacgccaacccgaacgccaaccccaacgccaaccccaacgcgaaccccaacgccaacccgaacgccaaccccaacgccaaccccaacgccaaccccaacgcgaacccgaacgccaaccccaacgccaaccccaacgccaaccccaacgccaacccgaacaagaacaaccagggcaacgggcagggccacaacaugcccaacgaccccaaccgcaacguggacgagaacgcgaacgccaacaacgccgucaagaacaacaacaacgaggagcccuccgacaagcacaucgagcaguaccugaagaacauccagaacagccucuccacggaguggagcccgugcuccgugaccugcggcaacgggauccaggugcggaucaagcccggcagcgccaacaagcccaaggacgagcuggacuacgagaacgacaucgagaagaagaucugcaagauggagaagugcuccagcgucuucaacguggugaacuccagcaucgggcugaucaugguccucuccuuccuguuccugaacuga

SEQ ID NO: 3338 - RNA, 1284 nt, Artificial Sequence
  derived and/or modified CDS sequence (opt1) from Pf(TMS75)__ACO49490.1__CSP
augcgcaagcuggccauccucagcguguccagcuuccuguucgucgaggcccuguuccaggaguaccagugcuacggcuccagcuccaacacccgggugcucaacgagcugaacuacgacaacgcggggaccaaccuguacaacgagcucgagaugaacuacuacggcaagcaggagaacugguacagccugaagaagaacucccgcagccugggggagaacgacgacggcaacaacaacaacggggacaacggccgggagggcaaggacgaggacaagcgcgacgggaacaacgaggacaacgagaagcuccggaagcccaagcacaagaagcugaagcagccgggcgacgggaaccccgaccccaacgccaaccccaacguggacccgaacgccaaccccaacgucgaccccaacgccaaccccaacguggacccgaacgccaaccccaacguggaccccaacgcgaaccccaacgccaacccgaacgccaaccccaacgccaaccccaacgcgaaccccaacgccaacccgaacgccaaccccaacgccaaccccaacgccaaccccaacgcgaacccgaacgccaaccccaacgccaaccccaacgccaaccccaacgccaacccgaacgcgaaccccaacgccaaccccaacgccaaccccaacgccaacccgaacgccaaccccaacgcgaaccccaacgccaacccgaacgccaaccccaacgccaaccccaacgccaaccccaacgcgaacccgaacgccaaccccaacgccaaccccaacgccaaccccaacgcgaacccgaacgccaaccccaacgccaaccccaacgccaaccccaacgccaacccgaacgcgaaccccaacgccaaccccaacgccaaccccaacgccaacccgaacaagaacaaccagggcaacgggcagggccacaacaugcccaacgaccccaaccgcaacgucgacgagaacgccaacgcgaacaacgccgugaagaacaacaacaacgaggagcccuccgacaagcacaucgagcaguaccugaagaagauccagaacagccucuccacggaguggagcccgugcuccgugaccugcggcaacgggauccagguccggaucaagcccggcagcgccaacaagcccaaggacgagcuggacuacgagaacgacaucgagaagaagaucugcaagauggagaagugcuccagcguguucaacguggucaacuccagcaucgggcugaucauggugcucuccuuccuguuccugaacuga

SEQ ID NO: 3339 - RNA, 1284 nt, Artificial Sequence
  derived and/or modified CDS sequence (opt1) from Pf(TSY621)__ACO49538.1__CSP
augcgcaagcuggccauccucagcguguccagcuuccuguucgucgaggcccuguuccaggaguaccagugcuacggcuccagcuccaacacccgggugcucaacgagcugaacuacgacaacgcggggaccaaccuguacaacgagcucgagaugaacuacuacggcaagcaggagaacugguacagccugaagaagaacucccgcagccugggggagaacgacgacggcaacaacaacaacggggacaacggccgggagggcaaggacgaggacaagcgcgacgggaacaacgaggacaacgagaagcuccggaagcccaagcacaagaagcugaagcagccgggcgacgggaaccccgaccccaacgccaaccccaacguggacccgaacgccaaccccaacgucgaccccaacgccaaccccaacguggacccgaacgccaaccccaacgcgaaccccaacgccaaccccaacgccaacccgaacgccaaccccaacgcgaaccccaacgccaaccccaacgccaacccgaacgccaaccccaacgccaaccccaacgcgaaccccaacgccaacccgaacgccaaccccaacgccaaccccaacgccaaccccaacgcgaacccgaacgccaaccccaacgccaaccccaacgccaaccccaacgccaacccgaacgcgaaccccaacgccaaccccaacgccaacccgaacgccaaccccaacgccaaccccaacgcgaaccccaacgccaacccgaacgccaaccccaacgccaaccccaacgcgaaccccaacgccaacccgaacgccaaccccaacgccaaccccaacgccaaccccaacgcgaacccgaacgccaaccccaacgccaaccccaacgccaaccccaacgccaacccgaacaagaacaaccagggcaacgggcagggccacaacaugcccaacgaccccaaccgcaacguggacgagaacgcgaacgccaacaacgacgucaagaacaacaacaacgaggagcccuccgacaagcacaucgagcaguaccugaagaagauccaguacagccucuccacggaguggagcccgugcuccgugaccugcggcaacgggauccaggugcggaucaagcccggcagcgccgacaagcccaaggaccagcuggacuacgagaacgacaucgagaagaagaucugcaagauggagaagugcuccagcgucuucaacguggugaacuccagcaucgggcugaucaugguccucuccuuccuguuccugaacuga

SEQ ID NO: 3340 - RNA, 1284 nt, Artificial Sequence
  derived and/or modified CDS sequence (opt1) from Pf(TSY646)__ACO49540.1__CSP
augcgcaagcuggccauccucagcguguccagcuuccuguucgucgaggcccuguuccaggaguaccagugcuacggcuccagcuccaacacccgggugcucaacgagcugaacuacgacaacgcggggaccaaccuguacaacgagcucgagaugaacuacuacggcaagcaggagaacugguacagccugaagaagaacucccgcagccugggggagaacgacgacggcaacaacaacaacggggacaacggccgggagggcaaggacgaggacaagcgcgacgggaacaacgaggacaacgagaagcuccggaagcccaagcacaagaagcugaagcagccgggcgacgggaaccccgaccccaacgccaaccccaacguggacccgaacgccaaccccaacgucgaccccaacgccaaccccaacguggacccgaacgccaaccccaacgcgaaccccaacgccaaccccaacgccaacccgaacgccaaccccaacgcgaaccccaacgccaaccccaacgccaacccgaacgccaaccccaacgccaaccccaacgcgaaccccaacgccaacccgaacgccaaccccaacgccaaccccaacgccaaccccaacgcgaacccgaacgccaaccccaacgccaaccccaacgccaaccccaacgccaacccgaacgcgaaccccaacgccaaccccaacgccaacccgaacgccaaccccaacgccaaccccaacgcgaaccccaacgccaacccgaacgccaaccccaacgccaaccccaacgcgaaccccaacgccaacccgaacgccaaccccaacgccaaccccaacgccaaccccaacgcgaacccgaacgccaaccccaacgccaaccccaacgccaaccccaacgccaacccgaacaagaacaaccagggcaacgggcagggccacaacaugcccaacgaccccaaccgcaacguggacgagaacgcgaacgccaacaacgccgucaagaacaacaacaacgaggagcccuccgacaagcacaucgagcaguaccugaagaagauccagaacagccucuccacggaguggagcccgugcuccgugaccugcggcaacgggauccaggugcggaucaagcccggcagcgccaacaagcccaaggacgagcuggacuacgagaacgacaucgagaagaagaucugcaagauggagaagugcuccagcgucuucaacguggugaacuccagcaucgggcugaucaugguccucuccuuccuguuccugaacuga

SEQ ID NO: 3341 - RNA, 1275 nt, Artificial Sequence
  derived and/or modified CDS sequence (opt1) from Pf(806)__AAA29562.1__CSP
augaugcgcaagcuggccauccucagcguguccagcuuccuguucgucgaggcccuguuccaggaguaccagugcuacggcuccagcuccaacacccgggugcucaacgagcugaacuacgacaacgcggggaucaaccuguacaacgagcucgagaugaacuacuacggcaagcaggagaacugguacagccugaagaagaacucccgcagccugggggagaacgacgacggcaacaacaacaacggggacaacggccgggagggcaaggacgaggacaagcgcgacgggaacaacgaggacaacgagaagcuccggaagcccaagcacaagaagcugaagcagccgggcgacgggaaccccgaccccaacgccaaccccaacguggacccgaacgccaaccccaacgucgaccccaacgccaaccccaacguggacccgaacgccaaccccaacgcgaaccccaacgccaaccccaacgccaacccgaacgccaaccccaacgcgaaccccaacgccaaccccaacgccaacccgaacgccaaccccaacgccaaccccaacgcgaaccccaacgccaacccgaacgccaaccccaacgccaaccccaacgccaaccccaacgcgaacccgaacgccaaccccaacgccaaccccaacgccaaccccaacgccaacccgaacgcgaaccccaacgccaaccccaacgccaacccgaacgccaaccccaacgccaaccccaacgcgaaccccaacgccaacccgaacgccaaccccaacgccaaccccaacgcgaaccccaacgccaacccgaacgccaaccccaacgccaaccccaacgccaaccccaacgcgaacccgaacgccaaccccaacgccaaccccaacgccaaccccaacaagaacaaccagggcaacgggcagggccacaacaugccgaacgaccccaaccgcaacguggacgagaacgccaacgcgaacaacgccgucaagaacaacaacaacgaggagcccuccgacaagcacaucgagcaguaccugaagaagauccagaacagccucuccaccgaguggagccccugcuccgugacgugcggcaacgggauccaggugcggaucaagccgggcagcgccaacaagcccaaggacgagcuggacuacgagaacgacaucgagaagaagaucugcaagauggagaagugcuccagcgucuucaacguggugaacuccagcaucgggcugaucaugguccucuccuuccuguuccugaacuga

SEQ ID NO: 3342 - RNA, 1275 nt, Artificial Sequence
  derived and/or modified CDS sequence (opt1) from Pf(Pal97-100)__BAM84952.1__CSP
augaugcgcaagcuggccauccucagcguguccagcuuccuguucgucgaggcccuguuccaggaguaccagugcuacggcuccagcuccaacacccgggugcucaacgagcugaacuacgacaacgcggggaccaaccuguacaacgagcucgagaugaacuacuacggcaagcaggagaacugguacagccugaagaagaacucccgcagccugggggagaacgacgacggcaacaacaacaacggggacaacggccgggagggcaaggacgaggacaagcgcgacgggaacaacgaggacaacgagaagcuccggaagcccaagcacaagaagcugaagcagccgggcgacgggaaccccgaccccaacgccaaccccaacguggacccgaacgccaaccccaacgucgaccccaacgccaaccccaacguggacccgaacgccaaccccaacgcgaaccccaacgccaaccccaacgccaacccgaacgccaaccccaacgcgaaccccaacgccaaccccaacgccaacccgaacgccaaccccaacgccaaccccaacgcgaaccccaacguggacccgaacgccaaccccaacgccaaccccaacgccaaccccaacgccaacccgaacgcgaaccccaacgccaaccccaacgccaaccccaacgccaacccgaacgccaaccccaacgcgaaccccaacgccaacccgaacgccaaccccaacgccaaccccaacgccaaccccaacgcgaacccgaacgccaaccccaacgccaaccccaacgccaaccccaacgcgaacccgaacgccaaccccaacgccaaccccaacgccaaccccaacgccaacccgaacgcgaaccccaacgccaaccccaacgccaaccccaacaagaacaaccagggcaacgggcagggccacaacaugccgaacgaccccaaccgcaacgucgacgagaacgccaacgccaacaacgcggugaagaacaacaacaacgaggagcccuccgacaagcacaucacggaguaccugaagaagauccagaacagccucuccaccgaguggagccccugcuccgugaccugcggcaacgggauccagguccggaucaagccgggcagcgccgggaaguccaaggacgagcuggacuacgagaacgacaucgagaagaagaucugcaagauggagaagugcagcuccguguucaacguggucaacagcuccaucggccugaucauggugcucagcuuccuguuccugaacuga

SEQ ID NO: 3343 - RNA, 1275 nt, Artificial Sequence
  derived and/or modified CDS sequence (opt1) from Pf(PFS89)__BAN59425.1__CSP
augaugcgcaagcuggccauccucagcguguccagcuuccuguucgucgaggcccuguuccaggaguaccagugcuacggcuccagcuccaacacccgggugcucaacgagcugaacuacgacaacgcggggaccaaccuguacaacgagcucgagaugaacuacuacggcaagcaggagaacugguacagccugaagaagaacucccgcagccugggggagaacgacgacggcaacaacaacaacggggacaacggccgggagggcaaggacgaggacaagcgcgacgggaacaacgaggacaacgagaagcuccggaagcccaagcacaagaagcugaagcagccgggcgacgggaaccccgaccccaacgccaaccccaacguggacccgaacgccaaccccaacgucgaccccaacgccaaccccaacguggacccgaacgccaaccccaacgcgaaccccaacgccaaccccaacgccaacccgaacgccaaccccaacgcgaaccccaacgccaaccccaacgccaacccgaacgccaaccccaacgccaaccccaacgcgaaccccaacgccaacccgaacgccaaccccaacgccaaccccaacgccaaccccaacgcgaacccgaacgccaaccccaacgccaaccccaacgccaaccccaacgccaacccgaacgcgaaccccaacgccaaccccaacgccaacccgaacgccaaccccaacgccaaccccaacgcgaaccccaacgccaacccgaacgccaaccccaacgccaaccccaacgcgaaccccaacgccaacccgaacgccaaccccaacgccaaccccaacgccaaccccaacgcgaacccgaacgccaaccccaacgccaaccccaacgccaaccccaacaagaacaaccagggcaacgggcagggccacaacaugccgaacgaccccaaccgcaacguggacgagaacgccaacgcgaacaacgccgucaagaacaacaacaacgaggagcccuccgacaagcacaucgagcaguaccugaagaagauccagaacagccucuccacggaguggagccccugcuccgugaccugcggcaacgggauccaggugcggaucaagccgggcagcgccaacaagcccaaggacgagcuggacuacgagaacgacaucgagaagaagaucugcaagauggagaagugcuccagcgucuucaacguggugaacuccagcaucgggcugaucaugguccucuccuuccuguuccugaacuga

SEQ ID NO: 3344 - RNA, 1275 nt, Artificial Sequence
  derived and/or modified CDS sequence (opt1) from Pf(PNG912-035)__BAM85007.1__CSP
augaugcgcaagcuggccauccucagcguguccagcuuccuguucgucgaggcccuguuccaggaguaccagugcuacggcuccagcuccaacacccgggugcucaacgagcugaacuacgacaacgcggggaccaaccuguacaacgagcucgagaugaacuacuacggcaagcaggagaacugguacagccugaagaagaacucccgcagccugggggagaacgacgacggcaacaacaacaacggggacaacggccgggagggcaaggacgaggacaagcgcgacgggaacaacgaggacaacgagaagcuccggaagcccaagcacaagaagcugaagcagccgggcgacgggaaccccgaccccaacgccaaccccaacguggacccgaacgccaaccccaacgucgaccccaacgccaaccccaacguggacccgaacgccaaccccaacgcgaaccccaacgccaaccccaacgccaacccgaacgccaaccccaacgcgaaccccaacgccaaccccaacgccaacccgaacgccaaccccaacgccaaccccaacgcgaaccccaacgccaacccgaacgccaaccccaacgccaaccccaacgccaaccccaacgcgaacccgaacgccaaccccaacgccaaccccaacguggaccccaacgccaacccgaacgccaaccccaacgcgaaccccaacgccaacccgaacgccaaccccaacgccaaccccaacgccaaccccaacgcgaacccgaacgccaaccccaacgccaaccccaacgccaaccccaacgcgaacccgaacgccaaccccaacgccaaccccaacgccaaccccaacgccaacccgaacgcgaaccccaacgccaaccccaacgccaaccccaacaagaacaaccagggcaacgggcagggccacaacaugccgaacgaccccaaccgcaacgucgacgagaacgccaacgccaacaacgcggugaagaacaacaacaacgaggagcccuccgacaagcacaucgagcaguaccugaagaagauccagaacagccucuccacggaguggagccccugcuccgugaccugcggcaacgggauccagguccggaucaagccgggcagcgccgacaagcccaaggaccagcuggacuacgagaacgacaucgagaagaagaucugcaagauggagaagugcuccagcguguucaacguggucaacuccagcaucgggcugaucauggugcucuccuuccuguuccugaacuga

SEQ ID NO: 3345 - RNA, 1275 nt, Artificial Sequence
  derived and/or modified CDS sequence (opt1) from Pf(Sol95-308)__BAM85089.1__CSP
augaugcgcaagcuggccauccucagcguguccagcuuccuguucgucgaggcccuguuccaggaguaccagugcuacggcuccagcuccaacacccgggugcucaacgagcugaacuacgacaacgcggggaccaaccuguacaacgagcucgagaugaacuacuacggcaagcaggagaacugguacagccugaagaagaacucccgcagccugggggagaacgacgacggcaacaacaacaacggggacaacggccgggagggcaaggacgaggacaagcgcgacgggaacaacgaggacaacgagaagcuccggaagcccaagcacaagaagcugaagcagccgggcgacgggaaccccgaccccaacgccaaccccaacguggacccgaacgccaaccccaacgucgaccccaacgccaaccccaacguggacccgaacgccaaccccaacguggaccccaacgcgaaccccaacgccaacccgaacgccaaccccaacgccaaccccaacgcgaaccccaacgccaacccgaacgccaaccccaacgccaaccccaacgccaaccccaacgcgaacccgaacgccaaccccaacgccaaccccaacgccaaccccaacgccaacccgaacgcgaaccccaacgccaaccccaacgccaaccccaacgccaacccgaacgccaaccccaacgcgaaccccaacgccaacccgaacgccaaccccaacgccaaccccaacgccaaccccaacgcgaacccgaacgccaaccccaacgccaaccccaacgccaaccccaacgcgaacccgaacgccaaccccaacgccaaccccaacgccaaccccaacgccaacccgaacgcgaaccccaacgccaaccccaacgccaaccccaacaagaacaaccagggcaacgggcagggccacaacaugccgaacgaccccaaccgcaacgucgacgagaacgccaacgccaacaacgcggugaagaacaacaacaacgaggagcccuccgacaagcacaucgagcaguaccugaagaagauccagaacagccucuccacggaguggagccccugcuccgugaccugcggcaacgggauccagguccggaucaagccgggcagcgccaacaagcccaaggacgagcuggacuacgagaacgacaucgagaagaagaucugcaagauggagaagugcuccagcguguucaacguggucaacuccagcaucgggcugaucauggugcucuccuuccuguuccugaacuga

SEQ ID NO: 3346 - RNA, 1275 nt, Artificial Sequence
  derived and/or modified CDS sequence (opt1) from Pf(Sol95-346)__BAM85102.1__CSP
augaugcgcaagcuggccauccucagcguguccagcuuccuguucgucgaggcccuguuccaggaguaccagugcuacggcuccagcuccaacacccgggugcucaacgagcugaacuacgacaacgcggggaccaaccuguacaacgagcucgagaugaacuacuacggcaagcaggagaacugguacagccugaagaagaacucccgcagccugggggagaacgacgacggcaacaacaacaacggggacaacggccgggagggcaaggacgaggacaagcgcgacgggaacaacgaggacaacgagaagcuccggaagcccaagcacaagaagcugaagcagccgggcgacgggaaccccgaccccaacgccaaccccaacguggacccgaacgccaaccccaacgucgaccccaacgccaaccccaacguggacccgaacgccaaccccaacgcgaaccccaacgccaaccccaacgccaacccgaacgccaaccccaacgcgaaccccaacgccaaccccaacgccaacccgaacgccaaccccaacgccaaccccaacgcgaaccccaacgccaacccgaacgccaaccccaacgccaaccccaacgccaaccccaacgcgaacccgaacgccaaccccaacgccaaccccaacguggaccccaacgccaacccgaacgccaaccccaacgcgaaccccaacgccaacccgaacgccaaccccaacgccaaccccaacgccaaccccaacgcgaacccgaacgccaaccccaacgccaaccccaacgccaaccccaacgcgaacccgaacgccaaccccaacgccaaccccaacgccaaccccaacgccaacccgaacgcgaaccccaacgccaaccccaacgccaaccccaacaagaacaaccagggcaacgggcagggccacaacaugccgaacgaccccaaccgcaacgucgacgagaacgccaacgccaacaacgcggugaagaacaacaacaacgaggagcccuccgacaagcacaucgagcaguaccugaagaagauccagaacagccucuccacggaguggagccccugcuccgugaccugcggcaacgggauccagguccggaucaagccgggcagcgccgggaaguccaaggacgagcuggacuacgagaacgacaucgagaagaagaucugcaagauggagaagugcagcuccguguucaacguggucaacagcuccaucggccugaucauggugcucagcuuccuguuccugaacuga

SEQ ID NO: 3347 - RNA, 1275 nt, Artificial Sequence
  derived and/or modified CDS sequence (opt1) from Pf(T4 Thailand)__AAA29555.1__CSP
augaugcgcaagcuggccauccucagcguguccagcuuccuguucgucgaggcccuguuccaggaguaccagugcuacggcuccagcuccaacacccgggugcucaacgagcugaacuacgacaacgcggggaccaaccuguacaacgagcucgagaugaacuacuacggcaagcaggagaacugguacagccugaagaagaacucccgcagccugggggagaacgacgacggcaacaacaacaacggggacaacaaccgggagggcaaggacgaggacaagcgcgacggcaacaacgaggacaacgagacgcuccggaagcccaagcacaagaagcugaagcagccgggggacggcaaccccgaccccaacgccaaccccaacguggacccgaacgccaaccccaacgucgaccccaacgccaaccccaacguggacccgaacgccaaccccaacgcgaaccccaacgccaaccccaacgccaacccgaacgccaaccccaacgcgaaccccaacgccaaccccaacgccaacccgaacgccaaccccaacgccaaccccaacgcgaaccccaacgccaacccgaacgccaaccccaacgccaaccccaacgccaaccccaacgcgaacccgaacgccaaccccaacgccaaccccaacgccaaccccaacgccaacccgaacgcgaaccccaacgccaaccccaacgccaacccgaacgccaaccccaacgccaaccccaacgcgaaccccaacgccaacccgaacgccaaccccaacgccaaccccaacgcgaaccccaacgccaacccgaacgccaaccccaacgccaaccccaacgccaaccccaacgcgaacccgaacgccaaccccaacgccaaccccaacgccaaccccaacaagaacaaccaggggaacggccaggggcacaacaugccgaacgaccccaaccgcaacguggacgagaacgccaacgcgaacaacgccgucaagaacaacaacaacgaggagcccuccgacaagcacaucgagcaguaccugaagaagauccagaacagccucuccaccgaguggagccccugcuccgugaccugcggcaacggcauccaggugcggaucaagccggggagcgccaacaagcccaaggacgagcuggacuacgagaacgacaucgagaagaagaucugcaagauggagaagugcuccagcgucuucaacguggugaacuccagcaucggccugaucaugguccucuccuuccuguuccugaacuga

SEQ ID NO: 3348 - RNA, 1275 nt, Artificial Sequence
  derived and/or modified CDS sequence (opt1) from Pf(Tz03-025)__BAM84798.1__CSP
augaugcgcaagcuggccauccucagcguguccagcuuccuguucgucgaggcccuguuccaggaguaccagugcuacggcuccagcuccaacacccgggugcucaacgagcugaacuacgacaacgcggggaccaaccuguacaacgagcucgagaugaacuacuacggcaagcaggagaacugguacagccugaagaagaacucccgcagccugggggagaacgacgacggcaacaacaacaacggggacaacggccgggagggcaaggacgaggacaagcgcgacgggaacaacgaggacaacgagaagcuccggaagcccaagcacaagaagcugaagcagccggccgacggcaaccccgaccccaacgccaaccccaacguggacccgaacgccaaccccaacgucgaccccaacgccaaccccaacguggacccgaacgcgaaccccaacgccaaccccaacgccaaccccaacgccaacccgaacgcgaaccccaacgccaaccccaacgccaaccccaacgccaacccgaacgccaaccccaacgcgaaccccaacgccaaccccaacgccaacccgaacgccaaccccaacgccaaccccaacgcgaaccccaacgccaacccgaacgccaaccccaacgccaaccccaacguggaccccaacgccaacccgaacgcgaaccccaacgccaaccccaacgccaacccgaacgccaaccccaacgccaaccccaacgcgaaccccaacgccaacccgaacgccaaccccaacgccaaccccaacgcgaaccccaacgccaacccgaacgccaaccccaacgccaaccccaacgccaaccccaacgcgaacccgaacgccaaccccaacgccaaccccaacgccaaccccaacaagaacaaccaggggaacggccaggggcacaacaugccgaacgaccccaaccgcaacgucgacgagaacgccaacgcgaacaacgccgugaagaacaacaacaacgaggagcccuccgaccagcacaucgagaaguaccugaagacgaucaagaacagccucuccaccgaguggagccccugcuccgugaccugcggcaacggcauccagguccggaucaagccggggagcgccaacaagcccaaggaccagcuggacuacgccaacgacaucgagaagaagaucugcaagauggagaagugcuccagcguguucaacguggucaacuccagcaucggccugaucauggugcucuccuuccuguuccugaacuga

SEQ ID NO: 3349 - RNA, 1272 nt, Artificial Sequence
  derived and/or modified CDS sequence (opt1) from Pf(NR62)__ADF48375.1__CSP
augcgcaagcuggccauccucagcguguccagcuuccuguucgucgaggcccuguuccaggaguaccagugcuacggcuccagcuccaacacccgggugcucaacgagcugaacuacgacaacgcggggaccaaccuguacaacgagcucgagaugaacuacuacggcaagcaggagaacugguacagccugaagaagaacucccgcagccugggggagaacgacgacggcaacaacaacaacggggacaacggccgggagggcaaggacgaggacaagcgcgacgggaacaacgaggacaacgagaagcuccggaagcccaagcacaagaagcugaagcagccgggcgacgggaaccccgaccccaacgccaaccccaacguggacccgaacgccaaccccaacgucgaccccaacgccaaccccaacguggacccgaacgccaaccccaacguggaccccaacgcgaaccccaacgccaacccgaacgccaaccccaacgccaaccccaacgcgaaccccaacgccaacccgaacgccaaccccaacgccaaccccaacgccaaccccaacgcgaacccgaacgccaaccccaacgccaaccccaacgccaaccccaacgccaacccgaacgcgaaccccaacgccaaccccaacgccaaccccaacgccaacccgaacgccaaccccaacgcgaaccccaacgccaacccgaacgccaaccccaacgccaaccccaacgccaaccccaacgcgaacccgaacgccaaccccaacgccaaccccaacgccaaccccaacgcgaacccgaacgccaaccccaacgccaaccccaacgccaaccccaacgccaacccgaacgcgaaccccaacgccaaccccaacgccaaccccaacaagaacaaccagggcaacgggcagggccacaacaugccgaacgaccccaaccgcaacgucgacgagaacgccaacgccaacaacgcggugaagaacaacaacaacgaggagcccuccgacaagcacaucgagcaguaccugaagaagauccagaacagccucuccacggaguggagccccugcuccgugaccugcggcaacgggauccagguccggaucaagccgggcagcgccaacaagcccaaggacgagcuggacuacgagaacgacaucgagaagaagaucugcaagauggagaagugcuccagcguguucaacguggucaacuccagcaucgggcugaucauggugcucuccuuccuguuccugaacuga

SEQ ID NO: 3350 - RNA, 1272 nt, Artificial Sequence
  derived and/or modified CDS sequence (opt1) from Pf(TSY673)__ACO49542.1__CSP
augcgcaagcuggccauccucagcguguccagcuuccuguucgucgaggcccuguuccaggaguaccagugcuacggcuccagcuccaacacccgggugcucaacgagcugaacuacgacaacgcggggaccaaccuguacaacgagcucgagaugaacuacuacggcaagcaggagaacugguacagccugaagaagaacucccgcagccugggggagaacgacgacggcaacaacaacaacggggacaacggccgggagggcaaggacgaggacaagcgcgacgggaacaacgaggacaacgagaagcuccggaagcccaagcacaagaagcugaagcagccgggcgacgggaaccccgaccccaacgccaaccccaacguggacccgaacgccaaccccaacgucgaccccaacgccaaccccaacguggacccgaacgccaaccccaacgcgaaccccaacgccaaccccaacgccaacccgaacgccaaccccaacgcgaaccccaacgccaaccccaacgccaacccgaacgccaaccccaacgccaaccccaacgcgaaccccaacguggacccgaacgccaaccccaacgccaaccccaacgccaaccccaacgccaacccgaacgcgaaccccaacgccaaccccaacgccaaccccaacgccaacccgaacgccaaccccaacgcgaaccccaacgccaacccgaacgccaaccccaacgccaaccccaacgccaaccccaacgcgaacccgaacgccaaccccaacgccaaccccaacgccaaccccaacgcgaacccgaacgccaaccccaacgccaaccccaacgccaaccccaacgccaacccgaacgcgaaccccaacgccaaccccaacgccaaccccaacaagaacaaccagggcaacgggcagggccacaacaugccgaacgaccccaaccgcaacgucgacgagaacgccaacgccaacaacgcggugaagaacaacaacaacgaggagcccuccgacaagcacaucacggaguaccugaagaagauccagaacagccucuccaccgaguggagccccugcuccgugaccugcggcaacgggauccagguccggaucaagccgggcagcgccgggaaguccaaggacgagcuggacuacgagaacgacaucgagaagaagaucugcaagauggagaagugcagcuccguguucaacguggucaacagcuccaucggccugaucauggugcucagcuuccuguuccugaacuga

SEQ ID NO: 3351 - RNA, 1272 nt, Artificial Sequence
  derived and/or modified CDS sequence (opt1) from Pf(TSY688)__ACO49545.1__CSP
augcgcaagcuggccauccucagcguguccagcuuccuguucgucgaggcccuguuccaggaguaccagugcuacggcuccagcuccaacacccgggugcucaacgagcugaacuacgacaacgcggggaccaaccuguacaacgagcucgagaugaacuacuacggcaagcaggagaacugguacagccugaagaagaacucccgcagccugggggagaacgacgacggcaacaacaacaacggggacaacggccgggagggcaaggacgaggacaagcgcgacgggaacaacgaggacaacgagaagcuccggaagcccaagcacaagaagcugaagcagccgggcgacgggaaccccgaccccaacgccaaccccaacguggacccgaacgccaaccccaacgucgaccccaacgccaaccccaacguggacccgaacgccaaccccaacgcgaaccccaacgccaaccccaacgccaacccgaacgccaaccccaacgcgaaccccaacgccaaccccaacgccaacccgaacgccaaccccaacgccaaccccaacgcgaaccccaacgccaacccgaacgccaaccccaacgccaaccccaacgccaaccccaacgcgaacccgaacgccaaccccaacgccaaccccaacgccaaccccaacgccaacccgaacgcgaaccccaacgccaaccccaacgccaacccgaacgccaaccccaacgccaaccccaacgcgaaccccaacgccaacccgaacgccaaccccaacgccaaccccaacgcgaaccccaacgccaacccgaacgccaaccccaacgccaaccccaacgccaaccccaacgcgaacccgaacgccaaccccaacgccaaccccaacgccaaccccaacaagaacaaccagggcaacgggcagggccacaacaugccgaacgaccccaaccgcaacguggacgagaacgccaacgcgaacaacgccgucaagaacaacaacaacgaggagcccuccgacaagcacaucgagcaguaccugaagaagauccagaacagccucuccacggaguggagccccugcuccgugaccugcggcaacgggauccaggugcggaucaagccgggcagcgccaacaagcccaaggacgagcuggacuacgagaacgacaucgagaagaagaucugcaagauggagaagugcuccagcgucuucaacguggugaacuccagcaucgggcugaucaugguccucuccuuccuguuccugaacuga

SEQ ID NO: 3352 - RNA, 1263 nt, Artificial Sequence
  derived and/or modified CDS sequence (opt1) from Pf(835b)__AAA29574.1__CSP
augaugcgcaagcuggccauccucagcguguccagcuuccuguucgucgaggcccuguuccaggaguaccagugcuacggcuccagcuccaacacccgggugcucaacgagcugaacuacgacaacgcggggaucaaccuguacaacgagcucgagaugaacuacuacggcaagcaggagaacugguacagccugaagaagaacucccgcagccugggggagaacgacgacggcaacaacaacaacggggacaacggccgggagggcaaggacgaggacaagcgcgacgggaacaacgaggacaacgagaagcuccggaagcccaagcacaagaagcugaagcagccgggcgacgggaaccccgaccccaacgccaaccccaacguggacccgaacgccaaccccaacgucgaccccaacgccaaccccaacguggacccgaacgccaaccccaacgcgaaccccaacgccaaccccaacgccaacccgaacgccaaccccaacgcgaaccccaacgccaaccccaacgccaacccgaacgccaaccccaacgccaaccccaacgcgaaccccaacgccaacccgaacgccaaccccaacgccaaccccaacgccaaccccaacgcgaacccgaacgccaaccccaacgccaaccccaacgccaaccccaacguggacccgaacgccaaccccaacgcgaaccccaacgccaacccgaacgccaaccccaacgccaaccccaacgccaaccccaacgcgaacccgaacgccaaccccaacgccaaccccaacgccaaccccaacgcgaacccgaacgccaaccccaacgccaaccccaacgccaaccccaacgccaacccgaacgcgaaccccaacgccaaccccaacaagaacaaccagggcaacgggcagggccacaacaugcccaacgacccgaaccgcaacgucgacgagaacgccaacgccaacaacgccgugaagaacaacaacaacgaggagcccuccgacaagcacaucaaggaguaccugaccaagauccagaacagcaucuccacggaguggagccccugcuccgugaccugcggcaacgggauccagguccggaucaagcccggcagcgcggggaagccgaaggacgagcucgaguacgagaacgacaucgagaagaagaucugcaagauggagaagugcuccagcguguucaacguggucaacuccagcaucggccugaucauggugcuguccuuccucuuccugaacuga

SEQ ID NO: 3353 - RNA, 1263 nt, Artificial Sequence
  derived and/or modified CDS sequence (opt1) from Pf(FCC1/HN)__AAW59565.1__CSP
augaugcgcaagcuggccauccucagcguguccagcuuccuguucgucgaggcccuguuccaggaguaccagugcuacggcuccagcuccaacacccgggugcucaacgagcugaacuacgacaacgcggggaccaaccuguacaacgagcucgagaugaacuacuacggcaagcaggagaacugguacagccugaagaagaacucccgcagccugggggagaacgacgacggcaacaacaacaacggggacaacggccgggagggcaaggacgaggacaagcgcgacgggaacaacgaggacaacgagaagcuccggaagcccaagcacaagaagcugaagcagccgggcgacgggaaccccgaccccaacgccaaccccaacguggacccgaacgccaaccccaacgucgaccccaacgccaaccccaacguggacccgaacgccaaccccaacgcgaaccccaacgccaaccccaacgccaacccgaacgccaaccccaacgcgaaccccaacgccaaccccaacgccaacccgaacgccaaccccaacgccaaccccaacgcgaaccccaacgccaacccgaacgccaaccccaacgccaaccccaacgccaaccccaacgcgaacccgaacgccaaccccaacgccaaccccaacgccaaccccaacgccaacccgaacgcgaaccccaacgccaaccccaacgccaacccgaacgccaaccccaacgccaaccccaacgcgaaccccaacgccaacccgaacgccaaccccaacgccaaccccaacgcgaaccccaacgccaacccgaacgccaaccccaacgccaaccccaacgccaaccccaacgcgaacccgaacgccaaccccaacgccaaccccaacaagaacaaccagggcaacgggcagggccacaacaugcccaacgacccgaaccgcaacguggacgagaacgccaacgccaacaacgcggucaagaacaacaacaacgaggagcccuccgacaagcacaucgagcaguaccugaagaagauccagaacagccucuccacggaguggagccccugcuccgugaccugcggcaacgggauccaggcccggaucaagcccggcagcgccaacaagccgaaggacgagcuggacuacgagaacgacaucgagaagaagaucugcaagauggagaagugcuccagcguguucaacgucgugaacuccagcaucgggcugaucauggugcucuccuuccuguuccugaacuga

SEQ ID NO: 3354 - RNA, 1263 nt, Artificial Sequence
  derived and/or modified CDS sequence (opt1) from Pf(K1)__AAA29552.1__CSP
augaugcgcaagcuggccauccucagcguguccagcuuccuguucgucgaggcccuguuccaggaguaccagugcuacggcuccagcuccaacacccgggugcucaacgagcugaacuacgacaacgcggggaucaaccuguacaacgagcucgagaugaacuacuacggcaagcaggagaacugguacagccugaagaagaacucccgcagccugggggagaacgacgacggcaacaacaacaacggggacaacggccgggagggcaaggacgaggacaagcgcgacgggaacaacgaggacaacgagaagcuccggaagcccaagcacaagaagcugaagcagccgggcgacgggaaccccgaccccaacgccaaccccaacguggacccgaacgccaaccccaacgucgaccccaacgccaaccccaacguggacccgaacgccaaccccaacgcgaaccccaacgccaaccccaacgccaacccgaacgccaaccccaacgcgaaccccaacgccaaccccaacgccaacccgaacgccaaccccaacgccaaccccaacguggaccccaacgcgaacccgaacgccaaccccaacgccaaccccaacgccaaccccaacgccaacccgaacgcgaaccccaacgccaaccccaacgccaaccccaacgccaacccgaacgccaaccccaacgcgaaccccaacgccaacccgaacgccaaccccaacgccaaccccaacgccaaccccaacgcgaacccgaacgccaaccccaacgccaaccccaacgccaaccccaacgcgaacccgaacgccaaccccaacgccaaccccaacgccaaccccaacgccaacccgaacgcgaaccccaacgccaaccccaacaagaacaaccagggcaacgggcagggccacaacaugcccaacgacccgaaccgcaacgucgacgagaacgccaacgccaacaacgacgugaagaacaacaacaacgaggagcccuccgacaagcacaucgagcaguaccugaagaagauccaguacagccucuccaccgaguggagccccugcuccgugacgugcggcaacgggauccagguccggaucaagcccggcagcgccgacaagccgaaggaccagcuggacuacgagaacgacaucgagaagaagaucugcaagauggagaagugcuccagcguguucaacguggucaacuccagcaucgggcugaucauggugcucuccuuccuguuccugaacuga

SEQ ID NO: 3355 - RNA, 1263 nt, Artificial Sequence
  derived and/or modified CDS sequence (opt1) from Pf(K1)__BAD73952.1__CSP
augaugcgcaagcuggccauccucagcguguccagcuuccuguucgucgaggcccuguuccaggaguaccagugcuacggcuccagcuccaacacccgggugcucaacgagcugaacuacgacaacgcggggaccaaccuguacaacgagcucgagaugaacuacuacggcaagcaggagaacugguacagccugaagaagaacucccgcagccugggggagaacgacgacggcaacaacaacaacggggacaacggccgggagggcaaggacgaggacaagcgcgacgggaacaacgaggacaacgagaagcuccggaagcccaagcacaagaagcugaagcagccgggcgacgggaaccccgaccccaacgccaaccccaacguggacccgaacgccaaccccaacgucgaccccaacgccaaccccaacguggacccgaacgccaaccccaacgcgaaccccaacgccaaccccaacgccaacccgaacgccaaccccaacgcgaaccccaacgccaaccccaacgccaacccgaacgccaaccccaacgccaaccccaacguggaccccaacgcgaacccgaacgccaaccccaacgccaaccccaacgccaaccccaacgccaacccgaacgcgaaccccaacgccaaccccaacgccaaccccaacgccaacccgaacgccaaccccaacgcgaaccccaacgccaacccgaacgccaaccccaacgccaaccccaacgccaaccccaacgcgaacccgaacgccaaccccaacgccaaccccaacgccaaccccaacgcgaacccgaacgccaaccccaacgccaaccccaacgccaaccccaacgccaacccgaacgcgaaccccaacgccaaccccaacaagaacaaccagggcaacgggcagggccacaacaugcccaacgacccgaaccgcaacgucgacgagaacgccaacgccaacaacgacgugaagaacaacaacaacgaggagcccuccgacaagcacaucgagcaguaccugaagaagauccaguacagccucuccacggaguggagccccugcuccgugaccugcggcaacgggauccagguccggaucaagcccggcagcgccgacaagccgaaggaccagcuggacuacgagaacgacaucgagaagaagaucugcaagauggagaagugcuccagcguguucaacguggucaacuccagcaucgggcugaucauggugcucuccuuccuguuccugaacuga

SEQ ID NO: 3356 - RNA, 1263 nt, Artificial Sequence
  derived and/or modified CDS sequence (opt1) from Pf(Pal97-074)__BAM84944.1__CSP
augaugcgcaagcuggccauccucagcguguccagcuuccuguucgucgaggcccuguuccaggaguaccagugcuacggcuccagcuccaacacccgggugcucaacgagcugaacuacgacaacgcggggaccaaccuguacaacgagcucgagaugaacuacuacggcaagcaggagaacugguacagccugaagaagaacucccgcagccugggggagaacgacgacggcaacaacaacaacggggacaacggccgggagggcaaggacgaggacaagcgcgacgggaacaacgaggacaacgagaagcuccggaagcccaagcacaagaagcugaagcagccgguggacggcaaccccgaccccaacgccaaccccaacgucgacccgaacgccaaccccaacguggaccccaacgccaaccccaacguggacccgaacgccaaccccaacgcgaaccccaacgccaaccccaacgccaacccgaacgccaaccccaacgcgaaccccaacgccaaccccaacgccaacccgaacgccaaccccaacgccaaccccaacgcgaaccccaacgccaacccgaacgccaaccccaacgccaaccccaacgccaaccccaacgcgaacccgaacgccaaccccaacgccaaccccaacgccaaccccaacgccaacccgaacgcgaaccccaacgccaaccccaacgccaacccgaacgccaaccccaacgccaaccccaacgcgaaccccaacgccaacccgaacgccaaccccaacgccaaccccaacgcgaaccccaacgccaacccgaacgccaaccccaacgccaaccccaacgccaaccccaacgcgaacccgaacgccaaccccaacgccaaccccaacaagaacaaccaggggaacggccaggggcacaacaugcccaacgacccgaaccgcaacgucgacgagaacgccaacgccaacaacgcggugaagaacaacaacaacgaggagcccuccgaccagcacaucgagaaguaccugaagaucauccagaacagccucuccacggaguggagccccugcuccgugaccugcggcaacggcauccagguccggaucaagcccgggagcgccgacaagccgaaggaccagcuggacuacgccaacgacaucgagaagaagaucugcaagauggagaagugcuccagcguguucaacguggucaacuccagcaucggccugaucauggugcucuccuuccuguuccugaacuga

SEQ ID NO: 3357 - RNA, 1263 nt, Artificial Sequence
  derived and/or modified CDS sequence (opt1) from Pf(Pal97-108)__BAM84957.1__CSP
augaugcgcaagcuggccauccucagcguguccagcuuccuguucgucgaggcccuguuccaggaguaccagugcuacggcuccagcuccaacacccgggugcucaacgagcugaacuacgacaacgcggggaccaaccuguacaacgagcucgagaugaacuacuacggcaagcaggagaacugguacagccugaagaagaacucccgcagccugggggagaacgacgacggcaacaacaacaacggggacaacggccgggagggcaaggacgaggacaagcgcgacgggaacaacgaggacaacgagaagcuccggaagcccaagcacaagaagcugaagcagccgggcgacgggaaccccgaccccaacgccaaccccaacguggacccgaacgccaaccccaacgucgaccccaacgccaaccccaacguggacccgaacgccaaccccaacgcgaaccccaacgccaaccccaacgccaacccgaacgccaaccccaacgcgaaccccaacgccaaccccaacgccaacccgaacgccaaccccaacgccaaccccaacgcgaaccccaacgccaacccgaacgccaaccccaacgccaaccccaacgccaaccccaacgcgaacccgaacgccaaccccaacgccaaccccaacgccaaccccaacgccaacccgaacgcgaaccccaacgccaaccccaacgccaacccgaacgccaaccccaacgccaaccccaacgcgaaccccaacgccaacccgaacgccaaccccaacgccaaccccaacgcgaaccccaacgccaacccgaacgccaaccccaacgccaaccccaacgccaaccccaacgcgaacccgaacgccaaccccaacgccaaccccaacaagaacaaccagggcaacgggcagggccacaacaugcccaacgacccgaaccgcaacguggacgagaacgccaacgccaacaacgcggucaagaacaacaacaacgaggagcccuccgacaagcacaucaaggaguaccugacgaagauccagaacagcaucuccaccgaguggagccccugcuccgugaccugcggcaacgggauccaggugcggaucaagcccggcagcgccgggaagccgaaggacgagcucaacuacgagaacgacaucgagaagaagaucugcaagauggagaagugcuccagcgucuucaacguggugaacuccagcaucggccugaucaugguccuguccuuccucuuccugaacuga

SEQ ID NO: 3358 - RNA, 1263 nt, Artificial Sequence
  derived and/or modified CDS sequence (opt1) from Pf(PNG225-053)__BAM85032.1__CSP
augaugcgcaagcuggccauccucagcguguccagcuuccuguucgucgaggcccuguuccaggaguaccagugcuacggcuccagcuccaacacccgggugcucaacgagcugaacuacgacaacgcggggaccaaccuguacaacgagcucgagaugaacuacuacggcaagcaggagaacugguacagccugaagaagaacucccgcagccugggggagaacgacgacggcaacaacaacaacggggacaacggccgggagggcaaggacgaggacaagcgcgacgggaacaacgaggacaacgagaagcuccggaagcccaagcacaagaagcugaagcagccgggcgacgggaaccccgaccccaacgccaaccccaacguggacccgaacgccaaccccaacgucgaccccaacgccaaccccaacguggacccgaacgccaaccccaacgcgaaccccaacgccaaccccaacgccaacccgaacgccaaccccaacgcgaaccccaacgccaaccccaacgccaacccgaacgccaaccccaacgccaaccccaacgcgaaccccaacgccaacccgaacgccaaccccaacgccaaccccaacgccaaccccaacgcgaacccgaacgccaaccccaacgccaaccccaacgccaaccccaacgccaacccgaacgcgaaccccaacgccaaccccaacgccaacccgaacgccaaccccaacgccaaccccaacgcgaaccccaacgccaacccgaacgccaaccccaacgccaaccccaacgcgaaccccaacgccaacccgaacgccaaccccaacgccaaccccaacgccaaccccaacgcgaacccgaacgccaaccccaacgccaaccccaacaagaacaaccagggcaacgggcagggccacaacaugcccaacgacccgaaccgcaacguggacgagaacgccaacgccaacaacgcggucaagaacaacaacaacgaggagcccuccgacaagcacaucgagcaguaccugaagaagauccagaacagccucuccacggaguggagccccugcuccgugaccugcggcaacgggauccaggugcggaucaagcccggcagcgccaacaagccgaaggacgagcuggacuacgagaacgacaucgagaagaagaucugcaagauggagaagugcuccagcgucuucaacguggugaacuccagcaucgggcugaucaugguccucuccuuccuguuccugaacuga

SEQ ID NO: 3359 - RNA, 1263 nt, Artificial Sequence
  derived and/or modified CDS sequence (opt1) from Pf(Sol95-113)__BAM85062.1__CSP
augaugcgcaagcuggccauccucagcguguccagcuuccuguucgucgaggcccuguuccaggaguaccagugcuacggcuccagcuccaacacccgggugcucaacgagcugaacuacgacaacgcggggaccaaccuguacaacgagcucgagaugaacuacuacggcaagcaggagaacugguacagccugaagaagaacucccgcagccugggggagaacgacgacggcaacaacaacaacggggacaacggccgggagggcaaggacgaggacaagcgcgacgggaacaacgaggacaacgagaagcuccggaagcccaagcacaagaagcugaagcagccgggcgacgggaaccccgaccccaacgccaaccccaacguggacccgaacgccaaccccaacgucgaccccaacgccaaccccaacguggacccgaacgccaaccccaacguggaccccaacgcgaaccccaacgccaacccgaacgccaaccccaacgccaaccccaacgcgaaccccaacgccaacccgaacgccaaccccaacgccaaccccaacgccaaccccaacgcgaacccgaacgccaaccccaacgccaaccccaacgccaaccccaacgccaacccgaacgcgaaccccaacgccaaccccaacgccaaccccaacgccaacccgaacgccaaccccaacgcgaaccccaacgccaacccgaacgccaaccccaacgccaaccccaacgccaaccccaacgcgaacccgaacgccaaccccaacgccaaccccaacgccaaccccaacgcgaacccgaacgccaaccccaacgccaaccccaacgccaaccccaacgccaacccgaacgcgaaccccaacgccaaccccaacaagaacaaccagggcaacgggcagggccacaacaugcccaacgacccgaaccgcaacgucgacgagaacgccaacgccaacaacgccgugaagaacaacaacaacgaggagcccuccgacaagcacaucgagcaguaccugaagaagauccagaacagccucuccacggaguggagccccugcuccgugaccugcggcaacgggauccagguccggaucaagcccggcagcgcgaacaagccgaaggacgagcuggacuacgagaacgacaucgagaagaagaucugcaagauggagaagugcuccagcguguucaacguggucaacuccagcaucgggcugaucauggugcucuccuuccuguuccugaacuga

SEQ ID NO: 3360 - RNA, 1263 nt, Artificial Sequence
  derived and/or modified CDS sequence (opt1) from Pf(Sol95-328)__BAM85093.1__CSP
augaugcgcaagcuggccauccucagcguguccagcuuccuguucgucgaggcccuguuccaggaguaccagugcuacggcuccagcuccaacacccgggugcucaacgagcugaacuacgacaacgcggggaccaaccuguacaacgagcucgagaugaacuacuacggcaagcaggagaacugguacagccugaagaagaacucccgcagccugggggagaacgacgacggcaacaacaacaacggggacaacggccgggagggcaaggacgaggacaagcgcgacgggaacaacgaggacaacgagaagcuccggaagcccaagcacaagaagcugaagcagccgggcgacgggaaccccgaccccaacgccaaccccaacguggacccgaacgccaaccccaacgucgaccccaacgccaaccccaacguggacccgaacgccaaccccaacgcgaaccccaacgccaaccccaacgccaacccgaacgccaaccccaacgcgaaccccaacgccaaccccaacgccaacccgaacgccaaccccaacgccaaccccaacgcgaaccccaacgccaacccgaacgccaaccccaacgccaaccccaacgccaaccccaacgcgaacccgaacgccaaccccaacguggaccccaacgccaaccccaacgccaacccgaacgccaaccccaacgcgaaccccaacgccaacccgaacgccaaccccaacgccaaccccaacgccaaccccaacgcgaacccgaacgccaaccccaacgccaaccccaacgccaaccccaacgcgaacccgaacgccaaccccaacgccaaccccaacgccaaccccaacgccaacccgaacgcgaaccccaacgccaaccccaacaagaacaaccagggcaacgggcagggccacaacaugcccaacgacccgaaccgcaacgucgacgagaacgccaacgccaacaacgccgugaagaacaacaacaacgaggagcccuccgacaagcacaucgagcaguaccugaagaagauccagaacagccucuccacggaguggagccccugcuccgugaccugcggcaacgggauccagguccggaucaagcccggcagcgcggacaagccgaaggaccagcuggacuacgagaacgacaucgagaagaagaucugcaagauggagaagugcuccagcguguucaacguggucaacuccagcaucgggcugaucauggugcucuccuuccuguuccugaacuga

SEQ ID NO: 3361 - RNA, 1263 nt, Artificial Sequence
  derived and/or modified CDS sequence (opt1) from Pf(TiMS95-208)__BAM84896.1__CSP
augaugcgcaagcuggccauccucagcguguccagcuuccuguucgucgaggcccuguuccaggaguaccagugcuacggcuccagcuccaacacccgggugcucaacgagcugaacuacgacaacgcggggaccaaccuguacaacgagcucgagaugaacuacuacggcaagcaggagaacugguacagccugaagaagaacucccgcagccugggggagaacgacgacggcaacaacaacaacggggacaacggccgggagggcaaggacgaggacaagcgcgacgggaacaacgaggacaacgagaagcuccggaagcccaagcacaagaagcugaagcagccgggcgacgggaaccccgaccccaacgccaaccccaacguggacccgaacgccaaccccaacgucgaccccaacgccaaccccaacguggacccgaacgccaaccccaacgcgaaccccaacgccaaccccaacgccaacccgaacgccaaccccaacgcgaaccccaacgccaaccccaacgccaacccgaacgccaaccccaacgccaaccccaacgcgaaccccaacgccaacccgaacgccaaccccaacgccaaccccaacgccaaccccaacgcgaacccgaacgccaaccccaacgccaaccccaacgccaaccccaacgccaacccgaacgcgaaccccaacgccaaccccaacgccaacccgaacgccaaccccaacgccaaccccaacgcgaaccccaacgccaacccgaacgccaaccccaacgccaaccccaacgcgaaccccaacgccaacccgaacgccaaccccaacgccaaccccaacgccaaccccaacgcgaacccgaacgccaaccccaacgccaaccccaacaagaacaaccagggcaacgggcagggccacaacaugcccaacgacccgaaccgcaacguggacgagaacgccaacgccaacaacgacgucaagaacaacaacaacgaggagcccuccgacaagcacaucgagcaguaccugaagaagauccaguacagccucuccacggaguggagccccugcuccgugaccugcggcaacgggauccaggugcggaucaagcccggcagcgcggacaagccgaaggaccagcuggacuacgagaacgacaucgagaagaagaucugcaagauggagaagugcuccagcgucuucaacguggugaacuccagcaucgggcugaucaugguccucuccuuccuguuccugaacuga

SEQ ID NO: 3362 - RNA, 1263 nt, Artificial Sequence
  derived and/or modified CDS sequence (opt1) from Pf(TiMS95-260)__BAM84907.1__CSP
augaugcgcaagcuggccauccucagcguguccagcuuccuguucgucgaggcccuguuccaggaguaccagugcuacggcuccagcuccaacacccgggugcucaacgagcugaacuacgacaacgcggggaccaaccuguacaacgagcucgagaugaacuacuacggcaagcaggagaacugguacagccugaagaagaacucccgcagccugggggagaacgacgacggcaacaacaacaacggggacaacggccgggagggcaaggacgaggacaagcgcgacgggaacaacgaggacaacgagaagcuccggaagcccaagcacaagaagcugaagcagccgggcgacgggaaccccgaccccaacgccaaccccaacguggacccgaacgccaaccccaacgucgaccccaacgccaaccccaacguggacccgaacgccaaccccaacgcgaaccccaacgccaaccccaacgccaacccgaacgccaaccccaacgcgaaccccaacgccaaccccaacgccaacccgaacgccaaccccaacgccaaccccaacgcgaaccccaacgccaacccgaacgccaaccccaacgccaaccccaacgccaaccccaacgcgaacccgaacgccaaccccaacgccaaccccaacgccaaccccaacguggacccgaacgccaaccccaacgcgaaccccaacgccaacccgaacgccaaccccaacgccaaccccaacgccaaccccaacgcgaacccgaacgccaaccccaacgccaaccccaacgccaaccccaacgcgaacccgaacgccaaccccaacgccaaccccaacgccaaccccaacgccaacccgaacgcgaaccccaacgccaaccccaacaagaacaaccagggcaacgggcagggccacaacaugcccaacgacccgaaccgcaacgucgacgagaacgccaacgccaacaacgccgugaagaacaacaacaacgaggagcccuccgacaagcacaucaaggaguaccugacgaagauccagaacagcaucuccaccgaguggagccccugcuccgugaccugcggcaacgggauccagguccggaucaagcccggcagcgcggggaagccgaaggacgagcucaacuacgagaacgacaucgagaagaagaucugcaagauggagaagugcuccagcguguucaacguggucaacuccagcaucggccugaucauggugcuguccuuccucuuccugaacuga

SEQ ID NO: 3363 - RNA, 1263 nt, Artificial Sequence
  derived and/or modified CDS sequence (opt1) from Pf(Tz93-030)__BAM84756.1__CSP
augaugcgcaagcuggccauccucagcguguccagcuuccuguucgucgaggcccuguuccaggaguaccagugcuacggcuccagcuccaacacccgggugcucaacgagcugaacuacgacaacgcggggaccaaccuguacaacgagcucgagaugaacuacuacggcaagcaggagaacugguacagccugaagaagaacucccgcagccugggggagaacgacgacggcaacaacaacaacggggacaacggccgggagggcaaggacgaggacaagcgcgacgggaacaacgaggacaacgagaagcuccggaagcccaagcacaagaagcugaagcagccgggcgacgggaaccccgaccccaacgccaaccccaacguggacccgaacgccaaccccaacgucgaccccaacgccaaccccaacguggacccgaacgccaaccccaacgcgaaccccaacgccaaccccaacgccaacccgaacgccaaccccaacgcgaaccccaacgccaaccccaacgccaacccgaacgccaaccccaacgccaaccccaacgcgaaccccaacgccaacccgaacgccaaccccaacgccaaccccaacgccaaccccaacgcgaacccgaacguggaccccaacgccaaccccaacgccaaccccaacgccaacccgaacgccaaccccaacgcgaaccccaacgccaacccgaacgccaaccccaacgccaaccccaacgccaaccccaacgcgaacccgaacgccaaccccaacgccaaccccaacgccaaccccaacgcgaacccgaacgccaaccccaacgccaaccccaacgccaaccccaacgccaacccgaacgcgaaccccaacgccaaccccaacaagaacaaccagggcaacgggcagggccacaacaugcccaacgacccgaaccgcaacgucgacgagaacgccaacgccaacaacgccgugaagaacaacaacaacgaggagcccuccgacaagcacaucaaggaguaccugaacaagauccagaacagcaucuccacggaguggagccccugcuccgugaccugcggcaacgggauccagguccggaucaagcccggcagcgcggacaagccgaaggaccagcucgacuacaucaacgacaucgagaagaagaucugcaagauggagaagugcuccagcguguucaacguggucaacuccagcaucgggcugaucauggugcuguccuuccucuuccugaacuga

SEQ ID NO: 3364 - RNA, 1263 nt, Artificial Sequence
  derived and/or modified CDS sequence (opt1) from Pf(Tz93-038)__BAM84758.1__CSP
augaugcgcaagcuggccauccucagcguguccagcuuccuguucgucgaggcccuguuccaggaguaccagugcuacggcuccagcuccaacacccgggugcucaacgagcugaacuacgacaacgcggggaccaaccuguacaacgagcucgagaugaacuacuacggcaagcaggagaacugguacagccugaagaagaacucccgcagccugggggagaacgacgacggcaacaacaacaacggggacaacggccgggagggcaaggacgaggacaagcgcgacgggaacaacgaggacaacgagaagcuccggaagcccaagcacaagaagcugaagcagccgggcgacgggaaccccgaccccaacgccaaccccaacguggacccgaacgccaaccccaacgucgaccccaacgccaaccccaacguggacccgaacgccaaccccaacgcgaaccccaacgccaaccccaacgccaacccgaacgccaaccccaacgcgaaccccaacgccaaccccaacgccaacccgaacgccaaccccaacgccaaccccaacgcgaaccccaacgccaacccgaacgccaaccccaacgccaaccccaacgccaaccccaacgcgaacccgaacgccaaccccaacguggaccccaacgccaaccccaacgccaacccgaacgccaaccccaacgcgaaccccaacgccaacccgaacgccaaccccaacgccaaccccaacgccaaccccaacgcgaacccgaacgccaaccccaacgccaaccccaacgccaaccccaacgcgaacccgaacgccaaccccaacgccaaccccaacgccaaccccaacgccaacccgaacgcgaaccccaacgccaaccccaacaagaacaaccagggcaacgggcagggccacaacaugcccaacgacccgaaccgcaacgucgacgagaacgccaacgccaacaacgccgugaagaacaacaacaacgaggagcccuccgacaagcacaucaaggaguaccugaacaagauccagaacagcaucuccacggaguggagccccugcuccgugaccugcggcaacgggauccagguccggaucaagcccggcagcgcggacaagccgaaggaccagcucgacuacaucaacgacaucgagaagaagaucugcaagauggagaagugcuccagcguguucaacguggucaacuccagcaucgggcugaucauggugcuguccuuccucuuccugaacuga

SEQ ID NO: 3365 - RNA, 1260 nt, Artificial Sequence
  derived and/or modified CDS sequence (opt1) from Pf(TMS31)__ACO49480.1__CSP
augcgcaagcuggccauccucagcguguccagcuuccuguucgucgaggcccuguuccaggaguaccagugcuacggcuccagcuccaacacccgggugcucaacgagcugaacuacgacaacgcggggaccaaccuguacaacgagcucgagaugaacuacuacggcaagcaggagaacugguacagccugaagaagaacucccgcagccugggggagaacgacgacggcaacaacaacaacggggacaacggccgggagggcaaggacgaggacaagcgcgacgggaacaacgaggacaacgagaagcuccggaagcccaagcacaagaagcugaagcagccgggcgacgggaaccccgaccccaacgccaaccccaacguggacccgaacgccaaccccaacgucgaccccaacgccaaccccaacguggacccgaacgccaaccccaacgcgaaccccaacgccaaccccaacgccaacccgaacgccaaccccaacgcgaaccccaacgccaaccccaacgccaacccgaacgccaaccccaacgccaaccccaacgcgaaccccaacgccaacccgaacgccaaccccaacgccaaccccaacgccaaccccaacgcgaacccgaacgccaaccccaacgccaaccccaacgccaaccccaacgccaacccgaacgcgaaccccaacgccaaccccaacgccaacccgaacgccaaccccaacgccaaccccaacgcgaaccccaacgccaacccgaacgccaaccccaacgccaaccccaacgcgaaccccaacgccaacccgaacgccaaccccaacgccaaccccaacgccaaccccaacgcgaacccgaacgccaaccccaacgccaaccccaacaagaacaaccagggcaacgggcagggccacaacaugcccaacgacccgaaccgcaacguggacgagaacgccaacgccaacaacgcggucaagaacaacaacaacgaggagcccuccgacaagcacaucgagcaguaccugaagaagaugcagaacagccucuccacggaguggagccccugcuccgugaccugcggcaacgggauccaggugcggaucaagcccggcagcgccaacaagccgaaggacgagcuggacuacgagaacgacaucgagaagaagaucugcaagauggagaagugcuccagcgucuucaacguggugaacuccagcaucgggcugaucaugguccucuccuuccuguuccugaacuga

SEQ ID NO: 3366 - RNA, 1260 nt, Artificial Sequence
  derived and/or modified CDS sequence (opt1) from Pf(TSY172)__ACO49517.1__CSP
augcgcaagcuggccauccucagcguguccagcuuccuguucgucgaggcccuguuccaggaguaccagugcuacggcuccagcuccaacacccgggugcucaacgagcugaacuacgacaacgcggggaccaaccuguacaacgagcucgagaugaacuacuacggcaagcaggagaacugguacagccugaagaagaacucccgcagccugggggagaacgacgacggcaacaacaacaacggggacaacggccgggagggcaaggacgaggacaagcgcgacgggaacaacgaggacaacgagaagcuccggaagcccaagcacaagaagcugaagcagccgggcgacgggaaccccgaccccaacgccaaccccaacguggacccgaacgccaaccccaacgucgaccccaacgccaaccccaacguggacccgaacgccaaccccaacgcgaaccccaacgccaaccccaacgccaacccgaacgccaaccccaacgcgaaccccaacgccaaccccaacgccaacccgaacgccaaccccaacgccaaccccaacgcgaaccccaacgccaacccgaacgccaaccccaacgccaaccccaacgccaaccccaacgcgaacccgaacgccaaccccaacgccaaccccaacgccaaccccaacgccaacccgaacgcgaaccccaacgccaaccccaacgccaacccgaacgccaaccccaacgccaaccccaacgcgaaccccaacgccaacccgaacgccaaccccaacgccaaccccaacgcgaaccccaacgccaacccgaacgccaaccccaacgccaaccccaacgccaaccccaacgcgaacccgaacgccaaccccaacgccaaccccaacaagaacaaccagggcaacgggcagggccacaacaugcccaacgacccgaaccgcaacguggacgagaacgccaacgccaacaacgcggucaagaacaacaacaacgaggagcccuccgacaagcacaucgagcaguaccugaagaagauccagaacagccucuccacggaguggagccccugcuccgugaccugcggcaacgggauccaggugcggaucaagcccggcagcgccaacaagccgaaggacgagcuggacuacgagaacgacaucgagaagaagaucugcaagauggagaagugcuccagcgucuucaacguggugaacuccagcaucgggcugaucaugguccucuccuuccuguuccugaacuga

SEQ ID NO: 3367 - RNA, 1251 nt, Artificial Sequence
  derived and/or modified CDS sequence (opt1) from Pf(Asembo Bay)__AAN87591.1__CSP
augaugcgcaagcuggccauccucagcguguccagcuuccuguucgucgaggcccuguuccaggaguaccagugcuacggcuccagcuccaacacccgggugcucaacgagcugaacuacgacaacgcggggaccaaccuguacaacgagcucgagaugaacuacuacggcaagcaggagaacugguacagccugaagaagaacucccgcagccugggggagaacgacgacggcaacaacaacaacggggacaacggccgggagggcaaggacgaggacaagcgcgacgggaacaacgaggacaacgagaagcuccggaagcccaagcacaagaagcugaagcagccgggcgacgggaaccccgaccccaacgccaaccccaacguggacccgaacgccaaccccaacgucgaccccaacgccaaccccaacguggacccgaacgccaaccccaacgcgaaccccaacgccaaccccaacgccaacccgaacgccaaccccaacgcgaaccccaacgccaaccccaacgccaacccgaacgccaaccccaacgccaaccccaacgcgaaccccaacgccaacccgaacgccaaccccaacgccaaccccaacgccaaccccaacgcgaacccgaacgccaaccccaacguggaccccaacgccaaccccaacgccaacccgaacgccaaccccaacgcgaaccccaacgccaacccgaacgccaaccccaacgccaaccccaacgccaaccccaacgcgaacccgaacgccaaccccaacgccaaccccaacgccaaccccaacgcgaacccgaacgccaaccccaacgccaaccccaacgccaaccccaacgccaacccgaacgcgaaccccaacaagaacaaccagggcaacgggcagggccacaacaugcccaacgaccccaaccgcaacgucgacgagaacgccaacgccaacaacgccgugaagaacaacaacaacgaggagccguccgaccagcacaucgagaaguaccugaagacgauccagaacagccucuccaccgaguggagccccugcuccgugaccugcggcaacgggauccagguccggaucaagcccggcagcgccaacaagcccaaggaccagcuggacuacgcgaacgacaucgagaagaagaucugcaagauggagaagugcuccagcguguucaacguggucaacuccagcaucgggcugaucauggugcucuccuuccuguuccugaacuga

SEQ ID NO: 3368 - RNA, 1251 nt, Artificial Sequence
  derived and/or modified CDS sequence (opt1) from Pf(Asembo Bay)__AAN87590.1__CSP
augaugcgcaagcuggccauccucagcguguccagcuuccuguucgucgaggcccuguuccaggaguaccagugcuacggcuccagcuccaacacccgggugcucaacgagcugaacuacgacaacgcggggaccaaccuguacaacgagcucgagaugaacuacuacggcaagcaggagaacugguacagccugaagaagaacucccgcagccugggggagaacgacgacggcaacaacaacaacggggacaacggccgggagggcaaggacgaggacaagcgcgacgggaacaacgaggacaacgagaagcuccggaagcccaagcacaagaagcugaagcagccgggcgacgggaaccccgaccccaacgccaaccccaacguggacccgaacgccaaccccaacgucgaccccaacgccaaccccaacguggacccgaacgccaaccccaacgcgaaccccaacgccaaccccaacgccaacccgaacgccaaccccaacgcgaaccccaacgccaaccccaacgccaacccgaacgccaaccccaacgccaaccccaacgcgaaccccaacgccaacccgaacguggaccccaacgccaaccccaacgccaaccccaacgccaacccgaacgcgaaccccaacgccaaccccaacgccaaccccaacgccaacccgaacgccaaccccaacgcgaaccccaacgccaacccgaacgccaaccccaacgccaaccccaacgccaaccccaacgcgaacccgaacgccaaccccaacgccaaccccaacgccaaccccaacgcgaacccgaacgccaaccccaacgccaaccccaacgccaaccccaacgccaacccgaacgcgaaccccaacaagaacaaccagggcaacgggcagggccacaacaugcccaacgaccccaaccgcaacgucgacgagaacgccaacgccaacaacgccgugaagaacaacaacaacgaggagccguccgaccagcacaucgagaaguaccugaagacgauccagaacagccucuccaccgaguggagccccugcuccgugaccugcggcaacgggauccagguccggaucaagcccggcagcgccaacaagcccaaggaccagcuggacuacgcgaacgacaucgagaagaagaucugcaagauggagaagugcuccagcguguucaacguggucaacuccagcaucgggcugaucauggugcucuccuuccuguuccugaacuga

SEQ ID NO: 3369 - RNA, 1251 nt, Artificial Sequence
  derived and/or modified CDS sequence (opt1) from Pf(Gha1108-097)__BAM84820.1__CSP
augaugcgcaagcuggccauccucagcguguccagcuuccuguucgucgaggcccuguuccaggaguaccagugcuacggcuccagcuccaacacccgggugcucaacgagcugaacuacgacaacgcggggaccaaccuguacaacgagcucgagaugaacuacuacggcaagcaggagaacugguacagccugaagaagaacgggcgcucccugggcgagaacgacgacgggaacaacaacaacggcgacaacggccgggaggggaaggacgaggacaagcgcgacggcaacaacgaggacaacgagaagcuccggaagcccaagcacaagaagcugaagcagccggccgacgggaaccccgaccccaacgccaaccccaacguggacccgaacgccaaccccaacgucgaccccaacgccaaccccaacguggacccgaacgcgaaccccaacgccaaccccaacgccaaccccaacgccaacccgaacgcgaaccccaacgccaaccccaacgccaaccccaacgccaacccgaacgccaaccccaacgcgaaccccaacgccaaccccaacgccaacccgaacgccaaccccaacgccaaccccaacgcgaaccccaacgccaacccgaacguggaccccaacgccaaccccaacgccaaccccaacgccaacccgaacgcgaaccccaacgccaaccccaacgccaacccgaacgccaaccccaacgccaaccccaacgcgaaccccaacgccaacccgaacgccaaccccaacgccaaccccaacgcgaaccccaacgccaacccgaacgccaaccccaacgccaaccccaacgccaaccccaacgcgaacccgaacgccaaccccaacaagaacaaccagggcaacgggcagggccacaacaugcccaacgaccccaaccgcaacgucgacgagaacgccaacgccaacaacggcgugaagaacaacaacaacgaggagccgagcgacaagcacaucgagcaguaccugaagcggauccagaacucccucagcacggaguggucccccugcagcgugaccugcgggaacggcauccagguccgcaucaagcccggguccgccaacaagcccaaggacgagcugaacuacgagaacgacaucgagaagaagaucugcaagauggagaagugcagcuccguguucaacguggucaacagcuccaucggccugaucauggugcucagcuuccuguuccugaacuga

SEQ ID NO: 3370 - RNA, 1251 nt, Artificial Sequence
  derived and/or modified CDS sequence (opt1) from Pf(MAD20)__AAA29550.1__CSP
augaugcgcaagcuggccauccucagcguguccagcuuccuguucgucgaggcccuguuccaggaguaccagugcuacggcuccagcuccaacacccgggugcucaacgagcugaacuacgacaacgcggggaucaaccuguacaacgagcucgagaugaacuacuacggcaagcaggagaacugguacagccugaagaagaacucccgcagccugggggagaacgacgacggcaacaacaacaacggggacaacggccgggagggcaaggacgaggacaagcgcgacgggaacaacgaggacaacgagaagcuccggaagcccaagcacaagaagcugaagcagccgggcgacgggaaccccgaccccaacgccaaccccaacguggacccgaacgccaaccccaacgucgaccccaacgccaaccccaacguggacccgaacgccaaccccaacgcgaaccccaacgccaaccccaacgccaacccgaacgccaaccccaacgcgaaccccaacgccaaccccaacgccaacccgaacgccaaccccaacgccaaccccaacgcgaaccccaacgccaacccgaacgccaaccccaacgccaaccccaacgccaaccccaacgcgaacccgaacguggaccccaacgccaaccccaacgccaaccccaacgccaacccgaacgccaaccccaacgcgaaccccaacgccaacccgaacgccaaccccaacgccaaccccaacgccaaccccaacgcgaacccgaacgccaaccccaacgccaaccccaacgccaaccccaacgcgaacccgaacgccaaccccaacgccaaccccaacgccaaccccaacgccaacccgaacgcgaaccccaacaagaacaaccagggcaacgggcagggccacaacaugcccaacgaccccaaccgcaacgucgacgagaacgccaacgccaacaacgccgugaagaacaacaacaacgaggagccguccgacaagcacaucgagcaguaccugaagaagauccagaacagccucuccaccgaguggagccccugcuccgugacgugcggcaacgggauccagguccggaucaagcccggcagcgccgacaagcccaaggaccagcuggacuacgagaacgacaucgagaagaagaucugcaagauggagaagugcuccagcguguucaacguggucaacuccagcaucgggcugaucauggugcucuccuuccuguuccugaacuga

SEQ ID NO: 3371 - RNA, 1251 nt, Artificial Sequence
  derived and/or modified CDS sequence (opt1) from Pf(Pal97-002)__BAM84917.1__CSP
augaugcgcaagcuggccauccucagcguguccagcuuccuguucgucgaggcccuguuccaggaguaccagugcuacggcuccagcuccaacacccgggugcucaacgagcugaacuacgacaacgcggggaccaaccuguacaacgagcucgagaugaacuacuacggcaagcaggagaacugguacagccugaagaagaacucccgcagccugggggagaacgacgacggcaacaacaacaacggggacaacggccgggagggcaaggacgaggacaagcgcgacgggaacaacgaggacaacgagaagcuccggaagcccaagcacaagaagcugaagcagccgggcgacgggaaccccgaccccaacgccaaccccaacguggacccgaacgccaaccccaacgucgaccccaacgccaaccccaacguggacccgaacgccaaccccaacgcgaaccccaacgccaaccccaacgccaacccgaacgccaaccccaacgcgaaccccaacgccaaccccaacgccaacccgaacgccaaccccaacgccaaccccaacgcgaaccccaacgccaacccgaacgccaaccccaacgccaaccccaacgccaaccccaacgcgaacccgaacguggaccccaacgccaaccccaacgccaaccccaacgccaacccgaacgccaaccccaacgcgaaccccaacgccaacccgaacgccaaccccaacgccaaccccaacgccaaccccaacgcgaacccgaacgccaaccccaacgccaaccccaacgccaaccccaacgcgaacccgaacgccaaccccaacgccaaccccaacgccaaccccaacgccaacccgaacgcgaaccccaacaagaacaaccagggcaacgggcagggccacaacaugcccaacgaccccaaccgcaacgucgacgagaacgccaacgccaacaacgccgugaagaacaacaacaacgaggagccguccgaccagcacaucgagaaguacaucaagaagauccagaacagccuguccacggaguggagccccugcuccgugaccugcggcaacgggauccagguccggaucaagcccggcagcgccgacaagcccaagaacgagcucgacuacgagaacgacaucgagaagaagaucugcaagauggagaagugcuccagcguguucaacguggucaacuccagcaucgggcugaucauggugcuguccuuccucuuccugaacuga

SEQ ID NO: 3372 - RNA, 1251 nt, Artificial Sequence
  derived and/or modified CDS sequence (opt1) from Pf(Pal97-102)__BAM84954.1__CSP
augaugcgcaagcuggccauccucagcguguccagcuuccuguucgucgaggcccuguuccaggaguaccagugcuacggcuccagcuccaacacccgggugcucaacgagcugaacuacgacaacgcggggaccaaccuguacaacgagcucgagaugaacuacuacggcaagcaggagaacugguacagccugaagaagaacucccgcagccugggggagaacgacgacggcaacaacaacaacggggacaacggccgggagggcaaggacgaggacaagcgcgacgggaacaacgaggacaacgagaagcuccggaagcccaagcacaagaagcugaagcagccgggcgacgggaaccccgaccccaacgccaaccccaacguggacccgaacgccaaccccaacgucgaccccaacgccaaccccaacguggacccgaacgccaaccccaacgcgaaccccaacgccaaccccaacgccaacccgaacgccaaccccaacgcgaaccccaacgccaaccccaacgccaacccgaacgccaaccccaacgccaaccccaacgcgaaccccaacgccaacccgaacgccaaccccaacgccaaccccaacgccaaccccaacgcgaacccgaacgccaaccccaacgccaaccccaacgccaaccccaacgccaacccgaacgcgaaccccaacgccaaccccaacgccaacccgaacgccaaccccaacgccaaccccaacgcgaaccccaacgccaacccgaacgccaaccccaacgccaaccccaacgcgaaccccaacgccaacccgaacgccaaccccaacgccaaccccaacgccaaccccaacgcgaacccgaacgccaaccccaacaagaacaaccagggcaacgggcagggccacaacaugcccaacgaccccaaccgcaacguggacgagaacgccaacgccaacaacgccgucaagaacaacaacaacgaggagccguccgacaagcacaucaaggaguaccugacgaagauccagaacagcaucuccaccgaguggagccccugcuccgugaccugcggcaacgggauccaggugcggaucaagcccggcagcgcggggaagcccaaggacgagcucaacuacgagaacgacaucgagaagaagaucugcaagauggagaagugcuccagcgucuucaacguggugaacuccagcaucggccugaucaugguccuguccuuccucuuccugaacuga

SEQ ID NO: 3373 - RNA, 1251 nt, Artificial Sequence
  derived and/or modified CDS sequence (opt1) from Pf(PNG227-255)__BAM85044.1__CSP
augaugcgcaagcuggccauccucagcguguccagcuuccuguucgucgaggcccuguuccaggaguaccagugcuacggcuccagcuccaacacccgggugcucaacgagcugaacuacgacaacgcggggaccaaccuguacaacgagcucgagaugaacuacuacggcaagcaggagaacugguacagccugaagaagaacucccgcagccugggggagaacgacgacggcaacaacaacaacggggacaacggccgggagggcaaggacgaggacaagcgcgacgggaacaacgaggacaacgagaagcuccggaagcccaagcacaagaagcugaagcagccgggcgacgggaaccccgaccccaacgccaaccccaacguggacccgaacgccaaccccaacgucgaccccaacgccaaccccaacguggacccgaacgccaaccccaacguggaccccaacgcgaaccccaacgccaacccgaacgccaaccccaacgccaaccccaacgcgaaccccaacgccaacccgaacgccaaccccaacgccaaccccaacgccaaccccaacgcgaacccgaacgccaaccccaacgccaaccccaacgccaaccccaacgccaacccgaacgucgaccccaacgcgaaccccaacgccaaccccaacgccaacccgaacgccaaccccaacgccaaccccaacgcgaacccgaacgccaaccccaacgccaaccccaacgccaaccccaacgccaacccgaacgcgaaccccaacgccaaccccaacgccaaccccaacgccaacccgaacgcgaaccccaacgccaaccccaacgccaaccccaacgccaacccgaacgccaaccccaacaagaacaaccagggcaacgggcagggccacaacaugcccaacgaccccaaccgcaacguggacgagaacgcgaacgccaacaacgccgugaagaacaacaacaacgaggagccguccgacaagcacaucgagcaguaccugaagaagauccagaacagccucuccacggaguggagccccugcuccgugaccugcggcaacgggauccagguccggaucaagcccggcagcgccgacaagcccaaggaccagcuggacuacgagaacgacaucgagaagaagaucugcaagauggagaagugcuccagcguguucaacgucgugaacuccagcaucgggcugaucauggugcucuccuuccuguuccugaacuga

SEQ ID NO: 3374 - RNA, 1251 nt, Artificial Sequence
  derived and/or modified CDS sequence (opt1) from Pf(PNG228-063)__BAM85045.1__CSP
augaugcgcaagcuggccauccucagcguguccagcuuccuguucgucgaggcccuguuccaggaguaccagugcuacggcuccagcuccaacacccgggugcucaacgagcugaacuacgacaacgcggggaccaaccuguacaacgagcucgagaugaacuacuacggcaagcaggagaacugguacagccugaagaagaacucccgcagccugggggagaacgacgacggcaacaacaacaacggggacaacggccgggagggcaaggacgaggacaagcgcgacgggaacaacgaggacaacgagaagcuccggaagcccaagcacaagaagcugaagcagccgggcgacgggaaccccgaccccaacgccaaccccaacguggacccgaacgccaaccccaacgucgaccccaacgccaaccccaacguggacccgaacgccaaccccaacgcgaaccccaacgccaaccccaacgccaacccgaacgccaaccccaacgcgaaccccaacgccaaccccaacgccaacccgaacgccaaccccaacgccaaccccaacgcgaaccccaacgccaacccgaacgccaaccccaacgccaaccccaacgccaaccccaacgcgaacccgaacguggaccccaacgccaaccccaacgccaaccccaacgccaacccgaacgccaaccccaacgcgaaccccaacgccaacccgaacgccaaccccaacgccaaccccaacgccaaccccaacgcgaacccgaacgccaaccccaacgccaaccccaacgccaaccccaacgcgaacccgaacgccaaccccaacgccaaccccaacgccaaccccaacgccaacccgaacgcgaaccccaacaagaacaaccagggcaacgggcagggccacaacaugcccaacgaccccaaccgcaacgucgacgagaacgccaacgccaacaacgccgugaagaacaacaacaacgaggagccguccgacaagcacaucgagcaguaccugaagaagauccagaacagccucuccacggaguggagccccugcuccgugaccugcggcaacgggauccagguccggaucaagcccggcagcgccgggaaguccaaggacgagcuggacuacgagaacgacaucgagaagaagaucugcaagauggagaagugcagcuccguguucaacguggucaacagcuccaucggccugaucauggugcucagcuuccuguuccugaacuga

SEQ ID NO: 3375 - RNA, 1251 nt, Artificial Sequence
  derived and/or modified CDS sequence (opt1) from Pf(PNG830-058)__BAM84987.1__CSP
augaugcgcaagcuggccauccucagcguguccagcuuccuguucgucgaggcccuguuccaggaguaccagugcuacggcuccagcuccaacacccgggugcucaacgagcugaacuacgacaacgcggggaccaaccuguacaacgagcucgagaugaacuacuacggcaagcaggagaacugguacagccugaagaagaacucccgcagccugggggagaacgacgacggcaacaacaacaacggggacaacggccgggagggcaaggacgaggacaagcgcgacgggaacaacgaggacaacgagaagcuccggaagcccaagcacaagaagcugaagcagccgggcgacgggaaccccgaccccaacgccaaccccaacguggacccgaacgccaaccccaacgucgaccccaacgccaaccccaacguggacccgaacgccaaccccaacguggaccccaacgcgaaccccaacgccaacccgaacgccaaccccaacgccaaccccaacgcgaaccccaacgccaacccgaacgccaaccccaacgccaaccccaacgccaaccccaacgcgaacccgaacgccaaccccaacgccaaccccaacgccaaccccaacgccaacccgaacgcgaaccccaacgccaaccccaacgccaaccccaacgccaacccgaacgccaaccccaacgcgaaccccaacgccaacccgaacgccaaccccaacgccaaccccaacgccaaccccaacgcgaacccgaacgccaaccccaacgccaaccccaacgccaaccccaacgcgaacccgaacgccaaccccaacgccaaccccaacgccaaccccaacgccaacccgaacgcgaaccccaacaagaacaaccagggcaacgggcagggccacaacaugcccaacgaccccaaccgcaacgucgacgagaacgccaacgccaacaacgccgugaagaacaacaacaacgaggagccguccgacaagcacaucgagcaguaccugaagaagauccagaacagccucuccacggaguggagccccugcuccgugaccugcggcaacgggauccagguccggaucaagcccggcagcgccaacaagcccaaggacgagcuggacuacgagaacgacaucgagaagaagaucugcaagauggagaagugcuccagcguguucaacguggucaacuccagcaucgggcugaucauggugcucuccuuccuguuccugaacuga

SEQ ID NO: 3376 - RNA, 1251 nt, Artificial Sequence
  derived and/or modified CDS sequence (opt1) from Pf(PNG903-136)__BAM84993.1__CSP
augaugcgcaagcuggccauccucagcguguccagcuuccuguucgucgaggcccuguuccaggaguaccagugcuacggcuccagcuccaacacccgggugcucaacgagcugaacuacgacaacgcggggaccaaccuguacaacgagcucgagaugaacuacuacggcaagcaggagaacugguacagccugaagaagaacucccgcagccugggggagaacgacgacggcaacaacaacaacggggacaacggccgggagggcaaggacgaggacaagcgcgacgggaacaacgaggacaacgagaagcuccggaagcccaagcacaagaagcugaagcagccgggcgacgggaaccccgaccccaacgccaaccccaacguggacccgaacgccaaccccaacgucgaccccaacgccaaccccaacguggacccgaacgccaaccccaacgcgaaccccaacgccaaccccaacgccaacccgaacgccaaccccaacgcgaaccccaacgccaaccccaacgccaacccgaacgccaaccccaacgccaaccccaacgcgaaccccaacgccaacccgaacgccaaccccaacgccaaccccaacgccaaccccaacgcgaacccgaacguggaccccaacgccaaccccaacgccaaccccaacgccaacccgaacgccaaccccaacgcgaaccccaacgccaacccgaacgccaaccccaacgccaaccccaacgccaaccccaacgcgaacccgaacgccaaccccaacgccaaccccaacgccaaccccaacgcgaacccgaacgccaaccccaacgccaaccccaacgccaaccccaacgccaacccgaacgcgaaccccaacaagaacaaccagggcaacgggcagggccacaacaugcccaacgaccccaaccgcaacgucgacgagaacgccaacgccaacaacgccgugaagaacaacaacaacgaggagccguccgacaagcacaucgagcaguaccugaagaagauccagaacagccucuccacggaguggagccccugcuccgugaccugcggcaacgggauccagguccggaucaagcccggcagcgccaacaagcccaaggacgagcuggacuacgagaacgacaucgagaagaagaucugcaagauggagaagugcuccagcguguucaacguggucaacuccagcaucgggcugaucauggugcucuccuuccuguuccugaacuga

SEQ ID NO: 3377 - RNA, 1251 nt, Artificial Sequence
  derived and/or modified CDS sequence (opt1) from Pf(Tz03-086)__BAM84805.1__CSP
augaugcgcaagcuggccauccucagcguguccagcuuccuguucgucgaggcccuguuccaggaguaccagugcuacggcuccagcuccaacacccgggugcucaacgagcugaacuacgacaacgcggggaccaaccuguacaacgagcucgagaugaacuacuacggcaagcaggagaacugguacagccugaagaagaacucccgcagccugggggagaacgacgacggcaacaacaacaacggggacaacggccgggagggcaaggacgaggacaagcgcgacgggaacaacgaggacaacgagaagcuccggaagcccaagcacaagaagcugaagcagccggccgacggcaaccccgaccccaacgccaaccccaacguggacccgaacgccaaccccaacgucgaccccaacgccaaccccaacguggacccgaacgcgaaccccaacgccaaccccaacgccaaccccaacgccaacccgaacgcgaaccccaacgccaaccccaacgccaaccccaacgccaacccgaacgccaaccccaacgcgaaccccaacgccaaccccaacgccaacccgaacgccaaccccaacgccaaccccaacgcgaaccccaacgccaacccgaacgccaaccccaacgccaaccccaacguggaccccaacgccaacccgaacgcgaaccccaacgccaaccccaacgccaacccgaacgccaaccccaacgccaaccccaacgcgaaccccaacgccaacccgaacgccaaccccaacgccaaccccaacgcgaaccccaacgccaacccgaacgccaaccccaacgccaaccccaacgccaaccccaacgcgaacccgaacgccaaccccaacaagaacaaccaggggaacggccaggggcacaacaugcccaacgaccccaaccgcaacgucgacgagaacgccaacgccaacaacgccgugaagaacaacaacaacgaggagccguccgacaagcacaucacggaguaccugaagaagauccagaacagccucuccaccgaguggagccccugcuccgugaccugcggcaacggcauccagguccggaucaagcccgggagcgcgggcaaguccaagaacgagcuggacuacgagaacgacaucgagaagaagaucugcaagauggagaagugcagcuccguguucaacguggucaacagcuccaucgggcugaucauggugcucagcuuccuguuccugaacuga

SEQ ID NO: 3378 - RNA, 1251 nt, Artificial Sequence
  derived and/or modified CDS sequence (opt1) from Pf(Tz93-009)__BAM84750.1__CSP
augaugcgcaagcuggccauccucagcguguccagcuuccuguucgucgaggcccuguuccaggaguaccagugcuacggcuccagcuccaacacccgggugcucaacgagcugaacuacgacaacgcggggaccaaccuguacaacgagcucgagaugaacuacuacggcaagcaggagaacugguacagccugaagaagaacucccgcagccugggggagaacgacgacggcaacaacaacaacggggacaacggccgggagggcaaggacgaggacaagcgcgacgggaacaacgaggacaacgagaagcuccggaagcccaagcacaagaagcugaagcagccgggcgacgggaaccccgaccccaacgccaaccccaacguggacccgaacgccaaccccaacgucgaccccaacgccaaccccaacguggacccgaacgccaaccccaacgcgaaccccaacgccaaccccaacgccaacccgaacgccaaccccaacgcgaaccccaacgccaaccccaacgccaacccgaacgccaaccccaacgccaaccccaacgcgaaccccaacgccaacccgaacgccaaccccaacgccaaccccaacgccaaccccaacgcgaacccgaacguggaccccaacgccaaccccaacgccaaccccaacgccaacccgaacgccaaccccaacgcgaaccccaacgccaacccgaacgccaaccccaacgccaaccccaacgccaaccccaacgcgaacccgaacgccaaccccaacgccaaccccaacgccaaccccaacgcgaacccgaacgccaaccccaacgccaaccccaacgccaaccccaacgccaacccgaacgcgaaccccaacaagaacaaccagggcaacgggcagggccacaacaugcccaacgaccccaaccgcaacgucgacgagaacgccaacgccaacaacgccgugaagaacaacaacaacgaggagccguccgacaagcacaucaaggaguaccugacgaagaucaagaacagcaucuccaccgaguggagccccugcuccgugaccugcggcaacgggauccagguccggaucaagcccggcagcgccaacaagcccaaggacgagcucgacuacgagaacgacaucgagaagaagaucugcaagauggagaagugcuccagcguguucaacguggucaacuccagcaucgggcugaucauggugcuguccuuccucuuccugaacuga

SEQ ID NO: 3379 - RNA, 1251 nt, Artificial Sequence
  derived and/or modified CDS sequence (opt1) from Pf(Van98M305-147)__BAM85260.1__CSP
augaugcgcaagcuggccauccucagcguguccagcuuccuguucgucgaggcccuguuccaggaguaccagugcuacggcuccagcuccaacacccgggugcucaacgagcugaacuacgacaacgcggggaccaaccuguacaacgagcucgagaugaacuacuacggcaagcaggagaacugguacagccugaagaagaacucccgcagccugggggagaacgacgacggcaacaacaacaacggggacaacggccgggagggcaaggacgaggacaagcgcgacgggaacaacgaggacaacgagaagcuccggaagcccaagcacaagaagcugaagcagccgggcgacgggaaccccgaccccaacgccaaccccaacguggacccgaacgccaaccccaacgucgaccccaacgccaaccccaacguggacccgaacgccaaccccaacgcgaaccccaacgccaaccccaacgccaacccgaacgccaaccccaacgcgaaccccaacgccaaccccaacgccaacccgaacgccaaccccaacgccaaccccaacgcgaaccccaacgccaacccgaacgccaaccccaacgccaaccccaacgccaaccccaacgcgaacccgaacguggaccccaacgccaaccccaacgccaaccccaacgccaacccgaacgccaaccccaacgcgaaccccaacgccaacccgaacgccaaccccaacgccaaccccaacgccaaccccaacgcgaacccgaacgccaaccccaacgccaaccccaacgccaaccccaacgcgaacccgaacgccaaccccaacgccaaccccaacgccaaccccaacgccaacccgaacgcgaaccccaacaagaacaaccagggcaacgggcagggccacaacaugcccaacgaccccaaccgcaacgucgacgagaacgccaacgccaacaacgccgugaagaacaacaacaacgaggagccguccgacaagcacaucgagcaguaccugaagaagauccagaacagccucuccacggaguggagccccugcuccgugaccugcggcaacgggauccagguccggaucaagcccggcagcgccgacaagcccaaggaccagcuggacuacgagaacgacaucgagaagaagaucugcaagauggagaagugcuccagcguguucaacguggucaacuccagcaucgggcugaucauggugcucuccuuccuguuccugaacuga

SEQ ID NO: 3380 - RNA, 1251 nt, Artificial Sequence
  derived and/or modified CDS sequence (opt1) from Pf(Van98P226-97)__BAM85298.1__CSP
augaugcgcaagcuggccauccucagcguguccagcuuccuguucgucgaggcccuguuccaggaguaccagugcuacggcuccagcuccaacacccgggugcucaacgagcugaacuacgacaacgcggggaccaaccuguacaacgagcucgagaugaacuacuacggcaagcaggagaacugguacagccugaagaagaacucccgcagccugggggagaacgacgacggcaacaacaacaacggggacaacggccgggagggcaaggacgaggacaagcgcgacgggaacaacgaggacaacgagaagcuccggaagcccaagcacaagaagcugaagcagccgggcgacgggaaccccgaccccaacgccaaccccaacguggacccgaacgccaaccccaacgucgaccccaacgccaaccccaacguggacccgaacgccaaccccaacgcgaaccccaacgccaaccccaacgccaacccgaacgccaaccccaacgcgaaccccaacgccaaccccaacgccaacccgaacgccaaccccaacgccaaccccaacgcgaaccccaacgccaacccgaacgccaaccccaacgccaaccccaacgccaaccccaacgcgaacccgaacgccaaccccaacgccaaccccaacgccaaccccaacgccaacccgaacgcgaaccccaacgccaaccccaacgccaacccgaacgccaaccccaacgccaaccccaacgcgaaccccaacgccaacccgaacgccaaccccaacgccaaccccaacgcgaaccccaacgccaacccgaacgccaaccccaacgccaaccccaacgccaaccccaacgcgaacccgaacgccaaccccaacaagaacaaccagggcaacgggcagggccacaacaugcccaacgaccccaaccgcaacguggacgagaacgccaacgccaacaacgccgucaagaacaacaacaacgaggagccguccgacaagcacaucgagcaguaccugaagaagauccagaacagccucuccacggaguggagccccugcuccgugaccugcggcaacgggauccaggugcggaucaagcccggcagcgcgaacaagcccaaggacgagcuggacuacgagaacgacaucgagaagaagaucugcaagauggagaagugcuccagcgucuucaacguggugaacuccagcaucgggcugaucaugguccucuccuuccuguuccugaacuga

SEQ ID NO: 3381 - RNA, 1251 nt, Artificial Sequence
  derived and/or modified CDS sequence (opt1) from Pf(Yaounde)__AAN87614.1__CSP
augaugcgcaagcuggccauccucagcguguccagcuuccuguucgucgaggcccuguuccaggaguaccagugcuacggcuccagcuccaacacccgggugcucaacgagcugaacuacgacaacgcggggaccaaccuguacaacgagcucgagaugaacuacuacggcaagcaggagaacugguacagccugaagaagaacucccgcagccugggggagaacgacgacggcaacaacaacaacggggacaacggccgggagggcaaggacgaggacaagcgcgacgggaacaacgaggacaacgagaagcuccggaagcccaagcacaagaagcugaagcagccggccgacggcaaccccgaccccaacgccaaccccaacguggacccgaacgccaaccccaacgucgaccccaacgccaaccccaacguggacccgaacgcgaaccccaacgccaaccccaacgccaaccccaacgccaacccgaacgcgaaccccaacgccaaccccaacgccaaccccaacgccaacccgaacgccaaccccaacgcgaaccccaacgccaaccccaacgccaacccgaacgccaaccccaacguggaccccaacgccaaccccaacgcgaacccgaacgccaaccccaacgccaaccccaacgccaaccccaacgccaacccgaacgcgaaccccaacgccaaccccaacgccaacccgaacgccaaccccaacgccaaccccaacgcgaaccccaacgccaacccgaacgccaaccccaacgccaaccccaacgcgaaccccaacgccaacccgaacgccaaccccaacgccaaccccaacgccaaccccaacgcgaacccgaacgccaaccccaacaagaacaaccaggggaacggccaggggcacaacaugcccaacgaccccaaccgcaacgucgacgagaacgccaacgccaacaacgccgugaagaacaacaacaacgaggagccguccgaccagcacaucgagaaguaccugaagaucaucaagaacagccucuccacggaguggagccccugcuccgugaccugcggcaacggcauccagguccggaucaagcccgggagcgcgaacaagcccaaggaccagcuggacuacgccaacgacaucgagaagaagaucugcaagauggagaagugcuccagcguguucaacguggucaacuccagcaucggccugaucauggugcucuccuuccuguuccugaacuga

SEQ ID NO: 3382 - RNA, 1248 nt, Artificial Sequence
  derived and/or modified CDS sequence (opt1) from Pf(A98)__ACO49328.1__CSP
augcgcaagcuggccauccucagcguguccagcuuccuguucgucgaggcccuguuccaggaguaccagugcuacggcuccagcuccaacacccgggugcucaacgagcugaacuacgacaacgcggggaccaaccuguacaacgagcucgagaugaacuacuacggcaagcaggagaacugguacagccugaagaagaacucccgcagccugggggagaacgacgacggcaacaacaacaacggggacaacggccgggagggcaaggacgaggacaagcgcgacgggaacaacgaggacaacgagaagcuccggaagcccaagcacaagaagcugaagcagccgggcgacgggaaccccgaccccaacgccaaccccaacguggacccgaacgccaaccccaacgucgaccccaacgccaaccccaacguggacccgaacgccaaccccaacgcgaaccccaacgccaaccccaacgccaacccgaacgccaaccccaacgcgaaccccaacgccaaccccaacgccaacccgaacgccaaccccaacgccaaccccaacgcgaaccccaacgccaacccgaacgccaaccccaacgccaaccccaacgccaaccccaacgcgaacccgaacgccaaccccaacgccaaccccaacgccaaccccaacgccaacccgaacgcgaaccccaacgccaaccccaacgccaacccgaacgccaaccccaacgccaaccccaacgcgaaccccaacgccaacccgaacgccaaccccaacgccaaccccaacgcgaaccccaacgccaacccgaacgccaaccccaacgccaaccccaacgccaaccccaacgcgaacccgaacgccaaccccaacaagaacaaccagggcaacgggcagggccacaacaugcccaacgaccccaaccgcaacguggacgagaacgccaacgccaacaacgccgucaagaacaacaacaacgaggagccguccgacaagcacaucgagcaguaccugaagaacauccagaacagccucuccacggaguggagccccugcuccgugaccugcggcaacgggauccaggugcggaucaagcccggcagcgcgaacaagcccaaggacgagcuggacuacgagaacgacaucgagaagaagaucugcaagauggagaagugcuccagcgucuucaacguggugaacuccagcaucgggcugaucaugguccucuccuuccuguuccugaacuga

SEQ ID NO: 3383 - RNA, 1248 nt, Artificial Sequence
  derived and/or modified CDS sequence (opt1) from Pf(B60)__ACO49339.1__CSP
augcgcaagcuggccauccucagcguguccagcuuccuguucgucgaggcccuguuccaggaguaccagugcuacggcuccagcuccaacacccgggugcucaacgagcugaacuacgacaacgcggggaccaaccuguacaacgagcucgagaugaacuacuacggcaagcaggagaacugguacagccugaagaagaacucccgcagccugggggagaacgacgacggcaacaacaacaacggggacaacggccgggagggcaaggacgaggacaagcgcgacgggaacaacgaggacaacgagaagcuccggaagcccaagcacaagaagcugaagcagccgggcgacgggaaccccgaccccaacgccaaccccaacguggacccgaacgccaaccccaacgucgaccccaacgccaaccccaacguggacccgaacgccaaccccaacguggaccccaacgcgaaccccaacgccaacccgaacgccaaccccaacgccaaccccaacgcgaaccccaacgccaacccgaacgccaaccccaacgccaaccccaacgccaaccccaacgcgaacccgaacgccaaccccaacgccaaccccaacgccaaccccaacgccaacccgaacgcgaaccccaacgccaaccccaacgccaaccccaacgccaacccgaacgccaaccccaacgcgaaccccaacgccaacccgaacgccaaccccaacgccaaccccaacgccaaccccaacgcgaacccgaacgccaaccccaacgccaaccccaacgccaaccccaacgcgaacccgaacgccaaccccaacgccaaccccaacgccaaccccaacgccaacccgaacgcgaaccccaacaagaacaaccagggcaacgggcagggccacaacaugcccaacgaccccaaccgcaacgucgacgagaacgccaacgccaacaacgccgugaagaacaacaacaacgaggagccguccgacaagcacaucgagcaguaccugaagaagauccagaacagccucuccacggaguggagccccugcuccgugaccugcggcaacgggauccagguccggaucaagcccggcagcgccaacaagcccaaggacgagcuggacuacgagaacgacaucgagaagaagaucugcaagauggagaagugcuccagcguguucaacguggucaacuccagcaucgggcugaucauggugcucuccuuccuguuccugaacuga

SEQ ID NO: 3384 - RNA, 1248 nt, Artificial Sequence
  derived and/or modified CDS sequence (opt1) from Pf(TM323)__ACO49493.1__CSP
augcgcaagcuggccauccucagcguguccagcuuccuguucgucgaggcccuguuccaggaguaccagugcuacggcuccagcuccaacacccgggugcucaacgagcugaacuacgacaacgcggggaccaaccuguacaacgagcucgagaugaacuacuacggcaagcaggagaacugguacagccugaagaagaacucccgcagccugggggagaacgacgacggcaacaacaacaacggggacaacggccgggagggcaaggacgaggacaagcgcgacgggaacaacgaggacaacgagaagcuccggaagcccaagcacaagaagcugaagcagccgggcgacgggaaccccgaccccaacgccaaccccaacguggacccgaacgccaaccccaacgucgaccccaacgccaaccccaacguggacccgaacgccaaccccaacgcgaaccccaacgccaaccccaacgccaacccgaacgccaaccccaacgcgaaccccaacgccaaccccaacgccaacccgaacgccaaccccaacgccaaccccaacgcgaaccccaacgccaacccgaacgccaaccccaacgccaaccccaacgccaaccccaacgcgaacccgaacgccaaccccaacgccaaccccaacgccaaccccaacgccaacccgaacgcgaaccccaacgccaaccccaacgccaacccgaacgccaaccccaacgccaaccccaacgcgaaccccaacgccaacccgaacgccaaccccaacgccaaccccaacgcgaaccccaacgccaacccgaacgccaaccccaacgccaaccccaacgccaaccccaacgcgaacccgaacgccaaccccaacaagaacaaccagggcaacgggcagggccacaacaugcccaacgaccccaaccgcaacguggacgagaacgccaacgccaacaacgccgucaagaacaacaacaacgaggagccguccgacaagcacaucgagaaguaccugaaggagauccagaacagccucuccacggaguggagccccugcuccgugaccugcggcaacgggauccaggugcggaucaagcccggcagcgcgaacaagcccaaggaccagcuggacuacgagaacgacaucgagaagaagaucugcaagauggagaagugcuccagcgucuucaacguggugaacuccagcaucgggcugaucaugguccucuccuuccuguuccugaacuga

SEQ ID NO: 3385 - RNA, 1239 nt, Artificial Sequence
  derived and/or modified CDS sequence (opt1) from Pf(22)__AGR53780.1__CSP
augaugcgcaagcuggccauccucagcguguccagcuuccuguucgucgaggcccuguuccaggaguaccagugcuacggcucccccagcaacacccgggugcucaacgagcugaacuacgacaacgcggggaccaaccuguacaacgagcucgagaugaacuacuacggcaagcaggagaacugguacucccugaagaagaacagccgcucccugggggagaacgacgacggcaacaacaacaacggggacaacggccgggagggcaaggacgaggacaagcgcgacgggaacaacgaggacaacgagaagcuccggaagccgaagcacaagaagcugaagcagcccgccgacggcaaccccgaccccaacgccaacccgaacguggaccccaacgccaaccccaacgucgaccccaacgccaacccgaacguggaccccaacgcgaaccccaacgccaaccccaacgccaacccgaacgccaaccccaacgcgaaccccaacgccaaccccaacgccaacccgaacgccaaccccaacgccaaccccaacgcgaaccccaacgccaacccgaacgccaaccccaacgccaaccccaacgccaaccccaacgcgaacccgaacguggaccccaacgccaaccccaacgccaaccccaacgccaacccgaacgccaaccccaacgcgaaccccaacgccaacccgaacgccaaccccaacgccaaccccaacgccaaccccaacgcgaacccgaacgccaaccccaacgccaaccccaacgccaaccccaacgcgaacccgaacgccaaccccaacgccaaccccaacgccaaccccaacgccaacccgaacgcgaaccccaacaagaacaaccaggggaacggccaggggcacaacaugcccaacgaccccaaccgcaacgucgacgagaacgccaacgccaacaacgccgugaagaacaacaacaacgaggagccgagcgacaagcacaucgagcaguaccugaagacgaucaagaacucccucagcaccgaguggucccccugcagcgugaccugcggcaacggcauccagguccggaucaagcccggguccgccaacaagcccaaggacgagcugaacuacgagaacgacaucgagaagaagaucugcaagauggagaagugcagcuccguguucaacguggucaacagcuccaucggccugaucauggugcucagcuuccuguuccugaacuga

SEQ ID NO: 3386 - RNA, 1239 nt, Artificial Sequence
  derived and/or modified CDS sequence (opt1) from Pf(Amazonas)__AAN87605.1__CSP
augaugcgcaagcuggccauccucagcguguccagcuuccuguucgucgaggcccuguuccaggaguaccagugcuacggcuccagcuccaacacccgggugcucaacgagcugaacuacgacaacgcggggaccaaccuguacaacgagcucgagaugaacuacuacggcaagcaggagaacugguacagccugaagaagaacucccgcagccugggggagaacgacgacggcaacaacaacaacggggacaacggccgggagggcaaggacgaggacaagcgcgacgggaacaacgaggacaacgagaagcuccggaagcccaagcacaagaagcugaagcagccggccgacggcaaccccgaccccaacgccaaccccaacguggacccgaacgccaaccccaacgucgaccccaacgccaaccccaacguggacccgaacgcgaaccccaacgccaaccccaacgccaaccccaacgccaacccgaacgcgaaccccaacgccaaccccaacgccaaccccaacgccaacccgaacgccaaccccaacgcgaaccccaacgccaaccccaacgccaacccgaacgccaaccccaacgccaaccccaacgcgaaccccaacguggacccgaacgccaaccccaacgccaaccccaacgccaaccccaacgccaacccgaacgcgaaccccaacgccaaccccaacgccaacccgaacgccaaccccaacgccaaccccaacgcgaaccccaacgccaacccgaacgccaaccccaacgccaaccccaacgcgaaccccaacgccaacccgaacgccaaccccaacgccaaccccaacgccaaccccaacgcgaacccgaacaagaacaaccaggggaacggccaggggcacaacaugcccaacgaccccaaccgcaacgucgacgagaacgccaacgccaacaacgccgugaagaacaacaacaacgaggagcccuccgaccagcacaucgagaaguaccugaagcggauccagaacagccucuccacggaguggagcccgugcuccgugaccugcggcaacggcauccagguccgcaucaagcccgggagcgccaacaagcccaaggacgagcuggacuacgagaacgacaucgagaagaagaucugcaagauggagaagugcuccagcguguucaacguggucaacuccagcaucggccugaucauggugcucuccuuccuguuccugaacuga

SEQ ID NO: 3387 - RNA, 1239 nt, Artificial Sequence
  derived and/or modified CDS sequence (opt1) from Pf(Amazonas)__AAN87598.1__CSP
augaugcgcaagcuggccauccucagcguguccagcuuccuguucgucgaggcccuguuccaggaguaccagugcuacggcuccagcuccaacacccgggugcucaacgagcugaacuacgacaacgcggggaccaaccuguacaacgagcucgagaugaacuacuacggcaagcaggagaacugguacagccugaagaagaacucccgcagccugggggagaacgacgacggcaacaacaacaacggggacaacggccgggagggcaaggacgaggacaagcgcgacgggaacaacgaggacaacgagaagcuccggaagcccaagcacaagaagcugaagcagccggccgacggcaaccccgaccccaacgccaaccccaacguggacccgaacgccaaccccaacgucgaccccaacgccaaccccaacguggacccgaacgcgaaccccaacgccaaccccaacgccaaccccaacgccaacccgaacgcgaaccccaacgccaaccccaacgccaaccccaacgccaacccgaacgccaaccccaacgcgaaccccaacgccaaccccaacgccaacccgaacgccaaccccaacgccaaccccaacgcgaaccccaacguggacccgaacgccaaccccaacgccaaccccaacgccaaccccaacgccaacccgaacgcgaaccccaacgccaaccccaacgccaacccgaacgccaaccccaacgccaaccccaacgcgaaccccaacgccaacccgaacgccaaccccaacgccaaccccaacgcgaaccccaacgccaacccgaacgccaaccccaacgccaaccccaacgccaaccccaacgcgaacccgaacaagaacaaccaggggaacggccaggggcacaacaugcccaacgaccccaaccgcaacgucgacgagaacgccaacgccaacaacgccgugaagaacaacaacaacgaggagcccuccgacaagcacaucaaggaguaccugaagaucauccagaacagccucuccacggaguggagcccgugcuccgugaccugcggcaacggcauccagguccggaucaagcccgggagcgccggcaagcccaaggacgagcuggacuacgcgaacgacaucgagaagaagaucugcaagauggagaagugcuccagcguguucaacguggucaacuccagcaucgggcugaucauggugcucuccuuccuguuccugaacuga

SEQ ID NO: 3388 - RNA, 1239 nt, Artificial Sequence
  derived and/or modified CDS sequence (opt1) from Pf(Asembo Bay)__AAN87611.1__CSP
augaugcgcaagcuggccauccucagcguguccagcuuccuguucgucgaggcccuguuccaggaguaccagugcuacggcuccagcuccaacacccgggugcucaacgagcugaacuacgacaacgcggggaccaaccuguacaacgagcucgagaugaacuacuacggcaagcaggagaacugguacagccugaagaagaacucccgcagccugggggagaacgacgacggcaacaacaacaacggggacaacggccgggagggcaaggacgaggacaagcgcgacgggaacaacgaggacaacgagaagcuccggaagcccaagcacaagaagcugaagcagccggccgacggcaaccccgaccccaacgccaaccccaacguggacccgaacgccaaccccaacgucgaccccaacgccaaccccaacguggacccgaacgcgaaccccaacgccaaccccaacgccaaccccaacgccaacccgaacgcgaaccccaacgccaaccccaacgccaaccccaacgccaacccgaacgccaaccccaacgcgaaccccaacgccaaccccaacgccaacccgaacgccaaccccaacgccaaccccaacgcgaaccccaacgccaacccgaacgccaaccccaacguggaccccaacgccaaccccaacgccaacccgaacgcgaaccccaacgccaaccccaacgccaacccgaacgccaaccccaacgccaaccccaacgcgaaccccaacgccaacccgaacgccaaccccaacgccaaccccaacgcgaaccccaacgccaacccgaacgccaaccccaacgccaaccccaacgccaaccccaacgcgaacccgaacaagaacaaccaggggaacggccaggggcacaacaugcccaacgaccccaaccgcaacgucgacgagaacgccaacgccaacaacgccgugaagaacaacaacaacgaggagcccuccgacaagcacaucgagcaguaccugaagaucaucaagaacagccucuccacggaguggagcccgugcuccgugaccugcggcaacggcauccagguccggaucaagcccgggagcgccaacaagcccaaggacgagcuggacuacgcgaacgacaucgagaagaagaucugcaagauggagaagugcuccagcguguucaacguggucaacuccagcaucggccugaucauggugcucuccuuccuguuccugaacuga

SEQ ID NO: 3389 - RNA, 1239 nt, Artificial Sequence
  derived and/or modified CDS sequence (opt1) from Pf(Asembo Bay)__AAN87589.1__CSP
augaugcgcaagcuggccauccucagcguguccagcuuccuguucgucgaggcccuguuccaggaguaccagugcuacggcuccagcuccaacacccgggugcucaacgagcugaacuacgacaacgcggggaccaaccuguacaacgagcucgagaugaacuacuacggcaagcaggagaacugguacagccugaagaagaacucccgcagccugggggagaacgacgacggcaacaacaacaacggggacaacggccgggagggcaaggacgaggacaagcgcgacgggaacaacgaggacaacgagaagcuccggaagcccaagcacaagaagcugaagcagccggccgacggcaaccccgaccccaacgccaaccccaacguggacccgaacgccaaccccaacgucgaccccaacgccaaccccaacguggacccgaacgcgaaccccaacgccaaccccaacgccaaccccaacgccaacccgaacgcgaaccccaacgccaaccccaacgccaaccccaacgccaacccgaacgccaaccccaacgcgaaccccaacgccaaccccaacguggacccgaacgccaaccccaacgccaaccccaacgccaaccccaacgcgaacccgaacgccaaccccaacgccaaccccaacgccaaccccaacgccaacccgaacgcgaaccccaacgccaaccccaacgccaacccgaacgccaaccccaacgccaaccccaacgcgaaccccaacgccaacccgaacgccaaccccaacgccaaccccaacgcgaaccccaacgccaacccgaacgccaaccccaacgccaaccccaacgccaaccccaacgcgaacccgaacaagaacaaccaggggaacggccaggggcacaacaugcccaacgaccccaaccgcaacgucgacgagaacgccaacgccaacaacgccgugaagaacaacaacaacgaggagcccuccgaccagcacaucgagaaguaccugaagaagauccagaacagccucuccacggaguggagcccgugcuccgugaccugcggcaacggcauccagguccggaucaagcccgggagcgccaacaagcccaaggaccagcuggacuacgcgaacgacaucgagaagaagaucugcaagauggagaagugcuccagcguguucaacguggucaacuccagcaucggccugaucauggugcucuccuuccuguuccugaacuga

SEQ ID NO: 3390 - RNA, 1239 nt, Artificial Sequence
  derived and/or modified CDS sequence (opt1) from Pf(BrB1)__BAM85131.1__CSP
augaugcgcaagcuggccauccucagcguguccagcuuccuguucgucgaggcccuguuccaggaguaccagugcuacggcuccagcuccaacacccgggugcucaacgagcugaacuacgacaacgcggggaccaaccuguacaacgagcucgagaugaacuacuacggcaagcaggagaacugguacagccugaagaagaacucccgcagccugggggagaacgacgacggcaacaacaacaacggggacaacggccgggagggcaaggacgaggacaagcgcgacgggaacaacgaggacaacgagaagcuccggaagcccaagcacaagaagcugaagcagccggccgacggcaaccccgaccccaacgccaaccccaacguggacccgaacgccaaccccaacgucgaccccaacgccaaccccaacguggacccgaacgcgaaccccaacgccaaccccaacgccaaccccaacgccaacccgaacgcgaaccccaacgccaaccccaacgccaaccccaacgccaacccgaacgccaaccccaacgcgaaccccaacgccaaccccaacgccaacccgaacgccaaccccaacgccaaccccaacgcgaaccccaacguggacccgaacgccaaccccaacgccaaccccaacgccaaccccaacgccaacccgaacgcgaaccccaacgccaaccccaacgccaacccgaacgccaaccccaacgccaaccccaacgcgaaccccaacgccaacccgaacgccaaccccaacgccaaccccaacgcgaaccccaacgccaacccgaacgccaaccccaacgccaaccccaacgccaaccccaacgcgaacccgaacaagaacaaccaggggaacggccaggggcacaacaugcccaacgaccccaaccgcaacgucgacgagaacgccaacgccaacaacgccgugaagaacaacaacaacgaggagcccuccgacaagcacaucgagcaguaccugaagaagaucaagaacagcaucuccacggaguggagcccgugcuccgugaccugcggcaacggcauccagguccggaucaagcccgggagcgccaacaagcccaaggacgagcucgacuacgagaacgacaucgagaagaagaucugcaagauggagaagugcuccagcguguucaacguggucaacuccagcaucggccugaucauggugcuguccuuccucuuccugaacuga

SEQ ID NO: 3391 - RNA, 1239 nt, Artificial Sequence
  derived and/or modified CDS sequence (opt1) from Pf(BrP9)__BAM85145.1__CSP
augaugcgcaagcuggccauccucagcguguccagcuuccuguucgucgaggcccuguuccaggaguaccagugcuacggcuccagcuccaacacccgggugcucaacgagcugaacuacgacaacgcggggaccaaccuguacaacgagcucgagaugaacuacuacggcaagcaggagaacugguacagccugaagaagaacucccgcagccugggggagaacgacgacggcaacaacaacaacggggacaacggccgggagggcaaggacgaggacaagcgcgacgggaacaacgaggacaacgagaagcuccggaagcccaagcacaagaagcugaagcagccgggcgacgggaaccccgaccccaacgccaaccccaacguggacccgaacgccaaccccaacgucgaccccaacgccaaccccaacguggacccgaacgccaaccccaacgcgaaccccaacgccaaccccaacgccaacccgaacgccaaccccaacgcgaaccccaacgccaaccccaacgccaacccgaacgccaaccccaacgccaaccccaacgcgaaccccaacgccaacccgaacgccaaccccaacgccaaccccaacgccaaccccaacguggacccgaacgcgaaccccaacgccaaccccaacgccaaccccaacgccaacccgaacgccaaccccaacgcgaaccccaacgccaacccgaacgccaaccccaacgccaaccccaacgccaaccccaacgcgaacccgaacgccaaccccaacgccaaccccaacgccaaccccaacgcgaacccgaacgccaaccccaacgccaaccccaacgccaaccccaacgccaacccgaacaagaacaaccagggcaacgggcagggccacaacaugcccaacgaccccaaccgcaacgucgacgagaacgcgaacgccaacaacgccgugaagaacaacaacaacgaggagcccuccgacaagcacaucgagcaguaccugaagaagaucaagaacagcaucuccacggaguggagcccgugcuccgugaccugcggcaacgggauccagguccggaucaagcccggcagcgccaacaagcccaaggacgagcucgacuacgagaacgacaucgagaagaagaucugcaagauggagaagugcuccagcguguucaacguggucaacuccagcaucgggcugaucauggugcuguccuuccucuuccugaacuga

SEQ ID NO: 3392 - RNA, 1239 nt, Artificial Sequence
  derived and/or modified CDS sequence (opt1) from Pf(India)__AAN87606.1__CSP
augaugcgcaagcuggccauccucagcguguccagcuuccuguucgucgaggcccuguuccaggaguaccagugcuacggcuccagcuccaacacccgggugcucaacgagcugaacuacgacaacgcggggaccaaccuguacaacgagcucgagaugaacuacuacggcaagcaggagaacugguacagccugaagaagaacucccgcagccugggggagaacgacgacggcaacaacaacaacggggacaacggccgggagggcaaggacgaggacaagcgcgacgggaacaacgaggacaacgagaagcuccggaagcccaagcacaagaagcugaagcagccgggcgacgggaaccccgaccccaacgccaaccccaacguggacccgaacgccaaccccaacgucgaccccaacgccaaccccaacguggacccgaacgccaaccccaacgcgaaccccaacgccaaccccaacgccaacccgaacgccaaccccaacgcgaaccccaacgccaaccccaacgccaacccgaacgccaaccccaacgccaaccccaacgcgaaccccaacgccaacccgaacgccaaccccaacgccaaccccaacgccaaccccaacguggacccgaacgcgaaccccaacgccaaccccaacgccaaccccaacgccaacccgaacgccaaccccaacgcgaaccccaacgccaacccgaacgccaaccccaacgccaaccccaacgccaaccccaacgcgaacccgaacgccaaccccaacgccaaccccaacgccaaccccaacgcgaacccgaacgccaaccccaacgccaaccccaacgccaaccccaacgccaacccgaacaagaacaaccagggcaacgggcagggccacaacaugcccaacgaccccaaccgcaacgucgacgagaacgcgaacgccaacaacgccgugaagaacaacaacaacgaggagcccuccgacaagcacaucgagaaguaccugaagaagauccagaacagccucuccacggaguggagcccgugcuccgugaccugcggcaacgggauccagguccggaucaagcccggcagcgccaacaagcccaaggacgagcuggacuacgagaacgacaucgagaagaagaucugcaagauggagaagugcuccagcguguucaacguggucaacuccagcaucgggcugaucauggugcucuccuuccuguuccugaacuga

SEQ ID NO: 3393 - RNA, 1239 nt, Artificial Sequence
  derived and/or modified CDS sequence (opt1) from Pf(Pal97-007)__BAM84921.1__CSP
augaugcgcaagcuggccauccucagcguguccagcuuccuguucgucgaggcccuguuccaggaguaccagugcuacggcuccagcuccaacacccgggugcucaacgagcugaacuacgacaacgcggggaccaaccuguacaacgagcucgagaugaacuacuacggcaagcaggagaacugguacagccugaagaagaacucccgcagccugggggagaacgacgacggcaacaacaacaacggggacaacggccgggagggcaaggacgaggacaagcgcgacgggaacaacgaggacaacgagaagcuccggaagcccaagcacaagaagcugaagcagccgggcgacgggaaccccgaccccaacgccaaccccaacguggacccgaacgccaaccccaacgucgaccccaacgccaaccccaacguggacccgaacgccaaccccaacgcgaaccccaacgccaaccccaacgccaacccgaacgccaaccccaacgcgaaccccaacgccaaccccaacgccaacccgaacgccaaccccaacgccaaccccaacgcgaaccccaacgccaacccgaacgccaaccccaacgccaaccccaacgccaaccccaacguggacccgaacgcgaaccccaacgccaaccccaacgccaaccccaacgccaacccgaacgccaaccccaacgcgaaccccaacgccaacccgaacgccaaccccaacgccaaccccaacgccaaccccaacgcgaacccgaacgccaaccccaacgccaaccccaacgccaaccccaacgcgaacccgaacgccaaccccaacgccaaccccaacgccaaccccaacgccaacccgaacaagaacaaccagggcaacgggcagggccacaacaugcccaacgaccccaaccgcaacgucgacgagaacgcgaacgccaacaacgccgugaagaacaacaacaacgaggagcccuccgacaagcacaucaaggaguaccugacgaagaucaagaacagcaucuccaccgaguggagcccgugcuccgugaccugcggcaacgggauccagguccggaucaagcccggcagcgccaacaagcccaaggacgagcucgacuacgagaacgacaucgagaagaagaucugcaagauggagaagugcuccagcguguucaacguggucaacuccagcaucgggcugaucauggugcuguccuuccucuuccugaacuga

SEQ ID NO: 3394 - RNA, 1239 nt, Artificial Sequence
  derived and/or modified CDS sequence (opt1) from Pf(Pal97-037)__BAM84929.1__CSP
augaugcgcaagcuggccauccucagcguguccagcuuccuguucgucgaggcccuguuccaggaguaccagugcuacggcuccagcuccaacacccgggugcucaacgagcugaacuacgacaacgcggggaccaaccuguacaacgagcucgagaugaacuacuacggcaagcaggagaacugguacagccugaagaagaacucccgcagccugggggagaacgacgacggcaacaacaacaacggggacaacggccgggagggcaaggacgaggacaagcgcgacgggaacaacgaggacaacgagaagcuccggaagcccaagcacaagaagcugaagcagccgggcgacgggaaccccgaccccaacgccaaccccaacguggacccgaacgccaaccccaacgucgaccccaacgccaaccccaacguggacccgaacgccaaccccaacgcgaaccccaacgccaaccccaacgccaacccgaacgccaaccccaacgcgaaccccaacgccaaccccaacgccaacccgaacgccaaccccaacgccaaccccaacgcgaaccccaacgccaacccgaacgccaaccccaacgccaaccccaacgccaaccccaacguggacccgaacgcgaaccccaacgccaaccccaacgccaaccccaacgccaacccgaacgccaaccccaacgcgaaccccaacgccaacccgaacgccaaccccaacgccaaccccaacgccaaccccaacgcgaacccgaacgccaaccccaacgccaaccccaacgccaaccccaacgcgaacccgaacgccaaccccaacgccaaccccaacgccaaccccaacgccaacccgaacaagaacaaccagggcaacgggcagggccacaacaugcccaacgaccccaaccgcaacgucgacgagaacgcgaacgccaacaacgccgugaagaacaacaacaacgaggagcccuccgaccagcacaucgagaaguacaucaagaagauccagaacagccuguccacggaguggagcccgugcuccgugaccugcggcaacgggauccagguccggaucaagcccggcagcgccgacaagcccaagaacgagcucgacuacgagaacgacaucgagaagaagaucugcaagauggagaagugcuccagcguguucaacguggucaacuccagcaucgggcugaucauggugcuguccuuccucuuccugaacuga

SEQ ID NO: 3395 - RNA, 1239 nt, Artificial Sequence
  derived and/or modified CDS sequence (opt1) from Pf(Pal97-052)__BAM84935.1__CSP
augaugcgcaagcuggccauccucagcguguccagcuuccuguucgucgaggcccuguuccaggaguaccagugcuacggcuccagcuccaacacccgggugcucaacgagcugaacuacgacaacgcggggaccaaccuguacaacgagcucgagaugaacuacuacggcaagcaggagaacugguacagccugaagaagaacucccgcagccugggggagaacgacgacggcaacaacaacaacggggacaacggccgggagggcaaggacgaggacaagcgcgacgggaacaacgaggacaacgagaagcuccggaagcccaagcacaagaagcugaagcagccgggcgacgggaaccccgaccccaacgccaaccccaacguggacccgaacgccaaccccaacgucgaccccaacgccaaccccaacguggacccgaacgccaaccccaacgcgaaccccaacgccaaccccaacgccaacccgaacgccaaccccaacgcgaaccccaacgccaaccccaacgccaacccgaacgccaaccccaacgccaaccccaacgcgaaccccaacgccaacccgaacgccaaccccaacgccaaccccaacgccaaccccaacguggacccgaacgcgaaccccaacgccaaccccaacgccaaccccaacgccaacccgaacgccaaccccaacgcgaaccccaacgccaacccgaacgccaaccccaacgccaaccccaacgccaaccccaacgcgaacccgaacgccaaccccaacgccaaccccaacgccaaccccaacgcgaacccgaacgccaaccccaacgccaaccccaacgccaaccccaacgccaacccgaacaagaacaaccagggcaacgggcagggccacaacaugcccaacgaccccaaccgcaacgucgacgagaacgcgaacgccaacaacgccgugaagaacaacaacaacgaggagcccuccgaccagcacaucgagaaguaccugaagaucauccagaacagccucuccacggaguggagcccgugcuccgugaccugcggcaacgggauccagguccggaucaagcccggcagcgccgacaagcccaaggaccagcuggacuacgccaacgacaucgagaagaagaucugcaagauggagaagugcuccagcguguucaacguggucaacuccagcaucgggcugaucauggugcucuccuuccuguuccugaacuga

SEQ ID NO: 3396 - RNA, 1239 nt, Artificial Sequence
  derived and/or modified CDS sequence (opt1) from Pf(Sol95-351)__BAM85103.1__CSP
augaugcgcaagcuggccauccucagcguguccagcuuccuguucgucgaggcccuguuccaggaguaccagugcuacggcuccagcuccaacacccgggugcucaacgagcugaacuacgacaacgcggggaccaaccuguacaacgagcucgagaugaacuacuacggcaagcaggagaacugguacagccugaagaagaacucccgcagccugggggagaacgacgacggcaacaacaacaacggggacaacggccgggagggcaaggacgaggacaagcgcgacgggaacaacgaggacaacgagaagcuccggaagcccaagcacaagaagcugaagcagccgggcgacgggaaccccgaccccaacgccaaccccaacguggacccgaacgccaaccccaacgucgaccccaacgccaaccccaacguggacccgaacgccaaccccaacgcgaaccccaacgccaaccccaacgccaacccgaacgccaaccccaacgcgaaccccaacgccaaccccaacgccaacccgaacgccaaccccaacgccaaccccaacgcgaaccccaacgccaacccgaacgccaaccccaacgccaaccccaacgccaaccccaacguggacccgaacgcgaaccccaacgccaaccccaacgccaaccccaacgccaacccgaacgccaaccccaacgcgaaccccaacgccaacccgaacgccaaccccaacgccaaccccaacgccaaccccaacgcgaacccgaacgccaaccccaacgccaaccccaacgccaaccccaacgcgaacccgaacgccaaccccaacgccaaccccaacgccaaccccaacgccaacccgaacaagaacaaccagggcaacgggcagggccacaacaugcccaacgaccccaaccgcaacgucgacgagaacgcgaacgccaacaacgccgugaagaacaacaacaacgaggagcccuccgacaagcacaucgagcaguaccugaagaagauccagaacagccucuccacggaguggagcccgugcuccgugaccugcggcaacgggauccagguccggaucaagcccggcagcgccgacaagcccaaggaccagcuggacuacgagaacgacaucgagaagaagaucugcaagauggagaagugcuccagcguguucaacguggucaacuccagcaucgggcugaucauggugcucuccuuccuguuccugaacuga

SEQ ID NO: 3397 - RNA, 1239 nt, Artificial Sequence
  derived and/or modified CDS sequence (opt1) from Pf(Tz03-038)__BAM84801.1__CSP
augaugcgcaagcuggccauccucagcguguccagcuuccuguucgucgaggcccuguuccaggaguaccagugcuacggcuccagcuccaacacccgggugcucaacgagcugaacuacgacaacgcggggaccaaccuguacaacgagcucgagaugaacuacuacggcaagcaggagaacugguacagccugaagaagaacucccgcagccugggggagaacgacgacggcaacaacaacaacggggacaacggccgggagggcaaggacgaggacaagcgcgacgggaacaacgaggacaacgagaagcuccggaagcccaagcacaagaagcugaagcagccgggcgacgggaaccccgaccccaacgccaaccccaacguggacccgaacgccaaccccaacgucgaccccaacgccaaccccaacguggacccgaacgccaaccccaacgcgaaccccaacgccaaccccaacgccaacccgaacgccaaccccaacgcgaaccccaacgccaaccccaacgccaacccgaacgccaaccccaacgccaaccccaacgcgaaccccaacguggacccgaacgccaaccccaacgccaaccccaacgccaaccccaacgccaacccgaacgcgaaccccaacgccaaccccaacgccaaccccaacgccaacccgaacgccaaccccaacgcgaaccccaacgccaacccgaacgccaaccccaacgccaaccccaacgccaaccccaacgcgaacccgaacgccaaccccaacgccaaccccaacgccaaccccaacgcgaacccgaacgccaaccccaacgccaaccccaacgccaaccccaacgccaacccgaacaagaacaaccagggcaacgggcagggccacaacaugcccaacgaccccaaccgcaacgucgacgagaacgcgaacgccaacaacgccgugaagaacaacaacaacgaggagcccuccgacaagcacaucgagcaguaccugaacaagaucaagaacagcaucuccacggaguggagcccgugcuccgugaccugcggcaacgggauccagguccggaucaagcccggcagcgccaacaagcccaaggacgagcucaacuacgagaacgacaucgagaagaagaucugcaagauggagaagugcuccagcguguucaacguggucaacuccagcaucgggcugaucauggugcuguccuuccucuuccugaacuga

SEQ ID NO: 3398 - RNA, 1239 nt, Artificial Sequence
  derived and/or modified CDS sequence (opt1) from Pf(Tz03-076)__BAM84804.1__CSP
augaugcgcaagcuggccauccucagcguguccagcuuccuguucgucgaggcccuguuccaggaguaccagugcuacggcuccagcuccaacacccgggugcucaacgagcugaacuacgacaacgcggggaccaaccuguacaacgagcucgagaugaacuacuacggcaagcaggagaacugguacagccugaagaagaacucccgcagccugggggagaacgacgacggcaacaacaacaacggggacaacggccgggagggcaaggacgaggacaagcgcgacgggaacaacgaggacaacgagaagcuccggaagcccaagcacaagaagcugaagcagccgggcgacgggaaccccgaccccaacgccaaccccaacguggacccgaacgccaaccccaacgucgaccccaacgccaaccccaacguggacccgaacgccaaccccaacgcgaaccccaacgccaaccccaacgccaacccgaacgccaaccccaacgcgaaccccaacgccaaccccaacgccaacccgaacgccaaccccaacgccaaccccaacgcgaaccccaacgccaacccgaacgccaaccccaacgccaaccccaacgccaaccccaacguggacccgaacgcgaaccccaacgccaaccccaacgccaaccccaacgccaacccgaacgccaaccccaacgcgaaccccaacgccaacccgaacgccaaccccaacgccaaccccaacgccaaccccaacgcgaacccgaacgccaaccccaacgccaaccccaacgccaaccccaacgcgaacccgaacgccaaccccaacgccaaccccaacgccaaccccaacgccaacccgaacaagaacaaccagggcaacgggcagggccacaacaugcccaacgaccccaaccgcaacgucgacgagaacgcgaacgccaacaacgccgugaagaacaacaacaacgaggagcccuccgacaagcacaucgagcaguaccugaagacgaucaagaacagccucuccaccgaguggagcccgugcuccgugaccugcggcaacgggauccagguccggaucaagcccggcagcgccaacaagcccaaggacgagcugaacuacgagaacgacaucgagaagaagaucugcaagauggagaagugcuccagcguguucaacguggucaacuccagcaucgggcugaucauggugcucuccuuccuguuccugaacuga

SEQ ID NO: 3399 - RNA, 1239 nt, Artificial Sequence
  derived and/or modified CDS sequence (opt1) from Pf(Tz03-101)__BAM84806.1__CSP
augaugcgcaagcuggccauccucagcguguccagcuuccuguucgucgaggcccuguuccaggaguaccagugcuacggcuccagcuccaacacccgggugcucaacgagcugaacuacgacaacgcggggaccaaccuguacaacgagcucgagaugaacuacuacggcaagcaggagaacugguacagccugaagaagaacucccgcagccugggggagaacgacgacggcaacaacaacaacggggacaacggccgggagggcaaggacgaggacaagcgcgacgggaacaacgaggacaacgagaagcuccggaagcccaagcacaagaagcugaagcagccgggcgacgggaaccccgaccccaacgccaaccccaacguggacccgaacgccaaccccaacgucgaccccaacgccaaccccaacguggacccgaacgccaaccccaacgcgaaccccaacgccaaccccaacgccaacccgaacgccaaccccaacgcgaaccccaacgccaaccccaacgccaacccgaacgccaaccccaacgccaaccccaacgcgaaccccaacgccaacccgaacgccaaccccaacgccaaccccaacgccaaccccaacguggacccgaacgcgaaccccaacgccaaccccaacgccaaccccaacgccaacccgaacgccaaccccaacgcgaaccccaacgccaacccgaacgccaaccccaacgccaaccccaacgccaaccccaacgcgaacccgaacgccaaccccaacgccaaccccaacgccaaccccaacgcgaacccgaacgccaaccccaacgccaaccccaacgccaaccccaacgccaacccgaacaagaacaaccagggcaacgggcagggccacaacaugcccaacgaccccaaccgcaacgucgacgagaacgcgaacgccaacaacgccgugaagaacaacaacaacgaggagcccuccgacaagcacaucaaggaguaccugaacaagauccagaacagcaucuccacggaguggagcccgugcuccgugaccugcggcaacgggauccagguccggaucaagcccggcagcgccgacaagcccaaggaccagcucgacuacaucaacgacaucgagaagaagaucugcaagauggagaagugcuccagcguguucaacguggucaacuccagcaucgggcugaucauggugcuguccuuccucuuccugaacuga

SEQ ID NO: 3400 - RNA, 1239 nt, Artificial Sequence
  derived and/or modified CDS sequence (opt1) from Pf(Tz93-022)__BAM84753.1__CSP
augaugcgcaagcuggccauccucagcguguccagcuuccuguucgucgaggcccuguuccaggaguaccagugcuacggcuccagcuccaacacccgggugcucaacgagcugaacuacgacaacgcggggaccaaccuguacaacgagcucgagaugaacuacuacggcaagcaggagaacugguacagccugaagaagaacucccgcagccugggggagaacgacgacggcaacaacaacaacggggacaacggccgggagggcaaggacgaggacaagcgcgacgggaacaacgaggacaacgagaagcuccggaagcccaagcacaagaagcugaagcagccgggcgacgggaaccccgaccccaacgccaaccccaacguggacccgaacgccaaccccaacgucgaccccaacgccaaccccaacguggacccgaacgccaaccccaacgcgaaccccaacgccaaccccaacgccaacccgaacgccaaccccaacgcgaaccccaacgccaaccccaacgccaacccgaacgccaaccccaacgccaaccccaacgcgaaccccaacgccaacccgaacgccaaccccaacgccaaccccaacgccaaccccaacgcgaacccgaacgccaaccccaacgccaaccccaacgccaaccccaacgccaacccgaacgcgaaccccaacgccaaccccaacgccaacccgaacgccaaccccaacgccaaccccaacgcgaaccccaacgccaacccgaacgccaaccccaacgccaaccccaacgcgaaccccaacgccaacccgaacgccaaccccaacgccaaccccaacgccaaccccaacgcgaacccgaacaagaacaaccagggcaacgggcagggccacaacaugcccaacgaccccaaccgcaacguggacgagaacgccaacgccaacaacgccgucaagaacaacaacaacgaggagcccuccgacaagcacaucgagaaguaccugaaggagauccagaacagccucuccacggaguggagcccgugcuccgugaccugcggcaacgggauccaggugcggaucaagcccggcagcgccaacaagcccaaggaccagcuggacuacgagaacgacaucgagaagaagaucugcaagauggagaagugcuccagcgucuucaacguggugaacuccagcaucgggcugaucaugguccucuccuuccuguuccugaacuga

SEQ ID NO: 3401 - RNA, 1239 nt, Artificial Sequence
  derived and/or modified CDS sequence (opt1) from Pf(Tz93-035)__BAM84757.1__CSP
augaugcgcaagcuggccauccucagcguguccagcuuccuguucgucgaggcccuguuccaggaguaccagugcuacggcuccagcuccaacacccgggugcucaacgagcugaacuacgacaacgcggggaccaaccuguacaacgagcucgagaugaacuacuacggcaagcaggagaacugguacagccugaagaagaacucccgcagccugggggagaacgacgacggcaacaacaacaacggggacaacggccgggagggcaaggacgaggacaagcgcgacgggaacaacgaggacaacgagaagcuccggaagcccaagcacaagaagcugaagcagccgggcgacgggaaccccgaccccaacgccaaccccaacguggacccgaacgccaaccccaacgucgaccccaacgccaaccccaacguggacccgaacgccaaccccaacgcgaaccccaacgccaaccccaacgccaacccgaacgccaaccccaacgcgaaccccaacgccaaccccaacgccaacccgaacgccaaccccaacgccaaccccaacgcgaaccccaacgccaacccgaacgccaaccccaacgccaaccccaacgccaaccccaacguggacccgaacgcgaaccccaacgccaaccccaacgccaaccccaacgccaacccgaacgccaaccccaacgcgaaccccaacgccaacccgaacgccaaccccaacgccaaccccaacgccaaccccaacgcgaacccgaacgccaaccccaacgccaaccccaacgccaaccccaacgcgaacccgaacgccaaccccaacgccaaccccaacgccaaccccaacgccaacccgaacaagaacaaccagggcaacgggcagggccacaacaugcccaacgaccccaaccgcaacgucgacgagaacgcgaacgccaacaacgccgugaagaacaacaacaacgaggagcccuccgacaagcacaucacggaguaccugaagaagaucaagaacagcaucuccaccgaguggagcccgugcuccgugaccugcggcaacgggauccagguccggaucaagcccggcagcgccaacaagcccaaggacgagcucgacuacgagaacgacaucgagaagaagaucugcaagauggagaagugcuccagcguguucaacguggucaacuccagcaucgggcugaucauggugcuguccuuccucuuccugaacuga

SEQ ID NO: 3402 - RNA, 1239 nt, Artificial Sequence
  derived and/or modified CDS sequence (opt1) from Pf(Tz93-041)__BAM84759.1__CSP
augaugcgcaagcuggccauccucagcguguccagcuuccuguucgucgaggcccuguuccaggaguaccagugcuacggcuccagcuccaacacccgggugcucaacgagcugaacuacgacaacgcggggaccaaccuguacaacgagcucgagaugaacuacuacggcaagcaggagaacugguacagccugaagaagaacucccgcagccugggggagaacgacgacggcaacaacaacaacggggacaacggccgggagggcaaggacgaggacaagcgcgacgggaacaacgaggacaacgagaagcuccggaagcccaagcacaagaagcugaagcagccgggcgacgggaaccccgaccccaacgccaaccccaacguggacccgaacgccaaccccaacgucgaccccaacgccaaccccaacguggacccgaacgccaaccccaacgcgaaccccaacgccaaccccaacgccaacccgaacgccaaccccaacgcgaaccccaacgccaaccccaacgccaacccgaacgccaaccccaacgccaaccccaacgcgaaccccaacgccaacccgaacgccaaccccaacgccaaccccaacgccaaccccaacguggacccgaacgcgaaccccaacgccaaccccaacgccaaccccaacgccaacccgaacgccaaccccaacgcgaaccccaacgccaacccgaacgccaaccccaacgccaaccccaacgccaaccccaacgcgaacccgaacgccaaccccaacgccaaccccaacgccaaccccaacgcgaacccgaacgccaaccccaacgccaaccccaacgccaaccccaacgccaacccgaacaagaacaaccagggcaacgggcagggccacaacaugcccaacgaccccaaccgcaacgucgacgagaacgcgaacgccaacaacgccgugaagaacaacaacaacgaggagcccuccgacaagcacaucgagcaguaccugaagcggauccagaacagccucuccacggaguggagcccgugcuccgugaccugcggcaacgggauccagguccgcaucaagcccggcagcgccgggaagcccaaggacgagcuggacuacgccaacgacaucgagaagaagaucugcaagauggagaagugcuccagcguguucaacguggucaacuccagcaucggccugaucauggugcucuccuuccuguuccugaacuga

SEQ ID NO: 3403 - RNA, 1239 nt, Artificial Sequence
  derived and/or modified CDS sequence (opt1) from Pf(Tz93-051)__BAM84763.1__CSP
augaugcgcaagcuggccauccucagcguguccagcuuccuguucgucgaggcccuguuccaggaguaccagugcuacggcuccagcuccaacacccgggugcucaacgagcugaacuacgacaacgcggggaccaaccuguacaacgagcucgagaugaacuacuacggcaagcaggagaacugguacagccugaagaagaacucccgcagccugggggagaacgacgacggcaacaacaacaacggggacaacggccgggagggcaaggacgaggacaagcgcgacgggaacaacgaggacaacgagaagcuccggaagcccaagcacaagaagcugaagcagccgggcgacgggaaccccgaccccaacgccaaccccaacguggacccgaacgccaaccccaacgucgaccccaacgccaaccccaacguggacccgaacgccaaccccaacgcgaaccccaacgccaaccccaacgccaacccgaacgccaaccccaacgcgaaccccaacgccaaccccaacgccaacccgaacgccaaccccaacgccaaccccaacgcgaaccccaacgccaacccgaacgccaaccccaacgccaaccccaacgccaaccccaacguggacccgaacgcgaaccccaacgccaaccccaacgccaaccccaacgccaacccgaacgccaaccccaacgcgaaccccaacgccaacccgaacgccaaccccaacgccaaccccaacgccaaccccaacgcgaacccgaacgccaaccccaacgccaaccccaacgccaaccccaacgcgaacccgaacgccaaccccaacgccaaccccaacgccaaccccaacgccaacccgaacaagaacaaccagggcaacgggcagggccacaacaugcccaacgaccccaaccgcaacgucgacgagaacgcgaacgccaacaacgccgugaagaacaacaacaacgaggagcccuccgacaagcacaucgagcaguaccugaacaagaucaagaacagcaucuccacggaguggagcccgugcuccgugaccugcggcaacgggauccagguccggaucaagcccggcagcgccaacaagcccaaggacgagcucaacuacgagaacgacaucgagaagaagaucugcaagauggagaagugcuccagcguguucaacguggucaacuccagcaucgggcugaucauggugcuguccuuccucuuccugaacuga

SEQ ID NO: 3404 - RNA, 1239 nt, Artificial Sequence
  derived and/or modified CDS sequence (opt1) from Pf(Tz93-052)__BAM84764.1__CSP
augaugcgcaagcuggccauccucagcguguccagcuuccuguucgucgaggcccuguuccaggaguaccagugcuacggcuccagcuccaacacccgggugcucaacgagcugaacuacgacaacgcggggaccaaccuguacaacgagcucgagaugaacuacuacggcaagcaggagaacugguacagccugaagaagaacucccgcagccugggggagaacgacgacggcaacaacaacaacggggacaacggccgggagggcaaggacgaggacaagcgcgacgggaacaacgaggacaacgagaagcuccggaagcccaagcacaagaagcugaagcagccgggcgacgggaaccccgaccccaacgccaaccccaacguggacccgaacgccaaccccaacgucgaccccaacgccaaccccaacguggacccgaacgccaaccccaacgcgaaccccaacgccaaccccaacgccaacccgaacgccaaccccaacgcgaaccccaacgccaaccccaacgccaacccgaacgccaaccccaacgccaaccccaacgcgaaccccaacguggacccgaacgccaaccccaacgccaaccccaacgccaaccccaacgccaacccgaacgcgaaccccaacgccaaccccaacgccaaccccaacgccaacccgaacgccaaccccaacgcgaaccccaacgccaacccgaacgccaaccccaacgccaaccccaacgccaaccccaacgcgaacccgaacgccaaccccaacgccaaccccaacgccaaccccaacgcgaacccgaacgccaaccccaacgccaaccccaacgccaaccccaacgccaacccgaacaagaacaaccagggcaacgggcagggccacaacaugcccaacgaccccaaccgcaacgucgacgagaacgcgaacgccaacaacgccgugaagaacaacaacaacgaggagcccuccgaccagcacaucgagaaguaccugaagaucauccagaacagccucuccacggaguggagcccgugcuccgugaccugcggcaacgggauccagguccggaucaagcccggcagcgccaacaagcccaaggaccagcuggacuacgccaacgacaucgagaagaagaucugcaagauggagaagugcuccagcguguucaacguggucaacuccagcaucgggcugaucauggugcucuccuuccuguuccugaacuga

SEQ ID NO: 3405 - RNA, 1239 nt, Artificial Sequence
  derived and/or modified CDS sequence (opt1) from Pf(Tz93-061)__BAM84768.1__CSP
augaugcgcaagcuggccauccucagcguguccagcuuccuguucgucgaggcccuguuccaggaguaccagugcuacggcuccagcuccaacacccgggugcucaacgagcugaacuacgacaacgcggggaccaaccuguacaacgagcucgagaugaacuacuacggcaagcaggagaacugguacagccugaagaagaacucccgcagccugggggagaacgacgacggcaacaacaacaacggggacaacggccgggagggcaaggacgaggacaagcgcgacgggaacaacgaggacaacgagaagcuccggaagcccaagcacaagaagcugaagcagccggccgacggcaaccccgaccccaacgccaaccccaacguggacccgaacgccaaccccaacgucgaccccaacgccaaccccaacguggacccgaacgcgaaccccaacgccaaccccaacgccaaccccaacgccaacccgaacgcgaaccccaacgccaaccccaacgccaaccccaacgccaacccgaacgccaaccccaacgcgaaccccaacgccaaccccaacgccaacccgaacgccaaccccaacgccaaccccaacgcgaaccccaacguggacccgaacgccaaccccaacgccaaccccaacgccaaccccaacgccaacccgaacgcgaaccccaacgccaaccccaacgccaacccgaacgccaaccccaacgccaaccccaacgcgaaccccaacgccaacccgaacgccaaccccaacgccaaccccaacgcgaaccccaacgccaacccgaacgccaaccccaacgccaaccccaacgccaaccccaacgcgaacccgaacaagaacaaccaggggaacggccaggggcacaacaugcccaacgaccccaaccgcaacgucgacgagaacgccaacgccaacaacgccgugaagaacaacaacaacgaggagcccuccgaccagcacaucgagaaguaccugaagcggauccagaacagccucuccacggaguggagcccgugcuccgugaccugcggcaacggcauccagguccgcaucaagcccgggagcgccaacaagcccaaggaccagcuggacuacgcgaacgacaucgagaagaagaucugcaagauggagaagugcuccagcguguucaacguggucaacuccagcaucggccugaucauggugcucuccuuccuguuccugaacuga

SEQ ID NO: 3406 - RNA, 1239 nt, Artificial Sequence
  derived and/or modified CDS sequence (opt1) from Pf(Tz93-075)__BAM84770.1__CSP
augaugcgcaagcuggccauccucagcguguccagcuuccuguucgucgaggcccuguuccaggaguaccagugcuacggcuccagcuccaacacccgggugcucaacgagcugaacuacgacaacgcggggaccaaccuguacaacgagcucgagaugaacuacuacggcaagcaggagaacugguacagccugaagaagaacucccgcagccugggggagaacgacgacggcaacaacaacaacggggacaacggccgggagggcaaggacgaggacaagcgcgacgggaacaacgaggacaacgagaagcuccggaagcccaagcacaagaagcugaagcagccgggcgacgggaaccccgaccccaacgccaaccccaacguggacccgaacgccaaccccaacgucgaccccaacgccaaccccaacguggacccgaacgccaaccccaacgcgaaccccaacgccaaccccaacgccaacccgaacgccaaccccaacgcgaaccccaacgccaaccccaacgccaacccgaacgccaaccccaacgccaaccccaacgcgaaccccaacgccaacccgaacgccaaccccaacgccaaccccaacgccaaccccaacguggacccgaacgcgaaccccaacgccaaccccaacgccaaccccaacgccaacccgaacgccaaccccaacgcgaaccccaacgccaacccgaacgccaaccccaacgccaaccccaacgccaaccccaacgcgaacccgaacgccaaccccaacgccaaccccaacgccaaccccaacgcgaacccgaacgccaaccccaacgccaaccccaacgccaaccccaacgccaacccgaacaagaacaaccagggcaacgggcagggccacaacaugcccaacgaccccaaccgcaacgucgacgagaacgcgaacgccaacaacgccgugaagaacaacaacaacgaggagcccuccgacaagcacaucgagcaguaccugaagacgaucaagaacagccucuccaccgaguggagcccgugcuccgugaccugcggcaacgggauccagguccggaucaagcccggcagcgccaacaagcccaaggaccagcuggacuacgagaacgacaucgagaagaagaucugcaagauggagaagugcuccagcguguucaacguggucaacuccagcaucgggcugaucauggugcucuccuuccuguuccugaacuga

SEQ ID NO: 3407 - RNA, 1239 nt, Artificial Sequence
  derived and/or modified CDS sequence (opt1) from Pf(Tz93-113)__BAM84775.1__CSP
augaugcgcaagcuggccauccucagcguguccagcuuccuguucgucgaggcccuguuccaggaguaccagugcuacggcuccagcuccaacacccgggugcucaacgagcugaacuacgacaacgcggggaccaaccuguacaacgagcucgagaugaacuacuacggcaagcaggagaacugguacagccugaagaagaacucccgcagccugggggagaacgacgacggcaacaacaacaacggggacaacggccgggagggcaaggacgaggacaagcgcgacgggaacaacgaggacaacgagaagcuccggaagcccaagcacaagaagcugaagcagccgggcgacgggaaccccgaccccaacgccaaccccaacguggacccgaacgccaaccccaacgucgaccccaacgccaaccccaacguggacccgaacgccaaccccaacgcgaaccccaacgccaaccccaacgccaacccgaacgccaaccccaacgcgaaccccaacgccaaccccaacgccaacccgaacgccaaccccaacgccaaccccaacgcgaaccccaacgccaacccgaacgccaaccccaacgccaaccccaacgccaaccccaacgcgaacccgaacguggaccccaacgccaaccccaacgccaaccccaacgccaacccgaacgccaaccccaacgcgaaccccaacgccaacccgaacgccaaccccaacgccaaccccaacgccaaccccaacgcgaacccgaacgccaaccccaacgccaaccccaacgccaaccccaacgcgaacccgaacgccaaccccaacgccaaccccaacgccaaccccaacgccaacccgaacaagaacaaccagggcaacgggcagggccacaacaugcccaacgaccccaaccgcaacgucgacgagaacgcgaacgccaacaacgccgugaagaacaacaacaacgaggagcccuccgacaagcacaucgagcaguaccugaacaagaucaagaacagcaucuccacggaguggagcccgugcuccgugaccugcggcaacgggauccagguccggaucaagcccggcagcgccaacaagcccaaggacgagcucaacuacgagaacgacaucgagaagaagaucugcaagauggagaagugcuccagcguguucaacguggucaacuccagcaucgggcugaucauggugcuguccuuccucuuccugaacuga

SEQ ID NO: 3408 - RNA, 1239 nt, Artificial Sequence
  derived and/or modified CDS sequence (opt1) from Pf(Tz93-123)__BAM84778.1__CSP
augaugcgcaagcuggccauccucagcguguccagcuuccuguucgucgaggcccuguuccaggaguaccagugcuacggcuccagcuccaacacccgggugcucaacgagcugaacuacgacaacgcggggaccaaccuguacaacgagcucgagaugaacuacuacggcaagcaggagaacugguacagccugaagaagaacucccgcagccugggggagaacgacgacggcaacaacaacaacggggacaacggccgggagggcaaggacgaggacaagcgcgacgggaacaacgaggacaacgagaagcuccggaagcccaagcacaagaagcugaagcagccggccgacggcaaccccgaccccaacgccaaccccaacguggacccgaacgccaaccccaacgucgaccccaacgccaaccccaacguggacccgaacgcgaaccccaacgccaaccccaacgccaaccccaacgccaacccgaacgcgaaccccaacgccaaccccaacgccaaccccaacgccaacccgaacgccaaccccaacgcgaaccccaacgccaaccccaacgccaacccgaacgccaaccccaacgccaaccccaacgcgaaccccaacguggacccgaacgccaaccccaacgccaaccccaacgccaaccccaacgccaacccgaacgcgaaccccaacgccaaccccaacgccaacccgaacgccaaccccaacgccaaccccaacgcgaaccccaacgccaacccgaacgccaaccccaacgccaaccccaacgcgaaccccaacgccaacccgaacgccaaccccaacgccaaccccaacgccaaccccaacgcgaacccgaacaagaacaaccaggggaacggccaggggcacaacaugcccaacgaccccaaccgcaacgucgacgagaacgccaacgccaacaacgccgccaagaacaacaacaacgaggagcccuccgaccagcacaucgagaaguaccugaagacgauccagaacagccucuccaccgaguggagcccgugcuccgugaccugcggcaacggcauccaggugcggaucaagcccgggagcgcgaacaagcccaaggaccagcuggacuacgccaacgacaucgagaagaagaucugcaagauggagaagugcuccagcgucuucaacguggugaacuccagcaucggccugaucaugguccucuccuuccuguuccugaacuga

SEQ ID NO: 3409 - RNA, 1239 nt, Artificial Sequence
  derived and/or modified CDS sequence (opt1) from Pf(Tz93-124)__BAM84779.1__CSP
augaugcgcaagcuggccauccucagcguguccagcuuccuguucgucgaggcccuguuccaggaguaccagugcuacggcuccagcuccaacacccgggugcucaacgagcugaacuacgacaacgcggggaccaaccuguacaacgagcucgagaugaacuacuacggcaagcaggagaacugguacagccugaagaagaacucccgcagccugggggagaacgacgacggcaacaacaacaacggggacaacggccgggagggcaaggacgaggacaagcgcgacgggaacaacgaggacaacgagaagcuccggaagcccaagcacaagaagcugaagcagccggccgacggcaaccccgaccccaacgccaaccccaacguggacccgaacgccaaccccaacgucgaccccaacgccaaccccaacguggacccgaacgcgaaccccaacgccaaccccaacgccaaccccaacgccaacccgaacgcgaaccccaacgccaaccccaacgccaaccccaacgccaacccgaacgccaaccccaacgcgaaccccaacgccaaccccaacgccaacccgaacgccaaccccaacgccaaccccaacgcgaaccccaacguggacccgaacgccaaccccaacgccaaccccaacgccaaccccaacgccaacccgaacgcgaaccccaacgccaaccccaacgccaacccgaacgccaaccccaacgccaaccccaacgcgaaccccaacgccaacccgaacgccaaccccaacgccaaccccaacgcgaaccccaacgccaacccgaacgccaaccccaacgccaaccccaacgccaaccccaacgcgaacccgaacaagaacaaccaggggaacggccaggggcacaacaugcccaacgaccccaaccgcaacgucgacgagaacgccaacgccaacaacgccgugaagaacaacaacaacgaggagcccuccgacaagcacaucgagcaguaccugaagacgaucaagaacagccucuccaccgaguggagcccgugcuccgugaccugcggcaacggcauccagguccggaucaagcccgggagcgccgacaagcccaaggaccagcuggacuacaucaacgacaucgagaagaagaucugcaagauggagaagugcuccagcguguucaacguggucaacuccagcaucggccugaucauggugcucuccuuccuguuccugaacuga

SEQ ID NO: 3410 - RNA, 1239 nt, Artificial Sequence
  derived and/or modified CDS sequence (opt1) from Pf(Tz98-009)__BAM84781.1__CSP
augaugcgcaagcuggccauccucagcguguccagcuuccuguucgucgaggcccuguuccaggaguaccagugcuacggcuccagcuccaacacccgggugcucaacgagcugaacuacgacaacgcggggaccaaccuguacaacgagcucgagaugaacuacuacggcaagcaggagaacugguacagccugaagaagaacucccgcagccugggggagaacgacgacggcaacaacaacaacggggacaacggccgggagggcaaggacgaggacaagcgcgacgggaacaacgaggacaacgagaagcuccggaagcccaagcacaagaagcugaagcagccggccgacggcaaccccgaccccaacgccaaccccaacguggacccgaacgccaaccccaacgucgaccccaacgccaaccccaacguggacccgaacgcgaaccccaacgccaaccccaacgccaaccccaacgccaacccgaacgcgaaccccaacgccaaccccaacgccaaccccaacgccaacccgaacgccaaccccaacgcgaaccccaacgccaaccccaacgccaacccgaacgccaaccccaacgccaaccccaacgcgaaccccaacguggacccgaacgccaaccccaacgccaaccccaacgccaaccccaacgccaacccgaacgcgaaccccaacgccaaccccaacgccaacccgaacgccaaccccaacgccaaccccaacgcgaaccccaacgccaacccgaacgccaaccccaacgccaaccccaacgcgaaccccaacgccaacccgaacgccaaccccaacgccaaccccaacgccaaccccaacgcgaacccgaacaagaacaaccaggggaacggccaggggcacaacaugcccaacgaccccaaccgcaacgucgacgagaacgccaacgccaacaacgccgugaagaacaacaacaacgaggagcccuccgacaagcacaucaaggaguaccugaacaagauccagaacagcaucuccacggaguggagcccgugcuccgugaccugcggcaacggcauccagguccggaucaagcccgggagcgccgacaagcccaaggaccagcucgacuacaucaacgacaucgagaagaagaucugcaagauggagaagugcuccagcguguucaacguggucaacuccagcaucggccugaucauggugcuguccuuccucuuccugaacuga

SEQ ID NO: 3411 - RNA, 1239 nt, Artificial Sequence
  derived and/or modified CDS sequence (opt1) from Pf(Tz98-049)__BAM84789.1__CSP
augaugcgcaagcuggccauccucagcguguccagcuuccuguucgucgaggcccuguuccaggaguaccagugcuacggcuccagcuccaacacccgggugcucaacgagcugaacuacgacaacgcggggaccaaccuguacaacgagcucgagaugaacuacuacggcaagcaggagaacugguacagccugaagaagaacucccgcagccugggggagaacgacgacggcaacaacaacaacggggacaacggccgggagggcaaggacgaggacaagcgcgacgggaacaacgaggacaacgagaagcuccggaagcccaagcacaagaagcugaagcagccggccgacggcaaccccgaccccaacgccaaccccaacguggacccgaacgccaaccccaacgucgaccccaacgccaaccccaacguggacccgaacgcgaaccccaacgccaaccccaacgccaaccccaacgccaacccgaacgcgaaccccaacgccaaccccaacgccaaccccaacgccaacccgaacgccaaccccaacgcgaaccccaacgccaaccccaacgccaacccgaacgccaaccccaacgccaaccccaacgcgaaccccaacguggacccgaacgccaaccccaacgccaaccccaacgccaaccccaacgccaacccgaacgcgaaccccaacgccaaccccaacgccaacccgaacgccaaccccaacgccaaccccaacgcgaaccccaacgccaacccgaacgccaaccccaacgccaaccccaacgcgaaccccaacgccaacccgaacgccaaccccaacgccaaccccaacgccaaccccaacgcgaacccgaacaagaacaaccaggggaacggccaggggcacaacaugcccaacgaccccaaccgcaacgucgacgagaacgccaacgccaacaacgccgugaagaacaacaacaacgaggagcccuccgacaagcacaucgagcaguaccugaagacgaucaagaacagccucuccaccgaguggagcccgugcuccgugaccugcggcaacggcauccagguccggaucaagcccgggagcgccaacaagcccaaggaccagcuggacuacgagaacgacaucgagaagaagaucugcaagauggagaagugcuccagcguguucaacguggucaacuccagcaucggccugaucauggugcucuccuuccuguuccugaacuga

SEQ ID NO: 3412 - RNA, 1239 nt, Artificial Sequence
  derived and/or modified CDS sequence (opt1) from Pf(Tz98-084)__BAM84792.1__CSP
augaugcgcaagcuggccauccucagcguguccagcuuccuguucgucgaggcccuguuccaggaguaccagugcuacggcuccagcuccaacacccgggugcucaacgagcugaacuacgacaacgcggggaccaaccuguacaacgagcucgagaugaacuacuacggcaagcaggagaacugguacagccugaagaagaacucccgcagccugggggagaacgacgacggcaacaacaacaacggggacaacggccgggagggcaaggacgaggacaagcgcgacgggaacaacgaggacaacgagaagcuccggaagcccaagcacaagaagcugaagcagccggccgacggcaaccccgaccccaacgccaaccccaacguggacccgaacgccaaccccaacgucgaccccaacgccaaccccaacguggacccgaacgcgaaccccaacgccaaccccaacgccaaccccaacgccaacccgaacgcgaaccccaacgccaaccccaacgccaaccccaacgccaacccgaacgccaaccccaacgcgaaccccaacgccaaccccaacgccaacccgaacgccaaccccaacgccaaccccaacgcgaaccccaacguggacccgaacgccaaccccaacgccaaccccaacgccaaccccaacgccaacccgaacgcgaaccccaacgccaaccccaacgccaacccgaacgccaaccccaacgccaaccccaacgcgaaccccaacgccaacccgaacgccaaccccaacgccaaccccaacgcgaaccccaacgccaacccgaacgccaaccccaacgccaaccccaacgccaaccccaacgcgaacccgaacaagaacaaccaggggaacggccaggggcacaacaugcccaacgaccccaaccgcaacgucgacgagaacgccaacgccaacaacgccgugaagaacaacaacaacgaggagcccuccgaccagcacaucgagaaguaccugaacaagauccagaacagccucuccacggaguggagcccgugcuccgugaccugcggcaacggcauccagguccggaucaagcccgggagcgccaacaagcccaaggaccagcuggacuacgcgaacgacaucgagaagaagaucugcaagauggagaagugcuccagcguguucaacguggucaacuccagcaucggccugaucauggugcucuccuuccuguuccugaacuga

SEQ ID NO: 3413 - RNA, 1239 nt, Artificial Sequence
  derived and/or modified CDS sequence (opt1) from Pf(Tz98-119)__BAM84797.1__CSP
augaugcgcaagcuggccauccucagcguguccagcuuccuguucgucgaggcccuguuccaggaguaccagugcuacggcuccagcuccaacacccgggugcucaacgagcugaacuacgacaacgcggggaccaaccuguacaacgagcucgagaugaacuacuacggcaagcaggagaacugguacagccugaagaagaacucccgcagccugggggagaacgacgacggcaacaacaacaacggggacaacggccgggagggcaaggacgaggacaagcgcgacgggaacaacgaggacaacgagaagcuccggaagcccaagcacaagaagcugaagcagccggccgacggcaaccccgaccccaacgccaaccccaacguggacccgaacgccaaccccaacgucgaccccaacgccaaccccaacguggacccgaacgcgaaccccaacgccaaccccaacgccaaccccaacgccaacccgaacgcgaaccccaacgccaaccccaacgccaaccccaacgccaacccgaacgccaaccccaacgcgaaccccaacgccaaccccaacgccaacccgaacgccaaccccaacgccaaccccaacgcgaaccccaacguggacccgaacgccaaccccaacgccaaccccaacgccaaccccaacgccaacccgaacgcgaaccccaacgccaaccccaacgccaacccgaacgccaaccccaacgccaaccccaacgcgaaccccaacgccaacccgaacgccaaccccaacgccaaccccaacgcgaaccccaacgccaacccgaacgccaaccccaacgccaaccccaacgccaaccccaacgcgaacccgaacaagaacaaccaggggaacggccaggggcacaacaugcccaacgaccccaaccgcaacgucgacgagaacgccaacgccaacaacgccgugaagaacaacaacaacgaggagcccuccgaccagcacaucgagaaguaccugaagacgauccagaacagccucuccaccgaguggagcccgugcuccgugaccugcggcaacggcauccagguccggaucaagcccgggagcgccaacaagcccaaggaccagcuggacuacgcgaacgacaucgagaagaagaucugcaagauggagaagugcuccagcguguucaacguggucaacuccagcaucggccugaucauggugcucuccuuccuguuccugaacuga

SEQ ID NO: 3414 - RNA, 1239 nt, Artificial Sequence
  derived and/or modified CDS sequence (opt1) from Pf(Yaounde)__AAN87602.1__CSP
augaugcgcaagcuggccauccucagcguguccagcuuccuguucgucgaggcccuguuccaggaguaccagugcuacggcuccagcuccaacacccgggugcucaacgagcugaacuacgacaacgcggggaccaaccuguacaacgagcucgagaugaacuacuacggcaagcaggagaacugguacagccugaagaagaacucccgcagccugggggagaacgacgacggcaacaacaacaacggggacaacggccgggagggcaaggacgaggacaagcgcgacgggaacaacgaggacaacgagaagcuccggaagcccaagcacaagaagcugaagcagccggccgacggcaaccccgaccccaacgccaaccccaacguggacccgaacgccaaccccaacgucgaccccaacgccaaccccaacguggacccgaacgcgaaccccaacgccaaccccaacgccaaccccaacgccaacccgaacgcgaaccccaacgccaaccccaacgccaaccccaacgccaacccgaacgccaaccccaacgcgaaccccaacgccaaccccaacgccaacccgaacgccaaccccaacgccaaccccaacgcgaaccccaacguggacccgaacgccaaccccaacgccaaccccaacgccaaccccaacgccaacccgaacgcgaaccccaacgccaaccccaacgccaacccgaacgccaaccccaacgccaaccccaacgcgaaccccaacgccaacccgaacgccaaccccaacgccaaccccaacgcgaaccccaacgccaacccgaacgccaaccccaacgccaaccccaacgccaaccccaacgcgaacccgaacaagaacaaccaggggaacggccaggggcacaacaugcccaacgaccccaaccgcaacgucgacgagaacgccaacgccaacaacgccgugaagaacaacaacaacgaggagcccuccgaccagcacaucgagaaguaccugaacaagaucaagaacagccucuccacggaguggagcccgugcuccgugaccugcggcaacggcauccagguccggaucaagcccgggagcgccaacaagcccaaggaccagcuggacuacgcgaacgacaucgagaagaagaucugcaagauggagaagugcuccagcguguucaacguggucaacuccagcaucggccugaucauggugcucuccuuccuguuccugaacuga

SEQ ID NO: 3415 - RNA, 1239 nt, Artificial Sequence
  derived and/or modified CDS sequence (opt1) from Pf(Yaounde)__AAN87587.1__CSP
augaugcgcaagcuggccauccucagcguguccagcuuccuguucgucgaggcccuguuccaggaguaccagugcuacggcuccagcuccaacacccgggugcucaacgagcugaacuacgacaacgcggggaccaaccuguacaacgagcucgagaugaacuacuacggcaagcaggagaacugguacagccugaagaagaacucccgcagccugggggagaacgacgacggcaacaacaacaacggggacaacggccgggagggcaaggacgaggacaagcgcgacgggaacaacgaggacaacgagaagcuccggaagcccaagcacaagaagcugaagcagccggccgacggcaaccccgaccccaacgccaaccccaacguggacccgaacgccaaccccaacgucgaccccaacgccaaccccaacguggacccgaacgcgaaccccaacgccaaccccaacgccaaccccaacgccaacccgaacgcgaaccccaacgccaaccccaacgccaaccccaacgccaacccgaacgccaaccccaacgcgaaccccaacgccaaccccaacgccaacccgaacgccaaccccaacgccaaccccaacgcgaaccccaacguggacccgaacgccaaccccaacgccaaccccaacgccaaccccaacgccaacccgaacgcgaaccccaacgccaaccccaacgccaacccgaacgccaaccccaacgccaaccccaacgcgaaccccaacgccaacccgaacgccaaccccaacgccaaccccaacgcgaaccccaacgccaacccgaacgccaaccccaacgccaaccccaacgccaaccccaacgcgaacccgaacaagaacaaccaggggaacggccaggggcacaacaugcccaacgaccccaaccgcaacgucgacgagaacgccaacgccaacaacgccgugaagaacaacaacaacgaggagcccuccgaccagcacaucgagaaguaccugaagacgaucaagaacagccucuccaccgaguggagcccgugcuccgugaccugcggcaacggcauccagguccggaucaagcccgggagcgccaacaagcccaaggaccagcuggacuacgcgaacgacaucgagaagaagaucugcaagauggagaagugcuccagcguguucaacguggucaacuccagcaucggccugaucauggugcucuccuuccuguuccugaacuga

SEQ ID NO: 3416 - RNA, 1236 nt, Artificial Sequence
  derived and/or modified CDS sequence (opt1) from Pf(A107)__ACO49330.1__CSP
augcgcaagcuggccauccucagcguguccagcuuccuguucgucgaggcccuguuccaggaguaccagugcuacggcuccagcuccaacacccgggugcucaacgagcugaacuacgacaacgcggggaccaaccuguacaacgagcucgagaugaacuacuacggcaagcaggagaacugguacagccugaagaagaacucccgcagccugggggagaacgacgacggcaacaacaacaacggggacaacggccgggagggcaaggacgaggacaagcgcgacgggaacaacgaggacaacgagaagcuccggaagcccaagcacaagaagcugaagcagccgggcgacgggaaccccgaccccaacgccaaccccaacguggacccgaacgccaaccccaacgucgaccccaacgccaaccccaacguggacccgaacgccaaccccaacgcgaaccccaacgccaaccccaacgccaacccgaacgccaaccccaacgcgaaccccaacgccaaccccaacgccaacccgaacgccaaccccaacgccaaccccaacgcgaaccccaacgccaacccgaacgccaaccccaacgccaaccccaacgccaaccccaacgcgaacccgaacgccaaccccaacgccaaccccaacgccaaccccaacgccaacccgaacgcgaaccccaacgccaaccccaacgccaacccgaacgccaaccccaacgccaaccccaacgcgaaccccaacgccaacccgaacgccaaccccaacgccaaccccaacgcgaaccccaacgccaacccgaacgccaaccccaacgccaaccccaacgccaaccccaacgcgaacccgaacaagaacaaccagggcaacgggcagggccacaacaugcccaacgaccccaaccgcaacguggacgagaacgccaacgccaacaacgccgucaagaacaacaacaacgaggagcccuccgacaagcacaucgagcaguaccugaagaagauccagaacagccucuccacggaguggagcccgugcuccgugaccugcggcaacgggauccaggugcggaucaagcccggcagcgccaacaagcccaaggacgagcuggacuacgagaacgacaucgagaagaagaucugcaagauggagaagugcuccagcgucuucaacguggugaacuccagcaucgggcugaucaugguccucuccuuccuguuccugaacuga

SEQ ID NO: 3417 - RNA, 1233 nt, Artificial Sequence
  derived and/or modified CDS sequence (opt1) from Pf(IT)____CSP
augaugcgcaagcuggccauccucagcguguccagcuuccuguucgucgaggcccuguuccaggaguaccagugcuacggcuccagcuccaacacccgggugcucaacgagcugaacuacgacaacgcggggaccaaccuguacaacgagcucgagaugaacuacuacggcaagcaggagaacugguacagccugaagaagaacucccgcagccugggggagaacgacgacggcgacaacgacaacgggaacaacaacaacggcaacaacaacaacggcgacaacgggcgggagggcaaggacgaggacaagcgcgacgggaacaacgaggacaacgagaagcuccggaagcccaagcacaagaagcugaagcagccgggcgacgacaaccccgaccccaacgccaaccccaacguggacccgaacgccaaccccaacgucgaccccaacgccaaccccaacgccaacccgaacgcgaaccccaacgccaaccccaacgccaaccccaacgccaacccgaacgcgaaccccaacguggaccccaacgccaaccccaacgccaacccgaacgccaaccccaacgccaaccccaacgcgaaccccaacgccaacccgaacgccaaccccaacgccaaccccaacgccaaccccaacgcgaacccgaacgccaaccccaacgccaaccccaacgccaaccccaacgccaacccgaacgcgaaccccaacgccaaccccaacgccaacccgaacgccaaccccaacgccaaccccaacgcgaaccccaacgccaacccgaacgccaaccccaacgccaaccccaacgcgaaccccaacgccaacccgaacgccaaccccaacaagaacaaccaggggaacggccagggccacaacaugcccaacgaccccaaccgcaacguggacgagaacgccaacgccaacaacgcggucaagaacaacaacaacgaggagccguccgacaagcacaucgagcaguaccugaagaagauccagaacagccucuccacggaguggagccccugcuccgugaccugcgggaacggcauccaggugcggaucaagcccgggagcgccgacaagcccaaggaccagcuggacuacgagaacgacaucgagaagaagaucugcaagauggagaagugcuccagcgucuucaacguggugaacuccagcaucggccugaucaugguccucuccuuccuguuccugaacuga

SEQ ID NO: 3418 - RNA, 1227 nt, Artificial Sequence
  derived and/or modified CDS sequence (opt1) from Pf(14)__AGR53782.1__CSP
augaugcgcaagcuggccauccucagcguguccagcuuccuguucgucgaggcccuguuccaggaguaccagugcuacggcuccagcuccaacacccgggugcucaacgagcugaacuacgacaacgcggggaccaaccuguacaacgagcucgagaugaacuacuacggcaagcaggagaacugguacagccugaagaagaacucccgcagccugggggagaacgacgacggcaacaacaacaacggggacaacggccgggagggcaaggacgaggacaagcgcgacgggaacaacgaggacaacgagaagcuccggaagcccaagcacaagaagcugaagcagccgggcgacgggaaccccgaccccaacgccaaccccaacguggacccgaacgccaaccccaacgucgaccccaacgccaaccccaacguggacccgaacgccaaccccaacgcgaaccccaacgccaaccccaacgccaacccgaacgccaaccccaacgcgaaccccaacgccaaccccaacgccaacccgaacgccaaccccaacgccaaccccaacgcgaaccccaacguggacccgaacgccaaccccaacgccaaccccaacgccaaccccaacgccaacccgaacgcgaaccccaacgccaaccccaacgccaaccccaacgccaacccgaacgccaaccccaacgcgaaccccaacgccaacccgaacgccaaccccaacgccaaccccaacgccaaccccaacgcgaacccgaacgccaaccccaacgccaaccccaacgccaaccccaacgcgaacccgaacgccaaccccaacgccaaccccaacgccaaccccaacaagaacaaccagggcaacgggcagggccacaacaugccgaacgaccccaaccgcaacgucgacgagaacgccaacgcgaacaacgccgugaagaacaacaacaacgaggagcccuccgaccagcacaucgagaaguaccugcagaagauccagaacagccucuccacggaguggagccccugcuccgugaccugcggcaacgggauccagguccggaucaagccgggcagcgccaacaagcccaaggaccagcugaacuacgagaacgacaucgggaagaagaucugcaagauggagaagugcuccagcguguucaacguggucaacuccagcaucggccugaucauggugcucuccuuccuguuccugaacuga

SEQ ID NO: 3419 - RNA, 1227 nt, Artificial Sequence
  derived and/or modified CDS sequence (opt1) from Pf(Asembo Bay)__AAN87609.1__CSP
augaugcgcaagcuggccauccucagcguguccagcuuccuguucgucgaggcccuguuccaggaguaccagugcuacggcuccagcuccaacacccgggugcucaacgagcugaacuacgacaacgcggggaccaaccuguacaacgagcucgagaugaacuacuacggcaagcaggagaacugguacagccugaagaagaacucccgcagccugggggagaacgacgacggcaacaacaacaacggggacaacggccgggagggcaaggacgaggacaagcgcgacgggaacaacgaggacaacgagaagcuccggaagcccaagcacaagaagcugaagcagccggccgacggcaaccccgaccccaacgccaaccccaacguggacccgaacgccaaccccaacgucgaccccaacgccaaccccaacguggacccgaacgcgaaccccaacgccaaccccaacgccaaccccaacgccaacccgaacgcgaaccccaacgccaaccccaacgccaaccccaacgccaacccgaacgccaaccccaacgcgaaccccaacgccaaccccaacgccaacccgaacgccaaccccaacgccaaccccaacguggaccccaacgcgaacccgaacgccaaccccaacgccaaccccaacgccaaccccaacgccaacccgaacgcgaaccccaacgccaaccccaacgccaacccgaacgccaaccccaacgccaaccccaacgcgaaccccaacgccaacccgaacgccaaccccaacgccaaccccaacgcgaaccccaacgccaacccgaacgccaaccccaacgccaaccccaacgccaaccccaacaagaacaaccaggggaacggccaggggcacaacaugccgaacaaccccaaccgcaacgucgacgagaacgcgaacgccaacaacgccgugaagaacaacaacaacgaggagcccuccgacaagcacaucgagcaguaccugaagacgauccagaacagccucuccaccgaguggagccccugcuccgugaccugcggcaacggcauccagguccggaucaagccggggagcgccaacaagcccaaggaccagcuggacuacgccaacgacaucgagaagaagaucugcaagauggagaagugcuccagcguguucaacguggucaacuccagcaucggccugaucauggugcucuccuuccuguuccugaacuga

SEQ ID NO: 3420 - RNA, 1227 nt, Artificial Sequence
  derived and/or modified CDS sequence (opt1) from Pf(Bolivar)__AAN87613.1__CSP
augaugcgcaagcuggccauccucagcguguccagcuuccuguucgucgaggcccuguuccaggaguaccagugcuacggcuccagcuccaacacccgggugcucaacgagcugaacuacgacaacgcggggaccaaccuguacaacgagcucgagaugaacuacuacggcaagcaggagaacugguacagccugaagaagaacucccgcagccugggggagaacgacgacggcaacaacaacaacggggacaacggccgggagggcaaggacgaggacaagcgcgacgggaacaacgaggacaacgagaagcuccggaagcccaagcacaagaagcugaagcagccgggcgacgggaaccccgaccccaacgccaaccccaacguggacccgaacgccaaccccaacgucgaccccaacgccaaccccaacguggacccgaacgccaaccccaacgcgaaccccaacgccaaccccaacgccaacccgaacgccaaccccaacgcgaaccccaacgccaaccccaacgccaacccgaacgccaaccccaacgccaaccccaacgcgaaccccaacguggacccgaacgccaaccccaacgccaaccccaacgccaaccccaacgccaacccgaacgcgaaccccaacgccaaccccaacgccaaccccaacgccaacccgaacgccaaccccaacgcgaaccccaacgccaacccgaacgccaaccccaacgccaaccccaacgccaaccccaacgcgaacccgaacgccaaccccaacgccaaccccaacgccaaccccaacgcgaacccgaacgccaaccccaacgccaaccccaacgccaaccccaacaagaacaaccagggcaacgggcagggccacaacaugccgaacgaccccaaccgcaacgucgacgagaacgccaacgcgaacaacgccgugaagaacaacaacaacgaggagcccuccgacaagcacaucgagcaguaccugaagaagauccagaacgcccucagcacggaguggucccccugcagcgugaccugcggcaacgggauccagguccggaucaagccgggcuccgccaacaagcccaaggaccagcuggacuacgagaacgacaucgagaagaagaucugcaagauggagaagugcagcuccguguucaacguggucaacagcuccaucgggcugaucauggugcucagcuuccuguuccugaacuga

SEQ ID NO: 3421 - RNA, 1227 nt, Artificial Sequence
  derived and/or modified CDS sequence (opt1) from Pf(Br419M3)__BAM85120.1__CSP
augaugcgcaagcuggccauccucagcguguccagcuuccuguucgucgaggcccuguuccaggaguaccagugcuacggcuccagcuccaacacccgggugcucaacgagcugaacuacgacaacgcggggaccaaccuguacaacgagcucgagaugaacuacuacggcaagcaggagaacugguacagccugaagaagaacucccgcagccugggggagaacgacgacggcaacaacaacaacggggacaacggccgggagggcaaggacgaggacaagcgcgacgggaacaacgaggacaacgagaagcuccggaagcccaagcacaagaagcugaagcagccggccgacggcaaccccgaccccaacgccaaccccaacguggacccgaacgccaaccccaacgucgaccccaacgccaaccccaacguggacccgaacgcgaaccccaacgccaaccccaacgccaaccccaacgccaacccgaacgcgaaccccaacgccaaccccaacgccaaccccaacgccaacccgaacgccaaccccaacgcgaaccccaacgccaaccccaacgccaacccgaacgccaaccccaacgccaaccccaacgcgaaccccaacguggacccgaacgccaaccccaacgccaaccccaacgccaaccccaacgccaacccgaacgcgaaccccaacgccaaccccaacgccaacccgaacgccaaccccaacgccaaccccaacgcgaaccccaacgccaacccgaacgccaaccccaacgccaaccccaacgcgaaccccaacgccaacccgaacgccaaccccaacgccaaccccaacgccaaccccaacaagaacaaccaggggaacggccaggggcacaacaugccgaacaaccccaaccgcaacgucgacgagaacgcgaacgccaacaacgccgugaagaacaacaacaacgaggagcccuccgacaagcacaucgagcaguaccugaagaagauccagaacagccucuccacggaguggagccccugcuccgugaccugcggcaacggcauccagguccggaucaagccggggagcgccggcaaguccaaggacgagcuggacuacgagaacgacaucgagaagaagaucugcaagauggagaagugcagcuccguguucaacguggucaacagcuccaucgggcugaucauggugcucagcuuccuguuccugaacuga

SEQ ID NO: 3422 - RNA, 1227 nt, Artificial Sequence
  derived and/or modified CDS sequence (opt1) from Pf(Gha1110-003)__BAM84840.1__CSP
augaugcgcaagcuggccauccucagcguguccagcuuccuguucgucgaggcccuguuccaggaguaccagugcuacggcuccagcuccaacacccgggugcucaacgagcugaacuacgacaacgcggggaccaaccuguacaacgagcucgagaugaacuacuacggcaagcaggagaacugguacagccugaagaagaacucccgcagccugggggagaacgacgacggcaacaacaacaacggggacaacggccgggagggcaaggacgaggacaagcgcgacgggaacaacgaggacaacgagaagcuccggaagcccaagcacaagaagcugaagcagccggccgacggcaaccccgaccccaacgccaaccccaacguggacccgaacgccaaccccaacgucgaccccaacgccaaccccaacguggacccgaacgcgaaccccaacgccaaccccaacgccaaccccaacgccaacccgaacgcgaaccccaacgccaaccccaacgccaaccccaacgccaacccgaacgccaaccccaacgcgaaccccaacgccaaccccaacgccaacccgaacgccaaccccaacgccaaccccaacguggaccccaacgcgaacccgaacgccaaccccaacgccaaccccaacgccaaccccaacgccaacccgaacgcgaaccccaacgccaaccccaacgccaacccgaacgccaaccccaacgccaaccccaacgcgaaccccaacgccaacccgaacgccaaccccaacgccaaccccaacgcgaaccccaacgccaacccgaacgccaaccccaacgccaaccccaacgccaaccccaacaagaacaaccaggggaacggccaggggcacaacaugccgaacgaccccaaccgcaacgucgacgagaacgcgaacgccaacaacgccgugaagaacaacaacaacgaggagcccuccgaccagcacaucgagaaguaccugaagacgaucaagaacagccucuccaccgaguggagccccugcuccgugaccugcggcaacggcauccagguccggaucaagccggggagcgccaacaagcccaaggaccagcuggacuacgccaacgacaucgagaagaagaucugcaagauggagaagugcuccagcguguucaacguggucaacuccagcaucggccugaucauggugcucuccuuccuguuccugaacuga

SEQ ID NO: 3423 - RNA, 1227 nt, Artificial Sequence
  derived and/or modified CDS sequence (opt1) from Pf(Tz03-032)__BAM84799.1__CSP
augaugcgcaagcuggccauccucagcguguccagcuuccuguucgucgaggcccuguuccaggaguaccagugcuacggcuccagcuccaacacccgggugcucaacgagcugaacuacgacaacgcggggaccaaccuguacaacgagcucgagaugaacuacuacggcaagcaggagaacugguacagccugaagaagaacucccgcagccugggggagaacgacgacggcaacaacaacaacggggacaacggccgggagggcaaggacgaggacaagcgcgacgggaacaacgaggacaacgagaagcuccggaagcccaagcacaagaagcugaagcagccggccgacggcaaccccgaccccaacgccaaccccaacguggacccgaacgccaaccccaacgucgaccccaacgccaaccccaacguggacccgaacgcgaaccccaacgccaaccccaacgccaaccccaacgccaacccgaacgcgaaccccaacgccaaccccaacgccaaccccaacgccaacccgaacgccaaccccaacgcgaaccccaacguggaccccaacgccaacccgaacgccaaccccaacgccaaccccaacgccaaccccaacgcgaacccgaacgccaaccccaacgccaaccccaacgccaaccccaacgccaacccgaacgcgaaccccaacgccaaccccaacgccaacccgaacgccaaccccaacgccaaccccaacgcgaaccccaacgccaacccgaacgccaaccccaacgccaaccccaacgcgaaccccaacgccaacccgaacgccaaccccaacgccaaccccaacgccaaccccaacaagaacaaccaggggaacggccaggggcacaacaugccgaacgaccccaaccgcaacgucgacgagaacgcgaacgccaacaacgccgugaagaacaacaacaacgaggagcccuccgaccagcacaucgagaaguaccugaagaagauccagaacagccucuccacggaguggagccccugcuccgugaccugcggcaacggcauccagguccggaucaagccggggagcgccaacaagcccaaggaccagcuggacuacgccaacgacaucgagaagaagaucugcaagauggagaagugcuccagcguguucaacguggucaacuccagcaucggccugaucauggugcucuccuuccuguuccugaacuga

SEQ ID NO: 3424 - RNA, 1227 nt, Artificial Sequence
  derived and/or modified CDS sequence (opt1) from Pf(Tz03-033)__BAM84800.1__CSP
augaugcgcaagcuggccauccucagcguguccagcuuccuguucgucgaggcccuguuccaggaguaccagugcuacggcuccagcuccaacacccgggugcucaacgagcugaacuacgacaacgcggggaccaaccuguacaacgagcucgagaugaacuacuacggcaagcaggagaacugguacagccugaagaagaacucccgcagccugggggagaacgacgacggcaacaacaacaacggggacaacggccgggagggcaaggacgaggacaagcgcgacgggaacaacgaggacaacgagaagcuccggaagcccaagcacaagaagcugaagcagccggccgacggcaaccccgaccccaacgccaaccccaacguggacccgaacgccaaccccaacgucgaccccaacgccaaccccaacguggacccgaacgcgaaccccaacgccaaccccaacgccaaccccaacgccaacccgaacgcgaaccccaacgccaaccccaacgccaaccccaacgccaacccgaacgccaaccccaacgcgaaccccaacgccaaccccaacgccaacccgaacgccaaccccaacgccaaccccaacguggaccccaacgcgaacccgaacgccaaccccaacgccaaccccaacgccaaccccaacgccaacccgaacgcgaaccccaacgccaaccccaacgccaacccgaacgccaaccccaacgccaaccccaacgcgaaccccaacgccaacccgaacgccaaccccaacgccaaccccaacgcgaaccccaacgccaacccgaacgccaaccccaacgccaaccccaacgccaaccccaacaagaacaaccaggggaacggccaggggcacaacaugccgaacgaccccaaccgcaacgucgacgagaacgcgaacgccaacaacgccgugaagaacaacaacaacgaggagcccuccgaccagcacaucgagaaguaccugaagacgaucaagaacagccucuccaccgaguggagccccugcuccgugaccugcggcaacggcauccagguccggaucaagccggggagcgccaacaagcccaaggacgagcuggacuacgccaacgacaucgagaagaagaucugcaagauggagaagugcuccagcguguucaacguggucaacuccagcaucggccugaucauggugcucuccuuccuguuccugaacuga

SEQ ID NO: 3425 - RNA, 1227 nt, Artificial Sequence
  derived and/or modified CDS sequence (opt1) from Pf(Tz93-056)__BAM84765.1__CSP
augaugcgcaagcuggccauccucagcguguccagcuuccuguucgucgaggcccuguuccaggaguaccagugcuacggcuccagcuccaacacccgggugcucaacgagcugaacuacgacaacgcggggaccaaccuguacaacgagcucgagaugaacuacuacggcaagcaggagaacugguacagccugaagaagaacucccgcagccugggggagaacgacgacggcaacaacaacaacggggacaacggccgggagggcaaggacgaggacaagcgcgacgggaacaacgaggacaacgagaagcuccggaagcccaagcacaagaagcugaagcagccggccgacggcaaccccgaccccaacgccaaccccaacguggacccgaacgccaaccccaacgucgaccccaacgccaaccccaacguggacccgaacgcgaaccccaacgccaaccccaacgccaaccccaacgccaacccgaacgcgaaccccaacgccaaccccaacgccaaccccaacgccaacccgaacgccaaccccaacgcgaaccccaacgccaaccccaacgccaacccgaacgccaaccccaacgccaaccccaacguggaccccaacgcgaacccgaacgccaaccccaacgccaaccccaacgccaaccccaacgccaacccgaacgcgaaccccaacgccaaccccaacgccaacccgaacgccaaccccaacgccaaccccaacgcgaaccccaacgccaacccgaacgccaaccccaacgccaaccccaacgcgaaccccaacgccaacccgaacgccaaccccaacgccaaccccaacgccaaccccaacaagaacaaccaggggaacggccaggggcacaacaugccgaacgaccccaaccgcaacgucgacgagaacgcgaacgccaacaacgccgugaagaacaacaacaacgaggagcccuccgacaagcacaucaaggaguaccugacgaagaucaagaacagcaucuccaccgaguggagccccugcuccgugaccugcggcaacggcauccagguccggaucaagccggggagcgccaacaagcccaaggacgagcucgacuacgagaacgacaucgagaagaagaucugcaagauggagaagugcuccagcguguucaacguggucaacuccagcaucggccugaucauggugcuguccuuccucuuccugaacuga

SEQ ID NO: 3426 - RNA, 1227 nt, Artificial Sequence
  derived and/or modified CDS sequence (opt1) from Pf(Tz93-085)__BAM84771.1__CSP
augaugcgcaagcuggccauccucagcguguccagcuuccuguucgucgaggcccuguuccaggaguaccagugcuacggcuccagcuccaacacccgggugcucaacgagcugaacuacgacaacgcggggaccaaccuguacaacgagcucgagaugaacuacuacggcaagcaggagaacugguacagccugaagaagaacucccgcagccugggggagaacgacgacggcaacaacaacaacggggacaacggccgggagggcaaggacgaggacaagcgcgacgggaacaacgaggacaacgagaagcuccggaagcccaagcacaagaagcugaagcagccggccgacggcaaccccgaccccaacgccaaccccaacguggacccgaacgccaaccccaacgucgaccccaacgccaaccccaacguggacccgaacgcgaaccccaacgccaaccccaacgccaaccccaacgccaacccgaacgcgaaccccaacgccaaccccaacgccaaccccaacgccaacccgaacgccaaccccaacgcgaaccccaacgccaaccccaacgccaacccgaacgccaaccccaacgccaaccccaacguggaccccaacgcgaacccgaacgccaaccccaacgccaaccccaacgccaaccccaacgccaacccgaacgcgaaccccaacgccaaccccaacgccaacccgaacgccaaccccaacgccaaccccaacgcgaaccccaacgccaacccgaacgccaaccccaacgccaaccccaacgcgaaccccaacgccaacccgaacgccaaccccaacgccaaccccaacgccaaccccaacaagaacaaccaggggaacggccaggggcacaacaugccgaacgaccccaaccgcaacgucgacgagaacgcgaaggccaacaacgccgugaagaacaacaacaacgaggagcccuccgacaagcacaucaaggaguaccugaacaagauccagaacagcaucuccacggaguggagccccugcuccgugaccugcggcaacggcauccagguccggaucaagccggggagcgccgacaagcccaaggaccagcucgacuacaucaacgacaucgagaagaagaucugcaagauggagaagugcuccagcguguucaacguggucaacuccagcaucggccugaucauggugcuguccuuccucuuccugaacuga

SEQ ID NO: 3427 - RNA, 1227 nt, Artificial Sequence
  derived and/or modified CDS sequence (opt1) from Pf(Tz93-102)__BAM84773.1__CSP
augaugcgcaagcuggccauccucagcguguccagcuuccuguucgucgaggcccuguuccaggaguaccagugcuacggcuccagcuccaacacccgggugcucaacgagcugaacuacgacaacgcggggaccaaccuguacaacgagcucgagaugaacuacuacggcaagcaggagaacugguacagccugaagaagaacucccgcagccugggggagaacgacgacggcaacaacaacaacggggacaacggccgggagggcaaggacgaggacaagcgcgacgggaacaacgaggacaacgagaagcuccggaagcccaagcacaagaagcugaagcagccgggcgacgggaaccccgaccccaacgccaaccccaacguggacccgaacgccaaccccaacgucgaccccaacgccaaccccaacguggacccgaacgccaaccccaacgcgaaccccaacgccaaccccaacgccaacccgaacgccaaccccaacgcgaaccccaacgccaaccccaacgccaacccgaacgccaaccccaacgccaaccccaacgcgaaccccaacgccaacccgaacgccaaccccaacgccaaccccaacguggaccccaacgccaacccgaacgcgaaccccaacgccaaccccaacgccaaccccaacgccaacccgaacgccaaccccaacgcgaaccccaacgccaacccgaacgccaaccccaacgccaaccccaacgccaaccccaacgcgaacccgaacgccaaccccaacgccaaccccaacgccaaccccaacgcgaacccgaacgccaaccccaacgccaaccccaacgccaaccccaacaagaacaaccagggcaacgggcagggccacaacaugccgaacgaccccaaccgcaacgucgacgagaacgccaacgcgaacaacgccgugaagaacaacaacaacgaggagcccuccgacaagcacaucgagcaguaccugaagacgaucaagaacagccucuccaccgaguggagccccugcuccgugaccugcggcaacgggauccagguccggaucaagccgggcagcgccaacaagcccaaggacgagcugaacuacgagaacgacaucgagaagaagaucugcaagauggagaagugcuccagcguguucaacguggucaacuccagcaucgggcugaucauggugcucuccuuccuguuccugaacuga

SEQ ID NO: 3428 - RNA, 1227 nt, Artificial Sequence
  derived and/or modified CDS sequence (opt1) from Pf(Tz98-021)__BAM84783.1__CSP
augaugcgcaagcuggccauccucagcguguccagcuuccuguucgucgaggcccuguuccaggaguaccagugcuacggcuccagcuccaacacccgggugcucaacgagcugaacuacgacaacgcggggaccaaccuguacaacgagcucgagaugaacuacuacggcaagcaggagaacugguacagccugaagaagaacucccgcagccugggggagaacgacgacggcaacaacaacaacggggacaacggccgggagggcaaggacgaggacaagcgcgacgggaacaacgaggacaacgagaagcuccggaagcccaagcacaagaagcugaagcagccggccgacggcaaccccgaccccaacgccaaccccaacguggacccgaacgccaaccccaacgucgaccccaacgccaaccccaacguggacccgaacgcgaaccccaacgccaaccccaacgccaaccccaacgccaacccgaacgcgaaccccaacgccaaccccaacgccaaccccaacgccaacccgaacgccaaccccaacgcgaaccccaacgccaaccccaacguggacccgaacgccaaccccaacgccaaccccaacgccaaccccaacgcgaacccgaacgccaaccccaacgccaaccccaacgccaaccccaacgccaacccgaacgcgaaccccaacgccaaccccaacgccaacccgaacgccaaccccaacgccaaccccaacgcgaaccccaacgccaacccgaacgccaaccccaacgccaaccccaacgcgaaccccaacgccaacccgaacgccaaccccaacgccaaccccaacgccaaccccaacaagaacaaccaggggaacggccaggggcacaacaugccgaacgaccccaaccgcaacgucgacgagaacgcgaacgccaacaacgccgugaagaacaacaacaacgaggagcccuccgaccagcacaucgagaaguaccugaagacgauccagaacagccucuccaccgaguggagccccugcuccgugaccugcggcaacggcauccagguccggaucaagccggggagcgccaacaagcccaaggaccagcuggacuacgccaacgacaucgagaagaagaucugcaagauggagaagugcuccagcguguucaacguggucaacuccagcaucggccugaucauggugcucuccuuccuguuccugaacuga

SEQ ID NO: 3429 - RNA, 1227 nt, Artificial Sequence
  derived and/or modified CDS sequence (opt1) from Pf(Tz98-030)__BAM84785.1__CSP
augaugcgcaagcuggccauccucagcguguccagcuuccuguucgucgaggcccuguuccaggaguaccagugcuacggcuccagcuccaacacccgggugcucaacgagcugaacuacgacaacgcggggaccaaccuguacaacgagcucgagaugaacuacuacggcaagcaggagaacugguacagccugaagaagaacucccgcagccugggggagaacgacgacggcaacaacaacaacggggacaacggccgggagggcaaggacgaggacaagcgcgacgggaacaacgaggacaacgagaagcuccggaagcccaagcacaagaagcugaagcagccgggcgacgggaaccccgaccccaacgccaaccccaacguggacccgaacgccaaccccaacgucgaccccaacgccaaccccaacguggacccgaacgccaaccccaacgcgaaccccaacgccaaccccaacgccaacccgaacgccaaccccaacgcgaaccccaacgccaaccccaacgccaacccgaacgccaaccccaacgccaaccccaacgcgaaccccaacguggacccgaacgccaaccccaacgccaaccccaacgccaaccccaacgccaacccgaacgcgaaccccaacgccaaccccaacgccaaccccaacgccaacccgaacgccaaccccaacgcgaaccccaacgccaacccgaacgccaaccccaacgccaaccccaacgccaaccccaacgcgaacccgaacgccaaccccaacgccaaccccaacgccaaccccaacgcgaacccgaacgccaaccccaacgccaaccccaacgccaaccccaacaagaacaaccagggcaacgggcagggccacaacaugccgaacgaccccaaccgcaacgucgacgagaacgccaacgcgaacaacgccgugaagaacaacaacaacgaggagcccuccgaccagcacaucgagaaguaccugcagaagauccagaacagccucuccacggaguggagccccugcuccgugaccugcggcaacgggauccagguccggaucaagccgggcagcgccaacaagcccaaggaccagcugaacuacgagaacgacaucgagaagaagaucugcaagauggagaagugcuccagcguguucaacguggucaacuccagcaucgggcugaucauggugcucuccuuccuguuccugaacuga

SEQ ID NO: 3430 - RNA, 1227 nt, Artificial Sequence
  derived and/or modified CDS sequence (opt1) from Pf(Tz98-070)__BAM84790.1__CSP
augaugcgcaagcuggccauccucagcguguccagcuuccuguucgucgaggcccuguuccaggaguaccagugcuacggcuccagcuccaacacccgggugcucaacgagcugaacuacgacaacgcggggaccaaccuguacaacgagcucgagaugaacuacuacggcaagcaggagaacugguacagccugaagaagaacucccgcagccugggggagaacgacgacggcaacaacaacaacggggacaacggccgggagggcaaggacgaggacaagcgcgacgggaacaacgaggacaacgagaagcuccggaagcccaagcacaagaagcugaagcagccgggcgacgggaaccccgaccccaacgccaaccccaacguggacccgaacgccaaccccaacgucgaccccaacgccaaccccaacguggacccgaacgccaaccccaacgcgaaccccaacgccaaccccaacgccaacccgaacgccaaccccaacgcgaaccccaacgccaaccccaacgccaacccgaacgccaaccccaacgccaaccccaacgcgaaccccaacgccaacccgaacgccaaccccaacgccaaccccaacguggaccccaacgccaacccgaacgcgaaccccaacgccaaccccaacgccaaccccaacgccaacccgaacgccaaccccaacgcgaaccccaacgccaacccgaacgccaaccccaacgccaaccccaacgccaaccccaacgcgaacccgaacgccaaccccaacgccaaccccaacgccaaccccaacgcgaacccgaacgccaaccccaacgccaaccccaacgccaaccccaacaagaacaaccagggcaacgggcagggccacaacaugccgaacgaccccaaccgcaacgucgacgagaacgccaacgcgaacgacgccgugaagaacaacaacaacgaggagcccuccgaccagcacaucgagaaguaccugaagaucaucaagaacagccucuccacggaguggagccccugcuccgugaccugcggcaacgggauccagguccggaucaagccgggcagcgccaacaagcccaaggaccagcuggacuacgccaacgacaucgagaagaagaucugcaagauggagaagugcuccagcguguucaacguggucaacuccagcaucgggcugaucauggugcucuccuuccuguuccugaacuga

SEQ ID NO: 3431 - RNA, 1224 nt, Artificial Sequence
  derived and/or modified CDS sequence (opt1) from Pf(A150)__ACO49332.1__CSP
augcgcaagcuggccauccucagcguguccagcuuccuguucgucgaggcccuguuccaggaguaccagugcuacggcuccagcuccaacacccgggugcucaacgagcugaacuacgacaacgcggggaccaaccuguacaacgagcucgagaugaacuacuacggcaagcaggagaacugguacagccugaagaagaacucccgcagccugggggagaacgacgacggcaacaacaacaacggggacaacggccgggagggcaaggacgaggacaagcgcgacgggaacaacgaggacaacgagaagcuccggaagcccaagcacaagaagcugaagcagccgggcgacgggaaccccgaccccaacgccaaccccaacguggacccgaacgccaaccccaacgucgaccccaacgccaaccccaacguggacccgaacgccaaccccaacgcgaaccccaacgccaaccccaacgccaacccgaacgccaaccccaacgcgaaccccaacgccaaccccaacgccaacccgaacgccaaccccaacgccaaccccaacgcgaaccccaacgccaacccgaacgccaaccccaacgccaaccccaacgccaaccccaacgcgaacccgaacgccaaccccaacgccaaccccaacgccaaccccaacgccaacccgaacgcgaaccccaacgccaaccccaacgccaacccgaacgccaaccccaacgccaaccccaacgcgaaccccaacgccaacccgaacgccaaccccaacgccaaccccaacgcgaaccccaacgccaacccgaacgccaaccccaacgccaaccccaacgccaaccccaacaagaacaaccagggcaacgggcagggccacaacaugccgaacgaccccaaccgcaacguggacgagaacgcgaacgccaacaacgccgucaagaacaacaacaacgaggagcccuccgacaagcacaucgagcaguaccugaagaagauccagaacagccucuccacggaguggagccccugcuccgugaccugcggcaacgggauccaggugcggaucaagccgggcagcgccaacaagcccaaggacgagcuggacuacgagaacgacaucgagaagaagaucugcaagauggagaagugcuccagcgucuucaacguggugaacuccagcaucgggcugaucaugguccucuccuuccuguuccugaacuga

SEQ ID NO: 3432 - RNA, 1215 nt, Artificial Sequence
  derived and/or modified CDS sequence (opt1) from Pf(Gha1109-183)__BAM84829.1__CSP
augaugcgcaagcuggccauccucagcguguccagcuuccuguucgucgaggcccuguuccaggaguaccagugcuacggcuccagcuccaacacccgggugcucaacgagcugaacuacgacaacgcggggaccaaccuguacaacgagcucgagaugaacuacuacggcaagcaggagaacugguacagccugaagaagaacucccgcagccugggggagaacgacgacggcaacaacaacaacggggacaacggccgggagggcaaggacgaggacaagcgcgacgggaacaacgaggacaacgagaagcuccggaagcccaagcacaagaagcugaagcagccggccgacggcaaccccgaccccaacgccaaccccaacguggacccgaacgccaaccccaacgucgaccccaacgccaaccccaacguggacccgaacgcgaaccccaacgccaaccccaacgccaaccccaacgccaacccgaacgcgaaccccaacgccaaccccaacgccaaccccaacgccaacccgaacgccaaccccaacgcgaaccccaacgccaaccccaacgccaacccgaacgccaaccccaacguggaccccaacgccaaccccaacgcgaacccgaacgccaaccccaacgccaaccccaacgccaaccccaacgccaacccgaacgcgaaccccaacgccaaccccaacgccaacccgaacgccaaccccaacgccaaccccaacgcgaaccccaacgccaacccgaacgccaaccccaacgccaaccccaacgcgaaccccaacgccaacccgaacgccaaccccaacgccaaccccaacaagaacaaccaggggaacggccaggggcacaacaugcccaacgacccgaaccgcaacgucgacgagaacgccaacgcgaacaacgccgugaagaacaacaacaacgaggagcccuccgaccagcacaucgagaaguaccugaagacgaucaagaacagccucuccaccgaguggagccccugcuccgugaccugcggcaacggcauccagguccggaucaagcccgggagcgccaacaagccgaaggaccagcuggacuacgccaacgacaucgagaagaagaucugcaagauggagaagugcuccagcguguucaacguggucaacuccagcaucggccugaucauggugcucuccuuccuguuccugaacuga

SEQ ID NO: 3433 - RNA, 1215 nt, Artificial Sequence
  derived and/or modified CDS sequence (opt1) from Pf(Pal97-107)__BAM84956.1__CSP
augaugcgcaagcuggccauccucagcguguccagcuuccuguucgucgaggcccuguuccaggaguaccagugcuacggcuccagcuccaacacccgggugcucaacgagcugaacuacgacaacgcggggaccaaccuguacaacgagcucgagaugaacuacuacggcaagcaggagaacugguacagccugaagaagaacucccgcagccugggggagaacgacgacggcaacaacaacaacggggacaacggccgggagggcaaggacgaggacaagcgcgacgggaacaacgaggacaacgagaagcuccggaagcccaagcacaagaagcugaagcagccgggcgacgggaaccccgaccccaacgccaaccccaacguggacccgaacgccaaccccaacgucgaccccaacgccaaccccaacguggacccgaacgccaaccccaacgcgaaccccaacgccaaccccaacgccaacccgaacgccaaccccaacgcgaaccccaacgccaaccccaacgccaacccgaacgccaaccccaacgccaaccccaacgcgaaccccaacgccaacccgaacgccaaccccaacguggaccccaacgccaaccccaacgccaacccgaacgcgaaccccaacgccaaccccaacgccaaccccaacgccaacccgaacgccaaccccaacgcgaaccccaacgccaacccgaacgccaaccccaacgccaaccccaacgccaaccccaacgcgaacccgaacgccaaccccaacgccaaccccaacgccaaccccaacgcgaacccgaacgccaaccccaacgccaaccccaacaagaacaaccagggcaacgggcagggccacaacaugcccaacgacccgaaccgcaacgucgacgagaacgccaacgccaacaacgcggugaagaacaacaacaacgaggagcccuccgacaagcacaucaaggaguaccugacgaagaucaagaacagcaucuccaccgaguggagccccugcuccgugaccugcggcaacgggauccagguccggaucaagcccggcagcgccaacaagccgaaggacgagcucgacuacgagaacgacaucgagaagaagaucugcaagauggagaagugcuccagcguguucaacguggucaacuccagcaucgggcugaucauggugcuguccuuccucuuccugaacuga

SEQ ID NO: 3434 - RNA, 1215 nt, Artificial Sequence
  derived and/or modified CDS sequence (opt1) from Pf(Tz98-103)__BAM84795.1__CSP
augaugcgcaagcuggccauccucagcguguccagcuuccuguucgucgaggcccuguuccaggaguaccagugcuacggcuccagcuccaacacccgggugcucaacgagcugaacuacgacaacgcggggaccaaccuguacaacgagcucgagaugaacuacuacggcaagcaggagaacugguacagccugaagaagaacucccgcagccugggggagaacgacgacggcaacaacaacaacggggacaacggccgggagggcaaggacgaggacaagcgcgacgggaacaacgaggacaacgagaagcuccggaagcccaagcacaagaagcugaagcagccggccgacggcaaccccgaccccaacgccaaccccaacguggacccgaacgccaaccccaacgucgaccccaacgccaaccccaacguggacccgaacgcgaaccccaacgccaaccccaacgccaaccccaacgccaacccgaacgcgaaccccaacgccaaccccaacgccaaccccaacgccaacccgaacgccaaccccaacgcgaaccccaacgccaaccccaacgccaacccgaacgccaaccccaacgccaaccccaacguggaccccaacgcgaacccgaacgccaaccccaacgccaaccccaacgccaaccccaacgccaacccgaacgcgaaccccaacgccaaccccaacgccaacccgaacgccaaccccaacgccaaccccaacgcgaaccccaacgccaacccgaacgccaaccccaacgccaaccccaacgcgaaccccaacgccaacccgaacgccaaccccaacgccaaccccaacaagaacaaccaggggaacggccaggggcacaacaugcccaacgacccgaaccgcaacgucgacgagaacgccaacgcgaacaacgccgugaagaacaacaacaacgaggagcccuccgacaagcacaucacggaguaccugaagcggauccagaacagccucuccaccgaguggagccccugcuccgugaccugcggcaacggcauccagguccgcaucaagcccgggagcgccggcaaguccaagaacgagcuggacuacgagaacgacaucgagaagaagaucugcaagauggagaagugcagcuccguguucaacguggucaacagcuccaucgggcugaucauggugcucagcuuccuguuccugaacuga

SEQ ID NO: 3435 - RNA, 1215 nt, Artificial Sequence
  derived and/or modified CDS sequence (opt1) from Pf(Yaounde)__AAN87588.1__CSP
augaugcgcaagcuggccauccucagcguguccagcuuccuguucgucgaggcccuguuccaggaguaccagugcuacggcuccagcuccaacacccgggugcucaacgagcugaacuacgacaacgcggggaccaaccuguacaacgagcucgagaugaacuacuacggcaagcaggagaacugguacagccugaagaagaacucccgcagccugggggagaacgacgacggcaacaacaacaacggggacaacggccgggagggcaaggacgaggacaagcgcgacgggaacaacgaggacaacgagaagcuccggaagcccaagcacaagaagcugaagcagccggccgacggcaaccccgaccccaacgccaaccccaacguggacccgaacgccaaccccaacgucgaccccaacgccaaccccaacguggacccgaacgcgaaccccaacgccaaccccaacgccaaccccaacgccaacccgaacgcgaaccccaacgccaaccccaacgccaaccccaacgccaacccgaacgccaaccccaacguggaccccaacgcgaaccccaacgccaacccgaacgccaaccccaacgccaaccccaacgccaaccccaacgcgaacccgaacgccaaccccaacgccaaccccaacgccaaccccaacgccaacccgaacgcgaaccccaacgccaaccccaacgccaacccgaacgccaaccccaacgccaaccccaacgcgaaccccaacgccaacccgaacgccaaccccaacgccaaccccaacgcgaaccccaacgccaacccgaacgccaaccccaacgccaaccccaacaagaacaaccaggggaacggccaggggcacaacaugcccaacgacccgaaccgcaacgucgacgagaacgccaacgcgaacaacgccgugaagaacaacaacaacgaggagcccuccgaccagcacaucgagaaguaccugaacaagaucaagaacagccucuccacggaguggagccccugcuccgugaccugcggcaacggcauccagguccggaucaagcccgggagcgccaacaagccgaaggaccagcuggacuacgccaacgacaucgagaagaagaucugcaagauggagaagugcuccagcguguucaacguggucaacuccagcaucggccugaucauggugcucuccuuccuguuccugaacuga

SEQ ID NO: 3436 - RNA, 1209 nt, Artificial Sequence
  derived and/or modified CDS sequence (opt1) from Pf(CMC247)__ADF48384.1__CSP
augcgcaagcuggccauccucagcguguccagcuuccuguucgucgaggcccuguuccaggaguaccagugcuacggcuccagcuccaacacccgggugcucaacgagcugaacuacgacaacgcggggaccaaccuguacaacgagcucgagaugaacuacuacggcaagcaggagaacugguacagccugaagaagaacucccgcagccugggggagaacgacgacggcaacaacaacaacggggacaacggccgggagggcaaggacgaggacaagcgcgacgggaacaacgaggacaacgagaagcuccggaagcccaagcacaagaagcugaagcagccgggcgacgggaaccccgaccccaacgccaaccccaacguggacccgaacgccaaccccaacgucgaccccaacgccaaccccaacguggacccgaacgccaaccccaacgcgaaccccaacgccaaccccaacgccaacccgaacgccaaccccaacgcgaaccccaacgccaaccccaacgccaacccgaacgccaaccccaacgccaaccccaacgcgaaccccaacgccaacccgaacgccaaccccaacgccaaccccaacgccaaccccaacgcgaacccgaacgccaaccccaacgccaaccccaacgccaaccccaacgccaacccgaacgcgaaccccaacgccaaccccaacgccaacccgaacgccaaccccaacgccaaccccaacgcgaaccccaacgccaacccgaacgccaaccccaacgccaaccccaacgcgaaccccaacgccaacccgaacgccaaccccaacgccaaccccaacaagaacaaccagggcaacgggcagggccacaacaugcccaacgacccgaaccgcaacguggacgagaacgccaacgcgaacaacgacgagaacaacaacaacgaggagcccuccgacaagcacaucgagcaguaccugaagaagauccaguacagccucuccacggaguggagccccugcuccgugaccugcggcaacgggauccagguccggaucaagcccggcagcgccgacaagccgaaggaccagcuggacuacgagaacgacaucgagaagaagaucugcaagauggagaagugcuccagcguguucaacgucgugaacuccagcaucgggcugaucauggugcucuccuuccuguuccugaacuga

SEQ ID NO: 3437 - RNA, 1206 nt, Artificial Sequence
  derived and/or modified CDS sequence (opt1) from Pf(Gha1109-215)__BAM84833.1__CSP
augaugcgcaagcuggccauccucagcguguccagcuuccuguucgucgaggcccuguuccaggaguaccagugcuacggcuccagcuccaacacccgggugcucaacgagcugaacuacgacaacgcggggaccaaccuguacaacgagcucgagaugaacuacuacggcaagcaggagaacugguacagccugaagaagaacucccgcagccugggggagaacgacgacggcaacaacgaggacaacgagaagcuccggaagcccaagcacaagaagcugaagcagccggccgacgggaaccccgaccccaacgccaaccccaacguggacccgaacgccaaccccaacgucgaccccaacgccaaccccaacguggacccgaacgcgaaccccaacgccaaccccaacgccaaccccaacgccaacccgaacgcgaaccccaacgccaaccccaacgccaaccccaacgccaacccgaacgccaaccccaacgcgaaccccaacgccaaccccaacgccaacccgaacgccaaccccaacgccaaccccaacgcgaaccccaacgccaacccgaacgccaaccccaacguggaccccaacgccaaccccaacgccaacccgaacgcgaaccccaacgccaaccccaacgccaacccgaacgccaaccccaacgccaaccccaacgcgaaccccaacgccaacccgaacgccaaccccaacgccaaccccaacgcgaaccccaacgccaacccgaacgccaaccccaacgccaaccccaacgccaaccccaacgcgaacccgaacgccaaccccaacgccaaccccaacaagaacaaccagggcaacggccaggggcacaacaugcccaacgacccgaaccgcaacgucgacgagaacgccaaggccaacaacgcggugaagaacaacaacaacgaggagcccuccgacaagcacaucgagcaguaccugaagacgauccagaacagccucuccaccgaguggagccccugcuccgugaccugcggcaacgggauccagguccggaucaagcccggcagcgccaacaagccgaaggaccagcuggacuacgagaacgacaucgagaagaagaucugcaagauggagaagugcuccagcguguucaacguggucaacuccagcaucgggcugaucauggugcucuccuuccuguuccugaacuga

SEQ ID NO: 3438 - RNA, 1203 nt, Artificial Sequence
  derived and/or modified CDS sequence (opt1) from Pf(Gha1109-199)__BAM84831.1__CSP
augaugcgcaagcuggccauccucagcguguccagcuuccuguucgucgaggcccuguuccaggaguaccagugcuacggcuccagcuccaacacccgggugcucaacgagcugaacuacgacaacgcggggaccaaccuguacaacgagcucgagaugaacuacuacggcaagcaggagaacugguacagccugaagaagaacucccgcagccugggggagaacgacgacggcaacaacaacaacggggacaacggccgggagggcaaggacgaggacaagcgcgacgggaacaacgaggacaacgagaagcuccggaagcccaagcacaagaagcugaagcagccggccgacggcaaccccgaccccaacgccaaccccaacguggacccgaacgccaaccccaacgucgaccccaacgccaaccccaacguggacccgaacgcgaaccccaacgccaaccccaacgccaaccccaacgccaacccgaacgcgaaccccaacgccaaccccaacgccaaccccaacgccaacccgaacgccaaccccaacgcgaaccccaacgccaaccccaacgccaacccgaacguggaccccaacgccaaccccaacgccaaccccaacgcgaacccgaacgccaaccccaacgccaaccccaacgccaaccccaacgccaacccgaacgcgaaccccaacgccaaccccaacgccaacccgaacgccaaccccaacgccaaccccaacgcgaaccccaacgccaacccgaacgccaaccccaacgccaaccccaacgcgaaccccaacgccaacccgaacgccaaccccaacaagaacaaccaggggaacggccaggggcacaacaugcccaacgaccccaaccgcaacgucgacgagaacgccaacgccaacuccgcggugaagaacaacaacaacgaggagccgagcgacaagcacaucaaggaguaccugaacaagauccagaacucccucagcacggaguggucccccugcagcgugaccugcggcaacggcauccagguccggaucaagcccggguccgccaacaagcccaaggacgagcuggacuacgccaacgacaucgagaagaagaucugcaagauggagaagugcagcuccguguucaacguggucaacagcuccaucggccugaucauggugcucagcuuccuguuccugaacuga

SEQ ID NO: 3439 - RNA, 1194 nt, Artificial Sequence
  derived and/or modified CDS sequence (opt1) from Pf(Asembo Bay)__AAN87582.1__CSP
augaugcgcaagcuggccauccucagcguguccagcuuccuguucgucgaggcccuguuccaggaguaccagugcuacggcuccagcuccaacacccgggugcucaacgagcugaacuacgacaacgcggggaccaaccuguacaacgagcucgagaugaacuacuacggcaagcaggagaacugguacagccugaagaagaacucccgcagccugggggagaacgacgacggcaacaacgaggacaacgagaagcuccggaagcccaagcacaagaagcugaagcagccggccgacgggaaccccgaccccaacgccaaccccaacguggacccgaacgccaaccccaacgucgaccccaacgccaaccccaacguggacccgaacgcgaaccccaacgccaaccccaacgccaaccccaacgccaacccgaacgcgaaccccaacgccaaccccaacgccaaccccaacgccaacccgaacgccaaccccaacgcgaaccccaacgccaaccccaacgccaacccgaacgccaaccccaacgccaaccccaacgcgaaccccaacgccaacccgaacgccaaccccaacguggaccccaacgccaaccccaacgccaacccgaacgcgaaccccaacgccaaccccaacgccaacccgaacgccaaccccaacgccaaccccaacgcgaaccccaacgccaacccgaacgccaaccccaacgccaaccccaacgcgaaccccaacgccaacccgaacgccaaccccaacgccaaccccaacgccaaccccaacgcgaacccgaacgccaaccccaacaagaacaaccagggcaacggccaggggcacaacaugcccaacgaccccaaccgcaacgucgacgagaacgccaacgccaacaacgccgugaagaacaacaacaacgaggagccguccgaccagcacaucgagaaguaccugaagacgauccagaacagccucuccaccgaguggagccccugcuccgugaccugcggcaacgggauccagguccggaucaagcccggcagcgcgaacaagcccaaggaccagcuggacuacgccaacgacaucgagaagaagaucugcaagauggagaagugcuccagcguguucaacguggucaacuccagcaucgggcugaucauggugcucuccuuccuguuccugaacuga

SEQ ID NO: 3440 - RNA, 1194 nt, Artificial Sequence
  derived and/or modified CDS sequence (opt1) from Pf(Tz98-017)__BAM84782.1__CSP
augaugcgcaagcuggccauccucagcguguccagcuuccuguucgucgaggcccuguuccaggaguaccagugcuacggcuccagcuccaacacccgggugcucaacgagcugaacuacgacaacgcggggaccaaccuguacaacgagcucgagaugaacuacuacggcaagcaggagaacugguacagccugaagaagaacucccgcagccugggggagaacgacgacggcaacaacgaggacaacgagaagcuccggaagcccaagcacaagaagcugaagcagccggccgacgggaaccccgaccccaacgccaaccccaacguggacccgaacgccaaccccaacgucgaccccaacgccaaccccaacguggacccgaacgcgaaccccaacgccaaccccaacgccaaccccaacgccaacccgaacgcgaaccccaacgccaaccccaacgccaaccccaacgccaacccgaacgccaaccccaacgcgaaccccaacgccaaccccaacgccaacccgaacgccaaccccaacgccaaccccaacgcgaaccccaacgccaacccgaacgccaaccccaacguggaccccaacgccaaccccaacgccaacccgaacgcgaaccccaacgccaaccccaacgccaacccgaacgccaaccccaacgccaaccccaacgcgaaccccaacgccaacccgaacgccaaccccaacgccaaccccaacgcgaaccccaacgccaacccgaacgccaaccccaacgccaaccccaacgccaaccccaacgcgaacccgaacgccaaccccaacaagaacaaccagggcaacggccaggggcacaacaugcccaacgaccccaaccgcaacgucgacgagaacgccaacgccaacaacgccgugaagaacaacaacaacgaggagccguccgacaagcacaucgagcaguaccugaacaagaucaagaacagcaucuccacggaguggagccccugcuccgugaccugcggcaacgggauccagguccggaucaagcccggcagcgcgaacaagcccaaggacgagcucaacuacgagaacgacaucgagaagaagaucugcaagauggagaagugcuccagcguguucaacguggucaacuccagcaucgggcugaucauggugcuguccuuccucuuccugaacuga

SEQ ID NO: 3441 - RNA, 1194 nt, Artificial Sequence
  derived and/or modified CDS sequence (opt1) from Pf(Yaounde)__AAN87583.1__CSP
augaugcgcaagcuggccauccucagcguguccagcuuccuguucgucgaggcccuguuccaggaguaccagugcuacggcuccagcuccaacacccgggugcucaacgagcugaacuacgacaacgcggggaccaaccuguacaacgagcucgagaugaacuacuacggcaagcaggagaacugguacagccugaagaagaacucccgcagccugggggagaacgacgacggcaacaacgaggacaacgagaagcuccggaagcccaagcacaagaagcugaagcagccggccgacgggaaccccgaccccaacgccaaccccaacguggacccgaacgccaaccccaacgucgaccccaacgccaaccccaacguggacccgaacgcgaaccccaacgccaaccccaacgccaaccccaacgccaacccgaacgcgaaccccaacgccaaccccaacgccaaccccaacgccaacccgaacgccaaccccaacgcgaaccccaacgccaaccccaacgccaacccgaacgccaaccccaacgccaaccccaacgcgaaccccaacgccaacccgaacgccaaccccaacguggaccccaacgccaaccccaacgccaacccgaacgcgaaccccaacgccaaccccaacgccaacccgaacgccaaccccaacgccaaccccaacgcgaaccccaacgccaacccgaacgccaaccccaacgccaaccccaacgcgaaccccaacgccaacccgaacgccaaccccaacgccaaccccaacgccaaccccaacgcgaacccgaacgccaaccccaacaagaacaaccagggcaacggccaggggcacaacaugcccaacgaccccaaccgcaacgucgacgagaacgccaacgccaacaacgccgugaagaacaacaacaacgaggagccguccgaccagcacaucgagaaguaccugaagcggauccagaacagccucuccacggaguggagccccugcuccgugaccugcggcaacgggauccagguccgcaucaagcccggcagcgcgaacaagcccaaggaccagcuggacuacgccaacgacaucgagaagaagaucugcaagauggagaagugcuccagcguguucaacguggucaacuccagcaucgggcugaucauggugcucuccuuccuguuccugaacuga

SEQ ID NO: 3442 - RNA, 1191 nt, Artificial Sequence
  derived and/or modified CDS sequence (opt1) from Pf(Amazonas)__AAN87593.1__CSP
augaugcgcaagcuggccauccucagcguguccagcuuccuguucgucgaggcccuguuccaggaguaccagugcuacggcuccagcuccaacacccgggugcucaacgagcugaacuacgacaacgcggggaccaaccuguacaacgagcucgagaugaacuacuacggcaagcaggagaacugguacagccugaagaagaacucccgcagccugggggagaacgacgacggcaacaacaacaacggggacaacggccgggagggcaaggacgaggacaagcgcgacgggaacaacgaggacaacgagaagcuccggaagcccaagcacaagaagcugaagcagccggccgacggcaaccccgaccccaacgccaaccccaacguggacccgaacgccaaccccaacgucgaccccaacgccaaccccaacguggacccgaacgcgaaccccaacgccaaccccaacgccaaccccaacgccaacccgaacgcgaaccccaacgccaaccccaacgccaaccccaacgccaacccgaacgccaaccccaacgcgaaccccaacgccaaccccaacgccaacccgaacguggaccccaacgccaaccccaacgccaaccccaacgcgaacccgaacgccaaccccaacgccaaccccaacgccaaccccaacgccaacccgaacgcgaaccccaacgccaaccccaacgccaacccgaacgccaaccccaacgccaaccccaacgcgaaccccaacgccaacccgaacgccaaccccaacgccaaccccaacgcgaaccccaacgccaacccgaacaagaacaaccaggggaacggccaggggcacaacaugcccaacgaccccaaccgcaacgucgacgagaacgccaacgccaacaacgccgugaagaacaacaacaacgaggagcccuccgacaagcacaucacggaguaccugaagcggauccagaacagccucuccaccgaguggagcccgugcuccgugaccugcggcaacggcauccagguccgcaucaagcccgggagcgcgggcaaguccaagaacgagcuggacuacgagaacgacaucgagaagaagaucugcaagauggagaagugcagcuccguguucaacguggucaacagcuccaucgggcugaucauggugcucagcuuccuguuccugaacuga

SEQ ID NO: 3443 - RNA, 1191 nt, Artificial Sequence
  derived and/or modified CDS sequence (opt1) from Pf(Amazonas)__AAN87594.1__CSP
augaugcgcaagcuggccauccucagcguguccagcuuccuguucgucgaggcccuguuccaggaguaccagugcuacggcuccagcuccaacacccgggugcucaacgagcugaacuacgacaacgcggggaccaaccuguacaacgagcucgagaugaacuacuacggcaagcaggagaacugguacagccugaagaagaacucccgcagccugggggagaacgacgacggcaacaacaacaacggggacaacggccgggagggcaaggacgaggacaagcgcgacgggaacaacgaggacaacgagaaccuccggaagcccaagcacaagaagcugaagcagccggccgacggcaaccccgaccccaacgccaaccccaacguggacccgaacgccaaccccaacgucgaccccaacgccaaccccaacguggacccgaacgcgaaccccaacgccaaccccaacgccaaccccaacgccaacccgaacgcgaaccccaacgccaaccccaacgccaaccccaacgccaacccgaacgccaaccccaacgcgaaccccaacgccaaccccaacgccaacccgaacguggaccccaacgccaaccccaacgccaaccccaacgcgaacccgaacgccaaccccaacgccaaccccaacgccaaccccaacgccaacccgaacgcgaaccccaacgccaaccccaacgccaacccgaacgccaaccccaacgccaaccccaacgcgaaccccaacgccaacccgaacgccaaccccaacgccaaccccaacgcgaaccccaacgccaacccgaacaagaacaaccaggggaacggccaggggcacaacaugcccaacgaccccaaccgcaacgucgacgagaacgccaacgccaacaacgccgugaagaacaacaacaacgaggagcccuccgacaagcacaucacggaguaccugaagcggauccagaacagccucuccaccgaguggagcccgugcuccgugaccugcggcaacggcauccagguccgcaucaagcccgggagcgcgggcaaguccaagaacgagcuggacuacgagaacgacaucgagaagaagaucugcaagauggagaagugcagcuccguguucaacguggucaacagcuccaucgggcugaucauggugcucagcuuccuguuccugaacuga

SEQ ID NO: 3444 - RNA, 1191 nt, Artificial Sequence
  derived and/or modified CDS sequence (opt1) from Pf(Bolivar)__AAN87592.1__CSP
augaugcgcaagcuggccauccucagcguguccagcuuccuguucgucgaggcccuguuccaggaguaccagugcuacggcuccagcuccaacacccgggugcucaacgagcugaacuacgacaacgcggggaccaaccuguacaacgagcucgagaugaacuacuacggcaagcaggagaacugguacagccugaagaagaacucccgcagccugggggagaacgacgacggcaacaacaacaacggggacaacggccgggagggcaaggacgaggacaagcgcgacgggaacaacgaggacaacgagaagcuccggaagcccaagcacaagaagcugaagcagccggccgacggcaaccccgaccccaacgccaaccccaacguggacccgaacgccaaccccaacgucgaccccaacgccaaccccaacguggacccgaacgcgaaccccaacgccaaccccaacgccaaccccaacgccaacccgaacgcgaaccccaacgccaaccccaacgccaaccccaacgccaacccgaacgccaaccccaacgcgaaccccaacgccaaccccaacgccaacccgaacguggaccccaacgccaaccccaacgccaaccccaacgcgaacccgaacgccaaccccaacgccaaccccaacgccaaccccaacgccaacccgaacgcgaaccccaacgccaaccccaacgccaacccgaacgccaaccccaacgccaaccccaacgcgaaccccaacgccaacccgaacgccaaccccaacgccaaccccaacgcgaaccccaacgccaacccgaacaagaacaaccaggggaacggccaggggcacaacaugcccaacgaccccaaccgcaacgucgacgagaacgccaacgccaacaacgccgugaagaacaacaacaacgaggagcccuccgacaagcacaucacggaguaccugaagcggauccagaacagccucuccaccgaguggagcccgugcuccgugaccugcggcaacggcauccagguccgcaucaagcccgggagcgcgggcaaguccaagaaccagcuggacuacgagaacgacaucgagaagaagaucugcaagauggagaagugcagcuccguguucaacguggucaacagcuccaucgggcugaucauggugcucagcuuccuguuccugaacuga

SEQ ID NO: 3445 - RNA, 1182 nt, Artificial Sequence
  derived and/or modified CDS sequence (opt1) from Pf(30)__AGR53781.1__CSP
augaugcgcaagcuggccauccucagcguguccagcuuccuguucgucgaggcccuguuccaggaguaccagugcuacggcuccagcuccaacacccgggugcucaacgagcugaacuacgacaacgcggggaccaaccuguacaacgagcucgagaugaacuacuacggcaagcaggagaacugguacagccugaagaagaacucccgcagccugggggagaacgacgacggcaacaacgaggacaacgagaagcuccggaagcccaagcacaagaagcugaagcagccgggggacggcaaccccgaccccaacgccaaccccaacguggacccgaacgccaaccccaacgucgaccccaacgccaaccccaacguggacccgaacgccaaccccaacgcgaaccccaacgccaaccccaacgccaacccgaacgccaaccccaacgcgaaccccaacgccaaccccaacgccaacccgaacgccaaccccaacgccaaccccaacgcgaaccccaacgccaacccgaacgccaaccccaacgccaaccccaacgccaaccccaacguggacccgaacgcgaaccccaacgccaaccccaacgccaaccccaacgccaacccgaacgccaaccccaacgcgaaccccaacgccaacccgaacgccaaccccaacgccaaccccaacgccaaccccaacgcgaacccgaacgccaaccccaacgccaaccccaacgccaaccccaacgcgaacccgaacgccaaccccaacgccaaccccaacgccaaccccaacgccaacccgaacaagaacaaccagggcaacgggcagggccacaacaugcccaacgaccccaaccgcaacgucgacgagaacgcgaacgccaacaacgccgugaagaacaacaacaacgaggagcccuccgacaagcacaucacggaguaccugaagaagauccagaacagccucuccaccgaguggagcccgugcuccgugaccugcgggaacggcauccagguccggaucaagcccgggagcgccggcaaguccaagaacgagcuggacuacgagaacgacaucgagaagaagaucugcaagauggagaagugcagcuccguguucaacguggucaacagcuccaucggccugaucauggugcucagcuuccuguuccugaacuga

SEQ ID NO: 3446 - RNA, 1182 nt, Artificial Sequence
  derived and/or modified CDS sequence (opt1) from Pf(Gha1108-087)__BAM84819.1__CSP
augaugcgcaagcuggccauccucagcguguccagcuuccuguucgucgaggcccuguuccaggaguaccagugcuacggcuccagcuccaacacccgggugcucaacgagcugaacuacgacaacgcggggaccaaccuguacaacgagcucgagaugaacuacuacggcaagcaggagaacugguacagccugaagaagaacucccgcagccugggggagaacgacgacggcaacaacgaggacaacgagaagcuccggaagcccaagcacaagaagcugaagcagccggccgacgggaaccccgaccccaacgccaaccccaacguggacccgaacgccaaccccaacgucgaccccaacgccaaccccaacguggacccgaacgcgaaccccaacgccaaccccaacgccaaccccaacgccaacccgaacgcgaaccccaacgccaaccccaacgccaaccccaacgccaacccgaacgccaaccccaacgcgaaccccaacgccaaccccaacgccaacccgaacgccaaccccaacgccaaccccaacgcgaaccccaacgccaacccgaacguggaccccaacgccaaccccaacgccaaccccaacgccaacccgaacgcgaaccccaacgccaaccccaacgccaacccgaacgccaaccccaacgccaaccccaacgcgaaccccaacgccaacccgaacgccaaccccaacgccaaccccaacgcgaaccccaacgccaacccgaacgccaaccccaacgccaaccccaacgccaaccccaacgcgaacccgaacaagaacaaccagggcaacggccaggggcacaacaugcccaacgaccccaaccgcaacgucgacgagaacgccaacgccaacaacgccgugaagaacaacaacaacgaggagcccuccgaccagcacaucgagaaguaccugaagcggauccagaacagccucuccacggaguggagcccgugcuccgugaccugcggcaacgggauccagguccgcaucaagcccggcagcgccaacaagcccaaggaccagcuggacuacgcgaacgacaucgagaagaagaucugcaagauggagaagugcuccagcguguucaacguggucaacuccagcaucgggcugaucauggugcucuccuuccuguuccugaacuga

SEQ ID NO: 3447 - RNA, 1182 nt, Artificial Sequence
  derived and/or modified CDS sequence (opt1) from Pf(Gha1108-098)__BAM84821.1__CSP
augaugcgcaagcuggccauccucagcguguccagcuuccuguucgucgaggcccuguuccaggaguaccagugcuacggcuccagcuccaacacccgggugcucaacgagcugaacuacgacaacgcggggaccaaccuguacaacgagcucgagaugaacuacuacggcaagcaggagaacugguacagccugaagaagaacucccgcagccugggggagaacgacgacggcaacaacgaggacaacgagaagcuccggaagcccaagcacaagaagcugaagcagccgggggacggcaaccccgaccccaacgccaaccccaacguggacccgaacgccaaccccaacgucgaccccaacgccaaccccaacguggacccgaacgccaaccccaacgcgaaccccaacgccaaccccaacgccaacccgaacgccaaccccaacgcgaaccccaacgccaaccccaacgccaacccgaacgccaaccccaacgccaaccccaacgcgaaccccaacgccaacccgaacgccaaccccaacgccaaccccaacgccaaccccaacguggacccgaacgcgaaccccaacgccaaccccaacgccaaccccaacgccaacccgaacgccaaccccaacgcgaaccccaacgccaacccgaacgccaaccccaacgccaaccccaacgccaaccccaacgcgaacccgaacgccaaccccaacgccaaccccaacgccaaccccaacgcgaacccgaacgccaaccccaacgccaaccccaacgccaaccccaacgccaacccgaacaagaacaaccagggcaacgggcagggccacaacaugcccaacgagcccaaccgcaacgucgacgagaacgcgaacgccaacaacgccgugaagaacaacaacaacgaggagcccuccgacaagcacaucgagcaguaccugaacaagauccagaacagccucuccacggaguggagcccgugcuccgugaccugcgggaacggcauccagguccggaucaagcccgggagcgccaacaagcccaaggaccagcuggacuacgccaacgacaucgagaagaagaucugcaagauggagaagugcuccagcguguucaacguggucaacuccagcaucggccugaucauggugcucuccuuccuguuccugaacuga

SEQ ID NO: 3448 - RNA, 1182 nt, Artificial Sequence
  derived and/or modified CDS sequence (opt1) from Pf(Gha1108-101)__BAM84808.1__CSP
augaugcgcaagcuggccauccucagcguguccagcuuccuguucgucgaggcccuguuccaggaguaccagugcuacggcuccagcuccaacacccgggugcucaacgagcugaacuacgacaacgcggggaccaaccuguacaacgagcucgagaugaacuacuacggcaagcaggagaacugguacagccugaagaagaacucccgcagccugggggagaacgacgacggcaacaacgaggacaacgagaagcuccggaagcccaagcacaagaagcugaagcagccggccgacgggaaccccgaccccaacgccaaccccaacguggacccgaacgccaaccccaacgucgaccccaacgccaaccccaacguggacccgaacgcgaaccccaacgccaaccccaacgccaaccccaacgccaacccgaacgcgaaccccaacgccaaccccaacgccaaccccaacgccaacccgaacgccaaccccaacgcgaaccccaacgccaaccccaacgccaacccgaacgccaaccccaacgccaaccccaacgcgaaccccaacguggacccgaacgccaaccccaacgccaaccccaacgccaaccccaacgccaacccgaacgcgaaccccaacgccaaccccaacgccaacccgaacgccaaccccaacgccaaccccaacgcgaaccccaacgccaacccgaacgccaaccccaacgccaaccccaacgcgaaccccaacgccaacccgaacgccaaccccaacgccaaccccaacgccaaccccaacgcgaacccgaacaagaacaaccagggcaacggccaggggcacaacaugcccaacgaccccaaccgcaacgucgacgagaacgccaacgccaacaacgccgugaagaacaacaacaacgaggagcccuccgaccagcacaucgagaaguaccugaacaagaucaagaacagccucuccacggaguggagcccgugcuccgugaccugcggcaacgggauccagguccggaucaagcccggcagcgccaacaagcccaaggaccagcuggacuacgcgaacgacaucgagaagaagaucugcaagauggagaagugcuccagcguguucaacguggucaacuccagcaucgggcugaucauggugcucuccuuccuguuccugaacuga

SEQ ID NO: 3449 - RNA, 1182 nt, Artificial Sequence
  derived and/or modified CDS sequence (opt1) from Pf(Gha1108-148)__BAM84814.1__CSP
augaugcgcaagcuggccauccucagcguguccagcuuccuguucgucgaggcccuguuccaggaguaccagugcuacggcuccagcuccaacacccgggugcucaacgagcugaacuacgacaacgcggggaccaaccuguacaacgagcucgagaugaacuacuacggcaagcaggagaacugguacagccugaagaagaacucccgcagccugggggagaacgacgacggcaacaacgaggacaacgagaagcuccggaagcccaagcacaagaagcugaagcagccgggggacggcaaccccgaccccaacgccaaccccaacguggacccgaacgccaaccccaacgucgaccccaacgccaaccccaacguggacccgaacgccaaccccaacgcgaaccccaacgccaaccccaacgccaacccgaacgccaaccccaacgcgaaccccaacgccaaccccaacgccaacccgaacgccaaccccaacgccaaccccaacgcgaaccccaacgccaacccgaacgccaaccccaacgccaaccccaacgccaaccccaacguggacccgaacgcgaaccccaacgccaaccccaacgccaaccccaacgccaacccgaacgccaaccccaacgcgaaccccaacgccaacccgaacgccaaccccaacgccaaccccaacgccaaccccaacgcgaacccgaacgccaaccccaacgccaaccccaacgccaaccccaacgcgaacccgaacgccaaccccaacgccaaccccaacgccaaccccaacgccaacccgaacaagaacaaccagggcaacgggcagggccacaacaugcccaacgaccccaaccgcaacgucgacgagaacgcgaacgccaacuccgccgugaagaacaacaacaacgaggagcccagcgacaagcacaucaaggaguaccugaacaagauccagaacucccucagcacggagugguccccgugcagcgugaccugcgggaacggcauccagguccggaucaagcccggguccgccaacaagcccaaggacgagcuggacuacgccaacgacaucgagaagaagaucugcaagauggagaagugcagcuccguguucaacguggucaacagcuccaucggccugaucauggugcucagcuuccuguuccugaacuga

SEQ ID NO: 3450 - RNA, 1182 nt, Artificial Sequence
  derived and/or modified CDS sequence (opt1) from Pf(Gha1109-097)__BAM84838.1__CSP
augaugcgcaagcuggccauccucagcguguccagcuuccuguucgucgaggcccuguuccaggaguaccagugcuacggcuccagcuccaacacccgggugcucaacgagcugaacuacgacaacgcggggaccaaccuguacaacgagcucgagaugaacuacuacggcaagcaggagaacugguacagccugaagaagaacucccgcagccugggggagaacgacgacggcaacaacgaggacaacgagaagcuccggaagcccaagcacaagaagcugaagcagccggccgacgggaaccccgaccccaacgccaaccccaacguggacccgaacgccaaccccaacgucgaccccaacgccaaccccaacguggacccgaacgcgaaccccaacgccaaccccaacgccaaccccaacgccaacccgaacgcgaaccccaacgccaaccccaacgccaaccccaacgccaacccgaacgccaaccccaacgcgaaccccaacgccaaccccaacgccaacccgaacgccaaccccaacgccaaccccaacgcgaaccccaacguggacccgaacgccaaccccaacgccaaccccaacgccaaccccaacgccaacccgaacgcgaaccccaacgccaaccccaacgccaacccgaacgccaaccccaacgccaaccccaacgcgaaccccaacgccaacccgaacgccaaccccaacgccaaccccaacgcgaaccccaacgccaacccgaacgccaaccccaacgccaaccccaacgccaaccccaacgcgaacccgaacaagaacaaccagggcaacggccaggggcacaacaugcccaacgaccccaaccgcaacgucgacgagaacgccaaggccaacaacgccgugaagaacaacaacaacgaggagcccuccgacaagcacaucgagcaguaccugaagacgauccagaacagccucuccaccgaguggagcccgugcuccgugaccugcggcaacgggauccagguccggaucaagcccggcagcgccaacaagcccaaggaccagcuggacuacgagaacgacaucgagaagaagaucugcaagauggagaagugcuccagcguguucaacguggucaacuccagcaucgggcugaucauggugcucuccuuccuguuccugaacuga

SEQ ID NO: 3451 - RNA, 1182 nt, Artificial Sequence
  derived and/or modified CDS sequence (opt1) from Pf(Gha1110-021)__BAM84839.1__CSP
augaugcgcaagcuggccauccucagcguguccagcuuccuguucgucgaggcccuguuccaggaguaccagugcuacggcuccagcuccaacacccgggugcucaacgagcugaacuacgacaacgcggggaccaaccuguacaacgagcucgagaugaacuacuacggcaagcaggagaacugguacagccugaagaagaacucccgcagccugggggagaacgacgacggcaacaacgaggacaacgagaagcuccggaagcccaagcacaagaagcugaagcagccggccgacgggaaccccgaccccaacgccaaccccaacguggacccgaacgccaaccccaacgucgaccccaacgccaaccccaacguggacccgaacgcgaaccccaacgccaaccccaacgccaaccccaacgccaacccgaacgcgaaccccaacgccaaccccaacgccaaccccaacgccaacccgaacgccaaccccaacgcgaaccccaacgccaaccccaacgccaacccgaacgccaaccccaacgccaaccccaacgcgaaccccaacguggacccgaacgccaaccccaacgccaaccccaacgccaaccccaacgccaacccgaacgcgaaccccaacgccaaccccaacgccaacccgaacgccaaccccaacgccaaccccaacgcgaaccccaacgccaacccgaacgccaaccccaacgccaaccccaacgcgaaccccaacgccaacccgaacgccaaccccaacgccaaccccaacgccaaccccaacgcgaacccgaacaagaacaaccagggcaacggccaggggcacaacaugcccaacgaccccaaccgcaacgucgacgagaacgccaacgccaacaacgccgugaagaacaacaacaacgaggagcccuccgacaagcacaucgagcaguaccugaagacgaucaagaacagccucuccaccgaguggagcccgugcuccgugaccugcggcaacgggauccagguccggaucaagcccggcagcgccaacaagcccaaggacgagcugaacuacgagaacgacaucgagaagaagaucugcaagauggagaagugcuccagcguguucaacguggucaacuccagcaucgggcugaucauggugcucuccuuccuguuccugaacuga

SEQ ID NO: 3452 - RNA, 1182 nt, Artificial Sequence
  derived and/or modified CDS sequence (opt1) from Pf(Tz03-068)__BAM84802.1__CSP
augaugcgcaagcuggccauccucagcguguccagcuuccuguucgucgaggcccuguuccaggaguaccagugcuacggcuccagcuccaacacccgggugcucaacgagcugaacuacgacaacgcggggaccaaccuguacaacgagcucgagaugaacuacuacggcaagcaggagaacugguacagccugaagaagaacucccgcagccugggggagaacgacgacggcaacaacgaggacaacgagaagcuccggaagcccaagcacaagaagcugaagcagccggccgacgggaaccccgaccccaacgccaaccccaacguggacccgaacgccaaccccaacgucgaccccaacgccaaccccaacguggacccgaacgcgaaccccaacgccaaccccaacgccaaccccaacgccaacccgaacgcgaaccccaacgccaaccccaacgccaaccccaacgccaacccgaacgccaaccccaacgcgaaccccaacgccaaccccaacgccaacccgaacgccaaccccaacgccaaccccaacgcgaaccccaacguggacccgaacgccaaccccaacgccaaccccaacgccaaccccaacgccaacccgaacgcgaaccccaacgccaaccccaacgccaacccgaacgccaaccccaacgccaaccccaacgcgaaccccaacgccaacccgaacgccaaccccaacgccaaccccaacgcgaaccccaacgccaacccgaacgccaaccccaacgccaaccccaacgccaaccccaacgcgaacccgaacaagaacaaccagggcaacggccaggggcacaacaugcccaacgaccccaaccgcaacgucgacgagaacgccaacgccaacaacgccgugaagaacaacaacaacgaggagcccuccgaccagcacaucgagaaguaccugaagaucauccagaacagccucuccacggaguggagcccgugcuccgugaccugcggcaacgggauccagguccggaucaagcccggcagcgccaacaagcccaaggaccagcuggacuacgcgaacgacaucgagaagaagaucugcaagauggagaagugcuccagcguguucaacguggucaacuccagcaucgggcugaucauggugcucuccuuccuguuccugaacuga

SEQ ID NO: 3453 - RNA, 1182 nt, Artificial Sequence
  derived and/or modified CDS sequence (opt1) from Pf(Tz03-070)__BAM84803.1__CSP
augaugcgcaagcuggccauccucagcguguccagcuuccuguucgucgaggcccuguuccaggaguaccagugcuacggcuccagcuccaacacccgggugcucaacgagcugaacuacgacaacgcggggaccaaccuguacaacgagcucgagaugaacuacuacggcaagcaggagaacugguacagccugaagaagaacucccgcagccugggggagaacgacgacggcaacaacgaggacaacgagaagcuccggaagcccaagcacaagaagcugaagcagccggccgacgggaaccccgaccccaacgccaaccccaacguggacccgaacgccaaccccaacgucgaccccaacgccaaccccaacguggacccgaacgcgaaccccaacgccaaccccaacgccaaccccaacgccaacccgaacgcgaaccccaacgccaaccccaacgccaaccccaacgccaacccgaacgccaaccccaacgcgaaccccaacgccaaccccaacgccaacccgaacgccaaccccaacgccaaccccaacgcgaaccccaacgccaacccgaacguggaccccaacgccaaccccaacgccaaccccaacgccaacccgaacgcgaaccccaacgccaaccccaacgccaacccgaacgccaaccccaacgccaaccccaacgcgaaccccaacgccaacccgaacgccaaccccaacgccaaccccaacgcgaaccccaacgccaacccgaacgccaaccccaacgccaaccccaacgccaaccccaacgcgaacccgaacaagaacaaccagggcaacggccaggggcacaacaugcccaacgaccccaaccgcaacgucgacgagaacgccaacgccaacaacgccgugaagaacaacaacaacgaggagcccuccgaccagcacaucgagaaguaccugcagaagauccagaacagccucuccacggaguggagcccgugcuccgugaccugcggcaacgggauccagguccggaucaagcccggcagcgccaacaagcccaaggaccagcugaacuacgagaacgacaucgagaagaagaucugcaagauggagaagugcuccagcguguucaacguggucaacuccagcaucgggcugaucauggugcucuccuuccuguuccugaacuga

SEQ ID NO: 3454 - RNA, 1182 nt, Artificial Sequence
  derived and/or modified CDS sequence (opt1) from Pf(Yaounde)__AAN87579.1__CSP
augaugcgcaagcuggccauccucagcguguccagcuuccuguucgucgaggcccuguuccaggaguaccagugcuacggcuccagcuccaacacccgggugcucaacgagcugaacuacgacaacgcggggaccaaccuguacaacgagcucgagaugaacuacuacggcaagcaggagaacugguacagccugaagaagaacucccgcagccugggggagaacgacgacggcaacaacgaggacaacgagaagcuccggaagcccaagcacaagaagcugaagcagccgggggacggcaaccccgaccccaacgccaaccccaacguggacccgaacgccaaccccaacgucgaccccaacgccaaccccaacguggacccgaacgccaaccccaacgcgaaccccaacgccaaccccaacgccaacccgaacgccaaccccaacgcgaaccccaacgccaaccccaacgccaacccgaacgccaaccccaacgccaaccccaacgcgaaccccaacgccaacccgaacgccaaccccaacgccaaccccaacgccaaccccaacguggacccgaacgcgaaccccaacgccaaccccaacgccaaccccaacgccaacccgaacgccaaccccaacgcgaaccccaacgccaacccgaacgccaaccccaacgccaaccccaacgccaaccccaacgcgaacccgaacgccaaccccaacgccaaccccaacgccaaccccaacgcgaacccgaacgccaaccccaacgccaaccccaacgccaaccccaacgccaacccgaacaagaacaaccagggcaacgggcagggccacaacaugcccaacgaccccaaccgcaacgucgacaagaacgcgaacgccaacaacgccgugaagaacaacaacaacgaggagcccuccgacaagcacaucgaggaguaccugaagaagaucaagaacagcaucuccacggaguggagcccgugcuccgugaccugcgggaacggcauccagguccggaucaagcccgggagcgccaacaagcccaaggacgagcucgacuacgagaacgacaucgagaagaagaucugcaagauggagaagugcuccagcguguucaacguggucaacuccagcaucggccugaucauggugcuguccuuccucuuccugaacuga

SEQ ID NO: 3455 - RNA, 1182 nt, Artificial Sequence
  derived and/or modified CDS sequence (opt1) from Pf(Yaounde)__AAN87578.1__CSP
augaugcgcaagcuggccauccucagcguguccagcuuccuguucgucgaggcccuguuccaggaguaccagugcuacggcuccagcuccaacacccgggugcucaacgagcugaacuacgacaacgcggggaccaaccuguacaacgagcucgagaugaacuacuacggcaagcaggagaacugguacagccugaagaagaacucccgcagccugggggagaacgacgacggcaacaacgaggacaacgagaagcuccggaagcccaagcacaagaagcugaagcagccgggggacggcaaccccgaccccaacgccaaccccaacguggacccgaacgccaaccccaacgucgaccccaacgccaaccccaacguggacccgaacgccaaccccaacgcgaaccccaacgccaaccccaacgccaacccgaacgccaaccccaacgcgaaccccaacgccaaccccaacgccaacccgaacgccaaccccaacgccaaccccaacgcgaaccccaacgccaacccgaacgccaaccccaacgccaaccccaacgccaaccccaacguggacccgaacgcgaaccccaacgccaaccccaacgccaaccccaacgccaacccgaacgccaaccccaacgcgaaccccaacgccaacccgaacgccaaccccaacgccaaccccaacgccaaccccaacgcgaacccgaacgccaaccccaacgccaaccccaacgccaaccccaacgcgaacccgaacgccaaccccaacgccaaccccaacgccaaccccaacgccaacccgaacaagaacaaccagggcaacgggcagggccacaacaugcccaacgaccccaaccgcaacgucaacgagaacgcgaacgccaacaacgccgugaagaacaacaacaacgaggagcccuccgacaagcacaucgagaaguaccugaaggagauccagaacagccucuccacggaguggagcccgugcuccgugaccugcgggaacggcauccagguccggaucaagcccgggagcgccggcaagcccaagaacgagcuggacuacgagaacgacaucgagaagaagaucugcaagauggagaagugcuccagcguguucaacguggucaacuccagcaucggccugaucauggugcucuccuuccuguuccugaacuga

SEQ ID NO: 3456 - RNA, 1179 nt, Artificial Sequence
  derived and/or modified CDS sequence (opt1) from Pf(Asembo Bay)__AAN87607.1__CSP
augaugcgcaagcuggccauccucagcguguccagcuuccuguucgucgaggcccuguuccaggaguaccagugcuacggcuccagcuccaacacccgggugcucaacgagcugaacuacgacaacgcggggaccaaccuguacaacgagcucgagaugaacuacuacggcaagcaggagaacugguacagccugaagaagaacucccgcagccugggggagaacgacgacggcaacaacaacaacggggacaacggccgggagggcaaggacgaggacaagcgcgacgggaacaacgaggacaacgagaagcuccggaagcccaagcacaagaagcugaagcagccggccgacggcaaccccgaccccaacgccaaccccaacguggacccgaacgccaaccccaacgucgaccccaacgccaaccccaacgcgaacccgaacgccaaccccaacgccaaccccaacgccaaccccaacgcgaacccgaacgccaaccccaacgccaaccccaacgccaaccccaacgccaacccgaacgcgaaccccaacgccaaccccaacguggaccccaacgccaacccgaacgccaaccccaacgccaaccccaacgcgaaccccaacgccaacccgaacgccaaccccaacgccaaccccaacgccaaccccaacgcgaacccgaacgccaaccccaacgccaaccccaacgccaacccgaacgccaaccccaacgcgaaccccaacgccaaccccaacgccaacccgaacgccaaccccaacgcgaaccccaacgccaaccccaacaagaacaaccaggggaacggccaggggcacaacaugccgaacgaccccaaccgcaacguggacgagaacgccaacgccaacaacgccgucaagaacaacaacaacgaggagcccuccgacaagcacaucgagcaguaccugaacaagaucaagaacagcaucuccacggaguggagccccugcuccgugaccugcggcaacggcauccaggugcggaucaagccggggagcgcgaacaagcccaaggaccagcucgacuacgagaacgacaucgagaagaagaucugcaagauggagaagugcuccagcgucuucaacguggugaacuccagcaucggccugaucaugguccuguccuuccucuuccugaacuga

SEQ ID NO: 3457 - RNA, 1179 nt, Artificial Sequence
  derived and/or modified CDS sequence (opt1) from Pf(Asembo Bay)__AAN87608.1__CSP
augaugcgcaagcuggccauccucagcguguccagcuuccuguucgucgaggcccuguuccaggaguaccagugcuacggcuccagcuccaacacccgggugcucaacgagcugaacuacgacaacgcggggaccaaccuguacaacgagcucgagaugaacuacuacggcaagcaggagaacugguacagccugaagaagaacucccgcagccugggggagaacgacgacggcaacaacaacaacggggacaacggccgggagggcaaggacgaggacaagcgcgacgggaacaacgaggacaacgagaagcuccggaagcccaagcacaagaagcugaagcagccggccgacggcaaccccgaccccaacgccaaccccaacguggacccgaacgccaaccccaacgucgaccccaacgccaaccccaacguggacccgaacgcgaaccccaacgccaaccccaacgccaaccccaacgccaacccgaacgcgaaccccaacgccaaccccaacgccaaccccaacgccaacccgaacgccaaccccaacgcgaaccccaacguggaccccaacgccaacccgaacgccaaccccaacgccaaccccaacgccaaccccaacgcgaacccgaacgccaaccccaacgccaaccccaacgccaaccccaacgccaacccgaacgcgaaccccaacgccaaccccaacgccaacccgaacgccaaccccaacgccaaccccaacgcgaaccccaacgccaacccgaacgccaaccccaacgccaaccccaacgcgaaccccaacaagaacaaccaggggaacggccaggggcacaacaugccgaacgaccccaaccgcaacgucgacgagaacgccaacgccaacaacgccgugaagaacaacaacaacgaggagcccuccgacaagcacaucgagcaguaccugaagaucaucaagaacagccucuccacggaguggagccccugcuccgugaccugcggcaacggcauccagguccggaucaagccggggagcgccaacaagcccaaggacgagcuggacuacgcgaacgacaucgagaagaagaucugcaagauggagaagugcuccagcguguucaacguggucaacuccagcaucggccugaucauggugcucuccuuccuguuccugaacuga

SEQ ID NO: 3458 - RNA, 1179 nt, Artificial Sequence
  derived and/or modified CDS sequence (opt1) from Pf(Asembo Bay)__AAN87595.1__CSP
augaugcgcaagcuggccauccucagcguguccagcuuccuguucgucgaggcccuguuccaggaguaccagugcuacggcuccagcuccaacacccgggugcucaacgagcugaacuacgacaacgcggggaccaaccuguacaacgagcucgagaugaacuacuacggcaagcaggagaacugguacagccugaagaagaacucccgcagccugggggagaacgacgacggcaacaacaacaacggggacaacggccgggagggcaaggacgaggacaagcgcgacgggaacaacgaggacaacgagaagcuccggaagcccaagcacaagaagcugaagcagccggccgacggcaaccccgaccccaacgccaaccccaacguggacccgaacgccaaccccaacgucgaccccaacgccaaccccaacguggacccgaacgcgaaccccaacgccaaccccaacgccaaccccaacgccaacccgaacgcgaaccccaacgccaaccccaacgccaaccccaacgccaacccgaacgccaaccccaacgcgaaccccaacguggaccccaacgccaacccgaacgccaaccccaacgccaaccccaacgccaaccccaacgcgaacccgaacgccaaccccaacgccaaccccaacgccaaccccaacgccaacccgaacgcgaaccccaacgccaaccccaacgccaacccgaacgccaaccccaacgccaaccccaacgcgaaccccaacgccaacccgaacgccaaccccaacgccaaccccaacgcgaaccccaacaagaacaaccaggggaacggccaggggcacaacaugccgaacgaccccaaccgcaacgucgacgagaacgccaacgccaacaacgccgugaagaacaacaacaacgaggagcccuccgacaagcacaucacggaguaccugaagcggauccagaacagccucuccaccgaguggagccccugcuccgugaccugcggcaacggcauccagguccgcaucaagccggggagcgccggcaaguccaagaacgagcuggacuacgagaacgacaucgagaagaagaucugcaagauggagaagugcagcuccguguucaacguggucaacagcuccaucgggcugaucauggugcucagcuuccuguuccugaacuga

SEQ ID NO: 3459 - RNA, 1179 nt, Artificial Sequence
  derived and/or modified CDS sequence (opt1) from Pf(India)__AAN87618.1__CSP
augaugcgcaagcuggccauccucagcguguccagcuuccuguucgucgaggcccuguuccaggaguaccagugcuacggcuccagcuccaacacccgggugcucaacgagcugaacuacgacaacgcggggaccaaccuguacaacgagcucgagaugaacuacuacggcaagcaggagaacugguacagccugaagaagaacucccgcagccugggggagaacgacgacggcaacaacaacaacggggacaacggccgggagggcaaggacgaggacaagcgcgacgggaacaacgaggacaacgagaagcuccggaagcccaagcacaagaagcugaagcagccgggcggggacaaccccgaccccaacgccaaccccaacguggacccgaacgccaaccccaacgccaaccccaacgccaaccccaacgcgaacccgaacgccaaccccaacgccaaccccaacgccaaccccaacgcgaacccgaacgccaaccccaacgccaaccccaacgccaaccccaacgccaacccgaacgcgaaccccaacgccaaccccaacgccaaccccaacgccaacccgaacgccaaccccaacgcgaaccccaacgccaaccccaacgccaacccgaacgccaaccccaacgccaaccccaacgcgaaccccaacgccaacccgaacgccaaccccaacgccaaccccaacgccaacccgaacgcgaaccccaacgccaaccccaacgccaaccccaacgccaacccgaacgcgaaccccaacgccaaccccaacgccaaccccaacaagaacaaccagggcaacgggcagggccacaacaugccgaacgaccccaaccgcaacgucgacgagaacgccaacgccaacaacgcggugaagaacaacaacaacgaggagcccuccgacaagcacaucgagcaguaccugaagaagauccagaacagccucuccacggaguggagccccugcuccgugaccugcggcaacgggauccagguccggaucaagccgggcagcgccaacaagcccaaggacgagcuggacuacgagaacgacaucgagaagaagaucugcaagauggagaagugcuccagcguguucaacguggucaacuccagcaucgggcugaucauggugcucuccuuccuguuccugaacuga

SEQ ID NO: 3460 - RNA, 1170 nt, Artificial Sequence
  derived and/or modified CDS sequence (opt1) from Pf(Asembo Bay)__AAN87585.1__CSP
augaugcgcaagcuggccauccucagcguguccagcuuccuguucgucgaggcccuguuccaggaguaccagugcuacggcuccagcuccaacacccgggugcucaacgagcugaacuacgacaacgcggggaccaaccuguacaacgagcucgagaugaacuacuacggcaagcaggagaacugguacagccugaagaagaacucccgcagccugggggagaacgacgacggcaacaacgaggacaacgagaagcuccggaagcccaagcacaagaagcugaagcagccggccgacgggaaccccgaccccaacgccaaccccaacguggacccgaacgccaaccccaacgucgaccccaacgccaaccccaacguggacccgaacgcgaaccccaacgccaaccccaacgccaaccccaacgccaacccgaacgcgaaccccaacgccaaccccaacgccaaccccaacgccaacccgaacgccaaccccaacgcgaaccccaacgccaaccccaacgccaacccgaacgccaaccccaacgccaaccccaacgcgaaccccaacguggacccgaacgccaaccccaacgccaaccccaacgccaaccccaacgccaacccgaacgcgaaccccaacgccaaccccaacgccaacccgaacgccaaccccaacgccaaccccaacgcgaaccccaacgccaacccgaacgccaaccccaacgccaaccccaacgcgaaccccaacgccaacccgaacgccaaccccaacgccaaccccaacgccaaccccaacaagaacaaccagggcaacggccaggggcacaacaugccgaacgaccccaaccgcaacgucgacgagaacgcgaacgccaacaacgccgugaagaacaacaacaacgaggagcccuccgaccagcacaucgagaaguaccugaagacgauccagaacagccucuccaccgaguggagccccugcuccgugaccugcggcaacgggauccagguccggaucaagccgggcagcgccaacaagcccaaggaccagcuggacuacgccaacgacaucgagaagaagaucugcaagauggagaagugcuccagcguguucaacguggucaacuccagcaucgggcugaucauggugcucuccuuccuguuccugaacuga

SEQ ID NO: 3461 - RNA, 1170 nt, Artificial Sequence
  derived and/or modified CDS sequence (opt1) from Pf(Asembo Bay)__AAN87577.1__CSP
augaugcgcaagcuggccauccucagcguguccagcuuccuguucgucgaggcccuguuccaggaguaccagugcuacggcuccagcuccaacacccgggugcucaacgagcugaacuacgacaacgcggggaccaaccuguacaacgagcucgagaugaacuacuacggcaagcaggagaacugguacagccugaagaagaacucccgcagccugggggagaacgacgacggcaacaacgaggacaacgagaagcuccggaagcccaagcacaagaagcugaagcagccgggggacggcaaccccgaccccaacgccaaccccaacguggacccgaacgccaaccccaacgucgaccccaacgccaaccccaacguggacccgaacgccaaccccaacgcgaaccccaacgccaaccccaacgccaacccgaacgccaaccccaacgcgaaccccaacgccaaccccaacgccaacccgaacgccaaccccaacgccaaccccaacgcgaaccccaacgccaacccgaacgccaaccccaacgccaaccccaacguggaccccaacgccaacccgaacgcgaaccccaacgccaaccccaacgccaaccccaacgccaacccgaacgccaaccccaacgcgaaccccaacgccaacccgaacgccaaccccaacgccaaccccaacgccaaccccaacgcgaacccgaacgccaaccccaacgccaaccccaacgccaaccccaacgcgaacccgaacgccaaccccaacgccaaccccaacgccaaccccaacaagaacaaccagggcaacgggcagggccacaacaugccgaacgaccccaaccgcaacgucaacgagaacgccaacgcgaacaacgccgugaagaacaacaacaacgaggagcccuccgacaagcacaucgagaaguaccugaaggagauccagaacagccucuccacggaguggagccccugcuccgugaccugcgggaacggcauccagguccggaucaagccggggagcgccggcaagcccaagaacgagcuggacuacgagaacgacaucgagaagaagaucugcaagauggagaagugcuccagcguguucaacguggucaacuccagcaucggccugaucauggugcucuccuuccuguuccugaacuga

SEQ ID NO: 3462 - RNA, 1170 nt, Artificial Sequence
  derived and/or modified CDS sequence (opt1) from Pf(Gha1108-043)__BAM84815.1__CSP
augaugcgcaagcuggccauccucagcguguccagcuuccuguucgucgaggcccuguuccaggaguaccagugcuacggcuccagcuccaacacccgggugcucaacgagcugaacuacgacaacgcggggaccaaccuguacaacgagcucgagaugaacuacuacggcaagcaggagaacugguacagccugaagaagaacucccgcagccugggggagaacgacgacggcaacaacgaggacaacgagaagcuccggaagcccaagcacaagaagcugaagcagccgggggacggcaaccccgaccccaacgccaaccccaacguggacccgaacgccaaccccaacgucgaccccaacgccaaccccaacguggacccgaacgccaaccccaacgcgaaccccaacgccaaccccaacgccaacccgaacgccaaccccaacgcgaaccccaacgccaaccccaacgccaacccgaacgccaaccccaacgccaaccccaacgcgaaccccaacgccaacccgaacgccaaccccaacgccaaccccaacguggaccccaacgccaacccgaacgcgaaccccaacgccaaccccaacgccaaccccaacgccaacccgaacgccaaccccaacgcgaaccccaacgccaacccgaacgccaaccccaacgccaaccccaacgccaaccccaacgcgaacccgaacgccaaccccaacgccaaccccaacgccaaccccaacgcgaacccgaacgccaaccccaacgccaaccccaacgccaaccccaacaagaacaaccagggcaacgggcagggccacaacaugccgaacgaccccaaccgcaacgucgacgagaacgccaacgcgaacuccgccgugaagaacaacaacaacgaggagcccagcgacaagcacaucaaggaguaccugaacaagauccagaacucccucagcacggaguggucccccugcagcgugaccugcgggaacggcauccagguccggaucaagccgggguccgccaacaagcccaaggacgagcuggacuacgccaacgacaucgagaagaagaucugcaagauggagaagugcagcuccguguucaacguggucaacagcuccaucggccugaucauggugcucagcuuccuguuccugaacuga

SEQ ID NO: 3463 - RNA, 1170 nt, Artificial Sequence
  derived and/or modified CDS sequence (opt1) from Pf(Gha1108-052)__BAM84816.1__CSP
augaugcgcaagcuggccauccucagcguguccagcuuccuguucgucgaggcccuguuccaggaguaccagugcuacggcuccagcuccaacacccgggugcucaacgagcugaacuacgacaacgcggggaccaaccuguacaacgagcucgagaugaacuacuacggcaagcaggagaacugguacagccugaagaagaacucccgcagccugggggagaacgacgacggcaacaacgaggacaacgagaagcuccggaagcccaagcacaagaagcugaagcagccggccgacgggaaccccgaccccaacgccaaccccaacguggacccgaacgccaaccccaacgucgaccccaacgccaaccccaacguggacccgaacgcgaaccccaacgccaaccccaacgccaaccccaacgccaacccgaacgcgaaccccaacgccaaccccaacgccaaccccaacgccaacccgaacgccaaccccaacgcgaaccccaacgccaaccccaacgccaacccgaacgccaaccccaacgccaaccccaacguggaccccaacgcgaacccgaacgccaaccccaacgccaaccccaacgccaaccccaacgccaacccgaacgcgaaccccaacgccaaccccaacgccaacccgaacgccaaccccaacgccaaccccaacgcgaaccccaacgccaacccgaacgccaaccccaacgccaaccccaacgcgaaccccaacgccaacccgaacgccaaccccaacgccaaccccaacgccaaccccaacaagaacaaccagggcaacggccaggggcacaacaugccgaacgaccccaaccgcaacgucgacgagaacgcgaacgccaacuccgccgugaagaacaacaacaacgaggagcccagcgacaagcacaucgagcaguaccugaagacgauccagaacucccucagcaccgaguggucccccugcagcgugaccugcggcaacgggauccagguccggaucaagccgggcuccgccaacaagcccaaggaccagcuggacuacgagaacgacaucgagaagaagaucugcaagauggagaagugcagcuccguguucaacguggucaacagcuccaucgggcugaucauggugcucagcuuccuguuccugaacuga

SEQ ID NO: 3464 - RNA, 1170 nt, Artificial Sequence
  derived and/or modified CDS sequence (opt1) from Pf(Gha1108-124)__BAM84812.1__CSP
augaugcgcaagcuggccauccucagcguguccagcuuccuguucgucgaggcccuguuccaggaguaccagugcuacggcuccagcuccaacacccgggugcucaacgagcugaacuacgacaacgcggggaccaaccuguacaacgagcucgagaugaacuacuacggcaagcaggagaacugguacagccugaagaagaacucccgcagccugggggagaacgacgacggcaacaacgaggacaacgagaagcuccggaagcccaagcacaagaagcugaagcagccggccgacgggaaccccgaccccaacgccaaccccaacguggacccgaacgccaaccccaacgucgaccccaacgccaaccccaacguggacccgaacgcgaaccccaacgccaaccccaacgccaaccccaacgccaacccgaacgcgaaccccaacgccaaccccaacgccaaccccaacgccaacccgaacgccaaccccaacgcgaaccccaacgccaaccccaacgccaacccgaacgccaaccccaacgccaaccccaacgcgaaccccaacguggacccgaacgccaaccccaacgccaaccccaacgccaaccccaacgccaacccgaacgcgaaccccaacgccaaccccaacgccaacccgaacgccaaccccaacgccaaccccaacgcgaaccccaacgccaacccgaacgccaaccccaacgccaaccccaacgcgaaccccaacgccaacccgaacgccaaccccaacgccaaccccaacgccaaccccaacaagaacaaccagggcaacggccaggggcacaacaugccgaacgaccccaaccgcaacgucgacgagaacgcgaacgccaacaacgccgugaagaacaacaacaacgaggagcccuccgaccagcacaucgagaaguaccugaacaagaucaagaacagccucuccacggaguggagccccugcuccgugaccugcggcaacgggauccagguccggaucaagccgggcagcgccaacaagcccaaggaccagcuggacuacgccaacgacaucgagaagaagaucugcaagauggagaagugcuccagcguguucaacguggucaacuccagcaucgggcugaucauggugcucuccuuccuguuccugaacuga

SEQ ID NO: 3465 - RNA, 1170 nt, Artificial Sequence
  derived and/or modified CDS sequence (opt1) from Pf(Gha1109-003)__BAM84834.1__CSP
augaugcgcaagcuggccauccucagcguguccagcuuccuguucgucgaggcccuguuccaggaguaccagugcuacggcuccagcuccaacacccgggugcucaacgagcugaacuacgacaacgcggggaccaaccuguacaacgagcucgagaugaacuacuacggcaagcaggagaacugguacagccugaagaagaacucccgcagccugggggagaacgacgacggcaacaacgaggacaacgagaagcuccggaagcccaagcacaagaagcugaagcagccggccgacgggaaccccgaccccaacgccaaccccaacguggacccgaacgccaaccccaacgucgaccccaacgccaaccccaacguggacccgaacgcgaaccccaacgccaaccccaacgccaaccccaacgccaacccgaacgcgaaccccaacgccaaccccaacgccaaccccaacgccaacccgaacgccaaccccaacgcgaaccccaacgccaaccccaacgccaacccgaacgccaaccccaacgccaaccccaacguggaccccaacgcgaacccgaacgccaaccccaacgccaaccccaacgccaaccccaacgccaacccgaacgcgaaccccaacgccaaccccaacgccaacccgaacgccaaccccaacgccaaccccaacgcgaaccccaacgccaacccgaacgccaaccccaacgccaaccccaacgcgaaccccaacgccaacccgaacgccaaccccaacgccaaccccaacgccaaccccaacaagaacaaccagggcaacggccaggggcacaacaugccgaacgaccccaaccgcaacgucgacgagaacgcgaacgccaacgacgccgugaagaacaacaacaacgaggagcccuccgaccagcacaucgagaaguaccugaagaucaucaagaacagccucuccacggaguggagccccugcuccgugaccugcggcaacgggauccagguccggaucaagccgggcagcgccaacaagcccaaggaccagcuggacuacgccaacgacaucgagaagaagaucugcaagauggagaagugcuccagcguguucaacguggucaacuccagcaucgggcugaucauggugcucuccuuccuguuccugaacuga

SEQ ID NO: 3466 - RNA, 1170 nt, Artificial Sequence
  derived and/or modified CDS sequence (opt1) from Pf(Gha1109-058)__BAM84835.1__CSP
augaugcgcaagcuggccauccucagcguguccagcuuccuguucgucgaggcccuguuccaggaguaccagugcuacggcuccagcuccaacacccgggugcucaacgagcugaacuacgacaacgcggggaccaaccuguacaacgagcucgagaugaacuacuacggcaagcaggagaacugguacagccugaagaagaacucccgcagccugggggagaacgacgacggcaacaacgaggacaacgagaagcuccggaagcccaagcacaagaagcugaagcagccgggggacggcaaccccgaccccaacgccaaccccaacguggacccgaacgccaaccccaacgucgaccccaacgccaaccccaacguggacccgaacgccaaccccaacgcgaaccccaacgccaaccccaacgccaacccgaacgccaaccccaacgcgaaccccaacgccaaccccaacgccaacccgaacgccaaccccaacgccaaccccaacgcgaaccccaacgccaacccgaacgccaaccccaacgccaaccccaacguggaccccaacgccaacccgaacgcgaaccccaacgccaaccccaacgccaaccccaacgccaacccgaacgccaaccccaacgcgaaccccaacgccaacccgaacgccaaccccaacgccaaccccaacgccaaccccaacgcgaacccgaacgccaaccccaacgccaaccccaacgccaaccccaacgcgaacccgaacgccaaccccaacgccaaccccaacgccaaccccaacaagaacaaccagggcaacgggcagggccacaacaugccgaacgaccccaaccgcaacgucgacgagaacgccaacgcgaacaacgccgugaagaacaacaacaacgaggagcccuccgacaagcacaucacggaguaccugaagaagauccagaacagccucuccaccgaguggagccccugcuccgugaccugcgggaacggcauccagguccggaucaagccggggagcgccggcaaguccaagaacgagcuggacuacgagaacgacaucgagaagaagaucugcaagauggagaagugcagcuccguguucaacguggucaacagcuccaucggccugaucauggugcucagcuuccuguuccugaacuga

SEQ ID NO: 3467 - RNA, 1170 nt, Artificial Sequence
  derived and/or modified CDS sequence (opt1) from Pf(Gha1109-105)__BAM84822.1__CSP
augaugcgcaagcuggccauccucagcguguccagcuuccuguucgucgaggcccuguuccaggaguaccagugcuacggcuccagcuccaacacccgggugcucaacgagcugaacuacgacaacgcggggaccaaccuguacaacgagcucgagaugaacuacuacggcaagcaggagaacugguacagccugaagaagaacucccgcagccugggggagaacgacgacggcaacaacgaggacaacgagaagcuccggaagcccaagcacaagaagcugaagcagccggccgacgggaaccccgaccccaacgccaaccccaacguggacccgaacgccaaccccaacgccaaccccaacgcgaaccccaacgccaacccgaacgccaaccccaacgccaaccccaacgucgaccccaacgcgaacccgaacguggaccccaacgccaaccccaacgccaaccccaacgccaacccgaacgccaaccccaacgcgaaccccaacgccaaccccaacgccaacccgaacgccaaccccaacguggaccccaacgccaaccccaacgcgaacccgaacgccaaccccaacgccaaccccaacgccaaccccaacgccaacccgaacgcgaaccccaacgccaaccccaacgccaacccgaacgccaaccccaacgccaaccccaacgcgaaccccaacgccaacccgaacgccaaccccaacgccaaccccaacgcgaaccccaacgccaacccgaacgccaaccccaacgccaaccccaacgccaaccccaacaagaacaaccagggcaacggccaggggcacaacaugccgaacgaccccaaccgcaacgucgacgagaacgcgaaggccaacaacgccgugaagaacaacaacaacgaggagcccuccgacaagcacaucgagcaguaccugaagacgauccagaacagccucuccaccgaguggagccccugcuccgugaccugcggcaacgggauccagguccggaucaagccgggcagcgccaacaagcccaaggaccagcuggacuacgagaacgacaucgagaagaagaucugcaagauggagaagugcuccagcguguucaacguggucaacuccagcaucgggcugaucauggugcucuccuuccuguuccugaacuga

SEQ ID NO: 3468 - RNA, 1170 nt, Artificial Sequence
  derived and/or modified CDS sequence (opt1) from Pf(Gha1109-111)__BAM84823.1__CSP
augaugcgcaagcuggccauccucagcguguccagcuuccuguucgucgaggcccuguuccaggaguaccagugcuacggcuccagcuccaacacccgggugcucaacgagcugaacuacgacaacgcggggaccaaccuguacaacgagcucgagaugaacuacuacggcaagcaggagaacugguacagccugaagaagaacucccgcagccugggggagaacgacgacggcaacaacgaggacaacgagaagcuccggaagcccaagcacaagaagcugaagcagccgggggacggcaaccccgaccccaacgccaaccccaacguggacccgaacgccaaccccaacgucgaccccaacgccaaccccaacguggacccgaacgccaaccccaacgcgaaccccaacgccaaccccaacgccaacccgaacgccaaccccaacgcgaaccccaacgccaaccccaacgccaacccgaacgccaaccccaacgccaaccccaacgcgaaccccaacgccaacccgaacgccaaccccaacgccaaccccaacguggaccccaacgccaacccgaacgcgaaccccaacgccaaccccaacgccaaccccaacgccaacccgaacgccaaccccaacgcgaaccccaacgccaacccgaacgccaaccccaacgccaaccccaacgccaaccccaacgcgaacccgaacgccaaccccaacgccaaccccaacgccaaccccaacgcgaacccgaacgccaaccccaacgccaaccccaacgccaaccccaacaagaacaaccagggcaacgggcagggccacaacaugccgaacgaccccaaccgcaacgucgacgagaacgccaacgcgaacaacgccgugaagaacaacaacaacgaggagcccuccgacaagcacaucaaggaguaccugaacaagauccagaacagcaucuccacggaguggagccccugcuccgugaccugcgggaacggcauccagguccggaucaagccggggagcgccgacaagcccaaggaccagcucgacuacaucaacgacaucgagaagaagaucugcaagauggagaagugcuccagcguguucaacguggucaacuccagcaucggccugaucauggugcuguccuuccucuuccugaacuga

SEQ ID NO: 3469 - RNA, 1170 nt, Artificial Sequence
  derived and/or modified CDS sequence (opt1) from Pf(Gha1109-125)__BAM84824.1__CSP
augaugcgcaagcuggccauccucagcguguccagcuuccuguucgucgaggcccuguuccaggaguaccagugcuacggcuccagcuccaacacccgggugcucaacgagcugaacuacgacaacgcggggaccaaccuguacaacgagcucgagaugaacuacuacggcaagcaggagaacugguacagccugaagaagaacucccgcagccugggggagaacgacgacggcaacaacgaggacaacgagaagcuccggaagcccaagcacaagaagcugaagcagccggccgacgggaaccccgaccccaacgccaaccccaacguggacccgaacgccaaccccaacgucgaccccaacgccaaccccaacguggacccgaacgcgaaccccaacgccaaccccaacgccaaccccaacgccaacccgaacgcgaaccccaacgccaaccccaacgccaaccccaacgccaacccgaacgccaaccccaacgcgaaccccaacgccaaccccaacgccaacccgaacgccaaccccaacgccaaccccaacgcgaaccccaacguggacccgaacgccaaccccaacgccaaccccaacgccaaccccaacgccaacccgaacgcgaaccccaacgccaaccccaacgccaacccgaacgccaaccccaacgccaaccccaacgcgaaccccaacgccaacccgaacgccaaccccaacgccaaccccaacgcgaaccccaacgccaacccgaacgccaaccccaacgccaaccccaacgccaaccccaacaagaacaaccagggcaacggccaggggcacaacaugccgaacgaccccaaccgcaacgucgacgagaacgcgaacgccaacaacgccgugaagaacaacaacaacgaggagcccuccgaccagcacaucgagaaguaccugaagacgaucaagaacagccucuccaccgaguggagccccugcuccgugaccugcggcaacgggauccagguccggaucaagccgggcagcgccaacaagcccaaggaccagcuggacuacgccaacgacaucgagaagaagaucugcaagauggagaagugcuccagcguguucaacguggucaacuccagcaucgggcugaucauggugcucuccuuccuguuccugaacuga

SEQ ID NO: 3470 - RNA, 1170 nt, Artificial Sequence
  derived and/or modified CDS sequence (opt1) from Pf(Gha1109-127)__BAM84825.1__CSP
augaugcgcaagcuggccauccucagcguguccagcuuccuguucgucgaggcccuguuccaggaguaccagugcuacggcuccagcuccaacacccgggugcucaacgagcugaacuacgacaacgcggggaccaaccuguacaacgagcucgagaugaacuacuacggcaagcaggagaacugguacagccugaagaagaacucccgcagccugggggagaacgacgacggcaacaacgaggacaacgagaagcuccggaagcccaagcacaagaagcugaagcagccgggggacggcaaccccgaccccaacgccaaccccaacguggacccgaacgccaaccccaacgucgaccccaacgccaaccccaacguggacccgaacgccaaccccaacgcgaaccccaacgccaaccccaacgccaacccgaacgccaaccccaacgcgaaccccaacgccaaccccaacgccaacccgaacgccaaccccaacgccaaccccaacgcgaaccccaacgccaacccgaacgccaaccccaacgccaaccccaacguggaccccaacgccaacccgaacgcgaaccccaacgccaaccccaacgccaaccccaacgccaacccgaacgccaaccccaacgcgaaccccaacgccaacccgaacgccaaccccaacgccaaccccaacgccaaccccaacgcgaacccgaacgccaaccccaacgccaaccccaacgccaaccccaacgcgaacccgaacgccaaccccaacgccaaccccaacgccaaccccaacaagaacaaccagggcaacgggcagggccacaacaugccgaacgaccccaaccgcaacgucgacgagaacgccaacgcgaacaacgccgugaagaacaacaacaacgaggagcccuccgacaagcacaucacggaguaccugaagaagaucaagaacagccucuccaccgaguggagccccugcuccgugaccugcgggaacggcauccagguccggaucaagccggggagcgccggcaaguccaagaacgagcuggacuacgagaacgacaucgagaagaagaucugcaagauggagaagugcagcuccguguucaacguggucaacagcuccaucggccugaucauggugcucagcuuccuguuccugaacuga

SEQ ID NO: 3471 - RNA, 1170 nt, Artificial Sequence
  derived and/or modified CDS sequence (opt1) from Pf(Gha1109-158)__BAM84826.1__CSP
augaugcgcaagcuggccauccucagcguguccagcuuccuguucgucgaggcccuguuccaggaguaccagugcuacggcuccagcuccaacacccgggugcucaacgagcugaacuacgacaacgcggggaccaaccuguacaacgagcucgagaugaacuacuacggcaagcaggagaacugguacagccugaagaagaacucccgcagccugggggagaacgacgacggcaacaacgaggacaacgagaagcuccggaagcccaagcacaagaagcugaagcagccggccgacgggaaccccgaccccaacgccaaccccaacguggacccgaacgccaaccccaacgucgaccccaacgccaaccccaacguggacccgaacgcgaaccccaacgccaaccccaacgccaaccccaacgccaacccgaacgcgaaccccaacgccaaccccaacgccaaccccaacgccaacccgaacgccaaccccaacgcgaaccccaacgccaaccccaacgccaacccgaacgccaaccccaacgccaaccccaacguggaccccaacgcgaacccgaacgccaaccccaacgccaaccccaacgccaaccccaacgccaacccgaacgcgaaccccaacgccaaccccaacgccaacccgaacgccaaccccaacgccaaccccaacgcgaaccccaacgccaacccgaacgccaaccccaacgccaaccccaacgcgaaccccaacgccaacccgaacgccaaccccaacgccaaccccaacgccaaccccaacaagaacaaccagggcaacggccaggggcacaacaugccgaacgaccccaaccgcaacgucgacgagaacgcgaacgccaacaacgccgugaagaacaacaacaacgaggagcccuccgacaagcacaucgagcaguaccugaagacgaucaagaacagccucuccaccgaguggagccccugcuccgugaccugcggcaacgggauccagguccggaucaagccgggcagcgccaacaagcccaaggaccagcuggacuacgccaacgacaucgagaagaagaucugcaagauggagaagugcuccagcguguucaacguggucaacuccagcaucgggcugaucauggugcucuccuuccuguuccugaacuga

SEQ ID NO: 3472 - RNA, 1170 nt, Artificial Sequence
  derived and/or modified CDS sequence (opt1) from Pf(Gha1109-205)__BAM84832.1__CSP
augaugcgcaagcuggccauccucagcguguccagcuuccuguucgucgaggcccuguuccaggaguaccagugcuacggcuccagcuccaacacccgggugcucaacgagcugaacuacgacaacgcggggaccaaccuguacaacgagcucgagaugaacuacuacggcaagcaggagaacugguacagccugaagaagaacucccgcagccugggggagaacgacgacggcaacaacgaggacaacgagaagcuccggaagcccaagcacaagaagcugaagcagccggccgacgggaaccccgaccccaacgccaaccccaacguggacccgaacgccaaccccaacgucgaccccaacgccaaccccaacguggacccgaacgcgaaccccaacgccaaccccaacgccaaccccaacgccaacccgaacgcgaaccccaacgccaaccccaacgccaaccccaacgccaacccgaacgccaaccccaacgcgaaccccaacgccaaccccaacgccaacccgaacgccaaccccaacgccaaccccaacguggaccccaacgcgaacccgaacgccaaccccaacgccaaccccaacgccaaccccaacgccaacccgaacgcgaaccccaacgccaaccccaacgccaacccgaacgccaaccccaacgccaaccccaacgcgaaccccaacgccaacccgaacgccaaccccaacgccaaccccaacgcgaaccccaacgccaacccgaacgccaaccccaacgccaaccccaacgccaaccccaacaagaacaaccagggcaacggccaggggcacaacaugccgaacgaccccaaccgcaacgucgacgagaacgcgaacgccaacaacgccgugaagaacaacaacaacgaggagcccuccgaccagcacaucgagaaguaccugaagaucauccagaacagccucuccacggaguggagccccugcuccgugaccugcggcaacgggauccagguccggaucaagccgggcagcgccaacaagcccaaggaccagcuggacuacgccaacgacaucgagaagaagaucugcaagauggagaagugcuccagcguguucaacguggucaacuccagcaucgggcugaucauggugcucuccuuccuguuccugaacuga

SEQ ID NO: 3473 - RNA, 1170 nt, Artificial Sequence
  derived and/or modified CDS sequence (opt1) from Pf(T9/96)__BAD73957.1__CSP
augaugcgcaagcuggccauccucagcguguccagcuuccuguucgucgaggcccuguuccaggaguaccagugcuacggcuccagcuccaacacccgggugcucaacgagcugaacuacgacaacgcggggaccaaccuguacaacgagcucgagaugaacuacuacggcaagcaggagaacugguacagccugaagaagaacucccgcagccugggggagaacgacgacggcaacaacgaggacaacgagaagcuccggaagcccaagcacaagaagcugaagcagccggccgacgggaaccccgaccccaacgccaaccccaacguggacccgaacgccaaccccaacgucgaccccaacgccaaccccaacguggacccgaacgcgaaccccaacgccaaccccaacgccaaccccaacgccaacccgaacgcgaaccccaacgccaaccccaacgccaaccccaacgccaacccgaacgccaaccccaacgcgaaccccaacgccaaccccaacgccaacccgaacgccaaccccaacgccaaccccaacguggaccccaacgcgaacccgaacgccaaccccaacgccaaccccaacgccaaccccaacgccaacccgaacgcgaaccccaacgccaaccccaacgccaacccgaacgccaaccccaacgccaaccccaacgcgaaccccaacgccaacccgaacgccaaccccaacgccaaccccaacgcgaaccccaacgccaacccgaacgccaaccccaacgccaaccccaacgccaaccccaacaagaacaaccagggcaacggccaggggcacaacaugccgaacgaccccaaccgcaacgucgacgagaacgcgaacgccaacaacgccgugaagaacaacaacaacgaggagcccuccgacaagcacaucgagcaguaccugaagacgaucaagaacagccucuccaccgaguggagccccugcuccgugaccugcggcaacgggauccagguccggaucaagccgggcagcgccaacaagcccaaggacgagcuggacuacgccaacgacaucgagaagaagaucugcaagauggagaagugcuccagcguguucaacguggucaacuccagcaucgggcugaucauggugcucuccuuccuguuccugaacuga

SEQ ID NO: 3474 - RNA, 1170 nt, Artificial Sequence
  derived and/or modified CDS sequence (opt1) from Pf(Tz93-015)__BAM84752.1__CSP
augaugcgcaagcuggccauccucagcguguccagcuuccuguucgucgaggcccuguuccaggaguaccagugcuacggcuccagcuccaacacccgggugcucaacgagcugaacuacgacaacgcggggaccaaccuguacaacgagcucgagaugaacuacuacggcaagcaggagaacugguacagccugaagaagaacucccgcagccugggggagaacgacgacggcaacaacgaggacaacgagaagcuccggaagcccaagcacaagaagcugaagcagccgggggacggcaaccccgaccccaacgccaaccccaacguggacccgaacgccaaccccaacgucgaccccaacgccaaccccaacguggacccgaacgccaaccccaacgcgaaccccaacgccaaccccaacgccaacccgaacgccaaccccaacgcgaaccccaacgccaaccccaacgccaacccgaacgccaaccccaacgccaaccccaacgcgaaccccaacgccaacccgaacgccaaccccaacgccaaccccaacguggaccccaacgccaacccgaacgcgaaccccaacgccaaccccaacgccaaccccaacgccaacccgaacgccaaccccaacgcgaaccccaacgccaacccgaacgccaaccccaacgccaaccccaacgccaaccccaacgcgaacccgaacgccaaccccaacgccaaccccaacgccaaccccaacgcgaacccgaacgccaaccccaacgccaaccccaacgccaaccccaacaagaacaaccagggcaacgggcagggccacaacaugccgaacgaccccaaccgcaacgucgacgagaacgccaacgcgaacgacgccgugaagaacaacaacaacgaggagcccuccgaccagcacaucgagaaguaccugaagaucaucaagaacagccucuccacggaguggagccccugcuccgugaccugcgggaacggcauccagguccggaucaagccggggagcgccaacaagcccaaggaccagcuggacuacgccaacgacaucgagaagaagaucugcaagauggagaagugcuccagcguguucaacguggucaacuccagcaucggccugaucauggugcucuccuuccuguuccugaacuga

SEQ ID NO: 3475 - RNA, 1170 nt, Artificial Sequence
  derived and/or modified CDS sequence (opt1) from Pf(Tz93-050)__BAM84762.1__CSP
augaugcgcaagcuggccauccucagcguguccagcuuccuguucgucgaggcccuguuccaggaguaccagugcuacggcuccagcuccaacacccgggugcucaacgagcugaacuacgacaacgcggggaccaaccuguacaacgagcucgagaugaacuacuacggcaagcaggagaacugguacagccugaagaagaacucccgcagccugggggagaacgacgacggcaacaacgaggacaacgagaagcuccggaagcccaagcacaagaagcugaagcagccgggggacggcaaccccgaccccaacgccaaccccaacguggacccgaacgccaaccccaacgucgaccccaacgccaaccccaacguggacccgaacgccaaccccaacgcgaaccccaacgccaaccccaacgccaacccgaacgccaaccccaacgcgaaccccaacgccaaccccaacgccaacccgaacgccaaccccaacgccaaccccaacgcgaaccccaacgccaacccgaacgccaaccccaacgccaaccccaacguggaccccaacgccaacccgaacgcgaaccccaacgccaaccccaacgccaaccccaacgccaacccgaacgccaaccccaacgcgaaccccaacgccaacccgaacgccaaccccaacgccaaccccaacgccaaccccaacgcgaacccgaacgccaaccccaacgccaaccccaacgccaaccccaacgcgaacccgaacgccaaccccaacgccaaccccaacgccaaccccaacaagaacaaccagggcaacgggcagggccacaacaugccgaacgaccccaaccgcaacgucgacgagaacgccaacgcgaacaaccccgugaagaacaacaacaacgaggagcccuccgacaagcacaucacggaguaccugaagaagaucaagaacagcaucuccaccgaguggagcccgugcuccgugaccugcgggaacggcauccagguccggaucaagcccgggagcgccaacaagcccaaggacgagcucgacuacgagaacgacaucgagaagaagaucugcaagauggagaagugcuccagcguguucaacguggucaacuccagcaucggccugaucauggugcuguccuuccucuuccugaacuga

SEQ ID NO: 3476 - RNA, 1170 nt, Artificial Sequence
  derived and/or modified CDS sequence (opt1) from Pf(Tz93-105)__BAM84774.1__CSP
augaugcgcaagcuggccauccucagcguguccagcuuccuguucgucgaggcccuguuccaggaguaccagugcuacggcuccagcuccaacacccgggugcucaacgagcugaacuacgacaacgcggggaccaaccuguacaacgagcucgagaugaacuacuacggcaagcaggagaacugguacagccugaagaagaacucccgcagccugggggagaacgacgacggcaacaacgaggacaacgagaagcuccggaagcccaagcacaagaagcugaagcagccgggggacggcaaccccgaccccaacgccaaccccaacguggacccgaacgccaaccccaacgucgaccccaacgccaaccccaacguggacccgaacgccaaccccaacgcgaaccccaacgccaaccccaacgccaacccgaacgccaaccccaacgcgaaccccaacgccaaccccaacgccaacccgaacgccaaccccaacgccaaccccaacgcgaaccccaacgccaacccgaacgccaaccccaacgccaaccccaacguggaccccaacgccaacccgaacgcgaaccccaacgccaaccccaacgccaaccccaacgccaacccgaacgccaaccccaacgcgaaccccaacgccaacccgaacgccaaccccaacgccaaccccaacgccaaccccaacgcgaacccgaacgccaaccccaacgccaaccccaacgccaaccccaacgcgaacccgaacgccaaccccaacgccaaccccaacgccaaccccaacaagaacaaccagggcaacgggcagggccacaacaugccgaacgaccccaaccgcaacgucgacgagaacgccaacgcgaacaacgccgugaagaacaacaacaacgaggagcccuccgaccagcacaucgagaaguaccugaagaucauccagaacagccucuccacggaguggagccccugcuccgugaccugcgggaacggcauccagguccggaucaagccggggagcgccaacaagcccaaggaccagcuggacuacgccaacgacaucgagaagaagaucugcaagauggagaagugcuccagcguguucaacguggucaacuccagcaucggccugaucauggugcucuccuuccuguuccugaacuga

SEQ ID NO: 3477 - RNA, 1170 nt, Artificial Sequence
  derived and/or modified CDS sequence (opt1) from Pf(Tz93-121)__BAM84777.1__CSP
augaugcgcaagcuggccauccucagcguguccagcuuccuguucgucgaggcccuguuccaggaguaccagugcuacggcuccagcuccaacacccgggugcucaacgagcugaacuacgacaacgcggggaccaaccuguacaacgagcucgagaugaacuacuacggcaagcaggagaacugguacagccugaagaagaacucccgcagccugggggagaacgacgacggcaacaacgaggacaacgagaagcuccggaagcccaagcacaagaagcugaagcagccgggggacggcaaccccgaccccaacgccaaccccaacguggacccgaacgccaaccccaacgucgaccccaacgccaaccccaacguggacccgaacgccaaccccaacgcgaaccccaacgccaaccccaacgccaacccgaacgccaaccccaacgcgaaccccaacgccaaccccaacgccaacccgaacgccaaccccaacgccaaccccaacgcgaaccccaacguggacccgaacgccaaccccaacgccaaccccaacgccaaccccaacgccaacccgaacgcgaaccccaacgccaaccccaacgccaaccccaacgccaacccgaacgccaaccccaacgcgaaccccaacgccaacccgaacgccaaccccaacgccaaccccaacgccaaccccaacgcgaacccgaacgccaaccccaacgccaaccccaacgccaaccccaacgcgaacccgaacgccaaccccaacgccaaccccaacgccaaccccaacaagaacaaccagggcaacgggcagggccacaacaugccgaacgaccccaaccgcaacgucgacgagaacgccaacgcgaacaacgccgugaagaacaacaacaacgaggagcccuccgaccagcacaucgagaaguaccugaagaagaucaagaacagcaucuccacggaguggagccccugcuccgugaccugcgggaacggcauccagguccggaucaagccggggagcgccaacaagcccaaggacgagcucgacuacgagaacgacaucgagaagaagaucugcaagauggagaagugcuccagcguguucaacguggucaacuccagcaucggccugaucauggugcuguccuuccucuuccugaacuga

SEQ ID NO: 3478 - RNA, 1170 nt, Artificial Sequence
  derived and/or modified CDS sequence (opt1) from Pf(Tz98-032)__BAM84786.1__CSP
augaugcgcaagcuggccauccucagcguguccagcuuccuguucgucgaggcccuguuccaggaguaccagugcuacggcuccagcuccaacacccgggugcucaacgagcugaacuacgacaacgcggggaccaaccuguacaacgagcucgagaugaacuacuacggcaagcaggagaacugguacagccugaagaagaacucccgcagccugggggagaacgacgacggcaacaacgaggacaacgagaagcuccggaagcccaagcacaagaagcugaagcagccggccgacgggaaccccgaccccaacgccaaccccaacguggacccgaacgccaaccccaacgucgaccccaacgccaaccccaacguggacccgaacgcgaaccccaacgccaaccccaacgccaaccccaacgccaacccgaacgcgaaccccaacgccaaccccaacgccaaccccaacgccaacccgaacgccaaccccaacgcgaaccccaacgccaaccccaacgccaacccgaacgccaaccccaacgccaaccccaacgcgaaccccaacguggacccgaacgccaaccccaacgccaaccccaacgccaaccccaacgccaacccgaacgcgaaccccaacgccaaccccaacgccaacccgaacgccaaccccaacgccaaccccaacgcgaaccccaacgccaacccgaacgccaaccccaacgccaaccccaacgcgaaccccaacgccaacccgaacgccaaccccaacgccaaccccaacgccaaccccaacaagaacaaccagggcaacggccaggggcacaacaugccgaacgaccccaaccgcaacgucgacgagaacgcgaacgccaacaacgccgugaagaacaacaacaacgaggagcccuccgacaagcacaucgagcaguaccugaacaagaucaagaacagcaucuccacggaguggagccccugcuccgugaccugcggcaacgggauccagguccggaucaagccgggcagcgccaacaagcccaaggacgagcucaacuacgagaacgacaucgagaagaagaucugcaagauggagaagugcuccagcguguucaacguggucaacuccagcaucgggcugaucauggugcuguccuuccucuuccugaacuga

SEQ ID NO: 3479 - RNA, 1170 nt, Artificial Sequence
  derived and/or modified CDS sequence (opt1) from Pf(Tz98-107)__BAM84796.1__CSP
augaugcgcaagcuggccauccucagcguguccagcuuccuguucgucgaggcccuguuccaggaguaccagugcuacggcuccagcuccaacacccgggugcucaacgagcugaacuacgacaacgcggggaccaaccuguacaacgagcucgagaugaacuacuacggcaagcaggagaacugguacagccugaagaagaacucccgcagccugggggagaacgacgacggcaacaacgaggacaacgagaagcuccggaagcccaagcacaagaagcugaagcagccggccgacgggaaccccgaccccaacgccaaccccaacguggacccgaacgccaaccccaacgucgaccccaacgccaaccccaacguggacccgaacgcgaaccccaacgccaaccccaacgccaaccccaacgccaacccgaacgcgaaccccaacgccaaccccaacgccaaccccaacgccaacccgaacgccaaccccaacgcgaaccccaacgccaaccccaacgccaacccgaacgccaaccccaacgccaaccccaacguggaccccaacgcgaacccgaacgccaaccccaacgccaaccccaacgccaaccccaacgccaacccgaacgcgaaccccaacgccaaccccaacgccaacccgaacgccaaccccaacgccaaccccaacgcgaaccccaacgccaacccgaacgccaaccccaacgccaaccccaacgcgaaccccaacgccaacccgaacgccaaccccaacgccaaccccaacgccaaccccaacaagaacaaccagggcaacggccaggggcacaacaugccgaacgaccccaaccgcaacgucgacgagaacgcgaacgccaacaacgccgugaagaacaacaacaacgaggagcccuccgaccagcacaucgagaaguaccugaagcggauccagaacagccucuccacggaguggagccccugcuccgugaccugcggcaacgggauccagguccgcaucaagccgggcagcgccaacaagcccaaggaccagcuggacuacgccaacgacaucgagaagaagaucugcaagauggagaagugcuccagcguguucaacguggucaacuccagcaucgggcugaucauggugcucuccuuccuguuccugaacuga

SEQ ID NO: 3480 - RNA, 1167 nt, Artificial Sequence
  derived and/or modified CDS sequence (opt1) from Pf(Asembo Bay)__AAN87599.1__CSP
augaugcgcaagcuggccauccucagcguguccagcuuccuguucgucgaggcccuguuccaggaguaccagugcuacggcuccagcuccaacacccgggugcucaacgagcugaacuacgacaacgcggggaccaaccuguacaacgagcucgagaugaacuacuacggcaagcaggagaacugguacagccugaagaagaacucccgcagccugggggagaacgacgacggcaacaacaacaacggggacaacggccgggagggcaaggacgaggacaagcgcgacgggaacaacgaggacaacgagaagcuccggaagcccaagcacaagaagcugaagcagccggccgacggcaaccccgaccccaacgccaaccccaacguggacccgaacgccaaccccaacgucgaccccaacgccaaccccaacguggacccgaacgcgaaccccaacgccaaccccaacgccaaccccaacgccaacccgaacgcgaaccccaacgccaaccccaacgccaaccccaacgccaacccgaacgccaaccccaacguggaccccaacgcgaaccccaacgccaacccgaacgccaaccccaacgccaaccccaacgccaaccccaacgcgaacccgaacgccaaccccaacgccaaccccaacgccaaccccaacgccaacccgaacgcgaaccccaacgccaaccccaacgccaacccgaacgccaaccccaacgccaaccccaacgcgaaccccaacgccaacccgaacgccaaccccaacgccaaccccaacaagaacaaccaggggaacggccaggggcacaacaugcccaacgacccgaaccgcaacgucgacgagaacgcgaacgccaacaacgccgugaagaacaacaacaacgaggagcccuccgacaagcacaucgagcaguaccugaacaagauccagaacagccucuccacggaguggagccccugcuccgugaccugcggcaacggcauccagguccggaucaagcccgggagcgccaacaagccgaaggaccagcuggacuacgccaacgacaucgagaagaagaucugcaagauggagaagugcuccagcguguucaacguggucaacuccagcaucggccugaucauggugcucuccuuccuguuccugaacuga

SEQ ID NO: 3481 - RNA, 1158 nt, Artificial Sequence
  derived and/or modified CDS sequence (opt1) from Pf(Asembo Bay)__AAN87581.1__CSP
augaugcgcaagcuggccauccucagcguguccagcuuccuguucgucgaggcccuguuccaggaguaccagugcuacggcuccagcuccaacacccgggugcucaacgagcugaacuacgacaacgcggggaccaaccuguacaacgagcucgagaugaacuacuacggcaagcaggagaacugguacagccugaagaagaacucccgcagccugggggagaacgacgacggcaacaacgaggacaacgagaagcuccggaagcccaagcacaagaagcugaagcagccggccgacgggaaccccgaccccaacgccaaccccaacguggacccgaacgccaaccccaacgucgaccccaacgccaaccccaacguggacccgaacgcgaaccccaacgccaaccccaacgccaaccccaacgccaacccgaacgcgaaccccaacgccaaccccaacgccaaccccaacgccaacccgaacgccaaccccaacgcgaaccccaacgccaaccccaacgccaacccgaacgccaaccccaacguggaccccaacgccaaccccaacgcgaacccgaacgccaaccccaacgccaaccccaacgccaaccccaacgccaacccgaacgcgaaccccaacgccaaccccaacgccaacccgaacgccaaccccaacgccaaccccaacgcgaaccccaacgccaacccgaacgccaaccccaacgccaaccccaacgcgaaccccaacgccaacccgaacgccaaccccaacgccaaccccaacaagaacaaccagggcaacggccaggggcacaacaugcccaacgacccgaaccgcaacgucgacgagaacgccaaggcgaacaacgccgugaagaacaacaacaacgaggagcccuccgacaagcacaucaagcaguaccugaagaagauccagaacagcaucuccacggaguggagccccugcuccgugaccugcggcaacgggauccagguccggaucaagcccggcagcgccgacaagccgaaggaccagcucgacuacgacaacgacaucgagaagaagaucugcaagauggagaagugcuccagcguguucaacguggucaacuccagcaucgggcugaucauggugcuguccuuccucuuccugaacuga

SEQ ID NO: 3482 - RNA, 1158 nt, Artificial Sequence
  derived and/or modified CDS sequence (opt1) from Pf(Gha1108-115)__BAM84810.1__CSP
augaugcgcaagcuggccauccucagcguguccagcuuccuguucgucgaggcccuguuccaggaguaccagugcuacggcuccagcuccaacacccgggugcucaacgagcugaacuacgacaacgcggggaccaaccuguacaacgagcucgagaugaacuacuacggcaagcaggagaacugguacagccugaagaagaacucccgcagccugggggagaacgacgacggcaacaacgaggacaacgagaagcuccggaagcccaagcacaagaagcugaagcagccggccgacgggaaccccgaccccaacgccaaccccaacguggacccgaacgccaaccccaacgucgaccccaacgccaaccccaacguggacccgaacgcgaaccccaacgccaaccccaacgccaaccccaacgccaacccgaacgcgaaccccaacgccaaccccaacgccaaccccaacgccaacccgaacgccaaccccaacgcgaaccccaacguggaccccaacgccaacccgaacgccaaccccaacgccaaccccaacgccaaccccaacgcgaacccgaacgccaaccccaacgccaaccccaacgccaaccccaacgccaacccgaacgcgaaccccaacgccaaccccaacgccaacccgaacgccaaccccaacgccaaccccaacgcgaaccccaacgccaacccgaacgccaaccccaacgccaaccccaacgcgaaccccaacgccaacccgaacgccaaccccaacgccaaccccaacaagaacaaccagggcaacggccaggggcacaacaugcccaacgacccgaaccgcaacgucgacgagaacgccaacgcgaacaacgccgugaagaacaacaacaacgaggagcccuccgaccagcacaucgagaaguaccugcagaagauccagaacagccucuccacggaguggagccccugcuccgugaccugcggcaacgggauccagguccggaucaagcccggcagcgccaacaagccgaaggaccagcugaacuacgagaacgacaucgagaagaagaucugcaagauggagaagugcuccagcguguucaacguggucaacuccagcaucgggcugaucauggugcucuccuuccuguuccugaacuga

SEQ ID NO: 3483 - RNA, 1158 nt, Artificial Sequence
  derived and/or modified CDS sequence (opt1) from Pf(Gha1108-119)__BAM84811.1__CSP
augaugcgcaagcuggccauccucagcguguccagcuuccuguucgucgaggcccuguuccaggaguaccagugcuacggcuccagcuccaacacccgggugcucaacgagcugaacuacgacaacgcggggaccaaccuguacaacgagcucgagaugaacuacuacggcaagcaggagaacugguacagccugaagaagaacucccgcagccugggggagaacgacgacggcaacaacgaggacaacgagaagcuccggaagcccaagcacaagaagcugaagcagccgggggacggcaaccccgaccccaacgccaaccccaacguggacccgaacgccaaccccaacgucgaccccaacgccaaccccaacguggacccgaacgccaaccccaacgcgaaccccaacgccaaccccaacgccaacccgaacgccaaccccaacgcgaaccccaacgccaaccccaacgccaacccgaacgccaaccccaacgccaaccccaacgcgaaccccaacgccaacccgaacgccaaccccaacguggaccccaacgccaaccccaacgccaacccgaacgcgaaccccaacgccaaccccaacgccaaccccaacgccaacccgaacgccaaccccaacgcgaaccccaacgccaacccgaacgccaaccccaacgccaaccccaacgccaaccccaacgcgaacccgaacgccaaccccaacgccaaccccaacgccaaccccaacgcgaacccgaacgccaaccccaacgccaaccccaacaagaacaaccagggcaacgggcagggccacaacaugcccaacgacccgaaccgcaacgucgacgagaacgccaacgccaacaacgcggugaagaacaacaacaacgaggagcccuccgaccagcacaucgagaaguaccugaagacgaucaagaacagccucuccaccgaguggagccccugcuccgugaccugcgggaacggcauccagguccggaucaagcccgggagcgccaacaagccgaaggaccagcuggacuacgagaacgacaucgagaagaagaucugcaagauggagaagugcuccagcguguucaacguggucaacuccagcaucggccugaucauggugcucuccuuccuguuccugaacuga

SEQ ID NO: 3484 - RNA, 1158 nt, Artificial Sequence
  derived and/or modified CDS sequence (opt1) from Pf(Gha1109-071)__BAM84836.1__CSP
augaugcgcaagcuggccauccucagcguguccagcuuccuguucgucgaggcccuguuccaggaguaccagugcuacggcuccagcuccaacacccgggugcucaacgagcugaacuacgacaacgcggggaccaaccuguacaacgagcucgagaugaacuacuacggcaagcaggagaacugguacagccugaagaagaacucccgcagccugggggagaacgacgacggcaacaacgaggacaacgagaagcuccggaagcccaagcacaagaagcugaagcagccgggggacggcaaccccgaccccaacgccaaccccaacguggacccgaacgccaaccccaacgucgaccccaacgccaaccccaacguggacccgaacgccaaccccaacgcgaaccccaacgccaaccccaacgccaacccgaacgccaaccccaacgcgaaccccaacgccaaccccaacgccaacccgaacgccaaccccaacgccaaccccaacgcgaaccccaacgccaacccgaacgccaaccccaacgccaaccccaacguggaccccaacgccaacccgaacgcgaaccccaacgccaaccccaacgccaaccccaacgccaacccgaacgccaaccccaacgcgaaccccaacgccaacccgaacgccaaccccaacgccaaccccaacgccaaccccaacgcgaacccgaacgccaaccccaacgccaaccccaacgccaaccccaacgcgaacccgaacgccaaccccaacgccaaccccaacaagaacaaccagggcaacgggcagggccacaacaugcccaacgacccgaaccgcaacgucgacgagaacgccaacgccaacaacgcggugaagaacaacaacaacgaggagcccuccgaccagcacaucgagaaguacaucaagaagauccagaacagccuguccacggaguggagccccugcuccgugaccugcgggaacggcauccagguccggaucaagcccgggagcgccaacaagccgaaggacgagcucaacuacgagaacgacaucgagaagaagaucugcaagauggagaagugcuccagcguguucaacguggucaacuccagcaucggccugaucauggugcuguccuuccucuuccugaacuga

SEQ ID NO: 3485 - RNA, 1158 nt, Artificial Sequence
  derived and/or modified CDS sequence (opt1) from Pf(Gha1109-163)__BAM84827.1__CSP
augaugcgcaagcuggccauccucagcguguccagcuuccuguucgucgaggcccuguuccaggaguaccagugcuacggcuccagcuccaacacccgggugcucaacgagcugaacuacgacaacgcggggaccaaccuguacaacgagcucgagaugaacuacuacggcaagcaggagaacugguacagccugaagaagaacucccgcagccugggggagaacgacgacggcaacaacgaggacaacgagaagcuccggaagcccaagcacaagaagcugaagcagccggccgacgggaaccccgaccccaacgccaaccccaacguggacccgaacgccaaccccaacgucgaccccaacgccaaccccaacguggacccgaacgcgaaccccaacgccaaccccaacgccaaccccaacgccaacccgaacgcgaaccccaacgccaaccccaacgccaaccccaacgccaacccgaacgccaaccccaacgcgaaccccaacgccaaccccaacgccaacccgaacgccaaccccaacgccaaccccaacguggaccccaacgcgaacccgaacgccaaccccaacgccaaccccaacgccaaccccaacgccaacccgaacgcgaaccccaacgccaaccccaacgccaacccgaacgccaaccccaacgccaaccccaacgcgaaccccaacgccaacccgaacgccaaccccaacgccaaccccaacgcgaaccccaacgccaacccgaacgccaaccccaacgccaaccccaacaagaacaaccagggcaacggccaggggcacaacaugcccaacgacccgaaccgcaacgucgacgagaacgccaacgcgaacaacgccgugaagaacaacaacaacgaggagcccuccgaccagcacaucgagaaguaccugaagacgauccagaacagccucuccaccgaguggagccccugcuccgugaccugcggcaacgggauccagguccggaucaagcccggcagcgccaacaagccgaaggaccagcuggacuacgccaacgacaucgagaagaagaucugcaagauggagaagugcuccagcguguucaacguggucaacuccagcaucgggcugaucauggugcucuccuuccuguuccugaacuga

SEQ ID NO: 3486 - RNA, 1158 nt, Artificial Sequence
  derived and/or modified CDS sequence (opt1) from Pf(Tz93-007)__BAM84748.1__CSP
augaugcgcaagcuggccauccucagcguguccagcuuccuguucgucgaggcccuguuccaggaguaccagugcuacggcuccagcuccaacacccgggugcucaacgagcugaacuacgacaacgcggggaccaaccuguacaacgagcucgagaugaacuacuacggcaagcaggagaacugguacagccugaagaagaacucccgcagccugggggagaacgacgacggcaacaacgaggacaacgagaagcuccggaagcccaagcacaagaagcugaagcagccggccgacgggaaccccgaccccaacgccaaccccaacguggacccgaacgccaaccccaacgucgaccccaacgccaaccccaacguggacccgaacgcgaaccccaacgccaaccccaacgccaaccccaacgccaacccgaacgcgaaccccaacgccaaccccaacgccaaccccaacgccaacccgaacgccaaccccaacgcgaaccccaacgccaaccccaacgccaacccgaacgccaaccccaacguggaccccaacgccaaccccaacgcgaacccgaacgccaaccccaacgccaaccccaacgccaaccccaacgccaacccgaacgcgaaccccaacgccaaccccaacgccaacccgaacgccaaccccaacgccaaccccaacgcgaaccccaacgccaacccgaacgccaaccccaacgccaaccccaacgcgaaccccaacgccaacccgaacgccaaccccaacgccaaccccaacaagaacaaccagggcaacggccaggggcacaacaugcccaacgacccgaaccgcaacgucgacgagaacgccaacgcgaacaacgccgugaagaacaacaacaacgaggagcccuccgacaagcacaucgagcaguaccugaagacgaucaagaacagccucuccaccgaguggagccccugcuccgugaccugcggcaacgggauccagguccggaucaagcccggcagcgccaacaagccgaaggacgagcuggacuacgccaacgacaucgagaagaagaucugcaagauggagaagugcuccagcguguucaacguggucaacuccagcaucgggcugaucauggugcucuccuuccuguuccugaacuga

SEQ ID NO: 3487 - RNA, 1158 nt, Artificial Sequence
  derived and/or modified CDS sequence (opt1) from Pf(Tz93-008)__BAM84749.1__CSP
augaugcgcaagcuggccauccucagcguguccagcuuccuguucgucgaggcccuguuccaggaguaccagugcuacggcuccagcuccaacacccgggugcucaacgagcugaacuacgacaacgcggggaccaaccuguacaacgagcucgagaugaacuacuacggcaagcaggagaacugguacagccugaagaagaacucccgcagccugggggagaacgacgacggcaacaacgaggacaacgagaagcuccggaagcccaagcacaagaagcugaagcagccggccgacgggaaccccgaccccaacgccaaccccaacguggacccgaacgccaaccccaacgucgaccccaacgccaaccccaacguggacccgaacgcgaaccccaacgccaaccccaacgccaaccccaacgccaacccgaacgcgaaccccaacgccaaccccaacgccaaccccaacgccaacccgaacgccaaccccaacgcgaaccccaacgccaaccccaacgccaacccgaacgccaaccccaacguggaccccaacgccaaccccaacgcgaacccgaacgccaaccccaacgccaaccccaacgccaaccccaacgccaacccgaacgcgaaccccaacgccaaccccaacgccaacccgaacgccaaccccaacgccaaccccaacgcgaaccccaacgccaacccgaacgccaaccccaacgccaaccccaacgcgaaccccaacgccaacccgaacgccaaccccaacgccaaccccaacaagaacaaccagggcaacggccaggggcacaacaugcccaacgacccgaaccgcaacgucgacgagaacgccaacgcgaacaacgccgugaagaacaacaacaacgaggagcccuccgacaagcacaucacggaguaccugaagaagauccagaacagccucuccaccgaguggagccccugcuccgugaccugcggcaacgggauccagguccggaucaagcccggcagcgccgggaaguccaagaacgagcuggacuacgagaacgacaucgagaagaagaucugcaagauggagaagugcagcuccguguucaacguggucaacagcuccaucggccugaucauggugcucagcuuccuguuccugaacuga

SEQ ID NO: 3488 - RNA, 1158 nt, Artificial Sequence
  derived and/or modified CDS sequence (opt1) from Pf(Tz93-013)__BAM84751.1__CSP
augaugcgcaagcuggccauccucagcguguccagcuuccuguucgucgaggcccuguuccaggaguaccagugcuacggcuccagcuccaacacccgggugcucaacgagcugaacuacgacaacgcggggaccaaccuguacaacgagcucgagaugaacuacuacggcaagcaggagaacugguacagccugaagaagaacucccgcagccugggggagaacgacgacggcaacaacgaggacaacgagaagcuccggaagcccaagcacaagaagcugaagcagccggccgacgggaaccccgaccccaacgccaaccccaacguggacccgaacgccaaccccaacgucgaccccaacgccaaccccaacguggacccgaacgcgaaccccaacgccaaccccaacgccaaccccaacgccaacccgaacgcgaaccccaacgccaaccccaacgccaaccccaacgccaacccgaacgccaaccccaacgcgaaccccaacgccaaccccaacgccaacccgaacgccaaccccaacguggaccccaacgccaaccccaacgcgaacccgaacgccaaccccaacgccaaccccaacgccaaccccaacgccaacccgaacgcgaaccccaacgccaaccccaacgccaacccgaacgccaaccccaacgccaaccccaacgcgaaccccaacgccaacccgaacgccaaccccaacgccaaccccaacgcgaaccccaacgccaacccgaacgccaaccccaacgccaaccccaacaagaacaaccagggcaacggccaggggcacaacaugcccaacgacccgaaccgcaacgucaacgagaacgccaacgcgaacaacgccgugaagaacaacaacaacgaggagcccuccgacaagcacaucacggaguaccugaagaagauccagaacagccucuccaccgaguggagccccugcuccgugaccugcggcaacgggauccagguccggaucaagcccggcagcgccgggaagucccgcgacgagcuggacuacgagaacgacaucgagaagaagaucugcaagauggagaagugcagcuccguguucaacguggucaacagcuccaucggccugaucauggugcucagcuuccuguuccugaacuga

SEQ ID NO: 3489 - RNA, 1158 nt, Artificial Sequence
  derived and/or modified CDS sequence (opt1) from Pf(Tz93-048)__BAM84761.1__CSP
augaugcgcaagcuggccauccucagcguguccagcuuccuguucgucgaggcccuguuccaggaguaccagugcuacggcuccagcuccaacacccgggugcucaacgagcugaacuacgacaacgcggggaccaaccuguacaacgagcucgagaugaacuacuacggcaagcaggagaacugguacagccugaagaagaacucccgcagccugggggagaacgacgacggcaacaacgaggacaacgagaagcuccggaagcccaagcacaagaagcugaagcagccggccgacgggaaccccgaccccaacgccaaccccaacguggacccgaacgccaaccccaacgucgaccccaacgccaaccccaacguggacccgaacgcgaaccccaacgccaaccccaacgccaaccccaacgccaacccgaacgcgaaccccaacgccaaccccaacgccaaccccaacgccaacccgaacgccaaccccaacgcgaaccccaacgccaaccccaacgccaacccgaacgccaaccccaacgccaaccccaacguggaccccaacgcgaacccgaacgccaaccccaacgccaaccccaacgccaaccccaacgccaacccgaacgcgaaccccaacgccaaccccaacgccaacccgaacgccaaccccaacgccaaccccaacgcgaaccccaacgccaacccgaacgccaaccccaacgccaaccccaacgcgaaccccaacgccaacccgaacgccaaccccaacgccaaccccaacaagaacaaccagggcaacggccaggggcacaacaugcccaacgacccgaaccgcaacgucgacgagaacgccaacgcgaacaacgccgugaagaacaacaacaacgaggagcccuccgaccagcacaucgagaaguaccugaagaucaucaagaacagccucuccacggaguggagccccugcuccgugaccugcggcaacgggauccagguccggaucaagcccggcagcgccaacaagccgaaggaccagcuggacuacgccaacgacaucgagaagaagaucugcaagauggagaagugcuccagcguguucaacguggucaacuccagcaucgggcugaucauggugcucuccuuccuguuccugaacuga

SEQ ID NO: 3490 - RNA, 1158 nt, Artificial Sequence
  derived and/or modified CDS sequence (opt1) from Pf(Tz93-120)__BAM84776.1__CSP
augaugcgcaagcuggccauccucagcguguccagcuuccuguucgucgaggcccuguuccaggaguaccagugcuacggcuccagcuccaacacccgggugcucaacgagcugaacuacgacaacgcggggaccaaccuguacaacgagcucgagaugaacuacuacggcaagcaggagaacugguacagccugaagaagaacucccgcagccugggggagaacgacgacggcaacaacgaggacaacgagaagcuccggaagcccaagcacaagaagcugaagcagccggccgacgggaaccccgaccccaacgccaaccccaacguggacccgaacgccaaccccaacgucgaccccaacgccaaccccaacguggacccgaacgcgaaccccaacgccaaccccaacgccaaccccaacgccaacccgaacgcgaaccccaacgccaaccccaacgccaaccccaacgccaacccgaacgccaaccccaacgcgaaccccaacgccaaccccaacgccaacccgaacgccaaccccaacguggaccccaacgccaaccccaacgcgaacccgaacgccaaccccaacgccaaccccaacgccaaccccaacgccaacccgaacgcgaaccccaacgccaaccccaacgccaacccgaacgccaaccccaacgccaaccccaacgcgaaccccaacgccaacccgaacgccaaccccaacgccaaccccaacgcgaaccccaacgccaacccgaacgccaaccccaacgccaaccccaacaagaacaaccagggcaacggccaggggcacaacaugcccaacgacccgaaccgcaacgucgacgagaacgccaacgcgaacaacgccgugaagaacaacaacaacgaggagcccuccgaccagcacaucgagaaguaccugaagaucauccagaacagccucuccacggaguggagccccugcuccgugaccugcggcaacgggauccagguccggaucaagcccggcagcgccaacaagccgaaggaccagcuggacuacgccaacgacaucgagaagaagaucugcaagauggagaagugcuccagcguguucaacguggucaacuccagcaucgggcugaucauggugcucuccuuccuguuccugaacuga

SEQ ID NO: 3491 - RNA, 1158 nt, Artificial Sequence
  derived and/or modified CDS sequence (opt1) from Pf(Tz98-101)__BAM84794.1__CSP
augaugcgcaagcuggccauccucagcguguccagcuuccuguucgucgaggcccuguuccaggaguaccagugcuacggcuccagcuccaacacccgggugcucaacgagcugaacuacgacaacgcggggaccaaccuguacaacgagcucgagaugaacuacuacggcaagcaggagaacugguacagccugaagaagaacucccgcagccugggggagaacgacgacggcaacaacgaggacaacgagaagcuccggaagcccaagcacaagaagcugaagcagccggccgacgggaaccccgaccccaacgccaaccccaacguggacccgaacgccaaccccaacgucgaccccaacgccaaccccaacguggacccgaacgcgaaccccaacgccaaccccaacgccaaccccaacgccaacccgaacgcgaaccccaacgccaaccccaacgccaaccccaacgccaacccgaacgccaaccccaacgcgaaccccaacgccaaccccaacgccaacccgaacgccaaccccaacgccaaccccaacguggaccccaacgcgaacccgaacgccaaccccaacgccaaccccaacgccaaccccaacgccaacccgaacgcgaaccccaacgccaaccccaacgccaacccgaacgccaaccccaacgccaaccccaacgcgaaccccaacgccaacccgaacgccaaccccaacgccaaccccaacgcgaaccccaacgccaacccgaacgccaaccccaacgccaaccccaacaagaacaaccagggcaacggccaggggcacaacaugcccaacgacccgaaccgcaacgucgacgagaacgccaacgcgaacaacgccgugaagaacaacaacaacgaggagcccuccgacaagcacaucacggaguaccugaagcggauccagaacagccucuccaccgaguggagccccugcuccgugaccugcggcaacgggauccagguccgcaucaagcccggcagcgccgggaaguccaagaacgagcuggacuacgagaacgacaucgagaagaagaucugcaagauggagaagugcagcuccguguucaacguggucaacagcuccaucggccugaucauggugcucagcuuccuguuccugaacuga

SEQ ID NO: 3492 - RNA, 1158 nt, Artificial Sequence
  derived and/or modified CDS sequence (opt1) from Pf(Yaounde)__AAN87580.1__CSP
augaugcgcaagcuggccauccucagcguguccagcuuccuguucgucgaggcccuguuccaggaguaccagugcuacggcuccagcuccaacacccgggugcucaacgagcugaacuacgacaacgcggggaccaaccuguacaacgagcucgagaugaacuacuacggcaagcaggagaacugguacagccugaagaagaacucccgcagccugggggagaacgacgacggcaacaacgaggacaacgagaagcuccggaagcccaagcacaagaagcugaagcagccggccgacgggaaccccgaccccaacgccaaccccaacguggacccgaacgccaaccccaacgucgaccccaacgccaaccccaacguggacccgaacgcgaaccccaacgccaaccccaacgccaaccccaacgccaacccgaacgcgaaccccaacgccaaccccaacgccaaccccaacgccaacccgaacgccaaccccaacgcgaaccccaacgccaaccccaacgccaacccgaacgccaaccccaacguggaccccaacgccaaccccaacgcgaacccgaacgccaaccccaacgccaaccccaacgccaaccccaacgccaacccgaacgcgaaccccaacgccaaccccaacgccaacccgaacgccaaccccaacgccaaccccaacgcgaaccccaacgccaacccgaacgccaaccccaacgccaaccccaacgcgaaccccaacgccaacccgaacgccaaccccaacgccaaccccaacaagaacaaccagggcaacggccaggggcacaacaugcccaacgacccgaaccgcaacgucgacgagaacgccaaggcgaacaacgccgugaagaacaacaacaacgaggagcccuccgacaagcacaucgagcaguaccugaagacgauccagaacagccucuccaccgaguggagccccugcuccgugaccugcggcaacgggauccagguccggaucaagcccggcagcgccaacaagccgaaggaccagcuggacuacgagaacgacaucgagaagaagaucugcaagauggagaagugcuccagcguguucaacguggucaacuccagcaucgggcugaucauggugcucuccuuccuguuccugaacuga

SEQ ID NO: 3493 - RNA, 1143 nt, Artificial Sequence
  derived and/or modified CDS sequence (opt1) from Pf(Asembo Bay)__AAN87610.1__CSP
augaugcgcaagcuggccauccucagcguguccagcuuccuguucgucgaggcccuguuccaggaguaccagugcuacggcuccagcuccaacacccgggugcucaacgagcugaacuacgacaacgcggggaccaaccuguacaacgagcucgagaugaacuacuacggcaagcaggagaacugguacagccugaagaagaacucccgcagccugggggagaacgacgacggcaacaacaacaacggggacaacggccgggagggcaaggacgaggacaagcgcgacgggaacaacgaggacaacgagaagcuccggaagcccaagcacaagaagcugaagcagccgggcgacgggaaccccgaccccaacgccaaccccaacguggacccgaacgccaaccccaacgucgaccccaacgccaaccccaacguggacccgaacgccaaccccaacgcgaaccccaacgccaaccccaacgccaacccgaacgccaaccccaacgcgaaccccaacgccaaccccaacgccaacccgaacgccaaccccaacgccaaccccaacgcgaaccccaacgccaacccgaacgccaaccccaacgccaaccccaacgccaaccccaacgcgaacccgaacgccaaccccaacgccaaccccaacgccaaccccaacgccaacccgaacgcgaaccccaacgccaaccccaacgccaacccgaacgccaaccccaacgccaaccccaacgcgaaccccaacgccaacccgaacaagaacaaccagggcaacgggcagggccacaacaugcccaacgaccccaaccgcaacguggacgagaacgccaacgccaacaacgcggucaagaacaacaacaacgaggagcccuccgacaagcacaucgagcaguaccugaacaagaucaagaacagcaucuccacggaguggagcccgugcuccgugaccugcggcaacgggauccaggugcggaucaagcccggcagcgccaacaagcccaaggaccagcucgacuacgccaacgacaucgagaagaagaucugcaagauggagaagugcuccagcgucuucaacguggugaacuccagcaucgggcugaucaugguccuguccuuccucuuccugaacuga

SEQ ID NO: 3494 - RNA, 1143 nt, Artificial Sequence
  derived and/or modified CDS sequence (opt1) from Pf(India)__AAN87619.1__CSP
augaugcgcaagcuggccauccucagcguguccagcuuccuguucgucgaggcccuguuccaggaguaccagugcuacggcuccagcuccaacacccgggugcucaacgagcugaacuacgacaacgcggggaccaaccuguacaacgagcucgagaugaacuacuacggcaagcaggagaacugguacagccugaagaagaacucccgcagccugggggagaacgacgacggcaacaacaacaacggggacaacggccgggagggcaaggacgaggacaagcgcgacgggaacaacgaggacaacgagaagcuccggaagcccaagcacaagaagcugaagcagccgggcggggacaaccccgaccccaacgccaaccccaacgccaacccgaacgccaaccccaacgccaaccccaacgcgaaccccaacgccaacccgaacguggaccccaacgccaaccccaacgccaaccccaacgcgaacccgaacgccaaccccaacgccaaccccaacgccaaccccaacgccaacccgaacgcgaaccccaacgccaaccccaacgccaaccccaacgccaacccgaacgccaaccccaacgcgaaccccaacgccaaccccaacgccaacccgaacgccaaccccaacgccaaccccaacgcgaaccccaacgccaacccgaacgccaaccccaacgccaaccccaacgccaacccgaacgcgaaccccaacgccaaccccaacgccaaccccaacgccaacccgaacaagaacaaccagggcaacgggcagggccacaacaugcccaacgaccccaaccgcaacgucgacgagaacgcgaacgccaacaacgccgugaagaacaacaacaacgaggagcccuccgacaagcacaucgagcaguaccugaagaagauccagaacagccucuccacggaguggagcccgugcuccgugaccugcggcaacgggauccagguccggaucaagcccggcagcgccaacaagcccaaggacgagcuggacuacgagaacgacaucgagaagaagaucugcaagauggagaagugcuccagcguguucaacguggucaacuccagcaucgggcugaucauggugcucuccuuccuguuccugaacuga

SEQ ID NO: 3495 - RNA, 1107 nt, Artificial Sequence
  derived and/or modified CDS sequence (opt1) from Pf(India)__AAN87617.1__CSP
augaugcgcaagcuggccauccucagcguguccagcuuccuguucgucgaggcccuguuccaggaguaccagugcuacggcuccagcuccaacacccgggugcucaacgagcugaacuacgacaacgcggggaccaaccuguacaacgagcucgagaugaacuacuacggcaagcaggagaacugguacagccugaagaagaacucccgcagccugggggagaacgacgacggcaacaacaacaacggggacaacggccgggagggcaaggacgaggacaagcgcgacgggaacaacgaggacaacgagaagcuccggaagcccaagcacaagaagcugaagcagccgggcggggacaaccccgaccccaacgccaaccccaacguggacccgaacgccaaccccaacgccaaccccaacgccaaccccaacgcgaacccgaacgccaaccccaacgccaaccccaacgccaaccccaacgcgaacccgaacgccaaccccaacgccaaccccaacgccaaccccaacgccaacccgaacgcgaaccccaacgccaaccccaacgccaaccccaacgccaacccgaacgccaaccccaacgcgaaccccaacgccaaccccaacgccaacccgaacgccaaccccaacgccaaccccaacgcgaaccccaacgccaacccgaacgccaaccccaacgccaaccccaacgccaacccgaacgcgaaccccaacaagaacaaccagggcaacgggcagggccacaacaugcccaacgaccccaaccgcaacgucgacgagaacgccaacgccaacaacgccgugaagaacaacaacaacgaggagccguccgacaagcacaucgagcaguaccugaagaagauccagaacagccucuccacggaguggagccccugcuccgugaccugcggcaacgggauccagguccggaucaagcccggcagcgcgaacaagcccaaggacgagcuggacuacgagaacgacaucgagaagaagaucugcaagauggagaagugcuccagcguguucaacguggucaacuccagcaucgggcugaucauggugcucuccuuccuguuccugaacuga

SEQ ID NO: 3496 - RNA, 1095 nt, Artificial Sequence
  derived and/or modified CDS sequence (opt1) from Pf(India)__AAN87616.1__CSP
augaugcgcaagcuggccauccucagcguguccagcuuccuguucgucgaggcccuguuccaggaguaccagugcuacggcuccagcuccaacacccgggugcucaacgagcugaacuacgacaacgcggggaccaaccuguacaacgagcucgagaugaacuacuacggcaagcaggagaacugguacagccugaagaagaacucccgcagccugggggagaacgacgacggcaacaacaacaacggggacaacggccgggagggcaaggacgaggacaagcgcgacgggaacaacgaggacaacgagaagcuccggaagcccaagcacaagaagcugaagcagccgggcggggacaaccccgaccccaacgccaaccccaacguggacccgaacgccaaccccaacgccaaccccaacgccaaccccaacgcgaacccgaacgccaaccccaacgccaaccccaacgccaaccccaacgcgaacccgaacgccaaccccaacgccaaccccaacgccaaccccaacgccaacccgaacgcgaaccccaacgccaaccccaacgccaaccccaacgccaacccgaacgccaaccccaacgcgaaccccaacgccaaccccaacgccaacccgaacgccaaccccaacgccaaccccaacgcgaaccccaacgccaacccgaacgccaaccccaacgccaaccccaacgccaacccgaacaagaacaaccagggcaacgggcagggccacaacaugcccaacgaccccaaccgcaacgucgacgagaacgcgaacgccaacaacgccgugaagaacaacaacaacgaggagcccuccgacaagcacaucgagcaguaccugaagaagauccagaacagccucuccacggaguggagcccgugcuccgugaccugcggcaacgggauccagguccggaucaagcccggcagcgccaacaagcccaaggacgagcuggacuacgagaacgacaucgagaagaagaucugcaagauggagaagugcuccagcguguucaacguggucaacuccagcaucgggcugaucauggugcucuccuuccuguuccugaacuga

SEQ ID NO: 3497 - RNA, 1092 nt, Artificial Sequence
  derived and/or modified CDS sequence (opt1) from Pf(Bolivar)__AAN87600.1__CSP
augaugcgcaagcuggccauccucagcguguccagcuuccuguucgucgaggcccuguuccaggaguaccagugcuacggcuccagcuccaacacccgggugcucaacgagcugaacuacgacaacgcggggaccaaccuguacaacgagcucgagaugaacuacuacggcaagcaggagaacugguacagccugaagaagaacucccgcagccugggggagaacgacgacggcaacaacaacaacggggacaacggccgggagggcaaggacgaggacaagcgcgacgggaacaacgaggacaacgagaagcuccggaagcccaagcacaagaagcugaagcagccggccgacggcaaccccgaccccaacgccaaccccaacguggacccgaacgccaaccccaaccccaacgccaacccgcccaacgcgaaccccaacgccaaccccaacgccaaccccaacgccaacccgaacgucgaccccaacgcgaaccccaacgccaaccccaacgccaacccgaacgccaaccccaacgccaaccccaacgcgaaccccaacgccaacccgaacgccaaccccaacgccaaccccaacgccaaccccaacgcgaacccgaacgccaaccccaacgccaaccccaacgccaaccccaacgccaacccgaacgcgaaccccaacgccaaccccaacgccaacccgaacgccaaccccaacaagaacaaccaggggaacggccaggggcacaacaugcccaacgaccccaaccgcaacguggacgagaacgccaacgcgaacaacgccgugaagaacaacaacaacgaggagccguccgacaagcacaucgagcaguaccugaacaagauccagaacagccucuccacggaguggagccccugcuccgugaccugcggcaacggcauccagguccggaucaagcccgggagcgccaacaagcccaaggaccagcuggacuacgccaacgacaucgagaagaagaucugcaagauggagaagugcuccagcguguucaacgucgugaacuccagcaucggccugaucauggugcucuccuuccuguuccugaacuga

SEQ ID NO: 3498 - RNA, 1083 nt, Artificial Sequence
  derived and/or modified CDS sequence (opt1) from Pf(Asembo Bay)__AAN87597.1__CSP
augaugcgcaagcuggccauccucagcguguccagcuuccuguucgucgaggcccuguuccaggaguaccagugcuacggcuccagcuccaacacccgggugcucaacgagcugaacuacgacaacgcggggaccaaccuguacaacgagcucgagaugaacuacuacggcaagcaggagaacugguacagccugaagaagaacucccgcagccugggggagaacgacgacggcaacaacaacaacggggacaacggccgggagggcaaggacgaggacaagcgcgacgggaacaacgaggacaacgagaagcuccggaagcccaagcacaagaagcugaagcagccggccgacggcaaccccgaccccaacgccaaccccaacguggacccgaacgccaaccccaacgccaaccccaacgcgaaccccaacgccaacccgaacgccaaccccaacgccaaccccaacgucgaccccaacgcgaacccgaacgccaaccccaacgccaaccccaacgccaaccccaacgccaacccgaacgcgaaccccaacgccaaccccaacgccaaccccaacgccaacccgaacgccaaccccaacgcgaaccccaacgccaaccccaacgccaacccgaacgccaaccccaacgccaaccccaacgcgaaccccaacgccaacccgaacgccaaccccaacgccaaccccaacaagaacaaccaggggaacggccaggggcacaacaugccgaacgaccccaaccgcaacguggacgagaacgccaacgcgaacaacgccgugaagaacaacaacaacgaggagcccuccgacaagcacaucaaggaguaccugaagaucauccccaacagccucuccacggaguggagcccgugcuccgugaccugcggcaacggcauccagguccggaucaagcccgggagcgccggcaagcccaaggacgagcuggacuacgccaacgacaucgagaagaagaucugcaagauggagaagugcuccagcguguucaacgucgugaacuccagcaucgggcugaucauggugcucuccuuccuguuccugaacuga

SEQ ID NO: 3499 - RNA, 1083 nt, Artificial Sequence
  derived and/or modified CDS sequence (opt1) from Pf(Asembo Bay)__AAN87596.1__CSP
augaugcgcaagcuggccauccucagcguguccagcuuccuguucgucgaggcccuguuccaggaguaccagugcuacggcuccagcuccaacacccgggugcucaacgagcugaacuacgacaacgcggggaccaaccuguacaacgagcucgagaugaacuacuacggcaagcaggagaacugguacagccugaagaagaacucccgcagccugggggagaacgacgacggcaacaacaacaacggggacaacggccgggagggcaaggacgaggacaagcgcgacgggaacaacgaggacaacgagaagcuccggaagcccaagcacaagaagcugaagcagccggccgacggcaaccccgaccccaacgccaaccccaacguggacccgaacgccaaccccaacgccaaccccaacgcgaaccccaacgccaacccgaacgccaaccccaacgccaaccccaacgucgaccccaacgcgaacccgaacgccaaccccaacgccaaccccaacgccaaccccaacgccaacccgaacgcgaaccccaacgccaaccccaacgccaaccccaacgccaacccgaacgccaaccccaacgcgaaccccaacgccaaccccaacgccaacccgaacgccaaccccaacgccaaccccaacgcgaaccccaacgccaacccgaacgccaaccccaacgccaaccccaacaagaacaaccaggggaacggccaggggcacaacaugccgaacgaccccaaccgcaacguggacgagaacgccaacgcgaacaacgccgugaagaacaacaacaacgaggagcccuccgacaagcacaucaaggaguaccugaagaucauccagaacagccucuccacggaguggagccccugcuccgugaccugcggcaacggcauccagguccggaucaagccggggagcgccggcaagcccaaggacgagcuggacuacgccaacgacaucgagaagaagaucugcaagauggagaagugcuccagcguguucaacgucgugaacuccagcaucgggcugaucauggugcucuccuuccuguuccugaacuga

SEQ ID NO: 3500 - RNA, 1071 nt, Artificial Sequence
  derived and/or modified CDS sequence (opt1) from Pf(India)__AAN87615.1__CSP
augaugcgcaagcuggccauccucagcguguccagcuuccuguucgucgaggcccuguuccaggaguaccagugcuacggcuccagcuccaacacccgggugcucaacgagcugaacuacgacaacgcggggaccaaccuguacaacgagcucgagaugaacuacuacggcaagcaggagaacugguacagccugaagaagaacucccgcagccugggggagaacgacgacggcaacaacaacaacggggacaacggccgggagggcaaggacgaggacaagcgcgacgggaacaacgaggacaacgagaagcuccggaagcccaagcacaagaagcugaagcagccgggcgacgggaaccccgaccccaacgccaaccccaacguggacccgaacgccaaccccaacgccaaccccaacgccaaccccaacgcgaacccgaacgccaaccccaacgccaaccccaacgccaaccccaacgcgaacccgaacgccaaccccaacgccaaccccaacgccaaccccaacgccaacccgaacgucaaccccaacgcgaaccccaacgccaaccccaacgccaacccgaacgccaaccccaacgccaaccccaacgcgaaccccaacgccaacccgaacgccaaccccaacgccaaccccaacgccaaccccaacgcgaacccgaacgccaaccccaacaagaacaaccagggcaacgggcagggccacaacaugcccaacgacccgaaccgcaacguggacgagaacgccaacgugaacaacgccgucaagaacaacaacaacgaggagcccuccgacaagcacaucgagcaguaccugaagaagauccagaacagccucuccacggaguggagccccugcuccgugaccugcggcaacgggauccaggugcggaucaagcccggcagcgccaacaagccgaaggacgagcuggacuacgagaacgacaucgagaagaagaucugcaagauggagaagugcuccagcgucuucaacguggugaacuccagcaucgggcugaucaugguccucuccuuccuguuccugaacuga

SEQ ID NO: 3501 - RNA, 1110 nt, Artificial Sequence
  derived and/or modified CDS sequence (opt1) from Pk(UMMAC6)__AHF20622.1__CSP
augaagaacuucauccugcucgccgugagcuccauccugcuggucgaccuccugcccacccacuucgagcacaacguggaccugagccgcgccaucaacgugaacggcgucuccuucaacaacguggacaccagcucccucggggcggcccaggugcggcagagcgccucccgcggccgggggcugggcgagaagccgaaggagggggccgacaaggagaagaagaaggagaaggagaaggagaaggaggaggagcccaagaagcccaacgagaacaagcugauccagcccgagcagccggccgcgggcgccggcggggagcagcccgccgccggcgccgggggcgagcagcccgcggccggggccggcggcgagcagcccgccgcgggggccggcggggagcagccggccgccggcgccggcggggagcagcccgcggccggcgcccgcggggagcagcccgccgccggcgccgggggcgagcagcccgcggccggcgccgggggcgagcagccggccgcgggggccggcggggagcagcccgccgccggcgcgggcggggagcagcccgccgccggcgccgggggcgagcagcccgccgcgggggcccggggcgagcagccggccgccggcgccgggggcgagcagcccgcggccggggccggcggcgagcagcccgcccccgccccgcgccgggagcagcccgcggccggggccggcggggagcagcccgcccccgcgccgcgccgggagcagcccgcccccggcgccggggccggcgacggcgcccgcgggggcaacgcgggggccggcaaggggcagggccagaacaaccagggcgccaacguccccaacgagaagguggugaacgacuaccuccacaagauccggagcuccgucacgaccgaguggaccccgugcagcgugaccugcgggaacggcgugcgcauccggcgcaaggggcacgccggcaacaagaaggccgaggaccugacgauggacgaccuggaggucgaggcgugcgugauggacaagugcgccgggaucuucaacguggucuccaacagccucggccuggugauccugcucgugcuggcccuguucaacuga

SEQ ID NO: 3502 - RNA, 1092 nt, Artificial Sequence
  derived and/or modified CDS sequence (opt1) from Pk(H (SL1_PK))__XP_002259002.1__CSP
augaagaacuucauccugcucgccgugagcuccauccugcuggucgaccuccugcccacccacuucgagcacaacguggaccugagccgcgccaucaacgugaacggcgucuccuucaacaacguggacaccagcucccucggggcggcccaggugcggcagagcgccucccgcggccgggggcugggcgagaagccgaaggagggggccgacaaggagaagaagaaggagaagggcaaggagaaggaggaggagcccaagaagcccaacgagaacaagcugaagcagcccaacgagggccagccgcaggcccagggggacggcgcgaacgccgggcagccccaggcccagggcgacggggccaacgcgggccagccccaggcccagggcgacggggccaacgccggccagccccaggcccagggggacggcgcgaacgccggccagccgcaggcccagggggacggcgccaacgccgggcagccccaggcgcagggcgacggggccaacgccggccagccccaggcccagggcgacggggccaacgcgggccagccccaggcccagggggacggcgccaacgccgggcagccgcaggcccagggcgacggcgcgaacgccgggcagccccaggcccagggcgacggggccaacgcgggccagccccaggcccagggggaccgcgccaacgccggccagccccaggcccagggcgacggggcgaacgucccgcggcagggccgcaacgggggcggcgcccccgccgggggcaacgaggggaacaagcaggccggcaaggggcagggccagaacaaccagggcgccaacgcgcccaacgagaagguggugaacgacuaccuccacaagauccggagcuccgucacgaccgaguggacccccugcagcgugaccugcgggaacggcgugcgcauccggcgcaaggcccacgccgggaacaagaaggccgaggaccugacgauggacgaccuggaggucgaggccugcgugauggacaagugcgcgggcaucuucaacguggucuccaacagccucgggcuggugauccugcucgugcuggcccuguucaacuga

SEQ ID NO: 3503 - RNA, 1443 nt, Artificial Sequence
  derived and/or modified CDS sequence (opt1) from Pk(SGEHIH2-im-Y09-12)__AFD97213.1__CSP
augaagaacuucauccugcucgccgugagcuccauccugcuggucgaccuccugcccacccacuucgagcacaacguggaccugagccgcgccaucaacgugaacggcgucuccuucaacaacguggacaccagcucccucggggcggcccaggugcggcagagcgccucccgcggccgggggcugggcgagaagccgaaggagggggacgacaaggagaagaagaaggagaaggagaaggaggaggagcccaagaagcugaacgagaacaaccccaagaagcccaacgaggagggcgacggcgccaagcucaagcagccgaacgaggagggggacggcgccaagcugaagcagcccaacgcggagggcggggccaagcugaagcagcccaacgccgagggcggggccaacgcgggccagcccaacgccgagggcggggccaacgccgggcagccgaacgccgagggcggcgcgaacgccgggcagcccaacgccggcggggccaacgccggccagcccaacgcggagggcggggccaacgccggccagcccaacgccgagggcggggccaacgcggggcagccgaacgccgagggcggggccaacgcccgccagcccaacgccgagggcggcgcgaacgcccggcagcccaacgccgagggcggggccaacgcggggcagcccaacgccgagggcggggccaacgccggccagccgaacgccgagggcggggcgaacgccggccagcccaacgccgagggcggggccaacgcccgccagcccaacgcggagggcggggccaacgccggccagcccaacgccgagggcggggccaacgcggggcagccgaacgccgagggcggcgccaacgccgggcagcccaacgcggagggcggggccaacgccggccagcccaacgccgagggcggggccaacgcgcggcagcccaacgccgagggcggggccaacgccggccagccgaacgccgagggcggggcgaacgccgggcagcccaacgccgagggcggcgccaacgcccgccagccccaggcggagggcggcggggccaacgcccggcagccccaggccgagggcggcggggcgaacgcccgccagggcgggaacgaggggaacaagcaggccgggaagggccagggccagaacaaccagggggccaacgccccgaacgagaaggucgugaacgacuaccuccagaagauccggagcuccgugacgaucgaguggacccccugcagcgugaccugcggcaacgggguccgcauccggcgccgggcgcacgccgacaagaagaaggccgaggaccugaccauggacgaccuggagguggaggccugcgucauggacaagugcgccggcaucuucaacgugguguccaacagccucgggcuggucauccugcucgugcuggcgcuguucaacuga

SEQ ID NO: 3504 - RNA, 1320 nt, Artificial Sequence
  derived and/or modified CDS sequence (opt1) from Pk(NB028)__AFG25469.1__CSP
augaagaacuucauccugcucgccgugagcuccauccugcuggucgaccuccugcccacccacuucgagcacaacguggaccugagccgcgccaucaacgugaacggcgucuccuucaacaacguggacaccagcucccucggggcggcccaggugcggcagagcgccucccgcggccgggggcugggcgagaagccgaaggagggggacgacaaggagaagaagaaggagaaggagaaggaggaggagcccaagaaccugaacgagaacaagcccaagcagcccaacgccgagggcgacggcgccaagcucaagcagccgaacgcggagggggacggcgccaagcugaagcagccccaggccgagggggacggcgccaacgcgcgccagccccaggccgaggggaacggcgccaacgcccggcagccccaggccgagggcgacggggcgaacgcccgccagccgcaggccgagggcgacggggccaacgcccggcagccccaggcggagggcgacggcgccaacgcccgccagccccaggccgagggggacggcgccaacgcgcggcagccccaggccgagggggacggcgccaacgcccgccagccgcaggccgagggggacggcgcgaacgcccggcagccccaggccgagggcgggggcgccaacgcgcgccagccccaggccgagggggacggcgccaacgcccggcagccccaggccgagggggacggcgcgaacgcccgccagccgcaggccgagggcgacggggccaacgcccggcagccccaggcggagggcgacggggccaacgcccgccagccccaggccgagggcgacggggccaacgcgcggcagccccaggccgagggcggcggggccaacgcccgccagccgcaggcggagggcgacggggccaacgcccggcaggcccaggcccagggcgacggcgggaacgcgcgccagggcgggaacggcgggggcgcccccgccggcgggaacgagggcaacaagcaggccgggaagggccaggggcagaacaaccagggcgccaacgcgcccaacgagaaggucgugaacgacuaccugcagaagauccggagcuccgugacgaccgaguggacccccugcagcgugaccugcggcaacgggguccgcauccgccggcgcgcccacgccgacaagaagaaggccgaggagcucacgauggacgaccuggagguggaggccugcgucauggacaagugcgcgggcaucuucaacgugguguccaacagccuggggcucgucauccugcuggugcucgcccuguucaacuga

SEQ ID NO: 3505 - RNA, 1278 nt, Artificial Sequence
  derived and/or modified CDS sequence (opt1) from Pk(SGEHIH1-im-Y09-102)__AFD97209.1__CSP
augaagaacuucauccugcucgccgugagcuccauccugcuggucgaccuccugcccacccacuucgagcacaacguggaccugagccgcgccaucaacgugaacggcgucuccuucaacaacguggacaccagcucccucggggcggcccaggugcggcagagcgccucccgcggccgggggcugggcgagaagccgaaggagggggacgacaaggagaagaagaaggagaaggagaaggaggaggagcccaagaagcugaacgagaacaaccccaagaagcccaacgaggagggcgacggcgccaagcucaagcagccgaacgaggagggggacggcgccaagcugaagcagcccaacgcggagggcggggccaagcugaagcagcccaacgccgagggcggggccaacgcgggccagcccaacgccgagggcggggccaacgccgggcagccgaacgccgagggcggcgcgaacgccgggcagcccaacgccggcggggccaacgccggccagcccaacgcggagggcggggccaacgccggccagcccaacgccgagggcggggccaacgcggggcagccgaacgccgagggcggggccaacgcccgccagcccaacgccgagggcggcgcgaacgcccggcagcccaacgccgagggcggggccaacgcggggcagcccaacgccgagggcggggccaacgccggccagccgaacgccgagggcggggcgaacgccggccagcccaacgccgagggcggggccaacgcccgccagcccaacgcggagggcggggccaacgccggccagcccaacgccgagggcggggccaacgcggggcagccgaacgccgagggcggcgccaacgcccggcagccccaggcggagggcggcggggccaacgcccgccagccccaggccgagggcggcggggccaacgcgcggcagggcgggaacgaggggaacaagcaggccgggaagggccaggggcagaacaaccagggcgccaacgcccccaacgagaaggucgugaacgacuaccuccagaagauccgcagcuccgugacgaucgaguggaccccgugcagcgugaccugcggcaacgggguccggauccgccggcgcgcccacgcggacaagaagaaggccgaggaccugaccauggacgaccuggagguggaggccugcgucauggaccggugcgccggcaucuucaacgugguguccaacagccucgggcuggucauccugcucgugcuggcccuguucaacuga

SEQ ID NO: 3506 - RNA, 1278 nt, Artificial Sequence
  derived and/or modified CDS sequence (opt1) from Pk(SGEHIH1-im-Y09-17)__AFD97205.1__CSP
augcgcaacuucauccugcucgccgugagcuccauccugcuggucgaccuccugcccacccacuucgagcacaacguggaccugagccgggccaucaacgugaacggcgucuccuucaacaacguggacaccagcucccucggggcggcccaggugcgccagagcgccucccggggccgcgggcugggcgagaagccgaaggagggggacgacaaggagaagaagaaggagaaggagaaggaggaggagcccaagaagcugaacgagaacaaccccaagaagcccaacgaggagggcgacggcgccaagcucaagcagccgaacgaggagggggacggcgccaagcugaagcagcccaacgcggagggcggggccaagcugaagcagcccaacgccgagggcggggccaacgcgggccagcccaacgccgagggcggggccaacgccgggcagccgaacgccgagggcggcgcgaacgccgggcagcccaacgccggcggggccaacgccggccagcccaacgcggagggcggggccaacgccggccagcccaacgccgagggcggggccaacgcggggcagccgaacgccgagggcggggccaacgcccggcagcccaacgccgagggcggcgcgaacgcccgccagcccaacgccgagggcggggccaacgcggggcagcccaacgccgagggcggggccaacgccggccagccgaacgccgagggcggggcgaacgccggccagcccaacgccgagggcggggccaacgcccggcagcccaacgcggagggcggggccaacgccggccagcccaacgccgagggcggggccaacgcggggcagccgaacgccgagggcggcgccaacgcccgccagccccaggcggagggcggcggggccaacgcccggcagccccaggccgagggcggcggggccaacgcgcgccagggcgggaacgaggggaacaagcaggccgggaagggccaggggcagaacaaccagggcgccaacgcccccaacgagaaggucgugaacgacuaccuccagaagauccggagcuccgugacgaucgaguggaccccgugcagcgugaccugcggcaacgggguccgcauccggcgccgggcccacgcggacaagaagaaggccgaggaccugaccauggacgaccuggagguggaggccugcgucauggacaagugcgccggcaucuucaacgugguguccaacagccucgggcuggucauccugcucgugcuggcccuguucaacuga

SEQ ID NO: 3507 - RNA, 1278 nt, Artificial Sequence
  derived and/or modified CDS sequence (opt1) from Pk(SGEHIH1-im-Y09-25)__AFD97206.1__CSP
augaagaacuucauccugcucgccgugagcuccauccugcuggucgaccuccugcccacccacuucgagcacaacguggaccugagccgcgccaucaacgugaacggcgucuccuucaacaacguggacaccagcucccucggggcggcccaggugcggcagagcgccucccgcggccgggggcugggcgagaagccgaaggagggggacgacaaggagaagaagaaggagaaggagaaggaggaggagcccaagaagcugaacgagaacaaccccaagaagcccaacgaggagggcgacggcgccaagcucaagcagccgaacgaggagggggacggcgccaagcugaagcagcccaacgcggagggcggggccaagcugaagcagcccaacgccgagggcggggccaacgcgggccagcccaacgccgagggcggggccaacgccgggcagccgaacgccgagggcggcgcgaacgccgggcagcccaacgccggcggggccaacgccggccagcccaacgcggagggcggggccaacgccggccagcccaacgccgagggcggggccaacgcggggcagccgaacgccgagggcggggccaacgcccgccagcccaacgccgagggcggcgcgaacgcccggcagcccaacgccgagggcggggccaacgcggggcagcccaacgccgagggcggggccaacgccggccagccgaacgccgagggcggggcgaacgccggccagcccaacgccgagggcggggccaacgcccgccagcccaacgcggagggcggggccaacgccggccagcccaacgccgagggcggggccaacgcggggcagccgaacgccgagggcggcgccaacgcccggcagccccaggcggagggcggcggggccaacgcccgccagccccaggccgagggcggcggggccaacgcgcggcagggcgggaacgaggggaacaagcaggccgggaagggccaggggcagaacaaccagggcgccaacgcccccaacgagaaggucgugaacgacuaccuccagaagauccgcagcuccgugacgaucgaguggaccccgugcagcgugaccugcggcaacgggguccggauccgccggcgcgcccacgcggacaagaagaaggccgaggaccugaccauggacgaccuggagguggaggccugcgucauggacaagugcgccggcaucuucaacgugguguccaacagccucgggcuggucauccugcucgugcuggcccuguucaacuga

SEQ ID NO: 3508 - RNA, 1278 nt, Artificial Sequence
  derived and/or modified CDS sequence (opt1) from Pk(SGEHIH2-im-Y09-11)__AFD97212.1__CSP
augaagaacuucauccugcucgccgugagcuccauccugcuggucgaccuccugcccacccacuucgagcacaacguggaccugagccgcgccaucaacgugaacggcgucuccuucaacaacguggacaccagcucccucggggcggcccaggugcggcagagcgccucccgcggccgggggcugggcgagaagccgaaggagggggacgacaaggagaagaagaaggagaaggagaaggaggaggagcccaagaagcugaacgagaacaaccccaagaagcccaacgaggagggcgacggcgccaagcucaagcagccgaacgaggagggggacggcgccaagcugaagcagcccaacgcggagggcggggccaagcugaagcagcccaacgccgagggcggggccaacgcgggccagcccaacgccgagggcggggccaacgccgggcagccgaacgccgagggcggcgcgaacgccgggcagcccaacgccggcggggccaacgccggccagcccaacgcggagggcggggccaacgccggccagcccaacgccgagggcggggccaacgcggggcagccgaacgccgagggcggggccaacgcccgccagcccaacgccgagggcggcgcgaacgcccggcagcccaacgccgagggcggggccaacgcggggcagcccaacgccgagggcggggccaacgccggccagccgaacgccgagggcggggcgaacgccggccagcccaacgccgagggcggggccaacgcccgccagcccaacgcggagggcggggccaacgccggccagcccaacgccgagggcggggccaacgcggggcagccgaacgccgagggcggcgccaacgcccggcagccccaggcggagggcggcggggccaacgcccgccagccccaggccgagggcggcggggccaacgcgcggcagggcgggaacgaggggaacaagcaggccgggaagggccaggggcagaacaaccagggcgccaacgcccccaacgagaaggucgugaacgacuaccuccagaagauccgcagcuccgugacgaucgaguggaccccgugcagcgugaccugcggcaacgggguccggauccgccggcgcgcccacgcggacaagaagcgggccgaggaccugaccauggacgaccuggagguggaggccugcgucauggacaagugcgccggcaucuucaacgugguguccaacagccucgggcuggucauccugcucgugcuggcccuguucaacuga

SEQ ID NO: 3509 - RNA, 1278 nt, Artificial Sequence
  derived and/or modified CDS sequence (opt1) from Pk(SGEHIH2-im-Y09-18)__AFD97214.1__CSP
augaagaacuucauccugcucgccgugagcuccauccugcuggucgaccuccugcccacccacuucgagcacaacguggaccugacccgcgccaucaacgugaacggcgucagcuucaacaacguggacacguccagccucggggcggcccaggugcggcaguccgccagccgcggccgggggcugggcgagaagccgaaggagggggacgacaaggagaagaagaaggagaaggagaaggaggaggagcccaagaagcugaacgagaacaaccccaagaagcccaacgaggagggcgacggcgccaagcucaagcagccgaacgaggagggggacggcgccaagcugaagcagcccaacgcggagggcggggccaagcugaagcagcccaacgccgagggcggggccaacgcgggccagcccaacgccgagggcggggccaacgccgggcagccgaacgccgagggcggcgcgaacgccgggcagcccaacgccggcggggccaacgccggccagcccaacgcggagggcggggccaacgccggccagcccaacgccgagggcggggccaacgcggggcagccgaacgccgagggcggggccaacgcccgccagcccaacgccgagggcggcgcgaacgcccggcagcccaacgccgagggcggggccaacgcggggcagcccaacgccgagggcggggccaacgccggccagccgaacgccgagggcggggcgaacgccggccagcccaacgccgagggcggggccaacgcccgccagcccaacgcggagggcggggccaacgccggccagcccaacgccgagggcggggccaacgcggggcagccgaacgccgagggcggcgccaacgcccggcagccccaggcggagggcggcggggccaacgcccgccagccccaggccgagggcggcggggccaacgcgcggcagggcgggaacgaggggaacaagcaggccgggaagggccaggggcagaacaaccagggcgccaacgcccccaacgagaaggucgugaacgacuaccuccagaagauccgcuccagcgugaccaucgaguggaccccgugcuccgugaccugcggcaacgggguccggauccgccggcgcgcccacgcggacaagaagaaggccgaggaccugacgauggacgaccuggagguggaggccugcgucauggacaagugcgccggcaucuucaacguggugagcaacucccucgggcuggucauccugcucgugcuggcccuguucaacuga

SEQ ID NO: 3510 - RNA, 1278 nt, Artificial Sequence
  derived and/or modified CDS sequence (opt1) from Pk(SGEHIH2-im-Y09-3)__AFD97210.1__CSP
augaagaacuucauccugcucgccgugagcuccauccugcuggucgaccuccugcccacccacuucgagcacaacguggaccugagccgcgccaucaacgugaacggcgucuccuucaacaacguggacaccagcucccucggggcggcccaggugcggcagagcgccucccgcggccgggggcugggcgagaagccgaaggagggggacgacaaggagaagaagaaggagaaggagaaggaggaggagcccaagaagcugaacgagaacaaccccaagaagcccaacgaggagggcgacggcgccaagcucaagcagccgaacgaggagggggacggcgccaagcugaagcagcccaacgcggagggcggggccaagcugaagcagcccaacgccgagggcggggccaacgcgggccagcccaacgccgagggcggggccaacgccgggcagccgaacgccgagggcggcgcgaacgccgggcagcccaacgccggcggggccaacgccggccagcccaacgcggagggcggggccaacgccggccagcccaacgccgagggcggggccaacgcggggcagccgaacgccgagggcggggccaacgcccgccagcccaacgccgagggcggcgcgaacgcccggcagcccaacgccgggggcggggccaacgcgggccagcccaacgccgagggcggggccaacgccggccagccgaacgccgagggcggggcgaacgccgggcagcccaacgccgagggcggcgccaacgcccgccagcccaacgcggagggcggggccaacgccgggcagcccaacgccgagggcggggccaacgcgggccagccgaacgccgagggcggggccaacgcccggcagccccaggcggagggcgggggcgccaacgcccgccagccccaggccgagggcgggggcgccaacgcgcggcagggcgggaacgaggggaacaagcaggccggcaaggggcagggccagaacaaccagggcgccaacgcccccaacgagaaggucgugaacgacuaccuccagaagauccgcagcuccgugacgaucgaguggaccccgugcagcgugaccugcgggaacggcguccggauccgccggcgcgcccacgcggacaagaagaaggccgaggaccugaccguggacgaccuggaggucgaggccugcgugauggacaagugcgccgggaucuucaacguggucuccaacagccucggccuggugauccugcucgugcuggcccuguucaacuga

SEQ ID NO: 3511 - RNA, 1278 nt, Artificial Sequence
  derived and/or modified CDS sequence (opt1) from Pk(SGEHIH2-im-Y09-7)__AFD97211.1__CSP
augcgcaacuucauccugcucgccgugagcuccauccugcuggucgaccuccugcccacccacuucgagcacaacguggaccugagccgggccaucaacgugaacggcgucuccuucaacaacguggacaccagcucccucggggcggcccaggugcgccagagcgccucccggggccgcgggcugggcgagaagccgaaggagggggacgacaaggagaagaagaaggagaaggagaaggaggaggagcccaagaagcugaacgagaacaaccccaagaagcccaacgaggagggcgacggcgccaagcucaagcagccgaacgaggagggggacggcgccaagcugaagcagcccaacgcggagggcggggccaagcugaagcagcccaacgccgagggcggggccaacgcgggccagcccaacgccgagggcggggccaacgccgggcagccgaacgccgagggcggcgcgaacgccgggcagcccaacgccggcggggccaacgccggccagcccaacgcggagggcggggccaacgccggccagcccaacgccgagggcggggccaacgcggggcagccgaacgccgagggcggggccaacgcccggcagcccaacgccgagggcggcgcgaacgcccgccagcccaacgccgagggcggggccaacgcggggcagcccaacgccgagggcggggccaacgccggccagccgaacgccgagggcggggcgaacgccggccagcccaacgccgagggcggggccaacgcccggcagcccaacgcggagggcggggccaacgccggccagcccaacgccgagggcggggccaacgcggggcagccgaacgccgagggcggcgccaacgcccgccagccccaggcggagggcggcggggccaacgcccggcagccccaggccgagggcggcggggccaacgcgcgccagggcgggaacgaggggaacaagcaggccgggaagggccaggggcagaacaaccagggcgccaacgcccccaacgagaaggucgugaacgacuaccuccagaagauccggagcuccgugacgaucgaguggaccccgugcagcgugaccugcggcaacgggguccgcauccggcgccgggcccacgcggacaagaagaaggccgaggaccugaccauggacgaccuggagguggaggccugcgucauggacaagugcgccggcaucuucaacgugguguccaacacgcucgggcuggucauccugcucgugcuggcccuguucaacuga

SEQ ID NO: 3512 - RNA, 1278 nt, Artificial Sequence
  derived and/or modified CDS sequence (opt1) from Pk(UMNGC3)__AHF20628.1__CSP
augaagaacuucauccugcucgccgugagcuccauccugcuggucgaccuccugcccacccacuucgagcacaacguggaccugagccgcgccaucaacgugaacggcgucuccuucaacaacguggacaccagcucccucggggcggcccaggugcggcagagcgccucccgcggccgggggcugggcgagaagccgaaggagggggacgacaaggagaagaagaaggagaaggagaaggaggaggagcccaagaagcugaacgagaacaaccccaagaagcccaacgaggagggcgacggcgccaagcucgagcagccgaacgaggagggggacggcgccaagcugaagcagcccaacgaggagggggacggcgcgaagcugaagcagcccaacgccgagggcggggccaagcucaagcagcccaacgccgagggcggggcgaacgccggccagccgaacgccgagggcggggccaacgccggccagcccaacgcggagggcggggccaacgccgggcagcccaacgccggcggggccaacgcgggccagcccaacgccgagggcggggccaacgccggccagccgaacgccgagggcggggcgaacgccgggcagcccaacgccgagggcggcgccaacgccgggcagcccaacgcggagggcggggccaacgcccgccagcccaacgccgagggcggggcgaacgccggccagccgaacgccgagggcggggccaacgccggccagcccaacgcggagggcggggccaacgccggccagcccaacgccgagggcggggccaacgcgcggcagcccaacgccgagggcggggccaacgccgggcagccgaacgccgagggcggcgcgaacgccgggcagcccaacgccgagggcggggccaacgcgcgccagccccaggccgagggcgggggcgccaacgcccggcagggcgggaacgagggcaacaagcaggccgggaagggccaggggcagaacaaccagggcgcgaacgcccccaacgagaaggucgugaacgacuaccugcagaagauccgcagcuccgugacgaucgaguggaccccgugcagcgugaccugcggcaacgggguccggauccgccggcgcgcccacgccgacaagaagaaggccgaggaccugaccaugggcgaccucgagguggaggcgugcgucauggacaagugcgccgggguguucaacguggucuccaacagccugggccuggugauccuccuggugcuggcccucuucaacuga

SEQ ID NO: 3513 - RNA, 1275 nt, Artificial Sequence
  derived and/or modified CDS sequence (opt1) from Pk(prk-1)__ADX31295.1__CSP
augaagaacuucauccugcucgcggugagcuccauccugcuggucgaccuccugcccacccacuucgagcacaacguggaccugagccgcgccaucaacgugaacggcgucuccuucaacaacguggacaccagcucccucggggcggcccaggugcggcagagcgccucccgcggccgggggcugggcgagaagccgaaggagggggacgacaaggagaagaagaaggagaaggagaaggaggaggagcccaagaagcugaacgagaacaaccccaagaagcccaacgaggagggcgacggcgccaagcucaagcagccggacgaggagggggacggcgccaagcugaagcagcccaacgaggagggggacggcgcgaagcugaagcagcccaacgccgagggcggggccaagcucaagcagcccaacgccgagggcggggcgaacgccggccagccgaacgccgagggcggggccaacgccggccagcccaacgcggagggcggggccaacgccgggcagcccaacgccggcggggccaacgcgggccagcccaacgccgagggcggggccaacgccggccagccgaacgccgagggcggggcgaacgccgggcagcccaacgccgagggcggcgccaacgccgggcagcccaacgcggagggcggggccaacgcccgccagcccaacgccgagggcggggcgaacgccggccagccgaacgccgagggcggggccaacgccggccagcccaacgcggagggcggggccaacgccggccagcccaacgccgagggcggggccaacgcgcggcagcccaacgccgaggucgagcagacgcaggacaaccgcaugcagaagguggagcagaugcagaccaccgagugccggagcgggaccaacgcccgccagccgcaggccgagggcgggggcgccaacgcgcggcagggcgggaacgagggcaacaagcaggccgggaagggccaggggcagaacaaccagggcgccaacgcccccaacgagaagguggucaacgacuaccugcagaagauccgcuccagcgugacgaucgaguggacccccugcuccgugaccugcggcaacgggguccggauccgccggcgcgcgcacgccgacaagaagaaggccgaggaccugaccauggacgaccucgagguggaggccugcgugauggacaagugcgccggcaucuucaacgucgugagcaacucccuggggcuggugauccuccugguccuggcccucuucaacuga

SEQ ID NO: 3514 - RNA, 1251 nt, Artificial Sequence
  derived and/or modified CDS sequence (opt1) from Pk(UM0018C10)__AHF20648.1__CSP
augaagaacuucauccugcucgccgugagcuccauccugcuggucgaccuccugcccacccacuucgagcacaacguggaccugagccgcgccaucaacgugaacggcgucuccuucaacaacguggacaccagcucccucggggcggcccaggugcggcagagcgccucccgcggccgggggcugggcgagaagccgaaggagggggacgacaaggagaagaagaaggagaaggagaaggaggaggagcccaagaagcugaacgagaacaagcccaagcagcccaacgucgagggcgacggcgccaagcucaagcagccgaacgaggagggggacggcgccaagcugaagcagcccaacgaggagggggacggcgcgaagcugaagcagcccaacgccgagggcggggccaagcucaagcagcccaacgccgagggcggggcgaacgccggccagccgaacgccgagggcggggccaacgccggccagcccaacgcggagggcggggccaacgccgggcagcccaacgccgagggcggggccaacgcgggccagcccaacgccgagggcggggccaacgccggccagccgaacgccgagggcggggcgaacgccgggcagcccaacgccgagggcggcgccaacgccgggcagcccaacgcggagggcggggccaacgcccgccagcccaacgccgagggcggggcgaacgcccggcagccgaacgccgagggcggcgccaacgcccgccagcccaacgcggagggcggggccaacgccgggcagcccaacgccgagggcggcgccaacgcggggcagcccaacgccgagggcggggccaacgcccggcagccgcaggccgagggcgggggcgcgaacgcccgccagccccaggccgagggcgggggcgccaacgcgcggcagggcgggaacgaggggaacaagcaggccggcaagggccaggggcagaacaaccagggcgccaacgcccccaacgagaagguggugaacgacuaccugcagaagauccgcagcuccgucacgaccgaguggacccccugcagcgugaccugcgggaacggcgugcggauccgccggcgcgcccacgcggacaagaagaaggccgaggaccugacgauggacgaccucgaggucgaggccugcgugauggacaagugcgccgggaucuucaacguggucuccaacagccugggccuggugauccuccuggugcuggcccucuucaacuga

SEQ ID NO: 3515 - RNA, 1251 nt, Artificial Sequence
  derived and/or modified CDS sequence (opt1) from Pk(UM0018C6)__AHF20646.1__CSP
augaagaacuucauccugcucgccgugagcuccauccugcuggucgaccuccugcccacccacuucgagcacaacguggaccugagccgcgccaucaacgugaacggcgucuccuucaacaacguggacaccagcucccucggggcggcccaggugcggcagagcgccucccgcggccgggggcugggcgagaagccgaaggagggggacgacaaggagaagaagaaggagaaggagaaggaggaggagcccaagaagcugaacgagaacaagcccaagcagcccaacgucgagggcgacggcgccaagcucaagcagccgaacgaggagggggacggcgccaagcugaagcagcccaacgaggagggggacggcgcgaagcugaagcagcccaacgccgagggcggggccaagcucgagcagcccaacgccgagggcggggcgaacgccggccagccgaacgccgagggcggggccaacgccggccagcccaacgcggagggcggggccaacgccgggcagcccaacgccgagggcggggccaacgcgggccagcccaacgccgagggcggggccaacgccggccagccgaacgccgagggcggggcgaacgccgggcagcccaacgccgagggcggcgccaacgccgggcagcccaacgcggagggcggggccaacgcccgccagcccaacgccgagggcggggcgaacgcccggcagccgaacgccgagggcggcgccaacgcccgccagcccaacgcggagggcggggccaacgccgggcagcccaacgccgagggcggcgccaacgcggggcagcccaacgccgagggcggggccaacgcccggcagccgcaggccgagggcgggggcgcgaacgcccgccagccccaggccgagggcgggggcgccaacgcgcggcagggcgggaacgaggggaacaagcaggccggcaagggccaggggcagaacaaccagggcgccaacgcccccaacgagaagguggugaacgacuaccugcagaagauccgcagcuccgucacgaccgaguggacccccugcagcgugaccugcgggaacggcgugcggauccgccggcgcgcccacgcggacaagaagaaggccgaggaccugacgauggacgaccucgaggucgaggccugcgugauggacaagugcgccgggaucuucaacguggucuccaacagccugggccuggugauccuccuggugcuggcccucuucaacuga

SEQ ID NO: 3516 - RNA, 1242 nt, Artificial Sequence
  derived and/or modified CDS sequence (opt1) from Pk(SGEHIH1-im-Y09-95)__AFD97208.1__CSP
augaagaacuucauccugcucgccgugagcuccauccugcuggucgaccuccugcccacccacuucgagcacaacguggaccugagccgcgccaucaacgugaacggcgucucccucaacaacguggacaccagcucccugggggcggcccaggugcggcagagcgccucccgcggccgggggcugggcgagaagccgaaggagggggacgacaaggagaagaagaaggagaaggagaaggaggaggagcccaagaagcucaacgagaacaaccccaagaagcccaacgaggagggcgacggcgccaagcugaagcagccgaacgccgagggcggggcgaagcugaagcagcccaacgccgagggcggggccaacgccgggcagcccaacgcggagggcggcgccaacgccgggcagcccaacgccgagggcggggccaacgcgggccagccgaacgccggcggggccaacgccggccagcccaacgccgagggcggggcgaacgccgggcagcccaacgccgagggcggcgccaacgucgggcagcccaacgccgagggcggggcgaacgcccgccagccgaacgccgagggcggggccaacgcccggcagcccaacgcggagggcggcgccaacgccgggcagcccaacgccgagggcggggcgaacgccggccagcccaacgccgagggcggggccaacgccggccagccgaacgcggagggcggggccaacgcccgccagcccaacgccgagggcggggccaacgcgggccagcccaacgccgagggcggggccaacgccgggcagcccaacgccgagggcggggcgaacgcccggcagccgcaggccgagggcggcggggccaacgcgcgccagccccaggccgagggcgggggcgccaacgcccggcagggcgggaacgagggcaacaagcgcgccgggaagggccaggggcagaacaaccagggcgcgaacgcccccaacgagaagguggugaacgacuaccuccagaagauccggagcuccgucacgaucgaguggacccccugcagcgugaccugcgggaacggcgugcgcauccggcgccgggcccacgccgacaagaagaaggccgaggaccugaccauggacgaccuggaggucgaggcgugcgugauggacaagugcgccggcaucuucaacguggucuccaacagccucgggcuggugauccugcucgugcuggcccuguucaacuga

SEQ ID NO: 3517 - RNA, 1221 nt, Artificial Sequence
  derived and/or modified CDS sequence (opt1) from Pk(KH100)__ADN94497.1__CSP
augaagaacuucauccugcucgccgugagcuccauccugcuggucgaccuccugcccacccacuucgagcacaacguggaccugagccgcgccaucaacgugaacggcgucuccuucaacaacguggacaccagcucccucggggcggcccaggugcggcagagcgccucccgcggccgggggcugggcgagaagccgaaggagggggacgacaaggagaagaagaaggagaaggagaaggaggaggagcccaagaaccugaacgagaacaagcccaagcagcccaacgccgagggcgacggcgccaagccgaagcagcccaacgcggagggggacggcgccaagcucaagcagcccaacgccgagggggacggcgccaagcugaagcagcccaacgcggagggggacggcggcaacgcccgccagccgaacgccgagggggacggcgggaacgcccggcagcccaacgccgagggcgacggcgggaacgcgcgccagcccaacgccgagggcgacgggggcaacgcccggcagcccaacgccgagggggacggcggcaacgcccgccagccgaacgcggagggggacggcgggaacgcccggcagcccaacgccgagggcgacgggggcaacgcccgccagcccaacgccgagggcgacgggggcaacgcgcggcagcccaacgccgagggggacggcgggaacgcccgccagccgaacgccgagggcgacggcgggaacgcccggcagcccaacgcggagggcgacgggggcaacgcccgccagcccaacgccgagggcgacggggccaacgcgcggcagcccaacgccgagggcgacggggccaacgcccgccagccgcaggccgagggcgggggcggcaacgcgcggcagggcgggaacgaggggaacaagcaggccggcaaggggcagggccagaacaaccagggcgccaacgcccccaacgagaaggucgugaacgacuaccugcagaagauccgcagcuccgugacgaccgaguggacccccugcagcgugaccugcgggaacggcguccggauccgccggcgcgcccacgcggacaagaagaaggccgaggaccucacgauggacgaccuggagguggaggccugcgucauggacaagugcgccgggaucuucaacgugguguccaacagccugggccucgucauccugcuggugcucgcccuguucaacuga

SEQ ID NO: 3518 - RNA, 1221 nt, Artificial Sequence
  derived and/or modified CDS sequence (opt1) from Pk(KH294)__ADN94542.1__CSP
augaagaacuucauccugcucgccgugagcuccauccugcuggucgaccuccugcccacccacuucgagcacaacguggaccugagccgcgccaucaacgugaacggcgucuccuucaacaacguggacaccagcucccucggggcggcccaggugcggcagagcgccucccgcggccgggggcugggcgagaagccgaaggagggggacgacaaggagaagaagaaggagaaggagaaggaggaggagcccaagaaccugaacgagaacaagcccaagcagcccaacgccgagggcgacggcgccaagccgaagcagcccaacgcggagggggacggcgccaagcucaagcagcccaacgccgagggggacggcgccaagcugaagcagcccaacgcggagggggacggcggcaacgcccgccagccgaacgccgagggggacggcgggaacgcccggcagcccaacgccgagggcgacggcgggaacgcgcgccagcccaacgccgagggcgacgggggcaacgcccggcagcccaacgccgagggggacggcggcaacgcccgccagccgaacgcggagggggacggcgggaacgcccggcagcccaacgccgagggcgacgggggcaacgcccgccagcccaacgccgagggcgacgggggcaacgcgcggcagcccaacgccgagggggacggcgggaacgcccgccagccgaacgccgagggcgacggcgggaacgcccggcagcccaacgcggagggcgacgggggcaacgcccgccagcccaacgccgagggcgacgggggcaacgcccggcagcccaacgcggagggggacggcgccaacgcccgccagccgcaggccgagggcgggggcgggaacgcccggcagggcgggaacgagggcaacaagcaggcggggaagggccagggccagaacaaccagggggccaacgcccccaacgagaaggucgugaacgacuaccugcagaagauccgcagcuccgugacgaccgaguggacccccugcagcgugaccugcggcaacgggguccggauccgccggcgcgcccacgccgacaagaagaaggcggaggaccucacgauggacgaccuggagguggaggccugcgucauggacaagugcgccggcaucuucaacgugguguccaacagccuggggcucgucauccugcuggugcucgcccuguucaacuga

SEQ ID NO: 3519 - RNA, 1218 nt, Artificial Sequence
  derived and/or modified CDS sequence (opt1) from Pk(UM0015C4)__AHF20661.1__CSP
augaagaacuucauccugcucgccgugagcuccauccugcuggucgaccuccugcccacccacuucgagcacaacguggaccugagccgcgccaucaacgugaacggcgucuccuucaacaacguggacaccagcucccucggggcggcccaggugcggcagagcgccucccgcggccgggggcugggcgagaagccgaaggagggggacgacaaggagaagaagaaggagaaggagaaggaggaggagcccaagaagcuggacgagaacaagcccaagcagcccaacgucgagggcgacggcgccaagcucaagcagccgaacgaggagggggacggcgccaagcugaagcagcccaacgaggagggggacggcgcgaagcugaagcagcccaacgccgagggcggggccaagcucaagcagcccaacgccgagggcggggcgaacgccggccagccgaacgccgagggcggggccaacgccggccagcccaacgcggagggcggggccaacgccgggcagcccaacgccgagggcggggccaacgcgggccagcccaacgccgagggcggggccaacgccggccagccgaacgccgagggcggggcgaacgccgggcagcccaacgccgagggcggcgccaacgcccgccagcccaacgcggagggcggggccaacgcccggcagcccaacgccgagggcggggcgaacgcccgccagccgaacgccgagggcggggccaacgccggccagcccaacgcggagggcggggccaacgccgggcagcccaacgccgagggcggcgccaacgcgcggcagccccaggccgagggcggcggggccaacgcccgccagccgcaggccgagggcggcggggcgaacgcccggcagggcgggaacgaggggaacaagcaggccgggaagggccaggggcagaacaaccagggcgccaacgcgcccaacgagaagguggugaacgacuaccugcagaagauccgcagcuccgucacgaccgaguggacccccugcagcgugaccugcggcaacggggugcggauccgccggcgcgcccacgccgacaagaagaaggccgaggaccugacgauggacgaccucgaggucgaggccugcgugauggacaagugcgcgggcaucuucuccguggucagcaacucccuggggcuggugauccuccuggugcuggcccucuucaacuga

SEQ ID NO: 3520 - RNA, 1218 nt, Artificial Sequence
  derived and/or modified CDS sequence (opt1) from Pk(UM0015C7)__AHF20662.1__CSP
augaagaacuucauccugcucgccgugagcuccauccugcuggucgaccuccugcccacccacuucgagcacaacguggaccugagccgcgccaucaacgugaacggcgucuccuucaacaacguggacaccagcucccucggggcggcccaggugcggcagagcgccucccgcggccgggggcugggcgagaagccgaaggagggggacgacaaggagaagaagaaggagaaggagaaggaggaggagcccaagaagcugaacgagaacaagcccaagcagcccaacgucgagggcgacggcgccaagcucaagcagccgaacgaggagggggacggcgccaagcugaagcagcccaacgaggagggggacggcgcgaagcugaagcagcccaacgccgagggcggggccaagcucaagcagcccaacgccgagggcggggcgaacgccggccagccgaacgccgagggcggggccaacgccggccagcccaacgcggagggcggggccaacgccgggcagcccaacgccgagggcggggccaacgcgggccagcccaacgccgagggcggggccaacgccggccagccgaacgccgagggcggggcgaacgccgggcagcccaacgccgagggcggcgccaacgcccgccagcccaacgcggagggcggggccaacgcccggcagcccaacgccgagggcggggcgaacgcccgccagccgaacgccgagggcggggccaacgccggccagcccaacgcggagggcggggccaacgccgggcagcccaacgccgagggcggcgccaacgcgcggcagccccaggccgagggcggcggggccaacgcccgccagccgcaggccgagggcggcggggcgaacgcccggcagggcgggaacgaggggaacaagcaggccgggaagggccaggggcagaacaaccagggcgccaacgcgcccaacgagaagguggugaacgacuaccugcagaagauccgcagcuccgucacgaccgaguggacccccugcagcgugaccugcggcaacggggugcggauccgccggcgcgcccacgccgacaagaagaaggccgaggaccugacgauggacgaccucgaggucgaggccugcgugauggacaagugcgcgggcaucuucaacguggucuccaacagccuggggcuggugauccuccuggugcuggcccucuucaacuga

SEQ ID NO: 3521 - RNA, 1218 nt, Artificial Sequence
  derived and/or modified CDS sequence (opt1) from Pk(UM009C4)__AHF20644.1__CSP
augaagaacuucauccugcucgccgugagcuccauccugcuggucgaccuccugcccacccacuucgagcacaacguggaccugagccgcgccaucaacgugaacggcgucuccuucaacaacguggacaccagcucccucggggcggcccaggugcggcagagcgccucccgcggccgggggcugggcgagaagccgaaggagggggacgacaaggagaagaagaaggagaaggagaaggaggaggagcccaagaagcugaacgagaacaagcccaagcagcccaacgucgagggcgacggcgccaagcucaagcagccgaacgaggagggggacggcgccaagcugaagcgccccaacgaggagggggacggcgcgaagcugaagcagcccaacgccgagggcggggccaagcccaagcagccgaacgccgagggcggggcgaacgccggccagcccaacgccgagggcggggccaacgccggccagcccaacgcggagggcggggccaacgccgggcagcccaacgccgagggcggggccaacgcgggccagccgaacgccgagggcggggccaacgccggccagcccaacgccgagggcggggcgaacgccgggcagcccaacgccgagggcggcgccaacgcccggcagcccaacgcggagggcggggccaacgcccgccagccgaacgccgagggcggggcgaacgcccggcagcccaacgccgagggcggggccaacgccggccagcccaacgcggagggcggggccaacgccgggcagcccaacgccgagggcggcgccaacgcgcgccagccgcaggccgagggcggcggggccaacgcccggcgcccccaggccgagggcggcggggcgaacgcccggcagggcgggaacgaggggaacaagcaggccgggaagggccaggggcagaacaaccagggcgccaacgcgcccaacgagaagguggugaacgacuaccuccagaagauccgcagcuccgucacgaccgaguggacccccugcagcgugaccugcggcaacggggugcggauccgccggcgcgcccacgccgacaagaagaaggccgaggaccugacgauggacgaccuggaggucgaggccugcgugauggacaagugcgcgggcaucuucaacguggucuccaacagccucgggcuggugauccugcucgcccuggcccuguucaacuga

SEQ ID NO: 3522 - RNA, 1212 nt, Artificial Sequence
  derived and/or modified CDS sequence (opt1) from Pk(TN027)__AFG25481.1__CSP
augaagaacuucauccugcucgccgugagcuccauccugcuggucgaccuccugcccacccacuucgagcacaacguggaccugagccgcgccaucaacgugaacggcgucuccuucaacaacguggacaccagcucccucggggcggcccaggugcggcagagcgccucccgcggccgggggcugggcgagaagccgaaggagggggacgacaaggagaagaagaaggagaaggagaaggaggaggagcccaagaaccugaacgagaacaagcccaagcagcccaacgccgagggcgacggcgccaagcucaagcagccgaacgcggagggggacggcgccaagcugaagcagcccaacgccgagggggacggcgccaagcugaagcagccccaggcggagggggacggcgccaacgcccgccagccccaggccgagggcgacggggccaacgcgcggcagccgcaggccgagggcgacggggccaacgcccgccagccccaggccgagggcgacggcgcgaacgcccggcagccccaggccgagggggacggcgccaacgcccgccagccccaggcggagggggacggcgccaacgcccggcagccgcaggccgagggggacggcgccaacgcgcgccagccccaggccgagggcgacggggccaacgcccggcagccccaggcggagggcgacggggccaacgcccgccagccccaggccgagggcgacggggccaacgcgcggcagccgcaggccgagggcggcggggccaacgcccgccagccccaggccgagggcgacggggcgaacgcccggcaggcccaggcccagggcgacgggggcaacgcccgccagggcgggaacggcgggggcgcgcccgccggcgggaacgagggcaacaagcaggccgggaagggccaggggcagaacaaccagggcgccaacgcgcccaacgagaaggucgugaacgacuaccuccagaagauccggagcuccgugacgaccgaguggaccccgugcagcgugaccugcggcaacgggguccgcauccggcgccgggcccacgccgacaagaagaaggccgaggaccugacgauggacgaccuggagguggaggccugcgucauggacaagugcgcgggcaucuucaacgugguguccaacagccucgggcuggucauccugcucgugcuggcccuguucaacuga

SEQ ID NO: 3523 - RNA, 1188 nt, Artificial Sequence
  derived and/or modified CDS sequence (opt1) from Pk(UM0034C7)__AHF20657.1__CSP
augcgcaacuucauccugcucgccgugagcuccauccugcuggucgaccuccugcccacccacuucgagcacaacguggaccugagccgggccaucaacgugaacggcgucuccuucaacaacguggacaccagcucccucggggcggcccaggugcgccagagcgccucccggggccgcgggcugggcgagaagcggaaggagggggccgacaaggagaagaagaaggagaaggaggaggagccgaagaagcccaacgagaacaagcugaagcagcccaaccccgaccagccgcaggcccagggcaacggcgcgaacgccgggcagccccaggcccagggcgacggggccaacgcgggccagccccaggcccagggggacggcgccaacgccggccagccccaggcccagggggacggcgcgaacgccgggcagccgcaggcccagggcgacggcgccaacgccgggcagccccaggcgcagggcgacggggccaacgccggccagccccaggcccagggggacggcgccaacgcgggccagccccaggcccagggggacggcgccaacgccgggcagccgcaggcccagggcgacggggcgaacgccggccagccccaggcccagggcgacggggccaacgcgggccagccccaggcccagggggacggcgccaacgccgggcagccccaggcccagggcgacggcgcgaacgccgggcagccgcaggcccagggcgacggggccaacgccggccagccccaggcgcagggcgaccgcgccaacgccgggcagccccaggcccagggcgacggggccaacgucccccggcagggccgcaacgggggcggcgcgccggccgggggcaacgaggggaacaagcaggccggcaaggggcagggccagaacaaccagggcgccaacgcgcccaacgagaagguggugaacgacuaccuccacaagauccggagcuccgucacgaccgaguggacccccugcagcgugaccugcgggaacggcgugcgcauccggcgcaaggcccacgccgggaacaagaaggccgaggaccugacgauggacgaccuggaggucgaggccugcgugauggacaagugcgcgggcaucuucaacguggucuccaacagccucgggcuggugauccugcucgugcuggcccuguucaacuga

SEQ ID NO: 3524 - RNA, 1185 nt, Artificial Sequence
  derived and/or modified CDS sequence (opt1) from Pk(KH225)__ADN94498.1__CSP
augaagaacuucauccugcucgccgugagcuccauccugcuggucgaccuccugcccacccacuucgagcacaacguggaccugagccgcgccaucaacgugaacggcgucuccuucaacaacguggacaccagcucccucggggcggcccaggugcggcagagcgccucccgcggccgggggcugggcgagaagccgaaggagggggacgacaaggagaagaagaaggagaaggagaaggaggaggagcccaagaaccugaacgagaacaagcccaagcagcccaacgccgagggcgacggcgccaagcucaagcagccgaacgcggagggggacggcgccaagcugaagcagcccaacgccgagggggacggcgggaacgcccgccagcccaacgcggagggcgacggcgggaacgcccggcagcccaacgccgagggcgacgggggcaacgcccgccagccgaacgccgagggcgacgggggcaacgcgcggcagcccaacgccgagggggacggcgggaacgcccgccagcccaacgccgagggcgacggcgggaacgcccggcagcccaacgcggagggcgacgggggcaacgcccgccagccgaacgccgagggggacggcggcaacgcccggcagcccaacgccgagggggacggcgggaacgcgcgccagcccaacgccgagggcgacgggggcaacgcccggcagcccaacgccgagggcgacgggggcaacgcccgccagccgaacgcggagggggacggcggcaacgcccggcagcccaacgccgagggggacggcgccaacgcgcgccagccccaggccgagggcgggggcgggaacgcccggcagggcgggaacgagggcaacaagcaggccgggaagggccaggggcagaacaaccagggcgccaacgcgcccaacgagaaggucgugaacgacuaccugcagaagauccgcagcuccgugacgaccgaguggaccccgugcagcgugaccugcggcaacgggguccggauccgccggcgcgcccacgccgacaagaagaaggccgaggaccucacgauggacgaccuggagguggaggccugcgucauggacaagugcgcgggcaucuucaacgugguguccaacagccuggggcucgucauccugcuggugcucgcccuguucaacuga

SEQ ID NO: 3525 - RNA, 1179 nt, Artificial Sequence
  derived and/or modified CDS sequence (opt1) from Pk(UM001C7)__AHF20637.1__CSP
augaagaacuucauccugcucgccgugagcuccauccugcuggucgaccuccugcccacccacuucgagcacaacguggaccugagccgcgccaucaacgugaacggcgucuccuucaacaacguggacaccagcucccucggggcggcccaggugcggcagagcgccucccgcggccgggggcugggcgagaagccgaaggagggggccgacaaggagaagaagaaggagaagggcaaggagaaggaggaggagcccaagaagcccaacgagaacaagcugaagcagcccaacgagggccagccgcaggcccagggggacggcgcgaacgccgggcagccccaggcccagggcgacggggccaacgcgggccagccccaggcccagggcgacggggccaacgccggccagccccaggcccagggggacggcgcgaacgccggccagccgcaggcccagggggacggcgccaacgccgggcagccccaggcgcagggcgacggggccaacgccggccagccccaggcccagggcgacggggccaacgcgggccagccccaggcccagggggacggcgccaacggggacggcgccaacgccggccagccgcaggcgcagggggacggcgccaacgccgggcagccccaggcccagggcgacggggcgaacgccggccagccccaggcccagggcgacggggccaacgccggccagccccaggcgcagggggacggcgccaacgccggccagccgcaggcccagggggaccgcgccaacgcgggccagccccaggcccagggggacggcgccaacgucccccggcaggggcgcaacggcggcggggcccccgccggcgggaacgagggcaacaagcaggcggggaagggccagggccagaacaaccagggggccaacgccccgaacgagaagguggugaacgacuaccuccacaagauccggagcuccgucacgaccgaguggacccccugcagcgugaccugcggcaacggggugcgcauccggcgcaaggcccacgcgggcaacaagaaggccgaggaccugacgauggacgaccuggaggucgaggccugcgugauggacaagugcgccgggaucuucaacguggucuccaacagccucggccuggugauccugcucgugcuggcccuguucaacuga

SEQ ID NO: 3526 - RNA, 1140 nt, Artificial Sequence
  derived and/or modified CDS sequence (opt1) from Pk(SGEHIWM4-Y09-15)__AFD97227.1__CSP
augaagaacuucauccugcucgccgugagcuccauccugcuggucgaccuccugcccaccuacuucgagcacaacguggaccugagccgcgccgugaacgucaacggcguguccuucaacagcguggacaccuccagccucggggcggcccagguccggcaguccgccagccgcggccgggggcugggcgagaagccgaaggagggggccgacaaggagaagaagaaggagaaggagaaggaggaggagcccaagaagcccaacgagaacaagcugaagcagccccagggcaacggcggggccggccaggcgcagccggaggggaacggcggggccggccaggcccagcccgagggcaacgggggcgccgggcaggcgcagcccgagggcaacggcggggccggccaggcccagcccgaggggaacggcggggccggccaggcccagccggagggcaacgggggcgcggggcaggcccagcccgagggcaacgggggcgccggccaggcccagcccgaggggaacggcggggccggccaggcgcagccccaggggaacggcggcgccgggcaggcccagccgcagggcaacgggggcgccggccaggcccagccccaggggaacggcggggcgggccaggcccagccccaggggaacggcggcgccgggcaggcccagcccgagggcaacgggggcgccgggcaggcgcagccgcagggcaacggcggggccggccaggcccagcccgaggggaaccgcgaggcccccgcgcagccccagggcaacgggggcgccggccaggcccagccgcagaagaacgagggcgggaacgccggggcccggaagggccaggggcagaacucccagggcgcgaacgcccccaacgagaagguggugaacgacuaccuccagaagauccgcagcuccgucacgaccgaguggacccccugcagcgugaccugcggcaacggggugcggauccgccggcgcgcccacgccgacaagaagaaggccggcgaccugacgauggacgaccuggaggucgaggcgugcgugauggacaagugcgccgggaucuucaacgccguguccaacagccucggccuggucauccugcucgugcuggcccuguucaacuga

SEQ ID NO: 3527 - RNA, 1140 nt, Artificial Sequence
  derived and/or modified CDS sequence (opt1) from Pk(UM002C3)__AHF20638.1__CSP
augaagaacuucauccugcucgccgugagcuccauccugcuggucgaccuccugcccaccuacuucgagcacaacguggaccugagccgcgccaucaacgugaacggcgucuccuucaacaacguggacaccagcucccucggggcggcccaggugcggcagagcgccucccgcggccgggggcugggcgagaagccgaaggagggggccgacaaggagaagaagaaggagaaggagaaggagaaggaggaggagcccaagaagcccaacgagaacaagcugaagcagcccgagggcaacggcggggccggcccggcgcagcccgaggggaacggcggggccggccccgcccagcccgagggcaacgggggcgccgggccggcgcagcccgagggcaacggcggggccggccccgcccagcccgaggggaacggcggggccggcccggcccagcccgagggcaacgggggcgcggggcccgcccagcccgagggcaacgggggcgccggcccggcccagcccgaggggaacggcggggccggccccgcgcagcccgaggggaacggcggcgccgggccggcccagcccggcgggcagguccagcacaaccgcaaggagaugggcggccaggugcagcacaaccggaaggagaugggcgggcagguccagcacaaccacaaggagaugggcgggcagguccagcacaaccacaaggagaugggcggggccggccccgcccagccccaggggaacggcggggcgggcccggcccagccccaggggaacggcggcgccgggcaggcccagccccagaagaacgagggcgggaacgccggcgcgcgcaaggggcagggccagaacaaccagggcgccaacgcccccaacgagaagguggugaacgacuaccuccagaagauccggagcuccgugacgaccgaguggaccccgugcagcgugaccugcggggacggcgugcgcaucaagcggcgcgcccacgcggacaagaagaaggccgaggaccugacgauggacgaccuggaggucgaggccugcgugauggacaagugcgccgggaucuucaacguggucuccaacagccucggccuggugauccugcucgugcuggcccuguucaacuga

SEQ ID NO: 3528 - RNA, 1128 nt, Artificial Sequence
  derived and/or modified CDS sequence (opt1) from Pk(UM0021C6)__AHF20666.1__CSP
augcgcaacuucauccugcucgccgugagcuccauccugcuggucgaccucuuccccacccacuucgagcacaacguggaccugagccgggccaucaacgugaacggcgucuccuucaacaacguggacaccagcucccugggggcggcccaggugcgccagagcgccucccggggccgcgggcucggcgagaagccgaaggagggggccgacaaggagaagaagaaggagaagggcaaggagaaggaggaggagcccaagaagcccaacgagaacaagcugaagcagcccaacgagggccagccgcaggcccagggggacggcgcgaacgccgggcagccccaggcccagggcgacggggccaacgcgggccagccccaggcccagggcgacggggccaacgccggccagccccaggcccagggggacggcgcgaacgccggccagccgcaggcccagggggacggcgccaacgccgggcagccccaggcgcagggcgacggggccaacgccggccagccccaggcccagggcgacggggccaacgcgggccagccccaggcccagggggacggcgccaacgccgggcagccgcaggcccagggcgacggcgcgaacgccgggcagccccaggcccagggcgacggggccaacacgggccagccccaggcgcagggggacggcgccaacgccggccagccccaggcccagggggaccgggccaacgcgggccagccgcaggcccagggggacggcgccaacgucccccgccagggccggaacgggggcggggcccccgccggcgggaacgagggcaacaagcaggcgggcaaggggcagggccagaacaaccagggggccaacgcccccaacgagaagguggugaacgacuaccugcacaagauccgcagcuccgucaccaccgaguggaccccgugcagcgugacgugcggcaacggggugcggauccgccggaaggcccacgccggcaacaagaaggcggaggaccucaccauggacgaccuggaggucgaggccugcgugauggacaagugcgccggcaucuucaacguggucuccaacagccuggggcucgugauccugcuggugcucgcccuguucaacuga

SEQ ID NO: 3529 - RNA, 1128 nt, Artificial Sequence
  derived and/or modified CDS sequence (opt1) from Pk(UM0050C2)__AHF20664.1__CSP
augaagaacuucauccugcucgccgugagcuccauccugcuggucgaccuccugcccacccacuucgagcacaacguggaccugagccgcgccaucaacgugaacggcgucuccuucaacaacguggacaccagcucccucggggcggcccaggugcggcagagcgccucccgcggccgggggcugggcgagaagccgaaggagggggccgacaaggagaagaagaaggagaagggcaaggagaaggaggaggagcccaagaagcccaacgagaacaagcugaagcagcccaacgagggccagccgcaggcccagggggacggcgcgaacgccgggcagccccaggcccagggcgacggggccaacgcgggccagccccaggcccagggcgacggggccaacgccggccagccccaggcccagggggacggcgcgaacgccggccagccgcaggcccagggggacggcgccaacgccgggcagccccaggcgcagggcgacggggccaacgccggccagccccaggcccagggcgacggggccaacgcgggccagccccaggcccagggggacggcgccaacgccgggcagccgcaggcccagggcgacggcgcgaacgccgggcagccccaggcccagggcgacggggccaacgcgggccagccccaggcccagggggacggcgccaacgccggccagccccaggcccagggggaccgcgcgaacgccggccagccgcaggcccagggggacggcgccaacgucccccggcagggccgcaacgggggcggggcccccgcgggcgggaacgagggcaacaagcaggccggcaaggggcagggccagaacaaccagggggccaacgcccccaacgagaagguggugaacgacuaccuccacaagauccggagcuccgucacgaccgaguggaccccgugcagcgugaccugcggcaacggggugcgcauccggcgcaaggcccacgcgggcaacaagaaggccgaggaccugacgauggacgaccuggaggucgaggccugcgugauggacaagugcgccggcaucuucaacguggucuccaacagccucgggcuggugauccugcucgugcuggcgcuguucaacuga

SEQ ID NO: 3530 - RNA, 1128 nt, Artificial Sequence
  derived and/or modified CDS sequence (opt1) from Pk(UMMK569C20)__AHF20669.1__CSP
augaagaacuucauccugcucgccgugagcuccauccugcuggucgaccuccugcccacccacuucgagcacaacguggaccugagccgcgccaucaacgugaacggcgucuccuucaacaacguggacaccagcucccucggggcggcccaggugcggcagagcgccucccgcggccgggggcugggcgagaagccgaaggagggggccgacaaggagaagaagaaggagaagggcaaggagaaggaggaggagcccaagaagcccaacgagaacaagcugaagcagcccaacgagggccagccgcaggcccagggggacggcgcgaacgccgggcagccccaggcccagggcgacggggccaacgcgggccagccccaggcccagggcgacggggccaacgccggccagccccaggcccagggggacggcgcgaacgccggccagccgcaggcccgcggggacggcgccaacgccgggcagccccaggcgcagggcgacggggccaacgccggccagccccaggcccagggcgacggggccaacgcgggccagccccaggcccagggggacggcgccaacgccgggcagccgcaggcccagggcgacggcgcgaacgccgggcagccccaggcccagggcgacggggccaacgcgggccagccccaggcccagggggacggcgccaacgccggccagccccaggcccagggggaccgggcgaacgccggccagccgcaggcccagggggacggcgccaacgucccccgccagggccggaacgggggcggggcccccgcgggcgggaacgagggcaacaagcaggccggcaaggggcagggccagaacaaccagggggccaacgcccccaacgagaagguggugaacgacuaccuccacaagauccgcagcuccgucacgaccgaguggaccccgugcagcgugaccugcggcaacggggugcggauccgccggaaggcccacgcgggcaacaagaaggccgaggaccugacgauggacgaccuggaggucgaggccugcgugauggacaagugcgccggcaucuucaacguggucuccaacagccucgggcuggugauccugcucgugcuggcgcuguucaacuga

SEQ ID NO: 3531 - RNA, 1116 nt, Artificial Sequence
  derived and/or modified CDS sequence (opt1) from Pk(KH433)__ADN94489.1__CSP
augcgcaacuucauccugcucgccgugagcuccauccugcuggucgaccuccugcccacccacuucgagcacaacguggaccugagccgggccaucaacgugaacggcgucuccuucaacaacguggacaccagcucccucggggcggcccaggugcgccagagcgccucccggggccgcgggcugggcgagaagcggaaggagggggccgacaaggagaagaagaaggagaaggaggaggagccgaagaagcccaacgagaacaagcugaagcagcccaaccccggccagccgcaggcccagggcgacggggcgaacgccggccagccccaggcccagggggacggcgccaacgcggggcagccccaggcccagggcgacggcgccaacgccgggcagccccaggcccagggcgacggggcgaacgccggccagccgcaggcccagggcgacggggccaacgccggccagccccaggcgcagggggacggcgccaacgccgggcagccccaggcccagggcgacggcgccaacgcggggcagccccaggcccagggcgacggggccaacgccggccagccgcaggcccagggggacggcgcgaacgccggccagccccaggcccagggggacggcgccaacgcggggcagccccaggcccagggcgacggggccaacgccggccagccccaggcccagggcgaccgcgcgaacgccgggcagccgcaggcccagggcgacggggccaacgucccccggcagggccgcaacggcgggggcgcccccgccgggggcaacgaggggaacaagcaggcgggcaagggccaggggcagaacaaccagggcgccaacgcccccaacgagaagguggugaacgacuaccuccacaagauccggagcuccgucacgaccgaguggaccccgugcagcgugaccugcgggaacggcgugcgcauccggcgcaaggcccacgcggggaacaagaaggccgaggaccugacgauggacgaccuggaggucgaggccugcgugauggacaagugcgccggcaucuucaacguggucuccaacagccucggccuggugauccugcucgugcuggcgcuguucaacuga

SEQ ID NO: 3532 - RNA, 1116 nt, Artificial Sequence
  derived and/or modified CDS sequence (opt1) from Pk(UM0034C10)__AHF20658.1__CSP
augcgcaacuucauccugcucgccgugagcuccauccugcuggucgaccuccugcccacccacuucgagcacaacguggaccugagccgggccaucaacgugaacggcgucuccuucaacaacguggacaccagcucccucggggcggcccaggugcgccagagcgccucccggggccgcgggcugggcgagaagcggaaggagggggccgacaaggagaagaagaaggagaaggaggaggagccgaagaagcccaacgagaacaagcugaagcagcccaaccccgaccagccgcaggcccagggcgacggcgcgaacgccgggcagccccaggcccagggcgacggggccaacgcgggccagccccaggcccagggggacggcgccaacgccggccagccccaggcccagggggacggcgcgaacgccgggcagccgcaggcccagggcgacggcgccaacgccgggcagccccaggcgcagggcgacggggccaacgccggccagccccaggcccagggggacggcgccaacgcgggccagccccaggcccagggggacggcgccaacgccgggcagccgcaggcccagggcgacggggcgaacgccggccagccccaggcccagggcgacggggccaacgcgggccagccccaggcccagggggacggcgccaacgccgggcagccccaggcccagggcgaccgcgcgaacgccggccagccgcaggcccagggggacggcgccaacgucccccggcaggggcgcaacggcggcggggcccccgcgggcgggaacgagggcaacaagcaggccgggaagggccagggccagaacaaccagggggccaacgcccccaacgagaagguggugaacgacuaccuccacaagauccggagcuccgucacgaccgaguggaccccgugcagcgugaccugcggcaacggggugcgcauccggcgccggcagaacgccggcaacaagaaggcggaggaccugacgauggacgaccuggaggccgaggccugcgucauggacaagugcgccgggaucuucaacgugguguccaacagccucggccuggucauccugcucgugcuggcgcuguucaacuga

SEQ ID NO: 3533 - RNA, 1116 nt, Artificial Sequence
  derived and/or modified CDS sequence (opt1) from Pk(UM0034C6)__AHF20656.1__CSP
augcgcaacuucauccugcucgccgugagcuccauccugcuggucgaccuccugcccacccacuucgagcacaacguggaccugagccgggccaucaacgugaacggcgucuccuucaacaacguggacaccagcucccucggggcggcccaggugcgccagagcgccucccggggccgcgggcugggcgagaagcggaaggagggggccgacaaggagaagaagaaggagaaggaggaggagccgaagaagcccaacgagaacaagcugaagcagcccaaccccgaccagccgcaggcccagggcgacggcgcgaacgccgggcagccccaggcccagggcgacggggccaacgcgggccagccccaggcccagggggacggcgccaacgccggccagccccaggcccagggggacggcgcgaacgccgggcagccgcaggcccagggcgacggcgccaacgccgggcagccccaggcgcagggcgacggggccaacgccggccagccccaggcccagggggacggcgccaacgcgggccagccccaggcccagggggacggcgccaacgccgggcagccgcaggcccagggcgacggggcgaacgccggccagccccaggcccagggcgacggggccaacgcgggccagccccaggcccagggggacggcgccaacgccgggcagccccaggcccagggcgaccgcgcgaacgccggccagccgcaggcccagggggacggcgccaacgucccccggcaggggcgcaacggcggcggggcccccgcgggcgggaacgagggcaacaagcaggccgggaagggccagggccagaacaaccagggggccaacgcccccaacgagaagguggugaacgacuaccuccacaagauccggagcuccgucacgaccgaguggaccccgugcagcgugaccugcggcaacggggugcgcauccggcgcaaggcccacgcgggcaacaagaaggccgaggaccugacgauggacgaccuggaggucgaggccugcgugauggacaagugcgccgggaucuucaacguggucuccaacagccucggccuggugauccugcucgugcuggcgcuguucaacuga

SEQ ID NO: 3534 - RNA, 1107 nt, Artificial Sequence
  derived and/or modified CDS sequence (opt1) from Pk(SGEHIWM16-Y09-85)__AFD97232.1__CSP
augaagaacuucauccugcucgccgugagcuccauccugcuggucgaccuccugcccaccuacuucgagcacaacguggaccugagccgcgccaucaacgugaacggcgucuccuucaacagcguggacaccuccagccucggggcggcccaggugcggcaguccgccagccgcggccgggggcugggcgagaagccgaaggagggggccgacaaggagaagaagaaggagaaggagaaggaggaggagcccaagaagcccaacgagaacaagcugaagcagccccagggcaacggcggggccggccaggcgcagccggaggggaacggcggggccggccaggcccagcccgagggcaacgggggcgccgggcaggcgcagcccgagggcaacggcggggccggccaggcccagcccgaggggaacggcggggccggccaggcccagccggagggcaacgggggcgcggggcaggcccagcccgagggcaacgggggcgccggccaggcccagcccgaggggaacggcggggccggccaggcgcagcccgaggggaacggcggcgccgggcaggcccagccggagggcaacgggggcgccggccaggcccagccccaggggaacggcggggcgggccaggcccagccccaggggaacggcggcgccgggcaggcccagccccagggcaacgggggcgccgggcaggcgcagccggagggcaaccgcgaggcccccgcccagccccagggcaacgggggcgccgggcaggcgcagccccagaagaacgagggcgggaacgccggcgcccggaagggccaggggcagaacaaccagggcgccaacgccccgaacgagaaggucgugaacgacuaccuccagaagauccgcuccagcgugacgaccgaguggacccccugcuccgugaccugcgggaacggcguccggauccgccggcgcgcgcacgccgacaagaagaaggccgaggaccugacgauggacgaccuggagguggaggccugcgucauggacaagugcgccgggaucuucaacguggugagcaacucccucggccuggucauccugcucgugcuggcgcuguucaacuga

SEQ ID NO: 3535 - RNA, 1107 nt, Artificial Sequence
  derived and/or modified CDS sequence (opt1) from Pk(SGEHIWM4-Y09-13)__AFD97225.1__CSP
augaagaacuucauccugcucgccgugagcuccauccugcuggucgaccuccugcccaccuacuucgagcacaacguggaccugagccgcgccaucaacgugaacggcgucuccuucaacagcguggacaccuccagccucggggcggcccaggugcggcaguccgccagccgcggccgggggcugggcgagaagccgaaggagggggccgacaaggagaagaagaaggagaaggagaaggaggaggagcccaagaagcccaacgagaacaagcugaagcagccccagggcaacggcggggccggccaggcgcagccggaggggaacggcggggccggccaggcccagcccgagggcaacgggggcgccgggcaggcgcagcccgagggcaacggcggggccggccaggcccagcccgaggggaacggcggggccggccaggcccagccggagggcaacgggggcgcggggcaggcccagcccgagggcaacgggggcgccggccaggcccagcccgaggggaacggcggggccggccaggcgcagcccgaggggaacggcggcgccgggcaggcccagccggagggcaacgggggcgccggccaggcccagccccaggggaacggcggggcgggccaggcccagccccaggggaacggcggcgccgggcaggcccagccccagggcaacgggggcgccgggcaggcgcagccggagggcaaccgcgaggcccccgcccagccccagggcaacgggggcgccgggcaggcgcagccccagaagaacgagggcgggaacgccggcgcccggaagggccaggggcagaacaaccagggcgccaacgccccgaacgagaaggucgugaacgacuaccuccagaagauccgcuccagcgugacgaccgaguggacccccugcuccgugaccugcgggaacggcguccggauccgccggcgcgcgcacgccgacaagaagaaggccgaggaccugacgguggacgaccuggaggucgaggccugcgugauggacaagugcgccgggaucuucaacguggucagcaacucccucggccuggugauccugcucgugcuggcgcuguucaacuga

SEQ ID NO: 3536 - RNA, 1104 nt, Artificial Sequence
  derived and/or modified CDS sequence (opt1) from Pk(KH58)__ADN94493.1__CSP
augaagaacuucauccugcucgccgugagcuccauccugcuggucgaccuccugcccacccacuucgagcacaacguggaccugagccgcgccaucaacaucaacggcguguccuucaacaacgucgacaccagcucccucggggcggcccaggugcggcagagcgccucccgcggccgggggcugggcgagaagccgaaggagggggccgacaaggagaagaagaaggagaaggagaaggaggaggagcccaagaagcccaacgagaacaagcugaagcagcccaacgccgagggcgacggcgcgaacgcccgccagccgaacgccgagggggacggcgccaacgcgcggcagcccaacgccgagggggacggcgccaacgcccgccagcccaacgccgagggggacggcgcgaacgcccggcagcccaacgccgagggcgacggggccaacgcccgccagccgaacgcggagggcgacggggccaacgcccggcagcccaacgccgagggcgacggcgccaacgcgcgccagcccaacgccgagggggacggcgccaacgcccggcagcccaacgccgagggggacggcgcgaacgcccgccagccgaacgccgagggggacggcgccaacgcgcggcagcccaacgccgagggcgggggcgccaacgcccgccagcccaacgccgagggggacggcgcgaacgcccggcagccccaggcccagggggacggcggcaacgcccgccagggcgggaacgggggcggggccccggcgggcggcaacgaggggaacaagcaggccggcaaggggcagggccagaacaaccagggcgccaacgcccccaacgagaagguggucaacgacuaccuccagaagauccggagcuccgugacgaccgaguggacccccugcagcgugaccugcgggaacggcguccgcauccggcgccgggcccacgcggacaagaagaaggccgaggaccugacgauggacgaccuggagguggaggccugcgugauggacaagugcgccgggaucuucaacgucguguccaacagccucggccuggugauccugcucguccuggcgcuguucaacuga

SEQ ID NO: 3537 - RNA, 1104 nt, Artificial Sequence
  derived and/or modified CDS sequence (opt1) from Pk(UM0029C8)__AHF20651.1__CSP
augaagaacuucauccugcucgccgugagcuccauccugcuggucgaccuccugcccacccacuucgagcacaacguggaccugagccgcgccaucaacgugaacggcgucuccuucaacaacguggacaccagcucccucggggcggcccaggugcggcagagcgccucccgcggccgggggcugggcgagaagccgaaggagggggccgacaaggagaagaagaaggagaaggagaaggagaaggaggaggagcccaagaagcccaacgagaacaagcugaagcagcccgagcagccggccgcgggcgccggcggggagcagcccgccgccggcgccgggggcgagcagcccgcggccggggccggcggcgagcagcccgccgcgggggccggcggggagcagccggccgccggcgcccgcggcgagcagcccgcggccggggccggcggggagcagcccgccgccggcgcgcgcggggagcagcccgccgccggcgccggcggggagcagccggccgcgggcgccgggggcgagcagcccgccgccggggcgggcggcgagcagcccgccgccgggggcgagcagcccgccgccggggcgggcggggagcagccggccgccggcgcccggggcgagcagcccgccgcgggggccggcggggagcagcccgcccccgccccgcggcgcgagcagcccgccgcgggcgccggcggggagcagcccgcccccgccccgcggcgcgagcagcccgcgcccggcgccggggccggcgacggggcccggggcggcaacgccggggcgggcaaggggcagggccagaacaaccagggggccaacguccccaacgagaagguggugaacgacuaccuccacaagauccgcagcuccgucacgaccgaguggaccccgugcagcgugaccugcggcaacggcgugcggauccgccggaaggggcacgccggcaacaagaaggccgaggaccugacgauggacgaccuggaggucgaggccugcgugauggacaagugcgcggggaucuucaacguggucuccaacagccucggccuggugauccugcucgugcuggcccuguucaacuga

SEQ ID NO: 3538 - RNA, 1104 nt, Artificial Sequence
  derived and/or modified CDS sequence (opt1) from Pk(UM0032C8)__AHF20655.1__CSP
augaagaacuucauccugcucgccgugagcuccauccugcuggucgaccuccugcccacccacuucgagcacaacguggaccugagccgcgccaucaacgugaacggcgucuccuucaacaacguggacaccagcucccucggggcggcccaggugcggcagagcgccucccgcggccgggggcugggcgagaagccgaaggagggggccgacaaggagaagaagaaggagaaggagaaggaggaggagcccaagaagcccaacgagaacaagcugaagcagcccaacgccgagggcgacggcgcgaacgcccgccagccgaacgccgagggggacggcgccaacgcgcggcagcccaacgccgagggggacggcgccaacgcccgccagcccaacgccgagggggacggcgcgaacgcccggcagcccaacgccgagggcgacggggccaacgcccgccagccgaacgcggagggcgacggggccaacgcccggcagcccaacgccgagggcaacggcgccaacgcgcgccagcccaacgccgagggcggcggggccaacgcccggcagcccaacgccgagggggacggggcgaacgcccgccagccgaacgccgagggcgacggcgccaacgcgcggcagcccaacgccgagggcggcggggccaacgcccgccagccccaggccgagggggacggggcgaacgcccggcagccccaggcccagggcgacggcgggaacgcccgccagggcgggaacggcgggggcgccccggcgggcgggaacgagggcaacaagcaggccgggaagggccagggccagaacaaccagggggccaacgcccccaacgagaaggucgugaacgacuaccuccagaagauccggagcuccgugacgaccgaguggacccccugcagcgugaccugcggcaacgggguccgcauccggcgccgggcccacgcggacaagaagaaggccgaggaccugacgauggacgaccuggagguggaggccugcgucauggacaagugcgccggcaucuucaacgugguguccaacagccucggguucgucauccugcuggugcucgcgcuguucaacuga

SEQ ID NO: 3539 - RNA, 1101 nt, Artificial Sequence
  derived and/or modified CDS sequence (opt1) from Pk(LT22)__ADN94538.1__CSP
augcgcaacuucauccugcucgccgugagcuccauccugcuggucgaccuccugcccacccacuucgagcacaacguggaccugagccgggccaucaacgugaacggcgucuccuucaacaacguggacaccagcucccucggggcggcccaggugcgccagagcgccucccggggccgcgggcugggcgagaagcggaaggagggggccgacaaggagaagaagaaggagaaggaggaggagccgaagaagcccaacgagaacaagcugaagcagcccaacgccgagggcggcgcgaacgccgggcagcccaacgccgagggcggggccaacgcgggccagccgaacgccgagggcggggccaacgccggccagcccaacgccgagggcggggcgaacgccgggcagcccaacgccgagggcggcgccaacgccgggcagcccaacgcggagggcggggccaacgccggccagccgaacgccgagggcggggccaacgcgggccagcccaacgccgagggcggggccaacgccgggcagcccaacgccgagggcggggcgaacgccggccagcccaacgccgagggcggggccaacgcgggccagccgaacgccgagggcggggccaacgcccgccagcccaacgccgagggcggggcgaacgccggccagcccaacgccgagggcggggccaacgccgggcagcccaacgcggagggcggcgccaacgcccggcagccgcaggccgagggcggcggggccaacgcgcgccagggcgggaacgaggggaacaagcaggccggcaaggggcagggccagaacaaccagggggccaacgcccccaacgagaaggucgugaacgacuaccuccagaagauccggagcuccgugacgaccgaguggacccccugcagcgugaccugcggcaacgggguccgcauccggcgccgggcgcacgccgacaagaagaaggccgaggaccugacgauggacgaccuggagguggaggccugcgucauggacaagugcgccggcaucuucaacgugguguccaacagccucggccuggucauccugcucgugcuggcgcuguucaacuga

SEQ ID NO: 3540 - RNA, 1101 nt, Artificial Sequence
  derived and/or modified CDS sequence (opt1) from Pk(LT26)__ADN94539.1__CSP
augcgcaacuucauccugcucgccgugagcuccauccugcuggucgaccuccugcccacccacuucgagcacaacguggaccugagccgggccaucaacgugaacggcgucuccuucaacaacguggacaccagcucccucggggcggcccaggugcgccagagcgccucccggggccgcgggcugggcgagaagcggaaggagggggccgacaaggagaagaagaaggagaaggaggaggagccgaagaagcccaacgagaacaagcugaagcagcccaacgccgagggcggcgcgaacgccgggcagcccaacgccgagggcggggccaacgcgggccagccgaacgccgagggcggggccaacgccggccagcccaacgccgagggcggggcgaacgccgggcagcccaacgccgagggcggcgccaacgccgggcagcccaacgcggagggcggggccaacgccggccagccgaacgccgagggcggggccaacgcgggccagcccaacgccgagggcggggccaacgcccgccagcccaacgccgagggcggggcgaacgccgggcagcccaacgccgagggcggcgccaacgcggggcagccgaacgccgagggcggggccaacgccggccagcccaacgccgagggcggggcgaacgccggccagcccaacgccgagggcggggccaacgccgggcagcccaacgcggagggcggcgccaacgcccggcagccgcaggccgagggcggcggggccaacgcgcgccagggcgggaacgaggggaacaagcaggccggcaaggggcagggccagaacaaccagggggccaacgcccccaacgagaaggucgugaacgacuaccuccagaagauccggagcuccgugacgaccgaguggacccccugcagcgugaccugcggcaacgggguccgcauccggcgccgggcgcacgccgacaagaagaaggccgaggaccugacgauggacgaccuggagguggaggccugcgucauggacaagugcgccggcaucuucaacgugguguccaacagccucggccuggucauccugcucgugcuggcgcuguucaacuga

SEQ ID NO: 3541 - RNA, 1101 nt, Artificial Sequence
  derived and/or modified CDS sequence (opt1) from Pk(TB013)__AFG25472.1__CSP
augcgcaacuucauccugcucgccgugagcuccauccugcuggucgaccuccugcccacccacuucgagcacaacguggaccugagccgggccaucaacgugaacggcgucuccuucaacaacguggacaccagcucccucggggcggcccaggugcgccagagcgccggccgggggcgcggccugggggagaagcggaaggagggcgccgacaaggagaagaagaaggagaaggaggaggagccgaagaagcccaacgagaacaagcugaagcagcccaacgccgagggcggggcgaacgccggccagcccaacgccgagggcggggccaacgcggggcagccgaacgccgagggcggcgccaacgccgggcagcccaacgccgagggcggggcgaacgccggccagcccaacgccgagggcggggccaacgccggccagcccaacgcggagggcggggccaacgccgggcagccgaacgccgagggcggcgccaacgcggggcagcccaacgccgagggcggggccaacgccggccagcccaacgccgagggcggggcgaacgccggccagcccaacgccgagggcggggccaacgcgcgccagccgaacgccgagggcggggccaacgcccggcagcccaacgccgagggcggggcgaacgccggccagcccaacgccgagggcggggccaacgccgggcagcccaacgcggagggcggcgccaacgcccgccagccgcaggccgagggcggcggggccaacgcgcggcagggcgggaacgaggggaacaagcaggccggcaaggggcagggccagaacaaccagggggccaacgcccccaacgagaaggucgugaacgacuaccuccagaagauccgcuccagcgugacgaccgaguggacccccugcuccgugaccugcggcaacgggguccggauccgccggcgcgcgcacgccgacaagaagaaggccgaggaccugacgauggacgaccuggagguggaggccugcgucauggacaagugcgccggcaucuucaacguggugagcaacucccucggccuggucauccugcucgugcuggcgcuguucaacuga

SEQ ID NO: 3542 - RNA, 1101 nt, Artificial Sequence
  derived and/or modified CDS sequence (opt1) from Pk(TB049)__AFG25474.1__CSP
augcgcaacuucauccugcucgccgugagcuccauccugcuggucgaccuccugcccacccacuucgagcacaacguggaccugagccgggccaucaacgugaacggcgucuccuucaacaacguggacaccagcucccucggggcggcccaggugcgccagagcgccucccggggccgcgggcugggcgagaagcggaaggagggggccgacaaggagaagaagaaggagaaggaggaggagccgaagaagcccaacgagaacaagcugaagcagcccaacgccgagggcggcgcgaacgccgggcagcccaacgccgagggcggggccaacgcgggccagccgaacgccgagggcggggccaacgccggccagcccaacgccgagggcggggcgaacgccgggcagcccaacgccgagggcggcgccaacgccgggcagcccaacgcggagggcggggccaacgccggccagccgaacgccgagggcggggccaacgcgggccagcccaacgccgagggcggggccaacgcccgccagcccaacgccgagggcggggcgaacgccgggcagcccaacgccgagggcggcgccaacgcggggcagccgaacgccgagggcggggccaacgcccggcagcccaacgccgagggcggggcgaacgcccgccagcccaacgccgagggcggcgccaacgccgggcagcccaacgcggagggcggggccaacgcccggcagccgcaggccgagggcggcggggccaacgcgcgccagggcgggaacgagggcaacaagcaggccgggaagggccagggccagaacaaccagggggccaacgcccccaacgagaaggucgugaacgacuaccuccagaagauccggagcuccgugacgaccgaguggacccccugcagcgugaccugcggcaacgggguccgcauccggcgccgggcgcacgccgacaagaagaaggccgaggaccugacgauggacgaccuggagguggaggccugcgucauggacaagugcgccggcaucuucaacgugguguccaacagccucgggcuggucauccugcucgugcuggcgcuguucaacuga

SEQ ID NO: 3543 - RNA, 1101 nt, Artificial Sequence
  derived and/or modified CDS sequence (opt1) from Pk(TN024)__AFG25479.1__CSP
augcgcaacuucauccugcucgccgugagcuccauccugcuggucgaccuccugcccacccacuucgagcacaacguggaccugagccgggccaucaacgugaacggcgucuccuucaacaacguggacaccagcucccucggggcggcccaggugcgccagagcgccucccggggccgcgggcugggcgagcggcgcaaggagggggccgacaaggagaagaagaaggagaaggaggaggagccgaagaagcccaacgagaacaagcugaagcagcccaacgccgagggcggcgcgaacgccgggcagcccaacgccgagggcggggccaacgcgggccagccgaacgccgagggcggggccaacgccggccagcccaacgccgagggcggggcgaacgccgggcagcccaacgccgagggcggcgccaacgccgggcagcccaacgcggagggcggggccaacgccggccagccgaacgccgagggcggggccaacgcgggccagcccaacgccgagggcggggccaacgcccggcagcccaacgccgagggcggggcgaacgccgggcagcccaacgccgagggcggcgccaacgcggggcagccgaacgccgagggcggggccaacgcccgccagcccaacgccgagggcggggcgaacgcccggcagcccaacgccgagggcggcgccaacgccgggcagcccaacgcggagggcggggccaacgcccgccagccgcaggccgagggcggcggggccaacgcgcggcagggcgggaacgagggcaacaagcaggccgggaagggccagggccagaacaaccagggggccaacgcccccaacgagaaggucgugaacgacuaccuccagaagauccgcagcuccgugacgaccgaguggacccccugcagcgugaccugcggcaacgggguccggauccgccggcgcgcgcacgccgacaagaagaaggccgaggaccugacgauggacgaccuggagguggaggccugcgucauggacaagugcgccggcaucuucaacgugguguccaacagccucgggcuggucauccugcucgugcuggcgcuguucaacuga

SEQ ID NO: 3544 - RNA, 1095 nt, Artificial Sequence
  derived and/or modified CDS sequence (opt1) from Pk(KH369)__ADN94494.1__CSP
augaagaacuucauccugcucgccgugagcuccauccugcuggucgaccucuuccccacccacuucgagcacaacguggaccugagccgcgccaucaacgugaacggcgucuccuucaacaacguggacaccagcucccugggggcggcccaggugcggcagagcgccucccgcggccgggggcucggcgagaagccgaaggagggggccgacaaggagaagaagaaggagaaggaggagcccaagaagcccaacgagaacaagcugaagcagccccaggccgagggcgacggcgcgaacgcccgccagccgcaggccgagggggacggcgccaacgcgcggcagccccaggccgagggggacggcgccaacgcccgccagccccaggccgagggggacggcgcgaacgcccggcagccccaggccgagggcgacggggccaacgcccgccagccgcaggcggagggcgacggggccaacgcccggcagccccaggccgagggcgacggcgccaacgcgcgccagccccaggccgagggggacggcgccaacgcccggcagccccaggccgagggggacggcgcgaacgcccgccagccgcaggccgagggggacggcgccaacgcgcggcagccccaggccgagggcgggggcgccaacgcccgccagccccaggccgagggggacggcgcgaacgcccggcagccccaggcccagggggacggcggcaacgcccgccagggcgggaacgggggcggggccccggcgggcggcaacgaggggaacaagcaggccggcaaggggcagggccagaacaaccagggcgccaacgcccccaacgagaaggucgugaacgacuaccugcagaagauccggagcuccgugacgaccgaguggacccccugcagcgugaccugcgggaacggcguccgcauccggcgccgggcccacgcggacaagaagaaggccgaggaccucacgauggacgaccuggagguggaggccugcgucauggacaagugcgccgggaucuucaacgugguguccaacagccugggccucgucauccugcuggugcucgcgcuguucaacuga

SEQ ID NO: 3545 - RNA, 1095 nt, Artificial Sequence
  derived and/or modified CDS sequence (opt1) from Pk(LT48)__ADN94507.1__CSP
augaagaacuucauccugcucgccgugagcuccauccugcuggucgaccuccugcccacccacuucgagcacaacguggaccugagccgcgccaucaacaucaacggcguguccuucaacaacgucgacaccagcucccucggggcggcccaggugcggcagagcgccucccgcggccgggggcugggcgagaagccgaaggagggggccgacaaggagaagaagaaggagaaggaggagcccaagaagcccaacgagaacaagcugaagcagccccaggccgagggcgacggcgcgaacgcccgccagccgcaggccgagggggacggcgccaacgcgcggcagccccaggccgagggggacggcgccaacgcccgccagccccaggccgagggggacggcgcgaacgcccggcagccccaggccgagggcgacggggccaacgcccgccagccgcaggcggagggcgacggggccaacgcccggcagccccaggccgagggcgacggcgccaacgcgcgccagccccaggccgagggggacggcgccaacgcccggcagccccaggccgagggggacggcgcgaacgcccgccagccgcaggccgagggggacggcgccaacgcgcggcagccccaggccgagggcgggggcgccaacgcccgccagccccaggccgagggggacggcgcgaacgcccggcagccccaggcccagggggacggcggcaacgcccgccagggcgggaacgggggcggggccccggcgggcggcaacgaggggaacaagcaggccggcaaggggcagggccagaacaaccagggcgccaacgcccccaacgagaagguggucaacgacuaccuccagaagauccggagcuccgugacgaccgaguggacccccugcagcgugaccugcgggaacggcguccgcauccggcgccgggcccacgcggacaagaagaaggccgaggaccugacgauggacgaccuggagguggaggccugcgugauggacaagugcgccgggaucuucaacgucguguccaacagccucggccuggugauccugcucguccuggcgcuguucaacuga

SEQ ID NO: 3546 - RNA, 1092 nt, Artificial Sequence
  derived and/or modified CDS sequence (opt1) from Pk(LT22)__ADN94522.1__CSP
augcgcaacuucauccugcucgccgugagcuccauccugcuggucgaccuccugcccacccacuucgagcacaacguggaccugagccgggccaucaacgugaacggcgucuccuucaacaacguggacaccagcucccucggggcggcccaggugcgccagagcgccucccggggccgcgggcugggcgagaagcggaaggagggggccgacaaggagaagaagaaggagaaggaggaggagccgaagaagcccaacgagaacaagcugaagcagcccgaccaggccggccccggcggggagcaggcgggccccgggggcgagcaggccgggcccggcggcgagcaggccgggccccgccccggcggggagcaggccggcccgggcggggagcaggcgggcccccggcccgggggcgagcaggccgggcccggcggcgagcaggccgggccgcgccccggcggggagcaggccggccccgggggcgagcaggccggccccgggggcgagcaggcggggccgcggcccggcggggagcaggccggccccggcggggagcaggccggcccccgccccgggggcgagcaggccggccccgggggcgagcaggccgggccccggcccggcggggagcaggcgggcccgggcggggagcagcccgccccgcgccccggcggggagcagccggcccccgccccgcggcgcgagcagccggcccccgcgcccggcggggagcagcccgccccgggcgccggcgccggggacggcgcccgcgggggcaaccccggggcgggcaagggccaggggcagaacaaccagggcgccaacguccccaacgagaagguggugaacgacuaccuccacaagauccggagcuccgucacgaccgaguggacccccugcagcgugaccugcgggaacggcgugcggauccgccggcgccagaacgccgggaacaagaaggccgaggaccugacgauggacgaccuggaggucgaggcgugcgugauggacaagugcgccggcaucuucaacguggucuccaacagccucggccuggugauccugcucgugcuggcccuguucaacuga

SEQ ID NO: 3547 - RNA, 1092 nt, Artificial Sequence
  derived and/or modified CDS sequence (opt1) from Pk(UM0020C1)__AHF20649.1__CSP
augaagaacuucauccugcucgccgugagcuccauccugcuggucgaccuccugcccacccacuucgagcacaacguggaccugagccgcgccaucaacgugaacggcgucuccuucaacaacguggacaccagcucccucggggcgagccaggugcggcaguccgccagccgcggccgggggcugggcgagaagccgaaggagggggccgacaaggagaagaagaaggagaagggcaaggagaaggaggaggagcccaagaagcccaacgagaacaagcugaagcagcccaacgagggccagccgcaggcccagggggacggcgccaacgcggggcagccccaggcccagggcgacggggccaacgccggccagccccaggcgcagggcgacggggccaacgccggccagccccaggcccagggggacggcgccaacgcgggccagccgcaggcccagggggacggcgccaacgccgggcagccccaggcccagggcgacggggcgaacgccggccagccccaggcccagggcgacggggccaacgccggccagccccaggcgcagggggacggcgccaacgccgggcagccgcaggcccagggcgacggcgccaacgcggggcagccccaggcccagggcgacggggccaacgccggccagccccaggcgcagggggaccgcgccaacgccggccagccccaggcccagggcgacggggccaacgucccgcggcagggccgcaacgggggcggcgcgcccgccgggggcaacgaggggaacaagcaggccggcaaggggcagggccagaacaaccagggcgccaacgcccccaacgagaagguggugaacgacuaccuccacaagauccgguccagcgucacgaccgaguggacccccugcuccgugaccugcgggaacggcgugcgcauccggcgccggcagaacgcggggaacaagaaggccgaggaccugacgauggacgaccuggaggucgaggccugcgugauggacaagugcgccggcaucuucaacguggucagcaacucccucgggcuggugauccugcucgugcuggcccuguucaacuga

SEQ ID NO: 3548 - RNA, 1092 nt, Artificial Sequence
  derived and/or modified CDS sequence (opt1) from Pk(UM0020C3)__AHF20650.1__CSP
augaagaacuucauccugcucgccgugagcuccauccugcuggucgaccuccugcccacccacuucgagcacaacguggaccugagccgcgccaucaacgugaacggcgucggguucaacaacguggacaccuccagccucggcgcgucccaggugcggcagagcgccucccgcgggcggggccugggggagaagccgaaggagggcgccgacaaggagaagaagaaggagaagggcaaggagaaggaggaggagcccaagaagcccaacgagaacaagcugaagcagcccaacgaggggcagccgcaggcccagggcgacggggccaacgcgggccagccccaggcccagggggacggcgccaacgccggccagccccaggcgcagggggacggcgccaacgccgggcagccccaggcccagggcgacggcgccaacgcggggcagccgcaggcccagggcgacggggccaacgccggccagccccaggcccagggggacggcgcgaacgccggccagccccaggcccagggggacggcgccaacgccgggcagccccaggcgcagggcgacggggccaacgccggccagccgcaggcccagggcgacggggccaacgcgggccagccccaggcccagggggacggcgccaacgccgggcagccccaggcgcagggcgaccgcgccaacgccggccagccccaggcccagggggacggcgccaacgucccgcggcaggggcgcaacggcggcggggcgcccgccggcgggaacgagggcaacaagcaggccgggaagggccagggccagaacaaccagggggccaacgcccccaacgagaagguggugaacgacuaccuccacaagauccggagcuccgucacgaccgaguggacccccugcagcgugaccugcggcaacggggugcgcauccggcgcaaggcgcacgccggcaacaagaaggccgaggaccugacgauggacgaccuggaggucgaggccugcgugauggacaagugcgccgggaucuucaacguggucuccaacagccucggccuggugauccugcucgugcuggcgcuguucaacuga

SEQ ID NO: 3549 - RNA, 1092 nt, Artificial Sequence
  derived and/or modified CDS sequence (opt1) from Pk(UM0021C19)__AHF20668.1__CSP
augcgcaacuucauccugcucgccgugagcuccauccugcuggucgaccucuuccccacccacuucgagcacaacguggaccugagccgggccaucaacgugaacggcgucuccuucaacaacguggacaccagcucccugggggcggcccaggugcgccagagcgccucccggggccgcgggcucggcgagaagcggaaggagggggccgacaaggagaagaagaaggagaaggaggaggagccgaagaagcccaacgagaacaagcugaagcagcccgaccaggccggccccggcggggagcaggcgggcccgggcggggagcaggccgggcccggcggcgagcaggccgggcccggcggggagcaggccggcccccgcccgggcggggagcaggcgggccccgggggcgagcaggccgggccccggcccggcggcgagcaggccgggccgcgccccggcggggagcaggccggcccccggcccgggggcgagcaggccggccccgggggcgagcaggcggggcccggcggggagcaggccggccccggcggggagcaggccggcccccgccccgggggcgagcaggccggccccgggggcgagcaggccgggccccggcccggcggggagcaggcgggcccgggcggggagcagcccgccccgcgccccggcggggagcagccggcccccgccccgcggcgcgagcagccggcccccggccccgggggcgagcagcccgcgccgggcgccggggccggcgacggggcccggggcgggaaccccggcgccggcaaggggcagggccagaacaaccagggggcgaacguccccaacgagaagguggugaacgacuaccugcacaagauccgcagcuccgucacgaccgaguggacccccugcagcgugaccugcggcaacggggugcggauccgccggcgccagaacgccggcaacaagaaggccgaggaccucacgauggacgaccuggaggucgaggccugcgugauggacaagugcgcgggcaucuucaacguggucuccaacagccuggggcucgugacccugcuggugcucgcccuguucaacuga

SEQ ID NO: 3550 - RNA, 1092 nt, Artificial Sequence
  derived and/or modified CDS sequence (opt1) from Pk(UMGAC7)__AHF20617.1__CSP
augaagaacuucauccugcucgccgugagcuccauccugcuggucgaccuccugcccacccacuucgagcacaacguggaccugagccgcgccaucaacgugaacggcgucuccuucaacaacguggacaccagcucccucggggcggcccaggugcggcagagcgccucccgcggccgggggcugggcgagaagccgaaggagggggccgacaaggagaagaagaaggagaagggcaaggagaaggaggaggagcccaagaagcccaacgagaacaagcugaagcagcccaacgagggccagccgcaggcccagggggacggcgcgaacgccgggcagccccaggcccagggcgacggggccaacgcgggccagccccaggcccagggcgacggggccaacgccggccagccccaggcccagggggacggcgcgaacgccggccagccgcaggcccagggggacggcgccaacgccgggcagccccaggcgcagggcgacggggccaacgccggccagccccaggcccagggcgacggggccaacgcgggccagccccaggcccagggggacggcgccaacgccgggcagccgcaggcccagggcgacggcgcgaacgccgggcagccccaggcccagggcgacggggccaacgcgggccagccccaggcccagggggaccgcgccaacgccggccagccccaggcccagggcgacggggcgaacgucccgcggcagggccgcaacgggggcggcgcccccgccgggggcaacgaggggaacaagcaggccggcaaggggcagggccagaacaaccagggcgccaacgcgcccaacgagaagguggugaacgacuaccuccacaagauccggagcuccgucacgaccgaguggacccccugcagcgugaccugcgggaacggcgugcgcauccggcgcaaggcccacgccgggaacaagaaggccgaggaccugacgauggacgaccuggaggucgaggccugcgugauggacaagugcgcgggcaucuucaacguggucuccaacagccucgggcuggugauccugcucgugccggcccuguucaacuga

SEQ ID NO: 3551 - RNA, 1092 nt, Artificial Sequence
  derived and/or modified CDS sequence (opt1) from Pk(UMMK566C6)__AHF20670.1__CSP
augaagaacuucauccugcucgccgugagcuccauccugcuggucgaccuccugcccacccacuucgagcacaacguggaccugagccgcgccaucaacgugaacggcgucuccuucaacaacguggacaccagcucccucggggcggcccaggugcggcagagcgccucccgcggccgggggcugggcgagaagccgaaggagggggccgacaaggagaagaagaaggagaagggcaaggagaaggagggcgagcccaagaagcccaacgagaacaagcugaagcagcccaacgaggggcagccgcaggcccagggcgacggggcgaacgccggccagccccaggcccagggggacggcgccaacgcgggccagccccaggcccagggggacggcgccaacgccgggcagccccaggcccagggcgacggcgcgaacgccgggcagccgcaggcccagggcgacggggccaacgccggccagccccaggcgcagggggacggcgccaacgccggccagccccaggcccagggggacggcgccaacgcggggcagccccaggcccagggcgacggggccaacgccggccagccgcaggcccagggcgacggggcgaacgccggccagccccaggcccagggggacggcgccaacgcggggcagccccaggcccagggcgaccgcgccaacgccggccagccccaggcccagggggacggcgcgaacgucccgcggcaggggcgcaacggcggcggggcccccgccggcgggaacgagggcaacaagcaggccgggaagggccagggccagaacaaccagggggccaacgcgcccaacgagaagguggugaacgacuaccuccacaagauccggagcuccgucacgaccgaguggacccccugcagcgugaccugcggcaacggggugcgcauccggcgcaaggcccacgccggcaacaagaaggccgaggaccugacgauggacgaccuggaggucgaggccugcgugauggacaagugcgcggggaucuucaacguggucuccaacagccucggccuggugauccugcucgugcuggcccuguucaacuga

SEQ ID NO: 3552 - RNA, 1089 nt, Artificial Sequence
  derived and/or modified CDS sequence (opt1) from Pk(UMGAC1)__AHF20615.1__CSP
augaagaacuucauccugcucgccgugagcuccauccugcuggucgaccuccugcccacccacuucgagcacaacguggaccugagccgcgccaucaacgugaacggcgucuccuucaacaacguggacaccagcucccucggggcggcccaggugcggcagagcgccucccgcggccgggggcugggcgagaagccgaaggagggggccgacaaggagaagaagaaggagaagggcaaggagaaggaggagcccaagaagcccaacgagaacaagcugaagcagcccaacgagggccagccgcaggcccagggggacggcgcgaacgccgggcagccccaggcccagggcgacggggccaacgcgggccagccccaggcccagggcgacggggccaacgccggccagccccaggcccagggggacggcgcgaacgccggccagccgcaggcccagggggacggcgccaacgccgggcagccccgcgcgcagggcgacggggccaacgccggccagccccaggcccagggcgacggggccaacgcgggccagccccaggcccagggggacggcgccaacgccgggcagccgcaggcccagggcgacggcgcgaacgccgggcagccccaggcccagggcgacggggccaacgcgggccagccccaggcccagggggaccgggccaacgccggccagccccaggcccagggcgacggggcgaacgucccgcgccagggccggaacgggggcggcgcccccgccgggggcaacgaggggaacaagcaggccggcaaggggcagggccagaacaaccagggcgccaacgcgcccaacgagaagguggugaacgacuaccuccacaagauccgcagcuccgucacgaccgaguggacccccugcagcgugaccugcgggaacggcgugcggauccgccggaaggcccacgccgggaacaagaaggccgaggaccugacgauggacgaccuggaggucgaggccugcgugauggacaagugcgcgggcaucuucaacguggucuccaacagccucgggcuggugauccugcucgugcuggcccuguucaacuga

SEQ ID NO: 3553 - RNA, 1086 nt, Artificial Sequence
  derived and/or modified CDS sequence (opt1) from Pk(NB032)__AFG25470.1__CSP
augaagaacuucauccugcucgccgugagcuccauccugcuggucgaccucuuccccacccacuucgagcacaacguggaccugagccgcgccaucaacgugaacggcgucuccuucaacaacguggacaccagcucccugggggcggcccaggugcggcagagcgccucccgcggccgggggcucggcgagaagccgaaggagggggccgacaaggagaagaagaaggagaaggagaaggagaaggagaaggaggaggagcccaagaagcccaacgagaacaagcugaagcagcccgagggcaaccaggacggccgcgcccagccggaggggaaccaggacggccgggcgcagcccgaggggaaccaggacggccgcgcccagcccgaggggaaccaggacggccgggcccagcccgagggcaaccaggacgggcgcgcccagccggagggcaaccaggacgggcgggcgcagcccgagggcaaccaggacggccgcgcccagcccgaggggaaccaggacggccgggcccagcccgaggggaaccaggacggccgcgcccagccggaggggaaccgggaggcccccgcgcagccccagggcaacggcggggccggccaggcccagcccgaggggaaccgcgaggccccggcccagccccagggcaacgggggcgcgggccaggcccagcccgaggggaaccgggaggcccccgcccagccgcagggcaacgggggcgccgggcaggcgcagccccagaagaacgagggcggcaacgccggggcccgcaagggccaggggcagaacaaccagggcgccaacgcccccaacgagaaggucgugaacgacuaccugcacaagauccggagcuccgugacgaccgaguggacccccugcagcgugaccugcggcaacgggguccgcauccggcgcaaggcgcacgccgacaagaagaaggccgaggaccucacgauggacgaccuggagguggaggccugcgucauggacaagugcgcgggcaucuucaacgugguguccaacagccuggggcucgucauccugcuggugcucgcccuguucaacuga

SEQ ID NO: 3554 - RNA, 1083 nt, Artificial Sequence
  derived and/or modified CDS sequence (opt1) from Pk(UM002C4)__AHF20639.1__CSP
augaagaacuucauccugcucgccgugagcuccauccugcuggucgaccuccugcccaccuacuucgagcacaacguggaccugagccgcgccaucaacgugaacggcgucuccuucaacaacguggacaccagcucccucggggcggcccaggugcggcagagcgccucccgcggccgggggcugggcgagaagccgaaggagggggccgacaaggagaagaagaaggagaaggagaaggagaaggaggaggagcccaagaagcccaacgagaacaagcugaagcagcccgagggcaacggcggggccggcccggcgcagcccgaggggaacggcggggccggccccgcccagcccgagggcaacgggggcgccgggccggcgcagcccgagggcaacggcggggccggccccgcccagcccgaggggaacggcggggccggcccggcccagcccgagggcaacgggggcgcggggcccgcccagcccgagggcaacgggggcgccggcccggcccagcccgaggggaacggcggggccggccccgcgcagcccgaggggaacggcggcgccgggccggcccagcccgagggcaacgggggcgccggccccgcccagccccaggggaacggcggggcgggcccggcccagccccaggggaacggcggcgccgggcccgcccagccccagggcaacgggggcgccgggccggcgcagccccagggcaacggcggggccggccaggcccagccccagaagaacgagggcgggaacgccggggcgcgcaagggccagggccagaacaaccagggggccaacgccccgaacgagaaggucgugaacgacuaccuccagaagauccggagcuccgugacgaccgaguggacccccugcagcgugaccugcggcaacgggguccgcaucaagcggcgcgcccacgccgacaagaagaaggcggaggaccugacgauggacgaccuggagguggaggccugcgucauggacaagugcgccggcaucuucaacgugguguccaacagccucgggcuggucauccugcucgugcuggcccuguucaacuga

SEQ ID NO: 3555 - RNA, 1080 nt, Artificial Sequence
  derived and/or modified CDS sequence (opt1) from Pk(CDK162)__ADN94495.1__CSP
augcgcaacuucauccugcucgccgugagcuccauccugcuggucgaccuccugcccacccacuucgagcacaacguggaccugagccgggccaucaacgugaacggcgucuccuucaacaacguggacaccagcucccucggggcggcccaggugcgccagagcgccucccggggccgcgggcugggcgagaagcggaaggagggggccgacaaggagaagaagaaggagaaggaggaggagccgaagaagcccaacgagaacaagcugaagcagcccaaccccgaccagccgcaggcccagggcgacggcgcgaacgccgggcagccccaggcccagggcgacggggccaacgcgggccagccccaggcccagggggacggcgccaacgccggccagccccaggcccagggggacggcgcgaacgccgggcagccgcaggcccagggcgacggcgccaacgccgggcagccccaggcgcagggcgacggggccaacgccggccagccccaggcccagggggacggcgccaacgcgggccagccccaggcccagggggacggcgccaacgccgggcagccgcaggcccagggcgacggggcgaacgccggccagccccaggcccagggcgacggggccaacgcgggccagccccaggcccagggggaccgcgccaacgccggccagccccaggcccagggggacggcgcgaacgucccgcggcagggccgcaacgggggcggggcccccgccggcggcaacgaggggaacaagcaggccggcaaggggcagggccagaacaaccagggggccaacgcgcccaacgagaagguggugaacgacuaccuccacaagauccggagcuccgucacgaccgaguggacccccugcagcgugaccugcggcaacggcgugcgcauccggcgccggcagaacgccgggaacaagaaggccgaggaccugacgauggacgaccuggaggucgaggccugcgugauggacaagugcgccggcaucuucaacguggucuccaacagccucgggcuggugauccugcucgugcuggcgcuguucaacuga

SEQ ID NO: 3556 - RNA, 1080 nt, Artificial Sequence
  derived and/or modified CDS sequence (opt1) from Pk(KN010)__AFG25463.1__CSP
augcgcaacuucauccugcucgccgugagcuccauccugcuggucgaccuccugcccacccacuucgagcacaacguggaccugagccgggccaucaacgugaacggcgucuccuucaacaacguggacaccagcucccucggggcggcccaggugcgccagagcgccucccggggccgcgggcugggcgagaagcggaaggagggggccgacaaggagaagaagaaggagaaggaggaggagccgaagaagcccaacgagaacaagcugaagcagcccaaccccgaccagccgcaggcccagggcgacggcgcgaacgccgggcagccccaggcccagggcgacggggccaacgcgggccagccccaggcccagggggacggcgccaacgccggccagccccaggcccagggggacggcgcgaacgccgggcagccgcaggcccagggcgacggcgccaacacggggcagccccaggcccagggcgacggggcgaacgccggccagccccaggcccagggggacggcgccaacgccggccagccccaggcgcagggggacggcgccaacgccgggcagccgcaggcccagggcgacggggccaacgcgggccagccccaggcccagggcgacggggccaacgccggccagccccaggcgcagggggaccgcgccaacgccggccagccccaggcccagggggacggcgccaacgucccgcggcagggccgcaacgggggcggggcgcccgccggcggcaacgaggggaacaagcaggccggcaaggggcagggccagaacaaccagggggccaacgcccccaacgagaagguggugaacgacuaccuccacaagauccggagcuccgucaccgcggaguggacccccugcagcgugaccugcggcaacggcgugcgcauccggcgcaaggcccacgccgggaacaagaaggccgaggaccugacgauggacgaccuggaggucgaggccugcgugauggacaagugcgcgggcaucuucaacguggucuccaacagccucgggcuggugauccugcucgugcuggcccuguucaacuga

SEQ ID NO: 3557 - RNA, 1080 nt, Artificial Sequence
  derived and/or modified CDS sequence (opt1) from Pk(KN013)__AFG25464.1__CSP
augcgcaacuucauccugcucgccgugagcuccauccugcuggucgaccuccugcccacccacuucgagcacaacguggaccugagccgggccaucaacgugaacggcgucuccuucaacaacguggacaccagcucccucggggcggcccaggugcgccagagcgccucccggggccgcgggcugggcgagaagcggaaggagggggccgacaaggagaagaagaaggagaaggaggaggagccgaagaagcccaacgagaacaagcugaagcagcccaaccccggccagccgcaggcccagggcgacggggcgaacgccggccagccccaggcccagggggacggcgccaacgcggggcagccccaggcccagggcgacggcgccaacgccgggcagccccaggcccagggcgacggggcgaacgccggccagccgcaggcccagggcgacggggccaacgccggccagccccaggcgcagggggacggcgccaacgccgggcagccccaggcccagggcgacggcgccaacgcggggcagccccaggcccagggcgacggggccaacgccggccagccgcaggcccagggggacggcgcgaacgccggccagccccaggcccagggggacggcgccaacgcggggcagccccaggcccagggcgaccgcgccaacgccgggcagccccaggcccagggcgacggcgcgaacgucccgcggcaggggcgcaacggcgggggcgcccccgccggcgggaacggcgggaacaagcaggccggcaaggggcagggccagaacaaccagggcgccaacgcgcccaacgagaagguggugaacgacuaccuccacaagauccggagcuccgucacgaccgaguggacccccugcagcgugaccugcgggaacggcgugcgcauccggcgcaaggcccacgccgggaacaagaaggccgaggaccugacgauggacgaccuggaggucgaggccugcgugauggacaagugcgcgggcaucuucaacguggucuccaacagccucgggcuggugauccugcucgugcuggcccuguucaacuga

SEQ ID NO: 3558 - RNA, 1080 nt, Artificial Sequence
  derived and/or modified CDS sequence (opt1) from Pk(LT57)__ADN94508.1__CSP
augaagaacuucauccugcucgccgugagcuccauccugcuggucgaccucuuccccacccacuucgagcacaacguggaccugagccgcgccaucaacgugaacggcgucuccuucaacaacguggacaccagcucccugggggcggcccaggugcggcagagcgccucccgcggccgggggcucggcgagaagccgaaggagggggccgacaaggagaagaagaaggagaaggagaaggagaaggaggaggagcccaagaagcccaacgagaacaagcugaagcagcccgagggcaaccaggacggccgcgcccagccggaggggaaccaggacggccgggcgcagcccgaggggaaccaggacggccgcgcccagcccgaggggaaccaggacggccgggcccagcccgagggcaaccaggacgggcgcgcccagccggagggcaaccaggacgggcgggcgcagcccgagggcaaccaggacggccgcgcccagcccgaggggaaccaggacggccgggcccagcccgaggggaaccaggacggccgcgcccagccggaggggaaccgggaggcccccgcgcagccccagggcaacggcggggccggccaggcccagcccgaggggaaccgcgaggccccggcccagccccagggcaacgggggcgcgggccaggcccagcccgaggggaaccgggaggcccccgcccagccgcagggcaacgggggcgccgggcaggcgcagccccagaagaacgagggcggcaacgccggggcccgcaagggccaggggcagaacaaccagggcgccaacgcccccaacgagaaggucgugaacgacuaccugcacaagauccggagcuccgugacgaccgaguggacccccugcagcgugaccugcggcaacgggguccgcauccggcgcaaggcgcacgccgacaagaagaaggccgaggaccucacgauggacgaccuggagguggaggccugcgucauggacaagugcgcgggcaucuucaacgugguguccaacagccuggggcucgucauccugcuggugcucgcccuguucaacuga

SEQ ID NO: 3559 - RNA, 1080 nt, Artificial Sequence
  derived and/or modified CDS sequence (opt1) from Pk(NB046)__AFG25471.1__CSP
augcgcaacuucauccugcucgccgugagcuccauccugcuggucgaccuccugcccacccacuucgagcacaacguggaccugagccgggccaucaacgugaacggcgucuccuucaacaacguggacaccagcucccucggggcggcccaggugcgccagagcgccucccggggccgcgggcugggcgagaagcggaaggagggggccgacaaggagaagaagaaggagaaggaggaggagccgaagaagcccaacgagaacaagcugaagcagcccaaccccgaccagccgcaggcccagggcgacggcgcgaacgccgggcagccccaggcccagggcgacggggccaacgcgggccagccccaggcccagggggacggcgccaacgccggccagccccaggcccagggggacggcgcgaacgccgggcagccgcaggcccagggcgacggcgccaacgccgggcagccccaggcgcagggcgacggggccaacgccggccagccccaggcccagggggacggcgccaacgcgggccagccccaggcccagggggacggcgccaacgccgggcagccgcaggcccagggcgacggggcgaacgccggccagccccaggcccagggcgacggggccaacgcgggccagccccaggcccagggggaccgcgccaacgccggccagccccaggcccagggggacggcgcgaacgucccgcggcagggccgcaacgggggcggggcccccgccggcggcaacgaggggaacaagcaggccggcaaggggcagggccagaacaaccagggggccaacgcgcccaacgagaagguggugaacgacuaccuccacaagauccggagcuccgucacgaccgaguggacccccugcagcgugaccugcggcaacggcgugcgcauccggcgcaaggcccacgccgggaacaagaaggccgaggaccugacgauggacgaccuggaggucgaggccugcgugauggacaagugcgcgggcaucuucaacguggucuccaacagccucgggcuggugauccugcucgugcuggcccuguucaacuga

SEQ ID NO: 3560 - RNA, 1080 nt, Artificial Sequence
  derived and/or modified CDS sequence (opt1) from Pk(TN023)__AFG25478.1__CSP
augcgcaacuucauccugcucgccgugagcuccauccugcuggucgaccuccugcccacccacuucgagcacaacguggaccugagccgggccaucaacgugaacggcgucuccuucaacaacguggacaucagcucccucggggcggcccaggugcgccagagcgccucccggggccgcgggcugggcgagaagcggaaggagggggccgacaaggagaagaagaaggagaaggaggaggagccgaagaagcccaacgagaacaagcugaagcagcccaaccccgaccagccgcaggcccagggcgacggcgcgaacgccgggcagccccaggcccagggcgacggggccaacgcgggccagccccaggcccagggggacggcgccaacgccggccagccccaggcccagggggacggcgcgaacgccgggcagccgcaggcccagggcgacggcgccaacgccgggcagccccaggcgcagggcgacggggccaacgccggccagccccaggcccagggggacggcgccaacgcgggccagccccaggcccagggggacggcgccaacgccgggcagccgcaggcccagggcgacggggcgaacgccggccagccccaggcccagggcgacggggccaacgcgggccagccccaggcccagggggaccgcgccaacgccggccagccccaggcccagggggacggcgcgaacgucccgcggcagggccgcaacgggggcggggcccccgccggcggcaacgaggggaacaagcaggccggcaaggggcagggccagaacaaccagggggccaacgcgcccaacgagaagguggugaacgacuaccuccacaagauccggagcuccgucaccacggaguggacccccugcagcgugaccugcggcaacggcgugcgcauccggcgcaaggcccacgccgggaacaagaaggccgaggaccugaccauggacgaccuggaggucgaggccugcgugauggacaagugcgcgggcaucuucaacguggucuccaacagccucgggcuggugauccugcucgugcuggcccuguucaacuga

SEQ ID NO: 3561 - RNA, 1080 nt, Artificial Sequence
  derived and/or modified CDS sequence (opt1) from Pk(UM0016C2)__AHF20663.1__CSP
augaagaacuucauccugcucgccgugagcuccauccugcuggucgaccuccugcccacccacuucgagcacaacguggaccugagccgcgccaucaacgugaacggcgucuccuucaacaacguggacaccagcucccucggggcggcccaggugcggcagagcgccucccgcggccgggggcugggcgagaagccgaaggagggggccgacaaggagaagaagaaggagaaggagaaggagaaggaggaggagcccaagaagcccaacgagaacaagcugaagcagcccgagggcaaccaggacggccgcgcccagccggaggggaaccaggacggccgggcgcagcccgaggggaaccaggacggccgcgcccagcccgaggggaaccaggacggccgggcccagcccgagggcaaccaggacgggcgcgcccagccggagggcaaccaggacgggcgggcgcagcccgagggcaaccaggacggccgcgcccagcccgaggggaaccaggacggccgggcccagcccgaggggaaccaggacggccgcgcccagccggaggggaaccgggaggcccccgcgcagccccagggcaacggcggggccggccaggcccagcccgaggggaaccgcgaggccccggcccagccccagggcaacgggggcgcgggccaggcccagcccgaggggaaccgggaggcccccgcccagccgcagggcaacgggggcgccgggcaggcgcagccccagaagaacgagggcggcaacgccggggcccgcaagggccaggggcagaacaaccagggcgccaacgcccccaacgagaaggucgugaacgacuaccuccagaagauccggagcuccgugacgaccgaguggacccccugcagcgugaccugcggcaacgggguccgcauccggcgccgggcgcacgccgacaagaagaaggccgaggaccugacgauggacgaccuggagguggaggccugcgucauggacaagugcgcgggcaucuucaacgugguguccaacagccucgggcuggucauccugcucgugcuggcccuguucaacuga

SEQ ID NO: 3562 - RNA, 1077 nt, Artificial Sequence
  derived and/or modified CDS sequence (opt1) from Pk(LT48)__ADN94519.1__CSP
augcgcaacuucauccugcucgccgugagcuccauccugcuggucgaccuccugcccacccacuucgagcacaacguggaccugagccgggccaucaacgugaacggcgucuccuucaacaacguggacaccagcucccucggggcggcccaggugcgccagagcgccucccggggccgcgggcugggcgagaagcggaaggagggggccgacaaggagaagaagaaggagaaggaggaggagccgaagaagcccaacgagaacaagcugaagcagcccaaccccgaccagccgcaggcccagggcgacggcgcgaacgccgggcagccccaggcccagggcgacggggccaacgcgggccagccccaggcccagggggacggcgccaacgccggccagccccaggcccagggggacggcgcgaacgccgggcagccgcaggcccagggcgacggcgccaacgccgggcagccccaggcgcagggcgacggggccaacgccggccagccccaggcccagggggacggcgccaacgcgggccagccccaggcccagggggacggcgccaacgccgggcagccgcaggcccagggcgacggggcgaacgccggccagccccaggcccagggcgacggggccaacgcgggccagccccaggcccagggggaccgcggcaugcaggacaaccacaagcacaaggagauggggcagauguaccacgacaaggaggagacgggcgagguccaccagcaggaggagaugcggggcaucaacaagcaggagaaggcccgcgacaagaccauccggguggagugccccaaggagaagguggucaacgacuaccuccacaagauccgcagcuccgugaccaccgaguggacgccgugcagcgugaccugcgggaacggcguccggauccgccggaaggcccacgccgggaacaagaaggcggaggaccugaccauggacgaccuggagguggaggccugcgugauggacaagugcgccggcaucuucaacgucguguccaacagccucggccuggugauccugcucguccuggcccuguucaacuga

SEQ ID NO: 3563 - RNA, 1077 nt, Artificial Sequence
  derived and/or modified CDS sequence (opt1) from Pk(SGEHIWM4-Y09-9)__AFD97223.1__CSP
augaagaacuucauccugcucgccgugagcuccauccugcuggucgaccuccugcccaccuacuucgagcacaacguggaccugagccgcgccaucaacgugaacggcgucuccuucaacagcguggacaccuccagccucggggcggcccaggugcggcaguccgccagccgcggccgggggcugggcgagaagccgaaggagggggccgacaaggagaagaagaaggagaaggagaaggaggaggagcccaagaagcccaacgagaacaagcugaagcagccccagggcaacggcggggccggccaggcgcagccggaggggaacggcggggccggccaggcccagcccgagggcaacgggggcgccgggcaggcgcagcccgagggcaacggcggggccggccaggcccagcccgaggggaacggcggggccggccaggcccagccggagggcaacgggggcgcggggcaggcccagcccgagggcaacgggggcgccggccaggcccagcccgaggggaacggcggggccggccaggcgcagcccgaggggaacggcggcgccgggcaggcccagccggagggcaacgggggcgccggccaggcccagcccgaggggaacggcggggcgggccaggcccagcccgaggggaacggcggcgccgggcaggcccagcccgagggcaacgggggcgccgggcaggcgcagccgcagggcaacggcggggccggccaggcccagccccagaagaacgagggcgggaacgccggggcgcgcaagggccagggccagaacaaccagggggccaacgcccccaacgagaaggucgugaacgacuaccuccagaagauccgguccagcgugacgaccgaguggacccccugcuccgugaccugcggcaacgggguccgcauccggcgccgggcccacgccgacaagaagaaggcggaggaccugacgauggacgaccuggagguggaggccugcgucauggacaagugcgccggcaucuucaacguggugagcaacucccucgggcuggucauccugcucgugcuggcccuguucaacuga

SEQ ID NO: 3564 - RNA, 1071 nt, Artificial Sequence
  derived and/or modified CDS sequence (opt1) from Pk(LT15)__ADN94525.1__CSP
augcgcaacuucauccugcucgccgugagcuccauccugcuggucgaccuccugcccacccacuucgagcacaacguggaccugagccgggccaucaacgugaacggcgucuccuucaacaacguggacaccagcucccucggggcggcccaggugcgccagagcgccucccggggccgcgggcugggcgagaagcggaaggagggggccgacaaggagaagaagaaggagaaggaggaggagccgaagaagcccaacgagaacaagcugaagcagcccgagcaggccgcgcccggcgccggcggggagcagccggcccccggcgccgggggcgagcagcccgcgcccggggccggcggcgagcagccggcccccggggccggcggggagcgccccgcccccggcgcgggcggggagcagccggcccccggcgccgggggcgagcagcccgcccccggggccggcggcgagcggccggcgcccggggccggcggggagcagcccgcccccggcgccgggggcgagcagccggcccccggcgccgggggcgagcagcccgcccccggggccggcggggagcagccggcccccggcgccggcggggagcgccccgcgcccggcgccgggggcgagcggccggcccccggcgccgggggcgagcagcccgcgccgggggccggcggggagcagcccgcccccgcgccccgccgggagcagccggcccccggccccggcgcgggggacggcgcccgcgggggcaacgccggggccggcaagggccaggggcagaacaaccagggcgccaacguccccaacgagaagguggugaacgacuaccuccacaagauccggagcuccgucacgaccgaguggaccccgugcagcgugaccugcgggaacggcgugcgcauccggcgccggcagaacgcggggaacaagaaggccgaggaccugacgauggacgaccuggaggucgaggccugcgugauggacaagugcgccggcaucuucaacguggucuccaacagccucggccuggugauccugcucgugcuggcccuguucaacuga

SEQ ID NO: 3565 - RNA, 1071 nt, Artificial Sequence
  derived and/or modified CDS sequence (opt1) from Pk(LT57)__ADN94503.1__CSP
augaagaacuucauccugcucgccgugagcuccauccugcuggucgaccucuuccccacccacuucgagcacaacguggaccugagccgcgccaucaacgugaacggcgucuccuucaacaacguggacaccagcucccugggggcggcccaggugcggcagagcgccucccgcggccgggggcucggcgagaagccgaaggagggggccgacaaggagaagaagaaggagaaggagaaggaggagcccaagaagcccaacgagaacaagcugaagcagcccgagggcaaccaggacggccgcgcccagccggaggggaaccaggacggccgggcgcagcccgaggggaaccaggacggccgcgcccagcccgaggggaaccaggacggccgggcccagcccgagggcaaccaggacgggcgcgcccagccggagggcaaccaggacgggcgggcgcagcccgagggcaaccaggacggccgcgcccagcccgaggggaaccaggacggccgggcccagcccgaggggaaccaggacggccgcgcccagccggaggggaaccgggaggcccccgcgcagccccagggcaacggcggggccggccaggcccagcccgaggggaaccgcgaggccccggcccagccccagggcaacgggggcgcgggccaggcccagcccgaggggaaccgggaggcccccgcccagccgcagggcaacgggggcgccgggcaggcgcagccccagaagaacgagggcggcaacgccggggcccgcaagggccaggggcagaacaaccagggcgccaacgcccccaacgagaaggucgugaacgacuaccugcagaagauccggagcuccgugacgaccgaguggacccccugcagcgugaccugcggcaacgggguccgcauccggcgccgggcgcacgccgacaagaagaaggccgaggaccucacgauggacgaccuggagguggaggccugcgucauggacaagugcgcgggcaucuucaacgccguguccaacagccuggggcucgugauccugcugguccucgcccuguucaacuga

SEQ ID NO: 3566 - RNA, 1068 nt, Artificial Sequence
  derived and/or modified CDS sequence (opt1) from Pk(UMHIC2)__AHF20634.1__CSP
augaagaacuucauccugcucgccgugagcuccauccugcuggucgaccuccugcccacccacuucgagcacaacguggaccugagccgcgccaucaacgugaacggcgucuccuucaacaacguggacaccagcucccucggggcggcccaggugcggcagagcgccucccgcggccgggggcugggcgagaagccgaaggagggggccgacaaggagaagaagaaggagaaggagaaggaggaggagcccaagaagcccaacgagaacaagcugaagcagcccgagggcaaccgcgaggccccgggccagcccgaggggaaccgggaggcgcccggccagcccgaggggaaccgcgaggccccgggccagcccgaggggaaccgggaggcccccggccagcccgagggcaaccgcgaggccccggggcagcccgagggcaaccgggaggcgcccgggcagcccgagggcaaccgcgaggccccgggccagcccgaggggaaccgggaggcccccggccagcccgaggggaaccgcgaggccccgggccagcccgaggggaaccgggaggcccccggccagcccgagggcaaccgcgaggcgccggcccagcccgaggggaaccgggaggcccccggccagcccgaggggaaccgcgaggccccggcccagcccgagggcaaccgggaggcgcccgcccagccgcaggggaacggcggcgccgggcaggcccagccccagaagaacgagggcgggaacgccggcgcgcgcaaggggcagggccagaacaaccagggcgccaacgcccccaacgagaaggucgugaacgacuaccuccagaagauccggagcuccgugacgaccgaguggacccccugcagcgugaccugcgggaacggcguccgcaucaagcggaaggcccacgccgacaagaagaaggcggaggaccugacgauggacgaccuggagguggaggccugcgucauggacaagugcgccgggaucuucaacgugguguccaacagccucggccuggucauccugcucgugcuggcccuguucaacuga

SEQ ID NO: 3567 - RNA, 1068 nt, Artificial Sequence
  derived and/or modified CDS sequence (opt1) from Pk(UMHIC6)__AHF20635.1__CSP
augaagaacuucauccugcucgccgugagcuccauccugcuggucgaccuccugcccacccacuucgagcacaacguggaccugagccgcgccaucaacgugaacggcgucuccuucaacaacguggacaccagcucccucggggcggcccaggugcggcagagcgccucccgcggccgggggcugggcgagaagccgaaggagggggccgacaaggagaagaagaaggagaaggagaaggaggaggagcccaagaagcccaacgagaacaagcugaagcagcccgagggcaaccgcgaggccccgggccagcccgaggggaaccgggaggcgcccggccagcccgaggggaaccgcgaggccccgggccagcccgaggggaaccgggaggcccccggccagcccgagggcaaccgcgaggccccggggcagcccgagggcaaccgggaggcgcccgggcagcccgagggcaaccgcgaggccccgggccagcccgaggggaaccgggaggcccccggccagcccgaggggaaccgcgaggccccgggccagcccgaggggaaccgggaggcccccggccagcccgagggcaaccgcgaggcgccggggcagcccgagggcaaccgggaggcccccgggcagcccgagggcaaccgcgaggccccggcccagcccgaggggaaccgggaggcccccgcgcagccgcagggcaacggcggggccggccaggcccagccccagaagaacgagggcgggaacgccggggcccgcaagggccagggccagaacaaccagggggcgaacgcccccaacgagaaggucgugaacgacuaccuccagaagauccggagcuccgugacgaccgaguggacccccugcagcgugaccugcggcaacgggguccgcaucaagcggaaggcccacgccgacaagaagaaggccgaggaccugacgauggacgaccuggagguggaggcgugcgucauggacaagugcgccggcaucuucaacgugguguccaacagccucggccuggucauccugcucgugcuggcccuguucaacuga

SEQ ID NO: 3568 - RNA, 1068 nt, Artificial Sequence
  derived and/or modified CDS sequence (opt1) from Pk(UMJUC1)__AHF20630.1__CSP
augaagaacuucauccugcucgccgugagcuccauccugcuggucgaccuccugcccacccacuucgagcacaacguggaccugagccgcgccaucaacgugaacggcgucucccucaacaacguggacaccagcucccugggggcggcccaggugcggcagagcgccucccgcggccgggggcugggcgagaagccgaaggagggggccgacaaggagaagaagaaggagaaggagaaggaggaggagcccaagaagcccaacgagaacaagcucaagcagcccgagggcaaccgcgaggccccgggccagcccgaggggaaccgggaggcgcccggccagcccgaggggaaccgcgaggccccgggccagcccgaggggaaccgggaggcccccggccagcccgagggcaaccgcgaggccccggggcagcccgagggcaaccgggaggcgcccgggcagcccgagggcaaccgcgaggccccgggccagcccgaggggaaccgggaggcccccggccagcccgaggggaaccgcgaggccccgggccagcccgaggggaaccgggaggcccccggccagcccgagggcgaccgcgaggcgccggcccagcccgaggggaaccgggaggcccccggccagcccgaggggaaccgcgaggucccggcccagcccgagggcaaccgggaggcccccgcgcagccgcaggggaacggcggcgccgggcaggcccagccccagaagaacgagggcgggaacgccggcgcccgcaaggggcagggccagaacaaccagggcgcgaacgcccccaacgagaagguggugaacgacuaccugcagaagauccggagcuccgucacgaccgaguggacccccugcagcgugaccugcgggaacggcgugcgcaucaagcggaaggcccacgccgacaagaagaaggccgaggaccugacgauggacgaccucgaggucgaggcgugcgugauggacaagugcgccgggaucuucaacguggucuccaacagccugggccuggugauccuccuggugcuggcccucuucaacuga

SEQ ID NO: 3569 - RNA, 1062 nt, Artificial Sequence
  derived and/or modified CDS sequence (opt1) from Pk(TN026)__AFG25480.1__CSP
augaagaacuucauccugcucgccgugagcuccauccugcuggucgaccuccugcccacccacuucgagcacaacguggaccugagccgcgccaucaacgugaacggcgucuccuucaacaacguggacaccagcucccucggggcggcccaggugcggcagagcgccucccgcggccgggggcugggcgagaagccgaaggagggggccgacaaggagaagaagaaggagaaggagaaggagaaggagaaggaggaggagcccaagaagcccaacgagaacaagcugaagcagcccgagcagccggccgcgggcgccggcggggagcagcccgccgccggcgccgggggcgagcagcccgcggccggggccggcggcgagcagcccgccgcgggggccggcggggagcagccggccgccggcgccggcggggagcagcccgcggccggcgccgggggcgagcagcccgccgccggggcgcgcggcgagcagcccgccgccggcgccgggggcgagcagccggccgcgggggccggcggggagcagcccgccgccggcgcgcggggcgagcagcccgccgccggggccggcggggagcagcccgccgcgggcgcccgcggggagcagccggccgccggcgccggcggggagcagcccgcggccggcgccgggggcgagcagcccgcccccgccccgcggcgcgagcagcccgcgcccggcgccggggccggcgacggggcccggggcgggaacgcgggcgccggcaaggggcagggccagaacaaccagggggccaacguccccaacgagaagguggugaacgacuaccuccacaagauccgcagcuccgucacgaccgaguggaccccgugcagcgugaccugcggcaacggggugcggauccgcggcaagggccacgccgggaacaagaaggccgaggaccugacgauggacgaccuggaggucgaggcgugcgugauggacaagugcgccggcaucuucaacguggucuccaacagccucgggcuggugauccugcucgugcuggcccuguucaacuga

SEQ ID NO: 3570 - RNA, 1056 nt, Artificial Sequence
  derived and/or modified CDS sequence (opt1) from Pk(F08B49-1)__AHH02601.1__CSP
augaagaacuucauccugcucgccgugagcuccauccugcuggucgaccuccugcccacccacuucgagcacaacguggaccugagccgcgccaucaacgugaacggcgucuccuucaacaacguggacaccagcucccucggggcggcccaggugcggcagagcgccucccgcggccgggggcugggcgagaagccgaaggagggggccgacaaggagaagaagaaggagaaggagaaggagaaggaggaggagcccaagaagcccaacgagaacaagcugaagcagcccgagcagccggccgcgggcgccggcggggagcagcccgccgccggcgccgggggcgagcagcccgcggccggggccggcggcgagcagcccgccgcgggggcccgcggcgagcagccggccgccggggccggcggcgagcagcccgcggccggggccggcggggagcagcccgccgccggcgccgggggcgagcagcccgcggccggcgccgggggcgagcagccggccgcgggggccggcggggagcagcccgccgccggcgcgcggggcgagcagcccgccgccggggccggcggggagcagcccgccgcgggcgccgggggcgagcagccggccgccggcgcccgcggggagcagcccgcggccggcgccgggggcgagcagcccgcccccgccccgcggcgcgagcagcccgcgcccggcgccggggccggcgacggggcccggggcgggaacgcgggcgccggcaaggggcagggccagaacaaccagggggccaacguccccaacgagaagguggugaacgacuaccuccacaagauccgcagcuccgucacgaccgaguggaccccgugcagcgugaccugcggcaacggggugcggauccgccggaagggccacgccggcaacaagaaggccgaggaccugacgauggacgaccuggaggucgaggcgugcgugauggacaagugcgccgggaucuucaacguggucuccaacagccucggccuggugauccugcucgugcuggcccuguucaacuga

SEQ ID NO: 3571 - RNA, 1056 nt, Artificial Sequence
  derived and/or modified CDS sequence (opt1) from Pk(F08B69-1)__AHH02602.1__CSP
augaagaacuucauccugcucgccgugagcuccauccugcuggucgaccuccugcccacccacuucgagcacaacguggaccugagccgcgccaucaacgugaacggcgucuccuucaacaacguggacaccagcucccucggggcggcccaggugcggcagagcgccucccgcggccgggggcugggcgagaagccgaaggagggggccgacaaggagaagaagaaggagaaggagaaggagaaggaggaggagcccaagaagcccaacgagaacaagcugaagcagcccgagcagccggccgcgggcgccggcggggagcagcccgccgccggcgccgggggcgagcagcccgcggccggggccggcggcgagcagcccgccgcgggggcccgcggcgagcagccggccgccggggccggcggcgagcagcccgcggccggggccggcggggagcagcccgccgccggcgccgggggcgagcagcccgcggccggcgccgggggcgagcagccggccgcgggggccggcggggagcagcccgccgccggcgcgcggggcgagcagcccgccgccggggccggcggggagcagcccgccgcgggcgccgggggcgagcagccggccgccggcgcccgcggggagcagcccgcggccggcgccgggggcgagcagcccgcccccgccccgcggcgcgagcagcccgcgcccggcgccggggccggcgacggggcccggggcgggaacgcgggcgccggcaaggggcagggccagaacaaccagggggccaacguccccaacgagaagguggugaacgacuaccuccacaagauccgcagcuccgucacgaccgaguggaccccgugcagcgugaccugcggcaacggggugcggauccgccggaagggccacgccggcaacaagaaggccgaggaccugacgauggacgaccuggacgucgaggcgugcgugauggacaagugcgccgggaucuucaacguggucuccaacagccucggccuggugauccugcucgugcuggcccuguucaacuga

SEQ ID NO: 3572 - RNA, 1056 nt, Artificial Sequence
  derived and/or modified CDS sequence (opt1) from Pk(LT51)__ADN94540.1__CSP
augaagaacuucauccugcucgccgugagcuccauccugcuggucgaccuccugcccacccacuucgagcacaacguggaccugagccgcgccaucaacgugaacggcgucuccuucaacaacguggacaccagcucccucggggcggcccaggugcggcagagcgccucccgcggccgggggcugggcgagaagccgaaggagggggccgacaaggagaagaagaaggagaaggagaaggagaaggaggaggagcccaagaagcccaacgagaacaagcugaagcagcccgagcagccggccgcgggcgccggcggggagcagcccgccgccggcgccgggggcgagcagcccgccgccggggccggcggcgagcagcccgccgcgggggccggcggggagcagccggccgccggcgccggcggggagcagcccgcggccggcgccgggggcgagcagcccgccgccggggcgcgcggcgagcagcccgccgccggcgccgggggcgagcagccggccgcgggggccggcggggagcagcccgccgccggcgcgcggggcgagcagcccgccgccggggccggcggggagcagcccgccgcgggcgccgggggcgagcagccggcccccgcgccccgccgggagcagcccgccgcgggcgccgggggcgagcagccggcccccgcgccccgccgggagcagcccgccccgggggccggcgccggcgacggggcccgcggcgggaacgccggcgcggggaagggccagggccagaacaaccagggggccaacguccccaacgagaagguggugaacgacuaccuccacaagauccggagcuccgucacgaccgaguggacccccugcagcgugaccugcggcaacggggugcgcauccggcgcaagggccacgccgggaacaagaaggccgaggaccugacgauggacgaccuggaggucgaggccugcgugauggacaagugcgcgggcaucuucaacguggucuccaacagccucggccuggugauccugcucgugcuggcccuguucaacuga

SEQ ID NO: 3573 - RNA, 1056 nt, Artificial Sequence
  derived and/or modified CDS sequence (opt1) from Pk(UM0029C9)__AHF20652.1__CSP
augaagaacuucauccugcucgccgugagcuccauccugcuggucgaccuccugcccacccacuucgagcacaacguggaccugagccgcgccaucaacgugaacggcgucuccuucaacaacguggacaccagcucccucggggcggcccaggugcggcagagcgccucccgcggccgggggcugggcgagaagccgaaggagggggccgacaaggagaagaagaaggagaaggagaaggagaaggaggaggagcccaagaagcccaacgagaacaagcugaagcagcccgagcagccggccgcgggcgccggcggggagcagcccgccgccggcgccgggggcgagcagcccgccgccggggccggcggcgagcagcccgccgcgggggccggcggggagcagccggccgccggcgcccgcggcgagcagcccgcggccggggccggcggggagcagcccgccgccggcgcgcgcggggagcagcccgccgccggcgccggcggggagcagccggccgcgggcgccgggggcgagcagcccgccgccggggcgggcggcgagcagcccgccgccggggcccggggcgagcagcccgccgcgggggccggcggggagcagccggcccccgcgccccggcgcgagcagcccgccgcgggcgccggcggggagcagccggcccccgcgccccggcgcgagcagcccgccccgggcgccggggccggcgacggcgcccgggaggggaacgccggcgcggggaagggccaggggcagaacaaccagggcgccaacguccccaacgagaagguggugaacgacuaccuccacaagauccgcagcuccgucacgaccgaguggacccccugcagcgugaccugcggcaacggggugcggauccgccggaagggccacgccgggaacaagaaggccgaggaccugacgauggacgaccuggaggucgaggccugcgugauggacaagugcgcgggcaucuucaacguggucuccaacagccucgggcuggugauccugcucgugcuggcccuguucaacuga

SEQ ID NO: 3574 - RNA, 1056 nt, Artificial Sequence
  derived and/or modified CDS sequence (opt1) from Pk(UM0050C7)__AHF20665.1__CSP
augaagaacuucauccugcucgccgugagcuccauccugcuggucgaccuccugcccacccacuucgagcacaacguggaccugagccgcgccaucaacgugaacggcgucuccuucaacaacguggacaccagcuccccgggggcggcccaggugcggcagagcgccucccgcggccgggggcucggcgagaagcccaaggagggggccgacaaggagaagaagaaggagaaggagaaggagaaggaggaggagcccaagaagcccaacgagaacaagcugaagcagccggagcagcccgccgcgggcgccggcggggagcagcccgccgccggcgccgggggcgagcagcccgccgccggggccggcggcgagcagccggccgcgggggccggcggggagcagcccgccgccggcgcccgcggcgagcagcccgcggccggggccggcggggagcagcccgccgccggcgcgcgcggggagcagccggccgccggcgccggcggggagcagcccgccgcgggcgccgggggcgagcagcccgccgccggggcgggcggcgagcagcccgccgccggggccggcggggagcagccggccgcgggcgccgggggcgagcagcccgcccccgcgccccggcgggagcagccggccgcgggcgccgggggcgagcagcccgcccccgcgccccgccgggagcagccggcccccggggccggcgccggcgacggggcccgcggcgggaacgccggcgcggggaagggccagggccagaacaaccagggggccaacguccccaacgagaagguggugaacgacuaccugcggaagauccgcagcuccgucacgaccgaguggacccccugcagcgugaccugcggcaacggggugcggauccgccggaagggccacgccgggaacaagaaggccgaggaccucacgauggacgaccuggaggucgaggccugcgugauggacaagugcgcgggcaucuucaacguggucuccaacagccugggccucgugauccugcuggugcucgcccuguucaacuga

SEQ ID NO: 3575 - RNA, 1056 nt, Artificial Sequence
  derived and/or modified CDS sequence (opt1) from Pk(UMHEC1)__AHF20620.1__CSP
augaagaacuucauccugcucgccgugagcuccauccugcuggucgaccuccugcccacccacuucgagcacaacguggaccugagccgcgccaucaacgugaacggcgucuccuucaacaacguggacaccagcucccucggggcggcccaggugcggcagagcgccucccgcggccgggggcugggcgagaagccgaaggagggggccgacaaggagaagaagaaggagaaggagaaggagaaggaggaggagcccaagaagcccaacgagaacaagcugaagcagcccgagcagccggccgcgggcgccggcggggagcagcccgccgccggcgccgggggcgagcagcccgccgccggggccggcggcgagcagcccgccgcgggggccggcggggagcagccggccgccggcgccggcggggagcagcccgcggccggcgcccgcggggagcagcccgccgccggcgccgggggcgagcagcccgccgccggcgccgggggcgagcagccggccgcgggggccggcggggagcagcccgccgccggcgcgcggggcgagcagcccgccgccggggccggcggggagcagcccgccgcgggcgccgggggcgagcagccggcccccgcgccccgccgggagcagcccgccgcgggcgccgggggcgagcagccggcccccgcgccccgccgggagcagcccgccccgggggcgggcgccggcgacggggcccgcggcgggaacgccggcgcggggaagggccagggccagaacaaccagggggccaacguccccaacgagaagguggugaacgacuaccuccacaagauccggagcuccgucacgaccgaguggacccccugcagcgugaccugcggcaacggggugcgcauccggcgcaagggccacgccgggaacaagaaggccgaggaccugacgauggacgaccuggaggucgaggccugcgugauggacaagugcgcgggcaucuucaacguggucuccaacagccucggccuggugauccugcucgugcuggcccuguucaacuga

SEQ ID NO: 3576 - RNA, 1056 nt, Artificial Sequence
  derived and/or modified CDS sequence (opt1) from Pk(UMMAC4)__AHF20621.1__CSP
augaagaacuucauccugcucgccgugagcuccauccugcuggucgaccuccugcccacccacuucgagcacaacguggaccugagccgcgccaucaacgugaacggcgucuccuucaacaacguggacaccagcucccucggggcggcccaggugcggcagagcgccucccgcggccgggggcugggcgagaagccgaaggagggggccgacaaggagaagaagaagggcaaggagaaggagaaggaggaggagcccaagaagcccaacgagaacaagcugaagcagcccgagcagccggccgcgggcgccgggggcgagcagcccgccgccggggcgggcggggagcagcccgccgccggcgccggcggggagcagcccgccgcgggcgccgggggcgagcagccggccgccggcgccgggggcgagcagcccgcggccggggcccgcggcgagcagcccgccgccggggcgggcggcgagcagcccgccgccggggccggcggggagcagccggccgcgggcgccgggggcgagcagcccgccgccggcgcgcgcggggagcagcccgccgccggcgccgggggcgagcagcccgccgcgggggccggcggcgagcagccggcccccgcgccccggcgggagcagcccgccgccggggccggcggggagcagccggcccccgcgccccgccgggagcagcccgccccgggcgccggcgccggggacggcgcccgcgggggcaacgccggggcgggcaagggccaggggcagaacaaccagggcgccaacguccccaacgagaagguggugaacgacuaccuccacaagauccggagcuccgucacgaccgaguggacccccugcagcgugaccugcgggaacggcgugcgcauccggcgcaaggggcacgccggcaacaagaaggccgaggaccugacgauggacgaccuggaggucgaggccugcgugauggacaagugcgcgggcaucuucaacguggucuccaacagccucgggcuggugauccugcucgugcuggcccuguucaacuga

SEQ ID NO: 3577 - RNA, 1056 nt, Artificial Sequence
  derived and/or modified CDS sequence (opt1) from Pk(UMMEC8)__AHF20623.1__CSP
augaagaacuucauccugcucgccgugagcuccauccugcuggucgaccuccugcccacccacuucgagcacaacguggaccugagccgcgccaucaacgugaacggcgucuccuucaacaacguggacaccagcucccucggggcggcccaggugcggcagagcgccucccgcggccgggggcugggcgagaagccgaaggagggggccgacaaggagaagaagaaggagaaggagaaggagaaggaggaggagcccaagaagcccaacgagaacaagcugaagcagcccgagcagccggccgcgggcgccggcggggagcagcccgccgccggcgccgggggcgagcagcccgccgccggggccggcggcgagcagcccgccgcgggggccggcggggagcagccggccgccggcgccggcggggagcagcccgcggccggcgcccgcggggagcagcccgccgccggcgccgggggcgagcagcccgccgccggcgccgggggcgagcagccggccgcgggggccggcggggagcagcccgccgccggcgcgcggggcgagcagcccgccgccggggccggcggggagcagcccgccgcgggcgccgggggcgagcagccggcccccgcgccccgccgggagcagcccgccgcgggcgccgggggcgagcagccggcccccgcgccccgccgggagcagcccgccccgggggcgggcgccggcgacggggcccgcggcgggaacgccggcgcggggaagggccagggccagaacaaccagggggccaacguccccaacgagaagguggugaacgacuaccuccacaagacgcggagcuccgucaccaccgaguggacccccugcagcgugacgugcggcaacggggugcgcauccggcgcaagggccacgccgggaacaagaaggccgaggaccugaccauggacgaccuggaggucgaggccugcgugauggacaagugcgcgggcaucuucaacguggucuccaacagccucggccuggugauccugcucgugcuggcccuguucaacuga

SEQ ID NO: 3578 - RNA, 1050 nt, Artificial Sequence
  derived and/or modified CDS sequence (opt1) from Pk(MPG45)__ACD86467.1__CSP
augaagaacuucauccugcucgccgugagcuccauccugcuggucgaccuccugcccacccacuucgagcacaacguggaccugagccgcgccaucaaccucaacggcguguccuucaacaacgucgacaccagcucccugggggcggcccaggugcggcagagcgccucccgcggccgggggcugggcgagaagccgaaggagggggccgacaaggagaagaagaaggagaaggacaaggaggaggagcccaagaagcccaacgagaacaagcucaagcagcccaacgccggccagccgcaggcgcagggcgacggggccaacgccggccagccccaggcccagggggacggcgcgaacgccgggcagccccaggcccagggcgacggcgccaacgccgggcagccccaggcgcagggcgacggggccaacgccggccagccgcaggcccagggcgacggggccaacgcgggccagccccaggcccagggggacggcgccaacgccgggcagccccaggcccagggcgacggcgcgaacgccgggcagccccaggcccagggcgacggggccaacgccggccagccgcaggcgcagggggacggcgccaacgccggccagccccaggcccagggggaccgcgcgaacgccggccagccccaggcccagggggacggcgccaacgugccccggcaggggcgcaacggcggcggggccccggcgggcgggaacgagggcaacaagcaggccggcaaggggcagggccagaacaaccagggggccaacgcccccaacgagaaggucgugaacgacuaccugcagaagauccggagcuccgugacgaccgaguggacccccugcagcgugaccugcggcaacgggguccgcauccggcgccgggcccacgcggacaagaagaaggccgaggaccugacgauggacgaccucgagguggaggccugcgucauggacaagugcgccggcaucuucaacgugguguccaacagccugggccuggucauccuccuggugcuggcccucuucaacuga

SEQ ID NO: 3579 - RNA, 1044 nt, Artificial Sequence
  derived and/or modified CDS sequence (opt1) from Pk(KH462)__ADN94491.1__CSP
augcgcaacuucauccugcucgccgugagcuccauccugcuggucgaccuccugcccacccacuucgagcacaacguggaccugagccgggccaucaacgugaacggcgucuccuucaacaacguggacaccagcucccucggggcggcccaggugcgccagagcgccucccggggccgcgggcugggcgagaagcggaaggagggggccgacaaggagaagaagaaggagaaggaggaggagccgaagaagcccaacgagaacaagcugaagcagcccgagcaggccgcgcccggcgccggcggggagcagccggcccccggcgccgggggcgagcgccccgcgcccggggccggcggcgagcagccggcccccggggccggcggggagcagcccgcccccggcgcgggcggggagcagccggcccccggcgccgggggcgagcagcccgcccccggggccggcggcgagcggccggcgcccggggccggcggggagcagcccgcccccggcgccgggggcgagcgcccggcccccggcgccgggggcgagcagcccgcccccggggccggcggggagcggccggcccccggcgccggcggggagcagcccgcgcccggcgccgggggcgagcagccggcccccggcgccgggggcgagcagcccgcgccggcgccccgccgggagcagcccgcccccgccccgggggccggcgacggggcgcgcggcggcaacgccggggccggcaaggggcagggccagaacaaccagggggccaacguccccaacgagaagguggugaacgacuaccuccacaagauccggagcuccgucacgaccgaguggacccccugcagcgugaccugcggcaacggcgugcgcauccggcgcaaggcccacgcggacaagaagaaggccgaggaccugacgauggacgaccuggaggucgaggccugcgugauggacaagugcgccgggaucuucaacguggucuccaacagccucggccuggugauccugcucgugcuggcccuguucaacuga

SEQ ID NO: 3580 - RNA, 1044 nt, Artificial Sequence
  derived and/or modified CDS sequence (opt1) from Pk(LT3)__ADN94521.1__CSP
augcgcaacuucauccugcucgccgugagcuccauccugcuggucgaccuccugcccacccacuucgagcacaacguggaccugagccgggccaucaacgugaacggcgucuccuucaacaacguggacaccagcucccucggggcggcccaggugcgccagagcgccucccggggccgcgggcugggcgagaagcggaaggagggggccgacaaggagaagaagaaggagaaggaggaggagccgaagaagcccaacgagaacaagcugaagcagcccgagcaggccgcgcccggcgccggcggggagcagccggcccccggcgccgggggcgagcagcccgcgcccggggccggcggcgagcgcccggcccccggggccggcggggagcagcccgcccccggcgcgggcggggagcagccggcccccggcgccgggggcgagcggcccgcccccggggccggcggcgagcagccggcgcccggggccggcggggagcagcccgcccccggcgccgggggcgagcagccggcccccggcgccgggggcgagcagcccgcccccggggccggcggggagcucccggcccccggcgccggcggggagcgccccgcgcccggcgccgggggcgagcagccggcccccggcgccgggggcgagcagcccgcgccggcgccccggcgcgagcagcccgcccccgggccgggcgccggggacggcgcccggggcgggaacgcgggcgccgggaagggccaggggcagaacaaccagggcgccaacguccccaacgagaagguggugaacgacuaccugcacaagauccgcagcuccgucacgaccgaguggacccccugcagcgugaccugcggcaacggggugcggauccgccggcgccagaacgccggcaacaagaaggccgaggaccugacgauggacgaccucgaggucgaggcgugcgugauggacaagugcgccgggaucuucaacguggucuccaacagccugggccuggugauccuccuggugcuggcccucuucaacuga

SEQ ID NO: 3581 - RNA, 1044 nt, Artificial Sequence
  derived and/or modified CDS sequence (opt1) from Pk(LT33)__ADN94529.1__CSP
augcgcaacuucauccugcucgccgugagcuccauccugcuggucgaccuccugcccacccacuucgagcacaacguggaccugagccgggccaucaacgugaacggcgucuccuucaacaacguggacaccagcucccucggggcggcccaggugcgccagagcgccucccggggccgcgggcugggcgagaagcggaaggagggggccgacaaggagaagaagaaggagaaggaggaggagccgaagaagcccaacgagaacaagcugaagcagcccgagcaggccgcgcccggcgccggcggggagcagccggcccccggcgccgggggcgagcgccccgcgcccggggccggcggcgagcagccggcccccggggccggcggggagcagcccgcccccggcgcgggcggggagcagccggcccccggcgccgggggcgagcagcccgcccccggggccggcggcgagcggccggcgcccggggccggcggggagcagcccgcccccggcgccgggggcgagcagccggcccccggcgccgggggcgagcagcccgcccccggggccggcggggagcgcccggcccccggcgccggcggggagcagcccgcgcccggcgccgggggcgagcggccggcccccggcgccgggggcgagcagcccgcgccggcgccccgccgggagcagcccgcccccgggccgggcgccggggacggcgcccgcggcgggaacgcgggcgccgggaagggccaggggcagaacaaccagggcgccaacguccccaacgagaagguggugaacgacuaccuccacaagauccggagcuccgucacgaccgaguggacccccugcagcgugaccugcggcaacggggugcgcauccggcgccggcagaacgccggcaacaagaaggccgaggaccugacgauggacgaccuggaggucgaggcgugcgugauggacaagugcgccgggaucuucaacguggucuccaacagccucggccuggugauccugcucgugcuggcccuguucaacuga

SEQ ID NO: 3582 - RNA, 1044 nt, Artificial Sequence
  derived and/or modified CDS sequence (opt1) from Pk(LT33)__ADN94527.1__CSP
augaagaacuucauccugcucgccgugagcuccauccugcuggucgaccuccugcccacccacuucgagcacaacguggaccugagccgcgccaucaacgugaacggcgucuccuucaacaacguggacaccagcucccucggggcggcccaggugcggcagagcgccucccgcggccgggggcugggcgagaagcgcaaggagggggccgacaaggagaagaagaaggagaaggaggaggagccgaagaagcccaacgagaacaagcugaagcagcccgagcaggccgcgcccggcgccggcggggagcagccggcccccggcgccgggggcgagcggcccgcgcccggggccggcggcgagcagccggcccccggggccggcggggagcagcccgcccccggcgcgggcggggagcagccggcccccggcgccgggggcgagcagcccgcccccggggccggcggcgagcgcccggcgcccggggccggcggggagcagcccgcccccggcgccgggggcgagcagccggcccccggcgccgggggcgagcagcccgcccccggggccggcggggagcggccggcccccggcgccggcggggagcagcccgcgcccggcgccgggggcgagcgcccggcccccggcgccgggggcgagcagcccgcgccggcgccccggcgcgagcagcccgcccccgggccgggcgccggggacggcgcccggggcgggaacgcgggcgccgggaagggccaggggcagaacaaccagggcgccaacguccccaacgagaagguggugaacgacuaccuccacaagauccgcagcuccgucacgaccgaguggacccccugcagcgugaccugcggcaacggggugcggauccgccggcgccagaacgccggcaacaagaaggccgaggaccugacgauggacgaccuggaggucgaggcgugcgugauggacaagugcgccgggaucuucaacguggucuccaacagccucggccuggugauccugcucgugcuggcccuguucaacuga

SEQ ID NO: 3583 - RNA, 1044 nt, Artificial Sequence
  derived and/or modified CDS sequence (opt1) from Pk(TN029)__AFG25482.1__CSP
augcgcaacuucauccugcucgccgugagcuccauccugcuggucgaccuccugcccacccacuucgagcacaacguggaccugagccgggccaucaacgugaacggcgucuccuucaacaacguggacaccagcucccucggggcggcccaggugcgccagagcgccucccggggccgcgggcugggcgagaagcggaaggagggggccgacaaggagaagaagaaggagaaggaggaggagccgaagaagcccaacgagaacaagcugaagcagcccgagcaggccgcgcccggcgccggcggggagcagccggcccccggcgccgggggcgagcagcccgcgcccggggccggcggcgagcgcccggcccccggggccggcggggagcagcccgcccccggcgcgggcggggagcagccggcccccggcgccgggggcgagcggcccgcccccggggccggcggcgagcagccggcgcccggggccggcggggagcagcccgcccccggcgccgggggcgagcagccggcccccggcgccgggggcgagcagcccgcccccggggccggcggggagcgcccggcccccggcgccggcggggagcggcccgcgcccggcgccgggggcgagcagccggcccccggcgccgggggcgagcagcccgcgccggcgccccgccgggagcagcccgcccccgggccgggcgccggggacggcgcccgcggcgggaacgcgggcgccgggaagggccaggggcagaacaaccagggcgccaacguccccaacgagaagguggugaacgacuaccuccacaagauccggagcuccgucacgaccgaguggacccccugcagcgugaccugcggcaacggggugcgcauccggcgccggcagaacgccggcaacaagaaggccgaggaccugacgauggacgaccuggaggucgaggcgugcgugauggacaagugcgccgggaucuucaacguggucuccaacagccucggccuggugauccugcucgugcuggcccuguucaacuga

SEQ ID NO: 3584 - RNA, 1041 nt, Artificial Sequence
  derived and/or modified CDS sequence (opt1) from Pk(LT53)__ADN94501.1__CSP
augaagaacuucauccugcucgccgugagcuccauccugcuggucgaccuccugcccacccacuucgagcacaacguggaccugagccgcgccaucaacgugaacggcgucuccuucaacaacguggacaccagcucccucggggcggcccaggugcggcagagcgccucccgcggccgggggcugggcgagaagccgaaggagggggacgacaaggagaagaagaaggagaaggagaaggaggaggagcccaagaaccugaacgagaacaagcccaagcagcccaacgccgagggcgacggcgccaagccgaagcagcccaacgcggagggggacggcgccaagcucaagcagcccaacgccgagggggacggcgccaagcugaagcagcccaacgcggagggggacggcggcaacgcccgccagccgaacgccgagggggacggcgggaacgcccggcagcccaacgccgagggcgacggcgggaacgcgcgccagcccaacgccgagggcgacgggggcaacgcccggcagcccaacgccgagggggacggcggcaacgcccgccagccgaacgcggagggggacggcgggaacgcccggcagcccaacgccgagggcgacgggggcaacgcccgccagcccaacgccgagggcgacggggcgaacgcccggcagccccaggccgagggcgggggcgggaacgcccgccagggcggcaacgaggggaacaagcaggccggcaaggggcagggccagaacaaccagggcgcgaacgccccgaacgagaaggucgugaacgacuaccugcagaagauccggagcuccgugacgaccgaguggacccccugcagcgugaccugcgggaacggcguccgcauccggcgccgggcccacgccgacaagaagaaggcggaggaccucacgauggacgaccuggagguggaggccugcgucauggacaagugcgccgggaucuucaacgugguguccaacagccugggccucgucauccugcuggugcucgcccuguucaacuga

SEQ ID NO: 3585 - RNA, 1041 nt, Artificial Sequence
  derived and/or modified CDS sequence (opt1) from Pk(UMOTC3)__AHF20624.1__CSP
augaagaacuucauccugcucgccgugagcuccauccugcuggucgaccuccugcccacccacuucgagcacaacguggaccugagccgcgccaucaacgugaacggcgucuccuucaacaacguggacaccagcucccucggggcggcccaggugcggcagagcgccucccgcggccgggggcugggcgagaagccgaaggagggggccgacaaggagaagaagaaggagaaggagaaggaggaggagcccaagaagcccaacgagaacaagcugaagcagcccgagggcaaccgcgaggccccgggccagcccgaggggaaccgggaggcgcccggccagcccgaggggaaccgcgaggccccgggccagcccgaggggaaccgggaggcccccggccagcccgagggcaaccgcgaggccccggggcagcccgagggcaaccgggaggcgcccgggcagcccgagggcaaccgcgaggccccgggccagcccgaggggaaccgggaggcccccggccagcccgaggggaaccgcgaggccccggcccagcccgagggcaaccgggaggcgcccgggcagcccgagggcaaccgcgaggccccggcccagccccagggcaacgggggcgccgggcaggcccagcccgaggagaaccgggaggcgcccgcccagccgcagggcaacgggggcgccggccaggcccagccccagaagaacgagggcgggaacgccggggcgcgcaagggccaggggcagaacaaccagggcgccaacguccccaacgagaagguggugaacgacuaccuccacaagauccggagcuccgucacgaccgaguggaccccgugcagcgugaccugcggcaacggggugcgcauccggcgcaagggccacgccgggaacaagaaggccgaggaccugacgauggacgaccuggaggucgaggccugcgugauggacaagugcgcgggcaucuucaacguggucuccaacagccucggccuggugauccugcucgugcccgcccuguucaacuga

SEQ ID NO: 3586 - RNA, 1038 nt, Artificial Sequence
  derived and/or modified CDS sequence (opt1) from Pk(UMSY2C2)__AHF20625.1__CSP
augaagaacuucauccugcucgccgugagcuccauccugcuggucgaccuccugcccacccacuucgagcacaacguggaccugagccgcgccaucaacgugaacggcgucuccuucaacaacguggacaccagcucccucggggcggcccaggugcggcagagcgccucccgcggccgggggcugggcgagaagccgaaggagggggccgacaaggagaagaagaaggagaaggagaaggaggaggagcccaagaagcccaacgagaacaagcugaagcagcccgagggcaaccgcgaggccccgggccagcccgaggggaaccgggaggcgcccggccagcccgaggggaaccgcgaggccccgggccagcccgaggggaaccgggaggcccccggccagcccgagggcaaccgcgaggccccggggcagcccgagggcaaccgggaggcgcccgggcagcccgagggcaaccgcgaggccccgggccagcccgaggggaaccgggaggcccccggccagcccgaggggaaccgcgaggccccgggccagcccgaggggaaccgggaggcccccgcgcagcccgagggcaaccgcgaggccccgggccagcccgaggggaaccgggaggcccccgcccagcccgagggcaaccgcgaggccccggcgcagccccaggggaacggcggggccggccaggcccagccccagaagaacgagggcgggaacgccggcgcccggaaggggcagggccagaacaaccagggggcgaacgccccgaacgagaaggucgugaacgacuaccuccagaagauccgcagcuccgugacgaccgaguggacccccugcagcgugaccugcggcaacggcguccggaucaagcgcaaggcccacgccgacaagaagaaggccgaggaccugacgauggacgaccuggagguggaggcgugcgucauggacaagugcgccgggaucuucaacgugguguccaacagccucggccuggucauccugcucgugcuggcccuguucaacuga

SEQ ID NO: 3587 - RNA, 1029 nt, Artificial Sequence
  derived and/or modified CDS sequence (opt1) from Pk(KN045)__AFG25467.1__CSP
augaagaacuucauccugcucgccgugagcuccauccugcuggucgaccuccugcccacccacuucgagcacaacguggaccugagccgcgccaucaacgugaacggcgucuccuucaacaacguggacaccagcucccucggggcggcccaggugcggcagagcgccucccgcggccgggggcugggcgagaagccgaaggagggggccgacaaggagaagaagaaggagaaggagaaggagaaggaggaggagcccaagaagcccaacgagaacaagcugaagcagcccgagcagccggccgcgggcgccggcggggagcagcccgccgccggcgccgggggcgagcagcccgcggccggggccggcggcgagcagcccgccgcgggggccggcggggagcagccggccgccggcgccggcggggagcagcccgcggccggcgcccgcggggagcagcccgccgccggcgccgggggcgagcagcccgcggccggcgccgggggcgagcagccggccgcgggggcccggggcgagcagcccgccgccggggcgggcggcgagcagcccgccgccggggccggcggggagcagcccgccccggcgccccgccgggagcagcccgccgccggcgccgggggcgagcagcccgccccggcgccccgccgggagcagcccgcccccggcgccggggccggcgacggggcccgcggcggcaacgcgggggccggcaaggggcagggccagaacaaccagggggccaacgucccgaacgagaagguggugaacgacuaccuccacaagauccggagcuccgucacgaccgaguggacccccugcagcgugaccugcggcaacggcgugcgcauccggcgcaaggggcacgccggcaacaagaaggcggaggaccugacgauggacgaccuggaggucgaggccugcgugauggacaagugcgccgggaucuucaacguggucuccaacagccucggccuggugauccugcucgugcuggcccuguucaacuga

SEQ ID NO: 3588 - RNA, 1029 nt, Artificial Sequence
  derived and/or modified CDS sequence (opt1) from Pk(LT48)__ADN94515.1__CSP
augaagaacuucauccugcucgccgugagcuccauccugcuggucgaccuccugcccacccacuucgagcacaacguggaccugagccgcgccaucaacgugaacggcgucuccuucaacaacguggacaccagcucccucggggcggcccaggugcggcagagcgccucccgcggccgggggcugggcgagaagccgaaggagggggccgacaaggagaagaagaaggagaaggagaaggagaaggaggaggagcccaagaagcccaacgagaacaagcugaagcagcccgagcagccggccgcgggcgccggcggggagcagcccgccgccggcgccgggggcgagcagcccgcggccggggccggcggcgagcagcccgccgcgggggccggcggggagcagccggccgccggcgccggcggggagcagcccgcggccggcgccgggggcgagcagcccgccgccggggcgggcggcgagcagcccgccgccggggccggcggggagcagccggccgcgggcgcccgcggggagcagcccgccgccggcgcgggcggggagcagcccgccgccggcgccgggggcgagcagcccgccccggcgccccggcgcgagcagcccgccgccggggccggcggcgagcagcccgccccggcgccccggcgcgagcagcccgcccccggggccggcgccggggacggcgcccggggcgggaacgcgggcgccgggaagggccaggggcagaacaaccagggcgccaacgucccgaacgagaagguggugaacgacuaccuccacaagauccgcagcuccgucacgaccgaguggacccccugcagcgugaccugcggcaacggggugcggauccgccggaagggccacgccgggaacaagaaggcggaggaccugacgauggacgaccuggaggucgaggccugcgugauggacaagugcgccggcaucuucaacguggucuccaacagccucgggcuggugauccugcucgugcuggcccuguucaacuga

SEQ ID NO: 3589 - RNA, 1029 nt, Artificial Sequence
  derived and/or modified CDS sequence (opt1) from Pk(TB073)__AFG25476.1__CSP
augcgcaacuucuucuuccuggccgugagcuccauccuccuggucgaccugcuccccacccacuucgagcacaacguggaccugagccgggccaucaacgugaacggcgucuccuucaacaacguggacaccagcucccugggggcggcccaggugcgccagagcgccucccggggccgcgggcucggcgagaagcggaaggagggggccgacaaggagaagaagaaggagaaggaggaggagccgaagaagcccaacgagaacaagcugaagcagcccgagcaggcccgcgcgggcggcgagcagcccgccgccgggggcgagcagccggccgccgggggcgagcagcccgccgccgggggcgagcagcccgccgccggcggggagcagcccgcggccggcggggagcagccggccgccggcggcgagcagcccgccgccgggggcgagcagcccgcggccgggggcgagcagcccgccgccgggggcgagcggccggcggccggcggggagcagcccgccgccggcggggagcgccccgccgcgggcggggagcagcccgccgccggcggcgagcagccggcccccgcgccccggcgcgagcagcccgccgccgggggcgagcagccggcccccgcgccccggcgcgagcagcccgcggccgggggcgagcagccggcccccggggccggcgccggcgacggggcgcggggcgggaacgccggcgccggcaaggggcagggccagaacaaccagggggccaacguccccaacgagaagguggugaacgacuaccugcacaagacgcgcagcuccgucaccaccgaguggacccccugcagcgugacgugcggcaacggggugcggauccgccggaaggcccacgcggacaagaagaaggccgagaaccucaccauggacgaccuggaggucgaggccugcgugauggacaagugcgccggcaucuucaacguggucuccaacagccugggccucgugauccugcuggugcucgcgcuguucaacuga

SEQ ID NO: 3590 - RNA, 1026 nt, Artificial Sequence
  derived and/or modified CDS sequence (opt1) from Pk(SGEHIWM26-Y09-60)__AFD97238.1__CSP
augaagaacuucauccugcucgccgugagcuccauccugcuggucgaccuccugcccacccacuucgagcacaacguggaccugagccgcgccaucaacgugaacggcgucuccuucaacaacguggacaccagcucccucggggcggcccgggugcgccagagcgccucccggggccgcgggcugggcgagaagccgaaggagggggccgacaaggagaagaagaaggagaaggagaaggagaaggaggagcccaagaagcccaacgagaacaagcugaagcagcccgagcagccggccgcgggcgccggcggggagcagcccgccgccggcgccgggggcgagcagcccgcggccggggccggcggcgagcagcccgccgcgggggccggcggggagcagccggccgccggcgccggcggggagcagcccgcggccggcgccgggggcgagcagcccgccgccggggcgggcggcgagcagcccgccgccggggccggcggggagcagccggccgcgggcgccgggggcgagcagcccgccgccggcgccgggggcgagcagcccgcggccggggccggcggggagcagcccgccccggcgccccggcgcgagcagcccgccgccggcgccggcggggagcagcccgccccggcgccccggcgcgagcagcccgcccccggcgccggggccggcgacggcgcccgcgggggcaacgcgggggccggcaaggggcagggccagaacaaccagggcgccaacgucccgaacgagaagguggugaacgacuaccuccacaagauccggagcuccgucacgaccgaguggacccccugcagcgugaccugcgggaacggcgugcggauccgccggcgccagaacgccgggaacaagaaggcggaggaccugacgauggacgaccuggaggucgaggccugcgugauggacaagugcgccggcaucuucaacguggucuccaacagccucgggcuggugauccugcucgugcuggcccuguucaacuga

SEQ ID NO: 3591 - RNA, 1026 nt, Artificial Sequence
  derived and/or modified CDS sequence (opt1) from Pk(SGEHIWM35-Y09-74)__AFD97243.1__CSP
augaagaacuucauccugcucgccgugagcuccauccugcuggucgaccuccugcccacccacuucgagcacaacguggaccugagccgcgccaucaacgugaacggcgucuccuucaacaacguggacaccagcucccucggggcggcccaggugcggcagagcgccucccgcggccgggggcugggcgagaagccgaaggagggggccgacaaggagaagaagaaggagaaggagaaggagaaggaggagcccaagaagcccaacgagaacaagcugaagcagcccgagcagccggccgcgggcgccggcggggagcagcccgccgccggcgccgggggcgagcagcccgcggccggggccggcggcgagcagcccgccgcgggggccggcggggagcagccggccgccggcgccggcggggagcagcccgcggccggcgccgggggcgagcagcccgccgccggggcgggcggcgagcagcccgccgccggggccggcggggagcagccggccgcgggcgccgggggcgagcagcccgccgccggcgccgggggcgagcagcccgcggccggggccggcggggagcagcccgccccggcgccccgccgggagcagcccgccgccggcgccggcggggagcagcccgccccggcgccccgccgggagcagcccgcccccggcgccggggccggcgacggcgcccgcgggggcaacgcgggggccggcaaggggcagggccagaacaaccagggcgccaacgucccgaacgagaagguggugaacgacuaccuccacaagauccggagcuccgucacgaccgaguggacccccugcagcgugaccugcgggaacggcgugcgcauccggcgccggcagaacgccgggaacaagaaggcggaggaccugacgauggacgaccuggaggucgaggccugcgugauggacaagugcgccggcaucuucaacguggucuccaacagccucgggcuggugauccugcucgugcuggcccuguucaacuga

SEQ ID NO: 3592 - RNA, 1023 nt, Artificial Sequence
  derived and/or modified CDS sequence (opt1) from Pk(UM0014C4)__AHF20645.1__CSP
augaagaacuucauccugcucgccgugagcuccauccugcuggucgaccuccugcccacccacuucgagcacaacguggaccugagccgcgccaucaacgugaacggcgucuccuucaacaacguggacaccagcucccucggggcggcccaggugcggcagagcgccucccgcggccgggggcugggcgagaagccgaaggagggggccgacaaggagaagaagaaggagaaggagaaggaggaggagcccaagaagcccaacgagaacaagcugaagcagcccgagcaggcccgcccgggcgcgggcggggagcagcccgcccccggcgccgggggcgagcagcccgccccgggggcgggcggcgagcagcccgcccccggggccggcggggagcagcccgccccgggcgccggcggggagcagcccgcgcccggcgccgggggcgagcagcccgccccgggggccggcggcgagcagcccgcccccggggcgggcggggagcagcccgccccgggcgccgggggcggccagcccgcccccggggccggcggggagcagcccgcgccgggcgccgggggcgagcagcccgcccccgcgccccggcgcgagcagccggcccccggccccgggggcgagcagccggcccccgcgccccggcgcgagcagcccgccccgggggccggcgccggcgacggggcccggggcgggaacgccggcgccgggaagggccagggccagaacaaccagggggccaacguccccaacgagaagguggugaacgacuaccuccacaagauccgcagcuccgucacgaccgaguggacccccugcagcgugaccugcggcaacggggugcggauccgccggaagggccacgcggggaacaagaaggccgaggaccugacgauggacgaccuggaggucgaggccugcgugauggacaagugcgccggcaucuucaacguggucuccaacagccucggccuggugauccugcucgugcuggcccuguucaacuga

SEQ ID NO: 3593 - RNA, 1020 nt, Artificial Sequence
  derived and/or modified CDS sequence (opt1) from Pk(LT57)__ADN94510.1__CSP
augaagaacuucauccugcucgccgugagcuccauccugcuggucgaccuccugcccacccacuucgagcacaacguggaccugagccgcgccaucaacgugaacggcgucuccuucaacaacguggacaccagcucccucggggcggcccaggugcggcagagcgccucccgcggccgggggcugggcgagaagcgcaaggagggggccgacaaggagaagaagaaggagaaggaggagccgaagaagcccaacgagaacaagcugaagcagcccgagcaggcccgggcgggcggcgagcagcccgccgccgggggcgagcagccggccgccgggggcgagcagcccgcggccgggggcgagcagcccgccgccggcggggagcagcccgcggccggcggggagcagccggccgccggcggcgagcagcccgccgccgggggcgagcagcccgcggccgggggcgagcgccccgccgccgggggcgagcagccggcggccggcggggagcagcccgccgccggcggggagcagcccgccgcgggcggggagcggcccgccgccggcggcgagcgcccggccgccgggggcgagcagcccgcggccgggggcgagcagcccgcccccgccccgcggcgcgagcagcccgcggccgggggcgagcagcccgcccccggcgccggggccggcgacggggcgcggggcggcaacgccggggccggcaaggggcagggccagaacaaccagggggccaacgucccgaacgagaagguggugaacgacuaccuccacaagauccgcagcuccgucacgaccgaguggacccccugcagcgugaccugcggcaacggcgugcggauccgccggaaggcccacgcggacaagaagaaggccgagaaccugacgauggacgaccuggaggucgaggccugcgugauggacaagugcgccgggaucuucaacguggucuccaacagccucggccuggugauccugcucgugcuggcgcuguucaacuga

SEQ ID NO: 3594 - RNA, 1020 nt, Artificial Sequence
  derived and/or modified CDS sequence (opt1) from Pk(SGEHIWM17-Y09-4)__AFD97233.1__CSP
augaagaacuucauccugcucgccgugagcuccauccugcuggucgaccuccugcccacccacuucgagcacaacguggaccugagccgcgccaucaacgugaacggcgucuccuucaacaacgcggacaccagcucccucggggccgcccaggugcggcagagcgccucccgcggccgggggcugggcgagaagccgaaggagggggccgacaaggagaagaagaaggagaaggaggaggagcccaagaagcccaacgagaacaagcugaagcagcccgacgcggugccgggcggcgaggagcccgcccccgggcgcgagcagcccgccccgggccgggaggagcccgcccccgggcgcgagcagcccgcgccgggccgggaggagcccgcccccgggcgcgagcagcccgccccgggccgggaggagcccgcccccggccgcgagcagcccgccccggggcgggagcagcccgcgcccggccgcgaggagcccgccccggggcgggagcagcccgcccccggccgcgaggagcccgccccgggccgggagcagcccgcccccgggcgcgagcagccggcgcccggccgggagcagcccgcccccgggggcgagcagccggcccccgggcgcgagcagcccgcccccggcggcgagcagccggcccccgcgcccggggccggcgccggggacggcgcccgcgggggcaacgccggcgcggggaagggccaggggcagaacaaccagggcgccaacguccccaacgagaagguggugaacgacuaccuccacaagauccggagcuccgucacgaccgaguggaccccgugcagcgugaccugcgggaacggcgugcggauccgccgcaagggccacgccgggaacaagaaggccgaggaccugacgauggacgaccuggaggucgaggcgugcgugauggacaagugcgccggcaucuucaacguggucuccaacagccucgggcuggugauccugcucgugcuggcccuguucaacuga

SEQ ID NO: 3595 - RNA, 1020 nt, Artificial Sequence
  derived and/or modified CDS sequence (opt1) from Pk(SGEHIWM26-Y09-123)__AFD97240.1__CSP
augaagaacuucauccugcucgccgugagcuccauccugcuggucgaccuccugcccacccacuucgagcacaacguggaccugagccgcgccaucaacgugaacggcgucuccuucaacaacguggacaccagcucccucggggcggcccaggugcggcagagcgccucccgcggccgggggcugggcgagaagccgaaggagggggccgacaaggagaagaagaaggagaaggaggaggagcccaagaagcccaacgagaacaagcugaagcagcccgacgccgucccgggcggcgaggagcccgcgcccgggcgcgagcagcccgccccgggccgggaggagcccgcccccgggcgcgagcagcccgccccgggccgggaggagcccgcgcccgggcgcgagcagcccgccccgggccgggaggagcccgcccccggccgcgagcagcccgccccggggcgggagcagcccgcccccggccgcgaggagcccgcgccggggcgggagcagcccgcccccggccgcgaggagcccgccccgggccgggagcagcccgcccccgggcgcgagcagccggcccccggccgggagcagcccgcgcccgggggcgagcagccggcccccgggcgcgagcagcccgcccccggcggcgagcagccggcccccgcccccggggcgggcgccggggacggcgcccgcgggggcaacgccggcgccgggaagggccaggggcagaacaaccagggcgcgaacgugcccaacgagaagguggucaacgacuaccuccacaagauccggagcuccgugacgaccgaguggaccccgugcagcgugaccugcgggaacggcguccggauccgccgcaagggccacgccgggaacaagaaggccgaggaccugacgauggacgaccuggagguggaggccugcgugauggacaagugcgcgggcaucuucaacgucguguccaacagccucgggcuggugauccugcucguccuggcccuguucaacuga

SEQ ID NO: 3596 - RNA, 1020 nt, Artificial Sequence
  derived and/or modified CDS sequence (opt1) from Pk(TN003)__AFG25477.1__CSP
augaagaacuucauccugcucgccgugagcuccauccugcuggucgaccucuuccccacccacuucgagcacaacguggaccugagccgcgccaucaacgugaacggcgucuccuucaacaacguggacaccagcucccugggggcggcccaggugcggcagagcgccucccgcggccgggggcucggcgagaagccgaaggagggggccgacaaggagaagaagaaggagaaggaggagaagcccaagaagcccaacgagaacaagcugaagcagcccgccgcgggcggcgagcagccggccgccgggggcgagcagcccgccgccgggggcgagcagcccgcggccgggggcgagcagcccgccgccggcggggagcagccggcggccggcggggagcagcccgccgccggcggcgagcgccccgccgccgggggcgagcagcccgcggccgggggcgagcagccggccgccgggggcgagcggcccgcggccggcggggagcagcccgccgccggcggggagcgccccgccgcgggcggggagcagccggccgccggcggcgagcagcccgccgccgggggcgagcagcccgcgcccgccccgcggcgcgagcagcccgucgccgggggcgagcagcccgcccccgcgccgcggcgcgagcagcccgcccccggggccggcgccggcgacggggcccggggcgggaacgcgggcgccggcaaggggcagggccagaacaaccagggggccaacgugcccaacgagaagguggucaacgacuaccugcacaagauccgcagcuccgugacgaccgaguggaccccgugcagcgugaccugcggcaacgggguccggauccgccggcgccagaacgccggcaacaagaaggccgaggaccucacgauggacgaccuggagguggaggcgugcgugauggacaagugcgccggcaucuucaacgucguguccaacagccuggggcucgugauccugcugguccucgcccuguucaacuga

SEQ ID NO: 3597 - RNA, 1017 nt, Artificial Sequence
  derived and/or modified CDS sequence (opt1) from Pk(LT53)__ADN94524.1__CSP
augcgcaacuucauccugcucgccgugagcuccauccugcuggucgaccuccugcccacccacuucgagcacaacguggaccugagccgggccaucaacgugaacggcgucuccuucaacaacguggacaccagcucccucggggcggcccaggugcgccagagcgccucccggggccgcgggcugggcgagaagcggaaggagggggccgacaaggagaagaagaaggagaaggaggaggagccgaagaagcccaacgagaacaagcugaagcagcccgagcaggagcgccccggcggcgagcagccggcccccgggcccggcggggagcagcccgcgccgggccccgggggcgagcagcccgccccgcggccgggcggggagcagcccgcccccggccccgggggcgagcagccggcccccggccccgggggcgagcagcccgcgccggggcccggcggggagcagcccgcgccccgcccgggcggcgagcagcccgcccccgggcccggcggggagcagccggcgccccggcccggcggggagcagccggcccccggccccggcggggagcagcccgccccgcgccccggcggggagcagcccgcccccggccccgggggcgagcagcccgcccccgcgccccggcgcgagcagccggcccccgcccccggcgccggggccggcgacggggcccggggcggcaacgccggggccggcaaggggcagggccagaacaaccagggggccaacguccccaacgagaagguggugaacgacuaccuccacaagauccgcagcuccgucacgaccgaguggaccccgugcagcgugaccugcggcaacggcgugcggauccgccggcgccagaacgccgggaacaagaaggccgaggaccugacgauggacgaccuggaggucgaggccugcgugauggacaagugcgcgggcaucuucaacguggucuccaacagccucgggcuggugauccugcucgugcuggcccuguucaacuga

SEQ ID NO: 3598 - RNA, 1014 nt, Artificial Sequence
  derived and/or modified CDS sequence (opt1) from Pk(KH229)__ADN94485.1__CSP
augcgcaacuucauccugcucgccgugagcuccauccugcuggucgaccuccugcccacccacuucgagcacaacguggaccugagccgggccaucaacgugaacggcgucuccuucaacaacguggacaccagcucccucggggcggcccaggugcgccagagcgccucccggggccgcgggcugggcgagaagccgaaggagggggccgacaaggagaagaagaaggagaaggaggagaagcccaagaagcccaacgagaacaagcugaagcagcccggcggcgagcagccggccgccgggggcgagcagcccgcggccgggggcgagcagcccgccgccgggggcgagcagcccgcggccggcggggagcggccggccgccggcggggagcagcccgcggccggcggcgagcagcccgccgccgggggcgagcagcccgccgccgggggcgagcagccggcggccgggggcgagcgccccgccgccggcggggagcagcccgcggccggcggggagcagcccgccgccggcggggagcagccggccgcgggcggcgagcggcccgccgccgggggcgagcagcccgcccccgcgccgcgccgggagcagcccgccgccgggggcgagcagcccgcccccgccccgcgccgggagcagcccgcgcccggggccggcgccggcgacggggcccgcggcgggaacgccggcgcgggcaaggggcagggccagaacaaccagggggccaacguccccaacgagaagguggugaacgacuaccuccacaagauccggagcuccgucacgaccgaguggaccccgugcagcgugaccugcggcaacggggugcgcauccggcgccggcagaacgccggcaacaagaaggccgaggaccugacgauggacgaccuggaggucgaggccugcgugauggacaagugcgcgggcaucuucaacguggucuccaacagccucgggcuggugauccugcucgugcuggcccuguucaacuga

SEQ ID NO: 3599 - RNA, 1014 nt, Artificial Sequence
  derived and/or modified CDS sequence (opt1) from Pk(KH468)__ADN94487.1__CSP
augaagaacuucauccugcucgccgugagcuccauccugcuggucgaccucuuccccacccacuucgagcacaacguggaccugagccgcgccaucaacgugaacggcgucuccuucaacaacguggacaccagcucccugggggcggcccaggugcggcagagcgccucccgcggccgggggcucggcgagaagccgaaggagggggccgacaaggagaagaagaaggagaaggaggagaagcccaagaagcccaacgagaacaagcugaagcagcccggcggcgagcagccggccgccgggggcgagcagcccgcggccgggggcgagcagcccgccgccgggggcgagcagcccgcggccggcggggagcgcccggccgccggcggggagcagcccgcggccggcggcgagcagcccgccgccgggggcgagcagcccgccgccgggggcgagcagccggcggccgggggcgagcggcccgccgccggcggggagcagcccgcggccggcggggagcagcccgccgccggcggggagcgcccggccgcgggcggcgagcagcccgccgccgggggcgagcagcccgcccccgcgccgcggcgcgagcagcccgccgccgggggcgagcagcccgcccccgccccgcggcgcgagcagcccgcgcccggggccggcgccggcgacggggcccggggcgggaaccccggcgccggcaaggggcagggccagaacaaccagggggcgaacgucccgaacgagaagguggugaacgacuaccugcacaagauccgcagcuccgucacgaccgaguggacccccugcagcgugaccugcggcaacggggugcggauccgccggcgccagaacgccggcaacaagaaggccgaggaccucacgauggacgaccuggaggucgaggccugcgugauggacaagugcgccggcaucuucaacguggucuccaacagccuggggcucgugauccugcuggugcucgcgcuguucaacuga

SEQ ID NO: 3600 - RNA, 1014 nt, Artificial Sequence
  derived and/or modified CDS sequence (opt1) from Pk(LT33)__ADN94523.1__CSP
augcgcaacuucauccugcucgccgugagcuccauccugcuggucgaccuccugcccacccacuucgagcacaacguggaccugagccgggccaucaacgugaacggcgucuccuucaacaacguggacaccagcucccucggggcggcccaggugcgccagagcgccucccggggccgcgggcugggcgagaagcggaaggagggggccgacaaggagaagaagaaggagaaggaggaggagccgaagaagcccaacgagaacaagcugaagcagcccggcggcgagcagcccgccgccgggggcgagcagccggccgccgggggcgagcagcccgccgccgggggcgagcagcccgcggccggcggggagcgccccgccgccggcggggagcagccggcggccggcggcgagcagcccgccgccgggggcgagcagcccgccgccgggggcgagcagcccgcggccgggggcgagcggccggccgccggcggggagcagcccgcggccggcggggagcagcccgccgccggcggggagcgccccgccgcgggcggcgagcagccggccgccgggggcgagcagcccgcccccgcgccccggcgcgagcagccggccgccgggggcgagcagcccgcccccgcgccccggcgcgagcagccggcgcccggggccggcgccggcgacggggcccggggcgggaaccccggcgccggcaaggggcagggccagaacaaccagggggcgaacguccccaacgagaagguggugaacgacuaccuccacaagauccgcagcuccgucacgaccgaguggaccccgugcagcgugaccugcggcaacggggugcggauccgccggcgccagaacgccggcaacaagaaggccgaggaccugacgauggacgaccuggaggucgaggccugcgugauggacaagugcgccggcaucuucaacguggucuccaacagccucgggcuggugauccugcucgugcuggcgcuguucaacuga

SEQ ID NO: 3601 - RNA, 1014 nt, Artificial Sequence
  derived and/or modified CDS sequence (opt1) from Pk(LT64)__ADN94520.1__CSP
augaagaacuucauccugcucgccgugagcuccauccugcuggucgaccucuuccccacccacuucgagcacaacguggaccugagccgcgccaucaacgugaacggcgucuccuucaacaacguggacaccagcucccugggggcggcccaggugcggcagagcgccucccgcggccgggggcucggcgagaagccgaaggagggggccgacaaggagaagaagaaggagaaggaggagaagcccaagaagcccaacgagaacaagcugaagcagcccggcggcgagcagccggccgccgggggcgagcagcccgcggccgggggcgagcagcccgccgccgggggcgagcagcccgcggccggcggggagcagccggccgccggcggggagcagcccgcggccggcggcgagcgccccgccgccgggggcgagcagcccgccgccgggggcgagcagccggcggccgggggcgagcggcccgccgccggcggggagcagcccgcggccggcggggagcgccccgccgccggcggggagcagccggccgcgggcggcgagcagcccgccgccgggggcgagcagcccgcccccgcgccgcggcgcgagcagcccgccgccgggggcgagcagcccgcccccgccccgcggcgcgagcagcccgcgcccggggccggcgccggcgacggggcccggggcgggaacgccggcgcgggcaaggggcagggccagaacaaccagggggccaacguccccaacgagaagguggugaacgacuaccugcacaagauccgcagcuccgucacgaccgaguggaccccgugcagcgugaccugcggcaacggggugcggauccgccggcgccagaacgccggcaacaagaaggccgaggaccucacgauggacgaccuggaggucgaggccugcgugauggacaagugcgcgggcaucuucaacguggucuccaacagccuggggcucgugauccugcuggugcucgcccuguucaacuga

SEQ ID NO: 3602 - RNA, 1014 nt, Artificial Sequence
  derived and/or modified CDS sequence (opt1) from Pk(TB016)__AFG25473.1__CSP
augaagaacuucauccugcucgccgugagcuccauccugcuggucgaccucuuccccacccacuucgagcacaacguggaccugagccgcgccaucaacgugaacggcgucuccuucaacaacguggacaccagcucccugggggcggcccaggugcggcagagcgccucccgcggccgggggcucggcgagaagccgaaggagggggccgacaaggagaagaagaaggagaaggaggagaagcccaagaagcccaacgagaacaagcugaagcagcccggcggcgagcagccggccgccgggggcgagcagcccgcggccgggggcgagcagcccgccgccgggggcgagcagcccgcggccggcggggagcgcccggccgccggcggggagcagcccgcggccggcggcgagcagcccgccgccgggggcgagcagcccgccgccgggggcgagcagccggcggccgggggcgagcggcccgccgccggcggggagcagcccgcggccggcggggagcagcccgccgccggcggggagcgcccggccgcgggcggcgagcagcccgccgccgggggcgagcagcccgcccccgcgccgcggcgcgagcagcccgccgccgggggcgagcagcccgcccccgccccgcggcgcgagcagcccgcgcccggggccggcgccggcgacggggcccggggcgggaacgccggcgcgggcaaggggcagggccagaacaaccagggggccaacguccccaacgagaagguggugaacgacuaccugcacaagauccgcagcuccgucacgaccgaguggaccccgugcagcgugaccugcggcaacggggugcggauccgccggcgccagaacgccggcaacaagaaggccgaggaccucacgauggacgaccuggaggucgaggccugcgugauggacaagugcgcgggcaucuucaacguggucuccaacagccuggggcucgugauccugcuggugcucgcccuguucaacuga

SEQ ID NO: 3603 - RNA, 1014 nt, Artificial Sequence
  derived and/or modified CDS sequence (opt1) from Pk(UM0021C10)__AHF20667.1__CSP
augaagaacuucauccugcucgccgugagcuccauccugcuggucgaccucuuccccacccacuucgagcacaacguggaccugagccgcgccaucaacgugaacggcgucuccuucaacaacguggacaccagcucccugggggcggcccaggugcggcagagcgccucccgcggccgggggcucggcgagaagccgaaggagggggccgacaaggagaagaagaaggagaaggaggagaagcccaagaagcccaacgagaacaagcugaagcagcccggcggcgagcagagcgccgccgggggcgagcagccggccgccgggggcgagcagcccgccgccgggggcgagcagcccgcggccggcggggagcagcccgccgccggcggggagcagccggcggccggcggcgagcgccccgccgccgggggcgagcagcccgccgccgggggcgagcagcccgcggccgggggcgagcggccggccgccggcggggagcagcccgcggccggcggggagcgccccgccgccggcggggagcagcccgccgcgggcggcgagcagccggccgccgggggcgagcagcccgcccccgcgccccggcgcgagcagccggccgccgggggcgagcagcccgcccccgcgccccggcgcgagcagccggcgcccggggccggcgccggcgacggggcccggggcgggaacgccggcgcgggcaaggggcagggccagaacaaccagggggccaacguccccaacgagaagguggugaacgacuaccugcacaagauccgcuccagcgucacgaccgaguggacccccugcuccgugaccugcggcaacggggugcggauccgccggcgccagaacgccggcaacaagaaggccgaggaccucacgauggacgaccuggaggucgaggccugcgugauggacaagugcgcgggcaucuucaacguggucagcaacucccuggggcucgugauccugcuggugcucgcccuguucaacuga

SEQ ID NO: 3604 - RNA, 1011 nt, Artificial Sequence
  derived and/or modified CDS sequence (opt1) from Pk(UMRAC2)__AHF20618.1__CSP
augaagaacuucauccugcucgccgugagcuccauccugcuggucgaccuccugcccacccacuucgagcacaacguggaccugagccgcgccaucaacgugaacggcgucuccuucaacaacguggacaccagcucccucggggcggcccaggugcggcagagcgccucccgcggccgggggcugggcgagaagccgaaggagggggccgacaaggagaagaagaaggagaaggagaaggaggaggagcccaagaagcccaacgagaacaagcugaagcagcccgagggcaaccgcgaggccccgggccagcccgaggggaaccgggaggcgcccggccagcccgaggggaaccgcgaggccccgggccagcccgaggggaaccgggaggcccccggccagcccgagggcaaccgcgaggccccggggcagcccgagggcaaccgggaggcgcccgggcagcccgagggcaaccgcgaggccccgggccagcccgaggggaaccgggaggcccccgcccagcccgagggcaaccgcgaggccccggggcagcccgagggcaaccgggaggcgcccgcccagccccaggggaacggcggcgccgggcaggcccagccggagggcaaccgcgaggcccccgcgcagccccaggggaacggcggggccggccaggcccagccccagaagaacgagggcgggaacgccggcgcccggaaggggcagggccagaacaaccagggggcgaacgucccgaacgagaagguggugaacgacuaccuccacaagauccgcagcuccgucacgaccgaguggacccccugcagcgugaccugcggcaacggcgugcggauccgccggaaggggcacgccggcaacaagaaggccgaggaccugacgauggacgaccuggaggucgaggccugcgugauggacaagugcgccgggaucuucaacguggucuccaacagccucggccuggugauccugcucgugcuggcgcuguucaacuga

SEQ ID NO: 3605 - RNA, 1008 nt, Artificial Sequence
  derived and/or modified CDS sequence (opt1) from Pk(UMANC1)__AHF20619.1__CSP
augaagaacuucauccugcucgccgugagcuccauccugcuggucgaccuccugcccacccacuucgagcacaacguggaccugagccgcgccaucaacgugaacggcgucuccuucaacaacguggacaccagcucccucggggcggcccaggugcggcagagcgccucccgcggccgggggcugggcgagaagccgaaggagggggccgacaaggagaagaagaaggagaaggagaaggaggaggagcccaagaagcccaacgagaacaagcugaagcagcccgagggcaaccgcgaggccccgggccagcccgaggggaaccgggaggcgcccggccagcccgaggggaaccgcgaggccccgggccagcccgaggggaaccgggaggcccccggccagcccgagggcaaccgcgaggccccggggcagcccgagggcaaccgggaggcgcccgggcagcccgagggcaaccgcgaggccccgggccagcccgaggggaaccgggaggcccccggccagcccgaggggaaccgcgaggccccgggccagcccgaggggaaccgggaggcccccggccagcccgagggcaaccgcgaggcgccggcccagcccgaggggaaccgggaggcccccgcccagccccagggcaacgggggcgccgggcaggcgcagccgcagaagaacgagggcggcaacgccggggcccgcaagggccaggggcagaacaaccagggcgccaacgcccccaacgagaaggucgugaacgacuaccuccagaagauccggagcuccgugacgaccgaguggacccccugcagcgugaccugcgggaacggcguccgcaucaagcggaaggcgcacgccgacaagaagaaggccgaggaccugacgauggacgaccuggagguggaggccugcgucauggacaagugcgccggcaucuucaacgugguguccaacagccucgggcuggucauccugcucgugcuggcgcuguucaacuga

SEQ ID NO: 3606 - RNA, 1002 nt, Artificial Sequence
  derived and/or modified CDS sequence (opt1) from Pk(LT48)__ADN94505.1__CSP
augcgcaacuucauccugcucgccgugagcuccauccugcuggucgaccuccugcccacccacuucgagcacaacguggaccugagccgggccaucaacgugaacggcgucuccuucaacaacguggacaccagcucccucggggcggcccaggugcgccagagcgccucccggggccgcgggcugggcgagaagcggaaggagggggccgacaaggagaagaagaaggagaaggaggaggagccgaagaagcccaacgagaacaagcugaagcagcccaacgccgagggcggcgcgaacgccgggcagcccaacgccgagggcggggccaacgcgggccagccgaacgccgagggcggggccaacgccggccagcccaacgccgagggcggggcgaacgccgggcagcccaacgccgagggcggcgccaacgccgggcagcccaacgcggagggcggggccaacgccggccagccgaacgccgagggcggggccaacgcgggccagcccaacgccgagggcggggccaacgccgggcagcccaacgccgagggcggggcgaacgccggccagcccaacgccgagggcggggccaacgcgggccagccgaacgccgagggcggggccaacgcccgccagccccaggccgagggcgggggcgcgaacgcccggcagggcgggaacgaggggaacaagcaggccggcaagggccaggggcagaacaaccagggcgccaacgcccccaacgagaaggucgugaacgacuaccuccagaagauccgcagcuccgugacgaccgaguggacccccugcagcgugaccugcgggaacggcguccggauccgccggcgcgcgcacgccgacaagaagaaggccgaggaccugacgauggacgaccuggagguggaggccugcgucauggacaagugcgccgggaucuucaacgugguguccaacagccucggccuggucauccugcucgugcuggcgcuguucaacuga

SEQ ID NO: 3607 - RNA, 993 nt, Artificial Sequence
  derived and/or modified CDS sequence (opt1) from Pk(KH176)__ADN94486.1__CSP
augaagaacuucauccugcucgccgugagcuccauccugcuggucgaccucuuccccacccacuucgagcacaacguggaccugagccgcgccaucaacgugaacggcgucuccuucaacaacguggacaccagcucccugggggcggcccaggugcggcagagcgccucccgcggccgggggcucggcgagaagccgaaggagggggccgacaaggagaagaagaaggagaaggaggagaagcccaagaagcccaacgagaacaagcugaagcagcccggcggcgagcagccggccgccgggggcgagcagcccgccgccgggggcgagcagcccgccgccgggggcgagcagcccgccgccggcggggagcagccggccgccggcggggagcgccccgcggccggcggcgagcagcccgccgccgggggcgagcagcccgccgccgggggcgagcggccggcggccgggggcgagcagcccgccgccggcggggagcgccccgcggccggcggggagcagcccgccgccggcggggagcagccggccgcgggcggcgagcagcccgcccccgcgccccggcgcgagcagccggccgccgggggcgagcagcccgcgcccgcgccccggcgcgagcagccggcccccggggccggcgcgggggacggcgcccggggcgggaacgccggcgccgggaagggccagggccagaacaaccagggggccaacguccccaacgagaagguggugaacgacuaccugcacaagauccgcagcuccgucacgaccgaguggacccccugcagcgugaccugcggcaacggggugcggauccgccggcgccagaacgcgggcaacaagaaggccgaggaccucacgauggacgaccuggaggucgaggccugcgugauggacaagugcgccgggaucuucaacguggucuccaacagccugggccucgugauccugcuggugcucgcccuguucaacuga

SEQ ID NO: 3608 - RNA, 993 nt, Artificial Sequence
  derived and/or modified CDS sequence (opt1) from Pk(LT36)__ADN94511.1__CSP
augcgcaacuucauccugcucgccgugagcuccauccugcuggucgaccuccugcccacccacuucgagcacaacguggaccugagccgggccaucaacgugaacggcgucuccuucaacaacguggacaccagcucccucggggcggcccaggugcgccagagcgccucccggggccgcgggcugggcgagaagcggaaggagggggccgacaaggagaagaagaaggagaaggaggagaagccgaagaagcccaacgagaacaagcugaagcagcccggcggcgagcagcccgccgccgggggcgagcagccggcggccgggggcgagcagcccgccgccgggggcgagcagcccgcggccggcggggagcagcccgccgccggcggggagcagccggcggccggcggcgagcagcccgccgccgggggcgagcagcccgccgccgggggcgagcagcccgcggccgggggcgagcagccggccgccggcggggagcagcccgcggccggcggggagcagcccgcccccgccccgcgccgggagcagcccgccgcgggcggggagcagcccgccgccggcggcgagcagcccgccccggcgccccgccgggagcagcccgcccccgggggcgagcagccggcccccggggccggcgccggggacggcgcgcgcggcgggaaccccggcgccgggaagggccagggccagaacaaccagggggccaacguccccaacgagaagguggugaacgacuaccuccacaagauccggagcuccgucacgaccgaguggaccccgugcagcgugaccugcggcaacggggugcgcauccggcgcaaggcccacgccgacaagaagaaggcggagaaccugacgauggacgaccuggaggucgaggccugcgugauggacaagugcgccggcaucuucaacguggucuccaacagccucgggcuggugauccugcucgugcuggcccuguucaacuga

SEQ ID NO: 3609 - RNA, 993 nt, Artificial Sequence
  derived and/or modified CDS sequence (opt1) from Pk(TB066)__AFG25475.1__CSP
augaagacccuguuccuccuggccgugagcuccauccugcucgucgaccuguuccccacccacuucgagcacaacguggaccugagccgcgccaucaacgugaacggcgucuccuucaacaacguggacacgagcucccucggggcggcccaggugcggcagagcgccucccgcggccgggggcugggcgagaagcgcaaggagggggccgacaaggagaagaagaaggagaaggaggagaagccgaagaagcccaacgagaacaagcugaagcagcccggcggcgagcagcccgccgccgggggcgagcagccggcggccgggggcgagcagcccgccgccgggggcgagcagcccgcggccggcggggagcagcccgccgccggcggggagcagccggcggccggcggcgagcagcccgccgccgggggcgagcagcccgccgccgggggcgagcagcccgcggccgggggcgagcagccggccgccggcggggagcagcccgcggccggcggggagcagcccgcccccgccccgcggcgcgagcagcccgccgcgggcggggagcagcccgccgccggcggcgagcagcccgccccggcgccccggcgcgagcagcccgccgccgggggcgagcagcccgccccgggggccggcgcgggggacggcgcccggggcgggaaccccggcgccgggaagggccagggccagaacaaccagggggccaacguccccaacgagaagguggugaacgacuaccuccacaagauccgcagcuccgucaccaccgaguggacccccugcagcgugacgugcggcaacggggugcggauccgccggaaggcccacgcggacaagaagaaggccgagaaccugaccauggacgaccuggaggucgaggccugcgugauggacaagugcgccggcaucuucaacguggucuccaacagccucgggcuggugauccugcucgugcuggcccuguucaacuga

SEQ ID NO: 3610 - RNA, 993 nt, Artificial Sequence
  derived and/or modified CDS sequence (opt1) from Pk(UM006C6)__AHF20642.1__CSP
augaagaacuucauccugcucgccgugagcuccauccugcuggucgaccuccugcccacccacuucgagcacaacguggaccugagccgcgccaucaacgugaacggcgucuccuucaacaacguggacaccagcucccucggggcggcccaggugcggcagagcgccucccgcggccgggggcugggcgagaagccgaaggagggggccgacaaggagaagaagaaggagaaggaggaggagcccaagaagcccaacggcaacaagcugaagcagcccgccccgggcggggagcagcccgcgcccggcggggagcagcccgccccgggcggggagcagcccgcccccggcggcgagcagcccgcccccgggggcgagcagcccgcgcccgggggcgagcagcccgccccgggcggggagcagcccgcccccggcggggagcagcccgccccgggcggggagcagcccgcccccggcggcgagcagcccgcgcccgggggcgagcagccggcccccgggggcgagcagcccgcccccgggggcgagcagccggcccccgccccgcgccgggagcagcccgcgcccggcggggagcagcccgccccgggcggggagcagcccgccccgcgccgggagcagcccgccccgggcgccggggcgggcgacggcgcccgcgggggcaacgccggggccggcaagggccaggggcagaacaaccagggcgccagcguccccaacgagaagguggugaacgacuaccuccacaagauccgguccagcgucacgaccgaguggacccccugcuccgugaccugcgggaacggcgugcgcauccggcgcaaggcgcacgccgacaagaagaaggccgaggaccugacgauggacgaccuggaggucgaggccugcgugauggacaagugcgcggggaucuucaacguggucagcaacucccucggccuggugauccugcucgugcuggcccuguucaacuga

SEQ ID NO: 3611 - RNA, 984 nt, Artificial Sequence
  derived and/or modified CDS sequence (opt1) from Pk(UM004C4)__AHF20641.1__CSP
augaagaacuucauccugcucgccgugagcuccauccugcuggucgaccuccugcccacccacuucgagcacaacguggaccugagccgcgccaucaacgugaacggcgucuccuucaacaacguggacaccagcucccucggggcggcccaggugcggcagagcgccucccgcggccgggggcugggcgagaagccgaaggagggggccgacaaggagaagaagaaggagaagggcaaggagaaggaggaggagcccaagaagcccaacgagaacaagcugaagcagcccaacgagggccagccgcaggcccagggggacggcgcgaacgccgggcagccccaggcccagggcgacggggccaacgcgggccagccccaggcccagggcgacggggccaacgccggccagccccaggcccagggggacggcgcgaacgccggccagccgcaggcccagggggacggcgccaacgccgggcagccccaggcgcagggcgacggggccaacgccggccagccccaggcccagggcgacggggccaacgcgggccagccccaggcccagggggaccgcgccaacgccggccagccgcaggcccagggggacggcgcgaacgucccccggcagggccgcaacgggggcggggcccccgccggcgggaacgagggcaacaagcaggccggcaaggggcagggccagaacaaccagggggcgaacgcccccaacgagaagguggugaacgacuaccuccacaagauccggagcuccgucacgaccgaguggaccccgugcagcgugaccugcggcaacggcgugcgcauccggcgcaaggcccacgccgggaacaagaaggccgaggaccugacggucgacgaccuggagguggaggcgugcgugauggacaagugcgccggcaucuucaacgucguguccaacagccucgggcuggugauccugcucguccuggcccuguucaacuga

SEQ ID NO: 3612 - RNA, 978 nt, Artificial Sequence
  derived and/or modified CDS sequence (opt1) from Pk(UMHAC5)__AHF20632.1__CSP
augaagaacuucauccugcucgccgugagcuccauccugcuggucgaccuccugcccacccacuucgagcacaacguggaccugagccgcgccaucaacgugaacggcgucuccuucaacaacguggacaccagcucccucggggcggcccaggugcggcagagcgccucccgcggccgggggcugggcgagaagccgaaggagggggccgacaaggagaagaagaaggagaaggagaaggaggaggagcccaagaagcccaacgagaacaagcugaagcagcccgagggcaaccgcgaggccccgggccagcccgaggggaaccgggaggcgcccggccagcccgaggggaaccgcgaggccccgggccagcccgaggggaaccgggaggcccccggccagcccgagggcaaccgcgaggccccggggcagcccgagggcaaccgggaggcgcccgggcagcccgagggcaaccgcgaggccccgggccagcccgaggggaaccgggaggcccccgcccagcccgagggcaaccgcgaggccccggggcagcccgagggcaaccgggaggcgcccgcccagcccgaggggaaccgcgagacgccggcccagccccagggcaacggcggggccggccaggcccagccccagaagaacgagggcgggaacgcgggggcccggaagggccagggccagaacaaccagggggccaacgcccccaacgagaaggucgugaacgacuaccuccagaagauccgcagcuccgugaccaccgaguggaccccgugcagcgucacgugcggcaacggggugcggaucaagcgcaaggcccacgcggacaagaagaaggccgaggaccugaccauggacgaccuggagguggaggccugcgucauggacaagugcgccggcaucuucaacgugguguccaacagccucgggcuggucauccugcucgugcuggcccuguucaacuga

SEQ ID NO: 3613 - RNA, 978 nt, Artificial Sequence
  derived and/or modified CDS sequence (opt1) from Pk(UMSYC3)__AHF20626.1__CSP
augaagaacuucauccugcucgccgugagcuccauccugcuggucgaccuccugcccacccacuucgagcacaacguggaccugagccgcgccaucaacgugaacggcgucuccuucaacaacguggacaccagcucccucggggcggcccaggugcggcagagcgccucccgcggccgggggcugggcgagaagccgaaggagggggccgacaaggagaagaagaaggagaaggagaaggaggaggagcccaagaagcccaacgagaacaagcugaagcagcccgagggcaaccgcgaggccccgggccagcccgaggggaaccgggaggcgcccggccagcccgaggggaaccgcgaggccccgggccagcccgaggggaaccgggaggcccccggccagcccgagggcaaccgcgaggccccggggcagcccgagggcaaccgggaggcgcccgggcagcccgagggcaaccgcgaggccccgggccagcccgaggggaaccgggaggcccccgcccagcccgagggcaaccgcgaggccccggggcagcccgagggcaaccgggaggcgcccgcccagcccgaggggaaccgcgaggccccggcccagccccagggcaacggcggggccggccaggcgcagccccagaagaacgagggcgggaacgccggggcccggaagggccagggccagaacaaccagggggccaacgcccccaacgagaaggucgugaacgacuaccuccagaagauccgcagcuccgugacgaccgaguggaccccgugcagcgugaccugcggcaacgggguccggaucaagcgcaaggcgcacgccgacaagaagaaggccgaggaccugacgauggacgaccuggagguggaggccugcgucauggacaagugcgccggcaucuucaacgugguguccaacagccucgggcuggucauccugcucgugcuggcgcuguucaacuga

SEQ ID NO: 3614 - RNA, 966 nt, Artificial Sequence
  derived and/or modified CDS sequence (opt1) from Pk(LT33)__ADN94509.1__CSP
augaagaacuucauccugcucgccgugagcuccauccugcuggucgaccuccugcccacccacuucgagcacaacguggaccugagccgcgccaucaacgugaacggcgucuccuucaacaacguggacaccagcucccucggggcggcccaggugcggcagagcgccucccgcggccgggggcugggcgagaagcgcaaggagggggccgacaaggagaagaagaaggagaaggaggaggagccgaagaagcccaacgagaacaagcugaagcagcccgagcaggcccgggcgggcggcgagcagcccgccgccgggggcgagcagccggccgccgggggcgagcagcccgccgccgggggcgagcagcccgccgccggcggggagcagcccgcggccggcggggagcagccggccgccggcggcgagcagcccgccgccgggggcgagcagcccgccgccgggggcgagcagcccgccgccgggggcgagcagccggcggccggcggggagcagcccgcccccgcgccccgccgggagcagccggccgcgggcggggagcagcccgcccccgcgccccgccgggagcagccggccgcgggcggggagcagcccgcccccggcgccggcgccggggacggcgcccgcgggggcaacgcgggggccggcaagggccaggggcagaacaaccagggcgccaacguccccaacgagaagguggugaacgacuaccuccacaagauccggagcuccgucacgaccgaguggaccccgugcagcgugaccugcgggaacggcgugcgcauccggcgcaaggcccacgccgacaagaagaaggcggagaaccugacgauggacgaccuggaggucgaggccugcgugauggacaagugcgccggcaucuucaacguggucuccaacagccucgggcuggugauccugcucgugcuggcccuguucaacuga

SEQ ID NO: 3615 - RNA, 960 nt, Artificial Sequence
  derived and/or modified CDS sequence (opt1) from Pk(UM0032C4)__AHF20653.1__CSP
augaagaacuucauccugcucgccgugagcuccauccugcuggucgaccuccugcccacccacuucgagcacaacguggaccugagccgcgccaucaacgugaacggcgucuccuucaacaacguggacaccagcucccucggggcggcccaggugcggcagagcgccucccgcggccgggggcugggcgagaagccgaaggagggggccgacaaggagaagaagaaggagaaggagaaggaggaggagcccaagaagcccaacgagaacaagcugaagcagcccaacgccgagggcgacggcgcgaacgcccgccagccgaacgccgagggggacggcgccaacgcgcggcagcccaacgccgagggggacggcgccaacgcccgccagcccaacgccgagggggacggcgcgaacgcccggcagcccaacgccgagggcgacggggccaacgcccgccagccgaacgcggagggcgacggggccaacgcccggcagcccaacgccgagggcggcggggccaacgcgcgccagccccaggccgagggcgacggggccaacgcccggcagccccaggcccagggcgacgggggcaacgcgcgccagggcgggaacggcgggggcgccccggccgggggcaacgagggcaacaagcaggccgggaagggccaggggcagaacaaccagggcgcgaacgcccccaacgagaaggucgugaacgacuaccuccagaagauccggagcuccgugacgaccgaguggacccccugcagcgucaucugcgggaacggcgugcgcauccggcgccgggcccacgccgacaagaagaaggccgaggaccugaccauggacgaccuggagguggaggcgugcgucauggacaagugcgccggcaucuucaacgugguguccaacagccucggguucgucauccugcuggugcucgcccuguucaacuga

SEQ ID NO: 3616 - RNA, 951 nt, Artificial Sequence
  derived and/or modified CDS sequence (opt1) from Pk(SGEHIH1-im-Y09-80)__AFD97207.1__CSP
augaagaacuucauccugcucgccgugagcuccauccugcuggucgaccuccugcccacccacuucgagcacaacguggaccugagccgcgccaucaacgugaacggcgucuccuucaacaacguggacaccagcucccucggggcggcccaggugcggcagagcgccucccgcggccgggggcugggcgagaagccgaaggagggggacgacaaggagaagaagaaggagaaggagaaggaggaggagcccaagaagcugaacgagaacaaccccaagaagcccaacgaggagggcgacggcgccaagcucaagcagccgaacgaggagggggacggcgccaagcugaagcagcccaacgcggagggcggggccaacgccgggcagcccaacgccgagggcggcgcgaacgccgggcagcccaacgccgagggcggggccaacgcccgccagccgaacgcggagggcggcgccaacgccgggcagcccaacgccgagggcggggccaacgcgggccagcccaacgccgagggcggggccaacgcccggcagccccaggccgagggcgggggcgcgaacgcccgccagccgcaggccgagggcggcggggccaacgcccggcagggcgggaacgaggggaacaagcaggcgggcaaggggcagggccagaacaaccagggggccaacgcccccaacgagaaggucgugaacgacuaccugcagaagauccgcagcuccgugacgaucgaguggacccccugcagcgugaccugcggcaacggcguccggauccgccggcgcgcccacgcggacaagaagaaggccgaggaccucaccauggacgaccuggagguggaggccugcgucauggacaagugcgccgggaucuucaacgugguguccaacagccugggccucgucauccugcuggugcucgcccuguucaacuga

SEQ ID NO: 3617 - RNA, 939 nt, Artificial Sequence
  derived and/or modified CDS sequence (opt1) from Pk(LT33)__ADN94514.1__CSP
augcgcaacuucauccugcucgccgugagcuccauccugcuggucgaccuccugcccacccacuucgagcacaacguggaccugagccgggccaucaacgugaacggcgucuccuucaacaacguggacaccagcucccucggggcggcccaggugcgccagagcgccucccggggccgcgggcugggcgagaagcggaaggagggggccgacaaggagaagaagaaggagaaggaggaggagccgaagaagcccaacgagaacaagcugaagcagcccgagcaggccgcgcccggcgccggcggggagcagccggcccccggcgccgggggcgagcgccccgcgcccggggccggcggcgagcagccggcccccggggccggcggggagcagcccgcccccggcgcgggcggggagcagccggcccccggcgccgggggcgagcagcccgccgccgggggcgagcagcccgcggccggcggggagcagccggcccccgcgccccggcgcgagcagcccgccgccggcggggagcagccggcccccgcgccccggcgcgagcagcccgccgccggcggggagcagccggcccccggcgccggcgccggggacggcgcccgcgggggcaacgcgggggccggcaagggccaggggcagaacaaccagggcgccaacguccccaacgagaagguggugaacgacuaccuccacaagauccggagcuccgucacgaccgaguggacccccugcagcgugaccugcgggaacggcgugcggauccgccggaaggcccacgccgacaagaagaaggcggagaaccugacgauggacgaccuggaggucgaggccugcgugauggacaagugcgccggcaucuucaacguggucuccaacagccucgggcuggugauccugcucgugcuggcccuguucaacuga

SEQ ID NO: 3618 - RNA, 894 nt, Artificial Sequence
  derived and/or modified CDS sequence (opt1) from Pk(SGEHIWM26-Y09-98)__AFD97239.1__CSP
augaagaacuucauccugcucgccgugagcuccauccugcuggucgaccuccugcccacccacuucgagcacaacguggaccugagccgcgccaucaacgugaacggcgucuccuucaacaacguggacaccagcucccucggggcggcccaggugcggcagagcgccucccgcggccgggggcugggcgagaagccgaaggagggggccgacaaggagaagaagaaggagaaggaggaggagcccaagaagcccaacgagaacaagcugaagcagcccgacacggucccgggcggcgaggagcccgcccccgggcgcgagcagcccgcgccgggccgggaggagcccgcccccgggcgcgagcagcccgccccgggccgggaggagcccgcccccgggcgcgagcagcccgcgccgggccgggaggagcccgcccccggccgcgagcagcccgccccggggcgggagcagcccgcccccggccgcgaggagcccgccccggggcgggagcagcccgcgcccggccgcgaggagcccgccccggcccccggcgccggggccggcgacggggcgcggggcgggaacgccggcgccggcaaggggcagggccagaacaaccagggggccaacgugcccaacgagaagguggucaacgacuaccuccacaagauccgcagcuccgugaccaccgaguggaccccgugcagcgugacgugcggcaacgggguccggauccgccggaagggccacgccggcaacaagaaggcggaggaccugaccauggacgaccuggagguggaggccugcgugauggacaagugcgccgggaucuucaacgucguguccaacagccucggccuggugauccugcucguccuggcccuguucaacuga

SEQ ID NO: 3619 - RNA, 801 nt, Artificial Sequence
  derived and/or modified CDS sequence (opt1) from Pk(KH296)__ADN94490.1__CSP
augcgcaacuucauccugcucgccgugagcuccauccugcuggucgaccuccugcccacccacuucgagcacaacguggaccugagccgggccaucaacgugaacggcgucuccuucaacaacguggacaccagcucccucggggcggcccaggugcgccagagcgccucccggggccgcgggcugggcgagaagcggaaggagggggccgacaaggagaagaagaaggagaaggaggaggagccgaagaagcccaacgagaacaagcugaagcagcccgagcaggccgcgcccggcgccggcggggagcagccggcccccggcgccgggggcgagcagcccgcgcccggggccggcggcgagcagccggcccccggggccggcggggagcagcccgcccccggcgcgggcggggagcagccggcccccgcgccccgccgggagcagcccgccccggcccccggcgccggggacggcgcccgcgggggcaacgccggcgccgggaagggccaggggcagaacaaccagggcgccaacguccccaacgagaagguggugaacgacuaccuccacaagauccggagcuccgucacgaccgaguggacccccugcagcgugaccugcgggaacggcgugcgcauccggcgcaaggcgcacgccgacaagaagaaggccgaggaccugacgauggacgaccuggaggucgaggccugcgugauggacaagugcgccggcaucuucaacguggucuccaacagccucgggcuggugauccugcucgugcuggcgcuguucaacuga

SEQ ID NO: 3620 - RNA, 801 nt, Artificial Sequence
  derived and/or modified CDS sequence (opt1) from Pk(LT33)__ADN94528.1__CSP
augcgcaacuucauccugcucgccgugagcuccauccugcuggucgaccuccugcccacccacuucgagcacaacguggaccugagccgggccaucaacgugaacggcgucuccuucaacaacguggacaccagcucccucggggcggcccaggugcgccagagcgccucccggggccgcgggcugggcgagaagcggaaggagggggccgacaaggagaagaagaaggagaaggaggaggagccgaagaagcccaacgagaacaagcugaagcagcccgagcaggccgcgcccggcgccggcggggagcagccggcccccggcgccgggggcgagcgccccgcgcccggggccggcggcgagcagccggcccccggggccggcggggagcggcccgcccccggcgcgggcggggagcagccggcccccgcgccccgccgggagcagcccgccccgggccccggggccggcgacggggcccgcggcggcaacgccggggccggcaaggggcagggccagaacaaccagggggccaacguccccaacgagaagguggugaacgacuaccuccacaagauccggagcuccgucacgaccgaguggacccccugcagcgugaccugcggcaacggcgugcgcauccggcgccggcagaacgccgggaacaagaaggcggaggaccugacgauggacgaccuggaggucgaggccugcgugauggacaagugcgccggcaucuucaacguggucuccaacagccucgggcuggugauccugcucgugcuggcccuguucaacuga

SEQ ID NO: 3621 - RNA, 744 nt, Artificial Sequence
  derived and/or modified CDS sequence (opt1) from Pk(SGEHIWM4-Y09-8)__AFD97222.1__CSP
augaagaacuucauccugcucgccgugagcuccauccugcuggucgaccuccugcccaccuacuucgagcacaacguggaccugagccgcgccaucaacgugaacggcgucuccuucaacagcguggacaccuccagccucggggcggcccaggugcggcaguccgccagccgcggccgggggcugggcgagaagccgaaggagggggccgacaaggagaagaagaaggagaaggagaaggaggaggagcccaagaagcccaacgagaacaagcugaagcagccccagggcaacggcggggccggccaggcgcagccgcaggggaacggcggggccggccaggcccagcccgagggcaaccgcgaggcccccgcgcagccccaggggaacggcggggccggccaggcccagccgcagaagaacgagggcgggaacgccggcgcccggaaggggcagggccagaacaaccagggggcgaacgcccccaacgagaaggucgugaacgacuaccuccagaagauccgcuccagcgugacgaccgaguggacccccugcuccgugaccugcggcaacggcguccggauccgccggcgcgcccacgccgacaagaagaaggccgaggaccugacgauggacgaccuggagguggaggcgugcgucauggacaagugcgccgggaucuucaacguggugagcaacucccucggccuggucaucagccuggugcucgcccuguucaacuga

SEQ ID NO: 3622 - RNA, 720 nt, Artificial Sequence
  derived and/or modified CDS sequence (opt1) from Pk(PT01)__ADN94512.1__CSP
augcgcaacuucauccugcucgccgugagcuccauccugcuggucgaccuccugcccacccacuucgagcacaacguggaccugagccgggccaucaacgugaacggcgucuccuucaacaacguggacaccagcucccucggggcggcccaggugcgccagagcgccucccggggccgcgggcugggcgagaagcggaaggagggggccgacaaggagaagaagaaggagaaggaggaggagccgaagaagcccaacgagaacaagcugaagcagcccgagcaggccgcgcccggcgccggcggggagcagccggcccccggcgccgggggcgagcagcccgcgcccgccccgcgccgggagcagcccgcccccgcccccggggccggcgacggcgcgcgcgggggcaacgccggggccggcaagggccaggggcagaacaaccagggcgccaacgucccgaacgagaagguggugaacgacuaccuccacaagauccggagcuccgucacgaccgaguggacccccugcagcgugaccugcgggaacggcgugcgcauccggcgcaaggcccacgcggacaagaagaaggccgaggaccugacgauggacgaccuggaggucgaggccugcgugauggacaagugcgccgggaucuucaacguggucuccaacagccucggccuggugauccugcucgugcuggcccuguucaacuga

SEQ ID NO: 3623 - RNA, 717 nt, Artificial Sequence
  derived and/or modified CDS sequence (opt1) from Pk(LT53)__ADN94502.1__CSP
augaagaacuucauccugcucgccgugagcuccauccugcuggucgaccuccugcccacccacuucgagcacaacguggaccugagccgcgccaucaacgugaacggcgucuccuucaacaacguggacaccagcucccucggggcggcccaggugcggcagagcgccucccgcggccgggggcugggcgagaagccgaaggagggggacgacaaggagaagaagaaggagaaggagaaggaggaggagcccaagaaccugaacgagaacaagcccaagcagcccaacgccgagggcgacggcgccaagccgaagcagcccaacgcggagggggacggcgccaacgcccgccagccccaggccgagggcgggggcgggaacgcgcggcagggcgggaacgagggcaacaagcaggccgggaagggccagggccagaacaaccagggggccaacgcccccaacgagaaggucgugaacgacuaccuccagaagauccgcagcuccgugacgaccgaguggaccccgugcagcgugaccugcggcaacgggguccggauccgccggcgcgcccacgcggacaagaagaaggccgaggaccugacgauggacgaccuggagguggaggccugcgucauggacaagugcgccggcaucuucaacgugguguccaacagccucgggcuggucauccugcucgugcuggcccuguucaacuga

SEQ ID NO: 3624 - RNA, 702 nt, Artificial Sequence
  derived and/or modified CDS sequence (opt1) from Pk(SGEHIWM5-Y09-79)__AFD97229.1__CSP
augaagaacuucauccugcucgccgugagcuccauccugcuggucgaccuccugcccacccacuucgagcacaacguggaccugagccgcgccaucaacgugaacggcgucuccuucaacaacguggacaccagcucccucggggcggcccaggugcggcagagcgccucccgcggccgggggcugggcgagcgcccgaaggagggggccgacaaggagaagaagaaggagaaggagaaggagaaggaggagcccaagaagcccaacgagaacaagcugaagcagcccgagcagccggccgcgggcgccggcggggagcagcccgcccccgcgccccggcgcgagcagccggcccccggcgccggggccggcgacggggcccggggcggcaacgccggggcgggcaaggggcagggccagaacaaccagggcgccaacguccccaacgagaagguggugaacgacuaccuccacaagauccgcagcuccgucacgaccgaguggacccccugcagcgugaccugcgggaacggcgugcggauccgccggcgccagaacgccgggaacaagaaggccgaggaccugacgauggacgaccuggaggucgaggccugcgugauggacaagugcgcgggcaucuucaacguggucuccaacagccucgggcuggugauccugcucgugcuggcccuguucaacuga

SEQ ID NO: 3625 - RNA, 660 nt, Artificial Sequence
  derived and/or modified CDS sequence (opt1) from Pk(PT01)__ADN94513.1__CSP
augcgcaacuucauccugcucgccgugagcuccauccugcuggucgaccuccugcccacccacuucgagcacaacguggaccugagccgggccaucaacgugaacggcgucuccuucaacaacguggacaccagcucccucggggcggcccaggugcgccagagcgccucccggggccgcgggcugggcgagaagcggaaggagggggccgacaaggagaagaagaaggagaaggaggaggagccgaagaagcccaacgagaacaagcugaagcagcccgagcaggccgcgccccgccgggagcagccggcccccgcccccggcgccggcgacggggcgcgcggcgggaacgccggcgccgggaagggccagggccagaacaaccagggggccaacguccccaacgagaagguggugaacgacuaccuccacaagauccggagcuccgucacgaccgaguggaccccgugcagcgugaccugcggcaacggggugcgcauccggcgcaaggcccacgcggacaagaagaaggccgaggaccugacgauggacgaccuggaggucgaggccugcgugauggacaagugcgccggcaucuucaacguggucuccaacagccucggccuggugauccugcucgugcuggcccuguucaacuga

SEQ ID NO: 3626 - RNA, 1290 nt, Artificial Sequence
  derived and/or modified CDS sequence (opt1) from Pm(408/Cameroon)__CAA05623.1__CSP
augaagaagcugagcgugcucgccaucuccagcuuccugaucgucgacuuccuguuccccggcuaccaccacaacuccaacagcaccaagucccgcaaccucagcgagcugugcuacaacaacguggacaccaagcuguucaacgagcucgaggugcgguacuccacgaaccaggaccacuucuacaacuacaacaagaccauccgccugcugaacgagaacaacaacgagaaggacgggaacgucaccaacgagcggaagaagaagccgaccaaggccguggagaacaagcucaagcagccgcccggcgacgacgacggggcgggcaacgacgccgggaacgacgccggcaacgccgccggcaacgcggccgggaacgccgccggcaacgcggccgggaacgccgccggcaacgacgccgggaacgcggccggcaacgccgccggcaacgccgcggggaacgccgccggcaacgccgccgggaacgacgcgggcaacgccgccggcaacgacgccgggaacgccgcgggcaacgccgccgggaacgccgcgggcaacgccgccgggaacgccgccggcaacgacgcgggcaacgccgccgggaacgccgccggcaacgcggccgggaacgccgccggcaacgccgcggggaacgccgccggcaacgccgcgggcaacgccgccgggaacgccgccggcaacgcggccgggaacgacgccggcaacgccgccgggaacgcggccggcaacgccgccggcaacgccgcggggaacgccgccggcaacgccgcggggaacgccgccggcaacgccgccggcaacgcggccgggaacgccgccggcaacgccgcggggaacgccgccggcaacgccgccgggaacgcggccggcaacgccgccggcaacgccgcggggaacgccgccggcaacgccgcggggaacgagaaggccaagaacaaggacaacaagguggacgccaacacgaacaagaaggacaaccaggaggagaacaacgacagcuccaacggccccagcgaggagcacaucaagaacuaccuggaguccauccgcaacagcaucaccgaggaguggucccccugcagcgugaccugcggguccggcauccggacccgccggaaggucgacgccaagaacaagaagcccgccgagcuggugcucagcgaccuggagacggagaucugcucccuggacaagugcagcuccaucuucaacgucgugagcaacagccucggcaucgugcugguccuggugcucauccuguuccacuga

SEQ ID NO: 3627 - RNA, 1290 nt, Artificial Sequence
  derived and/or modified CDS sequence (opt1) from Pm(Uganda 1-CDC)__AAA29557.1__CSP
augaagaagcugagcgugcucgccaucuccagcuuccugaucgucgacuuccuguuccccggcuaccaccacaacuccaacagcaccaagucccgcaaccucagcgagcugugcuacaacaacguggacaccaagcuguucaacgagcucgaggugcgguacuccacgaaccaggaccacuucuacaacuacaacaagaccauccgccugcugaacgagaacaacaacgagaaggacgggaacgucaccaacgagcggaagaagaagccgaccaaggccguggagaacaagcucaagcagccgcccggcgacgacgacggggcgggcaacgacgccgggaacgacgccggcaacgacgccggcaacgccgcggggaacgccgccggcaacgccgcggggaacgccgccggcaacgccgccgggaacgcggccggcaacgccgccggcaacgccgcggggaacgccgccggcaacgccgccgggaacgacgcgggcaacgccgccggcaacgccgccgggaacgcggccggcaacgccgccgggaacgcggccggcaacgacgccgggaacgccgccggcaacgcggccggcaacgccgccgggaacgccgcgggcaacgccgccgggaacgccgccggcaacgcggccgggaacgccgccggcaacgcggccggcaacgccgccgggaacgacgccggcaacgcggccgggaacgccgccggcaacgccgcggggaacgccgccggcaacgccgccggcaacgcggccgggaacgccgccggcaacgcggccgggaacgccgccggcaacgccgcgggcaacgccgccgggaacgccgccggcaacgcggccgggaacgccgccggcaacgccgcggggaacgccgccggcaacgccgccggcaacgcggccgggaacgccgccggcaacgcggccgggaacgagaaggccaagaacaaggacaacaagguggacgccaacacgaacaagaaggacaaccaggaggagaacaacgacagcuccaacggccccagcgaggagcacaucaagaacuaccuggaguccauccgcaacagcaucaccgaggaguggucccccugcagcgugaccugcggguccggcauccgggcccgccggaaggucggcgcgaagaacaagaagcccgccgagcuggugcucagcgaccuggagaccgagaucugcucccuggacaagugcagcuccaucuucaacgucgugagcaacagccucgggaucgugcugguccuggugcucauccuguuccacuga

SEQ ID NO: 3628 - RNA, 1170 nt, Artificial Sequence
  derived and/or modified CDS sequence (opt1) from Pm(UG01)__SCN12386.1__CSP
augaagaagcugagcgugcucgccaucuccagcuuccugaucgucgacuuccuguuccccggcuaccaccacaacuccaacagcaccaagucccgcaaccucagcgagcugugcuacaacaacguggacaccaagcuguucaacgagcucgaggugcgguacuccacgaaccaggaccacuucuacaacuacaacaagaccauccgccugcugaacgagaacaacaacgagaaggacgggaacgucaccaacgagcggaagaagaagccgaccaaggccguggagaacaagcucaagcagccgcccggcgacgacgacggggcgggcaacgacgccgggaacgacgccggcaacgccgccggcaacgcggccgggaacgccgccggcaacgcggccgggaacgacgccggcaacgccgccgggaacgcggccggcaacgccgccggcaacgccgcggggaacgccgccggcaacgccgccgggaacgcggccggcaacgccgccggcaacgccgcggggaacgccgccggcaacgccgcggggaacgccgccggcaacgccgccgggaacgcggccggcaacgccgccggcaacgccgcggccgggaacgccgccggcaacgccgcggggaacgccgccggcgccgcggggaacgccgccggcaacgccgccggcaacgcggccgggaacgccgccggcaacgccgcggggaacgccgccggcaacgccgccgggaacgcggccggcaacgccgccggcaacgcggccgggaacgccgccggcaacgccgcggggaacgccgccggcaacgccgccggcaacgagaaggcgaagaacaaggacaacaagguggacgccaacacgaacaagaaggacaaccaggaggagaacaacgacagcuccaacgggcccagcgaggagcacaucaagaacuaccuggaguccauccgcaacagcaucaccgaggaguggucccccugcagcgugaccugcggcuccgggauccgggcccgccggaaggucgacgccaagaacaagaagcccgccgagcuggugcucagcgaccuggagaccgagaucugcucccuggacaagugcagcuccaucuucaacgucgugagcaacagccucggcaucgugcugguccuggugcucauccuguuccacuga

SEQ ID NO: 3629 - RNA, 1170 nt, Artificial Sequence; identical to SEQ ID NO: 3628
  derived and/or modified CDS sequence (opt1) from Pm()__SCN12386.1__CSP

SEQ ID NO: 3630 - RNA, 885 nt, Artificial Sequence
  derived and/or modified CDS sequence (opt1) from Pm(PmlGA01)__SBT79431.1__CSP
augaagaagcugagcgugcucgccaucuccagcuuccugaucgucgacuuccuguuccccggcuaccaccacaacuccaacagcaccaagucccgcaaccucagcgagcugugcuacaacaacguggacaccaagcuguucaacgagcucgaggugcgguacuccacgaaccaggaccacuucuacaacuacaacaagaccauccgccugcugaacgagaacaacaacgccaaggacgggaacgucaccaacgagcggaagaagaagccgaccaaggcgguggagaacaagcucaagcagccgcccggcgacgaggaggacgacgccgagaacggggagggcaacgagcgcgggaacggcgagggcaacgagcgggggaacggcgaggggaacgagcgcggcaacggggagggcaacgagcggggcaacggggccggcaacgagcgcgggaacgacgccggcaacgccgcgggcaacgccgccgggaacgacgccggcaacgcggccgggaacgccgccggcaacgccgcggggaacgccgccggcaacgacgccggcaacgccgcggggaacgccgccggcaacgccgccgggaacggcgagaacaacgacagcuccaacgggcccagcgaggagcacaucaagaacuaccuggaguccauccggaacagcaucacggaggaguggucccccugcagcgugaccugcggcaacggcauccgcgcgcggcgcaaggucgacgccaagaacaagaagcccgccgagcuggugcucuccgaccuggagaccgagaucugcagccuggacaagugcuccagcaucuucaacguggucuccaacagccucgggaucgugcuggugcugguccucauccuguuccacuga

SEQ ID NO: 3631 - RNA, 1104 nt, Artificial Sequence
  derived and/or modified CDS sequence (opt1) from Poc(contig1754)__SBT00176.1__CSP
augcgcaaccuggccaucuucgccgugagcgcguuccucuucgccgacucccgguaccccgucuacgcccacaacggcaacagcaccgaggggcgcaagcugaacgagcugugcuacaacaacguggaccucuacaacacccuguucaacgagcuggacgugggcuccagcacgaaccaggccuucuuccucaacuccaagaagacccugcggcugcucaacgagaacccgaaggagaacaagaagaagcgcaaggacgacaagaagcccgucgagaacaagcugaagcagggggagcgggagaacgacccccccgccccgcgcggcgaggggaacccccccgcgccccagggcgagggcaacccgcccgccccccagggggagggcaaccccccggccccccagggggagggcaacccccccgccccgcagggggagggcaacccccccgcgccccggggcgaggggaacccgcccgccccccagggcgaggggaaccccccggccccccagggcgagggcaacccccccgccccgcagggggagggcaacccccccgccccgcgcggggagggcaacccccccgcgccccagggggagggcaacccgcccgccccccagggcgaggggaaccccccggccccccagggcgaggggaacccccccgccgcccagggcgaggggaacccgcccgcggcccagggcaacggcaacccccccgccgcccaggggaacggcaacccgcccgccgcgcaggggaacggcaacccccccgccccggccgggaagggcaagaacgagaaccagaaggagaaggaggagaagaacgccgccaacaacccccccagcgaggacgacaucaagaaguacaucgacaagauccggaacgacaucaccgagaacuggucccccugcagcgugaccugcggcuucggggugcgcguccggcgcaaggcgggcgccuccgccaagaaggcccaggagcugacgcucagcgaccuggagaccgagaucugcaagaucgagaacugcuccagcaucuucaacgugguguccaacagccuggggcucgucaucuuccuguuccugguguucuuccacuga

SEQ ID NO: 3632 - RNA, 888 nt, Artificial Sequence
  derived and/or modified CDS sequence (opt1) from Poc(GH01)__SBT84923.1__CSP
augcgcaaccuggccaucuucgccgugagcgcguuccucuucgccgacucccgguaccccgucuacgcccacaacggcaacagcaccgaggggcgcaagcugaacgagcugugcuacaacaacguggaccucuacaacacccuguucaacgagcuggacgugggcuccagcacgaaccaggccuucuuccucaacuccaagaagacccugcggcugcucaacgagaacccgaaggagaacaagaagaagcgcaaggacgacaagaagcccgucgagaacaagcugaagcagggggagcgggagaacgacccccccgccccgcagggcgaggggaacccccccgcgccccagggcgagggcaacccgcccgccccccagggggagggcaaccccccggccccccagggggagggcaacccccccgccccgcagggggagggcaacccccccgcggcccagggcgaggggaaccccccggccgcccagggcaacgggaacccccccgccgcgcagggcaacggcaaccccccggccgcccaggggaacggcaacccccccgcccccgccgggaagggcaagaacgagaaccagaaggagaaggaggagaagaacgcggccaacaacccgcccagcgaggacgacaucaagaaguacaucgacaagauccgcaacgacaucaccgagaacuggucccccugcagcgugaccugcggguucggcgugcggguccgccggaaggccggcgccuccgccaagaaggcgcaggagcugacgcucagcgaccuggagaccgagaucugcaagaucgagaacugcuccagcaucuucaacgugguguccaacagccuggggcucgucaucuuccuguuccugguguucuuccacuga

SEQ ID NO: 3633 - RNA, 828 nt, Artificial Sequence
  derived and/or modified CDS sequence (opt1) from Poc(contig251)__SBS83173.1__CSP
augcgcaaccuggccaucuucgccgugagcgcguuccucuucgccgacucccgguaccccgucuacgcccacaacggcaacagcaccgaggggcgcaagcugaacgagcugugcuacaacaacguggaccucuacaacacccuguucaacgagcuggacgugggcuccagcacgaaccaggccuucuuccucaacuccaagaagacccugcggcugcucaacgagaacccgaaggagaacaagaagaagcgcaaggacgacaagaagcccgucgagaacaagcugaagcagggggagcgggagaacgacccccccgccccgcgcggcgaggggaacccccccgcgccccagggcgagggcaacccgcccgccccccagggggagggcaaccccccggccccccagggggagggcaacccccccgccccgcagggggagggcaacccccccgcggcccagggcgaggggaaccccccggccgcccagggcaacccccccgcccccgcggggaagggcaagaacgagaaccagaaggagaaggaggagaagaacgccgccaacaacccgcccagcgaggacgacaucaagaaguacaucgacaagauccggaacgacaucaccgagaacuggucccccugcagcgugaccugcggcuucggggugcgcguccggcgcaaggccggcgccuccgcgaagaaggcccaggagcugacgcucagcgaccuggagaccgagaucugcaagaucgagaacugcuccagcaucuucaacgugguguccaacagccuggggcucgucaucuuccuguuccugguguucuuccacuga

SEQ ID NO: 3634 - RNA, 945 nt, Artificial Sequence
  derived and/or modified CDS sequence (opt1) from Pow(contig93)__SBT35133.1__CSP
augcgcaaccuggccaucuucgccgugagcgcguuccucuucgccgacuccggcuaccccgucuacgcccacaacgggaacagcauggagggccggaagcugaacgagcugugcuacaacaacguggaccucuacaacacccuguucgacgggcuggacguggaguccagcaccaaccaggccuucuuccucaacuccaagaagacgcugcgccugcucaacgagaacccgaaggagaacaagaagaagcggaaggacgacaagauccccgucgagaacaagcugaagcagggcgaccgcgagaacgacccgcccgcccccgugccccagggggacccgcccgcgcccgugccccagggcgacccgcccgccgccgucccccagggcgacccgcccgcccccgugccccagggggacccgcccgcgccccagggcgacccgcccgcccccgugccccagggggacccgcccgcccccgucccccagggcgacccgcccgcccccgugccccagggggacccgcccgcccccgcgccccagggcgacccgcccgcccccgcgccccagggcgacgggaagccgcccgcccccgcgccccagggcgacgggaaccagcccgcccccggcaagggcaagagcgagaaccagaaggagaaggacgagaagaacgccgccaacaacccgcccuccgaggacgacaucaagaaguacaucgacaagauccggaaggacaucaccgagaacuggagccccugcuccgugaccugcgggcugggcguccgcgugcggcgcaaggccggggccagcgccaagaaggccaacgagcucaccaucaacgacguggagacggagaucugcaagaucgagaacugcuccagcaucuucaacgucguguccaacagcaucggccuggugaucuuccuguuccucgucuucuuccacuga

SEQ ID NO: 3635 - RNA, 891 nt, Artificial Sequence
  derived and/or modified CDS sequence (opt1) from Pow(contig72)__SBT34702.1__CSP
augcgcaaccuggccaucuucgccgugagcgccuuccucuucgccgacuccggcuaccccgucuacgcccacaacgggaacagcauggagggccggaagcugaacgagcugugcuacaacaacguggaccucuacaacacccuguucgacgggcuggacguggaguccagcaccaaccaggccuucuuccucaacuccaagaagacgcugcgccugcucaacgagaacccgaaggagaacaagaagaagcggaaggacgacaagauccccgucgagaacaagcugaagcagggcgaccgcgagaacgacccgcccgcccccgugccccagggggacccgcccgcgcccgugccccagggcgacccgcccgcccccgucccccagggcgacccgcccgcccccgugccccagggggacccgcccgcgccccagggcgacccgcccgcccccgugccccagggggacccgcccgcccccgcgccccagggcgacccgcccgcccccgcgccccagggggacggcaagccgcccgcccccgcgccccagggcgacgggaaccagcccgcccccggcaagggcaagagcgagaaccagaaggagaaggacgagaagaacgccgccaacaacccgcccuccgaggacgacaucaagaaguacaucgacaagauccggaaggacaucaccgagaacuggagccccugcuccgugaccugcgggcugggcguccgcgugcggcgcaaggccggggccagcgccaagaaggccaacgagcucaccaucaacgacgucgagacggagaucugcaagaucgagaacugcuccagcaucuucaacgugguguccaacagcaucggccuggucaucuuccuguuccucguguucuuccacuga

SEQ ID NO: 3636 - RNA, 1020 nt, Artificial Sequence
  derived and/or modified CDS sequence (opt1) from Po(PowCR01)__SBT72933.1__CSP
augcgcaaccuggccaucuucgccgugagcgcguuccucuucgccgacuccggcuaccccgucuacgcccacaacgggaacagcauggagggccggaagcugaacgagcugugcuacaacaacguggaccucuacaacacccuguucgacgggcuggacguggaguccagcaccaaccaggccuucuuccucaacuccaagaagacgcugcgccugcucaacgagaacccgaaggagaacaagaagaagcggaaggacgacaagauccccgucgagaacaagcugaagcagggcgaccgcgagaacgacccccccgccccggugccccagggggacccccccgcgccggugccccagggcgacccccccgccgccgucccgcagggcgacccccccgcccccgugccgcagggggacccccccgcgccccagggcgacccgcccgcccccgugccccagggggacccgcccgcccccgucccccagggcgacccgcccgcccccgugccgcaggggaacccccccgcccccgugccgcagggcgacccccccgcgccccagggcgacccgcccgcccccgucccccagggggacccgcccgcccccgccccccagggcgacccgcccgcccccgcgccccagggggacggcaagccgcccgcccccgccccccagggcgacgggaaccagccggcccccggcaaggggaagagcgagaaccagaaggagaaggacgagaagaacgccgcgaacaaccccccguccgaggacgacaucaagaaguacaucgacaagauccggaaggacaucaccgagaacuggagccccugcuccgugaccugcggccugggggugcgcguccggcgcaaggccggcgccagcgccaagaaggccaacgagcucaccaucaacgacguggagacggagaucugcaagaucgagaacugcuccagcaucuucaacguggucuccaacagcaucggccuggugaucuuccuguuccucguguucuuccacuga

SEQ ID NO: 3637 - RNA, 1164 nt, Artificial Sequence
  derived and/or modified CDS sequence (opt1) from Pv(Pt02.1)__ADB92551.1__CSP
augaagaacuucauccugcucgccgugagcuccauccugcuggucgaccucuuccccacccacugcggccacaacguggaccugagcaaggccaucaaccugaacggggugggcuucaacaacgucgacgcguccagccucggggccgcccacgugggccaguccgccagccgcgggcggggccugggcgagaacccggacgacgaggagggggacgccaagaagaagaaggacggcaagaaggcggagcccaagaacccccgcgagaacaagcugaagcagcccgaggacggggccggcgaccagccgggggccaacggcgccggcaaccagcccggggcgaacggcgccgggaaccagcccggcgccaacggcgccgggaaccagcccggcgccaacggggcgggcaaccagccgggggccaacggcgccggcaaccagcccggggccaacggcgccgggaaccagcccggcgcgaacggggccggcgaccagcccggcgccaacggggccggcaaccagccgggggccaacggcgcggggaaccagcccggcgccaacggcgccggggaccagcccggcgccaacggggccggcaaccagcccggcgcgaacggggccggcgaccagccgggggccaacggcgccgggaaccagcccggcgcgaacggcgccgggaaccagcccggcgccaacggggccggcaaccagcccggggccaacggcgcgggcaaccagccgggggccaacggcgccgggggccaggccgccgggggcaacgcggccaacaagaaggccggcgacgccggggccggcgggcaggcggccggcgggaacgccgccaacaagaaggcgggcgacgccggcgccgggcagggccagaacaacgagggggccaacgcccccaacgagaaguccgugaaggaguaccucgacaagguccgggcgaccgugggcacggaguggacccccugcagcgugaccugcggcgucggggugcgcgugcggcgccgggucaacgccgccaacaagaagcccgaggaccugacccugaacgaccucgagacggacgugugcaccauggacaagugcgccggcaucuucaacguggucuccaacagccuggggcuggugauccuccuggugcuggcccucuucaacuga

SEQ ID NO: 3638 - RNA, 1134 nt, Artificial Sequence
  derived and/or modified CDS sequence (opt1) from Pv(Salvador I (Sal-1))__XP_001613068.1__CSP
augaagaacuucauccugcucgccgugagcuccauccugcuggucgaccucuuccccacccacugcggccacaacguggaccugagcaaggccaucaaccugaacggggugaacuucaacaacgucgacgcguccagccucggcgccgcccacguggggcaguccgccagccgcggccgggggcugggcgagaacccggacgacgaggagggcgacgccaagaagaagaaggacgggaagaaggcggagcccaagaacccccgcgagaacaagcugaagcagcccggcgaccgggccgacgggcagccggccggcgaccgcgccgacgggcagcccgcgggcgaccgggccgacggccagcccgccggggaccgcgccgacggccagcccgccggggaccgggcggccggccagccggccggcgaccgcgccgacgggcagcccgccggcgaccgggcggacgggcagcccgccggcgaccgcgccgacgggcagcccgccggcgaccgggccgacggccagccggcgggggaccgcgccgccggccagcccgccggggaccgggccgcgggccagcccgccggggaccgcgccgacggccagcccgccggcgaccgggcggccgggcagccggccggcgaccgcgccgacgggcagcccgccggcgaccgggcggccgggcagcccgccggcgaccgcgccgacggccagcccgccggggaccgggcggccggccagccggccggggaccgcgccgccggccagcccgcgggcgaccgggccgccgggcaggccgcgggcgaccgcgccgccgggcaggccgccggcgggaacgcgggcggccaggggcagaacaacgagggcgccaacgcccccaacgagaaguccgugaaggaguaccucgacaagguccgcgccaccguggggacggaguggacccccugcagcgugaccugcggcgucggggugcgggugcgccggcgcgucaacgccgcgaacaagaagccggaggaccugacccugaacgaccucgagacggacgugugcaccauggacaagugcgccggcaucuucaacguggucuccaacagccugggccuggugauccuccuggugcuggcccucuucaacuga

SEQ ID NO: 3639 - RNA, 1092 nt, Artificial Sequence
  derived and/or modified CDS sequence (opt1) from Pv(P01)__SGX77278.1__CSP
augaagaacuucauccugcucgccgugagcuccauccugcuggucgaccucuuccccacccacugcggccacaacguggaccugagcaaggccaucaaccugaacggggugaacuucaacaacgucgacgcguccagccucggcgccgcccacguggggcaguccgccagccgcggccgggggcugggcgagaacccggacgacgaggagggcgacgccaagaagaagaaggacgggaagaaggcggagcccaagaacccccgcgagaacaagcugaagcagcccgccggcgaccgggccgacgggcagccggccggcgaccgcgcggacgggcagcccgccggcgaccgggccgacggccagcccgccggggaccgcgccgcgggccagcccgccggggaccgggccgacggccagccggccggcgaccgcgccgcggggcagcccgccggcgaccgggccgacgggcagcccgccggcgaccgcgccgcggggcagcccgccggcgaccgggccgacggccagccggccggggaccgcgccgcgggccagcccgccggggaccgggccgccggccagcccgcgggggaccgcgccgacggccagcccgccggcgaccgggccgccgggcagccggcgggcgaccgcgccgacgggcagcccgccggcgaccgggccgccgggcagcccgcgggcgaccgcgccgccggccagcccgccgggaacggcgccgggggccaggcggccggcgggaacgccggcgggaacgccggcgggaacgcgggcggcaacgccgggggccaggggcagaacaacgagggcgccaacgccccgaacgagaaguccgugaaggaguaccucgacaagguccgggccaccguggggacggaguggacccccugcagcgugaccugcggcgucggcgugcgcgugcggcgccgcgucaacgcggccaacaagaagcccgaggaccugacccugaacgaccucgagacggacgugugcaccauggacaagugcgccgggaucuucaacguggucuccaacagccugggccuggugauccuccuggugcuggcccucuucaacuga

SEQ ID NO: 3640 - RNA, 1188 nt, Artificial Sequence
  derived and/or modified CDS sequence (opt1) from Pv(Cam22)__AHL69650.1__CSP
augaagaacuucauccugcucgccgugagcuccauccugcuggucgaccucuuccccacccacugcggccacaacguggaccugagcaaggccaucaaccugaacggggugggcuucaacaacgucgacgcguccagccucggggccgcccacgugggccaguccgccagccgcgggcggggccugggcgagaacccggacgacgaggagggggacgccaagaagaagaaggacggcaagaaggcggagcccaagaacccccgcgagaacaagcugaagcagcccgaggacggggccggcaaccagccgggggccaacggcgccggcaaccagcccggggcgaacggcgccgggaaccagcccggcgccaacggcgccgggaaccagcccggcgccaacggggcgggcaaccagccgggggccaacggcgccggcaaccagcccggggccaacggcgccgggaaccagcccggcgcgaacggggccggcaaccagcccggcgccaacggggccgacgaccagccgggcgccaacggggcgggcaaccagcccggggccaacggcgccggcaaccagcccggggccaacggcgccgggaaccagcccggcgcgaacggcgccggggaccagccgggcgccaacggggccggcaaccagcccggggcgaacggcgccggcgaccagcccggggccaacggcgccgggaaccagcccggcgccaacggggcgggcaaccagccgggcgccaacggggccggcaaccagcccggggccaacggcgccgggaaccagcccggcgcgaacggcgccgggaaccagcccggcgccaacggggccggcgggcaggccgcgggcggcaacgccgccaacaagaaggccggggacgcgggcgccgggcagggccagaacaacgagggcgccaacgccccgaacgagaaguccgugaaggaguaccucgacaagguccgggccaccguggggacggaguggacccccugcagcgugaccugcggcgucggggugcgcgugcggcgccgggucaacgcggccaacaagaagcccgaggaccugacccugaacgaccucgagacggacgugugcaccauggacaagugcgccggcaucuucaacguggucuccaacagccuggggcuggugauccuccuggugcuggcccucuucaacuga

SEQ ID NO: 3641 - RNA, 1188 nt, Artificial Sequence
  derived and/or modified CDS sequence (opt1) from Pv(Cam29)__AGN05257.1__CSP
augaagaacuucauccugcucgccgugagcuccauccugcuggucgaccucuuccccacccacugcggccacaacguggaccugagcaaggccaucaaccugaacggggugggcuucaacaacgucgacgcguccagccucggggccgcccacgugggccaguccgccagccgcgggcggggccugggcgagaacccggacgacgaggagggggacgccaagaagaagaaggacggcaagaaggcggagcccaagaacccccgcgagaacaagcugaagcagcccgaggacggggagggcaaccagccgggggccaacggcgccggcaaccagcccggggccaacggcgcggggaaccagcccggcgccaacggcgccgggaaccagcccggcgccaacggggccggcaaccagccgggggcgaacggcgccggcaaccagcccggggccaacggcgccgggaaccagcccggcgccaacggggcggacgaccagcccggcgccaacggcgccgggaaccagccgggcgccaacggggccggcaaccagcccggggcgaacggcgccggcaaccagcccggggccaacggcgccggggaccagcccggcgccaacggcgcggggaaccagccgggcgccaacggggccggcaaccagcccggggccaacggcgcgggcaaccagcccggggccaacggcgccgggaaccagcccggcgccaacggggccggcaaccagccgggcgcgaacggggccggcaaccagcccggggccaacggcgccgggaaccagcccggcgccaacggcgcggggaaccagcccggcgccaacggggccggcgggcaggccgccggcggcaacgcggccaacaagaaggccggggacgccggcgcggggcagggccagaacaacgagggcgccaacgccccgaacgagaaguccgugaaggaguaccucgacaagguccgggccaccguggggacggaguggacccccugcagcgugaccugcggcgucggggugcgcgugcggcgccgggucaacgccgcgaacaagaagcccgaggaccugacccugaacgaccucgagacggacgugugcaccauggacaagugcgccggcaucuucaacguggucuccaacagccuggggcuggugauccuccuggugcuggcccucuucaacuga

SEQ ID NO: 3642 - RNA, 1188 nt, Artificial Sequence
  derived and/or modified CDS sequence (opt1) from Pv(Cam9)__AGN05240.1__CSP
augaagaacuucauccugcucgccgugagcuccauccugcuggucgaccucuuccccacccacugcggccacaacguggaccugagcaaggccaucaaccugaacggggugggcuucaacaacgucgacgcguccagccucggggccgcccacgugggccaguccgccagccgcgggcggggccugggcgagaacccggacgacgaggagggggacgccaagaagaagaaggacggcaagaaggcggagcccaagaacccccgcgagaacaagcugaagcagcccgaggacggggccggcaaccagccgggggccaacggcgccggcaaccagcccggggcgaacggcgccgggaaccagcccggcgccaacggcgccgggaaccagcccggcgccaacggggcgggcaaccagccgggggccaacggcgccggcaaccagcccggggccaacggcgccgggaaccagcccggcgcgaacggggccggcaaccagcccggcgccaacggggccgacgaccagccgggcgccaacggggcgggcaaccagcccggggccaacggcgccggcaaccagcccggggccaacggcgccgggaaccagcccggcgcgaacggcgccggggaccagccgggcgccaacggggccggcaaccagcccggggcgaacggcgccggcgaccagcccggggccaacggcgccgggaaccagcccggcgccaacggggcgggcaaccagccgggcgccaacgaggccgggaaccagcccggcgccaacggggccggcaaccagcccggggcgaacggcgccggcaaccagcccggggccaacggcgccgggggccaggccgccgggggcaacgcggccaacaagaaggccggcgacgcgggggccggccaggggcagaacaacgagggcgccaacgccccgaacgagaaguccgugaaggaguaccucgacaagguccgggccaccgugggcacggaguggacccccugcagcgugaccugcggggucggcgugcgcgugcggcgccgggucaacgcggccaacaagaagcccgaggaccugacccugaacgaccucgagacggacgugugcaccauggacaagugcgccgggaucuucaacguggucuccaacagccugggccuggugauccuccuggugcuggcccucuucaacuga

SEQ ID NO: 3643 - RNA, 1182 nt, Artificial Sequence
  derived and/or modified CDS sequence (opt1) from Pv(Ca05)__ADB92533.1__CSP
augaagaacuucauccugcucgccgugagcuccauccugcuggucgaccucuuccccacccacugcggccacaacguggaccugagcaaggccaucaaccugaacggggugggcuucaacaacgucgacgcguccagccucggggccgcccacgugggccaguccgccagccgcgggcggggccugggcgagaacccggacgacgaggagggggacgccaagaagaagaaggacggcaagaaggcggagcccaagaacccccgcgagaacaagcugaagcagcccgaggacggggccggcgaccagccgggggccaacggcgccggcaaccagcccggggcgaacggcgccgggaaccagcccggcgccaacggcgccgggaaccagcccggcgccaacggggcgggcaaccagccgggggccaacggcgccggcaaccagcccggggccaacggcgccgggaaccagcccggcgcgaacggggccggcaaccagcccggcgccaacggggccgacgaccagccgggcgccaacggggcgggcaaccagcccggggccaacggcgccggcaaccagcccggggccaacggcgccgggaaccagcccggcgcgaacggcgccggggaccagccgggcgccaacggggccggcaaccagcccggggcgaacggcgccggcgaccagcccggggccaacggcgccgggaaccagcccggcgccaacggggcgggcaaccagccgggcgccaacggggccggcaaccagcccggggccaacggcgccgggaaccagcccggcgcgaacggcgccgggggccaggccgccgggggcaacgccgcgaacaagaaggccggggacgccggcggcaacgccgggggcaacgccgggggccagggccagaacaacgagggggcgaacgcccccaacgagaaguccgugaaggaguaccucgacaagguccgggccaccgugggcacggaguggaccccgugcagcgugaccugcggggucggcgugcgcgugcggcgccgggucaacgccgcgaacaagaagcccgaggaccugacccugaacgaccucgagacggacgugugcaccauggacaagugcgccgggaucuucaacguggucuccaacagccugggccuggugauccuccuggugcuggcccucuucaacuga

SEQ ID NO: 3644 - RNA, 1182 nt, Artificial Sequence
  derived and/or modified CDS sequence (opt1) from Pv(Ch05)__ADB92538.1__CSP
augaagaacuucauccugcucgccgugagcuccauccugcuggucgaccucuuccccacccacugcggccacaacguggaccugagcaaggccaucaaccugaacggggugggcuucaacaacgucgacgcguccagccucggggccgcccacgugggccaguccgccagccgcgggcggggccugggcgagaacccggacgacgaggagggggacgccaagaagaagaaggacggcaagaaggcggagcccaagaacccccgcgagaacaagcugaagcagcccgaggacggggccggcgaccagccgggggccaacggcgccggcaaccagcccggggcgaacggcgccgggaaccagcccggcgccaacggcgccgggaaccagcccggcgccaacggggcgggcaaccagccgggggccaacggcgccggcaaccagcccggggccaacggcgccgggaaccagcccggcgcgaacggggccggcgaccagcccggcgccaacggggccgacgaccagccgggcgccaacggggcgggcaaccagcccggggccaacggcgccggcaaccagcccggggccaacggcgccggggaccagcccggcgcgaacggcgccggggaccagccgggcgccaacggggccggcaaccagcccggggcgaacggcgccggcgaccagcccggggccaacggcgccgggaaccagcccggcgccaacggggcgggcaaccagccgggcgccaacggggccggcaaccagcccggggccaacggcgccgggaaccagcccggcgcgaacggcgccgggggccaggccgccgggggcaacgccgcgaacaagaaggccggggacgccggcggcaacgccgggggcaacgccgggggccagggccagaacaacgagggggcgaacgcccccaacgagaaguccgugaaggaguaccucgacaagguccgggccaccgugggcacggaguggaccccgugcagcgugaccugcggggucggcgugcgcgugcggcgccgggucaacgccgcgaacaagaagcccgaggaccugacccugaacgaccucgagacggacgugugcaccauggacaagugcgccgggaucuucaacguggucuccaacagccugggccuggugauccuccuggugcuggcccucuucaacuga

SEQ ID NO: 3645 - RNA, 1173 nt, Artificial Sequence
  derived and/or modified CDS sequence (opt1) from Pv(Cam16)__AHL69649.1__CSP
augaagaacuucauccugcucgcggugagcuccauccugcuggucgaccucuuccccacccacugcggccacaacguggaccugagcaaggccaucaaccugaacggggugggcuucaacaacgucgacgcguccagccucggggccgcccacgugggccaguccgccagccgcgggcggggccugggcgagaacccggacgacgaggagggggacgccaagaagaagaaggacggcaagaaggcggagcccaagaacccccgcgagaacaagcugaagcagcccgaggacggggccggcaaccagccgggggccaacggcgccggcaaccagcccggggcgaacggcgccgggaaccagcccggcgccaacggcgccgggaaccagcccggcgccaacggggcgggcaaccagccgggggccaacggcgccggcaaccagcccggggccaacggcgccgacgaccagcccggggcgaacggcgccgggaaccagcccggcgccaacggcgccgggaaccagccgggcgccaacggggcgggcaaccagcccggggccaacggcgccggcaaccagcccggggccaacggcgccgggaaccagcccggcgcgaacggcgccggggaccagccgggcgccaacggggccggcaaccagcccggggcgaacggcgccggcgaccagcccggggccaacggcgccgggaaccagcccggcgccaacggggcgggcaaccagccgggcgccaacgaggccgggaaccagcccggcgccaacggggccggcaaccagcccggggcgaacggcgccggcaaccagcccggggccaacggcgccgggggccaggccgccgggggcaacgcgggcgggaacgccggcgggcagggccagaacaacgagggcgccaacgcgccgaacgagaaguccgugaaggaguaccucgacaagguccgggccaccguggggacggaguggacccccugcagcgugaccugcggcgucggggugcgcgugcggcgccgggucaacgccgccaacaagaagcccgaggaccugacccugaacgaccucgagacggacgugugcaccauggacaagugcgccggcaucuucaacguggucuccaacagccuggggcuggugauccuccuggugcuggcccucuucaacuga

SEQ ID NO: 3646 - RNA, 1170 nt, Artificial Sequence
  derived and/or modified CDS sequence (opt1) from Pv(Cam26)__AGN05254.1__CSP
augaagaacuucauccugcucgccgugagcuccauccugcuggucgaccucuuccccacccacugcggccacaacguggaccugagcaaggccaucaaccugaacggggugaacuucaacaacgucgacgcguccagccucggcgccgcccacguggggcaguccgccagccgcggccgggggcugggcgagaacccggacgacgaggagggcgacgccaagaagaagaaggacgggaagaaggcggagcccaagaacccccgcgagaacaagcugaagcagcccggcgaccgggccgacgggcagccggccggcgaccgcgccgacgggcagcccgcgggcgaccgggccgacggccagcccgccggggaccgcgccgccggccagcccgcgggggaccgggccgacggccagccggccggcgaccgcgccgccgggcagcccgcgggcgaccgggccgccgggcagcccgccggcgaccgcgccgacgggcagcccgcgggcgaccgggccgccggccagccggccggggaccgcgccgcgggccagcccgccggggaccgggccgacggccagcccgccggggaccgcgcggccggccagcccgccggcgaccgggccgacgggcagccggccggcgaccgcgcggccgggcagcccgccggcgaccgggccgccgggcagcccgcgggcgaccgcgccgacggccagcccgccggggaccgggccgccggccagccggcgggggaccgcgccgccggccagcccgccggcgaccgggcggccgggcagcccgccggcaacggggccggcgggcaggccgcgggcggcaacgccgccaacaagaaggccgaggacgccgggggcaacgccgggggccaggggcagaacaacgagggcgcgaacgcccccaacgagaaguccgugaaggaguaccucgacaagguccgcgccaccgugggcacggaguggaccccgugcagcgugaccugcggggucggcgugcgcgugcggcgccgggucaacgccgcgaacaagaagcccgaggaccugacccugaacgacaucgagacggacgugugcaccauggacaagugcgccgggaucuucaacguggucuccaacagccucggccuggugauccugcucgugcuggcccuguucaacuga

SEQ ID NO: 3647 - RNA, 1164 nt, Artificial Sequence
  derived and/or modified CDS sequence (opt1) from Pv(Ch01)__ADB92534.1__CSP
augaagaacuucauccugcucgccgugagcuccauccugcuggucgaccucuuccccacccacugcggccacaacguggaccugagcaaggccaucaaccugaacggggugggcuucaacaacgucgacgcguccagccucggggccgcccacgugggccaguccgccagccgcgggcggggccugggcgagaacccggacgacgaggagggggacgccaagaagaagaaggacggcaagaaggcggagcccaagaacccccgcgagaacaagcugaagcagcccgaggacggggccggcgaccagccgggggccaacggcgccggcaaccagcccggggcgaacggcgccgggaaccagcccggcgccaacggcgccgggaaccagcccggcgccaacggggcgggcaaccagccgggggccaacggcgccggcaaccagcccggggccaacggcgccgggaaccagcccggcgcgaacggggccggcaaccagcccggcgccaacggggccgacgaccagccgggcgccaacggggcgggcaaccagcccggggccaacggcgccggcgaccagcccggggccaacggcgccgggaaccagcccggcgcgaacggcgccggggaccagccgggcgccaacggggccggcaaccagcccggggcgaacggcgccggcaaccagcccggggccaacggcgccgggaaccagcccggcgccaacggggcgggcaaccagccgggcgccaacggggccggcgggcaggccgccggcgggaacgcggccaacaagaaggccggcgacgccggcgccgggggccaggcggccgggggcaacgccgccaacaagaaggcgggggacgccggcgccggccaggggcagaacaacgagggcgccaacgcccccaacgagaaguccgugaaggaguaccucgacaagguccgggcgaccguggggacggaguggacccccugcagcgugaccugcggcgucggcgugcgcgugcggcgccgggucaacgccgccaacaagaagcccgaggaccugacccugaacgaccucgagacggacgugugcaccauggacaagugcgccgggaucuucaacguggucuccaacagccugggccuggugauccuccuggugcuggcccucuucaacuga

SEQ ID NO: 3648 - RNA, 1164 nt, Artificial Sequence
  derived and/or modified CDS sequence (opt1) from Pv(Nr04)__ADB92542.1__CSP
augaagaacuucauccugcucgccgugagcuccauccugcuggucgaccucuuccccacccacugcggccacaacguggaccugagcaaggccaucaaccugaacggggugggcuucaacaacgucgacgcguccagccucggggccgcccacgugggccaguccgccagccgcgggcggggccugggcgagaacccggacgacgaggagggggacgccaagaagaagaaggacggcaagaaggcggagcccaagaacccccgcgagaacaagcugaagcagcccgaggacggggccggcgaccagccgggggccaacggcgccggcaaccagcccggggcgaacggcgccgggaaccagcccggcgccaacggcgccgggaaccagcccggcgccaacggggcgggcaaccagccgggggccaacggcgccggcaaccagcccggggccaacggcgccgggaaccagcccggcgcgaacggggccggcgaccagcccggcgccaacggggccgacaaccagccgggcgccaacggggcgggcaaccagcccggggccaacggcgccggcaaccagcccggggccaacggcgccgggaaccagcccggcgcgaacggcgccggggaccagccgggcgccaacggggccggcaaccagcccggggcgaacggcgccggcgaccagcccggggccaacggcgccgggaaccagcccggcgccaacggggcgggcaaccagccgggcgccaacggggccggcgggcaggccgccggcgggaacgcggccaacaagaaggccggcgacgccggcgccgggggccaggcggccgggggcaacgccgccaacaagaaggcgggggacgccggcgccggccaggggcagaacaacgagggcgccaacgcccccaacgagaaguccgugaaggaguaccucgacaagguccgggcgaccguggggacggaguggacccccugcagcgugaccugcggcgucggcgugcgcgugcggcgccgggucaacgccgccaacaagaagcccgaggaccugacccugaacgaccucgagacggacgugugcaccauggacaagugcgccgggaucuucaacguggucuccaacagccugggccuggugauccuccuggugcuggcccucuucaacuga

SEQ ID NO: 3649 - RNA, 1164 nt, Artificial Sequence
  derived and/or modified CDS sequence (opt1) from Pv(Pt03)__ADB92553.1__CSP
augaagaacuucauccugcucgccgugagcuccauccugcuggucgaccucuuccccacccacugcggccacaacguggaccugagcaaggccaucaaccugaacggggugggcuucaacaacgucgacgcguccagccucggggccgcccacgugggccaguccgccagccgcgggcggggccugggcgagaacccggacgacgaggagggggacgccaagaagaagaaggacggcaagaaggcggagcccaagaacccccgcgagaacaagcugaagcagcccgaggacggggccggcgaccagccgggggccaacggcgccggcaaccagcccggggcgaacggcgccgggaaccagcccggcgccaacggcgccgggaaccagcccggcgccaacggggcgggcgaccagccgggggccaacggcgccggcaaccagcccggggccaacggcgccggggaccagcccggcgcgaacggggccggcaaccagcccggcgccaacggggccggcaaccagccgggggccaacggcgcggggaaccagcccggcgccaacggcgccgggaaccagcccggcgccaacggggccggcaaccagcccggcgcgaacggggccggcgaccagccgggggccaacggcgccgggaaccagcccggcgcgaacggcgccgggaaccagcccggcgccaacggggccggcaaccagcccggggccaacggcgcgggcaaccagccgggggccaacggcgccgggggccaggccgccgggggcaacgcggccaacaagaaggccggcgacgccggggccggcgggcaggcggccggcgggaacgccgccaacaagaaggcgggcgacgccggcgccgggcagggccagaacaacgagggggccaacgcccccaacgagaaguccgugaaggaguaccucgacaagguccgggcgaccgugggcacggaguggacccccugcagcgugaccugcggcgucggggugcgcgugcggcgccgggucaacgccgccaacaagaagcccgaggaccugacccugaacgaccucgagacggacgugugcaccauggacaagugcgccggcaucuucaacguggucuccaacagccuggggcuggugauccuccuggugcuggcccucuucaacuga

SEQ ID NO: 3650 - RNA, 1164 nt, Artificial Sequence
  derived and/or modified CDS sequence (opt1) from Pv(Vc03)__ADB92546.1__CSP
augaagaacuucauccugcucgccgugagcuccauccugcuggucgaccucuuccccacccacugcggccacaacguggaccugagcaaggccaucaaccugaacggggugggcuucaacaacgucgacgcguccagccucggggccgcccacgugggccaguccgccagccgcgggcggggccugggcgagaacccggacgacgaggagggggacgccaagaagaagaaggacggcaagaaggcggagcccaagaacccccgcgagaacaagcugaagcagcccgaggacggggccggcgaccagccgggggccaacggcgccggcaaccagcccggggcgaacggcgccgggaaccagcccggcgccaacggcgccgggaaccagcccggcgccaacggggcgggcaaccagccgggggccaacggcgccggcaaccagcccggggccaacggcgccgggaaccagcccggcgcgaacggggccggcgaccagcccggcgccaacggggccgacgaccagccgggcgccaacggggcgggcaaccagcccggggccaacggcgccggcaaccagcccggggccaacggcgccgggaaccagcccggcgcgaacggcgccggggaccagccgggcgccaacggggccggcaaccagcccggggcgaacggcgccggcaaccagcccggggccaacggcgccgggaaccagcccggcgccaacggggcgggcaaccagccgggcgccaacggggccggcgggcaggccgccggcgggaacgcggccaacaagaaggccggcgacgccggcgccgggggccaggcggccgggggcaacgccgccaacaagaaggcgggggacgccggcgccggccaggggcagaacaacgagggcgccaacgcccccaacgagaaguccgugaaggaguaccucgacaagguccgggcgaccguggggacggaguggacccccugcagcgugaccugcggcgucggcgugcgcgugcggcgccgggucaacgccgccaacaagaagcccgaggaccugacccugaacgaccucgagacggacgugugcaccauggacaagugcgccgggaucuucaacguggucuccaacagccugggccuggugauccuccuggugcuggcccucuucaacuga

SEQ ID NO: 3651 - RNA, 1164 nt, Artificial Sequence
  derived and/or modified CDS sequence (opt1) from Pv(Vc04)__ADB92547.1__CSP
augaagaacuucauccugcucgccgugagcuccauccugcuggucgaccucuuccccacccacugcggccacaacguggaccugagcaaggccaucaaccugaacggggugggcuucaacaacgucgacgcguccagccucggggccgcccacgugggccaguccgccagccgcgggcggggccugggcgagaacccggacgacgaggagggggacgccaagaagaagaaggacggcaagaaggcggagcccaagaacccccgcgagaacaagcugaagcagcccgaggacggggccggcgaccagccgggggccaacggcgccggcaaccagcccggggcgaacggcgccgggaaccagcccggcgccaacggcgccgggaaccagcccggcgccaacggggcgggcaaccagccgggggccaacggcgccggcaaccagcccggggccaacggcgccgggaaccagcccggcgcgaacggggccgacgaccagcccggcgccaacggcgccggggaccagccgggcgccaacggggcgggcaaccagcccggggccaacggcgccggcaaccagcccggggccaacggcgccggggaccagcccggcgcgaacggcgccggggaccagccgggcgccaacggggccggcaaccagcccggggcgaacggcgccggcgaccagcccggggccaacggcgccgggaaccagcccggcgccaacggggcgggcaaccagccgggcgccaacggggccggcgggcaggccgccggcgggaacgcggccaacaagaaggccggcgacgccggcgccgggggccaggcggccgggggcaacgccgccaacaagaaggcgggggacgccggcgccggccaggggcagaacaacgagggcgccaacgcccccaacgagaaguccgugaaggaguaccucgacaagguccgggcgaccguggggacggaguggacccccugcagcgugaccugcggcgucggcgugcgcgugcggcgccgggucaacgccgccaacaagaagcccgaggaccugacccugaacgaccucgagacggacgugugcaccauggacaagugcgccgggaucuucaacguggucuccaacagccugggccuggugauccuccuggugcuggcccucuucaacuga

SEQ ID NO: 3652 - RNA, 1164 nt, Artificial Sequence
  derived and/or modified CDS sequence (opt1) from Pv(Vc05)__ADB92548.1__CSP
augaagaacuucauccugcucgccgugagcuccauccugcuggucgaccucuuccccacccacugcggccacaacguggaccugagcaaggccaucaaccugaacggggugggcuucaacaacgucgacgcguccagccucggggccgcccacgugggccaguccgccagccgcgggcggggccugggcgagaacccggacgacgaggagggggacgccaagaagaagaaggacggcaagaaggcggagcccaagaacccccgcgagaacaagcugaagcagcccgaggacggggccggcgaccagccgggggccaacggcgccggcaaccagcccggggcgaacggcgccgggaaccagcccggcgccaacggcgccgggaaccagcccggcgccaacggggcgggcaaccagccgggggccaacggcgccggcaaccagcccggggccaacggcgccgggaaccagcccggcgcgaacggggccggcgaccagcccggcgccaacggggccggcaaccagccgggggccaacggcgcggggaaccagcccggcgccaacggcgccgggaaccagcccggcgccaacggggccggcgaccagcccggcgcgaacggggccggcgaccagccgggggccaacggcgccgggaaccagcccggcgcgaacggcgccgggaaccagcccggcgccaacggggccggcaaccagcccggggccaacggcgcgggcaaccagccgggggccaacggcgccgggggccaggccgccgggggcaacgcggccaacaagaaggccggcgacgccggggccggcgggcaggcggccggcgggaacgccgccaacaagaaggcgggcgacgccggcgccgggcagggccagaacaacgagggggccaacgcccccaacgagaaguccgugaaggaguaccucgacaagguccgggcgaccgugggcacggaguggacccccugcagcgugaccugcggcgucggggugcgcgugcggcgccgggucaacgccgccaacaagaagcccgaggaccugacccugaacgaccucgagacggacgugugcaccauggacaagugcgccggcaucuucaacguggucuccaacagccuggggcuggugauccuccuggugcuggcccucuucaacuga

SEQ ID NO: 3653 - RNA, 1161 nt, Artificial Sequence
  derived and/or modified CDS sequence (opt1) from Pv(Ca03)__ADB92531.1__CSP
augaagaacuucauccugcucgcggugagcuccauccugcuggucgaccucuuccccacccacugcggccacaacguggaccugagcaaggccaucaaccugaacggggugggcuucaacaacgucgacgcguccagccucggggccgcccacgugggccaguccgccagccgcgggcggggccugggcgagaacccggacgacgaggagggggacgccaagaagaagaaggacggcaagaaggcggagcccaagaacccccgcgagaacaagcugaagcagcccgaggacggggccggcgaccagccgggggccaacggcgccggcaaccagcccggggcgaacggcgccgggaaccagcccggcgccaacggcgccgggaaccagcccggcgccaacggggcgggcaaccagccgggggccaacggcgccggcaaccagcccggggccaacggcgccgggaaccagcccggcgcgaacggggccgacgaccagcccggcgccaacggcgccgacgaccagccgggggccaacggcgcggggaaccagcccggcgccaacggggccggcaaccagcccggcgccaacggggccggcgaccagcccggggcgaacggcgccggcgaccagccgggggccaacggcgccgggaaccagcccggcgcgaacggggccggcgaccagcccggcgccaacggggccggcaaccagcccggggccaacggcgcggggaaccagccgggcgccaacggcgccgggaaccagcccggcgccaacggggccggcaaccagcccggggcgaacggcgccggcgggcaggccgccggcgggaacgccgcgaacaagaaggccggcgacgccgggggcggccaggggcagaacaacgagggcgccaacgcgcccaacgagaaguccgugaaggaguaccucgacaagguccgggccaccguggggacggaguggaccccgugcagcgugaccugcggcgucggcgugcgcgugcggcgccgggucaacgccgccaacaagaagcccgaggaccugacccugaacgaccucgagacggacgugugcaccauggacaagugcgccgggaucuucaacguggucuccaacagccugggccuggugauccuccuggugcuggcccucuucaacuga

SEQ ID NO: 3654 - RNA, 1161 nt, Artificial Sequence
  derived and/or modified CDS sequence (opt1) from Pv(Cam5)__AHL69647.1__CSP
augaagaacuucauccugcucgccgugagcuccauccugcuggucgaccucuuccccacccacugcggccacaacguggaccugagcaaggccaucaaccugaacggggugggcuucaacaacgucgacgcguccagccucggggccgcccacgugggccaguccgccagccgcgggcggggccugggcgagaacccggacgacgaggagggggacgccaagaagaagaaggacggcaagaaggcggagcccaagaacccccgcgagaacaagcugaagcagcccgaggacggggccggcaaccagccgggggccaacggcgccggcaaccagcccggggcgaacggcgccgggaaccagcccggcgccaacggcgccgggaaccagcccggcgccaacggggcgggcaaccagccgggggccaacggcgccggcaaccagcccggggccaacggcgccgggaaccagcccggcgcgaacggggccgacgaccagcccggcgccaacggcgccgggaaccagccgggcgccaacggggcgggcaaccagcccggggccaacggcgccggcaaccagcccggggccaacggcgccggggaccagcccggcgcgaacggcgccgggaaccagccgggcgccaacggggccggcgaccagcccggggcgaacggcgccggcaaccagcccggggccaacggcgccgggaaccagcccggcgccaacgaggcggggaaccagccgggcgccaacggcgccgggaaccagcccggcgccaacggggccggcaaccagcccggggcgaacggcgccggcgggcaggccgccggcgggaacgccgcgaacaagaaggccggcgacgccggggccggccagggccagaacaacgagggggcgaacgcccccaacgagaaguccgugaaggaguaccucgacaagguccgggccaccgugggcacggaguggaccccgugcagcgugaccugcggggucggcgugcgcgugcggcgccgggucaacgccgccaacaagaagcccgaggaccugacccugaacgaccucgagacggacgugugcaccauggacaagugcgcgggcaucuucaacguggucuccaacagccuggggcuggugauccuccuggugcuggcccucuucaacuga

SEQ ID NO: 3655 - RNA, 1161 nt, Artificial Sequence
  derived and/or modified CDS sequence (opt1) from Pv(Cam5)__AGN05236.2__CSP
augaagaacuucauccugcucgccgugagcuccauccugcuggucgaccucuuccccacccacugcggccacaacguggaccugagcaaggccaucaaccugaacggggugaacuucaacaacgucgacgcguccagccucggcgccgcccacguggggcaguccgccagccgcggccgggggcugggcgagaacccggacgacgaggagggcgacgccaagaagaagaaggacgggaagaaggcggagcccaagaacccccgcgagaacaagcugaagcagcccggcgaccgggccgacgggcagccggccggcgacggggccgcgggccagcccgccggcgacggggccgccggccagcccgccggggaccgcgcggccggccagcccgccggcgaccgggccgccgggcagccggcgggcgacggggccgccggccagcccgccggggacggcgccgcgggccagcccgccggggaccgcgccgccggccagcccgccggggaccgggcggccggccagccggccggggaccgcgccgacggccagcccgcgggcgaccgggccgccgggcagcccgccggcgaccgcgccgcggggcagcccgccggcgaccgggccgacgggcagccggccggcgaccgcgccgcgggccagcccgccggggaccgggccgccggccagcccgccggggaccgcgcggccggccagcccgccggcgaccgggccgacgggcagccggcgggcgaccgcgccgccgggcagcccgccggcgaccgggccgcggggcagcccgccggcgaccgcgccgccggccagcccgccgggaacggcgccgggggccaggcggccgggggcaacgccggcgggcagggccagaacaacgagggggccaacgcgccgaacgagaaguccgugaaggaguaccucgacaagguccgggccaccgugggcacggaguggacccccugcagcgugaccugcggggucggcgugcgcgugcggcgccgcgucaacgccgccaacaagaagcccgaggaccugacccugaacgaccucgagacggacgugugcaccauggacaagugcgcgggcaucuucaacguggucuccaacagccuggggcuggugauccuccuggugcuggcccucuucaacuga

SEQ ID NO: 3656 - RNA, 1161 nt, Artificial Sequence
  derived and/or modified CDS sequence (opt1) from Pv(Cam7)__AGN05238.1__CSP
augaagaacuucauccugcucgccgugagcuccauccugcuggucgaccucuuccccacccacugcggccacaacguggaccugagcaaggccaucaaccugaacggggugggcuucaacaacgucgacgcguccagccucggggccgcccacgugggccaguccgccagccgcgggcggggccugggcgagaacccggacgacgaggagggggacgccaagaagaagaaggacggcaagaaggcggagcccaagaacccccgcgagaacaagcugaagcagcccgaggacggggccggcaaccagccgggggccaacggcgccggcaaccagcccggggcgaacggcgccgggaaccagcccggcgccaacggcgccgggaaccagcccggcgccaacggggcgggcaaccagccgggggccaacggcgccggcaaccagcccggggccaacggcgccgggaaccagcccggcgcgaacggggccgacgaccagcccggcgccaacggcgccgggaaccagccgggcgccaacggggcgggcaaccagcccggggccaacggcgccggcaaccagcccggggccaacggcgccgggaaccagcccggcgcgaacggcgccggggaccagccgggcgccaacggggccggcaaccagcccggggcgaacggcgccggcgaccagcccggggccaacggcgccgggaaccagcccggcgccaacgaggcggggaaccagccgggcgccaacggcgccgggaaccagcccggcgccaacggggccggcaaccagcccggggcgaacggcgccggcgggcaggccgccggcgggaacgccgcgaacaagaaggccggcgacgccggggccggccagggccagaacaacgagggggcgaacgcccccaacgagaaguccgugaaggaguaccucgacaagguccgggccaccgugggcacggaguggaccccgugcagcgugaccugcggggucggcgugcgcgugcggcgccgggucaacgccgccaacaagaagcccgaggaccugacccugaacgaccucgagacggacgugugcaccauggacaagugcgcgggcaucuucaacguggucuccaacagccuggggcuggugauccuccuggugcuggcccucuucaacuga

SEQ ID NO: 3657 - RNA, 1161 nt, Artificial Sequence
  derived and/or modified CDS sequence (opt1) from Pv(CSP27VK247)__ANS71607.1__CSP
augaagaacuucauccugcucgcggugagcuccauccugcuggucgaccucuuccccacccacugcggccacaacguggaccugagcaaggccaucaaccugaacggggugggcuucaacaacgucgacgcguccagccucggggccgcccacgugggccaguccgccagccgcgggcggggccugggcgagaacccggacgacgaggagggggacgccaagaagaagaaggacggcaagaaggcggagcccaagaacccccgcgagaacaagcugaagcagcccgaggacggggccggcaaccagccgggggccaacggcgccggcgaccagcccggggcgaacggcgccgggaaccagcccggcgccaacggcgccgggaaccagcccggcgccaacggggcgggcaaccagccgggggccaacggcgccggcaaccagcccggggccaacggcgccgggaaccagcccggcgcgaacggggccggcgaccagcccggcgccaacggggccggcaaccagccgggggccaacggcgcggggaaccagcccggcgccaacggcgccgggaaccagcccggcgccaacggggccggcgaccagcccggcgcgaacggggccggcaaccagccgggggccaacggcgccggggaccagcccggcgcgaacggcgccgggaaccagcccggcgccaacggggccggcaaccagcccggggccaacggcgcgggcaaccagccgggggccaacggcgccgggaaccagcccggcgccaacggggccggcaaccagcccggcgcgaacggggccggcgggcaggccgccggcgggaacgccgcgaacaagaaggccggcgacgccggcgccgggcagggccagaacaacgagggggcgaacgcccccaacgagaaguccgugaaggaguaccucgacaagguccggaccacggugggcaccgaguggaccccgugcagcgugaccugcggcgucggggugcgcgugcggcgccgggucaacgccgccaacaagaagcccgaggaccugacgcugaacgaccucgagaccgacgugugcaccauggacaagugcgccggcaucuucaacguggucuccaacagccuggggcuggugauccuccuggugcuggcccucuucaacuga

SEQ ID NO: 3658 - RNA, 1161 nt, Artificial Sequence
  derived and/or modified CDS sequence (opt1) from Pv(CSP38VK247)__ANS71618.1__CSP
augaagaacuucauccugcucgccgugagcuccauccugcuggucgaccucuuccccacccacugcggccacaacguggaccugagcaaggccaucaaccugaacggggugaacuucaacaacgucgacgcguccagccucggcgccgcccacguggggcaguccgccagccgcggccgggggcugggcgagaacccggacgacgaggagggcgacgccaagaagaagaaggacgggaagaaggcggagcccaagaacccccgcgagaacaagcugaagcagcccgaggacggcgccggggaccagccgggcgccaacggggccggcaaccagcccggcgcgaacggggccggcaaccagcccggggccaacggcgccggcaaccagcccggggccaacggcgcggggaaccagccgggcgccaacggggccggcaaccagcccggcgccaacggggccggcaaccagcccggggcgaacggcgccggggaccagcccggcgccaacggcgccgggaaccagccgggcgccaacggggcgggcgaccagcccggggccaacggcgccggcaaccagcccggggccaacggcgccgggaaccagcccggcgcgaacggcgccggggaccagccgggcgccaacggggccggcaaccagcccggggcgaacggcgccggcgaccagcccggggccaacggcgccgggaaccagcccggcgccaacggggcgggcaaccagccgggcgccaacggggccggcaaccagcccggggccaacggcgccgggaaccagcccggcgcgaacggcgccgggggccaggccgccgggggcaacgccgcgaacaagaaggccggggacgccggcgccggccaggggcagaacaacgagggcgcgaacgcccccaacgagaaguccgugaaggaguaccucgacaagguccgggccaccguggggacggaguggaccccgugcagcgugaccugcggcgucggcgugcgcgugcggcgccgggucaacgccgccaacaagaagcccgaggaccugacccugaacgacaucgagacggacgugugcaccauggacaagugcgcggggaucuucaacguggucuccaacagccucggccuggugauccugcucgugcuggcccuguucaacuga

SEQ ID NO: 3659 - RNA, 1161 nt, Artificial Sequence
  derived and/or modified CDS sequence (opt1) from Pv(CSP48VK247)__ANS71628.1__CSP
augaagaacuucauccugcucgccgugagcuccauccugcuggucgaccucuuccccacccacugcggccacaacguggaccugagcaaggccaucaaccugaacggggugggcuucaacaacgucgacgcguccagccucggggccgcccacgugggccaguccgccagccgcgggcggggccugggcgagaacccggacgacgaggagggggacgccaagaagaagaaggacggcaagaaggcggagcccaagaacccccgcgagaacaagcugaagcagcccgaggacggggccggcaaccagccgggggccaacggcgccggcgaccagcccggggcgaacggcgccgggaaccagcccggcgccaacggcgccgggaaccagcccggcgccaacggggcgggcaaccagccgggggccaacggcgccggcaaccagcccggggccaacggcgccgggaaccagcccggcgcgaacggggccggcgaccagcccggcgccaacggggccggcaaccagccgggggccaacggcgcggggaaccagcccggcgccaacggcgccgggaaccagcccggcgccaacggggccggcgaccagcccggcgcgaacggggccggcaaccagccgggggccaacggcgccggggaccagcccggcgcgaacggcgccgggaaccagcccggcgccaacggggccggcaaccagcccggggccaacggcgcgggcaaccagccgggggccaacggcgccgggaaccagcccggcgccaacggggccggcaaccagcccggcgcgaacggggccggcgggcaggccgccggcgggaacgccgcgaacaagaaggccggcgacgccggcgccgggcagggccagaacaacgagggggcgaacgcccccaacgagaaguccgugaaggaguaccucgacaagguccgggccaccgugggcacggaguggaccccgugcagcgugaccugcggcgucggggugcgcgugcggcgccgggucaacgccgccaacaagaagcccgaggaccugacccugaacgaccucgagacggacgugugcaccauggacaagugcgcgggcaucuucaacguggucuccaacagccuggggcuggugauccuccuggugcuggcccucuucaacuga

SEQ ID NO: 3660 - RNA, 1161 nt, Artificial Sequence
  derived and/or modified CDS sequence (opt1) from Pv(Nr01)__ADB92539.1__CSP
augaagaacuucauccugcucgccgugagcuccauccugcuggucgaccucuuccccacccacugcggccacaacguggaccugagcaaggccaucaaccugaacggggugggcuucaacaacgucgacgcguccagccucggggccgcccacgugggccaguccgccagccgcgggcggggccugggcgagaacccggacgacgaggagggggacgccaagaagaagaaggacggcaagaaggcggagcccaagaacccccgcgagaacaagcugaagcagcccgaggacggggccggcgaccagccgggggccaacggcgccggcaaccagcccggggcgaacggcgccgggaaccagcccggcgccaacggcgccgggaaccagcccggcgccaacggggcgggcaaccagccgggggccaacggcgccggcaaccagcccggggccaacggcgccgggaaccagcccggcgcgaacggggccggcgaccagcccggcgccaacggggccgacgaccagccgggcgccaacggggcgggcaaccagcccggggccaacggcgccggcaaccagcccggggccaacggcgccggggaccagcccggcgcgaacggcgccggggaccagccgggcgccaacggggccggcaaccagcccggggcgaacggcgccggcgaccagcccggggccaacggcgccgggaaccagcccggcgccaacggggcgggcaaccagccgggcgccaacggggccggcgggcagcccggcgccaacggggccggcaaccagcccggcgcgaacggggccggcgggcaggccgccggcgggaacgccgcgaacaagaaggccggcgacgccggcgccgggcagggccagaacaacgagggggcgaacgcccccaacgagaaguccgugaaggaguaccucgacaagguccgggccaccgugggcacggaguggaccccgugcagcgugaccugcggcgucggggugcgcgugcggcgccgggucaacgccgccaacaagaagcccgaggaccugacccugaacgaccucgagacggacgugugcaccauggacaagugcgcgggcaucuucaacguggucuccaacagccuggggcuggugauccuccuggugcuggcccucuucaacuga

SEQ ID NO: 3661 - RNA, 1161 nt, Artificial Sequence
  derived and/or modified CDS sequence (opt1) from Pv(Nr02)__ADB92540.1__CSP
augaagaacuucauccugcucgccgugagcuccauccugcuggucgaccucuuccccacccacugcggccacaacguggaccugagcaaggccaucaaccugaacggggugggcuucaacaacgucgacgcguccagccucggggccgcccacgugggccaguccgccagccgcgggcggggccugggcgagaacccggacgacgaggagggggacgccaagaagaagaaggacggcaagaaggcggagcccaagaacccccgcgagaacaagcugaagcagcccgaggacggggccggcgaccagccgggggccaacggcgccggcaaccagcccggggcgaacggcgccgggaaccagcccggcgccaacggcgccgggaaccagcccggcgccaacggggcgggcaaccagccgggggccaacggcgccggcaaccagcccggggccaacggcgccgggaaccagcccggcgcgaacggggccggcgaccagcccggcgccaacggggccggcgaccagccgggggccaacggcgcggggaaccagcccggcgccaacggcgccgggaaccagcccggcgccaacggggccggcgaccagcccggcgcgaacggggccggcgaccagccgggggccaacggcgccgggaaccagcccggcgcgaacggcgccggggaccagcccggcgccaacggggccggcaaccagcccggggccaacggcgcgggcaaccagccgggggccaacggcgccgggaaccagcccggcgccaacggggccggcaagcagcccggcgcgaacggggccggcgggcaggccgccggcgggaacgccgcgaacaagaaggccggcgacgccggcgccgggcagggccagaacaacgagggggcgaacgcccccaacgagaaguccgugaaggaguaccucgacaagguccgggccaccgugggcacggaguggaccccgugcagcgugaccugcggcgucggggugcgcgugcggcgccgggucaacgccgccaacaagaagcccgaggaccugacccugaacgaccucgagacggacgugugcaccauggacaagugcgcgggcaucuucaacguggucuccaacagccuggggcuggugauccuccuggugcuggcccucuucaacuga

SEQ ID NO: 3662 - RNA, 1161 nt, Artificial Sequence
  derived and/or modified CDS sequence (opt1) from Pv(Nr05)__ADB92543.1__CSP
augaagaacuucauccugcucgccgugagcuccauccugcuggucgaccucuuccccacccacugcggccacaacguggaccugagcaaggccaucaaccugaacggggugggcuucaacaacgucgacgcguccagccucggggccgcccacgugggccaguccgccagccgcgggcggggccugggcgagaacccggacgacgaggagggggacgccaagaagaagaaggacggcaagaaggcggagcccaagaacccccgcgagaacaagcugaagcagcccgaggacggggccggcgaccagccgggggccaacggcgccggcaaccagcccggggcgaacggcgccgggaaccagcccggcgccaacggcgccgggaaccagcccggcgccaacggggcgggcaaccagccgggggccaacggcgccggcaaccagcccggggccaacggcgccgggaaccagcccggcgcgaacggggccggcaaccagcccggcgccaacggggccgacgaccagccgggcgccaacggggcgggcaaccagcccggggccaacggcgccggcaaccagcccggggccaacggcgccgggaaccagcccggcgcgaacggcgccggggaccagccgggcgccaacggggccggcaaccagcccggggcgaacggcgccggcgaccagcccggggccaacggcgccgggaaccagcccggcgccaacggggcgggcaaccagccgggcgccaacggggccggcaaccagcccggggccaacggcgccgggaaccagcccggcgcgaacggcgccgggggccaggccgccgggggcaacgccgcgaacaagaaggccggggacgccggcgccggccaggggcagaacaacgagggcgcgaacgcccccaacgagaaguccgugaaggaguaccucgacaagguccgggccaccguggggacggaguggaccccgugcagcgugaccugcggcgucggcgugcgcgugcggcgccgggucaacgccgccaacaagaagcccgaggaccugacccugaacgaccucgagacggacgugugcaccauggacaagugcgcggggaucuucaacguggucuccaacagccugggccuggugauccuccuggugcuggcccucuucaacuga

SEQ ID NO: 3663 - RNA, 1161 nt, Artificial Sequence
  derived and/or modified CDS sequence (opt1) from Pv(Vc01)__ADB92544.1__CSP
augaagaacuucauccugcucgcggugagcuccauccugcuggucgaccucuuccccacccacugcggccacaacguggaccugagcaaggccaucaaccugaacggggugggcuucaacaacgucgacgcguccagccucggggccgcccacgugggccaguccgccagccgcgggcggggccugggcgagaacccggacgacgaggagggggacgccaagaagaagaaggacggcaagaaggcggagcccaagaacccccgcgagaacaagcugaagcagcccgaggacggggccggcgaccagccgggggccaacggcgccggcaaccagcccggggcgaacggcgccgggaaccagcccggcgccaacggcgccgggaaccagcccggcgccaacggggcgggcaaccagccgggggccaacggcgccggcaaccagcccggggccaacggcgccgggaaccagcccggcgcgaacggggccggcaaccagcccggcgccaacggggccgacgaccagccgggcgccaacggggcgggcaaccagcccggggccaacggcgccggcaaccagcccggggccaacggcgccgggaaccagcccggcgcgaacggcgccggggaccagccgggcgccaacggggccggcaaccagcccggggcgaacggcgccggcgaccagcccggggccaacggcgccgggaaccagcccggcgccaacggggcgggcaaccagccgggcgccaacggggccggcaaccagcccggggccaacggcgccgggaaccagcccggcgcgaacggcgccgggggccaggccgccgggggcaacgccgcgaacaagaaggccggggacgccggcggcgggcagggccagaacaacgagggggccaacgcgcccaacgagaaguccgugaaggaguaccucgacaagguccgggccaccgugggcacggaguggaccccgugcagcgugaccugcggcgucggggugcgcgugcggcgccgggucaacgccgccaacaagaagcccgaggaccugacccugaacgaccucgagacggacgugugcaccauggacaagugcgccggcaucuucaacguggucuccaacagccuggggcuggugauccuccuggugcuggcccucuucaacuga

SEQ ID NO: 3664 - RNA, 1161 nt, Artificial Sequence
  derived and/or modified CDS sequence (opt1) from Pv(Vc02)__ADB92545.1__CSP
augaagaacuucauccugcucgccgugagcuccauccugcuggucgaccucuuccccacccacugcggccacaacguggaccugagcaaggccaucaaccugaacggggugggcuucaacaacgucgacgcguccagccucggggccgcccacgugggccaguccgccagccgcgggcggggccugggcgagaacccggacgacgaggagggggacgccaagaagaagaaggacggcaagaaggcggagcccaagaacccccgcgagaacaagcugaagcagcccgaggacggggccggcgaccagccgggggccaacggcgccggcaaccagcccggggcgaacggcgccgggaaccagcccggcgccaacggcgccgggaaccagcccggcgccaacggggcgggcaaccagccgggggccaacggcgccggcaaccagcccggggccaacggcgccgggaaccagcccggcgcgaacggggccggcgaccagcccggcgccaacggggccgacgaccagccgggcgccaacggggcgggcaaccagcccggggccaacggcgccggcaaccagcccggggccaacggcgccggggaccagcccggcgcgaacggcgccggggaccagccgggcgccaacggggccggcaaccagcccggggcgaacggcgccggcgaccagcccggggccaacggcgccgggaaccagcccggcgccaacggggcgggcaaccagccgggcgccaacggggccggcaaccagcccggggccaacggcgccgggaaccagcccggcgcgaacggcgccgggggccaggccgccgggggcaacgccgcgaacaagaaggccggggacgccggcgccggccaggggcagaacaacgagggcgcgaacgcccccaacgagaaguccgugaaggaguaccucgacaagguccgggccaccguggggacggaguggaccccgugcagcgugaccugcggcgucggcgugcgcgugcggcgccgggucaacgccgccaacaagaagcccgaggaccugacccugaacgaccucgagacggacgugugcaccauggacaagugcgcggggaucuucaacguggucuccaacagccugggccuggugauccuccuggugcuggcccucuucaacuga

SEQ ID NO: 3665 - RNA, 1158 nt, Artificial Sequence
  derived and/or modified CDS sequence (opt1) from Pv(Cam46)__AHL69652.1__CSP
augaagaacuucauccugcucgccgugagcuccauccugcuggucgaccucuuccccacccacugcggccacaacguggaccugagcaaggccaucaaccugaacggggugggcuucaacaacgucgacgcguccagccucggggccgcccacgugggccaguccgccagccgcgggcggggccugggcgagaacccggacgacgaggagggggacgccaagaagaagaaggacggcaagaaggcggagcccaagaacccccgcgagaacaagcugaagcagcccgaggacggggccggcaaccagccgggggccaacggcgccggcaaccagcccggggcgaacggcgccgggaaccagcccggcgccaacggcgccgacgaccagcccggggccaacggcgcggggaaccagccgggcgccaacggggccggcaaccagcccggcgccaacggggccggcaaccagcccggggcgaacggcgccgggaaccagcccggcgccaacggcgccgacgaccagccgggggccaacggcgcggggaaccagcccggcgccaacggggccggcaaccagcccggcgccaacggggccggcaaccagcccggggcgaacggcgccggcgaccagccgggggccaacggcgccgggaaccagcccggcgcgaacggggccggcaaccagcccggcgccaacggggccggcaaccagcccggggccaacggcgcggggaaccagccgggcgccaacggcgccgggaaccagcccggcgccaacggggccggcaaccagcccggggcgaacggcgccggcgggcaggccgccggcgggaacgccggcgggaacgcgggcggcaacgccgggggccaggggcagaacaacgagggcgccaacgcccccaacgagaaguccgugaaggaguaccucgacaagguccgggcgaccgugggcacggaguggaccccgugcagcgugaccugcggggucggcgugcgcgugcggcgccgggucaacgccgccaacaagaagcccgaggaccugacccugaacgaccucgagacggacgugugcaccauggacaagugcgccgggaucuucaacguggucuccaacagccugggccuggugauccuccuggugcuggcccucuucaacuga

SEQ ID NO: 3666 - RNA, 1143 nt, Artificial Sequence
  derived and/or modified CDS sequence (opt1) from Pv(Cam20)__AGN05250.1__CSP
augaagaacuucauccugcucgccgugagcuccauccugcuggucgaccucuuccccacccacugcggccacaacguggaccugagcaaggccaucaaccugaacggggugaacuucaacaacgucgacgcguccagccucggcgccgcccacguggggcaguccgccagccgcggccgggggcugggcgagaacccggacgacgaggagggcgacgccaagaagaagaaggacgggaagaaggcggagcccaagaacccccgcgagaacaagcugaagcagcccggcgaccgggccgacgggcagccggccggcgaccgcgccgacgggcagcccgcgggcgaccgggccgacggccagcccgccggggaccgcgccgccggccagcccgcgggggaccgggccgacggccagccggccggcgaccgcgccgccgggcagcccgcgggcgaccgggccgacgggcagcccgccggcgaccgcgccgccgggcagcccgcgggcgaccgggccgacggccagccggccggggaccgcgccgccggccagcccgcgggggaccgggccgacggccagcccgccggggaccgcgccgcgggccagcccgccggcgaccgggccgccgggcagccggccggcgaccgcgcggccgggcagcccgccggcgaccgggccgacgggcagcccgccggcgaccgcgcggccggccagcccgccggggaccgggccgccggccagccggcgggggaccgcgccgccggccagcccgccggcaacggggcgggcgggcaggccgccggcgggaacgccgccaacaagaaggcggaggacgccggcggcaacgccgggggccaggggcagaacaacgagggcgccaacgcccccaacgagaaguccgugaaggaguaccucgacaagguccgggcgaccguggggacggaguggacccccugcagcgugaccugcggcgucggcgugcgcgugcgccggcgcgucaacgccgccaacaagaagccggaggaccugacccugaacgacaucgagacggacgugugcaccauggacaagugcgccgggaucuucaacguggucuccaacagccucggccuggugauccugcucgugcuggcccuguucaacuga

SEQ ID NO: 3667 - RNA, 1143 nt, Artificial Sequence
  derived and/or modified CDS sequence (opt1) from Pv(Cam22)__AGN05252.1__CSP
augaagaacuucauccugcucgccgugagcuccauccugcuggucgaccucuuccccacccacugcggccacaacguggaccugagcaaggccaucaaccugaacggggugaacuucaacaacgucgacgcguccagccucggcgccgcccacguggggcaguccgccagccgcggccgggggcugggcgagaacccggacgacgaggagggcgacgccaagaagaagaaggacgggaagaaggcggagcccaagaacccccgcgagaacaagcugaagcagcccggcgaccgggccgacgggcagccggccggcgaccgcgccgacgggcagcccgcgggcgaccgggccgacggccagcccgccggggaccgcgccgccggccagcccgcgggggaccgggccgacggccagccggccggcgaccgcgccgccgggcagcccgcgggcgaccgggccgacgggcagcccgccggcgaccgcgccgccgggcagcccgcgggcgaccgggccgccggccagccggccggggaccgcgccgacggccagcccgcgggggaccgggccgccggccagcccgccggggaccgcgcggacggccagcccgccggcgaccgggccgccgggcagccggccggcgaccgcgcggccgggcagcccgccggcgaccgggccgacgggcagcccgccggcgaccgcgcggccggccagcccgccggggaccgggccgccggccagccggcgggggaccgcgccgccggccagcccgccggcaacggggcgggcgggcaggccgccggcgggaacgccgccaacaagaaggcggaggacgccggcggcaacgccgggggccaggggcagaacaacgagggcgccaacgcccccaacgagaaguccgugaaggaguaccucgacaagguccgggcgaccguggggacggaguggacccccugcagcgugaccugcggcgucggcgugcgcgugcgccggcgcgucaacgccgccaacaagaagccggaggaccugacccugaacgacaucgagacggacgugugcaccauggacaagugcgccgggaucuucaacguggucuccaacagccucggccuggugauccugcucgugcuggcccuguucaacuga

SEQ ID NO: 3668 - RNA, 1143 nt, Artificial Sequence
  derived and/or modified CDS sequence (opt1) from Pv(Cam36)__AHL69651.1__CSP
augaagaacuucauccugcucgccgugagcuccauccugcuggucgaccucuuccccacccacugcggccacaacguggaccugagcaaggccaucaaccugaacggggugaacuucaacaacgucgacgcguccagccucggcgccgcccacguggggcaguccgccagccgcggccgggggcugggcgagaacccggacgacgaggagggcgacgccaagaagaagaaggacgggaagaaggcggagcccaagaacccccgcgagaacaagcugaagcagcccgccggcgacggggccgccgugcagccggcgggcgacggggccgccguccagcccgccggcgacggcgccgacgggcagcccgcgggcgacggggccgccgugcagcccgccggcgacggcgccgcggggcagccggccggcgaccgggccgccgggcagcccgccggcaaccgcgcggccgggcagcccgccggcgaccgggccgacggccagcccgccggggaccgcgcggccggccagccggccggggaccgggccgcgggccagcccgccggggaccgcgccgacggccagcccgccggcgaccgggccgcggggcagcccgccggcgaccgcgccgccgggcagccggccggcgaccgggcggccgggcagcccgccggcgaccgcgccgacggccagcccgccggggaccgggcggccggccagcccgccggggaccgcgccgcgggccagccggccggcgaccgggccgccgggcaggccgcgggcgggaacgccggcgggaacgccggcggcaacgccgggggcaacgccgggggcaacgccgggggcaacgcgggcgggcagggccagaacaacgagggggccaacgcccccaacgagaaguccgugaaggaguaccucgacaagguccgcgccaccgugggcacggaguggacccccugcagcgugaccugcggggucggcgugcgggugcgccggcgcgucaacgcggccaacaagaagcccgaggaccugacccugaacgaccucgagacggacgugugcaccauggacaagugcgccggcaucuucaacguggucuccaacagccuggggcuggugauccuccuggugcuggcccucuucaacuga

SEQ ID NO: 3669 - RNA, 1137 nt, Artificial Sequence
  derived and/or modified CDS sequence (opt1) from Pv(Pt01.7)__ADB92550.1__CSP
augaagaacuucauccugcucgccgugagcuccauccugcuggucgaccucuuccccacccacugcggccacaacguggaccugagcaaggccaucaaccugaacggggugggcuucaacaacgucgacgcguccagccucggggccgcccacgugggccaguccgccagccgcgggcggggccugggcgagaacccggacgacgaggagggggacgccaagaagaagaaggacggcaagaaggcggagcccaagaacccccgcgagaacaagcugaagcagcccgaggacggggccggcgaccagccgggggccaacggcgccggcaaccagcccggggcgaacggcgccgggaaccagcccggcgccaacggcgccgggaaccagcccggcgccaacggggcgggcaaccagccgggggccaacggcgccgacgaccagcccggcgccaacggggccggcaaccagcccggggcgaacggcgccgggaaccagcccggcgccaacggcgccgggaaccagccgggcgccaacggggcgggcgaccagcccggggccaacggcgccggcaaccagcccggggccaacggcgccggggaccagcccggcgcgaacggcgccgggaaccagccgggcgccaacggggccggcaaccagcccggggcgaacggcgccggcaaccagcccggggccaacggcgccgggaaccagcccggcgccaacggggcgggcggccaggccgccgggggcaacgccgccaacaagaaggcgggggacgccggcgccgggggccaggccgccggcgggaacgcggccaacaagaaggccggcgacgccggggcgggccaggggcagaacaacgagggcgccaacgccccgaacgagaaguccgugaaggaguaccucgacaagguccgggccaccgugggcacggaguggacccccugcagcgugaccugcggggucggcgugcgcgugcggcgccgggucaacgccgcgaacaagaagcccgaggaccugacccugaacgaccucgagacggacgugugcaccauggacaagugcgccgggaucuucaacguggucuccaacagccugggccuggugauccuccuggugcuggcccucuucaacuga

SEQ ID NO: 3670 - RNA, 1134 nt, Artificial Sequence
  derived and/or modified CDS sequence (opt1) from Pv(Cam39)__AGN05267.1__CSP
augaagaacuucauccugcucgccgugagcuccauccugcuggucgaccucuuccccacccacugcggccacaacguggaccugagcaaggccaucaaccugaacggggugggcuucaacaacgucgacgcguccagccucggggccgcccacgugggccaguccgccagccgcgggcggggccugggcgagaacccggacgacgaggagggggacgccaagaagaagaaggacggcaagaaggcggagcccaagaacccccgcgagaacaagcugaagcagcccgccggggaccgggccgacggccagccggccggggaccgcgcggacggccagcccgccggcgaccgggccgacgggcagcccgccggcgaccgcgccgcggggcagcccgccggcgaccgggccgacggccagccggccggggaccgcgccgcgggccagcccgccggggaccgggccgacggccagcccgccggggaccgcgccgcgggccagcccgccggcgaccgggccgacgggcagccggccggcgaccgcgccgcggggcagcccgccggcgaccgggccgccgggcagcccgcgggcgaccgcgccgccggccagcccgccggggaccgggccgacggccagccggcgggggaccgcgccgccggccagcccgccggggaccgggccgacggccagcccgcgggcgaccgcgccgccgggcagcccgccggcgaccgggccgcggggcagccggccggcgaccgcgccgccggccagcccgcggggaacggcgccgggggccaggccgccgggggcaacgccggcgggaacgcgggcgggaacgccggcgggcagggccagaacaacgagggcgccaacgcccccaacgagaaguccgugaaggaguaccucgacaagguccgggccaccguggggacggaguggacccccugcagcgugaccugcggcgucggggugcgcgugcgccggcgcgucaacgcggccaacaagaagccggaggaccugacccugaacgaccucgagacggacgugugcaccauggacaagugcgccggcaucuucaacguggucuccaacagccuggggcuggugauccuccuggugcuggcccucuucaacuga

SEQ ID NO: 3671 - RNA, 1134 nt, Artificial Sequence
  derived and/or modified CDS sequence (opt1) from Pv(Nr03)__ADB92541.1__CSP
augaagaacuucauccugcucgcggugagcuccauccugcuggucgaccucuuccccacccacugcggccacaacguggaccugagcaaggccaucaaccugaacggggugaacuucaacaacgucgacgcguccagccucggcgccgcccacguggggcaguccgccagccgcggccgggggcugggcgagaacccggacgacgaggagggcgacgccaagaagaagaaggacgggaagaaggcggagcccaagaacccccgcgagaacaagcugaagcagcccggcgaccgggccgacgggcagccggccggcgaccgcgccgacgggcagcccgcgggcgaccgggccgacggccagcccgccggggaccgcgccgacggccagcccgccggggaccgggcggacggccagccggccggcgaccgcgccgacgggcagcccgccggcgaccgggccgacgggcagcccgcgggcgaccgcgccgacgggcagcccgccggcgaccgggccgacggccagccggccggggaccgcgcggacggccagcccgccggggaccgggccgacggccagcccgccggggaccgcgccgacggccagcccgcgggcgaccgggccgacgggcagccggccggcgaccgcgccgacgggcagcccgcgggcgaccgggccgacgggcagcccgccggcgaccgcgccgacggccagcccgccggggaccgggcggccggccagccggccggggaccgcgccgccggccagcccgcgggcgaccgggccgccgggcagcccgccggcaacggggccggcgggcaggcggccggcggcaacgccgggggccaggggcagaacaacgagggcgccaacgcgcccaacgagaaguccgugaaggaguaccucgacaagguccgcgccaccguggggacggaguggaccccgugcagcgugaccugcggcgucggcgugcgcgugcggcgccgggucaacgccgccaacaagaagcccgaggaccugacccugaacgaccucgagacggacgugugcaccauggacaagugcgccgggaucuucaacguggucuccaacagccugggccuggugauccuccuggugcuggcccucuucaacuga

SEQ ID NO: 3672 - RNA, 1134 nt, Artificial Sequence
  derived and/or modified CDS sequence (opt1) from Pv(Pt04.1)__ADB92554.1__CSP
augaagaacuucauccugcucgccgugagcuccauccugcuggucgaccucuuccccacccacugcggccacaacguggaccugagcaaggccaucaaccugaacggggugaacuucaacaacgucgacgcguccagccucggcgccgcccacguggggcaguccgccagccgcggccgggggcugggcgagaacccggacgacgaggagggcgacgccaagaagaagaaggacgggaagaaggcggagcccaagaacccccgcgagaacaagcugaagcagcccggcgaccgggccgacgggcagccggccggcgaccgcgccgacgggcagcccgcgggcgaccgggccgacggccagcccgccggggaccgcgccgccggccagcccgcgggggaccgggccgccggccagccggccggcgaccgcgccgacgggcagcccgcgggcgaccgggccgacgggcagcccgccggcgaccgcgccgacgggcagcccgccggcgaccgggcggacggccagccggccggggaccgcgccgccggccagcccgccggggaccgggcggccggccagcccgccggggaccgcgccgacggccagcccgcgggcgaccgggccgccgggcagccggccggcgaccgcgccgacgggcagcccgcgggcgaccgggccgccgggcagcccgccggcgaccgcgccgacggccagcccgcgggggaccgggccgccggccagccggccggggaccgcgccgcgggccagcccgccggcgaccgggccgccgggcaggcggccggcgaccgcgccgccgggcaggccgcgggcgggaacgccggcggccaggggcagaacaacgagggcgccaacgcccccaacgagaaguccgugaaggaguaccucgacaagguccgcgccaccguggggacggaguggacccccugcagcgugaccugcggcgucggggugcgggugcgccggcgcgucaacgcggccaacaagaagccggaggaccugacccugaacgaccucgagacggacgugugcaccauggacaagugcgccggcaucuucaacguggucuccaacagccugggccuggugauccuccuggugcuggcccucuucaacuga

SEQ ID NO: 3673 - RNA, 1134 nt, Artificial Sequence; identical to SEQ ID NO: 3638
  derived and/or modified CDS sequence (opt1) from Pv(Sal1)__ADB92528.1__CSP

SEQ ID NO: 3674 - RNA, 1131 nt, Artificial Sequence
  derived and/or modified CDS sequence (opt1) from Pv(Cam27)__AGN05255.1__CSP
augaagaacuucauccugcucgccgugagcuccauccugcuggucgaccucuuccccacccacugcggccacaacguggaccugagcaaggccaucaaccugaacggggugggcuucaacaacgucgacgcguccagccucggggccgcccacgugggccaguccgccagccgcgggcggggccugggcgagaacccggacgacgaggagggggacgccaagaagaagaaggacggcaagaaggcggagcccaagaacccccgcgagaacaagcugaagcagcccgccggggcccgggccgacggccagccggcgggggaccgcgccgacggccagcccgccggcgaccgggccgacgggcagcccgccggcgaccgcgcggccgggcagcccgccggcgaccgggccgacggccagccggccggggaccgcgcggccggccagcccgccggggaccgggccgacggccagcccgccggggaccgcgcggccggccagcccgccggcgaccgggccgacgggcagccggccggcgaccgcgcggccgggcagcccgccggcgaccgggccgcggggcagcccgccggcgaccgcgccgacggccagcccgccggggaccgggccgcgggccagccggccggggaccgcgccgacggccagcccgccggggaccgggccgcgggccagcccgccggcgaccgcgccgccgggcagcccgccggcgaccgggcggccgggcagccggccggcaacggcgccgggggccaggcggccgggggcaacgccgggggcaacgccggcgggaacgccggcgggaacgcgggcgggaacgccggcggccaggggcagaacaacgagggcgccaacgcccccaacgagaaguccgugaaggaguaccucgacaagguccgcgccaccguggggacggaguggacccccugcagcgugaccugcggcgucggggugcgggugcgccgccgggucaacgcggccaacaagaagcccgaggaccugacccugaacgaccucgagacggacgugugcaccauggacaagugcgccggcaucuucaacguggucuccaacagccugggccuggugauccuccuggugcuggcccucuucaacuga

SEQ ID NO: 3675 - RNA, 1131 nt, Artificial Sequence
  derived and/or modified CDS sequence (opt1) from Pv(Cam46)__AGN05273.2__CSP
augaagaacuucauccugcucgccgugagcuccauccugcuggucgaccucuuccccacccacugcggccacaacguggaccugagcaaggccaucaaccugaacggggugaacuucaacaacgucgacgcguccagccucggcgccgcccacguggggcaguccgccagccgcggccgggggcugggcgagaacccggacgacgaggagggcgacgccaagaagaagaaggacgggaagaaggcggagcccaagaacccccgcgagaacaagcugaagcagcccgccggcgaccgggccgacgggcagccggccggcgaccgcgcggacgggcagcccgccggcgaccgggccgacggccagcccgccggggaccgcgccgcgggccagcccgccggggaccgggccgacggccagccggccggcgaccgcgccgcggggcagcccgccggcgaccgggccgacgggcagcccgccggcgaccgcgccgcggggcagcccgccggcgaccgggccgacggccagccggccggggaccgcgccgcgggccagcccgccggggaccgggccgccggccagcccgcgggggaccgcgccgacggccagcccgccggcgaccgggccgccgggcagccggcgggcgaccgcgccgacgggcagcccgccggcgaccgggccgccgggcagcccgcgggcgaccgcgccgccggccagcccgccggggaccgggccgcgggccagccggccgggaacggcgccggcgggcaggccgcgggcgggaacgccggcgggaacgccggcggcaacgccgggggcaacgccgggggcaacgccgggggccagggccagaacaacgagggggcgaacgcccccaacgagaaguccgugaaggaguaccucgacaagguccgcgccaccgugggcacggaguggacccccugcagcgugaccugcggggucggcgugcgggugcgccgccgggucaacgccgcgaacaagaagcccgaggaccugacccugaacgaccucgagacggacgugugcaccauggacaagugcgccgggaucuucaacguggucuccaacagccugggccuggugauccuccuggugcuggcccucuucaacuga

SEQ ID NO: 3676 - RNA, 1128 nt, Artificial Sequence
  derived and/or modified CDS sequence (opt1) from Pv(CSP10VK210)__ANS71590.1__CSP
augaagaacuucauccugcucgccgugagcuccauccugcuggucgaccucuuccccacccacugcggccacaacguggaccugagcaaggccaucaaccugaacggggugaacuucaacaacgucgacgcguccagccucggcgccgcccacguggggcaguccgccagccgcggccgggggcugggcgagaacccggacgacgaggagggcgacgccaagaagaagaaggacgggaagaaggcggagcccaagaacccccgcgagaacaagcugaagcagcccggcgaccgggccgacgggcagccggccggcgaccgcgccgacgggcagcccgcgggcgaccgggccgacggccagcccgccggggaccgcgccgacggccagcccgccggggaccgggcggccggccagccggccggcgaccgcgccgccgggcagcccgcgggcgaccgggccgacgggcagcccgccggcgaccgcgccgccgggcagcccgcgggcgaccgggccgacggccagccggccggggaccgcgccgccggccagcccgcgggggaccgggccgccggccagcccgccggggaccgcgcggccggccagcccgccggcgaccgggccgacgggcagccggccggcgaccgcgcggccgggcagcccgccggcgaccgggccgccgggcagcccgcgggcgaccgcgccgccggccagcccgccggggaccgggccgcgggccagccggccgggaacggcgccggcgggcaggccgcgggcgggaacgccgccaacaagaaggccgaggacgccggcgggaacgcgggcggcaacgccgggggccaggggcagaacaacgagggcgccaacgcccccaacgagaaguccgugaaggaguaccucgacaagguccgcgccaccguggggacggaguggacccccugcagcgugaccugcggcgucggcgugcgggugcgccgccgggucaacgcggccaacaagaagcccgaggaccugacccugaacgaccucgagacggacgugugcaccauggacaagugcgccgggaucuucaacguggucuccaacagccugggccuggugauccuccuggugcuggcccucuucaacuga

SEQ ID NO: 3677 - RNA, 1122 nt, Artificial Sequence
  derived and/or modified CDS sequence (opt1) from Pv(Cam19)__AGN05249.1__CSP
augaagaacuucauccugcucgcggugagcuccauccugcuggucgaccucuuccccacccacugcggccacaacguggaccugagcaaggccaucaaccugaacggggugggcuucaacaacgucgacgcguccagccucggggccgcccacgugggccaguccgccagccgcgggcggggccugggcgagaacccggacgacgaggagggggacgccaagaagaagaaggacggcaagaaggcggagcccaagaacccccgcgagaacaagcugaagcagcccgccggggaccgggccgacggccagccggccggggaccgcgcggacggccagcccgccggcgaccgggccgacgggcagcccgccggcgaccgcgccgacgggcagcccgcgggcgaccgggccgacggccagccggccggggaccgcgccgccggccagcccgcgggggaccgggccgacggccagcccgccggggaccgcgccgccggccagcccgcgggcgaccgggccgacgggcagccggccggcgaccgcgccgacgggcagcccgccggcgaccgggcggccgggcagcccgccggcgaccgcgccgacggccagcccgcgggggaccgggccgccggccagccggccggggaccgcgccgacggccagcccgcgggggaccgggccgccggccagcccgccggcgaccgcgccgcggggcagcccgccggcgaccgggccgccgggcagccggccggcaacggcgccgggggccaggcggccgggggcaacgccgggggcaacgcgggcgggaacgccggcgggaacgccggcgccgggcagggccagaacaacgagggcgccaacgcgcccaacgagaaguccgugaaggaguaccucgacaagguccgcgccaccguggggacggaguggacccccugcagcgugaccugcggcgucggggugcgggugcgccgccgggucaacgccgccaacaagaagcccgaggaccugacccugaacgaccucgagacggacgugugcaccauggacaagugcgccggcaucuucaacguggucuccaacagccuggggcuggugauccuccuggugcuggcccucuucaacuga

SEQ ID NO: 3678 - RNA, 1119 nt, Artificial Sequence
  derived and/or modified CDS sequence (opt1) from Pv(Cam10)__AGN05241.2__CSP
augaagaacuucauccugcucgccgugagcuccauccugcuggucgaccucuuccccacccacugcggccacaacguggaccugagcaaggccaucaaccugaacggggugggcuucaacaacgucgacgcguccagccucggggccgcccacgugggccaguccgccagccgcgggcggggccugggcgagaacccggacgacgaggagggggacgccaagaagaagaaggacggcaagaaggcggagcccaagaacccccgcgagaacaagcugaagcagcccgccggggaccgggccgacggccagccggccggggaccgcgcggacggccagcccgccggcgaccgggccgacgggcagcccgccggcgaccgcgccgcggggcagcccgccggcgaccgggccgacggccagccggccggggaccgcgccgcgggccagcccgccggggaccgggccgacggccagcccgccggggaccgcgccgcgggccagcccgccggcgaccgggccgacgggcagccggccggcgaccgcgccgcggggcagcccgccggcgaccgggccgccgggcagcccgcgggcgaccgcgccgacggccagcccgccggggaccgggccgccggccagccggcgggggaccgcgccgacggccagcccgccggggaccgggccgccggccagcccgcgggcgaccgcgccgccgggcagcccgccggcgaccgggccgcggggcagccggccggcaacggcgccgggggccaggccgcgggcgggaacgccgggggcaacgccggcgggaacgccggcgggaacgccggcgggcagggccagaacaacgagggcgcgaacgcccccaacgagaaguccgugaaggaguaccucgacaagguccgcgccaccguggggacggaguggacccccugcagcgugaccugcggcgucggggugcgggugcgccgccgggucaacgccgccaacaagaagcccgaggaccugacccugaacgaccucgagacggacgugugcaccauggacaagugcgcgggcaucuucaacguggucuccaacagccuggggcuggugauccuccuggugcuggcccucuucaacuga

SEQ ID NO: 3679 - RNA, 1119 nt, Artificial Sequence
  derived and/or modified CDS sequence (opt1) from Pv(Cam3)__AGN05234.2__CSP
augaagaacuucauccugcucgccgugagcuccauccugcuggucgaccucuuccccacccacugcggccacaacguggaccugagcaaggccaucaaccugaacggggugaacuucaacaacgucgacgcguccagccucggcgccgcccacguggggcaguccgccagccgcggccgggggcugggcgagaacccggacgacgaggagggcgacgccaagaagaagaaggacgggaagaaggcggagcccaagaacccccgcgagaacaagcugaagcagcccgccggcgaccgggccgacgggcagccggccggcgaccgcgcggacgggcagcccgccggcgaccgggccgacggccagcccgccggggaccgcgccgcgggccagcccgccggggaccgggccgacggccagccggccggcgaccgcgccgcggggcagcccgccggcgaccgggccgacgggcagcccgccggcgaccgcgccgcggggcagcccgccggcgaccgggccgacggccagccggccggggaccgcgccgcgggccagcccgccggggaccgggccgccggccagcccgcgggggaccgcgccgacggccagcccgccggcgaccgggccgccgggcagccggcgggcgaccgcgccgacgggcagcccgccggcgaccgggccgccgggcagcccgcgggcgaccgcgccgccggccagcccgccggggaccgggccgcgggccagccggccgggaacggcgccggcgggcaggccgcgggcgggaacgccggcgggaacgccggcggcaacgccgggggcaacgccgggggccaggggcagaacaacgagggcgcgaacgcccccaacgagaaguccgugaaggaguaccucgacaagguccgcgccaccgugggcacggaguggacccccugcagcgugaccugcggggucggcgugcgggugcgccgccgggucaacgccgccaacaagaagcccgaggaccugacccugaacgaccucgagacggacgugugcaccauggacaagugcgcggggaucuucaacguggucuccaacagccugggccuggugauccuccuggugcuggcccucuucaacuga

SEQ ID NO: 3680 - RNA, 1119 nt, Artificial Sequence
  derived and/or modified CDS sequence (opt1) from Pv(Cam30)__AGN05258.1__CSP
augaagaacuucauccugcucgccgugagcuccauccugcuggucgaccucuuccccacccacugcggccacaacguggaccugagcaaggccaucaaccugaacggggugaacuucaacaacgucgacgcguccagccucggcgccgcccacguggggcaguccgccagccgcggccgggggcugggcgagaacccggacgacgaggagggcgacgccaagaagaagaaggacgggaagaaggcggagcccaagaacccccgcgagaacaagcugaagcagcccgccggcgacggggccgccgugcagccggcgggcgacggggccgccguccagcccgccggcgacggcgccgacgggcagcccgcgggcgacggggccgccggccagcccgccggcgaccgggccgacgggcagccggcgggcgaccgcgccgccgggcagcccgccggcgaccgggccgacgggcagcccgcgggcgaccgcgccgccggccagcccgccggggaccgggccgacggccagccggcgggggaccgcgccgccggccagcccgccggggaccgggcggccggccagcccgccggcgaccgcgccgacgggcagcccgccggcgaccgggcggccgggcagccggccggcgaccgcgccgacgggcagcccgccggcgaccgggcggccggccagcccgccggggaccgcgccgccggccagcccgcgggggaccgggccgccggccagccggccggcaacggggcgggcgggcaggccgccggcgggaacgccggcggcaacgccgggggcaacgcgggcgggaacgccgggggccagggccagaacaacgagggggccaacgcccccaacgagaaguccgugaaggaguaccucgacaaggugcgcgccaccgucggcacggaguggacccccugcagcgugaccugcggggugggcguccgggugcgccggcgcgugaacgcggccaacaagaagcccgaggaccugacccugaacgaccucgagacggacgucugcaccauggacaagugcgccgggaucuucaacgugguguccaacagccugggccuggucauccuccuggugcuggcccucuucaacuga

SEQ ID NO: 3681 - RNA, 1119 nt, Artificial Sequence
  derived and/or modified CDS sequence (opt1) from Pv(Cam43)__AGN05271.1__CSP
augaagaacuucauccugcucgccgugagcuccauccugcuggucgaccucuuccccacccacugcggccacaacguggaccugagcaaggccaucaaccugaacggggugggcuucaacaacgucgacgcguccagccucggggccgcccacgugggccaguccgccagccgcgggcggggccugggcgagaacccggacgacgaggagggggacgccaagaagaagaaggacggcaagaaggcggagcccaagaacccccgcgagaacaagcugaagcagcccgccggggaccgggccgacggccagccggccggggaccgcgcggacggccagcccgccggcgaccgggccgacgggcagcccgccggcgaccgcgccgacgggcagcccgcgggcgaccgggccgacggccagccggccggggaccgcgccgccggccagcccgcgggggaccgggccgacggccagcccgccggggaccgcgccgccggccagcccgcgggcgaccgggccgacgggcagccggccggcgaccgcgccgacgggcagcccgccggcgaccgggcggccgggcagcccgccggcgaccgcgccgacggccagcccgcgggggaccgggccgccggccagccggccggggaccgcgccgacggccagcccgcgggggaccgggccgccggccagcccgccggcgaccgcgccgcggggcagcccgccggcaacggggccggcggccaggccgccgggggcaacgcgggcgggaacgccgggggcaacgccggcgggaacgccggcgggaacgcgggcgggaacgccggcgccggccaggggcagaacaacgagggcgccaacgccccgaacgagaaguccgugaaggaguaccucgacaagguccgggcgaccguggggacggaguggacccccugcagcgugaccugcggcgucggggugcgcgugcggcgccgcgucaacgccgccaacaagaagcccgaggaccugacccugaacgaccucgagacggacgugugcaccauggacaagugcgccggcaucuucaacguggucuccaacagccugggccuggugauccuccuggugcuggcccucuucaacuga

SEQ ID NO: 3682 - RNA, 1116 nt, Artificial Sequence
  derived and/or modified CDS sequence (opt1) from Pv(Cam40)__AGN05268.1__CSP
augaagaacuucauccugcucgccgugagcuccauccugcuggucgaccucuuccccacccacugcggccacaacguggaccugagcaaggccaucaaccugaacggggugggcuucaacaacgucgacgcguccagccucggggccgcccacgugggccaguccgccagccgcgggcggggccugggcgagaacccggacgacgaggagggggacgccaagaagaagaaggacggcaagaagaccgagcccaagaacccccgcgagaacaagcugaagcagcccggggaccgggcggacggccagccggccggggaccgcgccgacggccagcccgccggcgaccgggcggccgggcagcccgccggcgaccgcgccgacgggcagcccgccggcgaccgggcggacggccagccggccggggaccgcgccgccggccagcccgccggggaccgggcggacggccagcccgccggggaccgcgccgccggccagcccgccggcgaccgggcggacgggcagccggccggcgaccgcgccgccgggcagcccgccggcgaccgggcggccgggcagcccgccggcgaccgcgccgacggccagcccgcgggggaccgggccgccggccagccggccggggaccgcgccgacggccagcccgcgggggaccgggccgccggccagcccgccggcgaccgcgccgcggggcagcccgccggcgaccgggccgccgggcagccggccggcaacggcgccgggggccaggcggccgggggcaacgccgggggcaacgcgggcgggaacgccggcgggaacgccggcgggcagggccagaacaacgagggcgccaacgcccccaacgagaaguccgugaaggaguaccucgacaagguccgcgcgacgguggggaccgaguggacccccugcagcgugaccugcggcgucggggugcgggugcgccgccgggucaacgccgccaacaagaagcccgaggaccugacgcugaacgaccucgagaccgacgugugcaccauggacaagugcgccggcaucuucaacguggucuccaacagccuggggcuggugauccuccuggugcuggcccucuucaacuga

SEQ ID NO: 3683 - RNA, 1116 nt, Artificial Sequence
  derived and/or modified CDS sequence (opt1) from Pv(CSP14VK210)__ANS71594.1__CSP
augaagaacuucauccugcucgccgugagcuccauccugcuggucgaccucuuccccacccacugcggccacaacguggaccugagcaaggccaucaaccugaacggggugaacuucaacaacgucgacgcguccagccucggcgccgcccacguggggcaguccgccagccgcggccgggggcugggcgagaacccggacgacgaggagggcgacgccaagaagaagaaggacgggaagaaggcggagcccaagaacccccgcgagaacaagcugaagcagcccggcgaccgggccgacgggcagccggccggcgaccgcgccgacgggcagcccgcgggcgaccgggccgccggccagcccgccggggaccgcgccgacggccagcccgcgggggaccgggccgccggccagccggccggcgaccgcgccgacgggcagcccgcgggcgaccgggccgccgggcagcccgccggcgaccgcgccgacgggcagcccgcgggcgaccgggccgccggccagccggccggggaccgcgccgacggccagcccgcgggggaccgggccgccggccagcccgccggggaccgcgcggccggccagcccgccggcgaccgggccgacgggcagccggccggcgaccgcgcggacgggcagcccgccggcgaccgggccgccgggcagcccgccggcgaccgcgcggccggccagcccgccggggaccgggccgccggccagccggcggggaacggcgccggcgggcaggccgccggcgggaacgcggccaacaagaaggccgaggacgccggcgggaacgccggcggccaggggcagaacaacgagggcgcgaacgcccccaacgagaaguccgugaaggaguaccucgacaagguccgcgccaccguggggacggaguggacccccugcagcgugaccugcggcgucggggugcgggugcgccgccgggucaacgccgccaacaagaagcccgaggaccugacccugaacgacaucgagacggacgugugcaccauggacaagugcgcgggcaucuucaacguggucuccaacagccucggccuggugauccugcucgugcuggcccuguucaacuga

SEQ ID NO: 3684 - RNA, 1116 nt, Artificial Sequence
  derived and/or modified CDS sequence (opt1) from Pv(CSP22VK210)__ANS71602.1__CSP
augaagaacuucauccugcucgccgugagcuccauccugcuggucgaccucuuccccacccacugcggccacaacguggaccugagcaaggccaucaaccugaacggggugaacuucaacaacgucgacgcguccagccucggcgccgcccacguggggcaguccgccagccgcggccgggggcugggcgagaacccggacgacgaggagggcgacgccaagaagaagaaggacgggaagaaggcggagcccaagaacccccgcgagaacaagcugaagcagcccggcgaccgggccgacgggcagccggccggcgaccgcgccgacgggcagcccgcgggcgaccgggccgacggccagcccgccggggaccgcgccgccggccagcccgcgggggaccgggccgacggccagccggccggcgaccgcgccgccgggcagcccgcgggcgaccgggccgacgggcagcccgccggcgaccgcgccgccgggcagcccgcgggcgaccgggccgccggccagccggccggggaccgcgccgacggccagcccgcgggggaccgggccgccggccagcccgccggggaccgcgcggccggccagcccgccggcgaccgggccgacgggcagccggccggcgaccgcgcggccgggcagcccgccggcgaccgggccgccgggcagcccgcgggcgaccgcgccgccggccagcccgccggggaccgggccgcgggccagccggccgggaacggcgccggcgggcaggccgcgggcgggaacgccgccaacaagaaggccgaggacgccggcgggaacgcgggcggccaggggcagaacaacgagggcgccaacgcccccaacgagaaguccgugaaggaguaccucgacaagguccgcgccaccguggggacggaguggacccccugcagcgugaccugcggcgucggggugcgggugcgccgccgggucaacgccgcgaacaagaagcccgaggaccugacccugaacgacaucgagacggacgugugcaccauggacaagugcgccggcaucuucaacguggucuccaacagccucggccuggugauccugcucgugcuggcccuguucaacuga

SEQ ID NO: 3685 - RNA, 1116 nt, Artificial Sequence
  derived and/or modified CDS sequence (opt1) from Pv(CSP28VK210)__ANS71608.1__CSP
augaagaacuucauccugcucgccgugagcuccauccugcuggucgaccucuuccccacccacugcggccacaacguggaccugagcaaggccaucaaccugaacggggugaacuucaacaacgucgacgcguccagccucggcgccgcccacguggggcaguccgccagccgcggccgggggcugggcgagaacccggacgacgaggagggcgacgccaagaagaagaaggacgggaagaaggcggagcccaagaacccccgcgagaacaagcugaagcagcccggcgaccgggccgacgggcagccggccggcgaccgcgccgacgggcagcccgcgggcgaccgggccgacggccagcccgccggggaccgcgccgccggccagcccgcgggggaccgggccgacggccagccggccggcgaccgcgccgccgggcagcccgcgggcgaccgggccgacgggcagcccgccggcgaccgcgccgccgggcagcccgcgggcgaccgggccgacggccagccggccggggaccgcgccgccggccagcccgcgggggaccgggccgacggccagcccgccggggaccgcgccgcgggccagcccgccggcgaccgggccgccgggcagccggccggcgaccgcgcggacgggcagcccgccggcgaccgggccgccgggcagcccgccggcgaccgcgcggccggccagcccgccggggaccgggccgccggccagccggcggggaacggcgccggcgggcaggccgccggcgggaacgcggccaacaagaaggccgaggacgccggcgggaacgccggcggccaggggcagaacaacgagggcgcgaacgcccccaacgagaaguccgugaaggaguaccucgacaagguccgcgccaccguggggacggaguggacccccugcagcgugaccugcggcgucggggugcgggugcgccgccgggucaacgccgccaacaagaagcccgaggaccugacccugaacgacaucgagacggacgugugcaccauggacaagugcgcgggcaucuucaacguggucuccaacagccucggccuggugauccugcucgugcuggcccuguucaacuga

SEQ ID NO: 3686 - RNA, 1116 nt, Artificial Sequence
  derived and/or modified CDS sequence (opt1) from Pv(CSP31VK210)__ANS71611.1__CSP
augaagaacuucauccugcucgccgugagcuccauccugcuggucgaccucuuccccacccacugcggccacaacguggaccugagcaaggccaucaaccugaacggggugaacuucaacaacgucgacgcguccagccucggcgccgcccacguggggcaguccgccagccgcggccgggggcugggcgagaacccggacgacgaggagggcgacgccaagaagaagaaggacgggaagaaggcggagcccaagaacccccgcgagaacaagcugaagcagcccggcgaccgggccgacgggcagccggccggcgaccgcgccgacgggcagcccgcgggcgaccgggccgccggccagcccgccggggaccgcgccgacggccagcccgcgggggaccgggccgccggccagccggccggcgaccgcgccgacgggcagcccgcgggcgaccgggccgccgggcagcccgccggcgaccgcgccgacgggcagcccgcgggcgaccgggccgacggccagccggccggggaccgcgccgccggccagcccgcgggggaccgggccgccggccagcccgccggggaccgcgcggccggccagcccgccggcgaccgggccgacgggcagccggccggcgaccgcgcggccgggcagcccgccggcgaccgggccgccgggcagcccgcgggcgaccgcgccgccggccagcccgccggggaccgggccgcgggccagccggccgggaacggcgccggcgggcaggccgcgggcgggaacgccgccaacaagaaggccgaggacgccggcgggaacgcgggcggccaggggcagaacaacgagggcgccaacgcccccaacgagaaguccgugaaggaguaccucgacaagguccgcgccaccguggggacggaguggacccccugcagcgugaccugcggcgucggggugcgggugcgccgccgggucaacgccgcgaacaagaagcccgaggaccugacccugaacgacaucgagacggacgugugcaccauggacaagugcgccggcaucuucaacguggucuccaacagccucggccuggugauccugcucgugcuggcccuguucaacuga

SEQ ID NO: 3687 - RNA, 1116 nt, Artificial Sequence
  derived and/or modified CDS sequence (opt1) from Pv(CSP37VK210)__ANS71617.1__CSP
augaagaacuucauccugcucgccgugagcuccauccugcuggucgaccucuuccccacccacugcggccacaacguggaccugagcaaggccaucaaccugaacggggugaacuucaacaacgucgacgcguccagccucggcgccgcccacguggggcaguccgccagccgcggccgggggcugggcgagaacccggacgacgaggagggcgacgccaagaagaagaaggacgggaagaaggcggagcccaagaacccccgcgagaacaagcugaagcagcccggcgaccgggccgacgggcagccggccggcgaccgcgccgacgggcagcccgcgggcgaccgggccgacggccagcccgccggggaccgcgccgccggccagcccgcgggggaccgggccgccggccagccggccggcgaccgcgccgcggggcagcccgccggcgaccgggccgacgggcagcccgccggcgaccgcgccgcggggcagcccgccggcgaccgggccgacggccagccggccggggaccgcgccgcgggccagcccgccggggaccgggccgacggccagcccgccggggaccgcgcggccggccagcccgccggcgaccgggccgccgggcagccggcgggcgaccgcgccgacgggcagcccgccggcgaccgggccgccgggcagcccgcgggcgaccgcgccgccggccagcccgccggggaccgggccgcgggccagccggccgggaacggcgccggcgggcaggccgcgggcgggaacgccgccaacaagaaggccgaggacgccggcgggaacgcgggcggccaggggcagaacaacgagggcgccaacgcccccaacgagaaguccgugaaggaguaccucgacaagguccgcgccaccguggggacggaguggacccccugcagcgugaccugcggcgucggggugcgggugcgccgccgggucaacgccgcgaacaagaagcccgaggaccugacccugaacgacaucgagacggacgugugcaccauggacaagugcgccggcaucuucaacguggucuccaacagccucggccuggugauccugcucgugcuggcccuguucaacuga

SEQ ID NO: 3688 - RNA, 1116 nt, Artificial Sequence
  derived and/or modified CDS sequence (opt1) from Pv(CSP50VK210)__ANS71630.1__CSP
augaagaacuucauccugcucgccgugagcuccauccugcuggucgaccucuuccccacccacugcggccacaacguggaccugagcaaggccaucaaccugaacggggugaacuucaacaacgucgacgcguccagccucggcgccgcccacguggggcaguccgccagccgcggccgggggcugggcgagaacccggacgacgaggagggcgacgccaagaagaagaaggacgggaagaaggcggagcccaagaacccccgcgagaacaagcugaagcagcccggcgaccgggccgacgggcagccggccggcgaccgcgccgacgggcagcccgcgggcgaccgggccgccggccagcccgccggggaccgcgccgacggccagcccgcgggggaccgggccgccggccagccggccggcgaccgcgccgacgggcagcccgcgggcgaccgggccgccgggcagcccgccggcgaccgcgccgacgggcagcccgcgggcgaccgggccgccggccagccggccggggaccgcgccgacggccagcccgcgggggaccgggccgccggccagcccgccggggaccgcgcggccggccagcccgccggcgaccgggccgacgggcagccggccggcgaccgcgcggccgggcagcccgccggcgaccgggccgccgggcagcccgcgggcgaccgcgccgccggccagcccgccggggaccgggccgcgggccagccggccgggaacggcgccggcgggcaggccgcgggcgggaacgccgccaacaagaaggccgaggacgccggcgggaacgcgggcggccaggggcagaacaacgagggcgccaacgcccccaacgagaaguccgugaaggaguaccucgacaagguccgcgccaccguggggacggaguggacccccugcagcgugaccugcggcgucggggugcgggugcgccgccgggucaacgccgcgaacaagaagcccgaggaccugacccugaacgacaucgagacggacgugugcaccauggacaagugcgccggcaucuucaacguggucuccaacagccucggccuggugauccugcucgugcuggcccuguucaacuga

SEQ ID NO: 3689 - RNA, 1107 nt, Artificial Sequence
  derived and/or modified CDS sequence (opt1) from Pv(Cam16)__AGN05247.1__CSP
augaagaacuucauccugcucgccgugagcuccauccugcuggucgaccucuuccccacccacugcggccacaacguggaccugagcaaggccaucaaccugaacggggugaacuucaacaacgucgacgcguccagccucggcgccgcccacguggggcaguccgccagccgcggccgggggcugggcgagaacccggacgacgaggagggcgacgccaagaagaagaaggacgggaagaaggcggagcccaagaacccccgcgagaacaagcugaagcagcccgccggcgaccgggccgacgggcagccggccggcgaccgcgcggacgggcagcccgccggcgaccgggccgccggccagcccgccggggaccgcgcggacggccagcccgccggggaccgggccgacggccagccggccggcgaccgcgccgcggggcagcccgccggcgaccgggccgacgggcagcccgccggcgaccgcgccgcggggcagcccgccggcgaccgggccgacggccagccggccggggaccgcgccgacggccagcccgcgggggaccgggccgccggccagcccgccggggaccgcgcggacggccagcccgccggcgaccgggccgccgggcagccggccggcgaccgcgcggacgggcagcccgccggcgaccgggccgccgggcagcccgccggcgaccgcgcggccggccagcccgccggggaccgggccgccggccagccggcggggaacggcgccggcgggcaggccgccggcgggaacgcgggcgggaacgccggcggcaacgccgggggccaggggcagaacaacgagggcgccaacgcccccaacgagaaguccgugaaggaguaccucgacaagguccgcgcgaccguggggacggaguggacccccugcagcgugaccugcggcgucggcgugcgggugcgccgccgggucaacgccgccaacaagaagcccgaggaccugacccugaacgaccucgagacggacgugugcaccauggacaagugcgccgggaucuucaacguggucuccaacagccugggccuggugauccuccuggugcuggcccucuucaacuga

SEQ ID NO: 3690 - RNA, 1107 nt, Artificial Sequence
  derived and/or modified CDS sequence (opt1) from Pv(Cam32)__AGN05260.1__CSP
augaagaacuucauccugcucgcggugagcuccauccugcuggucgaccucuuccccacccacugcggccacaacguggaccugagcaaggccaucaaccugaacggggugggcuucaacaacgucgacgcguccagccucggggccgcccacgugggccaguccgccagccgcgggcggggccugggcgagaacccggacgacgaggagggggacgccaagaagaagaaggacggcaagaaggcggagcccaagaacccccgcgagaacaagcugaagcagcccgccggggaccgggccgacggccagccggccggggaccgcgcggacggccagcccgccggcgaccgggccgacgggcagcccgccggcgaccgcgccgcggggcagcccgccggcgaccgggccgacggccagccggccggggaccgcgccgcgggccagcccgccggggaccgggccgacggccagcccgccggggaccgcgccgcgggccagcccgccggcgaccgggccgacgggcagccggccggcgaccgcgccgcggggcagcccgccggcgaccgggccgccgggcagcccgcgggcgaccgcgccgacggccagcccgccggggaccgggccgccggccagccggcgggggaccgcgccgacggccagcccgccggggaccgggccgccggccagcccgcgggcgaccgcgccgccgggcagcccgccggcgaccgggccgcggggcagccggccggcaacggcgccgggggccaggccgcgggcgggaacgccgggggcaacgccggcgggaacgccggcgggcagggccagaacaacgagggggccaacgcgcccaacgagaaguccgugaaggaguaccucgacaagguccgcgccaccgugggcacggaguggacccccugcagcgugaccugcggcgucggggugcgggugcgccgccgggucaacgccgccaacaagaagcccgaggaccugacccugaacgaccucgagacggacgugugcaccauggacaagugcgccggcaucuucaacguggucuccaacagccuggggcuggugauccuccuggugcuggcccucuucaacuga

SEQ ID NO: 3691 - RNA, 1107 nt, Artificial Sequence
  derived and/or modified CDS sequence (opt1) from Pv(Cam38)__AGN05266.1__CSP
augaagaacuucauccugcucgcggugagcuccauccugcuggucgaccucuuccccacccacugcggccacaacguggaccugagcaaggccaucaaccugaacggggugaacuucaacaacgucgacgcguccagccucggcgccgcccacguggggcaguccgccagccgcggccgggggcugggcgagaacccggacgacgaggagggcgacgccaagaagaagaaggacgggaagaaggcggagcccaagaacccccgcgagaacaagcugaagcagcccggcgaccgggccgacgggcagccggccggcgaccgcgccgacgggcagcccgcgggcgaccgggccgccggccagcccgccggggaccgcgccgacggccagcccgcgggggaccgggccgccggccagccggccggcgaccgcgccgacgggcagcccgcgggcgaccgggccgccgggcagcccgccggcgaccgcgccgacgggcagcccgcgggcgaccgggccgccggccagccggccggggaccgcgccgacggccagcccgcgggggaccgggccgccggccagcccgccggggaccgcgcggacggccagcccgccggcgaccgggccgccgggcagccggccggcgaccgcgcggccgggcagcccgccggcgaccgggccgacgggcagcccgccggcgaccgcgcggccggccagcccgccggggaccgggccgccggccagccggcgggggaccgcgccgccggccagcccgccggcaacggggcgggcgggcaggccgccggcgggaacgccggcggccaggggcagaacaacgagggcgccaacgcgcccaacgagaaguccgugaaggaguaccucgacaagguccgggccaccguggggacggaguggacccccugcagcgugaccugcggcgucggggugcgcgugcgccggcgcgucaacgccgccaacaagaagccggaggaccugacccugaacgaccucgagacggacgugugcaccauggacaagugcgccggcaucuucaacguggucuccaacagccugggccuggugauccuccuggugcuggcccucuucaacuga

SEQ ID NO: 3692 - RNA, 1104 nt, Artificial Sequence
  derived and/or modified CDS sequence (opt1) from Pv(CSP19VK210)__ANS71599.1__CSP
augaagaacuucauccugcucgccgugagcuccauccugcuggucgaccucuuccccacccacugcggccacaacguggaccugagcaaggccaucaaccugaacggggugaacuucaacaacgucgacgcguccagccucggcgccgcccacguggggcaguccgccagccgcggccgggggcugggcgagaacccggacgacgaggagggcgacgccaagaagaagaaggacgggaagaaggcggagcccaagaacccccgcgagaacaagcugaagcagcccggcgaccgggccgacgggcagccggccggcgaccgcgccgacgggcagcccgcgggcgaccgggccgacggccagcccgccggggaccgcgccgccggccagcccgcgggggaccgggccgacggccagccggccggcgaccgcgccgccgggcagcccgcgggcgaccgggccgacgggcagcccgccggcgaccgcgccgccgggcagcccgcgggcgaccgggccgacggccagccggccggggaccgcgccgccggccagcccgcgggggaccgggccgacggccagcccgccggggaccgcgccgcgggccagcccgccggcgaccgggccgccgggcagccggccggcgaccgcgcggacgggcagcccgccggcgaccgggccgccgggcagcccgccggcgaccgcgcggccggccagcccgccggggaccgggccgccggccagccggcggggaacggcgccggcgggcaggccgccggcgggaacgcggccaacaagaaggccgaggacgccggcgggcagggccagaacaacgagggcgccaacgcgcccaacgagaaguccgugaaggaguaccucgacaagguccgcgccaccguggggacggaguggacccccugcagcgugaccugcggcgucggggugcgggugcgccgccgggucaacgccgccaacaagaagcccgaggaccugacccugaacgacaucgagacggacgugugcaccauggacaagugcgccggcaucuucaacguggucuccaacagccucgggcuggugauccugcucgugcuggcgcuguucaacuga

SEQ ID NO: 3693 - RNA, 1089 nt, Artificial Sequence
  derived and/or modified CDS sequence (opt1) from Pv(CSP24VK210)__ANS71604.1__CSP
augaagaacuucauccugcucgccgugagcuccauccugcuggucgaccucuuccccacccacugcggccacaacguggaccugagcaaggccaucaaccugaacggggugaacuucaacaacgucgacgcguccagccucggcgccgcccacguggggcaguccgccagccgcggccgggggcugggcgagaacccggacgacgaggagggcgacgccaagaagaagaaggacgggaagaaggcggagcccaagaacccccgcgagaacaagcugaagcagcccggcgaccgggccgacgggcagccggccggcgaccgcgccgacgggcagcccgcgggcgaccgggccgacggccagcccgccggggaccgcgccgccggccagcccgcgggggaccgggccgacggccagccggccggcgaccgcgccgccgggcagcccgcgggcgaccgggccgacgggcagcccgccggcgaccgcgccgccgggcagcccgcgggcgaccgggccgacggccagccggccggggaccgcgccgccggccagcccgcgggggaccgggccgacggccagcccgccggggaccgcgccgcgggccagcccgccggcgaccgggccgccgggcagccggccggcgaccgcgcggacgggcagcccgccggcgaccgggccgccgggcagcccgccggcgaccgcgcggccggccagcccgccgggaacggcgccgggggccaggccgcgggcgggaacgccgccaacaagaaggccgaggacgcgggcgggaacgccggcgggcagggccagaacaacgagggcgccaacgccccgaacgagaaguccgugaaggaguaccucgacaagguccgggccaccguggggacggaguggacccccugcagcgugaccugcggcgucggggugcgcgugcggcgccgcgucaacgcggccaacaagaagcccgaggaccugacccugaacgacaucgagacggacgugugcaccauggacaagugcgccggcaucuucaacguggucuccaacagccucgggcuggugauccugcucgugcuggcccuguucaacuga

SEQ ID NO: 3694 - RNA, 1089 nt, Artificial Sequence
  derived and/or modified CDS sequence (opt1) from Pv(CSP35VK210)__ANS71615.1__CSP
augaagaacuucauccugcucgccgugagcuccauccugcuggucgaccucuuccccacccacugcggccacaacguggaccugagcaaggccaucaaccugaacggggugaacuucaacaacgucgacgcguccagccucggcgccgcccacguggggcaguccgccagccgcggccgggggcugggcgagaacccggacgacgaggagggcgacgccaagaagaagaaggacgggaagaaggcggagcccaagaacccccgcgagaacaagcugaagcagcccggcgaccgggccgacgggcagccggccggcgaccgcgccgacgggcagcccgcgggcgaccgggccgccggccagcccgccggggaccgcgccgacggccagcccgcgggggaccgggccgccggccagccggccggcgaccgcgccgacgggcagcccgcgggcgaccgggccgccgggcagcccgccggcgaccgcgccgacgggcagcccgcgggcgaccgggccgccggccagccggccggggaccgcgccgacggccagcccgcgggggaccgggccgccggccagcccgccggggaccgcgcggccggccagcccgccggcgaccgggccgacgggcagccggccggcgaccgcgcggccgggcagcccgccggcgaccgggccgccgggcagcccgcgggcgaccgcgccgccggccagcccgccgggaacggcgccgggggccaggcggccggcgggaacgccgccaacaagaaggcggaggacgccggcgggaacgccggcgggcagggccagaacaacgagggcgccaacgccccgaacgagaaguccgugaaggaguaccucgacaagguccgggcgaccguggggacggaguggacccccugcagcgugaccugcggcgucggggugcgcgugcggcgccgcgucaacgccgccaacaagaagcccgaggaccugacccugaacgacaucgagacggacgugugcaccauggacaagugcgccggcaucuucaacguggucuccaacagccucgggcuggugauccugcucgugcuggcccuguucaacuga

SEQ ID NO: 3695 - RNA, 1062 nt, Artificial Sequence
  derived and/or modified CDS sequence (opt1) from Pv(CSP9VK210)__ANS71589.1__CSP
augaagaacuucauccugcucgccgugagcuccauccugcuggucgaccucuuccccacccacugcggccacaacguggaccugagcaaggccaucaaccugaacggggugaacuucaacaacgucgacgcguccagccucggcgccgcccacguggggcaguccgccagccgcggccgggggcugggcgagaacccggacgacgaggagggcgacgccaagaagaagaaggacgggaagaaggcggagcccaagaacccccgcgagaacaagcugaagcagcccggcgaccgggccgacgggcagccggccggcgaccgcgccgacgggcagcccgcgggcgaccgggccgccggccagcccgccggggaccgcgccgacggccagcccgcgggggaccgggccgccggccagccggccggcgaccgcgccgacgggcagcccgcgggcgaccgggccgccgggcagcccgccggcgaccgcgccgacgggcagcccgcgggcgaccgggccgccggccagccggccggggaccgcgccgcgggccagcccgccggggaccgggccgacggccagcccgccggggaccgcgcggccggccagcccgccggcgaccgggccgccgggcagccggcgggcgaccgcgccgccgggcagcccgccggcgaccgggccgcggggcagcccgccggcaacggcgccgggggccaggccgccgggggcaacgcggccaacaagaaggccgaggacgccggcgggaacgcgggcgggcagggccagaacaacgagggggccaacgcccccaacgagaaguccgugaaggaguaccucgacaagguccgcgccaccgugggcacggaguggaccccgugcagcgugaccugcggcgucggggugcgggugcgccggcgcgucaacgccgcgaacaagaagcccgaggaccugacccugaacgacaucgagacggacgugugcaccauggacaagugcgccggcaucuucaacguggucuccaacagccucgggcuggugauccugcucgugcuggcccuguucaacuga

SEQ ID NO: 3696 - RNA, 894 nt, Artificial Sequence
  derived and/or modified CDS sequence (opt1) from Pv(Pt02.2)__ADB92552.1__CSP
augaagaacuucauccugcucgccgugagcuccauccugcuggucgaccucuuccccacccacugcggccacaacguggaccugagcaaggccaucaaccugaacggggugggcuucaacaacgucgacgcguccagccucggggccgcccacgugggccaguccgccagccgcgggcggggccugggcgagaacccggacgacgaggagggggacgccaagaagaagaaggacggcaagaaggcggagcccaagaacccccgcgagaacaagcugaagcagcccgaggacggggccggcgaccagccgggggccaacggcgccggcaaccagcccggggcgaacggcgccgggaaccagcccggcgccaacggcgccgggaaccagcccggcgccaacggggcgggcaaccagccgggggccaacggcgccggcaaccagcccggggccaacggcgccgggaaccagcccggcgcgaacggggccggcggccaggccgccgggggcaacgccgcgaacaagaaggccggggacgccggcgccgggggccaggccgcgggcgggaacgccgccaacaagaaggccggcgacgcgggggccggccagggccagaacaacgagggggccaacgcccccaacgagaaguccgugaaggaguaccucgacaagguccgggccaccgugggcacggaguggaccccgugcagcgugaccugcggggucggcgugcgcgugcggcgccgggucaacgcggccaacaagaagcccgaggaccugacccugaacgaccucgagacggacgugugcaccauggacaagugcgccgggaucuucaacguggucuccaacagccugggccuggugauccuccuggugcuggcccucuucaacuga

SEQ ID NO: 3697 - RNA, 840 nt, Artificial Sequence
  derived and/or modified CDS sequence (opt1) from Pv(Pt04.5)__ADB92555.1__CSP
augaagaacuucauccugcucgccgugagcuccauccugcuggucgaccucuuccccacccacugcggccacaacguggaccugagcaaggccaucaaccugaacggggugggcuucaacaacgucgacgcguccagccucggggccgcccacgugggccaguccgccagccgcgggcggggccugggcgagaacccggacgacgaggagggggacgccaagaagaagaaggacggcaagaaggcggagcccaagaacccccgcgagaacaagcugaagcagcccgaggacggggccggcgaccagccgggggccaacggcgccggcaaccagcccggggcgaacggcgccgggaaccagcccggcgccaacggcgccgggaaccagcccggcgccaacggggcgggcaaccagccgggggccaacggcgccggcgggcaggccgccggcgggaacgcggccaacaagaaggccggcgacgccggggccggcggccaggcggccgggggcaacgccgccaacaagaaggccggggacgcgggcgccgggcagggccagaacaacgagggcgccaacgcccccaacgagaaguccgugaaggaguaccucgacaagguccgggcgaccguggggacggaguggacccccugcagcgugaccugcggcgucggggugcgcgugcggcgccgggucaacgccgccaacaagaagcccgaggaccugacccugaacgaccucgagacggacgugugcaccauggacaagugcgccggcaucuucaacguggucuccaacagccugggccuggugauccuccuggugcuggcccucuucaacuga

SEQ ID NO: 3698 - RNA, 1023 nt, Artificial Sequence; identical to SEQ ID NO: 107
  derived and/or modified CDS sequence (opt1) from Pb(ANKA)__XP_022712148.1__CSP

SEQ ID NO: 3699 - RNA, 1194 nt, Artificial Sequence; identical to SEQ ID NO: 113
  derived and/or modified CDS sequence (opt2) from Pf(3D7)__XP_001351122.1__CSP

SEQ ID NO: 3700 - RNA, 1335 nt, Artificial Sequence
  derived and/or modified CDS sequence (opt2) from Pf(Pal97-089)__BAM84949.1__CSP
augaugcgcaagcucgccauccucuccgucuccuccuuccucuucgucgaggcccucuuccaggaguaccagugcuacggcuccuccuccaacacccgcguccucaacgagcucaacuacgacaacgccggcaccaaccucuacaacgagcucgagaugaacuacuacggcaagcaggagaacugguacucccucaagaagaacucccgcucccucggcgagaacgacgacggcgacaacgacaacggcgacaacggccgcgagggcaaggacgaggacaagcgcgacggcaacaacgaggacaacgagaagcuccgcaagcccaagcacaagaagcucaagcagcccggcgacggcaaccccgaccccaacgccaaccccaacgucgaccccaacgccaaccccaacgucgaccccaacgccaaccccaacgccaaccccaacgccaaccccaacgccaaccccaacgccaaccccaacgccaaccccaacgccaaccccaacgccaaccccaacgccaaccccaacgccaaccccaacgccaaccccaacgccaaccccaacgccaaccccaacgccaaccccaacgccaaccccaacgccaaccccaacgccaaccccaacgccaaccccaacgccaaccccaacgccaaccccaacgccaaccccaacgccaaccccaacgccaaccccaacgccaaccccaacgccaaccccaacgccaaccccaacgccaaccccaacgccaaccccaacgccaaccccaacgccaaccccaacgccaaccccaacgccaaccccaacgccaaccccaacgccaaccccaacgccaaccccaacgccaaccccaacgccaaccccaacgccaaccccaacgccaaccccaacgccaaccccaacgccaaccccaacgccaaccccaacgccaaccccaacgccaaccccaacgccaaccccaacaagaacaaccagggcaacggccagggccacaacaugcccaacgaccccaaccgcaacgucgacgagaacgccaacgccaacaacgccgucaagaacaacaacaacgaggagcccuccgacaagcacaucgagcaguaccucaagaagauccaguacucccucuccaccgaguggucccccugcuccgucaccugcggcaacggcauccagguccgcaucaagcccggcuccgccgacaagcccaaggaccagcucgacuacgagaacgacaucgagaagaagaucugcaagauggagaagugcuccuccgucuucaacgucgucaacuccuccaucggccucaucaugguccucuccuuccucuuccucaacuga

SEQ ID NO: 3701 - RNA, 1329 nt, Artificial Sequence
  derived and/or modified CDS sequence (opt2) from Pf(T9/94)__BAD73956.1__CSP
augaugcgcaagcucgccauccucuccgucuccuccuuccucuucgucgaggcccucuuccaggaguaccagugcuacggcuccuccuccaacacccgcguccucaacgagcucaacuacgacaacgccggcaccaaccucuacaacgagcucgagaugaacuacuacggcaagcaggagaacugguacucccucaagaagaacucccgcucccucggcgagaacgacgacggcgacaacgacaacggcaacaacaacaacggcaacaacaacaacggcgacaacggccgcgagggcaaggacgaggacaagcgcgacggcaacaacgaggacaacgagaagcuccgcaagcccaagcacaagaagcucaagcagcccggcgacgacaaccccgaccccaacgccaaccccaacgucgaccccaacgccaaccccaacgucgaccccaacgccaaccccaacgccaaccccaacgccaaccccaacgccaaccccaacgccaaccccaacgccaaccccaacgccaaccccaacgccaaccccaacgccaaccccaacgccaaccccaacgccaaccccaacgccaaccccaacgccaaccccaacgccaaccccaacgccaaccccaacgucgaccccaacgccaaccccaacgccaaccccaacgccaaccccaacgccaaccccaacgccaaccccaacgccaaccccaacgccaaccccaacgccaaccccaacgccaaccccaacgccaaccccaacgccaaccccaacgccaaccccaacgccaaccccaacgccaaccccaacgccaaccccaacgccaaccccaacgccaaccccaacgccaaccccaacgccaaccccaacgccaaccccaacgccaaccccaacgccaaccccaacgccaaccccaacgccaaccccaacgccaaccccaacgccaaccccaacaagaacaaccagggcaacggccagggccacaacaugcccaacgaccccaaccgcaacgucgacgagaacgccaacgccaacaacgccgucaagaacaacaacaacgaggagcccuccgacaagcacaucgagcaguaccucaagaagauccagaacucccucuccaccgaguggucccccugcuccgucaccugcggcaacggcauccagguccgcaucaagcccggcuccgccgacaagcccaaggaccagcucgacuacgagaacgacaucgagaagaagaucugcaagauggagaagugcuccuccgucuucaacgucgucaacuccuccaucggccucaucaugguccucuccuuccucuuccucaacuga

SEQ ID NO: 3702 - RNA, 1329 nt, Artificial Sequence
  derived and/or modified CDS sequence (opt2) from Pf(Tq/94)__AAA29551.1__CSP
augaugcgcaagcucgccauccucuccgucuccuccuuccucuucgucgaggcccucuuccaggaguaccagugcuacggcuccuccuccaacacccgcguccucaacgagcucaacuacgacaacgccggcaucaaccucuacaacgagcucgagaugaacuacuacggcaagcaggagaacugguacucccucaagaagaacucccgcucccucggcgagaacgacgacggcgacaacgacaacggcaacaacaacaacggcaacaacaacaacggcgacaacggccgcgagggcaaggacgaggacaagcgcgacggcaacaacgaggacaacgagaagcuccgcaagcccaagcacaagaagcucaagcagcccggcgacggcaaccccgaccccaacgccaaccccaacgucgaccccaacgccaaccccaacgucgaccccaacgccaaccccaacgccaaccccaacgccaaccccaacgccaaccccaacgccaaccccaacgccaaccccaacgccaaccccaacgccaaccccaacgccaaccccaacgccaaccccaacgccaaccccaacgccaaccccaacgccaaccccaacgccaaccccaacgccaaccccaacgucgaccccaacgccaaccccaacgccaaccccaacgccaaccccaacgccaaccccaacgccaaccccaacgccaaccccaacgccaaccccaacgccaaccccaacgccaaccccaacgccaaccccaacgccaaccccaacgccaaccccaacgccaaccccaacgccaaccccaacgccaaccccaacgccaaccccaacgccaaccccaacgccaaccccaacgccaaccccaacgccaaccccaacgccaaccccaacgccaaccccaacgccaaccccaacgccaaccccaacgccaaccccaacgccaaccccaacaagaacaaccagggcaacggccagggccacaacaugcccaacgaccccaaccgcaacgucgacgagaacgccaacgccaacaacgccgucaagaacaacaacaacgaggagcccuccgacaagcacaucgagcaguaccucaagaagauccagaacucccucuccaccgaguggucccccugcuccgucaccugcggcaacggcauccagguccgcaucaagcccggcuccgccgacaagcccaaggaccagcucgacuacgagaacgacaucgagaagaagaucugcaagauggagaagugcuccuccgucuucaacgucgucaacuccuccaucggccucaucaugguccucuccuuccucuuccucaacuga

SEQ ID NO: 3703 - RNA, 1329 nt, Artificial Sequence
  derived and/or modified CDS sequence (opt2) from Pf(Wellcome)__AAA29554.1__CSP
augaugcgcaagcucgccauccucuccgucuccuccuuccucuucgucgaggcccucuuccaggaguaccagugcuacggcuccuccuccaacacccgcguccucaacgagcucaacuacgacaacgccggcaccaaccucuacaacgagcucgagaugaacuacuacggcaagcaggagaacugguacucccucaagaagaacucccgcucccucggcgagaacgacgacggcgacaacgacaacggcaacaacaacaacggcaacaacaacaacggcgacaacggccgcgagggcaaggacgaggacaagcgcgacggcaacaacgaggacaacgagaagcuccgcaagcccaagcacaagaagcucaagcagcccggcgacggcaaccccgaccccaacgccaaccccaacgucgaccccaacgccaaccccaacgucgaccccaacgccaaccccaacgccaaccccaacgccaaccccaacgccaaccccaacgccaaccccaacgccaaccccaacgccaaccccaacgccaaccccaacgccaaccccaacgccaaccccaacgccaaccccaacgccaaccccaacgccaaccccaacgccaaccccaacgccaaccccaacgucgaccccaacgccaaccccaacgccaaccccaacgccaaccccaacgccaaccccaacgccaaccccaacgccaaccccaacgccaaccccaacgccaaccccaacgccaaccccaacgccaaccccaacgccaaccccaacgccaaccccaacgccaaccccaacgccaaccccaacgccaaccccaacgccaaccccaacgccaaccccaacgccaaccccaacgccaaccccaacgccaaccccaacgccaaccccaacgccaaccccaacgccaaccccaacgccaaccccaacgccaaccccaacgccaaccccaacaagaacaaccagggcaacggccagggccacaacaugcccaacgaccccaaccgcaacgucgacgagaacgccaacgccaacaacgccgucaagaacaacaacaacgaggagcccuccgacaagcacaucgagcaguaccucaagaagauccagaacucccucuccaccgaguggucccccugcuccgucaccugcggcaacggcauccagguccgcaucaagcccggcuccgccgacaagcccaaggaccagcucgacuacgagaacgacaucgagaagaagaucugcaagauggagaagugcuccuccgucuucaacgucgucaacuccuccaucggccucaucaugguccucuccuuccucuuccucaacuga

SEQ ID NO: 3704 - RNA, 1323 nt, Artificial Sequence
  derived and/or modified CDS sequence (opt2) from Pf(Pal97-115)__BAM84958.1__CSP
augaugcgcaagcucgccauccucuccgucuccuccuuccucuucgucgaggcccucuuccaggaguaccagugcuacggcuccuccuccaacacccgcguccucaacgagcucaacuacgacaacgccggcaccaaccucuacaacgagcucgagaugaacuacuacggcaagcaggagaacugguacucccucaagaagaacucccgcucccucggcgagaacgacgacggcaacaacaacaacggcgacaacggccgcgagggcaaggacgaggacaagcgcgacggcaacaacgaggacaacgagaagcuccgcaagcccaagcacaagaagcucaagcagcccggcgacggcaaccccgaccccaacgccaaccccaacgucgaccccaacgccaaccccaacgucgaccccaacgccaaccccaacgucgaccccaacgccaaccccaacgccaaccccaacgccaaccccaacgccaaccccaacgccaaccccaacgccaaccccaacgccaaccccaacgccaaccccaacgccaaccccaacgccaaccccaacgccaaccccaacgccaaccccaacgccaaccccaacgccaaccccaacgccaaccccaacgccaaccccaacgccaaccccaacgccaaccccaacgccaaccccaacgccaaccccaacgccaaccccaacgccaaccccaacgucgaccccaacgccaaccccaacgccaaccccaacgccaaccccaacgccaaccccaacgccaaccccaacgccaaccccaacgccaaccccaacgccaaccccaacgccaaccccaacgccaaccccaacgccaaccccaacgccaaccccaacgccaaccccaacgccaaccccaacgccaaccccaacgccaaccccaacgccaaccccaacgccaaccccaacgccaaccccaacaagaacaaccagggcaacggccagggccacaacaugcccaacgaccccaaccgcaacgucgacgagaacgccaacgccaacaacgccgucaagaacaacaacaacgaggagcccuccgaccagcacaucgagaaguaccucaagaucauccagaacucccucuccaccgaguggucccccugcuccgucaccugcggcaacggcauccagguccgcaucaagcccggcuccgccgacaagcccaaggaccagcucgacuacgccaacgacaucgagaagaagaucugcaagauggagaagugcuccuccgucuucaacgucgucaacuccuccaucggccucaucaugguccucuccuuccucuuccucaacuga

SEQ ID NO: 3705 - RNA, 1323 nt, Artificial Sequence
  derived and/or modified CDS sequence (opt2) from Pf(PMS5)__BAN59428.1__CSP
augaugcgcaagcucgccauccucuccgucuccuccuuccucuucgucgaggcccucuuccaggaguaccagugcuacggcuccuccuccaacacccgcguccucaacgagcucaacuacgacaacgccggcaccaaccucuacaacgagcucgagaugaacuacuacggcaagcaggagaacugguacucccucaagaagaacucccgcucccucggcgagaacgacgacggcaacaacaacaacggcgacaacggccgcgagggcaaggacgaggacaagcgcgacggcaacaacgaggacaacgagaagcuccgcaagcccaagcacaagaagcucaagcagcccggcgacggcaaccccgaccccaacgccaaccccaacgucgaccccaacgccaaccccaacgucgaccccaacgccaaccccaacgucgaccccaacgccaaccccaacgccaaccccaacgccaaccccaacgccaaccccaacgccaaccccaacgccaaccccaacgccaaccccaacgccaaccccaacgccaaccccaacgccaaccccaacgccaaccccaacgccaaccccaacgccaaccccaacgccaaccccaacgccaaccccaacgccaaccccaacgccaaccccaacgccaaccccaacgccaaccccaacgccaaccccaacgccaaccccaacgccaaccccaacgccaaccccaacgccaaccccaacgccaaccccaacgccaaccccaacgccaaccccaacgccaaccccaacgccaaccccaacgccaaccccaacgccaaccccaacgccaaccccaacgccaaccccaacgccaaccccaacgccaaccccaacgccaaccccaacgccaaccccaacgccaaccccaacgccaaccccaacgccaaccccaacgccaaccccaacgccaaccccaacaagaacaaccagggcaacggccagggccacaacaugcccaacgaccccaaccgcaacgucgacgagaacgccaacgccaacaacgacgucaagaacaacaacaacgaggagcccuccgacaagcacaucgagcaguaccucaagaagauccaguacucccucuccaccgaguggucccccugcuccgucaccugcggcaacggcauccagguccgcaucaagcccggcuccgccgacaagcccaaggaccagcucgacuacgagaacgacaucgagaagaagaucugcaagauggagaagugcuccuccgucuucaacgucgucaacuccuccaucggccucaucaugguccucuccuuccucuuccucaacuga

SEQ ID NO: 3706 - RNA, 1320 nt, Artificial Sequence
  derived and/or modified CDS sequence (opt2) from Pf(J2)__ACO49408.1__CSP
augcgcaagcucgccauccucuccgucuccuccuuccucuucgucgaggcccucuuccaggaguaccagugcuacggcuccuccuccaacacccgcguccucaacgagcucaacuacgacaacgccggcaccaaccucuacaacgagcucgagaugaacuacuacggcaagcaggagaacugguacucccucaagaagaacucccgcucccucggcgagaacgacgacggcaacaacaacaacggcgacaacggccgcgagggcaaggacgaggacaagcgcgacggcaacaacgaggacaacgagaagcuccgcaagcccaagcacaagaagcucaagcagcccggcgacggcaaccccgaccccaacgccaaccccaacgucgaccccaacgccaaccccaacgucgaccccaacgccaaccccaacgucgaccccaacgccaaccccaacgccaaccccaacgccaaccccaacgccaaccccaacgccaaccccaacgccaaccccaacgccaaccccaacgccaaccccaacgccaaccccaacgccaaccccaacgccaaccccaacgccaaccccaacgccaaccccaacgccaaccccaacgccaaccccaacgccaaccccaacgucgaccccaacgccaaccccaacgccaaccccaacgccaaccccaacgccaaccccaacgccaaccccaacgccaaccccaacgccaaccccaacgccaaccccaacgccaaccccaacgccaaccccaacgccaaccccaacgccaaccccaacgccaaccccaacgccaaccccaacgccaaccccaacgccaaccccaacgccaaccccaacgccaaccccaacgccaaccccaacgccaaccccaacgccaaccccaacgccaaccccaacgccaaccccaacgccaaccccaacgccaaccccaacaagaacaaccagggcaacggccagggccacaacaugcccaacgaccccaaccgcaacgucgacgagaacgccaacgccaacaacgacgucaagaacaacaacaacgaggagcccuccgacaagcacaucgagcaguaccucaagaagauccaguacucccucuccaccgaguggucccccugcuccgucaccugcggcaacggcauccagguccgcaucaagcccggcuccgccgacaagcccaaggaccagcucgacuacgagaacgacaucgagaagaagaucugcaagauggagaagugcuccuccgucuucaacgucgucaacuccuccaucggccucaucaugguccucuccuuccucuuccucaacuga

SEQ ID NO: 3707 - RNA, 1320 nt, Artificial Sequence
  derived and/or modified CDS sequence (opt2) from Pf(M4)__ACO49420.1__CSP
augcgcaagcucgccauccucuccgucuccuccuuccucuucgucgaggcccucuuccaggaguaccagugcuacggcuccuccuccaacacccgcguccucaacgagcucaacuacgacaacgccggcaccaaccucuacaacgagcucgagaugaacuacuacggcaagcaggagaacugguacucccucaagaagaacucccgcucccucggcgagaacgacgacggcaacaacaacaacggcgacaacggccgcgagggcaaggacgaggacaagcgcgacggcaacaacgaggacaacgagaagcuccgcaagcccaagcacaagaagcucaagcagcccggcgacggcaaccccgaccccaacgccaaccccaacgucgaccccaacgccaaccccaacgucgaccccaacgccaaccccaacgccaaccccaacgccaaccccaacgccaaccccaacgccaaccccaacgccaaccccaacgccaaccccaacgccaaccccaacgccaaccccaacgccaaccccaacgccaaccccaacgccaaccccaacgccaaccccaacgccaaccccaacgccaaccccaacgccaaccccaacgucgaccccaacgccaaccccaacgccaaccccaacgccaaccccaacgccaaccccaacgccaaccccaacgccaaccccaacgccaaccccaacgccaaccccaacgccaaccccaacgccaaccccaacgccaaccccaacgccaaccccaacgccaaccccaacgccaaccccaacgccaaccccaacgccaaccccaacgccaaccccaacgccaaccccaacgccaaccccaacgccaaccccaacgccaaccccaacgccaaccccaacgccaaccccaacgccaaccccaacgccaaccccaacgccaaccccaacgccaaccccaacaagaacaaccagggcaacggccagggccacaacaugcccaacgaccccaaccgcaacgucgacgagaacgccaacgccaacaacgccgucaagaacaacaacaacgaggagcccuccgacaagcacaucaccgaguaccucaagaagauccagaacucccucuccaccgaguggucccccugcuccgucaccugcggcaacggcauccagguccgcaucaagcccggcuccgccggcaaguccaaggacgagcucgacuacgagaacgacaucgagaagaagaucugcaagauggagaagugcuccuccgucuucaacgucgucaacuccuccaucggccucaucaugguccucuccuuccucuuccucaacuga

SEQ ID NO: 3708 - RNA, 1320 nt, Artificial Sequence
  derived and/or modified CDS sequence (opt2) from Pf(TMS121)__ACO49498.1__CSP
augcgcaagcucgccauccucuccgucuccuccuuccucuucgucgaggcccucuuccaggaguaccagugcuacggcuccuccuccaacacccgcguccucaacgagcucaacuacgacaacgccggcaccaaccucuacaacgagcucgagaugaacuacuacggcaagcaggagaacugguacucccucaagaagaacucccgcucccucggcgagaacgacgacggcaacaacaacaacggcgacaacggccgcgagggcaaggacgaggacaagcgcgacggcaacaacgaggacaacgagaagcuccgcaagcccaagcacaagaagcucaagcagcccggcgacggcaaccccgaccccaacgccaaccccaacgucgaccccaacgccaaccccaacgucgaccccaacgccaaccccaacgucgaccccaacgccaaccccaacgccaaccccaacgccaaccccaacgccaaccccaacgccaaccccaacgccaaccccaacgccaaccccaacgccaaccccaacgccaaccccaacgccaaccccaacgccaaccccaacgccaaccccaacgccaaccccaacgccaaccccaacgccaaccccaacgccaaccccaacgccaaccccaacgccaaccccaacgccaaccccaacgccaaccccaacgccaaccccaacgccaaccccaacgccaaccccaacgccaaccccaacgccaaccccaacgccaaccccaacgccaaccccaacgccaaccccaacgccaaccccaacgccaaccccaacgccaaccccaacgccaaccccaacgccaaccccaacgccaaccccaacgccaaccccaacgccaaccccaacgccaaccccaacgccaaccccaacgccaaccccaacgccaaccccaacgccaaccccaacgccaaccccaacaagaacaaccagggcaacggccagggccacaacaugcccaacgaccccaaccgcaacgucgacgagaacgccaacgccaacaacgacgucaagaacaacaacaacgaggagcccuccgacaagcacaucgagcaguaccucaagaagauccagaacucccucuccaccgaguggucccccugcuccgucaccugcggcaacggcauccagguccgcaucaagcccggcuccgccaacaagcccaaggacgagcucgacuacgagaacgacaucgagaagaagaucugcaagauggagaagugcuccuccgucuucaacgucgucaacuccuccaucggccucaucaugguccucuccuuccucuuccucaacuga

SEQ ID NO: 3709 - RNA, 1320 nt, Artificial Sequence
  derived and/or modified CDS sequence (opt2) from Pf(TMS180)__ACO49505.1__CSP
augcgcaagcucgccauccucuccgucuccuccuuccucuucgucgaggcccucuuccaggaguaccagugcuacggcuccuccuccaacacccgcguccucaacgagcucaacuacgacaacgccggcaccaaccucuacaacgagcucgagaugaacuacuacggcaagcaggagaacugguacucccucaagaagaacucccgcucccucggcgagaacgacgacggcaacaacaacaacggcgacaacggccgcgagggcaaggacgaggacaagcgcgacggcaacaacgaggacaacgagaagcuccgcaagcccaagcacaagaagcucaagcagcccggcgacggcaaccccgaccccaacgccaaccccaacgucgaccccaacgccaaccccaacgucgaccccaacgccaaccccaacgucgaccccaacgccaaccccaacgccaaccccaacgccaaccccaacgccaaccccaacgccaaccccaacgccaaccccaacgccaaccccaacgccaaccccaacgccaaccccaacgccaaccccaacgccaaccccaacgccaaccccaacgccaaccccaacgccaaccccaacgccaaccccaacgccaaccccaacgccaaccccaacgccaaccccaacgccaaccccaacgccaaccccaacgccaaccccaacgccaaccccaacgccaaccccaacgccaaccccaacgccaaccccaacgccaaccccaacgccaaccccaacgccaaccccaacgccaaccccaacgccaaccccaacgccaaccccaacgccaaccccaacgccaaccccaacgccaaccccaacgccaaccccaacgccaaccccaacgccaaccccaacgccaaccccaacgccaaccccaacgccaaccccaacgccaaccccaacgccaaccccaacaagaacaaccagggcaacggccagggccacaacaugcccaacgaccccaaccgcaacgucgacgagaacgccaacgccaacaacgacgucaagaacaacaacaacgaggagcccuccgacaagcacaucgagcaguaccucaagaagauccaguacucccucuccaccgaguggucccccugcuccgucaccugcggcaacggcauccagguccgcaucaagcccggcuccgccgacaagcccaaggaccagcucgacuacgagaacgacaucgagaagaagaucugcaagauggagaagugcuccuccgucuucaacgucgucaacuccuccaucggccucaucaugguccucuccuuccucuuccucaacuga

SEQ ID NO: 3710 - RNA, 1311 nt, Artificial Sequence
  derived and/or modified CDS sequence (opt2) from Pf(836)__AAA29576.1__CSP
augaugcgcaagcucgccauccucuccgucuccuccuuccucuucgucgaggcccucuuccaggaguaccagugcuacggcuccuccuccaacacccgcguccucaacgagcucaacuacgacaacgccggcaucaaccucuacaacgagcucgagaugaacuacuacggcaagcaggagaacugguacucccucaagaagaacucccgcucccucggcgagaacgacgacggcaacaacaacaacggcgacaacggccgcgagggcaaggacgaggacaagcgcgacggcaacaacgaggacaacgagaagcuccgcaagcccaagcacaagaagcucaagcagcccggcgacggcaaccccgaccccaacgccaaccccaacgucgaccccaacgccaaccccaacgucgaccccaacgccaaccccaacgccaaccccaacgccaaccccaacgccaaccccaacgccaaccccaacgccaaccccaacgccaaccccaacgccaaccccaacgccaaccccaacgccaaccccaacgccaaccccaacgccaaccccaacgccaaccccaacgccaaccccaacgccaaccccaacgucgaccccaacgccaaccccaacgccaaccccaacgccaaccccaacgccaaccccaacgccaaccccaacgccaaccccaacgccaaccccaacgccaaccccaacgccaaccccaacgccaaccccaacgccaaccccaacgccaaccccaacgccaaccccaacgccaaccccaacgccaaccccaacgccaaccccaacgccaaccccaacgccaaccccaacgccaaccccaacgccaaccccaacgccaaccccaacgccaaccccaacgccaaccccaacgccaaccccaacgccaaccccaacgccaaccccaacgccaaccccaacaagaacaaccagggcaacggccagggccacaacaugcccaacgaccccaaccgcaacgucgacgagaacgccaacgccaacaacgccgucaagaacaacaacaacgaggagcccuccgacaagcacaucaccgaguaccucaagaagauccagaacucccucuccaccgaguggucccccugcuccgucaccugcggcaacggcauccagguccgcaucaagcccggcuccgccggcaaguccaaggacgagcucgacuacgagaacgacaucgagaagaagaucugcaagauggagaagugcuccuccgucuucaacgucgucaacuccuccaucggccucaucaugguccucuccuuccucuuccucaacuga

SEQ ID NO: 3711 - RNA, 1311 nt, Artificial Sequence
  derived and/or modified CDS sequence (opt2) from Pf(842)__AAA29545.1__CSP
augaugcgcaagcucgccauccucuccgucuccuccuuccucuucgucgaggcccucuuccaggaguaccagugcuacggcuccuccuccaacacccgcguccucaacgagcucaacuacgacaacgccggcaucaaccucuacaacgagcucgagaugaacuacuacggcaagcaggagaacugguacucccucaagaagaacucccgcucccucggcgagaacgacgacggcaacaacaacaacggcgacaacggccgcgagggcaaggacgaggacaagcgcgacggcaacaacgaggacaacgagaagcuccgcaagcccaagcacaagaagcucaagcagcccggcgacggcaaccccgaccccaacgccaaccccaacgucgaccccaacgccaaccccaacgucgaccccaacgccaaccccaacgucgaccccaacgccaaccccaacgccaaccccaacgccaaccccaacgccaaccccaacgccaaccccaacgccaaccccaacgccaaccccaacgccaaccccaacgccaaccccaacgccaaccccaacgccaaccccaacgccaaccccaacgccaaccccaacgccaaccccaacgccaaccccaacgccaaccccaacgccaaccccaacgccaaccccaacgccaaccccaacgccaaccccaacgccaaccccaacgccaaccccaacgccaaccccaacgccaaccccaacgccaaccccaacgccaaccccaacgccaaccccaacgccaaccccaacgccaaccccaacgccaaccccaacgccaaccccaacgccaaccccaacgccaaccccaacgccaaccccaacgccaaccccaacgccaaccccaacgccaaccccaacgccaaccccaacgccaaccccaacgccaaccccaacgccaaccccaacaagaacaaccagggcaacggccagggccacaacaugcccaacgaccccaaccgcaacgucgacgagaacgccaacgccaacaacgacgucaagaacaacaacaacgaggagcccuccgacaagcacaucgagcaguaccucaagaagauccaguacucccucuccaccgaguggucccccugcuccgucaccugcggcaacggcauccagguccgcaucaagcccggcuccgccgacaagcccaaggaccagcucgacuacgagaacgacaucgagaagaagaucugcaagauggagaagugcuccuccgucuucaacgucgucaacuccuccaucggccucaucaugguccucuccuuccucuuccucaacuga

SEQ ID NO: 3712 - RNA, 1311 nt, Artificial Sequence
  derived and/or modified CDS sequence (opt2) from Pf(India)__AAN87576.1__CSP
augaugcgcaagcucgccauccucuccgucuccuccuuccucuucgucgaggcccucuuccaggaguaccagugcuacggcuccuccuccaacacccgcguccucaacgagcucaacuacgacaacgccggcaccaaccucuacaacgagcucgagaugaacuacuacggcaagcaggagaacugguacucccucaagaagaacucccgcucccucggcgagaacgacgacggcaacaacaacaacggcgacaacggccgcgagggcaaggacgaggacaagcgcgacggcaacaacgaggacaacgagaagcuccgcaagcccaagcacaagaagcucaagcagcccggcgacggcaaccccgaccccaacgccaaccccaacgucgaccccaacgccaaccccaacgucgaccccaacgccaaccccaacgccaaccccaacgccaaccccaacgccaaccccaacgccaaccccaacgccaaccccaacgccaaccccaacgccaaccccaacgccaaccccaacgccaaccccaacgccaaccccaacgccaaccccaacgccaaccccaacgccaaccccaacgccaaccccaacgccaaccccaacgccaaccccaacgccaaccccaacgccaaccccaacgccaaccccaacgccaaccccaacgccaaccccaacgccaaccccaacgccaaccccaacgccaaccccaacgccaaccccaacgccaaccccaacgccaaccccaacgccaaccccaacgccaaccccaacgccaaccccaacgccaaccccaacgccaaccccaacgccaaccccaacgccaaccccaacgccaaccccaacgccaaccccaacgccaaccccaacgccaaccccaacgccaaccccaacgccaaccccaacgccaaccccaacgccaaccccaacaagaacaaccagggcaacggccagggccacaacaugcccaacgaccccaaccgcaacgucgacgagaacgccaacgccaacaacgacgucaagaacaacaacaacgaggagcccuccgacaagcacaucgaggaguaccucaagaagauccagaacucccucuccaccgaguggucccccugcuccgucaccugcggcaacggcauccagguccgcaucaagcccggcuccgccaacaagcccaaggacgagcucaacuacgagaacgacaucgagaagaagaucugcaagauggagaagugcuccuccgucuucaacgucgucaacuccuccaucggccucaucaugguccucuccuuccucuuccucaacuga

SEQ ID NO: 3713 - RNA, 1311 nt, Artificial Sequence
  derived and/or modified CDS sequence (opt2) from Pf(India)__AAN87620.1__CSP
augaugcgcaagcucgccauccucuccgucuccuccuuccucuucgucgaggcccucuuccaggaguaccagugcuacggcuccuccuccaacacccgcguccucaacgagcucaacuacgacaacgccggcaccaaccucuacaacgagcucgagaugaacuacuacggcaagcaggagaacugguacucccucaagaagaacucccgcucccucggcgagaacgacgacggcaacaacaacaacggcgacaacggccgcgagggcaaggacgaggacaagcgcgacggcaacaacgaggacaacgagaagcuccgcaagcccaagcacaagaagcucaagcagcccggcggcgacaaccccgaccccaacgccaaccccaacgucgaccccaacgccaaccccaacgccaaccccaacgccaaccccaacgccaaccccaacgucaaccccaacgccaaccccaacgccaaccccaacgccaaccccaacgccaaccccaacgccaaccccaacgccaaccccaacgccaaccccaacgccaaccccaacgucgaccccaacgccaaccccaacgccaaccccaacgccaaccccaacgccaaccccaacgccaaccccaacgccaaccccaacgccaaccccaacgccaaccccaacgccaaccccaacgccaaccccaacgccaaccccaacgccaaccccaacgccaaccccaacgccaaccccaacgccaaccccaacgccaaccccaacgccaaccccaacgccaaccccaacgccaaccccaacgccaaccccaacgccaaccccaacgccaaccccaacgccaaccccaacgccaaccccaacgccaaccccaacgccaaccccaacgccaaccccaacgccaaccccaacgccaaccccaacgccaaccccaacgccaaccccaacaagaacaaccagggcaacggccagggccacaacaugcccaacgaccccaaccgcaacgucgacgagaacgccaacgccaacaacgccgucaagaacaacaacaacgaggagcccuccgacaagcacaucgagcaguaccucaagaagauccagaacucccucuccaccgaguggucccccugcuccgucaccugcggcaacggcauccagguccgcaucaagcccggcuccgccaacaagcccaaggacgagcucgacuacgagaacgacaucgagaagaagaucugcaagauggagaagugcuccuccgucuucaacgucgucaacuccuccaucggccucaucaugguccucuccuuccucuuccucaacuga

SEQ ID NO: 3714 - RNA, 1311 nt, Artificial Sequence
  derived and/or modified CDS sequence (opt2) from Pf(PFS19)__BAN59401.1__CSP
augaugcgcaagcucgccauccucuccgucuccuccuuccucuucgucgaggcccucuuccaggaguaccagugcuacggcuccuccuccaacacccgcguccucaacgagcucaacuacgacaacgccggcaccaaccucuacaacgagcucgagaugaacuacuacggcaagcaggagaacugguacucccucaagaagaacucccgcucccucggcgagaacgacgacggcaacaacaacaacggcgacaacggccgcgagggcaaggacgaggacaagcgcgacggcaacaacgaggacaacgagaagcuccgcaagcccaagcacaagaagcucaagcagcccggcgacggcaaccccgaccccaacgccaaccccaacgucgaccccaacgccaaccccaacgucgaccccaacgccaaccccaacgucgaccccaacgccaaccccaacgccaaccccaacgccaaccccaacgccaaccccaacgccaaccccaacgccaaccccaacgccaaccccaacgccaaccccaacgccaaccccaacgccaaccccaacgccaaccccaacgccaaccccaacgccaaccccaacgccaaccccaacgccaaccccaacgccaaccccaacgccaaccccaacgccaaccccaacgccaaccccaacgccaaccccaacgccaaccccaacgccaaccccaacgccaaccccaacgccaaccccaacgccaaccccaacgccaaccccaacgccaaccccaacgccaaccccaacgccaaccccaacgccaaccccaacgccaaccccaacgccaaccccaacgccaaccccaacgccaaccccaacgccaaccccaacgccaaccccaacgccaaccccaacgccaaccccaacgccaaccccaacgccaaccccaacgccaaccccaacaagaacaaccagggcaacggccagggccacaacaugcccaacgaccccaaccgcaacgucgacgagaacgccaacgccaacaacgccgucaagaacaacaacaacgaggagcccuccgacaagcacaucgagcaguaccucaagaagauccagaacucccucuccaccgaguggucccccugcuccgucaccugcggcaacggcauccagguccgcaucaagcccggcuccgccaacaagcccaaggacgagcucgacuacgagaacgacaucgagaagaagaucugcaagauggagaagugcuccuccgucuucaacgucgucaacuccuccaucggccucaucaugguccucuccuuccucuuccucaacuga

SEQ ID NO: 3715 - RNA, 1311 nt, Artificial Sequence
  derived and/or modified CDS sequence (opt2) from Pf(Sol95-121)__BAM85068.1__CSP
augaugcgcaagcucgccauccucuccgucuccuccuuccucuucgucgaggcccucuuccaggaguaccagugcuacggcuccuccuccaacacccgcguccucaacgagcucaacuacgacaacgccggcaccaaccucuacaacgagcucgagaugaacuacuacggcaagcaggagaacugguacucccucaagaagaacucccgcucccucggcgagaacgacgacggcaacaacaacaacggcgacaacggccgcgagggcaaggacgaggacaagcgcgacggcaacaacgaggacaacgagaagcuccgcaagcccaagcacaagaagcucaagcagcccgucgacggcaaccccgaccccaacgccaaccccaacgucgaccccaacgccaaccccaacgucgaccccaacgccaaccccaacgucgaccccaacgccaaccccaacgccaaccccaacgccaaccccaacgccaaccccaacgccaaccccaacgccaaccccaacgccaaccccaacgccaaccccaacgccaaccccaacgccaaccccaacgccaaccccaacgccaaccccaacgccaaccccaacgccaaccccaacgccaaccccaacgccaaccccaacgccaaccccaacgccaaccccaacgccaaccccaacgccaaccccaacgccaaccccaacgccaaccccaacgccaaccccaacgccaaccccaacgccaaccccaacgccaaccccaacgccaaccccaacgccaaccccaacgccaaccccaacgccaaccccaacgccaaccccaacgccaaccccaacgccaaccccaacgccaaccccaacgccaaccccaacgccaaccccaacgccaaccccaacgccaaccccaacgccaaccccaacgccaagcccaacgccaaccccaacaagaacaaccagggcaacggccagggccacaacaugcccaacgaccccaaccgcaacgucgacgagaacgccaacgccaacaacgccgucaagaacaacaacaacgaggagcccuccgacaagcacaucgagcaguaccucaagaagauccagaacucccucuccaccgaguggucccccugcuccgucaccugcggcaacggcauccagguccgcaucaagcccggcuccgccgacaagcccaaggaccagcucgacuacgagaacgacaucgagaagaagaucugcaagauggagaagugcuccuccgucuucaacgucgucaacuccuccaucggccucaucaugguccucuccuuccucuuccucaacuga

SEQ ID NO: 3716 - RNA, 1311 nt, Artificial Sequence
  derived and/or modified CDS sequence (opt2) from Pf(T837)__BAM84914.1__CSP
augaugcgcaagcucgccauccucuccgucuccuccuuccucuucgucgaggcccucuuccaggaguaccagugcuacggcuccuccuccaacacccgcguccucaacgagcucaacuacgacaacgccggcaccaaccucuacaacgagcucgagaugaacuacuacggcaagcaggagaacugguacucccucaagaagaacucccgcucccucggcgagaacgacgacggcaacaacaacaacggcgacaacggccgcgagggcaaggacgaggacaagcgcgacggcaacaacgaggacaacgagaagcuccgcaagcccaagcacaagaagcucaagcagcccggcgacggcaaccccgaccccaacgccaaccccaacgucgaccccaacgccaaccccaacgucgaccccaacgccaaccccaacgccaaccccaacgccaaccccaacgccaaccccaacgccaaccccaacgccaaccccaacgccaaccccaacgccaaccccaacgccaaccccaacgccaaccccaacgccaaccccaacgccaaccccaacgccaaccccaacgccaaccccaacgccaaccccaacgucgaccccaacgccaaccccaacgccaaccccaacgccaaccccaacgccaaccccaacgccaaccccaacgccaaccccaacgccaaccccaacgccaaccccaacgccaaccccaacgccaaccccaacgccaaccccaacgccaaccccaacgccaaccccaacgccaaccccaacgccaaccccaacgccaaccccaacgccaaccccaacgccaaccccaacgccaaccccaacgccaaccccaacgccaaccccaacgccaaccccaacgccaaccccaacgccaaccccaacgccaaccccaacgccaaccccaacgccaaccccaacaagaacaaccagggcaacggccagggccacaacaugcccaacgaccccaaccgcaacgucgacgagaacgccaacgccaacaacgccgucaagaacaacaacaacgaggagcccuccgacaagcacaucaccgaguaccucaagaagauccagaacucccucuccaccgaguggucccccugcuccgucaccugcggcaacggcauccagguccgcaucaagcccggcuccgccggcaaguccaaggacgagcucgacuacgagaacgacaucgagaagaagaucugcaagauggagaagugcuccuccgucuucaacgucgucaacuccuccaucggccucaucaugguccucuccuuccucuuccucaacuga

SEQ ID NO: 3717 - RNA, 1311 nt, Artificial Sequence
  derived and/or modified CDS sequence (opt2) from Pf(TiMS95-071)__BAM84865.1__CSP
augaugcgcaagcucgccauccucuccgucuccuccuuccucuucgucgaggcccucuuccaggaguaccagugcuacggcuccuccuccaacacccgcguccucaacgagcucaacuacgacaacgccggcaccaaccucuacaacgagcucgagaugaacuacuacggcaagcaggagaacugguacucccucaagaagaacucccgcucccucggcgagaacgacgacggcaacaacaacaacggcgacaacggccgcgagggcaaggacgaggacaagcgcgacggcaacaacgaggacaacgagaagcuccgcaagcccaagcacaagaagcucaagcagcccggcgacggcaaccccgaccccaacgccaaccccaacgucgaccccaacgccaaccccaacgucgaccccaacgccaaccccaacgucgaccccaacgccaaccccaacgccaaccccaacgccaaccccaacgccaaccccaacgccaaccccaacgccaaccccaacgccaaccccaacgccaaccccaacgccaaccccaacgccaaccccaacgccaaccccaacgccaaccccaacgccaaccccaacgccaaccccaacgccaaccccaacgccaaccccaacgccaaccccaacgccaaccccaacgccaaccccaacgccaaccccaacgccaaccccaacgccaaccccaacgccaaccccaacgccaaccccaacgccaaccccaacgccaaccccaacgccaaccccaacgccaaccccaacgccaaccccaacgccaaccccaacgccaaccccaacgccaaccccaacgccaaccccaacgccaaccccaacgccaaccccaacgccaaccccaacgccaaccccaacgccaaccccaacgccaaccccaacgccaaccccaacgccaaccccaacaagaacaaccagggcaacggccagggccacaacaugcccaacgaccccaaccgcaacgucgacgagaacgccaacgccaacaacgacgucaagaacaacaacaacgaggagcccuccgacaagcacaucgagcaguaccucaagaagauccaguacucccucuccaccgaguggucccccugcuccgucaccugcggcaacggcauccagguccgcaucaagcccggcuccgccgacaagcccaaggaccagcucgacuacgagaacgacaucgagaagaagaucugcaagauggagaagugcuccuccgucuucaacgucgucaacuccuccaucggccucaucaugguccucuccuuccucuuccucaacuga

SEQ ID NO: 3718 - RNA, 1308 nt, Artificial Sequence
  derived and/or modified CDS sequence (opt2) from Pf(TM69)__ACO49446.1__CSP
augcgcaagcucgccauccucuccgucuccuccuuccucuucgucgaggcccucuuccaggaguaccagugcuacggcuccuccuccaacacccgcguccucaacgagcucaacuacgacaacgccggcaccaaccucuacaacgagcucgagaugaacuacuacggcaagcaggagaacugguacucccucaagaagaacucccgcucccucggcgagaacgacgacggcaacaacaacaacggcgacaacggccgcgagggcaaggacgaggacaagcgcgacggcaacaacgaggacaacgagaagcuccgcaagcccaagcacaagaagcucaagcagcccggcgacggcaaccccgaccccaacgccaaccccaacgucgaccccaacgccaaccccaacgucgaccccaacgccaaccccaacgucgaccccaacgccaaccccaacgccaaccccaacgccaaccccaacgccaaccccaacgccaaccccaacgccaaccccaacgccaaccccaacgccaaccccaacgccaaccccaacgccaaccccaacgccaaccccaacgccaaccccaacgccaaccccaacgccaaccccaacgccaaccccaacgccaaccccaacgccaaccccaacgccaaccccaacgccaaccccaacgccaaccccaacgccaaccccaacgccaaccccaacgccaaccccaacgccaaccccaacgccaaccccaacgccaaccccaacgccaaccccaacgccaaccccaacgccaaccccaacgccaaccccaacgccaaccccaacgccaaccccaacgccaaccccaacgccaaccccaacgccaaccccaacgccaaccccaacgccaaccccaacgccaaccccaacgccaaccccaacgccaaccccaacgccaaccccaacaagaacaaccagggcaacggccagggccacaacaugcccaacgaccccaaccgcaacgucgacgagaacgccaacgccaacaacgacgucaagaacaacaacaacgaggagcccuccgacaagcacaucgagcaguaccucaagaagauccaguacucccucuccaccgaguggucccccugcuccgucaccugcggcaacggcauccagguccgcaucaagcccggcuccgccgacaagcccaaggaccagcucgacuacgagaacgacaucgagaagaagaucugcaagauggagaagugcuccuccgucuucaacgucgucaacuccuccaucggccucaucaugguccucuccuuccucuuccucaacuga

SEQ ID NO: 3719 - RNA, 1308 nt, Artificial Sequence
  derived and/or modified CDS sequence (opt2) from Pf(TMS177)__ACO49503.1__CSP
augcgcaagcucgccauccucuccgucuccuccuuccucuucgucgaggcccucuuccaggaguaccagugcuacggcuccuccuccaacacccgcguccucaacgagcucaacuacgacaacgccggcaccaaccucuacaacgagcucgagaugaacuacuacggcaagcaggagaacugguacucccucaagaagaacucccgcucccucggcgagaacgacgacggcaacaacaacaacggcgacaacggccgcgagggcaaggacgaggacaagcgcgacggcaacaacgaggacaacgagaagcuccgcaagcccaagcacaagaagcucaagcagcccggcgacggcaaccccgaccccaacgccaaccccaacgucgaccccaacgccaaccccaacgucgaccccaacgccaaccccaacgucgaccccaacgccaaccccaacgccaaccccaacgccaaccccaacgccaaccccaacgccaaccccaacgccaaccccaacgccaaccccaacgccaaccccaacgccaaccccaacgccaaccccaacgccaaccccaacgccaaccccaacgccaaccccaacgccaaccccaacgccaaccccaacgccaaccccaacgccaaccccaacgccaaccccaacgccaaccccaacgccaaccccaacgccaaccccaacgccaaccccaacgccaaccccaacgccaaccccaacgccaaccccaacgccaaccccaacgccaaccccaacgccaaccccaacgccaaccccaacgccaaccccaacgccaaccccaacgccaaccccaacgccaaccccaacgccaaccccaacgccaaccccaacgccaaccccaacgccaaccccaacgccaaccccaacgccaaccccaacgccaaccccaacgccaaccccaacaagaacaaccagggcaacggccagggccacaacaugcccaacgaccccaaccgcaacgucgacgagaacgccaacgccaacaacgccgucaagaacaacaacaacgaggagcccuccgacaagcacaucgagcaguaccucaagaagauccagaacucccucuccaccgaguggucccccugcuccgucaccugcggcaacggcauccagguccgcaucaagcccggcuccgccaacaagcccaaggacgagcucgacuacgagaacgacaucgagaagaagaucugcaagauggagaagugcuccuccgucuucaacgucgucaacuccuccaucggccucaucaugguccucuccuuccucuuccucaacuga

SEQ ID NO: 3720 - RNA, 1308 nt, Artificial Sequence
  derived and/or modified CDS sequence (opt2) from Pf(TMS178)__ACO49504.1__CSP
augcgcaagcucgccauccucuccgucuccuccuuccucuucgucgaggcccucuuccaggaguaccagugcuacggcuccuccuccaacacccgcguccucaacgagcucaacuacgacaacgccggcaccaaccucuacaacgagcucgagaugaacuacuacggcaagcaggagaacugguacucccucaagaagaacucccgcucccucggcgagaacgacgacggcaacaacaacaacggcgacaacggccgcgagggcaaggacgaggacaagcgcgacggcaacaacgaggacaacgagaagcuccgcaagcccaagcacaagaagcucaagcagcccggcgacggcaaccccgaccccaacgccaaccccaacgucgaccccaacgccaaccccaacgucgaccccaacgccaaccccaacgccaaccccaacgccaaccccaacgccaaccccaacgccaaccccaacgccaaccccaacgccaaccccaacgccaaccccaacgccaaccccaacgccaaccccaacgccaaccccaacgccaaccccaacgccaaccccaacgccaaccccaacgccaaccccaacgucgaccccaacgccaaccccaacgccaaccccaacgccaaccccaacgccaaccccaacgccaaccccaacgccaaccccaacgccaaccccaacgccaaccccaacgccaaccccaacgccaaccccaacgccaaccccaacgccaaccccaacgccaaccccaacgccaaccccaacgccaaccccaacgccaaccccaacgccaaccccaacgccaaccccaacgccaaccccaacgccaaccccaacgccaaccccaacgccaaccccaacgccaaccccaacgccaaccccaacgccaaccccaacgccaaccccaacgccaaccccaacaagaacaaccagggcaacggccagggccacaacaugcccaacgaccccaaccgcaacgucgacgagaacgccaacgccaacaacgccgucaagaacaacaacaacgaggagcccuccgacaagcacaucaccgaguaccucaagaagauccagaacucccucuccaccgaguggucccccugcuccgucaccugcggcaacggcauccagguccgcaucaagcccggcuccgccggcaaguccaaggacgagcucgacuacgagaacgacaucgagaagaagaucugcaagauggagaagugcuccuccgucuucaacgucgucaacuccuccaucggccucaucaugguccucuccuuccucuuccucaacuga

SEQ ID NO: 3721 - RNA, 1305 nt, Artificial Sequence
  derived and/or modified CDS sequence (opt2) from Pf(YL864)__ADF48458.1__CSP
augcgcaagcucgccauccucuccgucuccuccuuccucuucgucgaggcccucuuccaggaguaccagugcuacggcuccuccuccaacacccgcguccucaacgagcucaacuacgacaacgccggcaccaaccucuacaacgagcucgagaugaacuacuacggcaagcaggagaacugguacucccucaagaagaacucccgcucccucggcgagaacgacgacggcaacaacaacaacggcgacaacggccgcgagggcaaggacgaggacaagcgcgacggcaacaacgaggacaacgagaagcuccgcaagcccaagcacaagaagcucaagcagcccggcgacggcaaccccgaccccaacgccaaccccaacgucgaccccaacgccaaccccaacgucgaccccaacgccaaccccaacgucgaccccaacgccaaccccaacgccaaccccaacgccaaccccaacgccaaccccaacgccaaccccaacgccaaccccaacgccaaccccaacgccaaccccaacgccaaccccaacgccaaccccaacgccaaccccaacgccaaccccaacgccaaccccaacgccaaccccaacgccaaccccaacgucgaccccaacgccaaccccaacgccaaccccaacgccaaccccaacgccaaccccaacgccaaccccaacgccaaccccaacgccaaccccaacgccaaccccaacgccaaccccaacgccaaccccaacgccaaccccaacgccaaccccaacgccaaccccaacgccaaccccaacgccaaccccaacgccaaccccaacgccaaccccaacgccaaccccaacgccaaccccaacgccaaccccaacgccaaccccaacgccaaccccaacgccaaccccaacgccaaccccaacgccaaccccaacaagaacaaccagggcaacggccagggccacaacaugcccaacgaccccaaccgcaacgucgacgagaacgccaacgccaacaacgacgagaacaacaacaacgaggagcccuccgacaagcacaucgagcaguaccucaagaagauccaguacucccucuccaccgaguggucccccugcuccgucaccugcggcaacggcauccagguccgcaucaagcccggcuccgccgacaagcccaaggaccagcucgacuacgagaacgacaucgagaagaagaucugcaagauggagaagugcuccuccgucuucaacgucgucaacuccuccaucggccucaucaugguccucuccuuccucuuccucaacuga

SEQ ID NO: 3722 - RNA, 1299 nt, Artificial Sequence
  derived and/or modified CDS sequence (opt2) from Pf(838)__AAA29543.1__CSP
augaugcgcaagcucgccauccucuccgucuccuccuuccucuucgucgaggcccucuuccaggaguaccagugcuacggcuccuccuccaacacccgcguccucaacgagcucaacuacgacaacgccggcaucaaccucuacaacgagcucgagaugaacuacuacggcaagcaggagaacugguacucccucaagaagaacucccgcucccucggcgagaacgacgacggcaacaacaacaacggcgacaacggccgcgagggcaaggacgaggacaagcgcgacggcaacaacgaggacaacgagaagcuccgcaagcccaagcacaagaagcucaagcagcccggcgacggcaaccccgaccccaacgccaaccccaacgucgaccccaacgccaaccccaacgucgaccccaacgccaaccccaacgucgaccccaacgccaaccccaacgccaaccccaacgccaaccccaacgccaaccccaacgccaaccccaacgccaaccccaacgccaaccccaacgccaaccccaacgccaaccccaacgccaaccccaacgccaaccccaacgccaaccccaacgccaaccccaacgccaaccccaacgccaaccccaacgccaaccccaacgccaaccccaacgccaaccccaacgccaaccccaacgccaaccccaacgccaaccccaacgccaaccccaacgccaaccccaacgccaaccccaacgccaaccccaacgccaaccccaacgccaaccccaacgccaaccccaacgccaaccccaacgccaaccccaacgccaaccccaacgccaaccccaacgccaaccccaacgccaaccccaacgccaaccccaacgccaaccccaacgccaaccccaacgccaaccccaacgccaaccccaacgccaaccccaacaagaacaaccagggcaacggccagggccacaacaugcccaacgaccccaaccgcaacgucgacgagaacgccaacgccaacaacgccgucaagaacaacaacaacgaggagcccuccgacaagcacaucgagcaguaccucaagaagauccagaacucccucuccaccgaguggucccccugcuccgucaccugcggcaacggcauccagguccgcaucaagcccggcuccgccaacaagcccaaggacgagcucgacuacgagaacgacaucgagaagaagaucugcaagauggagaagugcuccuccgucuucaacgucgucaacuccuccaucggccucaucaugguccucuccuuccucuuccucaacuga

SEQ ID NO: 3723 - RNA, 1299 nt, Artificial Sequence
  derived and/or modified CDS sequence (opt2) from Pf(834a)__AAA29571.1__CSP
augaugcgcaagcucgccauccucuccgucuccuccuuccucuucgucgaggcccucuuccaggaguaccagugcuacggcuccuccuccaacacccgcguccucaacgagcucaacuacgacaacgccggcaucaaccucuacaacgagcucgagaugaacuacuacggcaagcaggagaacugguacucccucaagaagaacucccgcucccucggcgagaacgacgacggcaacaacaacaacggcgacaacggccgcgagggcaaggacgaggacaagcgcgacggcaacaacgaggacaacgagaagcuccgcaagcccaagcacaagaagcucaagcagcccggcgacggcaaccccgaccccaacgccaaccccaacgucgaccccaacgccaaccccaacgucgaccccaacgccaaccccaacgucgaccccaacgccaaccccaacgucgaccccaacgccaaccccaacgccaaccccaacgccaaccccaacgccaaccccaacgccaaccccaacgccaaccccaacgccaaccccaacgccaaccccaacgccaaccccaacgccaaccccaacgccaaccccaacgccaaccccaacgccaaccccaacgccaaccccaacgccaaccccaacgccaaccccaacgccaaccccaacgccaaccccaacgccaaccccaacgccaaccccaacgccaaccccaacgccaaccccaacgccaaccccaacgccaaccccaacgccaaccccaacgccaaccccaacgccaaccccaacgccaaccccaacgccaaccccaacgccaaccccaacgccaaccccaacgccaaccccaacgccaaccccaacgccaaccccaacgccaaccccaacgccaaccccaacgccaaccccaacgccaaccccaacaagaacaaccagggcaacggccagggccacaacaugcccaacgaccccaaccgcaacgucgacgagaacgccaacgccaacaacgccgucaagaacaacaacaacgaggagcccuccgacaagcacaucgagcaguaccucaagaagauccagaacucccucuccaccgaguggucccccugcuccgucaccugcggcaacggcauccagguccgcaucaagcccggcuccgccaacaagcccaaggacgagcucgacuacgagaacgacaucgagaagaagaucugcaagauggagaagugcuccuccgucuucaacgucgucaacuccuccaucggccucaucaugguccucuccuuccucuuccucaacuga

SEQ ID NO: 3724 - RNA, 1299 nt, Artificial Sequence
  derived and/or modified CDS sequence (opt2) from Pf(India)__AAN87622.1__CSP
augaugcgcaagcucgccauccucuccgucuccuccuuccucuucgucgaggcccucuuccaggaguaccagugcuacggcuccuccuccaacacccgcguccucaacgagcucaacuacgacaacgccggcaccaaccucuacaacgagcucgagaugaacuacuacggcaagcaggagaacugguacucccucaagaagaacucccgcucccucggcgagaacgacgacggcaacaacaacaacggcgacaacggccgcgagggcaaggacgaggacaagcgcgacggcaacaacgaggacaacgagaagcuccgcaagcccaagcacaagaagcucaagcagcccgccgacggcaaccccgaccccaacgccaaccccaacgucgaccccaacgccaaccccaacgccaaccccaacgccaaccccaacgccaaccccaacgccaaccccaacgccaaccccaacgccaaccccaacgccaaccccaacgccaaccccaacgccaaccccaacgccaaccccaacgccaaccccaacgucgaccccaacgccaaccccaacgccaaccccaacgccaaccccaacgccaaccccaacgccaaccccaacgccaaccccaacgccaaccccaacgccaaccccaacgccaaccccaacgccaaccccaacgccaaccccaacgccaaccccaacgccaaccccaacgccaaccccaacgccaaccccaacgccaaccccaacgccaaccccaacgccaaccccaacgccaaccccaacgccaaccccaacgccaaccccaacgccaaccccaacgccaaccccaacgccaaccccaacgccaaccccaacgccaaccccaacgccaaccccaacgccaaccccaacgccaaccccaacgccaaccccaacgccaaccccaacaagaacaaccagggcaacggccagggccacaacaugcccaacgaccccaaccgcaacgucgacgagaacgccaacgccaacaacgccgucaagaacaacaacaacgaggagcccuccgacaagcacaucgagcaguaccucaagaagauccagaacucccucuccaccgaguggucccccugcuccgucaccugcggcaacggcauccagguccgcaucaagcccggcuccgccaacaagcccaaggacgagcucgacuacgagaacgacaucgagaagaagaucugcaagauggagaagugcuccuccgucuucaacgucgucaacuccuccaucggccucaucaugguccucuccuuccucuuccucaacuga

SEQ ID NO: 3725 - RNA, 1299 nt, Artificial Sequence
  derived and/or modified CDS sequence (opt2) from Pf(PFS31)__BAN59407.1__CSP
augaugcgcaagcucgccauccucuccgucuccuccuuccucuucgucgaggcccucuuccaggaguaccagugcuacggcuccuccuccaacacccgcguccucaacgagcucaacuacgacaacgccggcaccaaccucuacaacgagcucgagaugaacuacuacggcaagcaggagaacugguacucccucaagaagaacucccgcucccucggcgagaacgacgacggcaacaacaacaacggcgacaacggccgcgagggcaaggacgaggacaagcgcgacggcaacaacgaggacaacgagaagcuccgcaagcccaagcacaagaagcucaagcagcccggcgacggcaaccccgaccccaacgccaaccccaacgucgaccccaacgccaaccccaacgucgaccccaacgccaaccccaacgucgaccccaacgccaaccccaacgccaaccccaacgccaaccccaacgccaaccccaacgccaaccccaacgccaaccccaacgccaaccccaacgccaaccccaacgccaaccccaacgccaaccccaacgccaaccccaacgccaaccccaacgccaaccccaacgccaaccccaacgccaaccccaacgccaaccccaacgccaaccccaacgccaaccccaacgccaaccccaacgccaaccccaacgccaaccccaacgccaaccccaacgccaaccccaacgccaaccccaacgccaaccccaacgccaaccccaacgccaaccccaacgccaaccccaacgccaaccccaacgccaaccccaacgccaaccccaacgccaaccccaacgccaaccccaacgccaaccccaacgccaaccccaacgccaaccccaacgccaaccccaacgccaaccccaacgccaaccccaacgccaaccccaacaagaacaaccagggcaacggccagggccacaacaugcccaacgaccccaaccgcaacgucgacgagaacgccaacgccaacaacgacgucaagaacaacaacaacgaggagcccuccgacaagcacaucgaggaguaccucaagaagauccagaacucccucuccaccgaguggucccccugcuccgucaccugcggcaacggcauccagguccgcaucaagcccggcuccgccaacaagcccaaggacgagcucaacuacgagaacgacaucgagaagaagaucugcaagauggagaagugcuccuccgucuucaacgucgucaacuccuccaucggccucaucaugguccucuccuuccucuuccucaacuga

SEQ ID NO: 3726 - RNA, 1299 nt, Artificial Sequence
  derived and/or modified CDS sequence (opt2) from Pf(PNG912-070)__BAM85010.1__CSP
augaugcgcaagcucgccauccucuccgucuccuccuuccucuucgucgaggcccucuuccaggaguaccagugcuacggcuccuccuccaacacccgcguccucaacgagcucaacuacgacaacgccggcaccaaccucuacaacgagcucgagaugaacuacuacggcaagcaggagaacugguacucccucaagaagaacucccgcucccucggcgagaacgacgacggcaacaacaacaacggcgacaacggccgcgagggcaaggacgaggacaagcgcgacggcaacaacgaggacaacgagaagcuccgcaagcccaagcacaagaagcucaagcagcccgucgacggcaaccccgaccccaacgccaaccccaacgucgaccccaacgccaaccccaacgucgaccccaacgccaaccccaacgucgaccccaacgccaaccccaacgccaaccccaacgccaaccccaacgccaaccccaacgccaaccccaacgccaaccccaacgccaaccccaacgccaaccccaacgccaaccccaacgccaaccccaacgccaaccccaacgccaaccccaacgccaaccccaacgccaaccccaacgccaaccccaacgccaaccccaacgccaaccccaacgccaaccccaacgccaaccccaacgccaaccccaacgccaaccccaacgccaaccccaacgccaaccccaacgccaaccccaacgccaaccccaacgccaaccccaacgccaaccccaacgccaaccccaacgccaaccccaacgccaaccccaacgccaaccccaacgccaaccccaacgccaaccccaacgccaaccccaacgccaaccccaacgccaaccccaacgccaaccccaacgccaaccccaacgccaaccccaacgccaaccccaacaagaacaaccagggcaacggccagggccacaacaugcccaacgaccccaaccgcaacgucgacgagaacgccaacgccaacaacgccgucaagaacaacaacaacgaggagcccuccgacaagcacaucgagcaguaccucaagaagauccagaacucccucuccaccgaguggucccccugcuccgucaccugcggcaacggcauccagguccgcaucaagcccggcuccgccgacaagcccaaggaccagcucgacuacgagaacgacaucgagaagaagaucugcaagauggagaagugcuccuccgucuucaacgucgucaacuccuccaucggccucaucaugguccucuccuuccucuuccucaacuga

SEQ ID NO: 3727 - RNA, 1299 nt, Artificial Sequence
  derived and/or modified CDS sequence (opt2) from Pf(PVS20)__BAN59429.1__CSP
augaugcgcaagcucgccauccucuccgucuccuccuuccucuucgucgaggcccucuuccaggaguaccagugcuacggcuccuccuccaacacccgcguccucaacgagcucaacuacgacaacgccggcaccaaccucuacaacgagcucgagaugaacuacuacggcaagcaggagaacugguacucccucaagaagaacucccgcucccucggcgagaacgacgacggcaacaacaacaacggcgacaacggccgcgagggcaaggacgaggacaagcgcgacggcaacaacgaggacaacgagaagcuccgcaagcccaagcacaagaagcucaagcagcccggcgacggcaaccccgaccccaacgccaaccccaacgucgaccccaacgccaaccccaacgucgaccccaacgccaaccccaacgucgaccccaacgccaaccccaacgccaaccccaacgccaaccccaacgccaaccccaacgccaaccccaacgccaaccccaacgccaaccccaacgccaaccccaacgccaaccccaacgccaaccccaacgccaaccccaacgccaaccccaacgccaaccccaacgccaaccccaacgccaaccccaacgccaaccccaacgccaaccccaacgccaaccccaacgccaaccccaacgccaaccccaacgccaaccccaacgccaaccccaacgccaaccccaacgccaaccccaacgccaaccccaacgccaaccccaacgccaaccccaacgccaaccccaacgccaaccccaacgccaaccccaacgccaaccccaacgccaaccccaacgccaaccccaacgccaaccccaacgccaaccccaacgccaaccccaacgccaaccccaacgccaaccccaacgccaaccccaacgccaaccccaacaagaacaaccagggcaacggccagggccacaacaugcccaacgaccccaaccgcaacgucgacgagaacgccaacgccaacaacgccgucaagaacaacaacaacgaggagcccuccgacaagcacaucgagcaguaccucaagaagauccagaacucccucuccaccgaguggucccccugcuccgucaccugcggcaacggcauccagguccgcaucaagcccggcuccgccaacaagcccaaggacgagcucgacuacgagaacgacaucgagaagaagaucugcaagauggagaagugcuccuccgucuucaacgucgucaacuccuccaucggccucaucaugguccucuccuuccucuuccucaacuga

SEQ ID NO: 3728 - RNA, 1299 nt, Artificial Sequence
  derived and/or modified CDS sequence (opt2) from Pf(Sol95-241)__BAM85085.1__CSP
augaugcgcaagcucgccauccucuccgucuccuccuuccucuucgucgaggcccucuuccaggaguaccagugcuacggcuccuccuccaacacccgcguccucaacgagcucaacuacgacaacgccggcaccaaccucuacaacgagcucgagaugaacuacuacggcaagcaggagaacugguacucccucaagaagaacucccgcucccucggcgagaacgacgacggcaacaacaacaacggcgacaacggccgcgagggcaaggacgaggacaagcgcgacggcaacaacgaggacaacgagaagcuccgcaagcccaagcacaagaagcucaagcagcccggcgacggcaaccccgaccccaacgccaaccccaacgucgaccccaacgccaaccccaacgucgaccccaacgccaaccccaacgucgaccccaacgccaaccccaacgucgaccccaacgccaaccccaacgccaaccccaacgccaaccccaacgccaaccccaacgccaaccccaacgccaaccccaacgccaaccccaacgccaaccccaacgccaaccccaacgccaaccccaacgccaaccccaacgccaaccccaacgccaaccccaacgccaaccccaacgccaaccccaacgccaaccccaacgccaaccccaacgccaaccccaacgccaaccccaacgccaaccccaacgccaaccccaacgccaaccccaacgccaaccccaacgccaaccccaacgccaaccccaacgccaaccccaacgccaaccccaacgccaaccccaacgccaaccccaacgccaaccccaacgccaaccccaacgccaaccccaacgccaaccccaacgccaaccccaacgccaaccccaacgccaaccccaacgccaaccccaacgccaaccccaacaagaacaaccagggcaacggccagggccacaacaugcccaacgaccccaaccgcaacgucgacgagaacgccaacgccaacaacgccgucaagaacaacaacaacgaggagcccuccgacaagcacaucgagcaguaccucaagaagauccagaacucccucuccaccgaguggucccccugcuccgucaccugcggcaacggcauccagguccgcaucaagcccggcuccgccaacaagcccaaggacgagcucgacuacgagaacgacaucgagaagaagaucugcaagauggagaagugcuccuccgucuucaacgucgucaacuccuccaucggccucaucaugguccucuccuuccucuuccucaacuga

SEQ ID NO: 3729 - RNA, 1299 nt, Artificial Sequence
  derived and/or modified CDS sequence (opt2) from Pf(TiMS95-198)__BAM84895.1__CSP
augaugcgcaagcucgccauccucuccgucuccuccuuccucuucgucgaggcccucuuccaggaguaccagugcuacggcuccuccuccaacacccgcguccucaacgagcucaacuacgacaacgccggcaccaaccucuacaacgagcucgagaugaacuacuacggcaagcaggagaacugguacucccucaagaagaacucccgcucccucggcgagaacgacgacggcaacaacaacaacggcgacaacggccgcgagggcaaggacgaggacaagcgcgacggcaacaacgaggacaacgagaagcuccgcaagcccaagcacaagaagcucaagcagcccggcgacggcaaccccgaccccaacgccaaccccaacgucgaccccaacgccaaccccaacgucgaccccaacgccaaccccaacgucgaccccaacgccaaccccaacgccaaccccaacgccaaccccaacgccaaccccaacgccaaccccaacgccaaccccaacgccaaccccaacgccaaccccaacgccaaccccaacgccaaccccaacgccaaccccaacgccaaccccaacgccaaccccaacgccaaccccaacgccaaccccaacgccaaccccaacgccaaccccaacgccaaccccaacgccaaccccaacgccaaccccaacgccaaccccaacgccaaccccaacgccaaccccaacgccaaccccaacgccaaccccaacgccaaccccaacgccaaccccaacgccaaccccaacgccaaccccaacgccaaccccaacgccaaccccaacgccaaccccaacgccaaccccaacgccaaccccaacgccaaccccaacgccaaccccaacgccaaccccaacgccaaccccaacgccaaccccaacgccaaccccaacaagaacaaccagggcaacggccagggccacaacaugcccaacgaccccaaccgcaacgucgacgagaacgccaacgccaacaacgccgucaagaacaacaacaacgaggagcccuccgacaagcacaucgagcaguaccucaagaacauccagaacucccucuccaccgaguggucccccugcuccgucaccugcggcaacggcauccagguccgcaucaagcccggcuccgccaacaagcccaaggacgagcucgacuacgagaacgacaucgagaagaagaucugcaagauggagaagugcuccuccgucuucaacgucgucaacuccuccaucggccucaucaugguccucuccuuccucuuccucaacuga

SEQ ID NO: 3730 - RNA, 1296 nt, Artificial Sequence
  derived and/or modified CDS sequence (opt2) from Pf(D164)__ACO49368.1__CSP
augcgcaagcucgccauccucuccgucuccuccuuccucuucgucgaggcccucuuccaggaguaccagugcuacggcuccuccuccaacacccgcguccucaacgagcucaacuacgacaacgccggcaccaaccucuacaacgagcucgagaugaacuacuacggcaagcaggagaacugguacucccucaagaagaacucccgcucccucggcgagaacgacgacggcaacaacaacaacggcgacaacggccgcgagggcaaggacgaggacaagcgcgacggcaacaacgaggacaacgagaagcuccgcaagcccaagcacaagaagcucaagcagcccggcgacggcaaccccgaccccaacgccaaccccaacgucgaccccaacgccaaccccaacgucgaccccaacgccaaccccaacgucgaccccaacgccaaccccaacgucgaccccaacgccaaccccaacgccaaccccaacgccaaccccaacgccaaccccaacgccaaccccaacgccaaccccaacgccaaccccaacgccaaccccaacgccaaccccaacgccaaccccaacgccaaccccaacgccaaccccaacgccaaccccaacgccaaccccaacgccaaccccaacgccaaccccaacgccaaccccaacgccaaccccaacgccaaccccaacgccaaccccaacgccaaccccaacgccaaccccaacgccaaccccaacgccaaccccaacgccaaccccaacgccaaccccaacgccaaccccaacgccaaccccaacgccaaccccaacgccaaccccaacgccaaccccaacgccaaccccaacgccaaccccaacgccaaccccaacgccaaccccaacgccaaccccaacgccaaccccaacgccaaccccaacaagaacaaccagggcaacggccagggccacaacaugcccaacgaccccaaccgcaacgucgacgagaacgccaacgccaacaacgccgucaagaacaacaacaacgaggagcccuccgacaagcacaucgagcaguaccucaagaagauccagaacucccucuccaccgaguggucccccugcuccgucaccugcggcaacggcauccagguccgcaucaagcccggcuccgccaacaagcccaaggacgagcucgacuacgagaacgacaucgagaagaagaucugcaagauggagaagugcuccuccgucuucaacgucgucaacuccuccaucggccucaucaugguccucuccuuccucuuccucaacuga

SEQ ID NO: 3731 - RNA, 1296 nt, Artificial Sequence
  derived and/or modified CDS sequence (opt2) from Pf(E28)__ACO49378.1__CSP
augcgcaagcucgccauccucuccgucuccuccuuccucuucgucgaggcccucuuccaggaguaccagugcuacggcuccuccuccaacacccgcguccucaacgagcucaacuacgacaacgccggcaccaaccucuacaacgagcucgagaugaacuacuacggcaagcaggagaacugguacucccucaagaagaacucccgcucccucggcgagaacgacgacggcaacaacaacaacggcgacaacggccgcgagggcaaggacgaggacaagcgcgacggcaacaacgaggacaacgagaagcuccgcaagcccaagcacaagaagcucaagcagcccggcgacggcaaccccgaccccaacgccaaccccaacgucgaccccaacgccaaccccaacgucgaccccaacgccaaccccaacgucgaccccaacgccaaccccaacgccaaccccaacgccaaccccaacgccaaccccaacgccaaccccaacgccaaccccaacgccaaccccaacgccaaccccaacgccaaccccaacgccaaccccaacgccaaccccaacgccaaccccaacgccaaccccaacgccaaccccaacgccaaccccaacgccaaccccaacgccaaccccaacgccaaccccaacgccaaccccaacgccaaccccaacgccaaccccaacgccaaccccaacgccaaccccaacgccaaccccaacgccaaccccaacgccaaccccaacgccaaccccaacgccaaccccaacgccaaccccaacgccaaccccaacgccaaccccaacgccaaccccaacgccaaccccaacgccaaccccaacgccaaccccaacgccaaccccaacgccaaccccaacgccaaccccaacgccaaccccaacgccaaccccaacaagaacaaccagggcaacggccagggccacaacaugcccaacgaccccaaccgcaacgucgacgagaacgccaacgccaacaacgccgucaagaacaacaacaacgaggagcccuccgacaagcacaucgagcaguaccucaagaacauccagaacucccucuccaccgaguggucccccugcuccgucaccugcggcaacggcauccagguccgcaucaagcccggcuccgccaacaagcccaaggacgagcucgacuacgagaacgacaucgagaagaagaucugcaagauggagaagugcuccuccgucuucaacgucgucaacuccuccaucggccucaucaugguccucuccuuccucuuccucaacuga

SEQ ID NO: 3732 - RNA, 1296 nt, Artificial Sequence
  derived and/or modified CDS sequence (opt2) from Pf(TM121)__ACO49457.1__CSP
augcgcaagcucgccauccucuccgucuccuccuuccucuucgucgaggcccucuuccaggaguaccagugcuacggcuccuccuccaacacccgcguccucaacgagcucaacuacgacaacgccggcaccaaccucuacaacgagcucgagaugaacuacuacggcaagcaggagaacugguacucccucaagaagaacucccgcucccucggcgagaacgacgacggcaacaacaacaacggcgacaacggccgcgagggcaaggacgaggacaagcgcgacggcaacaacgaggacaacgagaagcuccgcaagcccaagcacaagaagcucaagcagcccggcgacggcaaccccgaccccaacgccaaccccaacgucgaccccaacgccaaccccaacgucgaccccaacgccaaccccaacgucgaccccaacgccaaccccaacgccaaccccaacgccaaccccaacgccaaccccaacgccaaccccaacgccaaccccaacgccaaccccaacgccaaccccaacgccaaccccaacgccaaccccaacgccaaccccaacgccaaccccaacgccaaccccaacgccaaccccaacgccaaccccaacgccaaccccaacgccaaccccaacgccaaccccaacgccaaccccaacgccaaccccaacgccaaccccaacgccaaccccaacgccaaccccaacgccaaccccaacgccaaccccaacgccaaccccaacgccaaccccaacgccaaccccaacgccaaccccaacgccaaccccaacgccaaccccaacgccaaccccaacgccaaccccaacgccaaccccaacgccaaccccaacgccaaccccaacgccaaccccaacgccaaccccaacgccaaccccaacgccaaccccaacaagaacaaccagggcaacggccagggccacaacaugcccaacgaccccaaccgcaacgucgacgagaacgccaacgccaacaacgacgucaagaacaacaacaacgaggagcccuccgacaagcacaucgagcaguaccucaagaagauccaguacucccucuccaccgaguggucccccugcuccgucaccugcggcaacggcauccagguccgcaucaagcccggcuccgccaacaagcccaaggacgagcucgacuacgagaacgacaucgagaagaagaucugcaagauggagaagugcuccuccgucuucaacgucgucaacuccuccaucggccucaucaugguccucuccuuccucuuccucaacuga

SEQ ID NO: 3733 - RNA, 1296 nt, Artificial Sequence
  derived and/or modified CDS sequence (opt2) from Pf(TM176)__ACO49467.1__CSP
augcgcaagcucgccauccucuccgucuccuccuuccucuucgucgaggcccucuuccaggaguaccagugcuacggcuccuccuccaacacccgcguccucaacgagcucaacuacgacaacgccggcaccaaccucuacaacgagcucgagaugaacuacuacggcaagcaggagaacugguacucccucaagaagaacucccgcucccucggcgagaacgacgacggcaacaacaacaacggcgacaacggccgcgagggcaaggacgaggacaagcgcgacggcaacaacgaggacaacgagaagcuccgcaagcccaagcacaagaagcucaagcagcccggcgacggcaaccccgaccccaacgccaaccccaacgucgaccccaacgccaaccccaacgucgaccccaacgccaaccccaacgucgaccccaacgccaaccccaacgccaaccccaacgccaaccccaacgccaaccccaacgccaaccccaacgccaaccccaacgccaaccccaacgccaaccccaacgccaaccccaacgccaaccccaacgccaaccccaacgccaaccccaacgccaaccccaacgccaaccccaacgccaaccccaacgccaaccccaacgccaaccccaacgccaaccccaacgccaaccccaacgccaaccccaacgccaaccccaacgccaaccccaacgccaaccccaacgccaaccccaacgccaaccccaacgccaaccccaacgccaaccccaacgccaaccccaacgccaaccccaacgccaaccccaacgccaaccccaacgccaaccccaacgccaaccccaacgccaaccccaacgccaaccccaacgccaaccccaacgccaaccccaacgccaaccccaacgccaaccccaacgccaaccccaacaagaacaaccagggcaacggccagggccacaacaugcccaacgaccccaaccgcaacgucgacgagaacgccaacgccaacaacgacgucaagaacaacaacaacgaggagcccuccgacaagcacaucgagcaguaccucaagaagauccaguacucccucuccaccgaguggucccccugcuccgucaccugcggcaacggcauccagguccgcaucaagcccggcuccgccgacaagcccaaggaccagcucgacuacgagaacgacaucgagaagaagaucugcaagauggagaagugcuccuccgucuucaacgucgucaacuccuccaucggccucaucaugguccucuccuuccucuuccucaacuga

SEQ ID NO: 3734 - RNA, 1296 nt, Artificial Sequence
  derived and/or modified CDS sequence (opt2) from Pf(TSY650)__ACO49541.1__CSP
augcgcaagcucgccauccucuccgucuccuccuuccucuucgucgaggcccucuuccaggaguaccagugcuacggcuccuccuccaacacccgcguccucaacgagcucaacuacgacaacgccggcaccaaccucuacaacgagcucgagaugaacuacuacggcaagcaggagaacugguacucccucaagaagaacucccgcucccucggcgagaacgacgacggcaacaacaacaacggcgacaacggccgcgagggcaaggacgaggacaagcgcgacggcaacaacgaggacaacgagaagcuccgcaagcccaagcacaagaagcucaagcagcccggcgacggcaaccccgaccccaacgccaaccccaacgucgaccccaacgccaaccccaacgucgaccccaacgccaaccccaacgucgaccccaacgccaaccccaacgccaaccccaacgccaaccccaacgccaaccccaacgccaaccccaacgccaaccccaacgccaaccccaacgccaaccccaacgccaaccccaacgccaaccccaacgccaaccccaacgccaaccccaacgccaaccccaacgccaaccccaacgccaaccccaacgccaaccccaacgccaaccccaacgccaaccccaacgccaaccccaacgccaaccccaacgccaaccccaacgccaaccccaacgccaaccccaacgccaaccccaacgccaaccccaacgccaaccccaacgccaaccccaacgccaaccccaacgccaaccccaacgccaaccccaacgccaaccccaacgccaaccccaacgccaaccccaacgccaaccccaacgccaaccccaacgccaaccccaacgccaaccccaacgccaaccccaacgccaaccccaacgccaaccccaacaagaacaaccagggcaacggccagggccacaacaugcccaacgaccccaaccgcaacgucgacgagaacgccaacgccaacaacgccgucaagaacaacaacaacgaggagcccuccgacaagcacaucgagcaguaccucaagaagauccagaacucccucuccaccgaguggucccccugcuccgucaccugcggcaacggcauccagguccgcaucaagcccggcuccgccaacaagcccaaggacgagcucgacuacgagaacgacaucgagaagaagaucugcaagauggagaagugcuccuccgucuucaacgucgucaacuccuccaucggccucaucaugguccucuccuuccucuuccucaacuga

SEQ ID NO: 3735 - RNA, 1296 nt, Artificial Sequence
  derived and/or modified CDS sequence (opt2) from Pf(TSY682)__ACO49544.1__CSP
augcgcaagcucgccauccucuccgucuccuccuuccucuucgucgaggcccucuuccaggaguaccagugcuacggcuccuccuccaacacccgcguccucaacgagcucaacuacgacaacgccggcaccaaccucuacaacgagcucgagaugaacuacuacggcaagcaggagaacugguacucccucaagaagaacucccgcucccucggcgagaacgacgacggcaacaacaacaacggcgacaacggccgcgagggcaaggacgaggacaagcgcgacggcaacaacgaggacaacgagaagcuccgcaagcccaagcacaagaagcucaagcagcccggcgacggcaaccccgaccccaacgccaaccccaacgucgaccccaacgccaaccccaacgucgaccccaacgccaaccccaacgucgaccccaacgccaaccccaacgccaaccccaacgccaaccccaacgccaaccccaacgccaaccccaacgccaaccccaacgccaaccccaacgccaaccccaacgccaaccccaacgccaaccccaacgccaaccccaacgccaaccccaacgccaaccccaacgccaaccccaacgccaaccccaacgccaaccccaacgccaaccccaacgccaaccccaacgccaaccccaacgccaaccccaacgccaaccccaacgccaaccccaacgccaaccccaacgccaaccccaacgccaaccccaacgccaaccccaacgccaaccccaacgccaaccccaacgccaaccccaacgccaaccccaacgccaaccccaacgccaaccccaacgccaaccccaacgccaaccccaacgccaaccccaacgccaaccccaacgccaaccccaacgccaaccccaacgccaaccccaacgccaaccccaacaagaacaaccagggcaacggccagggccacaacaugcccaacgaccccaaccgcaacgucgacgagaacgccaacgccaacaacgacgucaagaacaacaacaacgaggagcccuccgacaagcacaucgaggaguaccucaagaagauccagaacucccucuccaccgaguggucccccugcuccgucaccugcggcaacggcauccagguccgcaucaagcccggcuccgccaacaagcccaaggacgagcucaacuacgagaacgacaucgagaagaagaucugcaagauggagaagugcuccuccgucuucaacgucgucaacuccuccaucggccucaucaugguccucuccuuccucuuccucaacuga

SEQ ID NO: 3736 - RNA, 1287 nt, Artificial Sequence
  derived and/or modified CDS sequence (opt2) from Pf(India)__AAN87575.1__CSP
augaugcgcaagcucgccauccucuccgucuccuccuuccucuucgucgaggcccucuuccaggaguaccagugcuacggcuccuccuccaacacccgcguccucaacgagcucaacuacgacaacgccggcaccaaccucuacaacgagcucgagaugaacuacuacggcaagcaggagaacugguacucccucaagaagaacucccgcucccucggcgagaacgacgacggcaacaacaacaacggcgacaacggccgcgagggcaaggacgaggacaagcgcgacggcaacaacgaggacaacgagaagcuccgcaagcccaagcacaagaagcucaagcagcccggcgacggcaaccccgaccccaacgccaaccccaacgucgaccccaacgccaaccccaacgucgaccccaacgccaaccccaacgccaaccccaacgccaaccccaacgccaaccccaacgccaaccccaacgccaaccccaacgccaaccccaacgccaaccccaacgccaaccccaacgccaaccccaacgccaaccccaacgccaaccccaacgccaaccccaacgccaaccccaacgccaaccccaacgccaaccccaacgccaaccccaacgccaaccccaacgccaaccccaacgccaaccccaacgccaaccccaacgccaaccccaacgccaaccccaacgccaaccccaacgccaaccccaacgccaaccccaacgccaaccccaacgccaaccccaacgccaaccccaacgccaaccccaacgccaaccccaacgccaaccccaacgccaaccccaacgccaaccccaacgccaaccccaacgccaaccccaacgccaaccccaacgccaaccccaacgccaaccccaacgccaaccccaacgccaaccccaacaagaacaaccagggcaacggccgcggccacaacaugcccaacgaccccaaccgcaacgucgacgagaacgccaacgccaacaacgacgucaagaacaacaacaacgaggagcccuccgacaagcacaucgaggaguaccucaagaagauccagaacucccucuccaccgaguggucccccugcuccgucaccugcggcaacggcauccagguccgcaucaagcccggcuccgccaacaagcccaaggacgagcucaacuacgagaacgacaucgagaagaagaucugcaagauggagaagugcuccuccgucuucaacgucgucaacuccuccaucggccucaucaugguccucuccuuccucuuccucaacuga

SEQ ID NO: 3737 - RNA, 1287 nt, Artificial Sequence
  derived and/or modified CDS sequence (opt2) from Pf(Pal97-082)__BAM84946.1__CSP
augaugcgcaagcucgccauccucuccgucuccuccuuccucuucgucgaggcccucuuccaggaguaccagugcuacggcuccuccuccaacacccgcguccucaacgagcucaacuacgacaacgccggcaccaaccucuacaacgagcucgagaugaacuacuacggcaagcaggagaacugguacucccucaagaagaacucccgcucccucggcgagaacgacgacggcaacaacaacaacggcgacaacggccgcgagggcaaggacgaggacaagcgcgacggcaacaacgaggacaacgagaagcuccgcaagcccaagcacaagaagcucaagcagcccggcgacggcaaccccgaccccaacgccaaccccaacgucgaccccaacgccaaccccaacgucgaccccaacgccaaccccaacgucgaccccaacgccaaccccaacgccaaccccaacgccaaccccaacgccaaccccaacgccaaccccaacgccaaccccaacgccaaccccaacgccaaccccaacgccaaccccaacgccaaccccaacgccaaccccaacgccaaccccaacgccaaccccaacgccaaccccaacgccaaccccaacgccaaccccaacgccaaccccaacgccaaccccaacgccaaccccaacgucgaccccaacgccaaccccaacgccaaccccaacgccaaccccaacgccaaccccaacgccaaccccaacgccaaccccaacgccaaccccaacgccaaccccaacgccaaccccaacgccaaccccaacgccaaccccaacgccaaccccaacgccaaccccaacgccaaccccaacgccaaccccaacgccaaccccaacgccaaccccaacgccaaccccaacgccaaccccaacaagaacaaccagggcaacggccagggccacaacaugcccaacgaccccaaccgcaacgucgacgagaacgccaacgccaacaacgccgucaagaacaacaacaacgaggagcccuccgacaagcacaucgagcaguaccucaagaagauccagaacucccucuccaccgaguggucccccugcuccgucaccugcggcaacggcauccagguccgcaucaagcccggcuccgccggcaaguccaaggacgagcucgacuacgagaacgacaucgagaagaagaucugcaagauggagaagugcuccuccgucuucaacgucgucaacuccuccaucggccucaucaugguccucuccuuccucuuccucaacuga

SEQ ID NO: 3738 - RNA, 1287 nt, Artificial Sequence
  derived and/or modified CDS sequence (opt2) from Pf(Pal97-084)__BAM84947.1__CSP
augaugcgcaagcucgccauccucuccgucuccuccuuccucuucgucgaggcccucuuccaggaguaccagugcuacggcuccuccuccaacacccgcguccucaacgagcucaacuacgacaacgccggcaccaaccucuacaacgagcucgagaugaacuacuacggcaagcaggagaacugguacucccucaagaagaacucccgcucccucggcgagaacgacgacggcaacaacaacaacggcgacaacggccgcgagggcaaggacgaggacaagcgcgacggcaacaacgaggacaacgagaagcuccgcaagcccaagcacaagaagcucaagcagcccggcgacggcaaccccgaccccaacgccaaccccaacgucgaccccaacgccaaccccaacgucgaccccaacgccaaccccaacgucgaccccaacgccaaccccaacgccaaccccaacgccaaccccaacgccaaccccaacgccaaccccaacgccaaccccaacgccaaccccaacgccaaccccaacgccaaccccaacgccaaccccaacgccaaccccaacgccaaccccaacgccaaccccaacgccaaccccaacgccaaccccaacgccaaccccaacgccaaccccaacgccaaccccaacgccaaccccaacgccaaccccaacgccaaccccaacgccaaccccaacgccaaccccaacgccaaccccaacgccaaccccaacgccaaccccaacgccaaccccaacgccaaccccaacgccaaccccaacgccaaccccaacgccaaccccaacgccaaccccaacgccaaccccaacgccaaccccaacgccaaccccaacgccaaccccaacgccaaccccaacgccaaccccaacgccaaccccaacaagaacaaccagggcaacggccagggccacaacaugcccaacgaccccaaccgcaacgucgacgagaacgccaacgccaacaacgccgucaagaacaacaacaacgaggagcccuccgaccagcacaucgagaaguaccucaagaucauccagaacucccucuccaccgaguggucccccugcuccgucaccugcggcaacggcauccagguccgcaucaagcccggcuccgccgacaagcccaaggaccagcucgacuacgccaacgacaucgagaagaagaucugcaagauggagaagugcuccuccgucuucaacgucgucaacuccuccaucggccucaucaugguccucuccuuccucuuccucaacuga

SEQ ID NO: 3739 - RNA, 1287 nt, Artificial Sequence
  derived and/or modified CDS sequence (opt2) from Pf(PFS54)__BAN59412.1__CSP
augaugcgcaagcucgccauccucuccgucuccuccuuccucuucgucgaggcccucuuccaggaguaccagugcuacggcuccuccuccaacacccgcguccucaacgagcucaacuacgacaacgccggcaccaaccucuacaacgagcucgagaugaacuacuacggcaagcaggagaacugguacucccucaagaagaacucccgcucccucggcgagaacgacgacggcaacaacaacaacggcgacaacggccgcgagggcaaggacgaggacaagcgcgacggcaacaacgaggacaacgagaagcuccgcaagcccaagcacaagaagcucaagcagcccggcgacgacaaccccgaccccaacgccaaccccaacgucgaccccaacgccaaccccaacgucgaccccaacgccaaccccaacgccaaccccaacgccaaccccaacgccaaccccaacgccaaccccaacgccaaccccaacgccaaccccaacgccaaccccaacgccaaccccaacgccaaccccaacgccaaccccaacgccaaccccaacgccaaccccaacgccaaccccaacgucgaccccaacgccaaccccaacgccaaccccaacgccaaccccaacgccaaccccaacgccaaccccaacgccaaccccaacgccaaccccaacgccaaccccaacgccaaccccaacgccaaccccaacgccaaccccaacgccaaccccaacgccaaccccaacgccaaccccaacgccaaccccaacgccaaccccaacgccaaccccaacgccaaccccaacgccaaccccaacgccaaccccaacgccaaccccaacgccaaccccaacgccaaccccaacgccaaccccaacgccaaccccaacgccaaccccaacaagaacaaccagggcaacggccagggccacaacaugcccaacgaccccaaccgcaacgucgacgagaacgccaacgccaacaacgccgucaagaacaacaacaacgaggagcccuccgacaagcacaucgagcaguaccucaagaagauccaguacucccucuccaccgaguggucccccugcuccgucaccugcggcaacggcauccagguccgcaucaagcccggcuccgccgacaagcccaaggaccagcucgacuacgagaacgacaucgagaagaagaucugcaagauggagaagugcuccuccgucuucaacgucgucaacuccuccaucggccucaucaugguccucuccuuccucuuccucaacuga

SEQ ID NO: 3740 - RNA, 1287 nt, Artificial Sequence
  derived and/or modified CDS sequence (opt2) from Pf(PFS79)__BAN59422.1__CSP
augaugcgcaagcucgccauccucuccgucuccuccuuccucuucgucgaggcccucuuccaggaguaccagugcuacggcuccuccuccaacacccgcguccucaacgagcucaacuacgacaacgccggcaccaaccucuacaacgagcucgagaugaacuacuacggcaagcaggagaacugguacucccucaagaagaacucccgcucccucggcgagaacgacgacggcaacaacaacaacggcgacaacggccgcgagggcaaggacgaggacaagcgcgacggcaacaacgaggacaacgagaagcuccgcaagcccaagcacaagaagcucaagcagcccggcgacggcaaccccgaccccaacgccaaccccaacgucgaccccaacgccaaccccaacgucgaccccaacgccaaccccaacgucgaccccaacgccaaccccaacgccaaccccaacgccaaccccaacgccaaccccaacgccaaccccaacgccaaccccaacgccaaccccaacgccaaccccaacgccaaccccaacgccaaccccaacgccaaccccaacgccaaccccaacgccaaccccaacgccaaccccaacgccaaccccaacgccaaccccaacgccaaccccaacgccaaccccaacgccaaccccaacgccaaccccaacgccaaccccaacgccaaccccaacgccaaccccaacgccaaccccaacgccaaccccaacgccaaccccaacgccaaccccaacgccaaccccaacgccaaccccaacgccaaccccaacgccaaccccaacgccaaccccaacgccaaccccaacgccaaccccaacgccaaccccaacgccaaccccaacgccaaccccaacgccaaccccaacgccaaccccaacaagaacaaccagggcaacggccagggccacaacaugcccaacgaccccaaccgcaacgucgacgagaacgccaacgccaacaacgccgucaagaacaacaacaacgaggagcccuccgacaagcacaucgagcaguaccucaagaagauccagaacucccucuccaccgaguggucccccugcuccgucaccugcggcaacggcauccagguccgcaucaagcccggcuccgccaacaagcccaaggacgagcucgacuacgagaacgacaucgagaagaagaucugcaagauggagaagugcuccuccgucuucaacgucgucaacuccuccaucggccucaucaugguccucuccuuccucuuccucaacuga

SEQ ID NO: 3741 - RNA, 1287 nt, Artificial Sequence
  derived and/or modified CDS sequence (opt2) from Pf(PFS83)__BAN59424.1__CSP
augaugcgcaagcucgccauccucuccgucuccuccuuccucuucgucgaggcccucuuccaggaguaccagugcuacggcuccuccuccaacacccgcguccucaacgagcucaacuacgacaacgccggcaccaaccucuacaacgagcucgagaugaacuacuacggcaagcaggagaacugguacucccucaagaagaacucccgcucccucggcgagaacgacgacggcaacaacaacaacggcgacaacggccgcgagggcaaggacgaggacaagcgcgacggcaacaacgaggacaacgagaagcuccgcaagcccaagcacaagaagcucaagcagcccggcgacggcaaccccgaccccaacgccaaccccaacgucgaccccaacgccaaccccaacgucgaccccaacgccaaccccaacgucgaccccaacgccaaccccaacgucgaccccaacgccaaccccaacgccaaccccaacgccaaccccaacgccaaccccaacgccaaccccaacgccaaccccaacgccaaccccaacgccaaccccaacgccaaccccaacgccaaccccaacgccaaccccaacgccaaccccaacgccaaccccaacgccaaccccaacgccaaccccaacgccaaccccaacgccaaccccaacgccaaccccaacgccaaccccaacgccaaccccaacgccaaccccaacgccaaccccaacgccaaccccaacgccaaccccaacgccaaccccaacgccaaccccaacgccaaccccaacgccaaccccaacgccaaccccaacgccaaccccaacgccaaccccaacgccaaccccaacgccaaccccaacgccaaccccaacgccaaccccaacgccaaccccaacgccaaccccaacaagaacaaccagggcaacggccagggccacaacaugcccaacgaccccaaccgcaacgucgacgagaacgccaacgccaacaacgccgucaagaacaacaacaacgaggagcccuccgacaagcacaucgagcaguaccucaagaagauccagaacucccucuccaccgaguggucccccugcuccgucaccugcggcaacggcauccagguccgcaucaagcccggcuccgccaacaagcccaaggacgagcucgacuacgagaacgacaucgagaagaagaucugcaagauggagaagugcuccuccgucuucaacgucgucaacuccuccaucggccucaucaugguccucuccuuccucuuccucaacuga

SEQ ID NO: 3742 - RNA, 1287 nt, Artificial Sequence
  derived and/or modified CDS sequence (opt2) from Pf(TiMS95-112)__BAM84878.1__CSP
augaugcgcaagcucgccauccucuccgucuccuccuuccucuucgucgaggcccucuuccaggaguaccagugcuacggcuccuccuccaacacccgcguccucaacgagcucaacuacgacaacgccggcaccaaccucuacaacgagcucgagaugaacuacuacggcaagcaggagaacugguacucccucaagaagaacucccgcucccucggcgagaacgacgacggcaacaacaacaacggcgacaacggccgcgagggcaaggacgaggacaagcgcgacggcaacaacgaggacaacgagaagcuccgcaagcccaagcacaagaagcucaagcagcccggcgacggcaaccccgaccccaacgccaaccccaacgucgaccccaacgccaaccccaacgucgaccccaacgccaaccccaacgucgaccccaacgccaaccccaacgccaaccccaacgccaaccccaacgccaaccccaacgccaaccccaacgccaaccccaacgccaaccccaacgccaaccccaacgccaaccccaacgccaaccccaacgccaaccccaacgccaaccccaacgccaaccccaacgccaaccccaacgccaaccccaacgccaaccccaacgccaaccccaacgccaaccccaacgccaaccccaacgccaaccccaacgccaaccccaacgccaaccccaacgccaaccccaacgccaaccccaacgccaaccccaacgccaaccccaacgccaaccccaacgccaaccccaacgccaaccccaacgccaaccccaacgccaaccccaacgccaaccccaacgccaaccccaacgccaaccccaacgccaaccccaacgccaaccccaacgccaaccccaacgccaaccccaacgccaaccccaacaagaacaaccagggcaacggccagggccacaacaugcccaacgaccccaaccgcaacgucgacgagaacgccaacgccaacaacgacgucaagaacaacaacaacgaggagcccuccgacaagcacaucgagcaguaccucaagaagauccaguacucccucuccaccgaguggucccccugcuccgucaccugcggcaacggcauccagguccgcaucaagcccggcuccgccgacaagcccaaggaccagcucgacuacgagaacgacaucgagaagaagaucugcaagauggagaagugcuccuccgucuucaacgucgucaacuccuccaucggccucaucaugguccucuccuuccucuuccucaacuga

SEQ ID NO: 3743 - RNA, 1284 nt, Artificial Sequence
  derived and/or modified CDS sequence (opt2) from Pf(E103)__ACO49384.1__CSP
augcgcaagcucgccauccucuccgucuccuccuuccucuucgucgaggcccucuuccaggaguaccagugcuacggcuccuccuccaacacccgcguccucaacgagcucaacuacgacaacgccggcaccaaccucuacaacgagcucgagaugaacuacuacggcaagcaggagaacugguacucccucaagaagaacucccgcucccucggcgagaacgacgacggcaacaacaacaacggcgacaacggccgcgagggcaaggacgaggacaagcgcgacggcaacaacgaggacaacgagaagcuccgcaagcccaagcacaagaagcucaagcagcccggcgacggcaaccccgaccccaacgccaaccccaacgucgaccccaacgccaaccccaacgucgaccccaacgccaaccccaacgucgaccccaacgccaaccccaacgccaaccccaacgccaaccccaacgccaaccccaacgccaaccccaacgccaaccccaacgccaaccccaacgccaaccccaacgccaaccccaacgccaaccccaacgccaaccccaacgccaaccccaacgccaaccccaacgccaaccccaacgccaaccccaacgccaaccccaacgccaaccccaacgccaaccccaacgccaaccccaacgccaaccccaacgccaaccccaacgccaaccccaacgccaaccccaacgccaaccccaacgccaaccccaacgccaaccccaacgccaaccccaacgccaaccccaacgccaaccccaacgccaaccccaacgccaaccccaacgccaaccccaacgccaaccccaacgccaaccccaacgccaaccccaacgccaaccccaacgccaaccccaacgccaaccccaacgccaaccccaacaagaacaaccagggcaacggccagggccacaacaugcccaacgaccccaaccgcaacgucgacgagaacgccaacgccaacaacgccgucaagaacaacaacaacgaggagcccuccgacaagcacaucgagcaguaccucaagaacauccagaacucccucuccaccgaguggucccccugcuccgucaccugcggcaacggcauccagguccgcaucaagcccggcuccgccaacaagcccaaggacgagcucgacuacgagaacgacaucgagaagaagaucugcaagauggagaagugcuccuccgucuucaacgucgucaacuccuccaucggccucaucaugguccucuccuuccucuuccucaacuga

SEQ ID NO: 3744 - RNA, 1284 nt, Artificial Sequence
  derived and/or modified CDS sequence (opt2) from Pf(TMS75)__ACO49490.1__CSP
augcgcaagcucgccauccucuccgucuccuccuuccucuucgucgaggcccucuuccaggaguaccagugcuacggcuccuccuccaacacccgcguccucaacgagcucaacuacgacaacgccggcaccaaccucuacaacgagcucgagaugaacuacuacggcaagcaggagaacugguacucccucaagaagaacucccgcucccucggcgagaacgacgacggcaacaacaacaacggcgacaacggccgcgagggcaaggacgaggacaagcgcgacggcaacaacgaggacaacgagaagcuccgcaagcccaagcacaagaagcucaagcagcccggcgacggcaaccccgaccccaacgccaaccccaacgucgaccccaacgccaaccccaacgucgaccccaacgccaaccccaacgucgaccccaacgccaaccccaacgucgaccccaacgccaaccccaacgccaaccccaacgccaaccccaacgccaaccccaacgccaaccccaacgccaaccccaacgccaaccccaacgccaaccccaacgccaaccccaacgccaaccccaacgccaaccccaacgccaaccccaacgccaaccccaacgccaaccccaacgccaaccccaacgccaaccccaacgccaaccccaacgccaaccccaacgccaaccccaacgccaaccccaacgccaaccccaacgccaaccccaacgccaaccccaacgccaaccccaacgccaaccccaacgccaaccccaacgccaaccccaacgccaaccccaacgccaaccccaacgccaaccccaacgccaaccccaacgccaaccccaacgccaaccccaacgccaaccccaacgccaaccccaacgccaaccccaacgccaaccccaacaagaacaaccagggcaacggccagggccacaacaugcccaacgaccccaaccgcaacgucgacgagaacgccaacgccaacaacgccgucaagaacaacaacaacgaggagcccuccgacaagcacaucgagcaguaccucaagaagauccagaacucccucuccaccgaguggucccccugcuccgucaccugcggcaacggcauccagguccgcaucaagcccggcuccgccaacaagcccaaggacgagcucgacuacgagaacgacaucgagaagaagaucugcaagauggagaagugcuccuccgucuucaacgucgucaacuccuccaucggccucaucaugguccucuccuuccucuuccucaacuga

SEQ ID NO: 3745 - RNA, 1284 nt, Artificial Sequence
  derived and/or modified CDS sequence (opt2) from Pf(TSY621)__ACO49538.1__CSP
augcgcaagcucgccauccucuccgucuccuccuuccucuucgucgaggcccucuuccaggaguaccagugcuacggcuccuccuccaacacccgcguccucaacgagcucaacuacgacaacgccggcaccaaccucuacaacgagcucgagaugaacuacuacggcaagcaggagaacugguacucccucaagaagaacucccgcucccucggcgagaacgacgacggcaacaacaacaacggcgacaacggccgcgagggcaaggacgaggacaagcgcgacggcaacaacgaggacaacgagaagcuccgcaagcccaagcacaagaagcucaagcagcccggcgacggcaaccccgaccccaacgccaaccccaacgucgaccccaacgccaaccccaacgucgaccccaacgccaaccccaacgucgaccccaacgccaaccccaacgccaaccccaacgccaaccccaacgccaaccccaacgccaaccccaacgccaaccccaacgccaaccccaacgccaaccccaacgccaaccccaacgccaaccccaacgccaaccccaacgccaaccccaacgccaaccccaacgccaaccccaacgccaaccccaacgccaaccccaacgccaaccccaacgccaaccccaacgccaaccccaacgccaaccccaacgccaaccccaacgccaaccccaacgccaaccccaacgccaaccccaacgccaaccccaacgccaaccccaacgccaaccccaacgccaaccccaacgccaaccccaacgccaaccccaacgccaaccccaacgccaaccccaacgccaaccccaacgccaaccccaacgccaaccccaacgccaaccccaacgccaaccccaacgccaaccccaacgccaaccccaacaagaacaaccagggcaacggccagggccacaacaugcccaacgaccccaaccgcaacgucgacgagaacgccaacgccaacaacgacgucaagaacaacaacaacgaggagcccuccgacaagcacaucgagcaguaccucaagaagauccaguacucccucuccaccgaguggucccccugcuccgucaccugcggcaacggcauccagguccgcaucaagcccggcuccgccgacaagcccaaggaccagcucgacuacgagaacgacaucgagaagaagaucugcaagauggagaagugcuccuccgucuucaacgucgucaacuccuccaucggccucaucaugguccucuccuuccucuuccucaacuga

SEQ ID NO: 3746 - RNA, 1284 nt, Artificial Sequence
  derived and/or modified CDS sequence (opt2) from Pf(TSY646)__ACO49540.1__CSP
augcgcaagcucgccauccucuccgucuccuccuuccucuucgucgaggcccucuuccaggaguaccagugcuacggcuccuccuccaacacccgcguccucaacgagcucaacuacgacaacgccggcaccaaccucuacaacgagcucgagaugaacuacuacggcaagcaggagaacugguacucccucaagaagaacucccgcucccucggcgagaacgacgacggcaacaacaacaacggcgacaacggccgcgagggcaaggacgaggacaagcgcgacggcaacaacgaggacaacgagaagcuccgcaagcccaagcacaagaagcucaagcagcccggcgacggcaaccccgaccccaacgccaaccccaacgucgaccccaacgccaaccccaacgucgaccccaacgccaaccccaacgucgaccccaacgccaaccccaacgccaaccccaacgccaaccccaacgccaaccccaacgccaaccccaacgccaaccccaacgccaaccccaacgccaaccccaacgccaaccccaacgccaaccccaacgccaaccccaacgccaaccccaacgccaaccccaacgccaaccccaacgccaaccccaacgccaaccccaacgccaaccccaacgccaaccccaacgccaaccccaacgccaaccccaacgccaaccccaacgccaaccccaacgccaaccccaacgccaaccccaacgccaaccccaacgccaaccccaacgccaaccccaacgccaaccccaacgccaaccccaacgccaaccccaacgccaaccccaacgccaaccccaacgccaaccccaacgccaaccccaacgccaaccccaacgccaaccccaacgccaaccccaacgccaaccccaacgccaaccccaacaagaacaaccagggcaacggccagggccacaacaugcccaacgaccccaaccgcaacgucgacgagaacgccaacgccaacaacgccgucaagaacaacaacaacgaggagcccuccgacaagcacaucgagcaguaccucaagaagauccagaacucccucuccaccgaguggucccccugcuccgucaccugcggcaacggcauccagguccgcaucaagcccggcuccgccaacaagcccaaggacgagcucgacuacgagaacgacaucgagaagaagaucugcaagauggagaagugcuccuccgucuucaacgucgucaacuccuccaucggccucaucaugguccucuccuuccucuuccucaacuga

SEQ ID NO: 3747 - RNA, 1275 nt, Artificial Sequence
  derived and/or modified CDS sequence (opt2) from Pf(806)__AAA29562.1__CSP
augaugcgcaagcucgccauccucuccgucuccuccuuccucuucgucgaggcccucuuccaggaguaccagugcuacggcuccuccuccaacacccgcguccucaacgagcucaacuacgacaacgccggcaucaaccucuacaacgagcucgagaugaacuacuacggcaagcaggagaacugguacucccucaagaagaacucccgcucccucggcgagaacgacgacggcaacaacaacaacggcgacaacggccgcgagggcaaggacgaggacaagcgcgacggcaacaacgaggacaacgagaagcuccgcaagcccaagcacaagaagcucaagcagcccggcgacggcaaccccgaccccaacgccaaccccaacgucgaccccaacgccaaccccaacgucgaccccaacgccaaccccaacgucgaccccaacgccaaccccaacgccaaccccaacgccaaccccaacgccaaccccaacgccaaccccaacgccaaccccaacgccaaccccaacgccaaccccaacgccaaccccaacgccaaccccaacgccaaccccaacgccaaccccaacgccaaccccaacgccaaccccaacgccaaccccaacgccaaccccaacgccaaccccaacgccaaccccaacgccaaccccaacgccaaccccaacgccaaccccaacgccaaccccaacgccaaccccaacgccaaccccaacgccaaccccaacgccaaccccaacgccaaccccaacgccaaccccaacgccaaccccaacgccaaccccaacgccaaccccaacgccaaccccaacgccaaccccaacgccaaccccaacgccaaccccaacgccaaccccaacgccaaccccaacgccaaccccaacaagaacaaccagggcaacggccagggccacaacaugcccaacgaccccaaccgcaacgucgacgagaacgccaacgccaacaacgccgucaagaacaacaacaacgaggagcccuccgacaagcacaucgagcaguaccucaagaagauccagaacucccucuccaccgaguggucccccugcuccgucaccugcggcaacggcauccagguccgcaucaagcccggcuccgccaacaagcccaaggacgagcucgacuacgagaacgacaucgagaagaagaucugcaagauggagaagugcuccuccgucuucaacgucgucaacuccuccaucggccucaucaugguccucuccuuccucuuccucaacuga

SEQ ID NO: 3748 - RNA, 1275 nt, Artificial Sequence
  derived and/or modified CDS sequence (opt2) from Pf(Pal97-100)__BAM84952.1__CSP
augaugcgcaagcucgccauccucuccgucuccuccuuccucuucgucgaggcccucuuccaggaguaccagugcuacggcuccuccuccaacacccgcguccucaacgagcucaacuacgacaacgccggcaccaaccucuacaacgagcucgagaugaacuacuacggcaagcaggagaacugguacucccucaagaagaacucccgcucccucggcgagaacgacgacggcaacaacaacaacggcgacaacggccgcgagggcaaggacgaggacaagcgcgacggcaacaacgaggacaacgagaagcuccgcaagcccaagcacaagaagcucaagcagcccggcgacggcaaccccgaccccaacgccaaccccaacgucgaccccaacgccaaccccaacgucgaccccaacgccaaccccaacgucgaccccaacgccaaccccaacgccaaccccaacgccaaccccaacgccaaccccaacgccaaccccaacgccaaccccaacgccaaccccaacgccaaccccaacgccaaccccaacgccaaccccaacgccaaccccaacgucgaccccaacgccaaccccaacgccaaccccaacgccaaccccaacgccaaccccaacgccaaccccaacgccaaccccaacgccaaccccaacgccaaccccaacgccaaccccaacgccaaccccaacgccaaccccaacgccaaccccaacgccaaccccaacgccaaccccaacgccaaccccaacgccaaccccaacgccaaccccaacgccaaccccaacgccaaccccaacgccaaccccaacgccaaccccaacgccaaccccaacgccaaccccaacgccaaccccaacgccaaccccaacgccaaccccaacaagaacaaccagggcaacggccagggccacaacaugcccaacgaccccaaccgcaacgucgacgagaacgccaacgccaacaacgccgucaagaacaacaacaacgaggagcccuccgacaagcacaucaccgaguaccucaagaagauccagaacucccucuccaccgaguggucccccugcuccgucaccugcggcaacggcauccagguccgcaucaagcccggcuccgccggcaaguccaaggacgagcucgacuacgagaacgacaucgagaagaagaucugcaagauggagaagugcuccuccgucuucaacgucgucaacuccuccaucggccucaucaugguccucuccuuccucuuccucaacuga

SEQ ID NO: 3749 - RNA, 1275 nt, Artificial Sequence
  derived and/or modified CDS sequence (opt2) from Pf(PFS89)__BAN59425.1__CSP
augaugcgcaagcucgccauccucuccgucuccuccuuccucuucgucgaggcccucuuccaggaguaccagugcuacggcuccuccuccaacacccgcguccucaacgagcucaacuacgacaacgccggcaccaaccucuacaacgagcucgagaugaacuacuacggcaagcaggagaacugguacucccucaagaagaacucccgcucccucggcgagaacgacgacggcaacaacaacaacggcgacaacggccgcgagggcaaggacgaggacaagcgcgacggcaacaacgaggacaacgagaagcuccgcaagcccaagcacaagaagcucaagcagcccggcgacggcaaccccgaccccaacgccaaccccaacgucgaccccaacgccaaccccaacgucgaccccaacgccaaccccaacgucgaccccaacgccaaccccaacgccaaccccaacgccaaccccaacgccaaccccaacgccaaccccaacgccaaccccaacgccaaccccaacgccaaccccaacgccaaccccaacgccaaccccaacgccaaccccaacgccaaccccaacgccaaccccaacgccaaccccaacgccaaccccaacgccaaccccaacgccaaccccaacgccaaccccaacgccaaccccaacgccaaccccaacgccaaccccaacgccaaccccaacgccaaccccaacgccaaccccaacgccaaccccaacgccaaccccaacgccaaccccaacgccaaccccaacgccaaccccaacgccaaccccaacgccaaccccaacgccaaccccaacgccaaccccaacgccaaccccaacgccaaccccaacgccaaccccaacgccaaccccaacgccaaccccaacaagaacaaccagggcaacggccagggccacaacaugcccaacgaccccaaccgcaacgucgacgagaacgccaacgccaacaacgccgucaagaacaacaacaacgaggagcccuccgacaagcacaucgagcaguaccucaagaagauccagaacucccucuccaccgaguggucccccugcuccgucaccugcggcaacggcauccagguccgcaucaagcccggcuccgccaacaagcccaaggacgagcucgacuacgagaacgacaucgagaagaagaucugcaagauggagaagugcuccuccgucuucaacgucgucaacuccuccaucggccucaucaugguccucuccuuccucuuccucaacuga

SEQ ID NO: 3750 - RNA, 1275 nt, Artificial Sequence
  derived and/or modified CDS sequence (opt2) from Pf(PNG912-035)__BAM85007.1__CSP
augaugcgcaagcucgccauccucuccgucuccuccuuccucuucgucgaggcccucuuccaggaguaccagugcuacggcuccuccuccaacacccgcguccucaacgagcucaacuacgacaacgccggcaccaaccucuacaacgagcucgagaugaacuacuacggcaagcaggagaacugguacucccucaagaagaacucccgcucccucggcgagaacgacgacggcaacaacaacaacggcgacaacggccgcgagggcaaggacgaggacaagcgcgacggcaacaacgaggacaacgagaagcuccgcaagcccaagcacaagaagcucaagcagcccggcgacggcaaccccgaccccaacgccaaccccaacgucgaccccaacgccaaccccaacgucgaccccaacgccaaccccaacgucgaccccaacgccaaccccaacgccaaccccaacgccaaccccaacgccaaccccaacgccaaccccaacgccaaccccaacgccaaccccaacgccaaccccaacgccaaccccaacgccaaccccaacgccaaccccaacgccaaccccaacgccaaccccaacgccaaccccaacgccaaccccaacgccaaccccaacgccaaccccaacgccaaccccaacgucgaccccaacgccaaccccaacgccaaccccaacgccaaccccaacgccaaccccaacgccaaccccaacgccaaccccaacgccaaccccaacgccaaccccaacgccaaccccaacgccaaccccaacgccaaccccaacgccaaccccaacgccaaccccaacgccaaccccaacgccaaccccaacgccaaccccaacgccaaccccaacgccaaccccaacgccaaccccaacaagaacaaccagggcaacggccagggccacaacaugcccaacgaccccaaccgcaacgucgacgagaacgccaacgccaacaacgccgucaagaacaacaacaacgaggagcccuccgacaagcacaucgagcaguaccucaagaagauccagaacucccucuccaccgaguggucccccugcuccgucaccugcggcaacggcauccagguccgcaucaagcccggcuccgccgacaagcccaaggaccagcucgacuacgagaacgacaucgagaagaagaucugcaagauggagaagugcuccuccgucuucaacgucgucaacuccuccaucggccucaucaugguccucuccuuccucuuccucaacuga

SEQ ID NO: 3751 - RNA, 1275 nt, Artificial Sequence
  derived and/or modified CDS sequence (opt2) from Pf(Sol95-308)__BAM85089.1__CSP
augaugcgcaagcucgccauccucuccgucuccuccuuccucuucgucgaggcccucuuccaggaguaccagugcuacggcuccuccuccaacacccgcguccucaacgagcucaacuacgacaacgccggcaccaaccucuacaacgagcucgagaugaacuacuacggcaagcaggagaacugguacucccucaagaagaacucccgcucccucggcgagaacgacgacggcaacaacaacaacggcgacaacggccgcgagggcaaggacgaggacaagcgcgacggcaacaacgaggacaacgagaagcuccgcaagcccaagcacaagaagcucaagcagcccggcgacggcaaccccgaccccaacgccaaccccaacgucgaccccaacgccaaccccaacgucgaccccaacgccaaccccaacgucgaccccaacgccaaccccaacgucgaccccaacgccaaccccaacgccaaccccaacgccaaccccaacgccaaccccaacgccaaccccaacgccaaccccaacgccaaccccaacgccaaccccaacgccaaccccaacgccaaccccaacgccaaccccaacgccaaccccaacgccaaccccaacgccaaccccaacgccaaccccaacgccaaccccaacgccaaccccaacgccaaccccaacgccaaccccaacgccaaccccaacgccaaccccaacgccaaccccaacgccaaccccaacgccaaccccaacgccaaccccaacgccaaccccaacgccaaccccaacgccaaccccaacgccaaccccaacgccaaccccaacgccaaccccaacgccaaccccaacgccaaccccaacgccaaccccaacgccaaccccaacgccaaccccaacaagaacaaccagggcaacggccagggccacaacaugcccaacgaccccaaccgcaacgucgacgagaacgccaacgccaacaacgccgucaagaacaacaacaacgaggagcccuccgacaagcacaucgagcaguaccucaagaagauccagaacucccucuccaccgaguggucccccugcuccgucaccugcggcaacggcauccagguccgcaucaagcccggcuccgccaacaagcccaaggacgagcucgacuacgagaacgacaucgagaagaagaucugcaagauggagaagugcuccuccgucuucaacgucgucaacuccuccaucggccucaucaugguccucuccuuccucuuccucaacuga

SEQ ID NO: 3752 - RNA, 1275 nt, Artificial Sequence
  derived and/or modified CDS sequence (opt2) from Pf(Sol95-346)__BAM85102.1__CSP
augaugcgcaagcucgccauccucuccgucuccuccuuccucuucgucgaggcccucuuccaggaguaccagugcuacggcuccuccuccaacacccgcguccucaacgagcucaacuacgacaacgccggcaccaaccucuacaacgagcucgagaugaacuacuacggcaagcaggagaacugguacucccucaagaagaacucccgcucccucggcgagaacgacgacggcaacaacaacaacggcgacaacggccgcgagggcaaggacgaggacaagcgcgacggcaacaacgaggacaacgagaagcuccgcaagcccaagcacaagaagcucaagcagcccggcgacggcaaccccgaccccaacgccaaccccaacgucgaccccaacgccaaccccaacgucgaccccaacgccaaccccaacgucgaccccaacgccaaccccaacgccaaccccaacgccaaccccaacgccaaccccaacgccaaccccaacgccaaccccaacgccaaccccaacgccaaccccaacgccaaccccaacgccaaccccaacgccaaccccaacgccaaccccaacgccaaccccaacgccaaccccaacgccaaccccaacgccaaccccaacgccaaccccaacgccaaccccaacgucgaccccaacgccaaccccaacgccaaccccaacgccaaccccaacgccaaccccaacgccaaccccaacgccaaccccaacgccaaccccaacgccaaccccaacgccaaccccaacgccaaccccaacgccaaccccaacgccaaccccaacgccaaccccaacgccaaccccaacgccaaccccaacgccaaccccaacgccaaccccaacgccaaccccaacgccaaccccaacaagaacaaccagggcaacggccagggccacaacaugcccaacgaccccaaccgcaacgucgacgagaacgccaacgccaacaacgccgucaagaacaacaacaacgaggagcccuccgacaagcacaucgagcaguaccucaagaagauccagaacucccucuccaccgaguggucccccugcuccgucaccugcggcaacggcauccagguccgcaucaagcccggcuccgccggcaaguccaaggacgagcucgacuacgagaacgacaucgagaagaagaucugcaagauggagaagugcuccuccgucuucaacgucgucaacuccuccaucggccucaucaugguccucuccuuccucuuccucaacuga

SEQ ID NO: 3753 - RNA, 1275 nt, Artificial Sequence
  derived and/or modified CDS sequence (opt2) from Pf(T4 Thailand)__AAA29555.1__CSP
augaugcgcaagcucgccauccucuccgucuccuccuuccucuucgucgaggcccucuuccaggaguaccagugcuacggcuccuccuccaacacccgcguccucaacgagcucaacuacgacaacgccggcaccaaccucuacaacgagcucgagaugaacuacuacggcaagcaggagaacugguacucccucaagaagaacucccgcucccucggcgagaacgacgacggcaacaacaacaacggcgacaacaaccgcgagggcaaggacgaggacaagcgcgacggcaacaacgaggacaacgagacccuccgcaagcccaagcacaagaagcucaagcagcccggcgacggcaaccccgaccccaacgccaaccccaacgucgaccccaacgccaaccccaacgucgaccccaacgccaaccccaacgucgaccccaacgccaaccccaacgccaaccccaacgccaaccccaacgccaaccccaacgccaaccccaacgccaaccccaacgccaaccccaacgccaaccccaacgccaaccccaacgccaaccccaacgccaaccccaacgccaaccccaacgccaaccccaacgccaaccccaacgccaaccccaacgccaaccccaacgccaaccccaacgccaaccccaacgccaaccccaacgccaaccccaacgccaaccccaacgccaaccccaacgccaaccccaacgccaaccccaacgccaaccccaacgccaaccccaacgccaaccccaacgccaaccccaacgccaaccccaacgccaaccccaacgccaaccccaacgccaaccccaacgccaaccccaacgccaaccccaacgccaaccccaacgccaaccccaacgccaaccccaacgccaaccccaacaagaacaaccagggcaacggccagggccacaacaugcccaacgaccccaaccgcaacgucgacgagaacgccaacgccaacaacgccgucaagaacaacaacaacgaggagcccuccgacaagcacaucgagcaguaccucaagaagauccagaacucccucuccaccgaguggucccccugcuccgucaccugcggcaacggcauccagguccgcaucaagcccggcuccgccaacaagcccaaggacgagcucgacuacgagaacgacaucgagaagaagaucugcaagauggagaagugcuccuccgucuucaacgucgucaacuccuccaucggccucaucaugguccucuccuuccucuuccucaacuga

SEQ ID NO: 3754 - RNA, 1275 nt, Artificial Sequence
  derived and/or modified CDS sequence (opt2) from Pf(Tz03-025)__BAM84798.1__CSP
augaugcgcaagcucgccauccucuccgucuccuccuuccucuucgucgaggcccucuuccaggaguaccagugcuacggcuccuccuccaacacccgcguccucaacgagcucaacuacgacaacgccggcaccaaccucuacaacgagcucgagaugaacuacuacggcaagcaggagaacugguacucccucaagaagaacucccgcucccucggcgagaacgacgacggcaacaacaacaacggcgacaacggccgcgagggcaaggacgaggacaagcgcgacggcaacaacgaggacaacgagaagcuccgcaagcccaagcacaagaagcucaagcagcccgccgacggcaaccccgaccccaacgccaaccccaacgucgaccccaacgccaaccccaacgucgaccccaacgccaaccccaacgucgaccccaacgccaaccccaacgccaaccccaacgccaaccccaacgccaaccccaacgccaaccccaacgccaaccccaacgccaaccccaacgccaaccccaacgccaaccccaacgccaaccccaacgccaaccccaacgccaaccccaacgccaaccccaacgccaaccccaacgccaaccccaacgccaaccccaacgccaaccccaacgccaaccccaacgucgaccccaacgccaaccccaacgccaaccccaacgccaaccccaacgccaaccccaacgccaaccccaacgccaaccccaacgccaaccccaacgccaaccccaacgccaaccccaacgccaaccccaacgccaaccccaacgccaaccccaacgccaaccccaacgccaaccccaacgccaaccccaacgccaaccccaacgccaaccccaacgccaaccccaacgccaaccccaacaagaacaaccagggcaacggccagggccacaacaugcccaacgaccccaaccgcaacgucgacgagaacgccaacgccaacaacgccgucaagaacaacaacaacgaggagcccuccgaccagcacaucgagaaguaccucaagaccaucaagaacucccucuccaccgaguggucccccugcuccgucaccugcggcaacggcauccagguccgcaucaagcccggcuccgccaacaagcccaaggaccagcucgacuacgccaacgacaucgagaagaagaucugcaagauggagaagugcuccuccgucuucaacgucgucaacuccuccaucggccucaucaugguccucuccuuccucuuccucaacuga

SEQ ID NO: 3755 - RNA, 1272 nt, Artificial Sequence
  derived and/or modified CDS sequence (opt2) from Pf(NR62)__ADF48375.1__CSP
augcgcaagcucgccauccucuccgucuccuccuuccucuucgucgaggcccucuuccaggaguaccagugcuacggcuccuccuccaacacccgcguccucaacgagcucaacuacgacaacgccggcaccaaccucuacaacgagcucgagaugaacuacuacggcaagcaggagaacugguacucccucaagaagaacucccgcucccucggcgagaacgacgacggcaacaacaacaacggcgacaacggccgcgagggcaaggacgaggacaagcgcgacggcaacaacgaggacaacgagaagcuccgcaagcccaagcacaagaagcucaagcagcccggcgacggcaaccccgaccccaacgccaaccccaacgucgaccccaacgccaaccccaacgucgaccccaacgccaaccccaacgucgaccccaacgccaaccccaacgucgaccccaacgccaaccccaacgccaaccccaacgccaaccccaacgccaaccccaacgccaaccccaacgccaaccccaacgccaaccccaacgccaaccccaacgccaaccccaacgccaaccccaacgccaaccccaacgccaaccccaacgccaaccccaacgccaaccccaacgccaaccccaacgccaaccccaacgccaaccccaacgccaaccccaacgccaaccccaacgccaaccccaacgccaaccccaacgccaaccccaacgccaaccccaacgccaaccccaacgccaaccccaacgccaaccccaacgccaaccccaacgccaaccccaacgccaaccccaacgccaaccccaacgccaaccccaacgccaaccccaacgccaaccccaacgccaaccccaacgccaaccccaacgccaaccccaacaagaacaaccagggcaacggccagggccacaacaugcccaacgaccccaaccgcaacgucgacgagaacgccaacgccaacaacgccgucaagaacaacaacaacgaggagcccuccgacaagcacaucgagcaguaccucaagaagauccagaacucccucuccaccgaguggucccccugcuccgucaccugcggcaacggcauccagguccgcaucaagcccggcuccgccaacaagcccaaggacgagcucgacuacgagaacgacaucgagaagaagaucugcaagauggagaagugcuccuccgucuucaacgucgucaacuccuccaucggccucaucaugguccucuccuuccucuuccucaacuga

SEQ ID NO: 3756 - RNA, 1272 nt, Artificial Sequence
  derived and/or modified CDS sequence (opt2) from Pf(TSY673)__ACO49542.1__CSP
augcgcaagcucgccauccucuccgucuccuccuuccucuucgucgaggcccucuuccaggaguaccagugcuacggcuccuccuccaacacccgcguccucaacgagcucaacuacgacaacgccggcaccaaccucuacaacgagcucgagaugaacuacuacggcaagcaggagaacugguacucccucaagaagaacucccgcucccucggcgagaacgacgacggcaacaacaacaacggcgacaacggccgcgagggcaaggacgaggacaagcgcgacggcaacaacgaggacaacgagaagcuccgcaagcccaagcacaagaagcucaagcagcccggcgacggcaaccccgaccccaacgccaaccccaacgucgaccccaacgccaaccccaacgucgaccccaacgccaaccccaacgucgaccccaacgccaaccccaacgccaaccccaacgccaaccccaacgccaaccccaacgccaaccccaacgccaaccccaacgccaaccccaacgccaaccccaacgccaaccccaacgccaaccccaacgccaaccccaacgucgaccccaacgccaaccccaacgccaaccccaacgccaaccccaacgccaaccccaacgccaaccccaacgccaaccccaacgccaaccccaacgccaaccccaacgccaaccccaacgccaaccccaacgccaaccccaacgccaaccccaacgccaaccccaacgccaaccccaacgccaaccccaacgccaaccccaacgccaaccccaacgccaaccccaacgccaaccccaacgccaaccccaacgccaaccccaacgccaaccccaacgccaaccccaacgccaaccccaacgccaaccccaacgccaaccccaacaagaacaaccagggcaacggccagggccacaacaugcccaacgaccccaaccgcaacgucgacgagaacgccaacgccaacaacgccgucaagaacaacaacaacgaggagcccuccgacaagcacaucaccgaguaccucaagaagauccagaacucccucuccaccgaguggucccccugcuccgucaccugcggcaacggcauccagguccgcaucaagcccggcuccgccggcaaguccaaggacgagcucgacuacgagaacgacaucgagaagaagaucugcaagauggagaagugcuccuccgucuucaacgucgucaacuccuccaucggccucaucaugguccucuccuuccucuuccucaacuga

SEQ ID NO: 3757 - RNA, 1272 nt, Artificial Sequence
  derived and/or modified CDS sequence (opt2) from Pf(TSY688)__ACO49545.1__CSP
augcgcaagcucgccauccucuccgucuccuccuuccucuucgucgaggcccucuuccaggaguaccagugcuacggcuccuccuccaacacccgcguccucaacgagcucaacuacgacaacgccggcaccaaccucuacaacgagcucgagaugaacuacuacggcaagcaggagaacugguacucccucaagaagaacucccgcucccucggcgagaacgacgacggcaacaacaacaacggcgacaacggccgcgagggcaaggacgaggacaagcgcgacggcaacaacgaggacaacgagaagcuccgcaagcccaagcacaagaagcucaagcagcccggcgacggcaaccccgaccccaacgccaaccccaacgucgaccccaacgccaaccccaacgucgaccccaacgccaaccccaacgucgaccccaacgccaaccccaacgccaaccccaacgccaaccccaacgccaaccccaacgccaaccccaacgccaaccccaacgccaaccccaacgccaaccccaacgccaaccccaacgccaaccccaacgccaaccccaacgccaaccccaacgccaaccccaacgccaaccccaacgccaaccccaacgccaaccccaacgccaaccccaacgccaaccccaacgccaaccccaacgccaaccccaacgccaaccccaacgccaaccccaacgccaaccccaacgccaaccccaacgccaaccccaacgccaaccccaacgccaaccccaacgccaaccccaacgccaaccccaacgccaaccccaacgccaaccccaacgccaaccccaacgccaaccccaacgccaaccccaacgccaaccccaacgccaaccccaacgccaaccccaacgccaaccccaacaagaacaaccagggcaacggccagggccacaacaugcccaacgaccccaaccgcaacgucgacgagaacgccaacgccaacaacgccgucaagaacaacaacaacgaggagcccuccgacaagcacaucgagcaguaccucaagaagauccagaacucccucuccaccgaguggucccccugcuccgucaccugcggcaacggcauccagguccgcaucaagcccggcuccgccaacaagcccaaggacgagcucgacuacgagaacgacaucgagaagaagaucugcaagauggagaagugcuccuccgucuucaacgucgucaacuccuccaucggccucaucaugguccucuccuuccucuuccucaacuga

SEQ ID NO: 3758 - RNA, 1263 nt, Artificial Sequence
  derived and/or modified CDS sequence (opt2) from Pf(835b)__AAA29574.1__CSP
augaugcgcaagcucgccauccucuccgucuccuccuuccucuucgucgaggcccucuuccaggaguaccagugcuacggcuccuccuccaacacccgcguccucaacgagcucaacuacgacaacgccggcaucaaccucuacaacgagcucgagaugaacuacuacggcaagcaggagaacugguacucccucaagaagaacucccgcucccucggcgagaacgacgacggcaacaacaacaacggcgacaacggccgcgagggcaaggacgaggacaagcgcgacggcaacaacgaggacaacgagaagcuccgcaagcccaagcacaagaagcucaagcagcccggcgacggcaaccccgaccccaacgccaaccccaacgucgaccccaacgccaaccccaacgucgaccccaacgccaaccccaacgucgaccccaacgccaaccccaacgccaaccccaacgccaaccccaacgccaaccccaacgccaaccccaacgccaaccccaacgccaaccccaacgccaaccccaacgccaaccccaacgccaaccccaacgccaaccccaacgccaaccccaacgccaaccccaacgccaaccccaacgccaaccccaacgccaaccccaacgccaaccccaacgccaaccccaacgccaaccccaacgucgaccccaacgccaaccccaacgccaaccccaacgccaaccccaacgccaaccccaacgccaaccccaacgccaaccccaacgccaaccccaacgccaaccccaacgccaaccccaacgccaaccccaacgccaaccccaacgccaaccccaacgccaaccccaacgccaaccccaacgccaaccccaacgccaaccccaacgccaaccccaacaagaacaaccagggcaacggccagggccacaacaugcccaacgaccccaaccgcaacgucgacgagaacgccaacgccaacaacgccgucaagaacaacaacaacgaggagcccuccgacaagcacaucaaggaguaccucaccaagauccagaacuccaucuccaccgaguggucccccugcuccgucaccugcggcaacggcauccagguccgcaucaagcccggcuccgccggcaagcccaaggacgagcucgaguacgagaacgacaucgagaagaagaucugcaagauggagaagugcuccuccgucuucaacgucgucaacuccuccaucggccucaucaugguccucuccuuccucuuccucaacuga

SEQ ID NO: 3759 - RNA, 1263 nt, Artificial Sequence
  derived and/or modified CDS sequence (opt2) from Pf(FCC1/HN)__AAW59565.1__CSP
augaugcgcaagcucgccauccucuccgucuccuccuuccucuucgucgaggcccucuuccaggaguaccagugcuacggcuccuccuccaacacccgcguccucaacgagcucaacuacgacaacgccggcaccaaccucuacaacgagcucgagaugaacuacuacggcaagcaggagaacugguacucccucaagaagaacucccgcucccucggcgagaacgacgacggcaacaacaacaacggcgacaacggccgcgagggcaaggacgaggacaagcgcgacggcaacaacgaggacaacgagaagcuccgcaagcccaagcacaagaagcucaagcagcccggcgacggcaaccccgaccccaacgccaaccccaacgucgaccccaacgccaaccccaacgucgaccccaacgccaaccccaacgucgaccccaacgccaaccccaacgccaaccccaacgccaaccccaacgccaaccccaacgccaaccccaacgccaaccccaacgccaaccccaacgccaaccccaacgccaaccccaacgccaaccccaacgccaaccccaacgccaaccccaacgccaaccccaacgccaaccccaacgccaaccccaacgccaaccccaacgccaaccccaacgccaaccccaacgccaaccccaacgccaaccccaacgccaaccccaacgccaaccccaacgccaaccccaacgccaaccccaacgccaaccccaacgccaaccccaacgccaaccccaacgccaaccccaacgccaaccccaacgccaaccccaacgccaaccccaacgccaaccccaacgccaaccccaacgccaaccccaacgccaaccccaacgccaaccccaacgccaaccccaacaagaacaaccagggcaacggccagggccacaacaugcccaacgaccccaaccgcaacgucgacgagaacgccaacgccaacaacgccgucaagaacaacaacaacgaggagcccuccgacaagcacaucgagcaguaccucaagaagauccagaacucccucuccaccgaguggucccccugcuccgucaccugcggcaacggcauccaggcccgcaucaagcccggcuccgccaacaagcccaaggacgagcucgacuacgagaacgacaucgagaagaagaucugcaagauggagaagugcuccuccgucuucaacgucgucaacuccuccaucggccucaucaugguccucuccuuccucuuccucaacuga

SEQ ID NO: 3760 - RNA, 1263 nt, Artificial Sequence
  derived and/or modified CDS sequence (opt2) from Pf(K1)__AAA29552.1__CSP
augaugcgcaagcucgccauccucuccgucuccuccuuccucuucgucgaggcccucuuccaggaguaccagugcuacggcuccuccuccaacacccgcguccucaacgagcucaacuacgacaacgccggcaucaaccucuacaacgagcucgagaugaacuacuacggcaagcaggagaacugguacucccucaagaagaacucccgcucccucggcgagaacgacgacggcaacaacaacaacggcgacaacggccgcgagggcaaggacgaggacaagcgcgacggcaacaacgaggacaacgagaagcuccgcaagcccaagcacaagaagcucaagcagcccggcgacggcaaccccgaccccaacgccaaccccaacgucgaccccaacgccaaccccaacgucgaccccaacgccaaccccaacgucgaccccaacgccaaccccaacgccaaccccaacgccaaccccaacgccaaccccaacgccaaccccaacgccaaccccaacgccaaccccaacgccaaccccaacgccaaccccaacgccaaccccaacgucgaccccaacgccaaccccaacgccaaccccaacgccaaccccaacgccaaccccaacgccaaccccaacgccaaccccaacgccaaccccaacgccaaccccaacgccaaccccaacgccaaccccaacgccaaccccaacgccaaccccaacgccaaccccaacgccaaccccaacgccaaccccaacgccaaccccaacgccaaccccaacgccaaccccaacgccaaccccaacgccaaccccaacgccaaccccaacgccaaccccaacgccaaccccaacgccaaccccaacgccaaccccaacgccaaccccaacaagaacaaccagggcaacggccagggccacaacaugcccaacgaccccaaccgcaacgucgacgagaacgccaacgccaacaacgacgucaagaacaacaacaacgaggagcccuccgacaagcacaucgagcaguaccucaagaagauccaguacucccucuccaccgaguggucccccugcuccgucaccugcggcaacggcauccagguccgcaucaagcccggcuccgccgacaagcccaaggaccagcucgacuacgagaacgacaucgagaagaagaucugcaagauggagaagugcuccuccgucuucaacgucgucaacuccuccaucggccucaucaugguccucuccuuccucuuccucaacuga

SEQ ID NO: 3761 - RNA, 1263 nt, Artificial Sequence
  derived and/or modified CDS sequence (opt2) from Pf(K1)__BAD73952.1__CSP
augaugcgcaagcucgccauccucuccgucuccuccuuccucuucgucgaggcccucuuccaggaguaccagugcuacggcuccuccuccaacacccgcguccucaacgagcucaacuacgacaacgccggcaccaaccucuacaacgagcucgagaugaacuacuacggcaagcaggagaacugguacucccucaagaagaacucccgcucccucggcgagaacgacgacggcaacaacaacaacggcgacaacggccgcgagggcaaggacgaggacaagcgcgacggcaacaacgaggacaacgagaagcuccgcaagcccaagcacaagaagcucaagcagcccggcgacggcaaccccgaccccaacgccaaccccaacgucgaccccaacgccaaccccaacgucgaccccaacgccaaccccaacgucgaccccaacgccaaccccaacgccaaccccaacgccaaccccaacgccaaccccaacgccaaccccaacgccaaccccaacgccaaccccaacgccaaccccaacgccaaccccaacgccaaccccaacgucgaccccaacgccaaccccaacgccaaccccaacgccaaccccaacgccaaccccaacgccaaccccaacgccaaccccaacgccaaccccaacgccaaccccaacgccaaccccaacgccaaccccaacgccaaccccaacgccaaccccaacgccaaccccaacgccaaccccaacgccaaccccaacgccaaccccaacgccaaccccaacgccaaccccaacgccaaccccaacgccaaccccaacgccaaccccaacgccaaccccaacgccaaccccaacgccaaccccaacgccaaccccaacgccaaccccaacaagaacaaccagggcaacggccagggccacaacaugcccaacgaccccaaccgcaacgucgacgagaacgccaacgccaacaacgacgucaagaacaacaacaacgaggagcccuccgacaagcacaucgagcaguaccucaagaagauccaguacucccucuccaccgaguggucccccugcuccgucaccugcggcaacggcauccagguccgcaucaagcccggcuccgccgacaagcccaaggaccagcucgacuacgagaacgacaucgagaagaagaucugcaagauggagaagugcuccuccgucuucaacgucgucaacuccuccaucggccucaucaugguccucuccuuccucuuccucaacuga

SEQ ID NO: 3762 - RNA, 1263 nt, Artificial Sequence
  derived and/or modified CDS sequence (opt2) from Pf(Pal97-074)__BAM84944.1__CSP
augaugcgcaagcucgccauccucuccgucuccuccuuccucuucgucgaggcccucuuccaggaguaccagugcuacggcuccuccuccaacacccgcguccucaacgagcucaacuacgacaacgccggcaccaaccucuacaacgagcucgagaugaacuacuacggcaagcaggagaacugguacucccucaagaagaacucccgcucccucggcgagaacgacgacggcaacaacaacaacggcgacaacggccgcgagggcaaggacgaggacaagcgcgacggcaacaacgaggacaacgagaagcuccgcaagcccaagcacaagaagcucaagcagcccgucgacggcaaccccgaccccaacgccaaccccaacgucgaccccaacgccaaccccaacgucgaccccaacgccaaccccaacgucgaccccaacgccaaccccaacgccaaccccaacgccaaccccaacgccaaccccaacgccaaccccaacgccaaccccaacgccaaccccaacgccaaccccaacgccaaccccaacgccaaccccaacgccaaccccaacgccaaccccaacgccaaccccaacgccaaccccaacgccaaccccaacgccaaccccaacgccaaccccaacgccaaccccaacgccaaccccaacgccaaccccaacgccaaccccaacgccaaccccaacgccaaccccaacgccaaccccaacgccaaccccaacgccaaccccaacgccaaccccaacgccaaccccaacgccaaccccaacgccaaccccaacgccaaccccaacgccaaccccaacgccaaccccaacgccaaccccaacgccaaccccaacgccaaccccaacgccaaccccaacaagaacaaccagggcaacggccagggccacaacaugcccaacgaccccaaccgcaacgucgacgagaacgccaacgccaacaacgccgucaagaacaacaacaacgaggagcccuccgaccagcacaucgagaaguaccucaagaucauccagaacucccucuccaccgaguggucccccugcuccgucaccugcggcaacggcauccagguccgcaucaagcccggcuccgccgacaagcccaaggaccagcucgacuacgccaacgacaucgagaagaagaucugcaagauggagaagugcuccuccgucuucaacgucgucaacuccuccaucggccucaucaugguccucuccuuccucuuccucaacuga

SEQ ID NO: 3763 - RNA, 1263 nt, Artificial Sequence
  derived and/or modified CDS sequence (opt2) from Pf(Pal97-108)__BAM84957.1__CSP
augaugcgcaagcucgccauccucuccgucuccuccuuccucuucgucgaggcccucuuccaggaguaccagugcuacggcuccuccuccaacacccgcguccucaacgagcucaacuacgacaacgccggcaccaaccucuacaacgagcucgagaugaacuacuacggcaagcaggagaacugguacucccucaagaagaacucccgcucccucggcgagaacgacgacggcaacaacaacaacggcgacaacggccgcgagggcaaggacgaggacaagcgcgacggcaacaacgaggacaacgagaagcuccgcaagcccaagcacaagaagcucaagcagcccggcgacggcaaccccgaccccaacgccaaccccaacgucgaccccaacgccaaccccaacgucgaccccaacgccaaccccaacgucgaccccaacgccaaccccaacgccaaccccaacgccaaccccaacgccaaccccaacgccaaccccaacgccaaccccaacgccaaccccaacgccaaccccaacgccaaccccaacgccaaccccaacgccaaccccaacgccaaccccaacgccaaccccaacgccaaccccaacgccaaccccaacgccaaccccaacgccaaccccaacgccaaccccaacgccaaccccaacgccaaccccaacgccaaccccaacgccaaccccaacgccaaccccaacgccaaccccaacgccaaccccaacgccaaccccaacgccaaccccaacgccaaccccaacgccaaccccaacgccaaccccaacgccaaccccaacgccaaccccaacgccaaccccaacgccaaccccaacgccaaccccaacgccaaccccaacgccaaccccaacaagaacaaccagggcaacggccagggccacaacaugcccaacgaccccaaccgcaacgucgacgagaacgccaacgccaacaacgccgucaagaacaacaacaacgaggagcccuccgacaagcacaucaaggaguaccucaccaagauccagaacuccaucuccaccgaguggucccccugcuccgucaccugcggcaacggcauccagguccgcaucaagcccggcuccgccggcaagcccaaggacgagcucaacuacgagaacgacaucgagaagaagaucugcaagauggagaagugcuccuccgucuucaacgucgucaacuccuccaucggccucaucaugguccucuccuuccucuuccucaacuga

SEQ ID NO: 3764 - RNA, 1263 nt, Artificial Sequence
  derived and/or modified CDS sequence (opt2) from Pf(PNG225-053)__BAM85032.1__CSP
augaugcgcaagcucgccauccucuccgucuccuccuuccucuucgucgaggcccucuuccaggaguaccagugcuacggcuccuccuccaacacccgcguccucaacgagcucaacuacgacaacgccggcaccaaccucuacaacgagcucgagaugaacuacuacggcaagcaggagaacugguacucccucaagaagaacucccgcucccucggcgagaacgacgacggcaacaacaacaacggcgacaacggccgcgagggcaaggacgaggacaagcgcgacggcaacaacgaggacaacgagaagcuccgcaagcccaagcacaagaagcucaagcagcccggcgacggcaaccccgaccccaacgccaaccccaacgucgaccccaacgccaaccccaacgucgaccccaacgccaaccccaacgucgaccccaacgccaaccccaacgccaaccccaacgccaaccccaacgccaaccccaacgccaaccccaacgccaaccccaacgccaaccccaacgccaaccccaacgccaaccccaacgccaaccccaacgccaaccccaacgccaaccccaacgccaaccccaacgccaaccccaacgccaaccccaacgccaaccccaacgccaaccccaacgccaaccccaacgccaaccccaacgccaaccccaacgccaaccccaacgccaaccccaacgccaaccccaacgccaaccccaacgccaaccccaacgccaaccccaacgccaaccccaacgccaaccccaacgccaaccccaacgccaaccccaacgccaaccccaacgccaaccccaacgccaaccccaacgccaaccccaacgccaaccccaacgccaaccccaacgccaaccccaacaagaacaaccagggcaacggccagggccacaacaugcccaacgaccccaaccgcaacgucgacgagaacgccaacgccaacaacgccgucaagaacaacaacaacgaggagcccuccgacaagcacaucgagcaguaccucaagaagauccagaacucccucuccaccgaguggucccccugcuccgucaccugcggcaacggcauccagguccgcaucaagcccggcuccgccaacaagcccaaggacgagcucgacuacgagaacgacaucgagaagaagaucugcaagauggagaagugcuccuccgucuucaacgucgucaacuccuccaucggccucaucaugguccucuccuuccucuuccucaacuga

SEQ ID NO: 3765 - RNA, 1263 nt, Artificial Sequence
  derived and/or modified CDS sequence (opt2) from Pf(Sol95-113)__BAM85062.1__CSP
augaugcgcaagcucgccauccucuccgucuccuccuuccucuucgucgaggcccucuuccaggaguaccagugcuacggcuccuccuccaacacccgcguccucaacgagcucaacuacgacaacgccggcaccaaccucuacaacgagcucgagaugaacuacuacggcaagcaggagaacugguacucccucaagaagaacucccgcucccucggcgagaacgacgacggcaacaacaacaacggcgacaacggccgcgagggcaaggacgaggacaagcgcgacggcaacaacgaggacaacgagaagcuccgcaagcccaagcacaagaagcucaagcagcccggcgacggcaaccccgaccccaacgccaaccccaacgucgaccccaacgccaaccccaacgucgaccccaacgccaaccccaacgucgaccccaacgccaaccccaacgucgaccccaacgccaaccccaacgccaaccccaacgccaaccccaacgccaaccccaacgccaaccccaacgccaaccccaacgccaaccccaacgccaaccccaacgccaaccccaacgccaaccccaacgccaaccccaacgccaaccccaacgccaaccccaacgccaaccccaacgccaaccccaacgccaaccccaacgccaaccccaacgccaaccccaacgccaaccccaacgccaaccccaacgccaaccccaacgccaaccccaacgccaaccccaacgccaaccccaacgccaaccccaacgccaaccccaacgccaaccccaacgccaaccccaacgccaaccccaacgccaaccccaacgccaaccccaacgccaaccccaacgccaaccccaacgccaaccccaacgccaaccccaacaagaacaaccagggcaacggccagggccacaacaugcccaacgaccccaaccgcaacgucgacgagaacgccaacgccaacaacgccgucaagaacaacaacaacgaggagcccuccgacaagcacaucgagcaguaccucaagaagauccagaacucccucuccaccgaguggucccccugcuccgucaccugcggcaacggcauccagguccgcaucaagcccggcuccgccaacaagcccaaggacgagcucgacuacgagaacgacaucgagaagaagaucugcaagauggagaagugcuccuccgucuucaacgucgucaacuccuccaucggccucaucaugguccucuccuuccucuuccucaacuga

SEQ ID NO: 3766 - RNA, 1263 nt, Artificial Sequence
  derived and/or modified CDS sequence (opt2) from Pf(Sol95-328)__BAM85093.1__CSP
augaugcgcaagcucgccauccucuccgucuccuccuuccucuucgucgaggcccucuuccaggaguaccagugcuacggcuccuccuccaacacccgcguccucaacgagcucaacuacgacaacgccggcaccaaccucuacaacgagcucgagaugaacuacuacggcaagcaggagaacugguacucccucaagaagaacucccgcucccucggcgagaacgacgacggcaacaacaacaacggcgacaacggccgcgagggcaaggacgaggacaagcgcgacggcaacaacgaggacaacgagaagcuccgcaagcccaagcacaagaagcucaagcagcccggcgacggcaaccccgaccccaacgccaaccccaacgucgaccccaacgccaaccccaacgucgaccccaacgccaaccccaacgucgaccccaacgccaaccccaacgccaaccccaacgccaaccccaacgccaaccccaacgccaaccccaacgccaaccccaacgccaaccccaacgccaaccccaacgccaaccccaacgccaaccccaacgccaaccccaacgccaaccccaacgccaaccccaacgccaaccccaacgccaaccccaacgccaaccccaacgccaaccccaacgucgaccccaacgccaaccccaacgccaaccccaacgccaaccccaacgccaaccccaacgccaaccccaacgccaaccccaacgccaaccccaacgccaaccccaacgccaaccccaacgccaaccccaacgccaaccccaacgccaaccccaacgccaaccccaacgccaaccccaacgccaaccccaacgccaaccccaacgccaaccccaacgccaaccccaacgccaaccccaacaagaacaaccagggcaacggccagggccacaacaugcccaacgaccccaaccgcaacgucgacgagaacgccaacgccaacaacgccgucaagaacaacaacaacgaggagcccuccgacaagcacaucgagcaguaccucaagaagauccagaacucccucuccaccgaguggucccccugcuccgucaccugcggcaacggcauccagguccgcaucaagcccggcuccgccgacaagcccaaggaccagcucgacuacgagaacgacaucgagaagaagaucugcaagauggagaagugcuccuccgucuucaacgucgucaacuccuccaucggccucaucaugguccucuccuuccucuuccucaacuga

SEQ ID NO: 3767 - RNA, 1263 nt, Artificial Sequence
  derived and/or modified CDS sequence (opt2) from Pf(TiMS95-208)__BAM84896.1__CSP
augaugcgcaagcucgccauccucuccgucuccuccuuccucuucgucgaggcccucuuccaggaguaccagugcuacggcuccuccuccaacacccgcguccucaacgagcucaacuacgacaacgccggcaccaaccucuacaacgagcucgagaugaacuacuacggcaagcaggagaacugguacucccucaagaagaacucccgcucccucggcgagaacgacgacggcaacaacaacaacggcgacaacggccgcgagggcaaggacgaggacaagcgcgacggcaacaacgaggacaacgagaagcuccgcaagcccaagcacaagaagcucaagcagcccggcgacggcaaccccgaccccaacgccaaccccaacgucgaccccaacgccaaccccaacgucgaccccaacgccaaccccaacgucgaccccaacgccaaccccaacgccaaccccaacgccaaccccaacgccaaccccaacgccaaccccaacgccaaccccaacgccaaccccaacgccaaccccaacgccaaccccaacgccaaccccaacgccaaccccaacgccaaccccaacgccaaccccaacgccaaccccaacgccaaccccaacgccaaccccaacgccaaccccaacgccaaccccaacgccaaccccaacgccaaccccaacgccaaccccaacgccaaccccaacgccaaccccaacgccaaccccaacgccaaccccaacgccaaccccaacgccaaccccaacgccaaccccaacgccaaccccaacgccaaccccaacgccaaccccaacgccaaccccaacgccaaccccaacgccaaccccaacgccaaccccaacgccaaccccaacgccaaccccaacaagaacaaccagggcaacggccagggccacaacaugcccaacgaccccaaccgcaacgucgacgagaacgccaacgccaacaacgacgucaagaacaacaacaacgaggagcccuccgacaagcacaucgagcaguaccucaagaagauccaguacucccucuccaccgaguggucccccugcuccgucaccugcggcaacggcauccagguccgcaucaagcccggcuccgccgacaagcccaaggaccagcucgacuacgagaacgacaucgagaagaagaucugcaagauggagaagugcuccuccgucuucaacgucgucaacuccuccaucggccucaucaugguccucuccuuccucuuccucaacuga

SEQ ID NO: 3768 - RNA, 1263 nt, Artificial Sequence
  derived and/or modified CDS sequence (opt2) from Pf(TiMS95-260)__BAM84907.1__CSP
augaugcgcaagcucgccauccucuccgucuccuccuuccucuucgucgaggcccucuuccaggaguaccagugcuacggcuccuccuccaacacccgcguccucaacgagcucaacuacgacaacgccggcaccaaccucuacaacgagcucgagaugaacuacuacggcaagcaggagaacugguacucccucaagaagaacucccgcucccucggcgagaacgacgacggcaacaacaacaacggcgacaacggccgcgagggcaaggacgaggacaagcgcgacggcaacaacgaggacaacgagaagcuccgcaagcccaagcacaagaagcucaagcagcccggcgacggcaaccccgaccccaacgccaaccccaacgucgaccccaacgccaaccccaacgucgaccccaacgccaaccccaacgucgaccccaacgccaaccccaacgccaaccccaacgccaaccccaacgccaaccccaacgccaaccccaacgccaaccccaacgccaaccccaacgccaaccccaacgccaaccccaacgccaaccccaacgccaaccccaacgccaaccccaacgccaaccccaacgccaaccccaacgccaaccccaacgccaaccccaacgccaaccccaacgccaaccccaacgccaaccccaacgucgaccccaacgccaaccccaacgccaaccccaacgccaaccccaacgccaaccccaacgccaaccccaacgccaaccccaacgccaaccccaacgccaaccccaacgccaaccccaacgccaaccccaacgccaaccccaacgccaaccccaacgccaaccccaacgccaaccccaacgccaaccccaacgccaaccccaacgccaaccccaacaagaacaaccagggcaacggccagggccacaacaugcccaacgaccccaaccgcaacgucgacgagaacgccaacgccaacaacgccgucaagaacaacaacaacgaggagcccuccgacaagcacaucaaggaguaccucaccaagauccagaacuccaucuccaccgaguggucccccugcuccgucaccugcggcaacggcauccagguccgcaucaagcccggcuccgccggcaagcccaaggacgagcucaacuacgagaacgacaucgagaagaagaucugcaagauggagaagugcuccuccgucuucaacgucgucaacuccuccaucggccucaucaugguccucuccuuccucuuccucaacuga

SEQ ID NO: 3769 - RNA, 1263 nt, Artificial Sequence
  derived and/or modified CDS sequence (opt2) from Pf(Tz93-030)__BAM84756.1__CSP
augaugcgcaagcucgccauccucuccgucuccuccuuccucuucgucgaggcccucuuccaggaguaccagugcuacggcuccuccuccaacacccgcguccucaacgagcucaacuacgacaacgccggcaccaaccucuacaacgagcucgagaugaacuacuacggcaagcaggagaacugguacucccucaagaagaacucccgcucccucggcgagaacgacgacggcaacaacaacaacggcgacaacggccgcgagggcaaggacgaggacaagcgcgacggcaacaacgaggacaacgagaagcuccgcaagcccaagcacaagaagcucaagcagcccggcgacggcaaccccgaccccaacgccaaccccaacgucgaccccaacgccaaccccaacgucgaccccaacgccaaccccaacgucgaccccaacgccaaccccaacgccaaccccaacgccaaccccaacgccaaccccaacgccaaccccaacgccaaccccaacgccaaccccaacgccaaccccaacgccaaccccaacgccaaccccaacgccaaccccaacgccaaccccaacgccaaccccaacgccaaccccaacgccaaccccaacgccaaccccaacgucgaccccaacgccaaccccaacgccaaccccaacgccaaccccaacgccaaccccaacgccaaccccaacgccaaccccaacgccaaccccaacgccaaccccaacgccaaccccaacgccaaccccaacgccaaccccaacgccaaccccaacgccaaccccaacgccaaccccaacgccaaccccaacgccaaccccaacgccaaccccaacgccaaccccaacgccaaccccaacgccaaccccaacaagaacaaccagggcaacggccagggccacaacaugcccaacgaccccaaccgcaacgucgacgagaacgccaacgccaacaacgccgucaagaacaacaacaacgaggagcccuccgacaagcacaucaaggaguaccucaacaagauccagaacuccaucuccaccgaguggucccccugcuccgucaccugcggcaacggcauccagguccgcaucaagcccggcuccgccgacaagcccaaggaccagcucgacuacaucaacgacaucgagaagaagaucugcaagauggagaagugcuccuccgucuucaacgucgucaacuccuccaucggccucaucaugguccucuccuuccucuuccucaacuga

SEQ ID NO: 3770 - RNA, 1263 nt, Artificial Sequence
  derived and/or modified CDS sequence (opt2) from Pf(Tz93-038)__BAM84758.1__CSP
augaugcgcaagcucgccauccucuccgucuccuccuuccucuucgucgaggcccucuuccaggaguaccagugcuacggcuccuccuccaacacccgcguccucaacgagcucaacuacgacaacgccggcaccaaccucuacaacgagcucgagaugaacuacuacggcaagcaggagaacugguacucccucaagaagaacucccgcucccucggcgagaacgacgacggcaacaacaacaacggcgacaacggccgcgagggcaaggacgaggacaagcgcgacggcaacaacgaggacaacgagaagcuccgcaagcccaagcacaagaagcucaagcagcccggcgacggcaaccccgaccccaacgccaaccccaacgucgaccccaacgccaaccccaacgucgaccccaacgccaaccccaacgucgaccccaacgccaaccccaacgccaaccccaacgccaaccccaacgccaaccccaacgccaaccccaacgccaaccccaacgccaaccccaacgccaaccccaacgccaaccccaacgccaaccccaacgccaaccccaacgccaaccccaacgccaaccccaacgccaaccccaacgccaaccccaacgccaaccccaacgccaaccccaacgucgaccccaacgccaaccccaacgccaaccccaacgccaaccccaacgccaaccccaacgccaaccccaacgccaaccccaacgccaaccccaacgccaaccccaacgccaaccccaacgccaaccccaacgccaaccccaacgccaaccccaacgccaaccccaacgccaaccccaacgccaaccccaacgccaaccccaacgccaaccccaacgccaaccccaacgccaaccccaacaagaacaaccagggcaacggccagggccacaacaugcccaacgaccccaaccgcaacgucgacgagaacgccaacgccaacaacgccgucaagaacaacaacaacgaggagcccuccgacaagcacaucaaggaguaccucaacaagauccagaacuccaucuccaccgaguggucccccugcuccgucaccugcggcaacggcauccagguccgcaucaagcccggcuccgccgacaagcccaaggaccagcucgacuacaucaacgacaucgagaagaagaucugcaagauggagaagugcuccuccgucuucaacgucgucaacuccuccaucggccucaucaugguccucuccuuccucuuccucaacuga

SEQ ID NO: 3771 - RNA, 1260 nt, Artificial Sequence
  derived and/or modified CDS sequence (opt2) from Pf(TMS31)__ACO49480.1__CSP
augcgcaagcucgccauccucuccgucuccuccuuccucuucgucgaggcccucuuccaggaguaccagugcuacggcuccuccuccaacacccgcguccucaacgagcucaacuacgacaacgccggcaccaaccucuacaacgagcucgagaugaacuacuacggcaagcaggagaacugguacucccucaagaagaacucccgcucccucggcgagaacgacgacggcaacaacaacaacggcgacaacggccgcgagggcaaggacgaggacaagcgcgacggcaacaacgaggacaacgagaagcuccgcaagcccaagcacaagaagcucaagcagcccggcgacggcaaccccgaccccaacgccaaccccaacgucgaccccaacgccaaccccaacgucgaccccaacgccaaccccaacgucgaccccaacgccaaccccaacgccaaccccaacgccaaccccaacgccaaccccaacgccaaccccaacgccaaccccaacgccaaccccaacgccaaccccaacgccaaccccaacgccaaccccaacgccaaccccaacgccaaccccaacgccaaccccaacgccaaccccaacgccaaccccaacgccaaccccaacgccaaccccaacgccaaccccaacgccaaccccaacgccaaccccaacgccaaccccaacgccaaccccaacgccaaccccaacgccaaccccaacgccaaccccaacgccaaccccaacgccaaccccaacgccaaccccaacgccaaccccaacgccaaccccaacgccaaccccaacgccaaccccaacgccaaccccaacgccaaccccaacgccaaccccaacgccaaccccaacgccaaccccaacaagaacaaccagggcaacggccagggccacaacaugcccaacgaccccaaccgcaacgucgacgagaacgccaacgccaacaacgccgucaagaacaacaacaacgaggagcccuccgacaagcacaucgagcaguaccucaagaagaugcagaacucccucuccaccgaguggucccccugcuccgucaccugcggcaacggcauccagguccgcaucaagcccggcuccgccaacaagcccaaggacgagcucgacuacgagaacgacaucgagaagaagaucugcaagauggagaagugcuccuccgucuucaacgucgucaacuccuccaucggccucaucaugguccucuccuuccucuuccucaacuga

SEQ ID NO: 3772 - RNA, 1260 nt, Artificial Sequence
  derived and/or modified CDS sequence (opt2) from Pf(TSY172)__ACO49517.1__CSP
augcgcaagcucgccauccucuccgucuccuccuuccucuucgucgaggcccucuuccaggaguaccagugcuacggcuccuccuccaacacccgcguccucaacgagcucaacuacgacaacgccggcaccaaccucuacaacgagcucgagaugaacuacuacggcaagcaggagaacugguacucccucaagaagaacucccgcucccucggcgagaacgacgacggcaacaacaacaacggcgacaacggccgcgagggcaaggacgaggacaagcgcgacggcaacaacgaggacaacgagaagcuccgcaagcccaagcacaagaagcucaagcagcccggcgacggcaaccccgaccccaacgccaaccccaacgucgaccccaacgccaaccccaacgucgaccccaacgccaaccccaacgucgaccccaacgccaaccccaacgccaaccccaacgccaaccccaacgccaaccccaacgccaaccccaacgccaaccccaacgccaaccccaacgccaaccccaacgccaaccccaacgccaaccccaacgccaaccccaacgccaaccccaacgccaaccccaacgccaaccccaacgccaaccccaacgccaaccccaacgccaaccccaacgccaaccccaacgccaaccccaacgccaaccccaacgccaaccccaacgccaaccccaacgccaaccccaacgccaaccccaacgccaaccccaacgccaaccccaacgccaaccccaacgccaaccccaacgccaaccccaacgccaaccccaacgccaaccccaacgccaaccccaacgccaaccccaacgccaaccccaacgccaaccccaacgccaaccccaacgccaaccccaacaagaacaaccagggcaacggccagggccacaacaugcccaacgaccccaaccgcaacgucgacgagaacgccaacgccaacaacgccgucaagaacaacaacaacgaggagcccuccgacaagcacaucgagcaguaccucaagaagauccagaacucccucuccaccgaguggucccccugcuccgucaccugcggcaacggcauccagguccgcaucaagcccggcuccgccaacaagcccaaggacgagcucgacuacgagaacgacaucgagaagaagaucugcaagauggagaagugcuccuccgucuucaacgucgucaacuccuccaucggccucaucaugguccucuccuuccucuuccucaacuga

SEQ ID NO: 3773 - RNA, 1251 nt, Artificial Sequence
  derived and/or modified CDS sequence (opt2) from Pf(Asembo Bay)__AAN87591.1__CSP
augaugcgcaagcucgccauccucuccgucuccuccuuccucuucgucgaggcccucuuccaggaguaccagugcuacggcuccuccuccaacacccgcguccucaacgagcucaacuacgacaacgccggcaccaaccucuacaacgagcucgagaugaacuacuacggcaagcaggagaacugguacucccucaagaagaacucccgcucccucggcgagaacgacgacggcaacaacaacaacggcgacaacggccgcgagggcaaggacgaggacaagcgcgacggcaacaacgaggacaacgagaagcuccgcaagcccaagcacaagaagcucaagcagcccggcgacggcaaccccgaccccaacgccaaccccaacgucgaccccaacgccaaccccaacgucgaccccaacgccaaccccaacgucgaccccaacgccaaccccaacgccaaccccaacgccaaccccaacgccaaccccaacgccaaccccaacgccaaccccaacgccaaccccaacgccaaccccaacgccaaccccaacgccaaccccaacgccaaccccaacgccaaccccaacgccaaccccaacgccaaccccaacgccaaccccaacgccaaccccaacgccaaccccaacgucgaccccaacgccaaccccaacgccaaccccaacgccaaccccaacgccaaccccaacgccaaccccaacgccaaccccaacgccaaccccaacgccaaccccaacgccaaccccaacgccaaccccaacgccaaccccaacgccaaccccaacgccaaccccaacgccaaccccaacgccaaccccaacgccaaccccaacgccaaccccaacgccaaccccaacaagaacaaccagggcaacggccagggccacaacaugcccaacgaccccaaccgcaacgucgacgagaacgccaacgccaacaacgccgucaagaacaacaacaacgaggagcccuccgaccagcacaucgagaaguaccucaagaccauccagaacucccucuccaccgaguggucccccugcuccgucaccugcggcaacggcauccagguccgcaucaagcccggcuccgccaacaagcccaaggaccagcucgacuacgccaacgacaucgagaagaagaucugcaagauggagaagugcuccuccgucuucaacgucgucaacuccuccaucggccucaucaugguccucuccuuccucuuccucaacuga

SEQ ID NO: 3774 - RNA, 1251 nt, Artificial Sequence
  derived and/or modified CDS sequence (opt2) from Pf(Asembo Bay)__AAN87590.1__CSP
augaugcgcaagcucgccauccucuccgucuccuccuuccucuucgucgaggcccucuuccaggaguaccagugcuacggcuccuccuccaacacccgcguccucaacgagcucaacuacgacaacgccggcaccaaccucuacaacgagcucgagaugaacuacuacggcaagcaggagaacugguacucccucaagaagaacucccgcucccucggcgagaacgacgacggcaacaacaacaacggcgacaacggccgcgagggcaaggacgaggacaagcgcgacggcaacaacgaggacaacgagaagcuccgcaagcccaagcacaagaagcucaagcagcccggcgacggcaaccccgaccccaacgccaaccccaacgucgaccccaacgccaaccccaacgucgaccccaacgccaaccccaacgucgaccccaacgccaaccccaacgccaaccccaacgccaaccccaacgccaaccccaacgccaaccccaacgccaaccccaacgccaaccccaacgccaaccccaacgccaaccccaacgccaaccccaacgccaaccccaacgccaaccccaacgucgaccccaacgccaaccccaacgccaaccccaacgccaaccccaacgccaaccccaacgccaaccccaacgccaaccccaacgccaaccccaacgccaaccccaacgccaaccccaacgccaaccccaacgccaaccccaacgccaaccccaacgccaaccccaacgccaaccccaacgccaaccccaacgccaaccccaacgccaaccccaacgccaaccccaacgccaaccccaacgccaaccccaacgccaaccccaacgccaaccccaacgccaaccccaacaagaacaaccagggcaacggccagggccacaacaugcccaacgaccccaaccgcaacgucgacgagaacgccaacgccaacaacgccgucaagaacaacaacaacgaggagcccuccgaccagcacaucgagaaguaccucaagaccauccagaacucccucuccaccgaguggucccccugcuccgucaccugcggcaacggcauccagguccgcaucaagcccggcuccgccaacaagcccaaggaccagcucgacuacgccaacgacaucgagaagaagaucugcaagauggagaagugcuccuccgucuucaacgucgucaacuccuccaucggccucaucaugguccucuccuuccucuuccucaacuga

SEQ ID NO: 3775 - RNA, 1251 nt, Artificial Sequence
  derived and/or modified CDS sequence (opt2) from Pf(Gha1108-097)__BAM84820.1__CSP
augaugcgcaagcucgccauccucuccgucuccuccuuccucuucgucgaggcccucuuccaggaguaccagugcuacggcuccuccuccaacacccgcguccucaacgagcucaacuacgacaacgccggcaccaaccucuacaacgagcucgagaugaacuacuacggcaagcaggagaacugguacucccucaagaagaacggccgcucccucggcgagaacgacgacggcaacaacaacaacggcgacaacggccgcgagggcaaggacgaggacaagcgcgacggcaacaacgaggacaacgagaagcuccgcaagcccaagcacaagaagcucaagcagcccgccgacggcaaccccgaccccaacgccaaccccaacgucgaccccaacgccaaccccaacgucgaccccaacgccaaccccaacgucgaccccaacgccaaccccaacgccaaccccaacgccaaccccaacgccaaccccaacgccaaccccaacgccaaccccaacgccaaccccaacgccaaccccaacgccaaccccaacgccaaccccaacgccaaccccaacgccaaccccaacgccaaccccaacgccaaccccaacgccaaccccaacgccaaccccaacgucgaccccaacgccaaccccaacgccaaccccaacgccaaccccaacgccaaccccaacgccaaccccaacgccaaccccaacgccaaccccaacgccaaccccaacgccaaccccaacgccaaccccaacgccaaccccaacgccaaccccaacgccaaccccaacgccaaccccaacgccaaccccaacgccaaccccaacgccaaccccaacgccaaccccaacgccaaccccaacaagaacaaccagggcaacggccagggccacaacaugcccaacgaccccaaccgcaacgucgacgagaacgccaacgccaacaacggcgucaagaacaacaacaacgaggagcccuccgacaagcacaucgagcaguaccucaagcgcauccagaacucccucuccaccgaguggucccccugcuccgucaccugcggcaacggcauccagguccgcaucaagcccggcuccgccaacaagcccaaggacgagcucaacuacgagaacgacaucgagaagaagaucugcaagauggagaagugcuccuccgucuucaacgucgucaacuccuccaucggccucaucaugguccucuccuuccucuuccucaacuga

SEQ ID NO: 3776 - RNA, 1251 nt, Artificial Sequence
  derived and/or modified CDS sequence (opt2) from Pf(MAD20)__AAA29550.1__CSP
augaugcgcaagcucgccauccucuccgucuccuccuuccucuucgucgaggcccucuuccaggaguaccagugcuacggcuccuccuccaacacccgcguccucaacgagcucaacuacgacaacgccggcaucaaccucuacaacgagcucgagaugaacuacuacggcaagcaggagaacugguacucccucaagaagaacucccgcucccucggcgagaacgacgacggcaacaacaacaacggcgacaacggccgcgagggcaaggacgaggacaagcgcgacggcaacaacgaggacaacgagaagcuccgcaagcccaagcacaagaagcucaagcagcccggcgacggcaaccccgaccccaacgccaaccccaacgucgaccccaacgccaaccccaacgucgaccccaacgccaaccccaacgucgaccccaacgccaaccccaacgccaaccccaacgccaaccccaacgccaaccccaacgccaaccccaacgccaaccccaacgccaaccccaacgccaaccccaacgccaaccccaacgccaaccccaacgccaaccccaacgccaaccccaacgccaaccccaacgccaaccccaacgccaaccccaacgccaaccccaacgucgaccccaacgccaaccccaacgccaaccccaacgccaaccccaacgccaaccccaacgccaaccccaacgccaaccccaacgccaaccccaacgccaaccccaacgccaaccccaacgccaaccccaacgccaaccccaacgccaaccccaacgccaaccccaacgccaaccccaacgccaaccccaacgccaaccccaacgccaaccccaacgccaaccccaacgccaaccccaacaagaacaaccagggcaacggccagggccacaacaugcccaacgaccccaaccgcaacgucgacgagaacgccaacgccaacaacgccgucaagaacaacaacaacgaggagcccuccgacaagcacaucgagcaguaccucaagaagauccagaacucccucuccaccgaguggucccccugcuccgucaccugcggcaacggcauccagguccgcaucaagcccggcuccgccgacaagcccaaggaccagcucgacuacgagaacgacaucgagaagaagaucugcaagauggagaagugcuccuccgucuucaacgucgucaacuccuccaucggccucaucaugguccucuccuuccucuuccucaacuga

SEQ ID NO: 3777 - RNA, 1251 nt, Artificial Sequence
  derived and/or modified CDS sequence (opt2) from Pf(Pal97-002)__BAM84917.1__CSP
augaugcgcaagcucgccauccucuccgucuccuccuuccucuucgucgaggcccucuuccaggaguaccagugcuacggcuccuccuccaacacccgcguccucaacgagcucaacuacgacaacgccggcaccaaccucuacaacgagcucgagaugaacuacuacggcaagcaggagaacugguacucccucaagaagaacucccgcucccucggcgagaacgacgacggcaacaacaacaacggcgacaacggccgcgagggcaaggacgaggacaagcgcgacggcaacaacgaggacaacgagaagcuccgcaagcccaagcacaagaagcucaagcagcccggcgacggcaaccccgaccccaacgccaaccccaacgucgaccccaacgccaaccccaacgucgaccccaacgccaaccccaacgucgaccccaacgccaaccccaacgccaaccccaacgccaaccccaacgccaaccccaacgccaaccccaacgccaaccccaacgccaaccccaacgccaaccccaacgccaaccccaacgccaaccccaacgccaaccccaacgccaaccccaacgccaaccccaacgccaaccccaacgccaaccccaacgccaaccccaacgucgaccccaacgccaaccccaacgccaaccccaacgccaaccccaacgccaaccccaacgccaaccccaacgccaaccccaacgccaaccccaacgccaaccccaacgccaaccccaacgccaaccccaacgccaaccccaacgccaaccccaacgccaaccccaacgccaaccccaacgccaaccccaacgccaaccccaacgccaaccccaacgccaaccccaacgccaaccccaacaagaacaaccagggcaacggccagggccacaacaugcccaacgaccccaaccgcaacgucgacgagaacgccaacgccaacaacgccgucaagaacaacaacaacgaggagcccuccgaccagcacaucgagaaguacaucaagaagauccagaacucccucuccaccgaguggucccccugcuccgucaccugcggcaacggcauccagguccgcaucaagcccggcuccgccgacaagcccaagaacgagcucgacuacgagaacgacaucgagaagaagaucugcaagauggagaagugcuccuccgucuucaacgucgucaacuccuccaucggccucaucaugguccucuccuuccucuuccucaacuga

SEQ ID NO: 3778 - RNA, 1251 nt, Artificial Sequence
  derived and/or modified CDS sequence (opt2) from Pf(Pal97-102)__BAM84954.1__CSP
augaugcgcaagcucgccauccucuccgucuccuccuuccucuucgucgaggcccucuuccaggaguaccagugcuacggcuccuccuccaacacccgcguccucaacgagcucaacuacgacaacgccggcaccaaccucuacaacgagcucgagaugaacuacuacggcaagcaggagaacugguacucccucaagaagaacucccgcucccucggcgagaacgacgacggcaacaacaacaacggcgacaacggccgcgagggcaaggacgaggacaagcgcgacggcaacaacgaggacaacgagaagcuccgcaagcccaagcacaagaagcucaagcagcccggcgacggcaaccccgaccccaacgccaaccccaacgucgaccccaacgccaaccccaacgucgaccccaacgccaaccccaacgucgaccccaacgccaaccccaacgccaaccccaacgccaaccccaacgccaaccccaacgccaaccccaacgccaaccccaacgccaaccccaacgccaaccccaacgccaaccccaacgccaaccccaacgccaaccccaacgccaaccccaacgccaaccccaacgccaaccccaacgccaaccccaacgccaaccccaacgccaaccccaacgccaaccccaacgccaaccccaacgccaaccccaacgccaaccccaacgccaaccccaacgccaaccccaacgccaaccccaacgccaaccccaacgccaaccccaacgccaaccccaacgccaaccccaacgccaaccccaacgccaaccccaacgccaaccccaacgccaaccccaacgccaaccccaacgccaaccccaacgccaaccccaacgccaaccccaacaagaacaaccagggcaacggccagggccacaacaugcccaacgaccccaaccgcaacgucgacgagaacgccaacgccaacaacgccgucaagaacaacaacaacgaggagcccuccgacaagcacaucaaggaguaccucaccaagauccagaacuccaucuccaccgaguggucccccugcuccgucaccugcggcaacggcauccagguccgcaucaagcccggcuccgccggcaagcccaaggacgagcucaacuacgagaacgacaucgagaagaagaucugcaagauggagaagugcuccuccgucuucaacgucgucaacuccuccaucggccucaucaugguccucuccuuccucuuccucaacuga

SEQ ID NO: 3779 - RNA, 1251 nt, Artificial Sequence
  derived and/or modified CDS sequence (opt2) from Pf(PNG227-255)__BAM85044.1__CSP
augaugcgcaagcucgccauccucuccgucuccuccuuccucuucgucgaggcccucuuccaggaguaccagugcuacggcuccuccuccaacacccgcguccucaacgagcucaacuacgacaacgccggcaccaaccucuacaacgagcucgagaugaacuacuacggcaagcaggagaacugguacucccucaagaagaacucccgcucccucggcgagaacgacgacggcaacaacaacaacggcgacaacggccgcgagggcaaggacgaggacaagcgcgacggcaacaacgaggacaacgagaagcuccgcaagcccaagcacaagaagcucaagcagcccggcgacggcaaccccgaccccaacgccaaccccaacgucgaccccaacgccaaccccaacgucgaccccaacgccaaccccaacgucgaccccaacgccaaccccaacgucgaccccaacgccaaccccaacgccaaccccaacgccaaccccaacgccaaccccaacgccaaccccaacgccaaccccaacgccaaccccaacgccaaccccaacgccaaccccaacgccaaccccaacgccaaccccaacgccaaccccaacgccaaccccaacgccaaccccaacgucgaccccaacgccaaccccaacgccaaccccaacgccaaccccaacgccaaccccaacgccaaccccaacgccaaccccaacgccaaccccaacgccaaccccaacgccaaccccaacgccaaccccaacgccaaccccaacgccaaccccaacgccaaccccaacgccaaccccaacgccaaccccaacgccaaccccaacgccaaccccaacgccaaccccaacgccaaccccaacaagaacaaccagggcaacggccagggccacaacaugcccaacgaccccaaccgcaacgucgacgagaacgccaacgccaacaacgccgucaagaacaacaacaacgaggagcccuccgacaagcacaucgagcaguaccucaagaagauccagaacucccucuccaccgaguggucccccugcuccgucaccugcggcaacggcauccagguccgcaucaagcccggcuccgccgacaagcccaaggaccagcucgacuacgagaacgacaucgagaagaagaucugcaagauggagaagugcuccuccgucuucaacgucgucaacuccuccaucggccucaucaugguccucuccuuccucuuccucaacuga

SEQ ID NO: 3780 - RNA, 1251 nt, Artificial Sequence
  derived and/or modified CDS sequence (opt2) from Pf(PNG228-063)__BAM85045.1__CSP
augaugcgcaagcucgccauccucuccgucuccuccuuccucuucgucgaggcccucuuccaggaguaccagugcuacggcuccuccuccaacacccgcguccucaacgagcucaacuacgacaacgccggcaccaaccucuacaacgagcucgagaugaacuacuacggcaagcaggagaacugguacucccucaagaagaacucccgcucccucggcgagaacgacgacggcaacaacaacaacggcgacaacggccgcgagggcaaggacgaggacaagcgcgacggcaacaacgaggacaacgagaagcuccgcaagcccaagcacaagaagcucaagcagcccggcgacggcaaccccgaccccaacgccaaccccaacgucgaccccaacgccaaccccaacgucgaccccaacgccaaccccaacgucgaccccaacgccaaccccaacgccaaccccaacgccaaccccaacgccaaccccaacgccaaccccaacgccaaccccaacgccaaccccaacgccaaccccaacgccaaccccaacgccaaccccaacgccaaccccaacgccaaccccaacgccaaccccaacgccaaccccaacgccaaccccaacgccaaccccaacgucgaccccaacgccaaccccaacgccaaccccaacgccaaccccaacgccaaccccaacgccaaccccaacgccaaccccaacgccaaccccaacgccaaccccaacgccaaccccaacgccaaccccaacgccaaccccaacgccaaccccaacgccaaccccaacgccaaccccaacgccaaccccaacgccaaccccaacgccaaccccaacgccaaccccaacgccaaccccaacaagaacaaccagggcaacggccagggccacaacaugcccaacgaccccaaccgcaacgucgacgagaacgccaacgccaacaacgccgucaagaacaacaacaacgaggagcccuccgacaagcacaucgagcaguaccucaagaagauccagaacucccucuccaccgaguggucccccugcuccgucaccugcggcaacggcauccagguccgcaucaagcccggcuccgccggcaaguccaaggacgagcucgacuacgagaacgacaucgagaagaagaucugcaagauggagaagugcuccuccgucuucaacgucgucaacuccuccaucggccucaucaugguccucuccuuccucuuccucaacuga

SEQ ID NO: 3781 - RNA, 1251 nt, Artificial Sequence
  derived and/or modified CDS sequence (opt2) from Pf(PNG830-058)__BAM84987.1__CSP
augaugcgcaagcucgccauccucuccgucuccuccuuccucuucgucgaggcccucuuccaggaguaccagugcuacggcuccuccuccaacacccgcguccucaacgagcucaacuacgacaacgccggcaccaaccucuacaacgagcucgagaugaacuacuacggcaagcaggagaacugguacucccucaagaagaacucccgcucccucggcgagaacgacgacggcaacaacaacaacggcgacaacggccgcgagggcaaggacgaggacaagcgcgacggcaacaacgaggacaacgagaagcuccgcaagcccaagcacaagaagcucaagcagcccggcgacggcaaccccgaccccaacgccaaccccaacgucgaccccaacgccaaccccaacgucgaccccaacgccaaccccaacgucgaccccaacgccaaccccaacgucgaccccaacgccaaccccaacgccaaccccaacgccaaccccaacgccaaccccaacgccaaccccaacgccaaccccaacgccaaccccaacgccaaccccaacgccaaccccaacgccaaccccaacgccaaccccaacgccaaccccaacgccaaccccaacgccaaccccaacgccaaccccaacgccaaccccaacgccaaccccaacgccaaccccaacgccaaccccaacgccaaccccaacgccaaccccaacgccaaccccaacgccaaccccaacgccaaccccaacgccaaccccaacgccaaccccaacgccaaccccaacgccaaccccaacgccaaccccaacgccaaccccaacgccaaccccaacgccaaccccaacgccaaccccaacgccaaccccaacaagaacaaccagggcaacggccagggccacaacaugcccaacgaccccaaccgcaacgucgacgagaacgccaacgccaacaacgccgucaagaacaacaacaacgaggagcccuccgacaagcacaucgagcaguaccucaagaagauccagaacucccucuccaccgaguggucccccugcuccgucaccugcggcaacggcauccagguccgcaucaagcccggcuccgccaacaagcccaaggacgagcucgacuacgagaacgacaucgagaagaagaucugcaagauggagaagugcuccuccgucuucaacgucgucaacuccuccaucggccucaucaugguccucuccuuccucuuccucaacuga

SEQ ID NO: 3782 - RNA, 1251 nt, Artificial Sequence
  derived and/or modified CDS sequence (opt2) from Pf(PNG903-136)__BAM84993.1__CSP
augaugcgcaagcucgccauccucuccgucuccuccuuccucuucgucgaggcccucuuccaggaguaccagugcuacggcuccuccuccaacacccgcguccucaacgagcucaacuacgacaacgccggcaccaaccucuacaacgagcucgagaugaacuacuacggcaagcaggagaacugguacucccucaagaagaacucccgcucccucggcgagaacgacgacggcaacaacaacaacggcgacaacggccgcgagggcaaggacgaggacaagcgcgacggcaacaacgaggacaacgagaagcuccgcaagcccaagcacaagaagcucaagcagcccggcgacggcaaccccgaccccaacgccaaccccaacgucgaccccaacgccaaccccaacgucgaccccaacgccaaccccaacgucgaccccaacgccaaccccaacgccaaccccaacgccaaccccaacgccaaccccaacgccaaccccaacgccaaccccaacgccaaccccaacgccaaccccaacgccaaccccaacgccaaccccaacgccaaccccaacgccaaccccaacgccaaccccaacgccaaccccaacgccaaccccaacgccaaccccaacgucgaccccaacgccaaccccaacgccaaccccaacgccaaccccaacgccaaccccaacgccaaccccaacgccaaccccaacgccaaccccaacgccaaccccaacgccaaccccaacgccaaccccaacgccaaccccaacgccaaccccaacgccaaccccaacgccaaccccaacgccaaccccaacgccaaccccaacgccaaccccaacgccaaccccaacgccaaccccaacaagaacaaccagggcaacggccagggccacaacaugcccaacgaccccaaccgcaacgucgacgagaacgccaacgccaacaacgccgucaagaacaacaacaacgaggagcccuccgacaagcacaucgagcaguaccucaagaagauccagaacucccucuccaccgaguggucccccugcuccgucaccugcggcaacggcauccagguccgcaucaagcccggcuccgccaacaagcccaaggacgagcucgacuacgagaacgacaucgagaagaagaucugcaagauggagaagugcuccuccgucuucaacgucgucaacuccuccaucggccucaucaugguccucuccuuccucuuccucaacuga

SEQ ID NO: 3783 - RNA, 1251 nt, Artificial Sequence
  derived and/or modified CDS sequence (opt2) from Pf(Tz03-086)__BAM84805.1__CSP
augaugcgcaagcucgccauccucuccgucuccuccuuccucuucgucgaggcccucuuccaggaguaccagugcuacggcuccuccuccaacacccgcguccucaacgagcucaacuacgacaacgccggcaccaaccucuacaacgagcucgagaugaacuacuacggcaagcaggagaacugguacucccucaagaagaacucccgcucccucggcgagaacgacgacggcaacaacaacaacggcgacaacggccgcgagggcaaggacgaggacaagcgcgacggcaacaacgaggacaacgagaagcuccgcaagcccaagcacaagaagcucaagcagcccgccgacggcaaccccgaccccaacgccaaccccaacgucgaccccaacgccaaccccaacgucgaccccaacgccaaccccaacgucgaccccaacgccaaccccaacgccaaccccaacgccaaccccaacgccaaccccaacgccaaccccaacgccaaccccaacgccaaccccaacgccaaccccaacgccaaccccaacgccaaccccaacgccaaccccaacgccaaccccaacgccaaccccaacgccaaccccaacgccaaccccaacgccaaccccaacgccaaccccaacgccaaccccaacgucgaccccaacgccaaccccaacgccaaccccaacgccaaccccaacgccaaccccaacgccaaccccaacgccaaccccaacgccaaccccaacgccaaccccaacgccaaccccaacgccaaccccaacgccaaccccaacgccaaccccaacgccaaccccaacgccaaccccaacgccaaccccaacgccaaccccaacgccaaccccaacaagaacaaccagggcaacggccagggccacaacaugcccaacgaccccaaccgcaacgucgacgagaacgccaacgccaacaacgccgucaagaacaacaacaacgaggagcccuccgacaagcacaucaccgaguaccucaagaagauccagaacucccucuccaccgaguggucccccugcuccgucaccugcggcaacggcauccagguccgcaucaagcccggcuccgccggcaaguccaagaacgagcucgacuacgagaacgacaucgagaagaagaucugcaagauggagaagugcuccuccgucuucaacgucgucaacuccuccaucggccucaucaugguccucuccuuccucuuccucaacuga

SEQ ID NO: 3784 - RNA, 1251 nt, Artificial Sequence
  derived and/or modified CDS sequence (opt2) from Pf(Tz93-009)__BAM84750.1__CSP
augaugcgcaagcucgccauccucuccgucuccuccuuccucuucgucgaggcccucuuccaggaguaccagugcuacggcuccuccuccaacacccgcguccucaacgagcucaacuacgacaacgccggcaccaaccucuacaacgagcucgagaugaacuacuacggcaagcaggagaacugguacucccucaagaagaacucccgcucccucggcgagaacgacgacggcaacaacaacaacggcgacaacggccgcgagggcaaggacgaggacaagcgcgacggcaacaacgaggacaacgagaagcuccgcaagcccaagcacaagaagcucaagcagcccggcgacggcaaccccgaccccaacgccaaccccaacgucgaccccaacgccaaccccaacgucgaccccaacgccaaccccaacgucgaccccaacgccaaccccaacgccaaccccaacgccaaccccaacgccaaccccaacgccaaccccaacgccaaccccaacgccaaccccaacgccaaccccaacgccaaccccaacgccaaccccaacgccaaccccaacgccaaccccaacgccaaccccaacgccaaccccaacgccaaccccaacgccaaccccaacgucgaccccaacgccaaccccaacgccaaccccaacgccaaccccaacgccaaccccaacgccaaccccaacgccaaccccaacgccaaccccaacgccaaccccaacgccaaccccaacgccaaccccaacgccaaccccaacgccaaccccaacgccaaccccaacgccaaccccaacgccaaccccaacgccaaccccaacgccaaccccaacgccaaccccaacgccaaccccaacaagaacaaccagggcaacggccagggccacaacaugcccaacgaccccaaccgcaacgucgacgagaacgccaacgccaacaacgccgucaagaacaacaacaacgaggagcccuccgacaagcacaucaaggaguaccucaccaagaucaagaacuccaucuccaccgaguggucccccugcuccgucaccugcggcaacggcauccagguccgcaucaagcccggcuccgccaacaagcccaaggacgagcucgacuacgagaacgacaucgagaagaagaucugcaagauggagaagugcuccuccgucuucaacgucgucaacuccuccaucggccucaucaugguccucuccuuccucuuccucaacuga

SEQ ID NO: 3785 - RNA, 1251 nt, Artificial Sequence
  derived and/or modified CDS sequence (opt2) from Pf(Van98M305-147)__BAM85260.1__CSP
augaugcgcaagcucgccauccucuccgucuccuccuuccucuucgucgaggcccucuuccaggaguaccagugcuacggcuccuccuccaacacccgcguccucaacgagcucaacuacgacaacgccggcaccaaccucuacaacgagcucgagaugaacuacuacggcaagcaggagaacugguacucccucaagaagaacucccgcucccucggcgagaacgacgacggcaacaacaacaacggcgacaacggccgcgagggcaaggacgaggacaagcgcgacggcaacaacgaggacaacgagaagcuccgcaagcccaagcacaagaagcucaagcagcccggcgacggcaaccccgaccccaacgccaaccccaacgucgaccccaacgccaaccccaacgucgaccccaacgccaaccccaacgucgaccccaacgccaaccccaacgccaaccccaacgccaaccccaacgccaaccccaacgccaaccccaacgccaaccccaacgccaaccccaacgccaaccccaacgccaaccccaacgccaaccccaacgccaaccccaacgccaaccccaacgccaaccccaacgccaaccccaacgccaaccccaacgccaaccccaacgucgaccccaacgccaaccccaacgccaaccccaacgccaaccccaacgccaaccccaacgccaaccccaacgccaaccccaacgccaaccccaacgccaaccccaacgccaaccccaacgccaaccccaacgccaaccccaacgccaaccccaacgccaaccccaacgccaaccccaacgccaaccccaacgccaaccccaacgccaaccccaacgccaaccccaacgccaaccccaacaagaacaaccagggcaacggccagggccacaacaugcccaacgaccccaaccgcaacgucgacgagaacgccaacgccaacaacgccgucaagaacaacaacaacgaggagcccuccgacaagcacaucgagcaguaccucaagaagauccagaacucccucuccaccgaguggucccccugcuccgucaccugcggcaacggcauccagguccgcaucaagcccggcuccgccgacaagcccaaggaccagcucgacuacgagaacgacaucgagaagaagaucugcaagauggagaagugcuccuccgucuucaacgucgucaacuccuccaucggccucaucaugguccucuccuuccucuuccucaacuga

SEQ ID NO: 3786 - RNA, 1251 nt, Artificial Sequence
  derived and/or modified CDS sequence (opt2) from Pf(Van98P226-97)__BAM85298.1__CSP
augaugcgcaagcucgccauccucuccgucuccuccuuccucuucgucgaggcccucuuccaggaguaccagugcuacggcuccuccuccaacacccgcguccucaacgagcucaacuacgacaacgccggcaccaaccucuacaacgagcucgagaugaacuacuacggcaagcaggagaacugguacucccucaagaagaacucccgcucccucggcgagaacgacgacggcaacaacaacaacggcgacaacggccgcgagggcaaggacgaggacaagcgcgacggcaacaacgaggacaacgagaagcuccgcaagcccaagcacaagaagcucaagcagcccggcgacggcaaccccgaccccaacgccaaccccaacgucgaccccaacgccaaccccaacgucgaccccaacgccaaccccaacgucgaccccaacgccaaccccaacgccaaccccaacgccaaccccaacgccaaccccaacgccaaccccaacgccaaccccaacgccaaccccaacgccaaccccaacgccaaccccaacgccaaccccaacgccaaccccaacgccaaccccaacgccaaccccaacgccaaccccaacgccaaccccaacgccaaccccaacgccaaccccaacgccaaccccaacgccaaccccaacgccaaccccaacgccaaccccaacgccaaccccaacgccaaccccaacgccaaccccaacgccaaccccaacgccaaccccaacgccaaccccaacgccaaccccaacgccaaccccaacgccaaccccaacgccaaccccaacgccaaccccaacgccaaccccaacgccaaccccaacgccaaccccaacgccaaccccaacaagaacaaccagggcaacggccagggccacaacaugcccaacgaccccaaccgcaacgucgacgagaacgccaacgccaacaacgccgucaagaacaacaacaacgaggagcccuccgacaagcacaucgagcaguaccucaagaagauccagaacucccucuccaccgaguggucccccugcuccgucaccugcggcaacggcauccagguccgcaucaagcccggcuccgccaacaagcccaaggacgagcucgacuacgagaacgacaucgagaagaagaucugcaagauggagaagugcuccuccgucuucaacgucgucaacuccuccaucggccucaucaugguccucuccuuccucuuccucaacuga

SEQ ID NO: 3787 - RNA, 1251 nt, Artificial Sequence
  derived and/or modified CDS sequence (opt2) from Pf(Yaounde)__AAN87614.1__CSP
augaugcgcaagcucgccauccucuccgucuccuccuuccucuucgucgaggcccucuuccaggaguaccagugcuacggcuccuccuccaacacccgcguccucaacgagcucaacuacgacaacgccggcaccaaccucuacaacgagcucgagaugaacuacuacggcaagcaggagaacugguacucccucaagaagaacucccgcucccucggcgagaacgacgacggcaacaacaacaacggcgacaacggccgcgagggcaaggacgaggacaagcgcgacggcaacaacgaggacaacgagaagcuccgcaagcccaagcacaagaagcucaagcagcccgccgacggcaaccccgaccccaacgccaaccccaacgucgaccccaacgccaaccccaacgucgaccccaacgccaaccccaacgucgaccccaacgccaaccccaacgccaaccccaacgccaaccccaacgccaaccccaacgccaaccccaacgccaaccccaacgccaaccccaacgccaaccccaacgccaaccccaacgccaaccccaacgccaaccccaacgccaaccccaacgccaaccccaacgucgaccccaacgccaaccccaacgccaaccccaacgccaaccccaacgccaaccccaacgccaaccccaacgccaaccccaacgccaaccccaacgccaaccccaacgccaaccccaacgccaaccccaacgccaaccccaacgccaaccccaacgccaaccccaacgccaaccccaacgccaaccccaacgccaaccccaacgccaaccccaacgccaaccccaacgccaaccccaacgccaaccccaacgccaaccccaacgccaaccccaacaagaacaaccagggcaacggccagggccacaacaugcccaacgaccccaaccgcaacgucgacgagaacgccaacgccaacaacgccgucaagaacaacaacaacgaggagcccuccgaccagcacaucgagaaguaccucaagaucaucaagaacucccucuccaccgaguggucccccugcuccgucaccugcggcaacggcauccagguccgcaucaagcccggcuccgccaacaagcccaaggaccagcucgacuacgccaacgacaucgagaagaagaucugcaagauggagaagugcuccuccgucuucaacgucgucaacuccuccaucggccucaucaugguccucuccuuccucuuccucaacuga

SEQ ID NO: 3788 - RNA, 1248 nt, Artificial Sequence
  derived and/or modified CDS sequence (opt2) from Pf(A98)__ACO49328.1__CSP
augcgcaagcucgccauccucuccgucuccuccuuccucuucgucgaggcccucuuccaggaguaccagugcuacggcuccuccuccaacacccgcguccucaacgagcucaacuacgacaacgccggcaccaaccucuacaacgagcucgagaugaacuacuacggcaagcaggagaacugguacucccucaagaagaacucccgcucccucggcgagaacgacgacggcaacaacaacaacggcgacaacggccgcgagggcaaggacgaggacaagcgcgacggcaacaacgaggacaacgagaagcuccgcaagcccaagcacaagaagcucaagcagcccggcgacggcaaccccgaccccaacgccaaccccaacgucgaccccaacgccaaccccaacgucgaccccaacgccaaccccaacgucgaccccaacgccaaccccaacgccaaccccaacgccaaccccaacgccaaccccaacgccaaccccaacgccaaccccaacgccaaccccaacgccaaccccaacgccaaccccaacgccaaccccaacgccaaccccaacgccaaccccaacgccaaccccaacgccaaccccaacgccaaccccaacgccaaccccaacgccaaccccaacgccaaccccaacgccaaccccaacgccaaccccaacgccaaccccaacgccaaccccaacgccaaccccaacgccaaccccaacgccaaccccaacgccaaccccaacgccaaccccaacgccaaccccaacgccaaccccaacgccaaccccaacgccaaccccaacgccaaccccaacgccaaccccaacgccaaccccaacgccaaccccaacgccaaccccaacaagaacaaccagggcaacggccagggccacaacaugcccaacgaccccaaccgcaacgucgacgagaacgccaacgccaacaacgccgucaagaacaacaacaacgaggagcccuccgacaagcacaucgagcaguaccucaagaacauccagaacucccucuccaccgaguggucccccugcuccgucaccugcggcaacggcauccagguccgcaucaagcccggcuccgccaacaagcccaaggacgagcucgacuacgagaacgacaucgagaagaagaucugcaagauggagaagugcuccuccgucuucaacgucgucaacuccuccaucggccucaucaugguccucuccuuccucuuccucaacuga

SEQ ID NO: 3789 - RNA, 1248 nt, Artificial Sequence
  derived and/or modified CDS sequence (opt2) from Pf(B60)__ACO49339.1__CSP
augcgcaagcucgccauccucuccgucuccuccuuccucuucgucgaggcccucuuccaggaguaccagugcuacggcuccuccuccaacacccgcguccucaacgagcucaacuacgacaacgccggcaccaaccucuacaacgagcucgagaugaacuacuacggcaagcaggagaacugguacucccucaagaagaacucccgcucccucggcgagaacgacgacggcaacaacaacaacggcgacaacggccgcgagggcaaggacgaggacaagcgcgacggcaacaacgaggacaacgagaagcuccgcaagcccaagcacaagaagcucaagcagcccggcgacggcaaccccgaccccaacgccaaccccaacgucgaccccaacgccaaccccaacgucgaccccaacgccaaccccaacgucgaccccaacgccaaccccaacgucgaccccaacgccaaccccaacgccaaccccaacgccaaccccaacgccaaccccaacgccaaccccaacgccaaccccaacgccaaccccaacgccaaccccaacgccaaccccaacgccaaccccaacgccaaccccaacgccaaccccaacgccaaccccaacgccaaccccaacgccaaccccaacgccaaccccaacgccaaccccaacgccaaccccaacgccaaccccaacgccaaccccaacgccaaccccaacgccaaccccaacgccaaccccaacgccaaccccaacgccaaccccaacgccaaccccaacgccaaccccaacgccaaccccaacgccaaccccaacgccaaccccaacgccaaccccaacgccaaccccaacgccaaccccaacgccaaccccaacaagaacaaccagggcaacggccagggccacaacaugcccaacgaccccaaccgcaacgucgacgagaacgccaacgccaacaacgccgucaagaacaacaacaacgaggagcccuccgacaagcacaucgagcaguaccucaagaagauccagaacucccucuccaccgaguggucccccugcuccgucaccugcggcaacggcauccagguccgcaucaagcccggcuccgccaacaagcccaaggacgagcucgacuacgagaacgacaucgagaagaagaucugcaagauggagaagugcuccuccgucuucaacgucgucaacuccuccaucggccucaucaugguccucuccuuccucuuccucaacuga

SEQ ID NO: 3790 - RNA, 1248 nt, Artificial Sequence
  derived and/or modified CDS sequence (opt2) from Pf(TM323)__ACO49493.1__CSP
augcgcaagcucgccauccucuccgucuccuccuuccucuucgucgaggcccucuuccaggaguaccagugcuacggcuccuccuccaacacccgcguccucaacgagcucaacuacgacaacgccggcaccaaccucuacaacgagcucgagaugaacuacuacggcaagcaggagaacugguacucccucaagaagaacucccgcucccucggcgagaacgacgacggcaacaacaacaacggcgacaacggccgcgagggcaaggacgaggacaagcgcgacggcaacaacgaggacaacgagaagcuccgcaagcccaagcacaagaagcucaagcagcccggcgacggcaaccccgaccccaacgccaaccccaacgucgaccccaacgccaaccccaacgucgaccccaacgccaaccccaacgucgaccccaacgccaaccccaacgccaaccccaacgccaaccccaacgccaaccccaacgccaaccccaacgccaaccccaacgccaaccccaacgccaaccccaacgccaaccccaacgccaaccccaacgccaaccccaacgccaaccccaacgccaaccccaacgccaaccccaacgccaaccccaacgccaaccccaacgccaaccccaacgccaaccccaacgccaaccccaacgccaaccccaacgccaaccccaacgccaaccccaacgccaaccccaacgccaaccccaacgccaaccccaacgccaaccccaacgccaaccccaacgccaaccccaacgccaaccccaacgccaaccccaacgccaaccccaacgccaaccccaacgccaaccccaacgccaaccccaacgccaaccccaacgccaaccccaacaagaacaaccagggcaacggccagggccacaacaugcccaacgaccccaaccgcaacgucgacgagaacgccaacgccaacaacgccgucaagaacaacaacaacgaggagcccuccgacaagcacaucgagaaguaccucaaggagauccagaacucccucuccaccgaguggucccccugcuccgucaccugcggcaacggcauccagguccgcaucaagcccggcuccgccaacaagcccaaggaccagcucgacuacgagaacgacaucgagaagaagaucugcaagauggagaagugcuccuccgucuucaacgucgucaacuccuccaucggccucaucaugguccucuccuuccucuuccucaacuga

SEQ ID NO: 3791 - RNA, 1239 nt, Artificial Sequence
  derived and/or modified CDS sequence (opt2) from Pf(22)__AGR53780.1__CSP
augaugcgcaagcucgccauccucuccgucuccuccuuccucuucgucgaggcccucuuccaggaguaccagugcuacggcucccccuccaacacccgcguccucaacgagcucaacuacgacaacgccggcaccaaccucuacaacgagcucgagaugaacuacuacggcaagcaggagaacugguacucccucaagaagaacucccgcucccucggcgagaacgacgacggcaacaacaacaacggcgacaacggccgcgagggcaaggacgaggacaagcgcgacggcaacaacgaggacaacgagaagcuccgcaagcccaagcacaagaagcucaagcagcccgccgacggcaaccccgaccccaacgccaaccccaacgucgaccccaacgccaaccccaacgucgaccccaacgccaaccccaacgucgaccccaacgccaaccccaacgccaaccccaacgccaaccccaacgccaaccccaacgccaaccccaacgccaaccccaacgccaaccccaacgccaaccccaacgccaaccccaacgccaaccccaacgccaaccccaacgccaaccccaacgccaaccccaacgccaaccccaacgccaaccccaacgucgaccccaacgccaaccccaacgccaaccccaacgccaaccccaacgccaaccccaacgccaaccccaacgccaaccccaacgccaaccccaacgccaaccccaacgccaaccccaacgccaaccccaacgccaaccccaacgccaaccccaacgccaaccccaacgccaaccccaacgccaaccccaacgccaaccccaacgccaaccccaacgccaaccccaacgccaaccccaacaagaacaaccagggcaacggccagggccacaacaugcccaacgaccccaaccgcaacgucgacgagaacgccaacgccaacaacgccgucaagaacaacaacaacgaggagcccuccgacaagcacaucgagcaguaccucaagaccaucaagaacucccucuccaccgaguggucccccugcuccgucaccugcggcaacggcauccagguccgcaucaagcccggcuccgccaacaagcccaaggacgagcucaacuacgagaacgacaucgagaagaagaucugcaagauggagaagugcuccuccgucuucaacgucgucaacuccuccaucggccucaucaugguccucuccuuccucuuccucaacuga

SEQ ID NO: 3792 - RNA, 1239 nt, Artificial Sequence
  derived and/or modified CDS sequence (opt2) from Pf(Amazonas)__AAN87605.1__CSP
augaugcgcaagcucgccauccucuccgucuccuccuuccucuucgucgaggcccucuuccaggaguaccagugcuacggcuccuccuccaacacccgcguccucaacgagcucaacuacgacaacgccggcaccaaccucuacaacgagcucgagaugaacuacuacggcaagcaggagaacugguacucccucaagaagaacucccgcucccucggcgagaacgacgacggcaacaacaacaacggcgacaacggccgcgagggcaaggacgaggacaagcgcgacggcaacaacgaggacaacgagaagcuccgcaagcccaagcacaagaagcucaagcagcccgccgacggcaaccccgaccccaacgccaaccccaacgucgaccccaacgccaaccccaacgucgaccccaacgccaaccccaacgucgaccccaacgccaaccccaacgccaaccccaacgccaaccccaacgccaaccccaacgccaaccccaacgccaaccccaacgccaaccccaacgccaaccccaacgccaaccccaacgccaaccccaacgccaaccccaacgccaaccccaacgccaaccccaacgccaaccccaacgccaaccccaacgucgaccccaacgccaaccccaacgccaaccccaacgccaaccccaacgccaaccccaacgccaaccccaacgccaaccccaacgccaaccccaacgccaaccccaacgccaaccccaacgccaaccccaacgccaaccccaacgccaaccccaacgccaaccccaacgccaaccccaacgccaaccccaacgccaaccccaacgccaaccccaacgccaaccccaacgccaaccccaacaagaacaaccagggcaacggccagggccacaacaugcccaacgaccccaaccgcaacgucgacgagaacgccaacgccaacaacgccgucaagaacaacaacaacgaggagcccuccgaccagcacaucgagaaguaccucaagcgcauccagaacucccucuccaccgaguggucccccugcuccgucaccugcggcaacggcauccagguccgcaucaagcccggcuccgccaacaagcccaaggacgagcucgacuacgagaacgacaucgagaagaagaucugcaagauggagaagugcuccuccgucuucaacgucgucaacuccuccaucggccucaucaugguccucuccuuccucuuccucaacuga

SEQ ID NO: 3793 - RNA, 1239 nt, Artificial Sequence
  derived and/or modified CDS sequence (opt2) from Pf(Amazonas)__AAN87598.1__CSP
augaugcgcaagcucgccauccucuccgucuccuccuuccucuucgucgaggcccucuuccaggaguaccagugcuacggcuccuccuccaacacccgcguccucaacgagcucaacuacgacaacgccggcaccaaccucuacaacgagcucgagaugaacuacuacggcaagcaggagaacugguacucccucaagaagaacucccgcucccucggcgagaacgacgacggcaacaacaacaacggcgacaacggccgcgagggcaaggacgaggacaagcgcgacggcaacaacgaggacaacgagaagcuccgcaagcccaagcacaagaagcucaagcagcccgccgacggcaaccccgaccccaacgccaaccccaacgucgaccccaacgccaaccccaacgucgaccccaacgccaaccccaacgucgaccccaacgccaaccccaacgccaaccccaacgccaaccccaacgccaaccccaacgccaaccccaacgccaaccccaacgccaaccccaacgccaaccccaacgccaaccccaacgccaaccccaacgccaaccccaacgccaaccccaacgccaaccccaacgccaaccccaacgccaaccccaacgucgaccccaacgccaaccccaacgccaaccccaacgccaaccccaacgccaaccccaacgccaaccccaacgccaaccccaacgccaaccccaacgccaaccccaacgccaaccccaacgccaaccccaacgccaaccccaacgccaaccccaacgccaaccccaacgccaaccccaacgccaaccccaacgccaaccccaacgccaaccccaacgccaaccccaacgccaaccccaacaagaacaaccagggcaacggccagggccacaacaugcccaacgaccccaaccgcaacgucgacgagaacgccaacgccaacaacgccgucaagaacaacaacaacgaggagcccuccgacaagcacaucaaggaguaccucaagaucauccagaacucccucuccaccgaguggucccccugcuccgucaccugcggcaacggcauccagguccgcaucaagcccggcuccgccggcaagcccaaggacgagcucgacuacgccaacgacaucgagaagaagaucugcaagauggagaagugcuccuccgucuucaacgucgucaacuccuccaucggccucaucaugguccucuccuuccucuuccucaacuga

SEQ ID NO: 3794 - RNA, 1239 nt, Artificial Sequence
  derived and/or modified CDS sequence (opt2) from Pf(Asembo Bay)__AAN87611.1__CSP
augaugcgcaagcucgccauccucuccgucuccuccuuccucuucgucgaggcccucuuccaggaguaccagugcuacggcuccuccuccaacacccgcguccucaacgagcucaacuacgacaacgccggcaccaaccucuacaacgagcucgagaugaacuacuacggcaagcaggagaacugguacucccucaagaagaacucccgcucccucggcgagaacgacgacggcaacaacaacaacggcgacaacggccgcgagggcaaggacgaggacaagcgcgacggcaacaacgaggacaacgagaagcuccgcaagcccaagcacaagaagcucaagcagcccgccgacggcaaccccgaccccaacgccaaccccaacgucgaccccaacgccaaccccaacgucgaccccaacgccaaccccaacgucgaccccaacgccaaccccaacgccaaccccaacgccaaccccaacgccaaccccaacgccaaccccaacgccaaccccaacgccaaccccaacgccaaccccaacgccaaccccaacgccaaccccaacgccaaccccaacgccaaccccaacgccaaccccaacgccaaccccaacgccaaccccaacgccaaccccaacgccaaccccaacgucgaccccaacgccaaccccaacgccaaccccaacgccaaccccaacgccaaccccaacgccaaccccaacgccaaccccaacgccaaccccaacgccaaccccaacgccaaccccaacgccaaccccaacgccaaccccaacgccaaccccaacgccaaccccaacgccaaccccaacgccaaccccaacgccaaccccaacgccaaccccaacaagaacaaccagggcaacggccagggccacaacaugcccaacgaccccaaccgcaacgucgacgagaacgccaacgccaacaacgccgucaagaacaacaacaacgaggagcccuccgacaagcacaucgagcaguaccucaagaucaucaagaacucccucuccaccgaguggucccccugcuccgucaccugcggcaacggcauccagguccgcaucaagcccggcuccgccaacaagcccaaggacgagcucgacuacgccaacgacaucgagaagaagaucugcaagauggagaagugcuccuccgucuucaacgucgucaacuccuccaucggccucaucaugguccucuccuuccucuuccucaacuga

SEQ ID NO: 3795 - RNA, 1239 nt, Artificial Sequence
  derived and/or modified CDS sequence (opt2) from Pf(Asembo Bay)__AAN87589.1__CSP
augaugcgcaagcucgccauccucuccgucuccuccuuccucuucgucgaggcccucuuccaggaguaccagugcuacggcuccuccuccaacacccgcguccucaacgagcucaacuacgacaacgccggcaccaaccucuacaacgagcucgagaugaacuacuacggcaagcaggagaacugguacucccucaagaagaacucccgcucccucggcgagaacgacgacggcaacaacaacaacggcgacaacggccgcgagggcaaggacgaggacaagcgcgacggcaacaacgaggacaacgagaagcuccgcaagcccaagcacaagaagcucaagcagcccgccgacggcaaccccgaccccaacgccaaccccaacgucgaccccaacgccaaccccaacgucgaccccaacgccaaccccaacgucgaccccaacgccaaccccaacgccaaccccaacgccaaccccaacgccaaccccaacgccaaccccaacgccaaccccaacgccaaccccaacgccaaccccaacgccaaccccaacgccaaccccaacgccaaccccaacgucgaccccaacgccaaccccaacgccaaccccaacgccaaccccaacgccaaccccaacgccaaccccaacgccaaccccaacgccaaccccaacgccaaccccaacgccaaccccaacgccaaccccaacgccaaccccaacgccaaccccaacgccaaccccaacgccaaccccaacgccaaccccaacgccaaccccaacgccaaccccaacgccaaccccaacgccaaccccaacgccaaccccaacgccaaccccaacgccaaccccaacgccaaccccaacaagaacaaccagggcaacggccagggccacaacaugcccaacgaccccaaccgcaacgucgacgagaacgccaacgccaacaacgccgucaagaacaacaacaacgaggagcccuccgaccagcacaucgagaaguaccucaagaagauccagaacucccucuccaccgaguggucccccugcuccgucaccugcggcaacggcauccagguccgcaucaagcccggcuccgccaacaagcccaaggaccagcucgacuacgccaacgacaucgagaagaagaucugcaagauggagaagugcuccuccgucuucaacgucgucaacuccuccaucggccucaucaugguccucuccuuccucuuccucaacuga

SEQ ID NO: 3796 - RNA, 1239 nt, Artificial Sequence
  derived and/or modified CDS sequence (opt2) from Pf(BrB1)__BAM85131.1__CSP
augaugcgcaagcucgccauccucuccgucuccuccuuccucuucgucgaggcccucuuccaggaguaccagugcuacggcuccuccuccaacacccgcguccucaacgagcucaacuacgacaacgccggcaccaaccucuacaacgagcucgagaugaacuacuacggcaagcaggagaacugguacucccucaagaagaacucccgcucccucggcgagaacgacgacggcaacaacaacaacggcgacaacggccgcgagggcaaggacgaggacaagcgcgacggcaacaacgaggacaacgagaagcuccgcaagcccaagcacaagaagcucaagcagcccgccgacggcaaccccgaccccaacgccaaccccaacgucgaccccaacgccaaccccaacgucgaccccaacgccaaccccaacgucgaccccaacgccaaccccaacgccaaccccaacgccaaccccaacgccaaccccaacgccaaccccaacgccaaccccaacgccaaccccaacgccaaccccaacgccaaccccaacgccaaccccaacgccaaccccaacgccaaccccaacgccaaccccaacgccaaccccaacgccaaccccaacgucgaccccaacgccaaccccaacgccaaccccaacgccaaccccaacgccaaccccaacgccaaccccaacgccaaccccaacgccaaccccaacgccaaccccaacgccaaccccaacgccaaccccaacgccaaccccaacgccaaccccaacgccaaccccaacgccaaccccaacgccaaccccaacgccaaccccaacgccaaccccaacgccaaccccaacgccaaccccaacaagaacaaccagggcaacggccagggccacaacaugcccaacgaccccaaccgcaacgucgacgagaacgccaacgccaacaacgccgucaagaacaacaacaacgaggagcccuccgacaagcacaucgagcaguaccucaagaagaucaagaacuccaucuccaccgaguggucccccugcuccgucaccugcggcaacggcauccagguccgcaucaagcccggcuccgccaacaagcccaaggacgagcucgacuacgagaacgacaucgagaagaagaucugcaagauggagaagugcuccuccgucuucaacgucgucaacuccuccaucggccucaucaugguccucuccuuccucuuccucaacuga

SEQ ID NO: 3797 - RNA, 1239 nt, Artificial Sequence
  derived and/or modified CDS sequence (opt2) from Pf(BrP9)__BAM85145.1__CSP
augaugcgcaagcucgccauccucuccgucuccuccuuccucuucgucgaggcccucuuccaggaguaccagugcuacggcuccuccuccaacacccgcguccucaacgagcucaacuacgacaacgccggcaccaaccucuacaacgagcucgagaugaacuacuacggcaagcaggagaacugguacucccucaagaagaacucccgcucccucggcgagaacgacgacggcaacaacaacaacggcgacaacggccgcgagggcaaggacgaggacaagcgcgacggcaacaacgaggacaacgagaagcuccgcaagcccaagcacaagaagcucaagcagcccggcgacggcaaccccgaccccaacgccaaccccaacgucgaccccaacgccaaccccaacgucgaccccaacgccaaccccaacgucgaccccaacgccaaccccaacgccaaccccaacgccaaccccaacgccaaccccaacgccaaccccaacgccaaccccaacgccaaccccaacgccaaccccaacgccaaccccaacgccaaccccaacgccaaccccaacgccaaccccaacgccaaccccaacgccaaccccaacgccaaccccaacgucgaccccaacgccaaccccaacgccaaccccaacgccaaccccaacgccaaccccaacgccaaccccaacgccaaccccaacgccaaccccaacgccaaccccaacgccaaccccaacgccaaccccaacgccaaccccaacgccaaccccaacgccaaccccaacgccaaccccaacgccaaccccaacgccaaccccaacgccaaccccaacgccaaccccaacgccaaccccaacaagaacaaccagggcaacggccagggccacaacaugcccaacgaccccaaccgcaacgucgacgagaacgccaacgccaacaacgccgucaagaacaacaacaacgaggagcccuccgacaagcacaucgagcaguaccucaagaagaucaagaacuccaucuccaccgaguggucccccugcuccgucaccugcggcaacggcauccagguccgcaucaagcccggcuccgccaacaagcccaaggacgagcucgacuacgagaacgacaucgagaagaagaucugcaagauggagaagugcuccuccgucuucaacgucgucaacuccuccaucggccucaucaugguccucuccuuccucuuccucaacuga

SEQ ID NO: 3798 - RNA, 1239 nt, Artificial Sequence
  derived and/or modified CDS sequence (opt2) from Pf(India)__AAN87606.1__CSP
augaugcgcaagcucgccauccucuccgucuccuccuuccucuucgucgaggcccucuuccaggaguaccagugcuacggcuccuccuccaacacccgcguccucaacgagcucaacuacgacaacgccggcaccaaccucuacaacgagcucgagaugaacuacuacggcaagcaggagaacugguacucccucaagaagaacucccgcucccucggcgagaacgacgacggcaacaacaacaacggcgacaacggccgcgagggcaaggacgaggacaagcgcgacggcaacaacgaggacaacgagaagcuccgcaagcccaagcacaagaagcucaagcagcccggcgacggcaaccccgaccccaacgccaaccccaacgucgaccccaacgccaaccccaacgucgaccccaacgccaaccccaacgucgaccccaacgccaaccccaacgccaaccccaacgccaaccccaacgccaaccccaacgccaaccccaacgccaaccccaacgccaaccccaacgccaaccccaacgccaaccccaacgccaaccccaacgccaaccccaacgccaaccccaacgccaaccccaacgccaaccccaacgccaaccccaacgucgaccccaacgccaaccccaacgccaaccccaacgccaaccccaacgccaaccccaacgccaaccccaacgccaaccccaacgccaaccccaacgccaaccccaacgccaaccccaacgccaaccccaacgccaaccccaacgccaaccccaacgccaaccccaacgccaaccccaacgccaaccccaacgccaaccccaacgccaaccccaacgccaaccccaacgccaaccccaacaagaacaaccagggcaacggccagggccacaacaugcccaacgaccccaaccgcaacgucgacgagaacgccaacgccaacaacgccgucaagaacaacaacaacgaggagcccuccgacaagcacaucgagaaguaccucaagaagauccagaacucccucuccaccgaguggucccccugcuccgucaccugcggcaacggcauccagguccgcaucaagcccggcuccgccaacaagcccaaggacgagcucgacuacgagaacgacaucgagaagaagaucugcaagauggagaagugcuccuccgucuucaacgucgucaacuccuccaucggccucaucaugguccucuccuuccucuuccucaacuga

SEQ ID NO: 3799 - RNA, 1239 nt, Artificial Sequence
  derived and/or modified CDS sequence (opt2) from Pf(Pal97-007)__BAM84921.1__CSP
augaugcgcaagcucgccauccucuccgucuccuccuuccucuucgucgaggcccucuuccaggaguaccagugcuacggcuccuccuccaacacccgcguccucaacgagcucaacuacgacaacgccggcaccaaccucuacaacgagcucgagaugaacuacuacggcaagcaggagaacugguacucccucaagaagaacucccgcucccucggcgagaacgacgacggcaacaacaacaacggcgacaacggccgcgagggcaaggacgaggacaagcgcgacggcaacaacgaggacaacgagaagcuccgcaagcccaagcacaagaagcucaagcagcccggcgacggcaaccccgaccccaacgccaaccccaacgucgaccccaacgccaaccccaacgucgaccccaacgccaaccccaacgucgaccccaacgccaaccccaacgccaaccccaacgccaaccccaacgccaaccccaacgccaaccccaacgccaaccccaacgccaaccccaacgccaaccccaacgccaaccccaacgccaaccccaacgccaaccccaacgccaaccccaacgccaaccccaacgccaaccccaacgccaaccccaacgucgaccccaacgccaaccccaacgccaaccccaacgccaaccccaacgccaaccccaacgccaaccccaacgccaaccccaacgccaaccccaacgccaaccccaacgccaaccccaacgccaaccccaacgccaaccccaacgccaaccccaacgccaaccccaacgccaaccccaacgccaaccccaacgccaaccccaacgccaaccccaacgccaaccccaacgccaaccccaacaagaacaaccagggcaacggccagggccacaacaugcccaacgaccccaaccgcaacgucgacgagaacgccaacgccaacaacgccgucaagaacaacaacaacgaggagcccuccgacaagcacaucaaggaguaccucaccaagaucaagaacuccaucuccaccgaguggucccccugcuccgucaccugcggcaacggcauccagguccgcaucaagcccggcuccgccaacaagcccaaggacgagcucgacuacgagaacgacaucgagaagaagaucugcaagauggagaagugcuccuccgucuucaacgucgucaacuccuccaucggccucaucaugguccucuccuuccucuuccucaacuga

SEQ ID NO: 3800 - RNA, 1239 nt, Artificial Sequence
  derived and/or modified CDS sequence (opt2) from Pf(Pal97-037)__BAM84929.1__CSP
augaugcgcaagcucgccauccucuccgucuccuccuuccucuucgucgaggcccucuuccaggaguaccagugcuacggcuccuccuccaacacccgcguccucaacgagcucaacuacgacaacgccggcaccaaccucuacaacgagcucgagaugaacuacuacggcaagcaggagaacugguacucccucaagaagaacucccgcucccucggcgagaacgacgacggcaacaacaacaacggcgacaacggccgcgagggcaaggacgaggacaagcgcgacggcaacaacgaggacaacgagaagcuccgcaagcccaagcacaagaagcucaagcagcccggcgacggcaaccccgaccccaacgccaaccccaacgucgaccccaacgccaaccccaacgucgaccccaacgccaaccccaacgucgaccccaacgccaaccccaacgccaaccccaacgccaaccccaacgccaaccccaacgccaaccccaacgccaaccccaacgccaaccccaacgccaaccccaacgccaaccccaacgccaaccccaacgccaaccccaacgccaaccccaacgccaaccccaacgccaaccccaacgccaaccccaacgucgaccccaacgccaaccccaacgccaaccccaacgccaaccccaacgccaaccccaacgccaaccccaacgccaaccccaacgccaaccccaacgccaaccccaacgccaaccccaacgccaaccccaacgccaaccccaacgccaaccccaacgccaaccccaacgccaaccccaacgccaaccccaacgccaaccccaacgccaaccccaacgccaaccccaacgccaaccccaacaagaacaaccagggcaacggccagggccacaacaugcccaacgaccccaaccgcaacgucgacgagaacgccaacgccaacaacgccgucaagaacaacaacaacgaggagcccuccgaccagcacaucgagaaguacaucaagaagauccagaacucccucuccaccgaguggucccccugcuccgucaccugcggcaacggcauccagguccgcaucaagcccggcuccgccgacaagcccaagaacgagcucgacuacgagaacgacaucgagaagaagaucugcaagauggagaagugcuccuccgucuucaacgucgucaacuccuccaucggccucaucaugguccucuccuuccucuuccucaacuga

SEQ ID NO: 3801 - RNA, 1239 nt, Artificial Sequence
  derived and/or modified CDS sequence (opt2) from Pf(Pal97-052)__BAM84935.1__CSP
augaugcgcaagcucgccauccucuccgucuccuccuuccucuucgucgaggcccucuuccaggaguaccagugcuacggcuccuccuccaacacccgcguccucaacgagcucaacuacgacaacgccggcaccaaccucuacaacgagcucgagaugaacuacuacggcaagcaggagaacugguacucccucaagaagaacucccgcucccucggcgagaacgacgacggcaacaacaacaacggcgacaacggccgcgagggcaaggacgaggacaagcgcgacggcaacaacgaggacaacgagaagcuccgcaagcccaagcacaagaagcucaagcagcccggcgacggcaaccccgaccccaacgccaaccccaacgucgaccccaacgccaaccccaacgucgaccccaacgccaaccccaacgucgaccccaacgccaaccccaacgccaaccccaacgccaaccccaacgccaaccccaacgccaaccccaacgccaaccccaacgccaaccccaacgccaaccccaacgccaaccccaacgccaaccccaacgccaaccccaacgccaaccccaacgccaaccccaacgccaaccccaacgccaaccccaacgucgaccccaacgccaaccccaacgccaaccccaacgccaaccccaacgccaaccccaacgccaaccccaacgccaaccccaacgccaaccccaacgccaaccccaacgccaaccccaacgccaaccccaacgccaaccccaacgccaaccccaacgccaaccccaacgccaaccccaacgccaaccccaacgccaaccccaacgccaaccccaacgccaaccccaacgccaaccccaacaagaacaaccagggcaacggccagggccacaacaugcccaacgaccccaaccgcaacgucgacgagaacgccaacgccaacaacgccgucaagaacaacaacaacgaggagcccuccgaccagcacaucgagaaguaccucaagaucauccagaacucccucuccaccgaguggucccccugcuccgucaccugcggcaacggcauccagguccgcaucaagcccggcuccgccgacaagcccaaggaccagcucgacuacgccaacgacaucgagaagaagaucugcaagauggagaagugcuccuccgucuucaacgucgucaacuccuccaucggccucaucaugguccucuccuuccucuuccucaacuga

SEQ ID NO: 3802 - RNA, 1239 nt, Artificial Sequence
  derived and/or modified CDS sequence (opt2) from Pf(Sol95-351)__BAM85103.1__CSP
augaugcgcaagcucgccauccucuccgucuccuccuuccucuucgucgaggcccucuuccaggaguaccagugcuacggcuccuccuccaacacccgcguccucaacgagcucaacuacgacaacgccggcaccaaccucuacaacgagcucgagaugaacuacuacggcaagcaggagaacugguacucccucaagaagaacucccgcucccucggcgagaacgacgacggcaacaacaacaacggcgacaacggccgcgagggcaaggacgaggacaagcgcgacggcaacaacgaggacaacgagaagcuccgcaagcccaagcacaagaagcucaagcagcccggcgacggcaaccccgaccccaacgccaaccccaacgucgaccccaacgccaaccccaacgucgaccccaacgccaaccccaacgucgaccccaacgccaaccccaacgccaaccccaacgccaaccccaacgccaaccccaacgccaaccccaacgccaaccccaacgccaaccccaacgccaaccccaacgccaaccccaacgccaaccccaacgccaaccccaacgccaaccccaacgccaaccccaacgccaaccccaacgccaaccccaacgucgaccccaacgccaaccccaacgccaaccccaacgccaaccccaacgccaaccccaacgccaaccccaacgccaaccccaacgccaaccccaacgccaaccccaacgccaaccccaacgccaaccccaacgccaaccccaacgccaaccccaacgccaaccccaacgccaaccccaacgccaaccccaacgccaaccccaacgccaaccccaacgccaaccccaacgccaaccccaacaagaacaaccagggcaacggccagggccacaacaugcccaacgaccccaaccgcaacgucgacgagaacgccaacgccaacaacgccgucaagaacaacaacaacgaggagcccuccgacaagcacaucgagcaguaccucaagaagauccagaacucccucuccaccgaguggucccccugcuccgucaccugcggcaacggcauccagguccgcaucaagcccggcuccgccgacaagcccaaggaccagcucgacuacgagaacgacaucgagaagaagaucugcaagauggagaagugcuccuccgucuucaacgucgucaacuccuccaucggccucaucaugguccucuccuuccucuuccucaacuga

SEQ ID NO: 3803 - RNA, 1239 nt, Artificial Sequence
  derived and/or modified CDS sequence (opt2) from Pf(Tz03-038)__BAM84801.1__CSP
augaugcgcaagcucgccauccucuccgucuccuccuuccucuucgucgaggcccucuuccaggaguaccagugcuacggcuccuccuccaacacccgcguccucaacgagcucaacuacgacaacgccggcaccaaccucuacaacgagcucgagaugaacuacuacggcaagcaggagaacugguacucccucaagaagaacucccgcucccucggcgagaacgacgacggcaacaacaacaacggcgacaacggccgcgagggcaaggacgaggacaagcgcgacggcaacaacgaggacaacgagaagcuccgcaagcccaagcacaagaagcucaagcagcccggcgacggcaaccccgaccccaacgccaaccccaacgucgaccccaacgccaaccccaacgucgaccccaacgccaaccccaacgucgaccccaacgccaaccccaacgccaaccccaacgccaaccccaacgccaaccccaacgccaaccccaacgccaaccccaacgccaaccccaacgccaaccccaacgccaaccccaacgccaaccccaacgccaaccccaacgucgaccccaacgccaaccccaacgccaaccccaacgccaaccccaacgccaaccccaacgccaaccccaacgccaaccccaacgccaaccccaacgccaaccccaacgccaaccccaacgccaaccccaacgccaaccccaacgccaaccccaacgccaaccccaacgccaaccccaacgccaaccccaacgccaaccccaacgccaaccccaacgccaaccccaacgccaaccccaacgccaaccccaacgccaaccccaacgccaaccccaacgccaaccccaacaagaacaaccagggcaacggccagggccacaacaugcccaacgaccccaaccgcaacgucgacgagaacgccaacgccaacaacgccgucaagaacaacaacaacgaggagcccuccgacaagcacaucgagcaguaccucaacaagaucaagaacuccaucuccaccgaguggucccccugcuccgucaccugcggcaacggcauccagguccgcaucaagcccggcuccgccaacaagcccaaggacgagcucaacuacgagaacgacaucgagaagaagaucugcaagauggagaagugcuccuccgucuucaacgucgucaacuccuccaucggccucaucaugguccucuccuuccucuuccucaacuga

SEQ ID NO: 3804 - RNA, 1239 nt, Artificial Sequence
  derived and/or modified CDS sequence (opt2) from Pf(Tz03-076)__BAM84804.1__CSP
augaugcgcaagcucgccauccucuccgucuccuccuuccucuucgucgaggcccucuuccaggaguaccagugcuacggcuccuccuccaacacccgcguccucaacgagcucaacuacgacaacgccggcaccaaccucuacaacgagcucgagaugaacuacuacggcaagcaggagaacugguacucccucaagaagaacucccgcucccucggcgagaacgacgacggcaacaacaacaacggcgacaacggccgcgagggcaaggacgaggacaagcgcgacggcaacaacgaggacaacgagaagcuccgcaagcccaagcacaagaagcucaagcagcccggcgacggcaaccccgaccccaacgccaaccccaacgucgaccccaacgccaaccccaacgucgaccccaacgccaaccccaacgucgaccccaacgccaaccccaacgccaaccccaacgccaaccccaacgccaaccccaacgccaaccccaacgccaaccccaacgccaaccccaacgccaaccccaacgccaaccccaacgccaaccccaacgccaaccccaacgccaaccccaacgccaaccccaacgccaaccccaacgccaaccccaacgucgaccccaacgccaaccccaacgccaaccccaacgccaaccccaacgccaaccccaacgccaaccccaacgccaaccccaacgccaaccccaacgccaaccccaacgccaaccccaacgccaaccccaacgccaaccccaacgccaaccccaacgccaaccccaacgccaaccccaacgccaaccccaacgccaaccccaacgccaaccccaacgccaaccccaacgccaaccccaacaagaacaaccagggcaacggccagggccacaacaugcccaacgaccccaaccgcaacgucgacgagaacgccaacgccaacaacgccgucaagaacaacaacaacgaggagcccuccgacaagcacaucgagcaguaccucaagaccaucaagaacucccucuccaccgaguggucccccugcuccgucaccugcggcaacggcauccagguccgcaucaagcccggcuccgccaacaagcccaaggacgagcucaacuacgagaacgacaucgagaagaagaucugcaagauggagaagugcuccuccgucuucaacgucgucaacuccuccaucggccucaucaugguccucuccuuccucuuccucaacuga

SEQ ID NO: 3805 - RNA, 1239 nt, Artificial Sequence
  derived and/or modified CDS sequence (opt2) from Pf(Tz03-101)__BAM84806.1__CSP
augaugcgcaagcucgccauccucuccgucuccuccuuccucuucgucgaggcccucuuccaggaguaccagugcuacggcuccuccuccaacacccgcguccucaacgagcucaacuacgacaacgccggcaccaaccucuacaacgagcucgagaugaacuacuacggcaagcaggagaacugguacucccucaagaagaacucccgcucccucggcgagaacgacgacggcaacaacaacaacggcgacaacggccgcgagggcaaggacgaggacaagcgcgacggcaacaacgaggacaacgagaagcuccgcaagcccaagcacaagaagcucaagcagcccggcgacggcaaccccgaccccaacgccaaccccaacgucgaccccaacgccaaccccaacgucgaccccaacgccaaccccaacgucgaccccaacgccaaccccaacgccaaccccaacgccaaccccaacgccaaccccaacgccaaccccaacgccaaccccaacgccaaccccaacgccaaccccaacgccaaccccaacgccaaccccaacgccaaccccaacgccaaccccaacgccaaccccaacgccaaccccaacgccaaccccaacgucgaccccaacgccaaccccaacgccaaccccaacgccaaccccaacgccaaccccaacgccaaccccaacgccaaccccaacgccaaccccaacgccaaccccaacgccaaccccaacgccaaccccaacgccaaccccaacgccaaccccaacgccaaccccaacgccaaccccaacgccaaccccaacgccaaccccaacgccaaccccaacgccaaccccaacgccaaccccaacaagaacaaccagggcaacggccagggccacaacaugcccaacgaccccaaccgcaacgucgacgagaacgccaacgccaacaacgccgucaagaacaacaacaacgaggagcccuccgacaagcacaucaaggaguaccucaacaagauccagaacuccaucuccaccgaguggucccccugcuccgucaccugcggcaacggcauccagguccgcaucaagcccggcuccgccgacaagcccaaggaccagcucgacuacaucaacgacaucgagaagaagaucugcaagauggagaagugcuccuccgucuucaacgucgucaacuccuccaucggccucaucaugguccucuccuuccucuuccucaacuga

SEQ ID NO: 3806 - RNA, 1239 nt, Artificial Sequence
  derived and/or modified CDS sequence (opt2) from Pf(Tz93-022)__BAM84753.1__CSP
augaugcgcaagcucgccauccucuccgucuccuccuuccucuucgucgaggcccucuuccaggaguaccagugcuacggcuccuccuccaacacccgcguccucaacgagcucaacuacgacaacgccggcaccaaccucuacaacgagcucgagaugaacuacuacggcaagcaggagaacugguacucccucaagaagaacucccgcucccucggcgagaacgacgacggcaacaacaacaacggcgacaacggccgcgagggcaaggacgaggacaagcgcgacggcaacaacgaggacaacgagaagcuccgcaagcccaagcacaagaagcucaagcagcccggcgacggcaaccccgaccccaacgccaaccccaacgucgaccccaacgccaaccccaacgucgaccccaacgccaaccccaacgucgaccccaacgccaaccccaacgccaaccccaacgccaaccccaacgccaaccccaacgccaaccccaacgccaaccccaacgccaaccccaacgccaaccccaacgccaaccccaacgccaaccccaacgccaaccccaacgccaaccccaacgccaaccccaacgccaaccccaacgccaaccccaacgccaaccccaacgccaaccccaacgccaaccccaacgccaaccccaacgccaaccccaacgccaaccccaacgccaaccccaacgccaaccccaacgccaaccccaacgccaaccccaacgccaaccccaacgccaaccccaacgccaaccccaacgccaaccccaacgccaaccccaacgccaaccccaacgccaaccccaacgccaaccccaacgccaaccccaacgccaaccccaacaagaacaaccagggcaacggccagggccacaacaugcccaacgaccccaaccgcaacgucgacgagaacgccaacgccaacaacgccgucaagaacaacaacaacgaggagcccuccgacaagcacaucgagaaguaccucaaggagauccagaacucccucuccaccgaguggucccccugcuccgucaccugcggcaacggcauccagguccgcaucaagcccggcuccgccaacaagcccaaggaccagcucgacuacgagaacgacaucgagaagaagaucugcaagauggagaagugcuccuccgucuucaacgucgucaacuccuccaucggccucaucaugguccucuccuuccucuuccucaacuga

SEQ ID NO: 3807 - RNA, 1239 nt, Artificial Sequence
  derived and/or modified CDS sequence (opt2) from Pf(Tz93-035)__BAM84757.1__CSP
augaugcgcaagcucgccauccucuccgucuccuccuuccucuucgucgaggcccucuuccaggaguaccagugcuacggcuccuccuccaacacccgcguccucaacgagcucaacuacgacaacgccggcaccaaccucuacaacgagcucgagaugaacuacuacggcaagcaggagaacugguacucccucaagaagaacucccgcucccucggcgagaacgacgacggcaacaacaacaacggcgacaacggccgcgagggcaaggacgaggacaagcgcgacggcaacaacgaggacaacgagaagcuccgcaagcccaagcacaagaagcucaagcagcccggcgacggcaaccccgaccccaacgccaaccccaacgucgaccccaacgccaaccccaacgucgaccccaacgccaaccccaacgucgaccccaacgccaaccccaacgccaaccccaacgccaaccccaacgccaaccccaacgccaaccccaacgccaaccccaacgccaaccccaacgccaaccccaacgccaaccccaacgccaaccccaacgccaaccccaacgccaaccccaacgccaaccccaacgccaaccccaacgccaaccccaacgucgaccccaacgccaaccccaacgccaaccccaacgccaaccccaacgccaaccccaacgccaaccccaacgccaaccccaacgccaaccccaacgccaaccccaacgccaaccccaacgccaaccccaacgccaaccccaacgccaaccccaacgccaaccccaacgccaaccccaacgccaaccccaacgccaaccccaacgccaaccccaacgccaaccccaacgccaaccccaacaagaacaaccagggcaacggccagggccacaacaugcccaacgaccccaaccgcaacgucgacgagaacgccaacgccaacaacgccgucaagaacaacaacaacgaggagcccuccgacaagcacaucaccgaguaccucaagaagaucaagaacuccaucuccaccgaguggucccccugcuccgucaccugcggcaacggcauccagguccgcaucaagcccggcuccgccaacaagcccaaggacgagcucgacuacgagaacgacaucgagaagaagaucugcaagauggagaagugcuccuccgucuucaacgucgucaacuccuccaucggccucaucaugguccucuccuuccucuuccucaacuga

SEQ ID NO: 3808 - RNA, 1239 nt, Artificial Sequence
  derived and/or modified CDS sequence (opt2) from Pf(Tz93-041)__BAM84759.1__CSP
augaugcgcaagcucgccauccucuccgucuccuccuuccucuucgucgaggcccucuuccaggaguaccagugcuacggcuccuccuccaacacccgcguccucaacgagcucaacuacgacaacgccggcaccaaccucuacaacgagcucgagaugaacuacuacggcaagcaggagaacugguacucccucaagaagaacucccgcucccucggcgagaacgacgacggcaacaacaacaacggcgacaacggccgcgagggcaaggacgaggacaagcgcgacggcaacaacgaggacaacgagaagcuccgcaagcccaagcacaagaagcucaagcagcccggcgacggcaaccccgaccccaacgccaaccccaacgucgaccccaacgccaaccccaacgucgaccccaacgccaaccccaacgucgaccccaacgccaaccccaacgccaaccccaacgccaaccccaacgccaaccccaacgccaaccccaacgccaaccccaacgccaaccccaacgccaaccccaacgccaaccccaacgccaaccccaacgccaaccccaacgccaaccccaacgccaaccccaacgccaaccccaacgccaaccccaacgucgaccccaacgccaaccccaacgccaaccccaacgccaaccccaacgccaaccccaacgccaaccccaacgccaaccccaacgccaaccccaacgccaaccccaacgccaaccccaacgccaaccccaacgccaaccccaacgccaaccccaacgccaaccccaacgccaaccccaacgccaaccccaacgccaaccccaacgccaaccccaacgccaaccccaacgccaaccccaacaagaacaaccagggcaacggccagggccacaacaugcccaacgaccccaaccgcaacgucgacgagaacgccaacgccaacaacgccgucaagaacaacaacaacgaggagcccuccgacaagcacaucgagcaguaccucaagcgcauccagaacucccucuccaccgaguggucccccugcuccgucaccugcggcaacggcauccagguccgcaucaagcccggcuccgccggcaagcccaaggacgagcucgacuacgccaacgacaucgagaagaagaucugcaagauggagaagugcuccuccgucuucaacgucgucaacuccuccaucggccucaucaugguccucuccuuccucuuccucaacuga

SEQ ID NO: 3809 - RNA, 1239 nt, Artificial Sequence
  derived and/or modified CDS sequence (opt2) from Pf(Tz93-051)__BAM84763.1__CSP
augaugcgcaagcucgccauccucuccgucuccuccuuccucuucgucgaggcccucuuccaggaguaccagugcuacggcuccuccuccaacacccgcguccucaacgagcucaacuacgacaacgccggcaccaaccucuacaacgagcucgagaugaacuacuacggcaagcaggagaacugguacucccucaagaagaacucccgcucccucggcgagaacgacgacggcaacaacaacaacggcgacaacggccgcgagggcaaggacgaggacaagcgcgacggcaacaacgaggacaacgagaagcuccgcaagcccaagcacaagaagcucaagcagcccggcgacggcaaccccgaccccaacgccaaccccaacgucgaccccaacgccaaccccaacgucgaccccaacgccaaccccaacgucgaccccaacgccaaccccaacgccaaccccaacgccaaccccaacgccaaccccaacgccaaccccaacgccaaccccaacgccaaccccaacgccaaccccaacgccaaccccaacgccaaccccaacgccaaccccaacgccaaccccaacgccaaccccaacgccaaccccaacgccaaccccaacgucgaccccaacgccaaccccaacgccaaccccaacgccaaccccaacgccaaccccaacgccaaccccaacgccaaccccaacgccaaccccaacgccaaccccaacgccaaccccaacgccaaccccaacgccaaccccaacgccaaccccaacgccaaccccaacgccaaccccaacgccaaccccaacgccaaccccaacgccaaccccaacgccaaccccaacgccaaccccaacaagaacaaccagggcaacggccagggccacaacaugcccaacgaccccaaccgcaacgucgacgagaacgccaacgccaacaacgccgucaagaacaacaacaacgaggagcccuccgacaagcacaucgagcaguaccucaacaagaucaagaacuccaucuccaccgaguggucccccugcuccgucaccugcggcaacggcauccagguccgcaucaagcccggcuccgccaacaagcccaaggacgagcucaacuacgagaacgacaucgagaagaagaucugcaagauggagaagugcuccuccgucuucaacgucgucaacuccuccaucggccucaucaugguccucuccuuccucuuccucaacuga

SEQ ID NO: 3810 - RNA, 1239 nt, Artificial Sequence
  derived and/or modified CDS sequence (opt2) from Pf(Tz93-052)__BAM84764.1__CSP
augaugcgcaagcucgccauccucuccgucuccuccuuccucuucgucgaggcccucuuccaggaguaccagugcuacggcuccuccuccaacacccgcguccucaacgagcucaacuacgacaacgccggcaccaaccucuacaacgagcucgagaugaacuacuacggcaagcaggagaacugguacucccucaagaagaacucccgcucccucggcgagaacgacgacggcaacaacaacaacggcgacaacggccgcgagggcaaggacgaggacaagcgcgacggcaacaacgaggacaacgagaagcuccgcaagcccaagcacaagaagcucaagcagcccggcgacggcaaccccgaccccaacgccaaccccaacgucgaccccaacgccaaccccaacgucgaccccaacgccaaccccaacgucgaccccaacgccaaccccaacgccaaccccaacgccaaccccaacgccaaccccaacgccaaccccaacgccaaccccaacgccaaccccaacgccaaccccaacgccaaccccaacgccaaccccaacgccaaccccaacgucgaccccaacgccaaccccaacgccaaccccaacgccaaccccaacgccaaccccaacgccaaccccaacgccaaccccaacgccaaccccaacgccaaccccaacgccaaccccaacgccaaccccaacgccaaccccaacgccaaccccaacgccaaccccaacgccaaccccaacgccaaccccaacgccaaccccaacgccaaccccaacgccaaccccaacgccaaccccaacgccaaccccaacgccaaccccaacgccaaccccaacgccaaccccaacaagaacaaccagggcaacggccagggccacaacaugcccaacgaccccaaccgcaacgucgacgagaacgccaacgccaacaacgccgucaagaacaacaacaacgaggagcccuccgaccagcacaucgagaaguaccucaagaucauccagaacucccucuccaccgaguggucccccugcuccgucaccugcggcaacggcauccagguccgcaucaagcccggcuccgccaacaagcccaaggaccagcucgacuacgccaacgacaucgagaagaagaucugcaagauggagaagugcuccuccgucuucaacgucgucaacuccuccaucggccucaucaugguccucuccuuccucuuccucaacuga

SEQ ID NO: 3811 - RNA, 1239 nt, Artificial Sequence
  derived and/or modified CDS sequence (opt2) from Pf(Tz93-061)__BAM84768.1__CSP
augaugcgcaagcucgccauccucuccgucuccuccuuccucuucgucgaggcccucuuccaggaguaccagugcuacggcuccuccuccaacacccgcguccucaacgagcucaacuacgacaacgccggcaccaaccucuacaacgagcucgagaugaacuacuacggcaagcaggagaacugguacucccucaagaagaacucccgcucccucggcgagaacgacgacggcaacaacaacaacggcgacaacggccgcgagggcaaggacgaggacaagcgcgacggcaacaacgaggacaacgagaagcuccgcaagcccaagcacaagaagcucaagcagcccgccgacggcaaccccgaccccaacgccaaccccaacgucgaccccaacgccaaccccaacgucgaccccaacgccaaccccaacgucgaccccaacgccaaccccaacgccaaccccaacgccaaccccaacgccaaccccaacgccaaccccaacgccaaccccaacgccaaccccaacgccaaccccaacgccaaccccaacgccaaccccaacgccaaccccaacgccaaccccaacgccaaccccaacgccaaccccaacgccaaccccaacgucgaccccaacgccaaccccaacgccaaccccaacgccaaccccaacgccaaccccaacgccaaccccaacgccaaccccaacgccaaccccaacgccaaccccaacgccaaccccaacgccaaccccaacgccaaccccaacgccaaccccaacgccaaccccaacgccaaccccaacgccaaccccaacgccaaccccaacgccaaccccaacgccaaccccaacgccaaccccaacaagaacaaccagggcaacggccagggccacaacaugcccaacgaccccaaccgcaacgucgacgagaacgccaacgccaacaacgccgucaagaacaacaacaacgaggagcccuccgaccagcacaucgagaaguaccucaagcgcauccagaacucccucuccaccgaguggucccccugcuccgucaccugcggcaacggcauccagguccgcaucaagcccggcuccgccaacaagcccaaggaccagcucgacuacgccaacgacaucgagaagaagaucugcaagauggagaagugcuccuccgucuucaacgucgucaacuccuccaucggccucaucaugguccucuccuuccucuuccucaacuga

SEQ ID NO: 3812 - RNA, 1239 nt, Artificial Sequence
  derived and/or modified CDS sequence (opt2) from Pf(Tz93-075)__BAM84770.1__CSP
augaugcgcaagcucgccauccucuccgucuccuccuuccucuucgucgaggcccucuuccaggaguaccagugcuacggcuccuccuccaacacccgcguccucaacgagcucaacuacgacaacgccggcaccaaccucuacaacgagcucgagaugaacuacuacggcaagcaggagaacugguacucccucaagaagaacucccgcucccucggcgagaacgacgacggcaacaacaacaacggcgacaacggccgcgagggcaaggacgaggacaagcgcgacggcaacaacgaggacaacgagaagcuccgcaagcccaagcacaagaagcucaagcagcccggcgacggcaaccccgaccccaacgccaaccccaacgucgaccccaacgccaaccccaacgucgaccccaacgccaaccccaacgucgaccccaacgccaaccccaacgccaaccccaacgccaaccccaacgccaaccccaacgccaaccccaacgccaaccccaacgccaaccccaacgccaaccccaacgccaaccccaacgccaaccccaacgccaaccccaacgccaaccccaacgccaaccccaacgccaaccccaacgccaaccccaacgucgaccccaacgccaaccccaacgccaaccccaacgccaaccccaacgccaaccccaacgccaaccccaacgccaaccccaacgccaaccccaacgccaaccccaacgccaaccccaacgccaaccccaacgccaaccccaacgccaaccccaacgccaaccccaacgccaaccccaacgccaaccccaacgccaaccccaacgccaaccccaacgccaaccccaacgccaaccccaacaagaacaaccagggcaacggccagggccacaacaugcccaacgaccccaaccgcaacgucgacgagaacgccaacgccaacaacgccgucaagaacaacaacaacgaggagcccuccgacaagcacaucgagcaguaccucaagaccaucaagaacucccucuccaccgaguggucccccugcuccgucaccugcggcaacggcauccagguccgcaucaagcccggcuccgccaacaagcccaaggaccagcucgacuacgagaacgacaucgagaagaagaucugcaagauggagaagugcuccuccgucuucaacgucgucaacuccuccaucggccucaucaugguccucuccuuccucuuccucaacuga

SEQ ID NO: 3813 - RNA, 1239 nt, Artificial Sequence
  derived and/or modified CDS sequence (opt2) from Pf(Tz93-113)__BAM84775.1__CSP
augaugcgcaagcucgccauccucuccgucuccuccuuccucuucgucgaggcccucuuccaggaguaccagugcuacggcuccuccuccaacacccgcguccucaacgagcucaacuacgacaacgccggcaccaaccucuacaacgagcucgagaugaacuacuacggcaagcaggagaacugguacucccucaagaagaacucccgcucccucggcgagaacgacgacggcaacaacaacaacggcgacaacggccgcgagggcaaggacgaggacaagcgcgacggcaacaacgaggacaacgagaagcuccgcaagcccaagcacaagaagcucaagcagcccggcgacggcaaccccgaccccaacgccaaccccaacgucgaccccaacgccaaccccaacgucgaccccaacgccaaccccaacgucgaccccaacgccaaccccaacgccaaccccaacgccaaccccaacgccaaccccaacgccaaccccaacgccaaccccaacgccaaccccaacgccaaccccaacgccaaccccaacgccaaccccaacgccaaccccaacgccaaccccaacgccaaccccaacgccaaccccaacgccaaccccaacgccaaccccaacgucgaccccaacgccaaccccaacgccaaccccaacgccaaccccaacgccaaccccaacgccaaccccaacgccaaccccaacgccaaccccaacgccaaccccaacgccaaccccaacgccaaccccaacgccaaccccaacgccaaccccaacgccaaccccaacgccaaccccaacgccaaccccaacgccaaccccaacgccaaccccaacgccaaccccaacaagaacaaccagggcaacggccagggccacaacaugcccaacgaccccaaccgcaacgucgacgagaacgccaacgccaacaacgccgucaagaacaacaacaacgaggagcccuccgacaagcacaucgagcaguaccucaacaagaucaagaacuccaucuccaccgaguggucccccugcuccgucaccugcggcaacggcauccagguccgcaucaagcccggcuccgccaacaagcccaaggacgagcucaacuacgagaacgacaucgagaagaagaucugcaagauggagaagugcuccuccgucuucaacgucgucaacuccuccaucggccucaucaugguccucuccuuccucuuccucaacuga

SEQ ID NO: 3814 - RNA, 1239 nt, Artificial Sequence
  derived and/or modified CDS sequence (opt2) from Pf(Tz93-123)__BAM84778.1__CSP
augaugcgcaagcucgccauccucuccgucuccuccuuccucuucgucgaggcccucuuccaggaguaccagugcuacggcuccuccuccaacacccgcguccucaacgagcucaacuacgacaacgccggcaccaaccucuacaacgagcucgagaugaacuacuacggcaagcaggagaacugguacucccucaagaagaacucccgcucccucggcgagaacgacgacggcaacaacaacaacggcgacaacggccgcgagggcaaggacgaggacaagcgcgacggcaacaacgaggacaacgagaagcuccgcaagcccaagcacaagaagcucaagcagcccgccgacggcaaccccgaccccaacgccaaccccaacgucgaccccaacgccaaccccaacgucgaccccaacgccaaccccaacgucgaccccaacgccaaccccaacgccaaccccaacgccaaccccaacgccaaccccaacgccaaccccaacgccaaccccaacgccaaccccaacgccaaccccaacgccaaccccaacgccaaccccaacgccaaccccaacgccaaccccaacgccaaccccaacgccaaccccaacgccaaccccaacgucgaccccaacgccaaccccaacgccaaccccaacgccaaccccaacgccaaccccaacgccaaccccaacgccaaccccaacgccaaccccaacgccaaccccaacgccaaccccaacgccaaccccaacgccaaccccaacgccaaccccaacgccaaccccaacgccaaccccaacgccaaccccaacgccaaccccaacgccaaccccaacgccaaccccaacgccaaccccaacaagaacaaccagggcaacggccagggccacaacaugcccaacgaccccaaccgcaacgucgacgagaacgccaacgccaacaacgccgccaagaacaacaacaacgaggagcccuccgaccagcacaucgagaaguaccucaagaccauccagaacucccucuccaccgaguggucccccugcuccgucaccugcggcaacggcauccagguccgcaucaagcccggcuccgccaacaagcccaaggaccagcucgacuacgccaacgacaucgagaagaagaucugcaagauggagaagugcuccuccgucuucaacgucgucaacuccuccaucggccucaucaugguccucuccuuccucuuccucaacuga

SEQ ID NO: 3815 - RNA, 1239 nt, Artificial Sequence
  derived and/or modified CDS sequence (opt2) from Pf(Tz93-124)__BAM84779.1__CSP
augaugcgcaagcucgccauccucuccgucuccuccuuccucuucgucgaggcccucuuccaggaguaccagugcuacggcuccuccuccaacacccgcguccucaacgagcucaacuacgacaacgccggcaccaaccucuacaacgagcucgagaugaacuacuacggcaagcaggagaacugguacucccucaagaagaacucccgcucccucggcgagaacgacgacggcaacaacaacaacggcgacaacggccgcgagggcaaggacgaggacaagcgcgacggcaacaacgaggacaacgagaagcuccgcaagcccaagcacaagaagcucaagcagcccgccgacggcaaccccgaccccaacgccaaccccaacgucgaccccaacgccaaccccaacgucgaccccaacgccaaccccaacgucgaccccaacgccaaccccaacgccaaccccaacgccaaccccaacgccaaccccaacgccaaccccaacgccaaccccaacgccaaccccaacgccaaccccaacgccaaccccaacgccaaccccaacgccaaccccaacgccaaccccaacgccaaccccaacgccaaccccaacgccaaccccaacgucgaccccaacgccaaccccaacgccaaccccaacgccaaccccaacgccaaccccaacgccaaccccaacgccaaccccaacgccaaccccaacgccaaccccaacgccaaccccaacgccaaccccaacgccaaccccaacgccaaccccaacgccaaccccaacgccaaccccaacgccaaccccaacgccaaccccaacgccaaccccaacgccaaccccaacgccaaccccaacaagaacaaccagggcaacggccagggccacaacaugcccaacgaccccaaccgcaacgucgacgagaacgccaacgccaacaacgccgucaagaacaacaacaacgaggagcccuccgacaagcacaucgagcaguaccucaagaccaucaagaacucccucuccaccgaguggucccccugcuccgucaccugcggcaacggcauccagguccgcaucaagcccggcuccgccgacaagcccaaggaccagcucgacuacaucaacgacaucgagaagaagaucugcaagauggagaagugcuccuccgucuucaacgucgucaacuccuccaucggccucaucaugguccucuccuuccucuuccucaacuga

SEQ ID NO: 3816 - RNA, 1239 nt, Artificial Sequence
  derived and/or modified CDS sequence (opt2) from Pf(Tz98-009)__BAM84781.1__CSP
augaugcgcaagcucgccauccucuccgucuccuccuuccucuucgucgaggcccucuuccaggaguaccagugcuacggcuccuccuccaacacccgcguccucaacgagcucaacuacgacaacgccggcaccaaccucuacaacgagcucgagaugaacuacuacggcaagcaggagaacugguacucccucaagaagaacucccgcucccucggcgagaacgacgacggcaacaacaacaacggcgacaacggccgcgagggcaaggacgaggacaagcgcgacggcaacaacgaggacaacgagaagcuccgcaagcccaagcacaagaagcucaagcagcccgccgacggcaaccccgaccccaacgccaaccccaacgucgaccccaacgccaaccccaacgucgaccccaacgccaaccccaacgucgaccccaacgccaaccccaacgccaaccccaacgccaaccccaacgccaaccccaacgccaaccccaacgccaaccccaacgccaaccccaacgccaaccccaacgccaaccccaacgccaaccccaacgccaaccccaacgccaaccccaacgccaaccccaacgccaaccccaacgccaaccccaacgucgaccccaacgccaaccccaacgccaaccccaacgccaaccccaacgccaaccccaacgccaaccccaacgccaaccccaacgccaaccccaacgccaaccccaacgccaaccccaacgccaaccccaacgccaaccccaacgccaaccccaacgccaaccccaacgccaaccccaacgccaaccccaacgccaaccccaacgccaaccccaacgccaaccccaacgccaaccccaacaagaacaaccagggcaacggccagggccacaacaugcccaacgaccccaaccgcaacgucgacgagaacgccaacgccaacaacgccgucaagaacaacaacaacgaggagcccuccgacaagcacaucaaggaguaccucaacaagauccagaacuccaucuccaccgaguggucccccugcuccgucaccugcggcaacggcauccagguccgcaucaagcccggcuccgccgacaagcccaaggaccagcucgacuacaucaacgacaucgagaagaagaucugcaagauggagaagugcuccuccgucuucaacgucgucaacuccuccaucggccucaucaugguccucuccuuccucuuccucaacuga

SEQ ID NO: 3817 - RNA, 1239 nt, Artificial Sequence
  derived and/or modified CDS sequence (opt2) from Pf(Tz98-049)__BAM84789.1__CSP
augaugcgcaagcucgccauccucuccgucuccuccuuccucuucgucgaggcccucuuccaggaguaccagugcuacggcuccuccuccaacacccgcguccucaacgagcucaacuacgacaacgccggcaccaaccucuacaacgagcucgagaugaacuacuacggcaagcaggagaacugguacucccucaagaagaacucccgcucccucggcgagaacgacgacggcaacaacaacaacggcgacaacggccgcgagggcaaggacgaggacaagcgcgacggcaacaacgaggacaacgagaagcuccgcaagcccaagcacaagaagcucaagcagcccgccgacggcaaccccgaccccaacgccaaccccaacgucgaccccaacgccaaccccaacgucgaccccaacgccaaccccaacgucgaccccaacgccaaccccaacgccaaccccaacgccaaccccaacgccaaccccaacgccaaccccaacgccaaccccaacgccaaccccaacgccaaccccaacgccaaccccaacgccaaccccaacgccaaccccaacgccaaccccaacgccaaccccaacgccaaccccaacgccaaccccaacgucgaccccaacgccaaccccaacgccaaccccaacgccaaccccaacgccaaccccaacgccaaccccaacgccaaccccaacgccaaccccaacgccaaccccaacgccaaccccaacgccaaccccaacgccaaccccaacgccaaccccaacgccaaccccaacgccaaccccaacgccaaccccaacgccaaccccaacgccaaccccaacgccaaccccaacgccaaccccaacaagaacaaccagggcaacggccagggccacaacaugcccaacgaccccaaccgcaacgucgacgagaacgccaacgccaacaacgccgucaagaacaacaacaacgaggagcccuccgacaagcacaucgagcaguaccucaagaccaucaagaacucccucuccaccgaguggucccccugcuccgucaccugcggcaacggcauccagguccgcaucaagcccggcuccgccaacaagcccaaggaccagcucgacuacgagaacgacaucgagaagaagaucugcaagauggagaagugcuccuccgucuucaacgucgucaacuccuccaucggccucaucaugguccucuccuuccucuuccucaacuga

SEQ ID NO: 3818 - RNA, 1239 nt, Artificial Sequence
  derived and/or modified CDS sequence (opt2) from Pf(Tz98-084)__BAM84792.1__CSP
augaugcgcaagcucgccauccucuccgucuccuccuuccucuucgucgaggcccucuuccaggaguaccagugcuacggcuccuccuccaacacccgcguccucaacgagcucaacuacgacaacgccggcaccaaccucuacaacgagcucgagaugaacuacuacggcaagcaggagaacugguacucccucaagaagaacucccgcucccucggcgagaacgacgacggcaacaacaacaacggcgacaacggccgcgagggcaaggacgaggacaagcgcgacggcaacaacgaggacaacgagaagcuccgcaagcccaagcacaagaagcucaagcagcccgccgacggcaaccccgaccccaacgccaaccccaacgucgaccccaacgccaaccccaacgucgaccccaacgccaaccccaacgucgaccccaacgccaaccccaacgccaaccccaacgccaaccccaacgccaaccccaacgccaaccccaacgccaaccccaacgccaaccccaacgccaaccccaacgccaaccccaacgccaaccccaacgccaaccccaacgccaaccccaacgccaaccccaacgccaaccccaacgccaaccccaacgucgaccccaacgccaaccccaacgccaaccccaacgccaaccccaacgccaaccccaacgccaaccccaacgccaaccccaacgccaaccccaacgccaaccccaacgccaaccccaacgccaaccccaacgccaaccccaacgccaaccccaacgccaaccccaacgccaaccccaacgccaaccccaacgccaaccccaacgccaaccccaacgccaaccccaacgccaaccccaacaagaacaaccagggcaacggccagggccacaacaugcccaacgaccccaaccgcaacgucgacgagaacgccaacgccaacaacgccgucaagaacaacaacaacgaggagcccuccgaccagcacaucgagaaguaccucaacaagauccagaacucccucuccaccgaguggucccccugcuccgucaccugcggcaacggcauccagguccgcaucaagcccggcuccgccaacaagcccaaggaccagcucgacuacgccaacgacaucgagaagaagaucugcaagauggagaagugcuccuccgucuucaacgucgucaacuccuccaucggccucaucaugguccucuccuuccucuuccucaacuga

SEQ ID NO: 3819 - RNA, 1239 nt, Artificial Sequence
  derived and/or modified CDS sequence (opt2) from Pf(Tz98-119)__BAM84797.1__CSP
augaugcgcaagcucgccauccucuccgucuccuccuuccucuucgucgaggcccucuuccaggaguaccagugcuacggcuccuccuccaacacccgcguccucaacgagcucaacuacgacaacgccggcaccaaccucuacaacgagcucgagaugaacuacuacggcaagcaggagaacugguacucccucaagaagaacucccgcucccucggcgagaacgacgacggcaacaacaacaacggcgacaacggccgcgagggcaaggacgaggacaagcgcgacggcaacaacgaggacaacgagaagcuccgcaagcccaagcacaagaagcucaagcagcccgccgacggcaaccccgaccccaacgccaaccccaacgucgaccccaacgccaaccccaacgucgaccccaacgccaaccccaacgucgaccccaacgccaaccccaacgccaaccccaacgccaaccccaacgccaaccccaacgccaaccccaacgccaaccccaacgccaaccccaacgccaaccccaacgccaaccccaacgccaaccccaacgccaaccccaacgccaaccccaacgccaaccccaacgccaaccccaacgccaaccccaacgucgaccccaacgccaaccccaacgccaaccccaacgccaaccccaacgccaaccccaacgccaaccccaacgccaaccccaacgccaaccccaacgccaaccccaacgccaaccccaacgccaaccccaacgccaaccccaacgccaaccccaacgccaaccccaacgccaaccccaacgccaaccccaacgccaaccccaacgccaaccccaacgccaaccccaacgccaaccccaacaagaacaaccagggcaacggccagggccacaacaugcccaacgaccccaaccgcaacgucgacgagaacgccaacgccaacaacgccgucaagaacaacaacaacgaggagcccuccgaccagcacaucgagaaguaccucaagaccauccagaacucccucuccaccgaguggucccccugcuccgucaccugcggcaacggcauccagguccgcaucaagcccggcuccgccaacaagcccaaggaccagcucgacuacgccaacgacaucgagaagaagaucugcaagauggagaagugcuccuccgucuucaacgucgucaacuccuccaucggccucaucaugguccucuccuuccucuuccucaacuga

SEQ ID NO: 3820 - RNA, 1239 nt, Artificial Sequence
  derived and/or modified CDS sequence (opt2) from Pf(Yaounde)__AAN87602.1__CSP
augaugcgcaagcucgccauccucuccgucuccuccuuccucuucgucgaggcccucuuccaggaguaccagugcuacggcuccuccuccaacacccgcguccucaacgagcucaacuacgacaacgccggcaccaaccucuacaacgagcucgagaugaacuacuacggcaagcaggagaacugguacucccucaagaagaacucccgcucccucggcgagaacgacgacggcaacaacaacaacggcgacaacggccgcgagggcaaggacgaggacaagcgcgacggcaacaacgaggacaacgagaagcuccgcaagcccaagcacaagaagcucaagcagcccgccgacggcaaccccgaccccaacgccaaccccaacgucgaccccaacgccaaccccaacgucgaccccaacgccaaccccaacgucgaccccaacgccaaccccaacgccaaccccaacgccaaccccaacgccaaccccaacgccaaccccaacgccaaccccaacgccaaccccaacgccaaccccaacgccaaccccaacgccaaccccaacgccaaccccaacgccaaccccaacgccaaccccaacgccaaccccaacgccaaccccaacgucgaccccaacgccaaccccaacgccaaccccaacgccaaccccaacgccaaccccaacgccaaccccaacgccaaccccaacgccaaccccaacgccaaccccaacgccaaccccaacgccaaccccaacgccaaccccaacgccaaccccaacgccaaccccaacgccaaccccaacgccaaccccaacgccaaccccaacgccaaccccaacgccaaccccaacgccaaccccaacaagaacaaccagggcaacggccagggccacaacaugcccaacgaccccaaccgcaacgucgacgagaacgccaacgccaacaacgccgucaagaacaacaacaacgaggagcccuccgaccagcacaucgagaaguaccucaacaagaucaagaacucccucuccaccgaguggucccccugcuccgucaccugcggcaacggcauccagguccgcaucaagcccggcuccgccaacaagcccaaggaccagcucgacuacgccaacgacaucgagaagaagaucugcaagauggagaagugcuccuccgucuucaacgucgucaacuccuccaucggccucaucaugguccucuccuuccucuuccucaacuga

SEQ ID NO: 3821 - RNA, 1239 nt, Artificial Sequence
  derived and/or modified CDS sequence (opt2) from Pf(Yaounde)__AAN87587.1__CSP
augaugcgcaagcucgccauccucuccgucuccuccuuccucuucgucgaggcccucuuccaggaguaccagugcuacggcuccuccuccaacacccgcguccucaacgagcucaacuacgacaacgccggcaccaaccucuacaacgagcucgagaugaacuacuacggcaagcaggagaacugguacucccucaagaagaacucccgcucccucggcgagaacgacgacggcaacaacaacaacggcgacaacggccgcgagggcaaggacgaggacaagcgcgacggcaacaacgaggacaacgagaagcuccgcaagcccaagcacaagaagcucaagcagcccgccgacggcaaccccgaccccaacgccaaccccaacgucgaccccaacgccaaccccaacgucgaccccaacgccaaccccaacgucgaccccaacgccaaccccaacgccaaccccaacgccaaccccaacgccaaccccaacgccaaccccaacgccaaccccaacgccaaccccaacgccaaccccaacgccaaccccaacgccaaccccaacgccaaccccaacgccaaccccaacgccaaccccaacgccaaccccaacgccaaccccaacgucgaccccaacgccaaccccaacgccaaccccaacgccaaccccaacgccaaccccaacgccaaccccaacgccaaccccaacgccaaccccaacgccaaccccaacgccaaccccaacgccaaccccaacgccaaccccaacgccaaccccaacgccaaccccaacgccaaccccaacgccaaccccaacgccaaccccaacgccaaccccaacgccaaccccaacgccaaccccaacaagaacaaccagggcaacggccagggccacaacaugcccaacgaccccaaccgcaacgucgacgagaacgccaacgccaacaacgccgucaagaacaacaacaacgaggagcccuccgaccagcacaucgagaaguaccucaagaccaucaagaacucccucuccaccgaguggucccccugcuccgucaccugcggcaacggcauccagguccgcaucaagcccggcuccgccaacaagcccaaggaccagcucgacuacgccaacgacaucgagaagaagaucugcaagauggagaagugcuccuccgucuucaacgucgucaacuccuccaucggccucaucaugguccucuccuuccucuuccucaacuga

SEQ ID NO: 3822 - RNA, 1236 nt, Artificial Sequence
  derived and/or modified CDS sequence (opt2) from Pf(A107)__ACO49330.1__CSP
augcgcaagcucgccauccucuccgucuccuccuuccucuucgucgaggcccucuuccaggaguaccagugcuacggcuccuccuccaacacccgcguccucaacgagcucaacuacgacaacgccggcaccaaccucuacaacgagcucgagaugaacuacuacggcaagcaggagaacugguacucccucaagaagaacucccgcucccucggcgagaacgacgacggcaacaacaacaacggcgacaacggccgcgagggcaaggacgaggacaagcgcgacggcaacaacgaggacaacgagaagcuccgcaagcccaagcacaagaagcucaagcagcccggcgacggcaaccccgaccccaacgccaaccccaacgucgaccccaacgccaaccccaacgucgaccccaacgccaaccccaacgucgaccccaacgccaaccccaacgccaaccccaacgccaaccccaacgccaaccccaacgccaaccccaacgccaaccccaacgccaaccccaacgccaaccccaacgccaaccccaacgccaaccccaacgccaaccccaacgccaaccccaacgccaaccccaacgccaaccccaacgccaaccccaacgccaaccccaacgccaaccccaacgccaaccccaacgccaaccccaacgccaaccccaacgccaaccccaacgccaaccccaacgccaaccccaacgccaaccccaacgccaaccccaacgccaaccccaacgccaaccccaacgccaaccccaacgccaaccccaacgccaaccccaacgccaaccccaacgccaaccccaacgccaaccccaacgccaaccccaacgccaaccccaacaagaacaaccagggcaacggccagggccacaacaugcccaacgaccccaaccgcaacgucgacgagaacgccaacgccaacaacgccgucaagaacaacaacaacgaggagcccuccgacaagcacaucgagcaguaccucaagaagauccagaacucccucuccaccgaguggucccccugcuccgucaccugcggcaacggcauccagguccgcaucaagcccggcuccgccaacaagcccaaggacgagcucgacuacgagaacgacaucgagaagaagaucugcaagauggagaagugcuccuccgucuucaacgucgucaacuccuccaucggccucaucaugguccucuccuuccucuuccucaacuga

SEQ ID NO: 3823 - RNA, 1233 nt, Artificial Sequence
  derived and/or modified CDS sequence (opt2) from Pf(IT)____CSP
augaugcgcaagcucgccauccucuccgucuccuccuuccucuucgucgaggcccucuuccaggaguaccagugcuacggcuccuccuccaacacccgcguccucaacgagcucaacuacgacaacgccggcaccaaccucuacaacgagcucgagaugaacuacuacggcaagcaggagaacugguacucccucaagaagaacucccgcucccucggcgagaacgacgacggcgacaacgacaacggcaacaacaacaacggcaacaacaacaacggcgacaacggccgcgagggcaaggacgaggacaagcgcgacggcaacaacgaggacaacgagaagcuccgcaagcccaagcacaagaagcucaagcagcccggcgacgacaaccccgaccccaacgccaaccccaacgucgaccccaacgccaaccccaacgucgaccccaacgccaaccccaacgccaaccccaacgccaaccccaacgccaaccccaacgccaaccccaacgccaaccccaacgccaaccccaacgucgaccccaacgccaaccccaacgccaaccccaacgccaaccccaacgccaaccccaacgccaaccccaacgccaaccccaacgccaaccccaacgccaaccccaacgccaaccccaacgccaaccccaacgccaaccccaacgccaaccccaacgccaaccccaacgccaaccccaacgccaaccccaacgccaaccccaacgccaaccccaacgccaaccccaacgccaaccccaacgccaaccccaacgccaaccccaacgccaaccccaacgccaaccccaacgccaaccccaacgccaaccccaacgccaaccccaacaagaacaaccagggcaacggccagggccacaacaugcccaacgaccccaaccgcaacgucgacgagaacgccaacgccaacaacgccgucaagaacaacaacaacgaggagcccuccgacaagcacaucgagcaguaccucaagaagauccagaacucccucuccaccgaguggucccccugcuccgucaccugcggcaacggcauccagguccgcaucaagcccggcuccgccgacaagcccaaggaccagcucgacuacgagaacgacaucgagaagaagaucugcaagauggagaagugcuccuccgucuucaacgucgucaacuccuccaucggccucaucaugguccucuccuuccucuuccucaacuga

SEQ ID NO: 3824 - RNA, 1227 nt, Artificial Sequence
  derived and/or modified CDS sequence (opt2) from Pf(14)__AGR53782.1__CSP
augaugcgcaagcucgccauccucuccgucuccuccuuccucuucgucgaggcccucuuccaggaguaccagugcuacggcuccuccuccaacacccgcguccucaacgagcucaacuacgacaacgccggcaccaaccucuacaacgagcucgagaugaacuacuacggcaagcaggagaacugguacucccucaagaagaacucccgcucccucggcgagaacgacgacggcaacaacaacaacggcgacaacggccgcgagggcaaggacgaggacaagcgcgacggcaacaacgaggacaacgagaagcuccgcaagcccaagcacaagaagcucaagcagcccggcgacggcaaccccgaccccaacgccaaccccaacgucgaccccaacgccaaccccaacgucgaccccaacgccaaccccaacgucgaccccaacgccaaccccaacgccaaccccaacgccaaccccaacgccaaccccaacgccaaccccaacgccaaccccaacgccaaccccaacgccaaccccaacgccaaccccaacgccaaccccaacgccaaccccaacgucgaccccaacgccaaccccaacgccaaccccaacgccaaccccaacgccaaccccaacgccaaccccaacgccaaccccaacgccaaccccaacgccaaccccaacgccaaccccaacgccaaccccaacgccaaccccaacgccaaccccaacgccaaccccaacgccaaccccaacgccaaccccaacgccaaccccaacgccaaccccaacgccaaccccaacgccaaccccaacgccaaccccaacgccaaccccaacgccaaccccaacaagaacaaccagggcaacggccagggccacaacaugcccaacgaccccaaccgcaacgucgacgagaacgccaacgccaacaacgccgucaagaacaacaacaacgaggagcccuccgaccagcacaucgagaaguaccuccagaagauccagaacucccucuccaccgaguggucccccugcuccgucaccugcggcaacggcauccagguccgcaucaagcccggcuccgccaacaagcccaaggaccagcucaacuacgagaacgacaucggcaagaagaucugcaagauggagaagugcuccuccgucuucaacgucgucaacuccuccaucggccucaucaugguccucuccuuccucuuccucaacuga

SEQ ID NO: 3825 - RNA, 1227 nt, Artificial Sequence
  derived and/or modified CDS sequence (opt2) from Pf(Asembo Bay)__AAN87609.1__CSP
augaugcgcaagcucgccauccucuccgucuccuccuuccucuucgucgaggcccucuuccaggaguaccagugcuacggcuccuccuccaacacccgcguccucaacgagcucaacuacgacaacgccggcaccaaccucuacaacgagcucgagaugaacuacuacggcaagcaggagaacugguacucccucaagaagaacucccgcucccucggcgagaacgacgacggcaacaacaacaacggcgacaacggccgcgagggcaaggacgaggacaagcgcgacggcaacaacgaggacaacgagaagcuccgcaagcccaagcacaagaagcucaagcagcccgccgacggcaaccccgaccccaacgccaaccccaacgucgaccccaacgccaaccccaacgucgaccccaacgccaaccccaacgucgaccccaacgccaaccccaacgccaaccccaacgccaaccccaacgccaaccccaacgccaaccccaacgccaaccccaacgccaaccccaacgccaaccccaacgccaaccccaacgccaaccccaacgccaaccccaacgccaaccccaacgccaaccccaacgccaaccccaacgucgaccccaacgccaaccccaacgccaaccccaacgccaaccccaacgccaaccccaacgccaaccccaacgccaaccccaacgccaaccccaacgccaaccccaacgccaaccccaacgccaaccccaacgccaaccccaacgccaaccccaacgccaaccccaacgccaaccccaacgccaaccccaacgccaaccccaacgccaaccccaacgccaaccccaacgccaaccccaacaagaacaaccagggcaacggccagggccacaacaugcccaacaaccccaaccgcaacgucgacgagaacgccaacgccaacaacgccgucaagaacaacaacaacgaggagcccuccgacaagcacaucgagcaguaccucaagaccauccagaacucccucuccaccgaguggucccccugcuccgucaccugcggcaacggcauccagguccgcaucaagcccggcuccgccaacaagcccaaggaccagcucgacuacgccaacgacaucgagaagaagaucugcaagauggagaagugcuccuccgucuucaacgucgucaacuccuccaucggccucaucaugguccucuccuuccucuuccucaacuga

SEQ ID NO: 3826 - RNA, 1227 nt, Artificial Sequence
  derived and/or modified CDS sequence (opt2) from Pf(Bolivar)__AAN87613.1__CSP
augaugcgcaagcucgccauccucuccgucuccuccuuccucuucgucgaggcccucuuccaggaguaccagugcuacggcuccuccuccaacacccgcguccucaacgagcucaacuacgacaacgccggcaccaaccucuacaacgagcucgagaugaacuacuacggcaagcaggagaacugguacucccucaagaagaacucccgcucccucggcgagaacgacgacggcaacaacaacaacggcgacaacggccgcgagggcaaggacgaggacaagcgcgacggcaacaacgaggacaacgagaagcuccgcaagcccaagcacaagaagcucaagcagcccggcgacggcaaccccgaccccaacgccaaccccaacgucgaccccaacgccaaccccaacgucgaccccaacgccaaccccaacgucgaccccaacgccaaccccaacgccaaccccaacgccaaccccaacgccaaccccaacgccaaccccaacgccaaccccaacgccaaccccaacgccaaccccaacgccaaccccaacgccaaccccaacgccaaccccaacgucgaccccaacgccaaccccaacgccaaccccaacgccaaccccaacgccaaccccaacgccaaccccaacgccaaccccaacgccaaccccaacgccaaccccaacgccaaccccaacgccaaccccaacgccaaccccaacgccaaccccaacgccaaccccaacgccaaccccaacgccaaccccaacgccaaccccaacgccaaccccaacgccaaccccaacgccaaccccaacgccaaccccaacgccaaccccaacgccaaccccaacaagaacaaccagggcaacggccagggccacaacaugcccaacgaccccaaccgcaacgucgacgagaacgccaacgccaacaacgccgucaagaacaacaacaacgaggagcccuccgacaagcacaucgagcaguaccucaagaagauccagaacgcccucuccaccgaguggucccccugcuccgucaccugcggcaacggcauccagguccgcaucaagcccggcuccgccaacaagcccaaggaccagcucgacuacgagaacgacaucgagaagaagaucugcaagauggagaagugcuccuccgucuucaacgucgucaacuccuccaucggccucaucaugguccucuccuuccucuuccucaacuga

SEQ ID NO: 3827 - RNA, 1227 nt, Artificial Sequence
  derived and/or modified CDS sequence (opt2) from Pf(Br419M3)__BAM85120.1__CSP
augaugcgcaagcucgccauccucuccgucuccuccuuccucuucgucgaggcccucuuccaggaguaccagugcuacggcuccuccuccaacacccgcguccucaacgagcucaacuacgacaacgccggcaccaaccucuacaacgagcucgagaugaacuacuacggcaagcaggagaacugguacucccucaagaagaacucccgcucccucggcgagaacgacgacggcaacaacaacaacggcgacaacggccgcgagggcaaggacgaggacaagcgcgacggcaacaacgaggacaacgagaagcuccgcaagcccaagcacaagaagcucaagcagcccgccgacggcaaccccgaccccaacgccaaccccaacgucgaccccaacgccaaccccaacgucgaccccaacgccaaccccaacgucgaccccaacgccaaccccaacgccaaccccaacgccaaccccaacgccaaccccaacgccaaccccaacgccaaccccaacgccaaccccaacgccaaccccaacgccaaccccaacgccaaccccaacgccaaccccaacgccaaccccaacgccaaccccaacgccaaccccaacgccaaccccaacgucgaccccaacgccaaccccaacgccaaccccaacgccaaccccaacgccaaccccaacgccaaccccaacgccaaccccaacgccaaccccaacgccaaccccaacgccaaccccaacgccaaccccaacgccaaccccaacgccaaccccaacgccaaccccaacgccaaccccaacgccaaccccaacgccaaccccaacgccaaccccaacgccaaccccaacaagaacaaccagggcaacggccagggccacaacaugcccaacaaccccaaccgcaacgucgacgagaacgccaacgccaacaacgccgucaagaacaacaacaacgaggagcccuccgacaagcacaucgagcaguaccucaagaagauccagaacucccucuccaccgaguggucccccugcuccgucaccugcggcaacggcauccagguccgcaucaagcccggcuccgccggcaaguccaaggacgagcucgacuacgagaacgacaucgagaagaagaucugcaagauggagaagugcuccuccgucuucaacgucgucaacuccuccaucggccucaucaugguccucuccuuccucuuccucaacuga

SEQ ID NO: 3828 - RNA, 1227 nt, Artificial Sequence
  derived and/or modified CDS sequence (opt2) from Pf(Gha1110-003)__BAM84840.1__CSP
augaugcgcaagcucgccauccucuccgucuccuccuuccucuucgucgaggcccucuuccaggaguaccagugcuacggcuccuccuccaacacccgcguccucaacgagcucaacuacgacaacgccggcaccaaccucuacaacgagcucgagaugaacuacuacggcaagcaggagaacugguacucccucaagaagaacucccgcucccucggcgagaacgacgacggcaacaacaacaacggcgacaacggccgcgagggcaaggacgaggacaagcgcgacggcaacaacgaggacaacgagaagcuccgcaagcccaagcacaagaagcucaagcagcccgccgacggcaaccccgaccccaacgccaaccccaacgucgaccccaacgccaaccccaacgucgaccccaacgccaaccccaacgucgaccccaacgccaaccccaacgccaaccccaacgccaaccccaacgccaaccccaacgccaaccccaacgccaaccccaacgccaaccccaacgccaaccccaacgccaaccccaacgccaaccccaacgccaaccccaacgccaaccccaacgccaaccccaacgccaaccccaacgucgaccccaacgccaaccccaacgccaaccccaacgccaaccccaacgccaaccccaacgccaaccccaacgccaaccccaacgccaaccccaacgccaaccccaacgccaaccccaacgccaaccccaacgccaaccccaacgccaaccccaacgccaaccccaacgccaaccccaacgccaaccccaacgccaaccccaacgccaaccccaacgccaaccccaacgccaaccccaacaagaacaaccagggcaacggccagggccacaacaugcccaacgaccccaaccgcaacgucgacgagaacgccaacgccaacaacgccgucaagaacaacaacaacgaggagcccuccgaccagcacaucgagaaguaccucaagaccaucaagaacucccucuccaccgaguggucccccugcuccgucaccugcggcaacggcauccagguccgcaucaagcccggcuccgccaacaagcccaaggaccagcucgacuacgccaacgacaucgagaagaagaucugcaagauggagaagugcuccuccgucuucaacgucgucaacuccuccaucggccucaucaugguccucuccuuccucuuccucaacuga

SEQ ID NO: 3829 - RNA, 1227 nt, Artificial Sequence
  derived and/or modified CDS sequence (opt2) from Pf(Tz03-032)__BAM84799.1__CSP
augaugcgcaagcucgccauccucuccgucuccuccuuccucuucgucgaggcccucuuccaggaguaccagugcuacggcuccuccuccaacacccgcguccucaacgagcucaacuacgacaacgccggcaccaaccucuacaacgagcucgagaugaacuacuacggcaagcaggagaacugguacucccucaagaagaacucccgcucccucggcgagaacgacgacggcaacaacaacaacggcgacaacggccgcgagggcaaggacgaggacaagcgcgacggcaacaacgaggacaacgagaagcuccgcaagcccaagcacaagaagcucaagcagcccgccgacggcaaccccgaccccaacgccaaccccaacgucgaccccaacgccaaccccaacgucgaccccaacgccaaccccaacgucgaccccaacgccaaccccaacgccaaccccaacgccaaccccaacgccaaccccaacgccaaccccaacgccaaccccaacgccaaccccaacgccaaccccaacgccaaccccaacgccaaccccaacgucgaccccaacgccaaccccaacgccaaccccaacgccaaccccaacgccaaccccaacgccaaccccaacgccaaccccaacgccaaccccaacgccaaccccaacgccaaccccaacgccaaccccaacgccaaccccaacgccaaccccaacgccaaccccaacgccaaccccaacgccaaccccaacgccaaccccaacgccaaccccaacgccaaccccaacgccaaccccaacgccaaccccaacgccaaccccaacgccaaccccaacgccaaccccaacaagaacaaccagggcaacggccagggccacaacaugcccaacgaccccaaccgcaacgucgacgagaacgccaacgccaacaacgccgucaagaacaacaacaacgaggagcccuccgaccagcacaucgagaaguaccucaagaagauccagaacucccucuccaccgaguggucccccugcuccgucaccugcggcaacggcauccagguccgcaucaagcccggcuccgccaacaagcccaaggaccagcucgacuacgccaacgacaucgagaagaagaucugcaagauggagaagugcuccuccgucuucaacgucgucaacuccuccaucggccucaucaugguccucuccuuccucuuccucaacuga

SEQ ID NO: 3830 - RNA, 1227 nt, Artificial Sequence
  derived and/or modified CDS sequence (opt2) from Pf(Tz03-033)__BAM84800.1__CSP
augaugcgcaagcucgccauccucuccgucuccuccuuccucuucgucgaggcccucuuccaggaguaccagugcuacggcuccuccuccaacacccgcguccucaacgagcucaacuacgacaacgccggcaccaaccucuacaacgagcucgagaugaacuacuacggcaagcaggagaacugguacucccucaagaagaacucccgcucccucggcgagaacgacgacggcaacaacaacaacggcgacaacggccgcgagggcaaggacgaggacaagcgcgacggcaacaacgaggacaacgagaagcuccgcaagcccaagcacaagaagcucaagcagcccgccgacggcaaccccgaccccaacgccaaccccaacgucgaccccaacgccaaccccaacgucgaccccaacgccaaccccaacgucgaccccaacgccaaccccaacgccaaccccaacgccaaccccaacgccaaccccaacgccaaccccaacgccaaccccaacgccaaccccaacgccaaccccaacgccaaccccaacgccaaccccaacgccaaccccaacgccaaccccaacgccaaccccaacgccaaccccaacgucgaccccaacgccaaccccaacgccaaccccaacgccaaccccaacgccaaccccaacgccaaccccaacgccaaccccaacgccaaccccaacgccaaccccaacgccaaccccaacgccaaccccaacgccaaccccaacgccaaccccaacgccaaccccaacgccaaccccaacgccaaccccaacgccaaccccaacgccaaccccaacgccaaccccaacgccaaccccaacaagaacaaccagggcaacggccagggccacaacaugcccaacgaccccaaccgcaacgucgacgagaacgccaacgccaacaacgccgucaagaacaacaacaacgaggagcccuccgaccagcacaucgagaaguaccucaagaccaucaagaacucccucuccaccgaguggucccccugcuccgucaccugcggcaacggcauccagguccgcaucaagcccggcuccgccaacaagcccaaggacgagcucgacuacgccaacgacaucgagaagaagaucugcaagauggagaagugcuccuccgucuucaacgucgucaacuccuccaucggccucaucaugguccucuccuuccucuuccucaacuga

SEQ ID NO: 3831 - RNA, 1227 nt, Artificial Sequence
  derived and/or modified CDS sequence (opt2) from Pf(Tz93-056)__BAM84765.1__CSP
augaugcgcaagcucgccauccucuccgucuccuccuuccucuucgucgaggcccucuuccaggaguaccagugcuacggcuccuccuccaacacccgcguccucaacgagcucaacuacgacaacgccggcaccaaccucuacaacgagcucgagaugaacuacuacggcaagcaggagaacugguacucccucaagaagaacucccgcucccucggcgagaacgacgacggcaacaacaacaacggcgacaacggccgcgagggcaaggacgaggacaagcgcgacggcaacaacgaggacaacgagaagcuccgcaagcccaagcacaagaagcucaagcagcccgccgacggcaaccccgaccccaacgccaaccccaacgucgaccccaacgccaaccccaacgucgaccccaacgccaaccccaacgucgaccccaacgccaaccccaacgccaaccccaacgccaaccccaacgccaaccccaacgccaaccccaacgccaaccccaacgccaaccccaacgccaaccccaacgccaaccccaacgccaaccccaacgccaaccccaacgccaaccccaacgccaaccccaacgccaaccccaacgucgaccccaacgccaaccccaacgccaaccccaacgccaaccccaacgccaaccccaacgccaaccccaacgccaaccccaacgccaaccccaacgccaaccccaacgccaaccccaacgccaaccccaacgccaaccccaacgccaaccccaacgccaaccccaacgccaaccccaacgccaaccccaacgccaaccccaacgccaaccccaacgccaaccccaacgccaaccccaacaagaacaaccagggcaacggccagggccacaacaugcccaacgaccccaaccgcaacgucgacgagaacgccaacgccaacaacgccgucaagaacaacaacaacgaggagcccuccgacaagcacaucaaggaguaccucaccaagaucaagaacuccaucuccaccgaguggucccccugcuccgucaccugcggcaacggcauccagguccgcaucaagcccggcuccgccaacaagcccaaggacgagcucgacuacgagaacgacaucgagaagaagaucugcaagauggagaagugcuccuccgucuucaacgucgucaacuccuccaucggccucaucaugguccucuccuuccucuuccucaacuga

SEQ ID NO: 3832 - RNA, 1227 nt, Artificial Sequence
  derived and/or modified CDS sequence (opt2) from Pf(Tz93-085)__BAM84771.1__CSP
augaugcgcaagcucgccauccucuccgucuccuccuuccucuucgucgaggcccucuuccaggaguaccagugcuacggcuccuccuccaacacccgcguccucaacgagcucaacuacgacaacgccggcaccaaccucuacaacgagcucgagaugaacuacuacggcaagcaggagaacugguacucccucaagaagaacucccgcucccucggcgagaacgacgacggcaacaacaacaacggcgacaacggccgcgagggcaaggacgaggacaagcgcgacggcaacaacgaggacaacgagaagcuccgcaagcccaagcacaagaagcucaagcagcccgccgacggcaaccccgaccccaacgccaaccccaacgucgaccccaacgccaaccccaacgucgaccccaacgccaaccccaacgucgaccccaacgccaaccccaacgccaaccccaacgccaaccccaacgccaaccccaacgccaaccccaacgccaaccccaacgccaaccccaacgccaaccccaacgccaaccccaacgccaaccccaacgccaaccccaacgccaaccccaacgccaaccccaacgccaaccccaacgucgaccccaacgccaaccccaacgccaaccccaacgccaaccccaacgccaaccccaacgccaaccccaacgccaaccccaacgccaaccccaacgccaaccccaacgccaaccccaacgccaaccccaacgccaaccccaacgccaaccccaacgccaaccccaacgccaaccccaacgccaaccccaacgccaaccccaacgccaaccccaacgccaaccccaacgccaaccccaacaagaacaaccagggcaacggccagggccacaacaugcccaacgaccccaaccgcaacgucgacgagaacgccaaggccaacaacgccgucaagaacaacaacaacgaggagcccuccgacaagcacaucaaggaguaccucaacaagauccagaacuccaucuccaccgaguggucccccugcuccgucaccugcggcaacggcauccagguccgcaucaagcccggcuccgccgacaagcccaaggaccagcucgacuacaucaacgacaucgagaagaagaucugcaagauggagaagugcuccuccgucuucaacgucgucaacuccuccaucggccucaucaugguccucuccuuccucuuccucaacuga

SEQ ID NO: 3833 - RNA, 1227 nt, Artificial Sequence
  derived and/or modified CDS sequence (opt2) from Pf(Tz93-102)__BAM84773.1__CSP
augaugcgcaagcucgccauccucuccgucuccuccuuccucuucgucgaggcccucuuccaggaguaccagugcuacggcuccuccuccaacacccgcguccucaacgagcucaacuacgacaacgccggcaccaaccucuacaacgagcucgagaugaacuacuacggcaagcaggagaacugguacucccucaagaagaacucccgcucccucggcgagaacgacgacggcaacaacaacaacggcgacaacggccgcgagggcaaggacgaggacaagcgcgacggcaacaacgaggacaacgagaagcuccgcaagcccaagcacaagaagcucaagcagcccggcgacggcaaccccgaccccaacgccaaccccaacgucgaccccaacgccaaccccaacgucgaccccaacgccaaccccaacgucgaccccaacgccaaccccaacgccaaccccaacgccaaccccaacgccaaccccaacgccaaccccaacgccaaccccaacgccaaccccaacgccaaccccaacgccaaccccaacgccaaccccaacgccaaccccaacgccaaccccaacgccaaccccaacgccaaccccaacgucgaccccaacgccaaccccaacgccaaccccaacgccaaccccaacgccaaccccaacgccaaccccaacgccaaccccaacgccaaccccaacgccaaccccaacgccaaccccaacgccaaccccaacgccaaccccaacgccaaccccaacgccaaccccaacgccaaccccaacgccaaccccaacgccaaccccaacgccaaccccaacgccaaccccaacgccaaccccaacaagaacaaccagggcaacggccagggccacaacaugcccaacgaccccaaccgcaacgucgacgagaacgccaacgccaacaacgccgucaagaacaacaacaacgaggagcccuccgacaagcacaucgagcaguaccucaagaccaucaagaacucccucuccaccgaguggucccccugcuccgucaccugcggcaacggcauccagguccgcaucaagcccggcuccgccaacaagcccaaggacgagcucaacuacgagaacgacaucgagaagaagaucugcaagauggagaagugcuccuccgucuucaacgucgucaacuccuccaucggccucaucaugguccucuccuuccucuuccucaacuga

SEQ ID NO: 3834 - RNA, 1227 nt, Artificial Sequence
  derived and/or modified CDS sequence (opt2) from Pf(Tz98-021)__BAM84783.1__CSP
augaugcgcaagcucgccauccucuccgucuccuccuuccucuucgucgaggcccucuuccaggaguaccagugcuacggcuccuccuccaacacccgcguccucaacgagcucaacuacgacaacgccggcaccaaccucuacaacgagcucgagaugaacuacuacggcaagcaggagaacugguacucccucaagaagaacucccgcucccucggcgagaacgacgacggcaacaacaacaacggcgacaacggccgcgagggcaaggacgaggacaagcgcgacggcaacaacgaggacaacgagaagcuccgcaagcccaagcacaagaagcucaagcagcccgccgacggcaaccccgaccccaacgccaaccccaacgucgaccccaacgccaaccccaacgucgaccccaacgccaaccccaacgucgaccccaacgccaaccccaacgccaaccccaacgccaaccccaacgccaaccccaacgccaaccccaacgccaaccccaacgccaaccccaacgccaaccccaacgccaaccccaacgccaaccccaacgccaaccccaacgucgaccccaacgccaaccccaacgccaaccccaacgccaaccccaacgccaaccccaacgccaaccccaacgccaaccccaacgccaaccccaacgccaaccccaacgccaaccccaacgccaaccccaacgccaaccccaacgccaaccccaacgccaaccccaacgccaaccccaacgccaaccccaacgccaaccccaacgccaaccccaacgccaaccccaacgccaaccccaacgccaaccccaacgccaaccccaacgccaaccccaacaagaacaaccagggcaacggccagggccacaacaugcccaacgaccccaaccgcaacgucgacgagaacgccaacgccaacaacgccgucaagaacaacaacaacgaggagcccuccgaccagcacaucgagaaguaccucaagaccauccagaacucccucuccaccgaguggucccccugcuccgucaccugcggcaacggcauccagguccgcaucaagcccggcuccgccaacaagcccaaggaccagcucgacuacgccaacgacaucgagaagaagaucugcaagauggagaagugcuccuccgucuucaacgucgucaacuccuccaucggccucaucaugguccucuccuuccucuuccucaacuga

SEQ ID NO: 3835 - RNA, 1227 nt, Artificial Sequence
  derived and/or modified CDS sequence (opt2) from Pf(Tz98-030)__BAM84785.1__CSP
augaugcgcaagcucgccauccucuccgucuccuccuuccucuucgucgaggcccucuuccaggaguaccagugcuacggcuccuccuccaacacccgcguccucaacgagcucaacuacgacaacgccggcaccaaccucuacaacgagcucgagaugaacuacuacggcaagcaggagaacugguacucccucaagaagaacucccgcucccucggcgagaacgacgacggcaacaacaacaacggcgacaacggccgcgagggcaaggacgaggacaagcgcgacggcaacaacgaggacaacgagaagcuccgcaagcccaagcacaagaagcucaagcagcccggcgacggcaaccccgaccccaacgccaaccccaacgucgaccccaacgccaaccccaacgucgaccccaacgccaaccccaacgucgaccccaacgccaaccccaacgccaaccccaacgccaaccccaacgccaaccccaacgccaaccccaacgccaaccccaacgccaaccccaacgccaaccccaacgccaaccccaacgccaaccccaacgccaaccccaacgucgaccccaacgccaaccccaacgccaaccccaacgccaaccccaacgccaaccccaacgccaaccccaacgccaaccccaacgccaaccccaacgccaaccccaacgccaaccccaacgccaaccccaacgccaaccccaacgccaaccccaacgccaaccccaacgccaaccccaacgccaaccccaacgccaaccccaacgccaaccccaacgccaaccccaacgccaaccccaacgccaaccccaacgccaaccccaacgccaaccccaacaagaacaaccagggcaacggccagggccacaacaugcccaacgaccccaaccgcaacgucgacgagaacgccaacgccaacaacgccgucaagaacaacaacaacgaggagcccuccgaccagcacaucgagaaguaccuccagaagauccagaacucccucuccaccgaguggucccccugcuccgucaccugcggcaacggcauccagguccgcaucaagcccggcuccgccaacaagcccaaggaccagcucaacuacgagaacgacaucgagaagaagaucugcaagauggagaagugcuccuccgucuucaacgucgucaacuccuccaucggccucaucaugguccucuccuuccucuuccucaacuga

SEQ ID NO: 3836 - RNA, 1227 nt, Artificial Sequence
  derived and/or modified CDS sequence (opt2) from Pf(Tz98-070)__BAM84790.1__CSP
augaugcgcaagcucgccauccucuccgucuccuccuuccucuucgucgaggcccucuuccaggaguaccagugcuacggcuccuccuccaacacccgcguccucaacgagcucaacuacgacaacgccggcaccaaccucuacaacgagcucgagaugaacuacuacggcaagcaggagaacugguacucccucaagaagaacucccgcucccucggcgagaacgacgacggcaacaacaacaacggcgacaacggccgcgagggcaaggacgaggacaagcgcgacggcaacaacgaggacaacgagaagcuccgcaagcccaagcacaagaagcucaagcagcccggcgacggcaaccccgaccccaacgccaaccccaacgucgaccccaacgccaaccccaacgucgaccccaacgccaaccccaacgucgaccccaacgccaaccccaacgccaaccccaacgccaaccccaacgccaaccccaacgccaaccccaacgccaaccccaacgccaaccccaacgccaaccccaacgccaaccccaacgccaaccccaacgccaaccccaacgccaaccccaacgccaaccccaacgccaaccccaacgucgaccccaacgccaaccccaacgccaaccccaacgccaaccccaacgccaaccccaacgccaaccccaacgccaaccccaacgccaaccccaacgccaaccccaacgccaaccccaacgccaaccccaacgccaaccccaacgccaaccccaacgccaaccccaacgccaaccccaacgccaaccccaacgccaaccccaacgccaaccccaacgccaaccccaacgccaaccccaacaagaacaaccagggcaacggccagggccacaacaugcccaacgaccccaaccgcaacgucgacgagaacgccaacgccaacgacgccgucaagaacaacaacaacgaggagcccuccgaccagcacaucgagaaguaccucaagaucaucaagaacucccucuccaccgaguggucccccugcuccgucaccugcggcaacggcauccagguccgcaucaagcccggcuccgccaacaagcccaaggaccagcucgacuacgccaacgacaucgagaagaagaucugcaagauggagaagugcuccuccgucuucaacgucgucaacuccuccaucggccucaucaugguccucuccuuccucuuccucaacuga

SEQ ID NO: 3837 - RNA, 1224 nt, Artificial Sequence
  derived and/or modified CDS sequence (opt2) from Pf(A150)__ACO49332.1__CSP
augcgcaagcucgccauccucuccgucuccuccuuccucuucgucgaggcccucuuccaggaguaccagugcuacggcuccuccuccaacacccgcguccucaacgagcucaacuacgacaacgccggcaccaaccucuacaacgagcucgagaugaacuacuacggcaagcaggagaacugguacucccucaagaagaacucccgcucccucggcgagaacgacgacggcaacaacaacaacggcgacaacggccgcgagggcaaggacgaggacaagcgcgacggcaacaacgaggacaacgagaagcuccgcaagcccaagcacaagaagcucaagcagcccggcgacggcaaccccgaccccaacgccaaccccaacgucgaccccaacgccaaccccaacgucgaccccaacgccaaccccaacgucgaccccaacgccaaccccaacgccaaccccaacgccaaccccaacgccaaccccaacgccaaccccaacgccaaccccaacgccaaccccaacgccaaccccaacgccaaccccaacgccaaccccaacgccaaccccaacgccaaccccaacgccaaccccaacgccaaccccaacgccaaccccaacgccaaccccaacgccaaccccaacgccaaccccaacgccaaccccaacgccaaccccaacgccaaccccaacgccaaccccaacgccaaccccaacgccaaccccaacgccaaccccaacgccaaccccaacgccaaccccaacgccaaccccaacgccaaccccaacgccaaccccaacgccaaccccaacgccaaccccaacgccaaccccaacgccaaccccaacaagaacaaccagggcaacggccagggccacaacaugcccaacgaccccaaccgcaacgucgacgagaacgccaacgccaacaacgccgucaagaacaacaacaacgaggagcccuccgacaagcacaucgagcaguaccucaagaagauccagaacucccucuccaccgaguggucccccugcuccgucaccugcggcaacggcauccagguccgcaucaagcccggcuccgccaacaagcccaaggacgagcucgacuacgagaacgacaucgagaagaagaucugcaagauggagaagugcuccuccgucuucaacgucgucaacuccuccaucggccucaucaugguccucuccuuccucuuccucaacuga

SEQ ID NO: 3838 - RNA, 1215 nt, Artificial Sequence
  derived and/or modified CDS sequence (opt2) from Pf(Gha1109-183)__BAM84829.1__CSP
augaugcgcaagcucgccauccucuccgucuccuccuuccucuucgucgaggcccucuuccaggaguaccagugcuacggcuccuccuccaacacccgcguccucaacgagcucaacuacgacaacgccggcaccaaccucuacaacgagcucgagaugaacuacuacggcaagcaggagaacugguacucccucaagaagaacucccgcucccucggcgagaacgacgacggcaacaacaacaacggcgacaacggccgcgagggcaaggacgaggacaagcgcgacggcaacaacgaggacaacgagaagcuccgcaagcccaagcacaagaagcucaagcagcccgccgacggcaaccccgaccccaacgccaaccccaacgucgaccccaacgccaaccccaacgucgaccccaacgccaaccccaacgucgaccccaacgccaaccccaacgccaaccccaacgccaaccccaacgccaaccccaacgccaaccccaacgccaaccccaacgccaaccccaacgccaaccccaacgccaaccccaacgccaaccccaacgccaaccccaacgccaaccccaacgccaaccccaacgucgaccccaacgccaaccccaacgccaaccccaacgccaaccccaacgccaaccccaacgccaaccccaacgccaaccccaacgccaaccccaacgccaaccccaacgccaaccccaacgccaaccccaacgccaaccccaacgccaaccccaacgccaaccccaacgccaaccccaacgccaaccccaacgccaaccccaacgccaaccccaacgccaaccccaacgccaaccccaacaagaacaaccagggcaacggccagggccacaacaugcccaacgaccccaaccgcaacgucgacgagaacgccaacgccaacaacgccgucaagaacaacaacaacgaggagcccuccgaccagcacaucgagaaguaccucaagaccaucaagaacucccucuccaccgaguggucccccugcuccgucaccugcggcaacggcauccagguccgcaucaagcccggcuccgccaacaagcccaaggaccagcucgacuacgccaacgacaucgagaagaagaucugcaagauggagaagugcuccuccgucuucaacgucgucaacuccuccaucggccucaucaugguccucuccuuccucuuccucaacuga

SEQ ID NO: 3839 - RNA, 1215 nt, Artificial Sequence
  derived and/or modified CDS sequence (opt2) from Pf(Pal97-107)__BAM84956.1__CSP
augaugcgcaagcucgccauccucuccgucuccuccuuccucuucgucgaggcccucuuccaggaguaccagugcuacggcuccuccuccaacacccgcguccucaacgagcucaacuacgacaacgccggcaccaaccucuacaacgagcucgagaugaacuacuacggcaagcaggagaacugguacucccucaagaagaacucccgcucccucggcgagaacgacgacggcaacaacaacaacggcgacaacggccgcgagggcaaggacgaggacaagcgcgacggcaacaacgaggacaacgagaagcuccgcaagcccaagcacaagaagcucaagcagcccggcgacggcaaccccgaccccaacgccaaccccaacgucgaccccaacgccaaccccaacgucgaccccaacgccaaccccaacgucgaccccaacgccaaccccaacgccaaccccaacgccaaccccaacgccaaccccaacgccaaccccaacgccaaccccaacgccaaccccaacgccaaccccaacgccaaccccaacgccaaccccaacgccaaccccaacgccaaccccaacgccaaccccaacgucgaccccaacgccaaccccaacgccaaccccaacgccaaccccaacgccaaccccaacgccaaccccaacgccaaccccaacgccaaccccaacgccaaccccaacgccaaccccaacgccaaccccaacgccaaccccaacgccaaccccaacgccaaccccaacgccaaccccaacgccaaccccaacgccaaccccaacgccaaccccaacgccaaccccaacgccaaccccaacaagaacaaccagggcaacggccagggccacaacaugcccaacgaccccaaccgcaacgucgacgagaacgccaacgccaacaacgccgucaagaacaacaacaacgaggagcccuccgacaagcacaucaaggaguaccucaccaagaucaagaacuccaucuccaccgaguggucccccugcuccgucaccugcggcaacggcauccagguccgcaucaagcccggcuccgccaacaagcccaaggacgagcucgacuacgagaacgacaucgagaagaagaucugcaagauggagaagugcuccuccgucuucaacgucgucaacuccuccaucggccucaucaugguccucuccuuccucuuccucaacuga

SEQ ID NO: 3840 - RNA, 1215 nt, Artificial Sequence
  derived and/or modified CDS sequence (opt2) from Pf(Tz98-103)__BAM84795.1__CSP
augaugcgcaagcucgccauccucuccgucuccuccuuccucuucgucgaggcccucuuccaggaguaccagugcuacggcuccuccuccaacacccgcguccucaacgagcucaacuacgacaacgccggcaccaaccucuacaacgagcucgagaugaacuacuacggcaagcaggagaacugguacucccucaagaagaacucccgcucccucggcgagaacgacgacggcaacaacaacaacggcgacaacggccgcgagggcaaggacgaggacaagcgcgacggcaacaacgaggacaacgagaagcuccgcaagcccaagcacaagaagcucaagcagcccgccgacggcaaccccgaccccaacgccaaccccaacgucgaccccaacgccaaccccaacgucgaccccaacgccaaccccaacgucgaccccaacgccaaccccaacgccaaccccaacgccaaccccaacgccaaccccaacgccaaccccaacgccaaccccaacgccaaccccaacgccaaccccaacgccaaccccaacgccaaccccaacgccaaccccaacgccaaccccaacgccaaccccaacgccaaccccaacgucgaccccaacgccaaccccaacgccaaccccaacgccaaccccaacgccaaccccaacgccaaccccaacgccaaccccaacgccaaccccaacgccaaccccaacgccaaccccaacgccaaccccaacgccaaccccaacgccaaccccaacgccaaccccaacgccaaccccaacgccaaccccaacgccaaccccaacgccaaccccaacgccaaccccaacaagaacaaccagggcaacggccagggccacaacaugcccaacgaccccaaccgcaacgucgacgagaacgccaacgccaacaacgccgucaagaacaacaacaacgaggagcccuccgacaagcacaucaccgaguaccucaagcgcauccagaacucccucuccaccgaguggucccccugcuccgucaccugcggcaacggcauccagguccgcaucaagcccggcuccgccggcaaguccaagaacgagcucgacuacgagaacgacaucgagaagaagaucugcaagauggagaagugcuccuccgucuucaacgucgucaacuccuccaucggccucaucaugguccucuccuuccucuuccucaacuga

SEQ ID NO: 3841 - RNA, 1215 nt, Artificial Sequence
  derived and/or modified CDS sequence (opt2) from Pf(Yaounde)__AAN87588.1__CSP
augaugcgcaagcucgccauccucuccgucuccuccuuccucuucgucgaggcccucuuccaggaguaccagugcuacggcuccuccuccaacacccgcguccucaacgagcucaacuacgacaacgccggcaccaaccucuacaacgagcucgagaugaacuacuacggcaagcaggagaacugguacucccucaagaagaacucccgcucccucggcgagaacgacgacggcaacaacaacaacggcgacaacggccgcgagggcaaggacgaggacaagcgcgacggcaacaacgaggacaacgagaagcuccgcaagcccaagcacaagaagcucaagcagcccgccgacggcaaccccgaccccaacgccaaccccaacgucgaccccaacgccaaccccaacgucgaccccaacgccaaccccaacgucgaccccaacgccaaccccaacgccaaccccaacgccaaccccaacgccaaccccaacgccaaccccaacgccaaccccaacgccaaccccaacgccaaccccaacgccaaccccaacgucgaccccaacgccaaccccaacgccaaccccaacgccaaccccaacgccaaccccaacgccaaccccaacgccaaccccaacgccaaccccaacgccaaccccaacgccaaccccaacgccaaccccaacgccaaccccaacgccaaccccaacgccaaccccaacgccaaccccaacgccaaccccaacgccaaccccaacgccaaccccaacgccaaccccaacgccaaccccaacgccaaccccaacgccaaccccaacgccaaccccaacgccaaccccaacaagaacaaccagggcaacggccagggccacaacaugcccaacgaccccaaccgcaacgucgacgagaacgccaacgccaacaacgccgucaagaacaacaacaacgaggagcccuccgaccagcacaucgagaaguaccucaacaagaucaagaacucccucuccaccgaguggucccccugcuccgucaccugcggcaacggcauccagguccgcaucaagcccggcuccgccaacaagcccaaggaccagcucgacuacgccaacgacaucgagaagaagaucugcaagauggagaagugcuccuccgucuucaacgucgucaacuccuccaucggccucaucaugguccucuccuuccucuuccucaacuga

SEQ ID NO: 3842 - RNA, 1209 nt, Artificial Sequence
  derived and/or modified CDS sequence (opt2) from Pf(CMC247)__ADF48384.1__CSP
augcgcaagcucgccauccucuccgucuccuccuuccucuucgucgaggcccucuuccaggaguaccagugcuacggcuccuccuccaacacccgcguccucaacgagcucaacuacgacaacgccggcaccaaccucuacaacgagcucgagaugaacuacuacggcaagcaggagaacugguacucccucaagaagaacucccgcucccucggcgagaacgacgacggcaacaacaacaacggcgacaacggccgcgagggcaaggacgaggacaagcgcgacggcaacaacgaggacaacgagaagcuccgcaagcccaagcacaagaagcucaagcagcccggcgacggcaaccccgaccccaacgccaaccccaacgucgaccccaacgccaaccccaacgucgaccccaacgccaaccccaacgucgaccccaacgccaaccccaacgccaaccccaacgccaaccccaacgccaaccccaacgccaaccccaacgccaaccccaacgccaaccccaacgccaaccccaacgccaaccccaacgccaaccccaacgccaaccccaacgccaaccccaacgccaaccccaacgccaaccccaacgccaaccccaacgccaaccccaacgccaaccccaacgccaaccccaacgccaaccccaacgccaaccccaacgccaaccccaacgccaaccccaacgccaaccccaacgccaaccccaacgccaaccccaacgccaaccccaacgccaaccccaacgccaaccccaacgccaaccccaacgccaaccccaacgccaaccccaacgccaaccccaacgccaaccccaacaagaacaaccagggcaacggccagggccacaacaugcccaacgaccccaaccgcaacgucgacgagaacgccaacgccaacaacgacgagaacaacaacaacgaggagcccuccgacaagcacaucgagcaguaccucaagaagauccaguacucccucuccaccgaguggucccccugcuccgucaccugcggcaacggcauccagguccgcaucaagcccggcuccgccgacaagcccaaggaccagcucgacuacgagaacgacaucgagaagaagaucugcaagauggagaagugcuccuccgucuucaacgucgucaacuccuccaucggccucaucaugguccucuccuuccucuuccucaacuga

SEQ ID NO: 3843 - RNA, 1206 nt, Artificial Sequence
  derived and/or modified CDS sequence (opt2) from Pf(Gha1109-215)__BAM84833.1__CSP
augaugcgcaagcucgccauccucuccgucuccuccuuccucuucgucgaggcccucuuccaggaguaccagugcuacggcuccuccuccaacacccgcguccucaacgagcucaacuacgacaacgccggcaccaaccucuacaacgagcucgagaugaacuacuacggcaagcaggagaacugguacucccucaagaagaacucccgcucccucggcgagaacgacgacggcaacaacgaggacaacgagaagcuccgcaagcccaagcacaagaagcucaagcagcccgccgacggcaaccccgaccccaacgccaaccccaacgucgaccccaacgccaaccccaacgucgaccccaacgccaaccccaacgucgaccccaacgccaaccccaacgccaaccccaacgccaaccccaacgccaaccccaacgccaaccccaacgccaaccccaacgccaaccccaacgccaaccccaacgccaaccccaacgccaaccccaacgccaaccccaacgccaaccccaacgccaaccccaacgccaaccccaacgccaaccccaacgccaaccccaacgccaaccccaacgucgaccccaacgccaaccccaacgccaaccccaacgccaaccccaacgccaaccccaacgccaaccccaacgccaaccccaacgccaaccccaacgccaaccccaacgccaaccccaacgccaaccccaacgccaaccccaacgccaaccccaacgccaaccccaacgccaaccccaacgccaaccccaacgccaaccccaacgccaaccccaacgccaaccccaacgccaaccccaacaagaacaaccagggcaacggccagggccacaacaugcccaacgaccccaaccgcaacgucgacgagaacgccaaggccaacaacgccgucaagaacaacaacaacgaggagcccuccgacaagcacaucgagcaguaccucaagaccauccagaacucccucuccaccgaguggucccccugcuccgucaccugcggcaacggcauccagguccgcaucaagcccggcuccgccaacaagcccaaggaccagcucgacuacgagaacgacaucgagaagaagaucugcaagauggagaagugcuccuccgucuucaacgucgucaacuccuccaucggccucaucaugguccucuccuuccucuuccucaacuga

SEQ ID NO: 3844 - RNA, 1203 nt, Artificial Sequence
  derived and/or modified CDS sequence (opt2) from Pf(Gha1109-199)__BAM84831.1__CSP
augaugcgcaagcucgccauccucuccgucuccuccuuccucuucgucgaggcccucuuccaggaguaccagugcuacggcuccuccuccaacacccgcguccucaacgagcucaacuacgacaacgccggcaccaaccucuacaacgagcucgagaugaacuacuacggcaagcaggagaacugguacucccucaagaagaacucccgcucccucggcgagaacgacgacggcaacaacaacaacggcgacaacggccgcgagggcaaggacgaggacaagcgcgacggcaacaacgaggacaacgagaagcuccgcaagcccaagcacaagaagcucaagcagcccgccgacggcaaccccgaccccaacgccaaccccaacgucgaccccaacgccaaccccaacgucgaccccaacgccaaccccaacgucgaccccaacgccaaccccaacgccaaccccaacgccaaccccaacgccaaccccaacgccaaccccaacgccaaccccaacgccaaccccaacgccaaccccaacgccaaccccaacgccaaccccaacgccaaccccaacgccaaccccaacgucgaccccaacgccaaccccaacgccaaccccaacgccaaccccaacgccaaccccaacgccaaccccaacgccaaccccaacgccaaccccaacgccaaccccaacgccaaccccaacgccaaccccaacgccaaccccaacgccaaccccaacgccaaccccaacgccaaccccaacgccaaccccaacgccaaccccaacgccaaccccaacgccaaccccaacgccaaccccaacaagaacaaccagggcaacggccagggccacaacaugcccaacgaccccaaccgcaacgucgacgagaacgccaacgccaacuccgccgucaagaacaacaacaacgaggagcccuccgacaagcacaucaaggaguaccucaacaagauccagaacucccucuccaccgaguggucccccugcuccgucaccugcggcaacggcauccagguccgcaucaagcccggcuccgccaacaagcccaaggacgagcucgacuacgccaacgacaucgagaagaagaucugcaagauggagaagugcuccuccgucuucaacgucgucaacuccuccaucggccucaucaugguccucuccuuccucuuccucaacuga

SEQ ID NO: 3845 - RNA, 1194 nt, Artificial Sequence
  derived and/or modified CDS sequence (opt2) from Pf(Asembo Bay)__AAN87582.1__CSP
augaugcgcaagcucgccauccucuccgucuccuccuuccucuucgucgaggcccucuuccaggaguaccagugcuacggcuccuccuccaacacccgcguccucaacgagcucaacuacgacaacgccggcaccaaccucuacaacgagcucgagaugaacuacuacggcaagcaggagaacugguacucccucaagaagaacucccgcucccucggcgagaacgacgacggcaacaacgaggacaacgagaagcuccgcaagcccaagcacaagaagcucaagcagcccgccgacggcaaccccgaccccaacgccaaccccaacgucgaccccaacgccaaccccaacgucgaccccaacgccaaccccaacgucgaccccaacgccaaccccaacgccaaccccaacgccaaccccaacgccaaccccaacgccaaccccaacgccaaccccaacgccaaccccaacgccaaccccaacgccaaccccaacgccaaccccaacgccaaccccaacgccaaccccaacgccaaccccaacgccaaccccaacgccaaccccaacgccaaccccaacgccaaccccaacgucgaccccaacgccaaccccaacgccaaccccaacgccaaccccaacgccaaccccaacgccaaccccaacgccaaccccaacgccaaccccaacgccaaccccaacgccaaccccaacgccaaccccaacgccaaccccaacgccaaccccaacgccaaccccaacgccaaccccaacgccaaccccaacgccaaccccaacgccaaccccaacgccaaccccaacaagaacaaccagggcaacggccagggccacaacaugcccaacgaccccaaccgcaacgucgacgagaacgccaacgccaacaacgccgucaagaacaacaacaacgaggagcccuccgaccagcacaucgagaaguaccucaagaccauccagaacucccucuccaccgaguggucccccugcuccgucaccugcggcaacggcauccagguccgcaucaagcccggcuccgccaacaagcccaaggaccagcucgacuacgccaacgacaucgagaagaagaucugcaagauggagaagugcuccuccgucuucaacgucgucaacuccuccaucggccucaucaugguccucuccuuccucuuccucaacuga

SEQ ID NO: 3846 - RNA, 1194 nt, Artificial Sequence
  derived and/or modified CDS sequence (opt2) from Pf(Tz98-017)__BAM84782.1__CSP
augaugcgcaagcucgccauccucuccgucuccuccuuccucuucgucgaggcccucuuccaggaguaccagugcuacggcuccuccuccaacacccgcguccucaacgagcucaacuacgacaacgccggcaccaaccucuacaacgagcucgagaugaacuacuacggcaagcaggagaacugguacucccucaagaagaacucccgcucccucggcgagaacgacgacggcaacaacgaggacaacgagaagcuccgcaagcccaagcacaagaagcucaagcagcccgccgacggcaaccccgaccccaacgccaaccccaacgucgaccccaacgccaaccccaacgucgaccccaacgccaaccccaacgucgaccccaacgccaaccccaacgccaaccccaacgccaaccccaacgccaaccccaacgccaaccccaacgccaaccccaacgccaaccccaacgccaaccccaacgccaaccccaacgccaaccccaacgccaaccccaacgccaaccccaacgccaaccccaacgccaaccccaacgccaaccccaacgccaaccccaacgccaaccccaacgucgaccccaacgccaaccccaacgccaaccccaacgccaaccccaacgccaaccccaacgccaaccccaacgccaaccccaacgccaaccccaacgccaaccccaacgccaaccccaacgccaaccccaacgccaaccccaacgccaaccccaacgccaaccccaacgccaaccccaacgccaaccccaacgccaaccccaacgccaaccccaacgccaaccccaacaagaacaaccagggcaacggccagggccacaacaugcccaacgaccccaaccgcaacgucgacgagaacgccaacgccaacaacgccgucaagaacaacaacaacgaggagcccuccgacaagcacaucgagcaguaccucaacaagaucaagaacuccaucuccaccgaguggucccccugcuccgucaccugcggcaacggcauccagguccgcaucaagcccggcuccgccaacaagcccaaggacgagcucaacuacgagaacgacaucgagaagaagaucugcaagauggagaagugcuccuccgucuucaacgucgucaacuccuccaucggccucaucaugguccucuccuuccucuuccucaacuga

SEQ ID NO: 3847 - RNA, 1194 nt, Artificial Sequence
  derived and/or modified CDS sequence (opt2) from Pf(Yaounde)__AAN87583.1__CSP
augaugcgcaagcucgccauccucuccgucuccuccuuccucuucgucgaggcccucuuccaggaguaccagugcuacggcuccuccuccaacacccgcguccucaacgagcucaacuacgacaacgccggcaccaaccucuacaacgagcucgagaugaacuacuacggcaagcaggagaacugguacucccucaagaagaacucccgcucccucggcgagaacgacgacggcaacaacgaggacaacgagaagcuccgcaagcccaagcacaagaagcucaagcagcccgccgacggcaaccccgaccccaacgccaaccccaacgucgaccccaacgccaaccccaacgucgaccccaacgccaaccccaacgucgaccccaacgccaaccccaacgccaaccccaacgccaaccccaacgccaaccccaacgccaaccccaacgccaaccccaacgccaaccccaacgccaaccccaacgccaaccccaacgccaaccccaacgccaaccccaacgccaaccccaacgccaaccccaacgccaaccccaacgccaaccccaacgccaaccccaacgccaaccccaacgucgaccccaacgccaaccccaacgccaaccccaacgccaaccccaacgccaaccccaacgccaaccccaacgccaaccccaacgccaaccccaacgccaaccccaacgccaaccccaacgccaaccccaacgccaaccccaacgccaaccccaacgccaaccccaacgccaaccccaacgccaaccccaacgccaaccccaacgccaaccccaacgccaaccccaacaagaacaaccagggcaacggccagggccacaacaugcccaacgaccccaaccgcaacgucgacgagaacgccaacgccaacaacgccgucaagaacaacaacaacgaggagcccuccgaccagcacaucgagaaguaccucaagcgcauccagaacucccucuccaccgaguggucccccugcuccgucaccugcggcaacggcauccagguccgcaucaagcccggcuccgccaacaagcccaaggaccagcucgacuacgccaacgacaucgagaagaagaucugcaagauggagaagugcuccuccgucuucaacgucgucaacuccuccaucggccucaucaugguccucuccuuccucuuccucaacuga

SEQ ID NO: 3848 - RNA, 1191 nt, Artificial Sequence
  derived and/or modified CDS sequence (opt2) from Pf(Amazonas)__AAN87593.1__CSP
augaugcgcaagcucgccauccucuccgucuccuccuuccucuucgucgaggcccucuuccaggaguaccagugcuacggcuccuccuccaacacccgcguccucaacgagcucaacuacgacaacgccggcaccaaccucuacaacgagcucgagaugaacuacuacggcaagcaggagaacugguacucccucaagaagaacucccgcucccucggcgagaacgacgacggcaacaacaacaacggcgacaacggccgcgagggcaaggacgaggacaagcgcgacggcaacaacgaggacaacgagaagcuccgcaagcccaagcacaagaagcucaagcagcccgccgacggcaaccccgaccccaacgccaaccccaacgucgaccccaacgccaaccccaacgucgaccccaacgccaaccccaacgucgaccccaacgccaaccccaacgccaaccccaacgccaaccccaacgccaaccccaacgccaaccccaacgccaaccccaacgccaaccccaacgccaaccccaacgccaaccccaacgccaaccccaacgccaaccccaacgccaaccccaacgucgaccccaacgccaaccccaacgccaaccccaacgccaaccccaacgccaaccccaacgccaaccccaacgccaaccccaacgccaaccccaacgccaaccccaacgccaaccccaacgccaaccccaacgccaaccccaacgccaaccccaacgccaaccccaacgccaaccccaacgccaaccccaacgccaaccccaacgccaaccccaacgccaaccccaacaagaacaaccagggcaacggccagggccacaacaugcccaacgaccccaaccgcaacgucgacgagaacgccaacgccaacaacgccgucaagaacaacaacaacgaggagcccuccgacaagcacaucaccgaguaccucaagcgcauccagaacucccucuccaccgaguggucccccugcuccgucaccugcggcaacggcauccagguccgcaucaagcccggcuccgccggcaaguccaagaacgagcucgacuacgagaacgacaucgagaagaagaucugcaagauggagaagugcuccuccgucuucaacgucgucaacuccuccaucggccucaucaugguccucuccuuccucuuccucaacuga

SEQ ID NO: 3849 - RNA, 1191 nt, Artificial Sequence
  derived and/or modified CDS sequence (opt2) from Pf(Amazonas)__AAN87594.1__CSP
augaugcgcaagcucgccauccucuccgucuccuccuuccucuucgucgaggcccucuuccaggaguaccagugcuacggcuccuccuccaacacccgcguccucaacgagcucaacuacgacaacgccggcaccaaccucuacaacgagcucgagaugaacuacuacggcaagcaggagaacugguacucccucaagaagaacucccgcucccucggcgagaacgacgacggcaacaacaacaacggcgacaacggccgcgagggcaaggacgaggacaagcgcgacggcaacaacgaggacaacgagaaccuccgcaagcccaagcacaagaagcucaagcagcccgccgacggcaaccccgaccccaacgccaaccccaacgucgaccccaacgccaaccccaacgucgaccccaacgccaaccccaacgucgaccccaacgccaaccccaacgccaaccccaacgccaaccccaacgccaaccccaacgccaaccccaacgccaaccccaacgccaaccccaacgccaaccccaacgccaaccccaacgccaaccccaacgccaaccccaacgccaaccccaacgucgaccccaacgccaaccccaacgccaaccccaacgccaaccccaacgccaaccccaacgccaaccccaacgccaaccccaacgccaaccccaacgccaaccccaacgccaaccccaacgccaaccccaacgccaaccccaacgccaaccccaacgccaaccccaacgccaaccccaacgccaaccccaacgccaaccccaacgccaaccccaacgccaaccccaacaagaacaaccagggcaacggccagggccacaacaugcccaacgaccccaaccgcaacgucgacgagaacgccaacgccaacaacgccgucaagaacaacaacaacgaggagcccuccgacaagcacaucaccgaguaccucaagcgcauccagaacucccucuccaccgaguggucccccugcuccgucaccugcggcaacggcauccagguccgcaucaagcccggcuccgccggcaaguccaagaacgagcucgacuacgagaacgacaucgagaagaagaucugcaagauggagaagugcuccuccgucuucaacgucgucaacuccuccaucggccucaucaugguccucuccuuccucuuccucaacuga

SEQ ID NO: 3850 - RNA, 1191 nt, Artificial Sequence
  derived and/or modified CDS sequence (opt2) from Pf(Bolivar)__AAN87592.1__CSP
augaugcgcaagcucgccauccucuccgucuccuccuuccucuucgucgaggcccucuuccaggaguaccagugcuacggcuccuccuccaacacccgcguccucaacgagcucaacuacgacaacgccggcaccaaccucuacaacgagcucgagaugaacuacuacggcaagcaggagaacugguacucccucaagaagaacucccgcucccucggcgagaacgacgacggcaacaacaacaacggcgacaacggccgcgagggcaaggacgaggacaagcgcgacggcaacaacgaggacaacgagaagcuccgcaagcccaagcacaagaagcucaagcagcccgccgacggcaaccccgaccccaacgccaaccccaacgucgaccccaacgccaaccccaacgucgaccccaacgccaaccccaacgucgaccccaacgccaaccccaacgccaaccccaacgccaaccccaacgccaaccccaacgccaaccccaacgccaaccccaacgccaaccccaacgccaaccccaacgccaaccccaacgccaaccccaacgccaaccccaacgccaaccccaacgucgaccccaacgccaaccccaacgccaaccccaacgccaaccccaacgccaaccccaacgccaaccccaacgccaaccccaacgccaaccccaacgccaaccccaacgccaaccccaacgccaaccccaacgccaaccccaacgccaaccccaacgccaaccccaacgccaaccccaacgccaaccccaacgccaaccccaacgccaaccccaacgccaaccccaacaagaacaaccagggcaacggccagggccacaacaugcccaacgaccccaaccgcaacgucgacgagaacgccaacgccaacaacgccgucaagaacaacaacaacgaggagcccuccgacaagcacaucaccgaguaccucaagcgcauccagaacucccucuccaccgaguggucccccugcuccgucaccugcggcaacggcauccagguccgcaucaagcccggcuccgccggcaaguccaagaaccagcucgacuacgagaacgacaucgagaagaagaucugcaagauggagaagugcuccuccgucuucaacgucgucaacuccuccaucggccucaucaugguccucuccuuccucuuccucaacuga

SEQ ID NO: 3851 - RNA, 1182 nt, Artificial Sequence
  derived and/or modified CDS sequence (opt2) from Pf(30)__AGR53781.1__CSP
augaugcgcaagcucgccauccucuccgucuccuccuuccucuucgucgaggcccucuuccaggaguaccagugcuacggcuccuccuccaacacccgcguccucaacgagcucaacuacgacaacgccggcaccaaccucuacaacgagcucgagaugaacuacuacggcaagcaggagaacugguacucccucaagaagaacucccgcucccucggcgagaacgacgacggcaacaacgaggacaacgagaagcuccgcaagcccaagcacaagaagcucaagcagcccggcgacggcaaccccgaccccaacgccaaccccaacgucgaccccaacgccaaccccaacgucgaccccaacgccaaccccaacgucgaccccaacgccaaccccaacgccaaccccaacgccaaccccaacgccaaccccaacgccaaccccaacgccaaccccaacgccaaccccaacgccaaccccaacgccaaccccaacgccaaccccaacgccaaccccaacgccaaccccaacgccaaccccaacgccaaccccaacgccaaccccaacgucgaccccaacgccaaccccaacgccaaccccaacgccaaccccaacgccaaccccaacgccaaccccaacgccaaccccaacgccaaccccaacgccaaccccaacgccaaccccaacgccaaccccaacgccaaccccaacgccaaccccaacgccaaccccaacgccaaccccaacgccaaccccaacgccaaccccaacgccaaccccaacgccaaccccaacgccaaccccaacaagaacaaccagggcaacggccagggccacaacaugcccaacgaccccaaccgcaacgucgacgagaacgccaacgccaacaacgccgucaagaacaacaacaacgaggagcccuccgacaagcacaucaccgaguaccucaagaagauccagaacucccucuccaccgaguggucccccugcuccgucaccugcggcaacggcauccagguccgcaucaagcccggcuccgccggcaaguccaagaacgagcucgacuacgagaacgacaucgagaagaagaucugcaagauggagaagugcuccuccgucuucaacgucgucaacuccuccaucggccucaucaugguccucuccuuccucuuccucaacuga

SEQ ID NO: 3852 - RNA, 1182 nt, Artificial Sequence
  derived and/or modified CDS sequence (opt2) from Pf(Gha1108-087)__BAM84819.1__CSP
augaugcgcaagcucgccauccucuccgucuccuccuuccucuucgucgaggcccucuuccaggaguaccagugcuacggcuccuccuccaacacccgcguccucaacgagcucaacuacgacaacgccggcaccaaccucuacaacgagcucgagaugaacuacuacggcaagcaggagaacugguacucccucaagaagaacucccgcucccucggcgagaacgacgacggcaacaacgaggacaacgagaagcuccgcaagcccaagcacaagaagcucaagcagcccgccgacggcaaccccgaccccaacgccaaccccaacgucgaccccaacgccaaccccaacgucgaccccaacgccaaccccaacgucgaccccaacgccaaccccaacgccaaccccaacgccaaccccaacgccaaccccaacgccaaccccaacgccaaccccaacgccaaccccaacgccaaccccaacgccaaccccaacgccaaccccaacgccaaccccaacgccaaccccaacgccaaccccaacgccaaccccaacgccaaccccaacgccaaccccaacgucgaccccaacgccaaccccaacgccaaccccaacgccaaccccaacgccaaccccaacgccaaccccaacgccaaccccaacgccaaccccaacgccaaccccaacgccaaccccaacgccaaccccaacgccaaccccaacgccaaccccaacgccaaccccaacgccaaccccaacgccaaccccaacgccaaccccaacgccaaccccaacgccaaccccaacaagaacaaccagggcaacggccagggccacaacaugcccaacgaccccaaccgcaacgucgacgagaacgccaacgccaacaacgccgucaagaacaacaacaacgaggagcccuccgaccagcacaucgagaaguaccucaagcgcauccagaacucccucuccaccgaguggucccccugcuccgucaccugcggcaacggcauccagguccgcaucaagcccggcuccgccaacaagcccaaggaccagcucgacuacgccaacgacaucgagaagaagaucugcaagauggagaagugcuccuccgucuucaacgucgucaacuccuccaucggccucaucaugguccucuccuuccucuuccucaacuga

SEQ ID NO: 3853 - RNA, 1182 nt, Artificial Sequence
  derived and/or modified CDS sequence (opt2) from Pf(Gha1108-098)__BAM84821.1__CSP
augaugcgcaagcucgccauccucuccgucuccuccuuccucuucgucgaggcccucuuccaggaguaccagugcuacggcuccuccuccaacacccgcguccucaacgagcucaacuacgacaacgccggcaccaaccucuacaacgagcucgagaugaacuacuacggcaagcaggagaacugguacucccucaagaagaacucccgcucccucggcgagaacgacgacggcaacaacgaggacaacgagaagcuccgcaagcccaagcacaagaagcucaagcagcccggcgacggcaaccccgaccccaacgccaaccccaacgucgaccccaacgccaaccccaacgucgaccccaacgccaaccccaacgucgaccccaacgccaaccccaacgccaaccccaacgccaaccccaacgccaaccccaacgccaaccccaacgccaaccccaacgccaaccccaacgccaaccccaacgccaaccccaacgccaaccccaacgccaaccccaacgccaaccccaacgccaaccccaacgccaaccccaacgccaaccccaacgucgaccccaacgccaaccccaacgccaaccccaacgccaaccccaacgccaaccccaacgccaaccccaacgccaaccccaacgccaaccccaacgccaaccccaacgccaaccccaacgccaaccccaacgccaaccccaacgccaaccccaacgccaaccccaacgccaaccccaacgccaaccccaacgccaaccccaacgccaaccccaacgccaaccccaacgccaaccccaacaagaacaaccagggcaacggccagggccacaacaugcccaacgagcccaaccgcaacgucgacgagaacgccaacgccaacaacgccgucaagaacaacaacaacgaggagcccuccgacaagcacaucgagcaguaccucaacaagauccagaacucccucuccaccgaguggucccccugcuccgucaccugcggcaacggcauccagguccgcaucaagcccggcuccgccaacaagcccaaggaccagcucgacuacgccaacgacaucgagaagaagaucugcaagauggagaagugcuccuccgucuucaacgucgucaacuccuccaucggccucaucaugguccucuccuuccucuuccucaacuga

SEQ ID NO: 3854 - RNA, 1182 nt, Artificial Sequence
  derived and/or modified CDS sequence (opt2) from Pf(Gha1108-101)__BAM84808.1__CSP
augaugcgcaagcucgccauccucuccgucuccuccuuccucuucgucgaggcccucuuccaggaguaccagugcuacggcuccuccuccaacacccgcguccucaacgagcucaacuacgacaacgccggcaccaaccucuacaacgagcucgagaugaacuacuacggcaagcaggagaacugguacucccucaagaagaacucccgcucccucggcgagaacgacgacggcaacaacgaggacaacgagaagcuccgcaagcccaagcacaagaagcucaagcagcccgccgacggcaaccccgaccccaacgccaaccccaacgucgaccccaacgccaaccccaacgucgaccccaacgccaaccccaacgucgaccccaacgccaaccccaacgccaaccccaacgccaaccccaacgccaaccccaacgccaaccccaacgccaaccccaacgccaaccccaacgccaaccccaacgccaaccccaacgccaaccccaacgccaaccccaacgccaaccccaacgccaaccccaacgccaaccccaacgccaaccccaacgucgaccccaacgccaaccccaacgccaaccccaacgccaaccccaacgccaaccccaacgccaaccccaacgccaaccccaacgccaaccccaacgccaaccccaacgccaaccccaacgccaaccccaacgccaaccccaacgccaaccccaacgccaaccccaacgccaaccccaacgccaaccccaacgccaaccccaacgccaaccccaacgccaaccccaacgccaaccccaacaagaacaaccagggcaacggccagggccacaacaugcccaacgaccccaaccgcaacgucgacgagaacgccaacgccaacaacgccgucaagaacaacaacaacgaggagcccuccgaccagcacaucgagaaguaccucaacaagaucaagaacucccucuccaccgaguggucccccugcuccgucaccugcggcaacggcauccagguccgcaucaagcccggcuccgccaacaagcccaaggaccagcucgacuacgccaacgacaucgagaagaagaucugcaagauggagaagugcuccuccgucuucaacgucgucaacuccuccaucggccucaucaugguccucuccuuccucuuccucaacuga

SEQ ID NO: 3855 - RNA, 1182 nt, Artificial Sequence
  derived and/or modified CDS sequence (opt2) from Pf(Gha1108-148)__BAM84814.1__CSP
augaugcgcaagcucgccauccucuccgucuccuccuuccucuucgucgaggcccucuuccaggaguaccagugcuacggcuccuccuccaacacccgcguccucaacgagcucaacuacgacaacgccggcaccaaccucuacaacgagcucgagaugaacuacuacggcaagcaggagaacugguacucccucaagaagaacucccgcucccucggcgagaacgacgacggcaacaacgaggacaacgagaagcuccgcaagcccaagcacaagaagcucaagcagcccggcgacggcaaccccgaccccaacgccaaccccaacgucgaccccaacgccaaccccaacgucgaccccaacgccaaccccaacgucgaccccaacgccaaccccaacgccaaccccaacgccaaccccaacgccaaccccaacgccaaccccaacgccaaccccaacgccaaccccaacgccaaccccaacgccaaccccaacgccaaccccaacgccaaccccaacgccaaccccaacgccaaccccaacgccaaccccaacgccaaccccaacgucgaccccaacgccaaccccaacgccaaccccaacgccaaccccaacgccaaccccaacgccaaccccaacgccaaccccaacgccaaccccaacgccaaccccaacgccaaccccaacgccaaccccaacgccaaccccaacgccaaccccaacgccaaccccaacgccaaccccaacgccaaccccaacgccaaccccaacgccaaccccaacgccaaccccaacgccaaccccaacaagaacaaccagggcaacggccagggccacaacaugcccaacgaccccaaccgcaacgucgacgagaacgccaacgccaacuccgccgucaagaacaacaacaacgaggagcccuccgacaagcacaucaaggaguaccucaacaagauccagaacucccucuccaccgaguggucccccugcuccgucaccugcggcaacggcauccagguccgcaucaagcccggcuccgccaacaagcccaaggacgagcucgacuacgccaacgacaucgagaagaagaucugcaagauggagaagugcuccuccgucuucaacgucgucaacuccuccaucggccucaucaugguccucuccuuccucuuccucaacuga

SEQ ID NO: 3856 - RNA, 1182 nt, Artificial Sequence
  derived and/or modified CDS sequence (opt2) from Pf(Gha1109-097)__BAM84838.1__CSP
augaugcgcaagcucgccauccucuccgucuccuccuuccucuucgucgaggcccucuuccaggaguaccagugcuacggcuccuccuccaacacccgcguccucaacgagcucaacuacgacaacgccggcaccaaccucuacaacgagcucgagaugaacuacuacggcaagcaggagaacugguacucccucaagaagaacucccgcucccucggcgagaacgacgacggcaacaacgaggacaacgagaagcuccgcaagcccaagcacaagaagcucaagcagcccgccgacggcaaccccgaccccaacgccaaccccaacgucgaccccaacgccaaccccaacgucgaccccaacgccaaccccaacgucgaccccaacgccaaccccaacgccaaccccaacgccaaccccaacgccaaccccaacgccaaccccaacgccaaccccaacgccaaccccaacgccaaccccaacgccaaccccaacgccaaccccaacgccaaccccaacgccaaccccaacgccaaccccaacgccaaccccaacgccaaccccaacgucgaccccaacgccaaccccaacgccaaccccaacgccaaccccaacgccaaccccaacgccaaccccaacgccaaccccaacgccaaccccaacgccaaccccaacgccaaccccaacgccaaccccaacgccaaccccaacgccaaccccaacgccaaccccaacgccaaccccaacgccaaccccaacgccaaccccaacgccaaccccaacgccaaccccaacgccaaccccaacaagaacaaccagggcaacggccagggccacaacaugcccaacgaccccaaccgcaacgucgacgagaacgccaaggccaacaacgccgucaagaacaacaacaacgaggagcccuccgacaagcacaucgagcaguaccucaagaccauccagaacucccucuccaccgaguggucccccugcuccgucaccugcggcaacggcauccagguccgcaucaagcccggcuccgccaacaagcccaaggaccagcucgacuacgagaacgacaucgagaagaagaucugcaagauggagaagugcuccuccgucuucaacgucgucaacuccuccaucggccucaucaugguccucuccuuccucuuccucaacuga

SEQ ID NO: 3857 - RNA, 1182 nt, Artificial Sequence
  derived and/or modified CDS sequence (opt2) from Pf(Gha1110-021)__BAM84839.1__CSP
augaugcgcaagcucgccauccucuccgucuccuccuuccucuucgucgaggcccucuuccaggaguaccagugcuacggcuccuccuccaacacccgcguccucaacgagcucaacuacgacaacgccggcaccaaccucuacaacgagcucgagaugaacuacuacggcaagcaggagaacugguacucccucaagaagaacucccgcucccucggcgagaacgacgacggcaacaacgaggacaacgagaagcuccgcaagcccaagcacaagaagcucaagcagcccgccgacggcaaccccgaccccaacgccaaccccaacgucgaccccaacgccaaccccaacgucgaccccaacgccaaccccaacgucgaccccaacgccaaccccaacgccaaccccaacgccaaccccaacgccaaccccaacgccaaccccaacgccaaccccaacgccaaccccaacgccaaccccaacgccaaccccaacgccaaccccaacgccaaccccaacgccaaccccaacgccaaccccaacgccaaccccaacgccaaccccaacgucgaccccaacgccaaccccaacgccaaccccaacgccaaccccaacgccaaccccaacgccaaccccaacgccaaccccaacgccaaccccaacgccaaccccaacgccaaccccaacgccaaccccaacgccaaccccaacgccaaccccaacgccaaccccaacgccaaccccaacgccaaccccaacgccaaccccaacgccaaccccaacgccaaccccaacgccaaccccaacaagaacaaccagggcaacggccagggccacaacaugcccaacgaccccaaccgcaacgucgacgagaacgccaacgccaacaacgccgucaagaacaacaacaacgaggagcccuccgacaagcacaucgagcaguaccucaagaccaucaagaacucccucuccaccgaguggucccccugcuccgucaccugcggcaacggcauccagguccgcaucaagcccggcuccgccaacaagcccaaggacgagcucaacuacgagaacgacaucgagaagaagaucugcaagauggagaagugcuccuccgucuucaacgucgucaacuccuccaucggccucaucaugguccucuccuuccucuuccucaacuga

SEQ ID NO: 3858 - RNA, 1182 nt, Artificial Sequence
  derived and/or modified CDS sequence (opt2) from Pf(Tz03-068)__BAM84802.1__CSP
augaugcgcaagcucgccauccucuccgucuccuccuuccucuucgucgaggcccucuuccaggaguaccagugcuacggcuccuccuccaacacccgcguccucaacgagcucaacuacgacaacgccggcaccaaccucuacaacgagcucgagaugaacuacuacggcaagcaggagaacugguacucccucaagaagaacucccgcucccucggcgagaacgacgacggcaacaacgaggacaacgagaagcuccgcaagcccaagcacaagaagcucaagcagcccgccgacggcaaccccgaccccaacgccaaccccaacgucgaccccaacgccaaccccaacgucgaccccaacgccaaccccaacgucgaccccaacgccaaccccaacgccaaccccaacgccaaccccaacgccaaccccaacgccaaccccaacgccaaccccaacgccaaccccaacgccaaccccaacgccaaccccaacgccaaccccaacgccaaccccaacgccaaccccaacgccaaccccaacgccaaccccaacgccaaccccaacgucgaccccaacgccaaccccaacgccaaccccaacgccaaccccaacgccaaccccaacgccaaccccaacgccaaccccaacgccaaccccaacgccaaccccaacgccaaccccaacgccaaccccaacgccaaccccaacgccaaccccaacgccaaccccaacgccaaccccaacgccaaccccaacgccaaccccaacgccaaccccaacgccaaccccaacgccaaccccaacaagaacaaccagggcaacggccagggccacaacaugcccaacgaccccaaccgcaacgucgacgagaacgccaacgccaacaacgccgucaagaacaacaacaacgaggagcccuccgaccagcacaucgagaaguaccucaagaucauccagaacucccucuccaccgaguggucccccugcuccgucaccugcggcaacggcauccagguccgcaucaagcccggcuccgccaacaagcccaaggaccagcucgacuacgccaacgacaucgagaagaagaucugcaagauggagaagugcuccuccgucuucaacgucgucaacuccuccaucggccucaucaugguccucuccuuccucuuccucaacuga

SEQ ID NO: 3859 - RNA, 1182 nt, Artificial Sequence
  derived and/or modified CDS sequence (opt2) from Pf(Tz03-070)__BAM84803.1__CSP
augaugcgcaagcucgccauccucuccgucuccuccuuccucuucgucgaggcccucuuccaggaguaccagugcuacggcuccuccuccaacacccgcguccucaacgagcucaacuacgacaacgccggcaccaaccucuacaacgagcucgagaugaacuacuacggcaagcaggagaacugguacucccucaagaagaacucccgcucccucggcgagaacgacgacggcaacaacgaggacaacgagaagcuccgcaagcccaagcacaagaagcucaagcagcccgccgacggcaaccccgaccccaacgccaaccccaacgucgaccccaacgccaaccccaacgucgaccccaacgccaaccccaacgucgaccccaacgccaaccccaacgccaaccccaacgccaaccccaacgccaaccccaacgccaaccccaacgccaaccccaacgccaaccccaacgccaaccccaacgccaaccccaacgccaaccccaacgccaaccccaacgccaaccccaacgccaaccccaacgccaaccccaacgccaaccccaacgccaaccccaacgucgaccccaacgccaaccccaacgccaaccccaacgccaaccccaacgccaaccccaacgccaaccccaacgccaaccccaacgccaaccccaacgccaaccccaacgccaaccccaacgccaaccccaacgccaaccccaacgccaaccccaacgccaaccccaacgccaaccccaacgccaaccccaacgccaaccccaacgccaaccccaacgccaaccccaacaagaacaaccagggcaacggccagggccacaacaugcccaacgaccccaaccgcaacgucgacgagaacgccaacgccaacaacgccgucaagaacaacaacaacgaggagcccuccgaccagcacaucgagaaguaccuccagaagauccagaacucccucuccaccgaguggucccccugcuccgucaccugcggcaacggcauccagguccgcaucaagcccggcuccgccaacaagcccaaggaccagcucaacuacgagaacgacaucgagaagaagaucugcaagauggagaagugcuccuccgucuucaacgucgucaacuccuccaucggccucaucaugguccucuccuuccucuuccucaacuga

SEQ ID NO: 3860 - RNA, 1182 nt, Artificial Sequence
  derived and/or modified CDS sequence (opt2) from Pf(Yaounde)__AAN87579.1__CSP
augaugcgcaagcucgccauccucuccgucuccuccuuccucuucgucgaggcccucuuccaggaguaccagugcuacggcuccuccuccaacacccgcguccucaacgagcucaacuacgacaacgccggcaccaaccucuacaacgagcucgagaugaacuacuacggcaagcaggagaacugguacucccucaagaagaacucccgcucccucggcgagaacgacgacggcaacaacgaggacaacgagaagcuccgcaagcccaagcacaagaagcucaagcagcccggcgacggcaaccccgaccccaacgccaaccccaacgucgaccccaacgccaaccccaacgucgaccccaacgccaaccccaacgucgaccccaacgccaaccccaacgccaaccccaacgccaaccccaacgccaaccccaacgccaaccccaacgccaaccccaacgccaaccccaacgccaaccccaacgccaaccccaacgccaaccccaacgccaaccccaacgccaaccccaacgccaaccccaacgccaaccccaacgccaaccccaacgucgaccccaacgccaaccccaacgccaaccccaacgccaaccccaacgccaaccccaacgccaaccccaacgccaaccccaacgccaaccccaacgccaaccccaacgccaaccccaacgccaaccccaacgccaaccccaacgccaaccccaacgccaaccccaacgccaaccccaacgccaaccccaacgccaaccccaacgccaaccccaacgccaaccccaacgccaaccccaacaagaacaaccagggcaacggccagggccacaacaugcccaacgaccccaaccgcaacgucgacaagaacgccaacgccaacaacgccgucaagaacaacaacaacgaggagcccuccgacaagcacaucgaggaguaccucaagaagaucaagaacuccaucuccaccgaguggucccccugcuccgucaccugcggcaacggcauccagguccgcaucaagcccggcuccgccaacaagcccaaggacgagcucgacuacgagaacgacaucgagaagaagaucugcaagauggagaagugcuccuccgucuucaacgucgucaacuccuccaucggccucaucaugguccucuccuuccucuuccucaacuga

SEQ ID NO: 3861 - RNA, 1182 nt, Artificial Sequence
  derived and/or modified CDS sequence (opt2) from Pf(Yaounde)__AAN87578.1__CSP
augaugcgcaagcucgccauccucuccgucuccuccuuccucuucgucgaggcccucuuccaggaguaccagugcuacggcuccuccuccaacacccgcguccucaacgagcucaacuacgacaacgccggcaccaaccucuacaacgagcucgagaugaacuacuacggcaagcaggagaacugguacucccucaagaagaacucccgcucccucggcgagaacgacgacggcaacaacgaggacaacgagaagcuccgcaagcccaagcacaagaagcucaagcagcccggcgacggcaaccccgaccccaacgccaaccccaacgucgaccccaacgccaaccccaacgucgaccccaacgccaaccccaacgucgaccccaacgccaaccccaacgccaaccccaacgccaaccccaacgccaaccccaacgccaaccccaacgccaaccccaacgccaaccccaacgccaaccccaacgccaaccccaacgccaaccccaacgccaaccccaacgccaaccccaacgccaaccccaacgccaaccccaacgccaaccccaacgucgaccccaacgccaaccccaacgccaaccccaacgccaaccccaacgccaaccccaacgccaaccccaacgccaaccccaacgccaaccccaacgccaaccccaacgccaaccccaacgccaaccccaacgccaaccccaacgccaaccccaacgccaaccccaacgccaaccccaacgccaaccccaacgccaaccccaacgccaaccccaacgccaaccccaacgccaaccccaacaagaacaaccagggcaacggccagggccacaacaugcccaacgaccccaaccgcaacgucaacgagaacgccaacgccaacaacgccgucaagaacaacaacaacgaggagcccuccgacaagcacaucgagaaguaccucaaggagauccagaacucccucuccaccgaguggucccccugcuccgucaccugcggcaacggcauccagguccgcaucaagcccggcuccgccggcaagcccaagaacgagcucgacuacgagaacgacaucgagaagaagaucugcaagauggagaagugcuccuccgucuucaacgucgucaacuccuccaucggccucaucaugguccucuccuuccucuuccucaacuga

SEQ ID NO: 3862 - RNA, 1179 nt, Artificial Sequence
  derived and/or modified CDS sequence (opt2) from Pf(Asembo Bay)__AAN87607.1__CSP
augaugcgcaagcucgccauccucuccgucuccuccuuccucuucgucgaggcccucuuccaggaguaccagugcuacggcuccuccuccaacacccgcguccucaacgagcucaacuacgacaacgccggcaccaaccucuacaacgagcucgagaugaacuacuacggcaagcaggagaacugguacucccucaagaagaacucccgcucccucggcgagaacgacgacggcaacaacaacaacggcgacaacggccgcgagggcaaggacgaggacaagcgcgacggcaacaacgaggacaacgagaagcuccgcaagcccaagcacaagaagcucaagcagcccgccgacggcaaccccgaccccaacgccaaccccaacgucgaccccaacgccaaccccaacgucgaccccaacgccaaccccaacgccaaccccaacgccaaccccaacgccaaccccaacgccaaccccaacgccaaccccaacgccaaccccaacgccaaccccaacgccaaccccaacgccaaccccaacgccaaccccaacgccaaccccaacgucgaccccaacgccaaccccaacgccaaccccaacgccaaccccaacgccaaccccaacgccaaccccaacgccaaccccaacgccaaccccaacgccaaccccaacgccaaccccaacgccaaccccaacgccaaccccaacgccaaccccaacgccaaccccaacgccaaccccaacgccaaccccaacgccaaccccaacgccaaccccaacgccaaccccaacgccaaccccaacaagaacaaccagggcaacggccagggccacaacaugcccaacgaccccaaccgcaacgucgacgagaacgccaacgccaacaacgccgucaagaacaacaacaacgaggagcccuccgacaagcacaucgagcaguaccucaacaagaucaagaacuccaucuccaccgaguggucccccugcuccgucaccugcggcaacggcauccagguccgcaucaagcccggcuccgccaacaagcccaaggaccagcucgacuacgagaacgacaucgagaagaagaucugcaagauggagaagugcuccuccgucuucaacgucgucaacuccuccaucggccucaucaugguccucuccuuccucuuccucaacuga

SEQ ID NO: 3863 - RNA, 1179 nt, Artificial Sequence
  derived and/or modified CDS sequence (opt2) from Pf(Asembo Bay)__AAN87608.1__CSP
augaugcgcaagcucgccauccucuccgucuccuccuuccucuucgucgaggcccucuuccaggaguaccagugcuacggcuccuccuccaacacccgcguccucaacgagcucaacuacgacaacgccggcaccaaccucuacaacgagcucgagaugaacuacuacggcaagcaggagaacugguacucccucaagaagaacucccgcucccucggcgagaacgacgacggcaacaacaacaacggcgacaacggccgcgagggcaaggacgaggacaagcgcgacggcaacaacgaggacaacgagaagcuccgcaagcccaagcacaagaagcucaagcagcccgccgacggcaaccccgaccccaacgccaaccccaacgucgaccccaacgccaaccccaacgucgaccccaacgccaaccccaacgucgaccccaacgccaaccccaacgccaaccccaacgccaaccccaacgccaaccccaacgccaaccccaacgccaaccccaacgccaaccccaacgccaaccccaacgccaaccccaacgccaaccccaacgucgaccccaacgccaaccccaacgccaaccccaacgccaaccccaacgccaaccccaacgccaaccccaacgccaaccccaacgccaaccccaacgccaaccccaacgccaaccccaacgccaaccccaacgccaaccccaacgccaaccccaacgccaaccccaacgccaaccccaacgccaaccccaacgccaaccccaacgccaaccccaacgccaaccccaacgccaaccccaacaagaacaaccagggcaacggccagggccacaacaugcccaacgaccccaaccgcaacgucgacgagaacgccaacgccaacaacgccgucaagaacaacaacaacgaggagcccuccgacaagcacaucgagcaguaccucaagaucaucaagaacucccucuccaccgaguggucccccugcuccgucaccugcggcaacggcauccagguccgcaucaagcccggcuccgccaacaagcccaaggacgagcucgacuacgccaacgacaucgagaagaagaucugcaagauggagaagugcuccuccgucuucaacgucgucaacuccuccaucggccucaucaugguccucuccuuccucuuccucaacuga

SEQ ID NO: 3864 - RNA, 1179 nt, Artificial Sequence
  derived and/or modified CDS sequence (opt2) from Pf(Asembo Bay)__AAN87595.1__CSP
augaugcgcaagcucgccauccucuccgucuccuccuuccucuucgucgaggcccucuuccaggaguaccagugcuacggcuccuccuccaacacccgcguccucaacgagcucaacuacgacaacgccggcaccaaccucuacaacgagcucgagaugaacuacuacggcaagcaggagaacugguacucccucaagaagaacucccgcucccucggcgagaacgacgacggcaacaacaacaacggcgacaacggccgcgagggcaaggacgaggacaagcgcgacggcaacaacgaggacaacgagaagcuccgcaagcccaagcacaagaagcucaagcagcccgccgacggcaaccccgaccccaacgccaaccccaacgucgaccccaacgccaaccccaacgucgaccccaacgccaaccccaacgucgaccccaacgccaaccccaacgccaaccccaacgccaaccccaacgccaaccccaacgccaaccccaacgccaaccccaacgccaaccccaacgccaaccccaacgccaaccccaacgccaaccccaacgucgaccccaacgccaaccccaacgccaaccccaacgccaaccccaacgccaaccccaacgccaaccccaacgccaaccccaacgccaaccccaacgccaaccccaacgccaaccccaacgccaaccccaacgccaaccccaacgccaaccccaacgccaaccccaacgccaaccccaacgccaaccccaacgccaaccccaacgccaaccccaacgccaaccccaacgccaaccccaacaagaacaaccagggcaacggccagggccacaacaugcccaacgaccccaaccgcaacgucgacgagaacgccaacgccaacaacgccgucaagaacaacaacaacgaggagcccuccgacaagcacaucaccgaguaccucaagcgcauccagaacucccucuccaccgaguggucccccugcuccgucaccugcggcaacggcauccagguccgcaucaagcccggcuccgccggcaaguccaagaacgagcucgacuacgagaacgacaucgagaagaagaucugcaagauggagaagugcuccuccgucuucaacgucgucaacuccuccaucggccucaucaugguccucuccuuccucuuccucaacuga

SEQ ID NO: 3865 - RNA, 1179 nt, Artificial Sequence
  derived and/or modified CDS sequence (opt2) from Pf(India)__AAN87618.1__CSP
augaugcgcaagcucgccauccucuccgucuccuccuuccucuucgucgaggcccucuuccaggaguaccagugcuacggcuccuccuccaacacccgcguccucaacgagcucaacuacgacaacgccggcaccaaccucuacaacgagcucgagaugaacuacuacggcaagcaggagaacugguacucccucaagaagaacucccgcucccucggcgagaacgacgacggcaacaacaacaacggcgacaacggccgcgagggcaaggacgaggacaagcgcgacggcaacaacgaggacaacgagaagcuccgcaagcccaagcacaagaagcucaagcagcccggcggcgacaaccccgaccccaacgccaaccccaacgucgaccccaacgccaaccccaacgccaaccccaacgccaaccccaacgccaaccccaacgccaaccccaacgccaaccccaacgccaaccccaacgccaaccccaacgccaaccccaacgccaaccccaacgccaaccccaacgccaaccccaacgccaaccccaacgccaaccccaacgccaaccccaacgccaaccccaacgccaaccccaacgccaaccccaacgccaaccccaacgccaaccccaacgccaaccccaacgccaaccccaacgccaaccccaacgccaaccccaacgccaaccccaacgccaaccccaacgccaaccccaacgccaaccccaacgccaaccccaacgccaaccccaacgccaaccccaacgccaaccccaacgccaaccccaacgccaaccccaacaagaacaaccagggcaacggccagggccacaacaugcccaacgaccccaaccgcaacgucgacgagaacgccaacgccaacaacgccgucaagaacaacaacaacgaggagcccuccgacaagcacaucgagcaguaccucaagaagauccagaacucccucuccaccgaguggucccccugcuccgucaccugcggcaacggcauccagguccgcaucaagcccggcuccgccaacaagcccaaggacgagcucgacuacgagaacgacaucgagaagaagaucugcaagauggagaagugcuccuccgucuucaacgucgucaacuccuccaucggccucaucaugguccucuccuuccucuuccucaacuga

SEQ ID NO: 3866 - RNA, 1170 nt, Artificial Sequence
  derived and/or modified CDS sequence (opt2) from Pf(Asembo Bay)__AAN87585.1__CSP
augaugcgcaagcucgccauccucuccgucuccuccuuccucuucgucgaggcccucuuccaggaguaccagugcuacggcuccuccuccaacacccgcguccucaacgagcucaacuacgacaacgccggcaccaaccucuacaacgagcucgagaugaacuacuacggcaagcaggagaacugguacucccucaagaagaacucccgcucccucggcgagaacgacgacggcaacaacgaggacaacgagaagcuccgcaagcccaagcacaagaagcucaagcagcccgccgacggcaaccccgaccccaacgccaaccccaacgucgaccccaacgccaaccccaacgucgaccccaacgccaaccccaacgucgaccccaacgccaaccccaacgccaaccccaacgccaaccccaacgccaaccccaacgccaaccccaacgccaaccccaacgccaaccccaacgccaaccccaacgccaaccccaacgccaaccccaacgccaaccccaacgccaaccccaacgccaaccccaacgccaaccccaacgccaaccccaacgucgaccccaacgccaaccccaacgccaaccccaacgccaaccccaacgccaaccccaacgccaaccccaacgccaaccccaacgccaaccccaacgccaaccccaacgccaaccccaacgccaaccccaacgccaaccccaacgccaaccccaacgccaaccccaacgccaaccccaacgccaaccccaacgccaaccccaacgccaaccccaacgccaaccccaacaagaacaaccagggcaacggccagggccacaacaugcccaacgaccccaaccgcaacgucgacgagaacgccaacgccaacaacgccgucaagaacaacaacaacgaggagcccuccgaccagcacaucgagaaguaccucaagaccauccagaacucccucuccaccgaguggucccccugcuccgucaccugcggcaacggcauccagguccgcaucaagcccggcuccgccaacaagcccaaggaccagcucgacuacgccaacgacaucgagaagaagaucugcaagauggagaagugcuccuccgucuucaacgucgucaacuccuccaucggccucaucaugguccucuccuuccucuuccucaacuga

SEQ ID NO: 3867 - RNA, 1170 nt, Artificial Sequence
  derived and/or modified CDS sequence (opt2) from Pf(Asembo Bay)__AAN87577.1__CSP
augaugcgcaagcucgccauccucuccgucuccuccuuccucuucgucgaggcccucuuccaggaguaccagugcuacggcuccuccuccaacacccgcguccucaacgagcucaacuacgacaacgccggcaccaaccucuacaacgagcucgagaugaacuacuacggcaagcaggagaacugguacucccucaagaagaacucccgcucccucggcgagaacgacgacggcaacaacgaggacaacgagaagcuccgcaagcccaagcacaagaagcucaagcagcccggcgacggcaaccccgaccccaacgccaaccccaacgucgaccccaacgccaaccccaacgucgaccccaacgccaaccccaacgucgaccccaacgccaaccccaacgccaaccccaacgccaaccccaacgccaaccccaacgccaaccccaacgccaaccccaacgccaaccccaacgccaaccccaacgccaaccccaacgccaaccccaacgccaaccccaacgccaaccccaacgccaaccccaacgccaaccccaacgucgaccccaacgccaaccccaacgccaaccccaacgccaaccccaacgccaaccccaacgccaaccccaacgccaaccccaacgccaaccccaacgccaaccccaacgccaaccccaacgccaaccccaacgccaaccccaacgccaaccccaacgccaaccccaacgccaaccccaacgccaaccccaacgccaaccccaacgccaaccccaacgccaaccccaacgccaaccccaacaagaacaaccagggcaacggccagggccacaacaugcccaacgaccccaaccgcaacgucaacgagaacgccaacgccaacaacgccgucaagaacaacaacaacgaggagcccuccgacaagcacaucgagaaguaccucaaggagauccagaacucccucuccaccgaguggucccccugcuccgucaccugcggcaacggcauccagguccgcaucaagcccggcuccgccggcaagcccaagaacgagcucgacuacgagaacgacaucgagaagaagaucugcaagauggagaagugcuccuccgucuucaacgucgucaacuccuccaucggccucaucaugguccucuccuuccucuuccucaacuga

SEQ ID NO: 3868 - RNA, 1170 nt, Artificial Sequence
  derived and/or modified CDS sequence (opt2) from Pf(Gha1108-043)__BAM84815.1__CSP
augaugcgcaagcucgccauccucuccgucuccuccuuccucuucgucgaggcccucuuccaggaguaccagugcuacggcuccuccuccaacacccgcguccucaacgagcucaacuacgacaacgccggcaccaaccucuacaacgagcucgagaugaacuacuacggcaagcaggagaacugguacucccucaagaagaacucccgcucccucggcgagaacgacgacggcaacaacgaggacaacgagaagcuccgcaagcccaagcacaagaagcucaagcagcccggcgacggcaaccccgaccccaacgccaaccccaacgucgaccccaacgccaaccccaacgucgaccccaacgccaaccccaacgucgaccccaacgccaaccccaacgccaaccccaacgccaaccccaacgccaaccccaacgccaaccccaacgccaaccccaacgccaaccccaacgccaaccccaacgccaaccccaacgccaaccccaacgccaaccccaacgccaaccccaacgccaaccccaacgccaaccccaacgucgaccccaacgccaaccccaacgccaaccccaacgccaaccccaacgccaaccccaacgccaaccccaacgccaaccccaacgccaaccccaacgccaaccccaacgccaaccccaacgccaaccccaacgccaaccccaacgccaaccccaacgccaaccccaacgccaaccccaacgccaaccccaacgccaaccccaacgccaaccccaacgccaaccccaacgccaaccccaacaagaacaaccagggcaacggccagggccacaacaugcccaacgaccccaaccgcaacgucgacgagaacgccaacgccaacuccgccgucaagaacaacaacaacgaggagcccuccgacaagcacaucaaggaguaccucaacaagauccagaacucccucuccaccgaguggucccccugcuccgucaccugcggcaacggcauccagguccgcaucaagcccggcuccgccaacaagcccaaggacgagcucgacuacgccaacgacaucgagaagaagaucugcaagauggagaagugcuccuccgucuucaacgucgucaacuccuccaucggccucaucaugguccucuccuuccucuuccucaacuga

SEQ ID NO: 3869 - RNA, 1170 nt, Artificial Sequence
  derived and/or modified CDS sequence (opt2) from Pf(Gha1108-052)__BAM84816.1__CSP
augaugcgcaagcucgccauccucuccgucuccuccuuccucuucgucgaggcccucuuccaggaguaccagugcuacggcuccuccuccaacacccgcguccucaacgagcucaacuacgacaacgccggcaccaaccucuacaacgagcucgagaugaacuacuacggcaagcaggagaacugguacucccucaagaagaacucccgcucccucggcgagaacgacgacggcaacaacgaggacaacgagaagcuccgcaagcccaagcacaagaagcucaagcagcccgccgacggcaaccccgaccccaacgccaaccccaacgucgaccccaacgccaaccccaacgucgaccccaacgccaaccccaacgucgaccccaacgccaaccccaacgccaaccccaacgccaaccccaacgccaaccccaacgccaaccccaacgccaaccccaacgccaaccccaacgccaaccccaacgccaaccccaacgccaaccccaacgccaaccccaacgccaaccccaacgccaaccccaacgccaaccccaacgucgaccccaacgccaaccccaacgccaaccccaacgccaaccccaacgccaaccccaacgccaaccccaacgccaaccccaacgccaaccccaacgccaaccccaacgccaaccccaacgccaaccccaacgccaaccccaacgccaaccccaacgccaaccccaacgccaaccccaacgccaaccccaacgccaaccccaacgccaaccccaacgccaaccccaacgccaaccccaacaagaacaaccagggcaacggccagggccacaacaugcccaacgaccccaaccgcaacgucgacgagaacgccaacgccaacuccgccgucaagaacaacaacaacgaggagcccuccgacaagcacaucgagcaguaccucaagaccauccagaacucccucuccaccgaguggucccccugcuccgucaccugcggcaacggcauccagguccgcaucaagcccggcuccgccaacaagcccaaggaccagcucgacuacgagaacgacaucgagaagaagaucugcaagauggagaagugcuccuccgucuucaacgucgucaacuccuccaucggccucaucaugguccucuccuuccucuuccucaacuga

SEQ ID NO: 3870 - RNA, 1170 nt, Artificial Sequence
  derived and/or modified CDS sequence (opt2) from Pf(Gha1108-124)__BAM84812.1__CSP
augaugcgcaagcucgccauccucuccgucuccuccuuccucuucgucgaggcccucuuccaggaguaccagugcuacggcuccuccuccaacacccgcguccucaacgagcucaacuacgacaacgccggcaccaaccucuacaacgagcucgagaugaacuacuacggcaagcaggagaacugguacucccucaagaagaacucccgcucccucggcgagaacgacgacggcaacaacgaggacaacgagaagcuccgcaagcccaagcacaagaagcucaagcagcccgccgacggcaaccccgaccccaacgccaaccccaacgucgaccccaacgccaaccccaacgucgaccccaacgccaaccccaacgucgaccccaacgccaaccccaacgccaaccccaacgccaaccccaacgccaaccccaacgccaaccccaacgccaaccccaacgccaaccccaacgccaaccccaacgccaaccccaacgccaaccccaacgccaaccccaacgccaaccccaacgccaaccccaacgccaaccccaacgccaaccccaacgucgaccccaacgccaaccccaacgccaaccccaacgccaaccccaacgccaaccccaacgccaaccccaacgccaaccccaacgccaaccccaacgccaaccccaacgccaaccccaacgccaaccccaacgccaaccccaacgccaaccccaacgccaaccccaacgccaaccccaacgccaaccccaacgccaaccccaacgccaaccccaacgccaaccccaacaagaacaaccagggcaacggccagggccacaacaugcccaacgaccccaaccgcaacgucgacgagaacgccaacgccaacaacgccgucaagaacaacaacaacgaggagcccuccgaccagcacaucgagaaguaccucaacaagaucaagaacucccucuccaccgaguggucccccugcuccgucaccugcggcaacggcauccagguccgcaucaagcccggcuccgccaacaagcccaaggaccagcucgacuacgccaacgacaucgagaagaagaucugcaagauggagaagugcuccuccgucuucaacgucgucaacuccuccaucggccucaucaugguccucuccuuccucuuccucaacuga

SEQ ID NO: 3871 - RNA, 1170 nt, Artificial Sequence
  derived and/or modified CDS sequence (opt2) from Pf(Gha1109-003)__BAM84834.1__CSP
augaugcgcaagcucgccauccucuccgucuccuccuuccucuucgucgaggcccucuuccaggaguaccagugcuacggcuccuccuccaacacccgcguccucaacgagcucaacuacgacaacgccggcaccaaccucuacaacgagcucgagaugaacuacuacggcaagcaggagaacugguacucccucaagaagaacucccgcucccucggcgagaacgacgacggcaacaacgaggacaacgagaagcuccgcaagcccaagcacaagaagcucaagcagcccgccgacggcaaccccgaccccaacgccaaccccaacgucgaccccaacgccaaccccaacgucgaccccaacgccaaccccaacgucgaccccaacgccaaccccaacgccaaccccaacgccaaccccaacgccaaccccaacgccaaccccaacgccaaccccaacgccaaccccaacgccaaccccaacgccaaccccaacgccaaccccaacgccaaccccaacgccaaccccaacgccaaccccaacgccaaccccaacgucgaccccaacgccaaccccaacgccaaccccaacgccaaccccaacgccaaccccaacgccaaccccaacgccaaccccaacgccaaccccaacgccaaccccaacgccaaccccaacgccaaccccaacgccaaccccaacgccaaccccaacgccaaccccaacgccaaccccaacgccaaccccaacgccaaccccaacgccaaccccaacgccaaccccaacgccaaccccaacaagaacaaccagggcaacggccagggccacaacaugcccaacgaccccaaccgcaacgucgacgagaacgccaacgccaacgacgccgucaagaacaacaacaacgaggagcccuccgaccagcacaucgagaaguaccucaagaucaucaagaacucccucuccaccgaguggucccccugcuccgucaccugcggcaacggcauccagguccgcaucaagcccggcuccgccaacaagcccaaggaccagcucgacuacgccaacgacaucgagaagaagaucugcaagauggagaagugcuccuccgucuucaacgucgucaacuccuccaucggccucaucaugguccucuccuuccucuuccucaacuga

SEQ ID NO: 3872 - RNA, 1170 nt, Artificial Sequence
  derived and/or modified CDS sequence (opt2) from Pf(Gha1109-058)__BAM84835.1__CSP
augaugcgcaagcucgccauccucuccgucuccuccuuccucuucgucgaggcccucuuccaggaguaccagugcuacggcuccuccuccaacacccgcguccucaacgagcucaacuacgacaacgccggcaccaaccucuacaacgagcucgagaugaacuacuacggcaagcaggagaacugguacucccucaagaagaacucccgcucccucggcgagaacgacgacggcaacaacgaggacaacgagaagcuccgcaagcccaagcacaagaagcucaagcagcccggcgacggcaaccccgaccccaacgccaaccccaacgucgaccccaacgccaaccccaacgucgaccccaacgccaaccccaacgucgaccccaacgccaaccccaacgccaaccccaacgccaaccccaacgccaaccccaacgccaaccccaacgccaaccccaacgccaaccccaacgccaaccccaacgccaaccccaacgccaaccccaacgccaaccccaacgccaaccccaacgccaaccccaacgccaaccccaacgucgaccccaacgccaaccccaacgccaaccccaacgccaaccccaacgccaaccccaacgccaaccccaacgccaaccccaacgccaaccccaacgccaaccccaacgccaaccccaacgccaaccccaacgccaaccccaacgccaaccccaacgccaaccccaacgccaaccccaacgccaaccccaacgccaaccccaacgccaaccccaacgccaaccccaacgccaaccccaacaagaacaaccagggcaacggccagggccacaacaugcccaacgaccccaaccgcaacgucgacgagaacgccaacgccaacaacgccgucaagaacaacaacaacgaggagcccuccgacaagcacaucaccgaguaccucaagaagauccagaacucccucuccaccgaguggucccccugcuccgucaccugcggcaacggcauccagguccgcaucaagcccggcuccgccggcaaguccaagaacgagcucgacuacgagaacgacaucgagaagaagaucugcaagauggagaagugcuccuccgucuucaacgucgucaacuccuccaucggccucaucaugguccucuccuuccucuuccucaacuga

SEQ ID NO: 3873 - RNA, 1170 nt, Artificial Sequence
  derived and/or modified CDS sequence (opt2) from Pf(Gha1109-105)__BAM84822.1__CSP
augaugcgcaagcucgccauccucuccgucuccuccuuccucuucgucgaggcccucuuccaggaguaccagugcuacggcuccuccuccaacacccgcguccucaacgagcucaacuacgacaacgccggcaccaaccucuacaacgagcucgagaugaacuacuacggcaagcaggagaacugguacucccucaagaagaacucccgcucccucggcgagaacgacgacggcaacaacgaggacaacgagaagcuccgcaagcccaagcacaagaagcucaagcagcccgccgacggcaaccccgaccccaacgccaaccccaacgucgaccccaacgccaaccccaacgccaaccccaacgccaaccccaacgccaaccccaacgccaaccccaacgccaaccccaacgucgaccccaacgccaaccccaacgucgaccccaacgccaaccccaacgccaaccccaacgccaaccccaacgccaaccccaacgccaaccccaacgccaaccccaacgccaaccccaacgccaaccccaacgucgaccccaacgccaaccccaacgccaaccccaacgccaaccccaacgccaaccccaacgccaaccccaacgccaaccccaacgccaaccccaacgccaaccccaacgccaaccccaacgccaaccccaacgccaaccccaacgccaaccccaacgccaaccccaacgccaaccccaacgccaaccccaacgccaaccccaacgccaaccccaacgccaaccccaacgccaaccccaacgccaaccccaacaagaacaaccagggcaacggccagggccacaacaugcccaacgaccccaaccgcaacgucgacgagaacgccaaggccaacaacgccgucaagaacaacaacaacgaggagcccuccgacaagcacaucgagcaguaccucaagaccauccagaacucccucuccaccgaguggucccccugcuccgucaccugcggcaacggcauccagguccgcaucaagcccggcuccgccaacaagcccaaggaccagcucgacuacgagaacgacaucgagaagaagaucugcaagauggagaagugcuccuccgucuucaacgucgucaacuccuccaucggccucaucaugguccucuccuuccucuuccucaacuga

SEQ ID NO: 3874 - RNA, 1170 nt, Artificial Sequence
  derived and/or modified CDS sequence (opt2) from Pf(Gha1109-111)__BAM84823.1__CSP
augaugcgcaagcucgccauccucuccgucuccuccuuccucuucgucgaggcccucuuccaggaguaccagugcuacggcuccuccuccaacacccgcguccucaacgagcucaacuacgacaacgccggcaccaaccucuacaacgagcucgagaugaacuacuacggcaagcaggagaacugguacucccucaagaagaacucccgcucccucggcgagaacgacgacggcaacaacgaggacaacgagaagcuccgcaagcccaagcacaagaagcucaagcagcccggcgacggcaaccccgaccccaacgccaaccccaacgucgaccccaacgccaaccccaacgucgaccccaacgccaaccccaacgucgaccccaacgccaaccccaacgccaaccccaacgccaaccccaacgccaaccccaacgccaaccccaacgccaaccccaacgccaaccccaacgccaaccccaacgccaaccccaacgccaaccccaacgccaaccccaacgccaaccccaacgccaaccccaacgccaaccccaacgucgaccccaacgccaaccccaacgccaaccccaacgccaaccccaacgccaaccccaacgccaaccccaacgccaaccccaacgccaaccccaacgccaaccccaacgccaaccccaacgccaaccccaacgccaaccccaacgccaaccccaacgccaaccccaacgccaaccccaacgccaaccccaacgccaaccccaacgccaaccccaacgccaaccccaacgccaaccccaacaagaacaaccagggcaacggccagggccacaacaugcccaacgaccccaaccgcaacgucgacgagaacgccaacgccaacaacgccgucaagaacaacaacaacgaggagcccuccgacaagcacaucaaggaguaccucaacaagauccagaacuccaucuccaccgaguggucccccugcuccgucaccugcggcaacggcauccagguccgcaucaagcccggcuccgccgacaagcccaaggaccagcucgacuacaucaacgacaucgagaagaagaucugcaagauggagaagugcuccuccgucuucaacgucgucaacuccuccaucggccucaucaugguccucuccuuccucuuccucaacuga

SEQ ID NO: 3875 - RNA, 1170 nt, Artificial Sequence
  derived and/or modified CDS sequence (opt2) from Pf(Gha1109-125)__BAM84824.1__CSP
augaugcgcaagcucgccauccucuccgucuccuccuuccucuucgucgaggcccucuuccaggaguaccagugcuacggcuccuccuccaacacccgcguccucaacgagcucaacuacgacaacgccggcaccaaccucuacaacgagcucgagaugaacuacuacggcaagcaggagaacugguacucccucaagaagaacucccgcucccucggcgagaacgacgacggcaacaacgaggacaacgagaagcuccgcaagcccaagcacaagaagcucaagcagcccgccgacggcaaccccgaccccaacgccaaccccaacgucgaccccaacgccaaccccaacgucgaccccaacgccaaccccaacgucgaccccaacgccaaccccaacgccaaccccaacgccaaccccaacgccaaccccaacgccaaccccaacgccaaccccaacgccaaccccaacgccaaccccaacgccaaccccaacgccaaccccaacgccaaccccaacgccaaccccaacgccaaccccaacgccaaccccaacgccaaccccaacgucgaccccaacgccaaccccaacgccaaccccaacgccaaccccaacgccaaccccaacgccaaccccaacgccaaccccaacgccaaccccaacgccaaccccaacgccaaccccaacgccaaccccaacgccaaccccaacgccaaccccaacgccaaccccaacgccaaccccaacgccaaccccaacgccaaccccaacgccaaccccaacgccaaccccaacaagaacaaccagggcaacggccagggccacaacaugcccaacgaccccaaccgcaacgucgacgagaacgccaacgccaacaacgccgucaagaacaacaacaacgaggagcccuccgaccagcacaucgagaaguaccucaagaccaucaagaacucccucuccaccgaguggucccccugcuccgucaccugcggcaacggcauccagguccgcaucaagcccggcuccgccaacaagcccaaggaccagcucgacuacgccaacgacaucgagaagaagaucugcaagauggagaagugcuccuccgucuucaacgucgucaacuccuccaucggccucaucaugguccucuccuuccucuuccucaacuga

SEQ ID NO: 3876 - RNA, 1170 nt, Artificial Sequence
  derived and/or modified CDS sequence (opt2) from Pf(Gha1109-127)__BAM84825.1__CSP
augaugcgcaagcucgccauccucuccgucuccuccuuccucuucgucgaggcccucuuccaggaguaccagugcuacggcuccuccuccaacacccgcguccucaacgagcucaacuacgacaacgccggcaccaaccucuacaacgagcucgagaugaacuacuacggcaagcaggagaacugguacucccucaagaagaacucccgcucccucggcgagaacgacgacggcaacaacgaggacaacgagaagcuccgcaagcccaagcacaagaagcucaagcagcccggcgacggcaaccccgaccccaacgccaaccccaacgucgaccccaacgccaaccccaacgucgaccccaacgccaaccccaacgucgaccccaacgccaaccccaacgccaaccccaacgccaaccccaacgccaaccccaacgccaaccccaacgccaaccccaacgccaaccccaacgccaaccccaacgccaaccccaacgccaaccccaacgccaaccccaacgccaaccccaacgccaaccccaacgccaaccccaacgucgaccccaacgccaaccccaacgccaaccccaacgccaaccccaacgccaaccccaacgccaaccccaacgccaaccccaacgccaaccccaacgccaaccccaacgccaaccccaacgccaaccccaacgccaaccccaacgccaaccccaacgccaaccccaacgccaaccccaacgccaaccccaacgccaaccccaacgccaaccccaacgccaaccccaacgccaaccccaacaagaacaaccagggcaacggccagggccacaacaugcccaacgaccccaaccgcaacgucgacgagaacgccaacgccaacaacgccgucaagaacaacaacaacgaggagcccuccgacaagcacaucaccgaguaccucaagaagaucaagaacucccucuccaccgaguggucccccugcuccgucaccugcggcaacggcauccagguccgcaucaagcccggcuccgccggcaaguccaagaacgagcucgacuacgagaacgacaucgagaagaagaucugcaagauggagaagugcuccuccgucuucaacgucgucaacuccuccaucggccucaucaugguccucuccuuccucuuccucaacuga

SEQ ID NO: 3877 - RNA, 1170 nt, Artificial Sequence
  derived and/or modified CDS sequence (opt2) from Pf(Gha1109-158)__BAM84826.1__CSP
augaugcgcaagcucgccauccucuccgucuccuccuuccucuucgucgaggcccucuuccaggaguaccagugcuacggcuccuccuccaacacccgcguccucaacgagcucaacuacgacaacgccggcaccaaccucuacaacgagcucgagaugaacuacuacggcaagcaggagaacugguacucccucaagaagaacucccgcucccucggcgagaacgacgacggcaacaacgaggacaacgagaagcuccgcaagcccaagcacaagaagcucaagcagcccgccgacggcaaccccgaccccaacgccaaccccaacgucgaccccaacgccaaccccaacgucgaccccaacgccaaccccaacgucgaccccaacgccaaccccaacgccaaccccaacgccaaccccaacgccaaccccaacgccaaccccaacgccaaccccaacgccaaccccaacgccaaccccaacgccaaccccaacgccaaccccaacgccaaccccaacgccaaccccaacgccaaccccaacgccaaccccaacgucgaccccaacgccaaccccaacgccaaccccaacgccaaccccaacgccaaccccaacgccaaccccaacgccaaccccaacgccaaccccaacgccaaccccaacgccaaccccaacgccaaccccaacgccaaccccaacgccaaccccaacgccaaccccaacgccaaccccaacgccaaccccaacgccaaccccaacgccaaccccaacgccaaccccaacgccaaccccaacaagaacaaccagggcaacggccagggccacaacaugcccaacgaccccaaccgcaacgucgacgagaacgccaacgccaacaacgccgucaagaacaacaacaacgaggagcccuccgacaagcacaucgagcaguaccucaagaccaucaagaacucccucuccaccgaguggucccccugcuccgucaccugcggcaacggcauccagguccgcaucaagcccggcuccgccaacaagcccaaggaccagcucgacuacgccaacgacaucgagaagaagaucugcaagauggagaagugcuccuccgucuucaacgucgucaacuccuccaucggccucaucaugguccucuccuuccucuuccucaacuga

SEQ ID NO: 3878 - RNA, 1170 nt, Artificial Sequence
  derived and/or modified CDS sequence (opt2) from Pf(Gha1109-205)__BAM84832.1__CSP
augaugcgcaagcucgccauccucuccgucuccuccuuccucuucgucgaggcccucuuccaggaguaccagugcuacggcuccuccuccaacacccgcguccucaacgagcucaacuacgacaacgccggcaccaaccucuacaacgagcucgagaugaacuacuacggcaagcaggagaacugguacucccucaagaagaacucccgcucccucggcgagaacgacgacggcaacaacgaggacaacgagaagcuccgcaagcccaagcacaagaagcucaagcagcccgccgacggcaaccccgaccccaacgccaaccccaacgucgaccccaacgccaaccccaacgucgaccccaacgccaaccccaacgucgaccccaacgccaaccccaacgccaaccccaacgccaaccccaacgccaaccccaacgccaaccccaacgccaaccccaacgccaaccccaacgccaaccccaacgccaaccccaacgccaaccccaacgccaaccccaacgccaaccccaacgccaaccccaacgccaaccccaacgucgaccccaacgccaaccccaacgccaaccccaacgccaaccccaacgccaaccccaacgccaaccccaacgccaaccccaacgccaaccccaacgccaaccccaacgccaaccccaacgccaaccccaacgccaaccccaacgccaaccccaacgccaaccccaacgccaaccccaacgccaaccccaacgccaaccccaacgccaaccccaacgccaaccccaacgccaaccccaacaagaacaaccagggcaacggccagggccacaacaugcccaacgaccccaaccgcaacgucgacgagaacgccaacgccaacaacgccgucaagaacaacaacaacgaggagcccuccgaccagcacaucgagaaguaccucaagaucauccagaacucccucuccaccgaguggucccccugcuccgucaccugcggcaacggcauccagguccgcaucaagcccggcuccgccaacaagcccaaggaccagcucgacuacgccaacgacaucgagaagaagaucugcaagauggagaagugcuccuccgucuucaacgucgucaacuccuccaucggccucaucaugguccucuccuuccucuuccucaacuga

SEQ ID NO: 3879 - RNA, 1170 nt, Artificial Sequence
  derived and/or modified CDS sequence (opt2) from Pf(T9/96)__BAD73957.1__CSP
augaugcgcaagcucgccauccucuccgucuccuccuuccucuucgucgaggcccucuuccaggaguaccagugcuacggcuccuccuccaacacccgcguccucaacgagcucaacuacgacaacgccggcaccaaccucuacaacgagcucgagaugaacuacuacggcaagcaggagaacugguacucccucaagaagaacucccgcucccucggcgagaacgacgacggcaacaacgaggacaacgagaagcuccgcaagcccaagcacaagaagcucaagcagcccgccgacggcaaccccgaccccaacgccaaccccaacgucgaccccaacgccaaccccaacgucgaccccaacgccaaccccaacgucgaccccaacgccaaccccaacgccaaccccaacgccaaccccaacgccaaccccaacgccaaccccaacgccaaccccaacgccaaccccaacgccaaccccaacgccaaccccaacgccaaccccaacgccaaccccaacgccaaccccaacgccaaccccaacgccaaccccaacgucgaccccaacgccaaccccaacgccaaccccaacgccaaccccaacgccaaccccaacgccaaccccaacgccaaccccaacgccaaccccaacgccaaccccaacgccaaccccaacgccaaccccaacgccaaccccaacgccaaccccaacgccaaccccaacgccaaccccaacgccaaccccaacgccaaccccaacgccaaccccaacgccaaccccaacgccaaccccaacaagaacaaccagggcaacggccagggccacaacaugcccaacgaccccaaccgcaacgucgacgagaacgccaacgccaacaacgccgucaagaacaacaacaacgaggagcccuccgacaagcacaucgagcaguaccucaagaccaucaagaacucccucuccaccgaguggucccccugcuccgucaccugcggcaacggcauccagguccgcaucaagcccggcuccgccaacaagcccaaggacgagcucgacuacgccaacgacaucgagaagaagaucugcaagauggagaagugcuccuccgucuucaacgucgucaacuccuccaucggccucaucaugguccucuccuuccucuuccucaacuga

SEQ ID NO: 3880 - RNA, 1170 nt, Artificial Sequence
  derived and/or modified CDS sequence (opt2) from Pf(Tz93-015)__BAM84752.1__CSP
augaugcgcaagcucgccauccucuccgucuccuccuuccucuucgucgaggcccucuuccaggaguaccagugcuacggcuccuccuccaacacccgcguccucaacgagcucaacuacgacaacgccggcaccaaccucuacaacgagcucgagaugaacuacuacggcaagcaggagaacugguacucccucaagaagaacucccgcucccucggcgagaacgacgacggcaacaacgaggacaacgagaagcuccgcaagcccaagcacaagaagcucaagcagcccggcgacggcaaccccgaccccaacgccaaccccaacgucgaccccaacgccaaccccaacgucgaccccaacgccaaccccaacgucgaccccaacgccaaccccaacgccaaccccaacgccaaccccaacgccaaccccaacgccaaccccaacgccaaccccaacgccaaccccaacgccaaccccaacgccaaccccaacgccaaccccaacgccaaccccaacgccaaccccaacgccaaccccaacgccaaccccaacgucgaccccaacgccaaccccaacgccaaccccaacgccaaccccaacgccaaccccaacgccaaccccaacgccaaccccaacgccaaccccaacgccaaccccaacgccaaccccaacgccaaccccaacgccaaccccaacgccaaccccaacgccaaccccaacgccaaccccaacgccaaccccaacgccaaccccaacgccaaccccaacgccaaccccaacgccaaccccaacaagaacaaccagggcaacggccagggccacaacaugcccaacgaccccaaccgcaacgucgacgagaacgccaacgccaacgacgccgucaagaacaacaacaacgaggagcccuccgaccagcacaucgagaaguaccucaagaucaucaagaacucccucuccaccgaguggucccccugcuccgucaccugcggcaacggcauccagguccgcaucaagcccggcuccgccaacaagcccaaggaccagcucgacuacgccaacgacaucgagaagaagaucugcaagauggagaagugcuccuccgucuucaacgucgucaacuccuccaucggccucaucaugguccucuccuuccucuuccucaacuga

SEQ ID NO: 3881 - RNA, 1170 nt, Artificial Sequence
  derived and/or modified CDS sequence (opt2) from Pf(Tz93-050)__BAM84762.1__CSP
augaugcgcaagcucgccauccucuccgucuccuccuuccucuucgucgaggcccucuuccaggaguaccagugcuacggcuccuccuccaacacccgcguccucaacgagcucaacuacgacaacgccggcaccaaccucuacaacgagcucgagaugaacuacuacggcaagcaggagaacugguacucccucaagaagaacucccgcucccucggcgagaacgacgacggcaacaacgaggacaacgagaagcuccgcaagcccaagcacaagaagcucaagcagcccggcgacggcaaccccgaccccaacgccaaccccaacgucgaccccaacgccaaccccaacgucgaccccaacgccaaccccaacgucgaccccaacgccaaccccaacgccaaccccaacgccaaccccaacgccaaccccaacgccaaccccaacgccaaccccaacgccaaccccaacgccaaccccaacgccaaccccaacgccaaccccaacgccaaccccaacgccaaccccaacgccaaccccaacgccaaccccaacgucgaccccaacgccaaccccaacgccaaccccaacgccaaccccaacgccaaccccaacgccaaccccaacgccaaccccaacgccaaccccaacgccaaccccaacgccaaccccaacgccaaccccaacgccaaccccaacgccaaccccaacgccaaccccaacgccaaccccaacgccaaccccaacgccaaccccaacgccaaccccaacgccaaccccaacgccaaccccaacaagaacaaccagggcaacggccagggccacaacaugcccaacgaccccaaccgcaacgucgacgagaacgccaacgccaacaaccccgucaagaacaacaacaacgaggagcccuccgacaagcacaucaccgaguaccucaagaagaucaagaacuccaucuccaccgaguggucccccugcuccgucaccugcggcaacggcauccagguccgcaucaagcccggcuccgccaacaagcccaaggacgagcucgacuacgagaacgacaucgagaagaagaucugcaagauggagaagugcuccuccgucuucaacgucgucaacuccuccaucggccucaucaugguccucuccuuccucuuccucaacuga

SEQ ID NO: 3882 - RNA, 1170 nt, Artificial Sequence
  derived and/or modified CDS sequence (opt2) from Pf(Tz93-105)__BAM84774.1__CSP
augaugcgcaagcucgccauccucuccgucuccuccuuccucuucgucgaggcccucuuccaggaguaccagugcuacggcuccuccuccaacacccgcguccucaacgagcucaacuacgacaacgccggcaccaaccucuacaacgagcucgagaugaacuacuacggcaagcaggagaacugguacucccucaagaagaacucccgcucccucggcgagaacgacgacggcaacaacgaggacaacgagaagcuccgcaagcccaagcacaagaagcucaagcagcccggcgacggcaaccccgaccccaacgccaaccccaacgucgaccccaacgccaaccccaacgucgaccccaacgccaaccccaacgucgaccccaacgccaaccccaacgccaaccccaacgccaaccccaacgccaaccccaacgccaaccccaacgccaaccccaacgccaaccccaacgccaaccccaacgccaaccccaacgccaaccccaacgccaaccccaacgccaaccccaacgccaaccccaacgccaaccccaacgucgaccccaacgccaaccccaacgccaaccccaacgccaaccccaacgccaaccccaacgccaaccccaacgccaaccccaacgccaaccccaacgccaaccccaacgccaaccccaacgccaaccccaacgccaaccccaacgccaaccccaacgccaaccccaacgccaaccccaacgccaaccccaacgccaaccccaacgccaaccccaacgccaaccccaacgccaaccccaacaagaacaaccagggcaacggccagggccacaacaugcccaacgaccccaaccgcaacgucgacgagaacgccaacgccaacaacgccgucaagaacaacaacaacgaggagcccuccgaccagcacaucgagaaguaccucaagaucauccagaacucccucuccaccgaguggucccccugcuccgucaccugcggcaacggcauccagguccgcaucaagcccggcuccgccaacaagcccaaggaccagcucgacuacgccaacgacaucgagaagaagaucugcaagauggagaagugcuccuccgucuucaacgucgucaacuccuccaucggccucaucaugguccucuccuuccucuuccucaacuga

SEQ ID NO: 3883 - RNA, 1170 nt, Artificial Sequence
  derived and/or modified CDS sequence (opt2) from Pf(Tz93-121)__BAM84777.1__CSP
augaugcgcaagcucgccauccucuccgucuccuccuuccucuucgucgaggcccucuuccaggaguaccagugcuacggcuccuccuccaacacccgcguccucaacgagcucaacuacgacaacgccggcaccaaccucuacaacgagcucgagaugaacuacuacggcaagcaggagaacugguacucccucaagaagaacucccgcucccucggcgagaacgacgacggcaacaacgaggacaacgagaagcuccgcaagcccaagcacaagaagcucaagcagcccggcgacggcaaccccgaccccaacgccaaccccaacgucgaccccaacgccaaccccaacgucgaccccaacgccaaccccaacgucgaccccaacgccaaccccaacgccaaccccaacgccaaccccaacgccaaccccaacgccaaccccaacgccaaccccaacgccaaccccaacgccaaccccaacgccaaccccaacgccaaccccaacgccaaccccaacgucgaccccaacgccaaccccaacgccaaccccaacgccaaccccaacgccaaccccaacgccaaccccaacgccaaccccaacgccaaccccaacgccaaccccaacgccaaccccaacgccaaccccaacgccaaccccaacgccaaccccaacgccaaccccaacgccaaccccaacgccaaccccaacgccaaccccaacgccaaccccaacgccaaccccaacgccaaccccaacgccaaccccaacgccaaccccaacgccaaccccaacaagaacaaccagggcaacggccagggccacaacaugcccaacgaccccaaccgcaacgucgacgagaacgccaacgccaacaacgccgucaagaacaacaacaacgaggagcccuccgaccagcacaucgagaaguaccucaagaagaucaagaacuccaucuccaccgaguggucccccugcuccgucaccugcggcaacggcauccagguccgcaucaagcccggcuccgccaacaagcccaaggacgagcucgacuacgagaacgacaucgagaagaagaucugcaagauggagaagugcuccuccgucuucaacgucgucaacuccuccaucggccucaucaugguccucuccuuccucuuccucaacuga

SEQ ID NO: 3884 - RNA, 1170 nt, Artificial Sequence
  derived and/or modified CDS sequence (opt2) from Pf(Tz98-032)__BAM84786.1__CSP
augaugcgcaagcucgccauccucuccgucuccuccuuccucuucgucgaggcccucuuccaggaguaccagugcuacggcuccuccuccaacacccgcguccucaacgagcucaacuacgacaacgccggcaccaaccucuacaacgagcucgagaugaacuacuacggcaagcaggagaacugguacucccucaagaagaacucccgcucccucggcgagaacgacgacggcaacaacgaggacaacgagaagcuccgcaagcccaagcacaagaagcucaagcagcccgccgacggcaaccccgaccccaacgccaaccccaacgucgaccccaacgccaaccccaacgucgaccccaacgccaaccccaacgucgaccccaacgccaaccccaacgccaaccccaacgccaaccccaacgccaaccccaacgccaaccccaacgccaaccccaacgccaaccccaacgccaaccccaacgccaaccccaacgccaaccccaacgccaaccccaacgccaaccccaacgccaaccccaacgccaaccccaacgccaaccccaacgucgaccccaacgccaaccccaacgccaaccccaacgccaaccccaacgccaaccccaacgccaaccccaacgccaaccccaacgccaaccccaacgccaaccccaacgccaaccccaacgccaaccccaacgccaaccccaacgccaaccccaacgccaaccccaacgccaaccccaacgccaaccccaacgccaaccccaacgccaaccccaacgccaaccccaacaagaacaaccagggcaacggccagggccacaacaugcccaacgaccccaaccgcaacgucgacgagaacgccaacgccaacaacgccgucaagaacaacaacaacgaggagcccuccgacaagcacaucgagcaguaccucaacaagaucaagaacuccaucuccaccgaguggucccccugcuccgucaccugcggcaacggcauccagguccgcaucaagcccggcuccgccaacaagcccaaggacgagcucaacuacgagaacgacaucgagaagaagaucugcaagauggagaagugcuccuccgucuucaacgucgucaacuccuccaucggccucaucaugguccucuccuuccucuuccucaacuga

SEQ ID NO: 3885 - RNA, 1170 nt, Artificial Sequence
  derived and/or modified CDS sequence (opt2) from Pf(Tz98-107)__BAM84796.1__CSP
augaugcgcaagcucgccauccucuccgucuccuccuuccucuucgucgaggcccucuuccaggaguaccagugcuacggcuccuccuccaacacccgcguccucaacgagcucaacuacgacaacgccggcaccaaccucuacaacgagcucgagaugaacuacuacggcaagcaggagaacugguacucccucaagaagaacucccgcucccucggcgagaacgacgacggcaacaacgaggacaacgagaagcuccgcaagcccaagcacaagaagcucaagcagcccgccgacggcaaccccgaccccaacgccaaccccaacgucgaccccaacgccaaccccaacgucgaccccaacgccaaccccaacgucgaccccaacgccaaccccaacgccaaccccaacgccaaccccaacgccaaccccaacgccaaccccaacgccaaccccaacgccaaccccaacgccaaccccaacgccaaccccaacgccaaccccaacgccaaccccaacgccaaccccaacgccaaccccaacgccaaccccaacgucgaccccaacgccaaccccaacgccaaccccaacgccaaccccaacgccaaccccaacgccaaccccaacgccaaccccaacgccaaccccaacgccaaccccaacgccaaccccaacgccaaccccaacgccaaccccaacgccaaccccaacgccaaccccaacgccaaccccaacgccaaccccaacgccaaccccaacgccaaccccaacgccaaccccaacgccaaccccaacaagaacaaccagggcaacggccagggccacaacaugcccaacgaccccaaccgcaacgucgacgagaacgccaacgccaacaacgccgucaagaacaacaacaacgaggagcccuccgaccagcacaucgagaaguaccucaagcgcauccagaacucccucuccaccgaguggucccccugcuccgucaccugcggcaacggcauccagguccgcaucaagcccggcuccgccaacaagcccaaggaccagcucgacuacgccaacgacaucgagaagaagaucugcaagauggagaagugcuccuccgucuucaacgucgucaacuccuccaucggccucaucaugguccucuccuuccucuuccucaacuga

SEQ ID NO: 3886 - RNA, 1167 nt, Artificial Sequence
  derived and/or modified CDS sequence (opt2) from Pf(Asembo Bay)__AAN87599.1__CSP
augaugcgcaagcucgccauccucuccgucuccuccuuccucuucgucgaggcccucuuccaggaguaccagugcuacggcuccuccuccaacacccgcguccucaacgagcucaacuacgacaacgccggcaccaaccucuacaacgagcucgagaugaacuacuacggcaagcaggagaacugguacucccucaagaagaacucccgcucccucggcgagaacgacgacggcaacaacaacaacggcgacaacggccgcgagggcaaggacgaggacaagcgcgacggcaacaacgaggacaacgagaagcuccgcaagcccaagcacaagaagcucaagcagcccgccgacggcaaccccgaccccaacgccaaccccaacgucgaccccaacgccaaccccaacgucgaccccaacgccaaccccaacgucgaccccaacgccaaccccaacgccaaccccaacgccaaccccaacgccaaccccaacgccaaccccaacgccaaccccaacgccaaccccaacgccaaccccaacgccaaccccaacgucgaccccaacgccaaccccaacgccaaccccaacgccaaccccaacgccaaccccaacgccaaccccaacgccaaccccaacgccaaccccaacgccaaccccaacgccaaccccaacgccaaccccaacgccaaccccaacgccaaccccaacgccaaccccaacgccaaccccaacgccaaccccaacgccaaccccaacgccaaccccaacgccaaccccaacgccaaccccaacaagaacaaccagggcaacggccagggccacaacaugcccaacgaccccaaccgcaacgucgacgagaacgccaacgccaacaacgccgucaagaacaacaacaacgaggagcccuccgacaagcacaucgagcaguaccucaacaagauccagaacucccucuccaccgaguggucccccugcuccgucaccugcggcaacggcauccagguccgcaucaagcccggcuccgccaacaagcccaaggaccagcucgacuacgccaacgacaucgagaagaagaucugcaagauggagaagugcuccuccgucuucaacgucgucaacuccuccaucggccucaucaugguccucuccuuccucuuccucaacuga

SEQ ID NO: 3887 - RNA, 1158 nt, Artificial Sequence
  derived and/or modified CDS sequence (opt2) from Pf(Asembo Bay)__AAN87581.1__CSP
augaugcgcaagcucgccauccucuccgucuccuccuuccucuucgucgaggcccucuuccaggaguaccagugcuacggcuccuccuccaacacccgcguccucaacgagcucaacuacgacaacgccggcaccaaccucuacaacgagcucgagaugaacuacuacggcaagcaggagaacugguacucccucaagaagaacucccgcucccucggcgagaacgacgacggcaacaacgaggacaacgagaagcuccgcaagcccaagcacaagaagcucaagcagcccgccgacggcaaccccgaccccaacgccaaccccaacgucgaccccaacgccaaccccaacgucgaccccaacgccaaccccaacgucgaccccaacgccaaccccaacgccaaccccaacgccaaccccaacgccaaccccaacgccaaccccaacgccaaccccaacgccaaccccaacgccaaccccaacgccaaccccaacgccaaccccaacgccaaccccaacgccaaccccaacgccaaccccaacgucgaccccaacgccaaccccaacgccaaccccaacgccaaccccaacgccaaccccaacgccaaccccaacgccaaccccaacgccaaccccaacgccaaccccaacgccaaccccaacgccaaccccaacgccaaccccaacgccaaccccaacgccaaccccaacgccaaccccaacgccaaccccaacgccaaccccaacgccaaccccaacgccaaccccaacgccaaccccaacaagaacaaccagggcaacggccagggccacaacaugcccaacgaccccaaccgcaacgucgacgagaacgccaaggccaacaacgccgucaagaacaacaacaacgaggagcccuccgacaagcacaucaagcaguaccucaagaagauccagaacuccaucuccaccgaguggucccccugcuccgucaccugcggcaacggcauccagguccgcaucaagcccggcuccgccgacaagcccaaggaccagcucgacuacgacaacgacaucgagaagaagaucugcaagauggagaagugcuccuccgucuucaacgucgucaacuccuccaucggccucaucaugguccucuccuuccucuuccucaacuga

SEQ ID NO: 3888 - RNA, 1158 nt, Artificial Sequence
  derived and/or modified CDS sequence (opt2) from Pf(Gha1108-115)__BAM84810.1__CSP
augaugcgcaagcucgccauccucuccgucuccuccuuccucuucgucgaggcccucuuccaggaguaccagugcuacggcuccuccuccaacacccgcguccucaacgagcucaacuacgacaacgccggcaccaaccucuacaacgagcucgagaugaacuacuacggcaagcaggagaacugguacucccucaagaagaacucccgcucccucggcgagaacgacgacggcaacaacgaggacaacgagaagcuccgcaagcccaagcacaagaagcucaagcagcccgccgacggcaaccccgaccccaacgccaaccccaacgucgaccccaacgccaaccccaacgucgaccccaacgccaaccccaacgucgaccccaacgccaaccccaacgccaaccccaacgccaaccccaacgccaaccccaacgccaaccccaacgccaaccccaacgccaaccccaacgccaaccccaacgccaaccccaacgccaaccccaacgucgaccccaacgccaaccccaacgccaaccccaacgccaaccccaacgccaaccccaacgccaaccccaacgccaaccccaacgccaaccccaacgccaaccccaacgccaaccccaacgccaaccccaacgccaaccccaacgccaaccccaacgccaaccccaacgccaaccccaacgccaaccccaacgccaaccccaacgccaaccccaacgccaaccccaacgccaaccccaacgccaaccccaacgccaaccccaacgccaaccccaacaagaacaaccagggcaacggccagggccacaacaugcccaacgaccccaaccgcaacgucgacgagaacgccaacgccaacaacgccgucaagaacaacaacaacgaggagcccuccgaccagcacaucgagaaguaccuccagaagauccagaacucccucuccaccgaguggucccccugcuccgucaccugcggcaacggcauccagguccgcaucaagcccggcuccgccaacaagcccaaggaccagcucaacuacgagaacgacaucgagaagaagaucugcaagauggagaagugcuccuccgucuucaacgucgucaacuccuccaucggccucaucaugguccucuccuuccucuuccucaacuga

SEQ ID NO: 3889 - RNA, 1158 nt, Artificial Sequence
  derived and/or modified CDS sequence (opt2) from Pf(Gha1108-119)__BAM84811.1__CSP
augaugcgcaagcucgccauccucuccgucuccuccuuccucuucgucgaggcccucuuccaggaguaccagugcuacggcuccuccuccaacacccgcguccucaacgagcucaacuacgacaacgccggcaccaaccucuacaacgagcucgagaugaacuacuacggcaagcaggagaacugguacucccucaagaagaacucccgcucccucggcgagaacgacgacggcaacaacgaggacaacgagaagcuccgcaagcccaagcacaagaagcucaagcagcccggcgacggcaaccccgaccccaacgccaaccccaacgucgaccccaacgccaaccccaacgucgaccccaacgccaaccccaacgucgaccccaacgccaaccccaacgccaaccccaacgccaaccccaacgccaaccccaacgccaaccccaacgccaaccccaacgccaaccccaacgccaaccccaacgccaaccccaacgccaaccccaacgccaaccccaacgccaaccccaacgccaaccccaacgucgaccccaacgccaaccccaacgccaaccccaacgccaaccccaacgccaaccccaacgccaaccccaacgccaaccccaacgccaaccccaacgccaaccccaacgccaaccccaacgccaaccccaacgccaaccccaacgccaaccccaacgccaaccccaacgccaaccccaacgccaaccccaacgccaaccccaacgccaaccccaacgccaaccccaacgccaaccccaacaagaacaaccagggcaacggccagggccacaacaugcccaacgaccccaaccgcaacgucgacgagaacgccaacgccaacaacgccgucaagaacaacaacaacgaggagcccuccgaccagcacaucgagaaguaccucaagaccaucaagaacucccucuccaccgaguggucccccugcuccgucaccugcggcaacggcauccagguccgcaucaagcccggcuccgccaacaagcccaaggaccagcucgacuacgagaacgacaucgagaagaagaucugcaagauggagaagugcuccuccgucuucaacgucgucaacuccuccaucggccucaucaugguccucuccuuccucuuccucaacuga

SEQ ID NO: 3890 - RNA, 1158 nt, Artificial Sequence
  derived and/or modified CDS sequence (opt2) from Pf(Gha1109-071)__BAM84836.1__CSP
augaugcgcaagcucgccauccucuccgucuccuccuuccucuucgucgaggcccucuuccaggaguaccagugcuacggcuccuccuccaacacccgcguccucaacgagcucaacuacgacaacgccggcaccaaccucuacaacgagcucgagaugaacuacuacggcaagcaggagaacugguacucccucaagaagaacucccgcucccucggcgagaacgacgacggcaacaacgaggacaacgagaagcuccgcaagcccaagcacaagaagcucaagcagcccggcgacggcaaccccgaccccaacgccaaccccaacgucgaccccaacgccaaccccaacgucgaccccaacgccaaccccaacgucgaccccaacgccaaccccaacgccaaccccaacgccaaccccaacgccaaccccaacgccaaccccaacgccaaccccaacgccaaccccaacgccaaccccaacgccaaccccaacgccaaccccaacgccaaccccaacgccaaccccaacgccaaccccaacgccaaccccaacgucgaccccaacgccaaccccaacgccaaccccaacgccaaccccaacgccaaccccaacgccaaccccaacgccaaccccaacgccaaccccaacgccaaccccaacgccaaccccaacgccaaccccaacgccaaccccaacgccaaccccaacgccaaccccaacgccaaccccaacgccaaccccaacgccaaccccaacgccaaccccaacgccaaccccaacaagaacaaccagggcaacggccagggccacaacaugcccaacgaccccaaccgcaacgucgacgagaacgccaacgccaacaacgccgucaagaacaacaacaacgaggagcccuccgaccagcacaucgagaaguacaucaagaagauccagaacucccucuccaccgaguggucccccugcuccgucaccugcggcaacggcauccagguccgcaucaagcccggcuccgccaacaagcccaaggacgagcucaacuacgagaacgacaucgagaagaagaucugcaagauggagaagugcuccuccgucuucaacgucgucaacuccuccaucggccucaucaugguccucuccuuccucuuccucaacuga

SEQ ID NO: 3891 - RNA, 1158 nt, Artificial Sequence
  derived and/or modified CDS sequence (opt2) from Pf(Gha1109-163)__BAM84827.1__CSP
augaugcgcaagcucgccauccucuccgucuccuccuuccucuucgucgaggcccucuuccaggaguaccagugcuacggcuccuccuccaacacccgcguccucaacgagcucaacuacgacaacgccggcaccaaccucuacaacgagcucgagaugaacuacuacggcaagcaggagaacugguacucccucaagaagaacucccgcucccucggcgagaacgacgacggcaacaacgaggacaacgagaagcuccgcaagcccaagcacaagaagcucaagcagcccgccgacggcaaccccgaccccaacgccaaccccaacgucgaccccaacgccaaccccaacgucgaccccaacgccaaccccaacgucgaccccaacgccaaccccaacgccaaccccaacgccaaccccaacgccaaccccaacgccaaccccaacgccaaccccaacgccaaccccaacgccaaccccaacgccaaccccaacgccaaccccaacgccaaccccaacgccaaccccaacgccaaccccaacgccaaccccaacgucgaccccaacgccaaccccaacgccaaccccaacgccaaccccaacgccaaccccaacgccaaccccaacgccaaccccaacgccaaccccaacgccaaccccaacgccaaccccaacgccaaccccaacgccaaccccaacgccaaccccaacgccaaccccaacgccaaccccaacgccaaccccaacgccaaccccaacgccaaccccaacgccaaccccaacaagaacaaccagggcaacggccagggccacaacaugcccaacgaccccaaccgcaacgucgacgagaacgccaacgccaacaacgccgucaagaacaacaacaacgaggagcccuccgaccagcacaucgagaaguaccucaagaccauccagaacucccucuccaccgaguggucccccugcuccgucaccugcggcaacggcauccagguccgcaucaagcccggcuccgccaacaagcccaaggaccagcucgacuacgccaacgacaucgagaagaagaucugcaagauggagaagugcuccuccgucuucaacgucgucaacuccuccaucggccucaucaugguccucuccuuccucuuccucaacuga

SEQ ID NO: 3892 - RNA, 1158 nt, Artificial Sequence
  derived and/or modified CDS sequence (opt2) from Pf(Tz93-007)__BAM84748.1__CSP
augaugcgcaagcucgccauccucuccgucuccuccuuccucuucgucgaggcccucuuccaggaguaccagugcuacggcuccuccuccaacacccgcguccucaacgagcucaacuacgacaacgccggcaccaaccucuacaacgagcucgagaugaacuacuacggcaagcaggagaacugguacucccucaagaagaacucccgcucccucggcgagaacgacgacggcaacaacgaggacaacgagaagcuccgcaagcccaagcacaagaagcucaagcagcccgccgacggcaaccccgaccccaacgccaaccccaacgucgaccccaacgccaaccccaacgucgaccccaacgccaaccccaacgucgaccccaacgccaaccccaacgccaaccccaacgccaaccccaacgccaaccccaacgccaaccccaacgccaaccccaacgccaaccccaacgccaaccccaacgccaaccccaacgccaaccccaacgccaaccccaacgccaaccccaacgccaaccccaacgucgaccccaacgccaaccccaacgccaaccccaacgccaaccccaacgccaaccccaacgccaaccccaacgccaaccccaacgccaaccccaacgccaaccccaacgccaaccccaacgccaaccccaacgccaaccccaacgccaaccccaacgccaaccccaacgccaaccccaacgccaaccccaacgccaaccccaacgccaaccccaacgccaaccccaacgccaaccccaacaagaacaaccagggcaacggccagggccacaacaugcccaacgaccccaaccgcaacgucgacgagaacgccaacgccaacaacgccgucaagaacaacaacaacgaggagcccuccgacaagcacaucgagcaguaccucaagaccaucaagaacucccucuccaccgaguggucccccugcuccgucaccugcggcaacggcauccagguccgcaucaagcccggcuccgccaacaagcccaaggacgagcucgacuacgccaacgacaucgagaagaagaucugcaagauggagaagugcuccuccgucuucaacgucgucaacuccuccaucggccucaucaugguccucuccuuccucuuccucaacuga

SEQ ID NO: 3893 - RNA, 1158 nt, Artificial Sequence
  derived and/or modified CDS sequence (opt2) from Pf(Tz93-008)__BAM84749.1__CSP
augaugcgcaagcucgccauccucuccgucuccuccuuccucuucgucgaggcccucuuccaggaguaccagugcuacggcuccuccuccaacacccgcguccucaacgagcucaacuacgacaacgccggcaccaaccucuacaacgagcucgagaugaacuacuacggcaagcaggagaacugguacucccucaagaagaacucccgcucccucggcgagaacgacgacggcaacaacgaggacaacgagaagcuccgcaagcccaagcacaagaagcucaagcagcccgccgacggcaaccccgaccccaacgccaaccccaacgucgaccccaacgccaaccccaacgucgaccccaacgccaaccccaacgucgaccccaacgccaaccccaacgccaaccccaacgccaaccccaacgccaaccccaacgccaaccccaacgccaaccccaacgccaaccccaacgccaaccccaacgccaaccccaacgccaaccccaacgccaaccccaacgccaaccccaacgccaaccccaacgucgaccccaacgccaaccccaacgccaaccccaacgccaaccccaacgccaaccccaacgccaaccccaacgccaaccccaacgccaaccccaacgccaaccccaacgccaaccccaacgccaaccccaacgccaaccccaacgccaaccccaacgccaaccccaacgccaaccccaacgccaaccccaacgccaaccccaacgccaaccccaacgccaaccccaacgccaaccccaacaagaacaaccagggcaacggccagggccacaacaugcccaacgaccccaaccgcaacgucgacgagaacgccaacgccaacaacgccgucaagaacaacaacaacgaggagcccuccgacaagcacaucaccgaguaccucaagaagauccagaacucccucuccaccgaguggucccccugcuccgucaccugcggcaacggcauccagguccgcaucaagcccggcuccgccggcaaguccaagaacgagcucgacuacgagaacgacaucgagaagaagaucugcaagauggagaagugcuccuccgucuucaacgucgucaacuccuccaucggccucaucaugguccucuccuuccucuuccucaacuga

SEQ ID NO: 3894 - RNA, 1158 nt, Artificial Sequence
  derived and/or modified CDS sequence (opt2) from Pf(Tz93-013)__BAM84751.1__CSP
augaugcgcaagcucgccauccucuccgucuccuccuuccucuucgucgaggcccucuuccaggaguaccagugcuacggcuccuccuccaacacccgcguccucaacgagcucaacuacgacaacgccggcaccaaccucuacaacgagcucgagaugaacuacuacggcaagcaggagaacugguacucccucaagaagaacucccgcucccucggcgagaacgacgacggcaacaacgaggacaacgagaagcuccgcaagcccaagcacaagaagcucaagcagcccgccgacggcaaccccgaccccaacgccaaccccaacgucgaccccaacgccaaccccaacgucgaccccaacgccaaccccaacgucgaccccaacgccaaccccaacgccaaccccaacgccaaccccaacgccaaccccaacgccaaccccaacgccaaccccaacgccaaccccaacgccaaccccaacgccaaccccaacgccaaccccaacgccaaccccaacgccaaccccaacgccaaccccaacgucgaccccaacgccaaccccaacgccaaccccaacgccaaccccaacgccaaccccaacgccaaccccaacgccaaccccaacgccaaccccaacgccaaccccaacgccaaccccaacgccaaccccaacgccaaccccaacgccaaccccaacgccaaccccaacgccaaccccaacgccaaccccaacgccaaccccaacgccaaccccaacgccaaccccaacgccaaccccaacaagaacaaccagggcaacggccagggccacaacaugcccaacgaccccaaccgcaacgucaacgagaacgccaacgccaacaacgccgucaagaacaacaacaacgaggagcccuccgacaagcacaucaccgaguaccucaagaagauccagaacucccucuccaccgaguggucccccugcuccgucaccugcggcaacggcauccagguccgcaucaagcccggcuccgccggcaagucccgcgacgagcucgacuacgagaacgacaucgagaagaagaucugcaagauggagaagugcuccuccgucuucaacgucgucaacuccuccaucggccucaucaugguccucuccuuccucuuccucaacuga

SEQ ID NO: 3895 - RNA, 1158 nt, Artificial Sequence
  derived and/or modified CDS sequence (opt2) from Pf(Tz93-048)__BAM84761.1__CSP
augaugcgcaagcucgccauccucuccgucuccuccuuccucuucgucgaggcccucuuccaggaguaccagugcuacggcuccuccuccaacacccgcguccucaacgagcucaacuacgacaacgccggcaccaaccucuacaacgagcucgagaugaacuacuacggcaagcaggagaacugguacucccucaagaagaacucccgcucccucggcgagaacgacgacggcaacaacgaggacaacgagaagcuccgcaagcccaagcacaagaagcucaagcagcccgccgacggcaaccccgaccccaacgccaaccccaacgucgaccccaacgccaaccccaacgucgaccccaacgccaaccccaacgucgaccccaacgccaaccccaacgccaaccccaacgccaaccccaacgccaaccccaacgccaaccccaacgccaaccccaacgccaaccccaacgccaaccccaacgccaaccccaacgccaaccccaacgccaaccccaacgccaaccccaacgccaaccccaacgccaaccccaacgucgaccccaacgccaaccccaacgccaaccccaacgccaaccccaacgccaaccccaacgccaaccccaacgccaaccccaacgccaaccccaacgccaaccccaacgccaaccccaacgccaaccccaacgccaaccccaacgccaaccccaacgccaaccccaacgccaaccccaacgccaaccccaacgccaaccccaacgccaaccccaacgccaaccccaacaagaacaaccagggcaacggccagggccacaacaugcccaacgaccccaaccgcaacgucgacgagaacgccaacgccaacaacgccgucaagaacaacaacaacgaggagcccuccgaccagcacaucgagaaguaccucaagaucaucaagaacucccucuccaccgaguggucccccugcuccgucaccugcggcaacggcauccagguccgcaucaagcccggcuccgccaacaagcccaaggaccagcucgacuacgccaacgacaucgagaagaagaucugcaagauggagaagugcuccuccgucuucaacgucgucaacuccuccaucggccucaucaugguccucuccuuccucuuccucaacuga

SEQ ID NO: 3896 - RNA, 1158 nt, Artificial Sequence
  derived and/or modified CDS sequence (opt2) from Pf(Tz93-120)__BAM84776.1__CSP
augaugcgcaagcucgccauccucuccgucuccuccuuccucuucgucgaggcccucuuccaggaguaccagugcuacggcuccuccuccaacacccgcguccucaacgagcucaacuacgacaacgccggcaccaaccucuacaacgagcucgagaugaacuacuacggcaagcaggagaacugguacucccucaagaagaacucccgcucccucggcgagaacgacgacggcaacaacgaggacaacgagaagcuccgcaagcccaagcacaagaagcucaagcagcccgccgacggcaaccccgaccccaacgccaaccccaacgucgaccccaacgccaaccccaacgucgaccccaacgccaaccccaacgucgaccccaacgccaaccccaacgccaaccccaacgccaaccccaacgccaaccccaacgccaaccccaacgccaaccccaacgccaaccccaacgccaaccccaacgccaaccccaacgccaaccccaacgccaaccccaacgccaaccccaacgccaaccccaacgucgaccccaacgccaaccccaacgccaaccccaacgccaaccccaacgccaaccccaacgccaaccccaacgccaaccccaacgccaaccccaacgccaaccccaacgccaaccccaacgccaaccccaacgccaaccccaacgccaaccccaacgccaaccccaacgccaaccccaacgccaaccccaacgccaaccccaacgccaaccccaacgccaaccccaacgccaaccccaacaagaacaaccagggcaacggccagggccacaacaugcccaacgaccccaaccgcaacgucgacgagaacgccaacgccaacaacgccgucaagaacaacaacaacgaggagcccuccgaccagcacaucgagaaguaccucaagaucauccagaacucccucuccaccgaguggucccccugcuccgucaccugcggcaacggcauccagguccgcaucaagcccggcuccgccaacaagcccaaggaccagcucgacuacgccaacgacaucgagaagaagaucugcaagauggagaagugcuccuccgucuucaacgucgucaacuccuccaucggccucaucaugguccucuccuuccucuuccucaacuga

SEQ ID NO: 3897 - RNA, 1158 nt, Artificial Sequence
  derived and/or modified CDS sequence (opt2) from Pf(Tz98-101)__BAM84794.1__CSP
augaugcgcaagcucgccauccucuccgucuccuccuuccucuucgucgaggcccucuuccaggaguaccagugcuacggcuccuccuccaacacccgcguccucaacgagcucaacuacgacaacgccggcaccaaccucuacaacgagcucgagaugaacuacuacggcaagcaggagaacugguacucccucaagaagaacucccgcucccucggcgagaacgacgacggcaacaacgaggacaacgagaagcuccgcaagcccaagcacaagaagcucaagcagcccgccgacggcaaccccgaccccaacgccaaccccaacgucgaccccaacgccaaccccaacgucgaccccaacgccaaccccaacgucgaccccaacgccaaccccaacgccaaccccaacgccaaccccaacgccaaccccaacgccaaccccaacgccaaccccaacgccaaccccaacgccaaccccaacgccaaccccaacgccaaccccaacgccaaccccaacgccaaccccaacgccaaccccaacgccaaccccaacgucgaccccaacgccaaccccaacgccaaccccaacgccaaccccaacgccaaccccaacgccaaccccaacgccaaccccaacgccaaccccaacgccaaccccaacgccaaccccaacgccaaccccaacgccaaccccaacgccaaccccaacgccaaccccaacgccaaccccaacgccaaccccaacgccaaccccaacgccaaccccaacgccaaccccaacaagaacaaccagggcaacggccagggccacaacaugcccaacgaccccaaccgcaacgucgacgagaacgccaacgccaacaacgccgucaagaacaacaacaacgaggagcccuccgacaagcacaucaccgaguaccucaagcgcauccagaacucccucuccaccgaguggucccccugcuccgucaccugcggcaacggcauccagguccgcaucaagcccggcuccgccggcaaguccaagaacgagcucgacuacgagaacgacaucgagaagaagaucugcaagauggagaagugcuccuccgucuucaacgucgucaacuccuccaucggccucaucaugguccucuccuuccucuuccucaacuga

SEQ ID NO: 3898 - RNA, 1158 nt, Artificial Sequence
  derived and/or modified CDS sequence (opt2) from Pf(Yaounde)__AAN87580.1__CSP
augaugcgcaagcucgccauccucuccgucuccuccuuccucuucgucgaggcccucuuccaggaguaccagugcuacggcuccuccuccaacacccgcguccucaacgagcucaacuacgacaacgccggcaccaaccucuacaacgagcucgagaugaacuacuacggcaagcaggagaacugguacucccucaagaagaacucccgcucccucggcgagaacgacgacggcaacaacgaggacaacgagaagcuccgcaagcccaagcacaagaagcucaagcagcccgccgacggcaaccccgaccccaacgccaaccccaacgucgaccccaacgccaaccccaacgucgaccccaacgccaaccccaacgucgaccccaacgccaaccccaacgccaaccccaacgccaaccccaacgccaaccccaacgccaaccccaacgccaaccccaacgccaaccccaacgccaaccccaacgccaaccccaacgccaaccccaacgccaaccccaacgccaaccccaacgccaaccccaacgucgaccccaacgccaaccccaacgccaaccccaacgccaaccccaacgccaaccccaacgccaaccccaacgccaaccccaacgccaaccccaacgccaaccccaacgccaaccccaacgccaaccccaacgccaaccccaacgccaaccccaacgccaaccccaacgccaaccccaacgccaaccccaacgccaaccccaacgccaaccccaacgccaaccccaacgccaaccccaacaagaacaaccagggcaacggccagggccacaacaugcccaacgaccccaaccgcaacgucgacgagaacgccaaggccaacaacgccgucaagaacaacaacaacgaggagcccuccgacaagcacaucgagcaguaccucaagaccauccagaacucccucuccaccgaguggucccccugcuccgucaccugcggcaacggcauccagguccgcaucaagcccggcuccgccaacaagcccaaggaccagcucgacuacgagaacgacaucgagaagaagaucugcaagauggagaagugcuccuccgucuucaacgucgucaacuccuccaucggccucaucaugguccucuccuuccucuuccucaacuga

SEQ ID NO: 3899 - RNA, 1143 nt, Artificial Sequence
  derived and/or modified CDS sequence (opt2) from Pf(Asembo Bay)__AAN87610.1__CSP
augaugcgcaagcucgccauccucuccgucuccuccuuccucuucgucgaggcccucuuccaggaguaccagugcuacggcuccuccuccaacacccgcguccucaacgagcucaacuacgacaacgccggcaccaaccucuacaacgagcucgagaugaacuacuacggcaagcaggagaacugguacucccucaagaagaacucccgcucccucggcgagaacgacgacggcaacaacaacaacggcgacaacggccgcgagggcaaggacgaggacaagcgcgacggcaacaacgaggacaacgagaagcuccgcaagcccaagcacaagaagcucaagcagcccggcgacggcaaccccgaccccaacgccaaccccaacgucgaccccaacgccaaccccaacgucgaccccaacgccaaccccaacgucgaccccaacgccaaccccaacgccaaccccaacgccaaccccaacgccaaccccaacgccaaccccaacgccaaccccaacgccaaccccaacgccaaccccaacgccaaccccaacgccaaccccaacgccaaccccaacgccaaccccaacgccaaccccaacgccaaccccaacgccaaccccaacgccaaccccaacgccaaccccaacgccaaccccaacgccaaccccaacgccaaccccaacgccaaccccaacgccaaccccaacgccaaccccaacgccaaccccaacgccaaccccaacgccaaccccaacgccaaccccaacaagaacaaccagggcaacggccagggccacaacaugcccaacgaccccaaccgcaacgucgacgagaacgccaacgccaacaacgccgucaagaacaacaacaacgaggagcccuccgacaagcacaucgagcaguaccucaacaagaucaagaacuccaucuccaccgaguggucccccugcuccgucaccugcggcaacggcauccagguccgcaucaagcccggcuccgccaacaagcccaaggaccagcucgacuacgccaacgacaucgagaagaagaucugcaagauggagaagugcuccuccgucuucaacgucgucaacuccuccaucggccucaucaugguccucuccuuccucuuccucaacuga

SEQ ID NO: 3900 - RNA, 1143 nt, Artificial Sequence
  derived and/or modified CDS sequence (opt2) from Pf(India)__AAN87619.1__CSP
augaugcgcaagcucgccauccucuccgucuccuccuuccucuucgucgaggcccucuuccaggaguaccagugcuacggcuccuccuccaacacccgcguccucaacgagcucaacuacgacaacgccggcaccaaccucuacaacgagcucgagaugaacuacuacggcaagcaggagaacugguacucccucaagaagaacucccgcucccucggcgagaacgacgacggcaacaacaacaacggcgacaacggccgcgagggcaaggacgaggacaagcgcgacggcaacaacgaggacaacgagaagcuccgcaagcccaagcacaagaagcucaagcagcccggcggcgacaaccccgaccccaacgccaaccccaacgccaaccccaacgccaaccccaacgccaaccccaacgccaaccccaacgccaaccccaacgucgaccccaacgccaaccccaacgccaaccccaacgccaaccccaacgccaaccccaacgccaaccccaacgccaaccccaacgccaaccccaacgccaaccccaacgccaaccccaacgccaaccccaacgccaaccccaacgccaaccccaacgccaaccccaacgccaaccccaacgccaaccccaacgccaaccccaacgccaaccccaacgccaaccccaacgccaaccccaacgccaaccccaacgccaaccccaacgccaaccccaacgccaaccccaacgccaaccccaacgccaaccccaacgccaaccccaacaagaacaaccagggcaacggccagggccacaacaugcccaacgaccccaaccgcaacgucgacgagaacgccaacgccaacaacgccgucaagaacaacaacaacgaggagcccuccgacaagcacaucgagcaguaccucaagaagauccagaacucccucuccaccgaguggucccccugcuccgucaccugcggcaacggcauccagguccgcaucaagcccggcuccgccaacaagcccaaggacgagcucgacuacgagaacgacaucgagaagaagaucugcaagauggagaagugcuccuccgucuucaacgucgucaacuccuccaucggccucaucaugguccucuccuuccucuuccucaacuga

SEQ ID NO: 3901 - RNA, 1107 nt, Artificial Sequence
  derived and/or modified CDS sequence (opt2) from Pf(India)__AAN87617.1__CSP
augaugcgcaagcucgccauccucuccgucuccuccuuccucuucgucgaggcccucuuccaggaguaccagugcuacggcuccuccuccaacacccgcguccucaacgagcucaacuacgacaacgccggcaccaaccucuacaacgagcucgagaugaacuacuacggcaagcaggagaacugguacucccucaagaagaacucccgcucccucggcgagaacgacgacggcaacaacaacaacggcgacaacggccgcgagggcaaggacgaggacaagcgcgacggcaacaacgaggacaacgagaagcuccgcaagcccaagcacaagaagcucaagcagcccggcggcgacaaccccgaccccaacgccaaccccaacgucgaccccaacgccaaccccaacgccaaccccaacgccaaccccaacgccaaccccaacgccaaccccaacgccaaccccaacgccaaccccaacgccaaccccaacgccaaccccaacgccaaccccaacgccaaccccaacgccaaccccaacgccaaccccaacgccaaccccaacgccaaccccaacgccaaccccaacgccaaccccaacgccaaccccaacgccaaccccaacgccaaccccaacgccaaccccaacgccaaccccaacgccaaccccaacgccaaccccaacgccaaccccaacgccaaccccaacgccaaccccaacgccaaccccaacaagaacaaccagggcaacggccagggccacaacaugcccaacgaccccaaccgcaacgucgacgagaacgccaacgccaacaacgccgucaagaacaacaacaacgaggagcccuccgacaagcacaucgagcaguaccucaagaagauccagaacucccucuccaccgaguggucccccugcuccgucaccugcggcaacggcauccagguccgcaucaagcccggcuccgccaacaagcccaaggacgagcucgacuacgagaacgacaucgagaagaagaucugcaagauggagaagugcuccuccgucuucaacgucgucaacuccuccaucggccucaucaugguccucuccuuccucuuccucaacuga

SEQ ID NO: 3902 - RNA, 1095 nt, Artificial Sequence
  derived and/or modified CDS sequence (opt2) from Pf(India)__AAN87616.1__CSP
augaugcgcaagcucgccauccucuccgucuccuccuuccucuucgucgaggcccucuuccaggaguaccagugcuacggcuccuccuccaacacccgcguccucaacgagcucaacuacgacaacgccggcaccaaccucuacaacgagcucgagaugaacuacuacggcaagcaggagaacugguacucccucaagaagaacucccgcucccucggcgagaacgacgacggcaacaacaacaacggcgacaacggccgcgagggcaaggacgaggacaagcgcgacggcaacaacgaggacaacgagaagcuccgcaagcccaagcacaagaagcucaagcagcccggcggcgacaaccccgaccccaacgccaaccccaacgucgaccccaacgccaaccccaacgccaaccccaacgccaaccccaacgccaaccccaacgccaaccccaacgccaaccccaacgccaaccccaacgccaaccccaacgccaaccccaacgccaaccccaacgccaaccccaacgccaaccccaacgccaaccccaacgccaaccccaacgccaaccccaacgccaaccccaacgccaaccccaacgccaaccccaacgccaaccccaacgccaaccccaacgccaaccccaacgccaaccccaacgccaaccccaacgccaaccccaacgccaaccccaacgccaaccccaacgccaaccccaacaagaacaaccagggcaacggccagggccacaacaugcccaacgaccccaaccgcaacgucgacgagaacgccaacgccaacaacgccgucaagaacaacaacaacgaggagcccuccgacaagcacaucgagcaguaccucaagaagauccagaacucccucuccaccgaguggucccccugcuccgucaccugcggcaacggcauccagguccgcaucaagcccggcuccgccaacaagcccaaggacgagcucgacuacgagaacgacaucgagaagaagaucugcaagauggagaagugcuccuccgucuucaacgucgucaacuccuccaucggccucaucaugguccucuccuuccucuuccucaacuga

SEQ ID NO: 3903 - RNA, 1092 nt, Artificial Sequence
  derived and/or modified CDS sequence (opt2) from Pf(Bolivar)__AAN87600.1__CSP
augaugcgcaagcucgccauccucuccgucuccuccuuccucuucgucgaggcccucuuccaggaguaccagugcuacggcuccuccuccaacacccgcguccucaacgagcucaacuacgacaacgccggcaccaaccucuacaacgagcucgagaugaacuacuacggcaagcaggagaacugguacucccucaagaagaacucccgcucccucggcgagaacgacgacggcaacaacaacaacggcgacaacggccgcgagggcaaggacgaggacaagcgcgacggcaacaacgaggacaacgagaagcuccgcaagcccaagcacaagaagcucaagcagcccgccgacggcaaccccgaccccaacgccaaccccaacgucgaccccaacgccaaccccaaccccaacgccaacccccccaacgccaaccccaacgccaaccccaacgccaaccccaacgccaaccccaacgucgaccccaacgccaaccccaacgccaaccccaacgccaaccccaacgccaaccccaacgccaaccccaacgccaaccccaacgccaaccccaacgccaaccccaacgccaaccccaacgccaaccccaacgccaaccccaacgccaaccccaacgccaaccccaacgccaaccccaacgccaaccccaacgccaaccccaacgccaaccccaacgccaaccccaacgccaaccccaacaagaacaaccagggcaacggccagggccacaacaugcccaacgaccccaaccgcaacgucgacgagaacgccaacgccaacaacgccgucaagaacaacaacaacgaggagcccuccgacaagcacaucgagcaguaccucaacaagauccagaacucccucuccaccgaguggucccccugcuccgucaccugcggcaacggcauccagguccgcaucaagcccggcuccgccaacaagcccaaggaccagcucgacuacgccaacgacaucgagaagaagaucugcaagauggagaagugcuccuccgucuucaacgucgucaacuccuccaucggccucaucaugguccucuccuuccucuuccucaacuga

SEQ ID NO: 3904 - RNA, 1083 nt, Artificial Sequence
  derived and/or modified CDS sequence (opt2) from Pf(Asembo Bay)__AAN87597.1__CSP
augaugcgcaagcucgccauccucuccgucuccuccuuccucuucgucgaggcccucuuccaggaguaccagugcuacggcuccuccuccaacacccgcguccucaacgagcucaacuacgacaacgccggcaccaaccucuacaacgagcucgagaugaacuacuacggcaagcaggagaacugguacucccucaagaagaacucccgcucccucggcgagaacgacgacggcaacaacaacaacggcgacaacggccgcgagggcaaggacgaggacaagcgcgacggcaacaacgaggacaacgagaagcuccgcaagcccaagcacaagaagcucaagcagcccgccgacggcaaccccgaccccaacgccaaccccaacgucgaccccaacgccaaccccaacgccaaccccaacgccaaccccaacgccaaccccaacgccaaccccaacgccaaccccaacgucgaccccaacgccaaccccaacgccaaccccaacgccaaccccaacgccaaccccaacgccaaccccaacgccaaccccaacgccaaccccaacgccaaccccaacgccaaccccaacgccaaccccaacgccaaccccaacgccaaccccaacgccaaccccaacgccaaccccaacgccaaccccaacgccaaccccaacgccaaccccaacgccaaccccaacgccaaccccaacaagaacaaccagggcaacggccagggccacaacaugcccaacgaccccaaccgcaacgucgacgagaacgccaacgccaacaacgccgucaagaacaacaacaacgaggagcccuccgacaagcacaucaaggaguaccucaagaucauccccaacucccucuccaccgaguggucccccugcuccgucaccugcggcaacggcauccagguccgcaucaagcccggcuccgccggcaagcccaaggacgagcucgacuacgccaacgacaucgagaagaagaucugcaagauggagaagugcuccuccgucuucaacgucgucaacuccuccaucggccucaucaugguccucuccuuccucuuccucaacuga

SEQ ID NO: 3905 - RNA, 1083 nt, Artificial Sequence
  derived and/or modified CDS sequence (opt2) from Pf(Asembo Bay)__AAN87596.1__CSP
augaugcgcaagcucgccauccucuccgucuccuccuuccucuucgucgaggcccucuuccaggaguaccagugcuacggcuccuccuccaacacccgcguccucaacgagcucaacuacgacaacgccggcaccaaccucuacaacgagcucgagaugaacuacuacggcaagcaggagaacugguacucccucaagaagaacucccgcucccucggcgagaacgacgacggcaacaacaacaacggcgacaacggccgcgagggcaaggacgaggacaagcgcgacggcaacaacgaggacaacgagaagcuccgcaagcccaagcacaagaagcucaagcagcccgccgacggcaaccccgaccccaacgccaaccccaacgucgaccccaacgccaaccccaacgccaaccccaacgccaaccccaacgccaaccccaacgccaaccccaacgccaaccccaacgucgaccccaacgccaaccccaacgccaaccccaacgccaaccccaacgccaaccccaacgccaaccccaacgccaaccccaacgccaaccccaacgccaaccccaacgccaaccccaacgccaaccccaacgccaaccccaacgccaaccccaacgccaaccccaacgccaaccccaacgccaaccccaacgccaaccccaacgccaaccccaacgccaaccccaacgccaaccccaacaagaacaaccagggcaacggccagggccacaacaugcccaacgaccccaaccgcaacgucgacgagaacgccaacgccaacaacgccgucaagaacaacaacaacgaggagcccuccgacaagcacaucaaggaguaccucaagaucauccagaacucccucuccaccgaguggucccccugcuccgucaccugcggcaacggcauccagguccgcaucaagcccggcuccgccggcaagcccaaggacgagcucgacuacgccaacgacaucgagaagaagaucugcaagauggagaagugcuccuccgucuucaacgucgucaacuccuccaucggccucaucaugguccucuccuuccucuuccucaacuga

SEQ ID NO: 3906 - RNA, 1071 nt, Artificial Sequence
  derived and/or modified CDS sequence (opt2) from Pf(India)__AAN87615.1__CSP
augaugcgcaagcucgccauccucuccgucuccuccuuccucuucgucgaggcccucuuccaggaguaccagugcuacggcuccuccuccaacacccgcguccucaacgagcucaacuacgacaacgccggcaccaaccucuacaacgagcucgagaugaacuacuacggcaagcaggagaacugguacucccucaagaagaacucccgcucccucggcgagaacgacgacggcaacaacaacaacggcgacaacggccgcgagggcaaggacgaggacaagcgcgacggcaacaacgaggacaacgagaagcuccgcaagcccaagcacaagaagcucaagcagcccggcgacggcaaccccgaccccaacgccaaccccaacgucgaccccaacgccaaccccaacgccaaccccaacgccaaccccaacgccaaccccaacgccaaccccaacgccaaccccaacgccaaccccaacgccaaccccaacgccaaccccaacgccaaccccaacgccaaccccaacgccaaccccaacgucaaccccaacgccaaccccaacgccaaccccaacgccaaccccaacgccaaccccaacgccaaccccaacgccaaccccaacgccaaccccaacgccaaccccaacgccaaccccaacgccaaccccaacgccaaccccaacgccaaccccaacaagaacaaccagggcaacggccagggccacaacaugcccaacgaccccaaccgcaacgucgacgagaacgccaacgucaacaacgccgucaagaacaacaacaacgaggagcccuccgacaagcacaucgagcaguaccucaagaagauccagaacucccucuccaccgaguggucccccugcuccgucaccugcggcaacggcauccagguccgcaucaagcccggcuccgccaacaagcccaaggacgagcucgacuacgagaacgacaucgagaagaagaucugcaagauggagaagugcuccuccgucuucaacgucgucaacuccuccaucggccucaucaugguccucuccuuccucuuccucaacuga

SEQ ID NO: 3907 - RNA, 1110 nt, Artificial Sequence
  derived and/or modified CDS sequence (opt2) from Pk(UMMAC6)__AHF20622.1__CSP
augaagaacuucauccuccucgccgucuccuccauccuccucgucgaccuccuccccacccacuucgagcacaacgucgaccucucccgcgccaucaacgucaacggcgucuccuucaacaacgucgacaccuccucccucggcgccgcccagguccgccaguccgccucccgcggccgcggccucggcgagaagcccaaggagggcgccgacaaggagaagaagaaggagaaggagaaggagaaggaggaggagcccaagaagcccaacgagaacaagcucauccagcccgagcagcccgccgccggcgccggcggcgagcagcccgccgccggcgccggcggcgagcagcccgccgccggcgccggcggcgagcagcccgccgccggcgccggcggcgagcagcccgccgccggcgccggcggcgagcagcccgccgccggcgcccgcggcgagcagcccgccgccggcgccggcggcgagcagcccgccgccggcgccggcggcgagcagcccgccgccggcgccggcggcgagcagcccgccgccggcgccggcggcgagcagcccgccgccggcgccggcggcgagcagcccgccgccggcgcccgcggcgagcagcccgccgccggcgccggcggcgagcagcccgccgccggcgccggcggcgagcagcccgcccccgccccccgccgcgagcagcccgccgccggcgccggcggcgagcagcccgcccccgccccccgccgcgagcagcccgcccccggcgccggcgccggcgacggcgcccgcggcggcaacgccggcgccggcaagggccagggccagaacaaccagggcgccaacguccccaacgagaaggucgucaacgacuaccuccacaagauccgcuccuccgucaccaccgaguggacccccugcuccgucaccugcggcaacggcguccgcauccgccgcaagggccacgccggcaacaagaaggccgaggaccucaccauggacgaccucgaggucgaggccugcgucauggacaagugcgccggcaucuucaacgucgucuccaacucccucggccucgucauccuccucguccucgcccucuucaacuga

SEQ ID NO: 3908 - RNA, 1092 nt, Artificial Sequence
  derived and/or modified CDS sequence (opt2) from Pk(H (SL1_PK))__XP_002259002.1__CSP
augaagaacuucauccuccucgccgucuccuccauccuccucgucgaccuccuccccacccacuucgagcacaacgucgaccucucccgcgccaucaacgucaacggcgucuccuucaacaacgucgacaccuccucccucggcgccgcccagguccgccaguccgccucccgcggccgcggccucggcgagaagcccaaggagggcgccgacaaggagaagaagaaggagaagggcaaggagaaggaggaggagcccaagaagcccaacgagaacaagcucaagcagcccaacgagggccagccccaggcccagggcgacggcgccaacgccggccagccccaggcccagggcgacggcgccaacgccggccagccccaggcccagggcgacggcgccaacgccggccagccccaggcccagggcgacggcgccaacgccggccagccccaggcccagggcgacggcgccaacgccggccagccccaggcccagggcgacggcgccaacgccggccagccccaggcccagggcgacggcgccaacgccggccagccccaggcccagggcgacggcgccaacgccggccagccccaggcccagggcgacggcgccaacgccggccagccccaggcccagggcgacggcgccaacgccggccagccccaggcccagggcgaccgcgccaacgccggccagccccaggcccagggcgacggcgccaacgucccccgccagggccgcaacggcggcggcgcccccgccggcggcaacgagggcaacaagcaggccggcaagggccagggccagaacaaccagggcgccaacgcccccaacgagaaggucgucaacgacuaccuccacaagauccgcuccuccgucaccaccgaguggacccccugcuccgucaccugcggcaacggcguccgcauccgccgcaaggcccacgccggcaacaagaaggccgaggaccucaccauggacgaccucgaggucgaggccugcgucauggacaagugcgccggcaucuucaacgucgucuccaacucccucggccucgucauccuccucguccucgcccucuucaacuga

SEQ ID NO: 3909 - RNA, 1443 nt, Artificial Sequence
  derived and/or modified CDS sequence (opt2) from Pk(SGEHIH2-im-Y09-12)__AFD97213.1__CSP
augaagaacuucauccuccucgccgucuccuccauccuccucgucgaccuccuccccacccacuucgagcacaacgucgaccucucccgcgccaucaacgucaacggcgucuccuucaacaacgucgacaccuccucccucggcgccgcccagguccgccaguccgccucccgcggccgcggccucggcgagaagcccaaggagggcgacgacaaggagaagaagaaggagaaggagaaggaggaggagcccaagaagcucaacgagaacaaccccaagaagcccaacgaggagggcgacggcgccaagcucaagcagcccaacgaggagggcgacggcgccaagcucaagcagcccaacgccgagggcggcgccaagcucaagcagcccaacgccgagggcggcgccaacgccggccagcccaacgccgagggcggcgccaacgccggccagcccaacgccgagggcggcgccaacgccggccagcccaacgccggcggcgccaacgccggccagcccaacgccgagggcggcgccaacgccggccagcccaacgccgagggcggcgccaacgccggccagcccaacgccgagggcggcgccaacgcccgccagcccaacgccgagggcggcgccaacgcccgccagcccaacgccgagggcggcgccaacgccggccagcccaacgccgagggcggcgccaacgccggccagcccaacgccgagggcggcgccaacgccggccagcccaacgccgagggcggcgccaacgcccgccagcccaacgccgagggcggcgccaacgccggccagcccaacgccgagggcggcgccaacgccggccagcccaacgccgagggcggcgccaacgccggccagcccaacgccgagggcggcgccaacgccggccagcccaacgccgagggcggcgccaacgcccgccagcccaacgccgagggcggcgccaacgccggccagcccaacgccgagggcggcgccaacgccggccagcccaacgccgagggcggcgccaacgcccgccagccccaggccgagggcggcggcgccaacgcccgccagccccaggccgagggcggcggcgccaacgcccgccagggcggcaacgagggcaacaagcaggccggcaagggccagggccagaacaaccagggcgccaacgcccccaacgagaaggucgucaacgacuaccuccagaagauccgcuccuccgucaccaucgaguggacccccugcuccgucaccugcggcaacggcguccgcauccgccgccgcgcccacgccgacaagaagaaggccgaggaccucaccauggacgaccucgaggucgaggccugcgucauggacaagugcgccggcaucuucaacgucgucuccaacucccucggccucgucauccuccucguccucgcccucuucaacuga

SEQ ID NO: 3910 - RNA, 1320 nt, Artificial Sequence
  derived and/or modified CDS sequence (opt2) from Pk(NB028)__AFG25469.1__CSP
augaagaacuucauccuccucgccgucuccuccauccuccucgucgaccuccuccccacccacuucgagcacaacgucgaccucucccgcgccaucaacgucaacggcgucuccuucaacaacgucgacaccuccucccucggcgccgcccagguccgccaguccgccucccgcggccgcggccucggcgagaagcccaaggagggcgacgacaaggagaagaagaaggagaaggagaaggaggaggagcccaagaaccucaacgagaacaagcccaagcagcccaacgccgagggcgacggcgccaagcucaagcagcccaacgccgagggcgacggcgccaagcucaagcagccccaggccgagggcgacggcgccaacgcccgccagccccaggccgagggcaacggcgccaacgcccgccagccccaggccgagggcgacggcgccaacgcccgccagccccaggccgagggcgacggcgccaacgcccgccagccccaggccgagggcgacggcgccaacgcccgccagccccaggccgagggcgacggcgccaacgcccgccagccccaggccgagggcgacggcgccaacgcccgccagccccaggccgagggcgacggcgccaacgcccgccagccccaggccgagggcggcggcgccaacgcccgccagccccaggccgagggcgacggcgccaacgcccgccagccccaggccgagggcgacggcgccaacgcccgccagccccaggccgagggcgacggcgccaacgcccgccagccccaggccgagggcgacggcgccaacgcccgccagccccaggccgagggcgacggcgccaacgcccgccagccccaggccgagggcggcggcgccaacgcccgccagccccaggccgagggcgacggcgccaacgcccgccaggcccaggcccagggcgacggcggcaacgcccgccagggcggcaacggcggcggcgcccccgccggcggcaacgagggcaacaagcaggccggcaagggccagggccagaacaaccagggcgccaacgcccccaacgagaaggucgucaacgacuaccuccagaagauccgcuccuccgucaccaccgaguggacccccugcuccgucaccugcggcaacggcguccgcauccgccgccgcgcccacgccgacaagaagaaggccgaggagcucaccauggacgaccucgaggucgaggccugcgucauggacaagugcgccggcaucuucaacgucgucuccaacucccucggccucgucauccuccucguccucgcccucuucaacuga

SEQ ID NO: 3911 - RNA, 1278 nt, Artificial Sequence
  derived and/or modified CDS sequence (opt2) from Pk(SGEHIH1-im-Y09-102)__AFD97209.1__CSP
augaagaacuucauccuccucgccgucuccuccauccuccucgucgaccuccuccccacccacuucgagcacaacgucgaccucucccgcgccaucaacgucaacggcgucuccuucaacaacgucgacaccuccucccucggcgccgcccagguccgccaguccgccucccgcggccgcggccucggcgagaagcccaaggagggcgacgacaaggagaagaagaaggagaaggagaaggaggaggagcccaagaagcucaacgagaacaaccccaagaagcccaacgaggagggcgacggcgccaagcucaagcagcccaacgaggagggcgacggcgccaagcucaagcagcccaacgccgagggcggcgccaagcucaagcagcccaacgccgagggcggcgccaacgccggccagcccaacgccgagggcggcgccaacgccggccagcccaacgccgagggcggcgccaacgccggccagcccaacgccggcggcgccaacgccggccagcccaacgccgagggcggcgccaacgccggccagcccaacgccgagggcggcgccaacgccggccagcccaacgccgagggcggcgccaacgcccgccagcccaacgccgagggcggcgccaacgcccgccagcccaacgccgagggcggcgccaacgccggccagcccaacgccgagggcggcgccaacgccggccagcccaacgccgagggcggcgccaacgccggccagcccaacgccgagggcggcgccaacgcccgccagcccaacgccgagggcggcgccaacgccggccagcccaacgccgagggcggcgccaacgccggccagcccaacgccgagggcggcgccaacgcccgccagccccaggccgagggcggcggcgccaacgcccgccagccccaggccgagggcggcggcgccaacgcccgccagggcggcaacgagggcaacaagcaggccggcaagggccagggccagaacaaccagggcgccaacgcccccaacgagaaggucgucaacgacuaccuccagaagauccgcuccuccgucaccaucgaguggacccccugcuccgucaccugcggcaacggcguccgcauccgccgccgcgcccacgccgacaagaagaaggccgaggaccucaccauggacgaccucgaggucgaggccugcgucauggaccgcugcgccggcaucuucaacgucgucuccaacucccucggccucgucauccuccucguccucgcccucuucaacuga

SEQ ID NO: 3912 - RNA, 1278 nt, Artificial Sequence
  derived and/or modified CDS sequence (opt2) from Pk(SGEHIH1-im-Y09-17)__AFD97205.1__CSP
augcgcaacuucauccuccucgccgucuccuccauccuccucgucgaccuccuccccacccacuucgagcacaacgucgaccucucccgcgccaucaacgucaacggcgucuccuucaacaacgucgacaccuccucccucggcgccgcccagguccgccaguccgccucccgcggccgcggccucggcgagaagcccaaggagggcgacgacaaggagaagaagaaggagaaggagaaggaggaggagcccaagaagcucaacgagaacaaccccaagaagcccaacgaggagggcgacggcgccaagcucaagcagcccaacgaggagggcgacggcgccaagcucaagcagcccaacgccgagggcggcgccaagcucaagcagcccaacgccgagggcggcgccaacgccggccagcccaacgccgagggcggcgccaacgccggccagcccaacgccgagggcggcgccaacgccggccagcccaacgccggcggcgccaacgccggccagcccaacgccgagggcggcgccaacgccggccagcccaacgccgagggcggcgccaacgccggccagcccaacgccgagggcggcgccaacgcccgccagcccaacgccgagggcggcgccaacgcccgccagcccaacgccgagggcggcgccaacgccggccagcccaacgccgagggcggcgccaacgccggccagcccaacgccgagggcggcgccaacgccggccagcccaacgccgagggcggcgccaacgcccgccagcccaacgccgagggcggcgccaacgccggccagcccaacgccgagggcggcgccaacgccggccagcccaacgccgagggcggcgccaacgcccgccagccccaggccgagggcggcggcgccaacgcccgccagccccaggccgagggcggcggcgccaacgcccgccagggcggcaacgagggcaacaagcaggccggcaagggccagggccagaacaaccagggcgccaacgcccccaacgagaaggucgucaacgacuaccuccagaagauccgcuccuccgucaccaucgaguggacccccugcuccgucaccugcggcaacggcguccgcauccgccgccgcgcccacgccgacaagaagaaggccgaggaccucaccauggacgaccucgaggucgaggccugcgucauggacaagugcgccggcaucuucaacgucgucuccaacucccucggccucgucauccuccucguccucgcccucuucaacuga

SEQ ID NO: 3913 - RNA, 1278 nt, Artificial Sequence
  derived and/or modified CDS sequence (opt2) from Pk(SGEHIH1-im-Y09-25)__AFD97206.1__CSP
augaagaacuucauccuccucgccgucuccuccauccuccucgucgaccuccuccccacccacuucgagcacaacgucgaccucucccgcgccaucaacgucaacggcgucuccuucaacaacgucgacaccuccucccucggcgccgcccagguccgccaguccgccucccgcggccgcggccucggcgagaagcccaaggagggcgacgacaaggagaagaagaaggagaaggagaaggaggaggagcccaagaagcucaacgagaacaaccccaagaagcccaacgaggagggcgacggcgccaagcucaagcagcccaacgaggagggcgacggcgccaagcucaagcagcccaacgccgagggcggcgccaagcucaagcagcccaacgccgagggcggcgccaacgccggccagcccaacgccgagggcggcgccaacgccggccagcccaacgccgagggcggcgccaacgccggccagcccaacgccggcggcgccaacgccggccagcccaacgccgagggcggcgccaacgccggccagcccaacgccgagggcggcgccaacgccggccagcccaacgccgagggcggcgccaacgcccgccagcccaacgccgagggcggcgccaacgcccgccagcccaacgccgagggcggcgccaacgccggccagcccaacgccgagggcggcgccaacgccggccagcccaacgccgagggcggcgccaacgccggccagcccaacgccgagggcggcgccaacgcccgccagcccaacgccgagggcggcgccaacgccggccagcccaacgccgagggcggcgccaacgccggccagcccaacgccgagggcggcgccaacgcccgccagccccaggccgagggcggcggcgccaacgcccgccagccccaggccgagggcggcggcgccaacgcccgccagggcggcaacgagggcaacaagcaggccggcaagggccagggccagaacaaccagggcgccaacgcccccaacgagaaggucgucaacgacuaccuccagaagauccgcuccuccgucaccaucgaguggacccccugcuccgucaccugcggcaacggcguccgcauccgccgccgcgcccacgccgacaagaagaaggccgaggaccucaccauggacgaccucgaggucgaggccugcgucauggacaagugcgccggcaucuucaacgucgucuccaacucccucggccucgucauccuccucguccucgcccucuucaacuga

SEQ ID NO: 3914 - RNA, 1278 nt, Artificial Sequence
  derived and/or modified CDS sequence (opt2) from Pk(SGEHIH2-im-Y09-11)__AFD97212.1__CSP
augaagaacuucauccuccucgccgucuccuccauccuccucgucgaccuccuccccacccacuucgagcacaacgucgaccucucccgcgccaucaacgucaacggcgucuccuucaacaacgucgacaccuccucccucggcgccgcccagguccgccaguccgccucccgcggccgcggccucggcgagaagcccaaggagggcgacgacaaggagaagaagaaggagaaggagaaggaggaggagcccaagaagcucaacgagaacaaccccaagaagcccaacgaggagggcgacggcgccaagcucaagcagcccaacgaggagggcgacggcgccaagcucaagcagcccaacgccgagggcggcgccaagcucaagcagcccaacgccgagggcggcgccaacgccggccagcccaacgccgagggcggcgccaacgccggccagcccaacgccgagggcggcgccaacgccggccagcccaacgccggcggcgccaacgccggccagcccaacgccgagggcggcgccaacgccggccagcccaacgccgagggcggcgccaacgccggccagcccaacgccgagggcggcgccaacgcccgccagcccaacgccgagggcggcgccaacgcccgccagcccaacgccgagggcggcgccaacgccggccagcccaacgccgagggcggcgccaacgccggccagcccaacgccgagggcggcgccaacgccggccagcccaacgccgagggcggcgccaacgcccgccagcccaacgccgagggcggcgccaacgccggccagcccaacgccgagggcggcgccaacgccggccagcccaacgccgagggcggcgccaacgcccgccagccccaggccgagggcggcggcgccaacgcccgccagccccaggccgagggcggcggcgccaacgcccgccagggcggcaacgagggcaacaagcaggccggcaagggccagggccagaacaaccagggcgccaacgcccccaacgagaaggucgucaacgacuaccuccagaagauccgcuccuccgucaccaucgaguggacccccugcuccgucaccugcggcaacggcguccgcauccgccgccgcgcccacgccgacaagaagcgcgccgaggaccucaccauggacgaccucgaggucgaggccugcgucauggacaagugcgccggcaucuucaacgucgucuccaacucccucggccucgucauccuccucguccucgcccucuucaacuga

SEQ ID NO: 3915 - RNA, 1278 nt, Artificial Sequence
  derived and/or modified CDS sequence (opt2) from Pk(SGEHIH2-im-Y09-18)__AFD97214.1__CSP
augaagaacuucauccuccucgccgucuccuccauccuccucgucgaccuccuccccacccacuucgagcacaacgucgaccucacccgcgccaucaacgucaacggcgucuccuucaacaacgucgacaccuccucccucggcgccgcccagguccgccaguccgccucccgcggccgcggccucggcgagaagcccaaggagggcgacgacaaggagaagaagaaggagaaggagaaggaggaggagcccaagaagcucaacgagaacaaccccaagaagcccaacgaggagggcgacggcgccaagcucaagcagcccaacgaggagggcgacggcgccaagcucaagcagcccaacgccgagggcggcgccaagcucaagcagcccaacgccgagggcggcgccaacgccggccagcccaacgccgagggcggcgccaacgccggccagcccaacgccgagggcggcgccaacgccggccagcccaacgccggcggcgccaacgccggccagcccaacgccgagggcggcgccaacgccggccagcccaacgccgagggcggcgccaacgccggccagcccaacgccgagggcggcgccaacgcccgccagcccaacgccgagggcggcgccaacgcccgccagcccaacgccgagggcggcgccaacgccggccagcccaacgccgagggcggcgccaacgccggccagcccaacgccgagggcggcgccaacgccggccagcccaacgccgagggcggcgccaacgcccgccagcccaacgccgagggcggcgccaacgccggccagcccaacgccgagggcggcgccaacgccggccagcccaacgccgagggcggcgccaacgcccgccagccccaggccgagggcggcggcgccaacgcccgccagccccaggccgagggcggcggcgccaacgcccgccagggcggcaacgagggcaacaagcaggccggcaagggccagggccagaacaaccagggcgccaacgcccccaacgagaaggucgucaacgacuaccuccagaagauccgcuccuccgucaccaucgaguggacccccugcuccgucaccugcggcaacggcguccgcauccgccgccgcgcccacgccgacaagaagaaggccgaggaccucaccauggacgaccucgaggucgaggccugcgucauggacaagugcgccggcaucuucaacgucgucuccaacucccucggccucgucauccuccucguccucgcccucuucaacuga

SEQ ID NO: 3916 - RNA, 1278 nt, Artificial Sequence
  derived and/or modified CDS sequence (opt2) from Pk(SGEHIH2-im-Y09-3)__AFD97210.1__CSP
augaagaacuucauccuccucgccgucuccuccauccuccucgucgaccuccuccccacccacuucgagcacaacgucgaccucucccgcgccaucaacgucaacggcgucuccuucaacaacgucgacaccuccucccucggcgccgcccagguccgccaguccgccucccgcggccgcggccucggcgagaagcccaaggagggcgacgacaaggagaagaagaaggagaaggagaaggaggaggagcccaagaagcucaacgagaacaaccccaagaagcccaacgaggagggcgacggcgccaagcucaagcagcccaacgaggagggcgacggcgccaagcucaagcagcccaacgccgagggcggcgccaagcucaagcagcccaacgccgagggcggcgccaacgccggccagcccaacgccgagggcggcgccaacgccggccagcccaacgccgagggcggcgccaacgccggccagcccaacgccggcggcgccaacgccggccagcccaacgccgagggcggcgccaacgccggccagcccaacgccgagggcggcgccaacgccggccagcccaacgccgagggcggcgccaacgcccgccagcccaacgccgagggcggcgccaacgcccgccagcccaacgccggcggcggcgccaacgccggccagcccaacgccgagggcggcgccaacgccggccagcccaacgccgagggcggcgccaacgccggccagcccaacgccgagggcggcgccaacgcccgccagcccaacgccgagggcggcgccaacgccggccagcccaacgccgagggcggcgccaacgccggccagcccaacgccgagggcggcgccaacgcccgccagccccaggccgagggcggcggcgccaacgcccgccagccccaggccgagggcggcggcgccaacgcccgccagggcggcaacgagggcaacaagcaggccggcaagggccagggccagaacaaccagggcgccaacgcccccaacgagaaggucgucaacgacuaccuccagaagauccgcuccuccgucaccaucgaguggacccccugcuccgucaccugcggcaacggcguccgcauccgccgccgcgcccacgccgacaagaagaaggccgaggaccucaccgucgacgaccucgaggucgaggccugcgucauggacaagugcgccggcaucuucaacgucgucuccaacucccucggccucgucauccuccucguccucgcccucuucaacuga

SEQ ID NO: 3917 - RNA, 1278 nt, Artificial Sequence
  derived and/or modified CDS sequence (opt2) from Pk(SGEHIH2-im-Y09-7)__AFD97211.1__CSP
augcgcaacuucauccuccucgccgucuccuccauccuccucgucgaccuccuccccacccacuucgagcacaacgucgaccucucccgcgccaucaacgucaacggcgucuccuucaacaacgucgacaccuccucccucggcgccgcccagguccgccaguccgccucccgcggccgcggccucggcgagaagcccaaggagggcgacgacaaggagaagaagaaggagaaggagaaggaggaggagcccaagaagcucaacgagaacaaccccaagaagcccaacgaggagggcgacggcgccaagcucaagcagcccaacgaggagggcgacggcgccaagcucaagcagcccaacgccgagggcggcgccaagcucaagcagcccaacgccgagggcggcgccaacgccggccagcccaacgccgagggcggcgccaacgccggccagcccaacgccgagggcggcgccaacgccggccagcccaacgccggcggcgccaacgccggccagcccaacgccgagggcggcgccaacgccggccagcccaacgccgagggcggcgccaacgccggccagcccaacgccgagggcggcgccaacgcccgccagcccaacgccgagggcggcgccaacgcccgccagcccaacgccgagggcggcgccaacgccggccagcccaacgccgagggcggcgccaacgccggccagcccaacgccgagggcggcgccaacgccggccagcccaacgccgagggcggcgccaacgcccgccagcccaacgccgagggcggcgccaacgccggccagcccaacgccgagggcggcgccaacgccggccagcccaacgccgagggcggcgccaacgcccgccagccccaggccgagggcggcggcgccaacgcccgccagccccaggccgagggcggcggcgccaacgcccgccagggcggcaacgagggcaacaagcaggccggcaagggccagggccagaacaaccagggcgccaacgcccccaacgagaaggucgucaacgacuaccuccagaagauccgcuccuccgucaccaucgaguggacccccugcuccgucaccugcggcaacggcguccgcauccgccgccgcgcccacgccgacaagaagaaggccgaggaccucaccauggacgaccucgaggucgaggccugcgucauggacaagugcgccggcaucuucaacgucgucuccaacacccucggccucgucauccuccucguccucgcccucuucaacuga

SEQ ID NO: 3918 - RNA, 1278 nt, Artificial Sequence
  derived and/or modified CDS sequence (opt2) from Pk(UMNGC3)__AHF20628.1__CSP
augaagaacuucauccuccucgccgucuccuccauccuccucgucgaccuccuccccacccacuucgagcacaacgucgaccucucccgcgccaucaacgucaacggcgucuccuucaacaacgucgacaccuccucccucggcgccgcccagguccgccaguccgccucccgcggccgcggccucggcgagaagcccaaggagggcgacgacaaggagaagaagaaggagaaggagaaggaggaggagcccaagaagcucaacgagaacaaccccaagaagcccaacgaggagggcgacggcgccaagcucgagcagcccaacgaggagggcgacggcgccaagcucaagcagcccaacgaggagggcgacggcgccaagcucaagcagcccaacgccgagggcggcgccaagcucaagcagcccaacgccgagggcggcgccaacgccggccagcccaacgccgagggcggcgccaacgccggccagcccaacgccgagggcggcgccaacgccggccagcccaacgccggcggcgccaacgccggccagcccaacgccgagggcggcgccaacgccggccagcccaacgccgagggcggcgccaacgccggccagcccaacgccgagggcggcgccaacgccggccagcccaacgccgagggcggcgccaacgcccgccagcccaacgccgagggcggcgccaacgccggccagcccaacgccgagggcggcgccaacgccggccagcccaacgccgagggcggcgccaacgccggccagcccaacgccgagggcggcgccaacgcccgccagcccaacgccgagggcggcgccaacgccggccagcccaacgccgagggcggcgccaacgccggccagcccaacgccgagggcggcgccaacgcccgccagccccaggccgagggcggcggcgccaacgcccgccagggcggcaacgagggcaacaagcaggccggcaagggccagggccagaacaaccagggcgccaacgcccccaacgagaaggucgucaacgacuaccuccagaagauccgcuccuccgucaccaucgaguggacccccugcuccgucaccugcggcaacggcguccgcauccgccgccgcgcccacgccgacaagaagaaggccgaggaccucaccaugggcgaccucgaggucgaggccugcgucauggacaagugcgccggcgucuucaacgucgucuccaacucccucggccucgucauccuccucguccucgcccucuucaacuga

SEQ ID NO: 3919 - RNA, 1275 nt, Artificial Sequence
  derived and/or modified CDS sequence (opt2) from Pk(prk-1)__ADX31295.1__CSP
augaagaacuucauccuccucgccgucuccuccauccuccucgucgaccuccuccccacccacuucgagcacaacgucgaccucucccgcgccaucaacgucaacggcgucuccuucaacaacgucgacaccuccucccucggcgccgcccagguccgccaguccgccucccgcggccgcggccucggcgagaagcccaaggagggcgacgacaaggagaagaagaaggagaaggagaaggaggaggagcccaagaagcucaacgagaacaaccccaagaagcccaacgaggagggcgacggcgccaagcucaagcagcccgacgaggagggcgacggcgccaagcucaagcagcccaacgaggagggcgacggcgccaagcucaagcagcccaacgccgagggcggcgccaagcucaagcagcccaacgccgagggcggcgccaacgccggccagcccaacgccgagggcggcgccaacgccggccagcccaacgccgagggcggcgccaacgccggccagcccaacgccggcggcgccaacgccggccagcccaacgccgagggcggcgccaacgccggccagcccaacgccgagggcggcgccaacgccggccagcccaacgccgagggcggcgccaacgccggccagcccaacgccgagggcggcgccaacgcccgccagcccaacgccgagggcggcgccaacgccggccagcccaacgccgagggcggcgccaacgccggccagcccaacgccgagggcggcgccaacgccggccagcccaacgccgagggcggcgccaacgcccgccagcccaacgccgaggucgagcagacccaggacaaccgcaugcagaaggucgagcagaugcagaccaccgagugccgcuccggcaccaacgcccgccagccccaggccgagggcggcggcgccaacgcccgccagggcggcaacgagggcaacaagcaggccggcaagggccagggccagaacaaccagggcgccaacgcccccaacgagaaggucgucaacgacuaccuccagaagauccgcuccuccgucaccaucgaguggacccccugcuccgucaccugcggcaacggcguccgcauccgccgccgcgcccacgccgacaagaagaaggccgaggaccucaccauggacgaccucgaggucgaggccugcgucauggacaagugcgccggcaucuucaacgucgucuccaacucccucggccucgucauccuccucguccucgcccucuucaacuga

SEQ ID NO: 3920 - RNA, 1251 nt, Artificial Sequence
  derived and/or modified CDS sequence (opt2) from Pk(UM0018C10)__AHF20648.1__CSP
augaagaacuucauccuccucgccgucuccuccauccuccucgucgaccuccuccccacccacuucgagcacaacgucgaccucucccgcgccaucaacgucaacggcgucuccuucaacaacgucgacaccuccucccucggcgccgcccagguccgccaguccgccucccgcggccgcggccucggcgagaagcccaaggagggcgacgacaaggagaagaagaaggagaaggagaaggaggaggagcccaagaagcucaacgagaacaagcccaagcagcccaacgucgagggcgacggcgccaagcucaagcagcccaacgaggagggcgacggcgccaagcucaagcagcccaacgaggagggcgacggcgccaagcucaagcagcccaacgccgagggcggcgccaagcucaagcagcccaacgccgagggcggcgccaacgccggccagcccaacgccgagggcggcgccaacgccggccagcccaacgccgagggcggcgccaacgccggccagcccaacgccgagggcggcgccaacgccggccagcccaacgccgagggcggcgccaacgccggccagcccaacgccgagggcggcgccaacgccggccagcccaacgccgagggcggcgccaacgccggccagcccaacgccgagggcggcgccaacgcccgccagcccaacgccgagggcggcgccaacgcccgccagcccaacgccgagggcggcgccaacgcccgccagcccaacgccgagggcggcgccaacgccggccagcccaacgccgagggcggcgccaacgccggccagcccaacgccgagggcggcgccaacgcccgccagccccaggccgagggcggcggcgccaacgcccgccagccccaggccgagggcggcggcgccaacgcccgccagggcggcaacgagggcaacaagcaggccggcaagggccagggccagaacaaccagggcgccaacgcccccaacgagaaggucgucaacgacuaccuccagaagauccgcuccuccgucaccaccgaguggacccccugcuccgucaccugcggcaacggcguccgcauccgccgccgcgcccacgccgacaagaagaaggccgaggaccucaccauggacgaccucgaggucgaggccugcgucauggacaagugcgccggcaucuucaacgucgucuccaacucccucggccucgucauccuccucguccucgcccucuucaacuga

SEQ ID NO: 3921 - RNA, 1251 nt, Artificial Sequence
  derived and/or modified CDS sequence (opt2) from Pk(UM0018C6)__AHF20646.1__CSP
augaagaacuucauccuccucgccgucuccuccauccuccucgucgaccuccuccccacccacuucgagcacaacgucgaccucucccgcgccaucaacgucaacggcgucuccuucaacaacgucgacaccuccucccucggcgccgcccagguccgccaguccgccucccgcggccgcggccucggcgagaagcccaaggagggcgacgacaaggagaagaagaaggagaaggagaaggaggaggagcccaagaagcucaacgagaacaagcccaagcagcccaacgucgagggcgacggcgccaagcucaagcagcccaacgaggagggcgacggcgccaagcucaagcagcccaacgaggagggcgacggcgccaagcucaagcagcccaacgccgagggcggcgccaagcucgagcagcccaacgccgagggcggcgccaacgccggccagcccaacgccgagggcggcgccaacgccggccagcccaacgccgagggcggcgccaacgccggccagcccaacgccgagggcggcgccaacgccggccagcccaacgccgagggcggcgccaacgccggccagcccaacgccgagggcggcgccaacgccggccagcccaacgccgagggcggcgccaacgccggccagcccaacgccgagggcggcgccaacgcccgccagcccaacgccgagggcggcgccaacgcccgccagcccaacgccgagggcggcgccaacgcccgccagcccaacgccgagggcggcgccaacgccggccagcccaacgccgagggcggcgccaacgccggccagcccaacgccgagggcggcgccaacgcccgccagccccaggccgagggcggcggcgccaacgcccgccagccccaggccgagggcggcggcgccaacgcccgccagggcggcaacgagggcaacaagcaggccggcaagggccagggccagaacaaccagggcgccaacgcccccaacgagaaggucgucaacgacuaccuccagaagauccgcuccuccgucaccaccgaguggacccccugcuccgucaccugcggcaacggcguccgcauccgccgccgcgcccacgccgacaagaagaaggccgaggaccucaccauggacgaccucgaggucgaggccugcgucauggacaagugcgccggcaucuucaacgucgucuccaacucccucggccucgucauccuccucguccucgcccucuucaacuga

SEQ ID NO: 3922 - RNA, 1242 nt, Artificial Sequence
  derived and/or modified CDS sequence (opt2) from Pk(SGEHIH1-im-Y09-95)__AFD97208.1__CSP
augaagaacuucauccuccucgccgucuccuccauccuccucgucgaccuccuccccacccacuucgagcacaacgucgaccucucccgcgccaucaacgucaacggcgucucccucaacaacgucgacaccuccucccucggcgccgcccagguccgccaguccgccucccgcggccgcggccucggcgagaagcccaaggagggcgacgacaaggagaagaagaaggagaaggagaaggaggaggagcccaagaagcucaacgagaacaaccccaagaagcccaacgaggagggcgacggcgccaagcucaagcagcccaacgccgagggcggcgccaagcucaagcagcccaacgccgagggcggcgccaacgccggccagcccaacgccgagggcggcgccaacgccggccagcccaacgccgagggcggcgccaacgccggccagcccaacgccggcggcgccaacgccggccagcccaacgccgagggcggcgccaacgccggccagcccaacgccgagggcggcgccaacgucggccagcccaacgccgagggcggcgccaacgcccgccagcccaacgccgagggcggcgccaacgcccgccagcccaacgccgagggcggcgccaacgccggccagcccaacgccgagggcggcgccaacgccggccagcccaacgccgagggcggcgccaacgccggccagcccaacgccgagggcggcgccaacgcccgccagcccaacgccgagggcggcgccaacgccggccagcccaacgccgagggcggcgccaacgccggccagcccaacgccgagggcggcgccaacgcccgccagccccaggccgagggcggcggcgccaacgcccgccagccccaggccgagggcggcggcgccaacgcccgccagggcggcaacgagggcaacaagcgcgccggcaagggccagggccagaacaaccagggcgccaacgcccccaacgagaaggucgucaacgacuaccuccagaagauccgcuccuccgucaccaucgaguggacccccugcuccgucaccugcggcaacggcguccgcauccgccgccgcgcccacgccgacaagaagaaggccgaggaccucaccauggacgaccucgaggucgaggccugcgucauggacaagugcgccggcaucuucaacgucgucuccaacucccucggccucgucauccuccucguccucgcccucuucaacuga

SEQ ID NO: 3923 - RNA, 1221 nt, Artificial Sequence
  derived and/or modified CDS sequence (opt2) from Pk(KH100)__ADN94497.1__CSP
augaagaacuucauccuccucgccgucuccuccauccuccucgucgaccuccuccccacccacuucgagcacaacgucgaccucucccgcgccaucaacgucaacggcgucuccuucaacaacgucgacaccuccucccucggcgccgcccagguccgccaguccgccucccgcggccgcggccucggcgagaagcccaaggagggcgacgacaaggagaagaagaaggagaaggagaaggaggaggagcccaagaaccucaacgagaacaagcccaagcagcccaacgccgagggcgacggcgccaagcccaagcagcccaacgccgagggcgacggcgccaagcucaagcagcccaacgccgagggcgacggcgccaagcucaagcagcccaacgccgagggcgacggcggcaacgcccgccagcccaacgccgagggcgacggcggcaacgcccgccagcccaacgccgagggcgacggcggcaacgcccgccagcccaacgccgagggcgacggcggcaacgcccgccagcccaacgccgagggcgacggcggcaacgcccgccagcccaacgccgagggcgacggcggcaacgcccgccagcccaacgccgagggcgacggcggcaacgcccgccagcccaacgccgagggcgacggcggcaacgcccgccagcccaacgccgagggcgacggcggcaacgcccgccagcccaacgccgagggcgacggcggcaacgcccgccagcccaacgccgagggcgacggcggcaacgcccgccagcccaacgccgagggcgacggcgccaacgcccgccagcccaacgccgagggcgacggcgccaacgcccgccagccccaggccgagggcggcggcggcaacgcccgccagggcggcaacgagggcaacaagcaggccggcaagggccagggccagaacaaccagggcgccaacgcccccaacgagaaggucgucaacgacuaccuccagaagauccgcuccuccgucaccaccgaguggacccccugcuccgucaccugcggcaacggcguccgcauccgccgccgcgcccacgccgacaagaagaaggccgaggaccucaccauggacgaccucgaggucgaggccugcgucauggacaagugcgccggcaucuucaacgucgucuccaacucccucggccucgucauccuccucguccucgcccucuucaacuga

SEQ ID NO: 3924 - RNA, 1221 nt, Artificial Sequence
  derived and/or modified CDS sequence (opt2) from Pk(KH294)__ADN94542.1__CSP
augaagaacuucauccuccucgccgucuccuccauccuccucgucgaccuccuccccacccacuucgagcacaacgucgaccucucccgcgccaucaacgucaacggcgucuccuucaacaacgucgacaccuccucccucggcgccgcccagguccgccaguccgccucccgcggccgcggccucggcgagaagcccaaggagggcgacgacaaggagaagaagaaggagaaggagaaggaggaggagcccaagaaccucaacgagaacaagcccaagcagcccaacgccgagggcgacggcgccaagcccaagcagcccaacgccgagggcgacggcgccaagcucaagcagcccaacgccgagggcgacggcgccaagcucaagcagcccaacgccgagggcgacggcggcaacgcccgccagcccaacgccgagggcgacggcggcaacgcccgccagcccaacgccgagggcgacggcggcaacgcccgccagcccaacgccgagggcgacggcggcaacgcccgccagcccaacgccgagggcgacggcggcaacgcccgccagcccaacgccgagggcgacggcggcaacgcccgccagcccaacgccgagggcgacggcggcaacgcccgccagcccaacgccgagggcgacggcggcaacgcccgccagcccaacgccgagggcgacggcggcaacgcccgccagcccaacgccgagggcgacggcggcaacgcccgccagcccaacgccgagggcgacggcggcaacgcccgccagcccaacgccgagggcgacggcggcaacgcccgccagcccaacgccgagggcgacggcgccaacgcccgccagccccaggccgagggcggcggcggcaacgcccgccagggcggcaacgagggcaacaagcaggccggcaagggccagggccagaacaaccagggcgccaacgcccccaacgagaaggucgucaacgacuaccuccagaagauccgcuccuccgucaccaccgaguggacccccugcuccgucaccugcggcaacggcguccgcauccgccgccgcgcccacgccgacaagaagaaggccgaggaccucaccauggacgaccucgaggucgaggccugcgucauggacaagugcgccggcaucuucaacgucgucuccaacucccucggccucgucauccuccucguccucgcccucuucaacuga

SEQ ID NO: 3925 - RNA, 1218 nt, Artificial Sequence
  derived and/or modified CDS sequence (opt2) from Pk(UM0015C4)__AHF20661.1__CSP
augaagaacuucauccuccucgccgucuccuccauccuccucgucgaccuccuccccacccacuucgagcacaacgucgaccucucccgcgccaucaacgucaacggcgucuccuucaacaacgucgacaccuccucccucggcgccgcccagguccgccaguccgccucccgcggccgcggccucggcgagaagcccaaggagggcgacgacaaggagaagaagaaggagaaggagaaggaggaggagcccaagaagcucgacgagaacaagcccaagcagcccaacgucgagggcgacggcgccaagcucaagcagcccaacgaggagggcgacggcgccaagcucaagcagcccaacgaggagggcgacggcgccaagcucaagcagcccaacgccgagggcggcgccaagcucaagcagcccaacgccgagggcggcgccaacgccggccagcccaacgccgagggcggcgccaacgccggccagcccaacgccgagggcggcgccaacgccggccagcccaacgccgagggcggcgccaacgccggccagcccaacgccgagggcggcgccaacgccggccagcccaacgccgagggcggcgccaacgccggccagcccaacgccgagggcggcgccaacgcccgccagcccaacgccgagggcggcgccaacgcccgccagcccaacgccgagggcggcgccaacgcccgccagcccaacgccgagggcggcgccaacgccggccagcccaacgccgagggcggcgccaacgccggccagcccaacgccgagggcggcgccaacgcccgccagccccaggccgagggcggcggcgccaacgcccgccagccccaggccgagggcggcggcgccaacgcccgccagggcggcaacgagggcaacaagcaggccggcaagggccagggccagaacaaccagggcgccaacgcccccaacgagaaggucgucaacgacuaccuccagaagauccgcuccuccgucaccaccgaguggacccccugcuccgucaccugcggcaacggcguccgcauccgccgccgcgcccacgccgacaagaagaaggccgaggaccucaccauggacgaccucgaggucgaggccugcgucauggacaagugcgccggcaucuucuccgucgucuccaacucccucggccucgucauccuccucguccucgcccucuucaacuga

SEQ ID NO: 3926 - RNA, 1218 nt, Artificial Sequence
  derived and/or modified CDS sequence (opt2) from Pk(UM0015C7)__AHF20662.1__CSP
augaagaacuucauccuccucgccgucuccuccauccuccucgucgaccuccuccccacccacuucgagcacaacgucgaccucucccgcgccaucaacgucaacggcgucuccuucaacaacgucgacaccuccucccucggcgccgcccagguccgccaguccgccucccgcggccgcggccucggcgagaagcccaaggagggcgacgacaaggagaagaagaaggagaaggagaaggaggaggagcccaagaagcucaacgagaacaagcccaagcagcccaacgucgagggcgacggcgccaagcucaagcagcccaacgaggagggcgacggcgccaagcucaagcagcccaacgaggagggcgacggcgccaagcucaagcagcccaacgccgagggcggcgccaagcucaagcagcccaacgccgagggcggcgccaacgccggccagcccaacgccgagggcggcgccaacgccggccagcccaacgccgagggcggcgccaacgccggccagcccaacgccgagggcggcgccaacgccggccagcccaacgccgagggcggcgccaacgccggccagcccaacgccgagggcggcgccaacgccggccagcccaacgccgagggcggcgccaacgcccgccagcccaacgccgagggcggcgccaacgcccgccagcccaacgccgagggcggcgccaacgcccgccagcccaacgccgagggcggcgccaacgccggccagcccaacgccgagggcggcgccaacgccggccagcccaacgccgagggcggcgccaacgcccgccagccccaggccgagggcggcggcgccaacgcccgccagccccaggccgagggcggcggcgccaacgcccgccagggcggcaacgagggcaacaagcaggccggcaagggccagggccagaacaaccagggcgccaacgcccccaacgagaaggucgucaacgacuaccuccagaagauccgcuccuccgucaccaccgaguggacccccugcuccgucaccugcggcaacggcguccgcauccgccgccgcgcccacgccgacaagaagaaggccgaggaccucaccauggacgaccucgaggucgaggccugcgucauggacaagugcgccggcaucuucaacgucgucuccaacucccucggccucgucauccuccucguccucgcccucuucaacuga

SEQ ID NO: 3927 - RNA, 1218 nt, Artificial Sequence
  derived and/or modified CDS sequence (opt2) from Pk(UM009C4)__AHF20644.1__CSP
augaagaacuucauccuccucgccgucuccuccauccuccucgucgaccuccuccccacccacuucgagcacaacgucgaccucucccgcgccaucaacgucaacggcgucuccuucaacaacgucgacaccuccucccucggcgccgcccagguccgccaguccgccucccgcggccgcggccucggcgagaagcccaaggagggcgacgacaaggagaagaagaaggagaaggagaaggaggaggagcccaagaagcucaacgagaacaagcccaagcagcccaacgucgagggcgacggcgccaagcucaagcagcccaacgaggagggcgacggcgccaagcucaagcgccccaacgaggagggcgacggcgccaagcucaagcagcccaacgccgagggcggcgccaagcccaagcagcccaacgccgagggcggcgccaacgccggccagcccaacgccgagggcggcgccaacgccggccagcccaacgccgagggcggcgccaacgccggccagcccaacgccgagggcggcgccaacgccggccagcccaacgccgagggcggcgccaacgccggccagcccaacgccgagggcggcgccaacgccggccagcccaacgccgagggcggcgccaacgcccgccagcccaacgccgagggcggcgccaacgcccgccagcccaacgccgagggcggcgccaacgcccgccagcccaacgccgagggcggcgccaacgccggccagcccaacgccgagggcggcgccaacgccggccagcccaacgccgagggcggcgccaacgcccgccagccccaggccgagggcggcggcgccaacgcccgccgcccccaggccgagggcggcggcgccaacgcccgccagggcggcaacgagggcaacaagcaggccggcaagggccagggccagaacaaccagggcgccaacgcccccaacgagaaggucgucaacgacuaccuccagaagauccgcuccuccgucaccaccgaguggacccccugcuccgucaccugcggcaacggcguccgcauccgccgccgcgcccacgccgacaagaagaaggccgaggaccucaccauggacgaccucgaggucgaggccugcgucauggacaagugcgccggcaucuucaacgucgucuccaacucccucggccucgucauccuccucgcccucgcccucuucaacuga

SEQ ID NO: 3928 - RNA, 1212 nt, Artificial Sequence
  derived and/or modified CDS sequence (opt2) from Pk(TN027)__AFG25481.1__CSP
augaagaacuucauccuccucgccgucuccuccauccuccucgucgaccuccuccccacccacuucgagcacaacgucgaccucucccgcgccaucaacgucaacggcgucuccuucaacaacgucgacaccuccucccucggcgccgcccagguccgccaguccgccucccgcggccgcggccucggcgagaagcccaaggagggcgacgacaaggagaagaagaaggagaaggagaaggaggaggagcccaagaaccucaacgagaacaagcccaagcagcccaacgccgagggcgacggcgccaagcucaagcagcccaacgccgagggcgacggcgccaagcucaagcagcccaacgccgagggcgacggcgccaagcucaagcagccccaggccgagggcgacggcgccaacgcccgccagccccaggccgagggcgacggcgccaacgcccgccagccccaggccgagggcgacggcgccaacgcccgccagccccaggccgagggcgacggcgccaacgcccgccagccccaggccgagggcgacggcgccaacgcccgccagccccaggccgagggcgacggcgccaacgcccgccagccccaggccgagggcgacggcgccaacgcccgccagccccaggccgagggcgacggcgccaacgcccgccagccccaggccgagggcgacggcgccaacgcccgccagccccaggccgagggcgacggcgccaacgcccgccagccccaggccgagggcggcggcgccaacgcccgccagccccaggccgagggcgacggcgccaacgcccgccaggcccaggcccagggcgacggcggcaacgcccgccagggcggcaacggcggcggcgcccccgccggcggcaacgagggcaacaagcaggccggcaagggccagggccagaacaaccagggcgccaacgcccccaacgagaaggucgucaacgacuaccuccagaagauccgcuccuccgucaccaccgaguggacccccugcuccgucaccugcggcaacggcguccgcauccgccgccgcgcccacgccgacaagaagaaggccgaggaccucaccauggacgaccucgaggucgaggccugcgucauggacaagugcgccggcaucuucaacgucgucuccaacucccucggccucgucauccuccucguccucgcccucuucaacuga

SEQ ID NO: 3929 - RNA, 1188 nt, Artificial Sequence
  derived and/or modified CDS sequence (opt2) from Pk(UM0034C7)__AHF20657.1__CSP
augcgcaacuucauccuccucgccgucuccuccauccuccucgucgaccuccuccccacccacuucgagcacaacgucgaccucucccgcgccaucaacgucaacggcgucuccuucaacaacgucgacaccuccucccucggcgccgcccagguccgccaguccgccucccgcggccgcggccucggcgagaagcgcaaggagggcgccgacaaggagaagaagaaggagaaggaggaggagcccaagaagcccaacgagaacaagcucaagcagcccaaccccgaccagccccaggcccagggcaacggcgccaacgccggccagccccaggcccagggcgacggcgccaacgccggccagccccaggcccagggcgacggcgccaacgccggccagccccaggcccagggcgacggcgccaacgccggccagccccaggcccagggcgacggcgccaacgccggccagccccaggcccagggcgacggcgccaacgccggccagccccaggcccagggcgacggcgccaacgccggccagccccaggcccagggcgacggcgccaacgccggccagccccaggcccagggcgacggcgccaacgccggccagccccaggcccagggcgacggcgccaacgccggccagccccaggcccagggcgacggcgccaacgccggccagccccaggcccagggcgacggcgccaacgccggccagccccaggcccagggcgacggcgccaacgccggccagccccaggcccagggcgaccgcgccaacgccggccagccccaggcccagggcgacggcgccaacgucccccgccagggccgcaacggcggcggcgcccccgccggcggcaacgagggcaacaagcaggccggcaagggccagggccagaacaaccagggcgccaacgcccccaacgagaaggucgucaacgacuaccuccacaagauccgcuccuccgucaccaccgaguggacccccugcuccgucaccugcggcaacggcguccgcauccgccgcaaggcccacgccggcaacaagaaggccgaggaccucaccauggacgaccucgaggucgaggccugcgucauggacaagugcgccggcaucuucaacgucgucuccaacucccucggccucgucauccuccucguccucgcccucuucaacuga

SEQ ID NO: 3930 - RNA, 1185 nt, Artificial Sequence
  derived and/or modified CDS sequence (opt2) from Pk(KH225)__ADN94498.1__CSP
augaagaacuucauccuccucgccgucuccuccauccuccucgucgaccuccuccccacccacuucgagcacaacgucgaccucucccgcgccaucaacgucaacggcgucuccuucaacaacgucgacaccuccucccucggcgccgcccagguccgccaguccgccucccgcggccgcggccucggcgagaagcccaaggagggcgacgacaaggagaagaagaaggagaaggagaaggaggaggagcccaagaaccucaacgagaacaagcccaagcagcccaacgccgagggcgacggcgccaagcucaagcagcccaacgccgagggcgacggcgccaagcucaagcagcccaacgccgagggcgacggcggcaacgcccgccagcccaacgccgagggcgacggcggcaacgcccgccagcccaacgccgagggcgacggcggcaacgcccgccagcccaacgccgagggcgacggcggcaacgcccgccagcccaacgccgagggcgacggcggcaacgcccgccagcccaacgccgagggcgacggcggcaacgcccgccagcccaacgccgagggcgacggcggcaacgcccgccagcccaacgccgagggcgacggcggcaacgcccgccagcccaacgccgagggcgacggcggcaacgcccgccagcccaacgccgagggcgacggcggcaacgcccgccagcccaacgccgagggcgacggcggcaacgcccgccagcccaacgccgagggcgacggcggcaacgcccgccagcccaacgccgagggcgacggcgccaacgcccgccagccccaggccgagggcggcggcggcaacgcccgccagggcggcaacgagggcaacaagcaggccggcaagggccagggccagaacaaccagggcgccaacgcccccaacgagaaggucgucaacgacuaccuccagaagauccgcuccuccgucaccaccgaguggacccccugcuccgucaccugcggcaacggcguccgcauccgccgccgcgcccacgccgacaagaagaaggccgaggaccucaccauggacgaccucgaggucgaggccugcgucauggacaagugcgccggcaucuucaacgucgucuccaacucccucggccucgucauccuccucguccucgcccucuucaacuga

SEQ ID NO: 3931 - RNA, 1179 nt, Artificial Sequence
  derived and/or modified CDS sequence (opt2) from Pk(UM001C7)__AHF20637.1__CSP
augaagaacuucauccuccucgccgucuccuccauccuccucgucgaccuccuccccacccacuucgagcacaacgucgaccucucccgcgccaucaacgucaacggcgucuccuucaacaacgucgacaccuccucccucggcgccgcccagguccgccaguccgccucccgcggccgcggccucggcgagaagcccaaggagggcgccgacaaggagaagaagaaggagaagggcaaggagaaggaggaggagcccaagaagcccaacgagaacaagcucaagcagcccaacgagggccagccccaggcccagggcgacggcgccaacgccggccagccccaggcccagggcgacggcgccaacgccggccagccccaggcccagggcgacggcgccaacgccggccagccccaggcccagggcgacggcgccaacgccggccagccccaggcccagggcgacggcgccaacgccggccagccccaggcccagggcgacggcgccaacgccggccagccccaggcccagggcgacggcgccaacgccggccagccccaggcccagggcgacggcgccaacggcgacggcgccaacgccggccagccccaggcccagggcgacggcgccaacgccggccagccccaggcccagggcgacggcgccaacgccggccagccccaggcccagggcgacggcgccaacgccggccagccccaggcccagggcgacggcgccaacgccggccagccccaggcccagggcgaccgcgccaacgccggccagccccaggcccagggcgacggcgccaacgucccccgccagggccgcaacggcggcggcgcccccgccggcggcaacgagggcaacaagcaggccggcaagggccagggccagaacaaccagggcgccaacgcccccaacgagaaggucgucaacgacuaccuccacaagauccgcuccuccgucaccaccgaguggacccccugcuccgucaccugcggcaacggcguccgcauccgccgcaaggcccacgccggcaacaagaaggccgaggaccucaccauggacgaccucgaggucgaggccugcgucauggacaagugcgccggcaucuucaacgucgucuccaacucccucggccucgucauccuccucguccucgcccucuucaacuga

SEQ ID NO: 3932 - RNA, 1140 nt, Artificial Sequence
  derived and/or modified CDS sequence (opt2) from Pk(SGEHIWM4-Y09-15)__AFD97227.1__CSP
augaagaacuucauccuccucgccgucuccuccauccuccucgucgaccuccuccccaccuacuucgagcacaacgucgaccucucccgcgccgucaacgucaacggcgucuccuucaacuccgucgacaccuccucccucggcgccgcccagguccgccaguccgccucccgcggccgcggccucggcgagaagcccaaggagggcgccgacaaggagaagaagaaggagaaggagaaggaggaggagcccaagaagcccaacgagaacaagcucaagcagccccagggcaacggcggcgccggccaggcccagcccgagggcaacggcggcgccggccaggcccagcccgagggcaacggcggcgccggccaggcccagcccgagggcaacggcggcgccggccaggcccagcccgagggcaacggcggcgccggccaggcccagcccgagggcaacggcggcgccggccaggcccagcccgagggcaacggcggcgccggccaggcccagcccgagggcaacggcggcgccggccaggcccagccccagggcaacggcggcgccggccaggcccagccccagggcaacggcggcgccggccaggcccagccccagggcaacggcggcgccggccaggcccagccccagggcaacggcggcgccggccaggcccagcccgagggcaacggcggcgccggccaggcccagccccagggcaacggcggcgccggccaggcccagcccgagggcaaccgcgaggcccccgcccagccccagggcaacggcggcgccggccaggcccagccccagaagaacgagggcggcaacgccggcgcccgcaagggccagggccagaacucccagggcgccaacgcccccaacgagaaggucgucaacgacuaccuccagaagauccgcuccuccgucaccaccgaguggacccccugcuccgucaccugcggcaacggcguccgcauccgccgccgcgcccacgccgacaagaagaaggccggcgaccucaccauggacgaccucgaggucgaggccugcgucauggacaagugcgccggcaucuucaacgccgucuccaacucccucggccucgucauccuccucguccucgcccucuucaacuga

SEQ ID NO: 3933 - RNA, 1140 nt, Artificial Sequence
  derived and/or modified CDS sequence (opt2) from Pk(UM002C3)__AHF20638.1__CSP
augaagaacuucauccuccucgccgucuccuccauccuccucgucgaccuccuccccaccuacuucgagcacaacgucgaccucucccgcgccaucaacgucaacggcgucuccuucaacaacgucgacaccuccucccucggcgccgcccagguccgccaguccgccucccgcggccgcggccucggcgagaagcccaaggagggcgccgacaaggagaagaagaaggagaaggagaaggagaaggaggaggagcccaagaagcccaacgagaacaagcucaagcagcccgagggcaacggcggcgccggccccgcccagcccgagggcaacggcggcgccggccccgcccagcccgagggcaacggcggcgccggccccgcccagcccgagggcaacggcggcgccggccccgcccagcccgagggcaacggcggcgccggccccgcccagcccgagggcaacggcggcgccggccccgcccagcccgagggcaacggcggcgccggccccgcccagcccgagggcaacggcggcgccggccccgcccagcccgagggcaacggcggcgccggccccgcccagcccggcggccagguccagcacaaccgcaaggagaugggcggccagguccagcacaaccgcaaggagaugggcggccagguccagcacaaccacaaggagaugggcggccagguccagcacaaccacaaggagaugggcggcgccggccccgcccagccccagggcaacggcggcgccggccccgcccagccccagggcaacggcggcgccggccaggcccagccccagaagaacgagggcggcaacgccggcgcccgcaagggccagggccagaacaaccagggcgccaacgcccccaacgagaaggucgucaacgacuaccuccagaagauccgcuccuccgucaccaccgaguggacccccugcuccgucaccugcggcgacggcguccgcaucaagcgccgcgcccacgccgacaagaagaaggccgaggaccucaccauggacgaccucgaggucgaggccugcgucauggacaagugcgccggcaucuucaacgucgucuccaacucccucggccucgucauccuccucguccucgcccucuucaacuga

SEQ ID NO: 3934 - RNA, 1128 nt, Artificial Sequence
  derived and/or modified CDS sequence (opt2) from Pk(UM0021C6)__AHF20666.1__CSP
augcgcaacuucauccuccucgccgucuccuccauccuccucgucgaccucuuccccacccacuucgagcacaacgucgaccucucccgcgccaucaacgucaacggcgucuccuucaacaacgucgacaccuccucccucggcgccgcccagguccgccaguccgccucccgcggccgcggccucggcgagaagcccaaggagggcgccgacaaggagaagaagaaggagaagggcaaggagaaggaggaggagcccaagaagcccaacgagaacaagcucaagcagcccaacgagggccagccccaggcccagggcgacggcgccaacgccggccagccccaggcccagggcgacggcgccaacgccggccagccccaggcccagggcgacggcgccaacgccggccagccccaggcccagggcgacggcgccaacgccggccagccccaggcccagggcgacggcgccaacgccggccagccccaggcccagggcgacggcgccaacgccggccagccccaggcccagggcgacggcgccaacgccggccagccccaggcccagggcgacggcgccaacgccggccagccccaggcccagggcgacggcgccaacgccggccagccccaggcccagggcgacggcgccaacaccggccagccccaggcccagggcgacggcgccaacgccggccagccccaggcccagggcgaccgcgccaacgccggccagccccaggcccagggcgacggcgccaacgucccccgccagggccgcaacggcggcggcgcccccgccggcggcaacgagggcaacaagcaggccggcaagggccagggccagaacaaccagggcgccaacgcccccaacgagaaggucgucaacgacuaccuccacaagauccgcuccuccgucaccaccgaguggacccccugcuccgucaccugcggcaacggcguccgcauccgccgcaaggcccacgccggcaacaagaaggccgaggaccucaccauggacgaccucgaggucgaggccugcgucauggacaagugcgccggcaucuucaacgucgucuccaacucccucggccucgucauccuccucguccucgcccucuucaacuga

SEQ ID NO: 3935 - RNA, 1128 nt, Artificial Sequence
  derived and/or modified CDS sequence (opt2) from Pk(UM0050C2)__AHF20664.1__CSP
augaagaacuucauccuccucgccgucuccuccauccuccucgucgaccuccuccccacccacuucgagcacaacgucgaccucucccgcgccaucaacgucaacggcgucuccuucaacaacgucgacaccuccucccucggcgccgcccagguccgccaguccgccucccgcggccgcggccucggcgagaagcccaaggagggcgccgacaaggagaagaagaaggagaagggcaaggagaaggaggaggagcccaagaagcccaacgagaacaagcucaagcagcccaacgagggccagccccaggcccagggcgacggcgccaacgccggccagccccaggcccagggcgacggcgccaacgccggccagccccaggcccagggcgacggcgccaacgccggccagccccaggcccagggcgacggcgccaacgccggccagccccaggcccagggcgacggcgccaacgccggccagccccaggcccagggcgacggcgccaacgccggccagccccaggcccagggcgacggcgccaacgccggccagccccaggcccagggcgacggcgccaacgccggccagccccaggcccagggcgacggcgccaacgccggccagccccaggcccagggcgacggcgccaacgccggccagccccaggcccagggcgacggcgccaacgccggccagccccaggcccagggcgaccgcgccaacgccggccagccccaggcccagggcgacggcgccaacgucccccgccagggccgcaacggcggcggcgcccccgccggcggcaacgagggcaacaagcaggccggcaagggccagggccagaacaaccagggcgccaacgcccccaacgagaaggucgucaacgacuaccuccacaagauccgcuccuccgucaccaccgaguggacccccugcuccgucaccugcggcaacggcguccgcauccgccgcaaggcccacgccggcaacaagaaggccgaggaccucaccauggacgaccucgaggucgaggccugcgucauggacaagugcgccggcaucuucaacgucgucuccaacucccucggccucgucauccuccucguccucgcccucuucaacuga

SEQ ID NO: 3936 - RNA, 1128 nt, Artificial Sequence
  derived and/or modified CDS sequence (opt2) from Pk(UMMK569C20)__AHF20669.1__CSP
augaagaacuucauccuccucgccgucuccuccauccuccucgucgaccuccuccccacccacuucgagcacaacgucgaccucucccgcgccaucaacgucaacggcgucuccuucaacaacgucgacaccuccucccucggcgccgcccagguccgccaguccgccucccgcggccgcggccucggcgagaagcccaaggagggcgccgacaaggagaagaagaaggagaagggcaaggagaaggaggaggagcccaagaagcccaacgagaacaagcucaagcagcccaacgagggccagccccaggcccagggcgacggcgccaacgccggccagccccaggcccagggcgacggcgccaacgccggccagccccaggcccagggcgacggcgccaacgccggccagccccaggcccagggcgacggcgccaacgccggccagccccaggcccgcggcgacggcgccaacgccggccagccccaggcccagggcgacggcgccaacgccggccagccccaggcccagggcgacggcgccaacgccggccagccccaggcccagggcgacggcgccaacgccggccagccccaggcccagggcgacggcgccaacgccggccagccccaggcccagggcgacggcgccaacgccggccagccccaggcccagggcgacggcgccaacgccggccagccccaggcccagggcgaccgcgccaacgccggccagccccaggcccagggcgacggcgccaacgucccccgccagggccgcaacggcggcggcgcccccgccggcggcaacgagggcaacaagcaggccggcaagggccagggccagaacaaccagggcgccaacgcccccaacgagaaggucgucaacgacuaccuccacaagauccgcuccuccgucaccaccgaguggacccccugcuccgucaccugcggcaacggcguccgcauccgccgcaaggcccacgccggcaacaagaaggccgaggaccucaccauggacgaccucgaggucgaggccugcgucauggacaagugcgccggcaucuucaacgucgucuccaacucccucggccucgucauccuccucguccucgcccucuucaacuga

SEQ ID NO: 3937 - RNA, 1116 nt, Artificial Sequence
  derived and/or modified CDS sequence (opt2) from Pk(KH433)__ADN94489.1__CSP
augcgcaacuucauccuccucgccgucuccuccauccuccucgucgaccuccuccccacccacuucgagcacaacgucgaccucucccgcgccaucaacgucaacggcgucuccuucaacaacgucgacaccuccucccucggcgccgcccagguccgccaguccgccucccgcggccgcggccucggcgagaagcgcaaggagggcgccgacaaggagaagaagaaggagaaggaggaggagcccaagaagcccaacgagaacaagcucaagcagcccaaccccggccagccccaggcccagggcgacggcgccaacgccggccagccccaggcccagggcgacggcgccaacgccggccagccccaggcccagggcgacggcgccaacgccggccagccccaggcccagggcgacggcgccaacgccggccagccccaggcccagggcgacggcgccaacgccggccagccccaggcccagggcgacggcgccaacgccggccagccccaggcccagggcgacggcgccaacgccggccagccccaggcccagggcgacggcgccaacgccggccagccccaggcccagggcgacggcgccaacgccggccagccccaggcccagggcgacggcgccaacgccggccagccccaggcccagggcgacggcgccaacgccggccagccccaggcccagggcgaccgcgccaacgccggccagccccaggcccagggcgacggcgccaacgucccccgccagggccgcaacggcggcggcgcccccgccggcggcaacgagggcaacaagcaggccggcaagggccagggccagaacaaccagggcgccaacgcccccaacgagaaggucgucaacgacuaccuccacaagauccgcuccuccgucaccaccgaguggacccccugcuccgucaccugcggcaacggcguccgcauccgccgcaaggcccacgccggcaacaagaaggccgaggaccucaccauggacgaccucgaggucgaggccugcgucauggacaagugcgccggcaucuucaacgucgucuccaacucccucggccucgucauccuccucguccucgcccucuucaacuga

SEQ ID NO: 3938 - RNA, 1116 nt, Artificial Sequence
  derived and/or modified CDS sequence (opt2) from Pk(UM0034C10)__AHF20658.1__CSP
augcgcaacuucauccuccucgccgucuccuccauccuccucgucgaccuccuccccacccacuucgagcacaacgucgaccucucccgcgccaucaacgucaacggcgucuccuucaacaacgucgacaccuccucccucggcgccgcccagguccgccaguccgccucccgcggccgcggccucggcgagaagcgcaaggagggcgccgacaaggagaagaagaaggagaaggaggaggagcccaagaagcccaacgagaacaagcucaagcagcccaaccccgaccagccccaggcccagggcgacggcgccaacgccggccagccccaggcccagggcgacggcgccaacgccggccagccccaggcccagggcgacggcgccaacgccggccagccccaggcccagggcgacggcgccaacgccggccagccccaggcccagggcgacggcgccaacgccggccagccccaggcccagggcgacggcgccaacgccggccagccccaggcccagggcgacggcgccaacgccggccagccccaggcccagggcgacggcgccaacgccggccagccccaggcccagggcgacggcgccaacgccggccagccccaggcccagggcgacggcgccaacgccggccagccccaggcccagggcgacggcgccaacgccggccagccccaggcccagggcgaccgcgccaacgccggccagccccaggcccagggcgacggcgccaacgucccccgccagggccgcaacggcggcggcgcccccgccggcggcaacgagggcaacaagcaggccggcaagggccagggccagaacaaccagggcgccaacgcccccaacgagaaggucgucaacgacuaccuccacaagauccgcuccuccgucaccaccgaguggacccccugcuccgucaccugcggcaacggcguccgcauccgccgccgccagaacgccggcaacaagaaggccgaggaccucaccauggacgaccucgaggccgaggccugcgucauggacaagugcgccggcaucuucaacgucgucuccaacucccucggccucgucauccuccucguccucgcccucuucaacuga

SEQ ID NO: 3939 - RNA, 1116 nt, Artificial Sequence
  derived and/or modified CDS sequence (opt2) from Pk(UM0034C6)__AHF20656.1__CSP
augcgcaacuucauccuccucgccgucuccuccauccuccucgucgaccuccuccccacccacuucgagcacaacgucgaccucucccgcgccaucaacgucaacggcgucuccuucaacaacgucgacaccuccucccucggcgccgcccagguccgccaguccgccucccgcggccgcggccucggcgagaagcgcaaggagggcgccgacaaggagaagaagaaggagaaggaggaggagcccaagaagcccaacgagaacaagcucaagcagcccaaccccgaccagccccaggcccagggcgacggcgccaacgccggccagccccaggcccagggcgacggcgccaacgccggccagccccaggcccagggcgacggcgccaacgccggccagccccaggcccagggcgacggcgccaacgccggccagccccaggcccagggcgacggcgccaacgccggccagccccaggcccagggcgacggcgccaacgccggccagccccaggcccagggcgacggcgccaacgccggccagccccaggcccagggcgacggcgccaacgccggccagccccaggcccagggcgacggcgccaacgccggccagccccaggcccagggcgacggcgccaacgccggccagccccaggcccagggcgacggcgccaacgccggccagccccaggcccagggcgaccgcgccaacgccggccagccccaggcccagggcgacggcgccaacgucccccgccagggccgcaacggcggcggcgcccccgccggcggcaacgagggcaacaagcaggccggcaagggccagggccagaacaaccagggcgccaacgcccccaacgagaaggucgucaacgacuaccuccacaagauccgcuccuccgucaccaccgaguggacccccugcuccgucaccugcggcaacggcguccgcauccgccgcaaggcccacgccggcaacaagaaggccgaggaccucaccauggacgaccucgaggucgaggccugcgucauggacaagugcgccggcaucuucaacgucgucuccaacucccucggccucgucauccuccucguccucgcccucuucaacuga

SEQ ID NO: 3940 - RNA, 1107 nt, Artificial Sequence
  derived and/or modified CDS sequence (opt2) from Pk(SGEHIWM16-Y09-85)__AFD97232.1__CSP
augaagaacuucauccuccucgccgucuccuccauccuccucgucgaccuccuccccaccuacuucgagcacaacgucgaccucucccgcgccaucaacgucaacggcgucuccuucaacuccgucgacaccuccucccucggcgccgcccagguccgccaguccgccucccgcggccgcggccucggcgagaagcccaaggagggcgccgacaaggagaagaagaaggagaaggagaaggaggaggagcccaagaagcccaacgagaacaagcucaagcagccccagggcaacggcggcgccggccaggcccagcccgagggcaacggcggcgccggccaggcccagcccgagggcaacggcggcgccggccaggcccagcccgagggcaacggcggcgccggccaggcccagcccgagggcaacggcggcgccggccaggcccagcccgagggcaacggcggcgccggccaggcccagcccgagggcaacggcggcgccggccaggcccagcccgagggcaacggcggcgccggccaggcccagcccgagggcaacggcggcgccggccaggcccagcccgagggcaacggcggcgccggccaggcccagccccagggcaacggcggcgccggccaggcccagccccagggcaacggcggcgccggccaggcccagccccagggcaacggcggcgccggccaggcccagcccgagggcaaccgcgaggcccccgcccagccccagggcaacggcggcgccggccaggcccagccccagaagaacgagggcggcaacgccggcgcccgcaagggccagggccagaacaaccagggcgccaacgcccccaacgagaaggucgucaacgacuaccuccagaagauccgcuccuccgucaccaccgaguggacccccugcuccgucaccugcggcaacggcguccgcauccgccgccgcgcccacgccgacaagaagaaggccgaggaccucaccauggacgaccucgaggucgaggccugcgucauggacaagugcgccggcaucuucaacgucgucuccaacucccucggccucgucauccuccucguccucgcccucuucaacuga

SEQ ID NO: 3941 - RNA, 1107 nt, Artificial Sequence
  derived and/or modified CDS sequence (opt2) from Pk(SGEHIWM4-Y09-13)__AFD97225.1__CSP
augaagaacuucauccuccucgccgucuccuccauccuccucgucgaccuccuccccaccuacuucgagcacaacgucgaccucucccgcgccaucaacgucaacggcgucuccuucaacuccgucgacaccuccucccucggcgccgcccagguccgccaguccgccucccgcggccgcggccucggcgagaagcccaaggagggcgccgacaaggagaagaagaaggagaaggagaaggaggaggagcccaagaagcccaacgagaacaagcucaagcagccccagggcaacggcggcgccggccaggcccagcccgagggcaacggcggcgccggccaggcccagcccgagggcaacggcggcgccggccaggcccagcccgagggcaacggcggcgccggccaggcccagcccgagggcaacggcggcgccggccaggcccagcccgagggcaacggcggcgccggccaggcccagcccgagggcaacggcggcgccggccaggcccagcccgagggcaacggcggcgccggccaggcccagcccgagggcaacggcggcgccggccaggcccagcccgagggcaacggcggcgccggccaggcccagccccagggcaacggcggcgccggccaggcccagccccagggcaacggcggcgccggccaggcccagccccagggcaacggcggcgccggccaggcccagcccgagggcaaccgcgaggcccccgcccagccccagggcaacggcggcgccggccaggcccagccccagaagaacgagggcggcaacgccggcgcccgcaagggccagggccagaacaaccagggcgccaacgcccccaacgagaaggucgucaacgacuaccuccagaagauccgcuccuccgucaccaccgaguggacccccugcuccgucaccugcggcaacggcguccgcauccgccgccgcgcccacgccgacaagaagaaggccgaggaccucaccgucgacgaccucgaggucgaggccugcgucauggacaagugcgccggcaucuucaacgucgucuccaacucccucggccucgucauccuccucguccucgcccucuucaacuga

SEQ ID NO: 3942 - RNA, 1104 nt, Artificial Sequence
  derived and/or modified CDS sequence (opt2) from Pk(KH58)__ADN94493.1__CSP
augaagaacuucauccuccucgccgucuccuccauccuccucgucgaccuccuccccacccacuucgagcacaacgucgaccucucccgcgccaucaacaucaacggcgucuccuucaacaacgucgacaccuccucccucggcgccgcccagguccgccaguccgccucccgcggccgcggccucggcgagaagcccaaggagggcgccgacaaggagaagaagaaggagaaggagaaggaggaggagcccaagaagcccaacgagaacaagcucaagcagcccaacgccgagggcgacggcgccaacgcccgccagcccaacgccgagggcgacggcgccaacgcccgccagcccaacgccgagggcgacggcgccaacgcccgccagcccaacgccgagggcgacggcgccaacgcccgccagcccaacgccgagggcgacggcgccaacgcccgccagcccaacgccgagggcgacggcgccaacgcccgccagcccaacgccgagggcgacggcgccaacgcccgccagcccaacgccgagggcgacggcgccaacgcccgccagcccaacgccgagggcgacggcgccaacgcccgccagcccaacgccgagggcgacggcgccaacgcccgccagcccaacgccgagggcggcggcgccaacgcccgccagcccaacgccgagggcgacggcgccaacgcccgccagccccaggcccagggcgacggcggcaacgcccgccagggcggcaacggcggcggcgcccccgccggcggcaacgagggcaacaagcaggccggcaagggccagggccagaacaaccagggcgccaacgcccccaacgagaaggucgucaacgacuaccuccagaagauccgcuccuccgucaccaccgaguggacccccugcuccgucaccugcggcaacggcguccgcauccgccgccgcgcccacgccgacaagaagaaggccgaggaccucaccauggacgaccucgaggucgaggccugcgucauggacaagugcgccggcaucuucaacgucgucuccaacucccucggccucgucauccuccucguccucgcccucuucaacuga

SEQ ID NO: 3943 - RNA, 1104 nt, Artificial Sequence
  derived and/or modified CDS sequence (opt2) from Pk(UM0029C8)__AHF20651.1__CSP
augaagaacuucauccuccucgccgucuccuccauccuccucgucgaccuccuccccacccacuucgagcacaacgucgaccucucccgcgccaucaacgucaacggcgucuccuucaacaacgucgacaccuccucccucggcgccgcccagguccgccaguccgccucccgcggccgcggccucggcgagaagcccaaggagggcgccgacaaggagaagaagaaggagaaggagaaggagaaggaggaggagcccaagaagcccaacgagaacaagcucaagcagcccgagcagcccgccgccggcgccggcggcgagcagcccgccgccggcgccggcggcgagcagcccgccgccggcgccggcggcgagcagcccgccgccggcgccggcggcgagcagcccgccgccggcgcccgcggcgagcagcccgccgccggcgccggcggcgagcagcccgccgccggcgcccgcggcgagcagcccgccgccggcgccggcggcgagcagcccgccgccggcgccggcggcgagcagcccgccgccggcgccggcggcgagcagcccgccgccggcggcgagcagcccgccgccggcgccggcggcgagcagcccgccgccggcgcccgcggcgagcagcccgccgccggcgccggcggcgagcagcccgcccccgccccccgccgcgagcagcccgccgccggcgccggcggcgagcagcccgcccccgccccccgccgcgagcagcccgcccccggcgccggcgccggcgacggcgcccgcggcggcaacgccggcgccggcaagggccagggccagaacaaccagggcgccaacguccccaacgagaaggucgucaacgacuaccuccacaagauccgcuccuccgucaccaccgaguggacccccugcuccgucaccugcggcaacggcguccgcauccgccgcaagggccacgccggcaacaagaaggccgaggaccucaccauggacgaccucgaggucgaggccugcgucauggacaagugcgccggcaucuucaacgucgucuccaacucccucggccucgucauccuccucguccucgcccucuucaacuga

SEQ ID NO: 3944 - RNA, 1104 nt, Artificial Sequence
  derived and/or modified CDS sequence (opt2) from Pk(UM0032C8)__AHF20655.1__CSP
augaagaacuucauccuccucgccgucuccuccauccuccucgucgaccuccuccccacccacuucgagcacaacgucgaccucucccgcgccaucaacgucaacggcgucuccuucaacaacgucgacaccuccucccucggcgccgcccagguccgccaguccgccucccgcggccgcggccucggcgagaagcccaaggagggcgccgacaaggagaagaagaaggagaaggagaaggaggaggagcccaagaagcccaacgagaacaagcucaagcagcccaacgccgagggcgacggcgccaacgcccgccagcccaacgccgagggcgacggcgccaacgcccgccagcccaacgccgagggcgacggcgccaacgcccgccagcccaacgccgagggcgacggcgccaacgcccgccagcccaacgccgagggcgacggcgccaacgcccgccagcccaacgccgagggcgacggcgccaacgcccgccagcccaacgccgagggcaacggcgccaacgcccgccagcccaacgccgagggcggcggcgccaacgcccgccagcccaacgccgagggcgacggcgccaacgcccgccagcccaacgccgagggcgacggcgccaacgcccgccagcccaacgccgagggcggcggcgccaacgcccgccagccccaggccgagggcgacggcgccaacgcccgccagccccaggcccagggcgacggcggcaacgcccgccagggcggcaacggcggcggcgcccccgccggcggcaacgagggcaacaagcaggccggcaagggccagggccagaacaaccagggcgccaacgcccccaacgagaaggucgucaacgacuaccuccagaagauccgcuccuccgucaccaccgaguggacccccugcuccgucaccugcggcaacggcguccgcauccgccgccgcgcccacgccgacaagaagaaggccgaggaccucaccauggacgaccucgaggucgaggccugcgucauggacaagugcgccggcaucuucaacgucgucuccaacucccucggcuucgucauccuccucguccucgcccucuucaacuga

SEQ ID NO: 3945 - RNA, 1101 nt, Artificial Sequence
  derived and/or modified CDS sequence (opt2) from Pk(LT22)__ADN94538.1__CSP
augcgcaacuucauccuccucgccgucuccuccauccuccucgucgaccuccuccccacccacuucgagcacaacgucgaccucucccgcgccaucaacgucaacggcgucuccuucaacaacgucgacaccuccucccucggcgccgcccagguccgccaguccgccucccgcggccgcggccucggcgagaagcgcaaggagggcgccgacaaggagaagaagaaggagaaggaggaggagcccaagaagcccaacgagaacaagcucaagcagcccaacgccgagggcggcgccaacgccggccagcccaacgccgagggcggcgccaacgccggccagcccaacgccgagggcggcgccaacgccggccagcccaacgccgagggcggcgccaacgccggccagcccaacgccgagggcggcgccaacgccggccagcccaacgccgagggcggcgccaacgccggccagcccaacgccgagggcggcgccaacgccggccagcccaacgccgagggcggcgccaacgccggccagcccaacgccgagggcggcgccaacgccggccagcccaacgccgagggcggcgccaacgccggccagcccaacgccgagggcggcgccaacgcccgccagcccaacgccgagggcggcgccaacgccggccagcccaacgccgagggcggcgccaacgccggccagcccaacgccgagggcggcgccaacgcccgccagccccaggccgagggcggcggcgccaacgcccgccagggcggcaacgagggcaacaagcaggccggcaagggccagggccagaacaaccagggcgccaacgcccccaacgagaaggucgucaacgacuaccuccagaagauccgcuccuccgucaccaccgaguggacccccugcuccgucaccugcggcaacggcguccgcauccgccgccgcgcccacgccgacaagaagaaggccgaggaccucaccauggacgaccucgaggucgaggccugcgucauggacaagugcgccggcaucuucaacgucgucuccaacucccucggccucgucauccuccucguccucgcccucuucaacuga

SEQ ID NO: 3946 - RNA, 1101 nt, Artificial Sequence
  derived and/or modified CDS sequence (opt2) from Pk(LT26)__ADN94539.1__CSP
augcgcaacuucauccuccucgccgucuccuccauccuccucgucgaccuccuccccacccacuucgagcacaacgucgaccucucccgcgccaucaacgucaacggcgucuccuucaacaacgucgacaccuccucccucggcgccgcccagguccgccaguccgccucccgcggccgcggccucggcgagaagcgcaaggagggcgccgacaaggagaagaagaaggagaaggaggaggagcccaagaagcccaacgagaacaagcucaagcagcccaacgccgagggcggcgccaacgccggccagcccaacgccgagggcggcgccaacgccggccagcccaacgccgagggcggcgccaacgccggccagcccaacgccgagggcggcgccaacgccggccagcccaacgccgagggcggcgccaacgccggccagcccaacgccgagggcggcgccaacgccggccagcccaacgccgagggcggcgccaacgccggccagcccaacgccgagggcggcgccaacgcccgccagcccaacgccgagggcggcgccaacgccggccagcccaacgccgagggcggcgccaacgccggccagcccaacgccgagggcggcgccaacgccggccagcccaacgccgagggcggcgccaacgccggccagcccaacgccgagggcggcgccaacgccggccagcccaacgccgagggcggcgccaacgcccgccagccccaggccgagggcggcggcgccaacgcccgccagggcggcaacgagggcaacaagcaggccggcaagggccagggccagaacaaccagggcgccaacgcccccaacgagaaggucgucaacgacuaccuccagaagauccgcuccuccgucaccaccgaguggacccccugcuccgucaccugcggcaacggcguccgcauccgccgccgcgcccacgccgacaagaagaaggccgaggaccucaccauggacgaccucgaggucgaggccugcgucauggacaagugcgccggcaucuucaacgucgucuccaacucccucggccucgucauccuccucguccucgcccucuucaacuga

SEQ ID NO: 3947 - RNA, 1101 nt, Artificial Sequence
  derived and/or modified CDS sequence (opt2) from Pk(TB013)__AFG25472.1__CSP
augcgcaacuucauccuccucgccgucuccuccauccuccucgucgaccuccuccccacccacuucgagcacaacgucgaccucucccgcgccaucaacgucaacggcgucuccuucaacaacgucgacaccuccucccucggcgccgcccagguccgccaguccgccggccgcggccgcggccucggcgagaagcgcaaggagggcgccgacaaggagaagaagaaggagaaggaggaggagcccaagaagcccaacgagaacaagcucaagcagcccaacgccgagggcggcgccaacgccggccagcccaacgccgagggcggcgccaacgccggccagcccaacgccgagggcggcgccaacgccggccagcccaacgccgagggcggcgccaacgccggccagcccaacgccgagggcggcgccaacgccggccagcccaacgccgagggcggcgccaacgccggccagcccaacgccgagggcggcgccaacgccggccagcccaacgccgagggcggcgccaacgccggccagcccaacgccgagggcggcgccaacgccggccagcccaacgccgagggcggcgccaacgcccgccagcccaacgccgagggcggcgccaacgcccgccagcccaacgccgagggcggcgccaacgccggccagcccaacgccgagggcggcgccaacgccggccagcccaacgccgagggcggcgccaacgcccgccagccccaggccgagggcggcggcgccaacgcccgccagggcggcaacgagggcaacaagcaggccggcaagggccagggccagaacaaccagggcgccaacgcccccaacgagaaggucgucaacgacuaccuccagaagauccgcuccuccgucaccaccgaguggacccccugcuccgucaccugcggcaacggcguccgcauccgccgccgcgcccacgccgacaagaagaaggccgaggaccucaccauggacgaccucgaggucgaggccugcgucauggacaagugcgccggcaucuucaacgucgucuccaacucccucggccucgucauccuccucguccucgcccucuucaacuga

SEQ ID NO: 3948 - RNA, 1101 nt, Artificial Sequence
  derived and/or modified CDS sequence (opt2) from Pk(TB049)__AFG25474.1__CSP
augcgcaacuucauccuccucgccgucuccuccauccuccucgucgaccuccuccccacccacuucgagcacaacgucgaccucucccgcgccaucaacgucaacggcgucuccuucaacaacgucgacaccuccucccucggcgccgcccagguccgccaguccgccucccgcggccgcggccucggcgagaagcgcaaggagggcgccgacaaggagaagaagaaggagaaggaggaggagcccaagaagcccaacgagaacaagcucaagcagcccaacgccgagggcggcgccaacgccggccagcccaacgccgagggcggcgccaacgccggccagcccaacgccgagggcggcgccaacgccggccagcccaacgccgagggcggcgccaacgccggccagcccaacgccgagggcggcgccaacgccggccagcccaacgccgagggcggcgccaacgccggccagcccaacgccgagggcggcgccaacgccggccagcccaacgccgagggcggcgccaacgcccgccagcccaacgccgagggcggcgccaacgccggccagcccaacgccgagggcggcgccaacgccggccagcccaacgccgagggcggcgccaacgcccgccagcccaacgccgagggcggcgccaacgcccgccagcccaacgccgagggcggcgccaacgccggccagcccaacgccgagggcggcgccaacgcccgccagccccaggccgagggcggcggcgccaacgcccgccagggcggcaacgagggcaacaagcaggccggcaagggccagggccagaacaaccagggcgccaacgcccccaacgagaaggucgucaacgacuaccuccagaagauccgcuccuccgucaccaccgaguggacccccugcuccgucaccugcggcaacggcguccgcauccgccgccgcgcccacgccgacaagaagaaggccgaggaccucaccauggacgaccucgaggucgaggccugcgucauggacaagugcgccggcaucuucaacgucgucuccaacucccucggccucgucauccuccucguccucgcccucuucaacuga

SEQ ID NO: 3949 - RNA, 1101 nt, Artificial Sequence
  derived and/or modified CDS sequence (opt2) from Pk(TN024)__AFG25479.1__CSP
augcgcaacuucauccuccucgccgucuccuccauccuccucgucgaccuccuccccacccacuucgagcacaacgucgaccucucccgcgccaucaacgucaacggcgucuccuucaacaacgucgacaccuccucccucggcgccgcccagguccgccaguccgccucccgcggccgcggccucggcgagcgccgcaaggagggcgccgacaaggagaagaagaaggagaaggaggaggagcccaagaagcccaacgagaacaagcucaagcagcccaacgccgagggcggcgccaacgccggccagcccaacgccgagggcggcgccaacgccggccagcccaacgccgagggcggcgccaacgccggccagcccaacgccgagggcggcgccaacgccggccagcccaacgccgagggcggcgccaacgccggccagcccaacgccgagggcggcgccaacgccggccagcccaacgccgagggcggcgccaacgccggccagcccaacgccgagggcggcgccaacgcccgccagcccaacgccgagggcggcgccaacgccggccagcccaacgccgagggcggcgccaacgccggccagcccaacgccgagggcggcgccaacgcccgccagcccaacgccgagggcggcgccaacgcccgccagcccaacgccgagggcggcgccaacgccggccagcccaacgccgagggcggcgccaacgcccgccagccccaggccgagggcggcggcgccaacgcccgccagggcggcaacgagggcaacaagcaggccggcaagggccagggccagaacaaccagggcgccaacgcccccaacgagaaggucgucaacgacuaccuccagaagauccgcuccuccgucaccaccgaguggacccccugcuccgucaccugcggcaacggcguccgcauccgccgccgcgcccacgccgacaagaagaaggccgaggaccucaccauggacgaccucgaggucgaggccugcgucauggacaagugcgccggcaucuucaacgucgucuccaacucccucggccucgucauccuccucguccucgcccucuucaacuga

SEQ ID NO: 3950 - RNA, 1095 nt, Artificial Sequence
  derived and/or modified CDS sequence (opt2) from Pk(KH369)__ADN94494.1__CSP
augaagaacuucauccuccucgccgucuccuccauccuccucgucgaccucuuccccacccacuucgagcacaacgucgaccucucccgcgccaucaacgucaacggcgucuccuucaacaacgucgacaccuccucccucggcgccgcccagguccgccaguccgccucccgcggccgcggccucggcgagaagcccaaggagggcgccgacaaggagaagaagaaggagaaggaggagcccaagaagcccaacgagaacaagcucaagcagccccaggccgagggcgacggcgccaacgcccgccagccccaggccgagggcgacggcgccaacgcccgccagccccaggccgagggcgacggcgccaacgcccgccagccccaggccgagggcgacggcgccaacgcccgccagccccaggccgagggcgacggcgccaacgcccgccagccccaggccgagggcgacggcgccaacgcccgccagccccaggccgagggcgacggcgccaacgcccgccagccccaggccgagggcgacggcgccaacgcccgccagccccaggccgagggcgacggcgccaacgcccgccagccccaggccgagggcgacggcgccaacgcccgccagccccaggccgagggcggcggcgccaacgcccgccagccccaggccgagggcgacggcgccaacgcccgccagccccaggcccagggcgacggcggcaacgcccgccagggcggcaacggcggcggcgcccccgccggcggcaacgagggcaacaagcaggccggcaagggccagggccagaacaaccagggcgccaacgcccccaacgagaaggucgucaacgacuaccuccagaagauccgcuccuccgucaccaccgaguggacccccugcuccgucaccugcggcaacggcguccgcauccgccgccgcgcccacgccgacaagaagaaggccgaggaccucaccauggacgaccucgaggucgaggccugcgucauggacaagugcgccggcaucuucaacgucgucuccaacucccucggccucgucauccuccucguccucgcccucuucaacuga

SEQ ID NO: 3951 - RNA, 1095 nt, Artificial Sequence
  derived and/or modified CDS sequence (opt2) from Pk(LT48)__ADN94507.1__CSP
augaagaacuucauccuccucgccgucuccuccauccuccucgucgaccuccuccccacccacuucgagcacaacgucgaccucucccgcgccaucaacaucaacggcgucuccuucaacaacgucgacaccuccucccucggcgccgcccagguccgccaguccgccucccgcggccgcggccucggcgagaagcccaaggagggcgccgacaaggagaagaagaaggagaaggaggagcccaagaagcccaacgagaacaagcucaagcagccccaggccgagggcgacggcgccaacgcccgccagccccaggccgagggcgacggcgccaacgcccgccagccccaggccgagggcgacggcgccaacgcccgccagccccaggccgagggcgacggcgccaacgcccgccagccccaggccgagggcgacggcgccaacgcccgccagccccaggccgagggcgacggcgccaacgcccgccagccccaggccgagggcgacggcgccaacgcccgccagccccaggccgagggcgacggcgccaacgcccgccagccccaggccgagggcgacggcgccaacgcccgccagccccaggccgagggcgacggcgccaacgcccgccagccccaggccgagggcggcggcgccaacgcccgccagccccaggccgagggcgacggcgccaacgcccgccagccccaggcccagggcgacggcggcaacgcccgccagggcggcaacggcggcggcgcccccgccggcggcaacgagggcaacaagcaggccggcaagggccagggccagaacaaccagggcgccaacgcccccaacgagaaggucgucaacgacuaccuccagaagauccgcuccuccgucaccaccgaguggacccccugcuccgucaccugcggcaacggcguccgcauccgccgccgcgcccacgccgacaagaagaaggccgaggaccucaccauggacgaccucgaggucgaggccugcgucauggacaagugcgccggcaucuucaacgucgucuccaacucccucggccucgucauccuccucguccucgcccucuucaacuga

SEQ ID NO: 3952 - RNA, 1092 nt, Artificial Sequence
  derived and/or modified CDS sequence (opt2) from Pk(LT22)__ADN94522.1__CSP
augcgcaacuucauccuccucgccgucuccuccauccuccucgucgaccuccuccccacccacuucgagcacaacgucgaccucucccgcgccaucaacgucaacggcgucuccuucaacaacgucgacaccuccucccucggcgccgcccagguccgccaguccgccucccgcggccgcggccucggcgagaagcgcaaggagggcgccgacaaggagaagaagaaggagaaggaggaggagcccaagaagcccaacgagaacaagcucaagcagcccgaccaggccggccccggcggcgagcaggccggccccggcggcgagcaggccggccccggcggcgagcaggccggcccccgccccggcggcgagcaggccggccccggcggcgagcaggccggcccccgccccggcggcgagcaggccggccccggcggcgagcaggccggcccccgccccggcggcgagcaggccggccccggcggcgagcaggccggccccggcggcgagcaggccggcccccgccccggcggcgagcaggccggccccggcggcgagcaggccggcccccgccccggcggcgagcaggccggccccggcggcgagcaggccggcccccgccccggcggcgagcaggccggccccggcggcgagcagcccgccccccgccccggcggcgagcagcccgcccccgccccccgccgcgagcagcccgcccccgcccccggcggcgagcagcccgcccccggcgccggcgccggcgacggcgcccgcggcggcaaccccggcgccggcaagggccagggccagaacaaccagggcgccaacguccccaacgagaaggucgucaacgacuaccuccacaagauccgcuccuccgucaccaccgaguggacccccugcuccgucaccugcggcaacggcguccgcauccgccgccgccagaacgccggcaacaagaaggccgaggaccucaccauggacgaccucgaggucgaggccugcgucauggacaagugcgccggcaucuucaacgucgucuccaacucccucggccucgucauccuccucguccucgcccucuucaacuga

SEQ ID NO: 3953 - RNA, 1092 nt, Artificial Sequence
  derived and/or modified CDS sequence (opt2) from Pk(UM0020C1)__AHF20649.1__CSP
augaagaacuucauccuccucgccgucuccuccauccuccucgucgaccuccuccccacccacuucgagcacaacgucgaccucucccgcgccaucaacgucaacggcgucuccuucaacaacgucgacaccuccucccucggcgccucccagguccgccaguccgccucccgcggccgcggccucggcgagaagcccaaggagggcgccgacaaggagaagaagaaggagaagggcaaggagaaggaggaggagcccaagaagcccaacgagaacaagcucaagcagcccaacgagggccagccccaggcccagggcgacggcgccaacgccggccagccccaggcccagggcgacggcgccaacgccggccagccccaggcccagggcgacggcgccaacgccggccagccccaggcccagggcgacggcgccaacgccggccagccccaggcccagggcgacggcgccaacgccggccagccccaggcccagggcgacggcgccaacgccggccagccccaggcccagggcgacggcgccaacgccggccagccccaggcccagggcgacggcgccaacgccggccagccccaggcccagggcgacggcgccaacgccggccagccccaggcccagggcgacggcgccaacgccggccagccccaggcccagggcgaccgcgccaacgccggccagccccaggcccagggcgacggcgccaacgucccccgccagggccgcaacggcggcggcgcccccgccggcggcaacgagggcaacaagcaggccggcaagggccagggccagaacaaccagggcgccaacgcccccaacgagaaggucgucaacgacuaccuccacaagauccgcuccuccgucaccaccgaguggacccccugcuccgucaccugcggcaacggcguccgcauccgccgccgccagaacgccggcaacaagaaggccgaggaccucaccauggacgaccucgaggucgaggccugcgucauggacaagugcgccggcaucuucaacgucgucuccaacucccucggccucgucauccuccucguccucgcccucuucaacuga

SEQ ID NO: 3954 - RNA, 1092 nt, Artificial Sequence
  derived and/or modified CDS sequence (opt2) from Pk(UM0020C3)__AHF20650.1__CSP
augaagaacuucauccuccucgccgucuccuccauccuccucgucgaccuccuccccacccacuucgagcacaacgucgaccucucccgcgccaucaacgucaacggcgucggcuucaacaacgucgacaccuccucccucggcgccucccagguccgccaguccgccucccgcggccgcggccucggcgagaagcccaaggagggcgccgacaaggagaagaagaaggagaagggcaaggagaaggaggaggagcccaagaagcccaacgagaacaagcucaagcagcccaacgagggccagccccaggcccagggcgacggcgccaacgccggccagccccaggcccagggcgacggcgccaacgccggccagccccaggcccagggcgacggcgccaacgccggccagccccaggcccagggcgacggcgccaacgccggccagccccaggcccagggcgacggcgccaacgccggccagccccaggcccagggcgacggcgccaacgccggccagccccaggcccagggcgacggcgccaacgccggccagccccaggcccagggcgacggcgccaacgccggccagccccaggcccagggcgacggcgccaacgccggccagccccaggcccagggcgacggcgccaacgccggccagccccaggcccagggcgaccgcgccaacgccggccagccccaggcccagggcgacggcgccaacgucccccgccagggccgcaacggcggcggcgcccccgccggcggcaacgagggcaacaagcaggccggcaagggccagggccagaacaaccagggcgccaacgcccccaacgagaaggucgucaacgacuaccuccacaagauccgcuccuccgucaccaccgaguggacccccugcuccgucaccugcggcaacggcguccgcauccgccgcaaggcccacgccggcaacaagaaggccgaggaccucaccauggacgaccucgaggucgaggccugcgucauggacaagugcgccggcaucuucaacgucgucuccaacucccucggccucgucauccuccucguccucgcccucuucaacuga

SEQ ID NO: 3955 - RNA, 1092 nt, Artificial Sequence
  derived and/or modified CDS sequence (opt2) from Pk(UM0021C19)__AHF20668.1__CSP
augcgcaacuucauccuccucgccgucuccuccauccuccucgucgaccucuuccccacccacuucgagcacaacgucgaccucucccgcgccaucaacgucaacggcgucuccuucaacaacgucgacaccuccucccucggcgccgcccagguccgccaguccgccucccgcggccgcggccucggcgagaagcgcaaggagggcgccgacaaggagaagaagaaggagaaggaggaggagcccaagaagcccaacgagaacaagcucaagcagcccgaccaggccggccccggcggcgagcaggccggccccggcggcgagcaggccggccccggcggcgagcaggccggccccggcggcgagcaggccggcccccgccccggcggcgagcaggccggccccggcggcgagcaggccggcccccgccccggcggcgagcaggccggcccccgccccggcggcgagcaggccggcccccgccccggcggcgagcaggccggccccggcggcgagcaggccggccccggcggcgagcaggccggccccggcggcgagcaggccggcccccgccccggcggcgagcaggccggccccggcggcgagcaggccggcccccgccccggcggcgagcaggccggccccggcggcgagcagcccgccccccgccccggcggcgagcagcccgcccccgccccccgccgcgagcagcccgcccccggccccggcggcgagcagcccgcccccggcgccggcgccggcgacggcgcccgcggcggcaaccccggcgccggcaagggccagggccagaacaaccagggcgccaacguccccaacgagaaggucgucaacgacuaccuccacaagauccgcuccuccgucaccaccgaguggacccccugcuccgucaccugcggcaacggcguccgcauccgccgccgccagaacgccggcaacaagaaggccgaggaccucaccauggacgaccucgaggucgaggccugcgucauggacaagugcgccggcaucuucaacgucgucuccaacucccucggccucgucacccuccucguccucgcccucuucaacuga

SEQ ID NO: 3956 - RNA, 1092 nt, Artificial Sequence
  derived and/or modified CDS sequence (opt2) from Pk(UMGAC7)__AHF20617.1__CSP
augaagaacuucauccuccucgccgucuccuccauccuccucgucgaccuccuccccacccacuucgagcacaacgucgaccucucccgcgccaucaacgucaacggcgucuccuucaacaacgucgacaccuccucccucggcgccgcccagguccgccaguccgccucccgcggccgcggccucggcgagaagcccaaggagggcgccgacaaggagaagaagaaggagaagggcaaggagaaggaggaggagcccaagaagcccaacgagaacaagcucaagcagcccaacgagggccagccccaggcccagggcgacggcgccaacgccggccagccccaggcccagggcgacggcgccaacgccggccagccccaggcccagggcgacggcgccaacgccggccagccccaggcccagggcgacggcgccaacgccggccagccccaggcccagggcgacggcgccaacgccggccagccccaggcccagggcgacggcgccaacgccggccagccccaggcccagggcgacggcgccaacgccggccagccccaggcccagggcgacggcgccaacgccggccagccccaggcccagggcgacggcgccaacgccggccagccccaggcccagggcgacggcgccaacgccggccagccccaggcccagggcgaccgcgccaacgccggccagccccaggcccagggcgacggcgccaacgucccccgccagggccgcaacggcggcggcgcccccgccggcggcaacgagggcaacaagcaggccggcaagggccagggccagaacaaccagggcgccaacgcccccaacgagaaggucgucaacgacuaccuccacaagauccgcuccuccgucaccaccgaguggacccccugcuccgucaccugcggcaacggcguccgcauccgccgcaaggcccacgccggcaacaagaaggccgaggaccucaccauggacgaccucgaggucgaggccugcgucauggacaagugcgccggcaucuucaacgucgucuccaacucccucggccucgucauccuccucguccccgcccucuucaacuga

SEQ ID NO: 3957 - RNA, 1092 nt, Artificial Sequence
  derived and/or modified CDS sequence (opt2) from Pk(UMMK566C6)__AHF20670.1__CSP
augaagaacuucauccuccucgccgucuccuccauccuccucgucgaccuccuccccacccacuucgagcacaacgucgaccucucccgcgccaucaacgucaacggcgucuccuucaacaacgucgacaccuccucccucggcgccgcccagguccgccaguccgccucccgcggccgcggccucggcgagaagcccaaggagggcgccgacaaggagaagaagaaggagaagggcaaggagaaggagggcgagcccaagaagcccaacgagaacaagcucaagcagcccaacgagggccagccccaggcccagggcgacggcgccaacgccggccagccccaggcccagggcgacggcgccaacgccggccagccccaggcccagggcgacggcgccaacgccggccagccccaggcccagggcgacggcgccaacgccggccagccccaggcccagggcgacggcgccaacgccggccagccccaggcccagggcgacggcgccaacgccggccagccccaggcccagggcgacggcgccaacgccggccagccccaggcccagggcgacggcgccaacgccggccagccccaggcccagggcgacggcgccaacgccggccagccccaggcccagggcgacggcgccaacgccggccagccccaggcccagggcgaccgcgccaacgccggccagccccaggcccagggcgacggcgccaacgucccccgccagggccgcaacggcggcggcgcccccgccggcggcaacgagggcaacaagcaggccggcaagggccagggccagaacaaccagggcgccaacgcccccaacgagaaggucgucaacgacuaccuccacaagauccgcuccuccgucaccaccgaguggacccccugcuccgucaccugcggcaacggcguccgcauccgccgcaaggcccacgccggcaacaagaaggccgaggaccucaccauggacgaccucgaggucgaggccugcgucauggacaagugcgccggcaucuucaacgucgucuccaacucccucggccucgucauccuccucguccucgcccucuucaacuga

SEQ ID NO: 3958 - RNA, 1089 nt, Artificial Sequence
  derived and/or modified CDS sequence (opt2) from Pk(UMGAC1)__AHF20615.1__CSP
augaagaacuucauccuccucgccgucuccuccauccuccucgucgaccuccuccccacccacuucgagcacaacgucgaccucucccgcgccaucaacgucaacggcgucuccuucaacaacgucgacaccuccucccucggcgccgcccagguccgccaguccgccucccgcggccgcggccucggcgagaagcccaaggagggcgccgacaaggagaagaagaaggagaagggcaaggagaaggaggagcccaagaagcccaacgagaacaagcucaagcagcccaacgagggccagccccaggcccagggcgacggcgccaacgccggccagccccaggcccagggcgacggcgccaacgccggccagccccaggcccagggcgacggcgccaacgccggccagccccaggcccagggcgacggcgccaacgccggccagccccaggcccagggcgacggcgccaacgccggccagccccgcgcccagggcgacggcgccaacgccggccagccccaggcccagggcgacggcgccaacgccggccagccccaggcccagggcgacggcgccaacgccggccagccccaggcccagggcgacggcgccaacgccggccagccccaggcccagggcgacggcgccaacgccggccagccccaggcccagggcgaccgcgccaacgccggccagccccaggcccagggcgacggcgccaacgucccccgccagggccgcaacggcggcggcgcccccgccggcggcaacgagggcaacaagcaggccggcaagggccagggccagaacaaccagggcgccaacgcccccaacgagaaggucgucaacgacuaccuccacaagauccgcuccuccgucaccaccgaguggacccccugcuccgucaccugcggcaacggcguccgcauccgccgcaaggcccacgccggcaacaagaaggccgaggaccucaccauggacgaccucgaggucgaggccugcgucauggacaagugcgccggcaucuucaacgucgucuccaacucccucggccucgucauccuccucguccucgcccucuucaacuga

SEQ ID NO: 3959 - RNA, 1086 nt, Artificial Sequence
  derived and/or modified CDS sequence (opt2) from Pk(NB032)__AFG25470.1__CSP
augaagaacuucauccuccucgccgucuccuccauccuccucgucgaccucuuccccacccacuucgagcacaacgucgaccucucccgcgccaucaacgucaacggcgucuccuucaacaacgucgacaccuccucccucggcgccgcccagguccgccaguccgccucccgcggccgcggccucggcgagaagcccaaggagggcgccgacaaggagaagaagaaggagaaggagaaggagaaggagaaggaggaggagcccaagaagcccaacgagaacaagcucaagcagcccgagggcaaccaggacggccgcgcccagcccgagggcaaccaggacggccgcgcccagcccgagggcaaccaggacggccgcgcccagcccgagggcaaccaggacggccgcgcccagcccgagggcaaccaggacggccgcgcccagcccgagggcaaccaggacggccgcgcccagcccgagggcaaccaggacggccgcgcccagcccgagggcaaccaggacggccgcgcccagcccgagggcaaccaggacggccgcgcccagcccgagggcaaccgcgaggcccccgcccagccccagggcaacggcggcgccggccaggcccagcccgagggcaaccgcgaggcccccgcccagccccagggcaacggcggcgccggccaggcccagcccgagggcaaccgcgaggcccccgcccagccccagggcaacggcggcgccggccaggcccagccccagaagaacgagggcggcaacgccggcgcccgcaagggccagggccagaacaaccagggcgccaacgcccccaacgagaaggucgucaacgacuaccuccacaagauccgcuccuccgucaccaccgaguggacccccugcuccgucaccugcggcaacggcguccgcauccgccgcaaggcccacgccgacaagaagaaggccgaggaccucaccauggacgaccucgaggucgaggccugcgucauggacaagugcgccggcaucuucaacgucgucuccaacucccucggccucgucauccuccucguccucgcccucuucaacuga

SEQ ID NO: 3960 - RNA, 1083 nt, Artificial Sequence
  derived and/or modified CDS sequence (opt2) from Pk(UM002C4)__AHF20639.1__CSP
augaagaacuucauccuccucgccgucuccuccauccuccucgucgaccuccuccccaccuacuucgagcacaacgucgaccucucccgcgccaucaacgucaacggcgucuccuucaacaacgucgacaccuccucccucggcgccgcccagguccgccaguccgccucccgcggccgcggccucggcgagaagcccaaggagggcgccgacaaggagaagaagaaggagaaggagaaggagaaggaggaggagcccaagaagcccaacgagaacaagcucaagcagcccgagggcaacggcggcgccggccccgcccagcccgagggcaacggcggcgccggccccgcccagcccgagggcaacggcggcgccggccccgcccagcccgagggcaacggcggcgccggccccgcccagcccgagggcaacggcggcgccggccccgcccagcccgagggcaacggcggcgccggccccgcccagcccgagggcaacggcggcgccggccccgcccagcccgagggcaacggcggcgccggccccgcccagcccgagggcaacggcggcgccggccccgcccagcccgagggcaacggcggcgccggccccgcccagccccagggcaacggcggcgccggccccgcccagccccagggcaacggcggcgccggccccgcccagccccagggcaacggcggcgccggccccgcccagccccagggcaacggcggcgccggccaggcccagccccagaagaacgagggcggcaacgccggcgcccgcaagggccagggccagaacaaccagggcgccaacgcccccaacgagaaggucgucaacgacuaccuccagaagauccgcuccuccgucaccaccgaguggacccccugcuccgucaccugcggcaacggcguccgcaucaagcgccgcgcccacgccgacaagaagaaggccgaggaccucaccauggacgaccucgaggucgaggccugcgucauggacaagugcgccggcaucuucaacgucgucuccaacucccucggccucgucauccuccucguccucgcccucuucaacuga

SEQ ID NO: 3961 - RNA, 1080 nt, Artificial Sequence
  derived and/or modified CDS sequence (opt2) from Pk(CDK162)__ADN94495.1__CSP
augcgcaacuucauccuccucgccgucuccuccauccuccucgucgaccuccuccccacccacuucgagcacaacgucgaccucucccgcgccaucaacgucaacggcgucuccuucaacaacgucgacaccuccucccucggcgccgcccagguccgccaguccgccucccgcggccgcggccucggcgagaagcgcaaggagggcgccgacaaggagaagaagaaggagaaggaggaggagcccaagaagcccaacgagaacaagcucaagcagcccaaccccgaccagccccaggcccagggcgacggcgccaacgccggccagccccaggcccagggcgacggcgccaacgccggccagccccaggcccagggcgacggcgccaacgccggccagccccaggcccagggcgacggcgccaacgccggccagccccaggcccagggcgacggcgccaacgccggccagccccaggcccagggcgacggcgccaacgccggccagccccaggcccagggcgacggcgccaacgccggccagccccaggcccagggcgacggcgccaacgccggccagccccaggcccagggcgacggcgccaacgccggccagccccaggcccagggcgacggcgccaacgccggccagccccaggcccagggcgaccgcgccaacgccggccagccccaggcccagggcgacggcgccaacgucccccgccagggccgcaacggcggcggcgcccccgccggcggcaacgagggcaacaagcaggccggcaagggccagggccagaacaaccagggcgccaacgcccccaacgagaaggucgucaacgacuaccuccacaagauccgcuccuccgucaccaccgaguggacccccugcuccgucaccugcggcaacggcguccgcauccgccgccgccagaacgccggcaacaagaaggccgaggaccucaccauggacgaccucgaggucgaggccugcgucauggacaagugcgccggcaucuucaacgucgucuccaacucccucggccucgucauccuccucguccucgcccucuucaacuga

SEQ ID NO: 3962 - RNA, 1080 nt, Artificial Sequence
  derived and/or modified CDS sequence (opt2) from Pk(KN010)__AFG25463.1__CSP
augcgcaacuucauccuccucgccgucuccuccauccuccucgucgaccuccuccccacccacuucgagcacaacgucgaccucucccgcgccaucaacgucaacggcgucuccuucaacaacgucgacaccuccucccucggcgccgcccagguccgccaguccgccucccgcggccgcggccucggcgagaagcgcaaggagggcgccgacaaggagaagaagaaggagaaggaggaggagcccaagaagcccaacgagaacaagcucaagcagcccaaccccgaccagccccaggcccagggcgacggcgccaacgccggccagccccaggcccagggcgacggcgccaacgccggccagccccaggcccagggcgacggcgccaacgccggccagccccaggcccagggcgacggcgccaacgccggccagccccaggcccagggcgacggcgccaacaccggccagccccaggcccagggcgacggcgccaacgccggccagccccaggcccagggcgacggcgccaacgccggccagccccaggcccagggcgacggcgccaacgccggccagccccaggcccagggcgacggcgccaacgccggccagccccaggcccagggcgacggcgccaacgccggccagccccaggcccagggcgaccgcgccaacgccggccagccccaggcccagggcgacggcgccaacgucccccgccagggccgcaacggcggcggcgcccccgccggcggcaacgagggcaacaagcaggccggcaagggccagggccagaacaaccagggcgccaacgcccccaacgagaaggucgucaacgacuaccuccacaagauccgcuccuccgucaccgccgaguggacccccugcuccgucaccugcggcaacggcguccgcauccgccgcaaggcccacgccggcaacaagaaggccgaggaccucaccauggacgaccucgaggucgaggccugcgucauggacaagugcgccggcaucuucaacgucgucuccaacucccucggccucgucauccuccucguccucgcccucuucaacuga

SEQ ID NO: 3963 - RNA, 1080 nt, Artificial Sequence
  derived and/or modified CDS sequence (opt2) from Pk(KN013)__AFG25464.1__CSP
augcgcaacuucauccuccucgccgucuccuccauccuccucgucgaccuccuccccacccacuucgagcacaacgucgaccucucccgcgccaucaacgucaacggcgucuccuucaacaacgucgacaccuccucccucggcgccgcccagguccgccaguccgccucccgcggccgcggccucggcgagaagcgcaaggagggcgccgacaaggagaagaagaaggagaaggaggaggagcccaagaagcccaacgagaacaagcucaagcagcccaaccccggccagccccaggcccagggcgacggcgccaacgccggccagccccaggcccagggcgacggcgccaacgccggccagccccaggcccagggcgacggcgccaacgccggccagccccaggcccagggcgacggcgccaacgccggccagccccaggcccagggcgacggcgccaacgccggccagccccaggcccagggcgacggcgccaacgccggccagccccaggcccagggcgacggcgccaacgccggccagccccaggcccagggcgacggcgccaacgccggccagccccaggcccagggcgacggcgccaacgccggccagccccaggcccagggcgacggcgccaacgccggccagccccaggcccagggcgaccgcgccaacgccggccagccccaggcccagggcgacggcgccaacgucccccgccagggccgcaacggcggcggcgcccccgccggcggcaacggcggcaacaagcaggccggcaagggccagggccagaacaaccagggcgccaacgcccccaacgagaaggucgucaacgacuaccuccacaagauccgcuccuccgucaccaccgaguggacccccugcuccgucaccugcggcaacggcguccgcauccgccgcaaggcccacgccggcaacaagaaggccgaggaccucaccauggacgaccucgaggucgaggccugcgucauggacaagugcgccggcaucuucaacgucgucuccaacucccucggccucgucauccuccucguccucgcccucuucaacuga

SEQ ID NO: 3964 - RNA, 1080 nt, Artificial Sequence
  derived and/or modified CDS sequence (opt2) from Pk(LT57)__ADN94508.1__CSP
augaagaacuucauccuccucgccgucuccuccauccuccucgucgaccucuuccccacccacuucgagcacaacgucgaccucucccgcgccaucaacgucaacggcgucuccuucaacaacgucgacaccuccucccucggcgccgcccagguccgccaguccgccucccgcggccgcggccucggcgagaagcccaaggagggcgccgacaaggagaagaagaaggagaaggagaaggagaaggaggaggagcccaagaagcccaacgagaacaagcucaagcagcccgagggcaaccaggacggccgcgcccagcccgagggcaaccaggacggccgcgcccagcccgagggcaaccaggacggccgcgcccagcccgagggcaaccaggacggccgcgcccagcccgagggcaaccaggacggccgcgcccagcccgagggcaaccaggacggccgcgcccagcccgagggcaaccaggacggccgcgcccagcccgagggcaaccaggacggccgcgcccagcccgagggcaaccaggacggccgcgcccagcccgagggcaaccgcgaggcccccgcccagccccagggcaacggcggcgccggccaggcccagcccgagggcaaccgcgaggcccccgcccagccccagggcaacggcggcgccggccaggcccagcccgagggcaaccgcgaggcccccgcccagccccagggcaacggcggcgccggccaggcccagccccagaagaacgagggcggcaacgccggcgcccgcaagggccagggccagaacaaccagggcgccaacgcccccaacgagaaggucgucaacgacuaccuccacaagauccgcuccuccgucaccaccgaguggacccccugcuccgucaccugcggcaacggcguccgcauccgccgcaaggcccacgccgacaagaagaaggccgaggaccucaccauggacgaccucgaggucgaggccugcgucauggacaagugcgccggcaucuucaacgucgucuccaacucccucggccucgucauccuccucguccucgcccucuucaacuga

SEQ ID NO: 3965 - RNA, 1080 nt, Artificial Sequence
  derived and/or modified CDS sequence (opt2) from Pk(NB046)__AFG25471.1__CSP
augcgcaacuucauccuccucgccgucuccuccauccuccucgucgaccuccuccccacccacuucgagcacaacgucgaccucucccgcgccaucaacgucaacggcgucuccuucaacaacgucgacaccuccucccucggcgccgcccagguccgccaguccgccucccgcggccgcggccucggcgagaagcgcaaggagggcgccgacaaggagaagaagaaggagaaggaggaggagcccaagaagcccaacgagaacaagcucaagcagcccaaccccgaccagccccaggcccagggcgacggcgccaacgccggccagccccaggcccagggcgacggcgccaacgccggccagccccaggcccagggcgacggcgccaacgccggccagccccaggcccagggcgacggcgccaacgccggccagccccaggcccagggcgacggcgccaacgccggccagccccaggcccagggcgacggcgccaacgccggccagccccaggcccagggcgacggcgccaacgccggccagccccaggcccagggcgacggcgccaacgccggccagccccaggcccagggcgacggcgccaacgccggccagccccaggcccagggcgacggcgccaacgccggccagccccaggcccagggcgaccgcgccaacgccggccagccccaggcccagggcgacggcgccaacgucccccgccagggccgcaacggcggcggcgcccccgccggcggcaacgagggcaacaagcaggccggcaagggccagggccagaacaaccagggcgccaacgcccccaacgagaaggucgucaacgacuaccuccacaagauccgcuccuccgucaccaccgaguggacccccugcuccgucaccugcggcaacggcguccgcauccgccgcaaggcccacgccggcaacaagaaggccgaggaccucaccauggacgaccucgaggucgaggccugcgucauggacaagugcgccggcaucuucaacgucgucuccaacucccucggccucgucauccuccucguccucgcccucuucaacuga

SEQ ID NO: 3966 - RNA, 1080 nt, Artificial Sequence
  derived and/or modified CDS sequence (opt2) from Pk(TN023)__AFG25478.1__CSP
augcgcaacuucauccuccucgccgucuccuccauccuccucgucgaccuccuccccacccacuucgagcacaacgucgaccucucccgcgccaucaacgucaacggcgucuccuucaacaacgucgacaucuccucccucggcgccgcccagguccgccaguccgccucccgcggccgcggccucggcgagaagcgcaaggagggcgccgacaaggagaagaagaaggagaaggaggaggagcccaagaagcccaacgagaacaagcucaagcagcccaaccccgaccagccccaggcccagggcgacggcgccaacgccggccagccccaggcccagggcgacggcgccaacgccggccagccccaggcccagggcgacggcgccaacgccggccagccccaggcccagggcgacggcgccaacgccggccagccccaggcccagggcgacggcgccaacgccggccagccccaggcccagggcgacggcgccaacgccggccagccccaggcccagggcgacggcgccaacgccggccagccccaggcccagggcgacggcgccaacgccggccagccccaggcccagggcgacggcgccaacgccggccagccccaggcccagggcgacggcgccaacgccggccagccccaggcccagggcgaccgcgccaacgccggccagccccaggcccagggcgacggcgccaacgucccccgccagggccgcaacggcggcggcgcccccgccggcggcaacgagggcaacaagcaggccggcaagggccagggccagaacaaccagggcgccaacgcccccaacgagaaggucgucaacgacuaccuccacaagauccgcuccuccgucaccaccgaguggacccccugcuccgucaccugcggcaacggcguccgcauccgccgcaaggcccacgccggcaacaagaaggccgaggaccucaccauggacgaccucgaggucgaggccugcgucauggacaagugcgccggcaucuucaacgucgucuccaacucccucggccucgucauccuccucguccucgcccucuucaacuga

SEQ ID NO: 3967 - RNA, 1080 nt, Artificial Sequence
  derived and/or modified CDS sequence (opt2) from Pk(UM0016C2)__AHF20663.1__CSP
augaagaacuucauccuccucgccgucuccuccauccuccucgucgaccuccuccccacccacuucgagcacaacgucgaccucucccgcgccaucaacgucaacggcgucuccuucaacaacgucgacaccuccucccucggcgccgcccagguccgccaguccgccucccgcggccgcggccucggcgagaagcccaaggagggcgccgacaaggagaagaagaaggagaaggagaaggagaaggaggaggagcccaagaagcccaacgagaacaagcucaagcagcccgagggcaaccaggacggccgcgcccagcccgagggcaaccaggacggccgcgcccagcccgagggcaaccaggacggccgcgcccagcccgagggcaaccaggacggccgcgcccagcccgagggcaaccaggacggccgcgcccagcccgagggcaaccaggacggccgcgcccagcccgagggcaaccaggacggccgcgcccagcccgagggcaaccaggacggccgcgcccagcccgagggcaaccaggacggccgcgcccagcccgagggcaaccgcgaggcccccgcccagccccagggcaacggcggcgccggccaggcccagcccgagggcaaccgcgaggcccccgcccagccccagggcaacggcggcgccggccaggcccagcccgagggcaaccgcgaggcccccgcccagccccagggcaacggcggcgccggccaggcccagccccagaagaacgagggcggcaacgccggcgcccgcaagggccagggccagaacaaccagggcgccaacgcccccaacgagaaggucgucaacgacuaccuccagaagauccgcuccuccgucaccaccgaguggacccccugcuccgucaccugcggcaacggcguccgcauccgccgccgcgcccacgccgacaagaagaaggccgaggaccucaccauggacgaccucgaggucgaggccugcgucauggacaagugcgccggcaucuucaacgucgucuccaacucccucggccucgucauccuccucguccucgcccucuucaacuga

SEQ ID NO: 3968 - RNA, 1077 nt, Artificial Sequence
  derived and/or modified CDS sequence (opt2) from Pk(LT48)__ADN94519.1__CSP
augcgcaacuucauccuccucgccgucuccuccauccuccucgucgaccuccuccccacccacuucgagcacaacgucgaccucucccgcgccaucaacgucaacggcgucuccuucaacaacgucgacaccuccucccucggcgccgcccagguccgccaguccgccucccgcggccgcggccucggcgagaagcgcaaggagggcgccgacaaggagaagaagaaggagaaggaggaggagcccaagaagcccaacgagaacaagcucaagcagcccaaccccgaccagccccaggcccagggcgacggcgccaacgccggccagccccaggcccagggcgacggcgccaacgccggccagccccaggcccagggcgacggcgccaacgccggccagccccaggcccagggcgacggcgccaacgccggccagccccaggcccagggcgacggcgccaacgccggccagccccaggcccagggcgacggcgccaacgccggccagccccaggcccagggcgacggcgccaacgccggccagccccaggcccagggcgacggcgccaacgccggccagccccaggcccagggcgacggcgccaacgccggccagccccaggcccagggcgacggcgccaacgccggccagccccaggcccagggcgaccgcggcaugcaggacaaccacaagcacaaggagaugggccagauguaccacgacaaggaggagaccggcgagguccaccagcaggaggagaugcgcggcaucaacaagcaggagaaggcccgcgacaagaccauccgcgucgagugccccaaggagaaggucgucaacgacuaccuccacaagauccgcuccuccgucaccaccgaguggacccccugcuccgucaccugcggcaacggcguccgcauccgccgcaaggcccacgccggcaacaagaaggccgaggaccucaccauggacgaccucgaggucgaggccugcgucauggacaagugcgccggcaucuucaacgucgucuccaacucccucggccucgucauccuccucguccucgcccucuucaacuga

SEQ ID NO: 3969 - RNA, 1077 nt, Artificial Sequence
  derived and/or modified CDS sequence (opt2) from Pk(SGEHIWM4-Y09-9)__AFD97223.1__CSP
augaagaacuucauccuccucgccgucuccuccauccuccucgucgaccuccuccccaccuacuucgagcacaacgucgaccucucccgcgccaucaacgucaacggcgucuccuucaacuccgucgacaccuccucccucggcgccgcccagguccgccaguccgccucccgcggccgcggccucggcgagaagcccaaggagggcgccgacaaggagaagaagaaggagaaggagaaggaggaggagcccaagaagcccaacgagaacaagcucaagcagccccagggcaacggcggcgccggccaggcccagcccgagggcaacggcggcgccggccaggcccagcccgagggcaacggcggcgccggccaggcccagcccgagggcaacggcggcgccggccaggcccagcccgagggcaacggcggcgccggccaggcccagcccgagggcaacggcggcgccggccaggcccagcccgagggcaacggcggcgccggccaggcccagcccgagggcaacggcggcgccggccaggcccagcccgagggcaacggcggcgccggccaggcccagcccgagggcaacggcggcgccggccaggcccagcccgagggcaacggcggcgccggccaggcccagcccgagggcaacggcggcgccggccaggcccagcccgagggcaacggcggcgccggccaggcccagccccagggcaacggcggcgccggccaggcccagccccagaagaacgagggcggcaacgccggcgcccgcaagggccagggccagaacaaccagggcgccaacgcccccaacgagaaggucgucaacgacuaccuccagaagauccgcuccuccgucaccaccgaguggacccccugcuccgucaccugcggcaacggcguccgcauccgccgccgcgcccacgccgacaagaagaaggccgaggaccucaccauggacgaccucgaggucgaggccugcgucauggacaagugcgccggcaucuucaacgucgucuccaacucccucggccucgucauccuccucguccucgcccucuucaacuga

SEQ ID NO: 3970 - RNA, 1071 nt, Artificial Sequence
  derived and/or modified CDS sequence (opt2) from Pk(LT15)__ADN94525.1__CSP
augcgcaacuucauccuccucgccgucuccuccauccuccucgucgaccuccuccccacccacuucgagcacaacgucgaccucucccgcgccaucaacgucaacggcgucuccuucaacaacgucgacaccuccucccucggcgccgcccagguccgccaguccgccucccgcggccgcggccucggcgagaagcgcaaggagggcgccgacaaggagaagaagaaggagaaggaggaggagcccaagaagcccaacgagaacaagcucaagcagcccgagcaggccgcccccggcgccggcggcgagcagcccgcccccggcgccggcggcgagcagcccgcccccggcgccggcggcgagcagcccgcccccggcgccggcggcgagcgccccgcccccggcgccggcggcgagcagcccgcccccggcgccggcggcgagcagcccgcccccggcgccggcggcgagcgccccgcccccggcgccggcggcgagcagcccgcccccggcgccggcggcgagcagcccgcccccggcgccggcggcgagcagcccgcccccggcgccggcggcgagcagcccgcccccggcgccggcggcgagcgccccgcccccggcgccggcggcgagcgccccgcccccggcgccggcggcgagcagcccgcccccggcgccggcggcgagcagcccgcccccgccccccgccgcgagcagcccgcccccggccccggcgccggcgacggcgcccgcggcggcaacgccggcgccggcaagggccagggccagaacaaccagggcgccaacguccccaacgagaaggucgucaacgacuaccuccacaagauccgcuccuccgucaccaccgaguggacccccugcuccgucaccugcggcaacggcguccgcauccgccgccgccagaacgccggcaacaagaaggccgaggaccucaccauggacgaccucgaggucgaggccugcgucauggacaagugcgccggcaucuucaacgucgucuccaacucccucggccucgucauccuccucguccucgcccucuucaacuga

SEQ ID NO: 3971 - RNA, 1071 nt, Artificial Sequence
  derived and/or modified CDS sequence (opt2) from Pk(LT57)__ADN94503.1__CSP
augaagaacuucauccuccucgccgucuccuccauccuccucgucgaccucuuccccacccacuucgagcacaacgucgaccucucccgcgccaucaacgucaacggcgucuccuucaacaacgucgacaccuccucccucggcgccgcccagguccgccaguccgccucccgcggccgcggccucggcgagaagcccaaggagggcgccgacaaggagaagaagaaggagaaggagaaggaggagcccaagaagcccaacgagaacaagcucaagcagcccgagggcaaccaggacggccgcgcccagcccgagggcaaccaggacggccgcgcccagcccgagggcaaccaggacggccgcgcccagcccgagggcaaccaggacggccgcgcccagcccgagggcaaccaggacggccgcgcccagcccgagggcaaccaggacggccgcgcccagcccgagggcaaccaggacggccgcgcccagcccgagggcaaccaggacggccgcgcccagcccgagggcaaccaggacggccgcgcccagcccgagggcaaccgcgaggcccccgcccagccccagggcaacggcggcgccggccaggcccagcccgagggcaaccgcgaggcccccgcccagccccagggcaacggcggcgccggccaggcccagcccgagggcaaccgcgaggcccccgcccagccccagggcaacggcggcgccggccaggcccagccccagaagaacgagggcggcaacgccggcgcccgcaagggccagggccagaacaaccagggcgccaacgcccccaacgagaaggucgucaacgacuaccuccagaagauccgcuccuccgucaccaccgaguggacccccugcuccgucaccugcggcaacggcguccgcauccgccgccgcgcccacgccgacaagaagaaggccgaggaccucaccauggacgaccucgaggucgaggccugcgucauggacaagugcgccggcaucuucaacgccgucuccaacucccucggccucgucauccuccucguccucgcccucuucaacuga

SEQ ID NO: 3972 - RNA, 1068 nt, Artificial Sequence
  derived and/or modified CDS sequence (opt2) from Pk(UMHIC2)__AHF20634.1__CSP
augaagaacuucauccuccucgccgucuccuccauccuccucgucgaccuccuccccacccacuucgagcacaacgucgaccucucccgcgccaucaacgucaacggcgucuccuucaacaacgucgacaccuccucccucggcgccgcccagguccgccaguccgccucccgcggccgcggccucggcgagaagcccaaggagggcgccgacaaggagaagaagaaggagaaggagaaggaggaggagcccaagaagcccaacgagaacaagcucaagcagcccgagggcaaccgcgaggcccccggccagcccgagggcaaccgcgaggcccccggccagcccgagggcaaccgcgaggcccccggccagcccgagggcaaccgcgaggcccccggccagcccgagggcaaccgcgaggcccccggccagcccgagggcaaccgcgaggcccccggccagcccgagggcaaccgcgaggcccccggccagcccgagggcaaccgcgaggcccccggccagcccgagggcaaccgcgaggcccccggccagcccgagggcaaccgcgaggcccccggccagcccgagggcaaccgcgaggcccccgcccagcccgagggcaaccgcgaggcccccggccagcccgagggcaaccgcgaggcccccgcccagcccgagggcaaccgcgaggcccccgcccagccccagggcaacggcggcgccggccaggcccagccccagaagaacgagggcggcaacgccggcgcccgcaagggccagggccagaacaaccagggcgccaacgcccccaacgagaaggucgucaacgacuaccuccagaagauccgcuccuccgucaccaccgaguggacccccugcuccgucaccugcggcaacggcguccgcaucaagcgcaaggcccacgccgacaagaagaaggccgaggaccucaccauggacgaccucgaggucgaggccugcgucauggacaagugcgccggcaucuucaacgucgucuccaacucccucggccucgucauccuccucguccucgcccucuucaacuga

SEQ ID NO: 3973 - RNA, 1068 nt, Artificial Sequence
  derived and/or modified CDS sequence (opt2) from Pk(UMHIC6)__AHF20635.1__CSP
augaagaacuucauccuccucgccgucuccuccauccuccucgucgaccuccuccccacccacuucgagcacaacgucgaccucucccgcgccaucaacgucaacggcgucuccuucaacaacgucgacaccuccucccucggcgccgcccagguccgccaguccgccucccgcggccgcggccucggcgagaagcccaaggagggcgccgacaaggagaagaagaaggagaaggagaaggaggaggagcccaagaagcccaacgagaacaagcucaagcagcccgagggcaaccgcgaggcccccggccagcccgagggcaaccgcgaggcccccggccagcccgagggcaaccgcgaggcccccggccagcccgagggcaaccgcgaggcccccggccagcccgagggcaaccgcgaggcccccggccagcccgagggcaaccgcgaggcccccggccagcccgagggcaaccgcgaggcccccggccagcccgagggcaaccgcgaggcccccggccagcccgagggcaaccgcgaggcccccggccagcccgagggcaaccgcgaggcccccggccagcccgagggcaaccgcgaggcccccggccagcccgagggcaaccgcgaggcccccggccagcccgagggcaaccgcgaggcccccgcccagcccgagggcaaccgcgaggcccccgcccagccccagggcaacggcggcgccggccaggcccagccccagaagaacgagggcggcaacgccggcgcccgcaagggccagggccagaacaaccagggcgccaacgcccccaacgagaaggucgucaacgacuaccuccagaagauccgcuccuccgucaccaccgaguggacccccugcuccgucaccugcggcaacggcguccgcaucaagcgcaaggcccacgccgacaagaagaaggccgaggaccucaccauggacgaccucgaggucgaggccugcgucauggacaagugcgccggcaucuucaacgucgucuccaacucccucggccucgucauccuccucguccucgcccucuucaacuga

SEQ ID NO: 3974 - RNA, 1068 nt, Artificial Sequence
  derived and/or modified CDS sequence (opt2) from Pk(UMJUC1)__AHF20630.1__CSP
augaagaacuucauccuccucgccgucuccuccauccuccucgucgaccuccuccccacccacuucgagcacaacgucgaccucucccgcgccaucaacgucaacggcgucucccucaacaacgucgacaccuccucccucggcgccgcccagguccgccaguccgccucccgcggccgcggccucggcgagaagcccaaggagggcgccgacaaggagaagaagaaggagaaggagaaggaggaggagcccaagaagcccaacgagaacaagcucaagcagcccgagggcaaccgcgaggcccccggccagcccgagggcaaccgcgaggcccccggccagcccgagggcaaccgcgaggcccccggccagcccgagggcaaccgcgaggcccccggccagcccgagggcaaccgcgaggcccccggccagcccgagggcaaccgcgaggcccccggccagcccgagggcaaccgcgaggcccccggccagcccgagggcaaccgcgaggcccccggccagcccgagggcaaccgcgaggcccccggccagcccgagggcaaccgcgaggcccccggccagcccgagggcgaccgcgaggcccccgcccagcccgagggcaaccgcgaggcccccggccagcccgagggcaaccgcgagguccccgcccagcccgagggcaaccgcgaggcccccgcccagccccagggcaacggcggcgccggccaggcccagccccagaagaacgagggcggcaacgccggcgcccgcaagggccagggccagaacaaccagggcgccaacgcccccaacgagaaggucgucaacgacuaccuccagaagauccgcuccuccgucaccaccgaguggacccccugcuccgucaccugcggcaacggcguccgcaucaagcgcaaggcccacgccgacaagaagaaggccgaggaccucaccauggacgaccucgaggucgaggccugcgucauggacaagugcgccggcaucuucaacgucgucuccaacucccucggccucgucauccuccucguccucgcccucuucaacuga

SEQ ID NO: 3975 - RNA, 1062 nt, Artificial Sequence
  derived and/or modified CDS sequence (opt2) from Pk(TN026)__AFG25480.1__CSP
augaagaacuucauccuccucgccgucuccuccauccuccucgucgaccuccuccccacccacuucgagcacaacgucgaccucucccgcgccaucaacgucaacggcgucuccuucaacaacgucgacaccuccucccucggcgccgcccagguccgccaguccgccucccgcggccgcggccucggcgagaagcccaaggagggcgccgacaaggagaagaagaaggagaaggagaaggagaaggagaaggaggaggagcccaagaagcccaacgagaacaagcucaagcagcccgagcagcccgccgccggcgccggcggcgagcagcccgccgccggcgccggcggcgagcagcccgccgccggcgccggcggcgagcagcccgccgccggcgccggcggcgagcagcccgccgccggcgccggcggcgagcagcccgccgccggcgccggcggcgagcagcccgccgccggcgcccgcggcgagcagcccgccgccggcgccggcggcgagcagcccgccgccggcgccggcggcgagcagcccgccgccggcgcccgcggcgagcagcccgccgccggcgccggcggcgagcagcccgccgccggcgcccgcggcgagcagcccgccgccggcgccggcggcgagcagcccgccgccggcgccggcggcgagcagcccgcccccgccccccgccgcgagcagcccgcccccggcgccggcgccggcgacggcgcccgcggcggcaacgccggcgccggcaagggccagggccagaacaaccagggcgccaacguccccaacgagaaggucgucaacgacuaccuccacaagauccgcuccuccgucaccaccgaguggacccccugcuccgucaccugcggcaacggcguccgcauccgcggcaagggccacgccggcaacaagaaggccgaggaccucaccauggacgaccucgaggucgaggccugcgucauggacaagugcgccggcaucuucaacgucgucuccaacucccucggccucgucauccuccucguccucgcccucuucaacuga

SEQ ID NO: 3976 - RNA, 1056 nt, Artificial Sequence
  derived and/or modified CDS sequence (opt2) from Pk(F08B49-1)__AHH02601.1__CSP
augaagaacuucauccuccucgccgucuccuccauccuccucgucgaccuccuccccacccacuucgagcacaacgucgaccucucccgcgccaucaacgucaacggcgucuccuucaacaacgucgacaccuccucccucggcgccgcccagguccgccaguccgccucccgcggccgcggccucggcgagaagcccaaggagggcgccgacaaggagaagaagaaggagaaggagaaggagaaggaggaggagcccaagaagcccaacgagaacaagcucaagcagcccgagcagcccgccgccggcgccggcggcgagcagcccgccgccggcgccggcggcgagcagcccgccgccggcgccggcggcgagcagcccgccgccggcgcccgcggcgagcagcccgccgccggcgccggcggcgagcagcccgccgccggcgccggcggcgagcagcccgccgccggcgccggcggcgagcagcccgccgccggcgccggcggcgagcagcccgccgccggcgccggcggcgagcagcccgccgccggcgcccgcggcgagcagcccgccgccggcgccggcggcgagcagcccgccgccggcgccggcggcgagcagcccgccgccggcgcccgcggcgagcagcccgccgccggcgccggcggcgagcagcccgcccccgccccccgccgcgagcagcccgcccccggcgccggcgccggcgacggcgcccgcggcggcaacgccggcgccggcaagggccagggccagaacaaccagggcgccaacguccccaacgagaaggucgucaacgacuaccuccacaagauccgcuccuccgucaccaccgaguggacccccugcuccgucaccugcggcaacggcguccgcauccgccgcaagggccacgccggcaacaagaaggccgaggaccucaccauggacgaccucgaggucgaggccugcgucauggacaagugcgccggcaucuucaacgucgucuccaacucccucggccucgucauccuccucguccucgcccucuucaacuga

SEQ ID NO: 3977 - RNA, 1056 nt, Artificial Sequence
  derived and/or modified CDS sequence (opt2) from Pk(F08B69-1)__AHH02602.1__CSP
augaagaacuucauccuccucgccgucuccuccauccuccucgucgaccuccuccccacccacuucgagcacaacgucgaccucucccgcgccaucaacgucaacggcgucuccuucaacaacgucgacaccuccucccucggcgccgcccagguccgccaguccgccucccgcggccgcggccucggcgagaagcccaaggagggcgccgacaaggagaagaagaaggagaaggagaaggagaaggaggaggagcccaagaagcccaacgagaacaagcucaagcagcccgagcagcccgccgccggcgccggcggcgagcagcccgccgccggcgccggcggcgagcagcccgccgccggcgccggcggcgagcagcccgccgccggcgcccgcggcgagcagcccgccgccggcgccggcggcgagcagcccgccgccggcgccggcggcgagcagcccgccgccggcgccggcggcgagcagcccgccgccggcgccggcggcgagcagcccgccgccggcgccggcggcgagcagcccgccgccggcgcccgcggcgagcagcccgccgccggcgccggcggcgagcagcccgccgccggcgccggcggcgagcagcccgccgccggcgcccgcggcgagcagcccgccgccggcgccggcggcgagcagcccgcccccgccccccgccgcgagcagcccgcccccggcgccggcgccggcgacggcgcccgcggcggcaacgccggcgccggcaagggccagggccagaacaaccagggcgccaacguccccaacgagaaggucgucaacgacuaccuccacaagauccgcuccuccgucaccaccgaguggacccccugcuccgucaccugcggcaacggcguccgcauccgccgcaagggccacgccggcaacaagaaggccgaggaccucaccauggacgaccucgacgucgaggccugcgucauggacaagugcgccggcaucuucaacgucgucuccaacucccucggccucgucauccuccucguccucgcccucuucaacuga

SEQ ID NO: 3978 - RNA, 1056 nt, Artificial Sequence
  derived and/or modified CDS sequence (opt2) from Pk(LT51)__ADN94540.1__CSP
augaagaacuucauccuccucgccgucuccuccauccuccucgucgaccuccuccccacccacuucgagcacaacgucgaccucucccgcgccaucaacgucaacggcgucuccuucaacaacgucgacaccuccucccucggcgccgcccagguccgccaguccgccucccgcggccgcggccucggcgagaagcccaaggagggcgccgacaaggagaagaagaaggagaaggagaaggagaaggaggaggagcccaagaagcccaacgagaacaagcucaagcagcccgagcagcccgccgccggcgccggcggcgagcagcccgccgccggcgccggcggcgagcagcccgccgccggcgccggcggcgagcagcccgccgccggcgccggcggcgagcagcccgccgccggcgccggcggcgagcagcccgccgccggcgccggcggcgagcagcccgccgccggcgcccgcggcgagcagcccgccgccggcgccggcggcgagcagcccgccgccggcgccggcggcgagcagcccgccgccggcgcccgcggcgagcagcccgccgccggcgccggcggcgagcagcccgccgccggcgccggcggcgagcagcccgcccccgccccccgccgcgagcagcccgccgccggcgccggcggcgagcagcccgcccccgccccccgccgcgagcagcccgcccccggcgccggcgccggcgacggcgcccgcggcggcaacgccggcgccggcaagggccagggccagaacaaccagggcgccaacguccccaacgagaaggucgucaacgacuaccuccacaagauccgcuccuccgucaccaccgaguggacccccugcuccgucaccugcggcaacggcguccgcauccgccgcaagggccacgccggcaacaagaaggccgaggaccucaccauggacgaccucgaggucgaggccugcgucauggacaagugcgccggcaucuucaacgucgucuccaacucccucggccucgucauccuccucguccucgcccucuucaacuga

SEQ ID NO: 3979 - RNA, 1056 nt, Artificial Sequence
  derived and/or modified CDS sequence (opt2) from Pk(UM0029C9)__AHF20652.1__CSP
augaagaacuucauccuccucgccgucuccuccauccuccucgucgaccuccuccccacccacuucgagcacaacgucgaccucucccgcgccaucaacgucaacggcgucuccuucaacaacgucgacaccuccucccucggcgccgcccagguccgccaguccgccucccgcggccgcggccucggcgagaagcccaaggagggcgccgacaaggagaagaagaaggagaaggagaaggagaaggaggaggagcccaagaagcccaacgagaacaagcucaagcagcccgagcagcccgccgccggcgccggcggcgagcagcccgccgccggcgccggcggcgagcagcccgccgccggcgccggcggcgagcagcccgccgccggcgccggcggcgagcagcccgccgccggcgcccgcggcgagcagcccgccgccggcgccggcggcgagcagcccgccgccggcgcccgcggcgagcagcccgccgccggcgccggcggcgagcagcccgccgccggcgccggcggcgagcagcccgccgccggcgccggcggcgagcagcccgccgccggcgcccgcggcgagcagcccgccgccggcgccggcggcgagcagcccgcccccgccccccgccgcgagcagcccgccgccggcgccggcggcgagcagcccgcccccgccccccgccgcgagcagcccgcccccggcgccggcgccggcgacggcgcccgcgagggcaacgccggcgccggcaagggccagggccagaacaaccagggcgccaacguccccaacgagaaggucgucaacgacuaccuccacaagauccgcuccuccgucaccaccgaguggacccccugcuccgucaccugcggcaacggcguccgcauccgccgcaagggccacgccggcaacaagaaggccgaggaccucaccauggacgaccucgaggucgaggccugcgucauggacaagugcgccggcaucuucaacgucgucuccaacucccucggccucgucauccuccucguccucgcccucuucaacuga

SEQ ID NO: 3980 - RNA, 1056 nt, Artificial Sequence
  derived and/or modified CDS sequence (opt2) from Pk(UM0050C7)__AHF20665.1__CSP
augaagaacuucauccuccucgccgucuccuccauccuccucgucgaccuccuccccacccacuucgagcacaacgucgaccucucccgcgccaucaacgucaacggcgucuccuucaacaacgucgacaccuccucccccggcgccgcccagguccgccaguccgccucccgcggccgcggccucggcgagaagcccaaggagggcgccgacaaggagaagaagaaggagaaggagaaggagaaggaggaggagcccaagaagcccaacgagaacaagcucaagcagcccgagcagcccgccgccggcgccggcggcgagcagcccgccgccggcgccggcggcgagcagcccgccgccggcgccggcggcgagcagcccgccgccggcgccggcggcgagcagcccgccgccggcgcccgcggcgagcagcccgccgccggcgccggcggcgagcagcccgccgccggcgcccgcggcgagcagcccgccgccggcgccggcggcgagcagcccgccgccggcgccggcggcgagcagcccgccgccggcgccggcggcgagcagcccgccgccggcgccggcggcgagcagcccgccgccggcgccggcggcgagcagcccgcccccgccccccgccgcgagcagcccgccgccggcgccggcggcgagcagcccgcccccgccccccgccgcgagcagcccgcccccggcgccggcgccggcgacggcgcccgcggcggcaacgccggcgccggcaagggccagggccagaacaaccagggcgccaacguccccaacgagaaggucgucaacgacuaccuccgcaagauccgcuccuccgucaccaccgaguggacccccugcuccgucaccugcggcaacggcguccgcauccgccgcaagggccacgccggcaacaagaaggccgaggaccucaccauggacgaccucgaggucgaggccugcgucauggacaagugcgccggcaucuucaacgucgucuccaacucccucggccucgucauccuccucguccucgcccucuucaacuga

SEQ ID NO: 3981 - RNA, 1056 nt, Artificial Sequence
  derived and/or modified CDS sequence (opt2) from Pk(UMHEC1)__AHF20620.1__CSP
augaagaacuucauccuccucgccgucuccuccauccuccucgucgaccuccuccccacccacuucgagcacaacgucgaccucucccgcgccaucaacgucaacggcgucuccuucaacaacgucgacaccuccucccucggcgccgcccagguccgccaguccgccucccgcggccgcggccucggcgagaagcccaaggagggcgccgacaaggagaagaagaaggagaaggagaaggagaaggaggaggagcccaagaagcccaacgagaacaagcucaagcagcccgagcagcccgccgccggcgccggcggcgagcagcccgccgccggcgccggcggcgagcagcccgccgccggcgccggcggcgagcagcccgccgccggcgccggcggcgagcagcccgccgccggcgccggcggcgagcagcccgccgccggcgcccgcggcgagcagcccgccgccggcgccggcggcgagcagcccgccgccggcgccggcggcgagcagcccgccgccggcgccggcggcgagcagcccgccgccggcgcccgcggcgagcagcccgccgccggcgccggcggcgagcagcccgccgccggcgccggcggcgagcagcccgcccccgccccccgccgcgagcagcccgccgccggcgccggcggcgagcagcccgcccccgccccccgccgcgagcagcccgcccccggcgccggcgccggcgacggcgcccgcggcggcaacgccggcgccggcaagggccagggccagaacaaccagggcgccaacguccccaacgagaaggucgucaacgacuaccuccacaagauccgcuccuccgucaccaccgaguggacccccugcuccgucaccugcggcaacggcguccgcauccgccgcaagggccacgccggcaacaagaaggccgaggaccucaccauggacgaccucgaggucgaggccugcgucauggacaagugcgccggcaucuucaacgucgucuccaacucccucggccucgucauccuccucguccucgcccucuucaacuga

SEQ ID NO: 3982 - RNA, 1056 nt, Artificial Sequence
  derived and/or modified CDS sequence (opt2) from Pk(UMMAC4)__AHF20621.1__CSP
augaagaacuucauccuccucgccgucuccuccauccuccucgucgaccuccuccccacccacuucgagcacaacgucgaccucucccgcgccaucaacgucaacggcgucuccuucaacaacgucgacaccuccucccucggcgccgcccagguccgccaguccgccucccgcggccgcggccucggcgagaagcccaaggagggcgccgacaaggagaagaagaagggcaaggagaaggagaaggaggaggagcccaagaagcccaacgagaacaagcucaagcagcccgagcagcccgccgccggcgccggcggcgagcagcccgccgccggcgccggcggcgagcagcccgccgccggcgccggcggcgagcagcccgccgccggcgccggcggcgagcagcccgccgccggcgccggcggcgagcagcccgccgccggcgcccgcggcgagcagcccgccgccggcgccggcggcgagcagcccgccgccggcgccggcggcgagcagcccgccgccggcgccggcggcgagcagcccgccgccggcgcccgcggcgagcagcccgccgccggcgccggcggcgagcagcccgccgccggcgccggcggcgagcagcccgcccccgccccccgccgcgagcagcccgccgccggcgccggcggcgagcagcccgcccccgccccccgccgcgagcagcccgcccccggcgccggcgccggcgacggcgcccgcggcggcaacgccggcgccggcaagggccagggccagaacaaccagggcgccaacguccccaacgagaaggucgucaacgacuaccuccacaagauccgcuccuccgucaccaccgaguggacccccugcuccgucaccugcggcaacggcguccgcauccgccgcaagggccacgccggcaacaagaaggccgaggaccucaccauggacgaccucgaggucgaggccugcgucauggacaagugcgccggcaucuucaacgucgucuccaacucccucggccucgucauccuccucguccucgcccucuucaacuga

SEQ ID NO: 3983 - RNA, 1056 nt, Artificial Sequence
  derived and/or modified CDS sequence (opt2) from Pk(UMMEC8)__AHF20623.1__CSP
augaagaacuucauccuccucgccgucuccuccauccuccucgucgaccuccuccccacccacuucgagcacaacgucgaccucucccgcgccaucaacgucaacggcgucuccuucaacaacgucgacaccuccucccucggcgccgcccagguccgccaguccgccucccgcggccgcggccucggcgagaagcccaaggagggcgccgacaaggagaagaagaaggagaaggagaaggagaaggaggaggagcccaagaagcccaacgagaacaagcucaagcagcccgagcagcccgccgccggcgccggcggcgagcagcccgccgccggcgccggcggcgagcagcccgccgccggcgccggcggcgagcagcccgccgccggcgccggcggcgagcagcccgccgccggcgccggcggcgagcagcccgccgccggcgcccgcggcgagcagcccgccgccggcgccggcggcgagcagcccgccgccggcgccggcggcgagcagcccgccgccggcgccggcggcgagcagcccgccgccggcgcccgcggcgagcagcccgccgccggcgccggcggcgagcagcccgccgccggcgccggcggcgagcagcccgcccccgccccccgccgcgagcagcccgccgccggcgccggcggcgagcagcccgcccccgccccccgccgcgagcagcccgcccccggcgccggcgccggcgacggcgcccgcggcggcaacgccggcgccggcaagggccagggccagaacaaccagggcgccaacguccccaacgagaaggucgucaacgacuaccuccacaagacccgcuccuccgucaccaccgaguggacccccugcuccgucaccugcggcaacggcguccgcauccgccgcaagggccacgccggcaacaagaaggccgaggaccucaccauggacgaccucgaggucgaggccugcgucauggacaagugcgccggcaucuucaacgucgucuccaacucccucggccucgucauccuccucguccucgcccucuucaacuga

SEQ ID NO: 3984 - RNA, 1050 nt, Artificial Sequence
  derived and/or modified CDS sequence (opt2) from Pk(MPG45)__ACD86467.1__CSP
augaagaacuucauccuccucgccgucuccuccauccuccucgucgaccuccuccccacccacuucgagcacaacgucgaccucucccgcgccaucaaccucaacggcgucuccuucaacaacgucgacaccuccucccucggcgccgcccagguccgccaguccgccucccgcggccgcggccucggcgagaagcccaaggagggcgccgacaaggagaagaagaaggagaaggacaaggaggaggagcccaagaagcccaacgagaacaagcucaagcagcccaacgccggccagccccaggcccagggcgacggcgccaacgccggccagccccaggcccagggcgacggcgccaacgccggccagccccaggcccagggcgacggcgccaacgccggccagccccaggcccagggcgacggcgccaacgccggccagccccaggcccagggcgacggcgccaacgccggccagccccaggcccagggcgacggcgccaacgccggccagccccaggcccagggcgacggcgccaacgccggccagccccaggcccagggcgacggcgccaacgccggccagccccaggcccagggcgacggcgccaacgccggccagccccaggcccagggcgaccgcgccaacgccggccagccccaggcccagggcgacggcgccaacgucccccgccagggccgcaacggcggcggcgcccccgccggcggcaacgagggcaacaagcaggccggcaagggccagggccagaacaaccagggcgccaacgcccccaacgagaaggucgucaacgacuaccuccagaagauccgcuccuccgucaccaccgaguggacccccugcuccgucaccugcggcaacggcguccgcauccgccgccgcgcccacgccgacaagaagaaggccgaggaccucaccauggacgaccucgaggucgaggccugcgucauggacaagugcgccggcaucuucaacgucgucuccaacucccucggccucgucauccuccucguccucgcccucuucaacuga

SEQ ID NO: 3985 - RNA, 1044 nt, Artificial Sequence
  derived and/or modified CDS sequence (opt2) from Pk(KH462)__ADN94491.1__CSP
augcgcaacuucauccuccucgccgucuccuccauccuccucgucgaccuccuccccacccacuucgagcacaacgucgaccucucccgcgccaucaacgucaacggcgucuccuucaacaacgucgacaccuccucccucggcgccgcccagguccgccaguccgccucccgcggccgcggccucggcgagaagcgcaaggagggcgccgacaaggagaagaagaaggagaaggaggaggagcccaagaagcccaacgagaacaagcucaagcagcccgagcaggccgcccccggcgccggcggcgagcagcccgcccccggcgccggcggcgagcgccccgcccccggcgccggcggcgagcagcccgcccccggcgccggcggcgagcagcccgcccccggcgccggcggcgagcagcccgcccccggcgccggcggcgagcagcccgcccccggcgccggcggcgagcgccccgcccccggcgccggcggcgagcagcccgcccccggcgccggcggcgagcgccccgcccccggcgccggcggcgagcagcccgcccccggcgccggcggcgagcgccccgcccccggcgccggcggcgagcagcccgcccccggcgccggcggcgagcagcccgcccccggcgccggcggcgagcagcccgcccccgccccccgccgcgagcagcccgcccccgcccccggcgccggcgacggcgcccgcggcggcaacgccggcgccggcaagggccagggccagaacaaccagggcgccaacguccccaacgagaaggucgucaacgacuaccuccacaagauccgcuccuccgucaccaccgaguggacccccugcuccgucaccugcggcaacggcguccgcauccgccgcaaggcccacgccgacaagaagaaggccgaggaccucaccauggacgaccucgaggucgaggccugcgucauggacaagugcgccggcaucuucaacgucgucuccaacucccucggccucgucauccuccucguccucgcccucuucaacuga

SEQ ID NO: 3986 - RNA, 1044 nt, Artificial Sequence
  derived and/or modified CDS sequence (opt2) from Pk(LT3)__ADN94521.1__CSP
augcgcaacuucauccuccucgccgucuccuccauccuccucgucgaccuccuccccacccacuucgagcacaacgucgaccucucccgcgccaucaacgucaacggcgucuccuucaacaacgucgacaccuccucccucggcgccgcccagguccgccaguccgccucccgcggccgcggccucggcgagaagcgcaaggagggcgccgacaaggagaagaagaaggagaaggaggaggagcccaagaagcccaacgagaacaagcucaagcagcccgagcaggccgcccccggcgccggcggcgagcagcccgcccccggcgccggcggcgagcagcccgcccccggcgccggcggcgagcgccccgcccccggcgccggcggcgagcagcccgcccccggcgccggcggcgagcagcccgcccccggcgccggcggcgagcgccccgcccccggcgccggcggcgagcagcccgcccccggcgccggcggcgagcagcccgcccccggcgccggcggcgagcagcccgcccccggcgccggcggcgagcagcccgcccccggcgccggcggcgagcuccccgcccccggcgccggcggcgagcgccccgcccccggcgccggcggcgagcagcccgcccccggcgccggcggcgagcagcccgcccccgccccccgccgcgagcagcccgcccccggccccggcgccggcgacggcgcccgcggcggcaacgccggcgccggcaagggccagggccagaacaaccagggcgccaacguccccaacgagaaggucgucaacgacuaccuccacaagauccgcuccuccgucaccaccgaguggacccccugcuccgucaccugcggcaacggcguccgcauccgccgccgccagaacgccggcaacaagaaggccgaggaccucaccauggacgaccucgaggucgaggccugcgucauggacaagugcgccggcaucuucaacgucgucuccaacucccucggccucgucauccuccucguccucgcccucuucaacuga

SEQ ID NO: 3987 - RNA, 1044 nt, Artificial Sequence
  derived and/or modified CDS sequence (opt2) from Pk(LT33)__ADN94529.1__CSP
augcgcaacuucauccuccucgccgucuccuccauccuccucgucgaccuccuccccacccacuucgagcacaacgucgaccucucccgcgccaucaacgucaacggcgucuccuucaacaacgucgacaccuccucccucggcgccgcccagguccgccaguccgccucccgcggccgcggccucggcgagaagcgcaaggagggcgccgacaaggagaagaagaaggagaaggaggaggagcccaagaagcccaacgagaacaagcucaagcagcccgagcaggccgcccccggcgccggcggcgagcagcccgcccccggcgccggcggcgagcgccccgcccccggcgccggcggcgagcagcccgcccccggcgccggcggcgagcagcccgcccccggcgccggcggcgagcagcccgcccccggcgccggcggcgagcagcccgcccccggcgccggcggcgagcgccccgcccccggcgccggcggcgagcagcccgcccccggcgccggcggcgagcagcccgcccccggcgccggcggcgagcagcccgcccccggcgccggcggcgagcgccccgcccccggcgccggcggcgagcagcccgcccccggcgccggcggcgagcgccccgcccccggcgccggcggcgagcagcccgcccccgccccccgccgcgagcagcccgcccccggccccggcgccggcgacggcgcccgcggcggcaacgccggcgccggcaagggccagggccagaacaaccagggcgccaacguccccaacgagaaggucgucaacgacuaccuccacaagauccgcuccuccgucaccaccgaguggacccccugcuccgucaccugcggcaacggcguccgcauccgccgccgccagaacgccggcaacaagaaggccgaggaccucaccauggacgaccucgaggucgaggccugcgucauggacaagugcgccggcaucuucaacgucgucuccaacucccucggccucgucauccuccucguccucgcccucuucaacuga

SEQ ID NO: 3988 - RNA, 1044 nt, Artificial Sequence
  derived and/or modified CDS sequence (opt2) from Pk(LT33)__ADN94527.1__CSP
augaagaacuucauccuccucgccgucuccuccauccuccucgucgaccuccuccccacccacuucgagcacaacgucgaccucucccgcgccaucaacgucaacggcgucuccuucaacaacgucgacaccuccucccucggcgccgcccagguccgccaguccgccucccgcggccgcggccucggcgagaagcgcaaggagggcgccgacaaggagaagaagaaggagaaggaggaggagcccaagaagcccaacgagaacaagcucaagcagcccgagcaggccgcccccggcgccggcggcgagcagcccgcccccggcgccggcggcgagcgccccgcccccggcgccggcggcgagcagcccgcccccggcgccggcggcgagcagcccgcccccggcgccggcggcgagcagcccgcccccggcgccggcggcgagcagcccgcccccggcgccggcggcgagcgccccgcccccggcgccggcggcgagcagcccgcccccggcgccggcggcgagcagcccgcccccggcgccggcggcgagcagcccgcccccggcgccggcggcgagcgccccgcccccggcgccggcggcgagcagcccgcccccggcgccggcggcgagcgccccgcccccggcgccggcggcgagcagcccgcccccgccccccgccgcgagcagcccgcccccggccccggcgccggcgacggcgcccgcggcggcaacgccggcgccggcaagggccagggccagaacaaccagggcgccaacguccccaacgagaaggucgucaacgacuaccuccacaagauccgcuccuccgucaccaccgaguggacccccugcuccgucaccugcggcaacggcguccgcauccgccgccgccagaacgccggcaacaagaaggccgaggaccucaccauggacgaccucgaggucgaggccugcgucauggacaagugcgccggcaucuucaacgucgucuccaacucccucggccucgucauccuccucguccucgcccucuucaacuga

SEQ ID NO: 3989 - RNA, 1044 nt, Artificial Sequence
  derived and/or modified CDS sequence (opt2) from Pk(TN029)__AFG25482.1__CSP
augcgcaacuucauccuccucgccgucuccuccauccuccucgucgaccuccuccccacccacuucgagcacaacgucgaccucucccgcgccaucaacgucaacggcgucuccuucaacaacgucgacaccuccucccucggcgccgcccagguccgccaguccgccucccgcggccgcggccucggcgagaagcgcaaggagggcgccgacaaggagaagaagaaggagaaggaggaggagcccaagaagcccaacgagaacaagcucaagcagcccgagcaggccgcccccggcgccggcggcgagcagcccgcccccggcgccggcggcgagcagcccgcccccggcgccggcggcgagcgccccgcccccggcgccggcggcgagcagcccgcccccggcgccggcggcgagcagcccgcccccggcgccggcggcgagcgccccgcccccggcgccggcggcgagcagcccgcccccggcgccggcggcgagcagcccgcccccggcgccggcggcgagcagcccgcccccggcgccggcggcgagcagcccgcccccggcgccggcggcgagcgccccgcccccggcgccggcggcgagcgccccgcccccggcgccggcggcgagcagcccgcccccggcgccggcggcgagcagcccgcccccgccccccgccgcgagcagcccgcccccggccccggcgccggcgacggcgcccgcggcggcaacgccggcgccggcaagggccagggccagaacaaccagggcgccaacguccccaacgagaaggucgucaacgacuaccuccacaagauccgcuccuccgucaccaccgaguggacccccugcuccgucaccugcggcaacggcguccgcauccgccgccgccagaacgccggcaacaagaaggccgaggaccucaccauggacgaccucgaggucgaggccugcgucauggacaagugcgccggcaucuucaacgucgucuccaacucccucggccucgucauccuccucguccucgcccucuucaacuga

SEQ ID NO: 3990 - RNA, 1041 nt, Artificial Sequence
  derived and/or modified CDS sequence (opt2) from Pk(LT53)__ADN94501.1__CSP
augaagaacuucauccuccucgccgucuccuccauccuccucgucgaccuccuccccacccacuucgagcacaacgucgaccucucccgcgccaucaacgucaacggcgucuccuucaacaacgucgacaccuccucccucggcgccgcccagguccgccaguccgccucccgcggccgcggccucggcgagaagcccaaggagggcgacgacaaggagaagaagaaggagaaggagaaggaggaggagcccaagaaccucaacgagaacaagcccaagcagcccaacgccgagggcgacggcgccaagcccaagcagcccaacgccgagggcgacggcgccaagcucaagcagcccaacgccgagggcgacggcgccaagcucaagcagcccaacgccgagggcgacggcggcaacgcccgccagcccaacgccgagggcgacggcggcaacgcccgccagcccaacgccgagggcgacggcggcaacgcccgccagcccaacgccgagggcgacggcggcaacgcccgccagcccaacgccgagggcgacggcggcaacgcccgccagcccaacgccgagggcgacggcggcaacgcccgccagcccaacgccgagggcgacggcggcaacgcccgccagcccaacgccgagggcgacggcgccaacgcccgccagccccaggccgagggcggcggcggcaacgcccgccagggcggcaacgagggcaacaagcaggccggcaagggccagggccagaacaaccagggcgccaacgcccccaacgagaaggucgucaacgacuaccuccagaagauccgcuccuccgucaccaccgaguggacccccugcuccgucaccugcggcaacggcguccgcauccgccgccgcgcccacgccgacaagaagaaggccgaggaccucaccauggacgaccucgaggucgaggccugcgucauggacaagugcgccggcaucuucaacgucgucuccaacucccucggccucgucauccuccucguccucgcccucuucaacuga

SEQ ID NO: 3991 - RNA, 1041 nt, Artificial Sequence
  derived and/or modified CDS sequence (opt2) from Pk(UMOTC3)__AHF20624.1__CSP
augaagaacuucauccuccucgccgucuccuccauccuccucgucgaccuccuccccacccacuucgagcacaacgucgaccucucccgcgccaucaacgucaacggcgucuccuucaacaacgucgacaccuccucccucggcgccgcccagguccgccaguccgccucccgcggccgcggccucggcgagaagcccaaggagggcgccgacaaggagaagaagaaggagaaggagaaggaggaggagcccaagaagcccaacgagaacaagcucaagcagcccgagggcaaccgcgaggcccccggccagcccgagggcaaccgcgaggcccccggccagcccgagggcaaccgcgaggcccccggccagcccgagggcaaccgcgaggcccccggccagcccgagggcaaccgcgaggcccccggccagcccgagggcaaccgcgaggcccccggccagcccgagggcaaccgcgaggcccccggccagcccgagggcaaccgcgaggcccccggccagcccgagggcaaccgcgaggcccccgcccagcccgagggcaaccgcgaggcccccggccagcccgagggcaaccgcgaggcccccgcccagccccagggcaacggcggcgccggccaggcccagcccgaggagaaccgcgaggcccccgcccagccccagggcaacggcggcgccggccaggcccagccccagaagaacgagggcggcaacgccggcgcccgcaagggccagggccagaacaaccagggcgccaacguccccaacgagaaggucgucaacgacuaccuccacaagauccgcuccuccgucaccaccgaguggacccccugcuccgucaccugcggcaacggcguccgcauccgccgcaagggccacgccggcaacaagaaggccgaggaccucaccauggacgaccucgaggucgaggccugcgucauggacaagugcgccggcaucuucaacgucgucuccaacucccucggccucgucauccuccucguccccgcccucuucaacuga

SEQ ID NO: 3992 - RNA, 1038 nt, Artificial Sequence
  derived and/or modified CDS sequence (opt2) from Pk(UMSY2C2)__AHF20625.1__CSP
augaagaacuucauccuccucgccgucuccuccauccuccucgucgaccuccuccccacccacuucgagcacaacgucgaccucucccgcgccaucaacgucaacggcgucuccuucaacaacgucgacaccuccucccucggcgccgcccagguccgccaguccgccucccgcggccgcggccucggcgagaagcccaaggagggcgccgacaaggagaagaagaaggagaaggagaaggaggaggagcccaagaagcccaacgagaacaagcucaagcagcccgagggcaaccgcgaggcccccggccagcccgagggcaaccgcgaggcccccggccagcccgagggcaaccgcgaggcccccggccagcccgagggcaaccgcgaggcccccggccagcccgagggcaaccgcgaggcccccggccagcccgagggcaaccgcgaggcccccggccagcccgagggcaaccgcgaggcccccggccagcccgagggcaaccgcgaggcccccggccagcccgagggcaaccgcgaggcccccggccagcccgagggcaaccgcgaggcccccgcccagcccgagggcaaccgcgaggcccccggccagcccgagggcaaccgcgaggcccccgcccagcccgagggcaaccgcgaggcccccgcccagccccagggcaacggcggcgccggccaggcccagccccagaagaacgagggcggcaacgccggcgcccgcaagggccagggccagaacaaccagggcgccaacgcccccaacgagaaggucgucaacgacuaccuccagaagauccgcuccuccgucaccaccgaguggacccccugcuccgucaccugcggcaacggcguccgcaucaagcgcaaggcccacgccgacaagaagaaggccgaggaccucaccauggacgaccucgaggucgaggccugcgucauggacaagugcgccggcaucuucaacgucgucuccaacucccucggccucgucauccuccucguccucgcccucuucaacuga

SEQ ID NO: 3993 - RNA, 1029 nt, Artificial Sequence
  derived and/or modified CDS sequence (opt2) from Pk(KN045)__AFG25467.1__CSP
augaagaacuucauccuccucgccgucuccuccauccuccucgucgaccuccuccccacccacuucgagcacaacgucgaccucucccgcgccaucaacgucaacggcgucuccuucaacaacgucgacaccuccucccucggcgccgcccagguccgccaguccgccucccgcggccgcggccucggcgagaagcccaaggagggcgccgacaaggagaagaagaaggagaaggagaaggagaaggaggaggagcccaagaagcccaacgagaacaagcucaagcagcccgagcagcccgccgccggcgccggcggcgagcagcccgccgccggcgccggcggcgagcagcccgccgccggcgccggcggcgagcagcccgccgccggcgccggcggcgagcagcccgccgccggcgccggcggcgagcagcccgccgccggcgcccgcggcgagcagcccgccgccggcgccggcggcgagcagcccgccgccggcgccggcggcgagcagcccgccgccggcgcccgcggcgagcagcccgccgccggcgccggcggcgagcagcccgccgccggcgccggcggcgagcagcccgcccccgccccccgccgcgagcagcccgccgccggcgccggcggcgagcagcccgcccccgccccccgccgcgagcagcccgcccccggcgccggcgccggcgacggcgcccgcggcggcaacgccggcgccggcaagggccagggccagaacaaccagggcgccaacguccccaacgagaaggucgucaacgacuaccuccacaagauccgcuccuccgucaccaccgaguggacccccugcuccgucaccugcggcaacggcguccgcauccgccgcaagggccacgccggcaacaagaaggccgaggaccucaccauggacgaccucgaggucgaggccugcgucauggacaagugcgccggcaucuucaacgucgucuccaacucccucggccucgucauccuccucguccucgcccucuucaacuga

SEQ ID NO: 3994 - RNA, 1029 nt, Artificial Sequence
  derived and/or modified CDS sequence (opt2) from Pk(LT48)__ADN94515.1__CSP
augaagaacuucauccuccucgccgucuccuccauccuccucgucgaccuccuccccacccacuucgagcacaacgucgaccucucccgcgccaucaacgucaacggcgucuccuucaacaacgucgacaccuccucccucggcgccgcccagguccgccaguccgccucccgcggccgcggccucggcgagaagcccaaggagggcgccgacaaggagaagaagaaggagaaggagaaggagaaggaggaggagcccaagaagcccaacgagaacaagcucaagcagcccgagcagcccgccgccggcgccggcggcgagcagcccgccgccggcgccggcggcgagcagcccgccgccggcgccggcggcgagcagcccgccgccggcgccggcggcgagcagcccgccgccggcgccggcggcgagcagcccgccgccggcgccggcggcgagcagcccgccgccggcgccggcggcgagcagcccgccgccggcgccggcggcgagcagcccgccgccggcgcccgcggcgagcagcccgccgccggcgccggcggcgagcagcccgccgccggcgccggcggcgagcagcccgcccccgccccccgccgcgagcagcccgccgccggcgccggcggcgagcagcccgcccccgccccccgccgcgagcagcccgcccccggcgccggcgccggcgacggcgcccgcggcggcaacgccggcgccggcaagggccagggccagaacaaccagggcgccaacguccccaacgagaaggucgucaacgacuaccuccacaagauccgcuccuccgucaccaccgaguggacccccugcuccgucaccugcggcaacggcguccgcauccgccgcaagggccacgccggcaacaagaaggccgaggaccucaccauggacgaccucgaggucgaggccugcgucauggacaagugcgccggcaucuucaacgucgucuccaacucccucggccucgucauccuccucguccucgcccucuucaacuga

SEQ ID NO: 3995 - RNA, 1029 nt, Artificial Sequence
  derived and/or modified CDS sequence (opt2) from Pk(TB073)__AFG25476.1__CSP
augcgcaacuucuucuuccucgccgucuccuccauccuccucgucgaccuccuccccacccacuucgagcacaacgucgaccucucccgcgccaucaacgucaacggcgucuccuucaacaacgucgacaccuccucccucggcgccgcccagguccgccaguccgccucccgcggccgcggccucggcgagaagcgcaaggagggcgccgacaaggagaagaagaaggagaaggaggaggagcccaagaagcccaacgagaacaagcucaagcagcccgagcaggcccgcgccggcggcgagcagcccgccgccggcggcgagcagcccgccgccggcggcgagcagcccgccgccggcggcgagcagcccgccgccggcggcgagcagcccgccgccggcggcgagcagcccgccgccggcggcgagcagcccgccgccggcggcgagcagcccgccgccggcggcgagcagcccgccgccggcggcgagcgccccgccgccggcggcgagcagcccgccgccggcggcgagcgccccgccgccggcggcgagcagcccgccgccggcggcgagcagcccgcccccgccccccgccgcgagcagcccgccgccggcggcgagcagcccgcccccgccccccgccgcgagcagcccgccgccggcggcgagcagcccgcccccggcgccggcgccggcgacggcgcccgcggcggcaacgccggcgccggcaagggccagggccagaacaaccagggcgccaacguccccaacgagaaggucgucaacgacuaccuccacaagacccgcuccuccgucaccaccgaguggacccccugcuccgucaccugcggcaacggcguccgcauccgccgcaaggcccacgccgacaagaagaaggccgagaaccucaccauggacgaccucgaggucgaggccugcgucauggacaagugcgccggcaucuucaacgucgucuccaacucccucggccucgucauccuccucguccucgcccucuucaacuga

SEQ ID NO: 3996 - RNA, 1026 nt, Artificial Sequence
  derived and/or modified CDS sequence (opt2) from Pk(SGEHIWM26-Y09-60)__AFD97238.1__CSP
augaagaacuucauccuccucgccgucuccuccauccuccucgucgaccuccuccccacccacuucgagcacaacgucgaccucucccgcgccaucaacgucaacggcgucuccuucaacaacgucgacaccuccucccucggcgccgcccgcguccgccaguccgccucccgcggccgcggccucggcgagaagcccaaggagggcgccgacaaggagaagaagaaggagaaggagaaggagaaggaggagcccaagaagcccaacgagaacaagcucaagcagcccgagcagcccgccgccggcgccggcggcgagcagcccgccgccggcgccggcggcgagcagcccgccgccggcgccggcggcgagcagcccgccgccggcgccggcggcgagcagcccgccgccggcgccggcggcgagcagcccgccgccggcgccggcggcgagcagcccgccgccggcgccggcggcgagcagcccgccgccggcgccggcggcgagcagcccgccgccggcgccggcggcgagcagcccgccgccggcgccggcggcgagcagcccgccgccggcgccggcggcgagcagcccgcccccgccccccgccgcgagcagcccgccgccggcgccggcggcgagcagcccgcccccgccccccgccgcgagcagcccgcccccggcgccggcgccggcgacggcgcccgcggcggcaacgccggcgccggcaagggccagggccagaacaaccagggcgccaacguccccaacgagaaggucgucaacgacuaccuccacaagauccgcuccuccgucaccaccgaguggacccccugcuccgucaccugcggcaacggcguccgcauccgccgccgccagaacgccggcaacaagaaggccgaggaccucaccauggacgaccucgaggucgaggccugcgucauggacaagugcgccggcaucuucaacgucgucuccaacucccucggccucgucauccuccucguccucgcccucuucaacuga

SEQ ID NO: 3997 - RNA, 1026 nt, Artificial Sequence
  derived and/or modified CDS sequence (opt2) from Pk(SGEHIWM35-Y09-74)__AFD97243.1__CSP
augaagaacuucauccuccucgccgucuccuccauccuccucgucgaccuccuccccacccacuucgagcacaacgucgaccucucccgcgccaucaacgucaacggcgucuccuucaacaacgucgacaccuccucccucggcgccgcccagguccgccaguccgccucccgcggccgcggccucggcgagaagcccaaggagggcgccgacaaggagaagaagaaggagaaggagaaggagaaggaggagcccaagaagcccaacgagaacaagcucaagcagcccgagcagcccgccgccggcgccggcggcgagcagcccgccgccggcgccggcggcgagcagcccgccgccggcgccggcggcgagcagcccgccgccggcgccggcggcgagcagcccgccgccggcgccggcggcgagcagcccgccgccggcgccggcggcgagcagcccgccgccggcgccggcggcgagcagcccgccgccggcgccggcggcgagcagcccgccgccggcgccggcggcgagcagcccgccgccggcgccggcggcgagcagcccgccgccggcgccggcggcgagcagcccgcccccgccccccgccgcgagcagcccgccgccggcgccggcggcgagcagcccgcccccgccccccgccgcgagcagcccgcccccggcgccggcgccggcgacggcgcccgcggcggcaacgccggcgccggcaagggccagggccagaacaaccagggcgccaacguccccaacgagaaggucgucaacgacuaccuccacaagauccgcuccuccgucaccaccgaguggacccccugcuccgucaccugcggcaacggcguccgcauccgccgccgccagaacgccggcaacaagaaggccgaggaccucaccauggacgaccucgaggucgaggccugcgucauggacaagugcgccggcaucuucaacgucgucuccaacucccucggccucgucauccuccucguccucgcccucuucaacuga

SEQ ID NO: 3998 - RNA, 1023 nt, Artificial Sequence
  derived and/or modified CDS sequence (opt2) from Pk(UM0014C4)__AHF20645.1__CSP
augaagaacuucauccuccucgccgucuccuccauccuccucgucgaccuccuccccacccacuucgagcacaacgucgaccucucccgcgccaucaacgucaacggcgucuccuucaacaacgucgacaccuccucccucggcgccgcccagguccgccaguccgccucccgcggccgcggccucggcgagaagcccaaggagggcgccgacaaggagaagaagaaggagaaggagaaggaggaggagcccaagaagcccaacgagaacaagcucaagcagcccgagcaggcccgccccggcgccggcggcgagcagcccgcccccggcgccggcggcgagcagcccgcccccggcgccggcggcgagcagcccgcccccggcgccggcggcgagcagcccgcccccggcgccggcggcgagcagcccgcccccggcgccggcggcgagcagcccgcccccggcgccggcggcgagcagcccgcccccggcgccggcggcgagcagcccgcccccggcgccggcggcggccagcccgcccccggcgccggcggcgagcagcccgcccccggcgccggcggcgagcagcccgcccccgccccccgccgcgagcagcccgcccccggccccggcggcgagcagcccgcccccgccccccgccgcgagcagcccgcccccggcgccggcgccggcgacggcgcccgcggcggcaacgccggcgccggcaagggccagggccagaacaaccagggcgccaacguccccaacgagaaggucgucaacgacuaccuccacaagauccgcuccuccgucaccaccgaguggacccccugcuccgucaccugcggcaacggcguccgcauccgccgcaagggccacgccggcaacaagaaggccgaggaccucaccauggacgaccucgaggucgaggccugcgucauggacaagugcgccggcaucuucaacgucgucuccaacucccucggccucgucauccuccucguccucgcccucuucaacuga

SEQ ID NO: 3999 - RNA, 1020 nt, Artificial Sequence
  derived and/or modified CDS sequence (opt2) from Pk(LT57)__ADN94510.1__CSP
augaagaacuucauccuccucgccgucuccuccauccuccucgucgaccuccuccccacccacuucgagcacaacgucgaccucucccgcgccaucaacgucaacggcgucuccuucaacaacgucgacaccuccucccucggcgccgcccagguccgccaguccgccucccgcggccgcggccucggcgagaagcgcaaggagggcgccgacaaggagaagaagaaggagaaggaggagcccaagaagcccaacgagaacaagcucaagcagcccgagcaggcccgcgccggcggcgagcagcccgccgccggcggcgagcagcccgccgccggcggcgagcagcccgccgccggcggcgagcagcccgccgccggcggcgagcagcccgccgccggcggcgagcagcccgccgccggcggcgagcagcccgccgccggcggcgagcagcccgccgccggcggcgagcgccccgccgccggcggcgagcagcccgccgccggcggcgagcagcccgccgccggcggcgagcagcccgccgccggcggcgagcgccccgccgccggcggcgagcgccccgccgccggcggcgagcagcccgccgccggcggcgagcagcccgcccccgccccccgccgcgagcagcccgccgccggcggcgagcagcccgcccccggcgccggcgccggcgacggcgcccgcggcggcaacgccggcgccggcaagggccagggccagaacaaccagggcgccaacguccccaacgagaaggucgucaacgacuaccuccacaagauccgcuccuccgucaccaccgaguggacccccugcuccgucaccugcggcaacggcguccgcauccgccgcaaggcccacgccgacaagaagaaggccgagaaccucaccauggacgaccucgaggucgaggccugcgucauggacaagugcgccggcaucuucaacgucgucuccaacucccucggccucgucauccuccucguccucgcccucuucaacuga

SEQ ID NO: 4000 - RNA, 1020 nt, Artificial Sequence
  derived and/or modified CDS sequence (opt2) from Pk(SGEHIWM17-Y09-4)__AFD97233.1__CSP
augaagaacuucauccuccucgccgucuccuccauccuccucgucgaccuccuccccacccacuucgagcacaacgucgaccucucccgcgccaucaacgucaacggcgucuccuucaacaacgccgacaccuccucccucggcgccgcccagguccgccaguccgccucccgcggccgcggccucggcgagaagcccaaggagggcgccgacaaggagaagaagaaggagaaggaggaggagcccaagaagcccaacgagaacaagcucaagcagcccgacgccguccccggcggcgaggagcccgcccccggccgcgagcagcccgcccccggccgcgaggagcccgcccccggccgcgagcagcccgcccccggccgcgaggagcccgcccccggccgcgagcagcccgcccccggccgcgaggagcccgcccccggccgcgagcagcccgcccccggccgcgagcagcccgcccccggccgcgaggagcccgcccccggccgcgagcagcccgcccccggccgcgaggagcccgcccccggccgcgagcagcccgcccccggccgcgagcagcccgcccccggccgcgagcagcccgcccccggcggcgagcagcccgcccccggccgcgagcagcccgcccccggcggcgagcagcccgcccccgcccccggcgccggcgccggcgacggcgcccgcggcggcaacgccggcgccggcaagggccagggccagaacaaccagggcgccaacguccccaacgagaaggucgucaacgacuaccuccacaagauccgcuccuccgucaccaccgaguggacccccugcuccgucaccugcggcaacggcguccgcauccgccgcaagggccacgccggcaacaagaaggccgaggaccucaccauggacgaccucgaggucgaggccugcgucauggacaagugcgccggcaucuucaacgucgucuccaacucccucggccucgucauccuccucguccucgcccucuucaacuga

SEQ ID NO: 4001 - RNA, 1020 nt, Artificial Sequence
  derived and/or modified CDS sequence (opt2) from Pk(SGEHIWM26-Y09-123)__AFD97240.1__CSP
augaagaacuucauccuccucgccgucuccuccauccuccucgucgaccuccuccccacccacuucgagcacaacgucgaccucucccgcgccaucaacgucaacggcgucuccuucaacaacgucgacaccuccucccucggcgccgcccagguccgccaguccgccucccgcggccgcggccucggcgagaagcccaaggagggcgccgacaaggagaagaagaaggagaaggaggaggagcccaagaagcccaacgagaacaagcucaagcagcccgacgccguccccggcggcgaggagcccgcccccggccgcgagcagcccgcccccggccgcgaggagcccgcccccggccgcgagcagcccgcccccggccgcgaggagcccgcccccggccgcgagcagcccgcccccggccgcgaggagcccgcccccggccgcgagcagcccgcccccggccgcgagcagcccgcccccggccgcgaggagcccgcccccggccgcgagcagcccgcccccggccgcgaggagcccgcccccggccgcgagcagcccgcccccggccgcgagcagcccgcccccggccgcgagcagcccgcccccggcggcgagcagcccgcccccggccgcgagcagcccgcccccggcggcgagcagcccgcccccgcccccggcgccggcgccggcgacggcgcccgcggcggcaacgccggcgccggcaagggccagggccagaacaaccagggcgccaacguccccaacgagaaggucgucaacgacuaccuccacaagauccgcuccuccgucaccaccgaguggacccccugcuccgucaccugcggcaacggcguccgcauccgccgcaagggccacgccggcaacaagaaggccgaggaccucaccauggacgaccucgaggucgaggccugcgucauggacaagugcgccggcaucuucaacgucgucuccaacucccucggccucgucauccuccucguccucgcccucuucaacuga

SEQ ID NO: 4002 - RNA, 1020 nt, Artificial Sequence
  derived and/or modified CDS sequence (opt2) from Pk(TN003)__AFG25477.1__CSP
augaagaacuucauccuccucgccgucuccuccauccuccucgucgaccucuuccccacccacuucgagcacaacgucgaccucucccgcgccaucaacgucaacggcgucuccuucaacaacgucgacaccuccucccucggcgccgcccagguccgccaguccgccucccgcggccgcggccucggcgagaagcccaaggagggcgccgacaaggagaagaagaaggagaaggaggagaagcccaagaagcccaacgagaacaagcucaagcagcccgccgccggcggcgagcagcccgccgccggcggcgagcagcccgccgccggcggcgagcagcccgccgccggcggcgagcagcccgccgccggcggcgagcagcccgccgccggcggcgagcagcccgccgccggcggcgagcgccccgccgccggcggcgagcagcccgccgccggcggcgagcagcccgccgccggcggcgagcgccccgccgccggcggcgagcagcccgccgccggcggcgagcgccccgccgccggcggcgagcagcccgccgccggcggcgagcagcccgccgccggcggcgagcagcccgcccccgccccccgccgcgagcagcccgucgccggcggcgagcagcccgcccccgccccccgccgcgagcagcccgcccccggcgccggcgccggcgacggcgcccgcggcggcaacgccggcgccggcaagggccagggccagaacaaccagggcgccaacguccccaacgagaaggucgucaacgacuaccuccacaagauccgcuccuccgucaccaccgaguggacccccugcuccgucaccugcggcaacggcguccgcauccgccgccgccagaacgccggcaacaagaaggccgaggaccucaccauggacgaccucgaggucgaggccugcgucauggacaagugcgccggcaucuucaacgucgucuccaacucccucggccucgucauccuccucguccucgcccucuucaacuga

SEQ ID NO: 4003 - RNA, 1017 nt, Artificial Sequence
  derived and/or modified CDS sequence (opt2) from Pk(LT53)__ADN94524.1__CSP
augcgcaacuucauccuccucgccgucuccuccauccuccucgucgaccuccuccccacccacuucgagcacaacgucgaccucucccgcgccaucaacgucaacggcgucuccuucaacaacgucgacaccuccucccucggcgccgcccagguccgccaguccgccucccgcggccgcggccucggcgagaagcgcaaggagggcgccgacaaggagaagaagaaggagaaggaggaggagcccaagaagcccaacgagaacaagcucaagcagcccgagcaggagcgccccggcggcgagcagcccgcccccggccccggcggcgagcagcccgcccccggccccggcggcgagcagcccgccccccgccccggcggcgagcagcccgcccccggccccggcggcgagcagcccgcccccggccccggcggcgagcagcccgcccccggccccggcggcgagcagcccgccccccgccccggcggcgagcagcccgcccccggccccggcggcgagcagcccgccccccgccccggcggcgagcagcccgcccccggccccggcggcgagcagcccgccccccgccccggcggcgagcagcccgcccccggccccggcggcgagcagcccgcccccgccccccgccgcgagcagcccgcccccgcccccggcgccggcgccggcgacggcgcccgcggcggcaacgccggcgccggcaagggccagggccagaacaaccagggcgccaacguccccaacgagaaggucgucaacgacuaccuccacaagauccgcuccuccgucaccaccgaguggacccccugcuccgucaccugcggcaacggcguccgcauccgccgccgccagaacgccggcaacaagaaggccgaggaccucaccauggacgaccucgaggucgaggccugcgucauggacaagugcgccggcaucuucaacgucgucuccaacucccucggccucgucauccuccucguccucgcccucuucaacuga

SEQ ID NO: 4004 - RNA, 1014 nt, Artificial Sequence
  derived and/or modified CDS sequence (opt2) from Pk(KH229)__ADN94485.1__CSP
augcgcaacuucauccuccucgccgucuccuccauccuccucgucgaccuccuccccacccacuucgagcacaacgucgaccucucccgcgccaucaacgucaacggcgucuccuucaacaacgucgacaccuccucccucggcgccgcccagguccgccaguccgccucccgcggccgcggccucggcgagaagcccaaggagggcgccgacaaggagaagaagaaggagaaggaggagaagcccaagaagcccaacgagaacaagcucaagcagcccggcggcgagcagcccgccgccggcggcgagcagcccgccgccggcggcgagcagcccgccgccggcggcgagcagcccgccgccggcggcgagcgccccgccgccggcggcgagcagcccgccgccggcggcgagcagcccgccgccggcggcgagcagcccgccgccggcggcgagcagcccgccgccggcggcgagcgccccgccgccggcggcgagcagcccgccgccggcggcgagcagcccgccgccggcggcgagcagcccgccgccggcggcgagcgccccgccgccggcggcgagcagcccgcccccgccccccgccgcgagcagcccgccgccggcggcgagcagcccgcccccgccccccgccgcgagcagcccgcccccggcgccggcgccggcgacggcgcccgcggcggcaacgccggcgccggcaagggccagggccagaacaaccagggcgccaacguccccaacgagaaggucgucaacgacuaccuccacaagauccgcuccuccgucaccaccgaguggacccccugcuccgucaccugcggcaacggcguccgcauccgccgccgccagaacgccggcaacaagaaggccgaggaccucaccauggacgaccucgaggucgaggccugcgucauggacaagugcgccggcaucuucaacgucgucuccaacucccucggccucgucauccuccucguccucgcccucuucaacuga

SEQ ID NO: 4005 - RNA, 1014 nt, Artificial Sequence
  derived and/or modified CDS sequence (opt2) from Pk(KH468)__ADN94487.1__CSP
augaagaacuucauccuccucgccgucuccuccauccuccucgucgaccucuuccccacccacuucgagcacaacgucgaccucucccgcgccaucaacgucaacggcgucuccuucaacaacgucgacaccuccucccucggcgccgcccagguccgccaguccgccucccgcggccgcggccucggcgagaagcccaaggagggcgccgacaaggagaagaagaaggagaaggaggagaagcccaagaagcccaacgagaacaagcucaagcagcccggcggcgagcagcccgccgccggcggcgagcagcccgccgccggcggcgagcagcccgccgccggcggcgagcagcccgccgccggcggcgagcgccccgccgccggcggcgagcagcccgccgccggcggcgagcagcccgccgccggcggcgagcagcccgccgccggcggcgagcagcccgccgccggcggcgagcgccccgccgccggcggcgagcagcccgccgccggcggcgagcagcccgccgccggcggcgagcgccccgccgccggcggcgagcagcccgccgccggcggcgagcagcccgcccccgccccccgccgcgagcagcccgccgccggcggcgagcagcccgcccccgccccccgccgcgagcagcccgcccccggcgccggcgccggcgacggcgcccgcggcggcaaccccggcgccggcaagggccagggccagaacaaccagggcgccaacguccccaacgagaaggucgucaacgacuaccuccacaagauccgcuccuccgucaccaccgaguggacccccugcuccgucaccugcggcaacggcguccgcauccgccgccgccagaacgccggcaacaagaaggccgaggaccucaccauggacgaccucgaggucgaggccugcgucauggacaagugcgccggcaucuucaacgucgucuccaacucccucggccucgucauccuccucguccucgcccucuucaacuga

SEQ ID NO: 4006 - RNA, 1014 nt, Artificial Sequence
  derived and/or modified CDS sequence (opt2) from Pk(LT33)__ADN94523.1__CSP
augcgcaacuucauccuccucgccgucuccuccauccuccucgucgaccuccuccccacccacuucgagcacaacgucgaccucucccgcgccaucaacgucaacggcgucuccuucaacaacgucgacaccuccucccucggcgccgcccagguccgccaguccgccucccgcggccgcggccucggcgagaagcgcaaggagggcgccgacaaggagaagaagaaggagaaggaggaggagcccaagaagcccaacgagaacaagcucaagcagcccggcggcgagcagcccgccgccggcggcgagcagcccgccgccggcggcgagcagcccgccgccggcggcgagcagcccgccgccggcggcgagcgccccgccgccggcggcgagcagcccgccgccggcggcgagcagcccgccgccggcggcgagcagcccgccgccggcggcgagcagcccgccgccggcggcgagcgccccgccgccggcggcgagcagcccgccgccggcggcgagcagcccgccgccggcggcgagcgccccgccgccggcggcgagcagcccgccgccggcggcgagcagcccgcccccgccccccgccgcgagcagcccgccgccggcggcgagcagcccgcccccgccccccgccgcgagcagcccgcccccggcgccggcgccggcgacggcgcccgcggcggcaaccccggcgccggcaagggccagggccagaacaaccagggcgccaacguccccaacgagaaggucgucaacgacuaccuccacaagauccgcuccuccgucaccaccgaguggacccccugcuccgucaccugcggcaacggcguccgcauccgccgccgccagaacgccggcaacaagaaggccgaggaccucaccauggacgaccucgaggucgaggccugcgucauggacaagugcgccggcaucuucaacgucgucuccaacucccucggccucgucauccuccucguccucgcccucuucaacuga

SEQ ID NO: 4007 - RNA, 1014 nt, Artificial Sequence
  derived and/or modified CDS sequence (opt2) from Pk(LT64)__ADN94520.1__CSP
augaagaacuucauccuccucgccgucuccuccauccuccucgucgaccucuuccccacccacuucgagcacaacgucgaccucucccgcgccaucaacgucaacggcgucuccuucaacaacgucgacaccuccucccucggcgccgcccagguccgccaguccgccucccgcggccgcggccucggcgagaagcccaaggagggcgccgacaaggagaagaagaaggagaaggaggagaagcccaagaagcccaacgagaacaagcucaagcagcccggcggcgagcagcccgccgccggcggcgagcagcccgccgccggcggcgagcagcccgccgccggcggcgagcagcccgccgccggcggcgagcagcccgccgccggcggcgagcagcccgccgccggcggcgagcgccccgccgccggcggcgagcagcccgccgccggcggcgagcagcccgccgccggcggcgagcgccccgccgccggcggcgagcagcccgccgccggcggcgagcgccccgccgccggcggcgagcagcccgccgccggcggcgagcagcccgccgccggcggcgagcagcccgcccccgccccccgccgcgagcagcccgccgccggcggcgagcagcccgcccccgccccccgccgcgagcagcccgcccccggcgccggcgccggcgacggcgcccgcggcggcaacgccggcgccggcaagggccagggccagaacaaccagggcgccaacguccccaacgagaaggucgucaacgacuaccuccacaagauccgcuccuccgucaccaccgaguggacccccugcuccgucaccugcggcaacggcguccgcauccgccgccgccagaacgccggcaacaagaaggccgaggaccucaccauggacgaccucgaggucgaggccugcgucauggacaagugcgccggcaucuucaacgucgucuccaacucccucggccucgucauccuccucguccucgcccucuucaacuga

SEQ ID NO: 4008 - RNA, 1014 nt, Artificial Sequence
  derived and/or modified CDS sequence (opt2) from Pk(TB016)__AFG25473.1__CSP
augaagaacuucauccuccucgccgucuccuccauccuccucgucgaccucuuccccacccacuucgagcacaacgucgaccucucccgcgccaucaacgucaacggcgucuccuucaacaacgucgacaccuccucccucggcgccgcccagguccgccaguccgccucccgcggccgcggccucggcgagaagcccaaggagggcgccgacaaggagaagaagaaggagaaggaggagaagcccaagaagcccaacgagaacaagcucaagcagcccggcggcgagcagcccgccgccggcggcgagcagcccgccgccggcggcgagcagcccgccgccggcggcgagcagcccgccgccggcggcgagcgccccgccgccggcggcgagcagcccgccgccggcggcgagcagcccgccgccggcggcgagcagcccgccgccggcggcgagcagcccgccgccggcggcgagcgccccgccgccggcggcgagcagcccgccgccggcggcgagcagcccgccgccggcggcgagcgccccgccgccggcggcgagcagcccgccgccggcggcgagcagcccgcccccgccccccgccgcgagcagcccgccgccggcggcgagcagcccgcccccgccccccgccgcgagcagcccgcccccggcgccggcgccggcgacggcgcccgcggcggcaacgccggcgccggcaagggccagggccagaacaaccagggcgccaacguccccaacgagaaggucgucaacgacuaccuccacaagauccgcuccuccgucaccaccgaguggacccccugcuccgucaccugcggcaacggcguccgcauccgccgccgccagaacgccggcaacaagaaggccgaggaccucaccauggacgaccucgaggucgaggccugcgucauggacaagugcgccggcaucuucaacgucgucuccaacucccucggccucgucauccuccucguccucgcccucuucaacuga

SEQ ID NO: 4009 - RNA, 1014 nt, Artificial Sequence
  derived and/or modified CDS sequence (opt2) from Pk(UM0021C10)__AHF20667.1__CSP
augaagaacuucauccuccucgccgucuccuccauccuccucgucgaccucuuccccacccacuucgagcacaacgucgaccucucccgcgccaucaacgucaacggcgucuccuucaacaacgucgacaccuccucccucggcgccgcccagguccgccaguccgccucccgcggccgcggccucggcgagaagcccaaggagggcgccgacaaggagaagaagaaggagaaggaggagaagcccaagaagcccaacgagaacaagcucaagcagcccggcggcgagcaguccgccgccggcggcgagcagcccgccgccggcggcgagcagcccgccgccggcggcgagcagcccgccgccggcggcgagcagcccgccgccggcggcgagcagcccgccgccggcggcgagcgccccgccgccggcggcgagcagcccgccgccggcggcgagcagcccgccgccggcggcgagcgccccgccgccggcggcgagcagcccgccgccggcggcgagcgccccgccgccggcggcgagcagcccgccgccggcggcgagcagcccgccgccggcggcgagcagcccgcccccgccccccgccgcgagcagcccgccgccggcggcgagcagcccgcccccgccccccgccgcgagcagcccgcccccggcgccggcgccggcgacggcgcccgcggcggcaacgccggcgccggcaagggccagggccagaacaaccagggcgccaacguccccaacgagaaggucgucaacgacuaccuccacaagauccgcuccuccgucaccaccgaguggacccccugcuccgucaccugcggcaacggcguccgcauccgccgccgccagaacgccggcaacaagaaggccgaggaccucaccauggacgaccucgaggucgaggccugcgucauggacaagugcgccggcaucuucaacgucgucuccaacucccucggccucgucauccuccucguccucgcccucuucaacuga

SEQ ID NO: 4010 - RNA, 1011 nt, Artificial Sequence
  derived and/or modified CDS sequence (opt2) from Pk(UMRAC2)__AHF20618.1__CSP
augaagaacuucauccuccucgccgucuccuccauccuccucgucgaccuccuccccacccacuucgagcacaacgucgaccucucccgcgccaucaacgucaacggcgucuccuucaacaacgucgacaccuccucccucggcgccgcccagguccgccaguccgccucccgcggccgcggccucggcgagaagcccaaggagggcgccgacaaggagaagaagaaggagaaggagaaggaggaggagcccaagaagcccaacgagaacaagcucaagcagcccgagggcaaccgcgaggcccccggccagcccgagggcaaccgcgaggcccccggccagcccgagggcaaccgcgaggcccccggccagcccgagggcaaccgcgaggcccccggccagcccgagggcaaccgcgaggcccccggccagcccgagggcaaccgcgaggcccccggccagcccgagggcaaccgcgaggcccccggccagcccgagggcaaccgcgaggcccccgcccagcccgagggcaaccgcgaggcccccggccagcccgagggcaaccgcgaggcccccgcccagccccagggcaacggcggcgccggccaggcccagcccgagggcaaccgcgaggcccccgcccagccccagggcaacggcggcgccggccaggcccagccccagaagaacgagggcggcaacgccggcgcccgcaagggccagggccagaacaaccagggcgccaacguccccaacgagaaggucgucaacgacuaccuccacaagauccgcuccuccgucaccaccgaguggacccccugcuccgucaccugcggcaacggcguccgcauccgccgcaagggccacgccggcaacaagaaggccgaggaccucaccauggacgaccucgaggucgaggccugcgucauggacaagugcgccggcaucuucaacgucgucuccaacucccucggccucgucauccuccucguccucgcccucuucaacuga

SEQ ID NO: 4011 - RNA, 1008 nt, Artificial Sequence
  derived and/or modified CDS sequence (opt2) from Pk(UMANC1)__AHF20619.1__CSP
augaagaacuucauccuccucgccgucuccuccauccuccucgucgaccuccuccccacccacuucgagcacaacgucgaccucucccgcgccaucaacgucaacggcgucuccuucaacaacgucgacaccuccucccucggcgccgcccagguccgccaguccgccucccgcggccgcggccucggcgagaagcccaaggagggcgccgacaaggagaagaagaaggagaaggagaaggaggaggagcccaagaagcccaacgagaacaagcucaagcagcccgagggcaaccgcgaggcccccggccagcccgagggcaaccgcgaggcccccggccagcccgagggcaaccgcgaggcccccggccagcccgagggcaaccgcgaggcccccggccagcccgagggcaaccgcgaggcccccggccagcccgagggcaaccgcgaggcccccggccagcccgagggcaaccgcgaggcccccggccagcccgagggcaaccgcgaggcccccggccagcccgagggcaaccgcgaggcccccggccagcccgagggcaaccgcgaggcccccggccagcccgagggcaaccgcgaggcccccgcccagcccgagggcaaccgcgaggcccccgcccagccccagggcaacggcggcgccggccaggcccagccccagaagaacgagggcggcaacgccggcgcccgcaagggccagggccagaacaaccagggcgccaacgcccccaacgagaaggucgucaacgacuaccuccagaagauccgcuccuccgucaccaccgaguggacccccugcuccgucaccugcggcaacggcguccgcaucaagcgcaaggcccacgccgacaagaagaaggccgaggaccucaccauggacgaccucgaggucgaggccugcgucauggacaagugcgccggcaucuucaacgucgucuccaacucccucggccucgucauccuccucguccucgcccucuucaacuga

SEQ ID NO: 4012 - RNA, 1002 nt, Artificial Sequence
  derived and/or modified CDS sequence (opt2) from Pk(LT48)__ADN94505.1__CSP
augcgcaacuucauccuccucgccgucuccuccauccuccucgucgaccuccuccccacccacuucgagcacaacgucgaccucucccgcgccaucaacgucaacggcgucuccuucaacaacgucgacaccuccucccucggcgccgcccagguccgccaguccgccucccgcggccgcggccucggcgagaagcgcaaggagggcgccgacaaggagaagaagaaggagaaggaggaggagcccaagaagcccaacgagaacaagcucaagcagcccaacgccgagggcggcgccaacgccggccagcccaacgccgagggcggcgccaacgccggccagcccaacgccgagggcggcgccaacgccggccagcccaacgccgagggcggcgccaacgccggccagcccaacgccgagggcggcgccaacgccggccagcccaacgccgagggcggcgccaacgccggccagcccaacgccgagggcggcgccaacgccggccagcccaacgccgagggcggcgccaacgccggccagcccaacgccgagggcggcgccaacgccggccagcccaacgccgagggcggcgccaacgccggccagcccaacgccgagggcggcgccaacgcccgccagccccaggccgagggcggcggcgccaacgcccgccagggcggcaacgagggcaacaagcaggccggcaagggccagggccagaacaaccagggcgccaacgcccccaacgagaaggucgucaacgacuaccuccagaagauccgcuccuccgucaccaccgaguggacccccugcuccgucaccugcggcaacggcguccgcauccgccgccgcgcccacgccgacaagaagaaggccgaggaccucaccauggacgaccucgaggucgaggccugcgucauggacaagugcgccggcaucuucaacgucgucuccaacucccucggccucgucauccuccucguccucgcccucuucaacuga

SEQ ID NO: 4013 - RNA, 993 nt, Artificial Sequence
  derived and/or modified CDS sequence (opt2) from Pk(KH176)__ADN94486.1__CSP
augaagaacuucauccuccucgccgucuccuccauccuccucgucgaccucuuccccacccacuucgagcacaacgucgaccucucccgcgccaucaacgucaacggcgucuccuucaacaacgucgacaccuccucccucggcgccgcccagguccgccaguccgccucccgcggccgcggccucggcgagaagcccaaggagggcgccgacaaggagaagaagaaggagaaggaggagaagcccaagaagcccaacgagaacaagcucaagcagcccggcggcgagcagcccgccgccggcggcgagcagcccgccgccggcggcgagcagcccgccgccggcggcgagcagcccgccgccggcggcgagcagcccgccgccggcggcgagcgccccgccgccggcggcgagcagcccgccgccggcggcgagcagcccgccgccggcggcgagcgccccgccgccggcggcgagcagcccgccgccggcggcgagcgccccgccgccggcggcgagcagcccgccgccggcggcgagcagcccgccgccggcggcgagcagcccgcccccgccccccgccgcgagcagcccgccgccggcggcgagcagcccgcccccgccccccgccgcgagcagcccgcccccggcgccggcgccggcgacggcgcccgcggcggcaacgccggcgccggcaagggccagggccagaacaaccagggcgccaacguccccaacgagaaggucgucaacgacuaccuccacaagauccgcuccuccgucaccaccgaguggacccccugcuccgucaccugcggcaacggcguccgcauccgccgccgccagaacgccggcaacaagaaggccgaggaccucaccauggacgaccucgaggucgaggccugcgucauggacaagugcgccggcaucuucaacgucgucuccaacucccucggccucgucauccuccucguccucgcccucuucaacuga

SEQ ID NO: 4014 - RNA, 993 nt, Artificial Sequence
  derived and/or modified CDS sequence (opt2) from Pk(LT36)__ADN94511.1__CSP
augcgcaacuucauccuccucgccgucuccuccauccuccucgucgaccuccuccccacccacuucgagcacaacgucgaccucucccgcgccaucaacgucaacggcgucuccuucaacaacgucgacaccuccucccucggcgccgcccagguccgccaguccgccucccgcggccgcggccucggcgagaagcgcaaggagggcgccgacaaggagaagaagaaggagaaggaggagaagcccaagaagcccaacgagaacaagcucaagcagcccggcggcgagcagcccgccgccggcggcgagcagcccgccgccggcggcgagcagcccgccgccggcggcgagcagcccgccgccggcggcgagcagcccgccgccggcggcgagcagcccgccgccggcggcgagcagcccgccgccggcggcgagcagcccgccgccggcggcgagcagcccgccgccggcggcgagcagcccgccgccggcggcgagcagcccgccgccggcggcgagcagcccgcccccgccccccgccgcgagcagcccgccgccggcggcgagcagcccgccgccggcggcgagcagcccgcccccgccccccgccgcgagcagcccgcccccggcggcgagcagcccgcccccggcgccggcgccggcgacggcgcccgcggcggcaaccccggcgccggcaagggccagggccagaacaaccagggcgccaacguccccaacgagaaggucgucaacgacuaccuccacaagauccgcuccuccgucaccaccgaguggacccccugcuccgucaccugcggcaacggcguccgcauccgccgcaaggcccacgccgacaagaagaaggccgagaaccucaccauggacgaccucgaggucgaggccugcgucauggacaagugcgccggcaucuucaacgucgucuccaacucccucggccucgucauccuccucguccucgcccucuucaacuga

SEQ ID NO: 4015 - RNA, 993 nt, Artificial Sequence
  derived and/or modified CDS sequence (opt2) from Pk(TB066)__AFG25475.1__CSP
augaagacccucuuccuccucgccgucuccuccauccuccucgucgaccucuuccccacccacuucgagcacaacgucgaccucucccgcgccaucaacgucaacggcgucuccuucaacaacgucgacaccuccucccucggcgccgcccagguccgccaguccgccucccgcggccgcggccucggcgagaagcgcaaggagggcgccgacaaggagaagaagaaggagaaggaggagaagcccaagaagcccaacgagaacaagcucaagcagcccggcggcgagcagcccgccgccggcggcgagcagcccgccgccggcggcgagcagcccgccgccggcggcgagcagcccgccgccggcggcgagcagcccgccgccggcggcgagcagcccgccgccggcggcgagcagcccgccgccggcggcgagcagcccgccgccggcggcgagcagcccgccgccggcggcgagcagcccgccgccggcggcgagcagcccgccgccggcggcgagcagcccgcccccgccccccgccgcgagcagcccgccgccggcggcgagcagcccgccgccggcggcgagcagcccgcccccgccccccgccgcgagcagcccgccgccggcggcgagcagcccgcccccggcgccggcgccggcgacggcgcccgcggcggcaaccccggcgccggcaagggccagggccagaacaaccagggcgccaacguccccaacgagaaggucgucaacgacuaccuccacaagauccgcuccuccgucaccaccgaguggacccccugcuccgucaccugcggcaacggcguccgcauccgccgcaaggcccacgccgacaagaagaaggccgagaaccucaccauggacgaccucgaggucgaggccugcgucauggacaagugcgccggcaucuucaacgucgucuccaacucccucggccucgucauccuccucguccucgcccucuucaacuga

SEQ ID NO: 4016 - RNA, 993 nt, Artificial Sequence
  derived and/or modified CDS sequence (opt2) from Pk(UM006C6)__AHF20642.1__CSP
augaagaacuucauccuccucgccgucuccuccauccuccucgucgaccuccuccccacccacuucgagcacaacgucgaccucucccgcgccaucaacgucaacggcgucuccuucaacaacgucgacaccuccucccucggcgccgcccagguccgccaguccgccucccgcggccgcggccucggcgagaagcccaaggagggcgccgacaaggagaagaagaaggagaaggaggaggagcccaagaagcccaacggcaacaagcucaagcagcccgcccccggcggcgagcagcccgcccccggcggcgagcagcccgcccccggcggcgagcagcccgcccccggcggcgagcagcccgcccccggcggcgagcagcccgcccccggcggcgagcagcccgcccccggcggcgagcagcccgcccccggcggcgagcagcccgcccccggcggcgagcagcccgcccccggcggcgagcagcccgcccccggcggcgagcagcccgcccccggcggcgagcagcccgcccccggcggcgagcagcccgcccccgccccccgccgcgagcagcccgcccccggcggcgagcagcccgcccccggcggcgagcagcccgccccccgccgcgagcagcccgcccccggcgccggcgccggcgacggcgcccgcggcggcaacgccggcgccggcaagggccagggccagaacaaccagggcgccuccguccccaacgagaaggucgucaacgacuaccuccacaagauccgcuccuccgucaccaccgaguggacccccugcuccgucaccugcggcaacggcguccgcauccgccgcaaggcccacgccgacaagaagaaggccgaggaccucaccauggacgaccucgaggucgaggccugcgucauggacaagugcgccggcaucuucaacgucgucuccaacucccucggccucgucauccuccucguccucgcccucuucaacuga

SEQ ID NO: 4017 - RNA, 984 nt, Artificial Sequence
  derived and/or modified CDS sequence (opt2) from Pk(UM004C4)__AHF20641.1__CSP
augaagaacuucauccuccucgccgucuccuccauccuccucgucgaccuccuccccacccacuucgagcacaacgucgaccucucccgcgccaucaacgucaacggcgucuccuucaacaacgucgacaccuccucccucggcgccgcccagguccgccaguccgccucccgcggccgcggccucggcgagaagcccaaggagggcgccgacaaggagaagaagaaggagaagggcaaggagaaggaggaggagcccaagaagcccaacgagaacaagcucaagcagcccaacgagggccagccccaggcccagggcgacggcgccaacgccggccagccccaggcccagggcgacggcgccaacgccggccagccccaggcccagggcgacggcgccaacgccggccagccccaggcccagggcgacggcgccaacgccggccagccccaggcccagggcgacggcgccaacgccggccagccccaggcccagggcgacggcgccaacgccggccagccccaggcccagggcgacggcgccaacgccggccagccccaggcccagggcgaccgcgccaacgccggccagccccaggcccagggcgacggcgccaacgucccccgccagggccgcaacggcggcggcgcccccgccggcggcaacgagggcaacaagcaggccggcaagggccagggccagaacaaccagggcgccaacgcccccaacgagaaggucgucaacgacuaccuccacaagauccgcuccuccgucaccaccgaguggacccccugcuccgucaccugcggcaacggcguccgcauccgccgcaaggcccacgccggcaacaagaaggccgaggaccucaccgucgacgaccucgaggucgaggccugcgucauggacaagugcgccggcaucuucaacgucgucuccaacucccucggccucgucauccuccucguccucgcccucuucaacuga

SEQ ID NO: 4018 - RNA, 978 nt, Artificial Sequence
  derived and/or modified CDS sequence (opt2) from Pk(UMHAC5)__AHF20632.1__CSP
augaagaacuucauccuccucgccgucuccuccauccuccucgucgaccuccuccccacccacuucgagcacaacgucgaccucucccgcgccaucaacgucaacggcgucuccuucaacaacgucgacaccuccucccucggcgccgcccagguccgccaguccgccucccgcggccgcggccucggcgagaagcccaaggagggcgccgacaaggagaagaagaaggagaaggagaaggaggaggagcccaagaagcccaacgagaacaagcucaagcagcccgagggcaaccgcgaggcccccggccagcccgagggcaaccgcgaggcccccggccagcccgagggcaaccgcgaggcccccggccagcccgagggcaaccgcgaggcccccggccagcccgagggcaaccgcgaggcccccggccagcccgagggcaaccgcgaggcccccggccagcccgagggcaaccgcgaggcccccggccagcccgagggcaaccgcgaggcccccgcccagcccgagggcaaccgcgaggcccccggccagcccgagggcaaccgcgaggcccccgcccagcccgagggcaaccgcgagacccccgcccagccccagggcaacggcggcgccggccaggcccagccccagaagaacgagggcggcaacgccggcgcccgcaagggccagggccagaacaaccagggcgccaacgcccccaacgagaaggucgucaacgacuaccuccagaagauccgcuccuccgucaccaccgaguggacccccugcuccgucaccugcggcaacggcguccgcaucaagcgcaaggcccacgccgacaagaagaaggccgaggaccucaccauggacgaccucgaggucgaggccugcgucauggacaagugcgccggcaucuucaacgucgucuccaacucccucggccucgucauccuccucguccucgcccucuucaacuga

SEQ ID NO: 4019 - RNA, 978 nt, Artificial Sequence
  derived and/or modified CDS sequence (opt2) from Pk(UMSYC3)__AHF20626.1__CSP
augaagaacuucauccuccucgccgucuccuccauccuccucgucgaccuccuccccacccacuucgagcacaacgucgaccucucccgcgccaucaacgucaacggcgucuccuucaacaacgucgacaccuccucccucggcgccgcccagguccgccaguccgccucccgcggccgcggccucggcgagaagcccaaggagggcgccgacaaggagaagaagaaggagaaggagaaggaggaggagcccaagaagcccaacgagaacaagcucaagcagcccgagggcaaccgcgaggcccccggccagcccgagggcaaccgcgaggcccccggccagcccgagggcaaccgcgaggcccccggccagcccgagggcaaccgcgaggcccccggccagcccgagggcaaccgcgaggcccccggccagcccgagggcaaccgcgaggcccccggccagcccgagggcaaccgcgaggcccccggccagcccgagggcaaccgcgaggcccccgcccagcccgagggcaaccgcgaggcccccggccagcccgagggcaaccgcgaggcccccgcccagcccgagggcaaccgcgaggcccccgcccagccccagggcaacggcggcgccggccaggcccagccccagaagaacgagggcggcaacgccggcgcccgcaagggccagggccagaacaaccagggcgccaacgcccccaacgagaaggucgucaacgacuaccuccagaagauccgcuccuccgucaccaccgaguggacccccugcuccgucaccugcggcaacggcguccgcaucaagcgcaaggcccacgccgacaagaagaaggccgaggaccucaccauggacgaccucgaggucgaggccugcgucauggacaagugcgccggcaucuucaacgucgucuccaacucccucggccucgucauccuccucguccucgcccucuucaacuga

SEQ ID NO: 4020 - RNA, 966 nt, Artificial Sequence
  derived and/or modified CDS sequence (opt2) from Pk(LT33)__ADN94509.1__CSP
augaagaacuucauccuccucgccgucuccuccauccuccucgucgaccuccuccccacccacuucgagcacaacgucgaccucucccgcgccaucaacgucaacggcgucuccuucaacaacgucgacaccuccucccucggcgccgcccagguccgccaguccgccucccgcggccgcggccucggcgagaagcgcaaggagggcgccgacaaggagaagaagaaggagaaggaggaggagcccaagaagcccaacgagaacaagcucaagcagcccgagcaggcccgcgccggcggcgagcagcccgccgccggcggcgagcagcccgccgccggcggcgagcagcccgccgccggcggcgagcagcccgccgccggcggcgagcagcccgccgccggcggcgagcagcccgccgccggcggcgagcagcccgccgccggcggcgagcagcccgccgccggcggcgagcagcccgccgccggcggcgagcagcccgccgccggcggcgagcagcccgcccccgccccccgccgcgagcagcccgccgccggcggcgagcagcccgcccccgccccccgccgcgagcagcccgccgccggcggcgagcagcccgcccccggcgccggcgccggcgacggcgcccgcggcggcaacgccggcgccggcaagggccagggccagaacaaccagggcgccaacguccccaacgagaaggucgucaacgacuaccuccacaagauccgcuccuccgucaccaccgaguggacccccugcuccgucaccugcggcaacggcguccgcauccgccgcaaggcccacgccgacaagaagaaggccgagaaccucaccauggacgaccucgaggucgaggccugcgucauggacaagugcgccggcaucuucaacgucgucuccaacucccucggccucgucauccuccucguccucgcccucuucaacuga

SEQ ID NO: 4021 - RNA, 960 nt, Artificial Sequence
  derived and/or modified CDS sequence (opt2) from Pk(UM0032C4)__AHF20653.1__CSP
augaagaacuucauccuccucgccgucuccuccauccuccucgucgaccuccuccccacccacuucgagcacaacgucgaccucucccgcgccaucaacgucaacggcgucuccuucaacaacgucgacaccuccucccucggcgccgcccagguccgccaguccgccucccgcggccgcggccucggcgagaagcccaaggagggcgccgacaaggagaagaagaaggagaaggagaaggaggaggagcccaagaagcccaacgagaacaagcucaagcagcccaacgccgagggcgacggcgccaacgcccgccagcccaacgccgagggcgacggcgccaacgcccgccagcccaacgccgagggcgacggcgccaacgcccgccagcccaacgccgagggcgacggcgccaacgcccgccagcccaacgccgagggcgacggcgccaacgcccgccagcccaacgccgagggcgacggcgccaacgcccgccagcccaacgccgagggcggcggcgccaacgcccgccagccccaggccgagggcgacggcgccaacgcccgccagccccaggcccagggcgacggcggcaacgcccgccagggcggcaacggcggcggcgcccccgccggcggcaacgagggcaacaagcaggccggcaagggccagggccagaacaaccagggcgccaacgcccccaacgagaaggucgucaacgacuaccuccagaagauccgcuccuccgucaccaccgaguggacccccugcuccgucaucugcggcaacggcguccgcauccgccgccgcgcccacgccgacaagaagaaggccgaggaccucaccauggacgaccucgaggucgaggccugcgucauggacaagugcgccggcaucuucaacgucgucuccaacucccucggcuucgucauccuccucguccucgcccucuucaacuga

SEQ ID NO: 4022 - RNA, 951 nt, Artificial Sequence
  derived and/or modified CDS sequence (opt2) from Pk(SGEHIH1-im-Y09-80)__AFD97207.1__CSP
augaagaacuucauccuccucgccgucuccuccauccuccucgucgaccuccuccccacccacuucgagcacaacgucgaccucucccgcgccaucaacgucaacggcgucuccuucaacaacgucgacaccuccucccucggcgccgcccagguccgccaguccgccucccgcggccgcggccucggcgagaagcccaaggagggcgacgacaaggagaagaagaaggagaaggagaaggaggaggagcccaagaagcucaacgagaacaaccccaagaagcccaacgaggagggcgacggcgccaagcucaagcagcccaacgaggagggcgacggcgccaagcucaagcagcccaacgccgagggcggcgccaacgccggccagcccaacgccgagggcggcgccaacgccggccagcccaacgccgagggcggcgccaacgcccgccagcccaacgccgagggcggcgccaacgccggccagcccaacgccgagggcggcgccaacgccggccagcccaacgccgagggcggcgccaacgcccgccagccccaggccgagggcggcggcgccaacgcccgccagccccaggccgagggcggcggcgccaacgcccgccagggcggcaacgagggcaacaagcaggccggcaagggccagggccagaacaaccagggcgccaacgcccccaacgagaaggucgucaacgacuaccuccagaagauccgcuccuccgucaccaucgaguggacccccugcuccgucaccugcggcaacggcguccgcauccgccgccgcgcccacgccgacaagaagaaggccgaggaccucaccauggacgaccucgaggucgaggccugcgucauggacaagugcgccggcaucuucaacgucgucuccaacucccucggccucgucauccuccucguccucgcccucuucaacuga

SEQ ID NO: 4023 - RNA, 939 nt, Artificial Sequence
  derived and/or modified CDS sequence (opt2) from Pk(LT33)__ADN94514.1__CSP
augcgcaacuucauccuccucgccgucuccuccauccuccucgucgaccuccuccccacccacuucgagcacaacgucgaccucucccgcgccaucaacgucaacggcgucuccuucaacaacgucgacaccuccucccucggcgccgcccagguccgccaguccgccucccgcggccgcggccucggcgagaagcgcaaggagggcgccgacaaggagaagaagaaggagaaggaggaggagcccaagaagcccaacgagaacaagcucaagcagcccgagcaggccgcccccggcgccggcggcgagcagcccgcccccggcgccggcggcgagcgccccgcccccggcgccggcggcgagcagcccgcccccggcgccggcggcgagcagcccgcccccggcgccggcggcgagcagcccgcccccggcgccggcggcgagcagcccgccgccggcggcgagcagcccgccgccggcggcgagcagcccgcccccgccccccgccgcgagcagcccgccgccggcggcgagcagcccgcccccgccccccgccgcgagcagcccgccgccggcggcgagcagcccgcccccggcgccggcgccggcgacggcgcccgcggcggcaacgccggcgccggcaagggccagggccagaacaaccagggcgccaacguccccaacgagaaggucgucaacgacuaccuccacaagauccgcuccuccgucaccaccgaguggacccccugcuccgucaccugcggcaacggcguccgcauccgccgcaaggcccacgccgacaagaagaaggccgagaaccucaccauggacgaccucgaggucgaggccugcgucauggacaagugcgccggcaucuucaacgucgucuccaacucccucggccucgucauccuccucguccucgcccucuucaacuga

SEQ ID NO: 4024 - RNA, 894 nt, Artificial Sequence
  derived and/or modified CDS sequence (opt2) from Pk(SGEHIWM26-Y09-98)__AFD97239.1__CSP
augaagaacuucauccuccucgccgucuccuccauccuccucgucgaccuccuccccacccacuucgagcacaacgucgaccucucccgcgccaucaacgucaacggcgucuccuucaacaacgucgacaccuccucccucggcgccgcccagguccgccaguccgccucccgcggccgcggccucggcgagaagcccaaggagggcgccgacaaggagaagaagaaggagaaggaggaggagcccaagaagcccaacgagaacaagcucaagcagcccgacaccguccccggcggcgaggagcccgcccccggccgcgagcagcccgcccccggccgcgaggagcccgcccccggccgcgagcagcccgcccccggccgcgaggagcccgcccccggccgcgagcagcccgcccccggccgcgaggagcccgcccccggccgcgagcagcccgcccccggccgcgagcagcccgcccccggccgcgaggagcccgcccccggccgcgagcagcccgcccccggccgcgaggagcccgcccccgcccccggcgccggcgccggcgacggcgcccgcggcggcaacgccggcgccggcaagggccagggccagaacaaccagggcgccaacguccccaacgagaaggucgucaacgacuaccuccacaagauccgcuccuccgucaccaccgaguggacccccugcuccgucaccugcggcaacggcguccgcauccgccgcaagggccacgccggcaacaagaaggccgaggaccucaccauggacgaccucgaggucgaggccugcgucauggacaagugcgccggcaucuucaacgucgucuccaacucccucggccucgucauccuccucguccucgcccucuucaacuga

SEQ ID NO: 4025 - RNA, 801 nt, Artificial Sequence
  derived and/or modified CDS sequence (opt2) from Pk(KH296)__ADN94490.1__CSP
augcgcaacuucauccuccucgccgucuccuccauccuccucgucgaccuccuccccacccacuucgagcacaacgucgaccucucccgcgccaucaacgucaacggcgucuccuucaacaacgucgacaccuccucccucggcgccgcccagguccgccaguccgccucccgcggccgcggccucggcgagaagcgcaaggagggcgccgacaaggagaagaagaaggagaaggaggaggagcccaagaagcccaacgagaacaagcucaagcagcccgagcaggccgcccccggcgccggcggcgagcagcccgcccccggcgccggcggcgagcagcccgcccccggcgccggcggcgagcagcccgcccccggcgccggcggcgagcagcccgcccccggcgccggcggcgagcagcccgcccccgccccccgccgcgagcagcccgcccccgcccccggcgccggcgacggcgcccgcggcggcaacgccggcgccggcaagggccagggccagaacaaccagggcgccaacguccccaacgagaaggucgucaacgacuaccuccacaagauccgcuccuccgucaccaccgaguggacccccugcuccgucaccugcggcaacggcguccgcauccgccgcaaggcccacgccgacaagaagaaggccgaggaccucaccauggacgaccucgaggucgaggccugcgucauggacaagugcgccggcaucuucaacgucgucuccaacucccucggccucgucauccuccucguccucgcccucuucaacuga

SEQ ID NO: 4026 - RNA, 801 nt, Artificial Sequence
  derived and/or modified CDS sequence (opt2) from Pk(LT33)__ADN94528.1__CSP
augcgcaacuucauccuccucgccgucuccuccauccuccucgucgaccuccuccccacccacuucgagcacaacgucgaccucucccgcgccaucaacgucaacggcgucuccuucaacaacgucgacaccuccucccucggcgccgcccagguccgccaguccgccucccgcggccgcggccucggcgagaagcgcaaggagggcgccgacaaggagaagaagaaggagaaggaggaggagcccaagaagcccaacgagaacaagcucaagcagcccgagcaggccgcccccggcgccggcggcgagcagcccgcccccggcgccggcggcgagcgccccgcccccggcgccggcggcgagcagcccgcccccggcgccggcggcgagcgccccgcccccggcgccggcggcgagcagcccgcccccgccccccgccgcgagcagcccgcccccggccccggcgccggcgacggcgcccgcggcggcaacgccggcgccggcaagggccagggccagaacaaccagggcgccaacguccccaacgagaaggucgucaacgacuaccuccacaagauccgcuccuccgucaccaccgaguggacccccugcuccgucaccugcggcaacggcguccgcauccgccgccgccagaacgccggcaacaagaaggccgaggaccucaccauggacgaccucgaggucgaggccugcgucauggacaagugcgccggcaucuucaacgucgucuccaacucccucggccucgucauccuccucguccucgcccucuucaacuga

SEQ ID NO: 4027 - RNA, 744 nt, Artificial Sequence
  derived and/or modified CDS sequence (opt2) from Pk(SGEHIWM4-Y09-8)__AFD97222.1__CSP
augaagaacuucauccuccucgccgucuccuccauccuccucgucgaccuccuccccaccuacuucgagcacaacgucgaccucucccgcgccaucaacgucaacggcgucuccuucaacuccgucgacaccuccucccucggcgccgcccagguccgccaguccgccucccgcggccgcggccucggcgagaagcccaaggagggcgccgacaaggagaagaagaaggagaaggagaaggaggaggagcccaagaagcccaacgagaacaagcucaagcagccccagggcaacggcggcgccggccaggcccagccccagggcaacggcggcgccggccaggcccagcccgagggcaaccgcgaggcccccgcccagccccagggcaacggcggcgccggccaggcccagccccagaagaacgagggcggcaacgccggcgcccgcaagggccagggccagaacaaccagggcgccaacgcccccaacgagaaggucgucaacgacuaccuccagaagauccgcuccuccgucaccaccgaguggacccccugcuccgucaccugcggcaacggcguccgcauccgccgccgcgcccacgccgacaagaagaaggccgaggaccucaccauggacgaccucgaggucgaggccugcgucauggacaagugcgccggcaucuucaacgucgucuccaacucccucggccucgucaucucccucguccucgcccucuucaacuga

SEQ ID NO: 4028 - RNA, 720 nt, Artificial Sequence
  derived and/or modified CDS sequence (opt2) from Pk(PT01)__ADN94512.1__CSP
augcgcaacuucauccuccucgccgucuccuccauccuccucgucgaccuccuccccacccacuucgagcacaacgucgaccucucccgcgccaucaacgucaacggcgucuccuucaacaacgucgacaccuccucccucggcgccgcccagguccgccaguccgccucccgcggccgcggccucggcgagaagcgcaaggagggcgccgacaaggagaagaagaaggagaaggaggaggagcccaagaagcccaacgagaacaagcucaagcagcccgagcaggccgcccccggcgccggcggcgagcagcccgcccccggcgccggcggcgagcagcccgcccccgccccccgccgcgagcagcccgcccccgcccccggcgccggcgacggcgcccgcggcggcaacgccggcgccggcaagggccagggccagaacaaccagggcgccaacguccccaacgagaaggucgucaacgacuaccuccacaagauccgcuccuccgucaccaccgaguggacccccugcuccgucaccugcggcaacggcguccgcauccgccgcaaggcccacgccgacaagaagaaggccgaggaccucaccauggacgaccucgaggucgaggccugcgucauggacaagugcgccggcaucuucaacgucgucuccaacucccucggccucgucauccuccucguccucgcccucuucaacuga

SEQ ID NO: 4029 - RNA, 717 nt, Artificial Sequence
  derived and/or modified CDS sequence (opt2) from Pk(LT53)__ADN94502.1__CSP
augaagaacuucauccuccucgccgucuccuccauccuccucgucgaccuccuccccacccacuucgagcacaacgucgaccucucccgcgccaucaacgucaacggcgucuccuucaacaacgucgacaccuccucccucggcgccgcccagguccgccaguccgccucccgcggccgcggccucggcgagaagcccaaggagggcgacgacaaggagaagaagaaggagaaggagaaggaggaggagcccaagaaccucaacgagaacaagcccaagcagcccaacgccgagggcgacggcgccaagcccaagcagcccaacgccgagggcgacggcgccaacgcccgccagccccaggccgagggcggcggcggcaacgcccgccagggcggcaacgagggcaacaagcaggccggcaagggccagggccagaacaaccagggcgccaacgcccccaacgagaaggucgucaacgacuaccuccagaagauccgcuccuccgucaccaccgaguggacccccugcuccgucaccugcggcaacggcguccgcauccgccgccgcgcccacgccgacaagaagaaggccgaggaccucaccauggacgaccucgaggucgaggccugcgucauggacaagugcgccggcaucuucaacgucgucuccaacucccucggccucgucauccuccucguccucgcccucuucaacuga

SEQ ID NO: 4030 - RNA, 702 nt, Artificial Sequence
  derived and/or modified CDS sequence (opt2) from Pk(SGEHIWM5-Y09-79)__AFD97229.1__CSP
augaagaacuucauccuccucgccgucuccuccauccuccucgucgaccuccuccccacccacuucgagcacaacgucgaccucucccgcgccaucaacgucaacggcgucuccuucaacaacgucgacaccuccucccucggcgccgcccagguccgccaguccgccucccgcggccgcggccucggcgagcgccccaaggagggcgccgacaaggagaagaagaaggagaaggagaaggagaaggaggagcccaagaagcccaacgagaacaagcucaagcagcccgagcagcccgccgccggcgccggcggcgagcagcccgcccccgccccccgccgcgagcagcccgcccccggcgccggcgccggcgacggcgcccgcggcggcaacgccggcgccggcaagggccagggccagaacaaccagggcgccaacguccccaacgagaaggucgucaacgacuaccuccacaagauccgcuccuccgucaccaccgaguggacccccugcuccgucaccugcggcaacggcguccgcauccgccgccgccagaacgccggcaacaagaaggccgaggaccucaccauggacgaccucgaggucgaggccugcgucauggacaagugcgccggcaucuucaacgucgucuccaacucccucggccucgucauccuccucguccucgcccucuucaacuga

SEQ ID NO: 4031 - RNA, 660 nt, Artificial Sequence
  derived and/or modified CDS sequence (opt2) from Pk(PT01)__ADN94513.1__CSP
augcgcaacuucauccuccucgccgucuccuccauccuccucgucgaccuccuccccacccacuucgagcacaacgucgaccucucccgcgccaucaacgucaacggcgucuccuucaacaacgucgacaccuccucccucggcgccgcccagguccgccaguccgccucccgcggccgcggccucggcgagaagcgcaaggagggcgccgacaaggagaagaagaaggagaaggaggaggagcccaagaagcccaacgagaacaagcucaagcagcccgagcaggccgccccccgccgcgagcagcccgcccccgcccccggcgccggcgacggcgcccgcggcggcaacgccggcgccggcaagggccagggccagaacaaccagggcgccaacguccccaacgagaaggucgucaacgacuaccuccacaagauccgcuccuccgucaccaccgaguggacccccugcuccgucaccugcggcaacggcguccgcauccgccgcaaggcccacgccgacaagaagaaggccgaggaccucaccauggacgaccucgaggucgaggccugcgucauggacaagugcgccggcaucuucaacgucgucuccaacucccucggccucgucauccuccucguccucgcccucuucaacuga

SEQ ID NO: 4032 - RNA, 1290 nt, Artificial Sequence
  derived and/or modified CDS sequence (opt2) from Pm(408/Cameroon)__CAA05623.1__CSP
augaagaagcucuccguccucgccaucuccuccuuccucaucgucgacuuccucuuccccggcuaccaccacaacuccaacuccaccaagucccgcaaccucuccgagcucugcuacaacaacgucgacaccaagcucuucaacgagcucgagguccgcuacuccaccaaccaggaccacuucuacaacuacaacaagaccauccgccuccucaacgagaacaacaacgagaaggacggcaacgucaccaacgagcgcaagaagaagcccaccaaggccgucgagaacaagcucaagcagccccccggcgacgacgacggcgccggcaacgacgccggcaacgacgccggcaacgccgccggcaacgccgccggcaacgccgccggcaacgccgccggcaacgccgccggcaacgacgccggcaacgccgccggcaacgccgccggcaacgccgccggcaacgccgccggcaacgccgccggcaacgacgccggcaacgccgccggcaacgacgccggcaacgccgccggcaacgccgccggcaacgccgccggcaacgccgccggcaacgccgccggcaacgacgccggcaacgccgccggcaacgccgccggcaacgccgccggcaacgccgccggcaacgccgccggcaacgccgccggcaacgccgccggcaacgccgccggcaacgccgccggcaacgccgccggcaacgacgccggcaacgccgccggcaacgccgccggcaacgccgccggcaacgccgccggcaacgccgccggcaacgccgccggcaacgccgccggcaacgccgccggcaacgccgccggcaacgccgccggcaacgccgccggcaacgccgccggcaacgccgccggcaacgccgccggcaacgccgccggcaacgccgccggcaacgccgccggcaacgccgccggcaacgagaaggccaagaacaaggacaacaaggucgacgccaacaccaacaagaaggacaaccaggaggagaacaacgacuccuccaacggccccuccgaggagcacaucaagaacuaccucgaguccauccgcaacuccaucaccgaggaguggucccccugcuccgucaccugcggcuccggcauccgcacccgccgcaaggucgacgccaagaacaagaagcccgccgagcucguccucuccgaccucgagaccgagaucugcucccucgacaagugcuccuccaucuucaacgucgucuccaacucccucggcaucguccucguccucguccucauccucuuccacuga

SEQ ID NO: 4033 - RNA, 1290 nt, Artificial Sequence
  derived and/or modified CDS sequence (opt2) from Pm(Uganda 1-CDC)__AAA29557.1__CSP
augaagaagcucuccguccucgccaucuccuccuuccucaucgucgacuuccucuuccccggcuaccaccacaacuccaacuccaccaagucccgcaaccucuccgagcucugcuacaacaacgucgacaccaagcucuucaacgagcucgagguccgcuacuccaccaaccaggaccacuucuacaacuacaacaagaccauccgccuccucaacgagaacaacaacgagaaggacggcaacgucaccaacgagcgcaagaagaagcccaccaaggccgucgagaacaagcucaagcagccccccggcgacgacgacggcgccggcaacgacgccggcaacgacgccggcaacgacgccggcaacgccgccggcaacgccgccggcaacgccgccggcaacgccgccggcaacgccgccggcaacgccgccggcaacgccgccggcaacgccgccggcaacgccgccggcaacgccgccggcaacgacgccggcaacgccgccggcaacgccgccggcaacgccgccggcaacgccgccggcaacgccgccggcaacgacgccggcaacgccgccggcaacgccgccggcaacgccgccggcaacgccgccggcaacgccgccggcaacgccgccggcaacgccgccggcaacgccgccggcaacgccgccggcaacgccgccggcaacgacgccggcaacgccgccggcaacgccgccggcaacgccgccggcaacgccgccggcaacgccgccggcaacgccgccggcaacgccgccggcaacgccgccggcaacgccgccggcaacgccgccggcaacgccgccggcaacgccgccggcaacgccgccggcaacgccgccggcaacgccgccggcaacgccgccggcaacgccgccggcaacgccgccggcaacgccgccggcaacgccgccggcaacgagaaggccaagaacaaggacaacaaggucgacgccaacaccaacaagaaggacaaccaggaggagaacaacgacuccuccaacggccccuccgaggagcacaucaagaacuaccucgaguccauccgcaacuccaucaccgaggaguggucccccugcuccgucaccugcggcuccggcauccgcgcccgccgcaaggucggcgccaagaacaagaagcccgccgagcucguccucuccgaccucgagaccgagaucugcucccucgacaagugcuccuccaucuucaacgucgucuccaacucccucggcaucguccucguccucguccucauccucuuccacuga

SEQ ID NO: 4034 - RNA, 1170 nt, Artificial Sequence
  derived and/or modified CDS sequence (opt2) from Pm(UG01)__SCN12386.1__CSP
augaagaagcucuccguccucgccaucuccuccuuccucaucgucgacuuccucuuccccggcuaccaccacaacuccaacuccaccaagucccgcaaccucuccgagcucugcuacaacaacgucgacaccaagcucuucaacgagcucgagguccgcuacuccaccaaccaggaccacuucuacaacuacaacaagaccauccgccuccucaacgagaacaacaacgagaaggacggcaacgucaccaacgagcgcaagaagaagcccaccaaggccgucgagaacaagcucaagcagccccccggcgacgacgacggcgccggcaacgacgccggcaacgacgccggcaacgccgccggcaacgccgccggcaacgccgccggcaacgccgccggcaacgacgccggcaacgccgccggcaacgccgccggcaacgccgccggcaacgccgccggcaacgccgccggcaacgccgccggcaacgccgccggcaacgccgccggcaacgccgccggcaacgccgccggcaacgccgccggcaacgccgccggcaacgccgccggcaacgccgccggcaacgccgccggcaacgccgccgccggcaacgccgccggcaacgccgccggcaacgccgccggcgccgccggcaacgccgccggcaacgccgccggcaacgccgccggcaacgccgccggcaacgccgccggcaacgccgccggcaacgccgccggcaacgccgccggcaacgccgccggcaacgccgccggcaacgccgccggcaacgccgccggcaacgccgccggcaacgccgccggcaacgagaaggccaagaacaaggacaacaaggucgacgccaacaccaacaagaaggacaaccaggaggagaacaacgacuccuccaacggccccuccgaggagcacaucaagaacuaccucgaguccauccgcaacuccaucaccgaggaguggucccccugcuccgucaccugcggcuccggcauccgcgcccgccgcaaggucgacgccaagaacaagaagcccgccgagcucguccucuccgaccucgagaccgagaucugcucccucgacaagugcuccuccaucuucaacgucgucuccaacucccucggcaucguccucguccucguccucauccucuuccacuga

SEQ ID NO: 4035 - RNA, 1170 nt, Artificial Sequence; identical to SEQ ID NO: 4034
  derived and/or modified CDS sequence (opt2) from Pm()__SCN12386.1__CSP

SEQ ID NO: 4036 - RNA, 885 nt, Artificial Sequence
  derived and/or modified CDS sequence (opt2) from Pm(PmlGA01)__SBT79431.1__CSP
augaagaagcucuccguccucgccaucuccuccuuccucaucgucgacuuccucuuccccggcuaccaccacaacuccaacuccaccaagucccgcaaccucuccgagcucugcuacaacaacgucgacaccaagcucuucaacgagcucgagguccgcuacuccaccaaccaggaccacuucuacaacuacaacaagaccauccgccuccucaacgagaacaacaacgccaaggacggcaacgucaccaacgagcgcaagaagaagcccaccaaggccgucgagaacaagcucaagcagccccccggcgacgaggaggacgacgccgagaacggcgagggcaacgagcgcggcaacggcgagggcaacgagcgcggcaacggcgagggcaacgagcgcggcaacggcgagggcaacgagcgcggcaacggcgccggcaacgagcgcggcaacgacgccggcaacgccgccggcaacgccgccggcaacgacgccggcaacgccgccggcaacgccgccggcaacgccgccggcaacgccgccggcaacgacgccggcaacgccgccggcaacgccgccggcaacgccgccggcaacggcgagaacaacgacuccuccaacggccccuccgaggagcacaucaagaacuaccucgaguccauccgcaacuccaucaccgaggaguggucccccugcuccgucaccugcggcaacggcauccgcgcccgccgcaaggucgacgccaagaacaagaagcccgccgagcucguccucuccgaccucgagaccgagaucugcucccucgacaagugcuccuccaucuucaacgucgucuccaacucccucggcaucguccucguccucguccucauccucuuccacuga

SEQ ID NO: 4037 - RNA, 1104 nt, Artificial Sequence
  derived and/or modified CDS sequence (opt2) from Poc(contig1754)__SBT00176.1__CSP
augcgcaaccucgccaucuucgccgucuccgccuuccucuucgccgacucccgcuaccccgucuacgcccacaacggcaacuccaccgagggccgcaagcucaacgagcucugcuacaacaacgucgaccucuacaacacccucuucaacgagcucgacgucggcuccuccaccaaccaggccuucuuccucaacuccaagaagacccuccgccuccucaacgagaaccccaaggagaacaagaagaagcgcaaggacgacaagaagcccgucgagaacaagcucaagcagggcgagcgcgagaacgacccccccgccccccgcggcgagggcaacccccccgccccccagggcgagggcaacccccccgccccccagggcgagggcaacccccccgccccccagggcgagggcaacccccccgccccccagggcgagggcaacccccccgccccccgcggcgagggcaacccccccgccccccagggcgagggcaacccccccgccccccagggcgagggcaacccccccgccccccagggcgagggcaacccccccgccccccgcggcgagggcaacccccccgccccccagggcgagggcaacccccccgccccccagggcgagggcaacccccccgccccccagggcgagggcaacccccccgccgcccagggcgagggcaacccccccgccgcccagggcaacggcaacccccccgccgcccagggcaacggcaacccccccgccgcccagggcaacggcaacccccccgcccccgccggcaagggcaagaacgagaaccagaaggagaaggaggagaagaacgccgccaacaacccccccuccgaggacgacaucaagaaguacaucgacaagauccgcaacgacaucaccgagaacuggucccccugcuccgucaccugcggcuucggcguccgcguccgccgcaaggccggcgccuccgccaagaaggcccaggagcucacccucuccgaccucgagaccgagaucugcaagaucgagaacugcuccuccaucuucaacgucgucuccaacucccucggccucgucaucuuccucuuccucgucuucuuccacuga

SEQ ID NO: 4038 - RNA, 888 nt, Artificial Sequence
  derived and/or modified CDS sequence (opt2) from Poc(GH01)__SBT84923.1__CSP
augcgcaaccucgccaucuucgccgucuccgccuuccucuucgccgacucccgcuaccccgucuacgcccacaacggcaacuccaccgagggccgcaagcucaacgagcucugcuacaacaacgucgaccucuacaacacccucuucaacgagcucgacgucggcuccuccaccaaccaggccuucuuccucaacuccaagaagacccuccgccuccucaacgagaaccccaaggagaacaagaagaagcgcaaggacgacaagaagcccgucgagaacaagcucaagcagggcgagcgcgagaacgacccccccgccccccagggcgagggcaacccccccgccccccagggcgagggcaacccccccgccccccagggcgagggcaacccccccgccccccagggcgagggcaacccccccgccccccagggcgagggcaacccccccgccgcccagggcgagggcaacccccccgccgcccagggcaacggcaacccccccgccgcccagggcaacggcaacccccccgccgcccagggcaacggcaacccccccgcccccgccggcaagggcaagaacgagaaccagaaggagaaggaggagaagaacgccgccaacaacccccccuccgaggacgacaucaagaaguacaucgacaagauccgcaacgacaucaccgagaacuggucccccugcuccgucaccugcggcuucggcguccgcguccgccgcaaggccggcgccuccgccaagaaggcccaggagcucacccucuccgaccucgagaccgagaucugcaagaucgagaacugcuccuccaucuucaacgucgucuccaacucccucggccucgucaucuuccucuuccucgucuucuuccacuga

SEQ ID NO: 4039 - RNA, 828 nt, Artificial Sequence
  derived and/or modified CDS sequence (opt2) from Poc(contig251)__SBS83173.1__CSP
augcgcaaccucgccaucuucgccgucuccgccuuccucuucgccgacucccgcuaccccgucuacgcccacaacggcaacuccaccgagggccgcaagcucaacgagcucugcuacaacaacgucgaccucuacaacacccucuucaacgagcucgacgucggcuccuccaccaaccaggccuucuuccucaacuccaagaagacccuccgccuccucaacgagaaccccaaggagaacaagaagaagcgcaaggacgacaagaagcccgucgagaacaagcucaagcagggcgagcgcgagaacgacccccccgccccccgcggcgagggcaacccccccgccccccagggcgagggcaacccccccgccccccagggcgagggcaacccccccgccccccagggcgagggcaacccccccgccccccagggcgagggcaacccccccgccgcccagggcgagggcaacccccccgccgcccagggcaacccccccgcccccgccggcaagggcaagaacgagaaccagaaggagaaggaggagaagaacgccgccaacaacccccccuccgaggacgacaucaagaaguacaucgacaagauccgcaacgacaucaccgagaacuggucccccugcuccgucaccugcggcuucggcguccgcguccgccgcaaggccggcgccuccgccaagaaggcccaggagcucacccucuccgaccucgagaccgagaucugcaagaucgagaacugcuccuccaucuucaacgucgucuccaacucccucggccucgucaucuuccucuuccucgucuucuuccacuga

SEQ ID NO: 4040 - RNA, 945 nt, Artificial Sequence
  derived and/or modified CDS sequence (opt2) from Pow(contig93)__SBT35133.1__CSP
augcgcaaccucgccaucuucgccgucuccgccuuccucuucgccgacuccggcuaccccgucuacgcccacaacggcaacuccauggagggccgcaagcucaacgagcucugcuacaacaacgucgaccucuacaacacccucuucgacggccucgacgucgaguccuccaccaaccaggccuucuuccucaacuccaagaagacccuccgccuccucaacgagaaccccaaggagaacaagaagaagcgcaaggacgacaagauccccgucgagaacaagcucaagcagggcgaccgcgagaacgacccccccgcccccgucccccagggcgacccccccgcccccgucccccagggcgacccccccgccgccgucccccagggcgacccccccgcccccgucccccagggcgacccccccgccccccagggcgacccccccgcccccgucccccagggcgacccccccgcccccgucccccagggcgacccccccgcccccgucccccagggcgacccccccgcccccgccccccagggcgacccccccgcccccgccccccagggcgacggcaagccccccgcccccgccccccagggcgacggcaaccagcccgcccccggcaagggcaaguccgagaaccagaaggagaaggacgagaagaacgccgccaacaacccccccuccgaggacgacaucaagaaguacaucgacaagauccgcaaggacaucaccgagaacuggucccccugcuccgucaccugcggccucggcguccgcguccgccgcaaggccggcgccuccgccaagaaggccaacgagcucaccaucaacgacgucgagaccgagaucugcaagaucgagaacugcuccuccaucuucaacgucgucuccaacuccaucggccucgucaucuuccucuuccucgucuucuuccacuga

SEQ ID NO: 4041 - RNA, 891 nt, Artificial Sequence
  derived and/or modified CDS sequence (opt2) from Pow(contig72)__SBT34702.1__CSP
augcgcaaccucgccaucuucgccgucuccgccuuccucuucgccgacuccggcuaccccgucuacgcccacaacggcaacuccauggagggccgcaagcucaacgagcucugcuacaacaacgucgaccucuacaacacccucuucgacggccucgacgucgaguccuccaccaaccaggccuucuuccucaacuccaagaagacccuccgccuccucaacgagaaccccaaggagaacaagaagaagcgcaaggacgacaagauccccgucgagaacaagcucaagcagggcgaccgcgagaacgacccccccgcccccgucccccagggcgacccccccgcccccgucccccagggcgacccccccgcccccgucccccagggcgacccccccgcccccgucccccagggcgacccccccgccccccagggcgacccccccgcccccgucccccagggcgacccccccgcccccgccccccagggcgacccccccgcccccgccccccagggcgacggcaagccccccgcccccgccccccagggcgacggcaaccagcccgcccccggcaagggcaaguccgagaaccagaaggagaaggacgagaagaacgccgccaacaacccccccuccgaggacgacaucaagaaguacaucgacaagauccgcaaggacaucaccgagaacuggucccccugcuccgucaccugcggccucggcguccgcguccgccgcaaggccggcgccuccgccaagaaggccaacgagcucaccaucaacgacgucgagaccgagaucugcaagaucgagaacugcuccuccaucuucaacgucgucuccaacuccaucggccucgucaucuuccucuuccucgucuucuuccacuga

SEQ ID NO: 4042 - RNA, 1020 nt, Artificial Sequence
  derived and/or modified CDS sequence (opt2) from Po(PowCR01)__SBT72933.1__CSP
augcgcaaccucgccaucuucgccgucuccgccuuccucuucgccgacuccggcuaccccgucuacgcccacaacggcaacuccauggagggccgcaagcucaacgagcucugcuacaacaacgucgaccucuacaacacccucuucgacggccucgacgucgaguccuccaccaaccaggccuucuuccucaacuccaagaagacccuccgccuccucaacgagaaccccaaggagaacaagaagaagcgcaaggacgacaagauccccgucgagaacaagcucaagcagggcgaccgcgagaacgacccccccgcccccgucccccagggcgacccccccgcccccgucccccagggcgacccccccgccgccgucccccagggcgacccccccgcccccgucccccagggcgacccccccgccccccagggcgacccccccgcccccgucccccagggcgacccccccgcccccgucccccagggcgacccccccgcccccgucccccagggcaacccccccgcccccgucccccagggcgacccccccgccccccagggcgacccccccgcccccgucccccagggcgacccccccgcccccgccccccagggcgacccccccgcccccgccccccagggcgacggcaagccccccgcccccgccccccagggcgacggcaaccagcccgcccccggcaagggcaaguccgagaaccagaaggagaaggacgagaagaacgccgccaacaacccccccuccgaggacgacaucaagaaguacaucgacaagauccgcaaggacaucaccgagaacuggucccccugcuccgucaccugcggccucggcguccgcguccgccgcaaggccggcgccuccgccaagaaggccaacgagcucaccaucaacgacgucgagaccgagaucugcaagaucgagaacugcuccuccaucuucaacgucgucuccaacuccaucggccucgucaucuuccucuuccucgucuucuuccacuga

SEQ ID NO: 4043 - RNA, 1164 nt, Artificial Sequence
  derived and/or modified CDS sequence (opt2) from Pv(Pt02.1)__ADB92551.1__CSP
augaagaacuucauccuccucgccgucuccuccauccuccucgucgaccucuuccccacccacugcggccacaacgucgaccucuccaaggccaucaaccucaacggcgucggcuucaacaacgucgacgccuccucccucggcgccgcccacgucggccaguccgccucccgcggccgcggccucggcgagaaccccgacgacgaggagggcgacgccaagaagaagaaggacggcaagaaggccgagcccaagaacccccgcgagaacaagcucaagcagcccgaggacggcgccggcgaccagcccggcgccaacggcgccggcaaccagcccggcgccaacggcgccggcaaccagcccggcgccaacggcgccggcaaccagcccggcgccaacggcgccggcaaccagcccggcgccaacggcgccggcaaccagcccggcgccaacggcgccggcaaccagcccggcgccaacggcgccggcgaccagcccggcgccaacggcgccggcaaccagcccggcgccaacggcgccggcaaccagcccggcgccaacggcgccggcgaccagcccggcgccaacggcgccggcaaccagcccggcgccaacggcgccggcgaccagcccggcgccaacggcgccggcaaccagcccggcgccaacggcgccggcaaccagcccggcgccaacggcgccggcaaccagcccggcgccaacggcgccggcaaccagcccggcgccaacggcgccggcggccaggccgccggcggcaacgccgccaacaagaaggccggcgacgccggcgccggcggccaggccgccggcggcaacgccgccaacaagaaggccggcgacgccggcgccggccagggccagaacaacgagggcgccaacgcccccaacgagaaguccgucaaggaguaccucgacaagguccgcgccaccgucggcaccgaguggacccccugcuccgucaccugcggcgucggcguccgcguccgccgccgcgucaacgccgccaacaagaagcccgaggaccucacccucaacgaccucgagaccgacgucugcaccauggacaagugcgccggcaucuucaacgucgucuccaacucccucggccucgucauccuccucguccucgcccucuucaacuga

SEQ ID NO: 4044 - RNA, 1134 nt, Artificial Sequence
  derived and/or modified CDS sequence (opt2) from Pv(Salvador I (Sal-1))__XP_001613068.1__CSP
augaagaacuucauccuccucgccgucuccuccauccuccucgucgaccucuuccccacccacugcggccacaacgucgaccucuccaaggccaucaaccucaacggcgucaacuucaacaacgucgacgccuccucccucggcgccgcccacgucggccaguccgccucccgcggccgcggccucggcgagaaccccgacgacgaggagggcgacgccaagaagaagaaggacggcaagaaggccgagcccaagaacccccgcgagaacaagcucaagcagcccggcgaccgcgccgacggccagcccgccggcgaccgcgccgacggccagcccgccggcgaccgcgccgacggccagcccgccggcgaccgcgccgacggccagcccgccggcgaccgcgccgccggccagcccgccggcgaccgcgccgacggccagcccgccggcgaccgcgccgacggccagcccgccggcgaccgcgccgacggccagcccgccggcgaccgcgccgacggccagcccgccggcgaccgcgccgccggccagcccgccggcgaccgcgccgccggccagcccgccggcgaccgcgccgacggccagcccgccggcgaccgcgccgccggccagcccgccggcgaccgcgccgacggccagcccgccggcgaccgcgccgccggccagcccgccggcgaccgcgccgacggccagcccgccggcgaccgcgccgccggccagcccgccggcgaccgcgccgccggccagcccgccggcgaccgcgccgccggccaggccgccggcgaccgcgccgccggccaggccgccggcggcaacgccggcggccagggccagaacaacgagggcgccaacgcccccaacgagaaguccgucaaggaguaccucgacaagguccgcgccaccgucggcaccgaguggacccccugcuccgucaccugcggcgucggcguccgcguccgccgccgcgucaacgccgccaacaagaagcccgaggaccucacccucaacgaccucgagaccgacgucugcaccauggacaagugcgccggcaucuucaacgucgucuccaacucccucggccucgucauccuccucguccucgcccucuucaacuga

SEQ ID NO: 4045 - RNA, 1092 nt, Artificial Sequence
  derived and/or modified CDS sequence (opt2) from Pv(P01)__SGX77278.1__CSP
augaagaacuucauccuccucgccgucuccuccauccuccucgucgaccucuuccccacccacugcggccacaacgucgaccucuccaaggccaucaaccucaacggcgucaacuucaacaacgucgacgccuccucccucggcgccgcccacgucggccaguccgccucccgcggccgcggccucggcgagaaccccgacgacgaggagggcgacgccaagaagaagaaggacggcaagaaggccgagcccaagaacccccgcgagaacaagcucaagcagcccgccggcgaccgcgccgacggccagcccgccggcgaccgcgccgacggccagcccgccggcgaccgcgccgacggccagcccgccggcgaccgcgccgccggccagcccgccggcgaccgcgccgacggccagcccgccggcgaccgcgccgccggccagcccgccggcgaccgcgccgacggccagcccgccggcgaccgcgccgccggccagcccgccggcgaccgcgccgacggccagcccgccggcgaccgcgccgccggccagcccgccggcgaccgcgccgccggccagcccgccggcgaccgcgccgacggccagcccgccggcgaccgcgccgccggccagcccgccggcgaccgcgccgacggccagcccgccggcgaccgcgccgccggccagcccgccggcgaccgcgccgccggccagcccgccggcaacggcgccggcggccaggccgccggcggcaacgccggcggcaacgccggcggcaacgccggcggcaacgccggcggccagggccagaacaacgagggcgccaacgcccccaacgagaaguccgucaaggaguaccucgacaagguccgcgccaccgucggcaccgaguggacccccugcuccgucaccugcggcgucggcguccgcguccgccgccgcgucaacgccgccaacaagaagcccgaggaccucacccucaacgaccucgagaccgacgucugcaccauggacaagugcgccggcaucuucaacgucgucuccaacucccucggccucgucauccuccucguccucgcccucuucaacuga

SEQ ID NO: 4046 - RNA, 1188 nt, Artificial Sequence
  derived and/or modified CDS sequence (opt2) from Pv(Cam22)__AHL69650.1__CSP
augaagaacuucauccuccucgccgucuccuccauccuccucgucgaccucuuccccacccacugcggccacaacgucgaccucuccaaggccaucaaccucaacggcgucggcuucaacaacgucgacgccuccucccucggcgccgcccacgucggccaguccgccucccgcggccgcggccucggcgagaaccccgacgacgaggagggcgacgccaagaagaagaaggacggcaagaaggccgagcccaagaacccccgcgagaacaagcucaagcagcccgaggacggcgccggcaaccagcccggcgccaacggcgccggcaaccagcccggcgccaacggcgccggcaaccagcccggcgccaacggcgccggcaaccagcccggcgccaacggcgccggcaaccagcccggcgccaacggcgccggcaaccagcccggcgccaacggcgccggcaaccagcccggcgccaacggcgccggcaaccagcccggcgccaacggcgccgacgaccagcccggcgccaacggcgccggcaaccagcccggcgccaacggcgccggcaaccagcccggcgccaacggcgccggcaaccagcccggcgccaacggcgccggcgaccagcccggcgccaacggcgccggcaaccagcccggcgccaacggcgccggcgaccagcccggcgccaacggcgccggcaaccagcccggcgccaacggcgccggcaaccagcccggcgccaacggcgccggcaaccagcccggcgccaacggcgccggcaaccagcccggcgccaacggcgccggcaaccagcccggcgccaacggcgccggcggccaggccgccggcggcaacgccgccaacaagaaggccggcgacgccggcgccggccagggccagaacaacgagggcgccaacgcccccaacgagaaguccgucaaggaguaccucgacaagguccgcgccaccgucggcaccgaguggacccccugcuccgucaccugcggcgucggcguccgcguccgccgccgcgucaacgccgccaacaagaagcccgaggaccucacccucaacgaccucgagaccgacgucugcaccauggacaagugcgccggcaucuucaacgucgucuccaacucccucggccucgucauccuccucguccucgcccucuucaacuga

SEQ ID NO: 4047 - RNA, 1188 nt, Artificial Sequence
  derived and/or modified CDS sequence (opt2) from Pv(Cam29)__AGN05257.1__CSP
augaagaacuucauccuccucgccgucuccuccauccuccucgucgaccucuuccccacccacugcggccacaacgucgaccucuccaaggccaucaaccucaacggcgucggcuucaacaacgucgacgccuccucccucggcgccgcccacgucggccaguccgccucccgcggccgcggccucggcgagaaccccgacgacgaggagggcgacgccaagaagaagaaggacggcaagaaggccgagcccaagaacccccgcgagaacaagcucaagcagcccgaggacggcgagggcaaccagcccggcgccaacggcgccggcaaccagcccggcgccaacggcgccggcaaccagcccggcgccaacggcgccggcaaccagcccggcgccaacggcgccggcaaccagcccggcgccaacggcgccggcaaccagcccggcgccaacggcgccggcaaccagcccggcgccaacggcgccgacgaccagcccggcgccaacggcgccggcaaccagcccggcgccaacggcgccggcaaccagcccggcgccaacggcgccggcaaccagcccggcgccaacggcgccggcgaccagcccggcgccaacggcgccggcaaccagcccggcgccaacggcgccggcaaccagcccggcgccaacggcgccggcaaccagcccggcgccaacggcgccggcaaccagcccggcgccaacggcgccggcaaccagcccggcgccaacggcgccggcaaccagcccggcgccaacggcgccggcaaccagcccggcgccaacggcgccggcaaccagcccggcgccaacggcgccggcggccaggccgccggcggcaacgccgccaacaagaaggccggcgacgccggcgccggccagggccagaacaacgagggcgccaacgcccccaacgagaaguccgucaaggaguaccucgacaagguccgcgccaccgucggcaccgaguggacccccugcuccgucaccugcggcgucggcguccgcguccgccgccgcgucaacgccgccaacaagaagcccgaggaccucacccucaacgaccucgagaccgacgucugcaccauggacaagugcgccggcaucuucaacgucgucuccaacucccucggccucgucauccuccucguccucgcccucuucaacuga

SEQ ID NO: 4048 - RNA, 1188 nt, Artificial Sequence
  derived and/or modified CDS sequence (opt2) from Pv(Cam9)__AGN05240.1__CSP
augaagaacuucauccuccucgccgucuccuccauccuccucgucgaccucuuccccacccacugcggccacaacgucgaccucuccaaggccaucaaccucaacggcgucggcuucaacaacgucgacgccuccucccucggcgccgcccacgucggccaguccgccucccgcggccgcggccucggcgagaaccccgacgacgaggagggcgacgccaagaagaagaaggacggcaagaaggccgagcccaagaacccccgcgagaacaagcucaagcagcccgaggacggcgccggcaaccagcccggcgccaacggcgccggcaaccagcccggcgccaacggcgccggcaaccagcccggcgccaacggcgccggcaaccagcccggcgccaacggcgccggcaaccagcccggcgccaacggcgccggcaaccagcccggcgccaacggcgccggcaaccagcccggcgccaacggcgccggcaaccagcccggcgccaacggcgccgacgaccagcccggcgccaacggcgccggcaaccagcccggcgccaacggcgccggcaaccagcccggcgccaacggcgccggcaaccagcccggcgccaacggcgccggcgaccagcccggcgccaacggcgccggcaaccagcccggcgccaacggcgccggcgaccagcccggcgccaacggcgccggcaaccagcccggcgccaacggcgccggcaaccagcccggcgccaacgaggccggcaaccagcccggcgccaacggcgccggcaaccagcccggcgccaacggcgccggcaaccagcccggcgccaacggcgccggcggccaggccgccggcggcaacgccgccaacaagaaggccggcgacgccggcgccggccagggccagaacaacgagggcgccaacgcccccaacgagaaguccgucaaggaguaccucgacaagguccgcgccaccgucggcaccgaguggacccccugcuccgucaccugcggcgucggcguccgcguccgccgccgcgucaacgccgccaacaagaagcccgaggaccucacccucaacgaccucgagaccgacgucugcaccauggacaagugcgccggcaucuucaacgucgucuccaacucccucggccucgucauccuccucguccucgcccucuucaacuga

SEQ ID NO: 4049 - RNA, 1182 nt, Artificial Sequence
  derived and/or modified CDS sequence (opt2) from Pv(Ca05)__ADB92533.1__CSP
augaagaacuucauccuccucgccgucuccuccauccuccucgucgaccucuuccccacccacugcggccacaacgucgaccucuccaaggccaucaaccucaacggcgucggcuucaacaacgucgacgccuccucccucggcgccgcccacgucggccaguccgccucccgcggccgcggccucggcgagaaccccgacgacgaggagggcgacgccaagaagaagaaggacggcaagaaggccgagcccaagaacccccgcgagaacaagcucaagcagcccgaggacggcgccggcgaccagcccggcgccaacggcgccggcaaccagcccggcgccaacggcgccggcaaccagcccggcgccaacggcgccggcaaccagcccggcgccaacggcgccggcaaccagcccggcgccaacggcgccggcaaccagcccggcgccaacggcgccggcaaccagcccggcgccaacggcgccggcaaccagcccggcgccaacggcgccgacgaccagcccggcgccaacggcgccggcaaccagcccggcgccaacggcgccggcaaccagcccggcgccaacggcgccggcaaccagcccggcgccaacggcgccggcgaccagcccggcgccaacggcgccggcaaccagcccggcgccaacggcgccggcgaccagcccggcgccaacggcgccggcaaccagcccggcgccaacggcgccggcaaccagcccggcgccaacggcgccggcaaccagcccggcgccaacggcgccggcaaccagcccggcgccaacggcgccggcggccaggccgccggcggcaacgccgccaacaagaaggccggcgacgccggcggcaacgccggcggcaacgccggcggccagggccagaacaacgagggcgccaacgcccccaacgagaaguccgucaaggaguaccucgacaagguccgcgccaccgucggcaccgaguggacccccugcuccgucaccugcggcgucggcguccgcguccgccgccgcgucaacgccgccaacaagaagcccgaggaccucacccucaacgaccucgagaccgacgucugcaccauggacaagugcgccggcaucuucaacgucgucuccaacucccucggccucgucauccuccucguccucgcccucuucaacuga

SEQ ID NO: 4050 - RNA, 1182 nt, Artificial Sequence
  derived and/or modified CDS sequence (opt2) from Pv(Ch05)__ADB92538.1__CSP
augaagaacuucauccuccucgccgucuccuccauccuccucgucgaccucuuccccacccacugcggccacaacgucgaccucuccaaggccaucaaccucaacggcgucggcuucaacaacgucgacgccuccucccucggcgccgcccacgucggccaguccgccucccgcggccgcggccucggcgagaaccccgacgacgaggagggcgacgccaagaagaagaaggacggcaagaaggccgagcccaagaacccccgcgagaacaagcucaagcagcccgaggacggcgccggcgaccagcccggcgccaacggcgccggcaaccagcccggcgccaacggcgccggcaaccagcccggcgccaacggcgccggcaaccagcccggcgccaacggcgccggcaaccagcccggcgccaacggcgccggcaaccagcccggcgccaacggcgccggcaaccagcccggcgccaacggcgccggcgaccagcccggcgccaacggcgccgacgaccagcccggcgccaacggcgccggcaaccagcccggcgccaacggcgccggcaaccagcccggcgccaacggcgccggcgaccagcccggcgccaacggcgccggcgaccagcccggcgccaacggcgccggcaaccagcccggcgccaacggcgccggcgaccagcccggcgccaacggcgccggcaaccagcccggcgccaacggcgccggcaaccagcccggcgccaacggcgccggcaaccagcccggcgccaacggcgccggcaaccagcccggcgccaacggcgccggcggccaggccgccggcggcaacgccgccaacaagaaggccggcgacgccggcggcaacgccggcggcaacgccggcggccagggccagaacaacgagggcgccaacgcccccaacgagaaguccgucaaggaguaccucgacaagguccgcgccaccgucggcaccgaguggacccccugcuccgucaccugcggcgucggcguccgcguccgccgccgcgucaacgccgccaacaagaagcccgaggaccucacccucaacgaccucgagaccgacgucugcaccauggacaagugcgccggcaucuucaacgucgucuccaacucccucggccucgucauccuccucguccucgcccucuucaacuga

SEQ ID NO: 4051 - RNA, 1173 nt, Artificial Sequence
  derived and/or modified CDS sequence (opt2) from Pv(Cam16)__AHL69649.1__CSP
augaagaacuucauccuccucgccgucuccuccauccuccucgucgaccucuuccccacccacugcggccacaacgucgaccucuccaaggccaucaaccucaacggcgucggcuucaacaacgucgacgccuccucccucggcgccgcccacgucggccaguccgccucccgcggccgcggccucggcgagaaccccgacgacgaggagggcgacgccaagaagaagaaggacggcaagaaggccgagcccaagaacccccgcgagaacaagcucaagcagcccgaggacggcgccggcaaccagcccggcgccaacggcgccggcaaccagcccggcgccaacggcgccggcaaccagcccggcgccaacggcgccggcaaccagcccggcgccaacggcgccggcaaccagcccggcgccaacggcgccggcaaccagcccggcgccaacggcgccgacgaccagcccggcgccaacggcgccggcaaccagcccggcgccaacggcgccggcaaccagcccggcgccaacggcgccggcaaccagcccggcgccaacggcgccggcaaccagcccggcgccaacggcgccggcaaccagcccggcgccaacggcgccggcgaccagcccggcgccaacggcgccggcaaccagcccggcgccaacggcgccggcgaccagcccggcgccaacggcgccggcaaccagcccggcgccaacggcgccggcaaccagcccggcgccaacgaggccggcaaccagcccggcgccaacggcgccggcaaccagcccggcgccaacggcgccggcaaccagcccggcgccaacggcgccggcggccaggccgccggcggcaacgccggcggcaacgccggcggccagggccagaacaacgagggcgccaacgcccccaacgagaaguccgucaaggaguaccucgacaagguccgcgccaccgucggcaccgaguggacccccugcuccgucaccugcggcgucggcguccgcguccgccgccgcgucaacgccgccaacaagaagcccgaggaccucacccucaacgaccucgagaccgacgucugcaccauggacaagugcgccggcaucuucaacgucgucuccaacucccucggccucgucauccuccucguccucgcccucuucaacuga

SEQ ID NO: 4052 - RNA, 1170 nt, Artificial Sequence
  derived and/or modified CDS sequence (opt2) from Pv(Cam26)__AGN05254.1__CSP
augaagaacuucauccuccucgccgucuccuccauccuccucgucgaccucuuccccacccacugcggccacaacgucgaccucuccaaggccaucaaccucaacggcgucaacuucaacaacgucgacgccuccucccucggcgccgcccacgucggccaguccgccucccgcggccgcggccucggcgagaaccccgacgacgaggagggcgacgccaagaagaagaaggacggcaagaaggccgagcccaagaacccccgcgagaacaagcucaagcagcccggcgaccgcgccgacggccagcccgccggcgaccgcgccgacggccagcccgccggcgaccgcgccgacggccagcccgccggcgaccgcgccgccggccagcccgccggcgaccgcgccgacggccagcccgccggcgaccgcgccgccggccagcccgccggcgaccgcgccgccggccagcccgccggcgaccgcgccgacggccagcccgccggcgaccgcgccgccggccagcccgccggcgaccgcgccgccggccagcccgccggcgaccgcgccgacggccagcccgccggcgaccgcgccgccggccagcccgccggcgaccgcgccgacggccagcccgccggcgaccgcgccgccggccagcccgccggcgaccgcgccgccggccagcccgccggcgaccgcgccgacggccagcccgccggcgaccgcgccgccggccagcccgccggcgaccgcgccgccggccagcccgccggcgaccgcgccgccggccagcccgccggcaacggcgccggcggccaggccgccggcggcaacgccgccaacaagaaggccgaggacgccggcggcaacgccggcggccagggccagaacaacgagggcgccaacgcccccaacgagaaguccgucaaggaguaccucgacaagguccgcgccaccgucggcaccgaguggacccccugcuccgucaccugcggcgucggcguccgcguccgccgccgcgucaacgccgccaacaagaagcccgaggaccucacccucaacgacaucgagaccgacgucugcaccauggacaagugcgccggcaucuucaacgucgucuccaacucccucggccucgucauccuccucguccucgcccucuucaacuga

SEQ ID NO: 4053 - RNA, 1164 nt, Artificial Sequence
  derived and/or modified CDS sequence (opt2) from Pv(Ch01)__ADB92534.1__CSP
augaagaacuucauccuccucgccgucuccuccauccuccucgucgaccucuuccccacccacugcggccacaacgucgaccucuccaaggccaucaaccucaacggcgucggcuucaacaacgucgacgccuccucccucggcgccgcccacgucggccaguccgccucccgcggccgcggccucggcgagaaccccgacgacgaggagggcgacgccaagaagaagaaggacggcaagaaggccgagcccaagaacccccgcgagaacaagcucaagcagcccgaggacggcgccggcgaccagcccggcgccaacggcgccggcaaccagcccggcgccaacggcgccggcaaccagcccggcgccaacggcgccggcaaccagcccggcgccaacggcgccggcaaccagcccggcgccaacggcgccggcaaccagcccggcgccaacggcgccggcaaccagcccggcgccaacggcgccggcaaccagcccggcgccaacggcgccgacgaccagcccggcgccaacggcgccggcaaccagcccggcgccaacggcgccggcgaccagcccggcgccaacggcgccggcaaccagcccggcgccaacggcgccggcgaccagcccggcgccaacggcgccggcaaccagcccggcgccaacggcgccggcaaccagcccggcgccaacggcgccggcaaccagcccggcgccaacggcgccggcaaccagcccggcgccaacggcgccggcggccaggccgccggcggcaacgccgccaacaagaaggccggcgacgccggcgccggcggccaggccgccggcggcaacgccgccaacaagaaggccggcgacgccggcgccggccagggccagaacaacgagggcgccaacgcccccaacgagaaguccgucaaggaguaccucgacaagguccgcgccaccgucggcaccgaguggacccccugcuccgucaccugcggcgucggcguccgcguccgccgccgcgucaacgccgccaacaagaagcccgaggaccucacccucaacgaccucgagaccgacgucugcaccauggacaagugcgccggcaucuucaacgucgucuccaacucccucggccucgucauccuccucguccucgcccucuucaacuga

SEQ ID NO: 4054 - RNA, 1164 nt, Artificial Sequence
  derived and/or modified CDS sequence (opt2) from Pv(Nr04)__ADB92542.1__CSP
augaagaacuucauccuccucgccgucuccuccauccuccucgucgaccucuuccccacccacugcggccacaacgucgaccucuccaaggccaucaaccucaacggcgucggcuucaacaacgucgacgccuccucccucggcgccgcccacgucggccaguccgccucccgcggccgcggccucggcgagaaccccgacgacgaggagggcgacgccaagaagaagaaggacggcaagaaggccgagcccaagaacccccgcgagaacaagcucaagcagcccgaggacggcgccggcgaccagcccggcgccaacggcgccggcaaccagcccggcgccaacggcgccggcaaccagcccggcgccaacggcgccggcaaccagcccggcgccaacggcgccggcaaccagcccggcgccaacggcgccggcaaccagcccggcgccaacggcgccggcaaccagcccggcgccaacggcgccggcgaccagcccggcgccaacggcgccgacaaccagcccggcgccaacggcgccggcaaccagcccggcgccaacggcgccggcaaccagcccggcgccaacggcgccggcaaccagcccggcgccaacggcgccggcgaccagcccggcgccaacggcgccggcaaccagcccggcgccaacggcgccggcgaccagcccggcgccaacggcgccggcaaccagcccggcgccaacggcgccggcaaccagcccggcgccaacggcgccggcggccaggccgccggcggcaacgccgccaacaagaaggccggcgacgccggcgccggcggccaggccgccggcggcaacgccgccaacaagaaggccggcgacgccggcgccggccagggccagaacaacgagggcgccaacgcccccaacgagaaguccgucaaggaguaccucgacaagguccgcgccaccgucggcaccgaguggacccccugcuccgucaccugcggcgucggcguccgcguccgccgccgcgucaacgccgccaacaagaagcccgaggaccucacccucaacgaccucgagaccgacgucugcaccauggacaagugcgccggcaucuucaacgucgucuccaacucccucggccucgucauccuccucguccucgcccucuucaacuga

SEQ ID NO: 4055 - RNA, 1164 nt, Artificial Sequence
  derived and/or modified CDS sequence (opt2) from Pv(Pt03)__ADB92553.1__CSP
augaagaacuucauccuccucgccgucuccuccauccuccucgucgaccucuuccccacccacugcggccacaacgucgaccucuccaaggccaucaaccucaacggcgucggcuucaacaacgucgacgccuccucccucggcgccgcccacgucggccaguccgccucccgcggccgcggccucggcgagaaccccgacgacgaggagggcgacgccaagaagaagaaggacggcaagaaggccgagcccaagaacccccgcgagaacaagcucaagcagcccgaggacggcgccggcgaccagcccggcgccaacggcgccggcaaccagcccggcgccaacggcgccggcaaccagcccggcgccaacggcgccggcaaccagcccggcgccaacggcgccggcgaccagcccggcgccaacggcgccggcaaccagcccggcgccaacggcgccggcgaccagcccggcgccaacggcgccggcaaccagcccggcgccaacggcgccggcaaccagcccggcgccaacggcgccggcaaccagcccggcgccaacggcgccggcaaccagcccggcgccaacggcgccggcaaccagcccggcgccaacggcgccggcgaccagcccggcgccaacggcgccggcaaccagcccggcgccaacggcgccggcaaccagcccggcgccaacggcgccggcaaccagcccggcgccaacggcgccggcaaccagcccggcgccaacggcgccggcggccaggccgccggcggcaacgccgccaacaagaaggccggcgacgccggcgccggcggccaggccgccggcggcaacgccgccaacaagaaggccggcgacgccggcgccggccagggccagaacaacgagggcgccaacgcccccaacgagaaguccgucaaggaguaccucgacaagguccgcgccaccgucggcaccgaguggacccccugcuccgucaccugcggcgucggcguccgcguccgccgccgcgucaacgccgccaacaagaagcccgaggaccucacccucaacgaccucgagaccgacgucugcaccauggacaagugcgccggcaucuucaacgucgucuccaacucccucggccucgucauccuccucguccucgcccucuucaacuga

SEQ ID NO: 4056 - RNA, 1164 nt, Artificial Sequence
  derived and/or modified CDS sequence (opt2) from Pv(Vc03)__ADB92546.1__CSP
augaagaacuucauccuccucgccgucuccuccauccuccucgucgaccucuuccccacccacugcggccacaacgucgaccucuccaaggccaucaaccucaacggcgucggcuucaacaacgucgacgccuccucccucggcgccgcccacgucggccaguccgccucccgcggccgcggccucggcgagaaccccgacgacgaggagggcgacgccaagaagaagaaggacggcaagaaggccgagcccaagaacccccgcgagaacaagcucaagcagcccgaggacggcgccggcgaccagcccggcgccaacggcgccggcaaccagcccggcgccaacggcgccggcaaccagcccggcgccaacggcgccggcaaccagcccggcgccaacggcgccggcaaccagcccggcgccaacggcgccggcaaccagcccggcgccaacggcgccggcaaccagcccggcgccaacggcgccggcgaccagcccggcgccaacggcgccgacgaccagcccggcgccaacggcgccggcaaccagcccggcgccaacggcgccggcaaccagcccggcgccaacggcgccggcaaccagcccggcgccaacggcgccggcgaccagcccggcgccaacggcgccggcaaccagcccggcgccaacggcgccggcaaccagcccggcgccaacggcgccggcaaccagcccggcgccaacggcgccggcaaccagcccggcgccaacggcgccggcggccaggccgccggcggcaacgccgccaacaagaaggccggcgacgccggcgccggcggccaggccgccggcggcaacgccgccaacaagaaggccggcgacgccggcgccggccagggccagaacaacgagggcgccaacgcccccaacgagaaguccgucaaggaguaccucgacaagguccgcgccaccgucggcaccgaguggacccccugcuccgucaccugcggcgucggcguccgcguccgccgccgcgucaacgccgccaacaagaagcccgaggaccucacccucaacgaccucgagaccgacgucugcaccauggacaagugcgccggcaucuucaacgucgucuccaacucccucggccucgucauccuccucguccucgcccucuucaacuga

SEQ ID NO: 4057 - RNA, 1164 nt, Artificial Sequence
  derived and/or modified CDS sequence (opt2) from Pv(Vc04)__ADB92547.1__CSP
augaagaacuucauccuccucgccgucuccuccauccuccucgucgaccucuuccccacccacugcggccacaacgucgaccucuccaaggccaucaaccucaacggcgucggcuucaacaacgucgacgccuccucccucggcgccgcccacgucggccaguccgccucccgcggccgcggccucggcgagaaccccgacgacgaggagggcgacgccaagaagaagaaggacggcaagaaggccgagcccaagaacccccgcgagaacaagcucaagcagcccgaggacggcgccggcgaccagcccggcgccaacggcgccggcaaccagcccggcgccaacggcgccggcaaccagcccggcgccaacggcgccggcaaccagcccggcgccaacggcgccggcaaccagcccggcgccaacggcgccggcaaccagcccggcgccaacggcgccggcaaccagcccggcgccaacggcgccgacgaccagcccggcgccaacggcgccggcgaccagcccggcgccaacggcgccggcaaccagcccggcgccaacggcgccggcaaccagcccggcgccaacggcgccggcgaccagcccggcgccaacggcgccggcgaccagcccggcgccaacggcgccggcaaccagcccggcgccaacggcgccggcgaccagcccggcgccaacggcgccggcaaccagcccggcgccaacggcgccggcaaccagcccggcgccaacggcgccggcggccaggccgccggcggcaacgccgccaacaagaaggccggcgacgccggcgccggcggccaggccgccggcggcaacgccgccaacaagaaggccggcgacgccggcgccggccagggccagaacaacgagggcgccaacgcccccaacgagaaguccgucaaggaguaccucgacaagguccgcgccaccgucggcaccgaguggacccccugcuccgucaccugcggcgucggcguccgcguccgccgccgcgucaacgccgccaacaagaagcccgaggaccucacccucaacgaccucgagaccgacgucugcaccauggacaagugcgccggcaucuucaacgucgucuccaacucccucggccucgucauccuccucguccucgcccucuucaacuga

SEQ ID NO: 4058 - RNA, 1164 nt, Artificial Sequence
  derived and/or modified CDS sequence (opt2) from Pv(Vc05)__ADB92548.1__CSP
augaagaacuucauccuccucgccgucuccuccauccuccucgucgaccucuuccccacccacugcggccacaacgucgaccucuccaaggccaucaaccucaacggcgucggcuucaacaacgucgacgccuccucccucggcgccgcccacgucggccaguccgccucccgcggccgcggccucggcgagaaccccgacgacgaggagggcgacgccaagaagaagaaggacggcaagaaggccgagcccaagaacccccgcgagaacaagcucaagcagcccgaggacggcgccggcgaccagcccggcgccaacggcgccggcaaccagcccggcgccaacggcgccggcaaccagcccggcgccaacggcgccggcaaccagcccggcgccaacggcgccggcaaccagcccggcgccaacggcgccggcaaccagcccggcgccaacggcgccggcaaccagcccggcgccaacggcgccggcgaccagcccggcgccaacggcgccggcaaccagcccggcgccaacggcgccggcaaccagcccggcgccaacggcgccggcaaccagcccggcgccaacggcgccggcgaccagcccggcgccaacggcgccggcgaccagcccggcgccaacggcgccggcaaccagcccggcgccaacggcgccggcaaccagcccggcgccaacggcgccggcaaccagcccggcgccaacggcgccggcaaccagcccggcgccaacggcgccggcggccaggccgccggcggcaacgccgccaacaagaaggccggcgacgccggcgccggcggccaggccgccggcggcaacgccgccaacaagaaggccggcgacgccggcgccggccagggccagaacaacgagggcgccaacgcccccaacgagaaguccgucaaggaguaccucgacaagguccgcgccaccgucggcaccgaguggacccccugcuccgucaccugcggcgucggcguccgcguccgccgccgcgucaacgccgccaacaagaagcccgaggaccucacccucaacgaccucgagaccgacgucugcaccauggacaagugcgccggcaucuucaacgucgucuccaacucccucggccucgucauccuccucguccucgcccucuucaacuga

SEQ ID NO: 4059 - RNA, 1161 nt, Artificial Sequence
  derived and/or modified CDS sequence (opt2) from Pv(Ca03)__ADB92531.1__CSP
augaagaacuucauccuccucgccgucuccuccauccuccucgucgaccucuuccccacccacugcggccacaacgucgaccucuccaaggccaucaaccucaacggcgucggcuucaacaacgucgacgccuccucccucggcgccgcccacgucggccaguccgccucccgcggccgcggccucggcgagaaccccgacgacgaggagggcgacgccaagaagaagaaggacggcaagaaggccgagcccaagaacccccgcgagaacaagcucaagcagcccgaggacggcgccggcgaccagcccggcgccaacggcgccggcaaccagcccggcgccaacggcgccggcaaccagcccggcgccaacggcgccggcaaccagcccggcgccaacggcgccggcaaccagcccggcgccaacggcgccggcaaccagcccggcgccaacggcgccggcaaccagcccggcgccaacggcgccgacgaccagcccggcgccaacggcgccgacgaccagcccggcgccaacggcgccggcaaccagcccggcgccaacggcgccggcaaccagcccggcgccaacggcgccggcgaccagcccggcgccaacggcgccggcgaccagcccggcgccaacggcgccggcaaccagcccggcgccaacggcgccggcgaccagcccggcgccaacggcgccggcaaccagcccggcgccaacggcgccggcaaccagcccggcgccaacggcgccggcaaccagcccggcgccaacggcgccggcaaccagcccggcgccaacggcgccggcggccaggccgccggcggcaacgccgccaacaagaaggccggcgacgccggcggcggccagggccagaacaacgagggcgccaacgcccccaacgagaaguccgucaaggaguaccucgacaagguccgcgccaccgucggcaccgaguggacccccugcuccgucaccugcggcgucggcguccgcguccgccgccgcgucaacgccgccaacaagaagcccgaggaccucacccucaacgaccucgagaccgacgucugcaccauggacaagugcgccggcaucuucaacgucgucuccaacucccucggccucgucauccuccucguccucgcccucuucaacuga

SEQ ID NO: 4060 - RNA, 1161 nt, Artificial Sequence
  derived and/or modified CDS sequence (opt2) from Pv(Cam5)__AHL69647.1__CSP
augaagaacuucauccuccucgccgucuccuccauccuccucgucgaccucuuccccacccacugcggccacaacgucgaccucuccaaggccaucaaccucaacggcgucggcuucaacaacgucgacgccuccucccucggcgccgcccacgucggccaguccgccucccgcggccgcggccucggcgagaaccccgacgacgaggagggcgacgccaagaagaagaaggacggcaagaaggccgagcccaagaacccccgcgagaacaagcucaagcagcccgaggacggcgccggcaaccagcccggcgccaacggcgccggcaaccagcccggcgccaacggcgccggcaaccagcccggcgccaacggcgccggcaaccagcccggcgccaacggcgccggcaaccagcccggcgccaacggcgccggcaaccagcccggcgccaacggcgccggcaaccagcccggcgccaacggcgccgacgaccagcccggcgccaacggcgccggcaaccagcccggcgccaacggcgccggcaaccagcccggcgccaacggcgccggcaaccagcccggcgccaacggcgccggcgaccagcccggcgccaacggcgccggcaaccagcccggcgccaacggcgccggcgaccagcccggcgccaacggcgccggcaaccagcccggcgccaacggcgccggcaaccagcccggcgccaacgaggccggcaaccagcccggcgccaacggcgccggcaaccagcccggcgccaacggcgccggcaaccagcccggcgccaacggcgccggcggccaggccgccggcggcaacgccgccaacaagaaggccggcgacgccggcgccggccagggccagaacaacgagggcgccaacgcccccaacgagaaguccgucaaggaguaccucgacaagguccgcgccaccgucggcaccgaguggacccccugcuccgucaccugcggcgucggcguccgcguccgccgccgcgucaacgccgccaacaagaagcccgaggaccucacccucaacgaccucgagaccgacgucugcaccauggacaagugcgccggcaucuucaacgucgucuccaacucccucggccucgucauccuccucguccucgcccucuucaacuga

SEQ ID NO: 4061 - RNA, 1161 nt, Artificial Sequence
  derived and/or modified CDS sequence (opt2) from Pv(Cam5)__AGN05236.2__CSP
augaagaacuucauccuccucgccgucuccuccauccuccucgucgaccucuuccccacccacugcggccacaacgucgaccucuccaaggccaucaaccucaacggcgucaacuucaacaacgucgacgccuccucccucggcgccgcccacgucggccaguccgccucccgcggccgcggccucggcgagaaccccgacgacgaggagggcgacgccaagaagaagaaggacggcaagaaggccgagcccaagaacccccgcgagaacaagcucaagcagcccggcgaccgcgccgacggccagcccgccggcgacggcgccgccggccagcccgccggcgacggcgccgccggccagcccgccggcgaccgcgccgccggccagcccgccggcgaccgcgccgccggccagcccgccggcgacggcgccgccggccagcccgccggcgacggcgccgccggccagcccgccggcgaccgcgccgccggccagcccgccggcgaccgcgccgccggccagcccgccggcgaccgcgccgacggccagcccgccggcgaccgcgccgccggccagcccgccggcgaccgcgccgccggccagcccgccggcgaccgcgccgacggccagcccgccggcgaccgcgccgccggccagcccgccggcgaccgcgccgccggccagcccgccggcgaccgcgccgccggccagcccgccggcgaccgcgccgacggccagcccgccggcgaccgcgccgccggccagcccgccggcgaccgcgccgccggccagcccgccggcgaccgcgccgccggccagcccgccggcaacggcgccggcggccaggccgccggcggcaacgccggcggccagggccagaacaacgagggcgccaacgcccccaacgagaaguccgucaaggaguaccucgacaagguccgcgccaccgucggcaccgaguggacccccugcuccgucaccugcggcgucggcguccgcguccgccgccgcgucaacgccgccaacaagaagcccgaggaccucacccucaacgaccucgagaccgacgucugcaccauggacaagugcgccggcaucuucaacgucgucuccaacucccucggccucgucauccuccucguccucgcccucuucaacuga

SEQ ID NO: 4062 - RNA, 1161 nt, Artificial Sequence
  derived and/or modified CDS sequence (opt2) from Pv(Cam7)__AGN05238.1__CSP
augaagaacuucauccuccucgccgucuccuccauccuccucgucgaccucuuccccacccacugcggccacaacgucgaccucuccaaggccaucaaccucaacggcgucggcuucaacaacgucgacgccuccucccucggcgccgcccacgucggccaguccgccucccgcggccgcggccucggcgagaaccccgacgacgaggagggcgacgccaagaagaagaaggacggcaagaaggccgagcccaagaacccccgcgagaacaagcucaagcagcccgaggacggcgccggcaaccagcccggcgccaacggcgccggcaaccagcccggcgccaacggcgccggcaaccagcccggcgccaacggcgccggcaaccagcccggcgccaacggcgccggcaaccagcccggcgccaacggcgccggcaaccagcccggcgccaacggcgccggcaaccagcccggcgccaacggcgccgacgaccagcccggcgccaacggcgccggcaaccagcccggcgccaacggcgccggcaaccagcccggcgccaacggcgccggcaaccagcccggcgccaacggcgccggcaaccagcccggcgccaacggcgccggcgaccagcccggcgccaacggcgccggcaaccagcccggcgccaacggcgccggcgaccagcccggcgccaacggcgccggcaaccagcccggcgccaacgaggccggcaaccagcccggcgccaacggcgccggcaaccagcccggcgccaacggcgccggcaaccagcccggcgccaacggcgccggcggccaggccgccggcggcaacgccgccaacaagaaggccggcgacgccggcgccggccagggccagaacaacgagggcgccaacgcccccaacgagaaguccgucaaggaguaccucgacaagguccgcgccaccgucggcaccgaguggacccccugcuccgucaccugcggcgucggcguccgcguccgccgccgcgucaacgccgccaacaagaagcccgaggaccucacccucaacgaccucgagaccgacgucugcaccauggacaagugcgccggcaucuucaacgucgucuccaacucccucggccucgucauccuccucguccucgcccucuucaacuga

SEQ ID NO: 4063 - RNA, 1161 nt, Artificial Sequence
  derived and/or modified CDS sequence (opt2) from Pv(CSP27VK247)__ANS71607.1__CSP
augaagaacuucauccuccucgccgucuccuccauccuccucgucgaccucuuccccacccacugcggccacaacgucgaccucuccaaggccaucaaccucaacggcgucggcuucaacaacgucgacgccuccucccucggcgccgcccacgucggccaguccgccucccgcggccgcggccucggcgagaaccccgacgacgaggagggcgacgccaagaagaagaaggacggcaagaaggccgagcccaagaacccccgcgagaacaagcucaagcagcccgaggacggcgccggcaaccagcccggcgccaacggcgccggcgaccagcccggcgccaacggcgccggcaaccagcccggcgccaacggcgccggcaaccagcccggcgccaacggcgccggcaaccagcccggcgccaacggcgccggcaaccagcccggcgccaacggcgccggcaaccagcccggcgccaacggcgccggcgaccagcccggcgccaacggcgccggcaaccagcccggcgccaacggcgccggcaaccagcccggcgccaacggcgccggcaaccagcccggcgccaacggcgccggcgaccagcccggcgccaacggcgccggcaaccagcccggcgccaacggcgccggcgaccagcccggcgccaacggcgccggcaaccagcccggcgccaacggcgccggcaaccagcccggcgccaacggcgccggcaaccagcccggcgccaacggcgccggcaaccagcccggcgccaacggcgccggcaaccagcccggcgccaacggcgccggcggccaggccgccggcggcaacgccgccaacaagaaggccggcgacgccggcgccggccagggccagaacaacgagggcgccaacgcccccaacgagaaguccgucaaggaguaccucgacaagguccgcaccaccgucggcaccgaguggacccccugcuccgucaccugcggcgucggcguccgcguccgccgccgcgucaacgccgccaacaagaagcccgaggaccucacccucaacgaccucgagaccgacgucugcaccauggacaagugcgccggcaucuucaacgucgucuccaacucccucggccucgucauccuccucguccucgcccucuucaacuga

SEQ ID NO: 4064 - RNA, 1161 nt, Artificial Sequence
  derived and/or modified CDS sequence (opt2) from Pv(CSP38VK247)__ANS71618.1__CSP
augaagaacuucauccuccucgccgucuccuccauccuccucgucgaccucuuccccacccacugcggccacaacgucgaccucuccaaggccaucaaccucaacggcgucaacuucaacaacgucgacgccuccucccucggcgccgcccacgucggccaguccgccucccgcggccgcggccucggcgagaaccccgacgacgaggagggcgacgccaagaagaagaaggacggcaagaaggccgagcccaagaacccccgcgagaacaagcucaagcagcccgaggacggcgccggcgaccagcccggcgccaacggcgccggcaaccagcccggcgccaacggcgccggcaaccagcccggcgccaacggcgccggcaaccagcccggcgccaacggcgccggcaaccagcccggcgccaacggcgccggcaaccagcccggcgccaacggcgccggcaaccagcccggcgccaacggcgccggcgaccagcccggcgccaacggcgccggcaaccagcccggcgccaacggcgccggcgaccagcccggcgccaacggcgccggcaaccagcccggcgccaacggcgccggcaaccagcccggcgccaacggcgccggcgaccagcccggcgccaacggcgccggcaaccagcccggcgccaacggcgccggcgaccagcccggcgccaacggcgccggcaaccagcccggcgccaacggcgccggcaaccagcccggcgccaacggcgccggcaaccagcccggcgccaacggcgccggcaaccagcccggcgccaacggcgccggcggccaggccgccggcggcaacgccgccaacaagaaggccggcgacgccggcgccggccagggccagaacaacgagggcgccaacgcccccaacgagaaguccgucaaggaguaccucgacaagguccgcgccaccgucggcaccgaguggacccccugcuccgucaccugcggcgucggcguccgcguccgccgccgcgucaacgccgccaacaagaagcccgaggaccucacccucaacgacaucgagaccgacgucugcaccauggacaagugcgccggcaucuucaacgucgucuccaacucccucggccucgucauccuccucguccucgcccucuucaacuga

SEQ ID NO: 4065 - RNA, 1161 nt, Artificial Sequence
  derived and/or modified CDS sequence (opt2) from Pv(CSP48VK247)__ANS71628.1__CSP
augaagaacuucauccuccucgccgucuccuccauccuccucgucgaccucuuccccacccacugcggccacaacgucgaccucuccaaggccaucaaccucaacggcgucggcuucaacaacgucgacgccuccucccucggcgccgcccacgucggccaguccgccucccgcggccgcggccucggcgagaaccccgacgacgaggagggcgacgccaagaagaagaaggacggcaagaaggccgagcccaagaacccccgcgagaacaagcucaagcagcccgaggacggcgccggcaaccagcccggcgccaacggcgccggcgaccagcccggcgccaacggcgccggcaaccagcccggcgccaacggcgccggcaaccagcccggcgccaacggcgccggcaaccagcccggcgccaacggcgccggcaaccagcccggcgccaacggcgccggcaaccagcccggcgccaacggcgccggcgaccagcccggcgccaacggcgccggcaaccagcccggcgccaacggcgccggcaaccagcccggcgccaacggcgccggcaaccagcccggcgccaacggcgccggcgaccagcccggcgccaacggcgccggcaaccagcccggcgccaacggcgccggcgaccagcccggcgccaacggcgccggcaaccagcccggcgccaacggcgccggcaaccagcccggcgccaacggcgccggcaaccagcccggcgccaacggcgccggcaaccagcccggcgccaacggcgccggcaaccagcccggcgccaacggcgccggcggccaggccgccggcggcaacgccgccaacaagaaggccggcgacgccggcgccggccagggccagaacaacgagggcgccaacgcccccaacgagaaguccgucaaggaguaccucgacaagguccgcgccaccgucggcaccgaguggacccccugcuccgucaccugcggcgucggcguccgcguccgccgccgcgucaacgccgccaacaagaagcccgaggaccucacccucaacgaccucgagaccgacgucugcaccauggacaagugcgccggcaucuucaacgucgucuccaacucccucggccucgucauccuccucguccucgcccucuucaacuga

SEQ ID NO: 4066 - RNA, 1161 nt, Artificial Sequence
  derived and/or modified CDS sequence (opt2) from Pv(Nr01)__ADB92539.1__CSP
augaagaacuucauccuccucgccgucuccuccauccuccucgucgaccucuuccccacccacugcggccacaacgucgaccucuccaaggccaucaaccucaacggcgucggcuucaacaacgucgacgccuccucccucggcgccgcccacgucggccaguccgccucccgcggccgcggccucggcgagaaccccgacgacgaggagggcgacgccaagaagaagaaggacggcaagaaggccgagcccaagaacccccgcgagaacaagcucaagcagcccgaggacggcgccggcgaccagcccggcgccaacggcgccggcaaccagcccggcgccaacggcgccggcaaccagcccggcgccaacggcgccggcaaccagcccggcgccaacggcgccggcaaccagcccggcgccaacggcgccggcaaccagcccggcgccaacggcgccggcaaccagcccggcgccaacggcgccggcgaccagcccggcgccaacggcgccgacgaccagcccggcgccaacggcgccggcaaccagcccggcgccaacggcgccggcaaccagcccggcgccaacggcgccggcgaccagcccggcgccaacggcgccggcgaccagcccggcgccaacggcgccggcaaccagcccggcgccaacggcgccggcgaccagcccggcgccaacggcgccggcaaccagcccggcgccaacggcgccggcaaccagcccggcgccaacggcgccggcggccagcccggcgccaacggcgccggcaaccagcccggcgccaacggcgccggcggccaggccgccggcggcaacgccgccaacaagaaggccggcgacgccggcgccggccagggccagaacaacgagggcgccaacgcccccaacgagaaguccgucaaggaguaccucgacaagguccgcgccaccgucggcaccgaguggacccccugcuccgucaccugcggcgucggcguccgcguccgccgccgcgucaacgccgccaacaagaagcccgaggaccucacccucaacgaccucgagaccgacgucugcaccauggacaagugcgccggcaucuucaacgucgucuccaacucccucggccucgucauccuccucguccucgcccucuucaacuga

SEQ ID NO: 4067 - RNA, 1161 nt, Artificial Sequence
  derived and/or modified CDS sequence (opt2) from Pv(Nr02)__ADB92540.1__CSP
augaagaacuucauccuccucgccgucuccuccauccuccucgucgaccucuuccccacccacugcggccacaacgucgaccucuccaaggccaucaaccucaacggcgucggcuucaacaacgucgacgccuccucccucggcgccgcccacgucggccaguccgccucccgcggccgcggccucggcgagaaccccgacgacgaggagggcgacgccaagaagaagaaggacggcaagaaggccgagcccaagaacccccgcgagaacaagcucaagcagcccgaggacggcgccggcgaccagcccggcgccaacggcgccggcaaccagcccggcgccaacggcgccggcaaccagcccggcgccaacggcgccggcaaccagcccggcgccaacggcgccggcaaccagcccggcgccaacggcgccggcaaccagcccggcgccaacggcgccggcaaccagcccggcgccaacggcgccggcgaccagcccggcgccaacggcgccggcgaccagcccggcgccaacggcgccggcaaccagcccggcgccaacggcgccggcaaccagcccggcgccaacggcgccggcgaccagcccggcgccaacggcgccggcgaccagcccggcgccaacggcgccggcaaccagcccggcgccaacggcgccggcgaccagcccggcgccaacggcgccggcaaccagcccggcgccaacggcgccggcaaccagcccggcgccaacggcgccggcaaccagcccggcgccaacggcgccggcaagcagcccggcgccaacggcgccggcggccaggccgccggcggcaacgccgccaacaagaaggccggcgacgccggcgccggccagggccagaacaacgagggcgccaacgcccccaacgagaaguccgucaaggaguaccucgacaagguccgcgccaccgucggcaccgaguggacccccugcuccgucaccugcggcgucggcguccgcguccgccgccgcgucaacgccgccaacaagaagcccgaggaccucacccucaacgaccucgagaccgacgucugcaccauggacaagugcgccggcaucuucaacgucgucuccaacucccucggccucgucauccuccucguccucgcccucuucaacuga

SEQ ID NO: 4068 - RNA, 1161 nt, Artificial Sequence
  derived and/or modified CDS sequence (opt2) from Pv(Nr05)__ADB92543.1__CSP
augaagaacuucauccuccucgccgucuccuccauccuccucgucgaccucuuccccacccacugcggccacaacgucgaccucuccaaggccaucaaccucaacggcgucggcuucaacaacgucgacgccuccucccucggcgccgcccacgucggccaguccgccucccgcggccgcggccucggcgagaaccccgacgacgaggagggcgacgccaagaagaagaaggacggcaagaaggccgagcccaagaacccccgcgagaacaagcucaagcagcccgaggacggcgccggcgaccagcccggcgccaacggcgccggcaaccagcccggcgccaacggcgccggcaaccagcccggcgccaacggcgccggcaaccagcccggcgccaacggcgccggcaaccagcccggcgccaacggcgccggcaaccagcccggcgccaacggcgccggcaaccagcccggcgccaacggcgccggcaaccagcccggcgccaacggcgccgacgaccagcccggcgccaacggcgccggcaaccagcccggcgccaacggcgccggcaaccagcccggcgccaacggcgccggcaaccagcccggcgccaacggcgccggcgaccagcccggcgccaacggcgccggcaaccagcccggcgccaacggcgccggcgaccagcccggcgccaacggcgccggcaaccagcccggcgccaacggcgccggcaaccagcccggcgccaacggcgccggcaaccagcccggcgccaacggcgccggcaaccagcccggcgccaacggcgccggcggccaggccgccggcggcaacgccgccaacaagaaggccggcgacgccggcgccggccagggccagaacaacgagggcgccaacgcccccaacgagaaguccgucaaggaguaccucgacaagguccgcgccaccgucggcaccgaguggacccccugcuccgucaccugcggcgucggcguccgcguccgccgccgcgucaacgccgccaacaagaagcccgaggaccucacccucaacgaccucgagaccgacgucugcaccauggacaagugcgccggcaucuucaacgucgucuccaacucccucggccucgucauccuccucguccucgcccucuucaacuga

SEQ ID NO: 4069 - RNA, 1161 nt, Artificial Sequence
  derived and/or modified CDS sequence (opt2) from Pv(Vc01)__ADB92544.1__CSP
augaagaacuucauccuccucgccgucuccuccauccuccucgucgaccucuuccccacccacugcggccacaacgucgaccucuccaaggccaucaaccucaacggcgucggcuucaacaacgucgacgccuccucccucggcgccgcccacgucggccaguccgccucccgcggccgcggccucggcgagaaccccgacgacgaggagggcgacgccaagaagaagaaggacggcaagaaggccgagcccaagaacccccgcgagaacaagcucaagcagcccgaggacggcgccggcgaccagcccggcgccaacggcgccggcaaccagcccggcgccaacggcgccggcaaccagcccggcgccaacggcgccggcaaccagcccggcgccaacggcgccggcaaccagcccggcgccaacggcgccggcaaccagcccggcgccaacggcgccggcaaccagcccggcgccaacggcgccggcaaccagcccggcgccaacggcgccgacgaccagcccggcgccaacggcgccggcaaccagcccggcgccaacggcgccggcaaccagcccggcgccaacggcgccggcaaccagcccggcgccaacggcgccggcgaccagcccggcgccaacggcgccggcaaccagcccggcgccaacggcgccggcgaccagcccggcgccaacggcgccggcaaccagcccggcgccaacggcgccggcaaccagcccggcgccaacggcgccggcaaccagcccggcgccaacggcgccggcaaccagcccggcgccaacggcgccggcggccaggccgccggcggcaacgccgccaacaagaaggccggcgacgccggcggcggccagggccagaacaacgagggcgccaacgcccccaacgagaaguccgucaaggaguaccucgacaagguccgcgccaccgucggcaccgaguggacccccugcuccgucaccugcggcgucggcguccgcguccgccgccgcgucaacgccgccaacaagaagcccgaggaccucacccucaacgaccucgagaccgacgucugcaccauggacaagugcgccggcaucuucaacgucgucuccaacucccucggccucgucauccuccucguccucgcccucuucaacuga

SEQ ID NO: 4070 - RNA, 1161 nt, Artificial Sequence
  derived and/or modified CDS sequence (opt2) from Pv(Vc02)__ADB92545.1__CSP
augaagaacuucauccuccucgccgucuccuccauccuccucgucgaccucuuccccacccacugcggccacaacgucgaccucuccaaggccaucaaccucaacggcgucggcuucaacaacgucgacgccuccucccucggcgccgcccacgucggccaguccgccucccgcggccgcggccucggcgagaaccccgacgacgaggagggcgacgccaagaagaagaaggacggcaagaaggccgagcccaagaacccccgcgagaacaagcucaagcagcccgaggacggcgccggcgaccagcccggcgccaacggcgccggcaaccagcccggcgccaacggcgccggcaaccagcccggcgccaacggcgccggcaaccagcccggcgccaacggcgccggcaaccagcccggcgccaacggcgccggcaaccagcccggcgccaacggcgccggcaaccagcccggcgccaacggcgccggcgaccagcccggcgccaacggcgccgacgaccagcccggcgccaacggcgccggcaaccagcccggcgccaacggcgccggcaaccagcccggcgccaacggcgccggcgaccagcccggcgccaacggcgccggcgaccagcccggcgccaacggcgccggcaaccagcccggcgccaacggcgccggcgaccagcccggcgccaacggcgccggcaaccagcccggcgccaacggcgccggcaaccagcccggcgccaacggcgccggcaaccagcccggcgccaacggcgccggcaaccagcccggcgccaacggcgccggcggccaggccgccggcggcaacgccgccaacaagaaggccggcgacgccggcgccggccagggccagaacaacgagggcgccaacgcccccaacgagaaguccgucaaggaguaccucgacaagguccgcgccaccgucggcaccgaguggacccccugcuccgucaccugcggcgucggcguccgcguccgccgccgcgucaacgccgccaacaagaagcccgaggaccucacccucaacgaccucgagaccgacgucugcaccauggacaagugcgccggcaucuucaacgucgucuccaacucccucggccucgucauccuccucguccucgcccucuucaacuga

SEQ ID NO: 4071 - RNA, 1158 nt, Artificial Sequence
  derived and/or modified CDS sequence (opt2) from Pv(Cam46)__AHL69652.1__CSP
augaagaacuucauccuccucgccgucuccuccauccuccucgucgaccucuuccccacccacugcggccacaacgucgaccucuccaaggccaucaaccucaacggcgucggcuucaacaacgucgacgccuccucccucggcgccgcccacgucggccaguccgccucccgcggccgcggccucggcgagaaccccgacgacgaggagggcgacgccaagaagaagaaggacggcaagaaggccgagcccaagaacccccgcgagaacaagcucaagcagcccgaggacggcgccggcaaccagcccggcgccaacggcgccggcaaccagcccggcgccaacggcgccggcaaccagcccggcgccaacggcgccgacgaccagcccggcgccaacggcgccggcaaccagcccggcgccaacggcgccggcaaccagcccggcgccaacggcgccggcaaccagcccggcgccaacggcgccggcaaccagcccggcgccaacggcgccgacgaccagcccggcgccaacggcgccggcaaccagcccggcgccaacggcgccggcaaccagcccggcgccaacggcgccggcaaccagcccggcgccaacggcgccggcgaccagcccggcgccaacggcgccggcaaccagcccggcgccaacggcgccggcaaccagcccggcgccaacggcgccggcaaccagcccggcgccaacggcgccggcaaccagcccggcgccaacggcgccggcaaccagcccggcgccaacggcgccggcaaccagcccggcgccaacggcgccggcggccaggccgccggcggcaacgccggcggcaacgccggcggcaacgccggcggccagggccagaacaacgagggcgccaacgcccccaacgagaaguccgucaaggaguaccucgacaagguccgcgccaccgucggcaccgaguggacccccugcuccgucaccugcggcgucggcguccgcguccgccgccgcgucaacgccgccaacaagaagcccgaggaccucacccucaacgaccucgagaccgacgucugcaccauggacaagugcgccggcaucuucaacgucgucuccaacucccucggccucgucauccuccucguccucgcccucuucaacuga

SEQ ID NO: 4072 - RNA, 1143 nt, Artificial Sequence
  derived and/or modified CDS sequence (opt2) from Pv(Cam20)__AGN05250.1__CSP
augaagaacuucauccuccucgccgucuccuccauccuccucgucgaccucuuccccacccacugcggccacaacgucgaccucuccaaggccaucaaccucaacggcgucaacuucaacaacgucgacgccuccucccucggcgccgcccacgucggccaguccgccucccgcggccgcggccucggcgagaaccccgacgacgaggagggcgacgccaagaagaagaaggacggcaagaaggccgagcccaagaacccccgcgagaacaagcucaagcagcccggcgaccgcgccgacggccagcccgccggcgaccgcgccgacggccagcccgccggcgaccgcgccgacggccagcccgccggcgaccgcgccgccggccagcccgccggcgaccgcgccgacggccagcccgccggcgaccgcgccgccggccagcccgccggcgaccgcgccgacggccagcccgccggcgaccgcgccgccggccagcccgccggcgaccgcgccgacggccagcccgccggcgaccgcgccgccggccagcccgccggcgaccgcgccgacggccagcccgccggcgaccgcgccgccggccagcccgccggcgaccgcgccgccggccagcccgccggcgaccgcgccgccggccagcccgccggcgaccgcgccgacggccagcccgccggcgaccgcgccgccggccagcccgccggcgaccgcgccgccggccagcccgccggcgaccgcgccgccggccagcccgccggcaacggcgccggcggccaggccgccggcggcaacgccgccaacaagaaggccgaggacgccggcggcaacgccggcggccagggccagaacaacgagggcgccaacgcccccaacgagaaguccgucaaggaguaccucgacaagguccgcgccaccgucggcaccgaguggacccccugcuccgucaccugcggcgucggcguccgcguccgccgccgcgucaacgccgccaacaagaagcccgaggaccucacccucaacgacaucgagaccgacgucugcaccauggacaagugcgccggcaucuucaacgucgucuccaacucccucggccucgucauccuccucguccucgcccucuucaacuga

SEQ ID NO: 4073 - RNA, 1143 nt, Artificial Sequence
  derived and/or modified CDS sequence (opt2) from Pv(Cam22)__AGN05252.1__CSP
augaagaacuucauccuccucgccgucuccuccauccuccucgucgaccucuuccccacccacugcggccacaacgucgaccucuccaaggccaucaaccucaacggcgucaacuucaacaacgucgacgccuccucccucggcgccgcccacgucggccaguccgccucccgcggccgcggccucggcgagaaccccgacgacgaggagggcgacgccaagaagaagaaggacggcaagaaggccgagcccaagaacccccgcgagaacaagcucaagcagcccggcgaccgcgccgacggccagcccgccggcgaccgcgccgacggccagcccgccggcgaccgcgccgacggccagcccgccggcgaccgcgccgccggccagcccgccggcgaccgcgccgacggccagcccgccggcgaccgcgccgccggccagcccgccggcgaccgcgccgacggccagcccgccggcgaccgcgccgccggccagcccgccggcgaccgcgccgccggccagcccgccggcgaccgcgccgacggccagcccgccggcgaccgcgccgccggccagcccgccggcgaccgcgccgacggccagcccgccggcgaccgcgccgccggccagcccgccggcgaccgcgccgccggccagcccgccggcgaccgcgccgacggccagcccgccggcgaccgcgccgccggccagcccgccggcgaccgcgccgccggccagcccgccggcgaccgcgccgccggccagcccgccggcaacggcgccggcggccaggccgccggcggcaacgccgccaacaagaaggccgaggacgccggcggcaacgccggcggccagggccagaacaacgagggcgccaacgcccccaacgagaaguccgucaaggaguaccucgacaagguccgcgccaccgucggcaccgaguggacccccugcuccgucaccugcggcgucggcguccgcguccgccgccgcgucaacgccgccaacaagaagcccgaggaccucacccucaacgacaucgagaccgacgucugcaccauggacaagugcgccggcaucuucaacgucgucuccaacucccucggccucgucauccuccucguccucgcccucuucaacuga

SEQ ID NO: 4074 - RNA, 1143 nt, Artificial Sequence
  derived and/or modified CDS sequence (opt2) from Pv(Cam36)__AHL69651.1__CSP
augaagaacuucauccuccucgccgucuccuccauccuccucgucgaccucuuccccacccacugcggccacaacgucgaccucuccaaggccaucaaccucaacggcgucaacuucaacaacgucgacgccuccucccucggcgccgcccacgucggccaguccgccucccgcggccgcggccucggcgagaaccccgacgacgaggagggcgacgccaagaagaagaaggacggcaagaaggccgagcccaagaacccccgcgagaacaagcucaagcagcccgccggcgacggcgccgccguccagcccgccggcgacggcgccgccguccagcccgccggcgacggcgccgacggccagcccgccggcgacggcgccgccguccagcccgccggcgacggcgccgccggccagcccgccggcgaccgcgccgccggccagcccgccggcaaccgcgccgccggccagcccgccggcgaccgcgccgacggccagcccgccggcgaccgcgccgccggccagcccgccggcgaccgcgccgccggccagcccgccggcgaccgcgccgacggccagcccgccggcgaccgcgccgccggccagcccgccggcgaccgcgccgccggccagcccgccggcgaccgcgccgccggccagcccgccggcgaccgcgccgacggccagcccgccggcgaccgcgccgccggccagcccgccggcgaccgcgccgccggccagcccgccggcgaccgcgccgccggccaggccgccggcggcaacgccggcggcaacgccggcggcaacgccggcggcaacgccggcggcaacgccggcggcaacgccggcggccagggccagaacaacgagggcgccaacgcccccaacgagaaguccgucaaggaguaccucgacaagguccgcgccaccgucggcaccgaguggacccccugcuccgucaccugcggcgucggcguccgcguccgccgccgcgucaacgccgccaacaagaagcccgaggaccucacccucaacgaccucgagaccgacgucugcaccauggacaagugcgccggcaucuucaacgucgucuccaacucccucggccucgucauccuccucguccucgcccucuucaacuga

SEQ ID NO: 4075 - RNA, 1137 nt, Artificial Sequence
  derived and/or modified CDS sequence (opt2) from Pv(Pt01.7)__ADB92550.1__CSP
augaagaacuucauccuccucgccgucuccuccauccuccucgucgaccucuuccccacccacugcggccacaacgucgaccucuccaaggccaucaaccucaacggcgucggcuucaacaacgucgacgccuccucccucggcgccgcccacgucggccaguccgccucccgcggccgcggccucggcgagaaccccgacgacgaggagggcgacgccaagaagaagaaggacggcaagaaggccgagcccaagaacccccgcgagaacaagcucaagcagcccgaggacggcgccggcgaccagcccggcgccaacggcgccggcaaccagcccggcgccaacggcgccggcaaccagcccggcgccaacggcgccggcaaccagcccggcgccaacggcgccggcaaccagcccggcgccaacggcgccgacgaccagcccggcgccaacggcgccggcaaccagcccggcgccaacggcgccggcaaccagcccggcgccaacggcgccggcaaccagcccggcgccaacggcgccggcgaccagcccggcgccaacggcgccggcaaccagcccggcgccaacggcgccggcgaccagcccggcgccaacggcgccggcaaccagcccggcgccaacggcgccggcaaccagcccggcgccaacggcgccggcaaccagcccggcgccaacggcgccggcaaccagcccggcgccaacggcgccggcggccaggccgccggcggcaacgccgccaacaagaaggccggcgacgccggcgccggcggccaggccgccggcggcaacgccgccaacaagaaggccggcgacgccggcgccggccagggccagaacaacgagggcgccaacgcccccaacgagaaguccgucaaggaguaccucgacaagguccgcgccaccgucggcaccgaguggacccccugcuccgucaccugcggcgucggcguccgcguccgccgccgcgucaacgccgccaacaagaagcccgaggaccucacccucaacgaccucgagaccgacgucugcaccauggacaagugcgccggcaucuucaacgucgucuccaacucccucggccucgucauccuccucguccucgcccucuucaacuga

SEQ ID NO: 4076 - RNA, 1134 nt, Artificial Sequence
  derived and/or modified CDS sequence (opt2) from Pv(Cam39)__AGN05267.1__CSP
augaagaacuucauccuccucgccgucuccuccauccuccucgucgaccucuuccccacccacugcggccacaacgucgaccucuccaaggccaucaaccucaacggcgucggcuucaacaacgucgacgccuccucccucggcgccgcccacgucggccaguccgccucccgcggccgcggccucggcgagaaccccgacgacgaggagggcgacgccaagaagaagaaggacggcaagaaggccgagcccaagaacccccgcgagaacaagcucaagcagcccgccggcgaccgcgccgacggccagcccgccggcgaccgcgccgacggccagcccgccggcgaccgcgccgacggccagcccgccggcgaccgcgccgccggccagcccgccggcgaccgcgccgacggccagcccgccggcgaccgcgccgccggccagcccgccggcgaccgcgccgacggccagcccgccggcgaccgcgccgccggccagcccgccggcgaccgcgccgacggccagcccgccggcgaccgcgccgccggccagcccgccggcgaccgcgccgccggccagcccgccggcgaccgcgccgccggccagcccgccggcgaccgcgccgacggccagcccgccggcgaccgcgccgccggccagcccgccggcgaccgcgccgacggccagcccgccggcgaccgcgccgccggccagcccgccggcgaccgcgccgccggccagcccgccggcgaccgcgccgccggccagcccgccggcaacggcgccggcggccaggccgccggcggcaacgccggcggcaacgccggcggcaacgccggcggccagggccagaacaacgagggcgccaacgcccccaacgagaaguccgucaaggaguaccucgacaagguccgcgccaccgucggcaccgaguggacccccugcuccgucaccugcggcgucggcguccgcguccgccgccgcgucaacgccgccaacaagaagcccgaggaccucacccucaacgaccucgagaccgacgucugcaccauggacaagugcgccggcaucuucaacgucgucuccaacucccucggccucgucauccuccucguccucgcccucuucaacuga

SEQ ID NO: 4077 - RNA, 1134 nt, Artificial Sequence
  derived and/or modified CDS sequence (opt2) from Pv(Nr03)__ADB92541.1__CSP
augaagaacuucauccuccucgccgucuccuccauccuccucgucgaccucuuccccacccacugcggccacaacgucgaccucuccaaggccaucaaccucaacggcgucaacuucaacaacgucgacgccuccucccucggcgccgcccacgucggccaguccgccucccgcggccgcggccucggcgagaaccccgacgacgaggagggcgacgccaagaagaagaaggacggcaagaaggccgagcccaagaacccccgcgagaacaagcucaagcagcccggcgaccgcgccgacggccagcccgccggcgaccgcgccgacggccagcccgccggcgaccgcgccgacggccagcccgccggcgaccgcgccgacggccagcccgccggcgaccgcgccgacggccagcccgccggcgaccgcgccgacggccagcccgccggcgaccgcgccgacggccagcccgccggcgaccgcgccgacggccagcccgccggcgaccgcgccgacggccagcccgccggcgaccgcgccgacggccagcccgccggcgaccgcgccgacggccagcccgccggcgaccgcgccgacggccagcccgccggcgaccgcgccgacggccagcccgccggcgaccgcgccgacggccagcccgccggcgaccgcgccgacggccagcccgccggcgaccgcgccgacggccagcccgccggcgaccgcgccgccggccagcccgccggcgaccgcgccgccggccagcccgccggcgaccgcgccgccggccagcccgccggcaacggcgccggcggccaggccgccggcggcaacgccggcggccagggccagaacaacgagggcgccaacgcccccaacgagaaguccgucaaggaguaccucgacaagguccgcgccaccgucggcaccgaguggacccccugcuccgucaccugcggcgucggcguccgcguccgccgccgcgucaacgccgccaacaagaagcccgaggaccucacccucaacgaccucgagaccgacgucugcaccauggacaagugcgccggcaucuucaacgucgucuccaacucccucggccucgucauccuccucguccucgcccucuucaacuga

SEQ ID NO: 4078 - RNA, 1134 nt, Artificial Sequence
  derived and/or modified CDS sequence (opt2) from Pv(Pt04.1)__ADB92554.1__CSP
augaagaacuucauccuccucgccgucuccuccauccuccucgucgaccucuuccccacccacugcggccacaacgucgaccucuccaaggccaucaaccucaacggcgucaacuucaacaacgucgacgccuccucccucggcgccgcccacgucggccaguccgccucccgcggccgcggccucggcgagaaccccgacgacgaggagggcgacgccaagaagaagaaggacggcaagaaggccgagcccaagaacccccgcgagaacaagcucaagcagcccggcgaccgcgccgacggccagcccgccggcgaccgcgccgacggccagcccgccggcgaccgcgccgacggccagcccgccggcgaccgcgccgccggccagcccgccggcgaccgcgccgccggccagcccgccggcgaccgcgccgacggccagcccgccggcgaccgcgccgacggccagcccgccggcgaccgcgccgacggccagcccgccggcgaccgcgccgacggccagcccgccggcgaccgcgccgccggccagcccgccggcgaccgcgccgccggccagcccgccggcgaccgcgccgacggccagcccgccggcgaccgcgccgccggccagcccgccggcgaccgcgccgacggccagcccgccggcgaccgcgccgccggccagcccgccggcgaccgcgccgacggccagcccgccggcgaccgcgccgccggccagcccgccggcgaccgcgccgccggccagcccgccggcgaccgcgccgccggccaggccgccggcgaccgcgccgccggccaggccgccggcggcaacgccggcggccagggccagaacaacgagggcgccaacgcccccaacgagaaguccgucaaggaguaccucgacaagguccgcgccaccgucggcaccgaguggacccccugcuccgucaccugcggcgucggcguccgcguccgccgccgcgucaacgccgccaacaagaagcccgaggaccucacccucaacgaccucgagaccgacgucugcaccauggacaagugcgccggcaucuucaacgucgucuccaacucccucggccucgucauccuccucguccucgcccucuucaacuga

SEQ ID NO: 4079 - RNA, 1134 nt, Artificial Sequence; identical to SEQ ID NO: 4044
  derived and/or modified CDS sequence (opt2) from Pv(Sal1)__ADB92528.1__CSP

SEQ ID NO: 4080 - RNA, 1131 nt, Artificial Sequence
  derived and/or modified CDS sequence (opt2) from Pv(Cam27)__AGN05255.1__CSP
augaagaacuucauccuccucgccgucuccuccauccuccucgucgaccucuuccccacccacugcggccacaacgucgaccucuccaaggccaucaaccucaacggcgucggcuucaacaacgucgacgccuccucccucggcgccgcccacgucggccaguccgccucccgcggccgcggccucggcgagaaccccgacgacgaggagggcgacgccaagaagaagaaggacggcaagaaggccgagcccaagaacccccgcgagaacaagcucaagcagcccgccggcgcccgcgccgacggccagcccgccggcgaccgcgccgacggccagcccgccggcgaccgcgccgacggccagcccgccggcgaccgcgccgccggccagcccgccggcgaccgcgccgacggccagcccgccggcgaccgcgccgccggccagcccgccggcgaccgcgccgacggccagcccgccggcgaccgcgccgccggccagcccgccggcgaccgcgccgacggccagcccgccggcgaccgcgccgccggccagcccgccggcgaccgcgccgccggccagcccgccggcgaccgcgccgacggccagcccgccggcgaccgcgccgccggccagcccgccggcgaccgcgccgacggccagcccgccggcgaccgcgccgccggccagcccgccggcgaccgcgccgccggccagcccgccggcgaccgcgccgccggccagcccgccggcaacggcgccggcggccaggccgccggcggcaacgccggcggcaacgccggcggcaacgccggcggcaacgccggcggcaacgccggcggccagggccagaacaacgagggcgccaacgcccccaacgagaaguccgucaaggaguaccucgacaagguccgcgccaccgucggcaccgaguggacccccugcuccgucaccugcggcgucggcguccgcguccgccgccgcgucaacgccgccaacaagaagcccgaggaccucacccucaacgaccucgagaccgacgucugcaccauggacaagugcgccggcaucuucaacgucgucuccaacucccucggccucgucauccuccucguccucgcccucuucaacuga

SEQ ID NO: 4081 - RNA, 1131 nt, Artificial Sequence
  derived and/or modified CDS sequence (opt2) from Pv(Cam46)__AGN05273.2__CSP
augaagaacuucauccuccucgccgucuccuccauccuccucgucgaccucuuccccacccacugcggccacaacgucgaccucuccaaggccaucaaccucaacggcgucaacuucaacaacgucgacgccuccucccucggcgccgcccacgucggccaguccgccucccgcggccgcggccucggcgagaaccccgacgacgaggagggcgacgccaagaagaagaaggacggcaagaaggccgagcccaagaacccccgcgagaacaagcucaagcagcccgccggcgaccgcgccgacggccagcccgccggcgaccgcgccgacggccagcccgccggcgaccgcgccgacggccagcccgccggcgaccgcgccgccggccagcccgccggcgaccgcgccgacggccagcccgccggcgaccgcgccgccggccagcccgccggcgaccgcgccgacggccagcccgccggcgaccgcgccgccggccagcccgccggcgaccgcgccgacggccagcccgccggcgaccgcgccgccggccagcccgccggcgaccgcgccgccggccagcccgccggcgaccgcgccgacggccagcccgccggcgaccgcgccgccggccagcccgccggcgaccgcgccgacggccagcccgccggcgaccgcgccgccggccagcccgccggcgaccgcgccgccggccagcccgccggcgaccgcgccgccggccagcccgccggcaacggcgccggcggccaggccgccggcggcaacgccggcggcaacgccggcggcaacgccggcggcaacgccggcggcaacgccggcggccagggccagaacaacgagggcgccaacgcccccaacgagaaguccgucaaggaguaccucgacaagguccgcgccaccgucggcaccgaguggacccccugcuccgucaccugcggcgucggcguccgcguccgccgccgcgucaacgccgccaacaagaagcccgaggaccucacccucaacgaccucgagaccgacgucugcaccauggacaagugcgccggcaucuucaacgucgucuccaacucccucggccucgucauccuccucguccucgcccucuucaacuga

SEQ ID NO: 4082 - RNA, 1128 nt, Artificial Sequence
  derived and/or modified CDS sequence (opt2) from Pv(CSP10VK210)__ANS71590.1__CSP
augaagaacuucauccuccucgccgucuccuccauccuccucgucgaccucuuccccacccacugcggccacaacgucgaccucuccaaggccaucaaccucaacggcgucaacuucaacaacgucgacgccuccucccucggcgccgcccacgucggccaguccgccucccgcggccgcggccucggcgagaaccccgacgacgaggagggcgacgccaagaagaagaaggacggcaagaaggccgagcccaagaacccccgcgagaacaagcucaagcagcccggcgaccgcgccgacggccagcccgccggcgaccgcgccgacggccagcccgccggcgaccgcgccgacggccagcccgccggcgaccgcgccgacggccagcccgccggcgaccgcgccgccggccagcccgccggcgaccgcgccgccggccagcccgccggcgaccgcgccgacggccagcccgccggcgaccgcgccgccggccagcccgccggcgaccgcgccgacggccagcccgccggcgaccgcgccgccggccagcccgccggcgaccgcgccgccggccagcccgccggcgaccgcgccgccggccagcccgccggcgaccgcgccgacggccagcccgccggcgaccgcgccgccggccagcccgccggcgaccgcgccgccggccagcccgccggcgaccgcgccgccggccagcccgccggcgaccgcgccgccggccagcccgccggcaacggcgccggcggccaggccgccggcggcaacgccgccaacaagaaggccgaggacgccggcggcaacgccggcggcaacgccggcggccagggccagaacaacgagggcgccaacgcccccaacgagaaguccgucaaggaguaccucgacaagguccgcgccaccgucggcaccgaguggacccccugcuccgucaccugcggcgucggcguccgcguccgccgccgcgucaacgccgccaacaagaagcccgaggaccucacccucaacgaccucgagaccgacgucugcaccauggacaagugcgccggcaucuucaacgucgucuccaacucccucggccucgucauccuccucguccucgcccucuucaacuga

SEQ ID NO: 4083 - RNA, 1122 nt, Artificial Sequence
  derived and/or modified CDS sequence (opt2) from Pv(Cam19)__AGN05249.1__CSP
augaagaacuucauccuccucgccgucuccuccauccuccucgucgaccucuuccccacccacugcggccacaacgucgaccucuccaaggccaucaaccucaacggcgucggcuucaacaacgucgacgccuccucccucggcgccgcccacgucggccaguccgccucccgcggccgcggccucggcgagaaccccgacgacgaggagggcgacgccaagaagaagaaggacggcaagaaggccgagcccaagaacccccgcgagaacaagcucaagcagcccgccggcgaccgcgccgacggccagcccgccggcgaccgcgccgacggccagcccgccggcgaccgcgccgacggccagcccgccggcgaccgcgccgacggccagcccgccggcgaccgcgccgacggccagcccgccggcgaccgcgccgccggccagcccgccggcgaccgcgccgacggccagcccgccggcgaccgcgccgccggccagcccgccggcgaccgcgccgacggccagcccgccggcgaccgcgccgacggccagcccgccggcgaccgcgccgccggccagcccgccggcgaccgcgccgacggccagcccgccggcgaccgcgccgccggccagcccgccggcgaccgcgccgacggccagcccgccggcgaccgcgccgccggccagcccgccggcgaccgcgccgccggccagcccgccggcgaccgcgccgccggccagcccgccggcaacggcgccggcggccaggccgccggcggcaacgccggcggcaacgccggcggcaacgccggcggcaacgccggcgccggccagggccagaacaacgagggcgccaacgcccccaacgagaaguccgucaaggaguaccucgacaagguccgcgccaccgucggcaccgaguggacccccugcuccgucaccugcggcgucggcguccgcguccgccgccgcgucaacgccgccaacaagaagcccgaggaccucacccucaacgaccucgagaccgacgucugcaccauggacaagugcgccggcaucuucaacgucgucuccaacucccucggccucgucauccuccucguccucgcccucuucaacuga

SEQ ID NO: 4084 - RNA, 1119 nt, Artificial Sequence
  derived and/or modified CDS sequence (opt2) from Pv(Cam10)__AGN05241.2__CSP
augaagaacuucauccuccucgccgucuccuccauccuccucgucgaccucuuccccacccacugcggccacaacgucgaccucuccaaggccaucaaccucaacggcgucggcuucaacaacgucgacgccuccucccucggcgccgcccacgucggccaguccgccucccgcggccgcggccucggcgagaaccccgacgacgaggagggcgacgccaagaagaagaaggacggcaagaaggccgagcccaagaacccccgcgagaacaagcucaagcagcccgccggcgaccgcgccgacggccagcccgccggcgaccgcgccgacggccagcccgccggcgaccgcgccgacggccagcccgccggcgaccgcgccgccggccagcccgccggcgaccgcgccgacggccagcccgccggcgaccgcgccgccggccagcccgccggcgaccgcgccgacggccagcccgccggcgaccgcgccgccggccagcccgccggcgaccgcgccgacggccagcccgccggcgaccgcgccgccggccagcccgccggcgaccgcgccgccggccagcccgccggcgaccgcgccgacggccagcccgccggcgaccgcgccgccggccagcccgccggcgaccgcgccgacggccagcccgccggcgaccgcgccgccggccagcccgccggcgaccgcgccgccggccagcccgccggcgaccgcgccgccggccagcccgccggcaacggcgccggcggccaggccgccggcggcaacgccggcggcaacgccggcggcaacgccggcggcaacgccggcggccagggccagaacaacgagggcgccaacgcccccaacgagaaguccgucaaggaguaccucgacaagguccgcgccaccgucggcaccgaguggacccccugcuccgucaccugcggcgucggcguccgcguccgccgccgcgucaacgccgccaacaagaagcccgaggaccucacccucaacgaccucgagaccgacgucugcaccauggacaagugcgccggcaucuucaacgucgucuccaacucccucggccucgucauccuccucguccucgcccucuucaacuga

SEQ ID NO: 4085 - RNA, 1119 nt, Artificial Sequence
  derived and/or modified CDS sequence (opt2) from Pv(Cam3)__AGN05234.2__CSP
augaagaacuucauccuccucgccgucuccuccauccuccucgucgaccucuuccccacccacugcggccacaacgucgaccucuccaaggccaucaaccucaacggcgucaacuucaacaacgucgacgccuccucccucggcgccgcccacgucggccaguccgccucccgcggccgcggccucggcgagaaccccgacgacgaggagggcgacgccaagaagaagaaggacggcaagaaggccgagcccaagaacccccgcgagaacaagcucaagcagcccgccggcgaccgcgccgacggccagcccgccggcgaccgcgccgacggccagcccgccggcgaccgcgccgacggccagcccgccggcgaccgcgccgccggccagcccgccggcgaccgcgccgacggccagcccgccggcgaccgcgccgccggccagcccgccggcgaccgcgccgacggccagcccgccggcgaccgcgccgccggccagcccgccggcgaccgcgccgacggccagcccgccggcgaccgcgccgccggccagcccgccggcgaccgcgccgccggccagcccgccggcgaccgcgccgacggccagcccgccggcgaccgcgccgccggccagcccgccggcgaccgcgccgacggccagcccgccggcgaccgcgccgccggccagcccgccggcgaccgcgccgccggccagcccgccggcgaccgcgccgccggccagcccgccggcaacggcgccggcggccaggccgccggcggcaacgccggcggcaacgccggcggcaacgccggcggcaacgccggcggccagggccagaacaacgagggcgccaacgcccccaacgagaaguccgucaaggaguaccucgacaagguccgcgccaccgucggcaccgaguggacccccugcuccgucaccugcggcgucggcguccgcguccgccgccgcgucaacgccgccaacaagaagcccgaggaccucacccucaacgaccucgagaccgacgucugcaccauggacaagugcgccggcaucuucaacgucgucuccaacucccucggccucgucauccuccucguccucgcccucuucaacuga

SEQ ID NO: 4086 - RNA, 1119 nt, Artificial Sequence
  derived and/or modified CDS sequence (opt2) from Pv(Cam30)__AGN05258.1__CSP
augaagaacuucauccuccucgccgucuccuccauccuccucgucgaccucuuccccacccacugcggccacaacgucgaccucuccaaggccaucaaccucaacggcgucaacuucaacaacgucgacgccuccucccucggcgccgcccacgucggccaguccgccucccgcggccgcggccucggcgagaaccccgacgacgaggagggcgacgccaagaagaagaaggacggcaagaaggccgagcccaagaacccccgcgagaacaagcucaagcagcccgccggcgacggcgccgccguccagcccgccggcgacggcgccgccguccagcccgccggcgacggcgccgacggccagcccgccggcgacggcgccgccggccagcccgccggcgaccgcgccgacggccagcccgccggcgaccgcgccgccggccagcccgccggcgaccgcgccgacggccagcccgccggcgaccgcgccgccggccagcccgccggcgaccgcgccgacggccagcccgccggcgaccgcgccgccggccagcccgccggcgaccgcgccgccggccagcccgccggcgaccgcgccgacggccagcccgccggcgaccgcgccgccggccagcccgccggcgaccgcgccgacggccagcccgccggcgaccgcgccgccggccagcccgccggcgaccgcgccgccggccagcccgccggcgaccgcgccgccggccagcccgccggcaacggcgccggcggccaggccgccggcggcaacgccggcggcaacgccggcggcaacgccggcggcaacgccggcggccagggccagaacaacgagggcgccaacgcccccaacgagaaguccgucaaggaguaccucgacaagguccgcgccaccgucggcaccgaguggacccccugcuccgucaccugcggcgucggcguccgcguccgccgccgcgucaacgccgccaacaagaagcccgaggaccucacccucaacgaccucgagaccgacgucugcaccauggacaagugcgccggcaucuucaacgucgucuccaacucccucggccucgucauccuccucguccucgcccucuucaacuga

SEQ ID NO: 4087 - RNA, 1119 nt, Artificial Sequence
  derived and/or modified CDS sequence (opt2) from Pv(Cam43)__AGN05271.1__CSP
augaagaacuucauccuccucgccgucuccuccauccuccucgucgaccucuuccccacccacugcggccacaacgucgaccucuccaaggccaucaaccucaacggcgucggcuucaacaacgucgacgccuccucccucggcgccgcccacgucggccaguccgccucccgcggccgcggccucggcgagaaccccgacgacgaggagggcgacgccaagaagaagaaggacggcaagaaggccgagcccaagaacccccgcgagaacaagcucaagcagcccgccggcgaccgcgccgacggccagcccgccggcgaccgcgccgacggccagcccgccggcgaccgcgccgacggccagcccgccggcgaccgcgccgacggccagcccgccggcgaccgcgccgacggccagcccgccggcgaccgcgccgccggccagcccgccggcgaccgcgccgacggccagcccgccggcgaccgcgccgccggccagcccgccggcgaccgcgccgacggccagcccgccggcgaccgcgccgacggccagcccgccggcgaccgcgccgccggccagcccgccggcgaccgcgccgacggccagcccgccggcgaccgcgccgccggccagcccgccggcgaccgcgccgacggccagcccgccggcgaccgcgccgccggccagcccgccggcgaccgcgccgccggccagcccgccggcaacggcgccggcggccaggccgccggcggcaacgccggcggcaacgccggcggcaacgccggcggcaacgccggcggcaacgccggcggcaacgccggcgccggccagggccagaacaacgagggcgccaacgcccccaacgagaaguccgucaaggaguaccucgacaagguccgcgccaccgucggcaccgaguggacccccugcuccgucaccugcggcgucggcguccgcguccgccgccgcgucaacgccgccaacaagaagcccgaggaccucacccucaacgaccucgagaccgacgucugcaccauggacaagugcgccggcaucuucaacgucgucuccaacucccucggccucgucauccuccucguccucgcccucuucaacuga

SEQ ID NO: 4088 - RNA, 1116 nt, Artificial Sequence
  derived and/or modified CDS sequence (opt2) from Pv(Cam40)__AGN05268.1__CSP
augaagaacuucauccuccucgccgucuccuccauccuccucgucgaccucuuccccacccacugcggccacaacgucgaccucuccaaggccaucaaccucaacggcgucggcuucaacaacgucgacgccuccucccucggcgccgcccacgucggccaguccgccucccgcggccgcggccucggcgagaaccccgacgacgaggagggcgacgccaagaagaagaaggacggcaagaagaccgagcccaagaacccccgcgagaacaagcucaagcagcccggcgaccgcgccgacggccagcccgccggcgaccgcgccgacggccagcccgccggcgaccgcgccgccggccagcccgccggcgaccgcgccgacggccagcccgccggcgaccgcgccgacggccagcccgccggcgaccgcgccgccggccagcccgccggcgaccgcgccgacggccagcccgccggcgaccgcgccgccggccagcccgccggcgaccgcgccgacggccagcccgccggcgaccgcgccgccggccagcccgccggcgaccgcgccgccggccagcccgccggcgaccgcgccgacggccagcccgccggcgaccgcgccgccggccagcccgccggcgaccgcgccgacggccagcccgccggcgaccgcgccgccggccagcccgccggcgaccgcgccgccggccagcccgccggcgaccgcgccgccggccagcccgccggcaacggcgccggcggccaggccgccggcggcaacgccggcggcaacgccggcggcaacgccggcggcaacgccggcggccagggccagaacaacgagggcgccaacgcccccaacgagaaguccgucaaggaguaccucgacaagguccgcgccaccgucggcaccgaguggacccccugcuccgucaccugcggcgucggcguccgcguccgccgccgcgucaacgccgccaacaagaagcccgaggaccucacccucaacgaccucgagaccgacgucugcaccauggacaagugcgccggcaucuucaacgucgucuccaacucccucggccucgucauccuccucguccucgcccucuucaacuga

SEQ ID NO: 4089 - RNA, 1116 nt, Artificial Sequence
  derived and/or modified CDS sequence (opt2) from Pv(CSP14VK210)__ANS71594.1__CSP
augaagaacuucauccuccucgccgucuccuccauccuccucgucgaccucuuccccacccacugcggccacaacgucgaccucuccaaggccaucaaccucaacggcgucaacuucaacaacgucgacgccuccucccucggcgccgcccacgucggccaguccgccucccgcggccgcggccucggcgagaaccccgacgacgaggagggcgacgccaagaagaagaaggacggcaagaaggccgagcccaagaacccccgcgagaacaagcucaagcagcccggcgaccgcgccgacggccagcccgccggcgaccgcgccgacggccagcccgccggcgaccgcgccgccggccagcccgccggcgaccgcgccgacggccagcccgccggcgaccgcgccgccggccagcccgccggcgaccgcgccgacggccagcccgccggcgaccgcgccgccggccagcccgccggcgaccgcgccgacggccagcccgccggcgaccgcgccgccggccagcccgccggcgaccgcgccgacggccagcccgccggcgaccgcgccgccggccagcccgccggcgaccgcgccgccggccagcccgccggcgaccgcgccgacggccagcccgccggcgaccgcgccgacggccagcccgccggcgaccgcgccgccggccagcccgccggcgaccgcgccgccggccagcccgccggcgaccgcgccgccggccagcccgccggcaacggcgccggcggccaggccgccggcggcaacgccgccaacaagaaggccgaggacgccggcggcaacgccggcggccagggccagaacaacgagggcgccaacgcccccaacgagaaguccgucaaggaguaccucgacaagguccgcgccaccgucggcaccgaguggacccccugcuccgucaccugcggcgucggcguccgcguccgccgccgcgucaacgccgccaacaagaagcccgaggaccucacccucaacgacaucgagaccgacgucugcaccauggacaagugcgccggcaucuucaacgucgucuccaacucccucggccucgucauccuccucguccucgcccucuucaacuga

SEQ ID NO: 4090 - RNA, 1116 nt, Artificial Sequence
  derived and/or modified CDS sequence (opt2) from Pv(CSP22VK210)__ANS71602.1__CSP
augaagaacuucauccuccucgccgucuccuccauccuccucgucgaccucuuccccacccacugcggccacaacgucgaccucuccaaggccaucaaccucaacggcgucaacuucaacaacgucgacgccuccucccucggcgccgcccacgucggccaguccgccucccgcggccgcggccucggcgagaaccccgacgacgaggagggcgacgccaagaagaagaaggacggcaagaaggccgagcccaagaacccccgcgagaacaagcucaagcagcccggcgaccgcgccgacggccagcccgccggcgaccgcgccgacggccagcccgccggcgaccgcgccgacggccagcccgccggcgaccgcgccgccggccagcccgccggcgaccgcgccgacggccagcccgccggcgaccgcgccgccggccagcccgccggcgaccgcgccgacggccagcccgccggcgaccgcgccgccggccagcccgccggcgaccgcgccgccggccagcccgccggcgaccgcgccgacggccagcccgccggcgaccgcgccgccggccagcccgccggcgaccgcgccgccggccagcccgccggcgaccgcgccgacggccagcccgccggcgaccgcgccgccggccagcccgccggcgaccgcgccgccggccagcccgccggcgaccgcgccgccggccagcccgccggcgaccgcgccgccggccagcccgccggcaacggcgccggcggccaggccgccggcggcaacgccgccaacaagaaggccgaggacgccggcggcaacgccggcggccagggccagaacaacgagggcgccaacgcccccaacgagaaguccgucaaggaguaccucgacaagguccgcgccaccgucggcaccgaguggacccccugcuccgucaccugcggcgucggcguccgcguccgccgccgcgucaacgccgccaacaagaagcccgaggaccucacccucaacgacaucgagaccgacgucugcaccauggacaagugcgccggcaucuucaacgucgucuccaacucccucggccucgucauccuccucguccucgcccucuucaacuga

SEQ ID NO: 4091 - RNA, 1116 nt, Artificial Sequence
  derived and/or modified CDS sequence (opt2) from Pv(CSP28VK210)__ANS71608.1__CSP
augaagaacuucauccuccucgccgucuccuccauccuccucgucgaccucuuccccacccacugcggccacaacgucgaccucuccaaggccaucaaccucaacggcgucaacuucaacaacgucgacgccuccucccucggcgccgcccacgucggccaguccgccucccgcggccgcggccucggcgagaaccccgacgacgaggagggcgacgccaagaagaagaaggacggcaagaaggccgagcccaagaacccccgcgagaacaagcucaagcagcccggcgaccgcgccgacggccagcccgccggcgaccgcgccgacggccagcccgccggcgaccgcgccgacggccagcccgccggcgaccgcgccgccggccagcccgccggcgaccgcgccgacggccagcccgccggcgaccgcgccgccggccagcccgccggcgaccgcgccgacggccagcccgccggcgaccgcgccgccggccagcccgccggcgaccgcgccgacggccagcccgccggcgaccgcgccgccggccagcccgccggcgaccgcgccgacggccagcccgccggcgaccgcgccgccggccagcccgccggcgaccgcgccgccggccagcccgccggcgaccgcgccgacggccagcccgccggcgaccgcgccgccggccagcccgccggcgaccgcgccgccggccagcccgccggcgaccgcgccgccggccagcccgccggcaacggcgccggcggccaggccgccggcggcaacgccgccaacaagaaggccgaggacgccggcggcaacgccggcggccagggccagaacaacgagggcgccaacgcccccaacgagaaguccgucaaggaguaccucgacaagguccgcgccaccgucggcaccgaguggacccccugcuccgucaccugcggcgucggcguccgcguccgccgccgcgucaacgccgccaacaagaagcccgaggaccucacccucaacgacaucgagaccgacgucugcaccauggacaagugcgccggcaucuucaacgucgucuccaacucccucggccucgucauccuccucguccucgcccucuucaacuga

SEQ ID NO: 4092 - RNA, 1116 nt, Artificial Sequence
  derived and/or modified CDS sequence (opt2) from Pv(CSP31VK210)__ANS71611.1__CSP
augaagaacuucauccuccucgccgucuccuccauccuccucgucgaccucuuccccacccacugcggccacaacgucgaccucuccaaggccaucaaccucaacggcgucaacuucaacaacgucgacgccuccucccucggcgccgcccacgucggccaguccgccucccgcggccgcggccucggcgagaaccccgacgacgaggagggcgacgccaagaagaagaaggacggcaagaaggccgagcccaagaacccccgcgagaacaagcucaagcagcccggcgaccgcgccgacggccagcccgccggcgaccgcgccgacggccagcccgccggcgaccgcgccgccggccagcccgccggcgaccgcgccgacggccagcccgccggcgaccgcgccgccggccagcccgccggcgaccgcgccgacggccagcccgccggcgaccgcgccgccggccagcccgccggcgaccgcgccgacggccagcccgccggcgaccgcgccgacggccagcccgccggcgaccgcgccgccggccagcccgccggcgaccgcgccgccggccagcccgccggcgaccgcgccgccggccagcccgccggcgaccgcgccgacggccagcccgccggcgaccgcgccgccggccagcccgccggcgaccgcgccgccggccagcccgccggcgaccgcgccgccggccagcccgccggcgaccgcgccgccggccagcccgccggcaacggcgccggcggccaggccgccggcggcaacgccgccaacaagaaggccgaggacgccggcggcaacgccggcggccagggccagaacaacgagggcgccaacgcccccaacgagaaguccgucaaggaguaccucgacaagguccgcgccaccgucggcaccgaguggacccccugcuccgucaccugcggcgucggcguccgcguccgccgccgcgucaacgccgccaacaagaagcccgaggaccucacccucaacgacaucgagaccgacgucugcaccauggacaagugcgccggcaucuucaacgucgucuccaacucccucggccucgucauccuccucguccucgcccucuucaacuga

SEQ ID NO: 4093 - RNA, 1116 nt, Artificial Sequence
  derived and/or modified CDS sequence (opt2) from Pv(CSP37VK210)__ANS71617.1__CSP
augaagaacuucauccuccucgccgucuccuccauccuccucgucgaccucuuccccacccacugcggccacaacgucgaccucuccaaggccaucaaccucaacggcgucaacuucaacaacgucgacgccuccucccucggcgccgcccacgucggccaguccgccucccgcggccgcggccucggcgagaaccccgacgacgaggagggcgacgccaagaagaagaaggacggcaagaaggccgagcccaagaacccccgcgagaacaagcucaagcagcccggcgaccgcgccgacggccagcccgccggcgaccgcgccgacggccagcccgccggcgaccgcgccgacggccagcccgccggcgaccgcgccgccggccagcccgccggcgaccgcgccgccggccagcccgccggcgaccgcgccgccggccagcccgccggcgaccgcgccgacggccagcccgccggcgaccgcgccgccggccagcccgccggcgaccgcgccgacggccagcccgccggcgaccgcgccgccggccagcccgccggcgaccgcgccgacggccagcccgccggcgaccgcgccgccggccagcccgccggcgaccgcgccgccggccagcccgccggcgaccgcgccgacggccagcccgccggcgaccgcgccgccggccagcccgccggcgaccgcgccgccggccagcccgccggcgaccgcgccgccggccagcccgccggcaacggcgccggcggccaggccgccggcggcaacgccgccaacaagaaggccgaggacgccggcggcaacgccggcggccagggccagaacaacgagggcgccaacgcccccaacgagaaguccgucaaggaguaccucgacaagguccgcgccaccgucggcaccgaguggacccccugcuccgucaccugcggcgucggcguccgcguccgccgccgcgucaacgccgccaacaagaagcccgaggaccucacccucaacgacaucgagaccgacgucugcaccauggacaagugcgccggcaucuucaacgucgucuccaacucccucggccucgucauccuccucguccucgcccucuucaacuga

SEQ ID NO: 4094 - RNA, 1116 nt, Artificial Sequence
  derived and/or modified CDS sequence (opt2) from Pv(CSP50VK210)__ANS71630.1__CSP
augaagaacuucauccuccucgccgucuccuccauccuccucgucgaccucuuccccacccacugcggccacaacgucgaccucuccaaggccaucaaccucaacggcgucaacuucaacaacgucgacgccuccucccucggcgccgcccacgucggccaguccgccucccgcggccgcggccucggcgagaaccccgacgacgaggagggcgacgccaagaagaagaaggacggcaagaaggccgagcccaagaacccccgcgagaacaagcucaagcagcccggcgaccgcgccgacggccagcccgccggcgaccgcgccgacggccagcccgccggcgaccgcgccgccggccagcccgccggcgaccgcgccgacggccagcccgccggcgaccgcgccgccggccagcccgccggcgaccgcgccgacggccagcccgccggcgaccgcgccgccggccagcccgccggcgaccgcgccgacggccagcccgccggcgaccgcgccgccggccagcccgccggcgaccgcgccgacggccagcccgccggcgaccgcgccgccggccagcccgccggcgaccgcgccgccggccagcccgccggcgaccgcgccgacggccagcccgccggcgaccgcgccgccggccagcccgccggcgaccgcgccgccggccagcccgccggcgaccgcgccgccggccagcccgccggcgaccgcgccgccggccagcccgccggcaacggcgccggcggccaggccgccggcggcaacgccgccaacaagaaggccgaggacgccggcggcaacgccggcggccagggccagaacaacgagggcgccaacgcccccaacgagaaguccgucaaggaguaccucgacaagguccgcgccaccgucggcaccgaguggacccccugcuccgucaccugcggcgucggcguccgcguccgccgccgcgucaacgccgccaacaagaagcccgaggaccucacccucaacgacaucgagaccgacgucugcaccauggacaagugcgccggcaucuucaacgucgucuccaacucccucggccucgucauccuccucguccucgcccucuucaacuga

SEQ ID NO: 4095 - RNA, 1107 nt, Artificial Sequence
  derived and/or modified CDS sequence (opt2) from Pv(Cam16)__AGN05247.1__CSP
augaagaacuucauccuccucgccgucuccuccauccuccucgucgaccucuuccccacccacugcggccacaacgucgaccucuccaaggccaucaaccucaacggcgucaacuucaacaacgucgacgccuccucccucggcgccgcccacgucggccaguccgccucccgcggccgcggccucggcgagaaccccgacgacgaggagggcgacgccaagaagaagaaggacggcaagaaggccgagcccaagaacccccgcgagaacaagcucaagcagcccgccggcgaccgcgccgacggccagcccgccggcgaccgcgccgacggccagcccgccggcgaccgcgccgccggccagcccgccggcgaccgcgccgacggccagcccgccggcgaccgcgccgacggccagcccgccggcgaccgcgccgccggccagcccgccggcgaccgcgccgacggccagcccgccggcgaccgcgccgccggccagcccgccggcgaccgcgccgacggccagcccgccggcgaccgcgccgacggccagcccgccggcgaccgcgccgccggccagcccgccggcgaccgcgccgacggccagcccgccggcgaccgcgccgccggccagcccgccggcgaccgcgccgacggccagcccgccggcgaccgcgccgccggccagcccgccggcgaccgcgccgccggccagcccgccggcgaccgcgccgccggccagcccgccggcaacggcgccggcggccaggccgccggcggcaacgccggcggcaacgccggcggcaacgccggcggccagggccagaacaacgagggcgccaacgcccccaacgagaaguccgucaaggaguaccucgacaagguccgcgccaccgucggcaccgaguggacccccugcuccgucaccugcggcgucggcguccgcguccgccgccgcgucaacgccgccaacaagaagcccgaggaccucacccucaacgaccucgagaccgacgucugcaccauggacaagugcgccggcaucuucaacgucgucuccaacucccucggccucgucauccuccucguccucgcccucuucaacuga

SEQ ID NO: 4096 - RNA, 1107 nt, Artificial Sequence
  derived and/or modified CDS sequence (opt2) from Pv(Cam32)__AGN05260.1__CSP
augaagaacuucauccuccucgccgucuccuccauccuccucgucgaccucuuccccacccacugcggccacaacgucgaccucuccaaggccaucaaccucaacggcgucggcuucaacaacgucgacgccuccucccucggcgccgcccacgucggccaguccgccucccgcggccgcggccucggcgagaaccccgacgacgaggagggcgacgccaagaagaagaaggacggcaagaaggccgagcccaagaacccccgcgagaacaagcucaagcagcccgccggcgaccgcgccgacggccagcccgccggcgaccgcgccgacggccagcccgccggcgaccgcgccgacggccagcccgccggcgaccgcgccgccggccagcccgccggcgaccgcgccgacggccagcccgccggcgaccgcgccgccggccagcccgccggcgaccgcgccgacggccagcccgccggcgaccgcgccgccggccagcccgccggcgaccgcgccgacggccagcccgccggcgaccgcgccgccggccagcccgccggcgaccgcgccgccggccagcccgccggcgaccgcgccgacggccagcccgccggcgaccgcgccgccggccagcccgccggcgaccgcgccgacggccagcccgccggcgaccgcgccgccggccagcccgccggcgaccgcgccgccggccagcccgccggcgaccgcgccgccggccagcccgccggcaacggcgccggcggccaggccgccggcggcaacgccggcggcaacgccggcggcaacgccggcggccagggccagaacaacgagggcgccaacgcccccaacgagaaguccgucaaggaguaccucgacaagguccgcgccaccgucggcaccgaguggacccccugcuccgucaccugcggcgucggcguccgcguccgccgccgcgucaacgccgccaacaagaagcccgaggaccucacccucaacgaccucgagaccgacgucugcaccauggacaagugcgccggcaucuucaacgucgucuccaacucccucggccucgucauccuccucguccucgcccucuucaacuga

SEQ ID NO: 4097 - RNA, 1107 nt, Artificial Sequence
  derived and/or modified CDS sequence (opt2) from Pv(Cam38)__AGN05266.1__CSP
augaagaacuucauccuccucgccgucuccuccauccuccucgucgaccucuuccccacccacugcggccacaacgucgaccucuccaaggccaucaaccucaacggcgucaacuucaacaacgucgacgccuccucccucggcgccgcccacgucggccaguccgccucccgcggccgcggccucggcgagaaccccgacgacgaggagggcgacgccaagaagaagaaggacggcaagaaggccgagcccaagaacccccgcgagaacaagcucaagcagcccggcgaccgcgccgacggccagcccgccggcgaccgcgccgacggccagcccgccggcgaccgcgccgccggccagcccgccggcgaccgcgccgacggccagcccgccggcgaccgcgccgccggccagcccgccggcgaccgcgccgacggccagcccgccggcgaccgcgccgccggccagcccgccggcgaccgcgccgacggccagcccgccggcgaccgcgccgccggccagcccgccggcgaccgcgccgacggccagcccgccggcgaccgcgccgccggccagcccgccggcgaccgcgccgacggccagcccgccggcgaccgcgccgccggccagcccgccggcgaccgcgccgccggccagcccgccggcgaccgcgccgacggccagcccgccggcgaccgcgccgccggccagcccgccggcgaccgcgccgccggccagcccgccggcgaccgcgccgccggccagcccgccggcaacggcgccggcggccaggccgccggcggcaacgccggcggccagggccagaacaacgagggcgccaacgcccccaacgagaaguccgucaaggaguaccucgacaagguccgcgccaccgucggcaccgaguggacccccugcuccgucaccugcggcgucggcguccgcguccgccgccgcgucaacgccgccaacaagaagcccgaggaccucacccucaacgaccucgagaccgacgucugcaccauggacaagugcgccggcaucuucaacgucgucuccaacucccucggccucgucauccuccucguccucgcccucuucaacuga

SEQ ID NO: 4098 - RNA, 1104 nt, Artificial Sequence
  derived and/or modified CDS sequence (opt2) from Pv(CSP19VK210)__ANS71599.1__CSP
augaagaacuucauccuccucgccgucuccuccauccuccucgucgaccucuuccccacccacugcggccacaacgucgaccucuccaaggccaucaaccucaacggcgucaacuucaacaacgucgacgccuccucccucggcgccgcccacgucggccaguccgccucccgcggccgcggccucggcgagaaccccgacgacgaggagggcgacgccaagaagaagaaggacggcaagaaggccgagcccaagaacccccgcgagaacaagcucaagcagcccggcgaccgcgccgacggccagcccgccggcgaccgcgccgacggccagcccgccggcgaccgcgccgacggccagcccgccggcgaccgcgccgccggccagcccgccggcgaccgcgccgacggccagcccgccggcgaccgcgccgccggccagcccgccggcgaccgcgccgacggccagcccgccggcgaccgcgccgccggccagcccgccggcgaccgcgccgacggccagcccgccggcgaccgcgccgccggccagcccgccggcgaccgcgccgacggccagcccgccggcgaccgcgccgccggccagcccgccggcgaccgcgccgccggccagcccgccggcgaccgcgccgacggccagcccgccggcgaccgcgccgccggccagcccgccggcgaccgcgccgccggccagcccgccggcgaccgcgccgccggccagcccgccggcaacggcgccggcggccaggccgccggcggcaacgccgccaacaagaaggccgaggacgccggcggccagggccagaacaacgagggcgccaacgcccccaacgagaaguccgucaaggaguaccucgacaagguccgcgccaccgucggcaccgaguggacccccugcuccgucaccugcggcgucggcguccgcguccgccgccgcgucaacgccgccaacaagaagcccgaggaccucacccucaacgacaucgagaccgacgucugcaccauggacaagugcgccggcaucuucaacgucgucuccaacucccucggccucgucauccuccucguccucgcccucuucaacuga

SEQ ID NO: 4099 - RNA, 1089 nt, Artificial Sequence
  derived and/or modified CDS sequence (opt2) from Pv(CSP24VK210)__ANS71604.1__CSP
augaagaacuucauccuccucgccgucuccuccauccuccucgucgaccucuuccccacccacugcggccacaacgucgaccucuccaaggccaucaaccucaacggcgucaacuucaacaacgucgacgccuccucccucggcgccgcccacgucggccaguccgccucccgcggccgcggccucggcgagaaccccgacgacgaggagggcgacgccaagaagaagaaggacggcaagaaggccgagcccaagaacccccgcgagaacaagcucaagcagcccggcgaccgcgccgacggccagcccgccggcgaccgcgccgacggccagcccgccggcgaccgcgccgacggccagcccgccggcgaccgcgccgccggccagcccgccggcgaccgcgccgacggccagcccgccggcgaccgcgccgccggccagcccgccggcgaccgcgccgacggccagcccgccggcgaccgcgccgccggccagcccgccggcgaccgcgccgacggccagcccgccggcgaccgcgccgccggccagcccgccggcgaccgcgccgacggccagcccgccggcgaccgcgccgccggccagcccgccggcgaccgcgccgccggccagcccgccggcgaccgcgccgacggccagcccgccggcgaccgcgccgccggccagcccgccggcgaccgcgccgccggccagcccgccggcaacggcgccggcggccaggccgccggcggcaacgccgccaacaagaaggccgaggacgccggcggcaacgccggcggccagggccagaacaacgagggcgccaacgcccccaacgagaaguccgucaaggaguaccucgacaagguccgcgccaccgucggcaccgaguggacccccugcuccgucaccugcggcgucggcguccgcguccgccgccgcgucaacgccgccaacaagaagcccgaggaccucacccucaacgacaucgagaccgacgucugcaccauggacaagugcgccggcaucuucaacgucgucuccaacucccucggccucgucauccuccucguccucgcccucuucaacuga

SEQ ID NO: 4100 - RNA, 1089 nt, Artificial Sequence
  derived and/or modified CDS sequence (opt2) from Pv(CSP35VK210)__ANS71615.1__CSP
augaagaacuucauccuccucgccgucuccuccauccuccucgucgaccucuuccccacccacugcggccacaacgucgaccucuccaaggccaucaaccucaacggcgucaacuucaacaacgucgacgccuccucccucggcgccgcccacgucggccaguccgccucccgcggccgcggccucggcgagaaccccgacgacgaggagggcgacgccaagaagaagaaggacggcaagaaggccgagcccaagaacccccgcgagaacaagcucaagcagcccggcgaccgcgccgacggccagcccgccggcgaccgcgccgacggccagcccgccggcgaccgcgccgccggccagcccgccggcgaccgcgccgacggccagcccgccggcgaccgcgccgccggccagcccgccggcgaccgcgccgacggccagcccgccggcgaccgcgccgccggccagcccgccggcgaccgcgccgacggccagcccgccggcgaccgcgccgccggccagcccgccggcgaccgcgccgacggccagcccgccggcgaccgcgccgccggccagcccgccggcgaccgcgccgccggccagcccgccggcgaccgcgccgacggccagcccgccggcgaccgcgccgccggccagcccgccggcgaccgcgccgccggccagcccgccggcgaccgcgccgccggccagcccgccggcaacggcgccggcggccaggccgccggcggcaacgccgccaacaagaaggccgaggacgccggcggcaacgccggcggccagggccagaacaacgagggcgccaacgcccccaacgagaaguccgucaaggaguaccucgacaagguccgcgccaccgucggcaccgaguggacccccugcuccgucaccugcggcgucggcguccgcguccgccgccgcgucaacgccgccaacaagaagcccgaggaccucacccucaacgacaucgagaccgacgucugcaccauggacaagugcgccggcaucuucaacgucgucuccaacucccucggccucgucauccuccucguccucgcccucuucaacuga

SEQ ID NO: 4101 - RNA, 1062 nt, Artificial Sequence
  derived and/or modified CDS sequence (opt2) from Pv(CSP9VK210)__ANS71589.1__CSP
augaagaacuucauccuccucgccgucuccuccauccuccucgucgaccucuuccccacccacugcggccacaacgucgaccucuccaaggccaucaaccucaacggcgucaacuucaacaacgucgacgccuccucccucggcgccgcccacgucggccaguccgccucccgcggccgcggccucggcgagaaccccgacgacgaggagggcgacgccaagaagaagaaggacggcaagaaggccgagcccaagaacccccgcgagaacaagcucaagcagcccggcgaccgcgccgacggccagcccgccggcgaccgcgccgacggccagcccgccggcgaccgcgccgccggccagcccgccggcgaccgcgccgacggccagcccgccggcgaccgcgccgccggccagcccgccggcgaccgcgccgacggccagcccgccggcgaccgcgccgccggccagcccgccggcgaccgcgccgacggccagcccgccggcgaccgcgccgccggccagcccgccggcgaccgcgccgccggccagcccgccggcgaccgcgccgacggccagcccgccggcgaccgcgccgccggccagcccgccggcgaccgcgccgccggccagcccgccggcgaccgcgccgccggccagcccgccggcgaccgcgccgccggccagcccgccggcaacggcgccggcggccaggccgccggcggcaacgccgccaacaagaaggccgaggacgccggcggcaacgccggcggccagggccagaacaacgagggcgccaacgcccccaacgagaaguccgucaaggaguaccucgacaagguccgcgccaccgucggcaccgaguggacccccugcuccgucaccugcggcgucggcguccgcguccgccgccgcgucaacgccgccaacaagaagcccgaggaccucacccucaacgacaucgagaccgacgucugcaccauggacaagugcgccggcaucuucaacgucgucuccaacucccucggccucgucauccuccucguccucgcccucuucaacuga

SEQ ID NO: 4102 - RNA, 894 nt, Artificial Sequence
  derived and/or modified CDS sequence (opt2) from Pv(Pt02.2)__ADB92552.1__CSP
augaagaacuucauccuccucgccgucuccuccauccuccucgucgaccucuuccccacccacugcggccacaacgucgaccucuccaaggccaucaaccucaacggcgucggcuucaacaacgucgacgccuccucccucggcgccgcccacgucggccaguccgccucccgcggccgcggccucggcgagaaccccgacgacgaggagggcgacgccaagaagaagaaggacggcaagaaggccgagcccaagaacccccgcgagaacaagcucaagcagcccgaggacggcgccggcgaccagcccggcgccaacggcgccggcaaccagcccggcgccaacggcgccggcaaccagcccggcgccaacggcgccggcaaccagcccggcgccaacggcgccggcaaccagcccggcgccaacggcgccggcaaccagcccggcgccaacggcgccggcaaccagcccggcgccaacggcgccggcggccaggccgccggcggcaacgccgccaacaagaaggccggcgacgccggcgccggcggccaggccgccggcggcaacgccgccaacaagaaggccggcgacgccggcgccggccagggccagaacaacgagggcgccaacgcccccaacgagaaguccgucaaggaguaccucgacaagguccgcgccaccgucggcaccgaguggacccccugcuccgucaccugcggcgucggcguccgcguccgccgccgcgucaacgccgccaacaagaagcccgaggaccucacccucaacgaccucgagaccgacgucugcaccauggacaagugcgccggcaucuucaacgucgucuccaacucccucggccucgucauccuccucguccucgcccucuucaacuga

SEQ ID NO: 4103 - RNA, 840 nt, Artificial Sequence
  derived and/or modified CDS sequence (opt2) from Pv(Pt04.5)__ADB92555.1__CSP
augaagaacuucauccuccucgccgucuccuccauccuccucgucgaccucuuccccacccacugcggccacaacgucgaccucuccaaggccaucaaccucaacggcgucggcuucaacaacgucgacgccuccucccucggcgccgcccacgucggccaguccgccucccgcggccgcggccucggcgagaaccccgacgacgaggagggcgacgccaagaagaagaaggacggcaagaaggccgagcccaagaacccccgcgagaacaagcucaagcagcccgaggacggcgccggcgaccagcccggcgccaacggcgccggcaaccagcccggcgccaacggcgccggcaaccagcccggcgccaacggcgccggcaaccagcccggcgccaacggcgccggcaaccagcccggcgccaacggcgccggcggccaggccgccggcggcaacgccgccaacaagaaggccggcgacgccggcgccggcggccaggccgccggcggcaacgccgccaacaagaaggccggcgacgccggcgccggccagggccagaacaacgagggcgccaacgcccccaacgagaaguccgucaaggaguaccucgacaagguccgcgccaccgucggcaccgaguggacccccugcuccgucaccugcggcgucggcguccgcguccgccgccgcgucaacgccgccaacaagaagcccgaggaccucacccucaacgaccucgagaccgacgucugcaccauggacaagugcgccggcaucuucaacgucgucuccaacucccucggccucgucauccuccucguccucgcccucuucaacuga

SEQ ID NO: 4104 - RNA, 1023 nt, Artificial Sequence; identical to SEQ ID NO: 143
  derived and/or modified CDS sequence (opt2) from Pb(ANKA)__XP_022712148.1__CSP

SEQ ID NO: 4105 - RNA, 1194 nt, Artificial Sequence; identical to SEQ ID NO: 149
  derived and/or modified CDS sequence (opt3) from Pf(3D7)__XP_001351122.1__CSP

SEQ ID NO: 4106 - RNA, 1335 nt, Artificial Sequence
  derived and/or modified CDS sequence (opt3) from Pf(Pal97-089)__BAM84949.1__CSP
augaugagaaagcuggccauccucagcguguccucuuuccuuuuugucgaggcucuguuccaggaauaccaaugcuauggcucaaguagcaacaccaggguuuugaaugaguuaaacuacgacaaugcagggacaaaccuguauaaugaacuagagaugaacuacuauggaaaacaggaaaauugguacucccucaagaaaaacucucggucgcugggugagaaugaugacggcgauaacgacaauggggauaacggacgcgagggcaaggacgaagauaaacgagacgguaauaacgaggauaaugaaaaacuucguaagcccaagcacaagaaacugaagcagccuggggacggaaacccagauccgaacgccaaucccaacguggacccuaaugcgaacccaaauguagaucccaacgcuaauccuaacgccaauccaaacgcaaaucccaacgccaauccuaacgcuaauccaaacgcaaacccgaaugccaaccccaaugcuaacccuaaugccaacccaaaugcgaaccccaaugcaaacccuaaugccaacccaaaugcuaaccccaaugccaacccgaacgcaaauccuaacgcuaaucccaacgccaauccaaacgcgaauccuaacgccaaucccaacgcaaauccaaacgcuaaucccaacgccaauccuaacgcuaacccaaaugccaacccgaaugcaaaccccaaugccaacccuaaugcuaacccaaaugcgaaccccaaugcaaacccuaaugccaacccaaaugcuaaccccaaugccaacccgaacgcaaauccuaacgccaauccaaacgcuaaucccaacgccaauccuaacgcaaaucccaacgcgaauccaaacgcuaauccuaacgccaaucccaacgcaaacccaaaugccaacccgaaugcuaacccuaaugccaaccccaaugcaaacccaaauaaaaacaaucagggcaacggccaagggcauaauaugcccaacgacccuaauagaaacguggacgagaacgcuaaugccaacaaugcggucaagaacaauaacaaugaggaaccaucagauaagcacauugagcaguauuugaaaaagauacaguacagccucaguacugaauggucccccuguucugugacgugcggaaacgguauccagguuaggauuaaaccuggcagcgccgacaagccgaaagaucaacuggacuacgagaaugauaucgaaaagaaaauuuguaagauggagaagugcuccucaguguuuaacgucgugaauaguagcaucgggcugauaaugguacucucuuucuuauuucugaacuga

SEQ ID NO: 4107 - RNA, 1329 nt, Artificial Sequence
  derived and/or modified CDS sequence (opt3) from Pf(T9/94)__BAD73956.1__CSP
augaugagaaagcuggccauccucagcguguccucuuuccuuuuugucgaggcucuguuccaggaauaccaaugcuauggcucaaguagcaacaccaggguuuugaaugaguuaaacuacgacaaugcagggacaaaccuguauaaugaacuagagaugaacuacuauggaaaacaggaaaauugguacucccucaagaaaaacucucggucgcugggugagaaugaugacggcgauaacgacaaugggaacaauaacaauggaaacaacaauaacggcgauaauggucgcgaggggaaggacgaagauaaacgagacggaaacaaugaggauaacgaaaaacuucguaagcccaagcacaagaaacugaagcagccuggcgacgauaauccagacccgaacgccaaucccaacguggauccuaaugcgaacccaaauguagaccccaacgcuaauccuaacgccaacccaaaugcaaaccccaaugccaacccuaaugcuaacccaaaugcaaacccgaaugccaaccccaaugcuaacccuaaugccaacccaaaugcgaaccccaacgcaaauccuaacgccaauccaaacgcuaaucccaacgccaauccgaacgcaaauccuaacguggaccccaaugcuaacccaaaugccaacccuaaugcgaaccccaacgccaauccaaacgcaaaucccaacgcuaauccuaacgccaauccaaacgcuaauccgaacgccaaucccaacgcaaauccuaacgccaauccaaacgcuaaucccaacgcgaacccuaaugcaaacccaaaugccaaccccaaugcuaacccgaaugccaacccuaaugcaaacccaaaugccaaccccaaugcuaacccuaaugccaaccccaacgcaaauccaaacgcgaauccuaacgcuaaucccaacgccaauccaaacgcaaauccgaacaaaaauaaccagggcaaugggcaaggacauaacaugccuaaugaucccaacagaaacgucgacgagaaugccaacgcuaauaacgccgugaagaauaacaauaacgaggaaccaucagauaagcacauugagcaguauuugaaaaagauacagaauagccucaguacugaauggucccccuguucuguuacgugcgguaacggcauccaggugaggauuaaaccugggagcgcagacaagccaaaagaucaacuggacuacgagaaugauaucgaaaagaaaauuuguaagauggagaagugcuccucagucuuuaacgugguaaauaguagcaucggacugauaaugguucucucuuucuuauuucugaacuga

SEQ ID NO: 4108 - RNA, 1329 nt, Artificial Sequence
  derived and/or modified CDS sequence (opt3) from Pf(Tq/94)__AAA29551.1__CSP
augaugagaaagcuggccauccucagcguguccucuuuccuuuuugucgaggcucuguuccaggaauaccaaugcuauggcucaaguagcaacaccaggguuuugaaugaguuaaacuacgacaaugcagggauuaaccuguauaaugaacuagagaugaacuacuauggaaaacaggaaaauugguacucccucaagaaaaacucucggucgcugggugagaaugaugacggcgauaacgacaaugggaacaauaacaauggaaacaacaauaacggcgauaauggucgcgaggggaaggacgaagauaaacgagacggaaacaaugaggauaacgaaaaacuucguaagcccaagcacaagaaacugaagcagccuggcgacggcaauccagauccgaacgccaaucccaacguggacccuaaugcgaacccaaauguagaucccaacgcuaauccuaacgccaacccaaaugcaaaccccaaugccaacccuaaugcuaacccaaaugcaaacccgaaugccaaccccaaugcuaacccuaaugccaacccaaaugcgaaccccaacgcaaauccuaacgccaauccaaacgcuaaucccaacgccaauccgaacgcaaauccuaacguggaccccaaugcuaacccaaaugccaacccuaaugcgaaccccaacgccaauccaaacgcaaaucccaacgcuaauccuaacgccaauccaaacgcuaauccgaacgccaaucccaacgcaaauccuaacgccaauccaaacgcuaaucccaacgcgaacccuaaugcaaacccaaaugccaaccccaaugcuaacccgaaugccaacccuaaugcaaacccaaaugccaaccccaaugcuaacccuaaugccaaccccaacgcaaauccaaacgcgaauccuaacgcuaaucccaacgccaauccaaacgcaaauccgaacaaaaauaaccaggggaauggacaaggucauaacaugccuaaugaccccaacagaaacgucgaugagaaugccaacgcuaauaacgccgugaagaauaacaauaacgaggaaccaucagacaagcacauagagcaguauuugaaaaagauccagaauagccucaguacagaauggucccccuguucuguuacuugcggcaacgggauucaggugaggaucaaaccuggaagcgcagauaagccaaaagaccaacuggauuacgagaaugacauugaaaagaaaaucuguaagauggagaagugcuccucagucuuuaacgugguaaauaguagcauaggccugaucaugguucucucuuucuuauuucugaacuga

SEQ ID NO: 4109 - RNA, 1329 nt, Artificial Sequence
  derived and/or modified CDS sequence (opt3) from Pf(Wellcome)__AAA29554.1__CSP
augaugagaaagcuggccauccucagcguguccucuuuccuuuuugucgaggcucuguuccaggaauaccaaugcuauggcucaaguagcaacaccaggguuuugaaugaguuaaacuacgacaaugcagggacaaaccuguauaaugaacuagagaugaacuacuauggaaaacaggaaaauugguacucccucaagaaaaacucucggucgcugggugagaaugaugacggcgauaacgacaaugggaacaauaacaauggaaacaacaauaacggcgauaauggucgcgaggggaaggacgaagauaaacgagacggaaacaaugaggauaacgaaaaacuucguaagcccaagcacaagaaacugaagcagccuggcgacggcaauccagauccgaacgccaaucccaacguggacccuaaugcgaacccaaauguagaucccaacgcuaauccuaacgccaacccaaaugcaaaccccaaugccaacccuaaugcuaacccaaaugcaaacccgaaugccaaccccaaugcuaacccuaaugccaacccaaaugcgaaccccaacgcaaauccuaacgccaauccaaacgcuaaucccaacgccaauccgaacgcaaauccuaacguggaccccaaugcuaacccaaaugccaacccuaaugcgaaccccaacgccaauccaaacgcaaaucccaacgcuaauccuaacgccaauccaaacgcuaauccgaacgccaaucccaacgcaaauccuaacgccaauccaaacgcuaaucccaacgcgaacccuaaugcaaacccaaaugccaaccccaaugcuaacccgaaugccaacccuaaugcaaacccaaaugccaaccccaaugcuaacccuaaugccaaccccaacgcaaauccaaacgcgaauccuaacgcuaaucccaacgccaauccaaacgcaaauccgaacaaaaauaaccaggggaauggacaaggucauaacaugccuaaugaccccaacagaaacgucgaugagaaugccaacgcuaauaacgccgugaagaauaacaauaacgaggaaccaucagacaagcacauugagcaguauuugaaaaagauacagaauagccucaguacugaauggucccccuguucuguuacgugcggcaacgggauccaggugaggauuaaaccuggaagcgcagauaagccaaaagaccaacuggauuacgagaaugacaucgaaaagaaaauuuguaagauggagaagugcuccucagucuuuaacgugguaaauaguagcaucggccugauaaugguucucucuuucuuauuucugaacuga

SEQ ID NO: 4110 - RNA, 1323 nt, Artificial Sequence
  derived and/or modified CDS sequence (opt3) from Pf(Pal97-115)__BAM84958.1__CSP
augaugagaaagcuggccauccucagcguguccucuuuccuuuuugucgaggcucuguuccaggaauaccaaugcuauggcucaaguagcaacaccaggguuuugaaugaguuaaacuacgacaaugcagggacaaaccuguauaaugaacuagagaugaacuacuauggaaaacaggaaaauugguacucccucaagaaaaacucucggucgcugggugagaaugaugacggcaacaauaacaauggggauaacggacgcgagggcaaggacgaagauaaacgagacgguaauaacgaggauaacgaaaaacuucguaagcccaagcacaagaaacugaagcagccuggggacggaaauccagauccgaacgccaaucccaacguggacccuaaugcgaacccaaauguagaucccaacgcuaauccuaacguggacccaaaugccaaccccaaugcaaacccuaaugccaacccaaacgcuaauccgaacgcaaaucccaacgccaauccuaacgcuaauccaaacgccaaucccaacgcgaauccuaacgcaaauccaaacgccaaucccaacgcuaacccgaaugccaacccuaaugcaaaccccaaugcuaacccaaaugccaacccuaaugcgaaccccaaugccaacccaaaugcaaaccccaaugcuaacccuaacgccaauccaaacgcuaauccgaacgucgaucccaaugccaacccuaaugcaaacccaaaugccaaccccaaugcuaacccuaaugcgaacccaaaugcaaaccccaaugccaacccgaacgcuaauccuaacgccaauccaaacgcaaaucccaacgccaauccuaacgcuaaucccaacgccaauccaaacgcaaauccuaacgcgaaucccaacgcuaacccaaaugccaacccgaaugcaaacccuaaugccaaccccaauaaaaacaaucagggcaacggccaagggcauaauaugccaaacgaccccaauagaaacguggacgagaaugcuaacgccaacaaugcaguuaagaacaauaacaaugaggaaccuucagaucagcacauugagaaguauuugaaaauaauccagaacagccucaguacugaaugguccccauguucugugacgugcggaaaugguauucaggucaggaucaagcccggcagcgcugacaaaccuaaggaucaacuggacuacgccaacgauauugagaaaaagaucuguaaaauggaaaagugcuccucaguguuuaauguaguuaacaguagcauagggcugaucauggugcucucuuucuuauuucugaauuga

SEQ ID NO: 4111 - RNA, 1323 nt, Artificial Sequence
  derived and/or modified CDS sequence (opt3) from Pf(PMS5)__BAN59428.1__CSP
augaugagaaagcuggccauccucagcguguccucuuuccuuuuugucgaggcucuguuccaggaauaccaaugcuauggcucaaguagcaacaccaggguuuugaaugaguuaaacuacgacaaugcagggacaaaccuguauaaugaacuagagaugaacuacuauggaaaacaggaaaauugguacucccucaagaaaaacucucggucgcugggugagaaugaugacggcaacaauaacaauggggauaacggacgcgagggcaaggacgaagauaaacgagacgguaauaacgaggauaacgaaaaacuucguaagcccaagcacaagaaacugaagcagccuggggacggaaauccagauccgaacgccaaucccaacguggacccuaaugcgaacccaaauguagaucccaacgcuaauccuaacguggacccaaaugccaaccccaaugcaaacccuaaugccaacccaaacgcuaauccgaacgcaaaucccaacgccaauccuaacgcuaauccaaacgccaaucccaacgcgaauccuaacgcaaauccaaacgccaaucccaacgcuaacccgaaugccaacccuaaugcaaaccccaaugcuaacccaaaugccaacccuaaugcgaaccccaaugccaacccaaaugcaaaccccaaugcuaacccuaacgccaauccaaacgcuaauccgaacgccaaucccaacgcaaauccuaacgccaauccaaacgcuaaucccaacgcgaauccuaacgcaaauccaaacgccaaucccaacgcuaacccgaaugccaacccuaaugcaaacccaaaugccaaccccaaugcuaacccuaaugccaaccccaaugcaaacccaaaugcgaacccuaaugcuaaccccaacgccaauccaaacgcaaauccgaacgccaauccuaacgcuaaucccaacaaaaauaaccagggcaauggccaagggcauaacaugccaaaugaucccaacagaaaugucgacgagaacgccaacgcaaauaacgacgugaagaauaacaauaacgaggaaccuucagauaagcacauugagcaguauuugaaaaagauacaguacagccucaguacugaaugguccccauguucuguuacgugcggaaaugguauccaggugaggauuaaacccggcagcgcugacaagccuaaagaucaacuggacuacgagaacgauaucgaaaagaaaauuuguaagauggagaagugcuccucagucuuuaaugugguaaacaguagcaucgggcugauaaugguucucucuuucuuauuucugaauuga

SEQ ID NO: 4112 - RNA, 1320 nt, Artificial Sequence
  derived and/or modified CDS sequence (opt3) from Pf(J2)__ACO49408.1__CSP
augagaaagcuggccauccucagcguguccucuuuccuuuuugucgaggcucuguuccaggaauaccaaugcuauggcucaaguagcaacaccaggguuuugaaugaguuaaacuacgacaaugcagggacaaaccuguauaaugaacuagagaugaacuacuauggaaaacaggaaaauugguacucccucaagaaaaacucucggucgcugggugagaaugaugacggcaacaauaacaauggggauaacggacgcgagggcaaggacgaagauaaacgagacgguaauaacgaggauaacgaaaaacuucguaagcccaagcacaagaaacugaagcagccuggggacggaaauccagauccgaacgccaaucccaacguggacccuaaugcgaacccaaauguagaucccaacgcuaauccuaacguggacccaaaugccaaccccaaugcaaacccuaaugccaacccaaacgcuaauccgaacgcaaaucccaacgccaauccuaacgcuaauccaaacgccaaucccaacgcgaauccuaacgcaaauccaaacgccaaucccaacgcuaacccgaaugccaacccuaaugcaaaccccaaugcuaacccaaaugccaacccuaaugucgaucccaacgcgaauccaaacgccaaucccaacgcaaauccuaacgcuaacccaaaugccaacccgaaugcuaaccccaaugccaacccuaaugcaaacccaaaugccaaccccaaugcuaacccuaaugcgaacccaaaugcaaaccccaaugccaacccgaacgcuaauccuaacgccaauccaaacgcaaaucccaacgccaauccuaacgcuaaucccaacgccaauccaaacgcaaauccuaacgcgaaucccaacgcuaacccaaaugccaacccgaaugcaaacccuaaugccaaccccaauaaaaacaaucagggcaacggccaagggcauaauaugccaaacgaccccaauagaaacguggacgagaaugcuaacgccaacaaugauguuaagaacaauaacaaugaggaaccuucagacaagcacauugagcaguauuugaaaaagauacaguacagccucaguacugaaugguccccauguucugugacgugcggaaacgguauccaggucaggauuaaacccggcagcgcagauaagccuaaagaccaacuggauuacgagaaugacaucgaaaagaaaauuuguaagauggagaagugcuccucaguguuuaacguaguuaauaguagcaucgggcugauaauggugcucucuuucuuauuucugaacuga

SEQ ID NO: 4113 - RNA, 1320 nt, Artificial Sequence
  derived and/or modified CDS sequence (opt3) from Pf(M4)__ACO49420.1__CSP
augagaaagcuggccauccucagcguguccucuuuccuuuuugucgaggcucuguuccaggaauaccaaugcuauggcucaaguagcaacaccaggguuuugaaugaguuaaacuacgacaaugcagggacaaaccuguauaaugaacuagagaugaacuacuauggaaaacaggaaaauugguacucccucaagaaaaacucucggucgcugggugagaaugaugacggcaacaauaacaauggggauaacggacgcgagggcaaggacgaagauaaacgagacgguaauaacgaggauaacgaaaaacuucguaagcccaagcacaagaaacugaagcagccuggggacggaaauccagauccgaacgccaaucccaacguggacccuaaugcgaacccaaauguagaucccaacgcuaauccuaacgccaauccaaacgcaaaucccaacgccaauccuaacgcuaacccaaaugcaaacccgaaugccaaccccaaugcuaacccuaaugccaacccaaaugcgaaccccaaugcaaacccuaaugccaacccaaaugcuaaccccaacgccaauccgaacgcaaauccuaacgcuaaucccaacguggacccaaaugccaacccuaaugcgaaccccaaugccaacccaaaugcaaaccccaaugcuaacccuaacgccaauccaaacgcuaauccgaacgccaaucccaacgcaaauccuaacgccaauccaaacgcuaaucccaacgcgaauccuaacgcaaauccaaacgccaaucccaacgcuaacccgaaugccaacccuaaugcaaacccaaaugccaaccccaaugcuaacccuaaugccaaccccaaugcaaacccaaaugcgaacccuaaugcuaaccccaacgccaauccaaacgcaaauccgaacgccaauccuaacgcuaaucccaacaaaaauaaccagggcaauggccaagggcauaacaugccaaaugaucccaacagaaaugucgacgagaacgccaacgcaaauaacgcugugaagaauaacaauaacgaggaaccuucagacaagcacauuacugaguauuugaaaaagauacagaauagccucaguacggaaugguccccauguucuguuaccugcggaaacgguauccaggugaggauuaaacccggcagcgccgggaaguccaaagaugagcuggacuacgaaaaugauaucgagaagaaaauuuguaagauggagaagugcucaagugucuuuaacgugguaaauagcucuaucggacugauaaugguucucuccuucuuauuucugaacuga

SEQ ID NO: 4114 - RNA, 1320 nt, Artificial Sequence
  derived and/or modified CDS sequence (opt3) from Pf(TMS121)__ACO49498.1__CSP
augagaaagcuggccauccucagcguguccucuuuccuuuuugucgaggcucuguuccaggaauaccaaugcuauggcucaaguagcaacaccaggguuuugaaugaguuaaacuacgacaaugcagggacaaaccuguauaaugaacuagagaugaacuacuauggaaaacaggaaaauugguacucccucaagaaaaacucucggucgcugggugagaaugaugacggcaacaauaacaauggggauaacggacgcgagggcaaggacgaagauaaacgagacgguaauaacgaggauaacgaaaaacuucguaagcccaagcacaagaaacugaagcagccuggggacggaaauccagauccgaacgccaaucccaacguggacccuaaugcgaacccaaauguagaucccaacgcuaauccuaacguggacccaaaugccaaccccaaugcaaacccuaaugccaacccaaacgcuaauccgaacgcaaaucccaacgccaauccuaacgcuaauccaaacgccaaucccaacgcgaauccuaacgcaaauccaaacgccaaucccaacgcuaacccgaaugccaacccuaaugcaaaccccaaugcuaacccaaaugccaacccuaaugcgaaccccaaugccaacccaaaugcaaaccccaaugcuaacccuaacgccaauccaaacgcuaauccgaacgccaaucccaacgcaaauccuaacgccaauccaaacgcuaaucccaacgcgaauccuaacgcaaauccaaacgccaaucccaacgcuaacccgaaugccaacccuaaugcaaacccaaaugccaaccccaaugcuaacccuaaugccaaccccaaugcaaacccaaaugcgaacccuaaugcuaaccccaacgccaauccaaacgcaaauccgaacgccaauccuaacgcuaaucccaacaaaaauaaccagggcaauggccaagggcauaacaugccaaaugaucccaacagaaaugucgacgagaacgccaacgcaaauaacgacgugaagaauaacaauaacgaggaaccuucagauaagcacauugagcaguauuugaaaaagauacagaauagccucaguacugaaugguccccauguucuguuacgugcggaaacgguauccaggugaggauuaaacccggcagcgcuaauaagccuaaagacgagcuggauuacgaaaacgacaucgagaagaaaauuuguaagauggagaagugcuccucagucuuuaaugugguaaacaguagcaucgggcugauaaugguucucucuuucuuauuucugaauuga

SEQ ID NO: 4115 - RNA, 1320 nt, Artificial Sequence
  derived and/or modified CDS sequence (opt3) from Pf(TMS180)__ACO49505.1__CSP
augagaaagcuggccauccucagcguguccucuuuccuuuuugucgaggcucuguuccaggaauaccaaugcuauggcucaaguagcaacaccaggguuuugaaugaguuaaacuacgacaaugcagggacaaaccuguauaaugaacuagagaugaacuacuauggaaaacaggaaaauugguacucccucaagaaaaacucucggucgcugggugagaaugaugacggcaacaauaacaauggggauaacggacgcgagggcaaggacgaagauaaacgagacgguaauaacgaggauaacgaaaaacuucguaagcccaagcacaagaaacugaagcagccuggggacggaaauccagauccgaacgccaaucccaacguggacccuaaugcgaacccaaauguagaucccaacgcuaauccuaacguggacccaaaugccaaccccaaugcaaacccuaaugccaacccaaacgcuaauccgaacgcaaaucccaacgccaauccuaacgcuaauccaaacgccaaucccaacgcgaauccuaacgcaaauccaaacgccaaucccaacgcuaacccgaaugccaacccuaaugcaaaccccaaugcuaacccaaaugccaacccuaaugcgaaccccaaugccaacccaaaugcaaaccccaaugcuaacccuaacgccaauccaaacgcuaauccgaacgccaaucccaacgcaaauccuaacgccaauccaaacgcuaaucccaacgcgaauccuaacgcaaauccaaacgccaaucccaacgcuaacccgaaugccaacccuaaugcaaacccaaaugccaaccccaaugcuaacccuaaugccaaccccaaugcaaacccaaaugcgaacccuaaugcuaaccccaacgccaauccaaacgcaaauccgaacgccaauccuaacgcuaaucccaacaaaaauaaccagggcaauggccaagggcauaacaugccaaaugaucccaacagaaaugucgacgagaacgccaacgcaaauaacgacgugaagaauaacaauaacgaggaaccuucagauaagcacauugagcaguauuugaaaaagauacaguacagccucaguacugaaugguccccauguucuguuacgugcggaaaugguauccaggugaggauuaaacccggcagcgcugacaagccuaaagaucaacuggacuacgagaacgauaucgaaaagaaaauuuguaagauggagaagugcuccucagucuuuaaugugguaaacaguagcaucgggcugauaaugguucucucuuucuuauuucugaauuga

SEQ ID NO: 4116 - RNA, 1311 nt, Artificial Sequence
  derived and/or modified CDS sequence (opt3) from Pf(836)__AAA29576.1__CSP
augaugagaaagcuggccauccucagcguguccucuuuccuuuuugucgaggcucuguuccaggaauaccaaugcuauggcucaaguagcaacaccaggguuuugaaugaguuaaacuacgacaaugcagggauuaaccuguauaaugaacuagagaugaacuacuauggaaaacaggaaaauugguacucccucaagaaaaacucucggucgcugggugagaaugaugacggcaacaauaacaauggggauaacggacgcgagggcaaggacgaagauaaacgagacgguaauaacgaggauaacgaaaaacuucguaagcccaagcacaagaaacugaagcagccuggggacggaaauccagauccgaacgccaaucccaacguggacccuaaugcgaacccaaauguagaucccaacgcuaauccuaacgccaauccaaacgcaaaucccaacgccaauccuaacgcuaacccaaaugcaaacccgaaugccaaccccaaugcuaacccuaaugccaacccaaaugcgaaccccaaugcaaacccuaaugccaacccaaaugcuaaccccaacgccaauccgaacgcaaauccuaacguggaccccaaugcuaacccaaaugccaacccuaaugcgaaccccaaugccaacccaaaugcaaaccccaaugcuaacccuaacgccaauccaaacgcuaauccgaacgccaaucccaacgcaaauccuaacgccaauccaaacgcuaaucccaacgcgaauccuaacgcaaauccaaacgccaaucccaacgcuaacccgaaugccaacccuaaugcaaacccaaaugccaaccccaaugcuaacccuaaugccaaccccaaugcaaacccaaaugcgaacccuaaugcuaaccccaacgccaauccaaacgcaaauccgaacgccaauccuaacaaaaauaaccagggcaauggccaagggcauaacaugcccaaugauccaaacagaaaugucgacgagaacgcuaaugccaacaacgcagugaagaauaacaauaacgaggaacccucagacaagcacauaacagaguauuugaaaaagauccagaauagccucaguacugaaugguccccuuguucuguuacgugcggaaacgguauucaggugaggaucaaaccaggcagcgcugggaaguccaaagaugagcuggacuacgaaaaugauauugagaagaaaaucuguaagauggagaagugcucaagugucuuuaacgugguaaauagcucuauaggacugaucaugguucucuccuucuuauuucugaacuga

SEQ ID NO: 4117 - RNA, 1311 nt, Artificial Sequence
  derived and/or modified CDS sequence (opt3) from Pf(842)__AAA29545.1__CSP
augaugagaaagcuggccauccucagcguguccucuuuccuuuuugucgaggcucuguuccaggaauaccaaugcuauggcucaaguagcaacaccaggguuuugaaugaguuaaacuacgacaaugcagggauuaaccuguauaaugaacuagagaugaacuacuauggaaaacaggaaaauugguacucccucaagaaaaacucucggucgcugggugagaaugaugacggcaacaauaacaauggggauaacggacgcgagggcaaggacgaagauaaacgagacgguaauaacgaggauaacgaaaaacuucguaagcccaagcacaagaaacugaagcagccuggggacggaaauccagauccgaacgccaaucccaacguggacccuaaugcgaacccaaauguagaucccaacgcuaauccuaacguggacccaaaugccaaccccaaugcaaacccuaaugccaacccaaacgcuaauccgaacgcaaaucccaacgccaauccuaacgcuaauccaaacgccaaucccaacgcgaauccuaacgcaaauccaaacgccaaucccaacgcuaacccgaaugccaacccuaaugcaaaccccaaugcuaacccaaaugccaacccuaaugcgaaccccaaugccaacccaaaugcaaaccccaaugcuaacccuaacgccaauccaaacgcuaauccgaacgccaaucccaacgcaaauccuaacgccaauccaaacgcuaaucccaacgcgaauccuaacgcaaauccaaacgccaaucccaacgcuaacccgaaugccaacccuaaugcaaacccaaaugccaaccccaaugcuaacccuaaugccaaccccaaugcaaacccaaaugcgaacccuaaugcuaaccccaacgccaauccaaacgcaaauccgaacgccaauccuaacaaaaauaaccagggcaauggccaagggcauaacaugcccaaugauccaaacagaaaugucgacgagaacgcuaaugccaacaacgacgugaagaauaacaauaacgaggaacccucagauaagcacauagagcaguauuugaaaaagauccaguacagccucaguacagaaugguccccuuguucuguuacuugcggaaaugguauucaggugaggaucaaaccaggcagcgcagacaagcccaaagaucaacuggacuacgagaacgauauugaaaagaaaaucuguaagauggagaagugcuccucagucuuuaaugugguaaacaguagcauagggcugaucaugguucucucuuucuuauuucugaauuga

SEQ ID NO: 4118 - RNA, 1311 nt, Artificial Sequence
  derived and/or modified CDS sequence (opt3) from Pf(India)__AAN87576.1__CSP
augaugagaaagcuggccauccucagcguguccucuuuccuuuuugucgaggcucuguuccaggaauaccaaugcuauggcucaaguagcaacaccaggguuuugaaugaguuaaacuacgacaaugcagggacaaaccuguauaaugaacuagagaugaacuacuauggaaaacaggaaaauugguacucccucaagaaaaacucucggucgcugggugagaaugaugacggcaacaauaacaauggggauaacggacgcgagggcaaggacgaagauaaacgagacgguaauaacgaggauaacgaaaaacuucguaagcccaagcacaagaaacugaagcagccuggggacggaaauccagauccgaacgccaaucccaacguggacccuaaugcgaacccaaauguagaucccaacgcuaauccuaacgccaauccaaacgcaaaucccaacgccaauccuaacgcuaacccaaaugcaaacccgaaugccaaccccaaugcuaacccuaaugccaacccaaaugcgaaccccaaugcaaacccuaaugccaacccaaaugcuaaccccaacgccaauccgaacgcaaauccuaacgcuaaucccaacgccaauccaaacgcgaauccuaacgccaaucccaacgcaaauccaaacgcuaaucccaacgccaacccuaaugcuaacccaaaugccaacccgaaugcaaaccccaaugccaacccuaaugcuaacccaaaugcgaaccccaaugcaaacccuaaugccaacccaaaugcuaaccccaacgccaauccgaacgcaaauccuaacgccaauccaaacgcuaaucccaacgccaauccuaacgcaaaucccaacgcgaauccaaacgcuaauccuaacgccaaccccaaugcaaacccaaaugccaacccgaaugcuaacccuaauaaaaacaaucagggcaacggccaagggcauaauaugcccaacgacccaaauagaaacguggaugagaaugccaacgcaaacaaugacgucaagaacaauaacaaugaggaacccucagacaagcacauugaggaauauuugaaaaagauacagaacagccucaguacugagugguccccuuguucugugacgugcggaaaugguauccagguuaggauuaaaccaggcagcgcuaacaagcccaaagaugaacugaauuacgagaacgacaucgagaagaaaauuuguaagauggaaaagugcuccucaguguuuaaugucgugaacaguagcaucgggcugauaaugguacucucuuucuuauuucugaauuga

SEQ ID NO: 4119 - RNA, 1311 nt, Artificial Sequence
  derived and/or modified CDS sequence (opt3) from Pf(India)__AAN87620.1__CSP
augaugagaaagcuggccauccucagcguguccucuuuccuuuuugucgaggcucuguuccaggaauaccaaugcuauggcucaaguagcaacaccaggguuuugaaugaguuaaacuacgacaaugcagggacaaaccuguauaaugaacuagagaugaacuacuauggaaaacaggaaaauugguacucccucaagaaaaacucucggucgcugggugagaaugaugacggcaacaauaacaauggggauaacggacgcgagggcaaggacgaagauaaacgagacgguaauaacgaggauaacgaaaaacuucguaagcccaagcacaagaaacugaagcagccugggggagacaauccagauccgaacgccaaucccaacguggacccuaaugcgaacccaaaugcuaaccccaaugccaacccuaaugcaaacccaaauguaaaccccaaugccaacccuaacgcuaauccaaacgcaaauccgaacgccaaucccaacgcuaauccuaacgccaauccaaacgcgaaucccaacgcaaauccuaacguggauccaaaugccaaccccaacgcuaauccgaacgccaauccuaacgcaaaucccaacgcuaauccaaacgccaauccuaacgcgaaucccaacgccaauccaaacgcaaaucccaacgcuaacccuaaugccaacccaaaugcuaacccgaaugccaaccccaaugcaaacccuaaugccaacccaaaugcuaaccccaaugcgaacccuaaugcaaacccaaaugccaaccccaacgcuaauccgaacgccaauccuaacgcaaauccaaacgccaaucccaacgcuaauccuaacgccaaucccaacgcaaauccaaacgcgaauccuaacgcuaaccccaaugccaacccaaaugcaaacccgaaugccaacccuaauaaaaacaaucagggcaacggccaagggcauaauaugcccaacgacccaaauagaaacgucgaugagaaugcuaacgccaacaaugcagugaagaacaauaacaaugaggaacccucagacaagcacauugagcaguauuugaaaaagauacagaacagccucaguacugaaugguccccuuguucuguuacgugcggaaaugguauccaggugaggauuaaaccaggcagcgcuaacaagcccaaagacgagcuggauuacgaaaaugacaucgagaagaaaauuuguaagauggagaagugcuccucagucuuuaacgugguaaauaguagcaucgggcugauaaugguucucucuuucuuauuucugaacuga

SEQ ID NO: 4120 - RNA, 1311 nt, Artificial Sequence
  derived and/or modified CDS sequence (opt3) from Pf(PFS19)__BAN59401.1__CSP
augaugagaaagcuggccauccucagcguguccucuuuccuuuuugucgaggcucuguuccaggaauaccaaugcuauggcucaaguagcaacaccaggguuuugaaugaguuaaacuacgacaaugcagggacaaaccuguauaaugaacuagagaugaacuacuauggaaaacaggaaaauugguacucccucaagaaaaacucucggucgcugggugagaaugaugacggcaacaauaacaauggggauaacggacgcgagggcaaggacgaagauaaacgagacgguaauaacgaggauaacgaaaaacuucguaagcccaagcacaagaaacugaagcagccuggggacggaaauccagauccgaacgccaaucccaacguggacccuaaugcgaacccaaauguagaucccaacgcuaauccuaacguggacccaaaugccaaccccaaugcaaacccuaaugccaacccaaacgcuaauccgaacgcaaaucccaacgccaauccuaacgcuaauccaaacgccaaucccaacgcgaauccuaacgcaaauccaaacgccaaucccaacgcuaacccgaaugccaacccuaaugcaaaccccaaugcuaacccaaaugccaacccuaaugcgaaccccaaugccaacccaaaugcaaaccccaaugcuaacccuaacgccaauccaaacgcuaauccgaacgccaaucccaacgcaaauccuaacgccaauccaaacgcuaaucccaacgcgaauccuaacgcaaauccaaacgccaaucccaacgcuaacccgaaugccaacccuaaugcaaacccaaaugccaaccccaaugcuaacccuaaugccaaccccaaugcaaacccaaaugcgaacccuaaugcuaaccccaacgccaauccaaacgcaaauccgaacgccaauccuaacaaaaauaaccagggcaauggccaagggcauaacaugcccaaugauccaaacagaaaugucgacgagaacgcuaaugccaacaacgcagugaagaauaacaauaacgaggaacccucagacaagcacauugagcaguauuugaaaaagauacagaauagccucaguacugaaugguccccuuguucuguuacgugcggaaacgguauccaggugaggauuaaaccaggcagcgcuaauaagcccaaagaugagcuggacuacgaaaacgauaucgagaagaaaauuuguaagauggagaagugcuccucagucuuuaaugugguaaacaguagcaucgggcugauaaugguucucucuuucuuauuucugaauuga

SEQ ID NO: 4121 - RNA, 1311 nt, Artificial Sequence
  derived and/or modified CDS sequence (opt3) from Pf(Sol95-121)__BAM85068.1__CSP
augaugagaaagcuggccauccucagcguguccucuuuccuuuuugucgaggcucuguuccaggaauaccaaugcuauggcucaaguagcaacaccaggguuuugaaugaguuaaacuacgacaaugcagggacaaaccuguauaaugaacuagagaugaacuacuauggaaaacaggaaaauugguacucccucaagaaaaacucucggucgcugggugagaaugaugacggcaacaauaacaauggggauaacggacgcgagggcaaggacgaagauaaacgagacgguaauaacgaggauaacgaaaaacuucguaagcccaaacacaagaaacugaagcagccuguggacgggaauccagauccgaacgccaaucccaacguagacccuaaugcgaacccaaauguggaucccaacgcuaauccuaacgucgacccaaaugccaaccccaaugcaaacccuaaugccaacccaaacgcuaauccgaacgcaaaucccaacgccaauccuaacgcuaauccaaacgccaaucccaacgcgaauccuaacgcaaauccaaacgccaaucccaacgcuaacccgaaugccaacccuaaugcaaaccccaaugcuaacccaaaugccaacccuaaugcgaaccccaaugccaacccaaaugcaaaccccaaugcuaacccuaacgccaauccaaacgcuaauccgaacgccaaucccaacgcaaauccuaacgccaauccaaacgcuaaucccaacgcgaauccuaacgcaaauccaaacgccaaucccaacgcuaacccgaaugccaacccuaaugcaaacccaaaugccaaccccaaugcuaacccuaaugccaaccccaaugcaaacccaaaugcgaacccuaaugcuaaccccaacgccaauccaaacgcaaaaccgaaugccaacccuaauaagaacaaucagggaaacggccaaggccauaauaugcccaacgauccaaauagaaacguggacgagaaugcuaacgccaauaacgcaguuaagaacaauaacaaugaggaacccucagacaaacacauugagcaguauuugaagaaaauacagaacagccucaguacugaaugguccccuuguucugugacgugcgggaauggaauccaggucaggauuaagccagguagcgcugauaaacccaaggaccaacuggauuacgagaacgacaucgaaaagaagauuuguaagauggagaaaugcuccucaguguuuaauguaguuaacaguagcaucggccugauaauggugcucucuuucuuauuucugaauuga

SEQ ID NO: 4122 - RNA, 1311 nt, Artificial Sequence
  derived and/or modified CDS sequence (opt3) from Pf(T837)__BAM84914.1__CSP
augaugagaaagcuggccauccucagcguguccucuuuccuuuuugucgaggcucuguuccaggaauaccaaugcuauggcucaaguagcaacaccaggguuuugaaugaguuaaacuacgacaaugcagggacaaaccuguauaaugaacuagagaugaacuacuauggaaaacaggaaaauugguacucccucaagaaaaacucucggucgcugggugagaaugaugacggcaacaauaacaauggggauaacggacgcgagggcaaggacgaagauaaacgagacgguaauaacgaggauaacgaaaaacuucguaagcccaagcacaagaaacugaagcagccuggggacggaaauccagauccgaacgccaaucccaacguggacccuaaugcgaacccaaauguagaucccaacgcuaauccuaacgccaauccaaacgcaaaucccaacgccaauccuaacgcuaacccaaaugcaaacccgaaugccaaccccaaugcuaacccuaaugccaacccaaaugcgaaccccaaugcaaacccuaaugccaacccaaaugcuaaccccaacgccaauccgaacgcaaauccuaacguggaccccaaugcuaacccaaaugccaacccuaaugcgaaccccaaugccaacccaaaugcaaaccccaaugcuaacccuaacgccaauccaaacgcuaauccgaacgccaaucccaacgcaaauccuaacgccaauccaaacgcuaaucccaacgcgaauccuaacgcaaauccaaacgccaaucccaacgcuaacccgaaugccaacccuaaugcaaacccaaaugccaaccccaaugcuaacccuaaugccaaccccaaugcaaacccaaaugcgaacccuaaugcuaaccccaacgccaauccaaacgcaaauccgaacgccaauccuaacaaaaauaaccagggcaauggccaagggcauaacaugcccaaugauccaaacagaaaugucgacgagaacgcuaaugccaacaacgcagugaagaauaacaauaacgaggaacccucagacaagcacauuacugaguauuugaaaaagauacagaauagccucaguacggaaugguccccuuguucuguuaccugcggaaacgguauccaggugaggauuaaaccaggcagcgcugggaaguccaaagaugagcuggacuacgaaaaugauaucgagaagaaaauuuguaagauggagaagugcucaagugucuuuaacgugguaaauagcucuaucggacugauaaugguucucuccuucuuauuucugaacuga

SEQ ID NO: 4123 - RNA, 1311 nt, Artificial Sequence
  derived and/or modified CDS sequence (opt3) from Pf(TiMS95-071)__BAM84865.1__CSP
augaugagaaagcuggccauccucagcguguccucuuuccuuuuugucgaggcucuguuccaggaauaccaaugcuauggcucaaguagcaacaccaggguuuugaaugaguuaaacuacgacaaugcagggacaaaccuguauaaugaacuagagaugaacuacuauggaaaacaggaaaauugguacucccucaagaaaaacucucggucgcugggugagaaugaugacggcaacaauaacaauggggauaacggacgcgagggcaaggacgaagauaaacgagacgguaauaacgaggauaacgaaaaacuucguaagcccaagcacaagaaacugaagcagccuggggacggaaauccagauccgaacgccaaucccaacguggacccuaaugcgaacccaaauguagaucccaacgcuaauccuaacguggacccaaaugccaaccccaaugcaaacccuaaugccaacccaaacgcuaauccgaacgcaaaucccaacgccaauccuaacgcuaauccaaacgccaaucccaacgcgaauccuaacgcaaauccaaacgccaaucccaacgcuaacccgaaugccaacccuaaugcaaaccccaaugcuaacccaaaugccaacccuaaugcgaaccccaaugccaacccaaaugcaaaccccaaugcuaacccuaacgccaauccaaacgcuaauccgaacgccaaucccaacgcaaauccuaacgccaauccaaacgcuaaucccaacgcgaauccuaacgcaaauccaaacgccaaucccaacgcuaacccgaaugccaacccuaaugcaaacccaaaugccaaccccaaugcuaacccuaaugccaaccccaaugcaaacccaaaugcgaacccuaaugcuaaccccaacgccaauccaaacgcaaauccgaacgccaauccuaacaaaaauaaccagggcaauggccaagggcauaacaugcccaaugauccaaacagaaaugucgacgagaacgcuaaugccaacaacgacgugaagaauaacaauaacgaggaacccucagauaagcacauugagcaguauuugaaaaagauacaguacagccucaguacugaaugguccccuuguucuguuacgugcggaaaugguauccaggugaggauuaaaccaggcagcgcagacaagcccaaagaucaacuggacuacgagaacgauaucgaaaagaaaauuuguaagauggagaagugcuccucagucuuuaaugugguaaacaguagcaucgggcugauaaugguucucucuuucuuauuucugaauuga

SEQ ID NO: 4124 - RNA, 1308 nt, Artificial Sequence
  derived and/or modified CDS sequence (opt3) from Pf(TM69)__ACO49446.1__CSP
augagaaagcuggccauccucagcguguccucuuuccuuuuugucgaggcucuguuccaggaauaccaaugcuauggcucaaguagcaacaccaggguuuugaaugaguuaaacuacgacaaugcagggacaaaccuguauaaugaacuagagaugaacuacuauggaaaacaggaaaauugguacucccucaagaaaaacucucggucgcugggugagaaugaugacggcaacaauaacaauggggauaacggacgcgagggcaaggacgaagauaaacgagacgguaauaacgaggauaacgaaaaacuucguaagcccaagcacaagaaacugaagcagccuggggacggaaauccagauccgaacgccaaucccaacguggacccuaaugcgaacccaaauguagaucccaacgcuaauccuaacguggacccaaaugccaaccccaaugcaaacccuaaugccaacccaaacgcuaauccgaacgcaaaucccaacgccaauccuaacgcuaauccaaacgccaaucccaacgcgaauccuaacgcaaauccaaacgccaaucccaacgcuaacccgaaugccaacccuaaugcaaaccccaaugcuaacccaaaugccaacccuaaugcgaaccccaaugccaacccaaaugcaaaccccaaugcuaacccuaacgccaauccaaacgcuaauccgaacgccaaucccaacgcaaauccuaacgccaauccaaacgcuaaucccaacgcgaauccuaacgcaaauccaaacgccaaucccaacgcuaacccgaaugccaacccuaaugcaaacccaaaugccaaccccaaugcuaacccuaaugccaaccccaaugcaaacccaaaugcgaacccuaaugcuaaccccaacgccaauccaaacgcaaauccgaacgccaauccuaacaaaaauaaccagggcaauggccaagggcauaacaugcccaaugauccaaacagaaaugucgacgagaacgcuaaugccaacaacgacgugaagaauaacaauaacgaggaacccucagauaagcacauugagcaguauuugaaaaagauacaguacagccucaguacugaaugguccccuuguucuguuacgugcggaaaugguauccaggugaggauuaaaccaggcagcgcagacaagcccaaagaucaacuggacuacgagaacgauaucgaaaagaaaauuuguaagauggagaagugcuccucagucuuuaaugugguaaacaguagcaucgggcugauaaugguucucucuuucuuauuucugaauuga

SEQ ID NO: 4125 - RNA, 1308 nt, Artificial Sequence
  derived and/or modified CDS sequence (opt3) from Pf(TMS177)__ACO49503.1__CSP
augagaaagcuggccauccucagcguguccucuuuccuuuuugucgaggcucuguuccaggaauaccaaugcuauggcucaaguagcaacaccaggguuuugaaugaguuaaacuacgacaaugcagggacaaaccuguauaaugaacuagagaugaacuacuauggaaaacaggaaaauugguacucccucaagaaaaacucucggucgcugggugagaaugaugacggcaacaauaacaauggggauaacggacgcgagggcaaggacgaagauaaacgagacgguaauaacgaggauaacgaaaaacuucguaagcccaagcacaagaaacugaagcagccuggggacggaaauccagauccgaacgccaaucccaacguggacccuaaugcgaacccaaauguagaucccaacgcuaauccuaacguggacccaaaugccaaccccaaugcaaacccuaaugccaacccaaacgcuaauccgaacgcaaaucccaacgccaauccuaacgcuaauccaaacgccaaucccaacgcgaauccuaacgcaaauccaaacgccaaucccaacgcuaacccgaaugccaacccuaaugcaaaccccaaugcuaacccaaaugccaacccuaaugcgaaccccaaugccaacccaaaugcaaaccccaaugcuaacccuaacgccaauccaaacgcuaauccgaacgccaaucccaacgcaaauccuaacgccaauccaaacgcuaaucccaacgcgaauccuaacgcaaauccaaacgccaaucccaacgcuaacccgaaugccaacccuaaugcaaacccaaaugccaaccccaaugcuaacccuaaugccaaccccaaugcaaacccaaaugcgaacccuaaugcuaaccccaacgccaauccaaacgcaaauccgaacgccaauccuaacaaaaauaaccagggcaauggccaagggcauaacaugcccaaugauccaaacagaaaugucgacgagaacgcuaaugccaacaacgcagugaagaauaacaauaacgaggaacccucagacaagcacauugagcaguauuugaaaaagauacagaauagccucaguacugaaugguccccuuguucuguuacgugcggaaacgguauccaggugaggauuaaaccaggcagcgcuaauaagcccaaagaugagcuggacuacgaaaacgauaucgagaagaaaauuuguaagauggagaagugcuccucagucuuuaaugugguaaacaguagcaucgggcugauaaugguucucucuuucuuauuucugaauuga

SEQ ID NO: 4126 - RNA, 1308 nt, Artificial Sequence
  derived and/or modified CDS sequence (opt3) from Pf(TMS178)__ACO49504.1__CSP
augagaaagcuggccauccucagcguguccucuuuccuuuuugucgaggcucuguuccaggaauaccaaugcuauggcucaaguagcaacaccaggguuuugaaugaguuaaacuacgacaaugcagggacaaaccuguauaaugaacuagagaugaacuacuauggaaaacaggaaaauugguacucccucaagaaaaacucucggucgcugggugagaaugaugacggcaacaauaacaauggggauaacggacgcgagggcaaggacgaagauaaacgagacgguaauaacgaggauaacgaaaaacuucguaagcccaagcacaagaaacugaagcagccuggggacggaaauccagauccgaacgccaaucccaacguggacccuaaugcgaacccaaauguagaucccaacgcuaauccuaacgccaauccaaacgcaaaucccaacgccaauccuaacgcuaacccaaaugcaaacccgaaugccaaccccaaugcuaacccuaaugccaacccaaaugcgaaccccaaugcaaacccuaaugccaacccaaaugcuaaccccaacgccaauccgaacgcaaauccuaacguggaccccaaugcuaacccaaaugccaacccuaaugcgaaccccaaugccaacccaaaugcaaaccccaaugcuaacccuaacgccaauccaaacgcuaauccgaacgccaaucccaacgcaaauccuaacgccaauccaaacgcuaaucccaacgcgaauccuaacgcaaauccaaacgccaaucccaacgcuaacccgaaugccaacccuaaugcaaacccaaaugccaaccccaaugcuaacccuaaugccaaccccaaugcaaacccaaaugcgaacccuaaugcuaaccccaacgccaauccaaacgcaaauccgaacgccaauccuaacaaaaauaaccagggcaauggccaagggcauaacaugcccaaugauccaaacagaaaugucgacgagaacgcuaaugccaacaacgcagugaagaauaacaauaacgaggaacccucagacaagcacauuacugaguauuugaaaaagauacagaauagccucaguacggaaugguccccuuguucuguuaccugcggaaacgguauccaggugaggauuaaaccaggcagcgcugggaaguccaaagaugagcuggacuacgaaaaugauaucgagaagaaaauuuguaagauggagaagugcucaagugucuuuaacgugguaaauagcucuaucggacugauaaugguucucuccuucuuauuucugaacuga

SEQ ID NO: 4127 - RNA, 1305 nt, Artificial Sequence
  derived and/or modified CDS sequence (opt3) from Pf(YL864)__ADF48458.1__CSP
augagaaagcuggccauccucagcguguccucuuuccuuuuugucgaggcucuguuccaggaauaccaaugcuauggcucaaguagcaacaccaggguuuugaaugaguuaaacuacgacaaugcagggacaaaccuguauaaugaacuagagaugaacuacuauggaaaacaggaaaauugguacucccucaagaaaaacucucggucgcugggugagaaugaugacggcaacaauaacaauggggauaacggacgcgagggcaaggacgaagauaaacgagacgguaauaacgaggauaacgaaaaacuucguaagcccaagcacaagaaacugaagcagccuggggacggaaauccagauccgaacgccaaucccaacguggacccuaaugcgaacccaaauguagaucccaacgcuaauccuaacguggacccaaaugccaaccccaaugcaaacccuaaugccaacccaaacgcuaauccgaacgcaaaucccaacgccaauccuaacgcuaauccaaacgccaaucccaacgcgaauccuaacgcaaauccaaacgccaaucccaacgcuaacccgaaugccaacccuaaugcaaaccccaaugcuaacccaaaugucgauccuaacgccaaucccaacgcgaauccaaacgccaaucccaacgcaaauccuaacgcuaacccaaaugccaacccgaaugcuaaccccaaugccaacccuaaugcaaacccaaaugccaaccccaaugcuaacccuaaugcgaacccaaaugcaaaccccaaugccaacccgaacgcuaauccuaacgccaauccaaacgcaaaucccaacgccaauccuaacgcuaaucccaacgccaauccaaacgcaaauccuaacgcgaaucccaacgcuaacccaaaugccaacccgaaugcaaacccuaauaaaaacaaucagggcaacggccaagggcauaauaugcccaacgacccaaauagaaacguggacgagaaugccaacgcuaauaacgaugagaacaauaacaaugaggaacccucagacaagcacauugaacaguauuugaagaaaauacaguacagccucaguacugagugguccccuuguucuguuacgugcggaaacgguauccaggugaggauuaagccaggcagcgccgauaaacccaaggaccaacuggauuacgaaaaugacaucgagaaaaagauuuguaaaauggagaagugcuccucagucuuuaacgugguaaauaguagcaucgggcugauaaugguucucucuuucuuauuucugaacuga

SEQ ID NO: 4128 - RNA, 1299 nt, Artificial Sequence
  derived and/or modified CDS sequence (opt3) from Pf(838)__AAA29543.1__CSP
augaugagaaagcuggccauccucagcguguccucuuuccuuuuugucgaggcucuguuccaggaauaccaaugcuauggcucaaguagcaacaccaggguuuugaaugaguuaaacuacgacaaugcagggauuaaccuguauaaugaacuagagaugaacuacuauggaaaacaggaaaauugguacucccucaagaaaaacucucggucgcugggugagaaugaugacggcaacaauaacaauggggauaacggacgcgagggcaaggacgaagauaaacgagacgguaauaacgaggauaacgaaaaacuucguaagcccaagcacaagaaacugaagcagccuggggacggaaauccagauccgaacgccaaucccaacguggacccuaaugcgaacccaaauguagaucccaacgcuaauccuaacguggacccaaaugccaaccccaaugcaaacccuaaugccaacccaaacgcuaauccgaacgcaaaucccaacgccaauccuaacgcuaauccaaacgccaaucccaacgcgaauccuaacgcaaauccaaacgccaaucccaacgcuaacccgaaugccaacccuaaugcaaaccccaaugcuaacccaaaugccaacccuaaugcgaaccccaaugccaacccaaaugcaaaccccaaugcuaacccuaacgccaauccaaacgcuaauccgaacgccaaucccaacgcaaauccuaacgccaauccaaacgcuaaucccaacgcgaauccuaacgcaaauccaaacgccaaucccaacgcuaacccgaaugccaacccuaaugcaaacccaaaugccaaccccaaugcuaacccuaaugccaaccccaaugcaaacccaaaugcgaacccuaaugcuaaccccaacgccaauccaaacgcaaauccgaacaaaaauaaccagggcaauggccaagggcauaacaugccuaaugaucccaacagaaaugucgacgagaacgccaaugcuaacaaugccgugaagaacaacaauaacgaggaaccaucagacaagcacauagagcaguauuugaaaaagauccagaauagccucaguacagaauggucccccuguucuguuacuugcggaaacgguauucaggugaggaucaaaccuggcagcgcaaauaagccaaaagaugagcuggacuacgaaaacgauauugagaagaaaaucuguaagauggagaagugcuccucagucuuuaaugugguaaacaguagcauagggcugaucaugguucucucuuucuuauuucugaauuga

SEQ ID NO: 4129 - RNA, 1299 nt, Artificial Sequence
  derived and/or modified CDS sequence (opt3) from Pf(834a)__AAA29571.1__CSP
augaugagaaagcuggccauccucagcguguccucuuuccuuuuugucgaggcucuguuccaggaauaccaaugcuauggcucaaguagcaacaccaggguuuugaaugaguuaaacuacgacaaugcagggauuaaccuguauaaugaacuagagaugaacuacuauggaaaacaggaaaauugguacucccucaagaaaaacucucggucgcugggugagaaugaugacggcaacaauaacaauggggauaacggacgcgagggcaaggacgaagauaaacgagacgguaauaacgaggauaacgaaaaacuucguaagcccaagcacaagaaacugaagcagccuggggacggaaauccagauccgaacgccaaucccaacguggacccuaaugcgaacccaaauguagaucccaacgcuaauccuaacguggacccaaaugccaaccccaaugucgauccuaacgcaaauccaaacgccaacccgaaugcuaaccccaaugcaaacccuaaugccaacccaaaugcuaaccccaaugccaacccuaaugcgaacccaaaugcaaaccccaaugccaacccgaacgcuaauccuaacgccaaucccaacgcaaauccaaacgcuaauccuaacgccaaucccaacgcgaauccaaacgccaaucccaacgcaaauccuaacgcuaacccaaaugccaacccgaaugcuaaccccaaugccaacccuaaugcaaacccaaaugccaaccccaaugcuaacccuaaugcgaacccaaaugcaaaccccaaugccaacccgaacgcuaauccuaacgccaauccaaacgcaaaucccaacgccaauccuaacgcuaaucccaacgccaauccaaacgcaaauccuaacgcgaaucccaacgcuaacccaaaugccaacccgaauaaaaacaaucagggcaacggccaagggcauaauaugccuaacgaccccaauagaaacguggacgagaaugcaaacgccaauaacgcuguuaagaauaacaacaaugaggaaccaucagauaagcacauagagcaguauuugaaaaagauccagaacagccucaguacagaauggucccccuguucugugacuugcggaaaugguauucaggucaggaucaaaccuggcagcgccaacaagccaaaagacgagcuggauuacgaaaaugacauugagaagaaaaucuguaagauggagaagugcuccucaguguuuaacguaguuaauaguagcauagggcugaucauggugcucucuuucuuauuucugaacuga

SEQ ID NO: 4130 - RNA, 1299 nt, Artificial Sequence
  derived and/or modified CDS sequence (opt3) from Pf(India)__AAN87622.1__CSP
augaugagaaagcuggccauccucagcguguccucuuuccuuuuugucgaggcucuguuccaggaauaccaaugcuauggcucaaguagcaacaccaggguuuugaaugaguuaaacuacgacaaugcagggacaaaccuguauaaugaacuagagaugaacuacuauggaaaacaggaaaauugguacucccucaagaaaaacucucggucgcugggugagaaugaugacggcaacaauaacaauggggauaacggacgcgagggcaaggacgaagauaaacgagacgguaauaacgaggauaacgaaaaacuucguaagcccaagcacaagaaacugaagcagccugccgacgggaauccagauccgaacgcgaaucccaacguggacccuaaugcuaacccaaaugccaaccccaaugcaaacccuaaugccaacccaaaugcuaaccccaaugcaaacccuaacgccaauccaaacgcuaauccgaacgccaaucccaacgcgaauccuaacgcaaauccaaacgccaaucccaacguagauccuaaugcuaacccaaaugccaaccccaacgcaaauccgaacgcuaauccuaacgccaaucccaacgcgaauccaaacgccaauccuaacgcaaaucccaacgcuaauccaaacgccaaucccaacgcuaacccuaaugccaacccaaaugcaaacccgaaugccaaccccaaugcuaacccuaaugcgaacccaaaugcaaaccccaaugccaacccuaaugcuaacccaaaugccaaccccaacgcaaauccgaacgccaauccuaacgcuaauccaaacgccaaucccaacgcaaauccuaacgcgaaucccaacgcuaauccaaacgccaauccuaacgcaaaccccaaugccaacccaaaugcuaacccgaauaaaaacaaucagggaaacggccaaggccauaauaugccuaacgaccccaauagaaacguggaugagaaugccaacgcaaauaacgcugucaagaacaauaacaaugaggaaccaucagacaagcacauugagcaguauuugaaaaagauacagaacagccucaguacugaauggucccccuguucugugacgugcgggaauggaauccagguuaggauuaaaccugguagcgccaacaagccaaaagacgagcuggauuacgaaaaugacaucgagaagaaaauuuguaagauggagaagugcuccucaguguuuaacgucgugaauaguagcaucggccugauaaugguacucucuuucuuauuucugaacuga

SEQ ID NO: 4131 - RNA, 1299 nt, Artificial Sequence
  derived and/or modified CDS sequence (opt3) from Pf(PFS31)__BAN59407.1__CSP
augaugagaaagcuggccauccucagcguguccucuuuccuuuuugucgaggcucuguuccaggaauaccaaugcuauggcucaaguagcaacaccaggguuuugaaugaguuaaacuacgacaaugcagggacaaaccuguauaaugaacuagagaugaacuacuauggaaaacaggaaaauugguacucccucaagaaaaacucucggucgcugggugagaaugaugacggcaacaauaacaauggggauaacggacgcgagggcaaggacgaagauaaacgagacgguaauaacgaggauaacgaaaaacuucguaagcccaagcacaagaaacugaagcagccuggggacggaaauccagauccgaacgccaaucccaacguggacccuaaugcgaacccaaauguagaucccaacgcuaauccuaacguggacccaaaugccaaccccaaugcaaacccuaaugccaacccaaacgcuaauccgaacgcaaaucccaacgccaauccuaacgcuaauccaaacgccaaucccaacgcgaauccuaacgcaaauccaaacgccaaucccaacgcuaacccgaaugccaacccuaaugcaaaccccaaugcuaacccaaaugccaacccuaaugcgaaccccaaugccaacccaaaugcaaaccccaaugcuaacccuaacgccaauccaaacgcuaauccgaacgccaaucccaacgcaaauccuaacgccaauccaaacgcuaaucccaacgcgaauccuaacgcaaauccaaacgccaaucccaacgcuaacccgaaugccaacccuaaugcaaacccaaaugccaaccccaaugcuaacccuaaugccaaccccaaugcaaacccaaaugcgaacccuaaugcuaaccccaacgccaauccaaacgcaaauccgaacaaaaauaaccagggcaauggccaagggcauaacaugccuaaugaucccaacagaaaugucgacgagaacgccaaugcuaacaaugacgugaagaacaacaauaacgaggaaccaucagauaagcacauugaggaauauuugaaaaagauacagaauagccucaguacugaguggucccccuguucuguuacgugcggaaacgguauccaggugaggauuaaaccuggcagcgccaauaagccaaaagacgaacugaacuacgagaaugauaucgagaagaaaauuuguaagauggaaaagugcuccucagucuuuaacgugguaaauaguagcaucgggcugauaaugguucucucuuucuuauuucugaacuga

SEQ ID NO: 4132 - RNA, 1299 nt, Artificial Sequence
  derived and/or modified CDS sequence (opt3) from Pf(PNG912-070)__BAM85010.1__CSP
augaugagaaagcuggccauccucagcguguccucuuuccuuuuugucgaggcucuguuccaggaauaccaaugcuauggcucaaguagcaacaccaggguuuugaaugaguuaaacuacgacaaugcagggacaaaccuguauaaugaacuagagaugaacuacuauggaaaacaggaaaauugguacucccucaagaaaaacucucggucgcugggugagaaugaugacggcaacaauaacaauggggauaacggacgcgagggcaaggacgaagauaaacgagacgguaauaacgaggauaacgaaaaacuucguaagcccaagcacaagaaacugaagcagccuguggacgggaauccagauccgaacgccaaucccaacguagacccuaaugcgaacccaaauguggaucccaacgcuaauccuaacgucgacccaaaugccaaccccaaugcaaacccuaaugccaacccaaacgcuaauccgaacgcaaaucccaacgccaauccuaacgcuaauccaaacgccaaucccaacgcgaauccuaacgcaaauccaaacgccaaucccaacgcuaacccgaaugccaacccuaaugcaaaccccaaugcuaacccaaaugccaacccuaaugcgaaccccaaugccaacccaaaugcaaaccccaaugcuaacccuaacgccaauccaaacgcuaauccgaacgccaaucccaacgcaaauccuaacgccaauccaaacgcuaaucccaacgcgaauccuaacgcaaauccaaacgccaaucccaacgcuaacccgaaugccaacccuaaugcaaacccaaaugccaaccccaaugcuaacccuaaugccaaccccaaugcaaacccaaaugcgaacccuaaugcuaaccccaacgccaauccaaacgcaaauccgaacaaaaauaaccagggaaauggccaaggccauaacaugccuaaugaucccaacagaaauguggacgagaacgccaaugcuaacaaugccguuaagaacaacaauaacgaggaaccaucagacaagcacauugagcaguauuugaaaaagauacagaauagccucaguacugaauggucccccuguucugugacgugcgggaacggaauccaggucaggauuaaaccugguagcgcagauaagccaaaagaccaacuggauuacgagaaugacaucgaaaagaaaauuuguaagauggagaagugcuccucaguguuuaacguaguuaauaguagcaucggccugauaauggugcucucuuucuuauuucugaacuga

SEQ ID NO: 4133 - RNA, 1299 nt, Artificial Sequence
  derived and/or modified CDS sequence (opt3) from Pf(PVS20)__BAN59429.1__CSP
augaugagaaagcuggccauccucagcguguccucuuuccuuuuugucgaggcucuguuccaggaauaccaaugcuauggcucaaguagcaacaccaggguuuugaaugaguuaaacuacgacaaugcagggacaaaccuguauaaugaacuagagaugaacuacuauggaaaacaggaaaauugguacucccucaagaaaaacucucggucgcugggugagaaugaugacggcaacaauaacaauggggauaacggacgcgagggcaaggacgaagauaaacgagacgguaauaacgaggauaacgaaaaacuucguaagcccaagcacaagaaacugaagcagccuggggacggaaauccagauccgaacgccaaucccaacguggacccuaaugcgaacccaaauguagaucccaacgcuaauccuaacguggacccaaaugccaaccccaaugcaaacccuaaugccaacccaaacgcuaauccgaacgcaaaucccaacgccaauccuaacgcuaauccaaacgccaaucccaacgcgaauccuaacgcaaauccaaacgccaaucccaacgcuaacccgaaugccaacccuaaugcaaaccccaaugcuaacccaaaugccaacccuaaugcgaaccccaaugccaacccaaaugcaaaccccaaugcuaacccuaacgccaauccaaacgcuaauccgaacgccaaucccaacgcaaauccuaacgccaauccaaacgcuaaucccaacgcgaauccuaacgcaaauccaaacgccaaucccaacgcuaacccgaaugccaacccuaaugcaaacccaaaugccaaccccaaugcuaacccuaaugccaaccccaaugcaaacccaaaugcgaacccuaaugcuaaccccaacgccaauccaaacgcaaauccgaacaaaaauaaccagggcaauggccaagggcauaacaugccuaaugaucccaacagaaaugucgacgagaacgccaaugcuaacaaugccgugaagaacaacaauaacgaggaaccaucagacaagcacauugagcaguauuugaaaaagauacagaauagccucaguacugaauggucccccuguucuguuacgugcggaaacgguauccaggugaggauuaaaccuggcagcgcaaauaagccaaaagaugagcuggacuacgaaaacgauaucgagaagaaaauuuguaagauggagaagugcuccucagucuuuaaugugguaaacaguagcaucgggcugauaaugguucucucuuucuuauuucugaauuga

SEQ ID NO: 4134 - RNA, 1299 nt, Artificial Sequence
  derived and/or modified CDS sequence (opt3) from Pf(Sol95-241)__BAM85085.1__CSP
augaugagaaagcuggccauccucagcguguccucuuuccuuuuugucgaggcucuguuccaggaauaccaaugcuauggcucaaguagcaacaccaggguuuugaaugaguuaaacuacgacaaugcagggacaaaccuguauaaugaacuagagaugaacuacuauggaaaacaggaaaauugguacucccucaagaaaaacucucggucgcugggugagaaugaugacggcaacaauaacaauggggauaacggacgcgagggcaaggacgaagauaaacgagacgguaauaacgaggauaacgaaaaacuucguaagcccaagcacaagaaacugaagcagccuggggacggaaauccagauccgaacgccaaucccaacguggacccuaaugcgaacccaaauguagaucccaacgcuaauccuaacguggacccaaaugccaaccccaaugucgauccuaacgcaaauccaaacgccaacccgaaugcuaaccccaaugcaaacccuaaugccaacccaaaugcuaaccccaaugccaacccuaaugcgaacccaaaugcaaaccccaaugccaacccgaacgcuaauccuaacgccaaucccaacgcaaauccaaacgcuaauccuaacgccaaucccaacgcgaauccaaacgccaaucccaacgcaaauccuaacgcuaacccaaaugccaacccgaaugcuaaccccaaugccaacccuaaugcaaacccaaaugccaaccccaaugcuaacccuaaugcgaacccaaaugcaaaccccaaugccaacccgaacgcuaauccuaacgccaauccaaacgcaaaucccaacgccaauccuaacgcuaaucccaacgccaauccaaacgcaaauccuaacgcgaaucccaacgcuaacccaaaugccaacccgaauaaaaacaaucagggcaacggccaagggcauaauaugccuaacgaccccaauagaaacguggacgagaaugcaaacgccaauaacgcuguuaagaauaacaacaaugaggaaccaucagauaagcacauugagcaguauuugaaaaagauacagaacagccucaguacugaauggucccccuguucugugacgugcggaaaugguauccaggucaggauuaaaccuggcagcgccaacaagccaaaagacgagcuggauuacgaaaaugacaucgagaagaaaauuuguaagauggagaagugcuccucaguguuuaacguaguuaauaguagcaucgggcugauaauggugcucucuuucuuauuucugaacuga

SEQ ID NO: 4135 - RNA, 1299 nt, Artificial Sequence
  derived and/or modified CDS sequence (opt3) from Pf(TiMS95-198)__BAM84895.1__CSP
augaugagaaagcuggccauccucagcguguccucuuuccuuuuugucgaggcucuguuccaggaauaccaaugcuauggcucaaguagcaacaccaggguuuugaaugaguuaaacuacgacaaugcagggacaaaccuguauaaugaacuagagaugaacuacuauggaaaacaggaaaauugguacucccucaagaaaaacucucggucgcugggugagaaugaugacggcaacaauaacaauggggauaacggacgcgagggcaaggacgaagauaaacgagacgguaauaacgaggauaacgaaaaacuucguaagcccaagcacaagaaacugaagcagccuggggacggaaauccagauccgaacgccaaucccaacguggacccuaaugcgaacccaaauguagaucccaacgcuaauccuaacguggacccaaaugccaaccccaaugcaaacccuaaugccaacccaaacgcuaauccgaacgcaaaucccaacgccaauccuaacgcuaauccaaacgccaaucccaacgcgaauccuaacgcaaauccaaacgccaaucccaacgcuaacccgaaugccaacccuaaugcaaaccccaaugcuaacccaaaugccaacccuaaugcgaaccccaaugccaacccaaaugcaaaccccaaugcuaacccuaacgccaauccaaacgcuaauccgaacgccaaucccaacgcaaauccuaacgccaauccaaacgcuaaucccaacgcgaauccuaacgcaaauccaaacgccaaucccaacgcuaacccgaaugccaacccuaaugcaaacccaaaugccaaccccaaugcuaacccuaaugccaaccccaaugcaaacccaaaugcgaacccuaaugcuaaccccaacgccaauccaaacgcaaauccgaacaaaaauaaccagggcaauggccaagggcauaacaugccuaaugaucccaacagaaaugucgacgagaacgccaaugcuaacaaugccgugaagaacaacaauaacgaggaaccaucagacaagcacauugagcaguauuugaaaaauauacagaacagccucaguacugaauggucccccuguucuguuacgugcggaaaugguauccaggugaggauuaagccuggcagcgcaaacaaaccaaaggaugagcuggacuacgaaaaugauaucgagaaaaagauuuguaaaauggagaagugcuccucagucuuuaacgugguaaauaguagcaucgggcugauaaugguucucucuuucuuauuucugaacuga

SEQ ID NO: 4136 - RNA, 1296 nt, Artificial Sequence
  derived and/or modified CDS sequence (opt3) from Pf(D164)__ACO49368.1__CSP
augagaaagcuggccauccucagcguguccucuuuccuuuuugucgaggcucuguuccaggaauaccaaugcuauggcucaaguagcaacaccaggguuuugaaugaguuaaacuacgacaaugcagggacaaaccuguauaaugaacuagagaugaacuacuauggaaaacaggaaaauugguacucccucaagaaaaacucucggucgcugggugagaaugaugacggcaacaauaacaauggggauaacggacgcgagggcaaggacgaagauaaacgagacgguaauaacgaggauaacgaaaaacuucguaagcccaagcacaagaaacugaagcagccuggggacggaaauccagauccgaacgccaaucccaacguggacccuaaugcgaacccaaauguagaucccaacgcuaauccuaacguggacccaaaugccaaccccaaugucgauccuaacgcaaauccaaacgccaacccgaaugcuaaccccaaugcaaacccuaaugccaacccaaaugcuaaccccaaugccaacccuaaugcgaacccaaaugcaaaccccaaugccaacccgaacgcuaauccuaacgccaaucccaacgcaaauccaaacgcuaauccuaacgccaaucccaacgcgaauccaaacgccaaucccaacgcaaauccuaacgcuaacccaaaugccaacccgaaugcuaaccccaaugccaacccuaaugcaaacccaaaugccaaccccaaugcuaacccuaaugcgaacccaaaugcaaaccccaaugccaacccgaacgcuaauccuaacgccaauccaaacgcaaaucccaacgccaauccuaacgcuaaucccaacgccaauccaaacgcaaauccuaacgcgaaucccaacgcuaacccaaaugccaacccgaauaaaaacaaucagggcaacggccaagggcauaauaugccuaacgaccccaauagaaacguggacgagaaugcaaacgccaauaacgcuguuaagaauaacaacaaugaggaaccaucagauaagcacauugagcaguauuugaaaaagauacagaacagccucaguacugaauggucccccuguucugugacgugcggaaaugguauccaggucaggauuaaaccuggcagcgccaacaagccaaaagacgagcuggauuacgaaaaugacaucgagaagaaaauuuguaagauggagaagugcuccucaguguuuaacguaguuaauaguagcaucgggcugauaauggugcucucuuucuuauuucugaacuga

SEQ ID NO: 4137 - RNA, 1296 nt, Artificial Sequence
  derived and/or modified CDS sequence (opt3) from Pf(E28)__ACO49378.1__CSP
augagaaagcuggccauccucagcguguccucuuuccuuuuugucgaggcucuguuccaggaauaccaaugcuauggcucaaguagcaacaccaggguuuugaaugaguuaaacuacgacaaugcagggacaaaccuguauaaugaacuagagaugaacuacuauggaaaacaggaaaauugguacucccucaagaaaaacucucggucgcugggugagaaugaugacggcaacaauaacaauggggauaacggacgcgagggcaaggacgaagauaaacgagacgguaauaacgaggauaacgaaaaacuucguaagcccaagcacaagaaacugaagcagccuggggacggaaauccagauccgaacgccaaucccaacguggacccuaaugcgaacccaaauguagaucccaacgcuaauccuaacguggacccaaaugccaaccccaaugcaaacccuaaugccaacccaaacgcuaauccgaacgcaaaucccaacgccaauccuaacgcuaauccaaacgccaaucccaacgcgaauccuaacgcaaauccaaacgccaaucccaacgcuaacccgaaugccaacccuaaugcaaaccccaaugcuaacccaaaugccaacccuaaugcgaaccccaaugccaacccaaaugcaaaccccaaugcuaacccuaacgccaauccaaacgcuaauccgaacgccaaucccaacgcaaauccuaacgccaauccaaacgcuaaucccaacgcgaauccuaacgcaaauccaaacgccaaucccaacgcuaacccgaaugccaacccuaaugcaaacccaaaugccaaccccaaugcuaacccuaaugccaaccccaaugcaaacccaaaugcgaacccuaaugcuaaccccaacgccaauccaaacgcaaauccgaacaaaaauaaccagggcaauggccaagggcauaacaugccuaaugaucccaacagaaaugucgacgagaacgccaaugcuaacaaugccgugaagaacaacaauaacgaggaaccaucagacaagcacauugagcaguauuugaaaaauauacagaacagccucaguacugaauggucccccuguucuguuacgugcggaaaugguauccaggugaggauuaagccuggcagcgcaaacaaaccaaaggaugagcuggacuacgaaaaugauaucgagaaaaagauuuguaaaauggagaagugcuccucagucuuuaacgugguaaauaguagcaucgggcugauaaugguucucucuuucuuauuucugaacuga

SEQ ID NO: 4138 - RNA, 1296 nt, Artificial Sequence
  derived and/or modified CDS sequence (opt3) from Pf(TM121)__ACO49457.1__CSP
augagaaagcuggccauccucagcguguccucuuuccuuuuugucgaggcucuguuccaggaauaccaaugcuauggcucaaguagcaacaccaggguuuugaaugaguuaaacuacgacaaugcagggacaaaccuguauaaugaacuagagaugaacuacuauggaaaacaggaaaauugguacucccucaagaaaaacucucggucgcugggugagaaugaugacggcaacaauaacaauggggauaacggacgcgagggcaaggacgaagauaaacgagacgguaauaacgaggauaacgaaaaacuucguaagcccaagcacaagaaacugaagcagccuggggacggaaauccagauccgaacgccaaucccaacguggacccuaaugcgaacccaaauguagaucccaacgcuaauccuaacguggacccaaaugccaaccccaaugcaaacccuaaugccaacccaaacgcuaauccgaacgcaaaucccaacgccaauccuaacgcuaauccaaacgccaaucccaacgcgaauccuaacgcaaauccaaacgccaaucccaacgcuaacccgaaugccaacccuaaugcaaaccccaaugcuaacccaaaugccaacccuaaugcgaaccccaaugccaacccaaaugcaaaccccaaugcuaacccuaacgccaauccaaacgcuaauccgaacgccaaucccaacgcaaauccuaacgccaauccaaacgcuaaucccaacgcgaauccuaacgcaaauccaaacgccaaucccaacgcuaacccgaaugccaacccuaaugcaaacccaaaugccaaccccaaugcuaacccuaaugccaaccccaaugcaaacccaaaugcgaacccuaaugcuaaccccaacgccaauccaaacgcaaauccgaacaaaaauaaccagggcaauggccaagggcauaacaugccuaaugaucccaacagaaaugucgacgagaacgccaaugcuaacaaugacgugaagaacaacaauaacgaggaaccaucagauaagcacauugagcaguauuugaaaaagauacaguacagccucaguacugaauggucccccuguucuguuacgugcggaaaugguauccaggugaggauuaaaccuggcagcgccaacaagccaaaagacgagcuggauuacgaaaaugacaucgagaagaaaauuuguaagauggagaagugcuccucagucuuuaacgugguaaauaguagcaucgggcugauaaugguucucucuuucuuauuucugaacuga

SEQ ID NO: 4139 - RNA, 1296 nt, Artificial Sequence
  derived and/or modified CDS sequence (opt3) from Pf(TM176)__ACO49467.1__CSP
augagaaagcuggccauccucagcguguccucuuuccuuuuugucgaggcucuguuccaggaauaccaaugcuauggcucaaguagcaacaccaggguuuugaaugaguuaaacuacgacaaugcagggacaaaccuguauaaugaacuagagaugaacuacuauggaaaacaggaaaauugguacucccucaagaaaaacucucggucgcugggugagaaugaugacggcaacaauaacaauggggauaacggacgcgagggcaaggacgaagauaaacgagacgguaauaacgaggauaacgaaaaacuucguaagcccaagcacaagaaacugaagcagccuggggacggaaauccagauccgaacgccaaucccaacguggacccuaaugcgaacccaaauguagaucccaacgcuaauccuaacguggacccaaaugccaaccccaaugcaaacccuaaugccaacccaaacgcuaauccgaacgcaaaucccaacgccaauccuaacgcuaauccaaacgccaaucccaacgcgaauccuaacgcaaauccaaacgccaaucccaacgcuaacccgaaugccaacccuaaugcaaaccccaaugcuaacccaaaugccaacccuaaugcgaaccccaaugccaacccaaaugcaaaccccaaugcuaacccuaacgccaauccaaacgcuaauccgaacgccaaucccaacgcaaauccuaacgccaauccaaacgcuaaucccaacgcgaauccuaacgcaaauccaaacgccaaucccaacgcuaacccgaaugccaacccuaaugcaaacccaaaugccaaccccaaugcuaacccuaaugccaaccccaaugcaaacccaaaugcgaacccuaaugcuaaccccaacgccaauccaaacgcaaauccgaacaaaaauaaccagggcaauggccaagggcauaacaugccuaaugaucccaacagaaaugucgacgagaacgccaaugcuaacaaugacgugaagaacaacaauaacgaggaaccaucagauaagcacauugagcaguauuugaaaaagauacaguacagccucaguacugaauggucccccuguucuguuacgugcggaaaugguauccaggugaggauuaaaccuggcagcgccgacaagccaaaagaucaacuggacuacgagaacgauaucgaaaagaaaauuuguaagauggagaagugcuccucagucuuuaaugugguaaacaguagcaucgggcugauaaugguucucucuuucuuauuucugaauuga

SEQ ID NO: 4140 - RNA, 1296 nt, Artificial Sequence
  derived and/or modified CDS sequence (opt3) from Pf(TSY650)__ACO49541.1__CSP
augagaaagcuggccauccucagcguguccucuuuccuuuuugucgaggcucuguuccaggaauaccaaugcuauggcucaaguagcaacaccaggguuuugaaugaguuaaacuacgacaaugcagggacaaaccuguauaaugaacuagagaugaacuacuauggaaaacaggaaaauugguacucccucaagaaaaacucucggucgcugggugagaaugaugacggcaacaauaacaauggggauaacggacgcgagggcaaggacgaagauaaacgagacgguaauaacgaggauaacgaaaaacuucguaagcccaagcacaagaaacugaagcagccuggggacggaaauccagauccgaacgccaaucccaacguggacccuaaugcgaacccaaauguagaucccaacgcuaauccuaacguggacccaaaugccaaccccaaugcaaacccuaaugccaacccaaacgcuaauccgaacgcaaaucccaacgccaauccuaacgcuaauccaaacgccaaucccaacgcgaauccuaacgcaaauccaaacgccaaucccaacgcuaacccgaaugccaacccuaaugcaaaccccaaugcuaacccaaaugccaacccuaaugcgaaccccaaugccaacccaaaugcaaaccccaaugcuaacccuaacgccaauccaaacgcuaauccgaacgccaaucccaacgcaaauccuaacgccaauccaaacgcuaaucccaacgcgaauccuaacgcaaauccaaacgccaaucccaacgcuaacccgaaugccaacccuaaugcaaacccaaaugccaaccccaaugcuaacccuaaugccaaccccaaugcaaacccaaaugcgaacccuaaugcuaaccccaacgccaauccaaacgcaaauccgaacaaaaauaaccagggcaauggccaagggcauaacaugccuaaugaucccaacagaaaugucgacgagaacgccaaugcuaacaaugccgugaagaacaacaauaacgaggaaccaucagacaagcacauugagcaguauuugaaaaagauacagaauagccucaguacugaauggucccccuguucuguuacgugcggaaacgguauccaggugaggauuaaaccuggcagcgcaaauaagccaaaagaugagcuggacuacgaaaacgauaucgagaagaaaauuuguaagauggagaagugcuccucagucuuuaaugugguaaacaguagcaucgggcugauaaugguucucucuuucuuauuucugaauuga

SEQ ID NO: 4141 - RNA, 1296 nt, Artificial Sequence
  derived and/or modified CDS sequence (opt3) from Pf(TSY682)__ACO49544.1__CSP
augagaaagcuggccauccucagcguguccucuuuccuuuuugucgaggcucuguuccaggaauaccaaugcuauggcucaaguagcaacaccaggguuuugaaugaguuaaacuacgacaaugcagggacaaaccuguauaaugaacuagagaugaacuacuauggaaaacaggaaaauugguacucccucaagaaaaacucucggucgcugggugagaaugaugacggcaacaauaacaauggggauaacggacgcgagggcaaggacgaagauaaacgagacgguaauaacgaggauaacgaaaaacuucguaagcccaagcacaagaaacugaagcagccuggggacggaaauccagauccgaacgccaaucccaacguggacccuaaugcgaacccaaauguagaucccaacgcuaauccuaacguggacccaaaugccaaccccaaugcaaacccuaaugccaacccaaacgcuaauccgaacgcaaaucccaacgccaauccuaacgcuaauccaaacgccaaucccaacgcgaauccuaacgcaaauccaaacgccaaucccaacgcuaacccgaaugccaacccuaaugcaaaccccaaugcuaacccaaaugccaacccuaaugcgaaccccaaugccaacccaaaugcaaaccccaaugcuaacccuaacgccaauccaaacgcuaauccgaacgccaaucccaacgcaaauccuaacgccaauccaaacgcuaaucccaacgcgaauccuaacgcaaauccaaacgccaaucccaacgcuaacccgaaugccaacccuaaugcaaacccaaaugccaaccccaaugcuaacccuaaugccaaccccaaugcaaacccaaaugcgaacccuaaugcuaaccccaacgccaauccaaacgcaaauccgaacaaaaauaaccagggcaauggccaagggcauaacaugccuaaugaucccaacagaaaugucgacgagaacgccaaugcuaacaaugacgugaagaacaacaauaacgaggaaccaucagauaagcacauugaggaauauuugaaaaagauacagaauagccucaguacugaguggucccccuguucuguuacgugcggaaacgguauccaggugaggauuaaaccuggcagcgccaauaagccaaaagacgaacugaacuacgagaaugauaucgagaagaaaauuuguaagauggaaaagugcuccucagucuuuaacgugguaaauaguagcaucgggcugauaaugguucucucuuucuuauuucugaacuga

SEQ ID NO: 4142 - RNA, 1287 nt, Artificial Sequence
  derived and/or modified CDS sequence (opt3) from Pf(India)__AAN87575.1__CSP
augaugagaaagcuggccauccucagcguguccucuuuccuuuuugucgaggcucuguuccaggaauaccaaugcuauggcucaaguagcaacaccaggguuuugaaugaguuaaacuacgacaaugcagggacaaaccuguauaaugaacuagagaugaacuacuauggaaaacaggaaaauugguacucccucaagaaaaacucucggucgcugggugagaaugaugacggcaacaauaacaauggggauaacggacgcgagggcaaggacgaagauaaacgagacgguaauaacgaggauaacgaaaaacuucguaagcccaagcacaagaaacugaagcagccuggggacggaaauccagauccgaacgccaaucccaacguggacccuaaugcgaacccaaauguagaucccaacgcuaauccuaacgccaauccaaacgcaaaucccaacgccaauccuaacgcuaacccaaaugcaaacccgaaugccaaccccaaugcuaacccuaaugccaacccaaaugcgaaccccaaugcaaacccuaaugccaacccaaaugcuaaccccaacgccaauccgaacgcaaauccuaacgcuaaucccaacgccaauccaaacgcgaauccuaacgccaaucccaacgcaaauccaaacgcuaaucccaacgccaacccuaaugcuaacccaaaugccaacccgaaugcaaaccccaaugccaacccuaaugcuaacccaaaugcgaaccccaaugcaaacccuaaugccaacccaaaugcuaaccccaacgccaauccgaacgcaaauccuaacgccaauccaaacgcuaaucccaacgccaauccuaacgcaaaucccaacgcgaauccaaacgcuaauccuaacgccaaccccaaugcaaacccaaauaaaaacaaucagggcaacggcagagggcauaauaugccgaacgacccuaauaggaacguggaugagaaugccaacgcuaauaacgacgucaagaauaacaacaaugaggaacccucagacaagcacauugaggaauauuugaaaaagauacaaaacagccucaguacugagugguccccauguucugugacgugcggaaaugguauccagguucggauuaaacccggcagcgccaacaagccuaaagaugaacugaauuacgagaacgacaucgagaagaaaauuuguaagauggaaaagugcuccucaguguuuaaugucgugaacaguagcaucgggcugauaaugguacucucuuucuuauuucugaauuga

SEQ ID NO: 4143 - RNA, 1287 nt, Artificial Sequence
  derived and/or modified CDS sequence (opt3) from Pf(Pal97-082)__BAM84946.1__CSP
augaugagaaagcuggccauccucagcguguccucuuuccuuuuugucgaggcucuguuccaggaauaccaaugcuauggcucaaguagcaacaccaggguuuugaaugaguuaaacuacgacaaugcagggacaaaccuguauaaugaacuagagaugaacuacuauggaaaacaggaaaauugguacucccucaagaaaaacucucggucgcugggugagaaugaugacggcaacaauaacaauggggauaacggacgcgagggcaaggacgaagauaaacgagacgguaauaacgaggauaacgaaaaacuucguaagcccaagcacaagaaacugaagcagccuggggacggaaauccagauccgaacgccaaucccaacguggacccuaaugcgaacccaaauguagaucccaacgcuaauccuaacguggacccaaaugccaaccccaaugcaaacccuaaugccaacccaaacgcuaauccgaacgcaaaucccaacgccaauccuaacgcuaauccaaacgccaaucccaacgcgaauccuaacgcaaauccaaacgccaaucccaacgcuaacccgaaugccaacccuaaugcaaaccccaaugcuaacccaaaugccaacccuaaugcgaaccccaaugccaacccaaaugcaaaccccaaugucgauccuaacgcuaacccaaaugccaacccgaaugcuaaccccaaugccaacccuaaugcaaacccaaaugccaaccccaaugcuaacccuaaugcgaacccaaaugcaaaccccaaugccaacccgaacgcuaauccuaacgccaauccaaacgcaaaucccaacgccaauccuaacgcuaaucccaacgccaauccaaacgcaaauccuaacgcgaaucccaacgcuaacccaaauaaaaacaaucagggcaacggccaagggcauaauaugccgaacgacccuaauagaaacguggacgagaaugccaacgcaaauaacgccguuaagaauaacaauaacgaggaacccucagauaagcacauugagcaguauuugaaaaagauacagaacagccucaguacugaaugguccccauguucugugacgugcggaaaugguauccaggucaggauuaaacccggcagcgcugggaaguccaaagacgagcuggauuacgaaaacgacaucgagaagaaaauuuguaagauggagaagugcucaaguguguuuaauguaguuaacagcucuaucggacugauaauggugcucuccuucuuauuucugaauuga

SEQ ID NO: 4144 - RNA, 1287 nt, Artificial Sequence
  derived and/or modified CDS sequence (opt3) from Pf(Pal97-084)__BAM84947.1__CSP
augaugagaaagcuggccauccucagcguguccucuuuccuuuuugucgaggcucuguuccaggaauaccaaugcuauggcucaaguagcaacaccaggguuuugaaugaguuaaacuacgacaaugcagggacaaaccuguauaaugaacuagagaugaacuacuauggaaaacaggaaaauugguacucccucaagaaaaacucucggucgcugggugagaaugaugacggcaacaauaacaauggggauaacggacgcgagggcaaggacgaagauaaacgagacgguaauaacgaggauaacgaaaaacuucguaagcccaagcacaagaaacugaagcagccuggggacggaaauccagauccgaacgccaaucccaacguggacccuaaugcgaacccaaauguagaucccaacgcuaauccuaacguggacccaaaugccaaccccaaugcaaacccuaaugccaacccaaacgcuaauccgaacgcaaaucccaacgccaauccuaacgcuaauccaaacgccaaucccaacgcgaauccuaacgcaaauccaaacgccaaucccaacgcuaacccgaaugccaacccuaaugcaaaccccaaugcuaacccaaaugccaacccuaaugcgaaccccaaugccaacccaaaugcaaaccccaaugcuaacccuaacgccaauccaaacgcuaauccgaacgccaaucccaacgcaaauccuaacgccaauccaaacgcuaaucccaacgcgaauccuaacgcaaauccaaacgccaaucccaacgcuaacccgaaugccaacccuaaugcaaacccaaaugccaaccccaaugcuaacccuaaugccaaccccaaugcaaacccaaaugcgaacccuaaugcuaaccccaacgccaauccaaacaaaaauaaccagggcaauggccaagggcauaacaugccgaaugauccuaacagaaaugucgacgagaacgcaaaugccaacaaugcugugaagaacaauaacaacgaggaacccucagaccagcacauugagaaguauuugaaaauaauccagaauagccucaguacugaaugguccccauguucuguuacgugcggaaacgguauucaggugaggaucaagcccggcagcgccgauaaaccuaaggaccaacuggauuacgcaaaugacauugagaaaaagaucuguaaaauggaaaagugcuccucagucuuuaacgugguaaauaguagcauagggcugaucaugguucucucuuucuuauuucugaacuga

SEQ ID NO: 4145 - RNA, 1287 nt, Artificial Sequence
  derived and/or modified CDS sequence (opt3) from Pf(PFS54)__BAN59412.1__CSP
augaugagaaagcuggccauccucagcguguccucuuuccuuuuugucgaggcucuguuccaggaauaccaaugcuauggcucaaguagcaacaccaggguuuugaaugaguuaaacuacgacaaugcagggacaaaccuguauaaugaacuagagaugaacuacuauggaaaacaggaaaauugguacucccucaagaaaaacucucggucgcugggugagaaugaugacggcaacaauaacaauggggauaacggacgcgagggcaaggacgaagauaaacgagacgguaauaacgaggauaacgaaaaacuucguaagcccaagcacaagaaacugaagcagccuggggacgauaauccagacccgaacgccaaucccaacguggauccuaaugcgaacccaaauguagaccccaacgcuaauccuaacgccaauccaaacgcaaaucccaacgccaauccuaacgcuaacccaaaugcaaacccgaaugccaaccccaaugcuaacccuaaugccaacccaaaugcgaaccccaaugcaaacccuaaugccaacccaaaugcuaaccccaacgccaauccgaacguggauccuaaugcaaaccccaaugcuaacccaaaugccaacccuaaugcgaaccccaaugccaacccaaaugcaaaccccaaugcuaacccuaacgccaauccaaacgcuaauccgaacgccaaucccaacgcaaauccuaacgccaauccaaacgcuaaucccaacgcgaauccuaacgcaaauccaaacgccaaucccaacgcuaacccgaaugccaacccuaaugcaaacccaaaugccaaccccaaugcuaacccuaaugccaaccccaaugcaaacccaaaugcgaacccuaaugcuaaccccaacgccaauccaaacaaaaauaaccagggaaauggccaaggccauaacaugccgaaugacccuaacagaaaugucgacgagaacgcaaaugccaacaaugcugugaagaacaauaacaacgaggaacccucagauaagcacauugagcaguauuugaaaaagauacaguacagccucaguacugaaugguccccauguucuguuacgugcgggaauggaauccaggugaggauuaaacccgguagcgccgacaagccuaaagaucaacuggacuacgagaacgauaucgaaaagaaaauuuguaagauggagaagugcuccucagucuuuaaugugguaaacaguagcaucggccugauaaugguucucucuuucuuauuucugaauuga

SEQ ID NO: 4146 - RNA, 1287 nt, Artificial Sequence
  derived and/or modified CDS sequence (opt3) from Pf(PFS79)__BAN59422.1__CSP
augaugagaaagcuggccauccucagcguguccucuuuccuuuuugucgaggcucuguuccaggaauaccaaugcuauggcucaaguagcaacaccaggguuuugaaugaguuaaacuacgacaaugcagggacaaaccuguauaaugaacuagagaugaacuacuauggaaaacaggaaaauugguacucccucaagaaaaacucucggucgcugggugagaaugaugacggcaacaauaacaauggggauaacggacgcgagggcaaggacgaagauaaacgagacgguaauaacgaggauaacgaaaaacuucguaagcccaagcacaagaaacugaagcagccuggggacggaaauccagauccgaacgccaaucccaacguggacccuaaugcgaacccaaauguagaucccaacgcuaauccuaacguggacccaaaugccaaccccaaugcaaacccuaaugccaacccaaacgcuaauccgaacgcaaaucccaacgccaauccuaacgcuaauccaaacgccaaucccaacgcgaauccuaacgcaaauccaaacgccaaucccaacgcuaacccgaaugccaacccuaaugcaaaccccaaugcuaacccaaaugccaacccuaaugcgaaccccaaugccaacccaaaugcaaaccccaaugcuaacccuaacgccaauccaaacgcuaauccgaacgccaaucccaacgcaaauccuaacgccaauccaaacgcuaaucccaacgcgaauccuaacgcaaauccaaacgccaaucccaacgcuaacccgaaugccaacccuaaugcaaacccaaaugccaaccccaaugcuaacccuaaugccaaccccaaugcaaacccaaaugcgaacccuaaugcuaaccccaacgccaauccaaacaaaaauaaccagggcaauggccaagggcauaacaugccgaaugauccuaacagaaaugucgacgagaacgcaaaugccaacaaugcugugaagaacaauaacaacgaggaacccucagacaagcacauugagcaguauuugaaaaagauacagaauagccucaguacugaaugguccccauguucuguuacgugcggaaacgguauccaggugaggauuaaacccggcagcgccaauaagccuaaagaugagcuggacuacgaaaacgauaucgagaagaaaauuuguaagauggagaagugcuccucagucuuuaaugugguaaacaguagcaucgggcugauaaugguucucucuuucuuauuucugaauuga

SEQ ID NO: 4147 - RNA, 1287 nt, Artificial Sequence
  derived and/or modified CDS sequence (opt3) from Pf(PFS83)__BAN59424.1__CSP
augaugagaaagcuggccauccucagcguguccucuuuccuuuuugucgaggcucuguuccaggaauaccaaugcuauggcucaaguagcaacaccaggguuuugaaugaguuaaacuacgacaaugcagggacaaaccuguauaaugaacuagagaugaacuacuauggaaaacaggaaaauugguacucccucaagaaaaacucucggucgcugggugagaaugaugacggcaacaauaacaauggggauaacggacgcgagggcaaggacgaagauaaacgagacgguaauaacgaggauaacgaaaaacuucguaagcccaagcacaagaaacugaagcagccuggggacggaaauccagauccgaacgccaaucccaacguggacccuaaugcgaacccaaauguagaucccaacgcuaauccuaacguggacccaaaugccaaccccaaugucgauccuaacgcaaauccaaacgccaacccgaaugcuaaccccaaugcaaacccuaaugccaacccaaaugcuaaccccaaugccaacccuaaugcgaacccaaaugcaaaccccaaugccaacccgaacgcuaauccuaacgccaaucccaacgcaaauccaaacgcuaauccuaacgccaaucccaacgcgaauccaaacgccaaucccaacgcaaauccuaacgcuaacccaaaugccaacccgaaugcuaaccccaaugccaacccuaaugcaaacccaaaugccaaccccaaugcuaacccuaaugcgaacccaaaugcaaaccccaaugccaacccgaacgcuaauccuaacgccaauccaaacgcaaaucccaacgccaauccuaacgcuaaucccaacgccaauccaaacgcaaauccuaacgcgaaucccaacgcuaacccaaauaaaaacaaucagggcaacggccaagggcauaauaugccgaacgacccuaauagaaacguggacgagaaugccaacgcaaauaacgccguuaagaauaacaauaacgaggaacccucagauaagcacauugagcaguauuugaaaaagauacagaacagccucaguacugaaugguccccauguucugugacgugcggaaaugguauccaggucaggauuaaacccggcagcgcuaacaagccuaaagacgagcuggauuacgaaaaugacaucgagaagaaaauuuguaagauggagaagugcuccucaguguuuaacguaguuaauaguagcaucgggcugauaauggugcucucuuucuuauuucugaacuga

SEQ ID NO: 4148 - RNA, 1287 nt, Artificial Sequence
  derived and/or modified CDS sequence (opt3) from Pf(TiMS95-112)__BAM84878.1__CSP
augaugagaaagcuggccauccucagcguguccucuuuccuuuuugucgaggcucuguuccaggaauaccaaugcuauggcucaaguagcaacaccaggguuuugaaugaguuaaacuacgacaaugcagggacaaaccuguauaaugaacuagagaugaacuacuauggaaaacaggaaaauugguacucccucaagaaaaacucucggucgcugggugagaaugaugacggcaacaauaacaauggggauaacggacgcgagggcaaggacgaagauaaacgagacgguaauaacgaggauaacgaaaaacuucguaagcccaagcacaagaaacugaagcagccuggggacggaaauccagauccgaacgccaaucccaacguggacccuaaugcgaacccaaauguagaucccaacgcuaauccuaacguggacccaaaugccaaccccaaugcaaacccuaaugccaacccaaacgcuaauccgaacgcaaaucccaacgccaauccuaacgcuaauccaaacgccaaucccaacgcgaauccuaacgcaaauccaaacgccaaucccaacgcuaacccgaaugccaacccuaaugcaaaccccaaugcuaacccaaaugccaacccuaaugcgaaccccaaugccaacccaaaugcaaaccccaaugcuaacccuaacgccaauccaaacgcuaauccgaacgccaaucccaacgcaaauccuaacgccaauccaaacgcuaaucccaacgcgaauccuaacgcaaauccaaacgccaaucccaacgcuaacccgaaugccaacccuaaugcaaacccaaaugccaaccccaaugcuaacccuaaugccaaccccaaugcaaacccaaaugcgaacccuaaugcuaaccccaacgccaauccaaacaaaaauaaccagggcaauggccaagggcauaacaugccgaaugauccuaacagaaaugucgacgagaacgcaaaugccaacaaugacgugaagaacaauaacaacgaggaacccucagauaagcacauugagcaguauuugaaaaagauacaguacagccucaguacugaaugguccccauguucuguuacgugcggaaaugguauccaggugaggauuaaacccggcagcgcugacaagccuaaagaucaacuggacuacgagaacgauaucgaaaagaaaauuuguaagauggagaagugcuccucagucuuuaaugugguaaacaguagcaucgggcugauaaugguucucucuuucuuauuucugaauuga

SEQ ID NO: 4149 - RNA, 1284 nt, Artificial Sequence
  derived and/or modified CDS sequence (opt3) from Pf(E103)__ACO49384.1__CSP
augagaaagcuggccauccucagcguguccucuuuccuuuuugucgaggcucuguuccaggaauaccaaugcuauggcucaaguagcaacaccaggguuuugaaugaguuaaacuacgacaaugcagggacaaaccuguauaaugaacuagagaugaacuacuauggaaaacaggaaaauugguacucccucaagaaaaacucucggucgcugggugagaaugaugacggcaacaauaacaauggggauaacggacgcgagggcaaggacgaagauaaacgagacgguaauaacgaggauaacgaaaaacuucguaagcccaagcacaagaaacugaagcagccuggggacggaaauccagauccgaacgccaaucccaacguggacccuaaugcgaacccaaauguagaucccaacgcuaauccuaacguggacccaaaugccaaccccaaugcaaacccuaaugccaacccaaacgcuaauccgaacgcaaaucccaacgccaauccuaacgcuaauccaaacgccaaucccaacgcgaauccuaacgcaaauccaaacgccaaucccaacgcuaacccgaaugccaacccuaaugcaaaccccaaugcuaacccaaaugccaacccuaaugcgaaccccaaugccaacccaaaugcaaaccccaaugcuaacccuaacgccaauccaaacgcuaauccgaacgccaaucccaacgcaaauccuaacgccaauccaaacgcuaaucccaacgcgaauccuaacgcaaauccaaacgccaaucccaacgcuaacccgaaugccaacccuaaugcaaacccaaaugccaaccccaaugcuaacccuaaugccaaccccaaugcaaacccaaaugcgaacccuaaugcuaaccccaacgccaauccaaacaaaaauaaccagggcaauggccaagggcauaacaugccgaaugauccuaacagaaaugucgacgagaacgcaaaugccaacaaugcugugaagaacaauaacaacgaggaacccucagacaagcacauugagcaguauuugaaaaauauacagaacagccucaguacugaaugguccccauguucuguuacgugcggaaaugguauccaggugaggauuaagcccggcagcgccaacaaaccuaaggaugagcuggacuacgaaaaugauaucgagaaaaagauuuguaaaauggagaagugcuccucagucuuuaacgugguaaauaguagcaucgggcugauaaugguucucucuuucuuauuucugaacuga

SEQ ID NO: 4150 - RNA, 1284 nt, Artificial Sequence
  derived and/or modified CDS sequence (opt3) from Pf(TMS75)__ACO49490.1__CSP
augagaaagcuggccauccucagcguguccucuuuccuuuuugucgaggcucuguuccaggaauaccaaugcuauggcucaaguagcaacaccaggguuuugaaugaguuaaacuacgacaaugcagggacaaaccuguauaaugaacuagagaugaacuacuauggaaaacaggaaaauugguacucccucaagaaaaacucucggucgcugggugagaaugaugacggcaacaauaacaauggggauaacggacgcgagggcaaggacgaagauaaacgagacgguaauaacgaggauaacgaaaaacuucguaagcccaagcacaagaaacugaagcagccuggggacggaaauccagauccgaacgccaaucccaacguggacccuaaugcgaacccaaauguagaucccaacgcuaauccuaacguggacccaaaugccaaccccaaugucgauccuaacgcaaauccaaacgccaacccgaaugcuaaccccaaugcaaacccuaaugccaacccaaaugcuaaccccaaugccaacccuaaugcgaacccaaaugcaaaccccaaugccaacccgaacgcuaauccuaacgccaaucccaacgcaaauccaaacgcuaauccuaacgccaaucccaacgcgaauccaaacgccaaucccaacgcaaauccuaacgcuaacccaaaugccaacccgaaugcuaaccccaaugccaacccuaaugcaaacccaaaugccaaccccaaugcuaacccuaaugcgaacccaaaugcaaaccccaaugccaacccgaacgcuaauccuaacgccaauccaaacgcaaaucccaacgccaauccuaacgcuaaucccaacgccaauccaaacgcaaauccuaacgcgaaucccaacgcuaacccaaauaaaaacaaucagggcaacggccaagggcauaauaugccgaacgacccuaauagaaacguggacgagaaugccaacgcaaauaacgccguuaagaauaacaauaacgaggaacccucagauaagcacauugagcaguauuugaaaaagauacagaacagccucaguacugaaugguccccauguucugugacgugcggaaaugguauccaggucaggauuaaacccggcagcgcuaacaagccuaaagacgagcuggauuacgaaaaugacaucgagaagaaaauuuguaagauggagaagugcuccucaguguuuaacguaguuaauaguagcaucgggcugauaauggugcucucuuucuuauuucugaacuga

SEQ ID NO: 4151 - RNA, 1284 nt, Artificial Sequence
  derived and/or modified CDS sequence (opt3) from Pf(TSY621)__ACO49538.1__CSP
augagaaagcuggccauccucagcguguccucuuuccuuuuugucgaggcucuguuccaggaauaccaaugcuauggcucaaguagcaacaccaggguuuugaaugaguuaaacuacgacaaugcagggacaaaccuguauaaugaacuagagaugaacuacuauggaaaacaggaaaauugguacucccucaagaaaaacucucggucgcugggugagaaugaugacggcaacaauaacaauggggauaacggacgcgagggcaaggacgaagauaaacgagacgguaauaacgaggauaacgaaaaacuucguaagcccaagcacaagaaacugaagcagccuggggacggaaauccagauccgaacgccaaucccaacguggacccuaaugcgaacccaaauguagaucccaacgcuaauccuaacguggacccaaaugccaaccccaaugcaaacccuaaugccaacccaaacgcuaauccgaacgcaaaucccaacgccaauccuaacgcuaauccaaacgccaaucccaacgcgaauccuaacgcaaauccaaacgccaaucccaacgcuaacccgaaugccaacccuaaugcaaaccccaaugcuaacccaaaugccaacccuaaugcgaaccccaaugccaacccaaaugcaaaccccaaugcuaacccuaacgccaauccaaacgcuaauccgaacgccaaucccaacgcaaauccuaacgccaauccaaacgcuaaucccaacgcgaauccuaacgcaaauccaaacgccaaucccaacgcuaacccgaaugccaacccuaaugcaaacccaaaugccaaccccaaugcuaacccuaaugccaaccccaaugcaaacccaaaugcgaacccuaaugcuaaccccaacgccaauccaaacaaaaauaaccagggcaauggccaagggcauaacaugccgaaugauccuaacagaaaugucgacgagaacgcaaaugccaacaaugacgugaagaacaauaacaacgaggaacccucagauaagcacauugagcaguauuugaaaaagauacaguacagccucaguacugaaugguccccauguucuguuacgugcggaaaugguauccaggugaggauuaaacccggcagcgcugacaagccuaaagaucaacuggacuacgagaacgauaucgaaaagaaaauuuguaagauggagaagugcuccucagucuuuaaugugguaaacaguagcaucgggcugauaaugguucucucuuucuuauuucugaauuga

SEQ ID NO: 4152 - RNA, 1284 nt, Artificial Sequence
  derived and/or modified CDS sequence (opt3) from Pf(TSY646)__ACO49540.1__CSP
augagaaagcuggccauccucagcguguccucuuuccuuuuugucgaggcucuguuccaggaauaccaaugcuauggcucaaguagcaacaccaggguuuugaaugaguuaaacuacgacaaugcagggacaaaccuguauaaugaacuagagaugaacuacuauggaaaacaggaaaauugguacucccucaagaaaaacucucggucgcugggugagaaugaugacggcaacaauaacaauggggauaacggacgcgagggcaaggacgaagauaaacgagacgguaauaacgaggauaacgaaaaacuucguaagcccaagcacaagaaacugaagcagccuggggacggaaauccagauccgaacgccaaucccaacguggacccuaaugcgaacccaaauguagaucccaacgcuaauccuaacguggacccaaaugccaaccccaaugcaaacccuaaugccaacccaaacgcuaauccgaacgcaaaucccaacgccaauccuaacgcuaauccaaacgccaaucccaacgcgaauccuaacgcaaauccaaacgccaaucccaacgcuaacccgaaugccaacccuaaugcaaaccccaaugcuaacccaaaugccaacccuaaugcgaaccccaaugccaacccaaaugcaaaccccaaugcuaacccuaacgccaauccaaacgcuaauccgaacgccaaucccaacgcaaauccuaacgccaauccaaacgcuaaucccaacgcgaauccuaacgcaaauccaaacgccaaucccaacgcuaacccgaaugccaacccuaaugcaaacccaaaugccaaccccaaugcuaacccuaaugccaaccccaaugcaaacccaaaugcgaacccuaaugcuaaccccaacgccaauccaaacaaaaauaaccagggcaauggccaagggcauaacaugccgaaugauccuaacagaaaugucgacgagaacgcaaaugccaacaaugcugugaagaacaauaacaacgaggaacccucagacaagcacauugagcaguauuugaaaaagauacagaauagccucaguacugaaugguccccauguucuguuacgugcggaaacgguauccaggugaggauuaaacccggcagcgccaauaagccuaaagaugagcuggacuacgaaaacgauaucgagaagaaaauuuguaagauggagaagugcuccucagucuuuaaugugguaaacaguagcaucgggcugauaaugguucucucuuucuuauuucugaauuga

SEQ ID NO: 4153 - RNA, 1275 nt, Artificial Sequence
  derived and/or modified CDS sequence (opt3) from Pf(806)__AAA29562.1__CSP
augaugagaaagcuggccauccucagcguguccucuuuccuuuuugucgaggcucuguuccaggaauaccaaugcuauggcucaaguagcaacaccaggguuuugaaugaguuaaacuacgacaaugcagggauuaaccuguauaaugaacuagagaugaacuacuauggaaaacaggaaaauugguacucccucaagaaaaacucucggucgcugggugagaaugaugacggcaacaauaacaauggggauaacggacgcgagggcaaggacgaagauaaacgagacgguaauaacgaggauaacgaaaaacuucguaagcccaagcacaagaaacugaagcagccuggggacggaaauccagauccgaacgccaaucccaacguggacccuaaugcgaacccaaauguagaucccaacgcuaauccuaacguggacccaaaugccaaccccaaugcaaacccuaaugccaacccaaacgcuaauccgaacgcaaaucccaacgccaauccuaacgcuaauccaaacgccaaucccaacgcgaauccuaacgcaaauccaaacgccaaucccaacgcuaacccgaaugccaacccuaaugcaaaccccaaugcuaacccaaaugccaacccuaaugcgaaccccaaugccaacccaaaugcaaaccccaaugcuaacccuaacgccaauccaaacgcuaauccgaacgccaaucccaacgcaaauccuaacgccaauccaaacgcuaaucccaacgcgaauccuaacgcaaauccaaacgccaaucccaacgcuaacccgaaugccaacccuaaugcaaacccaaaugccaaccccaaugcuaacccuaaugccaaccccaaugcaaacccaaaugcgaacccuaaugcuaaccccaacaaaaauaaccagggcaauggccaagggcauaacaugccaaaugauccgaacagaaaugucgacgagaacgccaaugcaaacaaugccgugaagaacaauaacaaugaggaaccuucagacaagcacauagagcaguauuugaaaaagauccagaacagccucaguacagaauggucccccuguucuguuacuugcggaaacgguauucaggugaggaucaaaccaggcagcgcuaauaagcccaaagaugagcuggacuacgaaaacgauauugagaagaaaaucuguaagauggagaagugcuccucagucuuuaaugugguaaacaguagcauagggcugaucaugguucucucuuucuuauuucugaauuga

SEQ ID NO: 4154 - RNA, 1275 nt, Artificial Sequence
  derived and/or modified CDS sequence (opt3) from Pf(Pal97-100)__BAM84952.1__CSP
augaugagaaagcuggccauccucagcguguccucuuuccuuuuugucgaggcucuguuccaggaauaccaaugcuauggcucaaguagcaacaccaggguuuugaaugaguuaaacuacgacaaugcagggacaaaccuguauaaugaacuagagaugaacuacuauggaaaacaggaaaauugguacucccucaagaaaaacucucggucgcugggugagaaugaugacggcaacaauaacaauggggauaacggacgcgagggcaaggacgaagauaaacgagacgguaauaacgaggauaacgaaaaacuucguaagcccaagcacaagaaacugaagcagccuggggacggaaauccagauccgaacgccaaucccaacguggacccuaaugcgaacccaaauguagaucccaacgcuaauccuaacguggacccaaaugccaaccccaaugcaaacccuaaugccaacccaaacgcuaauccgaacgcaaaucccaacgccaauccuaacgcuaauccaaacgccaaucccaacgcgaauccuaacgcaaauccaaacgccaaucccaacgucgauccgaacgcuaauccuaacgccaaucccaacgcaaauccaaacgcuaauccuaacgccaaucccaacgcgaauccaaacgccaaucccaacgcaaauccuaacgcuaacccaaaugccaacccgaaugcuaaccccaaugccaacccuaaugcaaacccaaaugccaaccccaaugcuaacccuaaugcgaacccaaaugcaaaccccaaugccaacccgaacgcuaauccuaacgccaauccaaacgcaaaucccaacgccaauccuaacgcuaaucccaacgccaauccaaacgcaaauccuaacgcgaaucccaacaaaaacaaucagggcaacggccaagggcauaauaugccaaacgacccgaauagaaacguggacgagaaugcuaacgccaauaacgcaguuaagaauaacaauaacgaggaaccuucagauaagcacauuacugaguauuugaaaaagauacagaauagccucaguacggaauggucccccuguucugugaccugcggaaacgguauccaggucaggauuaaaccaggcagcgccgggaaguccaaagacgagcuggauuacgaaaacgacaucgagaagaaaauuuguaagauggagaagugcucaaguguguuuaauguaguuaacagcucuaucggacugauaauggugcucuccuucuuauuucugaauuga

SEQ ID NO: 4155 - RNA, 1275 nt, Artificial Sequence
  derived and/or modified CDS sequence (opt3) from Pf(PFS89)__BAN59425.1__CSP
augaugagaaagcuggccauccucagcguguccucuuuccuuuuugucgaggcucuguuccaggaauaccaaugcuauggcucaaguagcaacaccaggguuuugaaugaguuaaacuacgacaaugcagggacaaaccuguauaaugaacuagagaugaacuacuauggaaaacaggaaaauugguacucccucaagaaaaacucucggucgcugggugagaaugaugacggcaacaauaacaauggggauaacggacgcgagggcaaggacgaagauaaacgagacgguaauaacgaggauaacgaaaaacuucguaagcccaagcacaagaaacugaagcagccuggggacggaaauccagauccgaacgccaaucccaacguggacccuaaugcgaacccaaauguagaucccaacgcuaauccuaacguggacccaaaugccaaccccaaugcaaacccuaaugccaacccaaacgcuaauccgaacgcaaaucccaacgccaauccuaacgcuaauccaaacgccaaucccaacgcgaauccuaacgcaaauccaaacgccaaucccaacgcuaacccgaaugccaacccuaaugcaaaccccaaugcuaacccaaaugccaacccuaaugcgaaccccaaugccaacccaaaugcaaaccccaaugcuaacccuaacgccaauccaaacgcuaauccgaacgccaaucccaacgcaaauccuaacgccaauccaaacgcuaaucccaacgcgaauccuaacgcaaauccaaacgccaaucccaacgcuaacccgaaugccaacccuaaugcaaacccaaaugccaaccccaaugcuaacccuaaugccaaccccaaugcaaacccaaaugcgaacccuaaugcuaaccccaacaaaaauaaccagggcaauggccaagggcauaacaugccaaaugauccgaacagaaaugucgacgagaacgccaaugcaaacaaugccgugaagaacaauaacaaugaggaaccuucagacaagcacauugagcaguauuugaaaaagauacagaacagccucaguacugaauggucccccuguucuguuacgugcggaaacgguauccaggugaggauuaaaccaggcagcgcuaauaagcccaaagaugagcuggacuacgaaaacgauaucgagaagaaaauuuguaagauggagaagugcuccucagucuuuaaugugguaaacaguagcaucgggcugauaaugguucucucuuucuuauuucugaauuga

SEQ ID NO: 4156 - RNA, 1275 nt, Artificial Sequence
  derived and/or modified CDS sequence (opt3) from Pf(PNG912-035)__BAM85007.1__CSP
augaugagaaagcuggccauccucagcguguccucuuuccuuuuugucgaggcucuguuccaggaauaccaaugcuauggcucaaguagcaacaccaggguuuugaaugaguuaaacuacgacaaugcagggacaaaccuguauaaugaacuagagaugaacuacuauggaaaacaggaaaauugguacucccucaagaaaaacucucggucgcugggugagaaugaugacggcaacaauaacaauggggauaacggacgcgagggcaaggacgaagauaaacgagacgguaauaacgaggauaacgaaaaacuucguaagcccaagcacaagaaacugaagcagccuggggacggaaauccagauccgaacgccaaucccaacguggacccuaaugcgaacccaaauguagaucccaacgcuaauccuaacguggacccaaaugccaaccccaaugcaaacccuaaugccaacccaaacgcuaauccgaacgcaaaucccaacgccaauccuaacgcuaauccaaacgccaaucccaacgcgaauccuaacgcaaauccaaacgccaaucccaacgcuaacccgaaugccaacccuaaugcaaaccccaaugcuaacccaaaugccaacccuaaugcgaaccccaaugccaacccaaaugucgaucccaacgcaaauccuaacgcuaacccaaaugccaacccgaaugcuaaccccaaugccaacccuaaugcaaacccaaaugccaaccccaaugcuaacccuaaugcgaacccaaaugcaaaccccaaugccaacccgaacgcuaauccuaacgccaauccaaacgcaaaucccaacgccaauccuaacgcuaaucccaacgccaauccaaacgcaaauccuaacgcgaaucccaacaaaaacaaucagggcaacggccaagggcauaauaugccaaacgacccgaauagaaacguggacgagaaugcuaacgccaauaacgcaguuaagaauaacaauaacgaggaaccuucagauaagcacauugagcaguauuugaaaaagauacagaauagccucaguacugaauggucccccuguucugugacgugcggaaacgguauccaggucaggauuaaaccaggcagcgccgacaagcccaaagaucaacuggacuacgagaacgauaucgaaaagaaaauuuguaagauggagaagugcuccucaguguuuaauguaguuaacaguagcaucgggcugauaauggugcucucuuucuuauuucugaauuga

SEQ ID NO: 4157 - RNA, 1275 nt, Artificial Sequence
  derived and/or modified CDS sequence (opt3) from Pf(Sol95-308)__BAM85089.1__CSP
augaugagaaagcuggccauccucagcguguccucuuuccuuuuugucgaggcucuguuccaggaauaccaaugcuauggcucaaguagcaacaccaggguuuugaaugaguuaaacuacgacaaugcagggacaaaccuguauaaugaacuagagaugaacuacuauggaaaacaggaaaauugguacucccucaagaaaaacucucggucgcugggugagaaugaugacggcaacaauaacaauggggauaacggacgcgagggcaaggacgaagauaaacgagacgguaauaacgaggauaacgaaaaacuucguaagcccaagcacaagaaacugaagcagccuggggacggaaauccagauccgaacgccaaucccaacguggacccuaaugcgaacccaaauguagaucccaacgcuaauccuaacguggacccaaaugccaaccccaaugucgauccuaacgcaaauccaaacgccaacccgaaugcuaaccccaaugcaaacccuaaugccaacccaaaugcuaaccccaaugccaacccuaaugcgaacccaaaugcaaaccccaaugccaacccgaacgcuaauccuaacgccaaucccaacgcaaauccaaacgcuaauccuaacgccaaucccaacgcgaauccaaacgccaaucccaacgcaaauccuaacgcuaacccaaaugccaacccgaaugcuaaccccaaugccaacccuaaugcaaacccaaaugccaaccccaaugcuaacccuaaugcgaacccaaaugcaaaccccaaugccaacccgaacgcuaauccuaacgccaauccaaacgcaaaucccaacgccaauccuaacgcuaaucccaacgccaauccaaacgcaaauccuaacgcgaaucccaacaaaaacaaucagggcaacggccaagggcauaauaugccaaacgacccgaauagaaacguggacgagaaugcuaacgccaauaacgcaguuaagaauaacaauaacgaggaaccuucagauaagcacauugagcaguauuugaaaaagauacagaauagccucaguacugaauggucccccuguucugugacgugcggaaacgguauccaggucaggauuaaaccaggcagcgccaacaagcccaaagacgagcuggauuacgaaaaugacaucgagaagaaaauuuguaagauggagaagugcuccucaguguuuaacguaguuaauaguagcaucgggcugauaauggugcucucuuucuuauuucugaacuga

SEQ ID NO: 4158 - RNA, 1275 nt, Artificial Sequence
  derived and/or modified CDS sequence (opt3) from Pf(Sol95-346)__BAM85102.1__CSP
augaugagaaagcuggccauccucagcguguccucuuuccuuuuugucgaggcucuguuccaggaauaccaaugcuauggcucaaguagcaacaccaggguuuugaaugaguuaaacuacgacaaugcagggacaaaccuguauaaugaacuagagaugaacuacuauggaaaacaggaaaauugguacucccucaagaaaaacucucggucgcugggugagaaugaugacggcaacaauaacaauggggauaacggacgcgagggcaaggacgaagauaaacgagacgguaauaacgaggauaacgaaaaacuucguaagcccaagcacaagaaacugaagcagccuggggacggaaauccagauccgaacgccaaucccaacguggacccuaaugcgaacccaaauguagaucccaacgcuaauccuaacguggacccaaaugccaaccccaaugcaaacccuaaugccaacccaaacgcuaauccgaacgcaaaucccaacgccaauccuaacgcuaauccaaacgccaaucccaacgcgaauccuaacgcaaauccaaacgccaaucccaacgcuaacccgaaugccaacccuaaugcaaaccccaaugcuaacccaaaugccaacccuaaugcgaaccccaaugccaacccaaaugucgaucccaacgcaaauccuaacgcuaacccaaaugccaacccgaaugcuaaccccaaugccaacccuaaugcaaacccaaaugccaaccccaaugcuaacccuaaugcgaacccaaaugcaaaccccaaugccaacccgaacgcuaauccuaacgccaauccaaacgcaaaucccaacgccaauccuaacgcuaaucccaacgccaauccaaacgcaaauccuaacgcgaaucccaacaaaaacaaucagggcaacggccaagggcauaauaugccaaacgacccgaauagaaacguggacgagaaugcuaacgccaauaacgcaguuaagaauaacaauaacgaggaaccuucagauaagcacauugagcaguauuugaaaaagauacagaauagccucaguacugaauggucccccuguucugugacgugcggaaacgguauccaggucaggauuaaaccaggcagcgccgggaaguccaaagacgagcuggauuacgaaaacgacaucgagaagaaaauuuguaagauggagaagugcucaaguguguuuaauguaguuaacagcucuaucggacugauaauggugcucuccuucuuauuucugaauuga

SEQ ID NO: 4159 - RNA, 1275 nt, Artificial Sequence
  derived and/or modified CDS sequence (opt3) from Pf(T4 Thailand)__AAA29555.1__CSP
augaugagaaagcuggccauccucagcguguccucuuuccuuuuugucgaggcucuguuccaggaauaccaaugcuauggcucaaguagcaacaccaggguuuugaaugaguuaaacuacgacaaugcagggacaaaccuguauaaugaacuagagaugaacuacuauggaaaacaggaaaauugguacucccucaagaaaaacucucggucgcugggugagaaugaugacggcaacaauaacaauggggauaacaaucgcgagggaaaggacgaagauaaacgagacggcaacaacgaggauaaugaaacucuucguaagcccaagcacaaaaagcugaaacagccuggugacgggaacccagauccgaaugccaaccccaauguggacccuaacgcgaauccaaacguagaucccaaugcuaacccuaauguggacccaaacgccaaucccaacgcaaauccuaacgccaacccaaaugcuaacccgaaugcaaaccccaaugccaacccuaaugcuaacccaaaugccaaccccaaugcgaacccuaaugcaaacccaaaugccaaccccaacgcuaauccgaacgccaauccuaacgcaaaucccaacgcuaauccaaacgccaauccuaacgcgaaucccaacgccaauccaaacgcaaaucccaacgcuaacccuaaugccaacccaaaugcuaacccgaaugccaaccccaaugcaaacccuaaugccaacccaaaugcuaaccccaaugcgaacccuaaugcaaacccaaaugccaaccccaacgcuaauccgaacgccaauccuaacgcaaauccaaacgccaaucccaacgcuaauccuaacgccaaucccaacgcaaauccaaacgcgaauccuaacgcuaaccccaauaagaacaaucagggaaacggccaaggccauaauaugccaaacgauccgaauagaaacgucgacgagaaugccaacgcaaauaacgccgugaaaaauaacaauaacgaggaaccuucagacaagcacauugagcaguauuugaagaaaauacagaacagccucaguacggaauggucccccuguucuguuaccugcgggaauggaauccaggugaggauuaagccagguagcgcuaacaaacccaaggaugagcuggacuacgaaaaugauaucgagaaaaagauuuguaaaauggagaagugcuccucagucuuuaacgugguaaauaguagcaucggccugauaaugguucucucuuucuuauuucugaacuga

SEQ ID NO: 4160 - RNA, 1275 nt, Artificial Sequence
  derived and/or modified CDS sequence (opt3) from Pf(Tz03-025)__BAM84798.1__CSP
augaugagaaagcuggccauccucagcguguccucuuuccuuuuugucgaggcucuguuccaggaauaccaaugcuauggcucaaguagcaacaccaggguuuugaaugaguuaaacuacgacaaugcagggacaaaccuguauaaugaacuagagaugaacuacuauggaaaacaggaaaauugguacucccucaagaaaaacucucggucgcugggugagaaugaugacggcaacaauaacaauggggauaacggacgcgagggcaaggacgaagauaaacgagacgguaauaacgaggauaacgaaaaacuucguaagcccaagcacaagaaacugaagcagccugccgacgggaauccagauccgaacgcgaaucccaacguggacccuaaugcuaacccaaauguagaucccaacgccaauccuaacguggacccaaaugcaaaccccaaugccaacccuaaugcuaacccaaacgcaaauccgaacgccaaucccaacgcuaauccuaacgccaauccaaacgcgaaucccaacgcaaauccuaacgccaauccaaacgcuaaucccaacgccaacccgaaugcaaacccuaaugcuaaccccaaugccaacccaaaugcgaacccuaaugccaaccccaaugcaaacccaaaugucgaucccaacgcuaauccuaacgccaacccaaaugcuaacccgaaugccaaccccaaugcaaacccuaaugccaacccaaaugcuaaccccaaugcgaacccuaaugcaaacccaaaugccaaccccaaugcuaacccgaacgccaauccuaacgcaaauccaaacgccaaucccaacgcuaauccuaacgccaaucccaacgcaaauccaaacgcgaauccuaacgcuaaucccaacaaaaacaaucagggaaacggccaaggccauaauaugccaaacgacccgaauagaaacguggacgagaaugccaacgcaaauaacgccguuaagaauaacaauaacgaggaaccuucagaucagcacauugagaaguauuugaaaacuauaaagaauagccucaguacggaauggucccccuguucugugaccugcgggaacggaauccaggucaggauuaaaccagguagcgcuaacaagcccaaagaccagcuggauuacgccaaugacaucgagaagaaaauuuguaagauggaaaagugcuccucaguguuuaacguaguuaauaguagcaucggccugauaauggugcucucuuucuuauuucugaacuga

SEQ ID NO: 4161 - RNA, 1272 nt, Artificial Sequence
  derived and/or modified CDS sequence (opt3) from Pf(NR62)__ADF48375.1__CSP
augagaaagcuggccauccucagcguguccucuuuccuuuuugucgaggcucuguuccaggaauaccaaugcuauggcucaaguagcaacaccaggguuuugaaugaguuaaacuacgacaaugcagggacaaaccuguauaaugaacuagagaugaacuacuauggaaaacaggaaaauugguacucccucaagaaaaacucucggucgcugggugagaaugaugacggcaacaauaacaauggggauaacggacgcgagggcaaggacgaagauaaacgagacgguaauaacgaggauaacgaaaaacuucguaagcccaagcacaagaaacugaagcagccuggggacggaaauccagauccgaacgccaaucccaacguggacccuaaugcgaacccaaauguagaucccaacgcuaauccuaacguggacccaaaugccaaccccaaugucgauccuaacgcaaauccaaacgccaacccgaaugcuaaccccaaugcaaacccuaaugccaacccaaaugcuaaccccaaugccaacccuaaugcgaacccaaaugcaaaccccaaugccaacccgaacgcuaauccuaacgccaaucccaacgcaaauccaaacgcuaauccuaacgccaaucccaacgcgaauccaaacgccaaucccaacgcaaauccuaacgcuaacccaaaugccaacccgaaugcuaaccccaaugccaacccuaaugcaaacccaaaugccaaccccaaugcuaacccuaaugcgaacccaaaugcaaaccccaaugccaacccgaacgcuaauccuaacgccaauccaaacgcaaaucccaacgccaauccuaacgcuaaucccaacgccaauccaaacgcaaauccuaacgcgaaucccaacaaaaacaaucagggcaacggccaagggcauaauaugccaaacgacccgaauagaaacguggacgagaaugcuaacgccaauaacgcaguuaagaauaacaauaacgaggaaccuucagauaagcacauugagcaguauuugaaaaagauacagaauagccucaguacugaauggucccccuguucugugacgugcggaaacgguauccaggucaggauuaaaccaggcagcgccaacaagcccaaagacgagcuggauuacgaaaaugacaucgagaagaaaauuuguaagauggagaagugcuccucaguguuuaacguaguuaauaguagcaucgggcugauaauggugcucucuuucuuauuucugaacuga

SEQ ID NO: 4162 - RNA, 1272 nt, Artificial Sequence
  derived and/or modified CDS sequence (opt3) from Pf(TSY673)__ACO49542.1__CSP
augagaaagcuggccauccucagcguguccucuuuccuuuuugucgaggcucuguuccaggaauaccaaugcuauggcucaaguagcaacaccaggguuuugaaugaguuaaacuacgacaaugcagggacaaaccuguauaaugaacuagagaugaacuacuauggaaaacaggaaaauugguacucccucaagaaaaacucucggucgcugggugagaaugaugacggcaacaauaacaauggggauaacggacgcgagggcaaggacgaagauaaacgagacgguaauaacgaggauaacgaaaaacuucguaagcccaagcacaagaaacugaagcagccuggggacggaaauccagauccgaacgccaaucccaacguggacccuaaugcgaacccaaauguagaucccaacgcuaauccuaacguggacccaaaugccaaccccaaugcaaacccuaaugccaacccaaacgcuaauccgaacgcaaaucccaacgccaauccuaacgcuaauccaaacgccaaucccaacgcgaauccuaacgcaaauccaaacgccaaucccaacgucgauccgaacgcuaauccuaacgccaaucccaacgcaaauccaaacgcuaauccuaacgccaaucccaacgcgaauccaaacgccaaucccaacgcaaauccuaacgcuaacccaaaugccaacccgaaugcuaaccccaaugccaacccuaaugcaaacccaaaugccaaccccaaugcuaacccuaaugcgaacccaaaugcaaaccccaaugccaacccgaacgcuaauccuaacgccaauccaaacgcaaaucccaacgccaauccuaacgcuaaucccaacgccaauccaaacgcaaauccuaacgcgaaucccaacaaaaacaaucagggcaacggccaagggcauaauaugccaaacgacccgaauagaaacguggacgagaaugcuaacgccaauaacgcaguuaagaauaacaauaacgaggaaccuucagauaagcacauuacugaguauuugaaaaagauacagaauagccucaguacggaauggucccccuguucugugaccugcggaaacgguauccaggucaggauuaaaccaggcagcgccgggaaguccaaagacgagcuggauuacgaaaacgacaucgagaagaaaauuuguaagauggagaagugcucaaguguguuuaauguaguuaacagcucuaucggacugauaauggugcucuccuucuuauuucugaauuga

SEQ ID NO: 4163 - RNA, 1272 nt, Artificial Sequence
  derived and/or modified CDS sequence (opt3) from Pf(TSY688)__ACO49545.1__CSP
augagaaagcuggccauccucagcguguccucuuuccuuuuugucgaggcucuguuccaggaauaccaaugcuauggcucaaguagcaacaccaggguuuugaaugaguuaaacuacgacaaugcagggacaaaccuguauaaugaacuagagaugaacuacuauggaaaacaggaaaauugguacucccucaagaaaaacucucggucgcugggugagaaugaugacggcaacaauaacaauggggauaacggacgcgagggcaaggacgaagauaaacgagacgguaauaacgaggauaacgaaaaacuucguaagcccaagcacaagaaacugaagcagccuggggacggaaauccagauccgaacgccaaucccaacguggacccuaaugcgaacccaaauguagaucccaacgcuaauccuaacguggacccaaaugccaaccccaaugcaaacccuaaugccaacccaaacgcuaauccgaacgcaaaucccaacgccaauccuaacgcuaauccaaacgccaaucccaacgcgaauccuaacgcaaauccaaacgccaaucccaacgcuaacccgaaugccaacccuaaugcaaaccccaaugcuaacccaaaugccaacccuaaugcgaaccccaaugccaacccaaaugcaaaccccaaugcuaacccuaacgccaauccaaacgcuaauccgaacgccaaucccaacgcaaauccuaacgccaauccaaacgcuaaucccaacgcgaauccuaacgcaaauccaaacgccaaucccaacgcuaacccgaaugccaacccuaaugcaaacccaaaugccaaccccaaugcuaacccuaaugccaaccccaaugcaaacccaaaugcgaacccuaaugcuaaccccaacaaaaauaaccagggcaauggccaagggcauaacaugccaaaugauccgaacagaaaugucgacgagaacgccaaugcaaacaaugccgugaagaacaauaacaaugaggaaccuucagacaagcacauugagcaguauuugaaaaagauacagaacagccucaguacugaauggucccccuguucuguuacgugcggaaacgguauccaggugaggauuaaaccaggcagcgcuaauaagcccaaagaugagcuggacuacgaaaacgauaucgagaagaaaauuuguaagauggagaagugcuccucagucuuuaaugugguaaacaguagcaucgggcugauaaugguucucucuuucuuauuucugaauuga

SEQ ID NO: 4164 - RNA, 1263 nt, Artificial Sequence
  derived and/or modified CDS sequence (opt3) from Pf(835b)__AAA29574.1__CSP
augaugagaaagcuggccauccucagcguguccucuuuccuuuuugucgaggcucuguuccaggaauaccaaugcuauggcucaaguagcaacaccaggguuuugaaugaguuaaacuacgacaaugcagggauuaaccuguauaaugaacuagagaugaacuacuauggaaaacaggaaaauugguacucccucaagaaaaacucucggucgcugggugagaaugaugacggcaacaauaacaauggggauaacggacgcgagggcaaggacgaagauaaacgagacgguaauaacgaggauaacgaaaaacuucguaagcccaagcacaagaaacugaagcagccuggggacggaaauccagauccgaacgccaaucccaacguggacccuaaugcgaacccaaauguagaucccaacgcuaauccuaacguggacccaaaugccaaccccaaugcaaacccuaaugccaacccaaacgcuaauccgaacgcaaaucccaacgccaauccuaacgcuaauccaaacgccaaucccaacgcgaauccuaacgcaaauccaaacgccaaucccaacgcuaacccgaaugccaacccuaaugcaaaccccaaugcuaacccaaaugccaacccuaaugcgaaccccaaugccaacccaaaugcaaaccccaaugucgauccuaacgcuaacccaaaugccaacccgaaugcuaaccccaaugccaacccuaaugcaaacccaaaugccaaccccaaugcuaacccuaaugcgaacccaaaugcaaaccccaaugccaacccgaacgcuaauccuaacgccaauccaaacgcaaaucccaacgccaauccuaacgcuaaucccaacgccaauccaaacgcaaauccuaacaaaaauaaccagggcaacggccaagggcauaauaugcccaacgacccaaauagaaacguggacgagaaugcgaacgcuaauaacgccguuaagaauaacaauaacgaggaaccgucagauaagcacauaaaagaguauuugacaaagauccagaauagcauuaguacugaaugguccccuuguucugugacgugcggaaacgguauccaggucaggauuaaacccggcagcgcagggaagccaaaagacgagcucgaauacgagaaugauaucgagaagaaaauauguaagauggaaaagugcuccucaguguuuaacguaguuaacaguagcaucggacugauuauggugcugucuuuccucuuuuuaaauuga

SEQ ID NO: 4165 - RNA, 1263 nt, Artificial Sequence
  derived and/or modified CDS sequence (opt3) from Pf(FCC1/HN)__AAW59565.1__CSP
augaugagaaagcuggccauccucagcguguccucuuuccuuuuugucgaggcucuguuccaggaauaccaaugcuauggcucaaguagcaacaccaggguuuugaaugaguuaaacuacgacaaugcagggacaaaccuguauaaugaacuagagaugaacuacuauggaaaacaggaaaauugguacucccucaagaaaaacucucggucgcugggugagaaugaugacggcaacaauaacaauggggauaacggacgcgagggcaaggacgaagauaaacgagacgguaauaacgaggauaacgaaaaacuucguaagcccaagcacaagaaacugaagcagccuggggacggaaauccagauccgaacgccaaucccaacguggacccuaaugcgaacccaaauguagaucccaacgcuaauccuaacguggacccaaaugccaaccccaaugcaaacccuaaugccaacccaaacgcuaauccgaacgcaaaucccaacgccaauccuaacgcuaauccaaacgccaaucccaacgcgaauccuaacgcaaauccaaacgccaaucccaacgcuaacccgaaugccaacccuaaugcaaaccccaaugcuaacccaaaugccaacccuaaugcgaaccccaaugccaacccaaaugcaaaccccaaugcuaacccuaacgccaauccaaacgcuaauccgaacgccaaucccaacgcaaauccuaacgccaauccaaacgcuaaucccaacgcgaauccuaacgcaaauccaaacgccaaucccaacgcuaacccgaaugccaacccuaaugcaaacccaaaugccaaccccaaugcuaacccuaaugccaaccccaaugcaaacccaaaugcgaacccuaauaaaaacaaccagggcaauggccaagggcauaacaugcccaaugauccaaacagaaaugucgacgagaacgcuaaugccaacaaugcagugaagaacaauaacaaugaggaaccgucagacaagcacauugagcaguauuugaaaaagauacagaacagccucaguacugaaugguccccuuguucuguuacgugcggaaaugguauccaggccaggauuaaacccggcagcgcuaacaagccaaaagaugagcuggacuacgaaaacgauaucgagaagaaaauuuguaagauggagaagugcuccucaguguuuaaugucgugaacaguagcaucgggcugauaaugguacucucuuucuuauuucugaauuga

SEQ ID NO: 4166 - RNA, 1263 nt, Artificial Sequence
  derived and/or modified CDS sequence (opt3) from Pf(K1)__AAA29552.1__CSP
augaugagaaagcuggccauccucagcguguccucuuuccuuuuugucgaggcucuguuccaggaauaccaaugcuauggcucaaguagcaacaccaggguuuugaaugaguuaaacuacgacaaugcagggauuaaccuguauaaugaacuagagaugaacuacuauggaaaacaggaaaauugguacucccucaagaaaaacucucggucgcugggugagaaugaugacggcaacaauaacaauggggauaacggacgcgagggcaaggacgaagauaaacgagacgguaauaacgaggauaacgaaaaacuucguaagcccaagcacaagaaacugaagcagccuggggacggaaauccagauccgaacgccaaucccaacguggacccuaaugcgaacccaaauguagaucccaacgcuaauccuaacguggacccaaaugccaaccccaaugcaaacccuaaugccaacccaaacgcuaauccgaacgcaaaucccaacgccaauccuaacgcuaauccaaacgccaaucccaacgcgaauccuaacgcaaauccaaacgucgaucccaaugccaacccgaacgcuaauccuaacgccaaucccaacgcaaauccaaacgcuaauccuaacgccaaucccaacgcgaauccaaacgccaaucccaacgcaaauccuaacgcuaacccaaaugccaacccgaaugcuaaccccaaugccaacccuaaugcaaacccaaaugccaaccccaaugcuaacccuaaugcgaacccaaaugcaaaccccaaugccaacccgaacgcuaauccuaacgccaauccaaacgcaaaucccaacgccaauccuaacgcuaaucccaacgccaauccaaacgcaaauccuaacaaaaauaaccagggcaacggccaagggcauaauaugcccaacgacccaaauagaaacguggacgagaaugcgaacgcuaauaacgauguuaagaauaacaauaacgaggaaccgucagacaagcacauagagcaguauuugaaaaagauccaguacagccucaguacagaaugguccccuuguucugugacuugcggaaaugguauucaggucaggaucaaacccggcagcgccgauaagccaaaagaccaacuggauuacgagaacgacauugaaaagaaaaucuguaagauggagaagugcuccucaguguuuaauguaguuaacaguagcauagggcugaucauggugcucucuuucuuauuucugaacuga

SEQ ID NO: 4167 - RNA, 1263 nt, Artificial Sequence
  derived and/or modified CDS sequence (opt3) from Pf(K1)__BAD73952.1__CSP
augaugagaaagcuggccauccucagcguguccucuuuccuuuuugucgaggcucuguuccaggaauaccaaugcuauggcucaaguagcaacaccaggguuuugaaugaguuaaacuacgacaaugcagggacaaaccuguauaaugaacuagagaugaacuacuauggaaaacaggaaaauugguacucccucaagaaaaacucucggucgcugggugagaaugaugacggcaacaauaacaauggggauaacggacgcgagggcaaggacgaagauaaacgagacgguaauaacgaggauaacgaaaaacuucguaagcccaagcacaagaaacugaagcagccuggggacggaaauccagauccgaacgccaaucccaacguggacccuaaugcgaacccaaauguagaucccaacgcuaauccuaacguggacccaaaugccaaccccaaugcaaacccuaaugccaacccaaacgcuaauccgaacgcaaaucccaacgccaauccuaacgcuaauccaaacgccaaucccaacgcgaauccuaacgcaaauccaaacgucgaucccaaugccaacccgaacgcuaauccuaacgccaaucccaacgcaaauccaaacgcuaauccuaacgccaaucccaacgcgaauccaaacgccaaucccaacgcaaauccuaacgcuaacccaaaugccaacccgaaugcuaaccccaaugccaacccuaaugcaaacccaaaugccaaccccaaugcuaacccuaaugcgaacccaaaugcaaaccccaaugccaacccgaacgcuaauccuaacgccaauccaaacgcaaaucccaacgccaauccuaacgcuaaucccaacgccaauccaaacgcaaauccuaacaaaaauaaccagggcaacggccaagggcauaauaugcccaacgacccaaauagaaacguggacgagaaugcgaacgcuaauaacgauguuaagaauaacaauaacgaggaaccgucagacaagcacauugagcaguauuugaaaaagauacaguacagccucaguacugaaugguccccuuguucugugacgugcggaaaugguauccaggucaggauuaaacccggcagcgccgauaagccaaaagaccaacuggauuacgagaacgacaucgaaaagaaaauuuguaagauggagaagugcuccucaguguuuaauguaguuaacaguagcaucgggcugauaauggugcucucuuucuuauuucugaacuga

SEQ ID NO: 4168 - RNA, 1263 nt, Artificial Sequence
  derived and/or modified CDS sequence (opt3) from Pf(Pal97-074)__BAM84944.1__CSP
augaugagaaagcuggccauccucagcguguccucuuuccuuuuugucgaggcucuguuccaggaauaccaaugcuauggcucaaguagcaacaccaggguuuugaaugaguuaaacuacgacaaugcagggacaaaccuguauaaugaacuagagaugaacuacuauggaaaacaggaaaauugguacucccucaagaaaaacucucggucgcugggugagaaugaugacggcaacaauaacaauggggauaacggacgcgagggcaaggacgaagauaaacgagacgguaauaacgaggauaacgaaaaacuucguaagcccaagcacaagaaacugaagcagccuguggacgggaauccagauccgaacgccaaucccaacguagacccuaaugcgaacccaaauguggaucccaacgcuaauccuaacgucgacccaaaugccaaccccaaugcaaacccuaaugccaacccaaacgcuaauccgaacgcaaaucccaacgccaauccuaacgcuaauccaaacgccaaucccaacgcgaauccuaacgcaaauccaaacgccaaucccaacgcuaacccgaaugccaacccuaaugcaaaccccaaugcuaacccaaaugccaacccuaaugcgaaccccaaugccaacccaaaugcaaaccccaaugcuaacccuaacgccaauccaaacgcuaauccgaacgccaaucccaacgcaaauccuaacgccaauccaaacgcuaaucccaacgcgaauccuaacgcaaauccaaacgccaaucccaacgcuaacccgaaugccaacccuaaugcaaacccaaaugccaaccccaaugcuaacccuaaugccaaccccaaugcaaacccaaaugcgaacccuaauaaaaacaaccagggaaauggccaaggccauaacaugcccaaugauccaaacagaaauguggacgagaacgcuaaugccaacaaugcaguuaagaacaauaacaaugaggaaccgucagaccagcacauugagaaguauuugaaaauaauccagaacagccucaguacugaaugguccccuuguucugugacgugcgggaaugguauucaggucaggaucaagcccggaagcgccgauaaaccaaaggaccaacuggauuacgcuaacgacauugagaaaaagaucuguaaaauggaaaagugcuccucaguguuuaacguaguuaauaguagcauaggccugaucauggugcucucuuucuuauuucugaacuga

SEQ ID NO: 4169 - RNA, 1263 nt, Artificial Sequence
  derived and/or modified CDS sequence (opt3) from Pf(Pal97-108)__BAM84957.1__CSP
augaugagaaagcuggccauccucagcguguccucuuuccuuuuugucgaggcucuguuccaggaauaccaaugcuauggcucaaguagcaacaccaggguuuugaaugaguuaaacuacgacaaugcagggacaaaccuguauaaugaacuagagaugaacuacuauggaaaacaggaaaauugguacucccucaagaaaaacucucggucgcugggugagaaugaugacggcaacaauaacaauggggauaacggacgcgagggcaaggacgaagauaaacgagacgguaauaacgaggauaacgaaaaacuucguaagcccaagcacaagaaacugaagcagccuggggacggaaauccagauccgaacgccaaucccaacguggacccuaaugcgaacccaaauguagaucccaacgcuaauccuaacguggacccaaaugccaaccccaaugcaaacccuaaugccaacccaaacgcuaauccgaacgcaaaucccaacgccaauccuaacgcuaauccaaacgccaaucccaacgcgaauccuaacgcaaauccaaacgccaaucccaacgcuaacccgaaugccaacccuaaugcaaaccccaaugcuaacccaaaugccaacccuaaugcgaaccccaaugccaacccaaaugcaaaccccaaugcuaacccuaacgccaauccaaacgcuaauccgaacgccaaucccaacgcaaauccuaacgccaauccaaacgcuaaucccaacgcgaauccuaacgcaaauccaaacgccaaucccaacgcuaacccgaaugccaacccuaaugcaaacccaaaugccaaccccaaugcuaacccuaaugccaaccccaaugcaaacccaaaugcgaacccuaauaaaaacaaccagggcaauggccaagggcauaacaugcccaaugauccaaacagaaaugucgacgagaacgcuaaugccaacaaugcagugaagaacaauaacaaugaggaaccgucagacaagcacauuaaagaguauuugacuaagauacagaacagcaucaguacggaaugguccccuuguucuguuaccugcggaaaugguauucaggugaggaucaaacccggcagcgccgggaagccaaaagaugagcucaacuacgaaaacgacauugagaagaaaaucuguaagauggagaagugcuccucagucuuuaaugugguaaacaguagcauaggacugaucaugguucugucuuuccucuuuuuaaauuga

SEQ ID NO: 4170 - RNA, 1263 nt, Artificial Sequence
  derived and/or modified CDS sequence (opt3) from Pf(PNG225-053)__BAM85032.1__CSP
augaugagaaagcuggccauccucagcguguccucuuuccuuuuugucgaggcucuguuccaggaauaccaaugcuauggcucaaguagcaacaccaggguuuugaaugaguuaaacuacgacaaugcagggacaaaccuguauaaugaacuagagaugaacuacuauggaaaacaggaaaauugguacucccucaagaaaaacucucggucgcugggugagaaugaugacggcaacaauaacaauggggauaacggacgcgagggcaaggacgaagauaaacgagacgguaauaacgaggauaacgaaaaacuucguaagcccaagcacaagaaacugaagcagccuggggacggaaauccagauccgaacgccaaucccaacguggacccuaaugcgaacccaaauguagaucccaacgcuaauccuaacguggacccaaaugccaaccccaaugcaaacccuaaugccaacccaaacgcuaauccgaacgcaaaucccaacgccaauccuaacgcuaauccaaacgccaaucccaacgcgaauccuaacgcaaauccaaacgccaaucccaacgcuaacccgaaugccaacccuaaugcaaaccccaaugcuaacccaaaugccaacccuaaugcgaaccccaaugccaacccaaaugcaaaccccaaugcuaacccuaacgccaauccaaacgcuaauccgaacgccaaucccaacgcaaauccuaacgccaauccaaacgcuaaucccaacgcgaauccuaacgcaaauccaaacgccaaucccaacgcuaacccgaaugccaacccuaaugcaaacccaaaugccaaccccaaugcuaacccuaaugccaaccccaaugcaaacccaaaugcgaacccuaauaaaaacaaccagggcaauggccaagggcauaacaugcccaaugauccaaacagaaaugucgacgagaacgcuaaugccaacaaugcagugaagaacaauaacaaugaggaaccgucagacaagcacauugagcaguauuugaaaaagauacagaacagccucaguacugaaugguccccuuguucuguuacgugcggaaaugguauccaggugaggauuaaacccggcagcgccaacaagccaaaagaugagcuggacuacgaaaacgauaucgagaagaaaauuuguaagauggagaagugcuccucagucuuuaaugugguaaacaguagcaucgggcugauaaugguucucucuuucuuauuucugaauuga

SEQ ID NO: 4171 - RNA, 1263 nt, Artificial Sequence
  derived and/or modified CDS sequence (opt3) from Pf(Sol95-113)__BAM85062.1__CSP
augaugagaaagcuggccauccucagcguguccucuuuccuuuuugucgaggcucuguuccaggaauaccaaugcuauggcucaaguagcaacaccaggguuuugaaugaguuaaacuacgacaaugcagggacaaaccuguauaaugaacuagagaugaacuacuauggaaaacaggaaaauugguacucccucaagaaaaacucucggucgcugggugagaaugaugacggcaacaauaacaauggggauaacggacgcgagggcaaggacgaagauaaacgagacgguaauaacgaggauaacgaaaaacuucguaagcccaagcacaagaaacugaagcagccuggggacggaaauccagauccgaacgccaaucccaacguggacccuaaugcgaacccaaauguagaucccaacgcuaauccuaacguggacccaaaugccaaccccaaugucgauccuaacgcaaauccaaacgccaacccgaaugcuaaccccaaugcaaacccuaaugccaacccaaaugcuaaccccaaugccaacccuaaugcgaacccaaaugcaaaccccaaugccaacccgaacgcuaauccuaacgccaaucccaacgcaaauccaaacgcuaauccuaacgccaaucccaacgcgaauccaaacgccaaucccaacgcaaauccuaacgcuaacccaaaugccaacccgaaugcuaaccccaaugccaacccuaaugcaaacccaaaugccaaccccaaugcuaacccuaaugcgaacccaaaugcaaaccccaaugccaacccgaacgcuaauccuaacgccaauccaaacgcaaaucccaacgccaauccuaacgcuaaucccaacgccaauccaaacgcaaauccuaacaaaaauaaccagggcaacggccaagggcauaauaugcccaacgacccaaauagaaacguggacgagaaugcgaacgcuaauaacgccguuaagaauaacaauaacgaggaaccgucagauaagcacauugagcaguauuugaaaaagauacagaauagccucaguacugaaugguccccuuguucugugacgugcggaaacgguauccaggucaggauuaaacccggcagcgcaaauaagccaaaagacgagcuggauuacgaaaacgacaucgagaagaaaauuuguaagauggagaagugcuccucaguguuuaacguaguuaauaguagcaucgggcugauaauggugcucucuuucuuauuucugaacuga

SEQ ID NO: 4172 - RNA, 1263 nt, Artificial Sequence
  derived and/or modified CDS sequence (opt3) from Pf(Sol95-328)__BAM85093.1__CSP
augaugagaaagcuggccauccucagcguguccucuuuccuuuuugucgaggcucuguuccaggaauaccaaugcuauggcucaaguagcaacaccaggguuuugaaugaguuaaacuacgacaaugcagggacaaaccuguauaaugaacuagagaugaacuacuauggaaaacaggaaaauugguacucccucaagaaaaacucucggucgcugggugagaaugaugacggcaacaauaacaauggggauaacggacgcgagggcaaggacgaagauaaacgagacgguaauaacgaggauaacgaaaaacuucguaagcccaagcacaagaaacugaagcagccuggggacggaaauccagauccgaacgccaaucccaacguggacccuaaugcgaacccaaauguagaucccaacgcuaauccuaacguggacccaaaugccaaccccaaugcaaacccuaaugccaacccaaacgcuaauccgaacgcaaaucccaacgccaauccuaacgcuaauccaaacgccaaucccaacgcgaauccuaacgcaaauccaaacgccaaucccaacgcuaacccgaaugccaacccuaaugcaaaccccaaugcuaacccaaaugccaacccuaaugcgaaccccaaugucgauccaaacgccaaucccaacgcaaauccuaacgcuaacccaaaugccaacccgaaugcuaaccccaaugccaacccuaaugcaaacccaaaugccaaccccaaugcuaacccuaaugcgaacccaaaugcaaaccccaaugccaacccgaacgcuaauccuaacgccaauccaaacgcaaaucccaacgccaauccuaacgcuaaucccaacgccaauccaaacgcaaauccuaacaaaaauaaccagggcaacggccaagggcauaauaugcccaacgacccaaauagaaacguggacgagaaugcgaacgcuaauaacgccguuaagaauaacaauaacgaggaaccgucagauaagcacauugagcaguauuugaaaaagauacagaauagccucaguacugaaugguccccuuguucugugacgugcggaaacgguauccaggucaggauuaaacccggcagcgcagacaagccaaaagaucaacuggacuacgagaaugauaucgaaaagaaaauuuguaagauggagaagugcuccucaguguuuaacguaguuaacaguagcaucgggcugauaauggugcucucuuucuuauuucugaauuga

SEQ ID NO: 4173 - RNA, 1263 nt, Artificial Sequence
  derived and/or modified CDS sequence (opt3) from Pf(TiMS95-208)__BAM84896.1__CSP
augaugagaaagcuggccauccucagcguguccucuuuccuuuuugucgaggcucuguuccaggaauaccaaugcuauggcucaaguagcaacaccaggguuuugaaugaguuaaacuacgacaaugcagggacaaaccuguauaaugaacuagagaugaacuacuauggaaaacaggaaaauugguacucccucaagaaaaacucucggucgcugggugagaaugaugacggcaacaauaacaauggggauaacggacgcgagggcaaggacgaagauaaacgagacgguaauaacgaggauaacgaaaaacuucguaagcccaagcacaagaaacugaagcagccuggggacggaaauccagauccgaacgccaaucccaacguggacccuaaugcgaacccaaauguagaucccaacgcuaauccuaacguggacccaaaugccaaccccaaugcaaacccuaaugccaacccaaacgcuaauccgaacgcaaaucccaacgccaauccuaacgcuaauccaaacgccaaucccaacgcgaauccuaacgcaaauccaaacgccaaucccaacgcuaacccgaaugccaacccuaaugcaaaccccaaugcuaacccaaaugccaacccuaaugcgaaccccaaugccaacccaaaugcaaaccccaaugcuaacccuaacgccaauccaaacgcuaauccgaacgccaaucccaacgcaaauccuaacgccaauccaaacgcuaaucccaacgcgaauccuaacgcaaauccaaacgccaaucccaacgcuaacccgaaugccaacccuaaugcaaacccaaaugccaaccccaaugcuaacccuaaugccaaccccaaugcaaacccaaaugcgaacccuaauaaaaacaaccagggcaauggccaagggcauaacaugcccaaugauccaaacagaaaugucgacgagaacgcuaaugccaacaaugacgugaagaacaauaacaaugaggaaccgucagauaagcacauugagcaguauuugaaaaagauacaguacagccucaguacugaaugguccccuuguucuguuacgugcggaaacgguauccaggugaggauuaaacccggcagcgcagacaagccaaaagaucaacuggacuacgagaaugauaucgaaaagaaaauuuguaagauggagaagugcuccucagucuuuaacgugguaaacaguagcaucgggcugauaaugguucucucuuucuuauuucugaauuga

SEQ ID NO: 4174 - RNA, 1263 nt, Artificial Sequence
  derived and/or modified CDS sequence (opt3) from Pf(TiMS95-260)__BAM84907.1__CSP
augaugagaaagcuggccauccucagcguguccucuuuccuuuuugucgaggcucuguuccaggaauaccaaugcuauggcucaaguagcaacaccaggguuuugaaugaguuaaacuacgacaaugcagggacaaaccuguauaaugaacuagagaugaacuacuauggaaaacaggaaaauugguacucccucaagaaaaacucucggucgcugggugagaaugaugacggcaacaauaacaauggggauaacggacgcgagggcaaggacgaagauaaacgagacgguaauaacgaggauaacgaaaaacuucguaagcccaagcacaagaaacugaagcagccuggggacggaaauccagauccgaacgccaaucccaacguggacccuaaugcgaacccaaauguagaucccaacgcuaauccuaacguggacccaaaugccaaccccaaugcaaacccuaaugccaacccaaacgcuaauccgaacgcaaaucccaacgccaauccuaacgcuaauccaaacgccaaucccaacgcgaauccuaacgcaaauccaaacgccaaucccaacgcuaacccgaaugccaacccuaaugcaaaccccaaugcuaacccaaaugccaacccuaaugcgaaccccaaugccaacccaaaugcaaaccccaaugucgauccuaacgcuaacccaaaugccaacccgaaugcuaaccccaaugccaacccuaaugcaaacccaaaugccaaccccaaugcuaacccuaaugcgaacccaaaugcaaaccccaaugccaacccgaacgcuaauccuaacgccaauccaaacgcaaaucccaacgccaauccuaacgcuaaucccaacgccaauccaaacgcaaauccuaacaaaaauaaccagggcaacggccaagggcauaauaugcccaacgacccaaauagaaacguggacgagaaugcgaacgcuaauaacgccguuaagaauaacaauaacgaggaaccgucagauaagcacauuaaagaguauuugacuaagauacagaauagcaucaguacggaaugguccccuuguucugugaccugcggaaacgguauucaggucaggaucaaacccggcagcgcagggaagccaaaagacgagcucaauuacgaaaacgauauugagaagaaaaucuguaagauggagaagugcuccucaguguuuaacguaguuaauaguagcauaggacugaucauggugcugucuuuccucuuuuuaaacuga

SEQ ID NO: 4175 - RNA, 1263 nt, Artificial Sequence
  derived and/or modified CDS sequence (opt3) from Pf(Tz93-030)__BAM84756.1__CSP
augaugagaaagcuggccauccucagcguguccucuuuccuuuuugucgaggcucuguuccaggaauaccaaugcuauggcucaaguagcaacaccaggguuuugaaugaguuaaacuacgacaaugcagggacaaaccuguauaaugaacuagagaugaacuacuauggaaaacaggaaaauugguacucccucaagaaaaacucucggucgcugggugagaaugaugacggcaacaauaacaauggggauaacggacgcgagggcaaggacgaagauaaacgagacgguaauaacgaggauaacgaaaaacuucguaagcccaagcacaagaaacugaagcagccuggggacggaaauccagauccgaacgccaaucccaacguggacccuaaugcgaacccaaauguagaucccaacgcuaauccuaacguggacccaaaugccaaccccaaugcaaacccuaaugccaacccaaacgcuaauccgaacgcaaaucccaacgccaauccuaacgcuaauccaaacgccaaucccaacgcgaauccuaacgcaaauccaaacgccaaucccaacgcuaacccgaaugccaacccuaaugcaaaccccaaugcuaacccaaaugccaacccuaaugucgaucccaacgcgaauccaaacgccaaucccaacgcaaauccuaacgcuaacccaaaugccaacccgaaugcuaaccccaaugccaacccuaaugcaaacccaaaugccaaccccaaugcuaacccuaaugcgaacccaaaugcaaaccccaaugccaacccgaacgcuaauccuaacgccaauccaaacgcaaaucccaacgccaauccuaacgcuaaucccaacgccaauccaaacgcaaauccuaacaaaaauaaccagggcaacggccaagggcauaauaugcccaacgacccaaauagaaacguggacgagaaugcgaacgcuaauaacgccguuaagaauaacaauaacgaggaaccgucagauaagcacauuaaagaguauuugaauaagauacagaacagcaucaguacugaaugguccccuuguucugugacgugcggaaaugguauucaggucaggaucaaacccggcagcgcagacaagccaaaagaucagcucgacuacauuaacgauaucgagaagaaaauauguaagauggaaaagugcuccucaguguuuaacguaguuaauaguagcaucgggcugauuauggugcugucuuuccucuuuuuaaacuga

SEQ ID NO: 4176 - RNA, 1263 nt, Artificial Sequence
  derived and/or modified CDS sequence (opt3) from Pf(Tz93-038)__BAM84758.1__CSP
augaugagaaagcuggccauccucagcguguccucuuuccuuuuugucgaggcucuguuccaggaauaccaaugcuauggcucaaguagcaacaccaggguuuugaaugaguuaaacuacgacaaugcagggacaaaccuguauaaugaacuagagaugaacuacuauggaaaacaggaaaauugguacucccucaagaaaaacucucggucgcugggugagaaugaugacggcaacaauaacaauggggauaacggacgcgagggcaaggacgaagauaaacgagacgguaauaacgaggauaacgaaaaacuucguaagcccaagcacaagaaacugaagcagccuggggacggaaauccagauccgaacgccaaucccaacguggacccuaaugcgaacccaaauguagaucccaacgcuaauccuaacguggacccaaaugccaaccccaaugcaaacccuaaugccaacccaaacgcuaauccgaacgcaaaucccaacgccaauccuaacgcuaauccaaacgccaaucccaacgcgaauccuaacgcaaauccaaacgccaaucccaacgcuaacccgaaugccaacccuaaugcaaaccccaaugcuaacccaaaugccaacccuaaugcgaaccccaaugucgauccaaacgccaaucccaacgcaaauccuaacgcuaacccaaaugccaacccgaaugcuaaccccaaugccaacccuaaugcaaacccaaaugccaaccccaaugcuaacccuaaugcgaacccaaaugcaaaccccaaugccaacccgaacgcuaauccuaacgccaauccaaacgcaaaucccaacgccaauccuaacgcuaaucccaacgccaauccaaacgcaaauccuaacaaaaauaaccagggcaacggccaagggcauaauaugcccaacgacccaaauagaaacguggacgagaaugcgaacgcuaauaacgccguuaagaauaacaauaacgaggaaccgucagauaagcacauuaaagaguauuugaauaagauacagaacagcaucaguacugaaugguccccuuguucugugacgugcggaaaugguauucaggucaggaucaaacccggcagcgcagacaagccaaaagaucagcucgacuacauuaacgauaucgagaagaaaauauguaagauggaaaagugcuccucaguguuuaacguaguuaauaguagcaucgggcugauuauggugcugucuuuccucuuuuuaaacuga

SEQ ID NO: 4177 - RNA, 1260 nt, Artificial Sequence
  derived and/or modified CDS sequence (opt3) from Pf(TMS31)__ACO49480.1__CSP
augagaaagcuggccauccucagcguguccucuuuccuuuuugucgaggcucuguuccaggaauaccaaugcuauggcucaaguagcaacaccaggguuuugaaugaguuaaacuacgacaaugcagggacaaaccuguauaaugaacuagagaugaacuacuauggaaaacaggaaaauugguacucccucaagaaaaacucucggucgcugggugagaaugaugacggcaacaauaacaauggggauaacggacgcgagggcaaggacgaagauaaacgagacgguaauaacgaggauaacgaaaaacuucguaagcccaagcacaagaaacugaagcagccuggggacggaaauccagauccgaacgccaaucccaacguggacccuaaugcgaacccaaauguagaucccaacgcuaauccuaacguggacccaaaugccaaccccaaugcaaacccuaaugccaacccaaacgcuaauccgaacgcaaaucccaacgccaauccuaacgcuaauccaaacgccaaucccaacgcgaauccuaacgcaaauccaaacgccaaucccaacgcuaacccgaaugccaacccuaaugcaaaccccaaugcuaacccaaaugccaacccuaaugcgaaccccaaugccaacccaaaugcaaaccccaaugcuaacccuaacgccaauccaaacgcuaauccgaacgccaaucccaacgcaaauccuaacgccaauccaaacgcuaaucccaacgcgaauccuaacgcaaauccaaacgccaaucccaacgcuaacccgaaugccaacccuaaugcaaacccaaaugccaaccccaaugcuaacccuaaugccaaccccaaugcaaacccaaaugcgaacccuaauaaaaacaaccagggcaauggccaagggcauaacaugcccaaugauccaaacagaaaugucgacgagaacgcuaaugccaacaaugcagugaagaacaauaacaaugaggaaccgucagacaagcacauugagcaguauuugaaaaagaugcagaacagccucaguacugaaugguccccuuguucuguuacgugcggaaaugguauacaggugaggaucaaacccggcagcgccaacaagccaaaagaugagcuggacuacgaaaacgauauugagaagaaaaucuguaagauggagaagugcuccucagucuuuaaugugguaaacaguagcauugggcugaucaugguucucucuuucuuauuucugaauuga

SEQ ID NO: 4178 - RNA, 1260 nt, Artificial Sequence
  derived and/or modified CDS sequence (opt3) from Pf(TSY172)__ACO49517.1__CSP
augagaaagcuggccauccucagcguguccucuuuccuuuuugucgaggcucuguuccaggaauaccaaugcuauggcucaaguagcaacaccaggguuuugaaugaguuaaacuacgacaaugcagggacaaaccuguauaaugaacuagagaugaacuacuauggaaaacaggaaaauugguacucccucaagaaaaacucucggucgcugggugagaaugaugacggcaacaauaacaauggggauaacggacgcgagggcaaggacgaagauaaacgagacgguaauaacgaggauaacgaaaaacuucguaagcccaagcacaagaaacugaagcagccuggggacggaaauccagauccgaacgccaaucccaacguggacccuaaugcgaacccaaauguagaucccaacgcuaauccuaacguggacccaaaugccaaccccaaugcaaacccuaaugccaacccaaacgcuaauccgaacgcaaaucccaacgccaauccuaacgcuaauccaaacgccaaucccaacgcgaauccuaacgcaaauccaaacgccaaucccaacgcuaacccgaaugccaacccuaaugcaaaccccaaugcuaacccaaaugccaacccuaaugcgaaccccaaugccaacccaaaugcaaaccccaaugcuaacccuaacgccaauccaaacgcuaauccgaacgccaaucccaacgcaaauccuaacgccaauccaaacgcuaaucccaacgcgaauccuaacgcaaauccaaacgccaaucccaacgcuaacccgaaugccaacccuaaugcaaacccaaaugccaaccccaaugcuaacccuaaugccaaccccaaugcaaacccaaaugcgaacccuaauaaaaacaaccagggcaauggccaagggcauaacaugcccaaugauccaaacagaaaugucgacgagaacgcuaaugccaacaaugcagugaagaacaauaacaaugaggaaccgucagacaagcacauugagcaguauuugaaaaagauacagaacagccucaguacugaaugguccccuuguucuguuacgugcggaaaugguauccaggugaggauuaaacccggcagcgccaacaagccaaaagaugagcuggacuacgaaaacgauaucgagaagaaaauuuguaagauggagaagugcuccucagucuuuaaugugguaaacaguagcaucgggcugauaaugguucucucuuucuuauuucugaauuga

SEQ ID NO: 4179 - RNA, 1251 nt, Artificial Sequence
  derived and/or modified CDS sequence (opt3) from Pf(Asembo Bay)__AAN87591.1__CSP
augaugagaaagcuggccauccucagcguguccucuuuccuuuuugucgaggcucuguuccaggaauaccaaugcuauggcucaaguagcaacaccaggguuuugaaugaguuaaacuacgacaaugcagggacaaaccuguauaaugaacuagagaugaacuacuauggaaaacaggaaaauugguacucccucaagaaaaacucucggucgcugggugagaaugaugacggcaacaauaacaauggggauaacggacgcgagggcaaggacgaagauaaacgagacgguaauaacgaggauaacgaaaaacuucguaagcccaagcacaagaaacugaagcagccuggggacggaaauccagauccgaacgccaaucccaacguggacccuaaugcgaacccaaauguagaucccaacgcuaauccuaacguggacccaaaugccaaccccaaugcaaacccuaaugccaacccaaacgcuaauccgaacgcaaaucccaacgccaauccuaacgcuaauccaaacgccaaucccaacgcgaauccuaacgcaaauccaaacgccaaucccaacgcuaacccgaaugccaacccuaaugcaaaccccaaugcuaacccaaaugccaacccuaaugcgaaccccaaugucgauccaaacgccaaucccaacgcaaauccuaacgcuaacccaaaugccaacccgaaugcuaaccccaaugccaacccuaaugcaaacccaaaugccaaccccaaugcuaacccuaaugcgaacccaaaugcaaaccccaaugccaacccgaacgcuaauccuaacgccaauccaaacgcaaaucccaacgccaauccuaacgcuaaucccaacgccaauccaaacaaaaauaaccagggcaauggccaagggcauaacaugccuaacgaccccaauagaaacguggacgagaaugcaaacgcgaauaacgcuguuaagaauaacaauaacgaggaaccaucagaucagcacauugagaaguauuugaaaacuauacagaauagccucaguacggaaugguccccguguucugugaccugcggaaacgguauccaggucaggauuaagccuggcagcgccaauaaacccaaggaccaacuggauuacgcaaacgacaucgagaaaaagauuuguaaaauggaaaagugcuccucaguguuuaauguaguuaacaguagcaucgggcugauaauggugcucucuuucuuauuucugaacuga

SEQ ID NO: 4180 - RNA, 1251 nt, Artificial Sequence
  derived and/or modified CDS sequence (opt3) from Pf(Asembo Bay)__AAN87590.1__CSP
augaugagaaagcuggccauccucagcguguccucuuuccuuuuugucgaggcucuguuccaggaauaccaaugcuauggcucaaguagcaacaccaggguuuugaaugaguuaaacuacgacaaugcagggacaaaccuguauaaugaacuagagaugaacuacuauggaaaacaggaaaauugguacucccucaagaaaaacucucggucgcugggugagaaugaugacggcaacaauaacaauggggauaacggacgcgagggcaaggacgaagauaaacgagacgguaauaacgaggauaacgaaaaacuucguaagcccaagcacaagaaacugaagcagccuggggacggaaauccagauccgaacgccaaucccaacguggacccuaaugcgaacccaaauguagaucccaacgcuaauccuaacguggacccaaaugccaaccccaaugcaaacccuaaugccaacccaaacgcuaauccgaacgcaaaucccaacgccaauccuaacgcuaauccaaacgccaaucccaacgcgaauccuaacgcaaauccaaacgccaaucccaacgcuaacccgaaugucgauccuaacgccaaucccaacgcaaauccaaacgcuaauccuaacgccaaucccaacgcgaauccaaacgccaaucccaacgcaaauccuaacgcuaacccaaaugccaacccgaaugcuaaccccaaugccaacccuaaugcaaacccaaaugccaaccccaaugcuaacccuaaugcgaacccaaaugcaaaccccaaugccaacccgaacgcuaauccuaacgccaauccaaacgcaaaucccaacgccaauccuaacgcuaaucccaacgccaauccaaacaaaaauaaccagggcaauggccaagggcauaacaugccuaacgaccccaauagaaacguggacgagaaugcaaacgcgaauaacgcuguuaagaauaacaauaacgaggaaccaucagaucagcacauugagaaguauuugaaaacuauacagaauagccucaguacggaaugguccccguguucugugaccugcggaaacgguauccaggucaggauuaagccuggcagcgccaauaaacccaaggaccaacuggauuacgcaaacgacaucgagaaaaagauuuguaaaauggaaaagugcuccucaguguuuaauguaguuaacaguagcaucgggcugauaauggugcucucuuucuuauuucugaacuga

SEQ ID NO: 4181 - RNA, 1251 nt, Artificial Sequence
  derived and/or modified CDS sequence (opt3) from Pf(Gha1108-097)__BAM84820.1__CSP
augaugagaaagcuggccauccucagcguguccucuuuccuuuuugucgaggcucuguuccaggaauaccagugcuauggcucaaguagcaacaccaggguuuugaaugaguuaaacuacgacaaugcagggacaaaccuguauaaugaacuagagaugaacuacuauggaaaacaggaaaauugguacucccucaagaaaaacggucggucucugggcgagaaugaugacgggaacaauaacaauggagauaacggccgcgaggguaaggacgaagauaaacgagacgggaauaacgaggauaacgaaaaacuucguaagcccaagcacaagaaacugaagcagccugccgacggaaauccagauccgaacgcgaaucccaacguggacccuaaugcuaacccaaauguagaucccaacgccaauccuaacguggacccaaaugcaaaccccaaugccaacccuaaugcuaacccaaacgcaaauccgaacgccaaucccaacgcuaauccuaacgccaauccaaacgcgaaucccaacgcaaauccuaacgccaauccaaacgcuaaucccaacgccaacccgaaugcaaacccuaaugcuaaccccaaugccaacccaaaugcgaacccuaaugucgaucccaacgccaauccaaacgcaaaucccaacgcuaauccuaacgccaacccaaaugcuaacccgaaugccaaccccaaugcaaacccuaaugccaacccaaaugcuaaccccaaugcgaacccuaaugcaaacccaaaugccaaccccaaugcuaacccgaacgccaauccuaacgcaaauccaaacgccaaucccaacgcuaauccuaacgccaaucccaacgcaaauccaaacaaaaauaaccagggcaauggccaagggcauaacaugccuaacgaccccaauagaaacguggacgagaaugcgaacgcuaauaacggaguuaagaauaacaauaacgaggaaccaucggauaagcacauugagcaguauuugaaaaggauacaaaauucacucagcacugaauggaguccguguuccgugacgugcgguaacggcauccagguccggauuaagccugggucugccaauaaacccaaggacgagcugaacuacgaaaaugauaucgagaaaaagauuuguaaaauggagaagugcagcuccguguuuaacguaguuaacucaaguaucggacugauaauggugcucagcuucuuauuucugaauuga

SEQ ID NO: 4182 - RNA, 1251 nt, Artificial Sequence
  derived and/or modified CDS sequence (opt3) from Pf(MAD20)__AAA29550.1__CSP
augaugagaaagcuggccauccucagcguguccucuuuccuuuuugucgaggcucuguuccaggaauaccaaugcuauggcucaaguagcaacaccaggguuuugaaugaguuaaacuacgacaaugcagggauuaaccuguauaaugaacuagagaugaacuacuauggaaaacaggaaaauugguacucccucaagaaaaacucucggucgcugggugagaaugaugacggcaacaauaacaauggggauaacggacgcgagggcaaggacgaagauaaacgagacgguaauaacgaggauaacgaaaaacuucguaagcccaagcacaagaaacugaagcagccuggggacggaaauccagauccgaacgccaaucccaacguggacccuaaugcgaacccaaauguagaucccaacgcuaauccuaacguggacccaaaugccaaccccaaugcaaacccuaaugccaacccaaacgcuaauccgaacgcaaaucccaacgccaauccuaacgcuaauccaaacgccaaucccaacgcgaauccuaacgcaaauccaaacgccaaucccaacgcuaacccgaaugccaacccuaaugcaaaccccaaugcuaacccaaaugccaacccuaaugucgaucccaacgcgaauccaaacgccaaucccaacgcaaauccuaacgcuaacccaaaugccaacccgaaugcuaaccccaaugccaacccuaaugcaaacccaaaugccaaccccaaugcuaacccuaaugcgaacccaaaugcaaaccccaaugccaacccgaacgcuaauccuaacgccaauccaaacgcaaaucccaacgccaauccuaacgcuaaucccaacgccaauccaaacaaaaauaaccagggcaauggccaagggcauaacaugccuaacgaccccaauagaaacguggacgagaaugcaaacgcgaauaacgcuguuaagaauaacaauaacgaggaaccaucagauaagcacauagagcaguauuugaaaaagauccagaauagccucaguacagaaugguccccguguucugugacuugcggaaacgguauucaggucaggaucaaaccuggcagcgccgacaagcccaaagaucaacuggacuacgagaaugauauugaaaagaaaaucuguaagauggagaagugcuccucaguguuuaacguaguuaauaguagcauagggcugaucauggugcucucuuucuuauuucugaacuga

SEQ ID NO: 4183 - RNA, 1251 nt, Artificial Sequence
  derived and/or modified CDS sequence (opt3) from Pf(Pal97-002)__BAM84917.1__CSP
augaugagaaagcuggccauccucagcguguccucuuuccuuuuugucgaggcucuguuccaggaauaccaaugcuauggcucaaguagcaacaccaggguuuugaaugaguuaaacuacgacaaugcagggacaaaccuguauaaugaacuagagaugaacuacuauggaaaacaggaaaauugguacucccucaagaaaaacucucggucgcugggugagaaugaugacggcaacaauaacaauggggauaacggacgcgagggcaaggacgaagauaaacgagacgguaauaacgaggauaacgaaaaacuucguaagcccaaacacaagaaacugaagcagccuggggacggaaauccagauccgaacgccaaucccaacguggacccuaaugcgaacccaaauguagaucccaacgcuaauccuaacguggacccaaaugccaaccccaaugcaaacccuaaugccaacccaaacgcuaauccgaacgcaaaucccaacgccaauccuaacgcuaauccaaacgccaaucccaacgcgaauccuaacgcaaauccaaacgccaaucccaacgcuaacccgaaugccaacccuaaugcaaaccccaaugcuaacccaaaugccaacccuaaugucgaucccaacgcgaauccaaacgccaaucccaacgcaaauccuaacgcuaacccaaaugccaacccgaaugcuaaccccaaugccaacccuaaugcaaacccaaaugccaaccccaaugcuaacccuaaugcgaacccaaaugcaaaccccaaugccaacccgaacgcuaauccuaacgccaauccaaacgcaaaucccaacgccaauccuaacgcuaaucccaacgccaauccaaacaaaaauaaccagggcaauggccaagggcauaacaugccuaacgaccccaauagaaacguggacgagaaugcaaacgcgaauaacgcuguuaagaauaacaauaacgaggaaccaucagaucagcacauugagaaguauauaaagaagauccagaauagcuugaguacugaaugguccccguguucugugacgugcggaaacgguauucaggucaggaucaaaccuggcagcgccgacaagcccaaaaaugagcucgauuacgaaaacgacauugagaagaaaaucuguaagauggagaagugcuccucaguguuuaauguaguuaacaguagcauagggcugaucauggugcugucuuuccucuuuuuaaacuga

SEQ ID NO: 4184 - RNA, 1251 nt, Artificial Sequence
  derived and/or modified CDS sequence (opt3) from Pf(Pal97-102)__BAM84954.1__CSP
augaugagaaagcuggccauccucagcguguccucuuuccuuuuugucgaggcucuguuccaggaauaccaaugcuauggcucaaguagcaacaccaggguuuugaaugaguuaaacuacgacaaugcagggacaaaccuguauaaugaacuagagaugaacuacuauggaaaacaggaaaauugguacucccucaagaaaaacucucggucgcugggugagaaugaugacggcaacaauaacaauggggauaacggacgcgagggcaaggacgaagauaaacgagacgguaauaacgaggauaacgaaaaacuucguaagcccaagcacaagaaacugaagcagccuggggacggaaauccagauccgaacgccaaucccaacguggacccuaaugcgaacccaaauguagaucccaacgcuaauccuaacguggacccaaaugccaaccccaaugcaaacccuaaugccaacccaaacgcuaauccgaacgcaaaucccaacgccaauccuaacgcuaauccaaacgccaaucccaacgcgaauccuaacgcaaauccaaacgccaaucccaacgcuaacccgaaugccaacccuaaugcaaaccccaaugcuaacccaaaugccaacccuaaugcgaaccccaaugccaacccaaaugcaaaccccaaugcuaacccuaacgccaauccaaacgcuaauccgaacgccaaucccaacgcaaauccuaacgccaauccaaacgcuaaucccaacgcgaauccuaacgcaaauccaaacgccaaucccaacgcuaacccgaaugccaacccuaaugcaaacccaaaugccaaccccaaugcuaacccuaaugccaaccccaaugcaaacccaaauaaaaacaaucagggcaacggccaagggcauaacaugccuaaugaucccaacagaaaugucgacgagaacgcgaaugcuaacaaugccgugaagaacaauaacaaugaggaaccaucagacaagcacauuaaagaguauuugacuaagauacagaacagcaucaguacggaaugguccccguguucuguuaccugcggaaaugguauucaggugaggaucaaaccuggcagcgcagggaagcccaaagaugagcucaacuacgaaaaugacauugagaagaaaaucuguaagauggagaagugcuccucagucuuuaacgugguaaacaguagcauaggacugaucaugguucugucuuuccucuuuuuaaauuga

SEQ ID NO: 4185 - RNA, 1251 nt, Artificial Sequence
  derived and/or modified CDS sequence (opt3) from Pf(PNG227-255)__BAM85044.1__CSP
augaugagaaagcuggccauccucagcguguccucuuuccuuuuugucgaggcucuguuccaggaauaccaaugcuauggcucaaguagcaacaccaggguuuugaaugaguuaaacuacgacaaugcagggacaaaccuguauaaugaacuagagaugaacuacuauggaaaacaggaaaauugguacucccucaagaaaaacucucggucgcugggugagaaugaugacggcaacaauaacaauggggauaacggacgcgagggcaaggacgaagauaaacgagacgguaauaacgaggauaacgaaaaacuucguaagcccaagcacaagaaacugaagcagccuggggacggaaauccagauccgaacgccaaucccaacguggacccuaaugcgaacccaaauguagaucccaacgcuaauccuaacguggacccaaaugccaaccccaaugucgauccuaacgcaaauccaaacgccaacccgaaugcuaaccccaaugcaaacccuaaugccaacccaaaugcuaaccccaaugccaacccuaaugcgaacccaaaugcaaaccccaaugccaacccgaacgcuaauccuaacgccaaucccaacgcaaauccaaacgcuaauccuaacguggaccccaaugccaacccaaaugcgaaccccaaugccaacccuaaugcaaacccaaacgcuaauccgaacgccaaucccaacgcuaauccuaacgccaauccaaacgcaaaucccaacgccaauccuaacgcuaauccaaacgcgaaucccaacgcaaauccgaacgccaacccuaaugcuaacccaaaugccaaccccaaugcaaacccuaaugccaaccccaaugcuaacccaaauaaaaacaaucagggcaacggccaagggcauaauaugccuaacgaccccaacagaaauguugaugagaacgccaaugcaaacaaugcggugaagaacaauaacaaugaggaaccaucagacaagcacauugagcaguauuugaaaaagauacagaacagccucaguacugaaugguccccguguucugucacgugcggaaaugguauccaggugaggauuaaaccuggcagcgcugauaagcccaaagaccaacuggauuacgagaacgacaucgaaaagaaaauuuguaagauggagaagugcuccucaguauuuaauguugugaacaguagcaucgggcugauaaugguccucucuuucuuauuucugaauuga

SEQ ID NO: 4186 - RNA, 1251 nt, Artificial Sequence
  derived and/or modified CDS sequence (opt3) from Pf(PNG228-063)__BAM85045.1__CSP
augaugagaaagcuggccauccucagcguguccucuuuccuuuuugucgaggcucuguuccaggaauaccaaugcuauggcucaaguagcaacaccaggguuuugaaugaguuaaacuacgacaaugcagggacaaaccuguauaaugaacuagagaugaacuacuauggaaaacaggaaaauugguacucccucaagaaaaacucucggucgcugggugagaaugaugacggcaacaauaacaauggggauaacggacgcgagggcaaggacgaagauaaacgagacgguaauaacgaggauaacgaaaaacuucguaagcccaagcacaagaaacugaagcagccuggggacggaaauccagauccgaacgccaaucccaacguggacccuaaugcgaacccaaauguagaucccaacgcuaauccuaacguggacccaaaugccaaccccaaugcaaacccuaaugccaacccaaacgcuaauccgaacgcaaaucccaacgccaauccuaacgcuaauccaaacgccaaucccaacgcgaauccuaacgcaaauccaaacgccaaucccaacgcuaacccgaaugccaacccuaaugcaaaccccaaugcuaacccaaaugccaacccuaaugucgaucccaacgcgaauccaaacgccaaucccaacgcaaauccuaacgcuaacccaaaugccaacccgaaugcuaaccccaaugccaacccuaaugcaaacccaaaugccaaccccaaugcuaacccuaaugcgaacccaaaugcaaaccccaaugccaacccgaacgcuaauccuaacgccaauccaaacgcaaaucccaacgccaauccuaacgcuaaucccaacgccaauccaaacaaaaauaaccagggcaauggccaagggcauaacaugccuaacgaccccaauagaaacguggacgagaaugcaaacgcgaauaacgcuguuaagaauaacaauaacgaggaaccaucagauaagcacauugagcaguauuugaaaaagauacagaauagccucaguacugaaugguccccguguucugugacgugcggaaacgguauccaggucaggauuaaaccuggcagcgccgggaaguccaaagacgagcuggauuacgaaaaugacaucgagaagaaaauuuguaagauggagaagugcucaaguguguuuaacguaguuaauagcucuaucggacugauaauggugcucuccuucuuauuucugaacuga

SEQ ID NO: 4187 - RNA, 1251 nt, Artificial Sequence
  derived and/or modified CDS sequence (opt3) from Pf(PNG830-058)__BAM84987.1__CSP
augaugagaaagcuggccauccucagcguguccucuuuccuuuuugucgaggcucuguuccaggaauaccaaugcuauggcucaaguagcaacaccaggguuuugaaugaguuaaacuacgacaaugcagggacaaaccuguauaaugaacuagagaugaacuacuauggaaaacaggaaaauugguacucccucaagaaaaacucucggucgcugggugagaaugaugacggcaacaauaacaauggggauaacggacgcgagggcaaggacgaagauaaacgagacgguaauaacgaggauaacgaaaaacuucguaagcccaagcacaagaaacugaagcagccuggggacggaaauccagauccgaacgccaaucccaacguggacccuaaugcgaacccaaauguagaucccaacgcuaauccuaacguggacccaaaugccaaccccaaugucgauccuaacgcaaauccaaacgccaacccgaaugcuaaccccaaugcaaacccuaaugccaacccaaaugcuaaccccaaugccaacccuaaugcgaacccaaaugcaaaccccaaugccaacccgaacgcuaauccuaacgccaaucccaacgcaaauccaaacgcuaauccuaacgccaaucccaacgcgaauccaaacgccaaucccaacgcaaauccuaacgcuaacccaaaugccaacccgaaugcuaaccccaaugccaacccuaaugcaaacccaaaugccaaccccaaugcuaacccuaaugcgaacccaaaugcaaaccccaaugccaacccgaacgcuaauccuaacgccaauccaaacgcaaaucccaacgccaauccuaacgcuaaucccaacgccaauccaaacaaaaauaaccagggcaauggccaagggcauaacaugccuaacgaccccaauagaaacguggacgagaaugcaaacgcgaauaacgcuguuaagaauaacaauaacgaggaaccaucagauaagcacauugagcaguauuugaaaaagauacagaauagccucaguacugaaugguccccguguucugugacgugcggaaacgguauccaggucaggauuaaaccuggcagcgccaauaagcccaaagacgagcuggauuacgaaaacgacaucgagaagaaaauuuguaagauggagaagugcuccucaguguuuaauguaguuaacaguagcaucgggcugauaauggugcucucuuucuuauuucugaacuga

SEQ ID NO: 4188 - RNA, 1251 nt, Artificial Sequence
  derived and/or modified CDS sequence (opt3) from Pf(PNG903-136)__BAM84993.1__CSP
augaugagaaagcuggccauccucagcguguccucuuuccuuuuugucgaggcucuguuccaggaauaccaaugcuauggcucaaguagcaacaccaggguuuugaaugaguuaaacuacgacaaugcagggacaaaccuguauaaugaacuagagaugaacuacuauggaaaacaggaaaauugguacucccucaagaaaaacucucggucgcugggugagaaugaugacggcaacaauaacaauggggauaacggacgcgagggcaaggacgaagauaaacgagacgguaauaacgaggauaacgaaaaacuucguaagcccaagcacaagaaacugaagcagccuggggacggaaauccagauccgaacgccaaucccaacguggacccuaaugcgaacccaaauguagaucccaacgcuaauccuaacguggacccaaaugccaaccccaaugcaaacccuaaugccaacccaaacgcuaauccgaacgcaaaucccaacgccaauccuaacgcuaauccaaacgccaaucccaacgcgaauccuaacgcaaauccaaacgccaaucccaacgcuaacccgaaugccaacccuaaugcaaaccccaaugcuaacccaaaugccaacccuaaugucgaucccaacgcgaauccaaacgccaaucccaacgcaaauccuaacgcuaacccaaaugccaacccgaaugcuaaccccaaugccaacccuaaugcaaacccaaaugccaaccccaaugcuaacccuaaugcgaacccaaaugcaaaccccaaugccaacccgaacgcuaauccuaacgccaauccaaacgcaaaucccaacgccaauccuaacgcuaaucccaacgccaauccaaacaaaaauaaccagggcaauggccaagggcauaacaugccuaacgaccccaauagaaacguggacgagaaugcaaacgcgaauaacgcuguuaagaauaacaauaacgaggaaccaucagauaagcacauugagcaguauuugaaaaagauacagaauagccucaguacugaaugguccccguguucugugacgugcggaaacgguauccaggucaggauuaaaccuggcagcgccaauaagcccaaagacgagcuggauuacgaaaacgacaucgagaagaaaauuuguaagauggagaagugcuccucaguguuuaauguaguuaacaguagcaucgggcugauaauggugcucucuuucuuauuucugaacuga

SEQ ID NO: 4189 - RNA, 1251 nt, Artificial Sequence
  derived and/or modified CDS sequence (opt3) from Pf(Tz03-086)__BAM84805.1__CSP
augaugagaaagcuggccauccucagcguguccucuuuccuuuuugucgaggcucuguuccaggaauaccaaugcuauggcucaaguagcaacaccaggguuuugaaugaguuaaacuacgacaaugcagggacaaaccuguauaaugaacuagagaugaacuacuauggaaaacaggaaaauugguacucccucaagaaaaacucucggucgcugggugagaaugaugacggcaacaauaacaauggggauaacggacgcgagggcaaggacgaagauaaacgagacgguaauaacgaggauaacgaaaaacuucguaagcccaagcacaagaaacugaagcagccugccgacgggaauccagauccgaacgcgaaucccaacguggacccuaaugcuaacccaaauguagaucccaacgccaauccuaacguggacccaaaugcaaaccccaaugccaacccuaaugcuaacccaaacgcaaauccgaacgccaaucccaacgcuaauccuaacgccaauccaaacgcgaaucccaacgcaaauccuaacgccaauccaaacgcuaaucccaacgccaacccgaaugcaaacccuaaugcuaaccccaaugccaacccaaaugcgaacccuaaugccaaccccaaugcaaacccaaaugucgaucccaacgcuaauccuaacgccaacccaaaugcuaacccgaaugccaaccccaaugcaaacccuaaugccaacccaaaugcuaaccccaaugcgaacccuaaugcaaacccaaaugccaaccccaaugcuaacccgaacgccaauccuaacgcaaauccaaacgccaaucccaacgcuaauccuaacgccaaucccaacgcaaauccaaacaaaaauaaccagggaaauggccaaggccauaacaugccuaacgaccccaauagaaacguggacgagaaugcgaacgcuaauaacgccguuaagaauaacaauaacgaggaaccaucagauaagcacauuacugaguauuugaaaaagauacagaauagccucaguacggaaugguccccguguucugugaccugcgggaacggaauccaggucaggauuaaaccugguagcgcaggcaaguccaaaaaugagcuggacuacgaaaacgauaucgagaagaaaauuuguaagauggagaagugcucaaguguguuuaauguaguuaacagcucuaucgggcugauaauggugcucuccuucuuauuucugaacuga

SEQ ID NO: 4190 - RNA, 1251 nt, Artificial Sequence
  derived and/or modified CDS sequence (opt3) from Pf(Tz93-009)__BAM84750.1__CSP
augaugagaaagcuggccauccucagcguguccucuuuccuuuuugucgaggcucuguuccaggaauaccaaugcuauggcucaaguagcaacaccaggguuuugaaugaguuaaacuacgacaaugcagggacaaaccuguauaaugaacuagagaugaacuacuauggaaaacaggaaaauugguacucccucaagaaaaacucucggucgcugggugagaaugaugacggcaacaauaacaauggggauaacggacgcgagggcaaggacgaagauaaacgagacgguaauaacgaggauaacgaaaaacuucguaagcccaaacacaagaaacugaagcagccuggggacggaaauccagauccgaacgccaaucccaacguggacccuaaugcgaacccaaauguagaucccaacgcuaauccuaacguggacccaaaugccaaccccaaugcaaacccuaaugccaacccaaacgcuaauccgaacgcaaaucccaacgccaauccuaacgcuaauccaaacgccaaucccaacgcgaauccuaacgcaaauccaaacgccaaucccaacgcuaacccgaaugccaacccuaaugcaaaccccaaugcuaacccaaaugccaacccuaaugucgaucccaacgcgaauccaaacgccaaucccaacgcaaauccuaacgcuaacccaaaugccaacccgaaugcuaaccccaaugccaacccuaaugcaaacccaaaugccaaccccaaugcuaacccuaaugcgaacccaaaugcaaaccccaaugccaacccgaacgcuaauccuaacgccaauccaaacgcaaaucccaacgccaauccuaacgcuaaucccaacgccaauccaaacaaaaauaaccagggcaauggccaagggcauaacaugccuaacgaccccaauagaaacguggacgagaaugcaaacgcgaauaacgcuguuaagaauaacaauaacgaggaaccaucagauaagcacauuaaagaguauuugacuaagauaaagaauagcaucaguacggaaugguccccguguucugugaccugcggaaacgguauucaggucaggaucaagccuggcagcgccaauaaacccaaggacgagcucgauuacgaaaacgacauugagaaaaagaucuguaagauggagaaaugcuccucaguguuuaauguaguuaacaguagcauagggcugaucauggugcugucuuuccucuuuuuaaacuga

SEQ ID NO: 4191 - RNA, 1251 nt, Artificial Sequence
  derived and/or modified CDS sequence (opt3) from Pf(Van98M305-147)__BAM85260.1__CSP
augaugagaaagcuggccauccucagcguguccucuuuccuuuuugucgaggcucuguuccaggaauaccaaugcuauggcucaaguagcaacaccaggguuuugaaugaguuaaacuacgacaaugcagggacaaaccuguauaaugaacuagagaugaacuacuauggaaaacaggaaaauugguacucccucaagaaaaacucucggucgcugggugagaaugaugacggcaacaauaacaauggggauaacggacgcgagggcaaggacgaagauaaacgagacgguaauaacgaggauaacgaaaaacuucguaagcccaagcacaagaaacugaagcagccuggggacggaaauccagauccgaacgccaaucccaacguggacccuaaugcgaacccaaauguagaucccaacgcuaauccuaacguggacccaaaugccaaccccaaugcaaacccuaaugccaacccaaacgcuaauccgaacgcaaaucccaacgccaauccuaacgcuaauccaaacgccaaucccaacgcgaauccuaacgcaaauccaaacgccaaucccaacgcuaacccgaaugccaacccuaaugcaaaccccaaugcuaacccaaaugccaacccuaaugucgaucccaacgcgaauccaaacgccaaucccaacgcaaauccuaacgcuaacccaaaugccaacccgaaugcuaaccccaaugccaacccuaaugcaaacccaaaugccaaccccaaugcuaacccuaaugcgaacccaaaugcaaaccccaaugccaacccgaacgcuaauccuaacgccaauccaaacgcaaaucccaacgccaauccuaacgcuaaucccaacgccaauccaaacaaaaauaaccagggcaauggccaagggcauaacaugccuaacgaccccaauagaaacguggacgagaaugcaaacgcgaauaacgcuguuaagaauaacaauaacgaggaaccaucagauaagcacauugagcaguauuugaaaaagauacagaauagccucaguacugaaugguccccguguucugugacgugcggaaacgguauccaggucaggauuaaaccuggcagcgccgacaagcccaaagaucaacuggacuacgagaaugauaucgaaaagaaaauuuguaagauggagaagugcuccucaguguuuaacguaguuaauaguagcaucgggcugauaauggugcucucuuucuuauuucugaacuga

SEQ ID NO: 4192 - RNA, 1251 nt, Artificial Sequence
  derived and/or modified CDS sequence (opt3) from Pf(Van98P226-97)__BAM85298.1__CSP
augaugagaaagcuggccauccucagcguguccucuuuccuuuuugucgaggcucuguuccaggaauaccaaugcuauggcucaaguagcaacaccaggguuuugaaugaguuaaacuacgacaaugcagggacaaaccuguauaaugaacuagagaugaacuacuauggaaaacaggaaaauugguacucccucaagaaaaacucucggucgcugggugagaaugaugacggcaacaauaacaauggggauaacggacgcgagggcaaggacgaagauaaacgagacgguaauaacgaggauaacgaaaaacuucguaagcccaagcacaagaaacugaagcagccuggggacggaaauccagauccgaacgccaaucccaacguggacccuaaugcgaacccaaauguagaucccaacgcuaauccuaacguggacccaaaugccaaccccaaugcaaacccuaaugccaacccaaacgcuaauccgaacgcaaaucccaacgccaauccuaacgcuaauccaaacgccaaucccaacgcgaauccuaacgcaaauccaaacgccaaucccaacgcuaacccgaaugccaacccuaaugcaaaccccaaugcuaacccaaaugccaacccuaaugcgaaccccaaugccaacccaaaugcaaaccccaaugcuaacccuaacgccaauccaaacgcuaauccgaacgccaaucccaacgcaaauccuaacgccaauccaaacgcuaaucccaacgcgaauccuaacgcaaauccaaacgccaaucccaacgcuaacccgaaugccaacccuaaugcaaacccaaaugccaaccccaaugcuaacccuaaugccaaccccaaugcaaacccaaauaaaaacaaucagggcaacggccaagggcauaacaugccuaaugaucccaacagaaaugucgacgagaacgcgaaugcuaacaaugccgugaagaacaauaacaaugaggaaccaucagacaagcacauugagcaguauuugaaaaagauacagaacagccucaguacugaaugguccccguguucuguuacgugcggaaaugguauccaggugaggauuaaaccuggcagcgcaaacaagcccaaagaugagcuggacuacgaaaaugauaucgagaagaaaauuuguaagauggagaagugcuccucagucuuuaacgugguaaacaguagcaucgggcugauaaugguucucucuuucuuauuucugaauuga

SEQ ID NO: 4193 - RNA, 1251 nt, Artificial Sequence
  derived and/or modified CDS sequence (opt3) from Pf(Yaounde)__AAN87614.1__CSP
augaugagaaagcuggccauccucagcguguccucuuuccuuuuugucgaggcucuguuccaggaauaccaaugcuauggcucaaguagcaacaccaggguuuugaaugaguuaaacuacgacaaugcagggacaaaccuguauaaugaacuagagaugaacuacuauggaaaacaggaaaauugguacucccucaagaaaaacucucggucgcugggugagaaugaugacggcaacaauaacaauggggauaacggacgcgagggcaaggacgaagauaaacgagacgguaauaacgaggauaacgaaaaacuucguaagcccaagcacaagaaacugaagcagccugccgacgggaauccagauccgaacgcgaaucccaacguggacccuaaugcuaacccaaauguagaucccaacgccaauccuaacguggacccaaaugcaaaccccaaugccaacccuaaugcuaacccaaacgcaaauccgaacgccaaucccaacgcuaauccuaacgccaauccaaacgcgaaucccaacgcaaauccuaacgccaauccaaacgcuaaucccaacgccaacccgaaugcaaacccuaaugucgaucccaacgcuaauccaaacgccaauccuaacgcgaaucccaacgccaauccaaacgcaaaucccaacgcuaauccuaacgccaacccaaaugcuaacccgaaugccaaccccaaugcaaacccuaaugccaacccaaaugcuaaccccaaugcgaacccuaaugcaaacccaaaugccaaccccaaugcuaacccgaacgccaauccuaacgcaaauccaaacgccaaucccaacgcuaauccuaacgccaaucccaacgcaaauccaaacaaaaauaaccagggaaauggccaaggccauaacaugccuaacgaccccaauagaaacguggacgagaaugcgaacgcuaauaacgccguuaagaauaacaauaacgaggaaccaucagaucagcacauugagaaguauuugaaaauaaucaagaauagccucaguacugaaugguccccguguucugugacgugcgggaacgguauucaggucaggaucaaaccuggaagcgcaaauaagcccaaagaccagcuggauuacgccaacgacauugagaagaaaaucuguaagauggaaaagugcuccucaguguuuaauguaguuaacaguagcauaggccugaucauggugcucucuuucuuauuucugaacuga

SEQ ID NO: 4194 - RNA, 1248 nt, Artificial Sequence
  derived and/or modified CDS sequence (opt3) from Pf(A98)__ACO49328.1__CSP
augagaaagcuggccauccucagcguguccucuuuccuuuuugucgaggcucuguuccaggaauaccaaugcuauggcucaaguagcaacaccaggguuuugaaugaguuaaacuacgacaaugcagggacaaaccuguauaaugaacuagagaugaacuacuauggaaaacaggaaaauugguacucccucaagaaaaacucucggucgcugggugagaaugaugacggcaacaauaacaauggggauaacggacgcgagggcaaggacgaagauaaacgagacgguaauaacgaggauaacgaaaaacuucguaagcccaagcacaagaaacugaagcagccuggggacggaaauccagauccgaacgccaaucccaacguggacccuaaugcgaacccaaauguagaucccaacgcuaauccuaacguggacccaaaugccaaccccaaugcaaacccuaaugccaacccaaacgcuaauccgaacgcaaaucccaacgccaauccuaacgcuaauccaaacgccaaucccaacgcgaauccuaacgcaaauccaaacgccaaucccaacgcuaacccgaaugccaacccuaaugcaaaccccaaugcuaacccaaaugccaacccuaaugcgaaccccaaugccaacccaaaugcaaaccccaaugcuaacccuaacgccaauccaaacgcuaauccgaacgccaaucccaacgcaaauccuaacgccaauccaaacgcuaaucccaacgcgaauccuaacgcaaauccaaacgccaaucccaacgcuaacccgaaugccaacccuaaugcaaacccaaaugccaaccccaaugcuaacccuaaugccaaccccaaugcaaacccaaauaaaaacaaucagggcaacggccaagggcauaacaugccuaaugaucccaacagaaaugucgacgagaacgcgaaugcuaacaaugccgugaagaacaauaacaaugaggaaccaucagacaagcacauugagcaguauuugaaaaacauacagaauagccucaguacugaaugguccccguguucuguuacgugcggaaacgguauccaggugaggauuaagccuggcagcgcaaauaaacccaaggaugagcuggacuacgaaaacgauaucgagaaaaagauuuguaaaauggagaagugcuccucagucuuuaacgugguaaauaguagcaucgggcugauaaugguucucucuuucuuauuucugaacuga

SEQ ID NO: 4195 - RNA, 1248 nt, Artificial Sequence
  derived and/or modified CDS sequence (opt3) from Pf(B60)__ACO49339.1__CSP
augagaaagcuggccauccucagcguguccucuuuccuuuuugucgaggcucuguuccaggaauaccaaugcuauggcucaaguagcaacaccaggguuuugaaugaguuaaacuacgacaaugcagggacaaaccuguauaaugaacuagagaugaacuacuauggaaaacaggaaaauugguacucccucaagaaaaacucucggucgcugggugagaaugaugacggcaacaauaacaauggggauaacggacgcgagggcaaggacgaagauaaacgagacgguaauaacgaggauaacgaaaaacuucguaagcccaagcacaagaaacugaagcagccuggggacggaaauccagauccgaacgccaaucccaacguggacccuaaugcgaacccaaauguagaucccaacgcuaauccuaacguggacccaaaugccaaccccaaugucgauccuaacgcaaauccaaacgccaacccgaaugcuaaccccaaugcaaacccuaaugccaacccaaaugcuaaccccaaugccaacccuaaugcgaacccaaaugcaaaccccaaugccaacccgaacgcuaauccuaacgccaaucccaacgcaaauccaaacgcuaauccuaacgccaaucccaacgcgaauccaaacgccaaucccaacgcaaauccuaacgcuaacccaaaugccaacccgaaugcuaaccccaaugccaacccuaaugcaaacccaaaugccaaccccaaugcuaacccuaaugcgaacccaaaugcaaaccccaaugccaacccgaacgcuaauccuaacgccaauccaaacgcaaaucccaacgccaauccuaacgcuaaucccaacgccaauccaaacaaaaauaaccagggcaauggccaagggcauaacaugccuaacgaccccaauagaaacguggacgagaaugcaaacgcgaauaacgcuguuaagaauaacaauaacgaggaaccaucagauaagcacauugagcaguauuugaaaaagauacagaauagccucaguacugaaugguccccguguucugugacgugcggaaacgguauccaggucaggauuaaaccuggcagcgccaauaagcccaaagacgagcuggauuacgaaaacgacaucgagaagaaaauuuguaagauggagaagugcuccucaguguuuaauguaguuaacaguagcaucgggcugauaauggugcucucuuucuuauuucugaacuga

SEQ ID NO: 4196 - RNA, 1248 nt, Artificial Sequence
  derived and/or modified CDS sequence (opt3) from Pf(TM323)__ACO49493.1__CSP
augagaaagcuggccauccucagcguguccucuuuccuuuuugucgaggcucuguuccaggaauaccaaugcuauggcucaaguagcaacaccaggguuuugaaugaguuaaacuacgacaaugcagggacaaaccuguauaaugaacuagagaugaacuacuauggaaaacaggaaaauugguacucccucaagaaaaacucucggucgcugggugagaaugaugacggcaacaauaacaauggggauaacggacgcgagggcaaggacgaagauaaacgagacgguaauaacgaggauaacgaaaaacuucguaagcccaagcacaagaaacugaagcagccuggggacggaaauccagauccgaacgccaaucccaacguggacccuaaugcgaacccaaauguagaucccaacgcuaauccuaacguggacccaaaugccaaccccaaugcaaacccuaaugccaacccaaacgcuaauccgaacgcaaaucccaacgccaauccuaacgcuaauccaaacgccaaucccaacgcgaauccuaacgcaaauccaaacgccaaucccaacgcuaacccgaaugccaacccuaaugcaaaccccaaugcuaacccaaaugccaacccuaaugcgaaccccaaugccaacccaaaugcaaaccccaaugcuaacccuaacgccaauccaaacgcuaauccgaacgccaaucccaacgcaaauccuaacgccaauccaaacgcuaaucccaacgcgaauccuaacgcaaauccaaacgccaaucccaacgcuaacccgaaugccaacccuaaugcaaacccaaaugccaaccccaaugcuaacccuaaugccaaccccaaugcaaacccaaauaaaaacaaucagggcaacggccaagggcauaacaugccuaaugaucccaacagaaaugucgacgagaacgcgaaugcuaacaaugccgugaagaacaauaacaaugaggaaccaucagacaagcacauugagaaauauuugaaggaaauacagaacagccucaguacugagugguccccguguucuguuacgugcggaaaugguauccaggugaggauuaaaccuggcagcgcaaacaagcccaaagaucagcuggacuacgaaaaugauaucgagaagaaaauuuguaagauggagaagugcuccucagucuuuaacgugguaaacaguagcaucgggcugauaaugguucucucuuucuuauuucugaauuga

SEQ ID NO: 4197 - RNA, 1239 nt, Artificial Sequence
  derived and/or modified CDS sequence (opt3) from Pf(22)__AGR53780.1__CSP
augaugagaaagcuggccauccucagcguguccucuuuccuuuuugucgaggcucuguuccaggaauaccaaugcuauggcucacccaguaacaccaggguuuugaaugaguuaaacuacgacaaugcagggacaaaccuguauaaugaacuagagaugaacuacuauggaaaacaggaaaauugguacagccucaagaaaaacucccggucucugggugagaaugaugacggcaacaauaacaauggggauaacggacgcgagggcaaggacgaagauaaacgagacgguaauaacgaggauaacgaaaaacuucguaagccuaagcacaagaaacugaagcagccagccgacgggaauccggaucccaacgcgaauccuaacguggacccaaaugcuaaccccaauguagauccuaacgccaauccaaacguggaccccaaugcaaacccuaaugccaacccaaaugcuaacccgaacgcaaaucccaacgccaauccuaacgcuaauccaaacgccaaucccaacgcgaauccuaacgcaaauccaaacgccaaucccaacgcuaauccgaacgccaacccuaaugcaaaccccaaugcuaacccaaaugccaacccuaaugucgaucccaacgcgaauccaaacgccaaucccaacgcaaauccuaacgcuaauccaaacgccaacccgaaugcuaaccccaaugccaacccuaaugcaaacccaaaugccaaccccaaugcuaacccuaaugcgaacccaaaugcaaaccccaaugccaacccgaaugcuaacccuaacgccaauccaaacgcaaaucccaacgccaauccuaacgcuaaucccaacgccaauccaaacaaaaauaaccagggaaauggccaaggccauaacaugccuaaugaccccaacagaaacguggacgagaaugcaaacgcgaauaacgcuguuaagaauaacaauaacgaggaaccaucggauaagcacauugagcaguauuugaaaacuauaaagaacucacucagcacggaauggaguccguguuccgugaccugcgggaauggaauccaggucaggauuaaaccugguucugccaauaagcccaaagacgagcugaacuacgaaaaugauaucgagaagaaaauuuguaagauggagaagugcagcuccguguuuaacguaguuaauucaaguaucggccugauaauggugcucagcuucuuauuucugaacuga

SEQ ID NO: 4198 - RNA, 1239 nt, Artificial Sequence
  derived and/or modified CDS sequence (opt3) from Pf(Amazonas)__AAN87605.1__CSP
augaugagaaagcuggccauccucagcguguccucuuuccuuuuugucgaggcucuguuccaggaauaccaaugcuauggcucaaguagcaacaccaggguuuugaaugaguuaaacuacgacaaugcagggacaaaccuguauaaugaacuagagaugaacuacuauggaaaacaggaaaauugguacucccucaagaaaaacucucggucgcugggugagaaugaugacggcaacaauaacaauggggauaacggacgcgagggcaaggacgaagauaaacgagacgguaauaacgaggauaacgaaaaacuucguaagcccaagcacaagaaacugaagcagccugccgacgggaauccagauccgaacgcgaaucccaacguggacccuaaugcuaacccaaauguagaucccaacgccaauccuaacguggacccaaaugcaaaccccaaugccaacccuaaugcuaacccaaacgcaaauccgaacgccaaucccaacgcuaauccuaacgccaauccaaacgcgaaucccaacgcaaauccuaacgccaauccaaacgcuaaucccaacgccaacccgaaugcaaacccuaaugcuaaccccaaugccaacccaaaugucgauccuaacgcgaaucccaacgccaauccaaacgcaaaucccaacgcuaauccuaacgccaacccaaaugcuaacccgaaugccaaccccaaugcaaacccuaaugccaacccaaaugcuaaccccaaugcgaacccuaaugcaaacccaaaugccaaccccaaugcuaacccgaacgccaauccuaacgcaaauccaaacgccaaucccaacgcuaauccuaacgccaaucccaacaaaaauaaccagggaaauggccaaggccauaacaugccaaaugacccuaacagaaacguggacgagaaugcaaacgcgaauaacgcuguuaagaauaacaauaacgaggaacccucagaucagcacauugagaaguauuugaaaaggauacagaauagccucaguacugaaugguccccauguucugugacgugcgggaacggaauccagguccggauuaagccggguagcgccaauaaaccuaaggacgagcuggauuacgaaaacgacaucgagaaaaagauuuguaaaauggagaagugcuccucaguguuuaauguaguuaacaguagcaucggccugauaauggugcucucuuucuuauuucugaauuga

SEQ ID NO: 4199 - RNA, 1239 nt, Artificial Sequence
  derived and/or modified CDS sequence (opt3) from Pf(Amazonas)__AAN87598.1__CSP
augaugagaaagcuggccauccucagcguguccucuuuccuuuuugucgaggcucuguuccaggaauaccaaugcuauggcucaaguagcaacaccaggguuuugaaugaguuaaacuacgacaaugcagggacaaaccuguauaaugaacuagagaugaacuacuauggaaaacaggaaaauugguacucccucaagaaaaacucucggucgcugggugagaaugaugacggcaacaauaacaauggggauaacggacgcgagggcaaggacgaagauaaacgagacgguaauaacgaggauaacgaaaaacuucguaagcccaagcacaagaaacugaagcagccugccgacgggaauccagauccgaacgcgaaucccaacguggacccuaaugcuaacccaaauguagaucccaacgccaauccuaacguggacccaaaugcaaaccccaaugccaacccuaaugcuaacccaaacgcaaauccgaacgccaaucccaacgcuaauccuaacgccaauccaaacgcgaaucccaacgcaaauccuaacgccaauccaaacgcuaaucccaacgccaacccgaaugcaaacccuaaugcuaaccccaaugccaacccaaaugucgauccuaacgcgaaucccaacgccaauccaaacgcaaaucccaacgcuaauccuaacgccaacccaaaugcuaacccgaaugccaaccccaaugcaaacccuaaugccaacccaaaugcuaaccccaaugcgaacccuaaugcaaacccaaaugccaaccccaaugcuaacccgaacgccaauccuaacgcaaauccaaacgccaaucccaacgcuaauccuaacgccaaucccaacaaaaauaaccagggaaauggccaaggccauaacaugccaaaugacccuaacagaaacguggacgagaaugcaaacgcgaauaacgcuguuaagaauaacaauaacgaggaacccucagauaagcacauuaaagaguauuugaagauaauccagaauagccucaguacugaaugguccccauguucugugacgugcgggaacgguauucaggucaggaucaaaccgggaagcgccggcaagccuaaagacgagcuggauuacgcaaaugacauugaaaagaaaaucuguaagauggagaagugcuccucaguguuuaacguaguuaauaguagcauagggcugaucauggugcucucuuucuuauuucugaacuga

SEQ ID NO: 4200 - RNA, 1239 nt, Artificial Sequence
  derived and/or modified CDS sequence (opt3) from Pf(Asembo Bay)__AAN87611.1__CSP
augaugagaaagcuggccauccucagcguguccucuuuccuuuuugucgaggcucuguuccaggaauaccaaugcuauggcucaaguagcaacaccaggguuuugaaugaguuaaacuacgacaaugcagggacaaaccuguauaaugaacuagagaugaacuacuauggaaaacaggaaaauugguacucccucaagaaaaacucucggucgcugggugagaaugaugacggcaacaauaacaauggggauaacggacgcgagggcaaggacgaagauaaacgagacgguaauaacgaggauaacgaaaaacuucguaagcccaagcacaagaaacugaagcagccugccgacgggaauccagauccgaacgcgaaucccaacguggacccuaaugcuaacccaaauguagaucccaacgccaauccuaacguggacccaaaugcaaaccccaaugccaacccuaaugcuaacccaaacgcaaauccgaacgccaaucccaacgcuaauccuaacgccaauccaaacgcgaaucccaacgcaaauccuaacgccaauccaaacgcuaaucccaacgccaacccgaaugcaaacccuaaugcuaaccccaaugccaacccaaaugcgaacccuaaugccaaccccaaugucgauccaaacgcaaaucccaacgcuaauccuaacgccaacccaaaugcuaacccgaaugccaaccccaaugcaaacccuaaugccaacccaaaugcuaaccccaaugcgaacccuaaugcaaacccaaaugccaaccccaaugcuaacccgaacgccaauccuaacgcaaauccaaacgccaaucccaacgcuaauccuaacgccaaucccaacaaaaauaaccagggaaauggccaaggccauaacaugccaaaugacccuaacagaaacguggacgagaaugcaaacgcgaauaacgcuguuaagaauaacaauaacgaggaacccucagauaagcacauugagcaguauuugaaaauaaucaagaauagccucaguacugaaugguccccauguucugugacgugcgggaacgguauucaggucaggaucaaaccgggaagcgccaauaagccuaaagacgagcuggauuacgcaaacgacauugaaaagaaaaucuguaagauggagaagugcuccucaguguuuaauguaguuaacaguagcauaggccugaucauggugcucucuuucuuauuucugaauuga

SEQ ID NO: 4201 - RNA, 1239 nt, Artificial Sequence
  derived and/or modified CDS sequence (opt3) from Pf(Asembo Bay)__AAN87589.1__CSP
augaugagaaagcuggccauccucagcguguccucuuuccuuuuugucgaggcucuguuccaggaauaccaaugcuauggcucaaguagcaacaccaggguuuugaaugaguuaaacuacgacaaugcagggacaaaccuguauaaugaacuagagaugaacuacuauggaaaacaggaaaauugguacucccucaagaaaaacucucggucgcugggugagaaugaugacggcaacaauaacaauggggauaacggacgcgagggcaaggacgaagauaaacgagacgguaauaacgaggauaacgaaaaacuucguaagcccaagcacaagaaacugaagcagccugccgacgggaauccagauccgaacgcgaaucccaacguggacccuaaugcuaacccaaauguagaucccaacgccaauccuaacguggacccaaaugcaaaccccaaugccaacccuaaugcuaacccaaacgcaaauccgaacgccaaucccaacgcuaauccuaacgccaauccaaacgcgaaucccaacgcaaauccuaacgccaauccaaacgcuaaucccaacgucgauccgaacgccaauccuaacgcaaaucccaacgcuaauccaaacgccaauccuaacgcgaaucccaacgccaauccaaacgcaaaucccaacgcuaauccuaacgccaacccaaaugcuaacccgaaugccaaccccaaugcaaacccuaaugccaacccaaaugcuaaccccaaugcgaacccuaaugcaaacccaaaugccaaccccaaugcuaacccgaacgccaauccuaacgcaaauccaaacgccaaucccaacgcuaauccuaacgccaaucccaacaaaaauaaccagggaaauggccaaggccauaacaugccaaaugacccuaacagaaacguggacgagaaugcaaacgcgaauaacgcuguuaagaauaacaauaacgaggaacccucagaucagcacauugagaaguauuugaaaaagauacagaauagccucaguacugaaugguccccauguucugugacgugcgggaacggaauccaggucaggauuaaaccggguagcgccaauaagccuaaagaccaacuggauuacgcaaacgacaucgagaagaaaauuuguaagauggaaaagugcuccucaguguuuaauguaguuaacaguagcaucggccugauaauggugcucucuuucuuauuucugaauuga

SEQ ID NO: 4202 - RNA, 1239 nt, Artificial Sequence
  derived and/or modified CDS sequence (opt3) from Pf(BrB1)__BAM85131.1__CSP
augaugagaaagcuggccauccucagcguguccucuuuccuuuuugucgaggcucuguuccaggaauaccaaugcuauggcucaaguagcaacaccaggguuuugaaugaguuaaacuacgacaaugcagggacaaaccuguauaaugaacuagagaugaacuacuauggaaaacaggaaaauugguacucccucaagaaaaacucucggucgcugggugagaaugaugacggcaacaauaacaauggggauaacggacgcgagggcaaggacgaagauaaacgagacgguaauaacgaggauaacgaaaaacuucguaagcccaaacacaagaaacugaagcagccugccgacgggaauccagauccgaacgcgaaucccaacguggacccuaaugcuaacccaaauguagaucccaacgccaauccuaacguggacccaaaugcaaaccccaaugccaacccuaaugcuaacccaaacgcaaauccgaacgccaaucccaacgcuaauccuaacgccaauccaaacgcgaaucccaacgcaaauccuaacgccaauccaaacgcuaaucccaacgccaacccgaaugcaaacccuaaugcuaaccccaaugccaacccaaaugucgauccuaacgcgaaucccaacgccaauccaaacgcaaaucccaacgcuaauccuaacgccaacccaaaugcuaacccgaaugccaaccccaaugcaaacccuaaugccaacccaaaugcuaaccccaaugcgaacccuaaugcaaacccaaaugccaaccccaaugcuaacccgaacgccaauccuaacgcaaauccaaacgccaaucccaacgcuaauccuaacgccaaucccaacaaaaauaaccagggaaauggccaaggccauaacaugccaaaugacccuaacagaaacguggacgagaaugcaaacgcgaauaacgcuguuaagaauaacaauaacgaggaacccucagauaagcacauugagcaguauuugaaaaagauaaagaauagcaucaguacugaaugguccccauguucugugacgugcgggaacgguauucaggucaggaucaagccgggaagcgccaauaaaccuaaggacgagcucgauuacgaaaacgacauugagaaaaagaucuguaagauggagaaaugcuccucaguguuuaauguaguuaacaguagcauaggccugaucauggugcugucuuuccucuuuuuaaauuga

SEQ ID NO: 4203 - RNA, 1239 nt, Artificial Sequence
  derived and/or modified CDS sequence (opt3) from Pf(BrP9)__BAM85145.1__CSP
augaugagaaagcuggccauccucagcguguccucuuuccuuuuugucgaggcucuguuccaggaauaccaaugcuauggcucaaguagcaacaccaggguuuugaaugaguuaaacuacgacaaugcagggacaaaccuguauaaugaacuagagaugaacuacuauggaaaacaggaaaauugguacucccucaagaaaaacucucggucgcugggugagaaugaugacggcaacaauaacaauggggauaacggacgcgagggcaaggacgaagauaaacgagacgguaauaacgaggauaacgaaaaacuucguaagcccaaacacaagaaacugaagcagccuggggacggaaauccagauccgaacgccaaucccaacguggacccuaaugcgaacccaaauguagaucccaacgcuaauccuaacguggacccaaaugccaaccccaaugcaaacccuaaugccaacccaaacgcuaauccgaacgcaaaucccaacgccaauccuaacgcuaauccaaacgccaaucccaacgcgaauccuaacgcaaauccaaacgccaaucccaacgcuaacccgaaugccaacccuaaugcaaaccccaaugcuaacccaaaugucgauccuaacgccaaucccaacgcgaauccaaacgccaaucccaacgcaaauccuaacgcuaacccaaaugccaacccgaaugcuaaccccaaugccaacccuaaugcaaacccaaaugccaaccccaaugcuaacccuaaugcgaacccaaaugcaaaccccaaugccaacccgaacgcuaauccuaacgccaauccaaacgcaaaucccaacgccaauccuaacgcuaaucccaacaaaaauaaccagggcaauggccaagggcauaacaugccaaaugacccuaacagaaacguggacgagaaugccaacgcaaauaacgcgguuaagaauaacaauaacgaggaacccucagauaagcacauugagcaguauuugaaaaagauaaagaauagcaucaguacugaaugguccccauguucugugacgugcggaaacgguauucaggucaggaucaagccgggcagcgcuaauaaaccuaaggacgagcucgauuacgaaaacgacauugagaaaaagaucuguaagauggagaaaugcuccucaguguuuaauguaguuaacaguagcauagggcugaucauggugcugucuuuccucuuuuuaaauuga

SEQ ID NO: 4204 - RNA, 1239 nt, Artificial Sequence
  derived and/or modified CDS sequence (opt3) from Pf(India)__AAN87606.1__CSP
augaugagaaagcuggccauccucagcguguccucuuuccuuuuugucgaggcucuguuccaggaauaccaaugcuauggcucaaguagcaacaccaggguuuugaaugaguuaaacuacgacaaugcagggacaaaccuguauaaugaacuagagaugaacuacuauggaaaacaggaaaauugguacucccucaagaaaaacucucggucgcugggugagaaugaugacggcaacaauaacaauggggauaacggacgcgagggcaaggacgaagauaaacgagacgguaauaacgaggauaacgaaaaacuucguaagcccaagcacaagaaacugaagcagccuggggacggaaauccagauccgaacgccaaucccaacguggacccuaaugcgaacccaaauguagaucccaacgcuaauccuaacguggacccaaaugccaaccccaaugcaaacccuaaugccaacccaaacgcuaauccgaacgcaaaucccaacgccaauccuaacgcuaauccaaacgccaaucccaacgcgaauccuaacgcaaauccaaacgccaaucccaacgcuaacccgaaugccaacccuaaugcaaaccccaaugcuaacccaaaugucgauccuaacgccaaucccaacgcgaauccaaacgccaaucccaacgcaaauccuaacgcuaacccaaaugccaacccgaaugcuaaccccaaugccaacccuaaugcaaacccaaaugccaaccccaaugcuaacccuaaugcgaacccaaaugcaaaccccaaugccaacccgaacgcuaauccuaacgccaauccaaacgcaaaucccaacgccaauccuaacgcuaaucccaacaaaaauaaccagggcaauggccaagggcauaacaugccaaaugacccuaacagaaacguggacgagaaugccaacgcaaauaacgcgguuaagaauaacaauaacgaggaacccucagauaagcacauugagaaauauuugaagaaaauacagaauagccucaguacugaaugguccccauguucugugacgugcggaaacgguauccaggucaggauuaagccgggcagcgcuaauaaaccuaaggacgagcuggauuacgaaaacgacaucgagaaaaagauuuguaagauggagaaaugcuccucaguguuuaauguaguuaacaguagcaucgggcugauaauggugcucucuuucuuauuucugaauuga

SEQ ID NO: 4205 - RNA, 1239 nt, Artificial Sequence
  derived and/or modified CDS sequence (opt3) from Pf(Pal97-007)__BAM84921.1__CSP
augaugagaaagcuggccauccucagcguguccucuuuccuuuuugucgaggcucuguuccaggaauaccaaugcuauggcucaaguagcaacaccaggguuuugaaugaguuaaacuacgacaaugcagggacaaaccuguauaaugaacuagagaugaacuacuauggaaaacaggaaaauugguacucccucaagaaaaacucucggucgcugggugagaaugaugacggcaacaauaacaauggggauaacggacgcgagggcaaggacgaagauaaacgagacgguaauaacgaggauaacgaaaaacuucguaagcccaaacacaagaaacugaagcagccuggggacggaaauccagauccgaacgccaaucccaacguggacccuaaugcgaacccaaauguagaucccaacgcuaauccuaacguggacccaaaugccaaccccaaugcaaacccuaaugccaacccaaacgcuaauccgaacgcaaaucccaacgccaauccuaacgcuaauccaaacgccaaucccaacgcgaauccuaacgcaaauccaaacgccaaucccaacgcuaacccgaaugccaacccuaaugcaaaccccaaugcuaacccaaaugucgauccuaacgccaaucccaacgcgaauccaaacgccaaucccaacgcaaauccuaacgcuaacccaaaugccaacccgaaugcuaaccccaaugccaacccuaaugcaaacccaaaugccaaccccaaugcuaacccuaaugcgaacccaaaugcaaaccccaaugccaacccgaacgcuaauccuaacgccaauccaaacgcaaaucccaacgccaauccuaacgcuaaucccaacaaaaauaaccagggcaauggccaagggcauaacaugccaaaugacccuaacagaaacguggacgagaaugccaacgcaaauaacgcgguuaagaauaacaauaacgaggaacccucagauaagcacauuaaagaguauuugacuaagauaaagaauagcaucaguacggaaugguccccauguucugugaccugcggaaacgguauucaggucaggaucaagccgggcagcgcuaauaaaccuaaggacgagcucgauuacgaaaacgacauugagaaaaagaucuguaagauggagaaaugcuccucaguguuuaauguaguuaacaguagcauagggcugaucauggugcugucuuuccucuuuuuaaauuga

SEQ ID NO: 4206 - RNA, 1239 nt, Artificial Sequence
  derived and/or modified CDS sequence (opt3) from Pf(Pal97-037)__BAM84929.1__CSP
augaugagaaagcuggccauccucagcguguccucuuuccuuuuugucgaggcucuguuccaggaauaccaaugcuauggcucaaguagcaacaccaggguuuugaaugaguuaaacuacgacaaugcagggacaaaccuguauaaugaacuagagaugaacuacuauggaaaacaggaaaauugguacucccucaagaaaaacucucggucgcugggugagaaugaugacggcaacaauaacaauggggauaacggacgcgagggcaaggacgaagauaaacgagacgguaauaacgaggauaacgaaaaacuucguaagcccaaacacaagaaacugaagcagccuggggacggaaauccagauccgaacgccaaucccaacguggacccuaaugcgaacccaaauguagaucccaacgcuaauccuaacguggacccaaaugccaaccccaaugcaaacccuaaugccaacccaaacgcuaauccgaacgcaaaucccaacgccaauccuaacgcuaauccaaacgccaaucccaacgcgaauccuaacgcaaauccaaacgccaaucccaacgcuaacccgaaugccaacccuaaugcaaaccccaaugcuaacccaaaugucgauccuaacgccaaucccaacgcgaauccaaacgccaaucccaacgcaaauccuaacgcuaacccaaaugccaacccgaaugcuaaccccaaugccaacccuaaugcaaacccaaaugccaaccccaaugcuaacccuaaugcgaacccaaaugcaaaccccaaugccaacccgaacgcuaauccuaacgccaauccaaacgcaaaucccaacgccaauccuaacgcuaaucccaacaaaaauaaccagggcaauggccaagggcauaacaugccaaaugacccuaacagaaacguggacgagaaugccaacgcaaauaacgcgguuaagaauaacaauaacgaggaacccucagaucagcacauugagaaguauauaaagaagauccagaauagcuugaguacugaaugguccccauguucugugacgugcggaaacgguauucaggucaggaucaaaccgggcagcgcugacaagccuaaaaaugagcucgauuacgaaaacgacauugagaagaaaaucuguaagauggagaagugcuccucaguguuuaauguaguuaacaguagcauagggcugaucauggugcugucuuuccucuuuuuaaauuga

SEQ ID NO: 4207 - RNA, 1239 nt, Artificial Sequence
  derived and/or modified CDS sequence (opt3) from Pf(Pal97-052)__BAM84935.1__CSP
augaugagaaagcuggccauccucagcguguccucuuuccuuuuugucgaggcucuguuccaggaauaccaaugcuauggcucaaguagcaacaccaggguuuugaaugaguuaaacuacgacaaugcagggacaaaccuguauaaugaacuagagaugaacuacuauggaaaacaggaaaauugguacucccucaagaaaaacucucggucgcugggugagaaugaugacggcaacaauaacaauggggauaacggacgcgagggcaaggacgaagauaaacgagacgguaauaacgaggauaacgaaaaacuucguaagcccaagcacaagaaacugaagcagccuggggacggaaauccagauccgaacgccaaucccaacguggacccuaaugcgaacccaaauguagaucccaacgcuaauccuaacguggacccaaaugccaaccccaaugcaaacccuaaugccaacccaaacgcuaauccgaacgcaaaucccaacgccaauccuaacgcuaauccaaacgccaaucccaacgcgaauccuaacgcaaauccaaacgccaaucccaacgcuaacccgaaugccaacccuaaugcaaaccccaaugcuaacccaaaugucgauccuaacgccaaucccaacgcgaauccaaacgccaaucccaacgcaaauccuaacgcuaacccaaaugccaacccgaaugcuaaccccaaugccaacccuaaugcaaacccaaaugccaaccccaaugcuaacccuaaugcgaacccaaaugcaaaccccaaugccaacccgaacgcuaauccuaacgccaauccaaacgcaaaucccaacgccaauccuaacgcuaaucccaacaaaaauaaccagggcaauggccaagggcauaacaugccaaaugacccuaacagaaacguggacgagaaugccaacgcaaauaacgcgguuaagaauaacaauaacgaggaacccucagaucagcacauugagaaguauuugaaaauaauccagaauagccucaguacugaaugguccccauguucugugacgugcggaaacgguauucaggucaggaucaagccgggcagcgcugacaaaccuaaggaucaacuggacuacgccaaugauauugagaaaaagaucuguaaaauggaaaagugcuccucaguguuuaacguaguuaauaguagcauagggcugaucauggugcucucuuucuuauuucugaacuga

SEQ ID NO: 4208 - RNA, 1239 nt, Artificial Sequence
  derived and/or modified CDS sequence (opt3) from Pf(Sol95-351)__BAM85103.1__CSP
augaugagaaagcuggccauccucagcguguccucuuuccuuuuugucgaggcucuguuccaggaauaccaaugcuauggcucaaguagcaacaccaggguuuugaaugaguuaaacuacgacaaugcagggacaaaccuguauaaugaacuagagaugaacuacuauggaaaacaggaaaauugguacucccucaagaaaaacucucggucgcugggugagaaugaugacggcaacaauaacaauggggauaacggacgcgagggcaaggacgaagauaaacgagacgguaauaacgaggauaacgaaaaacuucguaagcccaagcacaagaaacugaagcagccuggggacggaaauccagauccgaacgccaaucccaacguggacccuaaugcgaacccaaauguagaucccaacgcuaauccuaacguggacccaaaugccaaccccaaugcaaacccuaaugccaacccaaacgcuaauccgaacgcaaaucccaacgccaauccuaacgcuaauccaaacgccaaucccaacgcgaauccuaacgcaaauccaaacgccaaucccaacgcuaacccgaaugccaacccuaaugcaaaccccaaugcuaacccaaaugucgauccuaacgccaaucccaacgcgaauccaaacgccaaucccaacgcaaauccuaacgcuaacccaaaugccaacccgaaugcuaaccccaaugccaacccuaaugcaaacccaaaugccaaccccaaugcuaacccuaaugcgaacccaaaugcaaaccccaaugccaacccgaacgcuaauccuaacgccaauccaaacgcaaaucccaacgccaauccuaacgcuaaucccaacaaaaauaaccagggcaauggccaagggcauaacaugccaaaugacccuaacagaaacguggacgagaaugccaacgcaaauaacgcgguuaagaauaacaauaacgaggaacccucagauaagcacauugagcaguauuugaaaaagauacagaauagccucaguacugaaugguccccauguucugugacgugcggaaacgguauccaggucaggauuaaaccgggcagcgcugacaagccuaaagaucaacuggacuacgagaaugauaucgaaaagaaaauuuguaagauggagaagugcuccucaguguuuaacguaguuaauaguagcaucgggcugauaauggugcucucuuucuuauuucugaacuga

SEQ ID NO: 4209 - RNA, 1239 nt, Artificial Sequence
  derived and/or modified CDS sequence (opt3) from Pf(Tz03-038)__BAM84801.1__CSP
augaugagaaagcuggccauccucagcguguccucuuuccuuuuugucgaggcucuguuccaggaauaccaaugcuauggcucaaguagcaacaccaggguuuugaaugaguuaaacuacgacaaugcagggacaaaccuguauaaugaacuagagaugaacuacuauggaaaacaggaaaauugguacucccucaagaaaaacucucggucgcugggugagaaugaugacggcaacaauaacaauggggauaacggacgcgagggcaaggacgaagauaaacgagacgguaauaacgaggauaacgaaaaacuucguaagcccaagcacaagaaacugaagcagccuggggacggaaauccagauccgaacgccaaucccaacguggacccuaaugcgaacccaaauguagaucccaacgcuaauccuaacguggacccaaaugccaaccccaaugcaaacccuaaugccaacccaaacgcuaauccgaacgcaaaucccaacgccaauccuaacgcuaauccaaacgccaaucccaacgcgaauccuaacgcaaauccaaacgccaaucccaacgucgauccgaacgcuaauccuaacgccaaucccaacgcaaauccaaacgcuaauccuaacgccaaucccaacgcgaauccaaacgccaaucccaacgcaaauccuaacgcuaacccaaaugccaacccgaaugcuaaccccaaugccaacccuaaugcaaacccaaaugccaaccccaaugcuaacccuaaugcgaacccaaaugcaaaccccaaugccaacccgaacgcuaauccuaacgccaauccaaacgcaaaucccaacgccaauccuaacgcuaaucccaacaaaaauaaccagggcaauggccaagggcauaacaugccaaaugacccuaacagaaacguggacgagaaugccaacgcaaauaacgcgguuaagaauaacaauaacgaggaacccucagauaagcacauugagcaguauuugaauaaaauaaagaacagcaucaguacugaaugguccccauguucugugacgugcggaaaugguauucaggucaggaucaaaccgggcagcgcuaacaagccuaaagacgagcucaauuacgaaaacgauauugagaagaaaaucuguaagauggagaagugcuccucaguguuuaauguaguuaacaguagcauagggcugaucauggugcugucuuuccucuuuuuaaacuga

SEQ ID NO: 4210 - RNA, 1239 nt, Artificial Sequence
  derived and/or modified CDS sequence (opt3) from Pf(Tz03-076)__BAM84804.1__CSP
augaugagaaagcuggccauccucagcguguccucuuuccuuuuugucgaggcucuguuccaggaauaccaaugcuauggcucaaguagcaacaccaggguuuugaaugaguuaaacuacgacaaugcagggacaaaccuguauaaugaacuagagaugaacuacuauggaaaacaggaaaauugguacucccucaagaaaaacucucggucgcugggugagaaugaugacggcaacaauaacaauggggauaacggacgcgagggcaaggacgaagauaaacgagacgguaauaacgaggauaacgaaaaacuucguaagcccaagcacaagaaacugaagcagccuggggacggaaauccagauccgaacgccaaucccaacguggacccuaaugcgaacccaaauguagaucccaacgcuaauccuaacguggacccaaaugccaaccccaaugcaaacccuaaugccaacccaaacgcuaauccgaacgcaaaucccaacgccaauccuaacgcuaauccaaacgccaaucccaacgcgaauccuaacgcaaauccaaacgccaaucccaacgcuaacccgaaugccaacccuaaugcaaaccccaaugcuaacccaaaugucgauccuaacgccaaucccaacgcgaauccaaacgccaaucccaacgcaaauccuaacgcuaacccaaaugccaacccgaaugcuaaccccaaugccaacccuaaugcaaacccaaaugccaaccccaaugcuaacccuaaugcgaacccaaaugcaaaccccaaugccaacccgaacgcuaauccuaacgccaauccaaacgcaaaucccaacgccaauccuaacgcuaaucccaacaaaaauaaccagggcaauggccaagggcauaacaugccaaaugacccuaacagaaacguggacgagaaugccaacgcaaauaacgcgguuaagaauaacaauaacgaggaacccucagauaagcacauugagcaguauuugaaaacuauaaagaauagccucaguacggaaugguccccauguucugugaccugcggaaacgguauccaggucaggauuaaaccgggcagcgcuaauaagccuaaagacgagcugaacuacgaaaaugauaucgagaagaaaauuuguaagauggagaagugcuccucaguguuuaacguaguuaauaguagcaucgggcugauaauggugcucucuuucuuauuucugaacuga

SEQ ID NO: 4211 - RNA, 1239 nt, Artificial Sequence
  derived and/or modified CDS sequence (opt3) from Pf(Tz03-101)__BAM84806.1__CSP
augaugagaaagcuggccauccucagcguguccucuuuccuuuuugucgaggcucuguuccaggaauaccaaugcuauggcucaaguagcaacaccaggguuuugaaugaguuaaacuacgacaaugcagggacaaaccuguauaaugaacuagagaugaacuacuauggaaaacaggaaaauugguacucccucaagaaaaacucucggucgcugggugagaaugaugacggcaacaauaacaauggggauaacggacgcgagggcaaggacgaagauaaacgagacgguaauaacgaggauaacgaaaaacuucguaagcccaagcacaagaaacugaagcagccuggggacggaaauccagauccgaacgccaaucccaacguggacccuaaugcgaacccaaauguagaucccaacgcuaauccuaacguggacccaaaugccaaccccaaugcaaacccuaaugccaacccaaacgcuaauccgaacgcaaaucccaacgccaauccuaacgcuaauccaaacgccaaucccaacgcgaauccuaacgcaaauccaaacgccaaucccaacgcuaacccgaaugccaacccuaaugcaaaccccaaugcuaacccaaaugucgauccuaacgccaaucccaacgcgaauccaaacgccaaucccaacgcaaauccuaacgcuaacccaaaugccaacccgaaugcuaaccccaaugccaacccuaaugcaaacccaaaugccaaccccaaugcuaacccuaaugcgaacccaaaugcaaaccccaaugccaacccgaacgcuaauccuaacgccaauccaaacgcaaaucccaacgccaauccuaacgcuaaucccaacaaaaauaaccagggcaauggccaagggcauaacaugccaaaugacccuaacagaaacguggacgagaaugccaacgcaaauaacgcgguuaagaauaacaauaacgaggaacccucagauaagcacauuaaagaguauuugaauaagauacagaacagcaucaguacugaaugguccccauguucugugacgugcggaaaugguauucaggucaggaucaaaccgggcagcgcugacaagccuaaagaucagcucgacuacauuaacgauaucgagaagaaaauauguaagauggaaaagugcuccucaguguuuaauguaguuaacaguagcaucgggcugauuauggugcugucuuuccucuuuuuaaauuga

SEQ ID NO: 4212 - RNA, 1239 nt, Artificial Sequence
  derived and/or modified CDS sequence (opt3) from Pf(Tz93-022)__BAM84753.1__CSP
augaugagaaagcuggccauccucagcguguccucuuuccuuuuugucgaggcucuguuccaggaauaccaaugcuauggcucaaguagcaacaccaggguuuugaaugaguuaaacuacgacaaugcagggacaaaccuguauaaugaacuagagaugaacuacuauggaaaacaggaaaauugguacucccucaagaaaaacucucggucgcugggugagaaugaugacggcaacaauaacaauggggauaacggacgcgagggcaaggacgaagauaaacgagacgguaauaacgaggauaacgaaaaacuucguaagcccaagcacaagaaacugaagcagccuggggacggaaauccagauccgaacgccaaucccaacguggacccuaaugcgaacccaaauguagaucccaacgcuaauccuaacguggacccaaaugccaaccccaaugcaaacccuaaugccaacccaaacgcuaauccgaacgcaaaucccaacgccaauccuaacgcuaauccaaacgccaaucccaacgcgaauccuaacgcaaauccaaacgccaaucccaacgcuaacccgaaugccaacccuaaugcaaaccccaaugcuaacccaaaugccaacccuaaugcgaaccccaaugccaacccaaaugcaaaccccaaugcuaacccuaacgccaauccaaacgcuaauccgaacgccaaucccaacgcaaauccuaacgccaauccaaacgcuaaucccaacgcgaauccuaacgcaaauccaaacgccaaucccaacgcuaacccgaaugccaacccuaaugcaaacccaaaugccaaccccaaugcuaacccuaaugccaaccccaauaaaaacaaucagggcaacggccaagggcauaauaugccaaacgauccuaacagaaaugucgacgagaacgcaaaugcgaacaaugcugugaagaacaauaacaaugaggaacccucagacaagcacauugagaaauauuugaaggaaauacagaacagccucaguacugagugguccccauguucuguuacgugcggaaaugguauccaggugaggauuaaaccgggcagcgccaacaagccuaaagaucagcuggacuacgaaaaugauaucgagaagaaaauuuguaagauggagaagugcuccucagucuuuaacgugguaaauaguagcaucgggcugauaaugguucucucuuucuuauuucugaacuga

SEQ ID NO: 4213 - RNA, 1239 nt, Artificial Sequence
  derived and/or modified CDS sequence (opt3) from Pf(Tz93-035)__BAM84757.1__CSP
augaugagaaagcuggccauccucagcguguccucuuuccuuuuugucgaggcucuguuccaggaauaccaaugcuauggcucaaguagcaacaccaggguuuugaaugaguuaaacuacgacaaugcagggacaaaccuguauaaugaacuagagaugaacuacuauggaaaacaggaaaauugguacucccucaagaaaaacucucggucgcugggugagaaugaugacggcaacaauaacaauggggauaacggacgcgagggcaaggacgaagauaaacgagacgguaauaacgaggauaacgaaaaacuucguaagcccaaacacaagaaacugaagcagccuggggacggaaauccagauccgaacgccaaucccaacguggacccuaaugcgaacccaaauguagaucccaacgcuaauccuaacguggacccaaaugccaaccccaaugcaaacccuaaugccaacccaaacgcuaauccgaacgcaaaucccaacgccaauccuaacgcuaauccaaacgccaaucccaacgcgaauccuaacgcaaauccaaacgccaaucccaacgcuaacccgaaugccaacccuaaugcaaaccccaaugcuaacccaaaugucgauccuaacgccaaucccaacgcgaauccaaacgccaaucccaacgcaaauccuaacgcuaacccaaaugccaacccgaaugcuaaccccaaugccaacccuaaugcaaacccaaaugccaaccccaaugcuaacccuaaugcgaacccaaaugcaaaccccaaugccaacccgaacgcuaauccuaacgccaauccaaacgcaaaucccaacgccaauccuaacgcuaaucccaacaaaaauaaccagggcaauggccaagggcauaacaugccaaaugacccuaacagaaacguggacgagaaugccaacgcaaauaacgcgguuaagaauaacaauaacgaggaacccucagauaagcacauuacugaguauuugaaaaagauaaagaauagcaucaguacggaaugguccccauguucugugaccugcggaaacgguauucaggucaggaucaagccgggcagcgcuaauaaaccuaaggacgagcucgauuacgaaaacgacauugagaaaaagaucuguaagauggagaaaugcuccucaguguuuaauguaguuaacaguagcauagggcugaucauggugcugucuuuccucuuuuuaaauuga

SEQ ID NO: 4214 - RNA, 1239 nt, Artificial Sequence
  derived and/or modified CDS sequence (opt3) from Pf(Tz93-041)__BAM84759.1__CSP
augaugagaaagcuggccauccucagcguguccucuuuccuuuuugucgaggcucuguuccaggaauaccaaugcuauggcucaaguagcaacaccaggguuuugaaugaguuaaacuacgacaaugcagggacaaaccuguauaaugaacuagagaugaacuacuauggaaaacaggaaaauugguacucccucaagaaaaacucucggucgcugggugagaaugaugacggcaacaauaacaauggggauaacggacgcgagggcaaggacgaagauaaacgagacgguaauaacgaggauaacgaaaaacuucguaagcccaaacacaagaaacugaagcagccuggggacggaaauccagauccgaacgccaaucccaacguggacccuaaugcgaacccaaauguagaucccaacgcuaauccuaacguggacccaaaugccaaccccaaugcaaacccuaaugccaacccaaacgcuaauccgaacgcaaaucccaacgccaauccuaacgcuaauccaaacgccaaucccaacgcgaauccuaacgcaaauccaaacgccaaucccaacgcuaacccgaaugccaacccuaaugcaaaccccaaugcuaacccaaaugucgauccuaacgccaaucccaacgcgaauccaaacgccaaucccaacgcaaauccuaacgcuaacccaaaugccaacccgaaugcuaaccccaaugccaacccuaaugcaaacccaaaugccaaccccaaugcuaacccuaaugcgaacccaaaugcaaaccccaaugccaacccgaacgcuaauccuaacgccaauccaaacgcaaaucccaacgccaauccuaacgcuaaucccaacaaaaauaaccagggcaauggccaagggcauaacaugccaaaugacccuaacagaaacguggacgagaaugccaacgcaaauaacgcgguuaagaauaacaauaacgaggaacccucagauaagcacauugagcaguauuugaaaaggauacagaauagccucaguacugaaugguccccauguucugugacgugcggaaacgguauccagguccggauuaagccgggcagcgcugggaaaccuaaggacgagcuggauuacgccaaugacaucgaaaagaagauuuguaaaauggagaagugcuccucaguguuuaacguaguuaauaguagcaucggacugauaauggugcucucuuucuuauuucugaacuga

SEQ ID NO: 4215 - RNA, 1239 nt, Artificial Sequence
  derived and/or modified CDS sequence (opt3) from Pf(Tz93-051)__BAM84763.1__CSP
augaugagaaagcuggccauccucagcguguccucuuuccuuuuugucgaggcucuguuccaggaauaccaaugcuauggcucaaguagcaacaccaggguuuugaaugaguuaaacuacgacaaugcagggacaaaccuguauaaugaacuagagaugaacuacuauggaaaacaggaaaauugguacucccucaagaaaaacucucggucgcugggugagaaugaugacggcaacaauaacaauggggauaacggacgcgagggcaaggacgaagauaaacgagacgguaauaacgaggauaacgaaaaacuucguaagcccaagcacaagaaacugaagcagccuggggacggaaauccagauccgaacgccaaucccaacguggacccuaaugcgaacccaaauguagaucccaacgcuaauccuaacguggacccaaaugccaaccccaaugcaaacccuaaugccaacccaaacgcuaauccgaacgcaaaucccaacgccaauccuaacgcuaauccaaacgccaaucccaacgcgaauccuaacgcaaauccaaacgccaaucccaacgcuaacccgaaugccaacccuaaugcaaaccccaaugcuaacccaaaugucgauccuaacgccaaucccaacgcgaauccaaacgccaaucccaacgcaaauccuaacgcuaacccaaaugccaacccgaaugcuaaccccaaugccaacccuaaugcaaacccaaaugccaaccccaaugcuaacccuaaugcgaacccaaaugcaaaccccaaugccaacccgaacgcuaauccuaacgccaauccaaacgcaaaucccaacgccaauccuaacgcuaaucccaacaaaaauaaccagggcaauggccaagggcauaacaugccaaaugacccuaacagaaacguggacgagaaugccaacgcaaauaacgcgguuaagaauaacaauaacgaggaacccucagauaagcacauugagcaguauuugaauaaaauaaagaacagcaucaguacugaaugguccccauguucugugacgugcggaaaugguauucaggucaggaucaaaccgggcagcgcuaacaagccuaaagacgagcucaauuacgaaaacgauauugagaagaaaaucuguaagauggagaagugcuccucaguguuuaauguaguuaacaguagcauagggcugaucauggugcugucuuuccucuuuuuaaacuga

SEQ ID NO: 4216 - RNA, 1239 nt, Artificial Sequence
  derived and/or modified CDS sequence (opt3) from Pf(Tz93-052)__BAM84764.1__CSP
augaugagaaagcuggccauccucagcguguccucuuuccuuuuugucgaggcucuguuccaggaauaccaaugcuauggcucaaguagcaacaccaggguuuugaaugaguuaaacuacgacaaugcagggacaaaccuguauaaugaacuagagaugaacuacuauggaaaacaggaaaauugguacucccucaagaaaaacucucggucgcugggugagaaugaugacggcaacaauaacaauggggauaacggacgcgagggcaaggacgaagauaaacgagacgguaauaacgaggauaacgaaaaacuucguaagcccaagcacaagaaacugaagcagccuggggacggaaauccagauccgaacgccaaucccaacguggacccuaaugcgaacccaaauguagaucccaacgcuaauccuaacguggacccaaaugccaaccccaaugcaaacccuaaugccaacccaaacgcuaauccgaacgcaaaucccaacgccaauccuaacgcuaauccaaacgccaaucccaacgcgaauccuaacgcaaauccaaacgccaaucccaacgucgauccgaacgcuaauccuaacgccaaucccaacgcaaauccaaacgcuaauccuaacgccaaucccaacgcgaauccaaacgccaaucccaacgcaaauccuaacgcuaacccaaaugccaacccgaaugcuaaccccaaugccaacccuaaugcaaacccaaaugccaaccccaaugcuaacccuaaugcgaacccaaaugcaaaccccaaugccaacccgaacgcuaauccuaacgccaauccaaacgcaaaucccaacgccaauccuaacgcuaaucccaacaaaaauaaccagggcaauggccaagggcauaacaugccaaaugacccuaacagaaacguggacgagaaugccaacgcaaauaacgcgguuaagaauaacaauaacgaggaacccucagaucagcacauugagaaguauuugaaaauaauccagaauagccucaguacugaaugguccccauguucugugacgugcggaaacgguauucaggucaggaucaagccgggcagcgcuaauaaaccuaaggaccaacuggauuacgccaacgacauugagaaaaagaucuguaaaauggaaaagugcuccucaguguuuaauguaguuaacaguagcauagggcugaucauggugcucucuuucuuauuucugaauuga

SEQ ID NO: 4217 - RNA, 1239 nt, Artificial Sequence
  derived and/or modified CDS sequence (opt3) from Pf(Tz93-061)__BAM84768.1__CSP
augaugagaaagcuggccauccucagcguguccucuuuccuuuuugucgaggcucuguuccaggaauaccaaugcuauggcucaaguagcaacaccaggguuuugaaugaguuaaacuacgacaaugcagggacaaaccuguauaaugaacuagagaugaacuacuauggaaaacaggaaaauugguacucccucaagaaaaacucucggucgcugggugagaaugaugacggcaacaauaacaauggggauaacggacgcgagggcaaggacgaagauaaacgagacgguaauaacgaggauaacgaaaaacuucguaagcccaagcacaagaaacugaagcagccugccgacgggaauccagauccgaacgcgaaucccaacguggacccuaaugcuaacccaaauguagaucccaacgccaauccuaacguggacccaaaugcaaaccccaaugccaacccuaaugcuaacccaaacgcaaauccgaacgccaaucccaacgcuaauccuaacgccaauccaaacgcgaaucccaacgcaaauccuaacgccaauccaaacgcuaaucccaacgccaacccgaaugcaaacccuaaugcuaaccccaaugccaacccaaaugucgauccuaacgcgaaucccaacgccaauccaaacgcaaaucccaacgcuaauccuaacgccaacccaaaugcuaacccgaaugccaaccccaaugcaaacccuaaugccaacccaaaugcuaaccccaaugcgaacccuaaugcaaacccaaaugccaaccccaaugcuaacccgaacgccaauccuaacgcaaauccaaacgccaaucccaacgcuaauccuaacgccaaucccaacaaaaauaaccagggaaauggccaaggccauaacaugccaaaugacccuaacagaaacguggacgagaaugcaaacgcgaauaacgcuguuaagaauaacaauaacgaggaacccucagaucagcacauugagaaguauuugaaaaggauacagaauagccucaguacugaaugguccccauguucugugacgugcgggaacggaauccagguccggauuaagccggguagcgccaauaaaccuaaggaccaacuggauuacgcaaacgacaucgagaaaaagauuuguaaaauggaaaagugcuccucaguguuuaauguaguuaacaguagcaucggccugauaauggugcucucuuucuuauuucugaauuga

SEQ ID NO: 4218 - RNA, 1239 nt, Artificial Sequence
  derived and/or modified CDS sequence (opt3) from Pf(Tz93-075)__BAM84770.1__CSP
augaugagaaagcuggccauccucagcguguccucuuuccuuuuugucgaggcucuguuccaggaauaccaaugcuauggcucaaguagcaacaccaggguuuugaaugaguuaaacuacgacaaugcagggacaaaccuguauaaugaacuagagaugaacuacuauggaaaacaggaaaauugguacucccucaagaaaaacucucggucgcugggugagaaugaugacggcaacaauaacaauggggauaacggacgcgagggcaaggacgaagauaaacgagacgguaauaacgaggauaacgaaaaacuucguaagcccaagcacaagaaacugaagcagccuggggacggaaauccagauccgaacgccaaucccaacguggacccuaaugcgaacccaaauguagaucccaacgcuaauccuaacguggacccaaaugccaaccccaaugcaaacccuaaugccaacccaaacgcuaauccgaacgcaaaucccaacgccaauccuaacgcuaauccaaacgccaaucccaacgcgaauccuaacgcaaauccaaacgccaaucccaacgcuaacccgaaugccaacccuaaugcaaaccccaaugcuaacccaaaugucgauccuaacgccaaucccaacgcgaauccaaacgccaaucccaacgcaaauccuaacgcuaacccaaaugccaacccgaaugcuaaccccaaugccaacccuaaugcaaacccaaaugccaaccccaaugcuaacccuaaugcgaacccaaaugcaaaccccaaugccaacccgaacgcuaauccuaacgccaauccaaacgcaaaucccaacgccaauccuaacgcuaaucccaacaaaaauaaccagggcaauggccaagggcauaacaugccaaaugacccuaacagaaacguggacgagaaugccaacgcaaauaacgcgguuaagaauaacaauaacgaggaacccucagauaagcacauugagcaguauuugaaaacuauaaagaauagccucaguacggaaugguccccauguucugugaccugcggaaacgguauccaggucaggauuaaaccgggcagcgcuaauaagccuaaagaccagcuggauuacgagaacgacaucgaaaagaaaauuuguaagauggagaagugcuccucaguguuuaauguaguuaacaguagcaucgggcugauaauggugcucucuuucuuauuucugaauuga

SEQ ID NO: 4219 - RNA, 1239 nt, Artificial Sequence
  derived and/or modified CDS sequence (opt3) from Pf(Tz93-113)__BAM84775.1__CSP
augaugagaaagcuggccauccucagcguguccucuuuccuuuuugucgaggcucuguuccaggaauaccaaugcuauggcucaaguagcaacaccaggguuuugaaugaguuaaacuacgacaaugcagggacaaaccuguauaaugaacuagagaugaacuacuauggaaaacaggaaaauugguacucccucaagaaaaacucucggucgcugggugagaaugaugacggcaacaauaacaauggggauaacggacgcgagggcaaggacgaagauaaacgagacgguaauaacgaggauaacgaaaaacuucguaagcccaagcacaagaaacugaagcagccuggggacggaaauccagauccgaacgccaaucccaacguggacccuaaugcgaacccaaauguagaucccaacgcuaauccuaacguggacccaaaugccaaccccaaugcaaacccuaaugccaacccaaacgcuaauccgaacgcaaaucccaacgccaauccuaacgcuaauccaaacgccaaucccaacgcgaauccuaacgcaaauccaaacgccaaucccaacgcuaacccgaaugccaacccuaaugcaaaccccaaugcuaacccaaaugccaacccuaaugucgaucccaacgcgaauccaaacgccaaucccaacgcaaauccuaacgcuaacccaaaugccaacccgaaugcuaaccccaaugccaacccuaaugcaaacccaaaugccaaccccaaugcuaacccuaaugcgaacccaaaugcaaaccccaaugccaacccgaacgcuaauccuaacgccaauccaaacgcaaaucccaacgccaauccuaacgcuaaucccaacaaaaauaaccagggcaauggccaagggcauaacaugccaaaugacccuaacagaaacguggacgagaaugccaacgcaaauaacgcgguuaagaauaacaauaacgaggaacccucagauaagcacauugagcaguauuugaauaaaauaaagaacagcaucaguacugaaugguccccauguucugugacgugcggaaaugguauucaggucaggaucaaaccgggcagcgcuaacaagccuaaagacgagcucaauuacgaaaacgauauugagaagaaaaucuguaagauggagaagugcuccucaguguuuaauguaguuaacaguagcauagggcugaucauggugcugucuuuccucuuuuuaaacuga

SEQ ID NO: 4220 - RNA, 1239 nt, Artificial Sequence
  derived and/or modified CDS sequence (opt3) from Pf(Tz93-123)__BAM84778.1__CSP
augaugagaaagcuggccauccucagcguguccucuuuccuuuuugucgaggcucuguuccaggaauaccaaugcuauggcucaaguagcaacaccaggguuuugaaugaguuaaacuacgacaaugcagggacaaaccuguauaaugaacuagagaugaacuacuauggaaaacaggaaaauugguacucccucaagaaaaacucucggucgcugggugagaaugaugacggcaacaauaacaauggggauaacggacgcgagggcaaggacgaagauaaacgagacgguaauaacgaggauaacgaaaaacuucguaagcccaagcacaagaaacugaagcagccugccgacgggaauccagauccgaacgcgaaucccaacguggacccuaaugcuaacccaaauguagaucccaacgccaauccuaacguggacccaaaugcaaaccccaaugccaacccuaaugcuaacccaaacgcaaauccgaacgccaaucccaacgcuaauccuaacgccaauccaaacgcgaaucccaacgcaaauccuaacgccaauccaaacgcuaaucccaacgccaacccgaaugcaaacccuaaugcuaaccccaaugccaacccaaaugucgauccuaacgcgaaucccaacgccaauccaaacgcaaaucccaacgcuaauccuaacgccaacccaaaugcuaacccgaaugccaaccccaaugcaaacccuaaugccaacccaaaugcuaaccccaaugcgaacccuaaugcaaacccaaaugccaaccccaaugcuaacccgaacgccaauccuaacgcaaauccaaacgccaaucccaacgcuaauccuaacgccaaucccaacaaaaauaaccagggaaauggccaaggccauaacaugccaaaugacccuaacagaaacguggacgagaaugcaaacgcgaauaacgcugccaagaauaacaauaacgaggaacccucagaucagcacauugagaaguauuugaaaacuauacagaauagccucaguacggaaugguccccauguucuguuaccugcgggaacggaauccaggugaggauuaagccggguagcgcaaauaaaccuaaggaccaacuggauuacgccaacgacaucgagaaaaagauuuguaaaauggaaaagugcuccucagucuuuaaugugguaaacaguagcaucggccugauaaugguucucucuuucuuauuucugaauuga

SEQ ID NO: 4221 - RNA, 1239 nt, Artificial Sequence
  derived and/or modified CDS sequence (opt3) from Pf(Tz93-124)__BAM84779.1__CSP
augaugagaaagcuggccauccucagcguguccucuuuccuuuuugucgaggcucuguuccaggaauaccaaugcuauggcucaaguagcaacaccaggguuuugaaugaguuaaacuacgacaaugcagggacaaaccuguauaaugaacuagagaugaacuacuauggaaaacaggaaaauugguacucccucaagaaaaacucucggucgcugggugagaaugaugacggcaacaauaacaauggggauaacggacgcgagggcaaggacgaagauaaacgagacgguaauaacgaggauaacgaaaaacuucguaagcccaagcacaagaaacugaagcagccugccgacgggaauccagauccgaacgcgaaucccaacguggacccuaaugcuaacccaaauguagaucccaacgccaauccuaacguggacccaaaugcaaaccccaaugccaacccuaaugcuaacccaaacgcaaauccgaacgccaaucccaacgcuaauccuaacgccaauccaaacgcgaaucccaacgcaaauccuaacgccaauccaaacgcuaaucccaacgccaacccgaaugcaaacccuaaugcuaaccccaaugccaacccaaaugucgauccuaacgcgaaucccaacgccaauccaaacgcaaaucccaacgcuaauccuaacgccaacccaaaugcuaacccgaaugccaaccccaaugcaaacccuaaugccaacccaaaugcuaaccccaaugcgaacccuaaugcaaacccaaaugccaaccccaaugcuaacccgaacgccaauccuaacgcaaauccaaacgccaaucccaacgcuaauccuaacgccaaucccaacaaaaauaaccagggaaauggccaaggccauaacaugccaaaugacccuaacagaaacguggacgagaaugcaaacgcgaauaacgcuguuaagaauaacaauaacgaggaacccucagauaagcacauugagcaguauuugaaaacuauaaagaauagccucaguacggaaugguccccauguucugugaccugcgggaacggaauccaggucaggauuaaaccggguagcgccgacaagccuaaagaucagcuggacuacaucaaugauauugagaagaaaaucuguaagauggaaaagugcuccucaguguuuaacguaguuaauaguagcauaggccugaucauggugcucucuuucuuauuucugaacuga

SEQ ID NO: 4222 - RNA, 1239 nt, Artificial Sequence
  derived and/or modified CDS sequence (opt3) from Pf(Tz98-009)__BAM84781.1__CSP
augaugagaaagcuggccauccucagcguguccucuuuccuuuuugucgaggcucuguuccaggaauaccaaugcuauggcucaaguagcaacaccaggguuuugaaugaguuaaacuacgacaaugcagggacaaaccuguauaaugaacuagagaugaacuacuauggaaaacaggaaaauugguacucccucaagaaaaacucucggucgcugggugagaaugaugacggcaacaauaacaauggggauaacggacgcgagggcaaggacgaagauaaacgagacgguaauaacgaggauaacgaaaaacuucguaagcccaagcacaagaaacugaagcagccugccgacgggaauccagauccgaacgcgaaucccaacguggacccuaaugcuaacccaaauguagaucccaacgccaauccuaacguggacccaaaugcaaaccccaaugccaacccuaaugcuaacccaaacgcaaauccgaacgccaaucccaacgcuaauccuaacgccaauccaaacgcgaaucccaacgcaaauccuaacgccaauccaaacgcuaaucccaacgccaacccgaaugcaaacccuaaugcuaaccccaaugccaacccaaaugucgauccuaacgcgaaucccaacgccaauccaaacgcaaaucccaacgcuaauccuaacgccaacccaaaugcuaacccgaaugccaaccccaaugcaaacccuaaugccaacccaaaugcuaaccccaaugcgaacccuaaugcaaacccaaaugccaaccccaaugcuaacccgaacgccaauccuaacgcaaauccaaacgccaaucccaacgcuaauccuaacgccaaucccaacaaaaauaaccagggaaauggccaaggccauaacaugccaaaugacccuaacagaaacguggacgagaaugcaaacgcgaauaacgcuguuaagaauaacaauaacgaggaacccucagauaagcacauuaaagaguauuugaauaagauacagaacagcaucaguacugaaugguccccauguucugugacgugcgggaaugguauucaggucaggaucaaaccgggaagcgccgacaagccuaaagaucagcucgacuacauuaacgauaucgagaagaaaauauguaagauggaaaagugcuccucaguguuuaauguaguuaacaguagcaucggccugauuauggugcugucuuuccucuuuuuaaauuga

SEQ ID NO: 4223 - RNA, 1239 nt, Artificial Sequence
  derived and/or modified CDS sequence (opt3) from Pf(Tz98-049)__BAM84789.1__CSP
augaugagaaagcuggccauccucagcguguccucuuuccuuuuugucgaggcucuguuccaggaauaccaaugcuauggcucaaguagcaacaccaggguuuugaaugaguuaaacuacgacaaugcagggacaaaccuguauaaugaacuagagaugaacuacuauggaaaacaggaaaauugguacucccucaagaaaaacucucggucgcugggugagaaugaugacggcaacaauaacaauggggauaacggacgcgagggcaaggacgaagauaaacgagacgguaauaacgaggauaacgaaaaacuucguaagcccaagcacaagaaacugaagcagccugccgacgggaauccagauccgaacgcgaaucccaacguggacccuaaugcuaacccaaauguagaucccaacgccaauccuaacguggacccaaaugcaaaccccaaugccaacccuaaugcuaacccaaacgcaaauccgaacgccaaucccaacgcuaauccuaacgccaauccaaacgcgaaucccaacgcaaauccuaacgccaauccaaacgcuaaucccaacgccaacccgaaugcaaacccuaaugcuaaccccaaugccaacccaaaugucgauccuaacgcgaaucccaacgccaauccaaacgcaaaucccaacgcuaauccuaacgccaacccaaaugcuaacccgaaugccaaccccaaugcaaacccuaaugccaacccaaaugcuaaccccaaugcgaacccuaaugcaaacccaaaugccaaccccaaugcuaacccgaacgccaauccuaacgcaaauccaaacgccaaucccaacgcuaauccuaacgccaaucccaacaaaaauaaccagggaaauggccaaggccauaacaugccaaaugacccuaacagaaacguggacgagaaugcaaacgcgaauaacgcuguuaagaauaacaauaacgaggaacccucagauaagcacauugagcaguauuugaaaacuauaaagaauagccucaguacggaaugguccccauguucugugaccugcgggaacggaauccaggucaggauuaaaccggguagcgccaauaagccuaaagaccagcuggauuacgagaacgacaucgaaaagaaaauuuguaagauggagaagugcuccucaguguuuaauguaguuaacaguagcaucggccugauaauggugcucucuuucuuauuucugaauuga

SEQ ID NO: 4224 - RNA, 1239 nt, Artificial Sequence
  derived and/or modified CDS sequence (opt3) from Pf(Tz98-084)__BAM84792.1__CSP
augaugagaaagcuggccauccucagcguguccucuuuccuuuuugucgaggcucuguuccaggaauaccaaugcuauggcucaaguagcaacaccaggguuuugaaugaguuaaacuacgacaaugcagggacaaaccuguauaaugaacuagagaugaacuacuauggaaaacaggaaaauugguacucccucaagaaaaacucucggucgcugggugagaaugaugacggcaacaauaacaauggggauaacggacgcgagggcaaggacgaagauaaacgagacgguaauaacgaggauaacgaaaaacuucguaagcccaagcacaagaaacugaagcagccugccgacgggaauccagauccgaacgcgaaucccaacguggacccuaaugcuaacccaaauguagaucccaacgccaauccuaacguggacccaaaugcaaaccccaaugccaacccuaaugcuaacccaaacgcaaauccgaacgccaaucccaacgcuaauccuaacgccaauccaaacgcgaaucccaacgcaaauccuaacgccaauccaaacgcuaaucccaacgccaacccgaaugcaaacccuaaugcuaaccccaaugccaacccaaaugucgauccuaacgcgaaucccaacgccaauccaaacgcaaaucccaacgcuaauccuaacgccaacccaaaugcuaacccgaaugccaaccccaaugcaaacccuaaugccaacccaaaugcuaaccccaaugcgaacccuaaugcaaacccaaaugccaaccccaaugcuaacccgaacgccaauccuaacgcaaauccaaacgccaaucccaacgcuaauccuaacgccaaucccaacaaaaauaaccagggaaauggccaaggccauaacaugccaaaugacccuaacagaaacguggacgagaaugcaaacgcgaauaacgcuguuaagaauaacaauaacgaggaacccucagaucagcacauugagaaguauuugaauaaaauacagaacagccucaguacugaaugguccccauguucugugacgugcgggaauggaauccaggucaggauuaagccggguagcgccaacaaaccuaaggaccaacuggauuacgcaaaugacaucgagaaaaagauuuguaaaauggaaaagugcuccucaguguuuaacguaguuaauaguagcaucggccugauaauggugcucucuuucuuauuucugaacuga

SEQ ID NO: 4225 - RNA, 1239 nt, Artificial Sequence
  derived and/or modified CDS sequence (opt3) from Pf(Tz98-119)__BAM84797.1__CSP
augaugagaaagcuggccauccucagcguguccucuuuccuuuuugucgaggcucuguuccaggaauaccaaugcuauggcucaaguagcaacaccaggguuuugaaugaguuaaacuacgacaaugcagggacaaaccuguauaaugaacuagagaugaacuacuauggaaaacaggaaaauugguacucccucaagaaaaacucucggucgcugggugagaaugaugacggcaacaauaacaauggggauaacggacgcgagggcaaggacgaagauaaacgagacgguaauaacgaggauaacgaaaaacuucguaagcccaagcacaagaaacugaagcagccugccgacgggaauccagauccgaacgcgaaucccaacguggacccuaaugcuaacccaaauguagaucccaacgccaauccuaacguggacccaaaugcaaaccccaaugccaacccuaaugcuaacccaaacgcaaauccgaacgccaaucccaacgcuaauccuaacgccaauccaaacgcgaaucccaacgcaaauccuaacgccaauccaaacgcuaaucccaacgccaacccgaaugcaaacccuaaugcuaaccccaaugccaacccaaaugucgauccuaacgcgaaucccaacgccaauccaaacgcaaaucccaacgcuaauccuaacgccaacccaaaugcuaacccgaaugccaaccccaaugcaaacccuaaugccaacccaaaugcuaaccccaaugcgaacccuaaugcaaacccaaaugccaaccccaaugcuaacccgaacgccaauccuaacgcaaauccaaacgccaaucccaacgcuaauccuaacgccaaucccaacaaaaauaaccagggaaauggccaaggccauaacaugccaaaugacccuaacagaaacguggacgagaaugcaaacgcgaauaacgcuguuaagaauaacaauaacgaggaacccucagaucagcacauugagaaguauuugaaaacuauacagaauagccucaguacggaaugguccccauguucugugaccugcgggaacggaauccaggucaggauuaagccggguagcgccaauaaaccuaaggaccaacuggauuacgcaaacgacaucgagaaaaagauuuguaaaauggaaaagugcuccucaguguuuaauguaguuaacaguagcaucggccugauaauggugcucucuuucuuauuucugaauuga

SEQ ID NO: 4226 - RNA, 1239 nt, Artificial Sequence
  derived and/or modified CDS sequence (opt3) from Pf(Yaounde)__AAN87602.1__CSP
augaugagaaagcuggccauccucagcguguccucuuuccuuuuugucgaggcucuguuccaggaauaccaaugcuauggcucaaguagcaacaccaggguuuugaaugaguuaaacuacgacaaugcagggacaaaccuguauaaugaacuagagaugaacuacuauggaaaacaggaaaauugguacucccucaagaaaaacucucggucgcugggugagaaugaugacggcaacaauaacaauggggauaacggacgcgagggcaaggacgaagauaaacgagacgguaauaacgaggauaacgaaaaacuucguaagcccaagcacaagaaacugaagcagccugccgacgggaauccagauccgaacgcgaaucccaacguggacccuaaugcuaacccaaauguagaucccaacgccaauccuaacguggacccaaaugcaaaccccaaugccaacccuaaugcuaacccaaacgcaaauccgaacgccaaucccaacgcuaauccuaacgccaauccaaacgcgaaucccaacgcaaauccuaacgccaauccaaacgcuaaucccaacgccaacccgaaugcaaacccuaaugcuaaccccaaugccaacccaaaugucgauccuaacgcgaaucccaacgccaauccaaacgcaaaucccaacgcuaauccuaacgccaacccaaaugcuaacccgaaugccaaccccaaugcaaacccuaaugccaacccaaaugcuaaccccaaugcgaacccuaaugcaaacccaaaugccaaccccaaugcuaacccgaacgccaauccuaacgcaaauccaaacgccaaucccaacgcuaauccuaacgccaaucccaacaaaaauaaccagggaaauggccaaggccauaacaugccaaaugacccuaacagaaacguggacgagaaugcaaacgcgaauaacgcuguuaagaauaacaauaacgaggaacccucagaucagcacauugagaaguauuugaauaaaauaaagaacagccucaguacugaaugguccccauguucugugacgugcgggaauggaauccaggucaggauuaaaccggguagcgccaacaagccuaaagaccagcuggauuacgcaaaugacaucgagaagaaaauuuguaagauggaaaagugcuccucaguguuuaacguaguuaauaguagcaucggccugauaauggugcucucuuucuuauuucugaacuga

SEQ ID NO: 4227 - RNA, 1239 nt, Artificial Sequence
  derived and/or modified CDS sequence (opt3) from Pf(Yaounde)__AAN87587.1__CSP
augaugagaaagcuggccauccucagcguguccucuuuccuuuuugucgaggcucuguuccaggaauaccaaugcuauggcucaaguagcaacaccaggguuuugaaugaguuaaacuacgacaaugcagggacaaaccuguauaaugaacuagagaugaacuacuauggaaaacaggaaaauugguacucccucaagaaaaacucucggucgcugggugagaaugaugacggcaacaauaacaauggggauaacggacgcgagggcaaggacgaagauaaacgagacgguaauaacgaggauaacgaaaaacuucguaagcccaagcacaagaaacugaagcagccugccgacgggaauccagauccgaacgcgaaucccaacguggacccuaaugcuaacccaaauguagaucccaacgccaauccuaacguggacccaaaugcaaaccccaaugccaacccuaaugcuaacccaaacgcaaauccgaacgccaaucccaacgcuaauccuaacgccaauccaaacgcgaaucccaacgcaaauccuaacgccaauccaaacgcuaaucccaacgccaacccgaaugcaaacccuaaugcuaaccccaaugccaacccaaaugucgauccuaacgcgaaucccaacgccaauccaaacgcaaaucccaacgcuaauccuaacgccaacccaaaugcuaacccgaaugccaaccccaaugcaaacccuaaugccaacccaaaugcuaaccccaaugcgaacccuaaugcaaacccaaaugccaaccccaaugcuaacccgaacgccaauccuaacgcaaauccaaacgccaaucccaacgcuaauccuaacgccaaucccaacaaaaauaaccagggaaauggccaaggccauaacaugccaaaugacccuaacagaaacguggacgagaaugcaaacgcgaauaacgcuguuaagaauaacaauaacgaggaacccucagaucagcacauugagaaguauuugaaaacuauaaagaauagccucaguacggaaugguccccauguucugugaccugcgggaacggaauccaggucaggauuaaaccggguagcgccaauaagccuaaagaccagcuggauuacgcaaacgacaucgagaagaaaauuuguaagauggaaaagugcuccucaguguuuaauguaguuaacaguagcaucggccugauaauggugcucucuuucuuauuucugaauuga

SEQ ID NO: 4228 - RNA, 1236 nt, Artificial Sequence
  derived and/or modified CDS sequence (opt3) from Pf(A107)__ACO49330.1__CSP
augagaaagcuggccauccucagcguguccucuuuccuuuuugucgaggcucuguuccaggaauaccaaugcuauggcucaaguagcaacaccaggguuuugaaugaguuaaacuacgacaaugcagggacaaaccuguauaaugaacuagagaugaacuacuauggaaaacaggaaaauugguacucccucaagaaaaacucucggucgcugggugagaaugaugacggcaacaauaacaauggggauaacggacgcgagggcaaggacgaagauaaacgagacgguaauaacgaggauaacgaaaaacuucguaagcccaagcacaagaaacugaagcagccuggggacggaaauccagauccgaacgccaaucccaacguggacccuaaugcgaacccaaauguagaucccaacgcuaauccuaacguggacccaaaugccaaccccaaugcaaacccuaaugccaacccaaacgcuaauccgaacgcaaaucccaacgccaauccuaacgcuaauccaaacgccaaucccaacgcgaauccuaacgcaaauccaaacgccaaucccaacgcuaacccgaaugccaacccuaaugcaaaccccaaugcuaacccaaaugccaacccuaaugcgaaccccaaugccaacccaaaugcaaaccccaaugcuaacccuaacgccaauccaaacgcuaauccgaacgccaaucccaacgcaaauccuaacgccaauccaaacgcuaaucccaacgcgaauccuaacgcaaauccaaacgccaaucccaacgcuaacccgaaugccaacccuaaugcaaacccaaaugccaaccccaaugcuaacccuaaugccaaccccaauaaaaacaaucagggcaacggccaagggcauaauaugccaaacgauccuaacagaaaugucgacgagaacgcaaaugcgaacaaugcugugaagaacaauaacaaugaggaacccucagacaagcacauugagcaguauuugaaaaagauacagaacagccucaguacugaaugguccccauguucuguuacgugcggaaaugguauccaggugaggauuaaaccgggcagcgccaacaagccuaaagaugagcuggacuacgaaaaugauaucgagaagaaaauuuguaagauggagaagugcuccucagucuuuaacgugguaaauaguagcaucgggcugauaaugguucucucuuucuuauuucugaacuga

SEQ ID NO: 4229 - RNA, 1233 nt, Artificial Sequence
  derived and/or modified CDS sequence (opt3) from Pf(IT)____CSP
augaugagaaagcuggccauccucagcguguccucuuuccuuuuugucgaggcucuguuccaggaauaccaaugcuauggcucaaguagcaacaccaggguuuugaaugaguuaaacuacgacaaugcagggacaaaccuguauaaugaacuagagaugaacuacuauggaaaacaggaaaauugguacucccucaagaaaaacucucggucgcugggugagaaugaugacggcgauaacgacaaugggaacaauaacaauggaaacaacaauaacggcgauaauggucgcgaggggaaggacgaagauaaacgagacggaaacaaugaggauaacgaaaaacuucguaagcccaagcacaagaaacugaagcagccuggcgacgauaauccagacccgaacgccaaucccaacguggauccuaaugcgaacccaaauguagaccccaacgcuaauccuaacgccaacccaaaugcaaaccccaaugccaacccuaaugcuaacccaaaugcaaacccgaaugccaaccccaauguggacccuaacgcuaauccaaacgccaaucccaacgcgaacccuaaugcaaacccaaaugccaaccccaaugcuaacccgaaugccaacccuaaugcaaaccccaaugcuaacccaaaugccaacccuaaugcgaaccccaacgccaauccaaacgcaaaucccaacgcuaauccuaacgccaauccaaacgcuaauccgaacgccaaucccaacgcaaauccuaacgccaauccaaacgcuaaucccaacgcgaacccuaaugcaaacccaaaugccaaccccaaugcuaacccgaaugccaacccuaaugcaaacccaaauaaaaacaaucagggcaacgggcaaggacauaauaugcccaacgauccuaacagaaaugucgacgagaacgccaaugcuaacaaugccgugaagaacaauaacaaugaggaacccucagauaagcacauugagcaguauuugaaaaagauacagaacagccucaguacugaaugguccccauguucuguuacgugcgguaauggcauccaggugaggauuaaaccugggagcgcagacaagcccaaagaucaacuggacuacgagaacgauaucgaaaagaaaauuuguaagauggagaagugcuccucagucuuuaaugugguaaacaguagcaucggacugauaaugguucucucuuucuuauuucugaauuga

SEQ ID NO: 4230 - RNA, 1227 nt, Artificial Sequence
  derived and/or modified CDS sequence (opt3) from Pf(14)__AGR53782.1__CSP
augaugagaaagcuggccauccucagcguguccucuuuccuuuuugucgaggcucuguuccaggaauaccaaugcuauggcucaaguagcaacaccaggguuuugaaugaguuaaacuacgacaaugcagggacaaaccuguauaaugaacuagagaugaacuacuauggaaaacaggaaaauugguacucccucaagaaaaacucucggucgcugggugagaaugaugacggcaacaauaacaauggggauaacggacgcgagggcaaggacgaagauaaacgagacgguaauaacgaggauaacgaaaaacuucguaagcccaagcacaagaaacugaagcagccuggggacggaaauccagauccgaacgccaaucccaacguggacccuaaugcgaacccaaauguagaucccaacgcuaauccuaacguggacccaaaugccaaccccaaugcaaacccuaaugccaacccaaacgcuaauccgaacgcaaaucccaacgccaauccuaacgcuaauccaaacgccaaucccaacgcgaauccuaacgcaaauccaaacgccaaucccaacgucgauccgaacgcuaauccuaacgccaaucccaacgcaaauccaaacgcuaauccuaacgccaaucccaacgcgaauccaaacgccaaucccaacgcaaauccuaacgcuaacccaaaugccaacccgaaugcuaaccccaaugccaacccuaaugcaaacccaaaugccaaccccaaugcuaacccuaaugcgaacccaaaugcaaaccccaaugccaacccgaacgcuaauccuaacgccaauccaaacgcaaaucccaacgccaauccuaacaaaaauaaccagggcaauggccaagggcauaacaugcccaaugacccaaacagaaauguggacgagaacgcuaacgccaauaacgcaguuaagaauaacaauaacgaggaaccuucagaucagcacauugagaaguauuugcagaaaauacagaauagccucaguacugaauggucccccuguucugugacgugcggaaacgguauccaagucaggauuaagccaggcagcgcgaauaaaccgaaggaccagcugaacuacgagaaugauaucgggaaaaagauuuguaaaauggaaaagugcuccucaguguuuaacguaguuaauaguagcaucggacugauaauggugcucucuuucuuauuucugaacuga

SEQ ID NO: 4231 - RNA, 1227 nt, Artificial Sequence
  derived and/or modified CDS sequence (opt3) from Pf(Asembo Bay)__AAN87609.1__CSP
augaugagaaagcuggccauccucagcguguccucuuuccuuuuugucgaggcucuguuccaggaauaccaaugcuauggcucaaguagcaacaccaggguuuugaaugaguuaaacuacgacaaugcagggacaaaccuguauaaugaacuagagaugaacuacuauggaaaacaggaaaauugguacucccucaagaaaaacucucggucgcugggugagaaugaugacggcaacaauaacaauggggauaacggacgcgagggcaaggacgaagauaaacgagacgguaauaacgaggauaacgaaaaacuucguaagcccaagcacaagaaacugaagcagccugccgacgggaauccagauccgaacgcgaaucccaacguggacccuaaugcuaacccaaauguagaucccaacgccaauccuaacguggacccaaaugcaaaccccaaugccaacccuaaugcuaacccaaacgcaaauccgaacgccaaucccaacgcuaauccuaacgccaauccaaacgcgaaucccaacgcaaauccuaacgccaauccaaacgcuaaucccaacgccaacccgaaugcaaacccuaaugcuaaccccaaugucgauccaaacgccaauccuaacgcgaaucccaacgccaauccaaacgcaaaucccaacgcuaauccuaacgccaacccaaaugcuaacccgaaugccaaccccaaugcaaacccuaaugccaacccaaaugcuaaccccaaugcgaacccuaaugcaaacccaaaugccaaccccaaugcuaacccgaacgccaauccuaacgcaaauccaaacgccaaucccaacgcuaauccuaacaaaaauaaccagggaaauggccaaggccauaacaugcccaauaacccaaauagaaacguggacgagaacgccaaugcaaacaaugcgguuaagaacaauaacaaugaggaaccuucagacaagcacauugagcaguauuugaaaacuauacagaacagccucaguacggaauggucccccuguucugugaccugcgggaauggaauccaggucaggauuaagccagguagcgcuaacaaaccgaaggaucaacuggacuacgccaaugauaucgagaaaaagauuuguaaaauggaaaagugcuccucaguguuuaacguaguuaauaguagcaucggccugauaauggugcucucuuucuuauuucugaacuga

SEQ ID NO: 4232 - RNA, 1227 nt, Artificial Sequence
  derived and/or modified CDS sequence (opt3) from Pf(Bolivar)__AAN87613.1__CSP
augaugagaaagcuggccauccucagcguguccucuuuccuuuuugucgaggcucuguuccaggaauaccaaugcuauggcucaaguagcaacaccaggguuuugaaugaguuaaacuacgacaaugcagggacaaaccuguauaaugaacuagagaugaacuacuauggaaaacaggaaaauugguacucccucaagaaaaacucucggucgcugggugagaaugaugacggcaacaauaacaauggggauaacggacgcgagggcaaggacgaagauaaacgagacgguaauaacgaggauaacgaaaaacuucguaagcccaagcacaagaaacugaagcagccuggggacggaaauccagauccgaacgccaaucccaacguggacccuaaugcgaacccaaauguagaucccaacgcuaauccuaacguggacccaaaugccaaccccaaugcaaacccuaaugccaacccaaacgcuaauccgaacgcaaaucccaacgccaauccuaacgcuaauccaaacgccaaucccaacgcgaauccuaacgcaaauccaaacgccaaucccaacgucgauccgaacgcuaauccuaacgccaaucccaacgcaaauccaaacgcuaauccuaacgccaaucccaacgcgaauccaaacgccaaucccaacgcaaauccuaacgcuaacccaaaugccaacccgaaugcuaaccccaaugccaacccuaaugcaaacccaaaugccaaccccaaugcuaacccuaaugcgaacccaaaugcaaaccccaaugccaacccgaacgcuaauccuaacgccaauccaaacgcaaaucccaacgccaauccuaacaaaaauaaccagggcaauggccaagggcauaacaugcccaaugacccaaacagaaauguggacgagaacgcuaacgccaauaacgcaguuaagaauaacaauaacgaggaaccuucagauaagcacauugagcaguauuugaaaaagauacagaaugcgcucagcacugaauggagucccuguuccgugacgugcggaaacgguauccaggucaggauuaaaccaggcucugcuaauaagccgaaagaccaacuggauuacgagaacgacaucgaaaagaaaauuuguaagauggagaagugcagcuccguguuuaauguaguuaacucaaguaucgggcugauaauggugcucagcuucuuauuucugaauuga

SEQ ID NO: 4233 - RNA, 1227 nt, Artificial Sequence
  derived and/or modified CDS sequence (opt3) from Pf(Br419M3)__BAM85120.1__CSP
augaugagaaagcuggccauccucagcguguccucuuuccuuuuugucgaggcucuguuccaggaauaccaaugcuauggcucaaguagcaacaccaggguuuugaaugaguuaaacuacgacaaugcagggacaaaccuguauaaugaacuagagaugaacuacuauggaaaacaggaaaauugguacucccucaagaaaaacucucggucgcugggugagaaugaugacggcaacaauaacaauggggauaacggacgcgagggcaaggacgaagauaaacgagacgguaauaacgaggauaacgaaaaacuucguaagcccaagcacaagaaacugaagcagccugccgacgggaauccagauccgaacgcgaaucccaacguggacccuaaugcuaacccaaauguagaucccaacgccaauccuaacguggacccaaaugcaaaccccaaugccaacccuaaugcuaacccaaacgcaaauccgaacgccaaucccaacgcuaauccuaacgccaauccaaacgcgaaucccaacgcaaauccuaacgccaauccaaacgcuaaucccaacgccaacccgaaugcaaacccuaaugcuaaccccaaugccaacccaaaugucgauccuaacgcgaaucccaacgccaauccaaacgcaaaucccaacgcuaauccuaacgccaacccaaaugcuaacccgaaugccaaccccaaugcaaacccuaaugccaacccaaaugcuaaccccaaugcgaacccuaaugcaaacccaaaugccaaccccaaugcuaacccgaacgccaauccuaacgcaaauccaaacgccaaucccaacgcuaauccuaacaaaaauaaccagggaaauggccaaggccauaacaugcccaauaacccaaauagaaacguggacgagaacgccaaugcaaacaaugcgguuaagaacaauaacaaugaggaaccuucagacaagcacauugagcaguauuugaaaaagauacagaacagccucaguacugaauggucccccuguucugugacgugcgggaauggaauccaggucaggauuaaaccagguagcgcuggcaaguccaaagaugagcuggacuacgaaaacgauaucgagaagaaaauuuguaagauggagaagugcucaaguguguuuaauguaguuaacagcucuaucgggcugauaauggugcucuccuucuuauuucugaauuga

SEQ ID NO: 4234 - RNA, 1227 nt, Artificial Sequence
  derived and/or modified CDS sequence (opt3) from Pf(Gha1110-003)__BAM84840.1__CSP
augaugagaaagcuggccauccucagcguguccucuuuccuuuuugucgaggcucuguuccaggaauaccaaugcuauggcucaaguagcaacaccaggguuuugaaugaguuaaacuacgacaaugcagggacaaaccuguauaaugaacuagagaugaacuacuauggaaaacaggaaaauugguacucccucaagaaaaacucucggucgcugggugagaaugaugacggcaacaauaacaauggggauaacggacgcgagggcaaggacgaagauaaacgagacgguaauaacgaggauaacgaaaaacuucguaagcccaagcacaagaaacugaagcagccugccgacgggaauccagauccgaacgcgaaucccaacguggacccuaaugcuaacccaaauguagaucccaacgccaauccuaacguggacccaaaugcaaaccccaaugccaacccuaaugcuaacccaaacgcaaauccgaacgccaaucccaacgcuaauccuaacgccaauccaaacgcgaaucccaacgcaaauccuaacgccaauccaaacgcuaaucccaacgccaacccgaaugcaaacccuaaugcuaaccccaaugucgauccaaacgccaauccuaacgcgaaucccaacgccaauccaaacgcaaaucccaacgcuaauccuaacgccaacccaaaugcuaacccgaaugccaaccccaaugcaaacccuaaugccaacccaaaugcuaaccccaaugcgaacccuaaugcaaacccaaaugccaaccccaaugcuaacccgaacgccaauccuaacgcaaauccaaacgccaaucccaacgcuaauccuaacaaaaauaaccagggaaauggccaaggccauaacaugcccaaugacccaaacagaaauguggacgagaacgccaacgcaaauaacgcgguuaagaauaacaauaacgaggaaccuucagaucagcacauugagaaguauuugaaaacuauaaagaauagccucaguacggaauggucccccuguucugugaccugcgggaacggaauccaggucaggauuaaaccagguagcgcuaauaagccgaaagaccagcuggauuacgccaacgacaucgagaagaaaauuuguaagauggaaaagugcuccucaguguuuaauguaguuaacaguagcaucggccugauaauggugcucucuuucuuauuucugaauuga

SEQ ID NO: 4235 - RNA, 1227 nt, Artificial Sequence
  derived and/or modified CDS sequence (opt3) from Pf(Tz03-032)__BAM84799.1__CSP
augaugagaaagcuggccauccucagcguguccucuuuccuuuuugucgaggcucuguuccaggaauaccaaugcuauggcucaaguagcaacaccaggguuuugaaugaguuaaacuacgacaaugcagggacaaaccuguauaaugaacuagagaugaacuacuauggaaaacaggaaaauugguacucccucaagaaaaacucucggucgcugggugagaaugaugacggcaacaauaacaauggggauaacggacgcgagggcaaggacgaagauaaacgagacgguaauaacgaggauaacgaaaaacuucguaagcccaagcacaagaaacugaagcagccugccgacgggaauccagauccgaacgcgaaucccaacguggacccuaaugcuaacccaaauguagaucccaacgccaauccuaacguggacccaaaugcaaaccccaaugccaacccuaaugcuaacccaaacgcaaauccgaacgccaaucccaacgcuaauccuaacgccaauccaaacgcgaaucccaacgcaaauccuaacgccaauccaaacgucgaucccaaugcuaacccgaacgccaauccuaacgcaaaucccaacgcuaauccaaacgccaauccuaacgcgaaucccaacgccaauccaaacgcaaaucccaacgcuaauccuaacgccaacccaaaugcuaacccgaaugccaaccccaaugcaaacccuaaugccaacccaaaugcuaaccccaaugcgaacccuaaugcaaacccaaaugccaaccccaaugcuaacccgaacgccaauccuaacgcaaauccaaacgccaaucccaacgcuaauccuaacaaaaauaaccagggaaauggccaaggccauaacaugcccaaugacccaaacagaaauguggacgagaacgccaacgcaaauaacgcgguuaagaauaacaauaacgaggaaccuucagaucagcacauugagaaguauuugaaaaagauacagaauagccucaguacugaauggucccccuguucugugacgugcgggaacggaauccaggucaggauuaaaccagguagcgcuaauaagccgaaagaccaacuggauuacgccaacgacaucgagaagaaaauuuguaagauggaaaagugcuccucaguguuuaauguaguuaacaguagcaucggccugauaauggugcucucuuucuuauuucugaauuga

SEQ ID NO: 4236 - RNA, 1227 nt, Artificial Sequence
  derived and/or modified CDS sequence (opt3) from Pf(Tz03-033)__BAM84800.1__CSP
augaugagaaagcuggccauccucagcguguccucuuuccuuuuugucgaggcucuguuccaggaauaccaaugcuauggcucaaguagcaacaccaggguuuugaaugaguuaaacuacgacaaugcagggacaaaccuguauaaugaacuagagaugaacuacuauggaaaacaggaaaauugguacucccucaagaaaaacucucggucgcugggugagaaugaugacggcaacaauaacaauggggauaacggacgcgagggcaaggacgaagauaaacgagacgguaauaacgaggauaacgaaaaacuucguaagcccaagcacaagaaacugaagcagccugccgacgggaauccagauccgaacgcgaaucccaacguggacccuaaugcuaacccaaauguagaucccaacgccaauccuaacguggacccaaaugcaaaccccaaugccaacccuaaugcuaacccaaacgcaaauccgaacgccaaucccaacgcuaauccuaacgccaauccaaacgcgaaucccaacgcaaauccuaacgccaauccaaacgcuaaucccaacgccaacccgaaugcaaacccuaaugcuaaccccaaugucgauccaaacgccaauccuaacgcgaaucccaacgccaauccaaacgcaaaucccaacgcuaauccuaacgccaacccaaaugcuaacccgaaugccaaccccaaugcaaacccuaaugccaacccaaaugcuaaccccaaugcgaacccuaaugcaaacccaaaugccaaccccaaugcuaacccgaacgccaauccuaacgcaaauccaaacgccaaucccaacgcuaauccuaacaaaaauaaccagggaaauggccaaggccauaacaugcccaaugacccaaacagaaauguggacgagaacgccaacgcaaauaacgcgguuaagaauaacaauaacgaggaaccuucagaucagcacauugagaaguauuugaaaacuauaaagaauagccucaguacggaauggucccccuguucugugaccugcgggaacggaauccaggucaggauuaaaccagguagcgcuaauaagccgaaagacgagcuggauuacgccaacgacaucgaaaagaaaauuuguaagauggagaagugcuccucaguguuuaauguaguuaacaguagcaucggccugauaauggugcucucuuucuuauuucugaauuga

SEQ ID NO: 4237 - RNA, 1227 nt, Artificial Sequence
  derived and/or modified CDS sequence (opt3) from Pf(Tz93-056)__BAM84765.1__CSP
augaugagaaagcuggccauccucagcguguccucuuuccuuuuugucgaggcucuguuccaggaauaccaaugcuauggcucaaguagcaacaccaggguuuugaaugaguuaaacuacgacaaugcagggacaaaccuguauaaugaacuagagaugaacuacuauggaaaacaggaaaauugguacucccucaagaaaaacucucggucgcugggugagaaugaugacggcaacaauaacaauggggauaacggacgcgagggcaaggacgaagauaaacgagacgguaauaacgaggauaacgaaaaacuucguaagcccaaacacaagaaacugaagcagccugccgacgggaauccagauccgaacgcgaaucccaacguggacccuaaugcuaacccaaauguagaucccaacgccaauccuaacguggacccaaaugcaaaccccaaugccaacccuaaugcuaacccaaacgcaaauccgaacgccaaucccaacgcuaauccuaacgccaauccaaacgcgaaucccaacgcaaauccuaacgccaauccaaacgcuaaucccaacgccaacccgaaugcaaacccuaaugcuaaccccaaugucgauccaaacgccaauccuaacgcgaaucccaacgccaauccaaacgcaaaucccaacgcuaauccuaacgccaacccaaaugcuaacccgaaugccaaccccaaugcaaacccuaaugccaacccaaaugcuaaccccaaugcgaacccuaaugcaaacccaaaugccaaccccaaugcuaacccgaacgccaauccuaacgcaaauccaaacgccaaucccaacgcuaauccuaacaaaaauaaccagggaaauggccaaggccauaacaugcccaaugacccaaacagaaauguggacgagaacgccaacgcaaauaacgcgguuaagaauaacaauaacgaggaaccuucagauaagcacauuaaagaguauuugacuaagauaaagaauagcaucaguacggaauggucccccuguucugugaccugcgggaacgguauucaggucaggaucaagccaggaagcgcuaauaaaccgaaggacgagcucgauuacgaaaacgacauugagaaaaagaucuguaagauggagaaaugcuccucaguguuuaauguaguuaacaguagcauaggccugaucauggugcugucuuuccucuuuuuaaauuga

SEQ ID NO: 4238 - RNA, 1227 nt, Artificial Sequence
  derived and/or modified CDS sequence (opt3) from Pf(Tz93-085)__BAM84771.1__CSP
augaugagaaagcuggccauccucagcguguccucuuuccuuuuugucgaggcucuguuccaggaauaccaaugcuauggcucaaguagcaacaccaggguuuugaaugaguuaaacuacgacaaugcagggacaaaccuguauaaugaacuagagaugaacuacuauggaaaacaggaaaauugguacucccucaagaaaaacucucggucgcugggugagaaugaugacggcaacaauaacaauggggauaacggacgcgagggcaaggacgaagauaaacgagacgguaauaacgaggauaacgaaaaacuucguaagcccaagcacaagaaacugaagcagccugccgacgggaauccagauccgaacgcgaaucccaacguggacccuaaugcuaacccaaauguagaucccaacgccaauccuaacguggacccaaaugcaaaccccaaugccaacccuaaugcuaacccaaacgcaaauccgaacgccaaucccaacgcuaauccuaacgccaauccaaacgcgaaucccaacgcaaauccuaacgccaauccaaacgcuaaucccaacgccaacccgaaugcaaacccuaaugcuaaccccaaugucgauccaaacgccaauccuaacgcgaaucccaacgccaauccaaacgcaaaucccaacgcuaauccuaacgccaacccaaaugcuaacccgaaugccaaccccaaugcaaacccuaaugccaacccaaaugcuaaccccaaugcgaacccuaaugcaaacccaaaugccaaccccaaugcuaacccgaacgccaauccuaacgcaaauccaaacgccaaucccaacgcuaauccuaacaaaaauaaccagggaaauggccaaggccauaacaugcccaaugacccaaacagaaauguggacgagaacgccaaggcaaacaaugcgguuaagaacaauaacaaugaggaaccuucagauaaacacauuaaggaguauuugaacaaaauacagaauagcaucaguacugaauggucccccuguucugugacgugcgggaacgguauucaggucaggaucaagccaggaagcgcugacaaaccgaaggaucagcucgacuacauuaaugauaucgagaaaaagauauguaagauggaaaaaugcuccucaguguuuaacguaguuaauaguagcaucggccugauuauggugcugucuuuccucuuuuuaaacuga

SEQ ID NO: 4239 - RNA, 1227 nt, Artificial Sequence
  derived and/or modified CDS sequence (opt3) from Pf(Tz93-102)__BAM84773.1__CSP
augaugagaaagcuggccauccucagcguguccucuuuccuuuuugucgaggcucuguuccaggaauaccaaugcuauggcucaaguagcaacaccaggguuuugaaugaguuaaacuacgacaaugcagggacaaaccuguauaaugaacuagagaugaacuacuauggaaaacaggaaaauugguacucccucaagaaaaacucucggucgcugggugagaaugaugacggcaacaauaacaauggggauaacggacgcgagggcaaggacgaagauaaacgagacgguaauaacgaggauaacgaaaaacuucguaagcccaagcacaagaaacugaagcagccuggggacggaaauccagauccgaacgccaaucccaacguggacccuaaugcgaacccaaauguagaucccaacgcuaauccuaacguggacccaaaugccaaccccaaugcaaacccuaaugccaacccaaacgcuaauccgaacgcaaaucccaacgccaauccuaacgcuaauccaaacgccaaucccaacgcgaauccuaacgcaaauccaaacgccaaucccaacgcuaacccgaaugccaacccuaaugcaaaccccaaugucgauccaaacgcuaauccuaacgccaaucccaacgcgaauccaaacgccaaucccaacgcaaauccuaacgcuaacccaaaugccaacccgaaugcuaaccccaaugccaacccuaaugcaaacccaaaugccaaccccaaugcuaacccuaaugcgaacccaaaugcaaaccccaaugccaacccgaacgcuaauccuaacgccaauccaaacgcaaaucccaacgccaauccuaacaaaaauaaccagggcaauggccaagggcauaacaugcccaaugacccaaacagaaauguggacgagaacgcuaacgccaauaacgcaguuaagaauaacaauaacgaggaaccuucagauaagcacauugagcaguauuugaaaacuauaaagaauagccucaguacggaauggucccccuguucugugaccugcggaaacgguauccaggucaggauuaaaccaggcagcgcgaauaagccgaaagacgagcugaacuacgaaaaugauaucgagaagaaaauuuguaagauggagaagugcuccucaguguuuaacguaguuaauaguagcaucgggcugauaauggugcucucuuucuuauuucugaacuga

SEQ ID NO: 4240 - RNA, 1227 nt, Artificial Sequence
  derived and/or modified CDS sequence (opt3) from Pf(Tz98-021)__BAM84783.1__CSP
augaugagaaagcuggccauccucagcguguccucuuuccuuuuugucgaggcucuguuccaggaauaccaaugcuauggcucaaguagcaacaccaggguuuugaaugaguuaaacuacgacaaugcagggacaaaccuguauaaugaacuagagaugaacuacuauggaaaacaggaaaauugguacucccucaagaaaaacucucggucgcugggugagaaugaugacggcaacaauaacaauggggauaacggacgcgagggcaaggacgaagauaaacgagacgguaauaacgaggauaacgaaaaacuucguaagcccaagcacaagaaacugaagcagccugccgacgggaauccagauccgaacgcgaaucccaacguggacccuaaugcuaacccaaauguagaucccaacgccaauccuaacguggacccaaaugcaaaccccaaugccaacccuaaugcuaacccaaacgcaaauccgaacgccaaucccaacgcuaauccuaacgccaauccaaacgcgaaucccaacgcaaauccuaacgccaauccaaacgcuaaucccaacgucgauccgaacgccaauccuaacgcaaaucccaacgcuaauccaaacgccaauccuaacgcgaaucccaacgccaauccaaacgcaaaucccaacgcuaauccuaacgccaacccaaaugcuaacccgaaugccaaccccaaugcaaacccuaaugccaacccaaaugcuaaccccaaugcgaacccuaaugcaaacccaaaugccaaccccaaugcuaacccgaacgccaauccuaacgcaaauccaaacgccaaucccaacgcuaauccuaacaaaaauaaccagggaaauggccaaggccauaacaugcccaaugacccaaacagaaauguggacgagaacgccaacgcaaauaacgcgguuaagaauaacaauaacgaggaaccuucagaucagcacauugagaaguauuugaaaacuauacagaauagccucaguacggaauggucccccuguucugugaccugcgggaacggaauccaggucaggauuaagccagguagcgcuaauaaaccgaaggaccaacuggauuacgccaacgacaucgagaaaaagauuuguaaaauggaaaagugcuccucaguguuuaauguaguuaacaguagcaucggccugauaauggugcucucuuucuuauuucugaauuga

SEQ ID NO: 4241 - RNA, 1227 nt, Artificial Sequence
  derived and/or modified CDS sequence (opt3) from Pf(Tz98-030)__BAM84785.1__CSP
augaugagaaagcuggccauccucagcguguccucuuuccuuuuugucgaggcucuguuccaggaauaccaaugcuauggcucaaguagcaacaccaggguuuugaaugaguuaaacuacgacaaugcagggacaaaccuguauaaugaacuagagaugaacuacuauggaaaacaggaaaauugguacucccucaagaaaaacucucggucgcugggugagaaugaugacggcaacaauaacaauggggauaacggacgcgagggcaaggacgaagauaaacgagacgguaauaacgaggauaacgaaaaacuucguaagcccaaacacaagaaacugaagcagccuggggacggaaauccagauccgaacgccaaucccaacguggacccuaaugcgaacccaaauguagaucccaacgcuaauccuaacguggacccaaaugccaaccccaaugcaaacccuaaugccaacccaaacgcuaauccgaacgcaaaucccaacgccaauccuaacgcuaauccaaacgccaaucccaacgcgaauccuaacgcaaauccaaacgccaaucccaacgucgauccgaacgcuaauccuaacgccaaucccaacgcaaauccaaacgcuaauccuaacgccaaucccaacgcgaauccaaacgccaaucccaacgcaaauccuaacgcuaacccaaaugccaacccgaaugcuaaccccaaugccaacccuaaugcaaacccaaaugccaaccccaaugcuaacccuaaugcgaacccaaaugcaaaccccaaugccaacccgaacgcuaauccuaacgccaauccaaacgcaaaucccaacgccaauccuaacaaaaauaaccagggcaauggccaagggcauaacaugcccaaugacccaaacagaaauguggacgagaacgcuaacgccaauaacgcaguuaagaauaacaauaacgaggaaccuucagaucagcacauugagaaguauuugcagaaaauacagaauagccucaguacugaauggucccccuguucugugacgugcggaaacgguauccaagucaggauuaagccaggcagcgcgaauaaaccgaaggaccagcugaacuacgagaaugauaucgaaaagaagauuuguaaaauggagaagugcuccucaguguuuaacguaguuaauaguagcaucgggcugauaauggugcucucuuucuuauuucugaacuga

SEQ ID NO: 4242 - RNA, 1227 nt, Artificial Sequence
  derived and/or modified CDS sequence (opt3) from Pf(Tz98-070)__BAM84790.1__CSP
augaugagaaagcuggccauccucagcguguccucuuuccuuuuugucgaggcucuguuccaggaauaccaaugcuauggcucaaguagcaacaccaggguuuugaaugaguuaaacuacgacaaugcagggacaaaccuguauaaugaacuagagaugaacuacuauggaaaacaggaaaauugguacucccucaagaaaaacucucggucgcugggugagaaugaugacggcaacaauaacaauggggauaacggacgcgagggcaaggacgaagauaaacgagacgguaauaacgaggauaacgaaaaacuucguaagcccaagcacaagaaacugaagcagccuggggacggaaauccagauccgaacgccaaucccaacguggacccuaaugcgaacccaaauguagaucccaacgcuaauccuaacguggacccaaaugccaaccccaaugcaaacccuaaugccaacccaaacgcuaauccgaacgcaaaucccaacgccaauccuaacgcuaauccaaacgccaaucccaacgcgaauccuaacgcaaauccaaacgccaaucccaacgcuaacccgaaugccaacccuaaugcaaaccccaaugucgauccaaacgcuaauccuaacgccaaucccaacgcgaauccaaacgccaaucccaacgcaaauccuaacgcuaacccaaaugccaacccgaaugcuaaccccaaugccaacccuaaugcaaacccaaaugccaaccccaaugcuaacccuaaugcgaacccaaaugcaaaccccaaugccaacccgaacgcuaauccuaacgccaauccaaacgcaaaucccaacgccaauccuaacaaaaauaaccagggcaauggccaagggcauaacaugcccaaugacccaaacagaaauguggacgagaacgcuaacgccaaugaugcaguuaagaacaauaacaaugaggaaccuucagaccagcacauugagaaguauuugaaaauaaucaagaacagccucaguacugaauggucccccuguucugugacgugcggaaaugguauucaggucaggaucaaaccaggcagcgcgaacaagccgaaagaucagcuggacuacgcuaaugauauugagaagaaaaucuguaagauggaaaagugcuccucaguguuuaacguaguuaauaguagcauagggcugaucauggugcucucuuucuuauuucugaacuga

SEQ ID NO: 4243 - RNA, 1224 nt, Artificial Sequence
  derived and/or modified CDS sequence (opt3) from Pf(A150)__ACO49332.1__CSP
augagaaagcuggccauccucagcguguccucuuuccuuuuugucgaggcucuguuccaggaauaccaaugcuauggcucaaguagcaacaccaggguuuugaaugaguuaaacuacgacaaugcagggacaaaccuguauaaugaacuagagaugaacuacuauggaaaacaggaaaauugguacucccucaagaaaaacucucggucgcugggugagaaugaugacggcaacaauaacaauggggauaacggacgcgagggcaaggacgaagauaaacgagacgguaauaacgaggauaacgaaaaacuucguaagcccaagcacaagaaacugaagcagccuggggacggaaauccagauccgaacgccaaucccaacguggacccuaaugcgaacccaaauguagaucccaacgcuaauccuaacguggacccaaaugccaaccccaaugcaaacccuaaugccaacccaaacgcuaauccgaacgcaaaucccaacgccaauccuaacgcuaauccaaacgccaaucccaacgcgaauccuaacgcaaauccaaacgccaaucccaacgcuaacccgaaugccaacccuaaugcaaaccccaaugcuaacccaaaugccaacccuaaugcgaaccccaaugccaacccaaaugcaaaccccaaugcuaacccuaacgccaauccaaacgcuaauccgaacgccaaucccaacgcaaauccuaacgccaauccaaacgcuaaucccaacgcgaauccuaacgcaaauccaaacgccaaucccaacgcuaacccgaaugccaacccuaaugcaaacccaaaugccaaccccaaugcuaacccuaauaaaaacaaucagggcaacggccaagggcauaauaugcccaacgauccaaauagaaacgucgacgagaacgccaaugcaaacaaugcggugaagaacaauaacaaugaggaaccuucagacaagcacauugagcaguauuugaaaaagauacagaacagccucaguacugaauggucccccuguucuguuacgugcggaaaugguauccaggugaggauuaaaccaggcagcgcuaacaagccgaaagaugagcuggacuacgaaaaugauaucgagaagaaaauuuguaagauggagaagugcuccucagucuuuaacgugguaaauaguagcaucgggcugauaaugguucucucuuucuuauuucugaacuga

SEQ ID NO: 4244 - RNA, 1215 nt, Artificial Sequence
  derived and/or modified CDS sequence (opt3) from Pf(Gha1109-183)__BAM84829.1__CSP
augaugagaaagcuggccauccucagcguguccucuuuccuuuuugucgaggcucuguuccaggaauaccaaugcuauggcucaaguagcaacaccaggguuuugaaugaguuaaacuacgacaaugcagggacaaaccuguauaaugaacuagagaugaacuacuauggaaaacaggaaaauugguacucccucaagaaaaacucucggucgcugggugagaaugaugacggcaacaauaacaauggggauaacggacgcgagggcaaggacgaagauaaacgagacgguaauaacgaggauaacgaaaaacuucguaagcccaagcacaagaaacugaagcagccugccgacgggaauccagauccgaacgcgaaucccaacguggacccuaaugcuaacccaaauguagaucccaacgccaauccuaacguggacccaaaugcaaaccccaaugccaacccuaaugcuaacccaaacgcaaauccgaacgccaaucccaacgcuaauccuaacgccaauccaaacgcgaaucccaacgcaaauccuaacgccaauccaaacgcuaaucccaacgccaacccgaaugcaaacccuaaugucgaucccaacgcuaauccaaacgccaauccuaacgcgaaucccaacgccaauccaaacgcaaaucccaacgcuaauccuaacgccaacccaaaugcuaacccgaaugccaaccccaaugcaaacccuaaugccaacccaaaugcuaaccccaaugcgaacccuaaugcaaacccaaaugccaaccccaaugcuaacccgaacgccaauccuaacgcaaauccaaacgccaaucccaacaaaaauaaccagggaaauggccaaggccauaacaugccuaaugaccccaacagaaauguggacgagaacgcuaaugccaacaacgcaguuaagaauaacaauaacgaggaaccaucagaucagcacauugagaaguauuugaaaacuauaaagaauagccucaguacggaaugguccccuuguucugugaccugcgggaacggaauccaggucaggauuaaacccgguagcgcgaauaagccaaaagaccagcuggauuacgcuaacgacaucgagaagaaaauuuguaagauggaaaagugcuccucaguguuuaauguaguuaacaguagcaucggccugauaauggugcucucuuucuuauuucugaauuga

SEQ ID NO: 4245 - RNA, 1215 nt, Artificial Sequence
  derived and/or modified CDS sequence (opt3) from Pf(Pal97-107)__BAM84956.1__CSP
augaugagaaagcuggccauccucagcguguccucuuuccuuuuugucgaggcucuguuccaggaauaccaaugcuauggcucaaguagcaacaccaggguuuugaaugaguuaaacuacgacaaugcagggacaaaccuguauaaugaacuagagaugaacuacuauggaaaacaggaaaauugguacucccucaagaaaaacucucggucgcugggugagaaugaugacggcaacaauaacaauggggauaacggacgcgagggcaaggacgaagauaaacgagacgguaauaacgaggauaacgaaaaacuucguaagcccaaacacaagaaacugaagcagccuggggacggaaauccagauccgaacgccaaucccaacguggacccuaaugcgaacccaaauguagaucccaacgcuaauccuaacguggacccaaaugccaaccccaaugcaaacccuaaugccaacccaaacgcuaauccgaacgcaaaucccaacgccaauccuaacgcuaauccaaacgccaaucccaacgcgaauccuaacgcaaauccaaacgccaaucccaacgcuaacccgaaugccaacccuaaugucgaucccaacgcaaauccaaacgcuaauccuaacgccaaucccaacgcgaauccaaacgccaaucccaacgcaaauccuaacgcuaacccaaaugccaacccgaaugcuaaccccaaugccaacccuaaugcaaacccaaaugccaaccccaaugcuaacccuaaugcgaacccaaaugcaaaccccaaugccaacccgaacgcuaauccuaacgccaauccaaacgcaaaucccaacaaaaauaaccagggcaauggccaagggcauaacaugccuaaugaccccaacagaaauguggacgagaacgccaaugcuaacaacgccguuaagaauaacaauaacgaggaaccaucagauaagcacauuaaagaguauuugacuaagauaaagaauagcaucaguacggaaugguccccuuguucugugaccugcggaaacgguauucaggucaggaucaagcccggcagcgcaaauaaaccaaaggacgagcucgauuacgaaaacgacauugagaaaaagaucuguaagauggagaaaugcuccucaguguuuaauguaguuaacaguagcauagggcugaucauggugcugucuuuccucuuuuuaaauuga

SEQ ID NO: 4246 - RNA, 1215 nt, Artificial Sequence
  derived and/or modified CDS sequence (opt3) from Pf(Tz98-103)__BAM84795.1__CSP
augaugagaaagcuggccauccucagcguguccucuuuccuuuuugucgaggcucuguuccaggaauaccaaugcuauggcucaaguagcaacaccaggguuuugaaugaguuaaacuacgacaaugcagggacaaaccuguauaaugaacuagagaugaacuacuauggaaaacaggaaaauugguacucccucaagaaaaacucucggucgcugggugagaaugaugacggcaacaauaacaauggggauaacggacgcgagggcaaggacgaagauaaacgagacgguaauaacgaggauaacgaaaaacuucguaagcccaagcacaagaaacugaagcagccugccgacgggaauccagauccgaacgcgaaucccaacguggacccuaaugcuaacccaaauguagaucccaacgccaauccuaacguggacccaaaugcaaaccccaaugccaacccuaaugcuaacccaaacgcaaauccgaacgccaaucccaacgcuaauccuaacgccaauccaaacgcgaaucccaacgcaaauccuaacgccaauccaaacgcuaaucccaacgccaacccgaaugcaaacccuaaugcuaaccccaaugucgauccaaacgccaauccuaacgcgaaucccaacgccaauccaaacgcaaaucccaacgcuaauccuaacgccaacccaaaugcuaacccgaaugccaaccccaaugcaaacccuaaugccaacccaaaugcuaaccccaaugcgaacccuaaugcaaacccaaaugccaaccccaaugcuaacccgaacgccaauccuaacgcaaauccaaacgccaaucccaacaaaaauaaccagggaaauggccaaggccauaacaugccuaaugaccccaacagaaauguggacgagaacgcuaaugccaacaacgcaguuaagaauaacaauaacgaggaaccaucagauaagcacauuacugaguauuugaaaaggauacagaauagccucaguacggaaugguccccuuguucugugaccugcgggaacggaauccagguccggauuaagcccgguagcgcgggcaaauccaagaaugagcuggacuacgaaaacgauaucgagaaaaagauuuguaaaauggagaagugcucaaguguguuuaauguaguuaacagcucuaucgggcugauaauggugcucuccuucuuauuucugaauuga

SEQ ID NO: 4247 - RNA, 1215 nt, Artificial Sequence
  derived and/or modified CDS sequence (opt3) from Pf(Yaounde)__AAN87588.1__CSP
augaugagaaagcuggccauccucagcguguccucuuuccuuuuugucgaggcucuguuccaggaauaccaaugcuauggcucaaguagcaacaccaggguuuugaaugaguuaaacuacgacaaugcagggacaaaccuguauaaugaacuagagaugaacuacuauggaaaacaggaaaauugguacucccucaagaaaaacucucggucgcugggugagaaugaugacggcaacaauaacaauggggauaacggacgcgagggcaaggacgaagauaaacgagacgguaauaacgaggauaacgaaaaacuucguaagcccaagcacaagaaacugaagcagccugccgacgggaauccagauccgaacgcgaaucccaacguggacccuaaugcuaacccaaauguagaucccaacgccaauccuaacguggacccaaaugcaaaccccaaugccaacccuaaugcuaacccaaacgcaaauccgaacgccaaucccaacgcuaauccuaacgccaauccaaacgcgaaucccaacgcaaauccuaacgucgauccaaaugccaaccccaaugcuaacccgaacgccaauccuaacgcaaaucccaacgcuaauccaaacgccaauccuaacgcgaaucccaacgccaauccaaacgcaaaucccaacgcuaauccuaacgccaacccaaaugcuaacccgaaugccaaccccaaugcaaacccuaaugccaacccaaaugcuaaccccaaugcgaacccuaaugcaaacccaaaugccaaccccaaugcuaacccgaacgccaauccuaacgcaaauccaaacgccaaucccaacaaaaauaaccagggaaauggccaaggccauaacaugccuaaugaccccaacagaaauguggacgagaacgcuaaugccaacaacgcaguuaagaauaacaauaacgaggaaccaucagaucagcacauugagaaguauuugaauaaaauaaagaacagccucaguacugaaugguccccuuguucugugacgugcgggaauggaauccaggucaggauuaaacccgguagcgcgaacaagccaaaagaccagcuggauuacgcuaaugacaucgagaagaaaauuuguaagauggaaaagugcuccucaguguuuaacguaguuaauaguagcaucggccugauaauggugcucucuuucuuauuucugaacuga

SEQ ID NO: 4248 - RNA, 1209 nt, Artificial Sequence
  derived and/or modified CDS sequence (opt3) from Pf(CMC247)__ADF48384.1__CSP
augagaaagcuggccauccucagcguguccucuuuccuuuuugucgaggcucuguuccaggaauaccaaugcuauggcucaaguagcaacaccaggguuuugaaugaguuaaacuacgacaaugcagggacaaaccuguauaaugaacuagagaugaacuacuauggaaaacaggaaaauugguacucccucaagaaaaacucucggucgcugggugagaaugaugacggcaacaauaacaauggggauaacggacgcgagggcaaggacgaagauaaacgagacgguaauaacgaggauaacgaaaaacuucguaagcccaagcacaagaaacugaagcagccuggggacggaaauccagauccgaacgccaaucccaacguggacccuaaugcgaacccaaauguagaucccaacgcuaauccuaacguggacccaaaugccaaccccaaugcaaacccuaaugccaacccaaacgcuaauccgaacgcaaaucccaacgccaauccuaacgcuaauccaaacgccaaucccaacgcgaauccuaacgcaaauccaaacgccaaucccaacgcuaacccgaaugccaacccuaaugcaaaccccaaugcuaacccaaaugccaacccuaaugcgaaccccaaugccaacccaaaugcaaaccccaaugcuaacccuaacgccaauccaaacgcuaauccgaacgccaaucccaacgcaaauccuaacgccaauccaaacgcuaaucccaacgcgaauccuaacgcaaauccaaacgccaaucccaacgcuaacccgaaugccaacccuaaugcaaacccaaaugccaaccccaauaaaaacaaucagggcaacggccaagggcauaauaugccuaacgaucccaauagaaacgucgacgagaaugcuaacgccaacaaugacgagaacaauaacaaugaggaaccaucagauaagcacauugaacaguauuugaagaaaauacaguacagccucaguacugagugguccccuuguucugugacgugcggaaacgguauccagguuaggauuaagcccggcagcgcagacaaaccaaaggaucaacuggacuacgaaaaugauaucgagaaaaagauuuguaaaauggagaagugcuccucaguguuuaacgucgugaauaguagcaucgggcugauaaugguacucucuuucuuauuucugaacuga

SEQ ID NO: 4249 - RNA, 1206 nt, Artificial Sequence
  derived and/or modified CDS sequence (opt3) from Pf(Gha1109-215)__BAM84833.1__CSP
augaugagaaagcuggccauccucagcguguccucuuuccuuuuugucgaggcucuguuccaggaauaccaaugcuauggcucaaguagcaacaccaggguuuugaaugaguuaaacuacgacaaugcagggacaaaccuguauaaugaacuagagaugaacuacuauggaaaacaggaaaauugguacucccucaagaaaaacucucggucgcugggugagaaugaugacggcaacaaugaggauaacgaaaaacuucgcaagcccaagcacaagaaacugaagcagccugccgacgggaauccagauccgaacgcgaaucccaacguggacccuaacgcuaauccaaacguagaucccaaugccaacccuaauguggacccaaacgcaaaucccaacgccaauccuaacgcuaauccaaacgcaaauccgaacgccaaucccaacgcuaacccuaaugccaacccaaaugcgaaccccaaugcaaacccuaaugccaacccaaaugcuaaccccaaugccaacccgaaugcaaacccuaaugcuaaccccaacgccaauccaaacgcgaauccuaacgccaaucccaacgucgauccaaaugcaaaccccaaugcuaacccuaaugccaacccaaaugcuaacccgaaugccaaccccaacgcaaauccuaacgccaauccaaacgcuaaucccaacgcgaauccuaacgcaaauccaaacgccaaucccaacgcuaauccgaacgccaauccuaacgcaaauccaaacgccaaccccaaugcuaacccuaaugccaaccccaaugcaaacccaaaugcgaacccuaauaaaaacaaucagggaaacggccaaggucauaauaugcccaacgacccaaaucgaaacguggaugagaacgcuaaggccaauaacgcaguuaaaaauaacaauaacgaggaaccgucagacaagcacauugagcaguauuugaagacuauacagaauagccucaguacggaaugguccccuuguucugugaccugcgggaacggaauccagguccguauuaaacccggcagcgccaauaagccaaaagaucaacuggacuacgagaacgacaucgaaaagaaaauuuguaagauggagaaaugcuccucaguguuuaauguaguuaacaguagcaucggccugauaauggugcucucuuucuuauuucugaauuga

SEQ ID NO: 4250 - RNA, 1203 nt, Artificial Sequence
  derived and/or modified CDS sequence (opt3) from Pf(Gha1109-199)__BAM84831.1__CSP
augaugagaaagcuggccauccucagcguguccucuuuccuuuuugucgaggcucuguuccaggaauaccaaugcuauggcucaaguagcaacaccaggguuuugaaugaguuaaacuacgacaaugcagggacaaaccuguauaaugaacuagagaugaacuacuauggaaaacaggaaaauugguacucccucaagaaaaacucucggucgcugggugagaaugaugacggcaacaauaacaauggggauaacggacgcgagggcaaggacgaagauaaacgagacgguaauaacgaggauaacgaaaaacuucguaagcccaagcacaagaaacugaagcagccugccgacgggaauccagauccgaacgcgaaucccaacguggacccuaaugcuaacccaaauguagaucccaacgccaauccuaacguggacccaaaugcaaaccccaaugccaacccuaaugcuaacccaaacgcaaauccgaacgccaaucccaacgcuaauccuaacgccaauccaaacgcgaaucccaacgcaaauccuaacgccaauccaaacgcuaaucccaacgccaacccgaaugucgauccuaacgcaaaucccaacgcuaauccaaacgccaauccuaacgcgaaucccaacgccaauccaaacgcaaaucccaacgcuaauccuaacgccaacccaaaugcuaacccgaaugccaaccccaaugcaaacccuaaugccaacccaaaugcuaaccccaaugcgaacccuaaugcaaacccaaaugccaaccccaaugcuaacccgaacgccaauccuaacgcaaauccaaacaaaaauaaccagggaaauggccaaggccauaacaugcccaaugacccuaacagaaauguggacgagaacgccaaugcuaacucagccguuaagaauaacaacaaugaggaacccagcgauaagcacauuaaagaguauuugaacaagauacagaauagucucuccacugaauggucuccauguagcgugacgugcgggaacggaauccaggucaggauuaaaccugguuccgcaaauaagcccaaagacgagcuggauuacgcgaacgacaucgaaaagaaaauuuguaagauggagaagugcucaaguguguuuaauguaguuaacagcucuaucggccugauaauggugcucuccuucuuauuucugaauuga

SEQ ID NO: 4251 - RNA, 1194 nt, Artificial Sequence
  derived and/or modified CDS sequence (opt3) from Pf(Asembo Bay)__AAN87582.1__CSP
augaugagaaagcuggccauccucagcguguccucuuuccuuuuugucgaggcucuguuccaggaauaccaaugcuauggcucaaguagcaacaccaggguuuugaaugaguuaaacuacgacaaugcagggacaaaccuguauaaugaacuagagaugaacuacuauggaaaacaggaaaauugguacucccucaagaaaaacucucggucgcugggugagaaugaugacggcaacaaugaggauaacgaaaaacuucgcaagcccaagcacaagaaacugaagcagccugccgacgggaauccagauccgaacgcgaaucccaacguggacccuaacgcuaauccaaacguagaucccaaugccaacccuaauguggacccaaacgcaaaucccaacgccaauccuaacgcuaauccaaacgcaaauccgaacgccaaucccaacgcuaacccuaaugccaacccaaaugcgaaccccaaugcaaacccuaaugccaacccaaaugcuaaccccaaugccaacccgaaugcaaacccuaaugcuaaccccaacgccaauccaaacgcgaauccuaacgccaaucccaacgucgauccaaaugcaaaccccaaugcuaacccuaaugccaacccaaaugcuaacccgaaugccaaccccaacgcaaauccuaacgccaauccaaacgcuaaucccaacgcgaauccuaacgcaaauccaaacgccaaucccaacgcuaauccgaacgccaauccuaacgcaaauccaaacgccaaccccaaugcuaacccuaaugccaaccccaaugcaaacccaaauaaaaacaaucagggaaacggccaaggucauaauaugccuaacgaccccaaucgaaacguggaugagaaugcgaacgcuaacaaugccguuaagaacaauaacaaugaggaaccaucagaccagcacauugagaaauauuugaagacuauacagaacagccucaguacggaaugguccccguguucugugaccugcgggaauggaauccagguccguauuaagccuggcagcgcaaacaaacccaaggaucaacuggacuacgccaaugacaucgagaaaaagauuuguaaaauggaaaagugcuccucaguguuuaacguaguuaauaguagcaucggccugauaauggugcucucuuucuuauuucugaacuga

SEQ ID NO: 4252 - RNA, 1194 nt, Artificial Sequence
  derived and/or modified CDS sequence (opt3) from Pf(Tz98-017)__BAM84782.1__CSP
augaugagaaagcuggccauccucagcguguccucuuuccuuuuugucgaggcucuguuccaggaauaccaaugcuauggcucaaguagcaacaccaggguuuugaaugaguuaaacuacgacaaugcagggacaaaccuguauaaugaacuagagaugaacuacuauggaaaacaggaaaauugguacucccucaagaaaaacucucggucgcugggugagaaugaugacggcaacaaugaggauaacgaaaaacuucgcaagcccaagcacaagaaacugaagcagccugccgacgggaauccagauccgaacgcgaaucccaacguggacccuaacgcuaauccaaacguagaucccaaugccaacccuaauguggacccaaacgcaaaucccaacgccaauccuaacgcuaauccaaacgcaaauccgaacgccaaucccaacgcuaacccuaaugccaacccaaaugcgaaccccaaugcaaacccuaaugccaacccaaaugcuaaccccaaugccaacccgaaugcaaacccuaaugcuaaccccaacgccaauccaaacgcgaauccuaacgccaaucccaacgucgauccaaaugcaaaccccaaugcuaacccuaaugccaacccaaaugcuaacccgaaugccaaccccaacgcaaauccuaacgccaauccaaacgcuaaucccaacgcgaauccuaacgcaaauccaaacgccaaucccaacgcuaauccgaacgccaauccuaacgcaaauccaaacgccaaccccaaugcuaacccuaaugccaaccccaaugcaaacccaaauaaaaacaaucagggaaacggccaaggucauaauaugccuaacgaccccaaucgaaacguggaugagaaugcgaacgcuaacaaugccguuaagaacaauaacaaugaggaaccaucagacaaacacauugagcaguauuugaacaagauaaagaauagcaucaguacugaaugguccccguguucugugacgugcgggaacggcauucagguccguaucaaaccuggaagcgcaaauaagcccaaagaugagcucaacuacgaaaaugacauugagaagaaaaucuguaagauggaaaaaugcuccucaguguuuaacguaguuaauaguagcauaggccugaucauggugcugucuuuccucuuuuuaaacuga

SEQ ID NO: 4253 - RNA, 1194 nt, Artificial Sequence
  derived and/or modified CDS sequence (opt3) from Pf(Yaounde)__AAN87583.1__CSP
augaugagaaagcuggccauccucagcguguccucuuuccuuuuugucgaggcucuguuccaggaauaccaaugcuauggcucaaguagcaacaccaggguuuugaaugaguuaaacuacgacaaugcagggacaaaccuguauaaugaacuagagaugaacuacuauggaaaacaggaaaauugguacucccucaagaaaaacucucggucgcugggugagaaugaugacggcaacaaugaggauaacgaaaaacuucgcaagcccaagcacaagaaacugaagcagccugccgacgggaauccagauccgaacgcgaaucccaacguggacccuaacgcuaauccaaacguagaucccaaugccaacccuaauguggacccaaacgcaaaucccaacgccaauccuaacgcuaauccaaacgcaaauccgaacgccaaucccaacgcuaacccuaaugccaacccaaaugcgaaccccaaugcaaacccuaaugccaacccaaaugcuaaccccaaugccaacccgaaugcaaacccuaaugcuaaccccaacgccaauccaaacgcgaauccuaacgccaaucccaacgucgauccaaaugcaaaccccaaugcuaacccuaaugccaacccaaaugcuaacccgaaugccaaccccaacgcaaauccuaacgccaauccaaacgcuaaucccaacgcgaauccuaacgcaaauccaaacgccaaucccaacgcuaauccgaacgccaauccuaacgcaaauccaaacgccaaccccaaugcuaacccuaaugccaaccccaaugcaaacccaaauaaaaacaaucagggaaacggccaaggucauaauaugccuaacgaccccaaucgaaacguggaugagaaugcgaacgcuaacaaugccguuaagaacaauaacaaugaggaaccaucagaccagcacauugagaaauauuugaagcguauacagaacagccucaguacugaaugguccccguguucugugacgugcgggaauggaauccaggucagaauuaagccuggcagcgcaaacaaacccaaggaucaacuggacuacgccaaugacaucgagaaaaagauuuguaaaauggaaaagugcuccucaguguuuaacguaguuaauaguagcaucggccugauaauggugcucucuuucuuauuucugaacuga

SEQ ID NO: 4254 - RNA, 1191 nt, Artificial Sequence
  derived and/or modified CDS sequence (opt3) from Pf(Amazonas)__AAN87593.1__CSP
augaugagaaagcuggccauccucagcguguccucuuuccuuuuugucgaggcucuguuccaggaauaccaaugcuauggcucaaguagcaacaccaggguuuugaaugaguuaaacuacgacaaugcagggacaaaccuguauaaugaacuagagaugaacuacuauggaaaacaggaaaauugguacucccucaagaaaaacucucggucgcugggugagaaugaugacggcaacaauaacaauggggauaacggacgcgagggcaaggacgaagauaaacgagacgguaauaacgaggauaacgaaaaacuucguaagcccaagcacaagaaacugaagcagccugccgacgggaauccagauccgaacgcgaaucccaacguggacccuaaugcuaacccaaauguagaucccaacgccaauccuaacguggacccaaaugcaaaccccaaugccaacccuaaugcuaacccaaacgcaaauccgaacgccaaucccaacgcuaauccuaacgccaauccaaacgcgaaucccaacgcaaauccuaacgccaauccaaacgcuaaucccaacgccaacccgaaugucgauccuaacgcaaaucccaacgcuaauccaaacgccaauccuaacgcgaaucccaacgccaauccaaacgcaaaucccaacgcuaauccuaacgccaacccaaaugcuaacccgaaugccaaccccaaugcaaacccuaaugccaacccaaaugcuaaccccaaugcgaacccuaaugcaaacccaaaugccaaccccaaugcuaacccgaacgccaauccuaacaaaaauaaccagggaaauggccaaggccauaacaugccaaaugaccccaacagaaauguggacgagaacgcaaaugccaacaaugcuguuaagaacaauaacaacgaggaaccuucagauaagcacauuacugaguauuugaaaaggauacagaauagccucaguacggaauggucccccuguucugugaccugcgggaacggaauccagguccggauuaagccagguagcgccggcaaauccaagaaugagcuggacuacgaaaacgauaucgagaaaaagauuuguaaaauggagaagugcucaaguguguuuaauguaguuaacagcucuaucgggcugauaauggugcucuccuucuuauuucugaauuga

SEQ ID NO: 4255 - RNA, 1191 nt, Artificial Sequence
  derived and/or modified CDS sequence (opt3) from Pf(Amazonas)__AAN87594.1__CSP
augaugagaaagcuggccauccucagcguguccucuuuccuuuuugucgaggcucuguuccaggaauaccaaugcuauggcucaaguagcaacaccaggguuuugaaugaguuaaacuacgacaaugcagggacaaaccuguauaaugaacuagagaugaacuacuauggaaaacaggaaaauugguacucccucaagaaaaacucucggucgcugggugagaaugaugacggcaacaauaacaauggggauaacggacgcgagggcaaggacgaagauaaacgagacgguaauaacgaggauaacgaaaaucuucguaagcccaagcacaaaaagcugaaacagccugccgacgggaacccagauccgaaugcgaaccccaauguggacccuaacgcuaauccaaacguagaucccaaugccaacccuaauguggacccaaacgcaaaucccaacgccaauccuaacgcuaacccaaaugcaaacccgaaugccaaccccaaugcuaacccuaaugccaacccaaaugcgaaccccaaugcaaacccuaaugccaacccaaaugcuaaccccaacgccaauccgaacgucgauccuaaugcaaaccccaaugcuaacccaaaugccaacccuaaugcgaaccccaaugccaacccaaaugcaaaccccaaugcuaacccuaacgccaauccaaacgcuaauccgaacgccaaucccaacgcaaauccuaacgccaauccaaacgcuaaucccaacgcgaauccuaacgcaaauccaaacgccaaucccaacgcuaacccgaaugccaacccuaauaagaacaaucagggaaacggccaaggccauaauaugccaaacgaccccaauagaaacguggacgagaaugcaaacgccaauaacgcuguuaaaaauaacaacaaugaggaaccuucagauaagcacauuacugaguauuugaagaggauacagaacagccucaguacggaauggucccccuguucugugaccugcgggaauggaauccagguccggauuaaaccagguagcgccggcaaguccaaaaacgagcuggacuacgaaaaugauaucgagaagaaaauuuguaagauggagaaaugcucaaguguguuuaacguaguuaauagcucuaucgggcugauaauggugcucuccuucuuauuucugaacuga

SEQ ID NO: 4256 - RNA, 1191 nt, Artificial Sequence
  derived and/or modified CDS sequence (opt3) from Pf(Bolivar)__AAN87592.1__CSP
augaugagaaagcuggccauccucagcguguccucuuuccuuuuugucgaggcucuguuccaggaauaccaaugcuauggcucaaguagcaacaccaggguuuugaaugaguuaaacuacgacaaugcagggacaaaccuguauaaugaacuagagaugaacuacuauggaaaacaggaaaauugguacucccucaagaaaaacucucggucgcugggugagaaugaugacggcaacaauaacaauggggauaacggacgcgagggcaaggacgaagauaaacgagacgguaauaacgaggauaacgaaaaacuucguaagcccaaacacaagaaacugaagcagccugccgacgggaauccagauccgaacgcgaaucccaacguggacccuaaugcuaacccaaauguagaucccaacgccaauccuaacguggacccaaaugcaaaccccaaugccaacccuaaugcuaacccaaacgcaaauccgaacgccaaucccaacgcuaauccuaacgccaauccaaacgcgaaucccaacgcaaauccuaacgccaauccaaacgcuaaucccaacgccaacccgaaugucgauccuaacgcaaaucccaacgcuaauccaaacgccaauccuaacgcgaaucccaacgccaauccaaacgcaaaucccaacgcuaauccuaacgccaacccaaaugcuaacccgaaugccaaccccaaugcaaacccuaaugccaacccaaaugcuaaccccaaugcgaacccuaaugcaaacccaaaugccaaccccaaugcuaacccgaacgccaauccuaacaaaaauaaccagggaaauggccaaggccauaacaugccaaaugaccccaacagaaauguggacgagaacgcaaaugccaacaaugcuguuaagaacaauaacaacgaggaaccuucagauaagcacauuacugaguauuugaaaaggauacagaauagccucaguacggaauggucccccuguucugugaccugcgggaacggaauccagguccggauuaagccagguagcgccggcaaauccaagaaucagcuggacuacgagaacgauaucgaaaagaagauuuguaaaauggagaagugcucaaguguguuuaauguaguuaacagcucuaucgggcugauaauggugcucuccuucuuauuucugaauuga

SEQ ID NO: 4257 - RNA, 1182 nt, Artificial Sequence
  derived and/or modified CDS sequence (opt3) from Pf(30)__AGR53781.1__CSP
augaugagaaagcuggccauccucagcguguccucuuuccuuuuugucgaggcucuguuccaggaauaccaaugcuauggcucaaguagcaacaccaggguuuugaaugaguuaaacuacgacaaugcagggacaaaccuguauaaugaacuagagaugaacuacuauggaaaacaggaaaauugguacucccucaagaaaaacucucggucgcugggugagaaugaugacggcaacaaugaggauaacgaaaaacuucgcaagcccaagcacaagaaacugaagcagccuggggacggaaauccagauccgaacgccaaucccaacguggacccuaacgcgaauccaaacguagaucccaaugcuaacccuaauguggacccaaacgccaaucccaacgcaaauccuaacgccaauccaaacgcuaauccgaacgcaaaucccaacgccaacccuaaugcuaacccaaaugccaaccccaaugcgaacccuaaugcaaacccaaaugccaaccccaaugcuaacccgaaugccaacccuaaugcaaaccccaacgcuaauccaaacgucgauccuaaugccaaccccaaugcgaacccaaaugccaaccccaaugcaaacccuaaugcuaacccaaaugccaacccgaaugcuaaccccaacgccaauccuaacgcaaauccaaacgccaaucccaacgcuaauccuaacgcgaauccaaacgcaaaucccaacgccaauccgaacgcuaauccuaacgccaauccaaacgcaaaccccaaugccaacccuaaugcuaaccccaauaaaaacaaucagggcaacggucaagggcauaauaugccaaacgacccuaaucgaaacguggaugagaaugccaacgcaaauaacgcgguuaagaacaauaacaaugaggaacccucagacaaacacauuacugaguauuugaagaagauacagaacagccucaguacggaaugguccccauguucugugaccugcggaaauggcauccagguccguauuaaaccgggcagcgcugggaaguccaaaaacgagcuggauuacgaaaaugacaucgagaagaaaauuuguaagauggaaaaaugcucaaguguguuuaacguaguuaauagcucuaucggacugauaauggugcucuccuucuuauuucugaacuga

SEQ ID NO: 4258 - RNA, 1182 nt, Artificial Sequence
  derived and/or modified CDS sequence (opt3) from Pf(Gha1108-087)__BAM84819.1__CSP
augaugagaaagcuggccauccucagcguguccucuuuccuuuuugucgaggcucuguuccaggaauaccaaugcuauggcucaaguagcaacaccaggguuuugaaugaguuaaacuacgacaaugcagggacaaaccuguauaaugaacuagagaugaacuacuauggaaaacaggaaaauugguacucccucaagaaaaacucucggucgcugggugagaaugaugacggcaacaaugaggauaacgaaaaacuucgcaagcccaagcacaagaaacugaagcagccugccgacgggaauccagauccgaacgcgaaucccaacguggacccuaacgcuaauccaaacguagaucccaaugccaacccuaauguggacccaaacgcaaaucccaacgccaauccuaacgcuaauccaaacgcaaauccgaacgccaaucccaacgcuaacccuaaugccaacccaaaugcgaaccccaaugcaaacccuaaugccaacccaaaugcuaaccccaaugccaacccgaaugcaaacccuaaugcuaaccccaacgccaauccaaacgcgaauccuaacgucgaucccaaugccaacccaaaugcaaaccccaaugcuaacccuaaugccaacccaaaugcuaacccgaaugccaaccccaacgcaaauccuaacgccaauccaaacgcuaaucccaacgcgaauccuaacgcaaauccaaacgccaaucccaacgcuaauccgaacgccaauccuaacgcaaauccaaacgccaaccccaaugcuaacccuaaugccaaccccaauaaaaacaaucagggaaacggccaaggucauaauaugccaaacgacccuaaucgaaacguggaugagaaugcaaacgcgaauaacgcuguuaagaacaauaacaaugaggaacccucagaccagcacauugagaaauauuugaagcguauacagaacagccucaguacugaaugguccccauguucugugacgugcgggaauggaauccaggucagaauuaagccgggcagcgccaacaaaccuaaggaucaacuggacuacgcaaaugacaucgagaaaaagauuuguaaaauggaaaagugcuccucaguguuuaacguaguuaauaguagcaucggccugauaauggugcucucuuucuuauuucugaacuga

SEQ ID NO: 4259 - RNA, 1182 nt, Artificial Sequence
  derived and/or modified CDS sequence (opt3) from Pf(Gha1108-098)__BAM84821.1__CSP
augaugagaaagcuggccauccucagcguguccucuuuccuuuuugucgaggcucuguuccaggaauaccaaugcuauggcucaaguagcaacaccaggguuuugaaugaguuaaacuacgacaaugcagggacaaaccuguauaaugaacuagagaugaacuacuauggaaaacaggaaaauugguacucccucaagaaaaacucucggucgcugggugagaaugaugacggcaacaaugaggauaacgaaaaacuucgcaaacccaagcacaagaaacugaagcagccuggggacggaaauccagauccgaacgccaaucccaacguggacccuaacgcgaauccaaacguagaucccaaugcuaacccuaauguggacccaaacgccaaucccaacgcaaauccuaacgccaauccaaacgcuaauccgaacgcaaaucccaacgccaacccuaaugcuaacccaaaugccaaccccaaugcgaacccuaaugcaaacccaaaugccaaccccaaugcuaacccgaaugccaacccuaaugcaaaccccaacgcuaauccaaacgucgauccuaaugccaaccccaaugcgaacccaaaugccaaccccaaugcaaacccuaaugcuaacccaaaugccaacccgaaugcuaaccccaacgccaauccuaacgcaaauccaaacgccaaucccaacgcuaauccuaacgcgaauccaaacgcaaaucccaacgccaauccgaacgcuaauccuaacgccaauccaaacgcaaaccccaaugccaacccuaaugcuaaccccaauaaaaacaaucagggcaacggucaagggcauaauaugccaaacgagccuaaucgaaacguggacgaaaaugccaacgcaaauaacgcgguuaagaacaauaacaaugaggagcccucagauaaacacauugaacaguauuugaacaagauacagaauagccucaguacugagugguccccauguucugugacgugcggaaacggcauccagguccguauuaagccgggcagcgcuaauaaaccuaaggaccaacuggauuacgccaacgacaucgaaaagaagauuuguaaaauggagaagugcuccucaguguuuaauguaguuaacaguagcaucgggcugauaauggugcucucuuucuuauuucugaauuga

SEQ ID NO: 4260 - RNA, 1182 nt, Artificial Sequence
  derived and/or modified CDS sequence (opt3) from Pf(Gha1108-101)__BAM84808.1__CSP
augaugagaaagcuggccauccucagcguguccucuuuccuuuuugucgaggcucuguuccaggaauaccaaugcuauggcucaaguagcaacaccaggguuuugaaugaguuaaacuacgacaaugcagggacaaaccuguauaaugaacuagagaugaacuacuauggaaaacaggaaaauugguacucccucaagaaaaacucucggucgcugggugagaaugaugacggcaacaaugaggauaacgaaaaacuucgcaagcccaagcacaagaaacugaagcagccugccgacgggaauccagauccgaacgcgaaucccaacguggacccuaacgcuaauccaaacguagaucccaaugccaacccuaauguggacccaaacgcaaaucccaacgccaauccuaacgcuaauccaaacgcaaauccgaacgccaaucccaacgcuaacccuaaugccaacccaaaugcgaaccccaaugcaaacccuaaugccaacccaaaugcuaaccccaaugccaacccgaaugcaaacccuaaugcuaaccccaacgccaauccaaacgucgauccuaaugcgaaccccaaugccaacccaaaugcaaaccccaaugcuaacccuaaugccaacccaaaugcuaacccgaaugccaaccccaacgcaaauccuaacgccaauccaaacgcuaaucccaacgcgaauccuaacgcaaauccaaacgccaaucccaacgcuaauccgaacgccaauccuaacgcaaauccaaacgccaaccccaaugcuaacccuaaugccaaccccaauaaaaacaaucagggaaacggccaaggucauaauaugccaaacgacccuaaucgaaacguggaugagaaugcaaacgcgaauaacgcuguuaagaacaauaacaaugaggaacccucagaccagcacauugagaaauauuugaacaagauaaagaauagccucaguacugaaugguccccauguucugugacgugcgggaacggaauccagguccguauuaaaccgggcagcgccaauaagccuaaagaucagcuggacuacgcaaacgacaucgagaagaaaauuuguaagauggaaaaaugcuccucaguguuuaauguaguuaacaguagcaucggccugauaauggugcucucuuucuuauuucugaauuga

SEQ ID NO: 4261 - RNA, 1182 nt, Artificial Sequence
  derived and/or modified CDS sequence (opt3) from Pf(Gha1108-148)__BAM84814.1__CSP
augaugagaaagcuggccauccucagcguguccucuuuccuuuuugucgaggcucuguuccaggaauaccaaugcuauggcucaaguagcaacaccaggguuuugaaugaguuaaacuacgacaaugcagggacaaaccuguauaaugaacuagagaugaacuacuauggaaaacaggaaaauugguacucccucaagaaaaacucucggucgcugggugagaaugaugacggcaacaaugaggauaacgaaaaacuucgcaagcccaagcacaagaaacugaagcagccuggggacggaaauccagauccgaacgccaaucccaacguggacccuaacgcgaauccaaacguagaucccaaugcuaacccuaauguggacccaaacgccaaucccaacgcaaauccuaacgccaauccaaacgcuaauccgaacgcaaaucccaacgccaacccuaaugcuaacccaaaugccaaccccaaugcgaacccuaaugcaaacccaaaugccaaccccaaugcuaacccgaaugccaacccuaaugcaaaccccaacgcuaauccaaacgucgauccuaaugccaaccccaaugcgaacccaaaugccaaccccaaugcaaacccuaaugcuaacccaaaugccaacccgaaugcuaaccccaacgccaauccuaacgcaaauccaaacgccaaucccaacgcuaauccuaacgcgaauccaaacgcaaaucccaacgccaauccgaacgcuaauccuaacgccaauccaaacgcaaaccccaaugccaacccuaaugcuaaccccaauaaaaacaaucagggcaacggucaagggcauaauaugccaaacgacccuaaucgaaacguggaugagaaugccaacgcaaauucagcgguuaagaacaacaauaacgaggaacccagcgacaaacacauuaaggaguauuugaauaagauacagaacagucucuccacugaauggucuccauguagcgugacgugcggaaauggcauccagguccguauuaaaccgggcuccgcuaacaagccuaaagaugagcuggacuacgccaaugacaucgaaaagaaaauuuguaagauggagaaaugcucaaguguguuuaacguaguuaauagcucuaucgggcugauaauggugcucuccuucuuauuucugaacuga

SEQ ID NO: 4262 - RNA, 1182 nt, Artificial Sequence
  derived and/or modified CDS sequence (opt3) from Pf(Gha1109-097)__BAM84838.1__CSP
augaugagaaagcuggccauccucagcguguccucuuuccuuuuugucgaggcucuguuccaggaauaccaaugcuauggcucaaguagcaacaccaggguuuugaaugaguuaaacuacgacaaugcagggacaaaccuguauaaugaacuagagaugaacuacuauggaaaacaggaaaauugguacucccucaagaaaaacucucggucgcugggugagaaugaugacggcaacaaugaggauaacgaaaaacuucgcaagcccaagcacaagaaacugaagcagccugccgacgggaauccagauccgaacgcgaaucccaacguggacccuaacgcuaauccaaacguagaucccaaugccaacccuaauguggacccaaacgcaaaucccaacgccaauccuaacgcuaauccaaacgcaaauccgaacgccaaucccaacgcuaacccuaaugccaacccaaaugcgaaccccaaugcaaacccuaaugccaacccaaaugcuaaccccaaugccaacccgaaugcaaacccuaaugcuaaccccaacgccaauccaaacgucgauccuaaugcgaaccccaaugccaacccaaaugcaaaccccaaugcuaacccuaaugccaacccaaaugcuaacccgaaugccaaccccaacgcaaauccuaacgccaauccaaacgcuaaucccaacgcgaauccuaacgcaaauccaaacgccaaucccaacgcuaauccgaacgccaauccuaacgcaaauccaaacgccaaccccaaugcuaacccuaaugccaaccccaauaaaaacaaucagggaaacggccaaggucauaauaugccaaacgacccuaaucgaaacguggaugagaaugcaaaggcgaacaaugcuguuaaaaacaacaauaacgaggaacccucagacaagcacauugagcaguauuugaagacuauacagaauagccucaguacggaaugguccccauguucugugaccugcgggaacggaauccagguccguauuaaaccgggcagcgccaauaagccuaaagaucaacuggacuacgagaacgacaucgaaaagaaaauuuguaagauggagaaaugcuccucaguguuuaauguaguuaacaguagcaucggccugauaauggugcucucuuucuuauuucugaauuga

SEQ ID NO: 4263 - RNA, 1182 nt, Artificial Sequence
  derived and/or modified CDS sequence (opt3) from Pf(Gha1110-021)__BAM84839.1__CSP
augaugagaaagcuggccauccucagcguguccucuuuccuuuuugucgaggcucuguuccaggaauaccaaugcuauggcucaaguagcaacaccaggguuuugaaugaguuaaacuacgacaaugcagggacaaaccuguauaaugaacuagagaugaacuacuauggaaaacaggaaaauugguacucccucaagaaaaacucucggucgcugggugagaaugaugacggcaacaaugaggauaacgaaaaacuucgcaagcccaagcacaagaaacugaagcagccugccgacgggaauccagauccgaacgcgaaucccaacguggacccuaacgcuaauccaaacguagaucccaaugccaacccuaauguggacccaaacgcaaaucccaacgccaauccuaacgcuaauccaaacgcaaauccgaacgccaaucccaacgcuaacccuaaugccaacccaaaugcgaaccccaaugcaaacccuaaugccaacccaaaugcuaaccccaaugccaacccgaaugcaaacccuaaugcuaaccccaacgccaauccaaacgucgauccuaaugcgaaccccaaugccaacccaaaugcaaaccccaaugcuaacccuaaugccaacccaaaugcuaacccgaaugccaaccccaacgcaaauccuaacgccaauccaaacgcuaaucccaacgcgaauccuaacgcaaauccaaacgccaaucccaacgcuaauccgaacgccaauccuaacgcaaauccaaacgccaaccccaaugcuaacccuaaugccaaccccaauaaaaacaaucagggaaacggccaaggucauaauaugccaaacgacccuaaucgaaacguggaugagaaugcaaacgcgaauaacgcuguuaagaacaauaacaaugaggaacccucagacaaacacauugagcaguauuugaagacuauaaagaacagccucaguacggaaugguccccauguucugugaccugcgggaauggaauccagguccguauuaaaccgggcagcgccaacaagccuaaagaugagcugaauuacgaaaacgacaucgagaagaaaauuuguaagauggaaaaaugcuccucaguguuuaauguaguuaacaguagcaucggccugauaauggugcucucuuucuuauuucugaauuga

SEQ ID NO: 4264 - RNA, 1182 nt, Artificial Sequence
  derived and/or modified CDS sequence (opt3) from Pf(Tz03-068)__BAM84802.1__CSP
augaugagaaagcuggccauccucagcguguccucuuuccuuuuugucgaggcucuguuccaggaauaccaaugcuauggcucaaguagcaacaccaggguuuugaaugaguuaaacuacgacaaugcagggacaaaccuguauaaugaacuagagaugaacuacuauggaaaacaggaaaauugguacucccucaagaaaaacucucggucgcugggugagaaugaugacggcaacaaugaggauaacgaaaaacuucgcaagcccaagcacaagaaacugaagcagccugccgacgggaauccagauccgaacgcgaaucccaacguggacccuaacgcuaauccaaacguagaucccaaugccaacccuaauguggacccaaacgcaaaucccaacgccaauccuaacgcuaauccaaacgcaaauccgaacgccaaucccaacgcuaacccuaaugccaacccaaaugcgaaccccaaugcaaacccuaaugccaacccaaaugcuaaccccaaugccaacccgaaugcaaacccuaaugcuaaccccaacgccaauccaaacgucgauccuaaugcgaaccccaaugccaacccaaaugcaaaccccaaugcuaacccuaaugccaacccaaaugcuaacccgaaugccaaccccaacgcaaauccuaacgccaauccaaacgcuaaucccaacgcgaauccuaacgcaaauccaaacgccaaucccaacgcuaauccgaacgccaauccuaacgcaaauccaaacgccaaccccaaugcuaacccuaaugccaaccccaauaaaaacaaucagggaaacggccaaggucauaauaugccaaacgacccuaaucgaaacguggaugagaaugcaaacgcgaauaacgcuguuaagaacaauaacaaugaggaacccucagaccagcacauugagaaauauuugaagauaauccagaacagccucaguacugaaugguccccauguucugugacgugcgggaauggcauucagguccguaucaagccgggaagcgccaacaaaccuaaggaucaacuggacuacgcaaaugacauugagaaaaagaucuguaaaauggaaaagugcuccucaguguuuaacguaguuaauaguagcauaggccugaucauggugcucucuuucuuauuucugaacuga

SEQ ID NO: 4265 - RNA, 1182 nt, Artificial Sequence
  derived and/or modified CDS sequence (opt3) from Pf(Tz03-070)__BAM84803.1__CSP
augaugagaaagcuggccauccucagcguguccucuuuccuuuuugucgaggcucuguuccaggaauaccaaugcuauggcucaaguagcaacaccaggguuuugaaugaguuaaacuacgacaaugcagggacaaaccuguauaaugaacuagagaugaacuacuauggaaaacaggaaaauugguacucccucaagaaaaacucucggucgcugggugagaaugaugacggcaacaaugaggauaacgaaaaacuucgcaaacccaagcacaagaaacugaagcagccugccgacgggaauccagauccgaacgcgaaucccaacguggacccuaacgcuaauccaaacguagaucccaaugccaacccuaauguggacccaaacgcaaaucccaacgccaauccuaacgcuaauccaaacgcaaauccgaacgccaaucccaacgcuaacccuaaugccaacccaaaugcgaaccccaaugcaaacccuaaugccaacccaaaugcuaaccccaaugccaacccgaaugcaaacccuaaugcuaaccccaacgccaauccaaacgcgaauccuaacgucgaucccaaugccaacccaaaugcaaaccccaaugcuaacccuaaugccaacccaaaugcuaacccgaaugccaaccccaacgcaaauccuaacgccaauccaaacgcuaaucccaacgcgaauccuaacgcaaauccaaacgccaaucccaacgcuaauccgaacgccaauccuaacgcaaauccaaacgccaaccccaaugcuaacccuaaugccaaccccaauaaaaacaaucagggaaacggccaaggucauaauaugccaaacgacccuaaucgaaacguggaugagaaugcaaacgcgaauaacgcuguuaagaacaauaacaaugaggaacccucagaccagcacauugagaaauauuugcagaagauacagaacagccucaguacugaaugguccccauguucugugacgugcgggaauggaauccaaguccguauuaagccgggcagcgccaacaaaccuaaggaucagcugaauuacgagaacgacaucgaaaagaagauuuguaaaauggagaagugcuccucaguguuuaauguaguuaacaguagcaucggccugauaauggugcucucuuucuuauuucugaauuga

SEQ ID NO: 4266 - RNA, 1182 nt, Artificial Sequence
  derived and/or modified CDS sequence (opt3) from Pf(Yaounde)__AAN87579.1__CSP
augaugagaaagcuggccauccucagcguguccucuuuccuuuuugucgaggcucuguuccaggaauaccaaugcuauggcucaaguagcaacaccaggguuuugaaugaguuaaacuacgacaaugcagggacaaaccuguauaaugaacuagagaugaacuacuauggaaaacaggaaaauugguacucccucaagaaaaacucucggucgcugggugagaaugaugacggcaacaaugaggauaacgaaaaacuucgcaagcccaagcacaagaaacugaagcagccuggggacggaaauccagauccgaacgccaaucccaacguggacccuaacgcgaauccaaacguagaucccaaugcuaacccuaauguggacccaaacgccaaucccaacgcaaauccuaacgccaauccaaacgcuaauccgaacgcaaaucccaacgccaacccuaaugcuaacccaaaugccaaccccaaugcgaacccuaaugcaaacccaaaugccaaccccaaugcuaacccgaaugccaacccuaaugcaaaccccaacgcuaauccaaacgucgauccuaaugccaaccccaaugcgaacccaaaugccaaccccaaugcaaacccuaaugcuaacccaaaugccaacccgaaugcuaaccccaacgccaauccuaacgcaaauccaaacgccaaucccaacgcuaauccuaacgcgaauccaaacgcaaaucccaacgccaauccgaacgcuaauccuaacgccaauccaaacgcaaaccccaaugccaacccuaaugcuaaccccaauaaaaacaaucagggcaacggucaagggcauaauaugccaaacgacccuaaucgaaacguggauaagaaugccaacgcaaauaacgcgguuaaaaacaauaacaaugaggaacccucagacaagcacauugaggaguauuugaagaaaauaaagaacagcaucaguacugaaugguccccauguucugugacgugcggaaauggcauucagguccguaucaaaccgggcagcgcuaacaagccuaaagaugagcucgacuacgaaaaugacauugagaagaaaaucuguaagauggaaaagugcuccucaguguuuaacguaguuaauaguagcauagggcugaucauggugcugucuuuccucuuuuuaaacuga

SEQ ID NO: 4267 - RNA, 1182 nt, Artificial Sequence
  derived and/or modified CDS sequence (opt3) from Pf(Yaounde)__AAN87578.1__CSP
augaugagaaagcuggccauccucagcguguccucuuuccuuuuugucgaggcucuguuccaggaauaccaaugcuauggcucaaguagcaacaccaggguuuugaaugaguuaaacuacgacaaugcagggacaaaccuguauaaugaacuagagaugaacuacuauggaaaacaggaaaauugguacucccucaagaaaaacucucggucgcugggugagaaugaugacggcaacaaugaggauaacgaaaaacuucgcaagcccaagcacaagaaacugaagcagccuggggacggaaauccagauccgaacgccaaucccaacguggacccuaacgcgaauccaaacguagaucccaaugcuaacccuaauguggacccaaacgccaaucccaacgcaaauccuaacgccaauccaaacgcuaauccgaacgcaaaucccaacgccaacccuaaugcuaacccaaaugccaaccccaaugcgaacccuaaugcaaacccaaaugccaaccccaaugcuaacccgaaugccaacccuaaugcaaaccccaacgcuaauccaaacgucgauccuaaugccaaccccaaugcgaacccaaaugccaaccccaaugcaaacccuaaugcuaacccaaaugccaacccgaaugcuaaccccaacgccaauccuaacgcaaauccaaacgccaaucccaacgcuaauccuaacgcgaauccaaacgcaaaucccaacgccaauccgaacgcuaauccuaacgccaauccaaacgcaaaccccaaugccaacccuaaugcuaaccccaauaaaaacaaucagggcaacggucaagggcauaauaugccaaacgacccuaaucgaaacgugaaugagaacgccaaugcaaacaacgcgguuaagaauaacaauaacgaggaacccucagauaaacacauugagaaguauuugaaggaaauacagaauagccucaguacugagugguccccauguucugugacgugcggaaacggcauccagguccguauuaaaccgggcagcgcugggaagccuaaaaaugaacuggacuacgagaacgauaucgaaaagaaaauuuguaagauggagaaaugcuccucaguguuuaauguaguuaacaguagcaucggacugauaauggugcucucuuucuuauuucugaauuga

SEQ ID NO: 4268 - RNA, 1179 nt, Artificial Sequence
  derived and/or modified CDS sequence (opt3) from Pf(Asembo Bay)__AAN87607.1__CSP
augaugagaaagcuggccauccucagcguguccucuuuccuuuuugucgaggcucuguuccaggaauaccaaugcuauggcucaaguagcaacaccaggguuuugaaugaguuaaacuacgacaaugcagggacaaaccuguauaaugaacuagagaugaacuacuauggaaaacaggaaaauugguacucccucaagaaaaacucucggucgcugggugagaaugaugacggcaacaauaacaauggggauaacggacgcgagggcaaggacgaagauaaacgagacgguaauaacgaggauaacgaaaaacuucguaagcccaagcacaagaaacugaagcagccugccgacgggaauccagauccgaacgcgaaucccaacguggacccuaaugcuaacccaaauguagaucccaacgccaauccuaacgcaaauccaaacgccaaucccaacgcuaauccuaacgcaaacccaaaugccaacccgaaugcuaaccccaaugccaacccuaaugcgaacccaaaugcaaaccccaaugccaacccuaaugcuaacccaaauguggaccccaacgccaacccgaaugcaaacccuaaugcuaaccccaaugccaacccaaaugcgaacccuaaugccaaccccaaugcaaacccaaaugcuaaccccaaugccaacccuaacgcuaauccaaacgccaauccgaacgcaaaucccaacgccaauccuaacgcuaauccaaacgcgaaucccaacgcaaauccuaacgccaauccaaacgcuaaucccaacgccaacccgaauaaaaacaaucagggaaacggccaaggccauaauaugccuaacgauccaaauagaaacgucgacgagaaugcaaacgccaauaacgcugugaagaauaacaauaacgaggaacccucagacaagcacauugagcaguauuugaacaaaauaaagaauagcaucaguacugaaugguccccuuguucuguuacgugcgggaacgguauucaggugaggaucaaacccggaagcgccaauaagccaaaagaucagcucgacuacgagaacgauauugaaaagaaaaucuguaagauggagaagugcuccucagucuuuaaugugguaaacaguagcauaggccugaucaugguucugucuuuccucuuuuuaaauuga

SEQ ID NO: 4269 - RNA, 1179 nt, Artificial Sequence
  derived and/or modified CDS sequence (opt3) from Pf(Asembo Bay)__AAN87608.1__CSP
augaugagaaagcuggccauccucagcguguccucuuuccuuuuugucgaggcucuguuccaggaauaccaaugcuauggcucaaguagcaacaccaggguuuugaaugaguuaaacuacgacaaugcagggacaaaccuguauaaugaacuagagaugaacuacuauggaaaacaggaaaauugguacucccucaagaaaaacucucggucgcugggugagaaugaugacggcaacaauaacaauggggauaacggacgcgagggcaaggacgaagauaaacgagacgguaauaacgaggauaacgaaaaacuucguaagcccaagcacaagaaacugaagcagccugccgacgggaauccagauccgaacgcgaaucccaacguggacccuaaugcuaacccaaauguagaucccaacgccaauccuaacguggacccaaaugcaaaccccaaugccaacccuaaugcuaacccaaacgcaaauccgaacgccaaucccaacgcuaauccuaacgccaauccaaacgcgaaucccaacgcaaauccuaacgccaauccaaacgucgaucccaaugcuaacccgaacgccaauccuaacgcaaaucccaacgcuaauccaaacgccaauccuaacgcgaaucccaacgccaauccaaacgcaaaucccaacgcuaauccuaacgccaacccaaaugcuaacccgaaugccaaccccaaugcaaacccuaaugccaacccaaaugcuaaccccaaugcgaacccuaaugcaaacccaaaugccaaccccaaugcuaacccgaacaaaaauaaccagggaaauggccaaggccauaacaugccuaaugacccaaacagaaauguggacgagaacgccaaugcaaacaaugccguuaagaacaauaacaaugaggaacccucagauaagcacauugagcaguauuugaaaauaaucaagaacagccucaguacugaaugguccccuuguucugugacgugcgggaacgguauucaggucaggaucaaacccggaagcgcuaauaagccaaaagacgagcuggauuacgccaacgacauugaaaagaaaaucuguaagauggagaagugcuccucaguguuuaauguaguuaacaguagcauaggccugaucauggugcucucuuucuuauuucugaauuga

SEQ ID NO: 4270 - RNA, 1179 nt, Artificial Sequence
  derived and/or modified CDS sequence (opt3) from Pf(Asembo Bay)__AAN87595.1__CSP
augaugagaaagcuggccauccucagcguguccucuuuccuuuuugucgaggcucuguuccaggaauaccaaugcuauggcucaaguagcaacaccaggguuuugaaugaguuaaacuacgacaaugcagggacaaaccuguauaaugaacuagagaugaacuacuauggaaaacaggaaaauugguacucccucaagaaaaacucucggucgcugggugagaaugaugacggcaacaauaacaauggggauaacggacgcgagggcaaggacgaagauaaacgagacgguaauaacgaggauaacgaaaaacuucguaagcccaagcacaagaaacugaagcagccugccgacgggaauccagauccgaacgcgaaucccaacguggacccuaaugcuaacccaaauguagaucccaacgccaauccuaacguggacccaaaugcaaaccccaaugccaacccuaaugcuaacccaaacgcaaauccgaacgccaaucccaacgcuaauccuaacgccaauccaaacgcgaaucccaacgcaaauccuaacgccaauccaaacgucgaucccaaugcuaacccgaacgccaauccuaacgcaaaucccaacgcuaauccaaacgccaauccuaacgcgaaucccaacgccaauccaaacgcaaaucccaacgcuaauccuaacgccaacccaaaugcuaacccgaaugccaaccccaaugcaaacccuaaugccaacccaaaugcuaaccccaaugcgaacccuaaugcaaacccaaaugccaaccccaaugcuaacccgaacaaaaauaaccagggaaauggccaaggccauaacaugccuaaugacccaaacagaaauguggacgagaacgccaaugcaaacaaugccguuaagaacaauaacaaugaggaacccucagauaagcacauuacugaguauuugaaaaggauacagaacagccucaguacggaaugguccccuuguucugugaccugcgggaacggaauccagguccggauuaagcccgguagcgcuggcaaauccaagaaugagcuggacuacgaaaacgauaucgagaaaaagauuuguaaaauggagaagugcucaaguguguuuaauguaguuaacagcucuaucgggcugauaauggugcucuccuucuuauuucugaauuga

SEQ ID NO: 4271 - RNA, 1179 nt, Artificial Sequence
  derived and/or modified CDS sequence (opt3) from Pf(India)__AAN87618.1__CSP
augaugagaaagcuggccauccucagcguguccucuuuccuuuuugucgaggcucuguuccaggaauaccaaugcuauggcucaaguagcaacaccaggguuuugaaugaguuaaacuacgacaaugcagggacaaaccuguauaaugaacuagagaugaacuacuauggaaaacaggaaaauugguacucccucaagaaaaacucucggucgcugggugagaaugaugacggcaacaauaacaauggggauaacggacgcgagggcaaggacgaagauaaacgagacgguaauaacgaggauaacgaaaaacuucguaagcccaagcacaagaaacugaagcagccugggggagacaauccagauccgaacgccaaucccaacguggacccuaaugcgaacccaaaugcuaaccccaaugccaacccuaaugcaaacccaaaugccaaccccaaugcuaacccuaacgcaaauccaaacgccaauccgaacgcuaaucccaacgccaauccuaacgcgaauccaaacgcaaaucccaacgccaauccuaacgcuaauccaaacgccaaccccaaugcaaacccgaaugcuaacccuaaugccaaccccaaugcgaacccaaaugccaacccuaaugcaaaccccaaugcuaacccaaaugccaaccccaacgcuaauccuaacgccaauccaaacgcaaauccgaacgccaaucccaacgcuaauccuaacgcgaauccaaacgcaaaucccaacgccaauccuaacgcuaauccaaacgccaaccccaaugcaaacccgaauaaaaacaaucagggcaacggccaagggcauaauaugccuaacgauccaaauagaaacguagacgagaaugccaacgcuaauaacgccgugaagaauaacaacaaugaggaacccucagauaagcacauugagcaguauuugaaaaagauacagaacagccucaguacugaaugguccccuuguucugucacgugcggaaaugguauccaggugaggauuaaacccggcagcgcaaacaagccaaaagacgagcuggacuacgaaaaugauaucgagaagaaaauuuguaagauggagaagugcuccucaguuuuuaacguggucaauaguagcaucgggcugauaauggugcucucuuucuuauuucugaacuga

SEQ ID NO: 4272 - RNA, 1170 nt, Artificial Sequence
  derived and/or modified CDS sequence (opt3) from Pf(Asembo Bay)__AAN87585.1__CSP
augaugagaaagcuggccauccucagcguguccucuuuccuuuuugucgaggcucuguuccaggaauaccaaugcuauggcucaaguagcaacaccaggguuuugaaugaguuaaacuacgacaaugcagggacaaaccuguauaaugaacuagagaugaacuacuauggaaaacaggaaaauugguacucccucaagaaaaacucucggucgcugggugagaaugaugacggcaacaaugaggauaacgaaaaacuucgcaagcccaagcacaagaaacugaagcagccugccgacgggaauccagauccgaacgcgaaucccaacguggacccuaacgcuaauccaaacguagaucccaaugccaacccuaauguggacccaaacgcaaaucccaacgccaauccuaacgcuaauccaaacgcaaauccgaacgccaaucccaacgcuaacccuaaugccaacccaaaugcgaaccccaaugcaaacccuaaugccaacccaaaugcuaaccccaaugccaacccgaaugcaaacccuaaugcuaaccccaacgccaauccaaacgucgauccuaaugcgaaccccaaugccaacccaaaugcaaaccccaaugcuaacccuaaugccaacccaaaugcuaacccgaaugccaaccccaacgcaaauccuaacgccaauccaaacgcuaaucccaacgcgaauccuaacgcaaauccaaacgccaaucccaacgcuaauccgaacgccaauccuaacgcaaauccaaacgccaaccccaaugcuaacccuaauaaaaacaaucagggaaacggccaaggucauaauaugcccaacgacccaaaucgaaacguggaugagaaugccaacgcaaauaacgcgguuaagaauaacaacaaugaggaaccuucagaccagcacauugagaaauauuugaagacuauacagaacagccucaguacggaauggucccccuguucugugaccugcgggaauggaauccagguccguauuaagccaggcagcgcuaacaaaccgaaggaucaacuggacuacgccaaugacaucgagaaaaagauuuguaaaauggaaaagugcuccucaguguuuaacguaguuaauaguagcaucggccugauaauggugcucucuuucuuauuucugaacuga

SEQ ID NO: 4273 - RNA, 1170 nt, Artificial Sequence
  derived and/or modified CDS sequence (opt3) from Pf(Asembo Bay)__AAN87577.1__CSP
augaugagaaagcuggccauccucagcguguccucuuuccuuuuugucgaggcucuguuccaggaauaccaaugcuauggcucaaguagcaacaccaggguuuugaaugaguuaaacuacgacaaugcagggacaaaccuguauaaugaacuagagaugaacuacuauggaaaacaggaaaauugguacucccucaagaaaaacucucggucgcugggugagaaugaugacggcaacaaugaggauaacgaaaaacuucgcaagcccaagcacaagaaacugaagcagccuggggacggaaauccagauccgaacgccaaucccaacguggacccuaacgcgaauccaaacguagaucccaaugcuaacccuaauguggacccaaacgccaaucccaacgcaaauccuaacgccaauccaaacgcuaauccgaacgcaaaucccaacgccaacccuaaugcuaacccaaaugccaaccccaaugcgaacccuaaugcaaacccaaaugccaaccccaaugcuaacccgaaugccaacccuaaugcaaaccccaacgucgauccaaaugcuaacccuaaugccaaccccaaugcgaacccaaaugccaaccccaaugcaaacccuaaugcuaacccaaaugccaacccgaaugcuaaccccaacgccaauccuaacgcaaauccaaacgccaaucccaacgcuaauccuaacgcgaauccaaacgcaaaucccaacgccaauccgaacgcuaauccuaacgccaauccaaacgcaaaccccaaugccaacccuaauaaaaacaaucagggcaacggucaagggcauaauaugcccaacgacccaaaucgaaacgugaaugagaacgcuaaugccaacaaugcaguuaagaacaacaauaacgaggaaccuucagauaaacacauugagaaguauuugaaggaaauacagaauagccucaguacugaguggucccccuguucugugacgugcggaaacggcauccagguccguauuaaaccaggcagcgcggggaagccgaaaaaugaacuggacuacgagaacgauaucgaaaagaaaauuuguaagauggagaaaugcuccucaguguuuaauguaguuaacaguagcaucggacugauaauggugcucucuuucuuauuucugaauuga

SEQ ID NO: 4274 - RNA, 1170 nt, Artificial Sequence
  derived and/or modified CDS sequence (opt3) from Pf(Gha1108-043)__BAM84815.1__CSP
augaugagaaagcuggccauccucagcguguccucuuuccuuuuugucgaggcucuguuccaggaauaccaaugcuauggcucaaguagcaacaccaggguuuugaaugaguuaaacuacgacaaugcagggacaaaccuguauaaugaacuagagaugaacuacuauggaaaacaggaaaauugguacucccucaagaaaaacucucggucgcugggugagaaugaugacggcaacaaugaggauaacgaaaaacuucgcaagcccaagcacaagaaacugaagcagccuggggacggaaauccagauccgaacgccaaucccaacguggacccuaacgcgaauccaaacguagaucccaaugcuaacccuaauguggacccaaacgccaaucccaacgcaaauccuaacgccaauccaaacgcuaauccgaacgcaaaucccaacgccaacccuaaugcuaacccaaaugccaaccccaaugcgaacccuaaugcaaacccaaaugccaaccccaaugcuaacccgaaugccaacccuaaugcaaaccccaacgucgauccaaaugcuaacccuaaugccaaccccaaugcgaacccaaaugccaaccccaaugcaaacccuaaugcuaacccaaaugccaacccgaaugcuaaccccaacgccaauccuaacgcaaauccaaacgccaaucccaacgcuaauccuaacgcgaauccaaacgcaaaucccaacgccaauccgaacgcuaauccuaacgccaauccaaacgcaaaccccaaugccaacccuaauaaaaacaaucagggcaacggucaagggcauaauaugcccaacgacccaaaucgaaacguggaugagaaugcuaacgccaauucagcaguuaagaacaauaacaacgaggaaccuagcgacaaacacauuaaggaguauuugaauaagauacagaacagucucuccacugaauggucucccuguagcgugacgugcggaaauggcauccagguccguauuaaaccaggcuccgcgaacaagccgaaagaugagcuggacuacgcuaaugacaucgaaaagaaaauuuguaagauggagaaaugcucaaguguguuuaacguaguuaauagcucuaucgggcugauaauggugcucuccuucuuauuucugaacuga

SEQ ID NO: 4275 - RNA, 1170 nt, Artificial Sequence
  derived and/or modified CDS sequence (opt3) from Pf(Gha1108-052)__BAM84816.1__CSP
augaugagaaagcuggccauccucagcguguccucuuuccuuuuugucgaggcucuguuccaggaauaccaaugcuauggcucaaguagcaacaccaggguuuugaaugaguuaaacuacgacaaugcagggacaaaccuguauaaugaacuagagaugaacuacuauggaaaacaggaaaauugguacucccucaagaaaaacucucggucgcugggugagaaugaugacggcaacaaugaggauaacgaaaaacuucgcaaacccaagcacaagaaacugaagcagccugccgacgggaauccagauccgaacgcgaaucccaacguggacccuaacgcuaauccaaacguagaucccaaugccaacccuaauguggacccaaacgcaaaucccaacgccaauccuaacgcuaauccaaacgcaaauccgaacgccaaucccaacgcuaacccuaaugccaacccaaaugcgaaccccaaugcaaacccuaaugccaacccaaaugcuaaccccaaugccaacccgaaugcaaacccuaaugcuaaccccaacgucgauccaaaugccaacccuaaugcgaaccccaaugccaacccaaaugcaaaccccaaugcuaacccuaaugccaacccaaaugcuaacccgaaugccaaccccaacgcaaauccuaacgccaauccaaacgcuaaucccaacgcgaauccuaacgcaaauccaaacgccaaucccaacgcuaauccgaacgccaauccuaacgcaaauccaaacgccaaccccaaugcuaacccuaauaaaaacaaucagggaaacggccaaggucauaauaugcccaacgacccaaaucgaaacguggaugagaaugccaacgcaaauucagcgguuaagaacaauaacaacgaggaaccuagcgacaaacacauugagcaguauuugaagacuauacagaauagucucuccacggaauggucucccuguagcgugaccugcgggaacggaauccagguccguauuaagccaggcuccgcuaauaaaccgaaggaucaacuggacuacgagaacgacaucgaaaagaagauuuguaaaauggagaagugcucaaguguguuuaauguaguuaacagcucuaucggccugauaauggugcucuccuucuuauuucugaauuga

SEQ ID NO: 4276 - RNA, 1170 nt, Artificial Sequence
  derived and/or modified CDS sequence (opt3) from Pf(Gha1108-124)__BAM84812.1__CSP
augaugagaaagcuggccauccucagcguguccucuuuccuuuuugucgaggcucuguuccaggaauaccaaugcuauggcucaaguagcaacaccaggguuuugaaugaguuaaacuacgacaaugcagggacaaaccuguauaaugaacuagagaugaacuacuauggaaaacaggaaaauugguacucccucaagaaaaacucucggucgcugggugagaaugaugacggcaacaaugaggauaacgaaaaacuucgcaagcccaagcacaagaaacugaagcagccugccgacgggaauccagauccgaacgcgaaucccaacguggacccuaacgcuaauccaaacguagaucccaaugccaacccuaauguggacccaaacgcaaaucccaacgccaauccuaacgcuaauccaaacgcaaauccgaacgccaaucccaacgcuaacccuaaugccaacccaaaugcgaaccccaaugcaaacccuaaugccaacccaaaugcuaaccccaaugccaacccgaaugcaaacccuaaugcuaaccccaacgccaauccaaacgucgauccuaaugcgaaccccaaugccaacccaaaugcaaaccccaaugcuaacccuaaugccaacccaaaugcuaacccgaaugccaaccccaacgcaaauccuaacgccaauccaaacgcuaaucccaacgcgaauccuaacgcaaauccaaacgccaaucccaacgcuaauccgaacgccaauccuaacgcaaauccaaacgccaaccccaaugcuaacccuaauaaaaacaaucagggaaacggccaaggucauaauaugcccaacgacccaaaucgaaacguggaugagaaugccaacgcaaauaacgcgguuaagaauaacaacaaugaggaaccuucagaccagcacauugagaaauauuugaacaagauaaagaauagccucaguacugaauggucccccuguucugugacgugcgggaacggaauccagguccguauuaaaccaggcagcgcuaauaagccgaaagaucagcuggacuacgccaacgacaucgagaagaaaauuuguaagauggaaaaaugcuccucaguguuuaauguaguuaacaguagcaucggccugauaauggugcucucuuucuuauuucugaauuga

SEQ ID NO: 4277 - RNA, 1170 nt, Artificial Sequence
  derived and/or modified CDS sequence (opt3) from Pf(Gha1109-003)__BAM84834.1__CSP
augaugagaaagcuggccauccucagcguguccucuuuccuuuuugucgaggcucuguuccaggaauaccaaugcuauggcucaaguagcaacaccaggguuuugaaugaguuaaacuacgacaaugcagggacaaaccuguauaaugaacuagagaugaacuacuauggaaaacaggaaaauugguacucccucaagaaaaacucucggucgcugggugagaaugaugacggcaacaaugaggauaacgaaaaacuucgcaagcccaagcacaagaaacugaagcagccugccgacgggaauccagauccgaacgcgaaucccaacguggacccuaacgcuaauccaaacguagaucccaaugccaacccuaauguggacccaaacgcaaaucccaacgccaauccuaacgcuaauccaaacgcaaauccgaacgccaaucccaacgcuaacccuaaugccaacccaaaugcgaaccccaaugcaaacccuaaugccaacccaaaugcuaaccccaaugccaacccgaaugcaaacccuaaugcuaaccccaacgucgauccaaaugccaacccuaaugcgaaccccaaugccaacccaaaugcaaaccccaaugcuaacccuaaugccaacccaaaugcuaacccgaaugccaaccccaacgcaaauccuaacgccaauccaaacgcuaaucccaacgcgaauccuaacgcaaauccaaacgccaaucccaacgcuaauccgaacgccaauccuaacgcaaauccaaacgccaaccccaaugcuaacccuaauaaaaacaaucagggaaacggccaaggucauaauaugcccaacgacccaaaucgaaacguggaugagaaugccaacgcaaaugacgcgguuaagaacaauaacaacgaggaaccuucagaucagcacauugagaaauauuugaagauaaucaagaauagccucaguacugaauggucccccuguucugugacgugcgggaacggcauucagguccguaucaaaccaggaagcgcuaauaagccgaaagaccagcuggacuacgccaacgauauugagaagaaaaucuguaagauggaaaaaugcuccucaguguuuaauguaguuaacaguagcauaggccugaucauggugcucucuuucuuauuucugaauuga

SEQ ID NO: 4278 - RNA, 1170 nt, Artificial Sequence
  derived and/or modified CDS sequence (opt3) from Pf(Gha1109-058)__BAM84835.1__CSP
augaugagaaagcuggccauccucagcguguccucuuuccuuuuugucgaggcucuguuccaggaauaccaaugcuauggcucaaguagcaacaccaggguuuugaaugaguuaaacuacgacaaugcagggacaaaccuguauaaugaacuagagaugaacuacuauggaaaacaggaaaauugguacucccucaagaaaaacucucggucgcugggugagaaugaugacggcaacaaugaggauaacgaaaaacuucgcaagcccaagcacaagaaacugaagcagccuggggacggaaauccagauccgaacgccaaucccaacguggacccuaacgcgaauccaaacguagaucccaaugcuaacccuaauguggacccaaacgccaaucccaacgcaaauccuaacgccaauccaaacgcuaauccgaacgcaaaucccaacgccaacccuaaugcuaacccaaaugccaaccccaaugcgaacccuaaugcaaacccaaaugccaaccccaaugcuaacccgaaugccaacccuaaugcaaaccccaacgucgauccaaaugcuaacccuaaugccaaccccaaugcgaacccaaaugccaaccccaaugcaaacccuaaugcuaacccaaaugccaacccgaaugcuaaccccaacgccaauccuaacgcaaauccaaacgccaaucccaacgcuaauccuaacgcgaauccaaacgcaaaucccaacgccaauccgaacgcuaauccuaacgccaauccaaacgcaaaccccaaugccaacccuaauaaaaacaaucagggcaacggucaagggcauaauaugcccaacgacccaaaucgaaacguggaugagaaugcuaacgccaauaacgcaguuaagaauaacaacaaugaggaaccuucagacaaacacauuacugaguauuugaagaagauacagaacagccucaguacggaauggucccccuguucugugaccugcggaaauggcauccagguccguauuaaaccaggcagcgcggggaaguccaaaaacgagcuggauuacgaaaaugacaucgagaagaaaauuuguaagauggaaaaaugcucaaguguguuuaacguaguuaauagcucuaucggacugauaauggugcucuccuucuuauuucugaacuga

SEQ ID NO: 4279 - RNA, 1170 nt, Artificial Sequence
  derived and/or modified CDS sequence (opt3) from Pf(Gha1109-105)__BAM84822.1__CSP
augaugagaaagcuggccauccucagcguguccucuuuccuuuuugucgaggcucuguuccaggaauaccaaugcuauggcucaaguagcaacaccaggguuuugaaugaguuaaacuacgacaaugcagggacaaaccuguauaaugaacuagagaugaacuacuauggaaaacaggaaaauugguacucccucaagaaaaacucucggucgcugggugagaaugaugacggcaacaaugaggauaacgaaaaacuucgcaagcccaagcacaagaaacugaagcagccugccgacgggaauccagauccgaacgcgaaucccaacguggacccuaacgcuaauccaaacgccaaucccaacgcaaauccuaacgccaauccaaacgcuaaucccaacgcaaauccuaacguagauccaaaugccaacccgaauguggaccccaacgcuaacccuaaugccaacccaaaugcgaaccccaaugcaaacccuaaugccaacccaaaugcuaaccccaaugccaacccgaaugcaaacccuaaugucgaucccaacgcuaacccaaaugccaacccuaaugcgaaccccaaugccaacccaaaugcaaaccccaaugcuaacccuaaugccaacccaaaugcuaacccgaaugccaaccccaacgcaaauccuaacgccaauccaaacgcuaaucccaacgcgaauccuaacgcaaauccaaacgccaaucccaacgcuaauccgaacgccaauccuaacgcaaauccaaacgccaaccccaaugcuaacccuaauaaaaacaaucagggaaacggccaaggucauaauaugcccaacgacccaaaucgaaacguggaugagaaugccaaggcaaacaaugcgguuaaaaacaauaacaacgaggaaccuucagacaagcacauugagcaguauuugaagacuauacagaauagccucaguacggaauggucccccuguucugugaccugcgggaacggaauccagguccguauuaaaccaggcagcgcuaauaagccgaaagaucaacuggacuacgagaacgacaucgaaaagaaaauuuguaagauggagaaaugcuccucaguguuuaauguaguuaacaguagcaucggccugauaauggugcucucuuucuuauuucugaauuga

SEQ ID NO: 4280 - RNA, 1170 nt, Artificial Sequence
  derived and/or modified CDS sequence (opt3) from Pf(Gha1109-111)__BAM84823.1__CSP
augaugagaaagcuggccauccucagcguguccucuuuccuuuuugucgaggcucuguuccaggaauaccaaugcuauggcucaaguagcaacaccaggguuuugaaugaguuaaacuacgacaaugcagggacaaaccuguauaaugaacuagagaugaacuacuauggaaaacaggaaaauugguacucccucaagaaaaacucucggucgcugggugagaaugaugacggcaacaaugaggauaacgaaaaacuucgcaagcccaagcacaagaaacugaagcagccuggggacggaaauccagauccgaacgccaaucccaacguggacccuaacgcgaauccaaacguagaucccaaugcuaacccuaauguggacccaaacgccaaucccaacgcaaauccuaacgccaauccaaacgcuaauccgaacgcaaaucccaacgccaacccuaaugcuaacccaaaugccaaccccaaugcgaacccuaaugcaaacccaaaugccaaccccaaugcuaacccgaaugccaacccuaaugcaaaccccaacgucgauccaaaugcuaacccuaaugccaaccccaaugcgaacccaaaugccaaccccaaugcaaacccuaaugcuaacccaaaugccaacccgaaugcuaaccccaacgccaauccuaacgcaaauccaaacgccaaucccaacgcuaauccuaacgcgaauccaaacgcaaaucccaacgccaauccgaacgcuaauccuaacgccaauccaaacgcaaaccccaaugccaacccuaauaaaaacaaucagggcaacggucaagggcauaauaugcccaacgacccaaaucgaaacguggaugagaaugcuaacgccaauaacgcaguuaagaauaacaacaaugaggaaccuucagacaaacacauuaaggaguauuugaacaagauacagaauagcaucaguacugaauggucccccuguucugugacgugcggaaacggcauucagguccguaucaaaccaggcagcgcggauaagccgaaagaccagcucgacuacauuaaugauaucgagaagaaaauauguaagauggaaaaaugcuccucaguguuuaacguaguuaauaguagcaucgggcugauuauggugcugucuuuccucuuuuuaaacuga

SEQ ID NO: 4281 - RNA, 1170 nt, Artificial Sequence
  derived and/or modified CDS sequence (opt3) from Pf(Gha1109-125)__BAM84824.1__CSP
augaugagaaagcuggccauccucagcguguccucuuuccuuuuugucgaggcucuguuccaggaauaccaaugcuauggcucaaguagcaacaccaggguuuugaaugaguuaaacuacgacaaugcagggacaaaccuguauaaugaacuagagaugaacuacuauggaaaacaggaaaauugguacucccucaagaaaaacucucggucgcugggugagaaugaugacggcaacaaugaggauaacgaaaaacuucgcaagcccaagcacaagaaacugaagcagccugccgacgggaauccagauccgaacgcgaaucccaacguggacccuaacgcuaauccaaacguagaucccaaugccaacccuaauguggacccaaacgcaaaucccaacgccaauccuaacgcuaauccaaacgcaaauccgaacgccaaucccaacgcuaacccuaaugccaacccaaaugcgaaccccaaugcaaacccuaaugccaacccaaaugcuaaccccaaugccaacccgaaugcaaacccuaaugcuaaccccaacgccaauccaaacgucgauccuaaugcgaaccccaaugccaacccaaaugcaaaccccaaugcuaacccuaaugccaacccaaaugcuaacccgaaugccaaccccaacgcaaauccuaacgccaauccaaacgcuaaucccaacgcgaauccuaacgcaaauccaaacgccaaucccaacgcuaauccgaacgccaauccuaacgcaaauccaaacgccaaccccaaugcuaacccuaauaaaaacaaucagggaaacggccaaggucauaauaugcccaacgacccaaaucgaaacguggaugagaaugccaacgcaaauaacgcgguuaagaauaacaacaaugaggaaccuucagaccagcacauugagaaauauuugaagacuauaaagaacagccucaguacggaauggucccccuguucugugaccugcgggaauggaauccagguccguauuaaaccaggcagcgcuaacaagccgaaagaucagcuggacuacgccaaugacaucgagaagaaaauuuguaagauggaaaaaugcuccucaguguuuaacguaguuaauaguagcaucggccugauaauggugcucucuuucuuauuucugaacuga

SEQ ID NO: 4282 - RNA, 1170 nt, Artificial Sequence
  derived and/or modified CDS sequence (opt3) from Pf(Gha1109-127)__BAM84825.1__CSP
augaugagaaagcuggccauccucagcguguccucuuuccuuuuugucgaggcucuguuccaggaauaccaaugcuauggcucaaguagcaacaccaggguuuugaaugaguuaaacuacgacaaugcagggacaaaccuguauaaugaacuagagaugaacuacuauggaaaacaggaaaauugguacucccucaagaaaaacucucggucgcugggugagaaugaugacggcaacaaugaggauaacgaaaaacuucgcaaacccaagcacaagaaacugaagcagccuggggacggaaauccagauccgaacgccaaucccaacguggacccuaacgcgaauccaaacguagaucccaaugcuaacccuaauguggacccaaacgccaaucccaacgcaaauccuaacgccaauccaaacgcuaauccgaacgcaaaucccaacgccaacccuaaugcuaacccaaaugccaaccccaaugcgaacccuaaugcaaacccaaaugccaaccccaaugcuaacccgaaugccaacccuaaugcaaaccccaacgucgauccaaaugcuaacccuaaugccaaccccaaugcgaacccaaaugccaaccccaaugcaaacccuaaugcuaacccaaaugccaacccgaaugcuaaccccaacgccaauccuaacgcaaauccaaacgccaaucccaacgcuaauccuaacgcgaauccaaacgcaaaucccaacgccaauccgaacgcuaauccuaacgccaauccaaacgcaaaccccaaugccaacccuaauaaaaacaaucagggcaacggucaagggcauaauaugcccaacgacccaaaucgaaacguggaugagaaugcuaacgccaauaacgcaguuaagaauaacaacaaugaggaaccuucagacaaacacauuacugaguauuugaagaagauaaagaacagccucaguacggaauggucccccuguucugugaccugcggaaauggcauccagguccguauuaagccaggcagcgcggggaaauccaagaacgagcuggauuacgaaaaugacaucgagaaaaagauuuguaaaauggaaaagugcucaaguguguuuaacguaguuaauagcucuaucggacugauaauggugcucuccuucuuauuucugaacuga

SEQ ID NO: 4283 - RNA, 1170 nt, Artificial Sequence
  derived and/or modified CDS sequence (opt3) from Pf(Gha1109-158)__BAM84826.1__CSP
augaugagaaagcuggccauccucagcguguccucuuuccuuuuugucgaggcucuguuccaggaauaccaaugcuauggcucaaguagcaacaccaggguuuugaaugaguuaaacuacgacaaugcagggacaaaccuguauaaugaacuagagaugaacuacuauggaaaacaggaaaauugguacucccucaagaaaaacucucggucgcugggugagaaugaugacggcaacaaugaggauaacgaaaaacuucgcaagcccaagcacaagaaacugaagcagccugccgacgggaauccagauccgaacgcgaaucccaacguggacccuaacgcuaauccaaacguagaucccaaugccaacccuaauguggacccaaacgcaaaucccaacgccaauccuaacgcuaauccaaacgcaaauccgaacgccaaucccaacgcuaacccuaaugccaacccaaaugcgaaccccaaugcaaacccuaaugccaacccaaaugcuaaccccaaugccaacccgaaugcaaacccuaaugcuaaccccaacgucgauccaaaugccaacccuaaugcgaaccccaaugccaacccaaaugcaaaccccaaugcuaacccuaaugccaacccaaaugcuaacccgaaugccaaccccaacgcaaauccuaacgccaauccaaacgcuaaucccaacgcgaauccuaacgcaaauccaaacgccaaucccaacgcuaauccgaacgccaauccuaacgcaaauccaaacgccaaccccaaugcuaacccuaauaaaaacaaucagggaaacggccaaggucauaauaugcccaacgacccaaaucgaaacguggaugagaaugccaacgcaaauaacgcgguuaagaauaacaacaaugaggaaccuucagacaaacacauugagcaguauuugaagacuauaaagaacagccucaguacggaauggucccccuguucugugaccugcgggaauggaauccagguccguauuaaaccaggcagcgcuaacaagccgaaagaucagcuggacuacgccaaugacaucgagaagaaaauuuguaagauggaaaaaugcuccucaguguuuaacguaguuaauaguagcaucggccugauaauggugcucucuuucuuauuucugaacuga

SEQ ID NO: 4284 - RNA, 1170 nt, Artificial Sequence
  derived and/or modified CDS sequence (opt3) from Pf(Gha1109-205)__BAM84832.1__CSP
augaugagaaagcuggccauccucagcguguccucuuuccuuuuugucgaggcucuguuccaggaauaccaaugcuauggcucaaguagcaacaccaggguuuugaaugaguuaaacuacgacaaugcagggacaaaccuguauaaugaacuagagaugaacuacuauggaaaacaggaaaauugguacucccucaagaaaaacucucggucgcugggugagaaugaugacggcaacaaugaggauaacgaaaaacuucgcaagcccaagcacaagaaacugaagcagccugccgacgggaauccagauccgaacgcgaaucccaacguggacccuaacgcuaauccaaacguagaucccaaugccaacccuaauguggacccaaacgcaaaucccaacgccaauccuaacgcuaauccaaacgcaaauccgaacgccaaucccaacgcuaacccuaaugccaacccaaaugcgaaccccaaugcaaacccuaaugccaacccaaaugcuaaccccaaugccaacccgaaugcaaacccuaaugcuaaccccaacgucgauccaaaugccaacccuaaugcgaaccccaaugccaacccaaaugcaaaccccaaugcuaacccuaaugccaacccaaaugcuaacccgaaugccaaccccaacgcaaauccuaacgccaauccaaacgcuaaucccaacgcgaauccuaacgcaaauccaaacgccaaucccaacgcuaauccgaacgccaauccuaacgcaaauccaaacgccaaccccaaugcuaacccuaauaaaaacaaucagggaaacggccaaggucauaauaugcccaacgacccaaaucgaaacguggaugagaaugccaacgcaaauaacgcgguuaagaauaacaacaaugaggaaccuucagaccagcacauugagaaauauuugaagauaauccagaacagccucaguacugaauggucccccuguucugugacgugcgggaauggcauucagguccguaucaagccaggaagcgcuaacaaaccgaaggaucaacuggacuacgccaaugacauugagaaaaagaucuguaaaauggaaaagugcuccucaguguuuaacguaguuaauaguagcauaggccugaucauggugcucucuuucuuauuucugaacuga

SEQ ID NO: 4285 - RNA, 1170 nt, Artificial Sequence
  derived and/or modified CDS sequence (opt3) from Pf(T9/96)__BAD73957.1__CSP
augaugagaaagcuggccauccucagcguguccucuuuccuuuuugucgaggcucuguuccaggaauaccaaugcuauggcucaaguagcaacaccaggguuuugaaugaguuaaacuacgacaaugcagggacaaaccuguauaaugaacuagagaugaacuacuauggaaaacaggaaaauugguacucccucaagaaaaacucucggucgcugggugagaaugaugacggcaacaaugaggauaacgaaaaacuucgcaagcccaagcacaagaaacugaagcagccugccgacgggaauccagauccgaacgcgaaucccaacguggacccuaacgcuaauccaaacguagaucccaaugccaacccuaauguggacccaaacgcaaaucccaacgccaauccuaacgcuaauccaaacgcaaauccgaacgccaaucccaacgcuaacccuaaugccaacccaaaugcgaaccccaaugcaaacccuaaugccaacccaaaugcuaaccccaaugccaacccgaaugcaaacccuaaugcuaaccccaacgucgauccaaaugccaacccuaaugcgaaccccaaugccaacccaaaugcaaaccccaaugcuaacccuaaugccaacccaaaugcuaacccgaaugccaaccccaacgcaaauccuaacgccaauccaaacgcuaaucccaacgcgaauccuaacgcaaauccaaacgccaaucccaacgcuaauccgaacgccaauccuaacgcaaauccaaacgccaaccccaaugcuaacccuaauaaaaacaaucagggaaacggccaaggucauaauaugcccaacgacccaaaucgaaacguggaugagaaugccaacgcaaauaacgcgguuaagaauaacaacaaugaggaaccuucagacaaacacauugagcaguauuugaagacuauaaagaacagccucaguacggaauggucccccuguucugugaccugcgggaauggaauccagguccguauuaaaccaggcagcgcuaacaagccgaaagaugagcuggacuacgccaaugacaucgaaaagaaaauuuguaagauggagaaaugcuccucaguguuuaacguaguuaauaguagcaucggccugauaauggugcucucuuucuuauuucugaacuga

SEQ ID NO: 4286 - RNA, 1170 nt, Artificial Sequence
  derived and/or modified CDS sequence (opt3) from Pf(Tz93-015)__BAM84752.1__CSP
augaugagaaagcuggccauccucagcguguccucuuuccuuuuugucgaggcucuguuccaggaauaccaaugcuauggcucaaguagcaacaccaggguuuugaaugaguuaaacuacgacaaugcagggacaaaccuguauaaugaacuagagaugaacuacuauggaaaacaggaaaauugguacucccucaagaaaaacucucggucgcugggugagaaugaugacggcaacaaugaggauaacgaaaaacuucgcaagcccaagcacaagaaacugaagcagccuggggacggaaauccagauccgaacgccaaucccaacguggacccuaacgcgaauccaaacguagaucccaaugcuaacccuaauguggacccaaacgccaaucccaacgcaaauccuaacgccaauccaaacgcuaauccgaacgcaaaucccaacgccaacccuaaugcuaacccaaaugccaaccccaaugcgaacccuaaugcaaacccaaaugccaaccccaaugcuaacccgaaugccaacccuaaugcaaaccccaacgucgauccaaaugcuaacccuaaugccaaccccaaugcgaacccaaaugccaaccccaaugcaaacccuaaugcuaacccaaaugccaacccgaaugcuaaccccaacgccaauccuaacgcaaauccaaacgccaaucccaacgcuaauccuaacgcgaauccaaacgcaaaucccaacgccaauccgaacgcuaauccuaacgccaauccaaacgcaaaccccaaugccaacccuaauaaaaacaaucagggcaacggucaagggcauaauaugcccaacgacccaaaucgaaacguggaugagaaugcuaacgccaaugacgcaguuaagaacaauaacaacgaggaaccuucagaucagcacauugagaaauauuugaagauaaucaagaauagccucaguacugaauggucccccuguucugugacgugcggaaacggcauucagguccguaucaaaccaggcagcgcgaauaagccgaaagaccagcuggacuacgcuaacgauauugagaagaaaaucuguaagauggaaaaaugcuccucaguguuuaauguaguuaacaguagcauagggcugaucauggugcucucuuucuuauuucugaauuga

SEQ ID NO: 4287 - RNA, 1170 nt, Artificial Sequence
  derived and/or modified CDS sequence (opt3) from Pf(Tz93-050)__BAM84762.1__CSP
augaugagaaagcuggccauccucagcguguccucuuuccuuuuugucgaggcucuguuccaggaauaccaaugcuauggcucaaguagcaacaccaggguuuugaaugaguuaaacuacgacaaugcagggacaaaccuguauaaugaacuagagaugaacuacuauggaaaacaggaaaauugguacucccucaagaaaaacucucggucgcugggugagaaugaugacggcaacaaugaggauaacgaaaaacuucgcaaacccaagcacaagaaacugaagcagccuggggacggaaauccagauccgaacgccaaucccaacguggacccuaacgcgaauccaaacguagaucccaaugcuaacccuaauguggacccaaacgccaaucccaacgcaaauccuaacgccaauccaaacgcuaauccgaacgcaaaucccaacgccaacccuaaugcuaacccaaaugccaaccccaaugcgaacccuaaugcaaacccaaaugccaaccccaaugcuaacccgaaugccaacccuaaugcaaaccccaacgucgauccaaaugcuaacccuaaugccaaccccaaugcgaacccaaaugccaaccccaaugcaaacccuaaugcuaacccaaaugccaacccgaaugcuaaccccaacgccaauccuaacgcaaauccaaacgccaaucccaacgcuaauccuaacgcgaauccaaacgcaaaucccaacgccaauccgaacgcuaauccuaacgccaauccaaacgcaaaccccaaugccaacccuaauaaaaacaaucagggcaacggucaagggcauaauaugcccaacgacccaaaucgaaacguggaugagaaugcuaacgccaauaacccuguuaagaauaacaacaaugaggaacccucagacaaacacauuacugaguauuugaagaagauaaagaacagcaucaguacggaaugguccccauguucugugaccugcggaaauggcauucagguccguaucaagccgggcagcgcaaacaaaccuaaggaugagcucgacuacgaaaaugacauugagaaaaagaucuguaaaauggaaaagugcuccucaguguuuaacguaguuaauaguagcauagggcugaucauggugcugucuuuccucuuuuuaaacuga

SEQ ID NO: 4288 - RNA, 1170 nt, Artificial Sequence
  derived and/or modified CDS sequence (opt3) from Pf(Tz93-105)__BAM84774.1__CSP
augaugagaaagcuggccauccucagcguguccucuuuccuuuuugucgaggcucuguuccaggaauaccaaugcuauggcucaaguagcaacaccaggguuuugaaugaguuaaacuacgacaaugcagggacaaaccuguauaaugaacuagagaugaacuacuauggaaaacaggaaaauugguacucccucaagaaaaacucucggucgcugggugagaaugaugacggcaacaaugaggauaacgaaaaacuucgcaagcccaagcacaagaaacugaagcagccuggggacggaaauccagauccgaacgccaaucccaacguggacccuaacgcgaauccaaacguagaucccaaugcuaacccuaauguggacccaaacgccaaucccaacgcaaauccuaacgccaauccaaacgcuaauccgaacgcaaaucccaacgccaacccuaaugcuaacccaaaugccaaccccaaugcgaacccuaaugcaaacccaaaugccaaccccaaugcuaacccgaaugccaacccuaaugcaaaccccaacgucgauccaaaugcuaacccuaaugccaaccccaaugcgaacccaaaugccaaccccaaugcaaacccuaaugcuaacccaaaugccaacccgaaugcuaaccccaacgccaauccuaacgcaaauccaaacgccaaucccaacgcuaauccuaacgcgaauccaaacgcaaaucccaacgccaauccgaacgcuaauccuaacgccaauccaaacgcaaaccccaaugccaacccuaauaaaaacaaucagggcaacggucaagggcauaauaugcccaacgacccaaaucgaaacguggaugagaaugcuaacgccaauaacgcaguuaagaauaacaacaaugaggaaccuucagaccagcacauugagaaauauuugaagauaauccagaacagccucaguacugaauggucccccuguucugugacgugcggaaauggcauucagguccguaucaagccaggcagcgcgaacaaaccgaaggaucaacuggacuacgcuaaugacauugagaaaaagaucuguaaaauggaaaagugcuccucaguguuuaacguaguuaauaguagcauagggcugaucauggugcucucuuucuuauuucugaacuga

SEQ ID NO: 4289 - RNA, 1170 nt, Artificial Sequence
  derived and/or modified CDS sequence (opt3) from Pf(Tz93-121)__BAM84777.1__CSP
augaugagaaagcuggccauccucagcguguccucuuuccuuuuugucgaggcucuguuccaggaauaccaaugcuauggcucaaguagcaacaccaggguuuugaaugaguuaaacuacgacaaugcagggacaaaccuguauaaugaacuagagaugaacuacuauggaaaacaggaaaauugguacucccucaagaaaaacucucggucgcugggugagaaugaugacggcaacaaugaggauaacgaaaaacuucgcaaacccaagcacaagaaacugaagcagccuggggacggaaauccagauccgaacgccaaucccaacguggacccuaacgcgaauccaaacguagaucccaaugcuaacccuaauguggacccaaacgccaaucccaacgcaaauccuaacgccaauccaaacgcuaauccgaacgcaaaucccaacgccaacccuaaugcuaacccaaaugccaaccccaaugcgaacccuaaugcaaacccaaaugccaaccccaaugucgauccgaacgcuaauccuaacgccaaucccaacgcaaacccaaaugcuaacccuaaugccaaccccaaugcgaacccaaaugccaaccccaaugcaaacccuaaugcuaacccaaaugccaacccgaaugcuaaccccaacgccaauccuaacgcaaauccaaacgccaaucccaacgcuaauccuaacgcgaauccaaacgcaaaucccaacgccaauccgaacgcuaauccuaacgccaauccaaacgcaaaccccaaugccaacccuaauaaaaacaaucagggcaacggucaagggcauaauaugcccaacgacccaaaucgaaacguggaugagaaugcuaacgccaauaacgcaguuaagaauaacaacaaugaggaaccuucagaccagcacauugagaaauauuugaagaagauaaagaacagcaucaguacugaauggucccccuguucugugacgugcggaaauggcauucagguccguaucaagccaggcagcgcgaacaaaccgaaggaugagcucgacuacgaaaaugacauugagaaaaagaucuguaaaauggaaaagugcuccucaguguuuaacguaguuaauaguagcauagggcugaucauggugcugucuuuccucuuuuuaaacuga

SEQ ID NO: 4290 - RNA, 1170 nt, Artificial Sequence
  derived and/or modified CDS sequence (opt3) from Pf(Tz98-032)__BAM84786.1__CSP
augaugagaaagcuggccauccucagcguguccucuuuccuuuuugucgaggcucuguuccaggaauaccaaugcuauggcucaaguagcaacaccaggguuuugaaugaguuaaacuacgacaaugcagggacaaaccuguauaaugaacuagagaugaacuacuauggaaaacaggaaaauugguacucccucaagaaaaacucucggucgcugggugagaaugaugacggcaacaaugaggauaacgaaaaacuucgcaagcccaagcacaagaaacugaagcagccugccgacgggaauccagauccgaacgcgaaucccaacguggacccuaacgcuaauccaaacguagaucccaaugccaacccuaauguggacccaaacgcaaaucccaacgccaauccuaacgcuaauccaaacgcaaauccgaacgccaaucccaacgcuaacccuaaugccaacccaaaugcgaaccccaaugcaaacccuaaugccaacccaaaugcuaaccccaaugccaacccgaaugcaaacccuaaugcuaaccccaacgccaauccaaacgucgauccuaaugcgaaccccaaugccaacccaaaugcaaaccccaaugcuaacccuaaugccaacccaaaugcuaacccgaaugccaaccccaacgcaaauccuaacgccaauccaaacgcuaaucccaacgcgaauccuaacgcaaauccaaacgccaaucccaacgcuaauccgaacgccaauccuaacgcaaauccaaacgccaaccccaaugcuaacccuaauaaaaacaaucagggaaacggccaaggucauaauaugcccaacgacccaaaucgaaacguggaugagaaugccaacgcaaauaacgcgguuaagaauaacaacaaugaggaaccuucagacaaacacauugagcaguauuugaacaagauaaagaauagcaucaguacugaauggucccccuguucugugacgugcgggaacggcauucagguccguaucaaaccaggaagcgcuaauaagccgaaagaugagcucaacuacgaaaaugacauugagaagaaaaucuguaagauggaaaaaugcuccucaguguuuaacguaguuaauaguagcauaggccugaucauggugcugucuuuccucuuuuuaaacuga

SEQ ID NO: 4291 - RNA, 1170 nt, Artificial Sequence
  derived and/or modified CDS sequence (opt3) from Pf(Tz98-107)__BAM84796.1__CSP
augaugagaaagcuggccauccucagcguguccucuuuccuuuuugucgaggcucuguuccaggaauaccaaugcuauggcucaaguagcaacaccaggguuuugaaugaguuaaacuacgacaaugcagggacaaaccuguauaaugaacuagagaugaacuacuauggaaaacaggaaaauugguacucccucaagaaaaacucucggucgcugggugagaaugaugacggcaacaaugaggauaacgaaaaacuucgcaagcccaagcacaagaaacugaagcagccugccgacgggaauccagauccgaacgcgaaucccaacguggacccuaacgcuaauccaaacguagaucccaaugccaacccuaauguggacccaaacgcaaaucccaacgccaauccuaacgcuaauccaaacgcaaauccgaacgccaaucccaacgcuaacccuaaugccaacccaaaugcgaaccccaaugcaaacccuaaugccaacccaaaugcuaaccccaaugccaacccgaaugcaaacccuaaugcuaaccccaacgucgauccaaaugccaacccuaaugcgaaccccaaugccaacccaaaugcaaaccccaaugcuaacccuaaugccaacccaaaugcuaacccgaaugccaaccccaacgcaaauccuaacgccaauccaaacgcuaaucccaacgcgaauccuaacgcaaauccaaacgccaaucccaacgcuaauccgaacgccaauccuaacgcaaauccaaacgccaaccccaaugcuaacccuaauaaaaacaaucagggaaacggccaaggucauaauaugcccaacgacccaaaucgaaacguggaugagaaugccaacgcaaauaacgcgguuaagaauaacaacaaugaggaaccuucagaccagcacauugagaaauauuugaagcguauacagaacagccucaguacugaauggucccccuguucugugacgugcgggaauggaauccaggucagaauuaagccaggcagcgcuaacaaaccgaaggaucaacuggacuacgccaaugacaucgagaaaaagauuuguaaaauggaaaagugcuccucaguguuuaacguaguuaauaguagcaucggccugauaauggugcucucuuucuuauuucugaacuga

SEQ ID NO: 4292 - RNA, 1167 nt, Artificial Sequence
  derived and/or modified CDS sequence (opt3) from Pf(Asembo Bay)__AAN87599.1__CSP
augaugagaaagcuggccauccucagcguguccucuuuccuuuuugucgaggcucuguuccaggaauaccaaugcuauggcucaaguagcaacaccaggguuuugaaugaguuaaacuacgacaaugcagggacaaaccuguauaaugaacuagagaugaacuacuauggaaaacaggaaaauugguacucccucaagaaaaacucucggucgcugggugagaaugaugacggcaacaauaacaauggggauaacggacgcgagggcaaggacgaagauaaacgagacgguaauaacgaggauaacgaaaaacuucguaagcccaagcacaagaaacugaagcagccugccgacgggaauccagauccgaacgcgaaucccaacguggacccuaaugcuaacccaaauguagaucccaacgccaauccuaacguggacccaaaugcaaaccccaaugccaacccuaaugcuaacccaaacgcaaauccgaacgccaaucccaacgcuaauccuaacgccaauccaaacgcgaaucccaacgcaaauccuaacgucgauccaaaugccaaccccaaugcuaacccgaacgccaauccuaacgcaaaucccaacgcuaauccaaacgccaauccuaacgcgaaucccaacgccaauccaaacgcaaaucccaacgcuaauccuaacgccaacccaaaugcuaacccgaaugccaaccccaaugcaaacccuaaugccaacccaaaugcuaaccccaaugcgaacccuaaugcaaacccaaaugccaaccccaauaaaaacaaccagggaaauggccaaggccauaacaugccgaaugacccuaacagaaauguggacgagaacgcuaaugccaacaaugcaguuaagaacaauaacaaugaggaaccaucagauaagcacauugagcaguauuugaacaaaauacagaauagccucaguacugaauggucccccuguucugugacgugcgggaacggaauccaggucaggauuaagccugguagcgccaacaaacccaaggaccaacuggauuacgcuaaugacaucgagaaaaagauuuguaaaauggaaaagugcuccucaguguuuaacguaguuaauaguagcaucggccugauaauggugcucucuuucuuauuucugaacuga

SEQ ID NO: 4293 - RNA, 1158 nt, Artificial Sequence
  derived and/or modified CDS sequence (opt3) from Pf(Asembo Bay)__AAN87581.1__CSP
augaugagaaagcuggccauccucagcguguccucuuuccuuuuugucgaggcucuguuccaggaauaccaaugcuauggcucaaguagcaacaccaggguuuugaaugaguuaaacuacgacaaugcagggacaaaccuguauaaugaacuagagaugaacuacuauggaaaacaggaaaauugguacucccucaagaaaaacucucggucgcugggugagaaugaugacggcaacaaugaggauaacgaaaaacuucgcaagcccaagcacaagaaacugaagcagccugccgacgggaauccagauccgaacgcgaaucccaacguggacccuaacgcuaauccaaacguagaucccaaugccaacccuaauguggacccaaacgcaaaucccaacgccaauccuaacgcuaauccaaacgcaaauccgaacgccaaucccaacgcuaacccuaaugccaacccaaaugcgaaccccaaugcaaacccuaaugccaacccaaaugcuaaccccaaugccaacccgaaugcaaacccuaaugucgaucccaacgcuaacccaaaugccaacccuaaugcgaaccccaaugccaacccaaaugcaaaccccaaugcuaacccuaaugccaacccaaaugcuaacccgaaugccaaccccaacgcaaauccuaacgccaauccaaacgcuaaucccaacgcgaauccuaacgcaaauccaaacgccaaucccaacgcuaauccgaacgccaauccuaacgcaaauccaaacgccaaccccaauaaaaacaaucagggaaacggccaaggucauaauaugccuaacgaccccaaucgaaacguggaugagaaugcuaaggccaacaaugcaguuaaaaacaauaacaaugaggaaccaucagacaagcacauuaagcaguauuugaaaaagauacagaacagcaucaguacugagugguccccuuguucugugacgugcgggaacggcauucagguccguaucaaacccggaagcgcggauaagccaaaagaccaacucgacuacgauaaugacauugaaaagaaaaucuguaagauggagaagugcuccucaguguuuaacguaguuaauaguagcauaggccugaucauggugcugucuuuccucuuuuuaaacuga

SEQ ID NO: 4294 - RNA, 1158 nt, Artificial Sequence
  derived and/or modified CDS sequence (opt3) from Pf(Gha1108-115)__BAM84810.1__CSP
augaugagaaagcuggccauccucagcguguccucuuuccuuuuugucgaggcucuguuccaggaauaccaaugcuauggcucaaguagcaacaccaggguuuugaaugaguuaaacuacgacaaugcagggacaaaccuguauaaugaacuagagaugaacuacuauggaaaacaggaaaauugguacucccucaagaaaaacucucggucgcugggugagaaugaugacggcaacaaugaggauaacgaaaaacuucgcaaacccaagcacaagaaacugaagcagccugccgacgggaauccagauccgaacgcgaaucccaacguggacccuaacgcuaauccaaacguagaucccaaugccaacccuaauguggacccaaacgcaaaucccaacgccaauccuaacgcuaauccaaacgcaaauccgaacgccaaucccaacgcuaacccuaaugccaacccaaaugcgaaccccaaugcaaacccuaaugccaacccaaaugucgaucccaacgcuaauccgaacgccaauccuaacgcaaaucccaacgcuaacccaaaugccaacccuaaugcgaaccccaaugccaacccaaaugcaaaccccaaugcuaacccuaaugccaacccaaaugcuaacccgaaugccaaccccaacgcaaauccuaacgccaauccaaacgcuaaucccaacgcgaauccuaacgcaaauccaaacgccaaucccaacgcuaauccgaacgccaauccuaacgcaaauccaaacgccaaccccaauaaaaacaaucagggaaacggccaaggucauaauaugccuaacgaccccaaucgaaacguggaugagaaugcuaacgccaauaacgcaguuaagaauaacaauaacgaggaaccaucagaccagcacauugagaaauauuugcagaagauacagaacagccucaguacugaaugguccccuuguucugugacgugcgggaauggaauccaaguccguauuaagcccggcagcgcgaacaaaccaaaggaucagcugaauuacgagaacgacaucgaaaagaagauuuguaaaauggagaagugcuccucaguguuuaauguaguuaacaguagcaucggccugauaauggugcucucuuucuuauuucugaauuga

SEQ ID NO: 4295 - RNA, 1158 nt, Artificial Sequence
  derived and/or modified CDS sequence (opt3) from Pf(Gha1108-119)__BAM84811.1__CSP
augaugagaaagcuggccauccucagcguguccucuuuccuuuuugucgaggcucuguuccaggaauaccaaugcuauggcucaaguagcaacaccaggguuuugaaugaguuaaacuacgacaaugcagggacaaaccuguauaaugaacuagagaugaacuacuauggaaaacaggaaaauugguacucccucaagaaaaacucucggucgcugggugagaaugaugacggcaacaaugaggauaacgaaaaacuucgcaagcccaagcacaagaaacugaagcagccuggggacggaaauccagauccgaacgccaaucccaacguggacccuaacgcgaauccaaacguagaucccaaugcuaacccuaauguggacccaaacgccaaucccaacgcaaauccuaacgccaauccaaacgcuaauccgaacgcaaaucccaacgccaacccuaaugcuaacccaaaugccaaccccaaugcgaacccuaaugcaaacccaaaugccaaccccaaugcuaacccgaaugccaacccuaaugucgaucccaacgcaaacccaaaugcuaacccuaaugccaaccccaaugcgaacccaaaugccaaccccaaugcaaacccuaaugcuaacccaaaugccaacccgaaugcuaaccccaacgccaauccuaacgcaaauccaaacgccaaucccaacgcuaauccuaacgcgaauccaaacgcaaaucccaacgccaauccgaacgcuaauccuaacgccaauccaaacgcaaaccccaauaaaaacaaucagggcaacggucaagggcauaauaugccuaacgaccccaaucgaaacguggaugagaaugccaacgcuaauaacgccguuaagaauaacaauaacgaggaaccaucagaccagcacauugagaaauauuugaagacuauaaagaacagccucaguacggaaugguccccuuguucugugaccugcggaaauggcauccagguccguauuaaacccggcagcgcaaacaagccaaaagaucagcuggacuacgagaaugacaucgaaaagaaaauuuguaagauggagaaaugcuccucaguguuuaacguaguuaauaguagcaucgggcugauaauggugcucucuuucuuauuucugaacuga

SEQ ID NO: 4296 - RNA, 1158 nt, Artificial Sequence
  derived and/or modified CDS sequence (opt3) from Pf(Gha1109-071)__BAM84836.1__CSP
augaugagaaagcuggccauccucagcguguccucuuuccuuuuugucgaggcucuguuccaggaauaccaaugcuauggcucaaguagcaacaccaggguuuugaaugaguuaaacuacgacaaugcagggacaaaccuguauaaugaacuagagaugaacuacuauggaaaacaggaaaauugguacucccucaagaaaaacucucggucgcugggugagaaugaugacggcaacaaugaggauaacgaaaaacuucgcaagcccaagcacaagaaacugaagcagccuggggacggaaauccagauccgaacgccaaucccaacguggacccuaacgcgaauccaaacguagaucccaaugcuaacccuaauguggacccaaacgccaaucccaacgcaaauccuaacgccaauccaaacgcuaauccgaacgcaaaucccaacgccaacccuaaugcuaacccaaaugccaaccccaaugcgaacccuaaugcaaacccaaaugccaaccccaaugcuaacccgaaugccaacccuaaugcaaaccccaacgucgauccaaaugcuaacccuaaugccaaccccaaugcgaacccaaaugccaaccccaaugcaaacccuaaugcuaacccaaaugccaacccgaaugcuaaccccaacgccaauccuaacgcaaauccaaacgccaaucccaacgcuaauccuaacgcgaauccaaacgcaaaucccaacgccaauccgaacgcuaauccuaacgccaauccaaacgcaaaccccaauaaaaacaaucagggcaacggucaagggcauaauaugccuaacgaccccaaucgaaacguggaugagaaugccaacgcuaauaacgccguuaagaauaacaauaacgaggaaccaucagaccagcacauugagaaauauauaaagaagauccagaacagcuugaguacugaaugguccccuuguucugugacgugcggaaauggcauucagguccguaucaaacccggcagcgcaaacaagccaaaagaugagcucaauuacgaaaacgacauugagaagaaaaucuguaagauggaaaaaugcuccucaguguuuaauguaguuaacaguagcauagggcugaucauggugcugucuuuccucuuuuuaaauuga

SEQ ID NO: 4297 - RNA, 1158 nt, Artificial Sequence
  derived and/or modified CDS sequence (opt3) from Pf(Gha1109-163)__BAM84827.1__CSP
augaugagaaagcuggccauccucagcguguccucuuuccuuuuugucgaggcucuguuccaggaauaccaaugcuauggcucaaguagcaacaccaggguuuugaaugaguuaaacuacgacaaugcagggacaaaccuguauaaugaacuagagaugaacuacuauggaaaacaggaaaauugguacucccucaagaaaaacucucggucgcugggugagaaugaugacggcaacaaugaggauaacgaaaaacuucgcaagcccaagcacaagaaacugaagcagccugccgacgggaauccagauccgaacgcgaaucccaacguggacccuaacgcuaauccaaacguagaucccaaugccaacccuaauguggacccaaacgcaaaucccaacgccaauccuaacgcuaauccaaacgcaaauccgaacgccaaucccaacgcuaacccuaaugccaacccaaaugcgaaccccaaugcaaacccuaaugccaacccaaaugcuaaccccaaugccaacccgaaugcaaacccuaaugcuaaccccaacgucgauccaaaugccaacccuaaugcgaaccccaaugccaacccaaaugcaaaccccaaugcuaacccuaaugccaacccaaaugcuaacccgaaugccaaccccaacgcaaauccuaacgccaauccaaacgcuaaucccaacgcgaauccuaacgcaaauccaaacgccaaucccaacgcuaauccgaacgccaauccuaacgcaaauccaaacgccaaccccaauaaaaacaaucagggaaacggccaaggucauaauaugccuaacgaccccaaucgaaacguggaugagaaugcuaacgccaauaacgcaguuaagaauaacaauaacgaggaaccaucagaccagcacauugagaaauauuugaagacuauacagaacagccucaguacggaaugguccccuuguucugugaccugcgggaauggaauccagguccguauuaagcccggcagcgcgaacaaaccaaaggaucaacuggacuacgcuaaugacaucgagaaaaagauuuguaaaauggaaaagugcuccucaguguuuaacguaguuaauaguagcaucggccugauaauggugcucucuuucuuauuucugaacuga

SEQ ID NO: 4298 - RNA, 1158 nt, Artificial Sequence
  derived and/or modified CDS sequence (opt3) from Pf(Tz93-007)__BAM84748.1__CSP
augaugagaaagcuggccauccucagcguguccucuuuccuuuuugucgaggcucuguuccaggaauaccaaugcuauggcucaaguagcaacaccaggguuuugaaugaguuaaacuacgacaaugcagggacaaaccuguauaaugaacuagagaugaacuacuauggaaaacaggaaaauugguacucccucaagaaaaacucucggucgcugggugagaaugaugacggcaacaaugaggauaacgaaaaacuucgcaagcccaagcacaagaaacugaagcagccugccgacgggaauccagauccgaacgcgaaucccaacguggacccuaacgcuaauccaaacguagaucccaaugccaacccuaauguggacccaaacgcaaaucccaacgccaauccuaacgcuaauccaaacgcaaauccgaacgccaaucccaacgcuaacccuaaugccaacccaaaugcgaaccccaaugcaaacccuaaugccaacccaaaugcuaaccccaaugccaacccgaaugcaaacccuaaugucgaucccaacgcuaacccaaaugccaacccuaaugcgaaccccaaugccaacccaaaugcaaaccccaaugcuaacccuaaugccaacccaaaugcuaacccgaaugccaaccccaacgcaaauccuaacgccaauccaaacgcuaaucccaacgcgaauccuaacgcaaauccaaacgccaaucccaacgcuaauccgaacgccaauccuaacgcaaauccaaacgccaaccccaauaaaaacaaucagggaaacggccaaggucauaauaugccuaacgaccccaaucgaaacguggaugagaaugcuaacgccaauaacgcaguuaagaauaacaauaacgaggaaccaucagacaaacacauugagcaguauuugaagacuauaaagaacagccucaguacggaaugguccccuuguucugugaccugcgggaauggaauccagguccguauuaaacccggcagcgcgaacaagccaaaagaugagcuggacuacgcuaaugacaucgaaaagaaaauuuguaagauggagaaaugcuccucaguguuuaacguaguuaauaguagcaucggccugauaauggugcucucuuucuuauuucugaacuga

SEQ ID NO: 4299 - RNA, 1158 nt, Artificial Sequence
  derived and/or modified CDS sequence (opt3) from Pf(Tz93-008)__BAM84749.1__CSP
augaugagaaagcuggccauccucagcguguccucuuuccuuuuugucgaggcucuguuccaggaauaccaaugcuauggcucaaguagcaacaccaggguuuugaaugaguuaaacuacgacaaugcagggacaaaccuguauaaugaacuagagaugaacuacuauggaaaacaggaaaauugguacucccucaagaaaaacucucggucgcugggugagaaugaugacggcaacaaugaggauaacgaaaaacuucgcaagcccaagcacaagaaacugaagcagccugccgacgggaauccagauccgaacgcgaaucccaacguggacccuaacgcuaauccaaacguagaucccaaugccaacccuaauguggacccaaacgcaaaucccaacgccaauccuaacgcuaauccaaacgcaaauccgaacgccaaucccaacgcuaacccuaaugccaacccaaaugcgaaccccaaugcaaacccuaaugccaacccaaaugcuaaccccaaugccaacccgaaugcaaacccuaaugucgaucccaacgcuaacccaaaugccaacccuaaugcgaaccccaaugccaacccaaaugcaaaccccaaugcuaacccuaaugccaacccaaaugcuaacccgaaugccaaccccaacgcaaauccuaacgccaauccaaacgcuaaucccaacgcgaauccuaacgcaaauccaaacgccaaucccaacgcuaauccgaacgccaauccuaacgcaaauccaaacgccaaccccaauaaaaacaaucagggaaacggccaaggucauaauaugccuaacgaccccaaucgaaacguggaugagaaugcuaacgccaauaacgcaguuaagaauaacaauaacgaggaaccaucagacaaacacauuacugaguauuugaagaagauacagaacagccucaguacggaaugguccccuuguucugugaccugcgggaauggaauccagguccguauuaaacccggcagcgcgggcaaguccaaaaacgagcuggauuacgaaaaugacaucgagaagaaaauuuguaagauggaaaaaugcucaaguguguuuaacguaguuaauagcucuaucgggcugauaauggugcucuccuucuuauuucugaacuga

SEQ ID NO: 4300 - RNA, 1158 nt, Artificial Sequence
  derived and/or modified CDS sequence (opt3) from Pf(Tz93-013)__BAM84751.1__CSP
augaugagaaagcuggccauccucagcguguccucuuuccuuuuugucgaggcucuguuccaggaauaccaaugcuauggcucaaguagcaacaccaggguuuugaaugaguuaaacuacgacaaugcagggacaaaccuguauaaugaacuagagaugaacuacuauggaaaacaggaaaauugguacucccucaagaaaaacucucggucgcugggugagaaugaugacggcaacaaugaggauaacgaaaaacuucgcaagcccaagcacaagaaacugaagcagccugccgacgggaauccagauccgaacgcgaaucccaacguggacccuaacgcuaauccaaacguagaucccaaugccaacccuaauguggacccaaacgcaaaucccaacgccaauccuaacgcuaauccaaacgcaaauccgaacgccaaucccaacgcuaacccuaaugccaacccaaaugcgaaccccaaugcaaacccuaaugccaacccaaaugcuaaccccaaugccaacccgaaugcaaacccuaaugucgaucccaacgcuaacccaaaugccaacccuaaugcgaaccccaaugccaacccaaaugcaaaccccaaugcuaacccuaaugccaacccaaaugcuaacccgaaugccaaccccaacgcaaauccuaacgccaauccaaacgcuaaucccaacgcgaauccuaacgcaaauccaaacgccaaucccaacgcuaauccgaacgccaauccuaacgcaaauccaaacgccaaccccaauaaaaacaaucagggaaacggccaaggucauaauaugccuaacgaccccaaucgaaacgugaaugagaacgcuaaugccaacaaugcaguuaagaacaauaacaacgaggaaccaucagauaaacacauuacugaguauuugaagaagauacagaauagccucaguacggaaugguccccuuguucugugaccugcgggaacggaauccagguccguauuaaacccggcagcgcgggcaaguccagagacgagcuggauuacgaaaaugacaucgagaaaaagauuuguaaaauggaaaagugcucaaguguguuuaacguaguuaauagcucuaucgggcugauaauggugcucuccuucuuauuucugaacuga

SEQ ID NO: 4301 - RNA, 1158 nt, Artificial Sequence
  derived and/or modified CDS sequence (opt3) from Pf(Tz93-048)__BAM84761.1__CSP
augaugagaaagcuggccauccucagcguguccucuuuccuuuuugucgaggcucuguuccaggaauaccaaugcuauggcucaaguagcaacaccaggguuuugaaugaguuaaacuacgacaaugcagggacaaaccuguauaaugaacuagagaugaacuacuauggaaaacaggaaaauugguacucccucaagaaaaacucucggucgcugggugagaaugaugacggcaacaaugaggauaacgaaaaacuucgcaagcccaagcacaagaaacugaagcagccugccgacgggaauccagauccgaacgcgaaucccaacguggacccuaacgcuaauccaaacguagaucccaaugccaacccuaauguggacccaaacgcaaaucccaacgccaauccuaacgcuaauccaaacgcaaauccgaacgccaaucccaacgcuaacccuaaugccaacccaaaugcgaaccccaaugcaaacccuaaugccaacccaaaugcuaaccccaaugccaacccgaaugcaaacccuaaugcuaaccccaacgucgauccaaaugccaacccuaaugcgaaccccaaugccaacccaaaugcaaaccccaaugcuaacccuaaugccaacccaaaugcuaacccgaaugccaaccccaacgcaaauccuaacgccaauccaaacgcuaaucccaacgcgaauccuaacgcaaauccaaacgccaaucccaacgcuaauccgaacgccaauccuaacgcaaauccaaacgccaaccccaauaaaaacaaucagggaaacggccaaggucauaauaugccuaacgaccccaaucgaaacguggaugagaaugcuaacgccaauaacgcaguuaagaauaacaauaacgaggaaccaucagaccagcacauugagaaauauuugaagauaaucaagaacagccucaguacugaaugguccccuuguucugugacgugcgggaauggcauucagguccguaucaaacccggaagcgcgaacaagccaaaagaucagcuggacuacgcuaaugacauugagaagaaaaucuguaagauggaaaaaugcuccucaguguuuaacguaguuaauaguagcauaggccugaucauggugcucucuuucuuauuucugaacuga

SEQ ID NO: 4302 - RNA, 1158 nt, Artificial Sequence
  derived and/or modified CDS sequence (opt3) from Pf(Tz93-120)__BAM84776.1__CSP
augaugagaaagcuggccauccucagcguguccucuuuccuuuuugucgaggcucuguuccaggaauaccaaugcuauggcucaaguagcaacaccaggguuuugaaugaguuaaacuacgacaaugcagggacaaaccuguauaaugaacuagagaugaacuacuauggaaaacaggaaaauugguacucccucaagaaaaacucucggucgcugggugagaaugaugacggcaacaaugaggauaacgaaaaacuucgcaagcccaagcacaagaaacugaagcagccugccgacgggaauccagauccgaacgcgaaucccaacguggacccuaacgcuaauccaaacguagaucccaaugccaacccuaauguggacccaaacgcaaaucccaacgccaauccuaacgcuaauccaaacgcaaauccgaacgccaaucccaacgcuaacccuaaugccaacccaaaugcgaaccccaaugcaaacccuaaugccaacccaaaugcuaaccccaaugccaacccgaaugcaaacccuaaugucgaucccaacgcuaacccaaaugccaacccuaaugcgaaccccaaugccaacccaaaugcaaaccccaaugcuaacccuaaugccaacccaaaugcuaacccgaaugccaaccccaacgcaaauccuaacgccaauccaaacgcuaaucccaacgcgaauccuaacgcaaauccaaacgccaaucccaacgcuaauccgaacgccaauccuaacgcaaauccaaacgccaaccccaauaaaaacaaucagggaaacggccaaggucauaauaugccuaacgaccccaaucgaaacguggaugagaaugcuaacgccaauaacgcaguuaagaauaacaauaacgaggaaccaucagaccagcacauugagaaauauuugaagauaauccagaacagccucaguacugaaugguccccuuguucugugacgugcgggaauggcauucagguccguaucaagcccggaagcgcgaacaaaccaaaggaucaacuggacuacgcuaaugacauugagaaaaagaucuguaaaauggaaaagugcuccucaguguuuaacguaguuaauaguagcauaggccugaucauggugcucucuuucuuauuucugaacuga

SEQ ID NO: 4303 - RNA, 1158 nt, Artificial Sequence
  derived and/or modified CDS sequence (opt3) from Pf(Tz98-101)__BAM84794.1__CSP
augaugagaaagcuggccauccucagcguguccucuuuccuuuuugucgaggcucuguuccaggaauaccaaugcuauggcucaaguagcaacaccaggguuuugaaugaguuaaacuacgacaaugcagggacaaaccuguauaaugaacuagagaugaacuacuauggaaaacaggaaaauugguacucccucaagaaaaacucucggucgcugggugagaaugaugacggcaacaaugaggauaacgaaaaacuucgcaagcccaagcacaagaaacugaagcagccugccgacgggaauccagauccgaacgcgaaucccaacguggacccuaacgcuaauccaaacguagaucccaaugccaacccuaauguggacccaaacgcaaaucccaacgccaauccuaacgcuaauccaaacgcaaauccgaacgccaaucccaacgcuaacccuaaugccaacccaaaugcgaaccccaaugcaaacccuaaugccaacccaaaugcuaaccccaaugccaacccgaaugcaaacccuaaugcuaaccccaacgucgauccaaaugccaacccuaaugcgaaccccaaugccaacccaaaugcaaaccccaaugcuaacccuaaugccaacccaaaugcuaacccgaaugccaaccccaacgcaaauccuaacgccaauccaaacgcuaaucccaacgcgaauccuaacgcaaauccaaacgccaaucccaacgcuaauccgaacgccaauccuaacgcaaauccaaacgccaaccccaauaaaaacaaucagggaaacggccaaggucauaauaugccuaacgaccccaaucgaaacguggaugagaaugcuaacgccaauaacgcaguuaagaauaacaauaacgaggaaccaucagacaaacacauuacugaguauuugaagcguauacagaacagccucaguacggaaugguccccuuguucugugaccugcgggaauggaauccaggucagaauuaagcccggcagcgcgggcaaauccaagaacgagcuggauuacgaaaaugacaucgagaaaaagauuuguaaaauggaaaagugcucaaguguguuuaacguaguuaauagcucuaucgggcugauaauggugcucuccuucuuauuucugaacuga

SEQ ID NO: 4304 - RNA, 1158 nt, Artificial Sequence
  derived and/or modified CDS sequence (opt3) from Pf(Yaounde)__AAN87580.1__CSP
augaugagaaagcuggccauccucagcguguccucuuuccuuuuugucgaggcucuguuccaggaauaccaaugcuauggcucaaguagcaacaccaggguuuugaaugaguuaaacuacgacaaugcagggacaaaccuguauaaugaacuagagaugaacuacuauggaaaacaggaaaauugguacucccucaagaaaaacucucggucgcugggugagaaugaugacggcaacaaugaggauaacgaaaaacuucgcaagcccaagcacaagaaacugaagcagccugccgacgggaauccagauccgaacgcgaaucccaacguggacccuaacgcuaauccaaacguagaucccaaugccaacccuaauguggacccaaacgcaaaucccaacgccaauccuaacgcuaauccaaacgcaaauccgaacgccaaucccaacgcuaacccuaaugccaacccaaaugcgaaccccaaugcaaacccuaaugccaacccaaaugcuaaccccaaugccaacccgaaugcaaacccuaaugucgaucccaacgcuaacccaaaugccaacccuaaugcgaaccccaaugccaacccaaaugcaaaccccaaugcuaacccuaaugccaacccaaaugcuaacccgaaugccaaccccaacgcaaauccuaacgccaauccaaacgcuaaucccaacgcgaauccuaacgcaaauccaaacgccaaucccaacgcuaauccgaacgccaauccuaacgcaaauccaaacgccaaccccaauaaaaacaaucagggaaacggccaaggucauaauaugccuaacgaccccaaucgaaacguggaugagaaugcuaaggccaacaaugcaguuaaaaacaauaacaaugaggaaccaucagacaagcacauugagcaguauuugaagacuauacagaacagccucaguacggaaugguccccuuguucugugaccugcgggaacggaauccagguccguauuaaacccggcagcgcgaauaagccaaaagaucaacuggacuacgagaacgacaucgaaaagaaaauuuguaagauggagaaaugcuccucaguguuuaauguaguuaacaguagcaucggccugauaauggugcucucuuucuuauuucugaauuga

SEQ ID NO: 4305 - RNA, 1143 nt, Artificial Sequence
  derived and/or modified CDS sequence (opt3) from Pf(Asembo Bay)__AAN87610.1__CSP
augaugagaaagcuggccauccucagcguguccucuuuccuuuuugucgaggcucuguuccaggaauaccaaugcuauggcucaaguagcaacaccaggguuuugaaugaguuaaacuacgacaaugcagggacaaaccuguauaaugaacuagagaugaacuacuauggaaaacaggaaaauugguacucccucaagaaaaacucucggucgcugggugagaaugaugacggcaacaauaacaauggggauaacggacgcgagggcaaggacgaagauaaacgagacgguaauaacgaggauaacgaaaaacuucguaagcccaagcacaagaaacugaagcagccuggggacggaaauccagauccgaacgccaaucccaacguggacccuaaugcgaacccaaauguagaucccaacgcuaauccuaacguggacccaaaugccaaccccaaugcaaacccuaaugccaacccaaacgcuaauccgaacgcaaaucccaacgccaauccuaacgcuaauccaaacgccaaucccaacgcgaauccuaacgcaaauccaaacgccaaucccaacgcuaacccgaaugccaacccuaaugcaaaccccaaugcuaacccaaaugccaacccuaaugcgaaccccaaugccaacccaaaugcaaaccccaaugcuaacccuaacgccaauccaaacgcuaauccgaacgccaaucccaacgcaaauccuaacgccaauccaaacgcuaaucccaacgcgaauccuaacaaaaauaaccagggcaauggccaagggcauaacaugccaaacgaucccaauagaaacgucgacgagaaugcaaacgccaauaacgcugugaagaauaacaauaacgaggaaccgucagacaagcacauugagcaguauuugaauaaaauaaagaacagcaucaguacugaaugguccccuuguucuguuacgugcggaaaugguauucaggugaggaucaaaccaggcagcgccaacaagcccaaagaucagcucgacuacgcaaaugauauugagaagaaaaucuguaagauggaaaagugcuccucagucuuuaacgugguaaacaguagcauagggcugaucaugguucugucuuuccucuuuuuaaauuga

SEQ ID NO: 4306 - RNA, 1143 nt, Artificial Sequence
  derived and/or modified CDS sequence (opt3) from Pf(India)__AAN87619.1__CSP
augaugagaaagcuggccauccucagcguguccucuuuccuuuuugucgaggcucuguuccaggaauaccaaugcuauggcucaaguagcaacaccaggguuuugaaugaguuaaacuacgacaaugcagggacaaaccuguauaaugaacuagagaugaacuacuauggaaaacaggaaaauugguacucccucaagaaaaacucucggucgcugggugagaaugaugacggcaacaauaacaauggggauaacggacgcgagggcaaggacgaagauaaacgagacgguaauaacgaggauaacgaaaaacuucguaagcccaagcacaagaaacugaagcagccugggggagacaauccagauccgaacgccaaucccaacgcgaauccuaacgcuaauccaaacgccaaucccaacgcaaauccuaacgccaauccaaacguggaccccaaugcuaacccuaacgcaaauccaaacgccaauccgaacgcuaaucccaacgccaauccuaacgcgaauccaaacgcaaaucccaacgccaauccuaacgcuaauccaaacgccaaccccaaugcaaacccgaaugcuaacccuaaugccaaccccaaugcgaacccaaaugccaacccuaaugcaaaccccaaugcuaacccaaaugccaaccccaacgcuaauccuaacgccaauccaaacgcaaauccgaacgccaaucccaacgcuaauccuaacgcgaauccaaacgcaaaucccaacgccaauccuaacaaaaauaaccagggcaacggccaagggcauaauaugccaaacgaucccaauagaaacguagacgagaaugcuaacgccaauaacgcagugaagaauaacaauaacgaggaaccgucagauaagcacauugagcaguauuugaaaaagauacagaauagccucaguacugaaugguccccuuguucugucacgugcggaaacgguauccaggugaggauuaaaccaggcagcgccaauaagcccaaagacgagcuggacuacgaaaacgauaucgagaagaaaauuuguaagauggagaagugcuccucaguuuuuaacguggucaauaguagcaucgggcugauaauggugcucucuuucuuauuucugaacuga

SEQ ID NO: 4307 - RNA, 1107 nt, Artificial Sequence
  derived and/or modified CDS sequence (opt3) from Pf(India)__AAN87617.1__CSP
augaugagaaagcuggccauccucagcguguccucuuuccuuuuugucgaggcucuguuccaggaauaccaaugcuauggcucaaguagcaacaccaggguuuugaaugaguuaaacuacgacaaugcagggacaaaccuguauaaugaacuagagaugaacuacuauggaaaacaggaaaauugguacucccucaagaaaaacucucggucgcugggugagaaugaugacggcaacaauaacaauggggauaacggacgcgagggcaaggacgaagauaaacgagacgguaauaacgaggauaacgaaaaacuucguaagcccaagcacaagaaacugaagcagccugggggagacaauccagauccgaacgccaaucccaacguggacccuaaugcgaacccaaaugcuaaccccaaugccaacccuaaugcaaacccaaaugccaaccccaaugcuaacccuaacgcaaauccaaacgccaauccgaacgcuaaucccaacgccaauccuaacgcgaauccaaacgcaaaucccaacgccaauccuaacgcuaauccaaacgccaaccccaaugcaaacccgaaugcuaacccuaaugccaaccccaaugcgaacccaaaugccaacccuaaugcaaaccccaaugcuaacccaaaugccaaccccaacgcuaauccuaacgccaauccaaacgcaaauccgaacgccaaucccaacgcuaauccuaacaaaaauaaccagggcaauggccaagggcauaacaugccaaaugaucccaacagaaauguagacgagaacgcgaacgcaaauaacgccgugaagaauaacaauaacgaggaaccuucagauaagcacauugagcaguauuugaaaaagauacagaauagccucaguacugaaugguccccauguucugucacgugcggaaacgguauccaggugaggauuaaacccggcagcgcuaauaagccgaaagacgagcuggacuacgaaaacgauaucgagaagaaaauuuguaagauggagaagugcuccucaguuuuuaauguggucaacaguagcaucgggcugauaauggugcucucuuucuuauuucugaauuga

SEQ ID NO: 4308 - RNA, 1095 nt, Artificial Sequence
  derived and/or modified CDS sequence (opt3) from Pf(India)__AAN87616.1__CSP
augaugagaaagcuggccauccucagcguguccucuuuccuuuuugucgaggcucuguuccaggaauaccaaugcuauggcucaaguagcaacaccaggguuuugaaugaguuaaacuacgacaaugcagggacaaaccuguauaaugaacuagagaugaacuacuauggaaaacaggaaaauugguacucccucaagaaaaacucucggucgcugggugagaaugaugacggcaacaauaacaauggggauaacggacgcgagggcaaggacgaagauaaacgagacgguaauaacgaggauaacgaaaaacuucguaagcccaagcacaagaaacugaagcagccugggggagacaauccagauccgaacgccaaucccaacguggacccuaaugcgaacccaaaugcuaaccccaaugccaacccuaaugcaaacccaaaugccaaccccaaugcuaacccuaacgcaaauccaaacgccaauccgaacgcuaaucccaacgccaauccuaacgcgaauccaaacgcaaaucccaacgccaauccuaacgcuaauccaaacgccaaccccaaugcaaacccgaaugcuaacccuaaugccaaccccaaugcgaacccaaaugccaacccuaaugcaaaccccaaugcuaacccaaaugccaaccccaacgcuaauccuaacgccaauccaaacgcaaauccgaacgccaaucccaacaaaaauaaccagggcaauggccaagggcauaacaugccuaaugauccaaacagaaauguagacgagaacgcuaaugcgaacaacgcagugaagaauaacaauaacgaggaacccucagauaagcacauugagcaguauuugaaaaagauacagaauagccucaguacugaaugguccccuuguucugucacgugcggaaacgguauccaggugaggauuaaaccaggcagcgccaauaagcccaaagacgagcuggacuacgaaaacgauaucgagaagaaaauuuguaagauggagaagugcuccucaguuuuuaauguggucaacaguagcaucgggcugauaauggugcucucuuucuuauuucugaauuga

SEQ ID NO: 4309 - RNA, 1092 nt, Artificial Sequence
  derived and/or modified CDS sequence (opt3) from Pf(Bolivar)__AAN87600.1__CSP
augaugagaaagcuggccauccucagcguguccucuuuccuuuuugucgaggcucuguuccaggaauaccaaugcuauggcucaaguagcaacaccaggguuuugaaugaguuaaacuacgacaaugcagggacaaaccuguauaaugaacuagagaugaacuacuauggaaaacaggaaaauugguacucccucaagaaaaacucucggucgcugggugagaaugaugacggcaacaauaacaauggggauaacggacgcgagggcaaggacgaagauaaacgagacgguaauaacgaggauaacgaaaaacuucguaagcccaagcacaagaaacugaagcagccugccgacgggaauccagauccgaacgcgaaucccaacguggacccuaaugcuaacccaaaucccaacgccaauccuccaaacgcaaaucccaacgccaauccuaacgcuaauccaaacgcaaacccgaauguagaucccaacgccaauccuaacgcuaauccaaacgccaaucccaacgcgaauccuaacgcaaauccaaacgccaaucccaacgcuaauccgaacgccaacccuaaugcaaaccccaaugcuaacccaaaugccaacccuaaugcgaaccccaaugccaacccaaaugcaaaccccaaugcuaacccuaaugccaacccaaacgcuaauccgaacgccaaucccaacgcaaauccuaacaaaaauaaccagggaaauggccaaggccauaacaugccaaaugaccccaacagaaauguggaugagaacgccaaugcuaacaaugcggucaagaacaacaauaacgaggaaccuucagacaagcacauugagcaguauuugaauaaaauacagaacagccucaguacugaaugguccccauguucugugacgugcgggaauggaauccagguuaggauuaagcccgguagcgcaaacaaaccgaaggaccaacuggauuacgccaaugacaucgagaaaaagauuuguaaaauggaaaagugcuccucaguguuuaacgucgugaauaguagcaucggccugauaaugguacucucuuucuuauuucugaacuga

SEQ ID NO: 4310 - RNA, 1083 nt, Artificial Sequence
  derived and/or modified CDS sequence (opt3) from Pf(Asembo Bay)__AAN87597.1__CSP
augaugagaaagcuggccauccucagcguguccucuuuccuuuuugucgaggcucuguuccaggaauaccaaugcuauggcucaaguagcaacaccaggguuuugaaugaguuaaacuacgacaaugcagggacaaaccuguauaaugaacuagagaugaacuacuauggaaaacaggaaaauugguacucccucaagaaaaacucucggucgcugggugagaaugaugacggcaacaauaacaauggggauaacggacgcgagggcaaggacgaagauaaacgagacgguaauaacgaggauaacgaaaaacuucguaagcccaagcacaagaaacugaagcagccugccgacgggaauccagauccgaacgcgaaucccaacguggacccuaaugcuaacccaaaugccaaccccaaugcaaacccuaaugccaacccaaaugcuaaccccaaugcaaacccuaacguagauccaaaugccaacccgaaugcuaaccccaaugccaacccuaaugcgaacccaaaugcaaaccccaaugccaacccuaaugcuaacccaaaugccaaccccaacgcaaauccgaacgcuaauccuaacgccaaucccaacgcgaauccaaacgccaauccuaacgcaaaucccaacgcuaauccaaacgccaaucccaacgcuaacccuaaugccaacccaaaugcaaacccgaauaaaaacaaucagggaaacggccaaggccauaauaugcccaacgacccuaauagaaacguggaugagaaugccaacgcuaauaacgcggucaagaauaacaacaaugaggaaccaucagacaagcacauuaaagaguauuugaagauaauccccaacagccucaguacugaaugguccccuuguucugugacgugcgggaaugguauucagguuaggaucaaaccaggaagcgcaggcaagcccaaagacgagcuggauuacgccaacgacauugaaaagaaaaucuguaagauggagaagugcuccucaguguuuaaugucgugaacaguagcauagggcugaucaugguacucucuuucuuauuucugaauuga

SEQ ID NO: 4311 - RNA, 1083 nt, Artificial Sequence
  derived and/or modified CDS sequence (opt3) from Pf(Asembo Bay)__AAN87596.1__CSP
augaugagaaagcuggccauccucagcguguccucuuuccuuuuugucgaggcucuguuccaggaauaccaaugcuauggcucaaguagcaacaccaggguuuugaaugaguuaaacuacgacaaugcagggacaaaccuguauaaugaacuagagaugaacuacuauggaaaacaggaaaauugguacucccucaagaaaaacucucggucgcugggugagaaugaugacggcaacaauaacaauggggauaacggacgcgagggcaaggacgaagauaaacgagacgguaauaacgaggauaacgaaaaacuucguaagcccaagcacaagaaacugaagcagccugccgacgggaauccagauccgaacgcgaaucccaacguggacccuaaugcuaacccaaaugccaaccccaaugcaaacccuaaugccaacccaaaugcuaaccccaaugcaaacccuaacguagauccaaaugccaacccgaaugcuaaccccaaugccaacccuaaugcgaacccaaaugcaaaccccaaugccaacccuaaugcuaacccaaaugccaaccccaacgcaaauccgaacgcuaauccuaacgccaaucccaacgcgaauccaaacgccaauccuaacgcaaaucccaacgcuaauccaaacgccaaucccaacgcuaacccuaaugccaacccaaaugcaaacccgaauaaaaacaaucagggaaacggccaaggccauaauaugcccaacgacccuaauagaaacguggaugagaaugccaacgcuaauaacgcggucaagaauaacaacaaugaggaaccaucagacaagcacauuaaagaguauuugaagauaauccagaacagccucaguacugaauggucccccuguucugugacgugcgggaaugguauucagguuaggaucaaaccuggaagcgcaggcaagccaaaagacgagcuggauuacgccaacgacauugaaaagaaaaucuguaagauggagaagugcuccucaguguuuaaugucgugaacaguagcauagggcugaucaugguacucucuuucuuauuucugaauuga

SEQ ID NO: 4312 - RNA, 1071 nt, Artificial Sequence
  derived and/or modified CDS sequence (opt3) from Pf(India)__AAN87615.1__CSP
augaugagaaagcuggccauccucagcguguccucuuuccuuuuugucgaggcucuguuccaggaauaccaaugcuauggcucaaguagcaacaccaggguuuugaaugaguuaaacuacgacaaugcagggacaaaccuguauaaugaacuagagaugaacuacuauggaaaacaggaaaauugguacucccucaagaaaaacucucggucgcugggugagaaugaugacggcaacaauaacaauggggauaacggacgcgagggcaaggacgaagauaaacgagacgguaauaacgaggauaacgaaaaacuucguaagcccaagcacaagaaacugaagcagccuggggacggaaauccagauccgaacgccaaucccaacguggacccuaaugcgaacccaaaugcuaaccccaaugccaacccuaaugcaaacccaaaugccaaccccaaugcuaacccuaacgcaaauccaaacgccaauccgaacgcuaaucccaacgccaauccuaacgcgaauccaaacgcaaaucccaacguaaauccuaacgccaauccaaacgcuaaccccaaugccaacccgaaugcaaacccuaaugcuaaccccaaugccaacccaaaugcgaacccuaaugccaaccccaaugcaaacccaaaugcuaaccccaacgccaauccuaacgcuaauccaaacaaaaauaaccagggcaauggccaagggcauaacaugccgaaugaucccaacagaaauguggacgagaacgccaaugucaacaaugcagugaagaacaauaacaacgaggaaccuucagauaagcacauugagcaguauuugaaaaagauacagaauagccucaguacugaaugguccccauguucuguuacgugcggaaacgguauccaggugaggauuaaacccggcagcgccaauaagccuaaagacgagcuggacuacgaaaacgauaucgagaagaaaauuuguaagauggagaagugcuccucagucuuuaaugugguaaacaguagcaucgggcugauaaugguucucucuuucuuauuucugaauuga

SEQ ID NO: 4313 - RNA, 1110 nt, Artificial Sequence
  derived and/or modified CDS sequence (opt3) from Pk(UMMAC6)__AHF20622.1__CSP
augaagaacuucauccugcucgccgugagcuccauucuucuggucgacuuguuacccacccacuuugagcauaauguugaucugucuagagcuauaaacgugaauggcguaucauucaacaauguggacacaaguagccuaggggcagcccaggucaggcaauccgcgucucggggacgcggucucggcgaaaaaccuaaggagggggcugauaaagaaaagaaaaaggagaaggaaaaagagaaggaggaggaaccgaaaaagccaaacgaaaauaaacugauccagcccgagcagccugccgcaggagccggcggugagcagccagcugcaggggccggaggcgaacaacccgcugccggcgcagggggagagcagccugcagccggugcuggcggggaacagccagccgcaggagcuggcggugagcagcccgccgcgggggcccgaggagaacaaccugcagcuggcgccggcggggagcagccagcugccggagcggguggcgagcagccggccgcuggggcgggaggcgaacagcccgcagccggugcugggggcgagcaaccugccgcaggagccggcggggaacagccagcugccggagcacguggugagcagcccgcggcuggcgccgggggagaacaaccugcagccggcgcugguggggagcagccagcccccgcaccgagaagggagcagccugcugccggcgcgggaggcgaacagcccgccccagcuccucggcgcgagcaacccgcaccaggggccggagcuggugacggcgccagagggggaaacgcaggcgcggguaaggggcagggccagaauaaccagggagccaaugugcccaacgaaaagguugugaaugauuaccuucacaaaauuaggucgucagucacuacggaguggaccccuugcagcgugacauguggcaacgggguacggauccgccgaaagggacaugcuggcaauaaaaaggccgaagaccugacuauggaugacuuggagguugaggcaugcgugauggauaaaugugcugguauuuuuaacgucgugaguaacucccucgggcuggugauccugcucgucuuagcccuguucaauuga

SEQ ID NO: 4314 - RNA, 1092 nt, Artificial Sequence
  derived and/or modified CDS sequence (opt3) from Pk(H (SL1_PK))__XP_002259002.1__CSP
augaagaacuucauccugcucgccgugagcuccauucuucuggucgacuuguuacccacccacuuugagcauaauguugaucugucuagagcuauaaacgugaauggcguaucauucaacaauguggacacaaguagccuaggggcagcccaggucaggcaauccgcgucucggggacgcggucucggcgaaaaaccuaaggagggggcugauaaagaaaagaaaaaggagaagggaaaagaaaaggaggaggaaccuaaaaagccgaacgagaauaaacugaagcagcccaacgaaggccagccucaggcccaaggugacggggcaaaugccggacagccacaggcucagggcgauggcgcaaacgccgggcaaccccaggcucagggagacggugccaaugcgggccagccucaagcacagggggauggagccaacgcuggccagccacaagcccagggugacggggcaaaugcuggacagccccaggcccaaggcgauggcgcgaacgccgggcagccucaggcacagggagacggugcuaaugccggccaaccacaggcucagggggauggagccaacgcaggccagccgcaagcccagggugacggggcuaacgcgggccagccccaggcacaaggagauggcgccaaugcugggcagccucaggcccaaggagaccgagcaaacgccggucagccacaggcucagggcgacggggccaaugugccccgucaaggaagaaacggcgguggggcaccagcgggcggaaaugagggcaacaagcaggcugggaaaggacagggucagaauaaccaaggcgccaaugcaccaaacgagaagguugugaaugauuaccuucacaaaaucaggucgucagucacuacggaauggacccccugcagcgugacaugugggaacggaguacggauucgcagaaaggcccaugcuggcaauaaaaaggccgaggaccugacuauggaugacuuggaaguugaggcaugcgugauggauaaaugugcugguaucuuuaacgucgugaguaauucccucgggcuggugauucugcucgucuuagcccuguucaacuga

SEQ ID NO: 4315 - RNA, 1443 nt, Artificial Sequence
  derived and/or modified CDS sequence (opt3) from Pk(SGEHIH2-im-Y09-12)__AFD97213.1__CSP
augaagaacuucauccugcucgccgugagcuccauucuucuggucgacuuguuacccacccacuuugagcauaauguugaucugucuagagcuauaaacgugaauggcguaucauucaacaauguggacacaaguagccuaggggcagcccaggucaggcaauccgcgucucggggacgcggucucggcgaaaaaccuaaggagggggaugacaaagaaaagaaaaaggagaaggaaaaagaggaggaaccaaagaaacugaacgagaauaacccgaagaaacccaaugaagagggagauggcgcuaaacuuaagcagccuaacgaggaaggugacggggccaagcugaagcagccaaaugcagagggaggcgccaaauugaagcagcccaacgcugaaggcggggcaaaugccggacaaccuaacgcugaggguggcgccaaugcggggcagccaaacgcagaaggaggcgccaacgcuggucagcccaaugccgggggagcaaacgcuggccagccuaaugccgagggcggggcgaacgccggacaaccaaaugcagaggguggcgcuaacgccgggcagccgaaugcugaaggaggcgccaacgcacgacagcccaaugccgaggguggggcuaacgcgcgucagccuaaugcagaaggcggagccaacgcuggccaaccaaaugccgaagggggagcaaacgccggucagcccaaugcugagggcggggccaacgcaggacagccuaacgcggagggcggugcuaaugccagacaaccaaacgcagaagggggcgccaaugcuggacagcccaacgccgagggcggggcaaaugcuggacagccgaacgccgaggguggcgcgaaugccgggcagccuaacgcugaaggaggcgcaaaugccggucaacccaacgcugaagggggcgccaaugcaaggcagccaaacgcggagggaggcgccaaugcugggcagccuaacgccgagggaggcgcaaaugcuggucagcccaacgccgaagggggagcaaacgcccggcaaccacaggcugagggcgguggcgcgaaugcccgccagccccaggcagaagggggaggcgcuaacgccagacaagggggaaaugagggcaacaaacaggccgguaaggggcagggacagaauaaccaaggcgcuaaugcaccuaacgagaaagugguuaaugauuaccuccagaagaucaggucgucagugacuauugaguggacgccaugcagcgucaccugugguaacggcgugcggauccgcagacgagcccacgcggacaagaaaaaggcugaagaucugacaauggacgaucuggagguagaagccugcguuauggacaaaugugcagggauuuuuaauguggucaguaacucccucggauuagugauccugcuuguguuggcccuguucaauuga

SEQ ID NO: 4316 - RNA, 1320 nt, Artificial Sequence
  derived and/or modified CDS sequence (opt3) from Pk(NB028)__AFG25469.1__CSP
augaagaacuucauccugcucgccgugagcuccauucuucuggucgacuuguuacccacccacuuugagcauaauguugaucugucuagagcuauaaacgugaauggcguaucauucaacaauguggacacaaguagccuaggggcagcccaggucaggcaauccgcgucucggggacgcggucucggcgaaaaaccuaaggagggggaugacaaagaaaagaaaaaggagaaggaaaaagaggaggaaccaaagaaccugaaugagaacaaaccgaagcagcccaaugcugaaggagauggcgccaaacuuaagcagccuaacgcagagggugacggggccaagcugaaacagccacaagcugagggagauggcgcaaaugcccgacagccccaggcugaaggcaacggggccaaugcgcgucagccucaagcagagggagacggugccaacgcuagacagccacaggccgaaggcgauggggcaaaugcuaggcagccccaagccgagggagacggcgcgaacgcccggcagccucaggcagaaggugauggggcuaacgcccgccaaccacaggcugagggagacggcgccaaugcaagacagccgcaggccgagggcgauggggcuaacgcgaggcaaccccaggcagaaggagguggcgccaaugcucggcagccucaggccgagggggacggagcaaacgcccgccaaccacaggcugaaggcgacggugccaaugcacgacagccccaggcggagggggauggcgcuaacgccagacaaccucaggcagaaggagacggcgccaaugcuaggcagccacaggccgagggggauggagcaaacgcucggcaaccccaggccgaggguggcggggcgaaugcccgucagccgcaagcugaaggagacggcgcaaacgcccgccaggcucaggcccagggugaugggggcaaugcaagacaaggaggcaacgggggaggugcgccugccggcgggaaugagggaaacaagcaggcuggcaaaggucaggggcagaauaaccaaggcgccaacgcacccaaugaaaaggugguuaacgacuacuugcagaaaaucaggucgucagugacuacggaguggaccccaugcagcgucacauguggaaauggcgugcggauucgacgcagagcucacgccgauaagaaaaaggcagaggaacucacuauggacgaucuggagguagaagccugcguuauggacaagugugcugggaucuuuaacguggucaguaauucccugggacucgugauuuuacuggugcuugcguuguucaacuga

SEQ ID NO: 4317 - RNA, 1278 nt, Artificial Sequence
  derived and/or modified CDS sequence (opt3) from Pk(SGEHIH1-im-Y09-102)__AFD97209.1__CSP
augaagaacuucauccugcucgccgugagcuccauucuucuggucgacuuguuacccacccacuuugagcauaauguugaucugucuagagcuauaaacgugaauggcguaucauucaacaauguggacacaaguagccuaggggcagcccaggucaggcaauccgcgucucggggacgcggucucggcgaaaaaccuaaggagggggaugacaaagaaaagaaaaaggagaaggaaaaagaggaggaaccaaagaaacugaacgagaauaacccgaagaaacccaaugaagagggagauggcgcuaaacuuaagcagccuaacgaggaaggugacggggccaagcugaagcagccaaaugcagagggaggcgccaaauugaagcagcccaacgcugaaggcggggcaaaugccggacaaccuaacgcugaggguggcgccaaugcggggcagccaaacgcagaaggaggcgccaacgcuggucagcccaaugccgggggagcaaacgcuggccagccuaaugccgagggcggggcgaacgccggacaaccaaaugcagaggguggcgcuaacgccgggcagccgaaugcugaaggaggcgccaacgcacgacagcccaaugccgaggguggggcuaacgcgcgucagccuaaugcagaaggcggagccaacgcuggccaaccaaaugccgaagggggagcaaacgccggucagcccaaugcugagggcggggccaacgcaggacagccuaacgcggagggcggugcuaaugccagacaaccaaacgcagaagggggcgccaaugcuggacagcccaacgccgagggcggggcaaaugcuggacagccgaacgccgaggguggcgcgaaugccaggcagccucaagcugaagggggaggcgcaaacgcccggcagccccaggcugagggugggggcgccaaugcacgccagggaggcaacgaagggaauaaacaagcgggaaagggccagggucagaacaaucagggggccaacgcuccaaaugagaaagugguuaacgauuaccuccaaaagaucagaucgucagugacuauugaguggacgccuugcagcgucaccuguggaaacggcgugaggauccggcgccgagcccacgcagacaagaaaaaggcugaagaucugacaauggacgaucuggagguagaagccugcguuauggacagaugugcagguauuuuuaauguggucaguaacucccucggcuuagugauccugcuuguguuggcccuguucaauuga

SEQ ID NO: 4318 - RNA, 1278 nt, Artificial Sequence
  derived and/or modified CDS sequence (opt3) from Pk(SGEHIH1-im-Y09-17)__AFD97205.1__CSP
augagaaacuucauccugcucgccgugagcuccauucuucuggucgacuuguuacccacccacuuugagcauaauguugaucugucuagggcuauaaacgugaauggcguaucauucaacaauguggacacaaguagccuaggggcagcccaaguccggcaauccgcgucucgcggacgaggucucggcgaaaagccuaaagagggggaugacaaggagaaaaagaaagagaaggaaaaggaggaggaaccaaagaaacugaacgagaauaacccgaaaaagcccaaugaagagggagauggcgcuaaacuuaagcagccuaacgaggaaggugacggggccaagcugaaacagccaaaugcagagggaggcgccaaguugaaacagcccaacgcugaaggcggggcaaaugccggacaaccuaacgcugaggguggcgccaaugcggggcagccaaacgcagaaggaggcgccaacgcuggucagcccaaugccgggggagcaaacgcuggccagccuaaugccgagggcggggcgaacgccggacaaccaaaugcagaggguggcgcuaacgccgggcagccgaaugcugaaggaggcgccaacgcacgucagcccaaugccgaggguggggcuaacgcgagacagccuaaugcagaaggcggagccaacgcuggccaaccaaaugccgaagggggagcaaacgccggucagcccaaugcugaaggcggggccaacgcaggacagccuaacgcggagggcggugcuaaugccaggcaaccaaacgcagaagggggcgccaaugcuggacagcccaacgccgagggcggggcaaaugcuggacagccgaacgccgaggguggcgcgaaugcccggcagccucaagcugaagggggaggcgcaaacgcccgccagccccaggcugagggugggggcgccaaugcaagacagggaggcaacgaagggaauaagcaagcgggaaaaggccagggucagaacaaucagggggccaacgcuccaaaugagaaggugguuaacgauuaccuccagaaaaucaggucgucagugacuauugaguggacgccuugcagcgucaccuguggaaacggcgugcggauccgcagacgagcccacgcagacaagaagaaagcugaagaucugacaauggacgaucuggagguagaagccugcguuauggacaagugugcagguauuuuuaauguggucaguaacucccucggcuuagugauccugcuuguguuggcccuguucaauuga

SEQ ID NO: 4319 - RNA, 1278 nt, Artificial Sequence
  derived and/or modified CDS sequence (opt3) from Pk(SGEHIH1-im-Y09-25)__AFD97206.1__CSP
augaagaacuucauccugcucgccgugagcuccauucuucuggucgacuuguuacccacccacuuugagcauaauguugaucugucuagagcuauaaacgugaauggcguaucauucaacaauguggacacaaguagccuaggggcagcccaggucaggcaauccgcgucucggggacgcggucucggcgaaaaaccuaaggagggggaugacaaagaaaagaaaaaggagaaggaaaaagaggaggaaccaaagaaacugaacgagaauaacccgaagaaacccaaugaagagggagauggcgcuaaacuuaagcagccuaacgaggaaggugacggggccaagcugaagcagccaaaugcagagggaggcgccaaauugaagcagcccaacgcugaaggcggggcaaaugccggacaaccuaacgcugaggguggcgccaaugcggggcagccaaacgcagaaggaggcgccaacgcuggucagcccaaugccgggggagcaaacgcuggccagccuaaugccgagggcggggcgaacgccggacaaccaaaugcagaggguggcgcuaacgccgggcagccgaaugcugaaggaggcgccaacgcacgacagcccaaugccgaggguggggcuaacgcgcgucagccuaaugcagaaggcggagccaacgcuggccaaccaaaugccgaagggggagcaaacgccggucagcccaaugcugagggcggggccaacgcaggacagccuaacgcggagggcggugcuaaugccagacaaccaaacgcagaagggggcgccaaugcuggacagcccaacgccgagggcggggcaaaugcuggacagccgaacgccgaggguggcgcgaaugccaggcagccucaagcugaagggggaggcgcaaacgcccggcagccccaggcugagggugggggcgccaaugcacgccagggaggcaacgaagggaauaaacaagcgggaaagggccagggucagaacaaucagggggccaacgcuccaaaugagaaagugguuaacgauuaccuccaaaagaucagaucgucagugacuauugaguggacgccuugcagcgucaccuguggaaacggcgugaggauccggcgccgagcccacgcagacaagaaaaaggcugaagaucugacaauggacgaucuggagguagaagccugcguuauggacaaaugugcagguauuuuuaauguggucaguaacucccucggcuuagugauccugcuuguguuggcccuguucaauuga

SEQ ID NO: 4320 - RNA, 1278 nt, Artificial Sequence
  derived and/or modified CDS sequence (opt3) from Pk(SGEHIH2-im-Y09-11)__AFD97212.1__CSP
augaagaacuucauccugcucgccgugagcuccauucuucuggucgacuuguuacccacccacuuugagcauaauguugaucugucuagagcuauaaacgugaauggcguaucauucaacaauguggacacaaguagccuaggggcagcccaggucaggcaauccgcgucucggggacgcggucucggcgaaaaaccuaaggagggggaugacaaagaaaagaaaaaggagaaggaaaaagaggaggaaccaaagaaacugaacgagaauaacccgaagaaacccaaugaagagggagauggcgcuaaacuuaagcagccuaacgaggaaggugacggggccaagcugaagcagccaaaugcagagggaggcgccaaauugaagcagcccaacgcugaaggcggggcaaaugccggacaaccuaacgcugaggguggcgccaaugcggggcagccaaacgcagaaggaggcgccaacgcuggucagcccaaugccgggggagcaaacgcuggccagccuaaugccgagggcggggcgaacgccggacaaccaaaugcagaggguggcgcuaacgccgggcagccgaaugcugaaggaggcgccaacgcacgacagcccaaugccgaggguggggcuaacgcgcgucagccuaaugcagaaggcggagccaacgcuggccaaccaaaugccgaagggggagcaaacgccggucagcccaaugcugagggcggggccaacgcaggacagccuaacgcggagggcggugcuaaugccagacaaccaaacgcagaagggggcgccaaugcuggacagcccaacgccgagggcggggcaaaugcuggacagccgaacgccgaggguggcgcgaaugccaggcagccucaagcugaagggggaggcgcaaacgcccggcagccccaggcugagggugggggcgccaaugcacgccagggaggcaacgaagggaauaaacaagcgggaaagggccagggucagaacaaucagggggccaacgcuccaaaugagaaagugguuaacgauuaccuccaaaagaucagaucgucagugacuauugaguggacgccuugcagcgucaccuguggaaacggcgugaggauccggcgccgagcccacgcagacaagaaaagagcugaagaucugacaauggacgaucuggagguagaagccugcguuauggacaagugugcagguauuuuuaauguggucaguaacucccucggcuuagugauccugcuuguguuggcccuguucaauuga

SEQ ID NO: 4321 - RNA, 1278 nt, Artificial Sequence
  derived and/or modified CDS sequence (opt3) from Pk(SGEHIH2-im-Y09-18)__AFD97214.1__CSP
augaagaacuucauccugcucgccgugagcuccauucuucuggucgacuuguuacccacccacuuugagcauaauguugaucugacaagagcuauaaacgugaauggcguaucuuucaacaauguggacacuucaagucuaggggcagcccaggucaggcaaagcgcgucccggggacgcggucucggcgaaaaaccuaaggagggggaugacaaagaaaagaaaaaggagaaggaaaaagaggaggaaccaaagaaacugaacgagaauaacccgaagaaacccaaugaagagggagauggcgcuaaacuuaagcagccuaacgaggaaggugacggggccaagcugaagcagccaaaugcagagggaggcgccaaauugaagcagcccaacgcugaaggcggggcaaaugccggacaaccuaacgcugaggguggcgccaaugcggggcagccaaacgcagaaggaggcgccaacgcuggucagcccaaugccgggggagcaaacgcuggccagccuaaugccgagggcggggcgaacgccggacaaccaaaugcagaggguggcgcuaacgccgggcagccgaaugcugaaggaggcgccaacgcacgacagcccaaugccgaggguggggcuaacgcgcgucagccuaaugcagaaggcggagccaacgcuggccaaccaaaugccgaagggggagcaaacgccggucagcccaaugcugagggcggggccaacgcaggacagccuaacgcggagggcggugcuaaugccagacaaccaaacgcagaagggggcgccaaugcuggacagcccaacgccgagggcggggcaaaugcuggacagccgaacgccgaggguggcgcgaaugccaggcagccucaagcugaagggggaggcgcaaacgcccggcagccccaggcugagggugggggcgccaaugcacgccagggaggcaacgaagggaauaaacaagcgggaaagggccagggucagaacaaucagggggccaacgcuccaaaugagaaagugguuaacgauuaccuccaaaagaucagaucuucggugacgauugaguggaccccuugcucagucacauguggaaacggcgugaggauccggcgccgagcccacgcagacaagaaaaaggcugaagaucugacuauggacgaucuggagguagaagccugcguuauggacaaaugugcagguauuuuuaauguggucagcaacagucucggcuuagugauccugcuuguguuggcccuguucaauuga

SEQ ID NO: 4322 - RNA, 1278 nt, Artificial Sequence
  derived and/or modified CDS sequence (opt3) from Pk(SGEHIH2-im-Y09-3)__AFD97210.1__CSP
augaagaacuucauccugcucgccgugagcuccauucuucuggucgacuuguuacccacccacuuugagcauaauguugaucugucuagagcuauaaacgugaauggcguaucauucaacaauguggacacaaguagccuaggggcagcccaggucaggcaauccgcgucucggggacgcggucucggcgaaaaaccuaaggagggggaugacaaagaaaagaaaaaggagaaggaaaaagaggaggaaccaaagaaacugaacgagaauaacccgaagaaacccaaugaagagggagauggcgcuaaacuuaagcagccuaacgaggaaggugacggggccaagcugaagcagccaaaugcagagggaggcgccaaauugaagcagcccaacgcugaaggcggggcaaaugccggacaaccuaacgcugaggguggcgccaaugcggggcagccaaacgcagaaggaggcgccaacgcuggucagcccaaugccgggggagcaaacgcuggccagccuaaugccgagggcggggcgaacgccggacaaccaaaugcagaggguggcgcuaacgccgggcagccgaaugcugaaggaggcgccaacgcacgacagcccaaugccgaggguggggcuaacgcgcgucagccuaaugcaggcggaggcgccaacgcugggcaaccaaaugccgaaggaggugcaaacgccggccagcccaaugcugaagggggagccaacgcaggccagccuaacgcggaggguggggcuaaugccagacaaccaaacgcagagggcggagccaaugcuggccagcccaacgccgaagggggagcaaaugcuggucagccgaacgccgagggcggggcgaaugccaggcagccucaagcugagggaggcggugcaaacgcccggcagccccaggcugaagggggcggagccaaugcacgccagggcgggaacgagggaaauaaacaagcgggcaagggucaggggcagaacaaucagggagccaacgcuccaaaugaaaaagugguuaacgauuaccuccaaaagaucagaucgucagugacuauugaguggacgccuugcagcgucaccuguggcaacggugugaggauccggcgccgagcccacgcagacaagaaaaaggcugaggaucugacaguagacgaucuggaaguugaggccugcgugauggacaaaugugcaggcauuuuuaaugucgugaguaacucccucggguuagugauccugcuugucuuggcccuguucaauuga

SEQ ID NO: 4323 - RNA, 1278 nt, Artificial Sequence
  derived and/or modified CDS sequence (opt3) from Pk(SGEHIH2-im-Y09-7)__AFD97211.1__CSP
augagaaacuucauccugcucgccgugagcuccauucuucuggucgacuuguuacccacccacuuugagcauaauguugaucugucuagggcuauaaacgugaauggcguaucauucaacaauguggacacaaguagccuaggggcagcccaaguccggcaauccgcgucucgcggacgaggucucggcgaaaagccuaaagagggggaugacaaggagaaaaagaaagagaaggaaaaggaggaggaaccaaagaaacugaacgagaauaacccgaaaaagcccaaugaagagggagauggcgcuaaacuuaagcagccuaacgaggaaggugacggggccaagcugaaacagccaaaugcagagggaggcgccaaguugaaacagcccaacgcugaaggcggggcaaaugccggacaaccuaacgcugaggguggcgccaaugcggggcagccaaacgcagaaggaggcgccaacgcuggucagcccaaugccgggggagcaaacgcuggccagccuaaugccgagggcggggcgaacgccggacaaccaaaugcagaggguggcgcuaacgccgggcagccgaaugcugaaggaggcgccaacgcacgucagcccaaugccgaggguggggcuaacgcgagacagccuaaugcagaaggcggagccaacgcuggccaaccaaaugccgaagggggagcaaacgccggucagcccaaugcugaaggcggggccaacgcaggacagccuaacgcggagggcggugcuaaugccaggcaaccaaacgcagaagggggcgccaaugcuggacagcccaacgccgagggcggggcaaaugcuggacagccgaacgccgaggguggcgcgaaugcccggcagccucaagcugaagggggaggcgcaaacgcccgccagccccaggcugagggugggggcgccaaugcaagacagggaggcaacgaagggaauaagcaagcgggaaaaggccagggucagaacaaucagggggccaacgcuccaaaugagaaggugguuaacgauuaccuccagaaaaucaggucgucagugacuauugaguggacgccuugcagcgucaccuguggaaacggcgugcggauccgcagacgagcccacgcagacaagaagaaagcugaagaucugacaauggacgaucuggagguagaagccugcguuauggacaagugugcagguauuuuuaauguggucaguaacacucucggcuuagugauccugcuuguguuggcccuguucaauuga

SEQ ID NO: 4324 - RNA, 1278 nt, Artificial Sequence
  derived and/or modified CDS sequence (opt3) from Pk(UMNGC3)__AHF20628.1__CSP
augaagaacuucauccugcucgccgugagcuccauucuucuggucgacuuguuacccacccacuuugagcauaauguugaucugucuagagcuauaaacgugaauggcguaucauucaacaauguggacacaaguagccuaggggcagcccaggucaggcaauccgcgucucggggacgcggucucggcgaaaaaccuaaggagggggaugacaaagaaaagaaaaaggagaaggaaaaagaggaggaaccaaagaaacugaacgagaauaacccgaagaaacccaaugaagagggagauggcgcuaaacuugagcagccuaacgaagagggugacggggccaagcugaagcagccaaaugaagagggagauggcgcaaaguugaaacagcccaacgccgaaggcggggcuaagcucaaacaaccuaaugcagagggaggugccaacgcuggccagccaaaugccgaagggggagcgaacgcaggccagcccaacgccgaggguggggcuaaugccggacagccuaacgcaggcggcgcuaaugccgggcaaccaaacgcggagggaggugccaaugcaggccagccgaacgcugaagggggagccaaugcuggccagcccaacgccgaggguggggcaaaugccggccagccuaacgcugaaggaggcgcgaaugcacgacaaccaaacgccgaagggggagcuaaugccggucagcccaacgcagagggcggggccaaugcuggacagccuaacgccgagggcggugcaaacgcggggcaaccaaaugcugagggcggagccaacgcacgucagcccaaugccgaaggcggggcuaacgccggacagccgaaugcagaggguggcgcuaacgccgggcagccuaaugcggaaggaggcgccaacgcuagacaaccccaggcagagggugggggcgccaaugcuaggcagggaggcaacgaggggaauaagcaggccggaaaaggccaaggucagaacaaucagggggcaaacgcgccaaaugaaaaggugguuaacgacuaccugcagaagauccggucgucagugacuauugaguggacgccuugcagcgucaccuguggaaacggcgugcgcaucagaaggcgggcccacgcugauaaaaagaaagccgaagaccugacaaugggugaucucgagguagaggcaugcguuauggacaagugugcuggcguguuuaaugucgugaguaacuccuuagggcuggugauucuuuugguccuggcccuauucaauuga

SEQ ID NO: 4325 - RNA, 1275 nt, Artificial Sequence
  derived and/or modified CDS sequence (opt3) from Pk(prk-1)__ADX31295.1__CSP
augaagaacuucauccugcucgccgugagcuccauucuucuggucgacuuguuacccacccacuuugagcauaauguugaucugucuagagcuauaaacgugaauggcguaucauucaacaauguggacacaaguagccuaggggcagcccaggucaggcaauccgcgucucggggacgcggucucggcgaaaaaccuaaggagggggaugacaaagaaaagaaaaaggagaaggaaaaagaggaggaaccaaagaaacugaacgagaauaacccgaagaaacccaaugaagagggagauggcgcuaaacuuaagcagccugacgaggaaggugauggggccaagcugaagcagccaaacgaggaaggagacggcgcaaaauugaagcagcccaaugccgagggcggggcuaaacucaagcaaccuaacgcagaaggaggugccaaugcuggccagccaaacgccgaagggggagcgaaugcaggccagcccaacgccgaggguggggcuaacgccggacagccuaaugcaggcggcgcuaacgccgggcaaccaaaugcggagggaggugccaacgcaggccagccgaaugcugaagggggagccaacgcuggccagcccaaugccgaggguggggcaaacgccggccagccuaaugcugagggaggcgcgaacgcacgacaaccaaaugccgaagggggagcuaacgccggucagcccaaugcagagggcggggccaacgcuggacagccuaaugccgagggcggugcaaacgcggggcaaccaaacgcugaaggcggagccaaugcacgucagcccaacgccgagguggaacagacucaggauaauagaaugcaaaaaguugagcagaugcagacgaccgaaugcaggucgggcacaaacgcucggcagccgcaagccgaagggggaggugcaaaugcucgccagggcgggaacgagggaaauaagcaggccggcaagggucaggggcaaaacaaucagggcgcgaacgccccuaaugagaaaguggucaacgacuaccugcagaagaucagaucaagcgugacuauugaguggacccccuguaguguaacaugcggaaauggcguuaggauccggcgccgagcucacgcagauaaaaagaaagccgaagaccugaccauggaugaccucgagguggaggcuugugucauggacaagugcgccgggauuuuuaacgugguguccaauucuuuaggacuggucauccuuuugguucuggcacuauucaacuga

SEQ ID NO: 4326 - RNA, 1251 nt, Artificial Sequence
  derived and/or modified CDS sequence (opt3) from Pk(UM0018C10)__AHF20648.1__CSP
augaagaacuucauccugcucgccgugagcuccauucuucuggucgacuuguuacccacccacuuugagcauaauguugaucugucuagagcuauaaacgugaauggcguaucauucaacaauguggacacaaguagccuaggggcagcccaggucaggcaauccgcgucucggggacgcggucucggcgaaaaaccuaaggagggggaugacaaagaaaagaaaaaggagaaggaaaaagaggaggaaccaaagaaacugaacgagaauaagccgaaacagcccaacguggaaggagauggcgcuaaacuuaagcagccuaaugaggagggugacggggccaaacugaagcagccaaacgaagagggagauggcgcaaaauugaagcaacccaaugccgaaggcggggcuaaacucaagcagccuaacgcagagggaggugccaaugcuggccagccaaacgccgaagggggagcgaaugcaggccagcccaacgccgaggguggggcuaacgccggacaaccuaaugcagagggcggcgcuaacgccgggcagccaaaugcggaaggaggugccaacgcaggccagccgaaugcugaagggggagccaacgcuggccagcccaaugccgaggguggggcaaacgccggccaaccuaaugcugagggaggcgcgaacgcacgacagccaaaugccgaagggggagcuaacgcccgucagcccaaugcagaggguggcgccaacgcuagacaaccuaaugccgaagggggagcaaacgcgggccagccaaacgcugaggguggggccaaugcaggccagcccaacgccgagggaggcgcuaaugccaggcagccgcaagcagaagggggaggugcuaacgcccggcagccucaggcggagggcgggggagccaaugcucgccagggcgguaacgaagggaauaaacaagcaggcaagggacagggccagaacaaucagggggccaacgcucccaaugagaagguugugaacgacuaccugcaaaagaucagaucgucagucacuacggaguggaccccaugcagcgugacauguggaaauggcguaaggauucggcgccgagcccacgcagauaagaaaaaggcggaagaccugacuauggaugaccucgagguugaagccugcgugauggauaaaugugcugguaucuuuaacgucgugaguaauuccuuagggcuggugauucuuuugguccuggcccuauucaacuga

SEQ ID NO: 4327 - RNA, 1251 nt, Artificial Sequence
  derived and/or modified CDS sequence (opt3) from Pk(UM0018C6)__AHF20646.1__CSP
augaagaacuucauccugcucgccgugagcuccauucuucuggucgacuuguuacccacccacuuugagcauaauguugaucugucuagagcuauaaacgugaauggcguaucauucaacaauguggacacaaguagccuaggggcagcccaggucaggcaauccgcgucucggggacgcggucucggcgaaaaaccuaaggagggggaugacaaagaaaagaaaaaggagaaggaaaaagaggaggaaccaaagaaacugaacgagaauaagccgaaacagcccaacguggaaggagauggcgcuaaacuuaagcagccuaaugaggagggugacggggccaagcugaagcagccaaacgaagagggagauggcgcaaaauugaagcaacccaaugccgaaggcggggcuaaacucgagcagccuaacgcagaaggaggugccaaugcuggccagccaaacgccgaagggggagcgaaugcaggccagcccaacgccgaggguggggcuaacgccggacaaccuaaugcagagggcggcgcuaacgccgggcagccaaaugcggagggaggugccaacgcaggccagccgaaugcugaagggggagccaacgcuggccagcccaaugccgaggguggggcaaacgccggccaaccuaaugcugaaggaggcgcgaacgcacgacagccaaaugccgagggaggggcuaacgcccgucagcccaaugcagaggguggcgccaacgcuagacaaccuaaugccgaagggggagcaaacgcgggccagccaaacgcugaggguggggccaaugcaggccagcccaacgccgaaggaggcgcuaaugccaggcagccgcaagcagaagggggaggugcuaacgcccggcagccucaggcggagggcgggggagccaaugcucgccagggcgguaacgaggggaauaagcaagcaggcaaaggacagggccagaacaaucagggggccaacgcucccaaugagaagguugugaacgacuaccugcaaaagaucagaucgucagucacuacggaauggaccccaugcagcgugacauguggaaauggcguaaggauucggcgccgagcccacgcagauaaaaagaaagcggaggaccugacuauggaugaccucgaaguugaggccugcgugauggauaagugugcugguaucuuuaacgucgugaguaauuccuuagggcuggugauucuuuugguccuggcccuauucaacuga

SEQ ID NO: 4328 - RNA, 1242 nt, Artificial Sequence
  derived and/or modified CDS sequence (opt3) from Pk(SGEHIH1-im-Y09-95)__AFD97208.1__CSP
augaagaacuucauccugcucgccgugagcuccauucuucuggucgacuuguuacccacccacuuugagcauaauguugaucugucuagagcuauaaacgugaauggcguaucacuaaacaauguggacacaaguagccucggggcagcccaggucaggcaauccgcgucucggggacgcggucugggcgaaaaaccuaaggagggggaugacaaagaaaagaaaaaggagaaggaaaaagaggaggaaccaaagaaacuuaacgagaauaacccgaagaaacccaaugaagagggagauggcgcuaagcugaagcagccuaacgccgaggguggggcaaaauugaagcagccaaaugccgaaggaggcgcuaacgcaggccagcccaaugccgaagggggagcuaacgccggucaaccuaaugcggagggcggggcaaacgccggacagccaaacgcuggcggugccaaugcagggcagcccaacgcugagggaggcgccaaugcgggccagccuaacgccgaagggggagcaaaugugggucaaccaaacgcugagggcggggccaaugcucgacagccgaacgccgagggaggcgcaaaugcccgucagcccaacgcugaagguggggcgaaugcaggccagccuaacgccgagggaggcgcuaaugccgggcaaccaaacgcagaaggaggugccaaugcuggccagcccaacgccgaagggggagcaaacgcgagacagccuaaugcugagggcggugccaacgcagggcaaccaaaugccgagggcggagcuaacgccggccagcccaaugcagaagggggagcuaacgccaggcagccgcaggcggaggguggcggggccaaugcucggcaaccucaggcagagggaggcggugccaacgcucgccaagggggcaaugaaggaaacaaaagagccggcaaggggcagggacagaauaaccagggcgcaaaugcgcccaacgagaaaguugugaaugacuaccuccagaagaucaggucgucagucacuauugaauggacgccaugcagcgugaccugugguaacgggguacggauccgcagacgagcccacgcugauaaaaagaaggccgaggaccugacaauggaugaccuggagguugaagcaugcgugauggauaaaugugcuggaauuuucaacgucgugaguaauucccucggcuuagugauccugcuugucuuggcccuguuuaacuga

SEQ ID NO: 4329 - RNA, 1221 nt, Artificial Sequence
  derived and/or modified CDS sequence (opt3) from Pk(KH100)__ADN94497.1__CSP
augaagaacuucauccugcucgccgugagcuccauucuucuggucgacuuguuacccacccacuuugagcauaauguugaucugucuagagcuauaaacgugaauggcguaucauucaacaauguggacacaaguagccuaggggcagcccaggucaggcaauccgcgucucggggacgcggucucggcgaaaaaccuaaggagggggaugacaaagaaaagaaaaaggagaaggaaaaagaggaggaaccaaagaaccugaaugagaacaaaccgaagcagcccaaugcugaaggagauggcgccaaaccuaagcagccaaacgcagagggugacggggccaaacuuaagcagcccaaugcugagggagauggcgcaaagcugaaacaaccuaacgccgaaggcgacgggggaaaugcucgacagccaaacgccgagggugauggcgggaaugcgcgucagcccaacgcagaaggagacggcgguaacgccagacagccuaaugcugagggggauggaggcaacgccaggcaaccaaaugcagaaggcgacgggggaaacgcucggcagccgaaugccgagggugauggcgggaacgcgcgccagcccaaugccgagggagacggcgguaacgcaagacagccuaaugcugaaggggacggcggaaacgccaggcaaccaaaugcugagggcgaugggggaaacgcccggcagcccaaugcagaaggugacggcgggaacgcccgccagccuaaugcugagggagauggcgguaacgcgcgacaaccaaacgcagaaggggacggcgccaaugcuagacagcccaacgccgagggagauggcgcaaaugccaggcagccgcaggcugaagggggagguggcaacgcccggcaagggggaaaugagggcaacaagcaggcagguaaagggcagggccagaauaaccaaggagcgaaugcuccuaacgagaaggugguuaaugacuacuugcagaaaauccguucgucagugacuacggaauggacccccugcagcgucacauguggcaacggggugcgcauuagaaggcgggcccacgcagauaagaagaaagccgaggaccucacuauggaugaccuggaaguagaggcuugcguuauggauaagugugccggaaucuuuaauguggucaguaacucccugggccucgugauuuuacuggugcuugcauuguucaauuga

SEQ ID NO: 4330 - RNA, 1221 nt, Artificial Sequence
  derived and/or modified CDS sequence (opt3) from Pk(KH294)__ADN94542.1__CSP
augaagaacuucauccugcucgccgugagcuccauucuucuggucgacuuguuacccacccacuuugagcauaauguugaucugucuagagcuauaaacgugaauggcguaucauucaacaauguggacacaaguagccuaggggcagcccaggucaggcaauccgcgucucggggacgcggucucggcgaaaaaccuaaggagggggaugacaaagaaaagaaaaaggagaaggaaaaagaggaggaaccaaagaaccugaaugagaacaaaccgaagcagcccaaugcugaaggagauggcgccaaaccuaagcagccaaacgcagagggugacggggccaaacuuaagcagcccaaugcugagggagauggcgcaaagcugaaacaaccuaacgccgaaggcgacgggggaaaugcucgacagccaaacgccgagggugauggcgggaaugcgcgucagcccaacgcagaaggagacggcgguaacgccagacagccuaaugcugagggggauggaggcaacgccaggcaaccaaaugcagaaggcgacgggggaaacgcucggcagccgaaugccgagggugauggcgggaacgcgcgccagcccaaugccgagggagacggcgguaacgcaagacagccuaaugcugaaggggacggcggaaacgccaggcaaccaaaugcugagggcgaugggggaaacgcccggcagcccaaugcagaaggugacggcgggaacgcccgccagccuaaugcugagggagauggcgguaacgcgcgacaaccaaacgcagaaggggacggcggaaaugccagacagcccaacgcugagggcgauggggccaaugcaaggcagccgcaggccgagggagguggcgggaacgcucggcaaggaggcaaugaagguaacaagcaggccgggaaaggccagggacagaauaaccaaggcgcaaaugcgccuaacgagaaggugguuaaugacuacuugcagaaaauccguucgucagugacuacggaauggacccccugcagcgucacaugugggaacggagugcgcauuagaaggcgggcucacgccgauaagaagaaagcagaggaccucacuauggaugaccuggaaguagaggccugcguuauggauaagugugcuggcaucuuuaauguggucaguaacucccugggucucgugauuuuacuggugcuugccuuguucaauuga

SEQ ID NO: 4331 - RNA, 1218 nt, Artificial Sequence
  derived and/or modified CDS sequence (opt3) from Pk(UM0015C4)__AHF20661.1__CSP
augaagaacuucauccugcucgccgugagcuccauucuucuggucgacuuguuacccacccacuuugagcauaauguugaucugucuagagcuauaaacgugaauggcguaucauucaacaauguggacacaaguagccuaggggcagcccaggucaggcaauccgcgucucggggacgcggucucggcgaaaaaccuaaggagggggaugacaaagaaaagaaaaaggagaaggaaaaagaggaggaaccaaagaaacuggaugagaacaagccgaaacagcccaauguggaaggagacggcgcuaaacuuaagcagccuaacgaggagggugauggggccaagcugaagcagccaaaugaagagggagacggcgcaaaauugaagcaacccaacgccgaaggcggggcuaaacucaagcagccuaaugcagagggaggugccaacgcuggccagccaaaugccgaagggggagcgaacgcaggccagcccaaugccgaggguggggcuaacgccggacaaccuaacgcagagggcggcgcuaaugccgggcagccaaacgcggaaggaggugccaaugcaggccagccgaacgcugaagggggagccaaugcuggccagcccaacgccgaggguggggcaaaugcccgacaaccuaacgcugagggcggagcgaaugcacgucagccaaacgccgaaggcggggcuaaugccagacagcccaacgcagagggaggugccaaugcuggccaaccuaacgccgaagggggagcaaaugcgggccagccaaacgcugaggguggggccaacgcaaggcagccccaggccgagggcggaggcgcuaaugcccggcaaccgcaggcagaagggggaggugcuaacgcccgccagggcgggaaugagggaaacaaacaggcgggcaagggucaagggcagaauaaccagggcgccaaugcuccuaacgaaaagguugugaaugauuaccugcagaaaaucagaucgucagucacuacggaguggacccccugcagcgugacauguggaaacggcguaaggauucggcgccgagcacacgccgacaagaaaaaggcugaggaucugacuauggacgaucucgaaguugaggccugcgugauggacaaaugugcagggaucuuuagugucguguccaauucuuuaggacuggugauucuuuugguccuggcgcuauucaacuga

SEQ ID NO: 4332 - RNA, 1218 nt, Artificial Sequence
  derived and/or modified CDS sequence (opt3) from Pk(UM0015C7)__AHF20662.1__CSP
augaagaacuucauccugcucgccgugagcuccauucuucuggucgacuuguuacccacccacuuugagcauaauguugaucugucuagagcuauaaacgugaauggcguaucauucaacaauguggacacaaguagccuaggggcagcccaggucaggcaauccgcgucucggggacgcggucucggcgaaaaaccuaaggagggggaugacaaagaaaagaaaaaggagaaggaaaaagaggaggaaccaaagaaacugaacgagaauaagccgaaacagcccaacguggaaggagauggcgcuaaacuuaagcagccuaaugaggagggugacggggccaagcugaagcagccaaacgaagagggagauggcgcaaaauugaagcaacccaaugccgaaggcggggcuaaacucaagcagccuaacgcagagggaggugccaaugcuggccagccaaacgccgaagggggagcgaaugcaggccagcccaacgccgaggguggggcuaacgccggacaaccuaaugcagagggcggcgcuaacgccgggcagccaaaugcggaaggaggugccaacgcaggccagccgaaugcugaagggggagccaacgcuggccagcccaaugccgaggguggggcaaacgcccgacaaccuaaugcugagggcggagcgaacgcacgucagccaaaugccgaaggcggggcuaacgccagacagcccaaugcagagggaggugccaacgcuggccaaccuaaugccgaagggggagcaaacgcgggccagccaaacgcugaggguggggccaaugcaaggcagccccaggccgagggcggaggcgcuaacgcccggcaaccgcaggcagaagggggaggugcuaaugcccgccagggcgggaacgagggaaauaaacaggcgggcaagggucaagggcagaacaaucagggcgccaacgcuccuaaugaaaagguugugaacgacuaccugcagaaaaucagaucgucagucacuacggaguggacccccugcagcgugacauguggaaauggcguaaggauucggcgccgagcacacgccgauaagaaaaaggcugaggaccugacuauggaugaccucgaaguugaggccugcgugauggauaaaugugcagggaucuuuaacgucgugaguaauuccuuaggacuggugauucuuuugguccuggcgcuauucaacuga

SEQ ID NO: 4333 - RNA, 1218 nt, Artificial Sequence
  derived and/or modified CDS sequence (opt3) from Pk(UM009C4)__AHF20644.1__CSP
augaagaacuucauccugcucgccgugagcuccauucuucuggucgacuuguuacccacccacuuugagcauaauguugaucugucuagagcuauaaacgugaauggcguaucauucaacaauguggacacaaguagccuaggggcagcccaggucaggcaauccgcgucucggggacgcggucucggcgaaaaaccuaaggagggggaugacaaagaaaagaaaaaggagaaggaaaaagaggaggaaccaaagaaacugaacgagaauaagccgaaacagcccaacguggaaggagauggcgcuaaacuuaagcagccuaaugaggagggugacggggccaagcugaagcgaccaaacgaagagggagauggcgcaaaauugaagcagcccaaugccgaaggcggggcuaaaccuaagcaaccaaacgcagagggaggugccaaugcuggccagcccaacgccgaagggggagcgaaugcaggccagccuaacgccgaggguggggcuaacgccggacagccaaaugcagagggcggcgcuaacgccgggcaaccgaaugcggaaggaggugccaacgcaggccagcccaaugcugaagggggagccaacgcuggccagccuaaugccgaggguggggcaaacgcccgucagccaaaugcugagggcggagcgaacgcaagacaacccaaugccgaaggcggggcuaacgccaggcagccuaaugcagagggaggugccaacgcuggccagccaaaugccgaagggggagcaaacgcgggccaacccaacgcugaggguggggccaaugcacggcagccgcaggccgagggcggaggcgcuaacgcccgcagaccucaggcagaagggggaggugcuaaugccaggcaaggcgggaacgagggaaauaaacaggcgggcaagggucaggggcagaacaaucaaggcgccaacgcucccaaugaaaagguugugaacgacuaccuccagaaaauccggucgucagucacuacggaguggaccccaugcagcgugacauguggaaauggcguacgcauucgaagaagggcacacgccgauaagaaaaaggcugaggaccugacuauggaugaccuggaaguugaggccugcgugauggauaaaugugcagggaucuuuaacgucgugaguaauucccucggauuagugauucugcuugcguuggcccuguucaacuga

SEQ ID NO: 4334 - RNA, 1212 nt, Artificial Sequence
  derived and/or modified CDS sequence (opt3) from Pk(TN027)__AFG25481.1__CSP
augaagaacuucauccugcucgccgugagcuccauucuucuggucgacuuguuacccacccacuuugagcauaauguugaucugucuagagcuauaaacgugaauggcguaucauucaacaauguggacacaaguagccuaggggcagcccaggucaggcaauccgcgucucggggacgcggucucggcgaaaaaccuaaggagggggaugacaaagaaaagaaaaaggagaaggaaaaagaggaggaaccaaagaaccugaaugagaacaaaccgaagcagcccaaugcugaaggagauggcgccaaacuuaagcagccuaacgcagagggugacggggccaagcugaaacagccaaaugcugagggagauggcgcaaaguugaaacaaccccaggccgaaggcgacggggcuaacgcccgacagccucaggcggagggagauggugcaaaugcccgucaaccacaggcugaaggcgacggggccaacgcaagacagccccaggcugagggagauggcgccaaugcgaggcaaccucaggccgaaggugacggggcaaacgcucggcagccacaagccgagggagauggcgcuaacgcccgccagccgcaggcagagggcgacggggccaaugcuagacagccccaagcggaaggagacggugcaaacgccaggcagccucaggcugagggcgauggggccaaugcacggcagccacaagccgaaggagacggcgcuaacgcccgccagccccaggcagagggugggggcgcgaaugcucgacagccucaagccgaaggagauggcgcaaacgccagacaggcucaggcccagggggacggagguaaugcaaggcaaggcgggaacggaggcggugcuccagccgggggcaaugagggaaacaagcaggcgggcaaagggcagggacaaaauaaccagggugccaaugcucccaacgagaaggugguuaaugauuaccuccagaaaauccggucgucagugacuacggaauggaccccgugcagcgucacauguggcaacggggugcguauucgcagaagggcacacgccgacaagaagaaagcugaggaucugacuauggacgaucuggaaguagaggccugcguuauggacaagugugcaggaaucuuuaacguggucaguaauucccucggcuuagugauucugcuuguguuggcgcuguucaacuga

SEQ ID NO: 4335 - RNA, 1188 nt, Artificial Sequence
  derived and/or modified CDS sequence (opt3) from Pk(UM0034C7)__AHF20657.1__CSP
augagaaacuucauccugcucgccgugagcuccauucuucuggucgacuuguuacccacccacuuugagcauaauguugaucugucuagggcuauaaacgugaauggcguaucauucaacaauguggacacaaguagccuaggggcagcccagguccggcaauccgcgucucgcggacgaggucucggcgaaaagcguaaagagggggcugauaaggagaaaaagaaagaaaaggaagaggagccuaagaaaccaaacgaaaauaagcugaaacagccgaaccccgaccagccucaggcccaaggaaauggcgcaaacgccggucagccacaggcucagggggauggagcaaaugccggccaaccccaggcucagggcgacggggccaacgcgggacagccucaagcacagggugauggcgccaaugcugggcagccacaagcccagggagacggcgcaaacgcuggucagccccaggcccaaggggauggagcgaaugccggccagccucaggcacagggcgacggggcuaacgccggacaaccacaggcucagggugauggcgccaacgcagggcagccgcaagcccagggagacggcgcuaaugcgggucagccccaggcacaaggggauggcgccaacgcuggacagccucaggcccaaggcgacggggcaaaugccggacagccacaggcucagggugacggcgccaacgcagggcaaccccaggcgcagggagauggcgcuaaugccggucagccucaagcacagggggacagagccaacgcuggccagccacaggcccaaggagauggcgcaaaugugcccaggcaggggcggaacggagguggcgcuccggccgggggaaaugagggcaacaagcaggcggguaaagggcaaggccagaauaaccagggagccaaugcuccuaacgaaaagguugugaaugacuaccuucacaagauccgcucgucagucacuacggaguggacccccugcagcgugacauguggcaacgggguaagaauuaggcggaaagcacaugccggaaacaagaaagcugaggaucugacuauggacgauuuggaaguugaggccugcgugauggacaagugugcaggcaucuuuaaugucgugaguaacucccucggucuggugauucugcucgucuuagcgcuguucaauuga

SEQ ID NO: 4336 - RNA, 1185 nt, Artificial Sequence
  derived and/or modified CDS sequence (opt3) from Pk(KH225)__ADN94498.1__CSP
augaagaacuucauccugcucgccgugagcuccauucuucuggucgacuuguuacccacccacuuugagcauaauguugaucugucuagagcuauaaacgugaauggcguaucauucaacaauguggacacaaguagccuaggggcagcccaagucaggcaauccgcgucucggggacgcggucucggcgaaaaaccuaaggagggggaugacaaagaaaagaaaaaggagaaggaaaaagaggaggaaccaaagaaccugaaugagaacaaaccgaagcagcccaaugcugaaggagauggcgccaaacuuaagcagccuaacgcagagggugacggggccaagcugaaacagccaaaugcugagggagauggcggcaacgcacgacaacccaaugccgaaggggacggagguaacgcucgucagccuaaugccgagggcgaugggggaaacgcgagacagccaaacgcagaaggcgacggugggaaugccaggcagcccaacgcugagggagauggcggcaaugcccggcaaccuaacgcagaaggggacggagguaaugcucgccagccaaacgccgagggcgaugggggaaaugcgagacagccgaacgccgagggcgacggugggaaugcaaggcagcccaacgcugaaggcgacggaggcaaugcccggcaaccuaacgcugagggggauggagguaaugcccgccagccaaacgcagaaggcgacgggggaaaugcccgacagcccaacgcugagggcgauggugggaacgcgagacaaccuaaugcagaaggcgacggagccaacgcuaggcagccacaggccgagggcgggggagguaaugcacggcagggcgggaacgagggaaauaagcaagccggcaaaggucaggggcagaacaaucagggcgcuaacgcccccaaugaaaaggugguuaacgauuacuugcagaaaauccguucgucagugacuacggaguggaccccgugcagcgucacauguggaaauggcgugcgcauuagaaggcgggcacacgcggacaagaaaaaggcugaagaucucacuauggacgaucuggagguagaagccugcguuauggacaagugugcagggaucuuuaacguggucaguaauucccugggacucgugauuuuacuggugcuugccuuguucaacuga

SEQ ID NO: 4337 - RNA, 1179 nt, Artificial Sequence
  derived and/or modified CDS sequence (opt3) from Pk(UM001C7)__AHF20637.1__CSP
augaagaacuucauccugcucgccgugagcuccauucuucuggucgacuuguuacccacccacuuugagcauaauguugaucugucuagagcuauaaacgugaauggcguaucauucaacaauguggacacaaguagccuaggggcagcccaggucaggcaauccgcgucucggggacgcggucucggcgaaaaaccuaaggagggggcugauaaagaaaagaaaaaggagaagggaaaagaaaaggaggaggaaccgaaaaagccaaacgagaauaaacugaagcagcccaacgaaggccagccucaggcccaaggugacggggcaaaugccggacagccacaggcucagggcgauggcgcaaacgccgggcaaccccaggcucagggagacggugccaaugcgggccagccucaagcacagggggauggagccaacgcuggccagccacaagcccagggugacggggcaaaugcuggacagccccaggcccaaggcgauggcgcgaacgccgggcagccucaggcacagggagacggugcuaaugccggccaaccacaggcucagggggauggagccaacggcgacggugcaaacgccgggcagccgcaagcucagggcgauggagcgaaugcaggccagccccaggcccaaggggacggagcuaacgccggucagccucaggcacaaggcgacggggccaaugcuggacagccacaggcccagggcgauggugcaaacgcggggcaaccccaggcucagggcgaccgagccaaugcaggacagccucaagcccagggcgauggggcuaacgugccacgucagggaagaaaugguggcggggcccccgcaggaggcaacgaggguaauaagcaggcugggaaaggccaaggacagaacaaucagggcgccaacgcgccgaaugagaagguugugaacgacuaccuucacaaaaucaggucgucagucacuacggaauggaccccuugcagcgugacaugugggaauggaguacggauucgcagaaaggcccaugcuggcaacaaaaaggcagaggaucugacuauggacgauuuggaaguugaggccugcgugauggacaaaugugcugguaucuuuaacgucgugaguaauucccucgggcuggugauucugcucgucuuagcccuguucaacuga

SEQ ID NO: 4338 - RNA, 1140 nt, Artificial Sequence
  derived and/or modified CDS sequence (opt3) from Pk(SGEHIWM4-Y09-15)__AFD97227.1__CSP
augaagaacuucauccugcucgccgugagcuccauucuucuggucgacuuguuacccaccuacuuugagcacaauguugaucugucuagagcugugaacguaaauggcgugucauucaacagugucgacacaagcucccuaggggcagcccaggugaggcaaucugcgucgcggggacgcggucucggcgaaaaaccuaaggagggggcugauaaagaaaagaaaaaggagaaggaaaaagaggaggaaccaaagaaaccgaaugagaacaagcugaaacagccccagggaaauggcggugccgggcaggcacaaccugaaggaaacggcggcgccgggcaggcucagccagagggaaaugguggcgcagggcaggcccaacccgagggaaacggcggugcugggcaggcccagccugaaggaaauggcggcgcggggcaggcacaaccagagggaaacgguggcgccgggcaggcucagcccgaaggaaauggcggugccgggcaagcacagccugagggcaacggaggcgcugggcaggcccagccacaaggaaaugguggcgcggggcaggcccagccgcagggaaacggcggugcagggcaagcucagccccagggcaacggaggcgccgggcaggcucaaccucagggaaaugguggcgccgggcaggcacagccagaaggaaacggcggugccgggcaagcucagccccagggcaauggaggcgcggggcaagcacagccugagggaaaccgagaggccccagcucagccccagggcaaugguggggccggacaagcacagccgcagaagaacgaaggcgguaaugccggcgcucguaaggggcagggacaaaacucacagggcgccaaugcaccuaacgagaaaguugugaaugacuaucuucagaagauaagaagcagugucacuacggaauggacccccugcuccgugacaugugggaacggaguaaggauccggcgcagagcgcaugcugauaaaaagaaagccggcgaccugacuauggaugacuuggagguugaagcaugcgugauggauaagugugccgguauuuuuaaugcugucucuaacagccucgggcuggugauccugcucguguuagcccuguucaauuga

SEQ ID NO: 4339 - RNA, 1140 nt, Artificial Sequence
  derived and/or modified CDS sequence (opt3) from Pk(UM002C3)__AHF20638.1__CSP
augaagaacuucauccugcucgccgugagcuccauucuucuggucgacuuguuacccaccuacuuugagcacaauguugaucugucuagagcuauaaacgugaauggcguaucauucaacaauguggacacaaguagccuaggggcagcccaggucaggcaauccgcgucucggggacgcggucucggcgaaaaaccuaaggagggggcugauaaagaaaagaaaaaggagaaggaaaaagagaaggaggaggaaccgaaaaagccaaacgaaaauaaacugaagcagcccgagggaaacggcggugccgggccugcacagccagagggaaauggcggcgccgggcccgcucagccugaaggaaacgguggcgcagggccagcccaacccgagggaaauggcggugcugggccugcccagccagaaggaaacggcggcgcggggccggcacagcccgagggaaaugguggcgccgggccugcucagccagaaggaaacggcggugccgggcccgcacaaccugagggcaauggaggcgcugggccagcccagcccgagggaaacgguggcgcggggccggcccagccuggaggccaggugcaacauaaccgaaaggaaaugggugggcagguucagcacaaucguaaagagaugggcggacaagugcagcauaaccacaaggaaaugggcgggcagguccagcauaaucacaaagagaugggaggugcaggccccgcucaaccacaggggaacggaggcgccgguccugcucagccccaggggaauggcggagccggccaagcacagccacagaagaacgaagggggaaaugccggcgcuagaaaaggucaggggcaaaacaaucagggagcgaacgcacccaaugagaaggugguaaacgacuaucuucagaaaaucaggucgucaguuacuacggaguggaccccuugcagcgugacauguggcgaugguguccggauuaagcgcagagcccacgcugacaagaaaaaggccgaagaucugacuauggacgauuuggagguggaagcaugcgugauggacaaaugugccggcaucuuuaaugucguuaguaacucccucgggcuggugauucugcucguauuagcucuguucaauuga

SEQ ID NO: 4340 - RNA, 1128 nt, Artificial Sequence
  derived and/or modified CDS sequence (opt3) from Pk(UM0021C6)__AHF20666.1__CSP
augagaaacuucauccugcucgccgugagcuccauucuucuggucgacuuguuucccacccacuucgagcauaauguugauuuaucuagggcuauaaacgugaauggcguaucauuuaacaauguggacacaaguagccugggggcagcccagguccggcaauccgcgucucgcggacgaggucuaggcgaaaagccuaaagagggggcugauaaggagaaaaagaaagaaaagggaaaggaaaaagaggaggaaccaaagaaaccgaacgagaauaagcucaaacagcccaacgaaggccagccucaggcccaaggugacggggcaaaugccggacagccacaggcucagggcgauggcgcaaacgccgggcaaccccaggcucagggagacggugccaaugcgggccagccucaagcacagggggauggagccaacgcuggccagccacaagcccagggugacggggcaaaugcuggacagccccaggcccaaggcgauggcgcgaacgccgggcagccucaggcacagggagacggugcuaaugccggccaaccacaggcucagggggauggagccaacgcaggccagccgcaagcccagggugacggggcuaacgcgggccagccccaggcacaaggagauggcgccaauacugggcagccucaggcucaaggagacggugccaacgcaggccagccacaggcccagggggaccgugcuaaugccggacaaccccaggcacagggcgauggugcgaacgugccuagacaggggaggaauggcggaggcgcuccagccgggggaaacgaggguaauaagcaagcaggcaaggggcagggacagaacaaucagggcgccaacgcucccaaugagaaaguugugaacgacuaccugcacaagauccggucgucagucacgaccgaauggacaccgugcagcgugacuugugguaaugggguacgcauuagaaggaaagcccaugcaggcaacaagaaagcugaggaucuuaccauggacgaucuggaaguugaggccugcgugauggacaagugugcgggaaucuucaaugucgugaguaacuccuugggccucgugauucugcugguccucgccuuauuuaacuga

SEQ ID NO: 4341 - RNA, 1128 nt, Artificial Sequence
  derived and/or modified CDS sequence (opt3) from Pk(UM0050C2)__AHF20664.1__CSP
augaagaacuucauccugcucgccgugagcuccauucuucuggucgacuuguuacccacccacuuugagcauaauguugaucugucuagagcuauaaacgugaauggcguaucauucaacaauguggacacaaguagccuaggggcagcccaggucaggcaauccgcgucucggggacgcggucucggcgaaaaaccuaaggagggggcugauaaagaaaagaaaaaggagaagggaaaagaaaaggaggaggaaccgaaaaagccaaacgagaauaaacugaagcagcccaacgaaggccagccucaggcccaaggugacggggcaaaugccggacagccacaggcucagggcgauggcgcaaacgccgggcaaccccaggcucagggagacggugccaaugcgggccagccucaagcacagggggauggagccaacgcuggccagccacaagcccagggugacggggcaaaugcuggacagccccaggcccaaggcgauggcgcgaacgccgggcagccucaggcacagggagacggugcuaaugccggccaaccacaggcucagggggauggagccaacgcaggccagccgcaagcccagggugacggggcuaacgcgggccagccccaggcacaaggagauggcgccaaugcugggcagccucaggcccaaggagacggugcaaacgccggccagccacaggcucagggggaccgagccaaugcaggacaaccccaggcgcagggcgauggugcuaacgugccucgucaggggagaaauggcggaggcgccccagcagggggaaacgaggguaauaagcaagccggcaaagggcagggacagaacaaucagggcgcuaacgcccccaaugagaagguugugaacgacuaccuucacaaaaucaggucgucagucacuacggaauggaccccgugcagcgugacaugugguaaugggguacggauucgcagaaaggcacaugcuggcaacaaaaaggccgaggaucugacuauggacgauuuggaaguugaggcgugcgugauggacaaaugugccggaaucuuuaaugucgugaguaacucccucggccuggugauucugcucgucuuagcucuguucaacuga

SEQ ID NO: 4342 - RNA, 1128 nt, Artificial Sequence
  derived and/or modified CDS sequence (opt3) from Pk(UMMK569C20)__AHF20669.1__CSP
augaagaacuucauccugcucgccgugagcuccauucuucuggucgacuuguuacccacccacuuugagcauaauguugaucugucuagagcuauaaacgugaauggcguaucauucaacaauguggacacaaguagccuaggggcagcccaggucaggcaauccgcgucucggggacgcggucucggcgaaaaaccuaaggagggggcugauaaagaaaagaaaaaggagaagggaaaagaaaaggaggaggaaccgaaaaagccaaacgagaauaaacugaagcagcccaacgaaggccagccucaggcccaaggugacggggcaaaugccggacagccacaggcucagggcgauggcgcaaacgccgggcaaccccaggcucagggagacggugccaaugcgggccagccucaagcacagggggauggagccaacgcuggccagccacaagcccgaggugacggggcaaaugcuggacagccccaggcccagggcgauggcgcgaacgccgggcaaccucaggcacagggagacggugcuaaugccggccagccacaagcucagggggauggagccaacgcaggccagccgcaggcccaaggugacggggcuaacgcgggccagccccaggcacagggagauggcgccaaugcugggcaaccucaggcccagggagacggugcaaacgccggccaaccacaggcucagggggaccgugccaaugcaggacagccccaagcgcagggcgauggugcuaacgugccuagacaggggaggaauggcggaggcgccccagcagggggaaacgaggguaauaagcaggccggcaaagggcaaggacagaacaaucagggcgcuaacgcccccaaugagaagguugugaacgacuaccuucacaaaauccggucgucagucacuacggaauggaccccgugcagcgugacaugugguaaugggguacgcauuagaaggaaggcacaugcuggcaacaaaaaggccgaggaucugacuauggacgauuuggaaguugaggcgugcgugauggacaaaugugccggaaucuuuaaugucgugaguaacucccucggccuggugauucugcucgucuuagcucuguucaacuga

SEQ ID NO: 4343 - RNA, 1116 nt, Artificial Sequence
  derived and/or modified CDS sequence (opt3) from Pk(KH433)__ADN94489.1__CSP
augagaaacuucauccugcucgccgugagcuccauucuucuggucgacuuguuacccacccacuuugagcauaauguugaucugucuagggcuauaaacgugaauggcguaucauucaacaauguggacacaaguagccuaggggcagcccagguccggcaauccgcgucucgcggacgaggucucggcgaaaagcguaaagagggggcugauaaggagaaaaagaaagaaaaggaagaggagccuaagaaaccaaacgaaaauaagcugaaacagccgaaccccggacagccucaggcccaaggcgacggugcaaaugccgggcagccacaggcucagggagauggcgcaaacgccggccaaccccaggcucagggggacggagccaaugcgggucagccucaagcacagggcgauggggccaacgcuggacagccacaagcccagggcgacggugcaaaugcugggcagccccaggcccaaggagauggcgcgaacgccggccagccucaggcacagggggacggagcuaaugccggucaaccacaggcucagggcgauggggccaacgcaggacagccgcaagcccagggcgacggugcuaacgcggggcagccccaggcacaaggcgauggagccaaugcuggccagccucaggcccaaggggacggagcaaacgccggucagccacaggcucagggcgacagagccaaugcagggcaaccccaggcgcagggagauggcgcuaacgugccuaggcagggucggaaugggggcggagccccagcaggcgggaacgagggaaauaagcaagccgguaaaggccaggggcagaacaaucagggagcuaacgcccccaaugaaaagguugugaacgacuaccuucacaagauccgcucgucagucacuacggaguggaccccgugcagcgugacauguggcaaugguguaagaauuaggcggaaagcacaugcugggaacaagaaagccgaggaucugacuauggacgauuuggaaguugaggcgugcgugauggacaagugugccggcaucuuuaaugucgugaguaacucccucggacuggugauucugcucgucuuagcucuguucaacuga

SEQ ID NO: 4344 - RNA, 1116 nt, Artificial Sequence
  derived and/or modified CDS sequence (opt3) from Pk(UM0034C10)__AHF20658.1__CSP
augagaaacuucauccugcucgccgugagcuccauucuucuggucgacuuguuacccacccacuuugagcauaauguugaucugucuagggcuauaaacgugaauggcguaucauucaacaauguggacacaaguagccuaggggcagcccagguccggcaauccgcgucucgcggacgaggucucggcgaaaagcguaaagagggggcugauaaggagaaaaagaaagaaaaggaagaggagccuaagaaaccaaacgaaaauaagcugaaacagccgaaccccgaccagccucaggcccaaggagauggcgcaaaugccggucagccacaggcucagggggacggagcaaacgccggccaaccccaggcucagggcgauggggccaaugcgggacagccucaagcacagggugacggcgccaacgcugggcagccacaagcccagggagauggcgcaaaugcuggucagccccaggcccaaggggacggagcgaacgccggccagccucaggcacagggcgauggggcuaaugccggacaaccacaggcucagggugacggcgccaacgcagggcagccgcaagcccagggagauggcgcuaacgcgggucagccccaggcacaaggggacggcgccaaugcuggacagccucaggcccaaggcgacggggcaaacgccggacagccacaggcucagggugauagagccaaugcaggccaaccccaggcgcagggggacggagcuaacgugccuaggcagggccggaauggugggggcgccccagcaggaggcaacgaggggaauaagcaagccggaaaaggucagggccagaacaaucagggggcuaacgcccccaaugaaaagguugugaacgauuaccuucacaagauccgcucgucagucacuacggaguggaccccgugcagcgugacauguggaaauggcguaagaauuaggcggcgccaaaacgcagguaauaaaaaggcugaggaccugacuauggaugacuuggaagccgaggcgugcguuauggauaaaugugccgggaucuuuaacguggucaguaacucccucggccuggugauucugcucguguuagcucuguucaauuga

SEQ ID NO: 4345 - RNA, 1116 nt, Artificial Sequence
  derived and/or modified CDS sequence (opt3) from Pk(UM0034C6)__AHF20656.1__CSP
augagaaacuucauccugcucgccgugagcuccauucuucuggucgacuuguuacccacccacuuugagcauaauguugaucugucuagggcuauaaacgugaauggcguaucauucaacaauguggacacaaguagccuaggggcagcccagguccggcaauccgcgucucgcggacgaggucucggcgaaaagcguaaagagggggcugauaaggagaaaaagaaagaaaaggaagaggagccuaagaaaccaaacgaaaauaagcugaaacagccgaaccccgaccagccucaggcccaaggagauggcgcaaaugccggucagccacaggcucagggggacggagcaaacgccggccaaccccaggcucagggcgauggggccaaugcgggacagccucaagcacagggugacggcgccaacgcugggcagccacaagcccagggagauggcgcaaaugcuggucagccccaggcccaaggggacggagcgaacgccggccagccucaggcacagggcgauggggcuaaugccggacaaccacaggcucagggugacggcgccaacgcagggcagccgcaagcccagggagauggcgcuaacgcgggucagccccaggcacaaggggacggcgccaaugcuggacagccucaggcccaaggcgacggggcaaacgccggacagccacaggcucagggugauagagccaaugcaggccaaccccaggcgcagggggacggagcuaacgugccuaggcagggccggaauggugggggcgccccagcaggaggcaacgaggggaauaagcaagccggaaaaggucagggccagaacaaucagggggcuaacgcccccaaugaaaagguugugaacgauuaccuucacaagauccgcucgucagucacuacggaguggaccccgugcagcgugacauguggaaauggcguaagaauuaggcggaaagcacaugcugguaacaagaaagccgaggaccugacuauggaugacuuggaaguugaggcgugcgugauggauaagugugccgggaucuuuaaugucgugaguaacucccucggccuggugauucugcucgucuuagcucuguucaacuga

SEQ ID NO: 4346 - RNA, 1107 nt, Artificial Sequence
  derived and/or modified CDS sequence (opt3) from Pk(SGEHIWM16-Y09-85)__AFD97232.1__CSP
augaagaacuucauccugcucgccgugagcuccauucuucuggucgacuuguuacccaccuacuuugagcacaauguugaucugucuagagcuauaaacgugaauggcguaucauucaacaguguggacacaagcucccuaggggcagcccaggucaggcaaucugcgucgcggggacgcggucucggcgaaaaaccuaaggagggggcugauaaagaaaagaaaaaggagaaggaaaaagaggaggaaccaaagaaaccgaaugagaacaagcugaaacagccccagggaaauggcggugccgggcaggcacaaccugaaggaaacggcggcgccgggcaggcucagccagagggaaaugguggcgcagggcaggcccaacccgagggaaacggcggugcugggcaggcccagccugaaggaaauggcggcgcggggcaggcacaaccagagggaaacgguggcgccgggcaggcucagcccgaaggaaauggcggugccgggcaagcacagccugagggcaacggaggcgcugggcaggcccagccagaaggaaaugguggcgcggggcaagcccagccggagggaaacggcggugcagggcaggcucagccccaaggcaacggaggcgccgggcaggcucagccucagggaaaugguggcgccgggcaagcacagccacagggaaacggcggugccgggcaggcucaacccgagggcaaucgagaagcgccugcacagccacagggaaacggcggggccggacaagcucagccccagaagaaugagggcgguaacgccggggcacguaagggacagggccaaaauaaccagggugccaaugcuccgaacgaaaaagugguuaaugacuaucuucagaagaucagaucaagcgugacuacggaguggaccccuugcagugucacauguggcaacggggugaggauucggcgcagagcccaugcagauaaaaagaaagcggaagaccugacuauggaugacuuggagguagaggcuugcguuauggauaagugugccggaaucuuuaauguggucuccaacucucucggccuggugauucugcucguguuagcacuguucaauuga

SEQ ID NO: 4347 - RNA, 1107 nt, Artificial Sequence
  derived and/or modified CDS sequence (opt3) from Pk(SGEHIWM4-Y09-13)__AFD97225.1__CSP
augaagaacuucauccugcucgccgugagcuccauucuucuggucgacuuguuacccaccuacuuugagcacaauguugaucugucuagagcuauaaacgugaauggcguaucauucaacaguguggacacaagcucccuaggggcagcccaggucaggcaaucugcgucgcggggacgcggucucggcgaaaaaccuaaggagggggcugauaaagaaaagaaaaaggagaaggaaaaagaggaggaaccaaagaaaccgaaugagaacaagcugaaacagccccagggaaauggcggugccgggcaggcacaaccugaaggaaacggcggcgccgggcaggcucagccagagggaaaugguggcgcagggcaggcccaacccgagggaaacggcggugcugggcaggcccagccugaaggaaauggcggcgcggggcaggcacaaccagagggaaacgguggcgccgggcaggcucagcccgaaggaaauggcggugccgggcaagcacagccugagggcaacggaggcgcugggcaggcccagccagaaggaaaugguggcgcggggcaagcccagccggagggaaacggcggugcagggcaggcucagccccaaggcaacggaggcgccgggcaggcucagccucagggaaaugguggcgccgggcaagcacagccacagggaaacggcggugccgggcaggcucaacccgagggcaaucgagaagcgccugcacagccacagggaaacggcggggccggacaagcucagccccagaagaaugagggcgguaacgccggggcacguaagggacagggccaaaauaaccagggugccaaugcuccgaacgaaaaagugguuaaugacuaucuucagaagaucagaucaagcgugacuacggaguggaccccuugcagugucacauguggcaacggggugaggauucggcgcagagcccaugcagauaaaaagaaagcggaagaccugacuguagaugacuuggagguugaggcuugcgugauggauaagugugccggaaucuuuaaugucguguccaacucucucggccuggugauucugcucgucuuagcacuguucaauuga

SEQ ID NO: 4348 - RNA, 1104 nt, Artificial Sequence
  derived and/or modified CDS sequence (opt3) from Pk(KH58)__ADN94493.1__CSP
augaagaacuucauccugcucgccgugagcuccauucuucuggucgacuuguuacccacccacuuugagcauaauguugaucugucuagagcuauaaacaucaauggcgugucauucaacaauguagacacaaguagccuaggggcagcccaggugaggcaauccgcgucucggggacgcggucucggcgaaaaaccuaaggagggggcugauaaagaaaagaaaaaggagaaggaaaaagaggaggaaccaaagaaaccgaacgagaauaagcugaaacagcccaacgccgaaggagacggcgcaaaugcccgacagccuaacgcugagggugauggggcaaaugcccgucagccaaacgcugagggagacggcgccaaugcgagacaacccaacgcagaaggcgauggggccaaugcuaggcagccuaacgccgagggagacggugcaaacgcucggcagccaaaugccgaaggcgauggggcgaacgcccgccagcccaaugcagagggagacggcgcuaacgccagacaaccuaaugcugaaggugauggggccaacgcaaggcagccaaaugccgagggagacggcgcuaacgcgcggcagccgaaugcagagggcgauggggccaacgcucgccagcccaaugccgaaggagguggcgcaaacgcccgacaaccuaaugcugagggggacggagccaacgcaagacagccacaggcgcaaggcgacggugggaaugcuaggcagggcggaaacggcgggggagcccccgccgguggcaacgaagggaauaagcaggcaggaaagggccagggucaaaacaaucagggggcuaacgccccuaaugagaaagucgugaacgauuaccuucagaagauucggucgucaguuacuacggaauggaccccaugcagcgugacauguggcaauggaguccguauccgcagaagggcacacgcugacaaaaagaaagccgaggaucugacuauggacgauuuggagguggaagcgugcguaauggacaagugugccggcauuuuuaacguugugaguaauucccucgggcuggucauccugcucguguuagcucuguucaacuga

SEQ ID NO: 4349 - RNA, 1104 nt, Artificial Sequence
  derived and/or modified CDS sequence (opt3) from Pk(UM0029C8)__AHF20651.1__CSP
augaagaacuucauccugcucgccgugagcuccauucuucuggucgacuuguuacccacccacuuugagcauaauguugaucugucuagagcuauaaacgugaauggcguaucauucaacaauguggacacaaguagccuaggggcagcccaggucaggcaauccgcgucucggggacgcggucucggcgaaaaaccuaaggagggggcugauaaagaaaagaaaaaggagaaggaaaaagagaaggaggaggaaccgaaaaagccaaacgaaaauaaacugaagcagcccgagcagccugccgcaggagccggcggugagcagccagcugcaggggccggaggcgaacaacccgcugccggcgcagggggagagcagccugcggccggugcuggcggggaacagccagccgcaggagcucgaggcgagcagcccgccgcgggugccgggggagaacaaccugcagcuggcgcccguggcgagcagccagcugccggggcaggaggugagcagccggccgcuggcgcagggggagaacagcccgcggccggcgcugguggggagcaaccugccgcaggcggagaacagccagccgcuggcgccgggggagagcagcccgcagcgggugcuagaggcgaacaaccugccgcaggggccggaggcgagcagccagcucccgccccgaggcgggagcagccugcagcuggugccgggggcgaacagcccgcgccagccccucgcagagagcaacccgcuccaggagcaggcgccggggacggagcuagggguggcaacgccggggcaggaaagggccagggucagaauaaccagggggcgaaugugcccaacgaaaaaguugugaaugauuaccuucacaagauccggucgucagucacuacggaguggaccccuugcagcgugacauguggcaacggaguacgcauucgaagaaaaggccaugccgggaauaagaaagcugaagaccugacuauggaugacuuggagguugaggccugcgugauggauaagugugcaggaaucuuuaacgucgugaguaacucccucggccuggugauucugcucgucuuagcucuguucaauuga

SEQ ID NO: 4350 - RNA, 1104 nt, Artificial Sequence
  derived and/or modified CDS sequence (opt3) from Pk(UM0032C8)__AHF20655.1__CSP
augaagaacuucauccugcucgccgugagcuccauucuucuggucgacuuguuacccacccacuuugagcauaauguugaucugucuagagcuauaaacgugaauggcguaucauucaacaauguggacacaaguagccuaggggcagcccaggucaggcaauccgcgucucggggacgcggucucggcgaaaaaccuaaggagggggcugauaaagaaaagaaaaaggagaaggaaaaagaggaggaaccaaagaaaccgaacgagaauaagcugaaacagcccaacgccgaaggagacggcgcaaaugcccgacagccuaacgcugagggugauggggcaaaugcccgucagccaaacgcugagggagacggcgccaaugcgagacaacccaacgcagaaggcgauggggccaaugcuaggcagccuaacgccgagggagacggugcaaacgcucggcagccaaaugccgaaggcgauggggcgaacgcccgccagcccaaugcagagggaaacggcgcuaaugccagacaaccuaacgcugaaggugggggagccaaugcaaggcagccaaacgccgagggcgacggcgcuaaugcgcggcagccgaacgcagagggggauggagccaaugcucgccagcccaacgccgaagguggcggggcaaaugcccgacaaccucaggcugagggagacggcgccaacgcaagacagccacaagcgcagggugaugggggcaaugcuaggcagggaggcaacgggggaggugcccccgcaggcgggaacgaaggaaauaagcaggccggcaagggucaagggcagaacaaucagggcgcuaacgccccuaaugagaaagugguuaacgacuaccuucagaagauccggucgucagugacuacggaauggaccccaugcagcgucacauguggaaauggcgugcguauucgcagaagggcacacgcugacaaaaagaaagccgaggaucugacuauggacgauuuggagguagaagcgugcguuauggacaagugugccgggaucuuuaacguggucaguaauucccucggauucgugauucugcuggugcucgcuuuauuuaacuga

SEQ ID NO: 4351 - RNA, 1101 nt, Artificial Sequence
  derived and/or modified CDS sequence (opt3) from Pk(LT22)__ADN94538.1__CSP
augagaaacuucauccugcucgccgugagcuccauucuucuggucgacuuguuacccacccacuuugagcauaauguugaucugucuagggcuauaaacgugaauggcguaucauucaacaauguggacacaaguagccuaggggcagcccagguccggcaauccgcgucucgcggacgaggucucggcgaaaagcguaaagagggggcugauaaggagaaaaagaaagagaaggaagaggagccuaagaaaccaaacgaaaauaagcugaaacagccgaacgccgagggaggcgcaaaugccggucagcccaacgcugaagggggagcaaaugccggccagccuaacgcugagggcggggccaaugcgggacaaccaaacgcagaggguggcgccaaugcugggcagcccaacgccgaaggaggcgcaaacgcuggucagccuaaugccgaagggggagcgaacgccggccagccaaaugcagaaggcggggcuaacgccggacaacccaaugcugaggguggcgccaacgcagggcagccuaaugccgaaggaggcgcuaacgcgggucagccaaaugcagaagggggcgccaacgcuggacagccgaaugccgagggcggggcaaacgccagacaacccaaugcugaaggaggugccaacgcaggccagccuaaugcggaagggggagcuaacgccggccagccaaacgcagaggguggggccaaugcuaggcaaccccaggccgagggcggaggcgcaaacgcucggcaagggggaaaugaagguaacaagcaggccggcaaagggcagggacagaauaaccagggcgcgaaugccccuaacgagaaggugguuaaugacuaccuucagaagauccgcucgucagugacuacggaguggaccccaugcagcgucacaugugguaacggggugagaauuaggcggcgcgcucacgcagauaaaaagaaagccgaagaccugacuauggaugacuuggagguagaggcuugcguuauggauaagugugccggcaucuuuaauguggucaguaacucccucggacuggugauucugcucguguuagcacuguucaauuga

SEQ ID NO: 4352 - RNA, 1101 nt, Artificial Sequence
  derived and/or modified CDS sequence (opt3) from Pk(LT26)__ADN94539.1__CSP
augagaaacuucauccugcucgccgugagcuccauucuucuggucgacuuguuacccacccacuuugagcauaauguugaucugucuagggcuauaaacgugaauggcguaucauucaacaauguggacacaaguagccuaggggcagcccagguccggcaauccgcgucucgcggacgaggucucggcgaaaagcguaaagagggggcugauaaggagaaaaagaaagagaaggaagaggagccuaagaaaccaaacgaaaauaagcugaaacagccgaacgccgagggaggcgcaaaugccggucagcccaacgcugaagggggagcaaaugccggccagccuaacgcugagggcggggccaaugcgggacaaccaaacgcagaggguggcgccaaugcugggcagcccaacgccgaaggaggcgcaaacgcuggucagccuaaugccgaagggggagcgaacgccggccagccaaaugcagaaggcggggcuaacgccggacaacccaaugcugaggguggcgccaacgcaagacagccuaaugccgaagggggagcuaacgcgggccagccaaaugcagaggguggggccaacgcuggccagccgaaugccgagggaggcgcaaacgccgggcaacccaaugcugaaggaggugccaacgcaggccagccuaaugcggaagggggagcuaacgccggccagccaaacgcagaagguggggccaaugcuaggcaaccccaggccgagggcggaggcgcaaacgcucggcaagggggaaaugaagguaacaagcaggccggcaaagggcagggacagaauaaccagggcgcgaaugccccuaacgagaaggugguuaaugacuaccuucagaagauccgcucgucagugacuacggaguggaccccaugcagcgucacaugugguaacggggugagaauuaggcggcgcgcucacgcagauaaaaagaaagccgaagaccugacuauggaugacuuggagguagaggcuugcguuauggauaagugugccggcaucuuuaauguggucaguaacucccucggacuggugauucugcucguguuagcacuguucaauuga

SEQ ID NO: 4353 - RNA, 1101 nt, Artificial Sequence
  derived and/or modified CDS sequence (opt3) from Pk(TB013)__AFG25472.1__CSP
augagaaacuucauccugcucgccgugagcuccauucuucuggucgacuuguuacccacccacuuugagcauaauguugaucugucuagggcuauaaacgugaauggcguaucauucaacaauguggacacaaguagccuaggggcagcccagguccggcaauccgcgggacgcggucgaggccucggggaaaagcguaaagagggagcugauaaggagaaaaagaaagagaaggaagaggagccuaagaaaccaaacgaaaauaagcugaaacagccgaacgccgagggcggugcaaaugccgggcagcccaacgcugaaggaggcgcaaaugccggccagccuaacgcugaagggggagccaaugcgggucaaccaaacgcagagggcggggccaaugcuggacagcccaacgccgaaggcggugcaaacgcugggcagccuaaugccgagggaggcgcgaacgccggccagccaaaugcagaagggggagcuaacgccggucaacccaaugcugagggcggggccaacgcaggacagccuaaugccgaaggcggugcuaacgcggggcagccaaaugcagagggcggagccaacgcuagacagccgaaugccgagggcggggcaaacgccaggcaacccaaugcugaaggaggugccaacgcaggccagccuaaugcggaagggggagcuaacgccggccagccaaacgcagaagguggggccaaugcucggcaaccccaggccgagggcggaggcgcaaacgcucgccaagggggaaaugaagguaacaagcaggccggcaaagggcagggacagaauaaccagggcgcgaaugccccuaacgagaaggugguuaaugacuaccuucagaagaucagaucuucggugacuacggaguggaccccaugcucagucacaugugguaacggggugaggauucggcgccgagcucacgcagauaaaaagaaagccgaagaccugacuauggaugacuuggagguagaggcuugcguuauggauaagugugccggcaucuuuaauguggucagcaacagucucggacuggugauucugcucguguuagcacuguucaauuga

SEQ ID NO: 4354 - RNA, 1101 nt, Artificial Sequence
  derived and/or modified CDS sequence (opt3) from Pk(TB049)__AFG25474.1__CSP
augagaaacuucauccugcucgccgugagcuccauucuucuggucgacuuguuacccacccacuuugaacauaauguugaucugucuagggcuauaaacgugaauggcguaucauucaacaauguggacacaaguagccuaggggcagcccagguccggcaauccgcgucucgcggacgaggucucggcgaaaagcguaaagagggggcugauaaggagaaaaagaaagagaaggaagaggagccuaagaaaccaaacgaaaauaagcugaaacagccgaacgccgagggaggcgcaaaugccggucagcccaacgcugaagggggagcaaaugccggccagccuaacgcugagggcggggccaaugcgggacaaccaaacgcagaggguggcgccaaugcugggcagcccaacgccgaaggaggcgcaaacgcuggucagccuaaugccgaagggggagcgaacgccggccagccaaaugcagaaggcggggcuaacgccggacaacccaaugcugaggguggcgccaacgcaagacagccuaaugccgaagggggagcuaacgcgggccagccaaaugcagaggguggggccaacgcuggccagccgaaugccgagggaggcgcaaacgccaggcaacccaaugcugaagggggagccaacgcacggcagccuaaugcggaggguggcgcuaacgccgggcagccaaacgcagaaggaggcgccaaugcucgccaaccccaggccgagggugggggcgcaaacgcuagacagggaggcaaugaagggaacaagcaggccggaaaaggucaaggccagaauaaccagggggcgaaugccccuaacgagaaggugguuaaugacuaccuucagaagaucaggucgucagugacuacggaguggaccccaugcagcgucacauguggaaacggcgugcggauucgcagacgagcucacgcagauaaaaagaaagccgaagaccugacuauggaugacuuggagguagaggcuugcguuauggauaagugugccgguaucuuuaauguggucaguaacucccucgggcuggugauucugcucguguuagcacuguucaauuga

SEQ ID NO: 4355 - RNA, 1101 nt, Artificial Sequence
  derived and/or modified CDS sequence (opt3) from Pk(TN024)__AFG25479.1__CSP
augagaaacuucauccugcucgccgugagcuccauucuucuggucgacuuguuacccacccacuuugagcauaauguugaucugucuagggcuauaaacgugaauggcguaucauucaacaauguggacacaaguagccuaggggcagcccagguccggcaauccgcgucucgcggacgaggucucggcgaacguagaaaggagggggcugauaaagaaaagaaaaaggagaaagaagaggagccuaagaagccaaacgaaaauaaacugaagcagccgaacgccgagggaggcgcaaaugccggucagcccaacgcugaagggggagcaaaugccggccagccuaacgcugagggcggggccaaugcgggacaaccaaacgcagaggguggcgccaaugcugggcagcccaacgccgaaggaggcgcaaacgcuggucagccuaaugccgaagggggagcgaacgccggccagccaaaugcagaaggcggggcuaacgccggacaacccaaugcugaggguggcgccaacgcaaggcagccuaaugccgaagggggagcuaacgcgggccagccaaaugcagaggguggggccaacgcuggccagccgaaugccgagggaggcgcaaacgcccggcaacccaaugcugaagggggagccaacgcacgccagccuaaugcggaggguggcgcuaacgccgggcagccaaacgcagaaggaggcgccaaugcuagacaaccccaggccgagggugggggcgcaaacgcuaggcagggaggcaaugaagggaacaaacaggccggaaagggucaaggccagaauaaccagggggcgaaugccccuaacgagaaagugguuaaugacuaccuucagaagauccggucgucagugacuacggaguggaccccaugcagcgucacauguggaaacggcgugcgcauucgaagaagggcucacgcagauaagaaaaaggccgaagaccugacuauggaugacuuggagguagaggcuugcguuauggauaaaugugccgguaucuuuaauguggucaguaacucccucgggcuggugauucugcucguguuagcacuguucaauuga

SEQ ID NO: 4356 - RNA, 1095 nt, Artificial Sequence
  derived and/or modified CDS sequence (opt3) from Pk(KH369)__ADN94494.1__CSP
augaagaacuucauccugcucgccgugagcuccauucuucuggucgacuuguuucccacccacuucgagcauaauguugauuuaucuagagcuauaaacgugaauggcguaucauuuaacaauguggacacaaguagccugggggcagcccaggucaggcaauccgcgucucggggacgcggucuaggcgaaaaaccuaaggagggggcugauaaagaaaagaaaaaggagaaggaggaaccgaaaaagccaaacgagaauaaacucaagcagccccaggccgaaggagacggcgcaaacgcccgacagccucaagcugagggugauggggcaaaugcccgucagccacaggcugaaggagacggcgccaacgcgagacagccccaagcagagggcgauggggccaaugcuaggcagccucaggccgagggagacggugcaaacgcucggcagccacaagccgaaggcgauggggcgaaugcccgccagccccaggcagagggagacggcgcuaacgccagacaaccucaggcugaaggugauggggccaaugcaaggcagccacaggccgagggagacggcgcuaacgcgcggcaaccgcaggcagaaggcgauggggccaacgcucgccagccccaggccgagggagguggcgcaaaugcccgacaaccucaggcugagggggacggagccaacgcaagacagccacaggcgcaaggcgacggugggaaugcuaggcagggcggaaacggcgggggagcccccgccgguggcaaugaagggaacaaacaggcaggaaagggccagggucaaaauaaccagggggcuaaugccccuaacgagaaggugguuaaugauuaccugcagaaaauccggucgucagugacuacggaauggaccccaugcagcgucacauguggcaacggagugcguauucgcagaagggcacacgcugacaagaaaaaggccgaggaucuuacuauggacgaucuggaaguagaggcgugcguuauggacaaaugugccggcaucuucaauguggucaguaacuccuuggggcucgugauucugcuggugcucgcuuuauuuaauuga

SEQ ID NO: 4357 - RNA, 1095 nt, Artificial Sequence
  derived and/or modified CDS sequence (opt3) from Pk(LT48)__ADN94507.1__CSP
augaagaacuucauccugcucgccgugagcuccauucuucuggucgacuuguuacccacccacuuugagcauaauguugaucugucuagagcuauaaacaucaauggcgugucauucaacaauguagacacaaguagccuaggggcagcccaggugaggcaauccgcgucucggggacgcggucucggcgaaaaaccuaaggagggggcugauaaagaaaagaaaaaggagaaggaggaaccgaaaaagccaaacgagaauaaacugaagcagccccaggccgaaggagacggcgcaaacgcccgacagccucaagcugagggugauggggcaaaugcccgucagccacaggcugaaggagacggcgccaacgcgagacagccccaagcagagggcgauggggccaaugcuaggcagccucaggccgagggagacggugcaaacgcucggcagccacaagccgaaggcgauggggcgaaugcccgccagccccaggcagagggagacggcgcuaacgccagacaaccucaggcugaaggugauggggccaaugcaaggcagccacaggccgagggagacggcgcuaacgcgcggcaaccgcaggcagaaggcgauggggccaacgcucgccagccccaggccgagggagguggcgcaaaugcccgacaaccucaggcugagggggacggagccaacgcaagacagccacaggcgcaaggcgacggugggaaugcuaggcagggcggaaacggcgggggagcccccgccgguggcaaugaagggaacaaacaggcaggaaagggccagggucaaaauaaccagggggcuaaugccccuaacgagaaggucgugaaugauuaccuucagaaaauucggucgucaguuacuacggaauggaccccaugcagcgugacauguggcaacggaguccguauccgcagaagggcacacgcugacaagaaaaaggccgaggaucugacuauggacgauuuggaaguggaggcgugcguaauggacaaaugugccggcauuuuuaauguugugaguaacucccucgggcuggucauccugcucguguuagcucuguucaauuga

SEQ ID NO: 4358 - RNA, 1092 nt, Artificial Sequence
  derived and/or modified CDS sequence (opt3) from Pk(LT22)__ADN94522.1__CSP
augagaaacuucauccugcucgccgugagcuccauucuucuggucgacuuguuacccacccacuuugagcauaauguugaucugucuagggcuauaaacgugaauggcguaucauucaacaauguggacacaaguagccuaggggcagcccagguccggcaauccgcgucucgcggacgaggucucggcgaaaagcguaaagagggggcugauaaggagaaaaagaaagaaaaggaagaggagccuaagaaaccaaacgaaaauaagcugaaacagccggaccaggccggacccggcggugagcaggcagggccuggaggcgaacaagccggcccagggggagagcaggcuggucccagaccuggcggggagcaggcaggaccaggcggugaacaggccgggcccaggccuggaggcgagcaagcuggcccagggggagaacaggccgguccgcggcccggcggggagcaggcgggaccuggcggugaacaggcagggccaggcggagagcaagccggcccccgcccugggggagagcaggcugguccaggcggggaacaggccggacccagaccgggcggugagcaagcagggccuggcggagaacaggcuggccccaggccagggggagagcaggccgguccuggcggggaacagcccgcgccacggcccggaggcgagcaaccugccccagcaccgcgccgagagcagcccgcuccugccccagguggggaacagcccgcuccuggcgccggagcaggcgauggggccagaggaggcaacccaggugcugggaagggacagggccaaaauaaccagggugcgaaugugcccaacgagaaaguugugaaugacuaccuucacaagaucaggucgucagucacuacggaauggaccccgugcagcgugacauguggcaacgggguacggauucgucgcagacagaaugcaggaaacaagaaagccgaggaucugacuauggacgauuuggaaguugaggcuugcgugauggacaagugugccggcaucuuuaacgucgugaguaauucccucgggcuggugauucugcucgucuuagcacuguucaacuga

SEQ ID NO: 4359 - RNA, 1092 nt, Artificial Sequence
  derived and/or modified CDS sequence (opt3) from Pk(UM0020C1)__AHF20649.1__CSP
augaagaacuucauccugcucgccgugagcuccauucuucuggucgacuuguuacccacccacuuugagcauaauguugaucugucuagagcuauaaacgugaauggcguaucauucaacaauguggacacaaguagccuaggggcaucccaggucaggcaaucugccucgcggggacgcggucucggcgaaaaaccuaaggagggggcggauaaagaaaagaaaaaggagaagggaaaagaaaaggaggaggaaccgaaaaagccaaacgagaauaaacugaagcagcccaacgaaggccagccucaggcucaaggugacggggccaaugcaggacagccacaggcccagggcgauggcgcuaacgcagggcaaccccaggcccagggagacggugcuaaugccggccagccucaagcgcagggggauggagcaaacgccggccagccacaagcucagggugacggggccaaugcaggacagccccaggcucaaggcgauggcgccaacgcggggcagccucaggcccagggagacggugcaaaugcuggccaaccacaggcccagggggauggagcuaacgccggccagccgcaagcacagggugacggggccaacgcuggccagccccaggcgcaaggagauggcgcaaaugccgggcagccucaggcucaaggagaccgagccaacgcaggucagccacaggcccagggcgacggggcuaaugugccccgucaaggaagaaacggcgguggggccccugcaggcggaaaugagggcaacaagcaggcggggaaaggacagggucagaauaaccaaggcgcuaaugccccaaacgagaagguugugaaugauuaccuucacaaaaucaggucaagcgucacuacggaauggacccccugcagugugacaugugggaacggaguacggauucgcagaaggcagaaugcaggcaacaagaaagccgaggaccugacuauggaugacuuggaaguugaggcuugcgugauggauaagugugccgguaucuuuaaugucguguccaacucucucgggcuggugauucugcucgucuuagcacuguucaacuga

SEQ ID NO: 4360 - RNA, 1092 nt, Artificial Sequence
  derived and/or modified CDS sequence (opt3) from Pk(UM0020C3)__AHF20650.1__CSP
augaagaacuucauccugcucgccgugagcuccauucuucuggucgacuuguuacccacccacuuugagcauaauguugaucugucuagagcuauaaacgugaauggcguaggguucaacaauguggacacaucaagucuaggagcaagccaggucaggcaauccgccucucggggucgcggccucggggaaaaaccuaaggagggagcggauaaagaaaagaaaaaggagaagggcaaagaaaaggaggaggaaccgaaaaagccaaacgagaauaaacugaagcagcccaacgaaggucagccucaggcucaaggggacggagccaaugcaggccagccacaggcccagggcgauggggcuaacgcaggacaaccccaggcccagggugacggcgcuaaugccgggcagccucaagcgcagggagauggcgcaaacgccggucagccacaagcucagggggacggagccaaugcaggccagccccaggcucaaggcgauggggccaacgcgggacagccucaggcccagggugacggcgcaaaugcugggcaaccacaggcccagggagauggcgcuaacgccggucagccgcaagcacagggggacggcgccaacgcuggacagccccaggcgcaaggcgauggggcaaaugccggacagccucaggcucaaggugaccgagccaacgcaggccagccacaggcccagggggacggagcuaaugugccccgucaaggcagaaacggugggggcgccccugcaggaggcaaugaggggaacaagcaggcgggaaaaggucagggccagaauaaccaaggggcuaaugccccaaacgagaagguugugaaugauuaccuucacaaaaucaggucgucagucacuacggaauggacccccugcagcgugacauguggaaacggcguacggauucgcagaaaggcacaugccgguaauaaaaaggcugaggaccugacuauggaugacuuggaaguugaggccugcgugauggauaaaugugcagggaucuuuaacgucgugaguaauucccucggccuggugauucugcucgucuuagcucuguucaacuga

SEQ ID NO: 4361 - RNA, 1092 nt, Artificial Sequence
  derived and/or modified CDS sequence (opt3) from Pk(UM0021C19)__AHF20668.1__CSP
augagaaacuucauccugcucgccgugagcuccauucuucuggucgacuuguuucccacccacuucgagcauaauguugauuuaucuagggcuauaaacgugaauggcguaucauuuaacaauguggacacaaguagccugggggcagcccagguccggcaauccgcgucucgcggacgaggucuaggcgaaaagcguaaagagggggcugauaaggagaaaaagaaagaaaaggaagaggagccuaagaaaccaaacgaaaauaagcucaaacagccggaccaggccggacccggcggugagcaggcagggccuggaggcgaacaagccggcccagggggagagcaggcuggucccggcggggagcaggcaggaccuagaccaggcggugaacaggccgggcccggaggcgagcaagcuggcccuaggccagggggagaacaggccgguccgcggcccggcggggagcaggcgggaccucgcccaggcggugaacaggcagggcccggcggagagcaagccggcccugggggagagcaggcugguccaggcggggaacaggccggacccagaccgggcggugagcaagcagggccuggcggagaacaggcuggccccaggccagggggagagcaggccgguccuggcggggaacagcccgcgccacggcccggaggcgagcaaccugccccagcaccgcgccgagagcagcccgcuccugguccagggggcgaacagcccgccccuggagcuggcgccggggauggagcaagaggcgguaacccaggggccggaaagggccagggucaaaauaaccagggcgcuaaugugcccaacgagaaaguugugaaugacuaccugcacaagaucaggucgucagucacuacggaauggaccccgugcagcgugacaugugggaacggaguacggauucgucgcagacagaaugcgggcaacaagaaagcagaggaucuuacuauggacgaucuggaaguugaggccugcgugauggacaagugugcugggaucuucaacgucgugaguaauuccuugggacucgugacccugcugguccucgccuuauuuaacuga

SEQ ID NO: 4362 - RNA, 1092 nt, Artificial Sequence
  derived and/or modified CDS sequence (opt3) from Pk(UMGAC7)__AHF20617.1__CSP
augaagaacuucauccugcucgccgugagcuccauucuucuggucgacuuguuacccacccacuuugagcauaauguugaucugucuagagcuauaaacgugaauggcguaucauucaacaauguggacacaaguagccuaggggcagcccaggucaggcaauccgcgucucggggacgcggucucggcgaaaaaccuaaggagggggcugauaaagaaaagaaaaaggagaagggaaaagaaaaggaggaggaaccuaaaaagccgaacgagaauaaacugaagcagcccaacgaaggccagccucaggcccaaggugacggggcaaaugccggacagccacaggcucagggcgauggcgcaaacgccgggcaaccccaggcucagggagacggugccaaugcgggccagccucaagcacagggggauggagccaacgcuggccagccacaagcccagggugacggggcaaaugcuggacagccccaggcccaaggcgauggcgcgaacgccgggcagccucaggcacagggagacggugcuaaugccggccaaccacaggcucagggggauggagccaacgcaggccagccgcaagcccagggugacggggcuaacgcgggccagccccaggcacaaggagauggcgccaaugcugggcagccucaggcccaaggagaccgagcaaacgccggucagccacaggcucagggcgacggggccaaugugccccgucaaggaagaaacggcgguggggcaccagcgggcggaaaugagggcaacaagcaggcugggaaaggacagggucagaauaaccaaggcgccaaugcaccaaacgagaagguugugaaugauuaccuucacaaaaucaggucgucagucacuacggaauggacccccugcagcgugacaugugggaacggaguacggauucgcagaaaggcccaugcuggcaauaaaaaggccgaggaccugacuauggaugacuuggaaguugaggcaugcgugauggauaaaugugcugguaucuuuaacgucgugaguaauucccucgggcuggugauucugcucgucccggccuuauucaacuga

SEQ ID NO: 4363 - RNA, 1092 nt, Artificial Sequence
  derived and/or modified CDS sequence (opt3) from Pk(UMMK566C6)__AHF20670.1__CSP
augaagaacuucauccugcucgccgugagcuccauucuucuggucgacuuguuacccacccacuuugagcauaauguugaucugucuagagcuauaaacgugaauggcguaucauucaacaauguggacacaaguagccuaggggcagcccaggucaggcaauccgcgucucggggacgcggucucggcgaaaaaccuaaggagggggcugauaaagaaaagaaaaaggagaagggaaaagaaaaggagggcgagccuaaaaagccgaacgaaaauaaacugaagcagcccaacgagggucagccucaggcccaaggggacggagcaaaugccggccagccacaggcucagggcgauggggcaaacgccggacaaccccaggcucagggugacggcgccaaugcggggcagccucaagcacagggagauggcgccaacgcuggucagccacaagcccagggggacggagcaaaugcuggccagccccaggcccaaggcgauggggcgaacgccggacagccucaggcacagggugacggcgcuaaugccgggcaaccacaggcucagggagauggcgccaacgcaggucagccgcaagcccagggggacggcgcuaacgcgggacagccccaggcacaaggcgauggggccaaugcuggacagccucaggcccaaggugaccgagcaaacgccggccagccacaggcucagggggacggagccaaugugccccgucaaggcagaaacggugggggcgcaccagcgggaggcaaugaagggaacaagcaggcuggaaaaggucagggccagaauaaccaaggggccaaugcaccaaacgagaagguugugaaugauuaccuucacaaaaucaggucgucagucacuacggaguggacccccugcagcgugacauguggaaacggcguacggauucgcagaaaggcccaugcugguaauaaaaaggccgaagaccugacuauggaugacuuggagguugaagcaugcgugauggauaaaugugcugggaucuuuaacgucgugaguaauucccucggccuggugauucugcucgucuuagcccuguucaacuga

SEQ ID NO: 4364 - RNA, 1089 nt, Artificial Sequence
  derived and/or modified CDS sequence (opt3) from Pk(UMGAC1)__AHF20615.1__CSP
augaagaacuucauccugcucgccgugagcuccauucuucuggucgacuuguuacccacccacuuugagcauaauguugaucugucuagagcuauaaacgugaauggcguaucauucaacaauguggacacaaguagccuaggggcagcccaggucaggcaauccgcgucucggggacgcggucucggcgaaaaaccuaaggagggggcugauaaagaaaagaaaaaggagaagggaaaagaaaaggaggagccuaaaaagccgaacgaaaauaaacugaagcagcccaacgagggccagccucaggcccaaggugacggggcaaaugccggacagccacaggcucagggcgauggcgcaaacgccgggcaaccccaggcucagggagacggugccaaugcgggccagccucaagcacagggggauggagccaacgcuggccagccacaagcccagggugacggggcaaaugcuggacagccccgagcccagggcgauggcgcgaacgccgggcaaccucaggcacagggagacggugcuaaugccggccagccacaagcucagggggauggagccaacgcaggccagccgcaggcccaaggugacggggcuaacgcgggccagccccaggcacagggagauggcgccaaugcugggcaaccucaggcccagggagaccgugcaaacgccggucaaccacaggcucagggcgacggggccaaugugcccagacagggaaggaacggcgguggggcaccagcgggcggaaaugaaggcaacaagcaagcugggaaaggacagggucagaauaaccagggcgccaaugcaccaaacgagaagguugugaaugauuaccuucacaaaauccggucgucagucacuacggaguggacccccugcagcgugacaugugggaacggaguacgcauuagaaggaaggcccaugcuggcaauaaaaaggccgaagaccugacuauggaugacuuggagguugaagcaugcgugauggauaaaugugcugguaucuuuaacgucgugaguaauucccucgggcuggugauucugcucgucuuagcccuguucaacuga

SEQ ID NO: 4365 - RNA, 1086 nt, Artificial Sequence
  derived and/or modified CDS sequence (opt3) from Pk(NB032)__AFG25470.1__CSP
augaagaacuucauccugcucgccgugagcuccauucuucuggucgacuuguuucccacccacuucgagcauaauguugauuuaucuagagcuauaaacgugaauggcguaucauuuaacaauguggacacaaguagccugggggcagcccaggucaggcaauccgcgucucggggacgcggucuaggcgaaaaaccuaaggagggggcugauaaagaaaagaaaaaggagaaggaaaaagagaaggagaaagaagaggaaccaaagaaaccgaacgagaauaagcucaagcagcccgagggaaaccaggacggccgagcccagccugaagguaaucaagaugggcgugcacagccagagggaaaccaggacggcagagcccagcccgaaggcaaucaagaugggagggcucagccugagggaaaccaggacggucgggcacagccagaaggcaaucaagaugggcgcgcccagcccgagggaaaccaggacggcagagcucaaccugaggguaaucaggaugggagggcccagccagaaggaaaccaggacggccgggcgcaaccggagggcaaccgcgaagcacccgcccagccucaggggaauggaggugcuggccaggcccaaccagaggggaaccgagaagcacccgcucagccucagggaaauggcggugccgggcaggcgcaaccagagggcaacagagaggcccccgcacagccgcagggaaauggcggggcuggacaggcccaaccucagaaaaacgaagguggcaaugcuggggccaggaagggacagggccaaaacaaucagggugcaaacgcccccaaugagaaagugguuaacgauuaccugcacaagauccggucgucagugacuacggaauggaccccaugcagcgucacaugugggaauggcgugcguauucgcagaaaagcucaugcggacaagaaaaaggcagaggaccuuacuauggaugaccuggaaguagaggccugcguuauggauaagugugcuggaaucuucaacguggucaguaauuccuugggccucgugauucugcuggugcucgccuuauuuaacuga

SEQ ID NO: 4366 - RNA, 1083 nt, Artificial Sequence
  derived and/or modified CDS sequence (opt3) from Pk(UM002C4)__AHF20639.1__CSP
augaagaacuucauccugcucgccgugagcuccauucuucuggucgacuuguuacccaccuacuuugagcacaauguugaucugucuagagcuauaaacgugaauggcguaucauucaacaauguggacacaaguagccuaggggcagcccaggucaggcaauccgcgucucggggacgcggucucggcgaaaaaccuaaggagggggcugauaaagaaaagaaaaaggagaaggaaaaagagaaggaggaggaaccgaaaaagccaaacgaaaauaaacugaagcagcccgagggaaacggcggugccgggccugcacagccagagggaaauggcggcgccgggcccgcucagccugaaggaaacgguggcgcagggccagcccaacccgagggaaauggcggugcugggccugcccagccagaaggaaacggcggcgcggggccggcacagcccgagggaaaugguggcgccgggccugcucagccagaaggaaacggcggugccgggcccgcacaaccugagggcaauggaggcgcugggccagcccagcccgagggaaacgguggcgcggggccggcccagccugaaggaaacggcggugcagggcccgcucagccacaaggcaauggaggcgccgggccugcucagccccagggaaacgguggcgccgggccagcacaaccccagggaaauggcggugccgggccugcucagccacagggcaacggaggcgcggggcaagcacagccgcagaagaaugagggaggcaacgccggugcucgaaaagggcagggacaaaauaaccagggcgccaaugcacccaacgaaaaggugguuaaugacuaucuucagaaaauccguucgucagugacuacggaguggaccccuugcagcgucacaugugguaacggcgugagaauuaagaggcgggcccaugcugauaaaaagaaagccgaagaccugacuauggaugacuuggagguagaggcaugcguuauggauaagugugcggggaucuuuaauguggucaguaacucccucggacuggugauucugcucguguuagcucuguucaauuga

SEQ ID NO: 4367 - RNA, 1080 nt, Artificial Sequence
  derived and/or modified CDS sequence (opt3) from Pk(CDK162)__ADN94495.1__CSP
augagaaacuucauccugcucgccgugagcuccauucuucuggucgacuuguuacccacccacuuugagcauaauguugaucugucuagggcuauaaacgugaauggcguaucauucaacaauguggacacaaguagccuaggggcagcccagguccggcaauccgcgucucgcggacgaggucucggcgaaaagcguaaagagggggcugauaaggagaaaaagaaagaaaaggaagaggagccuaagaaaccaaacgaaaauaagcugaaacagccgaaccccgaccagccucaggcccaaggagauggcgcaaaugccggucagccacaggcucagggggacggagcaaacgccggccaaccccaggcucagggcgauggggccaaugcgggacagccucaagcacagggugacggcgccaacgcugggcagccacaagcccagggagauggcgcaaaugcuggucagccccaggcccaaggggacggagcgaacgccggccagccucaggcacagggcgauggggcuaaugccggacaaccacaggcucagggugacggcgccaacgcagggcagccgcaagcccagggagauggcgcuaacgcgggucagccccaggcacaaggggacggcgccaaugcuggacagccucaggcccaaggcgacagagcaaacgccgggcagccacaggcucagggagauggugccaaugugcccaggcaaggccggaacgggggaggcgcaccagcgggugggaaugagggcaacaagcaggcuggaaaaggccaggggcagaauaaccaaggagccaaugcaccuaacgaaaagguugugaaugacuaccuucacaagauccgcucgucagucacuacggaguggacccccugcagcgugacaugugguaacggcguaagaauuaggcggcgccagaaugccgggaacaaaaaggcugaggaucugacuauggacgauuuggaaguugaggccugcgugauggacaaaugugcaggaaucuuuaaugucgugaguaacucccucggccuggugauucugcucgucuuagcucuguucaacuga

SEQ ID NO: 4368 - RNA, 1080 nt, Artificial Sequence
  derived and/or modified CDS sequence (opt3) from Pk(KN010)__AFG25463.1__CSP
augagaaacuucauccugcucgccgugagcuccauucuucuggucgacuuguuacccacccacuuugagcauaauguugaucugucuagggcuauaaacgugaauggcguaucauucaacaauguggacacaaguagccuaggggcagcccagguccggcaauccgcgucucgcggacgaggucucggcgaaaagcguaaagagggggcugauaaggagaaaaagaaagaaaaggaagaggagccuaagaaaccaaacgaaaauaagcugaaacagccgaaccccgaccagccucaggcccaaggagauggcgcaaaugccggucagccacaggcucagggggacggagcaaacgccggccaaccccaggcucagggcgauggggccaaugcgggacagccucaagcacagggugacggcgccaacgcugggcagccacaagcccagggagauggcgcaaauacuggucagccccaggcucaaggggacggagccaacgcgggccagccucaggcccagggcgauggggcaaaugcuggacaaccacaggcccagggugacggcgcuaacgccgggcagccgcaagcacagggagauggcgccaacgcuggucagccccaggcgcaaggggacggcgcaaaugccggacagccucaggcucaaggcgacagagccaacgcagggcagccacaggcccagggagauggugcuaaugugcccaggcaaggccggaacgggggaggcgccccugcgggugggaaugagggcaacaagcaggcaggaaaaggccaggggcagaauaaccaaggagcuaaugccccaaacgaaaagguugugaaugacuaccuucacaagauccgcucgucagucacggcagaguggacccccugcagcgugacaugugguaacggcguaagaauuaggcggaaagcccaugcugggaauaagaaagccgaggaucugacuauggacgauuuggaaguugaggcaugcgugauggacaagugugcuggaaucuuuaacgucgugaguaauucccucggccuggugauucugcucgucuuagcccuguucaacuga

SEQ ID NO: 4369 - RNA, 1080 nt, Artificial Sequence
  derived and/or modified CDS sequence (opt3) from Pk(KN013)__AFG25464.1__CSP
augagaaacuucauccugcucgccgugagcuccauucuucuggucgacuuguuacccacccacuuugagcauaauguugaucugucuagggcuauaaacgugaauggcguaucauucaacaauguggacacaaguagccuaggggcagcccagguccggcaauccgcgucucgcggacgaggucucggcgaaaagcguaaagagggggcugauaaggagaaaaagaaagaaaaggaagaggagccuaagaaaccaaacgaaaauaagcugaaacagccgaaccccggacagccucaggcccaaggcgacggugcaaaugccgggcagccacaggcucagggagauggcgcaaacgccggccaaccccaggcucagggggacggagccaaugcgggucagccucaagcacagggcgauggggccaacgcuggacagccacaagcccagggcgacggugcaaaugcugggcagccccaggcccaaggagauggcgcgaacgccggccagccucaggcacagggggacggagcuaaugccggucaaccacaggcucagggcgauggggccaacgcaggacagccgcaagcccagggcgacggugcuaacgcggggcagccccaggcacaaggcgauggagccaaugcuggccagccucaggcccaaggggacagagcaaacgccggacagccacaggcucagggugacggcgccaaugugcccaggcaagggcggaacggaggcggugcgccugcagggggcaauggaggcaacaagcaggcugggaaaggacagggucagaauaaccaaggcgccaaugcaccaaacgagaagguugugaaugauuaccuucacaagauccgcucgucagucacuacggaauggacccccugcagcgugacaugugggaacggaguaagaauuaggcggaaagcccaugcuggcaauaagaaagccgaggaccugacuauggaugacuuggagguugaagcaugcgugauggauaagugugcugguaucuuuaacgucgugaguaauucccucgggcuggugauucugcucgucuuagcccuguucaacuga

SEQ ID NO: 4370 - RNA, 1080 nt, Artificial Sequence
  derived and/or modified CDS sequence (opt3) from Pk(LT57)__ADN94508.1__CSP
augaagaacuucauccugcucgccgugagcuccauucuucuggucgacuuguuucccacccacuucgagcauaauguugauuuaucuagagcuauaaacgugaauggcguaucauuuaacaauguggacacaaguagccugggggcagcccaggucaggcaauccgcgucucggggacgcggucuaggcgaaaaaccuaaggagggggcugauaaagaaaagaaaaaggagaaggaaaaagagaaggaggaggaaccgaaaaagccaaacgaaaauaaacucaagcagcccgagggaaaccaggacggccgagcccagccugaggguaaucaagaugggcgugcacagccagaaggaaaccaggacggcagagcccagcccgagggcaaucaagaugggagggcucagccugaaggaaaccaggacggucgggcacagccagagggcaaucaagaugggcgcgcccagcccgaaggaaaccaggacggcagagcucaaccugaggguaaucaggaugggagggcccagccagagggaaaccaggacggccgggcgcaaccggaaggcaaccgcgaggcacccgcccagccucaggggaauggaggugcuggccaggcccaaccagaagggaaccgagaggcacccgcucagccucagggaaauggcggugccgggcaggcgcaaccagaaggcaacagagaggcccccgcacagccgcagggaaauggcggggcuggacaggcccaaccucagaagaacgaggguggcaaugcuggggccaggaaaggacagggccaaaacaaucagggugcaaacgcccccaaugaaaaggugguuaacgauuaccugcacaaaauccggucgucagugacuacggaguggaccccaugcagcgucacaugugggaauggcgugcguauucgcagaaaggcucaugcggacaaaaagaaagcagaagaccuuacuauggaugaccuggagguagaagccugcguuauggauaagugugcuggaaucuucaacguggucaguaauuccuugggccucgugauucugcuggugcucgccuuauuuaacuga

SEQ ID NO: 4371 - RNA, 1080 nt, Artificial Sequence
  derived and/or modified CDS sequence (opt3) from Pk(NB046)__AFG25471.1__CSP
augagaaacuucauccugcucgccgugagcuccauucuucuggucgacuuguuacccacccacuuugagcauaauguugaucugucuagggcuauaaacgugaauggcguaucauucaacaauguggacacaaguagccuaggggcagcccagguccggcaauccgcgucucgcggacgaggucucggcgaaaagcguaaagagggggcugauaaggagaaaaagaaagaaaaggaagaggagccuaagaaaccaaacgaaaauaagcugaaacagccgaaccccgaccagccucaggcccaaggagauggcgcaaaugccggucagccacaggcucagggggacggagcaaacgccggccaaccccaggcucagggcgauggggccaaugcgggacagccucaagcacagggugacggcgccaacgcugggcagccacaagcccagggagauggcgcaaaugcuggucagccccaggcccaaggggacggagcgaacgccggccagccucaggcacagggcgauggggcuaaugccggacaaccacaggcucagggugacggcgccaacgcagggcagccgcaagcccagggagauggcgcuaacgcgggucagccccaggcacaaggggacggcgccaaugcuggacagccucaggcccaaggcgacagagcaaacgccgggcagccacaggcucagggagauggugccaaugugcccaggcaaggccggaacgggggaggcgcaccagcgggugggaaugagggcaacaagcaggcuggaaaaggccaggggcagaauaaccaaggagccaaugcaccuaacgaaaagguugugaaugacuaccuucacaagauccgcucgucagucacuacggaguggacccccugcagcgugacaugugguaacggcguaagaauuaggcggaaagcccaugcugggaauaagaaagccgaggaucugacuauggacgauuuggaaguugaggcaugcgugauggacaagugugcuggaaucuuuaacgucgugaguaauucccucggccuggugauucugcucgucuuagcccuguucaacuga

SEQ ID NO: 4372 - RNA, 1080 nt, Artificial Sequence
  derived and/or modified CDS sequence (opt3) from Pk(TN023)__AFG25478.1__CSP
augagaaacuucauccugcucgccgugagcuccauucuucuggucgacuuguuacccacccacuuugagcauaauguugaucugucuagggcuauaaacgugaauggcguaucauucaacaauguggacaucaguagccuaggggcagcccagguccggcaauccgcgucucgcggacgaggucucggcgaaaagcguaaagagggggcugauaaggagaaaaagaaagaaaaggaagaggagccuaagaaaccaaacgaaaauaagcugaaacagccgaaccccgaccagccucaggcccaaggagauggcgcaaaugccggucagccacaggcucagggggacggagcaaacgccggccaaccccaggcucagggcgauggggccaaugcgggacagccucaagcacagggugacggcgccaacgcugggcagccacaagcccagggagauggcgcaaaugcuggucagccccaggcccaaggggacggagcgaacgccggccagccucaggcacagggcgauggggcuaaugccggacaaccacaggcucagggugacggcgccaacgcagggcagccgcaagcccagggagauggcgcuaacgcgggucagccccaggcacaaggggacggcgccaaugcuggacagccucaggcccaaggcgacagagcaaacgccgggcagccacaggcucagggagauggugccaaugugcccaggcaaggccggaacgggggaggcgcaccagcgggugggaaugagggcaacaagcaggcuggaaaaggccaggggcagaauaaccaaggagccaaugcaccuaacgaaaagguugugaaugacuaccuucacaagauucgcucgucagucacaacugaguggacgcccugcagcgugaccugugguaacggcguaagaaucaggcggaaagcccaugcugggaauaagaaagccgaggaucugacaauggacgauuuggaaguugaggcaugcgugauggacaagugugcuggaauuuuuaacgucgugaguaauucccucggccuggugauccugcucgucuuagcccuguucaacuga

SEQ ID NO: 4373 - RNA, 1080 nt, Artificial Sequence
  derived and/or modified CDS sequence (opt3) from Pk(UM0016C2)__AHF20663.1__CSP
augaagaacuucauccugcucgccgugagcuccauucuucuggucgacuuguuacccacccacuuugagcauaauguugaucugucuagagcuauaaacgugaauggcguaucauucaacaauguggacacaaguagccuaggggcagcccaggucaggcaauccgcgucucggggacgcggucucggcgaaaaaccuaaggagggggcugauaaagaaaagaaaaaggagaaggaaaaagagaaggaggaggaaccgaaaaagccaaacgaaaauaaacugaagcagcccgagggaaaccaggacggccgagcccagccugaggguaaucaagaugggcgugcacagccagaaggaaaccaggacggcagagcccagcccgagggcaaucaagaugggagggcucagccugaaggaaaccaggacggucgggcacagccagagggcaaucaagaugggcgcgcccagcccgaaggaaaccaggacggcagagcucaaccugaggguaaucaggaugggagggcccagccagagggaaaccaggacggccgggcgcaaccggaaggcaaccgcgaggcacccgcccagccucaggggaauggaggugcuggccaggcccaaccagaagggaaccgagaggcacccgcucagccucagggaaauggcggugccgggcaggcgcaaccagaaggcaacagagaggcccccgcacagccgcagggaaauggcggggcuggacaggcccaaccucagaagaacgaggguggcaaugcuggggccaggaaaggacagggccaaaacaaucagggugcaaacgcccccaaugaaaaggugguuaacgauuaccuucagaaaauccggucgucagugacuacggaguggaccccaugcagcgucacaugugggaauggcgugcguauucgcagaagggcucacgcggacaagaaaaaggcagaagaccugacuauggaugacuuggagguagaagccugcguuauggauaaaugugcuggaaucuuuaacguggucaguaauucccucggccuggugauucugcucguguuagcccuguucaacuga

SEQ ID NO: 4374 - RNA, 1077 nt, Artificial Sequence
  derived and/or modified CDS sequence (opt3) from Pk(LT48)__ADN94519.1__CSP
augagaaacuucauccugcucgccgugagcuccauucuucuggucgacuuguuacccacccacuuugagcauaauguugaucugucuagggcuauaaacgugaauggcguaucauucaacaauguggacacaaguagccuaggggcagcccagguccggcaauccgcgucucgcggacgaggucucggcgaaaagcguaaagagggggcugauaaggagaaaaagaaagaaaaggaagaggagccuaagaaaccaaacgaaaauaagcugaaacagccgaaccccgaccagccucaggcccaaggagauggcgcaaaugccggucagccacaggcucagggggacggagcaaacgccggccaaccccaggcucagggcgauggggccaaugcgggacagccucaagcacagggugacggcgccaacgcugggcagccacaagcccagggagauggcgcaaaugcuggucagccccaggcccaaggggacggagcgaacgccggccagccucaggcacagggcgauggggcuaaugccggacaaccacaggcucagggugacggcgccaacgcagggcagccgcaagcccagggagauggcgcuaacgcgggucagccccaggcacaaggggacggcgccaaugcuggacagccucaggcccaaggcgacagagggaugcaggauaaccacaagcauaaagagaugggacagauguaccacgacaaggaagagacuggugaggugcaucagcaagaagagaugaggggcaucaauaagcaggaaaaagcacgggauaagacgauucgcguugagugcccaaaagaaaagguggucaacgacuaucuucacaaaaucagaucgucagugaccacagaguggacucccuguagcguaaccugcgggaauggaguuaggauucggcgcaaggcccacgcuggcaacaaaaaggccgaggaucugacaauggacgauuuggaaguggaggcaugugucauggacaagugcgcggguaucuuuaauguggugaguaacucccucgggcuggucauacugcucguuuuagcucuguucaauuga

SEQ ID NO: 4375 - RNA, 1077 nt, Artificial Sequence
  derived and/or modified CDS sequence (opt3) from Pk(SGEHIWM4-Y09-9)__AFD97223.1__CSP
augaagaacuucauccugcucgccgugagcuccauucuucuggucgacuuguuacccaccuacuuugagcacaauguugaucugucuagagcuauaaacgugaauggcguaucauucaacaguguggacacaagcucccuaggggcagcccaggucaggcaaucugcgucgcggggacgcggucucggcgaaaaaccuaaggagggggcugauaaagaaaagaaaaaggagaaggaaaaagaggaggaaccaaagaaaccgaaugagaacaagcugaaacagccccagggaaauggcggugccgggcaggcacaaccugaaggaaacggcggcgccgggcaggcucagccagagggaaaugguggcgcagggcaggcccaacccgagggaaacggcggugcugggcaggcccagccugaaggaaauggcggcgcggggcaggcacaaccagagggaaacgguggcgccgggcaggcucagcccgaaggaaauggcggugccgggcaagcacagccugagggcaacggaggcgcugggcaggcccagccagaaggaaaugguggcgcggggcaagcccagccggagggaaacggcggugcagggcaggcucagcccgagggcaacggaggcgccgggcaagcucagccugaaggaaaugguggcgccgggcaggcacagccagagggaaacggcggugccgggcaagcucagccccagggcaauggaggcgcggggcaggcacaaccucagaagaacgaaggaggcaaugccggugcucgaaaggggcagggacaaaacaaucagggcgccaacgcaccaaaugagaaagugguuaacgacuaucuucagaagauccguucaagcgugacuacggaauggacccccugcagugucacaugugguaauggcgugagaauuaggcggcgcgcccaugcugauaaaaagaaagccgaggaccugacuauggaugacuuggagguagaagcaugcguuauggauaagugugcggggaucuuuaacguggucuccaauucucucggacuggugauucugcucguguuagcucuguucaacuga

SEQ ID NO: 4376 - RNA, 1071 nt, Artificial Sequence
  derived and/or modified CDS sequence (opt3) from Pk(LT15)__ADN94525.1__CSP
augagaaacuucauccugcucgccgugagcuccauucuucuggucgacuuguuacccacccacuuugagcauaauguugaucugucuagggcuauaaacgugaauggcguaucauucaacaauguggacacaaguagccuaggggcagcccagguccggcaauccgcgucucgcggacgaggucucggcgaaaagcguaaagagggggcugauaaggagaaaaagaaagaaaaggaagaggagccuaagaaaccaaacgaaaauaagcugaaacagccggagcaggccgcacccggagccggcggugaacagccugcuccaggggcaggaggcgagcaacccgccccuggcgcugggggagagcagccagcccccggugcgggcggggaaagaccugcaccaggagccggcggugagcagccggcucccggggccggaggcgaacagccugcaccaggcgcugggggagagaggcccgccccuggugcgggcggggaacaaccagcccccggagcaggcggugagcagccggcuccuggggccggcggagagcagcccgcuccaggcgccgggggagaacagccugcacccggugccggcggggagcggccagcucccggagcgggcggugaacgcccugcaccaggggccggcggagagcaaccggcucccggcgccgggggagaacagccugcaccagcccccagaagggagcagccugcuccaggucccggcgccggggacggagcacggggcgguaacgcgggggcuggcaagggacaaggccagaauaaccagggggccaaugugccgaacgagaaaguugugaaugauuaccuucacaagauccgcucgucagucacuacggaauggaccccuugcagcgugacauguggaaacggcguacgaauuagaaggcggcagaaugcagguaacaagaaagccgaggaccugacuauggaugacuuggaaguugaggcuugcgugauggauaagugugccgggaucuuuaacgucgugaguaauucccucggacuggugauucugcucgucuuagcacuguucaacuga

SEQ ID NO: 4377 - RNA, 1071 nt, Artificial Sequence
  derived and/or modified CDS sequence (opt3) from Pk(LT57)__ADN94503.1__CSP
augaagaacuucauccugcucgccgugagcuccauucuucuggucgacuuguuucccacccacuucgagcauaauguugauuuaucuagagcuauaaacgugaauggcguaucauuuaacaauguggacacaaguagccugggggcagcccaggucaggcaauccgcgucucggggacgcggucuaggcgaaaaaccuaaggagggggcugauaaagaaaagaaaaaggagaaggaaaaagaggagccaaagaaaccgaacgaaaauaagcucaaacagcccgagggaaaccaggacggccgagcccagccugaagguaaucaagaugggcgugcacagccagagggaaaccaggacggcagagcccagcccgagggcaaucaagaugggagggcucagccugaaggaaaccaggacggucgggcacagccagagggcaaucaagaugggcgcgcccagcccgaaggaaaccaggacggcagagcucaaccugaggguaaucaggaugggagggcccagccagaaggaaaccaggacggccgggcgcaaccggagggcaaccgcgaggcacccgcccagccucaggggaauggaggugcuggccaggcccaaccagaagggaaccgagaggcacccgcucagccucagggaaauggcggugccgggcaggcgcaaccagaaggcaacagagaggcccccgcacagccgcagggaaauggcggggcuggacaggcccaaccucagaagaacgaagguggcaaugcuggggccaggaagggacagggccaaaacaaucagggugcaaacgcccccaaugagaaagugguuaacgauuaccugcagaagauccggucgucagugacuacggaguggaccccaugcagcgucacaugugggaauggcgugcguauucgcagaagggcucacgcggacaaaaagaaagcagaagaccuuacuauggaugaccuggagguagaagccugcguuauggauaagugugcuggaaucuucaacgccgugaguaauuccuugggccucgucauucugcuggugcucgcauuauuuaacuga

SEQ ID NO: 4378 - RNA, 1068 nt, Artificial Sequence
  derived and/or modified CDS sequence (opt3) from Pk(UMHIC2)__AHF20634.1__CSP
augaagaacuucauccugcucgccgugagcuccauucuucuggucgacuuguuacccacccacuuugagcauaauguugaucugucuagagcuauaaacgugaauggcguaucauucaacaauguggacacaaguagccuaggggcagcccaggucaggcaauccgcgucucggggacgcggucucggcgaaaaaccuaaggagggggcugauaaagaaaagaaaaaggagaaggaaaaagaggaggaaccaaagaaaccgaacgagaauaagcugaaacagcccgaaggaaaccgagaggccccuggccagccagaggguaaucgugaagcacccgggcagccugagggaaacagagaagccccaggccaacccgagggcaauagggaagcuccugggcagccagagggaaaccgggaggcaccgggucagcccgaaggcaaucgcgaggccccugggcagccagaaggaaacagagaggcucccggccaaccugaagguaauagggaggccccagggcagcccgagggaaaccgggaagcgccgggccagccugagggcaaccgcgaagcacccgggcagccagagggaaaucgagaagccccugcucaacccgaggguaacagagaggccccaggccagcccgaagggaauagggaggcuccugcacagccagaaggaaaccgggaggccccggcgcaaccccagggcaaugguggggccggccaggcacagccucaaaagaacgagggaggcaaugcuggggcccguaagggacagggucagaacaaucagggcgcuaacgccccaaaugaaaaagugguuaacgacuaccuucaaaagauccgcucgucagugacuacggaguggacccccugcagcgucacaugugggaauggagugagaauuaaaaggaaggcacacgccgauaaaaagaaagcugaagaccugacuauggaugacuuggagguagaagcgugcguuauggauaagugugcaggcaucuuuaacguggucaguaauucccucggucuggugauucugcucguguuagcccuguucaacuga

SEQ ID NO: 4379 - RNA, 1068 nt, Artificial Sequence
  derived and/or modified CDS sequence (opt3) from Pk(UMHIC6)__AHF20635.1__CSP
augaagaacuucauccugcucgccgugagcuccauucuucuggucgacuuguuacccacccacuuugaacauaauguugaucugucuagagcuauaaacgugaauggcguaucauucaacaauguggacacaaguagccuaggggcagcccaggucaggcaauccgcgucucggggacgcggucucggcgaaaaaccuaaggagggggcugauaaagaaaagaaaaaggagaaggaaaaagaggaggaaccaaagaaaccgaacgagaauaagcugaaacagcccgaaggaaaccgagaggccccuggccagccagaggguaaucgugaagcacccgggcagccugagggaaacagagaagccccaggccaacccgagggcaauagggaagcuccugggcagccagagggaaaccgggaggcaccgggucagcccgaaggcaaucgcgaggccccugggcagccagaaggaaacagagaggcucccggccaaccugaagguaauagggaggccccagggcagcccgagggaaaccgggaagcgccgggccagccugagggcaaccgcgaagcacccgggcagccagagggaaaucgagaagccccuggucaacccgagggcaacagagaggcuccagggcagcccgaaggaaauagggaggccccugcacagccagaaggcaaccgggaggcuccggcccaaccccaggguaaugggggcgcgggacaggcccagccucaaaagaacgagggcgggaaugcaggagcucguaagggucagggccagaacaaucagggggccaacgcuccaaaugaaaaagugguuaacgacuaccuucaaaagauccgcucgucagugacuacggaguggacccccugcagcgucacauguggaaauggcgugagaauuaaaaggaaggcccacgcagauaaaaagaaagccgaagaccugacuauggaugacuuggagguagaggcuugcguuauggauaagugugcggguaucuuuaacguggucaguaauucccucgggcuggugauucugcucguguuagcacuguucaacuga

SEQ ID NO: 4380 - RNA, 1068 nt, Artificial Sequence
  derived and/or modified CDS sequence (opt3) from Pk(UMJUC1)__AHF20630.1__CSP
augaagaacuucauccugcucgccgugagcuccauucuucuggucgacuuguuacccacccacuuugaacauaauguugaucugucuagagcuauaaacgugaauggcguaucacuaaacaauguggacacaaguagccucggggcagcccaggucaggcaauccgcgucucggggacgcggucugggcgaaaaaccuaaggagggggcugauaaagaaaagaaaaaggagaaggaaaaagaggaggaaccaaagaaaccgaacgagaauaaacuuaagcagcccgaaggaaaccgagaggccccuggccagccagaggguaaucgugaagcacccgggcagccugagggaaacagagaagccccaggccaacccgagggcaauagggaagcuccugggcagccagagggaaaccgggaggcaccgggucagcccgaaggcaaucgcgaggccccugggcagccagaaggaaacagagaggcucccggccaaccugaagguaauagggaggccccagggcagcccgagggaaaccgggaagcgccgggccagccugagggcaaccgcgaagcacccgggcagccagagggagaccgagaagccccugcucaacccgaggguaauagagaggccccaggccagcccgaagggaacagggaggugccugcacagccagaaggaaaucgggaggcuccggcccaaccccagggcaacgguggggcgggccaggcccagccucaaaagaaugagggaggcaacgcaggggcucguaagggacagggucagaauaaccagggcgccaaugcuccaaacgaaaaaguugugaaugauuaccugcaaaagauccgcucgucagucacuacggaguggacccccugcagcgugacaugugggaacggaguaagaauuaaaaggaaggcccacgcagacaaaaagaaagccgaagauuugacuauggacgaucucgagguugaggcuugcgugauggacaagugugcgggcaucuucaaugucgugaguaacucccugggucuggugauucucuuaguccuggcacuuuuuaauuga

SEQ ID NO: 4381 - RNA, 1062 nt, Artificial Sequence
  derived and/or modified CDS sequence (opt3) from Pk(TN026)__AFG25480.1__CSP
augaagaacuucauccugcucgccgugagcuccauucuucuggucgacuuguuacccacccacuuugagcauaauguugaucugucuagagcuauaaacgugaauggcguaucauucaacaauguggacacaaguagccuaggggcagcccaggucaggcaauccgcgucucggggacgcggucucggcgaaaaaccuaaggagggggcugauaaagaaaagaaaaaggagaaggaaaaagagaaggagaaagaagaggaaccaaagaaaccgaacgagaauaagcugaagcagcccgagcagccugccgcaggagccggcggugaacagccagcugcaggggccggaggcgagcaacccgcugccggcgcagggggagaacagccugcagccggugcuggcggggagcagccagccgcaggagcuggcggugaacagcccgccgcgggggccggaggcgagcaaccugcagcuggcgcccgaggggagcagccagcugccggagcggguggcgaacagccggccgcuggggcgggaggcgagcagcccgcagccggugcucguggggaacaaccugccgcaggcgccggaggcgagcagccagcugccggggcaagaggagaacagcccgcggcuggugccggcggggagcaaccugcagccggagcuggcggugagcagccagcccccgcaccgaggcgggaacagccugcucccggggccggcgcgggagacggcgcccgcgggggaaacgcuggugcaggcaaagggcagggacaaaauaaccagggcgccaaugugccaaacgagaagguugugaaugauuaccuucacaaaaucagaucgucagucacuacggaauggaccccuugcagcgugacaugugguaacgggguaaggauucggggcaagggacaugcuggcaauaaaaaggccgaggaccugacuauggaugacuuggaaguugaggcaugcgugauggauaaaugugcggggaucuuuaacgucgugaguaacucccucggacuggugauucugcucgucuuagcccuguucaauuga

SEQ ID NO: 4382 - RNA, 1056 nt, Artificial Sequence
  derived and/or modified CDS sequence (opt3) from Pk(F08B49-1)__AHH02601.1__CSP
augaagaacuucauccugcucgccgugagcuccauucuucuggucgacuuguuacccacccacuuugagcauaauguugaucugucuagagcuauaaacgugaauggcguaucauucaacaauguggacacaaguagccuaggggcagcccaggucaggcaauccgcgucucggggacgcggucucggcgaaaaaccuaaggagggggcugauaaagaaaagaaaaaggagaaggaaaaagagaaggaggaggaaccgaaaaagccaaacgaaaauaaacugaagcagcccgagcagccugccgcaggagccggcggugagcagccagcugcaggggccggaggcgaacaacccgcugccggcgcagggggagagcagccugcagccggugcucgaggcgaacagccagccgcaggggcuggaggcgagcagcccgccgcgggugccgggggagaacaaccugcagcuggcgccggcggggagcagccagcugccggagcggguggcgagcagccggccgcuggggcgggaggcgaacagcccgcagccggugcucguggggagcaaccugccgcaggcgccggaggcgaacagccagcugccggggcaggaggugagcagcccgcggcuggcgccagaggggaacaaccugcagccggagcuggcggugagcagccagcccccgcaccgaggcgggagcagccugcucccggggccggcgcgggagacggcgcccgcgggggaaacgcuggugcaggcaaggggcagggacaaaauaaccagggcgccaaugugccaaacgaaaaaguugugaaugauuaccuucacaagaucagaucgucagucacuacggaguggaccccuugcagcgugacaugugguaacgggguaaggauucggcgcaaaggccaugcuggaaauaagaaagccgaagaccugacuauggaugacuuggagguugaagcaugcgugauggauaagugugcgggcaucuuuaacgucgugaguaacucccucgggcuggugauucugcucgucuuagcccuguucaauuga

SEQ ID NO: 4383 - RNA, 1056 nt, Artificial Sequence
  derived and/or modified CDS sequence (opt3) from Pk(F08B69-1)__AHH02602.1__CSP
augaagaacuucauccugcucgccgugagcuccauucuucuggucgacuuguuacccacccacuuugagcauaauguugaucugucuagagcuauaaacgugaauggcguaucauucaacaauguggacacaaguagccuaggggcagcccaggucaggcaauccgcgucucggggacgcggucucggcgaaaaaccuaaggagggggcugauaaagaaaagaaaaaggagaaggaaaaagagaaggaggaggaaccgaaaaagccaaacgaaaauaaacugaagcagcccgagcagccugccgcaggagccggcggugagcagccagcugcaggggccggaggcgaacaacccgcugccggcgcagggggagagcagccugcagccggugcucgaggcgaacagccagccgcaggggcuggaggcgagcagcccgccgcgggugccgggggagaacaaccugcagcuggcgccggcggggagcagccagcugccggagcggguggcgagcagccggccgcuggggcgggaggcgaacagcccgcagccggugcucguggggagcaaccugccgcaggcgccggaggcgaacagccagcugccggggcaggaggugagcagcccgcggcuggcgccagaggggaacaaccugcagccggagcuggcggugagcagccagcccccgcaccgaggcgggagcagccugcucccggggccggcgcgggagacggcgcccgcgggggaaacgcuggugcaggcaaggggcagggacaaaauaaccagggcgccaaugugccaaacgaaaaaguugugaaugauuaccuucacaagaucagaucgucagucacuacggaguggaccccuugcagcgugacaugugguaacgggguaaggauucggcgcaaaggccaugcuggaaauaagaaagccgaagaccugacuauggaugacuuggauguugaggcaugcgugauggacaagugugcgggcaucuuuaacgucgugaguaacucccucgggcuggugauucugcucgucuuagcccuguucaauuga

SEQ ID NO: 4384 - RNA, 1056 nt, Artificial Sequence
  derived and/or modified CDS sequence (opt3) from Pk(LT51)__ADN94540.1__CSP
augaagaacuucauccugcucgccgugagcuccauucuucuggucgacuuguuacccacccacuuugagcauaauguugaucugucuagagcuauaaacgugaauggcguaucauucaacaauguggacacaaguagccuaggggcagcccaggucaggcaauccgcgucucggggacgcggucucggcgaaaaaccuaaggagggggcugauaaagaaaagaaaaaggagaaggaaaaagagaaggaggaggaacccaaaaagccgaacgaaaauaaacugaagcagcccgagcagccugccgcaggagccggcggugagcagccagcugcaggggccggaggcgaacaacccgcugccggcgcagggggagagcagccugcagccggugcuggcggggaacagccagccgcaggagcuggcggugagcagcccgccgcgggggccggaggcgaacaaccugcagcuggcgcccgaggggagcagccagcugccggagcggguggcgagcagccggccgcuggggcgggaggcgaacagcccgcagccggugcucguggggagcaaccugccgcaggcgccggaggcgaacagccagcugccggggcaggaggugagcagcccgcgccugcuccaagaagggaacaacccgccgcaggcgccgggggagagcagccggcuccugccccacggcgcgagcagccagcaccuggcgcuggugccggggacggcgcgagaggaggcaacgccggggcuggaaagggucagggccaaaauaaccagggggcaaaugugcccaacgaaaaaguugugaaugauuaccuucacaagaucaggucgucagucacuacggaguggaccccaugcagcgugacauguggaaacggcguacggauucgccgaaaaggucaugccgggaauaagaaagcugaagaccugacuauggaugacuuggagguugaagccugcgugauggauaagugugcaggcaucuuuaacgucgugaguaacucccucggacuggugauucugcucgucuuagcgcuguucaauuga

SEQ ID NO: 4385 - RNA, 1056 nt, Artificial Sequence
  derived and/or modified CDS sequence (opt3) from Pk(UM0029C9)__AHF20652.1__CSP
augaagaacuucauccugcucgccgugagcuccauucuucuggucgacuuguuacccacccacuuugagcauaauguugaucugucuagagcuauaaacgugaauggcguaucauucaacaauguggacacaaguagccuaggggcagcccaggucaggcaauccgcgucucggggacgcggucucggcgaaaaaccuaaggagggggcugauaaagaaaagaaaaaggagaaggaaaaagagaaggaggaggaaccgaaaaagccaaacgaaaauaaacugaagcagcccgagcagccugccgcaggagccggcggugagcagccagcugcaggggccggaggcgaacaacccgcugccggcgcagggggagagcagccugcagccggugcuggcggggaacagccagccgcaggagcucgaggcgagcagcccgccgcgggugccgggggagaacaaccugcagcuggcgcccguggcgagcagccagcugccggggcaggaggugagcagccggccgcuggcgccgggggagaacagcccgcagccggcgcugguggggagcaaccugccgcaggcgccagaggagaacagccagcugccggcgcagggggagagcagcccgcgccugcuccaaggcgggaacaacccgccgcgggugccggcggggagcagccggcuccugcgccccgcagagagcagccagcaccuggagcuggcgccggugacggggcgagggaaggcaacgccggagcuggcaaggggcagggacaaaauaaccagggugcaaaugugcccaacgagaaaguugugaaugauuaccuucacaagauccggucgucagucacuacggaauggaccccaugcagcgugacauguggcaacgggguacgcauucgaagaaaaggacaugccggcaauaagaaagcugaggaccugacuauggaugacuuggaaguugaggccugcgugauggauaagugugcagguaucuuuaacgucgugaguaacucccucgggcuggugauucugcucgucuuagcgcuguucaauuga

SEQ ID NO: 4386 - RNA, 1056 nt, Artificial Sequence
  derived and/or modified CDS sequence (opt3) from Pk(UM0050C7)__AHF20665.1__CSP
augaagaacuucauccugcucgccgugagcuccauucuucuggucgacuuguuacccacccacuuugagcauaauguugaucugucuagagcuauaaacgugaauggcguaucauucaacaauguggacacaaguagcccuggggcagcccaggucaggcaauccgcgucucggggacgcggucuaggcgaaaaaccaaaggagggggcugauaaagaaaagaaaaaggagaaggaaaaagagaaggaggaggaaccgaaaaagcccaacgaaaauaaacucaagcagccugagcagccagccgcaggagccggcggugagcagcccgcugcaggggccggaggcgaacaaccugcugccggcgcagggggagagcagccagcggccggugcuggcggggaacagcccgccgcaggagcucgaggcgagcagccugccgcgggugccgggggagaacaaccagcagcuggcgcccguggcgagcagccggcugccggggcaggaggugagcagcccgccgcuggcgcagggggagaacagccugcggccggcgcugguggggagcaaccagccgcaggcgccggaggcgaacagcccgcugccggggcaggaggugagcagccugcgccagcucccagaagggaacaaccggccgcaggcgccgggggagagcagccugcucccgccccacggcgcgagcagccugcacccggcgcuggugccggggacggcgcgagaggaggcaacgccggggcuggaaagggucagggccaaaauaaccagggggcaaaugugccaaacgaaaaaguugugaaugauuaccugaggaagauccggucgucagucacuacggaguggacccccugcagcgugacauguggaaacggcguacgcauucgaagaaaaggucacgccgggaauaagaaagcugaagaccuuacuauggaugaccuggagguugaagccugcgugauggauaagugugcaggcaucuuuaacgucgugaguaacuccuugggacucgugauucugcugguccucgcguuauucaauuga

SEQ ID NO: 4387 - RNA, 1056 nt, Artificial Sequence
  derived and/or modified CDS sequence (opt3) from Pk(UMHEC1)__AHF20620.1__CSP
augaagaacuucauccugcucgccgugagcuccauucuucuggucgacuuguuacccacccacuuugagcauaauguugaucugucuagagcuauaaacgugaauggcguaucauucaacaauguggacacaaguagccuaggggcagcccaggucaggcaauccgcgucucggggacgcggucucggcgaaaaaccuaaggagggggcugauaaagaaaagaaaaaggagaaggaaaaagagaaggaggaggaacccaaaaagccgaacgaaaauaaacugaagcagcccgagcagccugccgcaggagccggcggugagcagccagcugcaggggccggaggcgaacaacccgcugccggcgcagggggagagcagccugcagccggugcuggcggggaacagccagccgcaggagcuggcggugagcagcccgccgcgggggcccgaggagaacaaccugcagcuggcgccggcggggagcagccagcugccggagcggguggcgagcagccggccgcuggggcgggaggcgaacagcccgcagccggugcucguggggagcaaccugccgcaggcgccggaggcgaacagccagcugccggggcaggaggugagcagcccgcgccugcuccaagaagggaacaacccgccgcaggcgccgggggagagcagccggcuccugccccacggcgcgagcagccagcaccuggcgcuggugccggggacggcgcgagaggaggcaacgccggggcuggaaagggucagggccaaaauaaccagggggcaaaugugcccaacgaaaaaguugugaaugauuaccuucacaagaucaggucgucagucacuacggaguggaccccaugcagcgugacauguggaaacggcguacggauucgccgaaaaggucaugccgggaauaagaaagcugaagaccugacuauggaugacuuggagguugaagccugcgugauggauaagugugcaggcaucuuuaacgucgugaguaacucccucggacuggugauucugcucgucuuagcgcuguucaauuga

SEQ ID NO: 4388 - RNA, 1056 nt, Artificial Sequence
  derived and/or modified CDS sequence (opt3) from Pk(UMMAC4)__AHF20621.1__CSP
augaagaacuucauccugcucgccgugagcuccauucuucuggucgacuuguuacccacccacuuugagcauaauguugaucugucuagagcuauaaacgugaauggcguaucauucaacaauguggacacaaguagccuaggggcagcccaggucaggcaauccgcgucucggggacgcggucucggcgaaaaaccuaaggagggggcugauaaagaaaagaaaaagggaaaggagaaagaaaaggaggaggaaccgaaaaagccaaacgagaauaaacugaagcagcccgaacagccugccgcaggcgccgguggggagcagccagcugcaggagccggcggcgagcaacccgcugccggggcgggaggugaacagccugcagccggcgcugggggagagcagccagccgcaggcgcugguggggaacagcccgccgcgggagcccgaggcgagcaaccugcagcuggcgccgggggagaacagccagcugccggugcaggcggggagcagccggccgcuggagcgggcggugagcagcccgcagccggggcucguggcgaacaaccugccgcaggagccggcggggagcagccagcugccggagccgguggcgaacagcccgcgccugcuccaagaagggagcaacccgccgcaggggccggaggcgaacagccggcuccugcaccccggcgcgagcagccagcaccuggugcuggggccggcgacggagcgagaggcgggaacgccggagcugguaagggccaggggcaaaauaaccagggagcaaaugugcccaacgagaaaguugugaaugauuaccuucacaagaucaggucgucagucacuacggaauggaccccaugcagcgugacauguggcaacgguguacggauucgccgaaaagggcaugccggcaauaagaaagcugaggaccugacuauggaugacuuggaaguugaggccugcgugauggauaagugugcaggaaucuuuaacgucgugaguaacucccucggccuggugauucugcucgucuuagcgcuguucaauuga

SEQ ID NO: 4389 - RNA, 1056 nt, Artificial Sequence
  derived and/or modified CDS sequence (opt3) from Pk(UMMEC8)__AHF20623.1__CSP
augaagaacuucauccugcucgccgugagcuccauucuucuggucgacuuguuacccacccacuuugagcauaauguugaucugucuagagcuauaaacgugaauggcguaucauucaacaauguggacacaaguagccuaggggcagcccaggucaggcaauccgcgucucggggacgcggucucggcgaaaaaccuaaggagggggcugauaaagaaaagaaaaaggagaaggaaaaagagaaggaggaggaacccaaaaagccgaacgaaaauaaacugaagcagcccgagcagccugccgcaggagccggcggugagcagccagcugcaggggccggaggcgaacaacccgcugccggcgcagggggagagcagccugcagccggugcuggcggggaacagccagccgcaggagcuggcggugagcagcccgccgcgggggcccgaggagaacaaccugcagcuggcgccggcggggagcagccagcugccggagcggguggcgagcagccggccgcuggggcgggaggcgaacagcccgcagccggugcucguggggagcaaccugccgcaggcgccggaggcgaacagccagcugccggggcaggaggugagcagcccgcgccugcuccaagaagggaacaacccgccgcaggcgccgggggagagcagccggcuccugccccacggcgcgagcagccagcaccuggcgcuggugccggggacggcgcgagaggaggcaacgccggggcuggaaagggucagggccaaaauaaccagggggcaaaugugcccaacgaaaaaguugugaaugauuaccuucacaagacuaggucgucagucacgaccgaguggacaccaugcagcgugacuuguggaaacggcguacggauccgccgaaaaggucaugccgggaauaagaaagcugaagaccugaccauggaugacuuggagguugaagccugcgugauggauaagugugcaggcauuuuuaacgucgugaguaacucccucggacuggugauccugcucgucuuagcgcuguucaauuga

SEQ ID NO: 4390 - RNA, 1050 nt, Artificial Sequence
  derived and/or modified CDS sequence (opt3) from Pk(MPG45)__ACD86467.1__CSP
augaagaacuucauccugcucgccgugagcuccauucuucuggucgacuuguuacccacccacuuugagcauaauguugaucugucuagagcuauaaaccuaaauggcgugucauucaacaauguagacacaaguagccucggggcagcccaggugaggcaauccgcgucucggggacgcggucugggcgaaaaaccuaaggagggggcugauaaagaaaagaaaaaggagaaggacaaagaagaggagccaaagaaaccgaacgaaaauaaacuuaagcagcccaacgccggacagccucaggcacaaggcgauggugccaaugcugggcagccacaggcacagggagacggcgccaacgcuggccaaccccaggcccagggggauggagcgaaugcaggucagccucaagcccagggcgacggggcuaacgccggacagccacaagcacagggcgauggugcuaaugccgggcagccccaggcgcaaggagacggcgccaacgcaggccagccucaggcucagggggauggagccaaugcuggucaaccacaggcccagggcgacggggcaaacgccggacagccgcaagcucagggcgauggugcgaacgcagggcagccccaggcccaaggcgaccgagcuaaugccggacagccucaggcacaaggcgacggggccaacgucccacgucagggaagaaaugguggcggggcucccgccggaggcaacgaggguaauaagcaggcagggaagggccagggacaaaacaaucagggcgcgaacgcuccuaaugaaaaagugguuaacgauuaccugcagaagaucaggucgucagugacuacggaguggaccccaugcagcgucacaugugggaauggagugcggauucgcagaagggcccacgcagacaaaaagaaagccgaggauuugacuauggacgaucucgaaguagaggcuugcguuauggacaagugugccgguaucuuuaacguggucaguaauucccugggccuggugauucucuuagugcuggcacuuuucaacuga

SEQ ID NO: 4391 - RNA, 1044 nt, Artificial Sequence
  derived and/or modified CDS sequence (opt3) from Pk(KH462)__ADN94491.1__CSP
augagaaacuucauccugcucgccgugagcuccauucuucuggucgacuuguuacccacccacuuugaacauaauguugaucugucuagggcuauaaacgugaauggcguaucauucaacaauguggacacaaguagccuaggggcagcccagguccggcaauccgcgucucgcggacgaggucucggcgaaaagcguaaagagggggcugauaaggagaaaaagaaagaaaaggaagaggagccuaagaaaccaaacgaaaauaagcugaaacagccggagcaggccgcacccggagccggcggugaacagccugcuccaggggcaggaggcgagagacccgccccuggcgcugggggagagcaaccagcccccggugcgggcggggaacagccugcaccaggagccggcggugagcagccggcucccggggccggaggcgaacagccugcaccaggcgcugggggagagaggcccgccccuggugcgggcggggaacaaccagcccccggagcaggcggugagcggccggcuccuggggccggcggagagcagcccgcuccaggcgccgggggagaacgcccugcacccggugccggcggggagcagccagcucccggagcgggcggugaacagccugcaccaggggccggcggagagcaaccggcucccgccccuagaagggaacagccagcacccgccccuggcgcuggggacggagcccgggguggcaacgcaggggcgggaaagggccagggucaaaauaaccagggggcuaaugugccaaacgagaaaguugugaaugauuaccuucacaagauccgcucgucagucacuacggaguggacccccugcagcgugacauguggcaacggaguacgaauuagaaggaaggcccaugcagacaaaaagaaagccgaagaucugacuauggacgauuuggagguugaggcuugcgugauggacaagugugccggcaucuuuaaugucgugaguaacucccucgggcuggugauucugcucgucuuagcacuguucaacuga

SEQ ID NO: 4392 - RNA, 1044 nt, Artificial Sequence
  derived and/or modified CDS sequence (opt3) from Pk(LT3)__ADN94521.1__CSP
augagaaacuucauccugcucgccgugagcuccauucuucuggucgacuuguuacccacccacuuugagcauaauguugaucugucuagggcuauaaacgugaauggcguaucauucaacaauguggacacaaguagccuaggggcagcccagguccggcaauccgcgucucgcggacgaggucucggcgaaaagcguaaagagggggcugauaaggagaaaaagaaagaaaaggaagaggagccuaagaaaccaaacgaaaauaagcugaaacagccggagcaggccgcacccggagccggcggugaacagccugcuccaggggcaggaggcgagcaacccgccccuggcgcugggggagagagaccagcccccggugcgggcggggaacagccugcaccaggagccggcggugagcagccggcucccggggccggaggcgaaaggccugcaccaggcgcugggggagagcagcccgccccuggugcgggcggggaacaaccagcccccggagcaggcggugagcagccggcuccuggggccggcggagagcagcccgcuccaggcgccgggggagaacuuccugcacccggugccggcggggagcggccagcucccggagcgggcggugaacagccugcaccaggggccggcggagagcaaccggcucccgccccucgcagagaacagccagcacccggcccuggggccggagacggugcuaggggcgggaacgccggagcaggcaagggucaggggcaaaauaaccagggcgcgaaugugccaaacgagaaaguugugaaugauuaccugcacaagauccggucgucagucacuacggaguggacccccugcagcgugacauguggaaacggcguacgcauucgaagaaggcagaaugcugggaacaagaaagccgaagacuugacuauggaugaccucgagguugaagcaugcgugauggauaagugugccggaaucuuuaacgucgugaguaauucccugggccuggugauucucuuaguccuggcucuuuucaacuga

SEQ ID NO: 4393 - RNA, 1044 nt, Artificial Sequence
  derived and/or modified CDS sequence (opt3) from Pk(LT33)__ADN94529.1__CSP
augagaaacuucauccugcucgccgugagcuccauucuucuggucgacuuguuacccacccacuuugagcauaauguugaucugucuagggcuauaaacgugaauggcguaucauucaacaauguggacacaaguagccuaggggcagcccagguccggcaauccgcgucucgcggacgaggucucggcgaaaagcguaaagagggggcugauaaggagaaaaagaaagaaaaggaagaggagccuaagaaaccaaacgaaaauaagcugaaacagccggagcaggccgcacccggagccggcggugaacagccugcuccaggggcaggaggcgagagacccgccccuggcgcugggggagagcaaccagcccccggugcgggcggggaacagccugcaccaggagccggcggugagcagccggcucccggggccggaggcgaacagccugcaccaggcgcugggggagagaggcccgccccuggugcgggcggggaacaaccagcccccggagcaggcggugagcagccggcuccuggggccggcggagagcagcccgcuccaggcgccgggggagaacggccugcacccggugccggcggggagcagccagcucccggagcgggcggugaacgcccugcaccaggggccggcggagagcaaccggcucccgccccuagaagggaacagccagcacccggcccuggggccggagacggugcucggggcgggaacgccggagcaggcaagggucaggggcaaaauaaccagggcgcgaaugugccaaacgagaaaguugugaaugauuaccuucacaagauccgcucgucagucacuacggaguggacccccugcagcgugacauguggaaacggcguacgaauuagaaggcggcagaaugcugggaacaagaaagccgaagaccugacuauggaugacuuggagguugaagcaugcgugauggauaagugugccggaaucuuuaacgucgugaguaauucccucggccuggugauucugcucgucuuagcucuguucaacuga

SEQ ID NO: 4394 - RNA, 1044 nt, Artificial Sequence
  derived and/or modified CDS sequence (opt3) from Pk(LT33)__ADN94527.1__CSP
augaagaacuucauccugcucgccgugagcuccauucuucuggucgacuuguuacccacccacuuugagcauaauguugaucugucuagagcuauaaacgugaauggcguaucauucaacaauguggacacaaguagccuaggggcagcccaggucaggcaauccgcgucucggggacgcggucucggcgaaaaacgaaaggagggggcugauaaagaaaagaaaaaggagaaggaagaggagccuaaaaagccaaacgaaaauaaacugaagcagccggagcaggccgcacccggagccggcggugaacagccugcuccaggggcaggaggcgagcgucccgccccuggcgcugggggagagcaaccagcccccggugcgggcggggaacagccugcaccaggagccggcggugagcagccggcucccggggccggaggcgaacagccugcaccaggcgcugggggagagagacccgccccuggugcgggcggggaacaaccagcccccggagcaggcggugagcagccggcuccuggggccggcggagagcagcccgcuccaggcgccgggggagaaaggccugcacccggugccggcggggagcagccagcucccggagcgggcggugaacggccugcaccaggggccggcggagagcaaccggcucccgccccucgcagagaacagccagcacccggcccuggggccggagacggugcuaggggcgggaacgccggagcaggcaaaggucaggggcaaaauaaccagggcgcgaaugugccaaacgagaagguugugaaugauuaccuucacaagauccggucgucagucacuacggaguggacccccugcagcgugacauguggaaacggcguacgcauucgaagaaggcagaaugcugggaacaaaaaggccgaagaccugacuauggaugacuuggagguugaagcaugcgugauggauaaaugugccggaaucuuuaacgucgugaguaauucccucggccuggugauucugcucgucuuagcucuguucaacuga

SEQ ID NO: 4395 - RNA, 1044 nt, Artificial Sequence
  derived and/or modified CDS sequence (opt3) from Pk(TN029)__AFG25482.1__CSP
augagaaacuucauccugcucgccgugagcuccauucuucuggucgacuuguuacccacccacuuugagcauaauguugaucugucuagggcuauaaacgugaauggcguaucauucaacaauguggacacaaguagccuaggggcagcccagguccggcaauccgcgucucgcggacgaggucucggcgaaaagcguaaagagggggcugauaaggagaaaaagaaagaaaaggaagaggagccuaagaaaccaaacgaaaauaagcugaaacagccggagcaggccgcacccggagccggcggugaacagccugcuccaggggcaggaggcgagcaacccgccccuggcgcugggggagagagaccagcccccggugcgggcggggaacagccugcaccaggagccggcggugagcagccggcucccggggccggaggcgaaaggccugcaccaggcgcugggggagagcagcccgccccuggugcgggcggggaacaaccagcccccggagcaggcggugagcagccggcuccuggggccggcggagagcagcccgcuccaggcgccgggggagaacggccugcacccggugccggcggggagcgcccagcucccggagcgggcggugaacagccugcaccaggggccggcggagagcaaccggcucccgccccuagaagggaacagccagcacccggcccuggggccggagacggugcucggggcgggaacgccggagcaggcaagggucaggggcaaaauaaccagggcgcgaaugugccaaacgagaaaguugugaaugauuaccuucacaagauccgcucgucagucacuacggaguggacccccugcagcgugacauguggaaacggcguacgaauuagaaggcggcagaaugcugggaacaagaaagccgaagaccugacuauggaugacuuggagguugaagcaugcgugauggauaagugugccggaaucuuuaacgucgugaguaauucccucggccuggugauucugcucgucuuagcucuguucaacuga

SEQ ID NO: 4396 - RNA, 1041 nt, Artificial Sequence
  derived and/or modified CDS sequence (opt3) from Pk(LT53)__ADN94501.1__CSP
augaagaacuucauccugcucgccgugagcuccauucuucuggucgacuuguuacccacccacuuugagcauaauguugaucugucuagagcuauaaacgugaauggcguaucauucaacaauguggacacaaguagccuaggggcagcccaggucaggcaauccgcgucucggggacgcggucucggcgaaaaaccuaaggagggggaugacaaagaaaagaaaaaggagaaggaaaaagaggaggaaccaaagaaccugaaugagaacaaaccgaagcagcccaaugcugaaggagauggcgccaaaccuaagcagccaaacgcagagggugacggggccaaacuuaaacagcccaaugcugagggagauggcgcaaagcugaaacaaccuaacgccgaaggcgacgggggaaaugcucgacagccaaacgccgagggugauggcgggaaugcgcgucagcccaacgcagaaggagacggcgguaacgccagacagccuaaugcugagggggauggaggcaacgccaggcaaccaaaugcagaaggcgacgggggaaacgcucggcagccgaaugccgagggugauggcgggaacgcgcgccagcccaaugccgagggagacggcgguaacgcaagacagccuaaugcugaaggggacggcgccaacgcuaggcaaccacaggccgagggaggcgggggaaaugcacggcaggguggcaacgaagggaauaagcaagccggaaaaggccagggucagaacaaucagggggcuaacgcgcccaacgagaaggugguuaaugauuacuugcaaaagauccgcucgucagugacuacggaauggaccccuugcagcgucacauguggcaacggagugcgaauuagaaggcgggcacacgccgacaagaagaaagcugaggaucucacuauggacgaucuggagguagaagccugcguuauggacaagugugcaggcaucuuuaauguggucaguaacucccuggggcucgugauuuuacuggugcuugccuuguucaauuga

SEQ ID NO: 4397 - RNA, 1041 nt, Artificial Sequence
  derived and/or modified CDS sequence (opt3) from Pk(UMOTC3)__AHF20624.1__CSP
augaagaacuucauccugcucgccgugagcuccauucuucuggucgacuuguuacccacccacuuugagcauaauguugaucugucuagagcuauaaacgugaauggcguaucauucaacaauguggacacaaguagccuaggggcagcccaggucaggcaauccgcgucucggggacgcggucucggcgaaaaaccuaaggagggggcugauaaagaaaagaaaaaggagaaggaaaaagaggaggaaccaaagaaaccgaacgagaauaagcugaaacagcccgaaggaaaccgagaggccccuggccagccagaggguaaucgugaagcacccgggcagccugagggaaacagagaagccccaggccaacccgagggcaauagggaagcuccugggcagccagagggaaaccgggaggcaccgggucagcccgaaggcaaucgcgaggccccugggcagccagaaggaaacagagaggcucccggccaaccugaagguaauagggaggccccagggcagcccgagggaaaccgggaagcgccggcacagccugagggcaaccgcgaagcccccggccagccagaggggaaucgagaagcuccugcccaaccccagggaaacgguggcgcagggcaggcucaaccagaggagaauagagaagcccccgcgcagccucagggaaacggcggugccgggcaggcacaaccacagaagaaugagggcggaaacgcuggcgccaggaaggggcagggacagaauaaccaaggugcuaaugugccgaacgaaaaaguugugaaugacuaccuucacaagauccggucgucagucacuacggaguggacccccugcagcgugacauguggcaacgggguacguauucgcagaaaaggacaugccggcaauaagaaagcagaggaucugacuauggacgauuuggaaguugaggccugcgugauggacaagugugcugguaucuuuaacgucgugaguaauucccucgggcuggugauucugcucgucccugcguuauucaacuga

SEQ ID NO: 4398 - RNA, 1038 nt, Artificial Sequence
  derived and/or modified CDS sequence (opt3) from Pk(UMSY2C2)__AHF20625.1__CSP
augaagaacuucauccugcucgccgugagcuccauucuucuggucgacuuguuacccacccacuuugaacauaauguugaucugucuagagcuauaaacgugaauggcguaucauucaacaauguggacacaaguagccuaggggcagcccaggucaggcaauccgcgucucggggacgcggucucggcgaaaaaccuaaggagggggcugauaaagaaaagaaaaaggagaaggaaaaagaggaggaaccaaagaaaccgaacgagaauaagcugaaacagcccgaaggaaaccgagaggccccuggccagccagaggguaaucgugaagcacccgggcagccugagggaaacagagaagccccaggccaacccgagggcaauagggaagcuccugggcagccagagggaaaccgggaggcaccgggucagcccgaaggcaaucgcgaggccccugggcagccagaaggaaacagagaggcucccggccaaccugaagguaauagggaggccccagggcagcccgagggaaaccgggaagcgccgggccagccugagggcaaccgcgaagcacccgcccagccagaggggaaucgagaagcuccuggacaacccgaggguaacagagaggccccagcacagcccgaaggcaauagggaggcuccugcccagccacaagggaacggaggcgcgggucaggcccagccgcagaagaaugaagggggcaacgcaggagcucggaagggccaagggcagaauaaccagggagccaaugcucccaacgagaaagugguuaaugacuaccuucagaagauccguucgucagugacuacggaguggaccccuugcagcgucacaugugguaacggcgugcgcauuaaaagaaaggcccacgcagauaaaaagaaagccgaagaccugacuauggaugacuuggagguagaggcuugcguuauggauaagugugcggggaucuuuaauguggucaguaacucccucggacuggugauucugcucguguuagcacuguucaauuga

SEQ ID NO: 4399 - RNA, 1029 nt, Artificial Sequence
  derived and/or modified CDS sequence (opt3) from Pk(KN045)__AFG25467.1__CSP
augaagaacuucauccugcucgccgugagcuccauucuucuggucgacuuguuacccacccacuuugagcauaauguugaucugucuagagcuauaaacgugaauggcguaucauucaacaauguggacacaaguagccuaggggcagcccaggucaggcaauccgcgucucggggacgcggucucggcgaaaaaccuaaggagggggcugauaaagaaaagaaaaaggagaaggaaaaagagaaggaggaggaaccgaaaaagccaaacgaaaauaaacugaagcagcccgagcagccugccgcaggagccggcggugagcagccagcugcaggggccggaggcgaacaacccgcugccggcgcagggggagagcagccugcagccggugcuggcggggaacagccagccgcaggagcuggcggugagcagcccgccgcgggggcccgaggagaacaaccugcagcuggcgccggcggggagcagccagcugccggagcggguggcgagcagccggccgcuggggcgcguggagaacagcccgcagccggcgcugguggggagcaaccugccgcaggcgccggaggcgaacagccagcucccgccccuagaagggagcagccagcagcgggggcuggaggugaacaacccgccccggcaccucggcgcgagcagcccgccccaggcgcuggggccggagacggcgcaagaggugggaacgcuggcgccggaaagggccaggggcagaauaaccaaggagcgaaugugccuaacgagaaaguugugaaugauuaccuucacaagaucaggucgucagucacuacggaauggacccccugcagcgugacaugugguaacggcguacggauucgccgaaaagggcaugccggaaauaagaaagcugaggaccugacuauggaugacuuggaaguugaggcaugcgugauggauaagugugccggcaucuuuaacgucgugaguaacucccucggucuggugauucugcucgucuuagcucuguucaauuga

SEQ ID NO: 4400 - RNA, 1029 nt, Artificial Sequence
  derived and/or modified CDS sequence (opt3) from Pk(LT48)__ADN94515.1__CSP
augaagaacuucauccugcucgccgugagcuccauucuucuggucgacuuguuacccacccacuuugagcauaauguugaucugucuagagcuauaaacgugaauggcguaucauucaacaauguggacacaaguagccuaggggcagcccaggucaggcaauccgcgucucggggacgcggucucggcgaaaaaccuaaggagggggcugauaaagaaaagaaaaaggagaaggaaaaagagaaggaggaggaaccgaaaaagccaaacgaaaauaaacugaagcagcccgagcagccugccgcaggagccggcggugagcagccagcugcaggggccggaggcgaacaacccgcugccggcgcagggggagagcagccugcggccggugcuggcggggaacagccagccgcaggagcuggcggugagcagcccgccgcgggggccggaggcgaacaaccugcagcuggcgccgggggagagcagccagcugccggugcaggcggggagcagccggccgcuggagcgcgaggcgaacagcccgcagccggugcugggggcgagcaaccugccgcaggagccggcggggaacagccagcucccgccccucguagagagcagccagcagcgggagcugguggcgaacaacccgccccggcaccuaggcgggagcagcccgccccaggggcuggagccggcgacggugcacgcgggggcaacgcuggagccggcaaggggcagggacagaauaaccaaggugcgaaugugccuaacgagaaaguugugaaugauuaccuucacaagaucagaucgucagucacuacggaauggacccccugcagcgugacauguggcaacgggguaaggauucggcgcaaaggacaugccggcaauaagaaagcugaggaccugacuauggaugacuuggaaguugaggcaugcgugauggauaagugugccgguaucuuuaacgucgugaguaacucccucgggcuggugauucugcucgucuuagcucuguucaauuga

SEQ ID NO: 4401 - RNA, 1029 nt, Artificial Sequence
  derived and/or modified CDS sequence (opt3) from Pk(TB073)__AFG25476.1__CSP
augagaaacuucuuuuuccuggccgugagcuccauccuccuugucgaccuguugcccacccacuuugagcauaauguugauuuaucuagggcuauuaacgugaauggcguaucauucaacaauguggacacaaguagccugggggcagcccagguccggcaauccgcgucucgcggacgaggucuaggcgaaaagcguaaagagggggcugauaaggagaaaaagaaagaaaaggaagaggagccuaagaaaccaaacgaaaauaagcucaaacagccggagcaggccagagcaggaggcgaacagcccgccgcugguggggagcaaccugcagccggaggcgagcagccagcugccggcggggaacagcccgcggcaggaggugagcagccugccgcuggcggggaacaaccagccgcaggaggcgagcagcccgcugccgguggggaacagccugcggccggaggcgagcagccagcagcuggcggggagaggccggccgcuggaggugaacaacccgccgcaggcggggagcggccugccgcuggaggcgaacagccagcggcagggggugagcagcccgccccugcuccacgcagagaacaacccgccgcaggcggagagcagccggccccugcucccaggcgggagcagccagccgcaggcggggaacagccugcgcccggagcuggugccggcgacggggcacgcggaggcaacgccggugcugggaagggccaaggacagaauaaccagggcgccaaugugccaaacgagaaaguugugaaugauuaccugcacaagacucgaucgucagucacgaccgaauggacacccugcagcgugacuugugggaacggaguaagaauaaggcggaaggcacaugcugacaaaaagaaagccgagaaucuuaccauggaugaccuggaaguugaggcgugcgugauggauaagugugccgguaucuuuaacgucgugaguaacuccuugggccucgugauucugcugguccucgcuuuauucaauuga

SEQ ID NO: 4402 - RNA, 1026 nt, Artificial Sequence
  derived and/or modified CDS sequence (opt3) from Pk(SGEHIWM26-Y09-60)__AFD97238.1__CSP
augaagaacuucauccugcucgccgugagcuccauucuucuggucgacuuguuacccacccacuuugagcauaauguugaucugucuagagcuauaaacgugaauggcguaucauucaacaauguggacacaaguagccuaggggcagccaggguccggcaguccgcgucucgcggacgaggucucggcgaaaaaccuaaggagggggcugauaaagaaaagaaaaaggagaaggaaaaagagaaggaggaaccgaaaaagccaaacgagaauaaacugaagcaacccgaacagccugccgcaggagccggcggugagcagccagcugcaggggccggaggcgagcagcccgcugccggcgcagggggagaacaaccugcggccggugcuggcggggagcagccagccgcaggagcuggcggugaacagcccgccgcgggggccggaggcgagcagccugcagcuggcgccgggggagaacaaccagcugccggugcaggcggggagcagccggccgcuggagcgggcggugagcagcccgcagccggggcuggcggagaacagccugccgcaggcgccgggggagagcaaccagcucccgccccucguagagaacagccagcagcgggugcuggcggggagcagcccgccccggcaccuaggcgggaacaacccgccccaggagcuggcgccggugacggggcacgcggcggaaacgcuggcgccgggaagggacagggucagaauaaccagggcgcgaaugugccuaacgagaaaguugugaaugauuaccuucacaagaucagaucgucagucacuacggaguggacccccugcagcgugacaugugggaacggaguaaggauucggcgccgacaaaaugccggcaacaaaaaggcugaagaccugacuauggaugacuuggagguugaagcaugcgugauggauaaaugugccgguaucuuuaacgucgugaguaauucccucgggcuggugauucugcucgucuuagcucuguucaacuga

SEQ ID NO: 4403 - RNA, 1026 nt, Artificial Sequence
  derived and/or modified CDS sequence (opt3) from Pk(SGEHIWM35-Y09-74)__AFD97243.1__CSP
augaagaacuucauccugcucgccgugagcuccauucuucuggucgacuuguuacccacccacuuugagcauaauguugaucugucuagagcuauaaacgugaauggcguaucauucaacaauguggacacaaguagccuaggggcagcccaggucaggcaauccgcgucucggggacgcggucucggcgaaaaaccuaaggagggggcugauaaagaaaagaaaaaggagaaggaaaaagagaaggaggaaccgaaaaagccaaacgagaauaaacugaagcagcccgaacagccugccgcaggagccggcggugagcagccagcugcaggggccggaggcgagcaacccgcugccggcgcagggggagaacagccugcggccggugcuggcggggagcagccagccgcaggagcuggcggugaacagcccgccgcgggggccggaggcgagcaaccugcagcuggcgccgggggagaacagccagcugccggugcaggcggggagcagccggccgcuggagcgggcggugagcagcccgcagccggggcuggcggagaacaaccugccgcaggcgccgggggagagcagccagcucccgccccucgacgugaacagccagcagcgggugcuggcggggagcaacccgccccggcaccuagaagggaacagcccgccccaggagcuggcgccggugacggggcacggggcggaaacgcuggcgccgggaagggacagggucagaauaaccaaggcgcgaaugugccuaacgagaaaguugugaaugauuaccuucacaagauccgcucgucagucacuacggaguggacccccugcagcgugacaugugggaacggaguaagaauuaggcggcgccagaaugccggcaacaaaaaggcugaagaccugacuauggaugacuuggagguugaagcaugcgugauggauaaaugugccgguaucuuuaacgucgugaguaauucccucgggcuggugauucugcucgucuuagcucuguucaacuga

SEQ ID NO: 4404 - RNA, 1023 nt, Artificial Sequence
  derived and/or modified CDS sequence (opt3) from Pk(UM0014C4)__AHF20645.1__CSP
augaagaacuucauccugcucgccgugagcuccauucuucuggucgacuuguuacccacccacuuugagcauaauguugaucugucuagagcuauaaacgugaauggcguaucauucaacaauguggacacaaguagccuaggggcagcccaggucaggcaauccgcgucucggggacgcggucucggcgaaaaaccuaaggagggggcugauaaagaaaagaaaaaggagaaggaaaaagaggaggaaccaaagaaaccgaacgagaauaagcugaaacagcccgaacaggcccgaccuggagcaggcggugagcagccagcccccggggcuggaggcgagcaaccugcaccaggcgccgggggagaacagcccgcuccuggugccggcggggagcagccagcgccgggagcaggcggugaacagcccgccccuggggcuggaggcgagcaaccagcccccggcgcagggggagaacagccugcuccaggugccggcggggagcagcccgcgccgggagccggcggugggcagccugcacccggcgcuggaggcgagcaaccagccccuggggcuggaggugaacagcccgccccagcaccccguagagagcagccugccccaggccccgggggagaacaaccggcuccugcgccaaggcgggagcagcccgcaccuggcgccggugcuggggacggcgcccgcggaggcaacgcaggggccggaaagggucagggccagaauaaccaaggggcuaaugugccaaacgaaaagguugugaaugauuaccuucacaaaaucagaucgucagucacuacggaguggacccccugcagcgugacauguggaaacggcguaaggauucggcgcaagggucaugccgggaauaaaaaggcagaggaccugacuauggaugacuuggaaguugaggcgugcgugauggauaaaugugcuggcaucuuuaacgucgugaguaacucccucggacuggugauucugcucgucuuagcccuguucaauuga

SEQ ID NO: 4405 - RNA, 1020 nt, Artificial Sequence
  derived and/or modified CDS sequence (opt3) from Pk(LT57)__ADN94510.1__CSP
augaagaacuucauccugcucgccgugagcuccauucuucuggucgacuuguuacccacccacuuugagcauaauguugaucugucuagagcuauaaacgugaauggcguaucauucaacaauguggacacaaguagccuaggggcagcccaggucaggcaauccgcgucucggggacgcggucucggcgaaaaacgaaaggagggggcugauaaagaaaagaaaaaggagaaggaggaaccuaaaaagccaaacgagaauaaacugaagcagccggaacaggcccgugcaggaggcgagcagcccgccgcugguggggaacaaccugcagccggaggcgagcagccagcugccggcggggagcagcccgcggcaggaggugaacagccugccgcuggcggggagcaaccagccgcaggaggcgaacagcccgcugccgguggggagcagccugcggccggaggcgaaagaccagcagcuggcggggagcagccggccgcuggaggugagcaacccgccgcaggcggggaacagccugccgcuggaggcgagaggccagcggccgguggggaacggcccgcagcuggcggagagcagccugccgcaggcggggaacaaccagcccccgcuccgcgcagagagcagccugccgcaggaggugagcagcccgcgccaggcgcuggggccggagacggcgcaaggggugggaacgccggcgcuggaaaaggccaggggcaaaauaaccagggagccaaugugccuaacgaaaagguugugaaugauuaccuucacaagauccggucgucagucacuacggaguggacccccugcagcgugacaugugguaacggcguacgcauucgaagaaaagcacaugcugacaagaaaaaggccgaaaaucugacuauggaugacuuggagguugaagcgugcgugauggauaaaugugccgggaucuuuaacgucgugaguaacucccucggacuggugauucugcucgucuuagcucuguucaauuga

SEQ ID NO: 4406 - RNA, 1020 nt, Artificial Sequence
  derived and/or modified CDS sequence (opt3) from Pk(SGEHIWM17-Y09-4)__AFD97233.1__CSP
augaagaacuucauccugcucgccgugagcuccauucuucuggucgacuuguuacccacccacuuugagcauaauguugaucugucuagagcuauaaacgugaauggcguaucauucaacaaugcagacacaaguagccuaggggccgcucaggugaggcaauccgcgucucggggacgcggucucggcgaaaaaccuaaggagggggccgauaaagaaaagaaaaaggagaaggaagaggagccgaaaaagccgaacgaaaauaaacugaagcagcccgacgcagucccuggaggcgaggaaccagcccccggucgagagcagccugcuccagggcgugaggaacccgcaccuggaagagagcagccagccccgggcagggaagaacccgcuccuggccgggaacaaccagcccccgggcgcgaggagccugcgccaggaagagaacagcccgcaccggguagggagcagccugcccccggccgggaggagccagcuccugggcgcgaacagcccgccccaggacgagaggagcccgcaccuggcagagaacaaccagcuccggguagggagcagcccgccccugggcgggaacagccagcgcccggaggcgagcagccugccccaggccgugaacaacccgcaccagggggagagcagccugcuccagcccccggugcuggcgccggggauggagcacgcggcgguaacgccggggcuggcaaaggacagggccaaaauaaccagggggcgaaugugccuaacgagaagguugugaaugacuaccuucacaagaucagaucgucagucacuacggaauggacccccugcagcgugacauguggaaacgguguaaggauucggcgaaaaggccaugcagggaauaagaaagccgaggaucugacuauggacgauuuggaaguugaggcuugcgugauggacaagugugccggaaucuuuaacgucgugaguaacucccucggccuggugauucugcucgucuuagcacuguucaauuga

SEQ ID NO: 4407 - RNA, 1020 nt, Artificial Sequence
  derived and/or modified CDS sequence (opt3) from Pk(SGEHIWM26-Y09-123)__AFD97240.1__CSP
augaagaacuucauccugcucgccgugagcuccauucuucuggucgacuuguuacccacccacuuugagcauaauguugaucugucuagagcuauaaacgugaauggcguaucauucaacaauguggacacaaguagccuaggggcagcccaggucaggcaauccgcgucucggggacgcggucucggcgaaaaaccuaaggagggggcugauaaagaaaagaaaaaggagaaggaagaggagccgaaaaagccgaacgaaaauaaacugaagcagcccgacgccgugccuggaggcgaggaaccagcacccggucgagagcagccugccccagggcgugaggaacccgcuccuggaagagagcagccagcaccgggcagggaagaacccgccccuggccgggaacaaccagcucccgggcgcgaggagccugccccaggaagagaacagcccgcgccggguagggagcagccugcacccggccgggaggagccagccccugggcgcgaacagcccgcuccaggacgagaggagcccgccccuggcagagaacaaccagcaccggguagggagcagcccgcuccugggcgggaacagccagcccccggaggcgagcagccugcgccaggccgugaacaacccgccccagggggagagcagccugcaccagcucccggugccggcgcuggggauggagcccgcggcgguaacgcaggggccggcaaaggacagggccaaaauaaccagggggcuaauguuccuaacgagaagguggucaaugacuaccuucacaagaucagaucgucagugacuacggaauggacccccugcagcguaacauguggaaacgguguuaggauucggcgaaaaggccaugcggggaauaagaaagcagaggaucugacuauggacgauuuggaaguggaggccugcgucauggacaagugugcuggaaucuuuaacguggugaguaacucccucggccuggucauucugcucguuuuagcccuguucaauuga

SEQ ID NO: 4408 - RNA, 1020 nt, Artificial Sequence
  derived and/or modified CDS sequence (opt3) from Pk(TN003)__AFG25477.1__CSP
augaagaacuucauccugcucgccgugagcuccauucuucuggucgacuuguuucccacccacuucgagcauaauguugauuuaucuagagcuauaaacgugaauggcguaucauuuaacaauguggacacaaguagccugggggcagcccaggucaggcaauccgcgucucggggacgcggucuaggcgaaaaaccuaaggagggggcugauaaagaaaagaaaaaggagaaggaagagaaaccaaagaaaccgaacgagaauaagcucaaacagcccgccgcaggaggcgaacagccugccgcugguggggagcagccagcagccggaggcgaacaacccgcugccggcggggagcagccugcggcaggaggugagcagccagccgcuggcggggaacagcccgccgcaggaggcgagcgaccugcugccgguggggaacaaccagcggccggaggcgagcagccggcagcuggcggggaacgucccgccgcuggaggugagcagccugccgcaggcggggagagaccagccgcuggaggcgaacagcccgcggccgguggggagcaaccugcagcuggcggagaacagccagcccccgcaccgaggcgggagcagccuguggccggcggggaacaacccgcuccagccccucgcagagagcagcccgcaccaggagcgggugcuggcgacggggccaggggaggcaacgccggugcagggaagggccagggacagaauaaccaaggcgcuaauguucccaacgagaagguggucaaugauuaccugcacaaaauccggucgucagugacuacggaauggaccccuugcagcguaacaugugggaacggaguucgcauucgaagaaggcagaaugccgguaacaagaaagcagaggaccuuacuauggaugaccuggaaguggaggcuugcgucauggauaagugugccggcaucuucaacguggugaguaauuccuuggggcucgucauucugcugguucucgcguuauuuaacuga

SEQ ID NO: 4409 - RNA, 1017 nt, Artificial Sequence
  derived and/or modified CDS sequence (opt3) from Pk(LT53)__ADN94524.1__CSP
augagaaacuucauccugcucgccgugagcuccauucuucuggucgacuuguuacccacccacuuugagcauaauguugaucugucuagggcuauaaacgugaauggcguaucauucaacaauguggacacaaguagccuaggggcagcccagguccggcaauccgcgucucgcggacgaggucucggcgaaaagcguaaagagggggcugauaaggagaaaaagaaagaaaaggaagaggagccuaagaaaccaaacgaaaauaagcugaaacagccggagcaggaaagacccggaggcgagcagccugccccaggucccgggggagagcaaccugcaccaggccccggcggggaacagccugccccaaggccgggaggugagcagcccgcuccuggcccagggggagaacagcccgcaccuggcccagguggggagcaacccgccccgggaccuggcggcgaacagcccgcuccacggccugggggagagcagcccgccccaggucccggcggggagcagccugcgccacgcccgggaggcgaacaacccgcaccugguccagggggcgagcagcccgccccuagaccaggaggcgaacagcccgcuccggggccuggaggugagcaaccagcccccgcaccuaggcgggaacagcccgcuccagccccuggcgcgggggccggagacggcgcacgcggugggaacgcuggcgccggaaagggccaggggcagaauaaccaaggagcuaaugugcccaacgagaaaguugugaaugauuaccuucacaagauccgaucgucagucacuacggaguggaccccaugcagcgugacaugugguaacggcguaagaauuaggcggcgucagaaugccgggaacaagaaagcagaagaccugacuauggaugacuuggagguugaagccugcgugauggauaagugugcuggaaucuuuaacgucgugaguaauucccucggccuggugauucugcucgucuuagcgcuguucaacuga

SEQ ID NO: 4410 - RNA, 1014 nt, Artificial Sequence
  derived and/or modified CDS sequence (opt3) from Pk(KH229)__ADN94485.1__CSP
augagaaacuucauccugcucgccgugagcuccauucuucuggucgacuuguuacccacccacuuugagcauaauguugaucugucuagggcuauaaacgugaauggcguaucauucaacaauguggacacaaguagccuaggggcagcccagguccggcaauccgcgucucgcggacgaggucucggcgaaaagccuaaagagggggcugauaaggagaaaaagaaagaaaaggaagagaagccgaaaaagccaaacgagaauaaacugaagcagcccggaggcgaacagccugccgccgguggggagcagccagcagcuggaggcgaacaacccgcagccggcggggagcagccugcugccggaggugagcguccagcggcaggcggggaacagcccgccgcuggaggcgagcagccugccgcugguggggaacaaccagcagccggaggcgagcagccggcggccggcggggaaagacccgcagcuggaggugagcagccugccgcuggcggggagcagccagccgcaggaggcgaacaacccgccgcugguggggagaggccugcggcaggcggagaacagccagcccccgcuccgcggcgcgagcagccugccgcaggcggggaacaacccgccccagcuccuagaagggagcagcccgccccaggagcgggugcaggcgacggggcucggggaggcaacgccggugcagggaaaggccagggacagaauaaccaaggcgccaaugugcccaacgagaagguugugaaugauuaccuucacaagauccgcucgucagucacuacggaauggaccccuugcagcgugacaugugggaacggaguacgaauuagaaggcggcagaaugcugguaacaaaaaggccgaggaccugacuauggaugacuuggaaguugaggcaugcgugauggauaaaugugcuggcaucuuuaacgucgugaguaauucccucgggcuggugauucugcucgucuuagcccuguucaacuga

SEQ ID NO: 4411 - RNA, 1014 nt, Artificial Sequence
  derived and/or modified CDS sequence (opt3) from Pk(KH468)__ADN94487.1__CSP
augaagaacuucauccugcucgccgugagcuccauucuucuggucgacuuguuucccacccacuucgagcauaauguugauuuaucuagagcuauaaacgugaauggcguaucauuuaacaauguggacacaaguagccugggggcagcccaggucaggcaauccgcgucucggggacgcggucuaggcgaaaaaccuaaggagggggcugauaaagaaaagaaaaaggagaaggaagagaaaccaaagaaaccgaacgagaauaagcucaaacagcccggaggcgaacagccugccgccgguggggagcagccagcagcuggaggcgaacaacccgcagccggcggggagcagccugcugccggaggugagcgaccagcggcaggcggggaacagcccgccgcuggaggcgagcagccugccgcugguggggaacaaccagcagccggaggcgagcagccggcggccggcggggaacgucccgcagcuggaggugagcagccugccgcuggcggggagcagccagccgcaggaggcgaaagacccgccgcugguggggagcaaccugcggcaggcggagaacagccagcccccgcuccgaggcgggagcagccugccgcaggcggggaacaacccgccccagcuccucgcagagagcagcccgccccaggagcgggugcaggcgacggggcuaggggaggcaaccccggugccgggaagggccagggacagaauaaccaaggcgcaaaugugccuaacgagaagguugugaaugauuaccugcacaaaauccggucgucagucacuacggaauggaccccaugcagcgugacaugugggaacggaguacgcauucgaagaaggcagaaugccgguaacaagaaagcugaggaccuuacuauggaugaccuggaaguugaggccugcgugauggauaagugugcaggcaucuucaacgucgugaguaauuccuuggggcucgugauucugcugguccucgcuuuauuuaacuga

SEQ ID NO: 4412 - RNA, 1014 nt, Artificial Sequence
  derived and/or modified CDS sequence (opt3) from Pk(LT33)__ADN94523.1__CSP
augagaaacuucauccugcucgccgugagcuccauucuucuggucgacuuguuacccacccacuuugagcauaauguugaucugucuagggcuauaaacgugaauggcguaucauucaacaauguggacacaaguagccuaggggcagcccagguccggcaauccgcgucucgcggacgaggucucggcgaaaagcguaaagagggggcugauaaggagaaaaagaaagaaaaggaagaggagccuaagaaaccaaacgaaaauaagcugaaacagccgggaggcgagcagcccgccgccgguggggaacagccugcagcuggaggcgagcaaccagcagccggcggggagcagcccgcugccggaggugaaagaccugcggcaggcggggagcagccagccgcuggaggcgaacagcccgccgcugguggggagcaaccugcagccggaggcgaacagccagcggccggcggggagaggccggcagcuggaggugagcagcccgccgcuggcggggaacagccugccgcaggaggcgagcggccagccgcugguggggaacaacccgcggcaggcggagagcagccugccccagcuccccgcagagaacagccggccgcaggcggggagcaaccugcccccgcuccaaggcgggagcagccugcccccggagcgggugcaggcgacggggcucgcggaggcaacccaggugccgggaagggccagggacagaauaaccaaggcgcaaaugugcccaacgaaaaaguugugaaugauuaccuucacaagauccgaucgucagucacuacggaguggaccccuugcagcgugacaugugggaacggaguaagaauuaggcggcgucagaaugccgguaacaagaaagcugaagaccugacuauggaugacuuggagguugaagccugcgugauggauaagugugcaggcaucuuuaacgucgugaguaauucccucgggcuggugauucugcucgucuuagcucuguucaacuga

SEQ ID NO: 4413 - RNA, 1014 nt, Artificial Sequence
  derived and/or modified CDS sequence (opt3) from Pk(LT64)__ADN94520.1__CSP
augaagaacuucauccugcucgccgugagcuccauucuucuggucgacuuguuucccacccacuucgagcauaauguugauuuaucuagagcuauaaacgugaauggcguaucauuuaacaauguggacacaaguagccugggggcagcccaggucaggcaauccgcgucucggggacgcggucuaggcgaaaaaccuaaggagggggcugauaaagaaaagaaaaaggagaaggaagagaaaccaaagaaaccgaacgagaauaagcucaaacagcccggaggcgaacagccugccgccgguggggagcagccagcagcuggaggcgaacaacccgcagccggcggggagcagccugcugccggaggugagcagccagcggcaggcggggaacagcccgccgcuggaggcgagcgaccugccgcugguggggaacaaccagcagccggaggcgagcagccggcggccggcggggaacgucccgcagcuggaggugagcagccugccgcuggcggggagagaccagccgcaggaggcgaacagcccgccgcugguggggagcaaccugcggcaggcggagaacagccagcccccgcuccgaggcgggagcagccugccgcaggcggggaacaacccgccccagcuccucgcagagagcagcccgccccaggagcgggugcaggcgacggggcuaggggaggcaacgccggugcagggaagggccagggacagaauaaccaaggcgccaaugugcccaacgagaagguugugaaugauuaccugcacaaaauccggucgucagucacuacggaauggaccccuugcagcgugacaugugggaacggaguacgcauucgaagaaggcagaaugcugguaacaagaaagccgaggaccuuacuauggaugaccuggaaguugaggcaugcgugauggauaagugugcuggcaucuucaacgucgugaguaauuccuuggggcucgugauucugcugguccucgccuuauuuaacuga

SEQ ID NO: 4414 - RNA, 1014 nt, Artificial Sequence
  derived and/or modified CDS sequence (opt3) from Pk(TB016)__AFG25473.1__CSP
augaagaacuucauccugcucgccgugagcuccauucuucuggucgacuuguuucccacccacuucgagcauaauguugauuuaucuagagcuauaaacgugaauggcguaucauuuaacaauguggacacaaguagccugggggcagcccaggucaggcaauccgcgucucggggacgcggucuaggcgaaaaaccuaaggagggggcugauaaagaaaagaaaaaggagaaggaagagaaaccaaagaaaccgaacgagaauaagcucaaacagcccggaggcgaacagccugccgccgguggggagcagccagcagcuggaggcgaacaacccgcagccggcggggagcagccugcugccggaggugagcgaccagcggcaggcggggaacagcccgccgcuggaggcgagcagccugccgcugguggggaacaaccagcagccggaggcgagcagccggcggccggcggggaacgucccgcagcuggaggugagcagccugccgcuggcggggagcagccagccgcaggaggcgaaagacccgccgcugguggggagcaaccugcggcaggcggagaacagccagcccccgcuccgaggcgggagcagccugccgcaggcggggaacaacccgccccagcuccucgcagagagcagcccgccccaggagcgggugcaggcgacggggcuaggggaggcaacgccggugcagggaagggccagggacagaauaaccaaggcgccaaugugcccaacgagaagguugugaaugauuaccugcacaaaauccggucgucagucacuacggaauggaccccuugcagcgugacaugugggaacggaguacgcauucgaagaaggcagaaugcugguaacaagaaagccgaggaccuuacuauggaugaccuggaaguugaggcaugcgugauggauaagugugcuggcaucuucaacgucgugaguaauuccuuggggcucgugauucugcugguccucgccuuauuuaacuga

SEQ ID NO: 4415 - RNA, 1014 nt, Artificial Sequence
  derived and/or modified CDS sequence (opt3) from Pk(UM0021C10)__AHF20667.1__CSP
augaagaacuucauccugcucgccgugagcuccauucuucuggucgacuuguuucccacccacuucgagcauaauguugauuuaucuagagcuauaaacgugaauggcguaucauuuaacaauguggacacaaguagccugggggcagcccaggucaggcaauccgcgucucggggacgcggucuaggcgaaaaaccuaaggagggggcugauaaagaaaagaaaaaggagaaggaagagaaaccaaagaaaccgaacgagaauaagcucaaacagcccggaggcgaacagucggccgccgguggggagcagccugcagcuggaggcgaacaaccagcagccggcggggagcagcccgcugccggaggugagcagccugcggcaggcggggaacagccagccgcuggaggcgagcgacccgccgcugguggggaacaaccugcagccggaggcgagcagccagcggccggcggggaacguccggcagcuggaggugagcagcccgccgcuggcggggagagaccugccgcaggaggcgaacagccagccgcugguggggagcaacccgcggcaggcggagaacagccugccccagcucccaggcgggagcagccggccgcaggcggggaacaaccugcccccgcuccacgcagagagcagccugcccccggagcgggugcaggcgacggggcuaggggaggcaacgccggugcagggaagggccagggacagaauaaccaaggcgccaaugugccaaacgagaagguugugaaugauuaccugcacaaaauccggucaagcgucacuacggaauggacccccugcagugugacaugugggaacggaguacgcauucgaagaaggcagaaugcugguaacaagaaagccgaggaccuuacuauggaugaccuggaaguugaggcaugcgugauggauaagugugcuggcaucuucaacgucguguccaauucuuuggggcucgugauucugcugguccucgccuuauuuaacuga

SEQ ID NO: 4416 - RNA, 1011 nt, Artificial Sequence
  derived and/or modified CDS sequence (opt3) from Pk(UMRAC2)__AHF20618.1__CSP
augaagaacuucauccugcucgccgugagcuccauucuucuggucgacuuguuacccacccacuuugagcauaauguugaucugucuagagcuauaaacgugaauggcguaucauucaacaauguggacacaaguagccuaggggcagcccaggucaggcaauccgcgucucggggacgcggucucggcgaaaaaccuaaggagggggcugauaaagaaaagaaaaaggagaaggaaaaagaggaggaaccaaagaaaccgaacgagaauaagcugaaacagcccgaaggaaaccgagaggccccuggccagccagaggguaaucgugaagcacccgggcagccugagggaaacagagaagccccaggccaacccgagggcaauagggaagcuccugggcagccagagggaaaccgggaggcaccgggucagcccgaaggcaaucgcgaggccccugggcagccagaaggaaacagagaggcucccggccaaccugaagguaauagggaggccccagcgcagcccgaggggaaccgggaagcaccgggacagccugagggcaaccgcgaagcccccgcucagccacaaggcaaugggggagccggucaggcacagccugagggcaaccgagaagcucccgcccaaccacaggggaauggaggcgcgggucaggcccagccccaaaagaacgaagggggcaaugcaggagcuagaaagggccaggggcagaacaaucagggagccaacgugccuaaugagaaaguugugaacgacuaccuucacaagaucaggucgucagucacuacggaguggaccccaugcagcgugacaugugguaauggcguacggauucgucgcaaagggcaugcuggaaacaagaaagccgaggaucugacuauggacgauuuggaaguugaggcaugcgugauggacaagugugccggcaucuuuaaugucgugaguaacucccucggucuggugauucugcucgucuuagcucuguucaauuga

SEQ ID NO: 4417 - RNA, 1008 nt, Artificial Sequence
  derived and/or modified CDS sequence (opt3) from Pk(UMANC1)__AHF20619.1__CSP
augaagaacuucauccugcucgccgugagcuccauucuucuggucgacuuguuacccacccacuuugagcauaauguugaucugucuagagcuauaaacgugaauggcguaucauucaacaauguggacacaaguagccuaggggcagcccaggucaggcaauccgcgucucggggacgcggucucggcgaaaaaccuaaggagggggcugauaaagaaaagaaaaaggagaaggaaaaagaggaggaaccaaagaaaccgaacgagaauaagcugaaacagcccgaaggaaaccgagaggccccuggccagccagaggguaaucgugaagcacccgggcagccugagggaaacagagaagccccaggccaacccgagggcaauagggaagcuccugggcagccagagggaaaccgggaggcaccgggucagcccgaaggcaaucgcgaggccccugggcagccagaaggaaacagagaggcucccggccaaccugaagguaauagggaggccccagggcagcccgagggaaaccgggaagcgccgggccagccugagggcaaccgcgaagcacccgggcagccagagggaaaucgagaagccccugcucaacccgaggguaacagagaggccccagcacagccccagggcaaugggggagcuggccaagcccagccucagaagaacgaaggugggaaugcgggcgccaggaagggacagggccaaaacaaucagggggcaaacgcuccaaaugagaaagugguuaacgacuaccuucagaagauccggucgucagugacuacggaauggaccccgugcagcgucacauguggaaauggugugcguauuaaacgcaaggcccacgcugauaaaaagaaagccgaggaccugacuauggaugacuuggagguagaagcaugcguuauggauaagugugccggcaucuuuaacguggucaguaauucccucgggcuggugauucugcucguguuagcucuguucaacuga

SEQ ID NO: 4418 - RNA, 1002 nt, Artificial Sequence
  derived and/or modified CDS sequence (opt3) from Pk(LT48)__ADN94505.1__CSP
augagaaacuucauccugcucgccgugagcuccauucuucuggucgacuuguuacccacccacuuugagcauaauguugaucugucuagggcuauaaacgugaauggcguaucauucaacaauguggacacaaguagccuaggggcagcccagguccggcaauccgcgucucgcggacgaggucucggcgaaaagcguaaagagggggcugauaaggagaaaaagaaagagaaggaagaggagccuaagaaaccaaacgaaaauaagcugaaacagccgaacgccgagggaggcgcaaaugccggucagcccaacgcugaagggggagcaaaugccggccagccuaacgcugagggcggggccaaugcgggacaaccaaacgcagaggguggcgccaaugcugggcagcccaacgccgaaggaggcgcaaacgcuggucagccuaaugccgaagggggagcgaacgccggccagccaaaugcagaaggcggggcuaacgccggacaacccaaugcugaggguggcgccaacgcagggcagccuaaugccgaaggaggcgcuaacgcgggucagccaaaugcagaagggggcgccaacgcuggacagccgaaugccgagggcggggcaaacgccagacaaccccaggcugagggagguggcgccaaugcaaggcaagggggaaacgagggcaauaagcaggcggguaaagggcagggccagaacaaccagggagcuaaugccccuaacgaaaaggugguuaaugacuaccuucaaaagauccggucgucagugacuacggaguggaccccaugcagcgucacauguggcaacggggugcgcauuagaaggcgggcacacgccgauaaaaagaaagcugaagaccugacuauggaugacuuggagguagaggccugcguuauggauaagugugcaggaaucuuuaauguggucaguaacucccucggucuggugauucugcucguguuagcucuguucaauuga

SEQ ID NO: 4419 - RNA, 993 nt, Artificial Sequence
  derived and/or modified CDS sequence (opt3) from Pk(KH176)__ADN94486.1__CSP
augaagaacuucauccugcucgccgugagcuccauucuucuggucgacuuguuucccacccacuucgagcauaauguugauuuaucuagagcuauaaacgugaauggcguaucauuuaacaauguggacacaaguagccugggggcagcccaggucaggcaauccgcgucucggggacgcggucuaggcgaaaaaccuaaggagggggcugauaaagaaaagaaaaaggagaaggaagagaaaccaaagaaaccgaacgagaauaagcucaaacagcccggaggcgaacagccugccgcugguggggagcagccagccgcuggaggcgaacaacccgcagccggcggggagcagccugcugccggaggugagcagccagcggcaggcggggaacgacccgccgcuggaggcgagcagccugccgcugguggggaacaaccagcagccggaggcgagcguccggcggccggcggggaacagcccgcagcuggaggugagagaccugccgcuggcggggagcagccagccgcaggaggcgaacagcccgccgcugguggggagcaaccugcgccagcacccaggcgggaacagccggccgcuggcggagagcagccugcccccgcaccacgcagagaacaaccugcccccggcgcuggggccggagacggugcaaggggcgggaacgcgggagcuggcaagggucaggggcagaauaaccagggcgccaaugugccaaacgagaagguugugaaugauuaccugcacaaaauccggucgucagucacuacggaguggacccccugcagcgugacauguggaaacggcguacgcauucgaagaaggcaaaaugcagggaacaagaaagccgaagaccuuacuauggaugaccuggagguugaagcaugcgugauggauaagugugccggaaucuucaacgucgugaguaauuccuugggucucgugauucugcugguccucgcauuauuuaacuga

SEQ ID NO: 4420 - RNA, 993 nt, Artificial Sequence
  derived and/or modified CDS sequence (opt3) from Pk(LT36)__ADN94511.1__CSP
augagaaacuucauccugcucgccgugagcuccauucuucuggucgacuuguuacccacccacuuugagcauaauguugaucugucuagggcuauaaacgugaauggcguaucauucaacaauguggacacaaguagccuaggggcagcccagguccggcaauccgcgucucgcggacgaggucucggcgaaaagcguaaagagggggcugauaaggagaaaaagaaagaaaaggaagagaagccuaaaaagccaaacgagaauaaacugaagcagccgggaggcgaacagcccgccgccgguggggagcagccugcagcuggaggcgaacaaccagcagccggcggggagcagcccgcugccggaggugagcagccugcggcaggcggggaacagccagccgcuggaggcgagcaacccgccgcugguggggaacagccugcagccggaggcgagcagccagcggccggcggggaacagccggcagcuggaggugagcaacccgccgcuggcggggagcagccugccccagcacccagaagggaacagccugccgcuggaggcgagcaaccagcggccgguggggaacagcccgcaccggcuccucggcgcgagcagcccgccccaggcggagaacagccugcacccggcgccggggcuggagacggugccagaggcgggaacccaggagcaggcaaaggucaagggcagaauaaccagggcgcgaaugugcccaacgagaagguugugaaugauuaccuucacaagaucaggucgucagucacuacggaguggaccccuugcagcgugacauguggaaacggcguacggauucgccgaaaagcucaugccgacaagaaaaaggcagaaaaucugacuauggaugacuuggagguugaagccugcgugauggauaaaugugcugggaucuuuaacgucgugaguaacucccucggacuggugauucugcucgucuuagcccuguucaauuga

SEQ ID NO: 4421 - RNA, 993 nt, Artificial Sequence
  derived and/or modified CDS sequence (opt3) from Pk(TB066)__AFG25475.1__CSP
augaagacccuguuccuccuugccgugagcuccauccuguuggucgacuuauuucccacacacuucgagcauaacguugaucugucuagagcuauuaaugugaacggcguaucauuuaauaacguggacacgaguagccuaggggcagcccaggucaggcaauccgcgucucggggacgcggucucggcgaaaaacgaaaggagggggcugauaaagaaaagaaaaaggagaaggaagagaaaccuaagaaaccaaaugagaacaagcugaaacagccgggaggcgaacagcccgccgcugguggggagcagccugccgcuggaggcgaacaaccagcagccggcggggagcagcccgcugccggaggugagcagccugcggcaggcggggaacagccagccgcuggaggcgagcaacccgccgcugguggggaacagccugcagccggaggcgagcagccagcggccggcggggaacagccggcagcuggaggugagcaacccgccgcuggcggggagcagccugccccagcaccccguagagaacagccugccgcuggaggcgagcaaccagcggccgguggggaacagcccgcaccggcuccuaggcgggagcagcccgccgcaggcggagaacagccagccccuggcgcuggggccggagacggugcacgcggcgggaaucccggagcgggcaagggucaagggcagaacaaucagggcgcuaacgugccaaaugagaagguugugaacgauuaccuucacaaaauaagaucgucagucacuaccgaguggacacccugcagcgugacuuguggaaauggcguaaggauccggcgcaaggcccaugcagacaaaaagaaagccgaaaaccugaccauggaugacuuggagguugaagcaugcgugauggauaagugugccgggauuuucaaugucgugaguaacucccucggacuggugauccugcucgucuuagcacuguuuaacuga

SEQ ID NO: 4422 - RNA, 993 nt, Artificial Sequence
  derived and/or modified CDS sequence (opt3) from Pk(UM006C6)__AHF20642.1__CSP
augaagaacuucauccugcucgccgugagcuccauucuucuggucgacuuguuacccacccacuuugagcauaauguugaucugucuagagcuauaaacgugaauggcguaucauucaacaauguggacacaaguagccuaggggcagcccaggucaggcaauccgcgucucggggacgcggucucggcgaaaaaccuaaggagggggcugauaaagaaaagaaaaaggagaaggaagaggagccgaaaaagccaaacggaaauaaacugaagcagcccgccccuggcggugaacagccagcacccgggggagagcagccugccccaggcggcgaacaacccgcuccugggggagagcagccagcaccggguggcgagcagcccgccccugggggagaacagccagcucccggcggugagcaaccugccccagggggagaacagcccgcgccgggcggcgagcagccugcacccgggggagaacagccagccccugguggcgagcaacccgcuccagggggagagcagcccgccccuggcggugaacagccagcaccggcuccccgacgugagcaaccugccccagggggcgaacagcccgcgccuggaggcgagcagccagcccccagaagggaacagccggcaccuggggcuggagccggugacggcgcucgcgggggaaacgccggcgcagguaaagggcaaggccagaauaaccagggagccucggugccaaaugagaagguugugaacgauuaccuucacaagauccggucaagcgucacuacggaguggacccccugcagugugacauguggcaaugggguaagaauuaggcggaaagcucaugcggacaagaaaaaggcagaagaucugacuauggacgauuuggagguugaagccugcgugauggacaaaugugcuggaaucuuuaacgucguguccaauucucucggucuggugauucugcucgucuuagcccuguucaacuga

SEQ ID NO: 4423 - RNA, 984 nt, Artificial Sequence
  derived and/or modified CDS sequence (opt3) from Pk(UM004C4)__AHF20641.1__CSP
augaagaacuucauccugcucgccgugagcuccauucuucuggucgacuuguuacccacccacuuugagcauaauguugaucugucuagagcuauaaacgugaauggcguaucauucaacaauguggacacaaguagccuaggggcagcccaggucaggcaauccgcgucucggggacgcggucucggcgaaaaaccuaaggagggggcugauaaagaaaagaaaaaggagaagggaaaagaaaaggaggaggaaccgaaaaagccaaacgagaauaaacugaagcagcccaacgaaggccagccucaggcccaaggugacggggcaaaugccggacagccacaggcucagggcgauggcgcaaacgccgggcaaccccaggcucagggagacggugccaaugcgggccagccucaagcacagggggauggagccaacgcuggccagccacaagcccagggugacggggcaaaugcuggacagccccaggcccaaggcgauggcgcgaacgccgggcagccucaggcacagggagacggugcuaaugccggccaaccacaggcucagggggaucgagccaacgcaggacagccgcaagcccagggcgacggugcuaacgugccccgucaggggagaaauggcggaggcgcgccugcagggggaaacgaggguaauaagcaggccggcaaagggcaaggacagaacaaucagggcgcuaacgccccaaaugagaagguugugaacgauuaccuucacaaaaucaggucgucagucacuacggaauggacccccugcagcgugacaugugguaaugggguacggauucgcagaaaggcacaugccggcaacaaaaaggcugaggaccugacuguugacgauuuggaaguggaggccugcgucauggacaaaugugcaggaaucuuuaauguggugaguaacucccucggccuggucauucugcucguuuuagcgcuguucaauuga

SEQ ID NO: 4424 - RNA, 978 nt, Artificial Sequence
  derived and/or modified CDS sequence (opt3) from Pk(UMHAC5)__AHF20632.1__CSP
augaagaacuucauccugcucgccgugagcuccauucuucuggucgacuuguuacccacccacuuugagcauaauguugaucugucuagagcuauaaacgugaauggcguaucauucaacaauguggacacaaguagccuaggggcagcccaggucaggcaauccgcgucucggggacgcggucucggcgaaaaaccuaaggagggggcugauaaagaaaagaaaaaggagaaggaaaaagaggaggaaccaaagaaaccgaacgagaauaagcugaaacagcccgaaggaaaccgagaggccccuggccagccagaggguaaucgugaagcacccgggcagccugagggaaacagagaagccccaggccaacccgagggcaauagggaagcuccugggcagccagagggaaaccgggaggcaccgggucagcccgaaggcaaucgcgaggccccugggcagccagaaggaaacagagaggcucccggccaaccugaagguaauagggaggccccagcgcagcccgaggggaaccgggaagcaccgggacagccugagggcaaccgcgaagcccccgcucagccagagggcaaucgagaaacuccugcccaaccccaggggaacggaggugcaggccaggcucaaccacagaagaaugaagggggaaacgccggcgcgagaaagggucaggggcagaauaaccaaggcgccaaugcacccaacgagaaagugguuaaugacuaccuucagaagaucaggucgucagugacgaccgaguggacaccuugcagcgucacuuguggaaacggcgugcggauuaaacguaaggcucacgccgauaaaaagaaagcugaggaccugaccauggaugacuuggaaguagaggccugcguuauggauaagugugcagggaucuuuaauguggucaguaacucccucggacuggugauucugcucguguuagcccuguucaauuga

SEQ ID NO: 4425 - RNA, 978 nt, Artificial Sequence
  derived and/or modified CDS sequence (opt3) from Pk(UMSYC3)__AHF20626.1__CSP
augaagaacuucauccugcucgccgugagcuccauucuucuggucgacuuguuacccacccacuuugagcauaauguugaucugucuagagcuauaaacgugaauggcguaucauucaacaauguggacacaaguagccuaggggcagcccaggucaggcaauccgcgucucggggacgcggucucggcgaaaaaccuaaggagggggcugauaaagaaaagaaaaaggagaaggaaaaagaggaggaaccaaagaaaccgaacgagaauaagcugaaacagcccgaaggaaaccgagaggccccuggccagccagaggguaaucgugaagcacccgggcagccugagggaaacagagaagccccaggccaacccgagggcaauagggaagcuccugggcagccagagggaaaccgggaggcaccgggucagcccgaaggcaaucgcgaggccccugggcagccagaaggaaacagagaggcucccggccaaccugaagguaauagggaggccccagcgcagcccgaggggaaccgggaagcaccgggacagccugagggcaaccgcgaagcccccgcucagccagagggcaaucgagaagccccugcacaaccccaggggaacggaggugcuggccaggcccaaccacagaagaaugaagggggaaacgcgggcgccagaaagggucaggggcagaauaaccaaggcgcaaaugcucccaacgagaaagugguuaaugacuaccuucagaagaucaggucgucagugacuacggaguggaccccuugcagcgucacauguggaaacggcgugcggauuaaacguaaggcccacgcugauaaaaagaaagccgaggaccugacuauggaugacuuggaaguagaggcaugcguuauggauaagugugccgggaucuuuaauguggucaguaacucccucggacuggugauucugcucguguuagcucuguucaauuga

SEQ ID NO: 4426 - RNA, 966 nt, Artificial Sequence
  derived and/or modified CDS sequence (opt3) from Pk(LT33)__ADN94509.1__CSP
augaagaacuucauccugcucgccgugagcuccauucuucuggucgacuuguuacccacccacuuugagcauaauguugaucugucuagagcuauaaacgugaauggcguaucauucaacaauguggacacaaguagccuaggggcagcccaggucaggcaauccgcgucucggggacgcggucucggcgaaaaacgaaaggagggggcugauaaagaaaagaaaaaggagaaggaagaggagccuaaaaagccaaacgaaaauaaacugaagcagccggagcaggcccgugcaggaggcgaacagcccgccgcugguggggagcaaccugcagccggaggcgagcagccagcugccggcggggaacagcccgcggcaggaggugagcagccugccgcuggcggggaacaaccagccgcaggaggcgagcagcccgcugccgguggggaacagccugcggccggaggcgagcagccagcagcuggcggggagcaaccggccgcuggaggugaacagcccgccccugcaccaagaagggagcagcccgccgcuggcggggaacaaccugcgccagcaccccggcgcgagcagccggccgcuggaggcgaacagccugcccccggugcaggggccggcgacggagcuagaggcgggaacgccggagcagguaaaggccaggggcaaaauaaccagggagcgaaugugccaaacgagaagguugugaaugauuaccuucacaagaucaggucgucagucacuacggaguggaccccuugcagcgugacauguggcaacgguguacggauucgccgaaaagcucaugccgacaagaaaaaggcagaaaaucugacuauggaugacuuggagguugaagccugcgugauggauaaaugugcugggaucuuuaacgucgugaguaacucccucggccuggugauucugcucgucuuagcccuguucaauuga

SEQ ID NO: 4427 - RNA, 960 nt, Artificial Sequence
  derived and/or modified CDS sequence (opt3) from Pk(UM0032C4)__AHF20653.1__CSP
augaagaacuucauccugcucgccgugagcuccauucuucuggucgacuuguuacccacccacuuugagcauaauguugaucugucuagagcuauaaacgugaauggcguaucauucaacaauguggacacaaguagccuaggggcagcccaggucaggcaauccgcgucucggggacgcggucucggcgaaaaaccuaaggagggggcugauaaagaaaagaaaaaggagaaggaaaaagaggaggaaccaaagaaaccgaacgagaauaagcugaaacagcccaacgccgaaggagacggcgcaaaugcccgacagccuaacgcugagggugauggggcaaaugcccgucagccaaacgcugagggagacggcgccaaugcgagacaacccaacgcagaaggcgauggggccaaugcuaggcagccuaacgccgagggagacggugcaaacgcucggcagccaaaugccgaaggcgauggggcgaacgcccgccagcccaaugcagagggaggcggugcuaacgccagacaaccucaggcugaaggggacggagccaaugcaaggcagccacaggcccaaggcgauggcgggaacgcucggcagggagguaauggcgggggagcgccggcaggcgguaacgaggggaauaagcaggccggcaagggacaaggccagaacaaucagggggcuaacgcccccaaugagaaagugguuaacgacuaccuucagaagauccgcucgucagugacuacggaauggaccccuugcagcgucauuuguggaaauggugugcgaaucagaaggcgggcacacgccgauaaaaagaaagcugaggaccugacaauggacgauuuggaaguagaggccugcguuauggacaagugugcaggcauuuuuaacguggucaguaacucccucggguucgugauccugcuggugcucgcguuauuuaauuga

SEQ ID NO: 4428 - RNA, 951 nt, Artificial Sequence
  derived and/or modified CDS sequence (opt3) from Pk(SGEHIH1-im-Y09-80)__AFD97207.1__CSP
augaagaacuucauccugcucgccgugagcuccauucuucuggucgacuuguuacccacccacuuugagcauaauguugaucugucuagagcuauaaacgugaauggcguaucauucaacaauguggacacaaguagccuaggggcagcccaggucaggcaauccgcgucucggggacgcggucucggcgaaaaaccuaaggagggggaugacaaagaaaagaaaaaggagaaggaaaaagaggaggaaccaaagaaacugaacgagaauaacccgaagaaacccaaugaagagggagauggcgcuaaacuuaagcagccuaacgaggaaggugacggggccaagcugaagcagccaaaugcagagggaggcgccaacgcuggccagcccaaugcagaagggggagccaacgcuggucaaccuaaugccgagggcggggcgaacgcacgacagccaaacgccgaaggaggcgcuaaugccggucagcccaacgcagaagggggagcuaaugccggccagccuaacgcggagggcggggccaaugcacgucaaccacaggcugagggagguggcgccaacgcuagacagccgcaggccgaagggggaggcgcaaaugccaggcaaggugggaacgagggcaauaaacaggcuggaaagggccaggggcaaaacaaucagggagcgaacgcacccaaugagaaagugguuaacgauuacuugcagaagauccggucgucagugacuauugaauggacgccuugcagcgucaccugugguaauggcgugcgcaucagaaggcgggcccacgcugacaaaaagaaggccgaggaucucacaauggacgaucuggagguagaagcaugcguuauggacaaaugugccgggauuuuuaacguggucaguaacucccugggacucgugaucuuacuggugcuugcuuuguucaauuga

SEQ ID NO: 4429 - RNA, 939 nt, Artificial Sequence
  derived and/or modified CDS sequence (opt3) from Pk(LT33)__ADN94514.1__CSP
augagaaacuucauccugcucgccgugagcuccauucuucuggucgacuuguuacccacccacuuugagcauaauguugaucugucuagggcuauaaacgugaauggcguaucauucaacaauguggacacaaguagccuaggggcagcccagguccggcaauccgcgucucgcggacgaggucucggcgaaaagcguaaagagggggcugauaaggagaaaaagaaagaaaaggaagaggagccuaagaaaccaaacgaaaauaagcugaaacagccggagcaggccgcacccggagccggcggugaacagccugcuccaggggcaggaggcgagagacccgccccuggcgcugggggagagcaaccagcccccggugcgggcggggaacagccugcaccaggagccggcggugagcagccggcucccggggccggaggcgaacagccugcagcuggcggggagcaaccagccgcgggaggugaacagcccgccccugcaccaaggcgggagcagcccgcugccggcggggagcagccggcuccugcaccccgcagagaacaaccagccgccggaggcgagcagccugcucccggugcgggggcaggcgacggagccaggggcgggaacgcuggagccgguaagggccaggggcaaaauaaccagggagcaaaugugccaaacgaaaaaguugugaaugauuaccuucacaagauccggucgucagucacuacggaguggacccccugcagcgugacauguggcaacgguguacgcauucgaagaaaggcccaugcugacaaaaagaaagccgaaaaucugacuauggaugacuuggagguugaggcaugcgugauggauaagugugcggggaucuuuaacgucgugaguaacucccucggccuggugauucugcucgucuuagcucuguucaauuga

SEQ ID NO: 4430 - RNA, 894 nt, Artificial Sequence
  derived and/or modified CDS sequence (opt3) from Pk(SGEHIWM26-Y09-98)__AFD97239.1__CSP
augaagaacuucauccugcucgccgugagcuccauucuucuggucgacuuguuacccacccacuuugagcauaauguugaucugucuagagcuauaaacgugaauggcguaucauucaacaauguggacacaaguagccuaggggcagcccaggucaggcaauccgcgucucggggacgcggucucggcgaaaaaccuaaggagggggcugauaaagaaaagaaaaaggagaaggaagaggagccgaaaaagccaaacgaaaauaaacugaagcagcccgacacugugccuggaggcgaggaaccagcccccggucgagagcagccugcaccagggcgugaggaacccgccccuggaagagagcagccagcuccgggcagggaagaacccgcaccuggccgggaacaaccagcccccgggcgcgaggagccugcuccaggaagagaacagcccgccccggguagggagcagccugcgcccggccgggaggagccagcaccugggcgcgaacagcccgccccaggacgagaggagcccgcuccugccccaggcgcuggugcuggggauggagccagaggcggcaacgcgggggccggaaaaggucaaggccagaauaaccagggggcaaauguuccgaacgaaaagguggucaaugacuaccuucacaagaucaggucgucagugacgaccgaguggacacccugcagcguaacuuguggaaacggcguucggauucgucgcaaaggucaugcugggaauaagaaagccgaagaucugaccauggacgauuuggagguggaagcaugcgucauggacaagugugccggcaucuuuaacguggugaguaacucccucggacuggucauucugcucguuuuagcacuguucaauuga

SEQ ID NO: 4431 - RNA, 801 nt, Artificial Sequence
  derived and/or modified CDS sequence (opt3) from Pk(KH296)__ADN94490.1__CSP
augagaaacuucauccugcucgccgugagcuccauucuucuggucgacuuguuacccacccacuuugagcauaauguugaucugucuagggcuauaaacgugaauggcguaucauucaacaauguggacacaaguagccuaggggcagcccagguccggcaauccgcgucucgcggacgaggucucggcgaaaagcguaaagagggggcugauaaggagaaaaagaaagaaaaggaagaggagccuaagaaaccaaacgaaaauaagcugaaacagccggagcaggccgcacccggagccggcggugaacagccugcuccaggggcaggaggcgagcaacccgccccuggcgcugggggagagcagccagcccccggugcgggcggggaacagccugcaccaggagccggcggugagcagccggcucccgccccuagaagggaacaaccagcacccgcuccuggggccggagacggcgcgcggggcgggaacgccggagcagguaagggccaggggcagaauaaccagggagcuaaugugccaaacgagaaaguugugaaugauuaccuucacaagauccgcucgucagucacuacggaauggacccccugcagcgugacauguggcaacgguguaagaauuaggcggaaggcccaugcugacaaaaagaaagccgaggaucugacuauggacgauuuggagguugaagcaugcgugauggacaagugugccgggaucuuuaaugucgugaguaacucccucggccuggugauucugcucgucuuagcucuguucaacuga

SEQ ID NO: 4432 - RNA, 801 nt, Artificial Sequence
  derived and/or modified CDS sequence (opt3) from Pk(LT33)__ADN94528.1__CSP
augagaaacuucauccugcucgccgugagcuccauucuucuggucgacuuguuacccacccacuuugaacauaauguugaucugucuagggcuauaaacgugaauggcguaucauucaacaauguggacacaaguagccuaggggcagcccagguccggcaauccgcgucucgcggacgaggucucggcgaaaagcguaaagagggggcugauaaggagaaaaagaaagaaaaggaagaggagccuaagaaaccaaacgaaaauaagcugaaacagccggagcaggccgcacccggagccggcggugaacagccugcuccaggggcaggaggcgagagacccgccccuggcgcugggggagagcaaccagcccccggugcgggcggggaaaggccugcaccaggagccggcggugagcagccggcucccgccccucggcgcgaacagccagcacccgggccuggagcuggcgacggcgccagagggggaaacgcgggugccggcaaggggcagggacaaaauaaccagggcgcaaaugugccaaacgagaaaguugugaaugauuaccuucacaagaucaggucgucagucacuacggaauggacccccugcagcgugacaugugguaacgggguacggauucgccgaagacagaaugcuggcaacaagaaagccgaggaccugacuauggaugacuuggagguugaggcuugcgugauggauaagugugccggaaucuuuaacgucgugaguaauucccucggccuggugauucugcucgucuuagcacuguucaacuga

SEQ ID NO: 4433 - RNA, 744 nt, Artificial Sequence
  derived and/or modified CDS sequence (opt3) from Pk(SGEHIWM4-Y09-8)__AFD97222.1__CSP
augaagaacuucauccugcucgccgugagcuccauucuucuggucgacuuguuacccaccuacuuugagcacaauguugaucugucuagagcuauaaacgugaauggcguaucauucaacaguguggacacaagcucccuaggggcagcccaggucaggcaaucugcgucgcggggacgcggucucggcgaaaaaccuaaggagggggcugauaaagaaaagaaaaaggagaaggaaaaagaggaggaaccaaagaaaccgaaugagaacaagcugaaacagccccagggaaauggcggugccgggcaggcacaaccucagggaaacggcggcgccgggcaggcucagccagaaggaaaucgagaggcacccgcccaaccucaggguaacggcggggcuggacaggcccagccacaaaagaaugagggcgguaacgcgggggcacguaagggacagggccagaauaaccaaggcgccaaugcucccaacgaaaaagugguuaacgacuaucuucagaagaucagaucaagcgugacuacggaguggaccccuugcagugucacaugugggaauggagugaggauucggcgcagagcccaugcagauaaaaagaaagcugaagaccugacuauggaugacuuggagguagaagccugcguuauggauaagugugcggguaucuuuaacguggucuccaauucucucggccuggugauuagccuggugcucgccuuauucaacuga

SEQ ID NO: 4434 - RNA, 720 nt, Artificial Sequence
  derived and/or modified CDS sequence (opt3) from Pk(PT01)__ADN94512.1__CSP
augagaaacuucauccugcucgccgugagcuccauucuucuggucgacuuguuacccacccacuuugagcauaauguugaucugucuagggcuauaaacgugaauggcguaucauucaacaauguggacacaaguagccuaggggcagcccagguccggcaauccgcgucucgcggacgaggucucggcgaaaagcguaaagagggggcugauaaggagaaaaagaaagaaaaggaagaggagccuaagaaaccaaacgaaaauaagcugaaacagccggagcaggccgcacccggagccggcggugaacagccugcuccaggggcaggaggcgagcaacccgccccugcuccaagaagggagcagcccgccccugcgccaggcgcaggggacggagcccgggguggcaacgcuggggccggaaagggccagggucagaauaaccaaggggcaaaugugccgaacgaaaaaguugugaaugauuaccuucacaagauccgcucgucagucacuacggaguggacccccugcagcgugacauguggaaacggcguaagaauuaggcggaaggcucaugccgacaaaaagaaagcggaagaucugacuauggacgauuuggagguugaagccugcgugauggacaagugugcaggcaucuuuaaugucgugaguaacucccucgggcuggugauucugcucgucuuagcucuguucaacuga

SEQ ID NO: 4435 - RNA, 717 nt, Artificial Sequence
  derived and/or modified CDS sequence (opt3) from Pk(LT53)__ADN94502.1__CSP
augaagaacuucauccugcucgccgugagcuccauucuucuggucgacuuguuacccacccacuuugagcauaauguugaucugucuagagcuauaaacgugaauggcguaucauucaacaauguggacacaaguagccuaggggcagcccaggucaggcaauccgcgucucggggacgcggucucggcgaaaaaccuaaggagggggaugacaaagaaaagaaaaaggagaaggaaaaagaggaggaaccaaagaaccugaaugagaacaaaccgaagcagcccaaugcugaaggagauggcgccaaaccuaagcagccaaacgcagagggugacggggccaaugcucgacagccccaagcagagggaggcggcgggaacgcccgucagggagguaaugaaggcaacaagcaggcugggaaaggacagggccaaaauaaccagggugccaacgcgccuaaugagaaggugguuaacgauuaccuucagaaaaucagaucgucagugacuacggaauggaccccaugcagcgucacaugugggaauggagugaggauucggcgcagagcacacgccgacaagaaaaaggcugaggaucugacuauggacgauuuggaaguagaggccugcguuauggacaaaugugcaggcaucuuuaacguggucaguaauucccucggccuggugauucugcucguguuagcucuguucaacuga

SEQ ID NO: 4436 - RNA, 702 nt, Artificial Sequence
  derived and/or modified CDS sequence (opt3) from Pk(SGEHIWM5-Y09-79)__AFD97229.1__CSP
augaagaacuucauccugcucgccgugagcuccauucuucuggucgacuuguuacccacccacuuugagcauaauguugaucugucuagagcuauaaacgugaauggcguaucauucaacaauguggacacaaguagccuaggggcagcccaggucaggcaauccgcgucucggggacgcggucucggcgaacgaccuaaagagggggcugauaaggagaaaaagaaagaaaaggaaaaggagaaagaggaaccaaagaaaccgaacgagaauaagcugaaacagcccgaacagccugccgcaggagccggcggugagcagccagcucccgcaccucguagagagcaaccagcccccggggcuggagccggcgacggcgcgaggggagggaacgcuggugccggcaaggggcagggacagaauaaccagggcgcuaaugugccuaacgaaaagguugugaaugauuaccuucacaaaauccggucgucagucacuacggaguggaccccaugcagcgugacaugugguaacgggguacgcauuagaaggcggcaaaaugccggaaacaagaaagcagaagaccugacuauggaugacuuggagguugaagcaugcgugauggauaagugugccggcaucuuuaacgucgugaguaauucccucggccuggugauucugcucgucuuagcgcuguucaacuga

SEQ ID NO: 4437 - RNA, 660 nt, Artificial Sequence
  derived and/or modified CDS sequence (opt3) from Pk(PT01)__ADN94513.1__CSP
augagaaacuucauccugcucgccgugagcuccauucuucuggucgacuuguuacccacccacuuugagcauaauguugaucugucuagggcuauaaacgugaauggcguaucauucaacaauguggacacaaguagccuaggggcagcccagguccggcaauccgcgucucgcggacgaggucucggcgaaaagcguaaagagggggcugauaaggagaaaaagaaagaaaaggaagaggagccuaagaaaccaaacgaaaauaagcugaaacagccggagcaggccgcacccagaagggaacagccugccccagcucccggagcaggcgacggugcccgcgggggaaacgcuggcgccggcaaggggcaaggacagaauaaccagggugcgaaugugccuaacgagaaaguugugaaugauuaccuucacaagauccggucgucagucacuacggaguggaccccaugcagcgugacauguggcaacgggguaagaauuaggcggaaggcacaugccgacaaaaagaaagcugaagaucugacuauggacgauuuggagguugaagccugcgugauggacaagugugcaggaaucuuuaaugucgugaguaacucccucggccuggugauucugcucgucuuagcucuguucaacuga

SEQ ID NO: 4438 - RNA, 1290 nt, Artificial Sequence
  derived and/or modified CDS sequence (opt3) from Pm(408/Cameroon)__CAA05623.1__CSP
augaagaaacugagcgugcucgccaucuccucuuuccuuauugucgacuuucuguuccccggcuaccaccauaacucaaauaguaccaagagcagaaacuuguccgaguuaugcuauaauaacguugauacaaaacuguuuaaugaacuagaggugagguacucuacuaaccaggaccacuucuauaauuacaacaagacgauacggcuccugaaugaaaacaauaacgagaaagaugggaauguaaccaacgaacgcaagaagaaaccuacaaaggcuguggagaauaaacuuaagcaaccaccgggagacgaugacggugcaggcaacgaugccgggaacgacgcgggaaaugcugccggcaacgcagccgguaaugcugcagggaacgccgcuggaaaugccgcgggcaacgaugcaggcaaugccgcugggaacgccgcaggaaaugcugccgguaacgcggccggcaaugcagcugggaacgacgccggaaaugcugccggcaacgaugcagguaaugccgcugggaacgcggcaggaaacgccgcuggcaaugccgcaggcaacgccgcugggaaugacgccggaaacgcagcggguaaugcugccggcaacgcagccgggaaugcugccggaaacgcagcuggcaaugccgcggguaacgccgcugggaaugcagccggcaacgcugccggaaaugcagcgggcaacgaugccgggaaugcugccggaaacgcagcugguaacgccgcaggcaaugccgcugggaacgcggccggaaaugcagcuggcaacgccgccgguaaugcugcagggaacgccgcgggcaaugcugccggaaacgcagccggcaaugcugcagggaacgccgcgggaaaugcugccgguaacgcagccggcaaugcugccgggaacgcagcuggaaaugccgcgggcaacgagaaagccaagaacaaggacaauaaagucgacgcaaacacuaauaagaaagauaaccaggaagagaauaacgacucgucaaauggucccagcgaggaacauaucaagaacuaucuggagaguauucgaaauuccaucaccgaagaguggucuccuuguagcgugacaugcggguccggcauucguaccagaaggaaaguugaugcuaagaacaaaaagccagccgaauuggugcucucagaccuggagacugaaaucuguagucuggauaagugcagcucuauauuuaaugucguguccaacucacucggaaucguauuaguucuggugcuuauuuuguuccacuga

SEQ ID NO: 4439 - RNA, 1290 nt, Artificial Sequence
  derived and/or modified CDS sequence (opt3) from Pm(Uganda 1-CDC)__AAA29557.1__CSP
augaagaaacugagcgugcucgccaucuccucuuuccuuauugucgacuuucuguuccccggcuaccaccauaacucaaauaguaccaagagcagaaacuuguccgaguuaugcuauaauaacguugauacaaaacuguuuaaugaacuagaggugagguacucuacuaaccaggaccacuucuauaauuacaacaagacgauacggcuccugaaugaaaacaauaacgagaaagaugggaauguaaccaacgaacgcaagaagaaaccuacaaaggcuguggagaauaaacuuaagcaaccaccgggagacgaugacggugcaggcaacgaugccgggaacgacgcgggaaaugaugcuggcaacgccgcagguaaugccgcugggaacgcagccggaaaugcugccggcaacgcggcaggcaaugccgcugggaacgccgcaggaaaugcugccgguaacgcggccggcaaugcagcugggaacgacgccggaaaugcugccggcaacgcagccgguaaugcugcggggaacgcagccggaaacgcugccggcaaugaugcaggcaacgccgcugggaaugccgcaggaaacgcggcugguaaugccgcaggcaacgccgcugggaaugccgcaggaaacgcugccggcaaugcggccgguaacgcugcagggaaugccgcuggcaacgacgccggaaaugcagcgggcaacgccgcugggaaugccgcaggaaacgcugccgguaacgcagccggcaaugcugcggggaacgccgcaggaaaugcugccggcaacgccgcugguaaugcagccgggaacgcggcuggcaaugccgcaggaaacgccgcuggcaaugcagccgggaacgcggcuggaaaugccgcagguaacgccgcuggcaaugccgcagggaacgcugccggaaaugcggccggcaacgagaaagcaaagaacaaggauaauaaagucgacgcuaacacuaauaagaaagacaaccaggaagagaauaacgauucgucaaauggucccagcgaggaacauaucaagaacuaucuggagaguauucgaaauuccaucaccgaagaguggucuccuuguagcgugacaugcggguccggcauucgugccagaaggaaaguuggagcuaagaacaaaaagccagcagaauuggugcucucagaccuggagaccgaaaucuguagucuggauaagugcagcucuauauuuaaugucguguccaacucacucggcaucguauuaguucuggugcuuauuuuguuccacuga

SEQ ID NO: 4440 - RNA, 1170 nt, Artificial Sequence
  derived and/or modified CDS sequence (opt3) from Pm(UG01)__SCN12386.1__CSP
augaagaaacugagcgugcucgccaucuccucuuuccuuauugucgacuuucuguuccccggcuaccaccauaacucaaauaguaccaagagcagaaacuuguccgaguuaugcuauaauaacguugauacaaaacuguuuaaugaacuagaggugagguacucuacuaaccaggaccacuucuauaauuacaacaagacgauacggcuccugaaugaaaacaauaacgagaaagaugggaauguaaccaacgaacgcaagaagaaaccuacaaaggcuguggagaauaaacuuaagcaaccaccgggagacgaugacggugcaggcaacgaugccgggaacgacgcgggaaaugcugccggcaacgcagccgguaaugcugcagggaacgccgcuggaaaugaugccggcaacgcggcaggcaaugccgcugggaacgccgcaggaaaugcugccgguaacgcggccggcaaugcagcugggaacgccgcuggaaaugccgcaggcaacgccgcugguaaugcggcagggaacgccgcuggaaacgccgcaggcaaugccgcuggcaacgccgcagggaaugcggcuggaaacgccgcagccgguaaugcugccggcaacgcagcugggaaugccgcgggagccgcuggcaacgcagccgguaaugcugccgggaacgcagcgggcaaugccgcuggaaacgccgcaggcaaugcugccgggaacgcagccggaaaugcugcggguaacgccgcaggcaacgcugccgggaaugccgcuggaaacgcagccggcaaugcggcugguaacgccgcagggaaugagaaagccaagaacaaggacaauaaagucgaugcuaacacuaauaagaaagacaaccaggaagagaauaacgauucgucaaauggccccagcgaggaacauaucaagaacuaucuggagaguauucgaaauuccaucaccgaagaguggucuccuuguagcgugacaugcggauccggcauucgugcaagaaggaaaguugacgccaagaacaaaaagccagcggaauuggugcucucagaccuggagaccgaaaucuguagucuggauaagugcagcucuauauuuaacgucguguccaauucacucgggaucguauuaguucuggugcuuauuuuguuccacuga

SEQ ID NO: 4441 - RNA, 1170 nt, Artificial Sequence; identical to SEQ ID NO: 4440
  derived and/or modified CDS sequence (opt3) from Pm()__SCN12386.1__CSP

SEQ ID NO: 4442 - RNA, 885 nt, Artificial Sequence
  derived and/or modified CDS sequence (opt3) from Pm(PmlGA01)__SBT79431.1__CSP
augaagaaacugagcgugcucgccaucuccucuuuccuuauugucgacuuucuguuccccggcuaccaccauaacucaaauaguaccaagagcagaaacuuguccgaguuaugcuauaauaacguugauacaaaacuguuuaaugaacuagaggugagguacucuacuaaccaggaccacuucuauaauuacaacaagacgauacggcuccugaaugaaaacaauaacgcuaaagaugggaauguaaccaacgagcgcaagaagaaaccuacaaaggcaguggaaaauaaacuuaagcaaccaccgggagacgaggaggaugacgccgaaaacggugagggcaacgaacgagggaauggagagggcaacgagcgugguaauggggaaggaaacgagagaggcaauggcgaagggaacgagaggggaaauggugcgggcaacgaacgggggaaugaugcuggaaacgccgcaggcaaugccgcugguaacgacgcagggaaugccgcuggaaacgccgcgggcaaugcagccggcaacgcugccgggaacgaugcaggaaaugcugccgguaacgcggccggcaaugcagcugggaacggagagaauaacgacucgucaaauggccccagcgaggaacauaucaaaaacuaucuggagaguauucgcaauuccaucacugaagaguggucuccuuguagcgugaccugcgguaacgggauuagagccaggcggaaggucgaugcuaagaauaaaaagccagccgaauugguucucuccgaccuggagacagagaucuguucacuggauaaaugcaguagcauauuuaacguggucucuaauucccucggcaucguguuaguacugguucuuauuuuguuccacuga

SEQ ID NO: 4443 - RNA, 1104 nt, Artificial Sequence
  derived and/or modified CDS sequence (opt3) from Poc(contig1754)__SBT00176.1__CSP
augagaaaccuggccaucuucgcugugagcgcauuucucuucgccgacuccagguaccccgucuaugcgcacaauggcaacucuaccgaggggcggaaacuuaaugaacugugcuacaacaauguugauuuguauaacacauuauuuaaugagcuggacgugggaucaaguacuaaccaggcuuucuuucuaaauagcaagaagacgcuccgccugcuuaacgaaaauccuaaagagaacaagaaaaagcgaaaggaugacaaaaagccaguagaaaauaaacugaagcaaggugagcgugagaacgauccgcccgccccuagaggcgaagggaauccacccgcaccucagggagagggcaacccacccgccccucagggugaagggaacccaccggcuccccagggagagggcaauccuccagcaccccaaggcgaggggaacccuccagcccccaggggagaagguaauccgccugcuccccagggcgaggggaacccacccgccccucagggagaaggcaauccacccgcgccucagggugaggggaacccaccggcaccccggggagaaggcaauccuccagcaccccaaggcgaggggaacccuccagcuccccagggagaggguaauccgccugccccacagggcgaagggaacccucccgcagcucagggagagggcaaucccccagccgcgcaagguaacgggaauccucccgccgcacagggcaacggaaauccaccggcugcccagggcaacgggaacccucccgcuccagccggaaaagguaagaaugaaaaccaaaaggagaaagaagagaagaaugcagccaacaaucccccuuccgaggacgauauuaaaaaguacauagacaaaauccgcaacgauauuaccgaaaauuggucuccauguucggugacaugcggcuucggggucagagugaggcggaaggcuggagcgucagccaaaaaggcccaggaguugacucucagcgaccuggaaaccgagaucuguaagauugaaaacugcaguuccaucuuuaauguugugucuaacagccugggccucgucauauucuuauuucugguguucuuucauuga

SEQ ID NO: 4444 - RNA, 888 nt, Artificial Sequence
  derived and/or modified CDS sequence (opt3) from Poc(GH01)__SBT84923.1__CSP
augagaaaccuggccaucuucgcugugagcgcauuucucuucgccgacuccagguaccccgucuaugcgcacaauggcaacucuaccgaggggcggaaacuuaaugaacugugcuacaacaauguugauuuguauaacacauuauuuaaugagcuggacgugggaucaaguacuaaccaggcuuucuuucuaaauagcaagaagacgcuccgccugcuuaacgaaaauccuaaagagaacaagaaaaagcgaaaggaugacaaaaagccaguagaaaauaaacugaagcaaggugagcgugagaacgauccgcccgccccucagggcgaagggaauccacccgcaccucagggagagggcaacccacccgccccucagggugaagggaacccaccggcuccccaaggagagggcaauccuccagcaccccagggcgaggggaacccuccagccgcucagggagaagguaaucccccggccgcgcagggcaacgggaauccucccgcagcccaaggaaacggcaauccuccagcugcccaggguaacgggaaucccccagcacccgcuggaaaaggcaagaacgagaaucagaaggaaaaagaggaaaagaacgccgcgaauaacccuccauccgaggacgauauuaaaaaguacauagacaaaaucagaaaugauauuaccgagaacuggucuccguguucggugacaugcggcuucggggucagggugcggcgcaaggccggagcaucagcuaaaaaggcccaggaauugacucucagcgaccuggagaccgaaaucuguaagauugagaacugcaguuccaucuuuaauguugugucuaacagccugggucucgucauauucuuauuucugguguucuuucauuga

SEQ ID NO: 4445 - RNA, 828 nt, Artificial Sequence
  derived and/or modified CDS sequence (opt3) from Poc(contig251)__SBS83173.1__CSP
augagaaaccuggccaucuucgcugugagcgcauuucucuucgccgacuccagguaccccgucuaugcgcacaauggcaacucuaccgaggggcggaaacuuaaugaacugugcuacaacaauguugauuuguauaacacauuauuuaaugagcuggacgugggaucaaguacuaaccaggcuuucuuucuaaauagcaagaagacgcuccgccugcuuaacgaaaauccuaaagagaacaagaaaaagcgaaaggaugacaaaaagccaguagaaaauaaacugaagcaaggugagcgugagaacgauccgcccgccccuagaggcgaagggaauccacccgcaccucagggagagggcaacccacccgccccucagggugaagggaacccaccggcuccccagggagagggcaauccuccagcaccccaaggcgaggggaacccuccagccgcucagggagaagguaaucccccggccgcgcagggcaacccucccgcaccagccgggaaaggaaagaaugagaaccagaaggaaaaagaggaaaagaaugcugccaacaauccucccuccgaggacgauauuaaaaaguacauagacaaaaucaggaacgauauuaccgagaauuggucuccauguucggugacaugcggcuucgguguccgggugcgcagaaaggcaggggcuucagccaaaaaggcgcaagaauugacucucagcgaccuggagaccgaaaucuguaagauugagaacugcaguuccaucuuuaauguugugucuaacagccugggacucgucauauucuuauuucugguguucuuucauuga

SEQ ID NO: 4446 - RNA, 945 nt, Artificial Sequence
  derived and/or modified CDS sequence (opt3) from Pow(contig93)__SBT35133.1__CSP
augagaaaccuggccaucuucgcuguuagcgcauuucucuucgccgacuccggcuaccccgucuaugcgcacaaugggaacucuauggagggaaggaaacuuaaugaacugugcuacaacaauguugauuuguauaacaccuuauuugacggucuggauguggagucaaguacaaaucaggcuuucuuucuaaacagcaaaaagacucuccggcugcuuaaugaaaacccuaaagagaauaagaaaaagcgcaaggacgauaaaauuccaguagaaaacaagcugaaacaaggcgaccgagagaaugauccgcccgccccugugccacagggggaucccccugcaccagucccccagggagacccuccagccgcugugccgcagggcgaucccccugcaccaguuccccaaggugacccuccagcaccccagggggacccgccugcucccgugccacagggagauccucccgccccagucccccagggcgacccuccagcgccggugccccaaggcgacccuccagcacccgccccucagggggauccacccgcuccggccccucagggagacgguaagccacccgccccugcuccccagggcgaugggaaccaaccagccccuggaaaaggcaaguccgagaaucagaaggaaaaagacgagaagaacgcggccaacaaucccccaucugaagaugacauaaagaaguacaucgauaaaauucguaaggacaucacggagaacuggucgccguguucaguaaccugcgguuuggggguuagagugaggcggaaagcaggagcuagcgccaagaaggcuaaugagcucacaauuaacgaugucgaaacugagaucuguaaaauagaaaauugcaguuccaucuucaacguggugucuaauagcauuggccuggucaucuuucuguuccucguguuuuuccauuga

SEQ ID NO: 4447 - RNA, 891 nt, Artificial Sequence
  derived and/or modified CDS sequence (opt3) from Pow(contig72)__SBT34702.1__CSP
augagaaaccuggccaucuucgcugugagcgcauuucucuucgccgacuccggcuaccccgucuaugcgcacaaugggaacucuauggagggaaggaaacuuaaugaacugugcuacaacaauguugauuuguauaacaccuuauuugacggucuggauguggagucaaguacaaaucaggcuuucuuucuaaacagcaaaaagacucuccggcugcuuaaugaaaacccuaaagagaauaagaaaaagcgcaaggacgauaaaauuccaguagaaaacaagcugaaacaaggcgaccgagagaaugauccgcccgccccugugccacagggggaucccccugcaccagucccccagggagacccuccagccccggugccccagggcgacccuccagcucccguuccucaaggugauccacccgcaccgcagggggacccucccgccccagugccucagggagaucccccagcucccgccccucagggcgacccaccggcgcccgcaccucaaggcgacgggaagccacccgccccugcuccacagggagaugguaaccagcccgccccgggcaaagggaaguccgagaaucagaaggaaaaagacgagaagaacgcagcuaacaauccuccaucugaagaugacauaaagaaguacaucgauaaaauucguaaggacaucacggagaacuggucgcccuguucagugaccugcggauugggcgucagaguaaggcggaaagccggugcgagcgccaagaaggcaaaugagcucacaauuaacgauguugaaacugagaucuguaaaauagaaaauugcaguuccaucuucaacguggucucuaauagcauugggcuggugaucuuucuguuccucguguuuuuccauuga

SEQ ID NO: 4448 - RNA, 1020 nt, Artificial Sequence
  derived and/or modified CDS sequence (opt3) from Po(PowCR01)__SBT72933.1__CSP
augagaaaccuggccaucuucgcugugagcgcauuucucuucgccgacuccggcuaccccgucuaugcgcacaaugggaacucuauggagggaaggaaacuuaaugaacugugcuacaacaauguugauuuguauaacaccuuauuugacggucuggauguggagucaaguacaaaucaggcuuucuuucuaaacagcaaaaagacucuccggcugcuuaaugaaaacccuaaagagaauaagaaaaagcgcaaggacgauaaaauuccaguagaaaacaagcugaaacaaggcgaccgagagaaugauccgcccgccccugugccacagggggaucccccugcaccagucccccagggagacccuccagccgcugugccgcagggcgaucccccugcaccaguuccccaaggugacccuccagcuccccagggggacccgccugcccccgugccacagggagauccucccgccccagucccccagggcgacccuccagcgccggugccccaaggcaacccuccagcacccguaccucagggggacccacccgccccgcagggagauccuccagcucccguuccucagggugaucccccagccccugcaccccaaggcgacccaccggcuccugcgccccagggggacggaaagccacccgccccugccccacagggcgaugguaaucaacccgcaccugggaaaggaaaguccgagaaccagaaggaaaaagacgagaagaacgcugccaauaacccgccaucugaagaugacauaaagaaguacaucgauaaaauucguaaggacaucacggagaauuggucgcccuguucagugaccugcggcuugggcgucagagugaggcggaaagcuggggccagcgcaaagaaggccaacgagcucacaauuaaugauguggaaacugagaucuguaaaauagaaaacugcaguuccaucuucaaugucguuucuaacagcauuggacuggugaucuuucuguuccucguauuuuuccauuga

SEQ ID NO: 4449 - RNA, 1164 nt, Artificial Sequence
  derived and/or modified CDS sequence (opt3) from Pv(Pt02.1)__ADB92551.1__CSP
augaagaacuucauccugcucgccgugagcuccauucuucuggucgacuuguuucccacccacugcggccauaauguugauuuaucuaaagcuauaaaccugaauggggugggauucaacaauguagacgcaucaagucuaggugccgcgcacgugggccagagcgcuuccagagggaggggacucggcgagaacccugaugacgaagagggugaugccaagaaaaagaaagacgggaagaaggcagaaccgaaaaauccacgggagaacaagcugaaacaacccgaagauggagccggcgaccagccuggcgcuaauggggcaggaaaccagccaggugccaauggcgcugggaaccagcccggagccaauggcgcggguaaccaaccuggggcaaauggagccggcaaccagccaggcgcuaacggggccggaaaucagcccggugcaaacggcgcugggaaucagccuggagccaacggcgcgggugaucaaccaggggccaauggcgcaggaaaccagccgggcgcuaauggggccggaaaccagcccggugcuaauggcgccggggaccagccuggagcaaacggcgccgguaaucaaccaggggcuaacggcgcgggagaucagcccggcgcaaauggggccggaaaccagccuggugcuaauggcgccgggaaccaaccaggagcaaacggcgccgguaaucagcccggggcuaacggcgccggaaaucagccgggcgcaaacggggcgggaggccaggcugccggugggaaugcagccaacaagaaagcuggagacgccggcgcugguggccaagcagccgggggaaaugcggccaacaagaaggcuggcgaugcaggggccggacagggccagaauaacgagggugcuaaugccccuaacgagaaaucugucaaggaauaccuugacaaagugcgcgcaacaguugggacugaguggacgcccuguucggugaccugcggagucggcgugcgaguacguagaaggguuaaugcggccaacaagaaaccagaagaccugacauugaaugaucucgagacugacguguguaccauggauaagugcgcugguaucuuuaacgucgugucaaacagccugggccuggugauucucuuaguccuggcccuuuucaauuga

SEQ ID NO: 4450 - RNA, 1134 nt, Artificial Sequence
  derived and/or modified CDS sequence (opt3) from Pv(Salvador I (Sal-1))__XP_001613068.1__CSP
augaagaacuucauccugcucgccgugagcuccauucuucuggucgacuuguuucccacccacugcggccauaauguugauuuaucuaaagcuauaaaccugaauggggugaacuucaauaacguagacgcaucaagucuaggagccgcgcacgugggucagagcgcuuccagaggcagggggcucggagagaauccugaugacgaagagggcgaugccaagaaaaagaaagacgguaagaaggcagaaccgaaaaacccacgggagaauaagcugaaacaacccggggaucgcgccgacggacagccugcuggcgaucgagcagacggccagccagccggggaucgugcugacggacagcccgccggugauagagcggacggccaaccugcaggggacagggccgcuggacagccagccggcgaucgggcagacggucagcccgcuggggaucgcgccgacggacagccugcgggcgauagagccgacggccaaccagcaggggauagggcugacggacagccggccggugaucgggcugccggccagcccgcaggggaccgcgccgcuggacagccugcgggcgaucgagcagacggucaaccagccggggacagagcugccggccagcccgcaggagauagggccgacggccagccugcuggggaucgggccgcaggacaaccagcgggugaccgugcugauggccagcccgccggggaccgcgcagccggacagccggcuggcgauagagccgcaggucagccugcuggggacagggccgcgggccaagccgcuggagaucgggcagccggccaggcugccgggggaaacgcggguggccaggggcagaauaacgaaggagcaaaugcccccaacgagaagucugucaaagaguaccuugacaaggugcgagcuacaguuggcacugaauggacgccauguucggugaccugcggugucggggugcgcguaagaaggcggguuaaugccgcaaacaagaaaccugaggaucugacauugaacgaccucgaaacugauguguguaccauggacaagugcgcuggcaucuuuaaugucgugucaaacagccugggacuggugauucucuuaguccuggcccuuuucaauuga

SEQ ID NO: 4451 - RNA, 1092 nt, Artificial Sequence
  derived and/or modified CDS sequence (opt3) from Pv(P01)__SGX77278.1__CSP
augaagaacuucauccugcucgccgugagcuccauucuucuggucgacuuguuucccacccacugcggccauaauguugauuuaucuaaagcuauaaaccugaauggggugaacuucaauaacguagacgcaucaagucuaggagccgcgcacgugggucagagcgcuuccagaggcagggggcucggagagaauccugaugacgaagagggcgaugccaagaaaaagaaagacgguaagaaggcagaaccgaaaaacccacgggagaauaagcugaaacaacccgccggggaucgcgcugacggacagccugcaggcgaucgagccgacggccagccagcuggggaucgugccgacggacagcccgcgggugauagagcagccggccaaccugcuggggacagggccgacggacagccagcaggcgaucgggcugccggucagcccgcgggggaccgcgccgauggacagccugcaggcgacagagcugccggccaaccagcuggggauagggccgacggacagccggccggugaucgggcagcuggccagcccgcgggggaccgcgcagccggacagccugcuggcgaucgagccgacggucaaccagcaggggauagagccgcuggccagcccgccggagacagggcagacggccagccugcgggggaucgggcugccggacaaccagccggugaccgugcagcuggccagcccgccgggaacggagcaggcggucaggcugccgggggcaaugcgggaggcaacgccgggggaaaugcugguggcaacgcagggggacagggccaaaauaacgaaggugccaacgcuccgaaugagaagucugucaaagaguaccuugauaaggugcgcgccacaguugggacugaauggacgccuuguucggugaccugcggcgucggagugagaguaaggcggcgaguuaacgcagcgaauaagaaacccgaggaccugacauugaacgaucucgaaacugacguguguaccauggauaagugcgccggcaucuuuaaugucgugucaaacagccuggggcuggugauucucuuaguccuggcucuuuucaauuga

SEQ ID NO: 4452 - RNA, 1188 nt, Artificial Sequence
  derived and/or modified CDS sequence (opt3) from Pv(Cam22)__AHL69650.1__CSP
augaagaacuucauccugcucgccgugagcuccauucuucuggucgacuuguuucccacccacugcggccauaauguugauuuaucuaaagcuauaaaccugaauggggugggauucaacaauguagacgcaucaagucuaggugccgcgcacgugggccagagcgcuuccagagggaggggacucggcgagaacccugaugacgaagagggugaugccaagaaaaagaaagacgggaagaaggcagaaccgaaaaauccacgggagaacaagcugaaacaacccgaagauggagccggcaaucagccuggcgcuaacggggcaggaaaucagccaggugccaacggcgcugggaaucagcccggagccaacggcgcggguaaucaaccuggggcaaacggagccggcaaccagccaggcgcuaauggggccggaaaccagcccggugcaaauggcgcugggaaccagccuggagccaauggcgcggguaaccaaccaggggccaauggcgcagacgaucagccgggagcuaacggcgccgggaaucagcccggagcuaacggugccggcaaucagccuggggcaaacggagccggcaaucaaccaggugcuaacggggcgggcgaccagcccggagcaaauggcgccgggaaccagccuggagcuaacggugccggcgaucaaccaggggcaaauggagccggcaaccagcccggugcuaauggggccggcaaccagccgggagcaaauggcgcggggaaccagccuggagcuaauggcgccgguaaccaacccggggcaaauggagccggcaaccagccaggugcuaauggcgccgggggacaggcagcuggcgggaacgccgcgaauaagaaagccggagacgcuggcgcaggucaggggcaaaacaaugagggagccaacgcuccuaacgagaagucugucaaggaauaccuugauaaagugcgcgccacaguuggcacugaguggacgcccuguucggugaccugcggugucggcgugcgaguacguagaaggguuaaugcagcgaacaagaaaccagaagaccugacauugaaugaccucgagacugauguguguaccauggacaagugcgccgggaucuuuaacgucgugucaaauagccugggacuggugauucucuuaguccuggcucuuuucaacuga

SEQ ID NO: 4453 - RNA, 1188 nt, Artificial Sequence
  derived and/or modified CDS sequence (opt3) from Pv(Cam29)__AGN05257.1__CSP
augaagaacuucauccugcucgccgugagcuccauucuucuggucgacuuguuucccacccacugcggccauaauguugauuuaucuaaagcuauaaaccugaauggggugggauucaacaauguagacgcaucaagucuaggugccgcgcacgugggccagagcgcuuccagagggaggggacucggcgagaacccugaugacgaagagggugaugccaagaaaaagaaagacgggaagaaggcagaaccgaaaaauccacgggagaacaagcugaaacaacccgaagauggagagggcaaucagccuggcgccaacggggcuggaaaucagccaggugcaaacggcgccgggaaucagcccggagcuaacggcgccgguaaucaaccuggggcgaacggagcaggcaaccagccaggcgccaauggggcuggaaaccagcccggugccaauggcgcagggaaccagccuggagcuaauggcgccgacgaucaaccaggugcgaacggggccggcaaucagccgggagcaaacggcgcugggaaucagcccggagccaacggugcuggcaaucagccuggggccaacggagcaggcgaccaaccaggugccaauggggcuggcaaccagcccggagcgaauggcgcagggaaccagccuggagccaacggugcuggcaaucaaccaggggccaacggagcaggcaaucagcccggugccaacggggcuggcaaucagccgggagccaacggcgcagggaaucagccuggagcgaacggcgcugguaaucaacccggggccaacggagcaggcaaucagccaggugccaacggcgcugggggacaggccgcaggcgggaaugcugccaacaagaaagcgggagaugccggcgcuggucaggggcaaaauaacgagggagcaaacgccccuaaugaaaagucugucaaggaguaccuugacaaagugcgcgcuacaguuggcacugaauggacgcccuguucggugaccugcggugucggcgugcgaguacguagaaggguuaacgccgcaaauaagaaaccagaggaucugacauugaacgaccucgagacugacguguguaccauggauaagugcgcggggaucuuuaaugucgugucaaacagccugggacuggugauucucuuaguccuggcccuuuucaauuga

SEQ ID NO: 4454 - RNA, 1188 nt, Artificial Sequence
  derived and/or modified CDS sequence (opt3) from Pv(Cam9)__AGN05240.1__CSP
augaagaacuucauccugcucgccgugagcuccauucuucuggucgacuuguuucccacccacugcggccauaauguugauuuaucuaaagcuauaaaccugaauggggugggauucaacaauguagacgcaucaagucuaggugccgcgcacgugggccagagcgcuuccagagggaggggacucggcgagaacccugaugacgaagagggugaugccaagaaaaagaaagacgggaagaaggcagaaccgaaaaauccacgggagaacaagcugaaacaacccgaagauggagccggcaaucagccuggcgcuaacggggcaggaaaucagccaggugccaacggcgcugggaaucagcccggagccaacggcgcggguaaucaaccuggggcaaacggagccggcaaccagccaggcgcuaauggggccggaaaccagcccggugcaaauggcgcugggaaccagccuggagccaauggcgcggguaaccaaccaggggccaauggcgcagacgaucagccgggagcuaacggcgccgggaaucagcccggagcuaacggugccggcaaucagccuggggcaaacggagccggcaaucaaccaggugcuaacggggcgggcgaccagcccggagcaaauggcgccgggaaccagccuggagcuaacggugccggcgaucaaccaggggcaaauggagccggcaaccagcccggugcuaauggggccggcaaccagccgggagcaaaugaggcgggcaaccagccuggggcuaauggagccggcaaccaacccggugcaaauggggccggaaaccagccaggcgcuaauggugccggcgggcaggcagcuggaggcaacgccgcgaauaagaaagccggggacgcuggagcaggccagggucaaaacaaugagggggccaacgcuccuaacgaaaagucugucaaggaguaccuugauaaagugcgcgccacaguuggaacugaauggacgcccuguucggugaccugcggcgucggugugcgaguacguagaaggguuaaugcagcgaacaagaaaccagaggaccugacauugaaugaccucgagacugauguguguaccauggacaagugcgccggcaucuuuaacgucgugucaaauagccuggggcuggugauucucuuaguccuggcucuuuucaacuga

SEQ ID NO: 4455 - RNA, 1182 nt, Artificial Sequence
  derived and/or modified CDS sequence (opt3) from Pv(Ca05)__ADB92533.1__CSP
augaagaacuucauccugcucgccgugagcuccauucuucuggucgacuuguuucccacccacugcggccauaauguugauuuaucuaaagcuauaaaccugaauggggugggauucaacaauguagacgcaucaagucuaggugccgcgcacgugggccagagcgcuuccagagggaggggacucggcgagaacccugaugacgaagagggugaugccaagaaaaagaaagacgggaagaaggcagaaccgaaaaauccacgggagaacaagcugaaacaacccgaagauggagccggcgaccagccuggcgcuaauggggcaggaaaccagccaggugccaauggcgcugggaaccagcccggagccaauggcgcggguaaccaaccuggggcaaauggagccggcaaccagccaggcgcuaacggggccggaaaucagcccggugcaaacggcgcugggaaucagccuggagccaacggcgcggguaaucaaccaggggccaacggcgcagaugaccagccgggagcuaauggcgccgggaaccagcccggagcuaauggugccggcaaccagccuggggcaaauggagccggcaaccaaccaggugcuaauggggcgggcgaucagcccggagcaaacggcgccgggaaucagccuggagcuaacggugccggcgaccaaccaggggcaaacggagccggcaaucagcccggugcuaacggggccggcaaucagccgggagcaaacggcgcggggaaucagccuggagcuaacggcgccgguaaucaacccggggcaaacggagccggcggucaggcugccggcgggaaugcagcuaacaagaaagccggagaugcgggcgggaaugccggaggcaacgcuggugggcagggacagaauaacgagggcgcaaaugccccaaacgagaagucugucaaggaauaccuugacaaagugcgcgcuacaguugguacugaguggacgccuuguucggugaccugcggcgucggggugcgaguacguagaaggguuaacgccgcaaauaagaaacccgaagaccugacauugaacgaucucgagacugacguguguaccauggauaagugcgcgggaaucuuuaaugucgugucaaacagccugggccuggugauucucuuaguccuggcccuuuucaauuga

SEQ ID NO: 4456 - RNA, 1182 nt, Artificial Sequence
  derived and/or modified CDS sequence (opt3) from Pv(Ch05)__ADB92538.1__CSP
augaagaacuucauccugcucgccgugagcuccauucuucuggucgacuuguuucccacccacugcggccauaauguugauuuaucuaaagcuauaaaccugaauggggugggauucaacaauguagacgcaucaagucuaggugccgcgcacgugggccagagcgcuuccagagggaggggacucggcgagaacccugaugacgaagagggugaugccaagaaaaagaaagacgggaagaaggcagaaccgaaaaauccacgggagaacaagcugaaacaacccgaagauggagccggcgaccagccuggcgcuaauggggcaggaaaccagccaggugccaauggcgcugggaaccagcccggagccaauggcgcggguaaccaaccuggggcaaauggagccggcaaccagccaggcgcuaacggggccggaaaucagcccggugcaaacggcgcugggaaucagccuggagccaacggcgcgggugaucaaccaggggccaauggcgcagacgaucagccgggagcuaacggcgccgggaaucagcccggagcuaacggugccggcaaucagccuggggcaaacggagccggcgaccaaccaggugcuaauggggcgggcgaucagcccggagcaaacggcgccgggaaucagccuggagcuaacggugccggcgaccaaccaggggcaaauggagccggcaaccagcccggugcuaacggggccggcaaucagccgggagcaaacggcgcggggaaucagccuggagcuaacggcgccgguaaucaacccggggcaaacggagccggcggucaggcugccggcgggaaugcagcuaacaagaaagccggagacgcgggcgggaaugccggaggcaacgcuggugggcagggacagaauaacgagggcgcaaaugccccaaacgagaagucugucaaggaauaccuugauaaagugcgcgcuacaguugguacugaguggacgccuuguucggugaccugcggcgucggggugcgaguacguagaaggguuaaugccgcaaacaagaaacccgaagaccugacauugaacgaucucgagacugacguguguaccauggauaagugcgcgggaaucuuuaaugucgugucaaacagccugggccuggugauucucuuaguccuggcccuuuucaauuga

SEQ ID NO: 4457 - RNA, 1173 nt, Artificial Sequence
  derived and/or modified CDS sequence (opt3) from Pv(Cam16)__AHL69649.1__CSP
augaagaacuucauccugcucgccgugagcuccauucuucuggucgacuuguuucccacccacugcggccauaauguugauuuaucuaaagcuauaaaccugaauggggugggauucaacaauguagacgcaucaagucuaggugccgcgcacgugggccagagcgcuuccagagggaggggacucggcgagaacccugaugacgaagagggugaugccaagaaaaagaaagacgggaagaaggcagaaccgaaaaauccacgggagaacaagcugaaacaacccgaagauggagccggcaaucagccuggcgcuaacggggcaggaaaucagccaggugccaacggcgcugggaaucagcccggagccaacggcgcggguaaucaaccuggggcaaacggagccggcaaccagccaggcgcuaauggggccggaaaccagcccggugcaaauggcgcugacgaucagccuggggccaacggagcgggcaaucaaccaggugccaacggggcaggcaaucagccgggagcuaacggcgccgggaaucagcccggagcuaacggugccggcaaucagccuggggcaaacggagccggcaaucaaccaggugcuaacggggcgggcgaccagcccggagcaaauggcgccgggaaccagccuggagcuaacggugccggcgaucaaccaggggcaaauggagccggcaaccagcccggugcuaauggggccggcaaccagccgggagcaaaugaggcgggcaaccagccuggggcuaauggagccggcaaccaacccggugcaaauggggccggaaaccagccaggcgcuaauggugccggcgggcaggcagcuggaggcaacgccgggggaaaugcgggcggucaggggcaaaacaaugagggagccaacgcuccuaacgaaaagucugucaaagaguaccuugacaaggugcgcgcaacaguuggcacugaauggacgcccuguucggugaccugcggugucggcgugcgaguacguagaaggguuaaugccgcuaacaagaaaccagaggaucugacauugaaugaccucgagacugacguguguaccauggauaagugcgccgggaucuuuaacgucgugucaaauagccugggacuggugauucucuuaguccuggcacuuuucaacuga

SEQ ID NO: 4458 - RNA, 1170 nt, Artificial Sequence
  derived and/or modified CDS sequence (opt3) from Pv(Cam26)__AGN05254.1__CSP
augaagaacuucauccugcucgccgugagcuccauucuucuggucgacuuguuucccacccacugcggccauaauguugauuuaucuaaagcuauaaaccugaauggggugaacuucaauaacguagacgcaucaagucuaggagccgcgcacgugggucagagcgcuuccagaggcagggggcucggagagaauccugaugacgaagagggcgaugccaagaaaaagaaagacgguaagaaggcagaaccgaaaaacccacgggagaauaagcugaaacaacccggggaucgcgccgacggacagccugcuggcgaucgagcagacggccagccagccggggaucgugcugacggacagcccgccggugauagagcggcaggccaaccugccggggacagggcugacggacagccagccggcgaucgggcagcuggucagcccgccggggaccgcgcggccggacagccugcaggcgauagagcugacggccaaccagccggggauagggcugccggacagccggccggugaccgggcagcuggccagcccgcgggggaucgcgcagacggacagccugccggcgaucgagcugccggucaaccagcaggggacagagccgauggccagcccgcuggagacagggccgcaggccagccugcgggggaccgggcugccggacaaccagccggugaucgugcagacggccagcccgcuggggaucgcgccgcaggacagccggcuggcgacagagccgcgggucagccugccggggauagggcugcaggccaacccgccggaaacggcgcugggggacaggccgcggguggcaaugcagccaacaagaaagcugaagacgccgggggaaaugcaggcggucaggggcagaacaaugagggcgcuaacgccccaaacgagaagucugucaaggaauaccuugauaaagugcgggcaacaguuggaacugaguggacgccuuguucggugaccugcggcgucggggugcgaguacgcagaaggguuaaugccgcuaacaagaaacccgaagaccugacauugaaugauaucgagacugacguguguaccauggauaagugcgcgggaauuuuuaacgucgugucaaauagccucggccuggugauccugcucgucuuagcccuguucaacuga

SEQ ID NO: 4459 - RNA, 1164 nt, Artificial Sequence
  derived and/or modified CDS sequence (opt3) from Pv(Ch01)__ADB92534.1__CSP
augaagaacuucauccugcucgccgugagcuccauucuucuggucgacuuguuucccacccacugcggccauaauguugauuuaucuaaagcuauaaaccugaauggggugggauucaacaauguagacgcaucaagucuaggugccgcgcacgugggccagagcgcuuccagagggaggggacucggcgagaacccugaugacgaagagggugaugccaagaaaaagaaagacgggaagaaggcagaaccgaaaaauccacgggagaacaagcugaaacaacccgaagauggagccggcgaccagccuggcgcuaauggggcaggaaaccagccaggugccaauggcgcugggaaccagcccggagccaauggcgcggguaaccaaccuggggcaaauggagccggcaaccagccaggcgcuaacggggccggaaaucagcccggugcaaacggcgcugggaaucagccuggagccaacggcgcggguaaucaaccaggggccaacggcgcagaugaccagccgggagcuaauggcgccgggaaccagcccggagcuaauggugccggcgaucagccuggggcaaacggagccggcaaucaaccaggugcuaacggggcgggcgaccagcccggagcaaauggcgccgggaaccagccuggagcuaauggugccggcaaccaaccaggggcaaacggagccggcaaucagcccggugcuaacggggccggcaaucagccgggagcaaacggcgcugggggacaggcggccggcgguaaugcagccaacaagaaagcuggggaugccggagcaggcggucaagcugccggcgggaaugcggccaacaagaaggcuggagacgcaggcgccgggcagggacagaauaacgagggcgcuaaugccccuaacgagaaaucugucaaggaauaccuugacaaagugcgcgcaacaguugguacugaguggacgcccuguucggugaccugcggggucggagugcgaguacguagaaggguuaaugcggccaacaagaaaccagaagaucugacauugaaugaccucgagacugauguguguaccauggacaagugcgcuggcaucuuuaacgucgugucaaacagccugggucuggugauucucuuaguccuggcccuuuucaauuga

SEQ ID NO: 4460 - RNA, 1164 nt, Artificial Sequence
  derived and/or modified CDS sequence (opt3) from Pv(Nr04)__ADB92542.1__CSP
augaagaacuucauccugcucgccgugagcuccauucuucuggucgacuuguuucccacccacugcggccauaauguugauuuaucuaaagcuauaaaccugaauggggugggauucaacaauguagacgcaucaagucuaggugccgcgcacgugggccagagcgcuuccagagggaggggacucggcgagaacccugaugacgaagagggugaugccaagaaaaagaaagacgggaagaaggcagaaccgaaaaauccacgggagaacaagcugaaacaacccgaagauggagccggcgaccagccuggcgcuaauggggcaggaaaccagccaggugccaauggcgcugggaaccagcccggagccaauggcgcggguaaccaaccuggggcaaauggagccggcaaccagccaggcgcuaacggggccggaaaucagcccggugcaaacggcgcugggaaucagccuggagccaacggcgcgggugaucaaccaggggccaauggcgcagacaaccagccgggagcuaauggcgccgggaaccagcccggagcuaauggugccggcaaccagccuggggcaaauggagccggcaaccaaccaggugcuaauggggcgggcgaucagcccggagcaaacggcgccgggaaucagccuggagcuaacggugccggcgaccaaccaggggcaaacggagccggcaaucagcccggugcuaacggggccggcaaucagccgggagcaaacggcgcugggggacaggcggccggcgguaaugcagccaacaagaaagcuggggaugccggagcaggcggucaagcugccggcgggaaugcggccaacaagaaggcuggagacgcaggcgccgggcagggacagaauaacgagggcgcuaaugccccuaacgagaaaucugucaaggaauaccuugacaaagugcgcgcaacaguugguacugaguggacgcccuguucggugaccugcggggucggagugcgaguacguagaaggguuaaugcggccaacaagaaaccagaagaucugacauugaaugaccucgagacugauguguguaccauggacaagugcgcuggcaucuuuaacgucgugucaaacagccugggucuggugauucucuuaguccuggcccuuuucaauuga

SEQ ID NO: 4461 - RNA, 1164 nt, Artificial Sequence
  derived and/or modified CDS sequence (opt3) from Pv(Pt03)__ADB92553.1__CSP
augaagaacuucauccugcucgccgugagcuccauucuucuggucgacuuguuucccacccacugcggccauaauguugauuuaucuaaagcuauaaaccugaauggggugggauucaacaauguagacgcaucaagucuaggugccgcgcacgugggccagagcgcuuccagagggaggggacucggcgagaacccugaugacgaagagggugaugccaagaaaaagaaagacgggaagaaggcagaaccgaaaaauccacgggagaacaagcugaaacaacccgaagauggagccggcgaccagccuggcgcuaauggggcaggaaaccagccaggugccaauggcgcugggaaccagcccggagccaauggcgcggguaaccaaccuggggcaaauggagccggcgaucagccaggcgcuaacggggccggaaaccagcccggugcaaauggcgcuggggaccagccuggagccaacggcgcggguaaucaaccaggggccaacggcgcaggaaaucagccgggcgcuaacggggccggaaaucagcccggugcuaacggcgccgggaaucagccuggagcaaacggcgccgguaaucaaccaggggcuaacggcgcgggagaucagcccggcgcaaauggggccggaaaccagccuggugcuaauggcgccgggaaccaaccaggagcaaacggcgccgguaaucagcccggggcuaacggcgccggaaaucagccgggcgcaaacggggcgggaggccaggcugccggugggaaugcagccaacaagaaagcuggagacgccggcgcugguggccaagcagccgggggaaaugcggccaacaagaaggcuggcgaugcaggggccggacagggccagaauaacgagggugcuaaugccccuaacgagaaaucugucaaggaauaccuugacaaagugcgcgcaacaguugggacugaguggacgcccuguucggugaccugcggagucggcgugcgaguacguagaaggguuaaugcggccaacaagaaaccagaagaccugacauugaaugaucucgagacugacguguguaccauggauaagugcgcugguaucuuuaacgucgugucaaacagccugggccuggugauucucuuaguccuggcccuuuucaauuga

SEQ ID NO: 4462 - RNA, 1164 nt, Artificial Sequence
  derived and/or modified CDS sequence (opt3) from Pv(Vc03)__ADB92546.1__CSP
augaagaacuucauccugcucgccgugagcuccauucuucuggucgacuuguuucccacccacugcggccauaauguugauuuaucuaaagcuauaaaccugaauggggugggauucaacaauguagacgcaucaagucuaggugccgcgcacgugggccagagcgcuuccagagggaggggacucggcgagaacccugaugacgaagagggugaugccaagaaaaagaaagacgggaagaaggcagaaccgaaaaauccacgggagaacaagcugaaacaacccgaagauggagccggcgaccagccuggcgcuaauggggcaggaaaccagccaggugccaauggcgcugggaaccagcccggagccaauggcgcggguaaccaaccuggggcaaauggagccggcaaccagccaggcgcuaacggggccggaaaucagcccggugcaaacggcgcugggaaucagccuggagccaacggcgcgggugaucaaccaggggccaauggcgcagacgaucagccgggagcuaacggcgccgggaaucagcccggagcuaacggugccggcaaucagccuggggcaaacggagccggcaaucaaccaggugcuaacggggcgggcgaccagcccggagcaaauggcgccgggaaccagccuggagcuaauggugccggcaaccaaccaggggcaaacggagccggcaaucagcccggugcuaacggggccggcaaucagccgggagcaaacggcgcugggggacaggcggccggcgguaaugcagccaacaagaaagcuggggaugccggagcaggcggucaagcugccggcgggaaugcggccaacaagaaggcuggagacgcaggcgccgggcagggacagaauaacgagggcgcuaaugccccuaacgagaaaucugucaaggaauaccuugacaaagugcgcgcaacaguugguacugaguggacgcccuguucggugaccugcggggucggagugcgaguacguagaaggguuaaugcggccaacaagaaaccagaagaucugacauugaaugaccucgagacugauguguguaccauggacaagugcgcuggcaucuuuaacgucgugucaaacagccugggucuggugauucucuuaguccuggcccuuuucaauuga

SEQ ID NO: 4463 - RNA, 1164 nt, Artificial Sequence
  derived and/or modified CDS sequence (opt3) from Pv(Vc04)__ADB92547.1__CSP
augaagaacuucauccugcucgccgugagcuccauucuucuggucgacuuguuucccacccacugcggccauaauguugauuuaucuaaagcuauaaaccugaauggggugggauucaacaauguagacgcaucaagucuaggugccgcgcacgugggccagagcgcuuccagagggaggggacucggcgagaacccugaugacgaagagggugaugccaagaaaaagaaagacgggaagaaggcagaaccgaaaaauccacgggagaacaagcugaaacaacccgaagauggagccggcgaccagccuggcgcuaauggggcaggaaaccagccaggugccaauggcgcugggaaccagcccggagccaauggcgcggguaaccaaccuggggcaaauggagccggcaaccagccaggcgcuaacggggccggaaaucagcccggugcaaacggcgcugggaaucagccuggagccaacggcgcggaugaccaaccaggugccaauggggcaggcgaucagccgggagcuaacggcgccgggaaucagcccggagcuaacggugccggcaaucagccuggggcaaacggagccggcgaccaaccaggugcuaauggggcgggcgaucagcccggagcaaacggcgccgggaaucagccuggagcuaacggugccggcgaccaaccaggggcaaauggagccggcaaccagcccggugcuaacggggccggcaaucagccgggagcaaacggcgcugggggacaggcggccggcgguaaugcagccaacaagaaagcuggggacgccggagcaggcggucaagcugccggcgggaaugcggccaacaagaaggcuggagaugcaggcgccgggcagggacagaauaacgagggcgcuaaugccccuaacgagaaaucugucaaggaauaccuugacaaagugcgcgcaacaguugguacugaguggacgcccuguucggugaccugcggggucggagugcgaguacguagaaggguuaaugcggccaacaagaaaccagaagaucugacauugaaugaccucgagacugauguguguaccauggacaagugcgcuggcaucuuuaacgucgugucaaauagccugggucuggugauucucuuaguccuggcccuuuucaacuga

SEQ ID NO: 4464 - RNA, 1164 nt, Artificial Sequence
  derived and/or modified CDS sequence (opt3) from Pv(Vc05)__ADB92548.1__CSP
augaagaacuucauccugcucgccgugagcuccauucuucuggucgacuuguuucccacccacugcggccauaauguugauuuaucuaaagcuauaaaccugaauggggugggauucaacaauguagacgcaucaagucuaggugccgcgcacgugggccagagcgcuuccagagggaggggacucggcgagaacccugaugacgaagagggugaugccaagaaaaagaaagacgggaagaaggcagaaccgaaaaauccacgggagaacaagcugaaacaacccgaagauggagccggcgaccagccuggcgcuaauggggcaggaaaccagccaggugccaauggcgcugggaaccagcccggagccaauggcgcggguaaccaaccuggggcaaauggagccggcaaccagccaggcgcuaacggggccggaaaucagcccggugcaaacggcgcugggaaucagccuggagccaacggcgcgggugaucaaccaggggccaauggcgcaggaaaccagccgggcgcuaauggggccggaaaccagcccggugcuaauggcgccgggaaccagccuggagcaaauggcgccggugaccaaccaggggcuaacggcgcgggagaucagcccggcgcaaauggggccggaaaccagccuggugcuaauggcgccgggaaccaaccaggagcaaacggcgccgguaaucagcccggggcuaacggcgccggaaaucagccgggcgcaaacggggcgggaggccaggcugccggugggaaugcagccaacaagaaagcuggagacgccggcgcugguggccaagcagccgggggaaaugcggccaacaagaaggcuggcgaugcaggggccggacagggccagaauaacgagggugcuaaugccccuaacgagaaaucugucaaggaauaccuugacaaagugcgcgcaacaguugggacugaguggacgcccuguucggugaccugcggagucggcgugcgaguacguagaaggguuaaugcggccaacaagaaaccagaagaccugacauugaaugaucucgagacugacguguguaccauggauaagugcgcugguaucuuuaacgucgugucaaacagccugggccuggugauucucuuaguccuggcccuuuucaauuga

SEQ ID NO: 4465 - RNA, 1161 nt, Artificial Sequence
  derived and/or modified CDS sequence (opt3) from Pv(Ca03)__ADB92531.1__CSP
augaagaacuucauccugcucgccgugagcuccauucuucuggucgacuuguuucccacccacugcggccauaauguugauuuaucuaaagcuauaaaccugaauggggugggauucaacaauguagacgcaucaagucuaggugccgcgcacgugggccagagcgcuuccagagggaggggacucggcgagaacccugaugacgaagagggugaugccaagaaaaagaaagacgggaagaaggcagaaccgaaaaauccacgggagaacaagcugaaacaacccgaagauggagccggcgaccagccuggcgcuaauggggcaggaaaccagccaggugccaauggcgcugggaaccagcccggagccaauggcgcggguaaccaaccuggggcaaauggagccggcaaccagccaggcgcuaacggggccggaaaucagcccggugcaaacggcgcugggaaucagccuggagccaacggcgcggaugaccaaccaggugccaauggggcagaugaccagccgggcgcuaacggagccggcaaucagcccggggcuaacggagccgguaaucagccuggcgcaaacggggccggagaucaaccaggcgcuaauggugcgggggaccagcccggcgcaaacggagccggcaaucagccuggggcuaacggagccggugaccaaccaggcgcaaauggggccggaaaccagcccggcgcuaacggugccgggaaucagccgggcgcaaacggagcgggcaaucagccuggggcuaacggagccggcaaucaacccggugcaaacggggccggaggccaggcugccgguggcaaugcagcuaacaagaaagccggggaugcgggaggcgggcagggacagaauaacgagggcgccaaugcuccaaacgagaagucugucaaggaauaccuugacaaagugcgcgcaacaguugguacugaguggacgccuuguucggugaccugcggggucggagugcgaguacguagaaggguuaaugccgcuaacaagaaacccgaagaucugacauugaaugaccucgagacugauguguguaccauggacaagugcgccggcaucuuuaacgucgugucaaacagccugggucuggugauucucuuaguccuggcacuuuucaauuga

SEQ ID NO: 4466 - RNA, 1161 nt, Artificial Sequence
  derived and/or modified CDS sequence (opt3) from Pv(Cam5)__AHL69647.1__CSP
augaagaacuucauccugcucgccgugagcuccauucuucuggucgacuuguuucccacccacugcggccauaauguugauuuaucuaaagcuauaaaccugaauggggugggauucaacaauguagacgcaucaagucuaggugccgcgcacgugggccagagcgcuuccagagggaggggacucggcgagaacccugaugacgaagagggugaugccaagaaaaagaaagacgggaagaaggcagaaccgaaaaauccacgggagaacaagcugaaacaacccgaagauggagccggcaaucagccuggcgcuaacggggcaggaaaucagccaggugccaacggcgcugggaaucagcccggagccaacggcgcggguaaucaaccuggggcaaacggagccggcaaccagccaggcgcuaauggggccggaaaccagcccggugcaaauggcgcugggaaccagccuggagccaauggcgcggacgaucaaccaggugccaacggggcaggcaaucagccgggagcuaacggcgccgggaaucagcccggagcuaacggugccggcaaucagccuggggcaaacggagccggcgaccaaccaggugcuaauggggcgggcaaccagcccggagcaaauggcgccggggaucagccuggagcuaacggugccggcaaccaaccaggggcaaauggagccggcaaccagcccggugcuaaugaggccgggaaccagccgggcgcaaauggagcgggcaaccagccuggggcuaauggagccggcaaccaacccggugcaaauggggccggaggccaggcugccgguggcaacgcagcuaauaagaaagccggggacgcgggagccggccaggggcagaacaaugagggagcuaacgcaccaaaugaaaagucugucaaggaguaccuugauaaagugcgcgccacaguuggcacugaauggacgccuuguucggugaccugcggugucggggugcgaguacguagaaggguuaacgcugccaacaagaaacccgaggaccugacauugaaugaccucgagacugauguguguaccauggacaagugcgcaggaaucuuuaacgucgugucaaauagccugggccuggugauucucuuaguccuggcgcuuuucaacuga

SEQ ID NO: 4467 - RNA, 1161 nt, Artificial Sequence
  derived and/or modified CDS sequence (opt3) from Pv(Cam5)__AGN05236.2__CSP
augaagaacuucauccugcucgccgugagcuccauucuucuggucgacuuguuucccacccacugcggccauaauguugauuuaucuaaagcuauaaaccugaauggggugaacuucaauaacguagacgcaucaagucuaggagccgcgcacgugggucagagcgcuuccagaggcagggggcucggagagaauccugaugacgaagagggcgaugccaagaaaaagaaagacgguaagaaggcagaaccgaaaaacccacgggagaauaagcugaaacaacccggggaucgcgccgacggacagccugcuggcgauggcgcagccgggcagccagcuggagacggugccgcgggccagcccgcaggggaucgagccgcuggacaaccugccggcgaccgugcagcuggucagccagccggggauggagcggccggccagcccgcaggcgacggggcugccggacagccugcuggugacagagccgcaggccaaccagccggggauagggcugcgggacagccggcaggcgaccgggccgauggucagcccgcuggggaccgcgccgcaggccagccugccggagauagagcugccggccaaccagcaggggacagggcggauggacagcccgcuggugaccgggccgcaggccagccugccggggaucgcgcugccggacaaccagcaggcgaccgagcugccggucagcccgcgggggauagagccgacggccagccggcuggagacagggcagccggccagccugcuggggaucgggccgcaggacaacccgcgggugaccgugccgcuggccagccagccgggaacggagcaggcggucaggcugccgggggcaaugcaggaggccaggggcaaaacaaugaaggagccaacgcuccuaaugagaagucugucaaagaguaccuugauaaggugcgcgcgacaguuggcacugaauggacgcccuguucggugaccugcggugucggggugagaguaaggcggcgaguuaacgccgcaaacaagaaaccagaggaccugacauugaaugaucucgaaacugacguguguaccauggauaagugcgcuggaaucuuuaacgucgugucaaauagccugggccuggugauucucuuaguccuggcccuuuucaacuga

SEQ ID NO: 4468 - RNA, 1161 nt, Artificial Sequence
  derived and/or modified CDS sequence (opt3) from Pv(Cam7)__AGN05238.1__CSP
augaagaacuucauccugcucgccgugagcuccauucuucuggucgacuuguuucccacccacugcggccauaauguugauuuaucuaaagcuauaaaccugaauggggugggauucaacaauguagacgcaucaagucuaggugccgcgcacgugggccagagcgcuuccagagggaggggacucggcgagaacccugaugacgaagagggugaugccaagaaaaagaaagacgggaagaaggcagaaccgaaaaauccacgggagaacaagcugaaacaacccgaagauggagccggcaaucagccuggcgcuaacggggcaggaaaucagccaggugccaacggcgcugggaaucagcccggagccaacggcgcggguaaucaaccuggggcaaacggagccggcaaccagccaggcgcuaauggggccggaaaccagcccggugcaaauggcgcugggaaccagccuggagccaauggcgcggacgaucaaccaggugccaacggggcaggcaaucagccgggagcuaacggcgccgggaaucagcccggagcuaacggugccggcaaucagccuggggcaaacggagccggcaaucaaccaggugcuaacggggcgggcgaccagcccggagcaaauggcgccgggaaccagccuggagcuaacggugccggcgaucaaccaggggcaaauggagccggcaaccagcccggugcuaaugaggccgggaaccagccgggcgcaaauggagcgggcaaccagccuggggcuaauggagccggcaaccaacccggugcaaauggggccggaggccaggcugccgguggcaacgcagcuaauaagaaagccggggacgcgggagccggccaggggcagaacaaugagggagcuaacgcaccaaaugaaaagucugucaaggaguaccuugauaaagugcgcgccacaguuggcacugaauggacgccuuguucggugaccugcggugucggggugcgaguacguagaaggguuaacgcugccaacaagaaacccgaggaccugacauugaaugaccucgagacugauguguguaccauggacaagugcgcaggaaucuuuaacgucgugucaaauagccugggccuggugauucucuuaguccuggcgcuuuucaacuga

SEQ ID NO: 4469 - RNA, 1161 nt, Artificial Sequence
  derived and/or modified CDS sequence (opt3) from Pv(CSP27VK247)__ANS71607.1__CSP
augaagaacuucauccugcucgccgugagcuccauucuucuggucgacuuguuucccacccacugcggccauaauguugauuuaucuaaagcuauaaaccugaauggggugggauucaacaauguagacgcaucaagucuaggugccgcgcacgugggccagagcgcuuccagagggaggggacucggcgagaacccugaugacgaagagggugaugccaagaaaaagaaagacgggaagaaggcagaaccgaaaaauccacgggagaacaagcugaaacaacccgaagauggagccggcaaucagccuggcgcuaacggggcaggagaccagccaggugccaauggcgcugggaaccagcccggagccaauggcgcggguaaccaaccuggggcaaauggagccggcaaccagccaggcgcuaacggggccggaaaucagcccggugcaaacggcgcugggaaucagccuggagccaacggcgcgggugaucaaccaggggccaauggcgcaggaaaccagccgggcgcuaauggggccggaaaccagcccggugcuaauggcgccgggaaccagccuggagcaaauggcgccggugaccaaccaggggcuaacggcgcgggaaaucagcccggcgcaaacggggccggagaucagccuggugcuaauggcgccgggaaccaaccaggagcaaacggcgccgguaaucagcccggggcuaacggcgccggaaaucagccgggcgcaaacggggcgggaaaucagccuggcgcuaacggugccgggaaucaacccggagcaaacggcgccgguggccaggcugccgggggaaaugcagcuaacaagaaagccggcgacgcgggggccggacagggccagaauaacgagggugcuaaugcaccaaacgagaagucugucaaggaauaccuugauaaagugcgcacaacuguugggacggaguggaccccuuguucggugacaugcggagucggcgugcgaguacguagaaggguuaaugccgcuaacaagaaacccgaagaccugacuuugaacgaccucgagaccgauguguguacaauggacaagugcgccgguaucuuuaaugucgugucaaacagccugggccuggugauucucuuaguccuggcacuuuucaauuga
